United States Patent Application Publication US 2017/0009304 A1 - sequence listing, part 17

SEQ ID NO: 345162 - DNA, 51 bp, Homo sapiens
ctttgaaagcttttgtggaagcaagtacgatatatgaaggagcttccaaca

SEQ ID NO: 345163 - DNA, 101 bp, Homo sapiens
gtcactaggagtatgccagatggaagaaccattgttagtgaacgtggacaaagctgttgtctcagggagcacagaattgcctgtgtccctggagtgttaca

SEQ ID NO: 345164 - DNA, 80 bp, Homo sapiens
tacaagactctcttcgctctttgcatcttaactgcagaacattctagtatgccagtagaaaaaaatatcactttagaaag

SEQ ID NO: 345165 - DNA, 100 bp, Homo sapiens
gtatccccgttcgccaccaattatgggagggctggccaacttctgctacagacgactcaacgccacaggtcatcatctggatcatcccattctggttccc

SEQ ID NO: 345166 - DNA, 100 bp, Homo sapiens
ccaccggccctccgcggggcaggggctgctgcgagctcgccgggcgccctttagacgggctatcaaggactcacaaactgcatgatggccgccctgccgg

SEQ ID NO: 345167 - DNA, 83 bp, Homo sapiens
gagctacatgtcgcaggtgctggagaaggaaatgaaggcacaggagcagaggggggatatgagactttctactcggaatatcc

SEQ ID NO: 345168 - DNA, 100 bp, Homo sapiens
caccaaactctctagcaaaaccactgctaagttatccactagtgctaaaagctgcagaaccttggcctgaaaatgctacattatatcagcaattgaaagg

SEQ ID NO: 345169 - DNA, 83 bp, Homo sapiens
ttgtttctcattctcatatttcaccaataaagatccatgttcactagcggccttacagaaagtactcaaaaagaagttcgaat

SEQ ID NO: 345170 - DNA, 99 bp, Homo sapiens
gaaatacaatacagagcgcattcatgttcttagtggggagcttcctctgcagaagggagatattgtttacatttataagcaaattgatcagaactggta

SEQ ID NO: 345171 - DNA, 80 bp, Homo sapiens
actgagctatttttgaaagaacatgaccaccttcgaaacttcgcaaacctgggtatacttcatgtgacaaagaaaaaagt

SEQ ID NO: 345172 - DNA, 73 bp, Homo sapiens
aaagaaacaatgactatgattcttaagatttggggtggaaggcaggcatggtcaaacccatttcactgacagg

SEQ ID NO: 345173 - DNA, 83 bp, Homo sapiens
aggatacagttcatgacaatgactttgagccctaccttactggacagtcaaatcagggcagtcagggcgacagcaagaatgcc

SEQ ID NO: 345174 - DNA, 101 bp, Homo sapiens
ctatgactttcaacgggactattatgataggtggcccacaaactctttaacaacttgaaataaatgtgtggacttaattcaccccagtcttcatcatctgg

SEQ ID NO: 345175 - DNA, 125 bp, Homo sapiens
caaggagcgccaagagctagagcagactcagaatgagctcaccagggagctgaaactcaaatcagatccagactgtgaagacatgaaaagataatagttggaaacctcagcaattttcaattcaa

SEQ ID NO: 345176 - DNA, 87 bp, Homo sapiens
tagccccgctaccggactacatgtcggaggagaagctgcaggagaaagataccccagaatcttccatgctccgtcacactgcagcca

SEQ ID NO: 345177 - DNA, 100 bp, Homo sapiens
ttcagttctcccggtgtggccacgagtcggcatcctgaggttagcattacacttctcccagtggagcccatgacttctgatcaggacgctaaggttgtgg

SEQ ID NO: 345178 - DNA, 100 bp, Homo sapiens
ctgagggccttcgagagctaccgcgccagacagagataattgacgaccttgccaacctagtggagaacacagatgaaaaacttcgcaatgaaaccaggcg

SEQ ID NO: 345179 - DNA, 95 bp, Homo sapiens
gcaccacacctgaagatattgcccaattcttacatcaagaggaaagattagactctggcccagaatgtgttcagtatcttcaacaagaatacctg

SEQ ID NO: 345180 - DNA, 74 bp, Homo sapiens
ccgggctgttactgtgaataaggccaccatgaagacaagcacagcccggtacaagcagagccttgacccaactg

SEQ ID NO: 345181 - DNA, 76 bp, Homo sapiens
ctgggttacaagcagcaagtgcgcggttggggccactgcgaggccgttttaggctggtgtttggaatgctttatcc

SEQ ID NO: 345182 - DNA, 83 bp, Homo sapiens
ctggaatcgcccaagtccctctactcgcgagaaagcgtggatacccatcaacgaagttttgatattggaattcagattggcta

SEQ ID NO: 345183 - DNA, 82 bp, Homo sapiens
agccagtgagggtcaacgtcaagcgggagtatgaccacatgaatggatccaggactcagtggcttttgaggatgtgtctgtg

SEQ ID NO: 345184 - DNA, 105 bp, Homo sapiens
cctagcgaatttttggagcatctccacccaggaacctcgccatccagaaggacttccttccccgcggttcaggaatcgtcacccggcggcctctcattctgcagc

SEQ ID NO: 345185 - DNA, 90 bp, Homo sapiens
gtgaaggaaaggtgaaactggttccaaatactaaaatccagatgtcatattcaaaactgctggagcgaacccgtgccaggcgagagaatc

SEQ ID NO: 345186 - DNA, 90 bp, Homo sapiens
aaaatatcgagcgaacgctttacttccttccccgtgaaatggtaaagaagcttcttaataaagtagtgctccgtgaatcttgcttttacc

SEQ ID NO: 345187 - DNA, 100 bp, Homo sapiens
acggatggtcttgaaacacaaatggtttttgctgtccgtacctggcggtgaaaatcacccctgccatccctgcagtcgctggcatcctgttcttctttgt

SEQ ID NO: 345188 - DNA, 98 bp, Homo sapiens
ggccgaggcgggcggatcacgaggactcctagaagtaccccaccccacccctgctccttggaggacaacgtgatcactgtattcagctctgtcaagaa

SEQ ID NO: 345189 - DNA, 100 bp, Homo sapiens
tgcagaaagaacctggaagacagaggctggagggagtaagccctgaaccaattcatcttaagattttttcacccaacgttgtcaatttgacacttgtgga

SEQ ID NO: 345190 - DNA, 78 bp, Homo sapiens
tcgcctctacagccggttcaccagcctggacaaaggagagaatgggactctcagatttggagcaagaggtggtggtgg

SEQ ID NO: 345191 - DNA, 100 bp, Homo sapiens
ggacgtaactgatcaattgaatatggacccaagagtcagcggtatattagttcagttaccactaccagatccactccttataccgccgcacaggtgccag

SEQ ID NO: 345192 - DNA, 99 bp, Homo sapiens
gtcggagccgaataccaagctcggatccctgaatttgatccagcggagctggagtttgttcagatcatcatcatcgtggtggtgatgatggtgatggtg

SEQ ID NO: 345193 - DNA, 51 bp, Homo sapiens
acagggaagtcgcctggaaaaaccaatagttactatactggcaattgctgg

SEQ ID NO: 345194 - DNA, 75 bp, Homo sapiens
tcagtatttaaacagatcacatcatgcgtactttgacccagccaacggcaagttcagcaagtcagccaccagccc

SEQ ID NO: 345195 - DNA, 74 bp, Homo sapiens
gaagtggccaagaaggagaagcagctgcggaaaatgctagaagtgtactaatggtcacttgatgtgcgctggct

SEQ ID NO: 345196 - DNA, 90 bp, Homo sapiens
ccaaagactaaactgacaagccttcaaggagcccagggtttgggagcctctggtggagcaagtaattgggattcctacagtgaccatttc

SEQ ID NO: 345197 - DNA, 98 bp, Homo sapiens
ttcaggaggaaatgaagtggaaggaggttgttgatcattatgaaaatcctagaaacgtggggtcccttgacaagacatctaaaaatgttggaactgga

SEQ ID NO: 345198 - DNA, 75 bp, Homo sapiens
gccaagagtctgggtctccgggccaacctgagggtcaaggtcagcatctcctcgacgatcaagatctatctctct

SEQ ID NO: 345199 - DNA, 74 bp, Homo sapiens
agaaacaccagacactggaagtctcactgtctcgagtcacagatgtgacattgatgtgtccactgaagccatgt

SEQ ID NO: 345200 - DNA, 112 bp, Homo sapiens
agagaagacgatctgcacttcgcattttggcattgacatttaattttagggtcctttatatagaagggagagtaggtttctaccatgaatgaaatgaagagttattctcaag

SEQ ID NO: 345201 - DNA, 100 bp, Homo sapiens
gtctgcttgcagtgttgatggtggtggtgctggtcatcaatgttactcaggtagaggagaattcctgcactcaggccacaaaagttaaagaggagccatc

SEQ ID NO: 345202 - DNA, 74 bp, Homo sapiens
cttgtgggtggcatgactaggatgcccaaggatagaatttttgcggcatttgaagagctttttccagattatgt

SEQ ID NO: 345203 - DNA, 100 bp, Homo sapiens
cggaaccgctccttggaaggtcgctgggaggtggcattcaaagcggtacaggaggagcgtcagcggggaaaggacaaggatggggatggggagggggctg

SEQ ID NO: 345204 - DNA, 75 bp, Homo sapiens
aatgtttacggcgaagtctactcaacgtttccaaggactctggggactggtgaacaatgcaggcattcttacacc

SEQ ID NO: 345205 - DNA, 75 bp, Homo sapiens
cgatccagcctgcggagcctgtggggcaggccatttcataattctgaatcatgtctgataacggagaactggaag

SEQ ID NO: 345206 - DNA, 90 bp, Homo sapiens
ggcccgccatgttcttctccgcggcgctccgggcccgggcggctggcctcaccgcccactgggagctgccactccgaaaccagtcccaga

SEQ ID NO: 345207 - DNA, 82 bp, Homo sapiens
aggatcctggtacaaaagacagttgaaaaagcatcagaatctgaggagtcagatgaggatgacggtcctgcacctgttatag

SEQ ID NO: 345208 - DNA, 82 bp, Homo sapiens
gccaagagggtcagctgggacttcaagacggccgagagccactgcattatggtgacaagctgaacatggagctgagtgagaa

SEQ ID NO: 345209 - DNA, 141 bp, Homo sapiens
caaaagattacgtggatgcataggtactttttctgccatgaatttgcattcaggactcagggagtacacacttaccaggctacagatgcacatgttgaatggagctcttctggcattgctgtttcctgtggtaaacactcg

SEQ ID NO: 345210 - DNA, 75 bp, Homo sapiens
aagcagtctaaacctgtgaccacccctgaagaaattgcacaggggctcacaacgaagtaagacagtagatgacaa

SEQ ID NO: 345211 - DNA, 75 bp, Homo sapiens
gcatcattaacggaccttttaccatgaatagttctactccttctacagatcagcttgaacgggtctttttacgac

SEQ ID NO: 345212 - DNA, 100 bp, Homo sapiens
agagggctaccttgtgaagaaggttcgatacaagaggctgttttcctagcgtggcttgctgcctttggtaagaacatgtcgtccatcttgccattcacgc

SEQ ID NO: 345213 - DNA, 108 bp, Homo sapiens
cattgtcccagatatagccgttggtacaaagctgagcagcccagccaacctcagtgcctccgtcgccacagtccagctgccacagcaggaccagccagtgccccacgg

SEQ ID NO: 345214 - DNA, 101 bp, Homo sapiens
caactgggccacccacgtctatgtaccatgcctcctgctccacgacgtgaccatggccgggctgcaggagctgcgattccctgaggagaagccgctgctcc

SEQ ID NO: 345215 - DNA, 100 bp, Homo sapiens
ttgcaggggagcctgagagccacagcccaaggcaaactatgaacaaagcaagaaagacccccaccagacattgcccctggacacccccagagacatcagc

SEQ ID NO: 345216 - DNA, 100 bp, Homo sapiens
cagcagcctcgggtgcaatcctggagccccccagtgaggaggcgacaggaagaagggtattacagccgcctggaagccgagaggcgcagacagcacgacg

SEQ ID NO: 345217 - DNA, 101 bp, Homo sapiens
gctaaatgtgacattgtcattgaaaaaccaacatatttcatgaaattagatgcaggctgagtgcagttgcatgatctcggctcaccacaacctctgcctcc

SEQ ID NO: 345218 - DNA, 102 bp, Homo sapiens
tcagccttcagacccaagtcttggcagacaacctagtagaagaaagccaatggataagccatcaccaaactcagaaaatgaacaaaattctgttaccctgga

SEQ ID NO: 345219 - DNA, 100 bp, Homo sapiens
caaagaagaccacacactgggaaacatcattaaatcgctgctctttggcgtaaattgcaatcgattagggatcgtttctcagaatcaagttagaagtgag

SEQ ID NO: 345220 - DNA, 129 bp, Homo sapiens
tcaaagggaccatcatcctgacagctgtgtactttgccctcagcatctcccttcatgtctgggtcatggtggaggtcctgattgccataagcagcctcacgtctccgctgctgttcacagcctctggat

SEQ ID NO: 345221 - DNA, 83 bp, Homo sapiens
cgacaagccgctggcagccgcggatctcaccgccgctcaggcttcatgtttcctgttgcaggtgggataagaccccctcaagg

SEQ ID NO: 345222 - DNA, 95 bp, Homo sapiens
gcagaggaagaatttttctatgaggctgaatataaaaaagctgtaaccactaatcagtggcaccgaagattagagtttccaagtggagagacaat

SEQ ID NO: 345223 - DNA, 89 bp, Homo sapiens
gggcagtgctgcttcagaagagagagaagaggggccctctgtggaggcactggcgggttccccctcagcccttcctggagatgcagcag

SEQ ID NO: 345224 - DNA, 75 bp, Homo sapiens
gacatgtctgagactcctgctcagtgtagcattaagttacagaatgtctgaaggggacagtgtgggagaatccgt

SEQ ID NO: 345225 - DNA, 82 bp, Homo sapiens
cctcgccacctgcaagagcctgcagcagtcgcttctccgcagcagcccctgtcaaagggaacaggaagcagtccacggaggg

SEQ ID NO: 345226 - DNA, 93 bp, Homo sapiens
acagcgggaggcagagggaggaacctggacgccggaagccgggaaatggtcttgccccagaagctgcgggcacatccacgcctgaaatgcggc

SEQ ID NO: 345227 - DNA, 98 bp, Homo sapiens
cagaccctgaaagcaaccaggaggcagtaaattcttcagctgctcggacagatgaagctccccaaggagctgcaggtggcagcatcttgagtactcgc

SEQ ID NO: 345228 - DNA, 100 bp, Homo sapiens
gtcatcttctaaacagagcagcagcagcagagatgataacatgtttcaggtgcggtctgcctgcagcctttctgccacctgtactggggctgcacccgga

SEQ ID NO: 345229 - DNA, 100 bp, Homo sapiens
gaagatcctggacatgaagaccgagggggctgcaaggtgtgactgttgtaaatctcaaggaactcttaaagagcgagttcagtggcgtggggaaatgaaa

SEQ ID NO: 345230 - DNA, 82 bp, Homo sapiens
ataccagtaatttttcatagaatagcaacaggaggaggacttcatccaacccagcagccgagaagaggcccagcagctgtgg

SEQ ID NO: 345231 - DNA, 101 bp, Homo sapiens
gtgatgctggagaacttcaggaacctgctgtcagtggatcgtgatgcttgtaaatgagaatcctctgctgacagaagaagcagccctgaataaatgctaca

SEQ ID NO: 345232 - DNA, 74 bp, Homo sapiens
aagaatccttggcccaatgtagatgctcacagtggggtgctgctccaggcacctcattgtgaacatgctttctg

SEQ ID NO: 345233 - DNA, 100 bp, Homo sapiens
caaatttctcctgtacctatgggaagcctgtcacttttgactgtgcagtgaaaccatctgttacctgtgttgtatccacaaattacccattatcaaaaac

SEQ ID NO: 345234 - DNA, 82 bp, Homo sapiens
gaaggaacgaggcaaggagctaaagcagcgtgcgttcagccctgggcttccatgaggcaggctgaacctgcagatatgcgcc

SEQ ID NO: 345235 - DNA, 100 bp, Homo sapiens
atagatggctacaggccgcggaggaggaggaggtggagttgctgcccttccggagtccgccccgtgaggagaatgtgcacagccagagaacaacacatca

SEQ ID NO: 345236 - DNA, 100 bp, Homo sapiens
gcaggagtgccaaagaaagaagtaaactgaagttgcaaagcaacagtaatagtctcaacatatgcactagtggaagtgccacctcatgtgaagaatgtct

SEQ ID NO: 345237 - DNA, 101 bp, Homo sapiens
tctaagatggcgactgtcgaaccgtgtggtgtaaaggaattcattagccatggatgtattcatgaaaggactttcaaaggccaaggagggagttgtggctg

SEQ ID NO: 345238 - DNA, 83 bp, Homo sapiens
atcttcgaacttttgacacggctttggaaacgacgtcatgtgttagtatgacatgatgggaagaaatcagactgctgtgagag

SEQ ID NO: 345239 - DNA, 100 bp, Homo sapiens
cccacagcctagcagtcgggaccgtactgagtaagactttgaccccgacgcaggcttcagtgattgccgcggatcagaagcctgagcactttggctcgag

SEQ ID NO: 345240 - DNA, 82 bp, Homo sapiens
gggatgatacagccagcgaatcttatttgcctggagaaaaccatgagctgttttccaagagcttcatctccatggaagtgcc

SEQ ID NO: 345241 - DNA, 83 bp, Homo sapiens
ggctggagaatatggtgcagaggccctccacggtgctcatctgccggaactaccgtggcgacgtggacatgtcagaggtggag

SEQ ID NO: 345242 - DNA, 80 bp, Homo sapiens
cgcggtgggtcctcgcttgcagttcagcgaccacggaccatcagcacgtgcccatcgacatccagaccagcaagctgctc

SEQ ID NO: 345243 - DNA, 50 bp, Homo sapiens
cctcccgagtggctgggattacaggcatcatggaccgatctaaagaaaac

SEQ ID NO: 345244 - DNA, 100 bp, Homo sapiens
gggcgaatagctctgaccacccggcgaaggtctactttgaggatgaggacagggcagaactataccgggtgcctgccaagagcaccttgctacaggttct

SEQ ID NO: 345245 - DNA, 83 bp, Homo sapiens
cctctcagtagccctgtgcacttggatttttcttcagcaggggaaatgctgtctgtagctgagcacttcctggagcagcagat

SEQ ID NO: 345246 - DNA, 74 bp, Homo sapiens
gctaccaggaggtcaaccccgctgcgccagggccccgcggggctggggcccaaaaagcgtgcggagcctcagct

SEQ ID NO: 345247 - DNA, 80 bp, Homo sapiens
gaaggatcaaggacggatgatgaagtagtacagagtacctcaaatcgtttgtgggctgaggatagtactgagaaagaaaa

SEQ ID NO: 345248 - DNA, 75 bp, Homo sapiens
ctttaagaaaagtgactacttcatgcctttctcagcagccacattgctgtgaggaagcctgggctacatggagaa

SEQ ID NO: 345249 - DNA, 90 bp, Homo sapiens
ggagcttctcaagtttgaggatgaggaagctcaggcacaaatacttccctggacaagaaagccagatgaaactgatctaccagggccgcc

SEQ ID NO: 345250 - DNA, 74 bp, Homo sapiens
aaaagacggctggaagaagagtctgctcagggccgacatgtgaggaagatgtggatgaatgcctgtcggatccc

SEQ ID NO: 345251 - DNA, 100 bp, Homo sapiens
agttccccagttctggcagattctggaaactgtacattgaagcagaggtgttggagcgggccggagagaagtagagtgggctgcgaggagaaggaaacag

SEQ ID NO: 345252 - DNA, 97 bp, Homo sapiens
tggacgtggcctgtggcacaggcctagtggctgccgaggccaaaaagcaaatggatttccacctgacaaatcttcgggatccaagaagcagaaacaa

SEQ ID NO: 345253 - DNA, 73 bp, Homo sapiens
ggaggcgttcagctgcttcaagatgaagacaaatttacatgtattggagaccagaccagaagcccttctgaat

SEQ ID NO: 345254 - DNA, 97 bp, Homo sapiens
tcggaaaacatgtggatgctcaaggcagaatatatttgccctatctccaaaactggagccatgtgaccaagaatatggcccaggtgaccaaagccct

SEQ ID NO: 345255 - DNA, 100 bp, Homo sapiens
aggcgctagtatgctcatccttcttgataatgccaaaagatacagaagatcattgagacactgacacagcagcttcaggcaaagggaaaagaactaaatg

SEQ ID NO: 345256 - DNA, 101 bp, Homo sapiens
gatgagtcaaacatccctgcagggaagtgcggctccttcgaagacaaacaaaaacatctttggaagtttctttgctagaaaaatatccgtgctccaagttt

SEQ ID NO: 345257 - DNA, 100 bp, Homo sapiens
aggctgcctataatcaagtaaaaacaatagctcaaggaaacctttccaacacagatgtccaagctgccaatgcctcattagcttactattgccatccccc

SEQ ID NO: 345258 - DNA, 75 bp, Homo sapiens
gaaagaatgaactggttgtgcaggaaccaggatccgaacccgcctccccaggtctcggcgcggaagatggccggc

SEQ ID NO: 345259 - DNA, 90 bp, Homo sapiens
gtgaattgatttggttggaatgctcttttaccgatgctttaacatacagccactagggatgtccgtcgcttggtagtggccatgtctaga

SEQ ID NO: 345260 - DNA, 100 bp, Homo sapiens
cctgtccatcttctccctgttggccaacatcaccatgctggtcagcttggtcatgatctaccagttcattgttcagaaaacgcccactcctggatcttca

SEQ ID NO: 345261 - DNA, 100 bp, Homo sapiens
cgtggagatatggcgcaactgcggcgcattcttcagaggaggcccctccagccactcagaacttcatcattccaaaaaaggagatccacacagttccaga

SEQ ID NO: 345262 - DNA, 75 bp, Homo sapiens
cacttaaacactgtgtgatagttcctacacatctcattatagtttcttcttggacacttaatgattgttggcaag

SEQ ID NO: 345263 - DNA, 98 bp, Homo sapiens
gcaggcctctgttgccagaccagtgagacggtttaagcggaagcatcttactgccattgactgccagcatttggctcggagtcacttggctgtgaccc

SEQ ID NO: 345264 - DNA, 101 bp, Homo sapiens
cggaggcttcgagtgacccgggtgccgaggagcgggaagagttgctggggcttgggcactgtttaaaggaaagttccgagaaggcatcgacaagccggacc

SEQ ID NO: 345265 - DNA, 75 bp, Homo sapiens
tatgtcctcgaagatcagaccgagaggtggcccacaaactctttaacaacttgaaataaatgtgtggacttaatt

SEQ ID NO: 345266 - DNA, 74 bp, Homo sapiens
tcagagacactggcaagaaataacttttaatttaccggtcaaacaatgacattcactactttcactgcctaaga

SEQ ID NO: 345267 - DNA, 97 bp, Homo sapiens
ctctcggccgccgccgcctctgcgtgggccggccgggagggcctcgggggactgactgggtcctaaaaaggtggggacgctgtggcgagaagccggg

SEQ ID NO: 345268 - DNA, 100 bp, Homo sapiens
ccagtttctagtgacagacagcggcaggacagtcatcctctataaggatcctaagcacttcaagtcagagaagacaggacggggacagttgagggaaggc

SEQ ID NO: 345269 - DNA, 100 bp, Homo sapiens
cgttattggctgccgttaaggaccgttacgtttcccggagttttgcggcctccaggtggtggatccaatttttcattaggttttgatgaaccaacagaac

SEQ ID NO: 345270 - DNA, 100 bp, Homo sapiens
agcctttgccaccatgggggagaccgtaatgagcgtcaaaattatccgaaaccgcctcactggcggtcacctttgtcccggtgtccaaggtgagcgggca

SEQ ID NO: 345271 - DNA, 108 bp, Homo sapiens
ctacaagtcataaagtcagatcttgtgaatgaagaagcaactggacagttccatgtataccacagcacccaagaaaacctcatttggctcgctgaaggatgaagaccg

SEQ ID NO: 345272 - DNA, 75 bp, Homo sapiens
atcgcaccttactctgttgaaattaaggtggtgaagcagtattttccaatttgaagattcatttgaaggtggctc

SEQ ID NO: 345273 - DNA, 100 bp, Homo sapiens
agccccttgcagaagacgccgtacgagattcagcgccctataaagaccagctgtcctcgaaggaacaacccagctttctagccagtcagcagctcctgag

SEQ ID NO: 345274 - DNA, 73 bp, Homo sapiens
gatgacctgcttgattctgcacctgaaactaatgaaactgttatggttagaaaggcagtggacgctctcttga

SEQ ID NO: 345275 - DNA, 76 bp, Homo sapiens
cgggagaggcgagctcgcgatgagtggtctcggcaggctcttcgggaaggataatgggaaattcatccgagttcca

SEQ ID NO: 345276 - DNA, 82 bp, Homo sapiens
cccgccgccgctcaccgcagccccctcctggcgacccgcaagatgctccagaccttgtatgattacttctggtgggaacgtc

SEQ ID NO: 345277 - DNA, 80 bp, Homo sapiens
aatgccctcaagtcgacaggggatgggaccctagacatatgtagagtgtgtcggtcagaaggaacacctgagaaaccgct

SEQ ID NO: 345278 - DNA, 100 bp, Homo sapiens
gcgctcgtctggcggagctggatggtgagaacaagaccaagattggaaagccagcttcagaggagggaattacagcaaaaattgaaccattgacagaaga

SEQ ID NO: 345279 - DNA, 101 bp, Homo sapiens
aaatcaaaataaaggaaacacatttcatatactgcaggatgacgactcatttaatttacataacagcaatagtactcaccaagaaagggatataaaccgaa

SEQ ID NO: 345280 - DNA, 98 bp, Homo sapiens
cgacgctgctgggtccgctgagcggggcgacccgaggcaatcctttatcacaggatattctcaacttataccaggacccagatggaacccgaaagcta

SEQ ID NO: 345281 - DNA, 98 bp, Homo sapiens
gcttgtgaccagttgggatggacaaaacccaccaagatccagattgaagctattcctttggccttacaaggtcgctgaaaattttgttccccctctgt

SEQ ID NO: 345282 - DNA, 99 bp, Homo sapiens
ggatgaacaagaaagtttggaaggcacaaatatgccagctacctttggacatttggcagggggatacgatggccaatattatggatatctttggagtga

SEQ ID NO: 345283 - DNA, 100 bp, Homo sapiens
gagcccgcgggggccgcgcccttctctcgcttcggactgcgcaacgctgcgctctgggctgacagagaaatcacagtgtcccaagcccaaggcggcacgg

SEQ ID NO: 345284 - DNA, 134 bp, Homo sapiens
tctcgtggcattatccttcagtggggctattggactgacttttcttatgctgggatgtgccttagaggattatgggttctatttcaccaattggcatggaaccaacgacaatgagcagtcagtgtggcgtcatt

SEQ ID NO: 345285 - DNA, 74 bp, Homo sapiens
ggtcgggatcccgccccgcccggagccccggcccccacagatggactcaccctgtcacccaggttggactgcac

SEQ ID NO: 345286 - DNA, 90 bp, Homo sapiens
cttaatgataagagacatatattaaccaaagataccaataataatgtggcatattgggatgtattgaagagtcacctgatatgaaaaagg

SEQ ID NO: 345287 - DNA, 75 bp, Homo sapiens
cgtcgagagattcactatggaatcggttgaatcaagggattctttgaatagcatagccctgaagtttgatacaac

SEQ ID NO: 345288 - DNA, 120 bp, Homo sapiens
ccacctcctccatttcttccacctcctccgactgtcagcactgctccacctctgattccaccaccggattttcagctgaactctcatctctcaacactggcaaatattcataagatctac

SEQ ID NO: 345289 - DNA, 90 bp, Homo sapiens
gccatatctttgcatccttcaatgacacttttgtccatgtcactgatctttctggcaaattatcgaatgtctgaaagaaaacaagaagca

SEQ ID NO: 345290 - DNA, 73 bp, Homo sapiens
gcaggaagaattgttacgcaaacaggaggttctgggggaagagaagctgaaggagatactgaaggagcgggaa

SEQ ID NO: 345291 - DNA, 96 bp, Homo sapiens
tcgcttcgccgactactttgtcatctgcggactggacacggagaccgggctggagccggacgagctgtcgggtgtcatggagaaactccagctggg

SEQ ID NO: 345292 - DNA, 82 bp, Homo sapiens
ctcaactccaaccacgacggggccgacgagacctcagctctgcagcgcttcagcgagggtgccctggagtacctagccaacc

SEQ ID NO: 345293 - DNA, 78 bp, Homo sapiens
gagccaagagcttctttgatggacacagcattgttggttttgccatgtactattttacctatgacccgtggattggca

SEQ ID NO: 345294 - DNA, 89 bp, Homo sapiens
agacttcattaaaattgaggagtttttagaacaaaccctggctcctccaaggtatgccattgcattggccttaagggaaaagcagcgtg

SEQ ID NO: 345295 - DNA, 89 bp, Homo sapiens
tgatcagaacagtgctagtgaaagaatgttattctgtcttcacaaatcgaaggaacattaaccaggtggtatttgttggaaatttcttg

SEQ ID NO: 345296 - DNA, 96 bp, Homo sapiens
cttgattctcttatacgctacttttactcagagtttgaaggttgtgaccaaaagaggctccgggaggcaaatacatgcaggcggtgattcagtatg

SEQ ID NO: 345297 - DNA, 78 bp, Homo sapiens
acagaagcggaacagccacagcagcctcccaaggagtctgcaagttggtgatgctgtggagtcttcaaaaagcccgac

SEQ ID NO: 345298 - DNA, 100 bp, Homo sapiens
tggaagaaccatcctataaacgggaaagattgactagtttcacaggttggaagctttcttagaatctatagccttcataccaaacttcaatcaatgaatt

SEQ ID NO: 345299 - DNA, 82 bp, Homo sapiens
atcgtggacgtcactggccctggtggggattgacagccacgggaaggctttactgcagatggtgcgtgacgagagccaccag

SEQ ID NO: 345300 - DNA, 83 bp, Homo sapiens
gccaaagatgatatcaagagggtcatggcggcgatcgagaaagtgcgcaaatgatggagtctcgctctgtcacccaggctgga

SEQ ID NO: 345301 - DNA, 90 bp, Homo sapiens
aattgtatgaaaatggtgtgactgattctctgaagagtaactttgccctcctcctaaagatgcgttcaggtcagctttctcgaaaatttt

SEQ ID NO: 345302 - DNA, 75 bp, Homo sapiens
cagacggctgcccttcaagtaccagtcctacaacgtgactttaaaaagacagcagaaagcaaaaatgtcccattg

SEQ ID NO: 345303 - DNA, 49 bp, Homo sapiens
ggcagaggcacttatgcttgtcaggttttgatgatgatggttcagaatt

SEQ ID NO: 345304 - DNA, 56 bp, Homo sapiens
tgatcacgaaccggagagcaaggttgaggtgatctacatgggccgcaacccccggg

SEQ ID NO: 345305 - DNA, 100 bp, Homo sapiens
ctgatgcgctcagtgagagagacaaagtcaaatttacagtgcacacaaaggtggttgtgaatgctcttgttggagcaattccctctatcatgaatgtgct

SEQ ID NO: 345306 - DNA, 98 bp, Homo sapiens
tagagccaatcacctgtcatgcctggaacagggatcgtactcgtgaaatgacaatggatgctctgttggctcgattgaaacttctgaatccagatgac

SEQ ID NO: 345307 - DNA, 100 bp, Homo sapiens
gtgagttgttgctcccgcctgagcccagcccccagaaaggattgtgacatatcgttggacccagaattgaggtttggtgcctggaatgctgacctagatc

SEQ ID NO: 345308 - DNA, 142 bp, Homo sapiens
ctatggaatgtaagaccccgactcttcctggtgaagcatctgatgcacgttccatccggcgctcagctgggcttgagcagcaagcatctaaagttgagaaggtgttttttaccactgcagtaccagtagccagtagcccagg

SEQ ID NO: 345309 - DNA, 97 bp, Homo sapiens
ctgtggtttagtcaaaaagccatgtagaatgcctgccttttgaagaccacttttaaggtgtctagtaagacagcagatggagtcttgctctctcacc

SEQ ID NO: 345310 - DNA, 75 bp, Homo sapiens
ggccaggcgacactgcacgggacaccctggagctgatttgcaaggcactcaaggagttgcccctggtcctgtaat

SEQ ID NO: 345311 - DNA, 82 bp, Homo sapiens
ctcaccgagacggcgatccgggcgctcgagacttaccagagccacaaggtgctggagaatctggtaaaagcaccattgtgaa

SEQ ID NO: 345312 - DNA, 100 bp, Homo sapiens
gtgcccttctttgagccagtgtttggagaaggaggaatatttggtccctggtcagtttctgctttgaacatgaacgattggatgcccatcgccaaggagt

SEQ ID NO: 345313 - DNA, 75 bp, Homo sapiens
caggttgaaaaaccaaagctccctgctgcataagaccttgtcagaggattatgaagaggatgaggaagatgatga

SEQ ID NO: 345314 - DNA, 89 bp, Homo sapiens
taagacctcagatcagacagagaatagaaatgtactgtcgagagctgacagaaaggtttgaagatgtttgggtggtatctgggcctttg

SEQ ID NO: 345315 - DNA, 98 bp, Homo sapiens
agagctaccttttcccacgagttggagcctgaggtgcggagtttcgtgagtttttactgactcgaggaatgtgccataccgaatccgtgtgcggctgt

SEQ ID NO: 345316 - DNA, 75 bp, Homo sapiens
aaatcattcaagtggccaagacctctgctgcacagagctcgctgcccaaatcattcaagaggaagatctccgttg

SEQ ID NO: 345317 - DNA, 82 bp, Homo sapiens
cggagctgcggtggcgtctccacacgggagaagcatgacactggccaacactgcgtccagcatttgggtggccctcaggatt

SEQ ID NO: 345318 - DNA, 75 bp, Homo sapiens
ggagcctcaggcggcagcgcttctagagttgcatttgggaactgcaatgggttggctgtggtggattttatacag

SEQ ID NO: 345319 - DNA, 88 bp, Homo sapiens
aatgacgaaggggcttcttccagagccaaggaggaagggttgtccgggttgtgtcaacgctgctcataaatataatcccagaggacca

SEQ ID NO: 345320 - DNA, 75 bp, Homo sapiens
tttgatccagaacttgcagcaacaatagacagggtctccctctgttgcccaggctggagtgcattggtgcaatca

SEQ ID NO: 345321 - DNA, 83 bp, Homo sapiens
ttgagtgtgccgactctgcccatggcctgaagggccacatcatctcttattcgggatttcacacagaaagatcggaatctgat

SEQ ID NO: 345322 - DNA, 106 bp, Homo sapiens
gaaggcactcaaaagtggggggcaggaaagtccccaaagctccagagatagatccagtagagtgtttggtggcagataactctgtaacagtggcttggagaatgcc

SEQ ID NO: 345323 - DNA, 109 bp, Homo sapiens
ctcacctcgctactcgcttgcctacccgccggcccgcgggtctacttcctcaaaggttttaaaatcaaagatgggaaaatcggagaaaattgcccttccccatggccag

SEQ ID NO: 345324 - DNA, 102 bp, Homo sapiens
tgctcctttggttgaatccccaggcccttgttggggcacaaggtggcaggagtgctcagattgctgacctacagcagaagctgctggatgcagaaagtgaag

SEQ ID NO: 345325 - DNA, 101 bp, Homo sapiens
agcagtggattcccagtgtccccacgagctgtgtggtccatgatgagaaatgagccgtcagactgctacagcattacctaccggtacctcgaagtgtccac

SEQ ID NO: 345326 - DNA, 82 bp, Homo sapiens
ggaaccctggtcaccgtctcctcagttgcagagtgggcaggatcttaagacccgataggtgcagaacccatctggacacgga

SEQ ID NO: 345327 - DNA, 100 bp, Homo sapiens
gcaaaaccacattcatgggacacttctccagtatctctcagaagatagaagtgtgcaagaagtactacagaagcatttcaatatcagcaaaaacctgcgg

SEQ ID NO: 345328 - DNA, 100 bp, Homo sapiens
caaaaatgctcaacagaagaagagcttgagtttggggccttctgcagctgaaatcaatcaaggagctgagagaagataatatcattttaattgaaaccaa

SEQ ID NO: 345329 - DNA, 100 bp, Homo sapiens
cccgctactgcagggacctatggattgtcagtggcttcgccccgaggagagctgactgccctgggctgctgcctccggcagagctgagccaaaatgtccc

SEQ ID NO: 345330 - DNA, 82 bp, Homo sapiens
ggcccgacccgcctccccggcgccgccgtggctcgacggagaccagctaggctgtttgcagacaaggtcccaaagacagcag

SEQ ID NO: 345331 - DNA, 88 bp, Homo sapiens
acgtgcggaggaaggactcctcgctctatataggcaccatcatgactccaagcggaggagatccgatgaatttaggcctcaaaattac

SEQ ID NO: 345332 - DNA, 101 bp, Homo sapiens
tctcaggttcctctgccaaagatagtaagttgtttaagaaaggcctgaatatatcagaacatctgagcaccattttagaagagtcaactcttaagattatc

SEQ ID NO: 345333 - DNA, 100 bp, Homo sapiens
tttccattatagaggagacggattcagaagggctacagacttcagattttcctgtccttgatcccagctggactgctcaagaagaaatggcccttttaga

SEQ ID NO: 345334 - DNA, 100 bp, Homo sapiens
tgcggctgtacggagccatcttgcaggatcctggaggtgatgggatagactggggagacgatgctgttgctttgcagatcacagtgctggaagcaggaac

SEQ ID NO: 345335 - DNA, 83 bp, Homo sapiens
cttccccacctgcccggtgcccgaggaggcagccaagctcgtagcctgccactccgtgcgagcatcagatccatgctgctgct

SEQ ID NO: 345336 - DNA, 100 bp, Homo sapiens
agaacacctactgcttcggccggaccgtggagacactgctgctccgctttggcaagcctcctgcccgaaggccacctgaacctaacggctccctgcaacg

SEQ ID NO: 345337 - DNA, 100 bp, Homo sapiens
aggtttcttgctatttaaagatttttgtttgaatgaaattaatgaagctgtacctcaggtgaagttttatgaagagatctccaagaaggagaagcttctc

SEQ ID NO: 345338 - DNA, 75 bp, Homo sapiens
ccgccagatcaacctggagctctacgcctcctacgtttacctgtccatgcgggccaatccgagcctacatccttg

SEQ ID NO: 345339 - DNA, 83 bp, Homo sapiens
ccccggccggtccctcgcctcccggccgagctgacggatagaccatgaagctgaaggaacttgagcggccagctgtccaggca

SEQ ID NO: 345340 - DNA, 100 bp, Homo sapiens
agaaattgcacatcaaattattgaacaacagatgggagagactgacaggccaactgttatagaatacgatgatcacgagtatatctttgaaggattttct

SEQ ID NO: 345341 - DNA, 100 bp, Homo sapiens
tacatgatacaagatcttactgagattggtccccaggaccaaattaccatcacagggtacgaaaagaacacagaagctgccagggatgctatactgagaa

SEQ ID NO: 345342 - DNA, 100 bp, Homo sapiens
ctgctgtcccgggcctaccccctggactccctggagaagcagatggaaaaggttcgagaacttgtcttggacaattgcaaatcaaatgatggaaaaattg

SEQ ID NO: 345343 - DNA, 76 bp, Homo sapiens
caggacttgagtaacagcaacatggtgccaatgggtcatgtttggttagaaggtgacaatctacagaattctacag

SEQ ID NO: 345344 - DNA, 50 bp, Homo sapiens
ggcatcatccgctatgcaattggggtccatgagctgattccagctgtgat

SEQ ID NO: 345345 - DNA, 83 bp, Homo sapiens
aaaggaagtaccaggacttgcacaggaatgaatctgaagtctgctgcagtaaaacacagaaggctttaaaatgttttcttgca

SEQ ID NO: 345346 - DNA, 96 bp, Homo sapiens
tgagcaggcgctggctgctgagcccaaggccaaggaccccttcgctcacctgcccaagaggttgctccttgagggcaggacagttcttatggcttt

SEQ ID NO: 345347 - DNA, 51 bp, Homo sapiens
ttgtggataagacagtcccacagtccaggttagcatacgtatcaaggacag

SEQ ID NO: 345348 - DNA, 96 bp, Homo sapiens
aacgaatgcagattgctgggaagctgacatcacagatactgggtcgtcaggatggagttttgcaagactgggtcattgacgattgcattggtaact

SEQ ID NO: 345349 - DNA, 100 bp, Homo sapiens
ctatcacagagcaattaaagttacagtagatggacctcgggaacccagaagagttgagaagaggaggaagaataatgggaggagacaggacctttttcaa

SEQ ID NO: 345350 - DNA, 80 bp, Homo sapiens
ctatagattctgctggtatacagctacatccaggagagaatgctgacagtcctgcaggagcagacaagatggagacaaat

SEQ ID NO: 345351 - DNA, 74 bp, Homo sapiens
tatggcaacatgacagaggaccatgtgatgcacctgctccagatttcaggtatgctgctgaaagtgggaatcct

SEQ ID NO: 345352 - DNA, 50 bp, Homo sapiens
aaaaactactgtgaatgctatgagatttccaaatctgaagtctgtccgag

SEQ ID NO: 345353 - DNA, 143 bp, Homo sapiens
tgaatttaaaaactgctccaggcggccggacggcgggacaacgcctcctcacttgctcctctacggttcgtgctggccgtgggcagcgccgtctttgatgccatgttcaacgggggaatggccacaacatccacggagattga

SEQ ID NO: 345354 - DNA, 50 bp, Homo sapiens
cgcgatgacggctacgaggccggtacaggtttgcagattccgccagcagc

SEQ ID NO: 345355 - DNA, 90 bp, Homo sapiens
ccgaggcccagaatccaccgtcaggcataaattgattattcctcgcccacatctgtgccagctcttcaccaccaggagtgttccttgaga

SEQ ID NO: 345356 - DNA, 82 bp, Homo sapiens
tggaaactggatgcagcaaggaaataggatttaaccgctctctgcctcccaggctcttgtcaggatggtgaagctgttcatc

SEQ ID NO: 345357 - DNA, 49 bp, Homo sapiens
cacctttccctttatttccggagtgctaggaaaagaatgtcagtgattg

SEQ ID NO: 345358 - DNA, 75 bp, Homo sapiens
gaaactacagtcatcacaatggtctggatggctcacagaacatttcctgcctgttgctcacactctgttgtccac

SEQ ID NO: 345359 - DNA, 90 bp, Homo sapiens
ctcaatcttgacatatatgttattggtaagactttgaccccgacgcaggcttcagtgattgccgcggatcagaagcctgagcactttggc

SEQ ID NO: 345360 - DNA, 82 bp, Homo sapiens
tggggccagggaaccctggtcaccgtctcctcagggtttccaggcctgaggtgcccgccctggccccaggagaatgaaccag

SEQ ID NO: 345361 - DNA, 100 bp, Homo sapiens
ctctgctgtagtggacaaagatttccttgataacgtatagcttctggcctgggcttggcctggattgttggacgagttctttatgcttatggctattaca

SEQ ID NO: 345362 - DNA, 83 bp, Homo sapiens
ggagatgtcagcccttcagaaacagtattacaaaccccaagactgcttctgagacagaaacagatatctgtgctgaatgggag

SEQ ID NO: 345363 - DNA, 75 bp, Homo sapiens
agctggtgtgatctgctacggattattgagctgcaagcgtttgctcaccacggccgctccctgccaagattccag

SEQ ID NO: 345364 - DNA, 100 bp, Homo sapiens
gaacagctcaccacccctggctcccggggagttcgatccgaacatcgacgtctatggaattaagtgccatgaaaaattacctctttaacatggaacaacc

SEQ ID NO: 345365 - DNA, 58 bp, Homo sapiens
tgaggctcagtctcccaacacctctggagaataaaggcagccccgttgatgactgaaa

SEQ ID NO: 345366 - DNA, 82 bp, Homo sapiens
ctgcggacccggcaggtgactttggaggcagtggagaaggtgacacagcacatccacggcctgtctgggaagaaggatgggc

SEQ ID NO: 345367 - DNA, 50 bp, Homo sapiens
ggggaacacccagccccagaaacaggtcctaggcctacttacaagcctcc

SEQ ID NO: 345368 - DNA, 82 bp, Homo sapiens
acaaatcatcaggaatccattatggtgtcattacatgtgaaggctgcaaggcaacagcattattgagaaaagcccttacaga

SEQ ID NO: 345369 - DNA, 90 bp, Homo sapiens
ggtgctgctgtgtggctgatcggactggccactcgctattgcacaccttatatggaaggacccggatgcagagtctacagcctgacccag

SEQ ID NO: 345370 - DNA, 83 bp, Homo sapiens
ctgcagatggaattccttcggaacaaccggaccacaggtccaggagcacaacgggcacgtgttcgccagctaccaggttagca

SEQ ID NO: 345371 - DNA, 75 bp, Homo sapiens
tgattgttggatatgcataagagacttgtcagcttgtgggaaagtgacatcagcgtccacccgctaaccctgccc

SEQ ID NO: 345372 - DNA, 98 bp, Homo sapiens
ccctaggagcttcctccaatttatctactctttcacattcaagaagattactgaagatttcattgctacatatcaggccaattatggcttctctaacg

SEQ ID NO: 345373 - DNA, 98 bp, Homo sapiens
ctgatagattagacctccaactccatatttaccagctgaagacgctcatcaagattgtgaaggttgaatttcaggcaggatctgaaggccaacttctg

SEQ ID NO: 345374 - DNA, 100 bp, Homo sapiens
ttgtggctggagtaggagcaaacagcaatgattcgcctttgccagtctcatctcgtgtctgctttgttaagttccatgatccagactcagcagttgtggc

SEQ ID NO: 345375 - DNA, 90 bp, Homo sapiens
ggtgatggaagcaggtggaattatgccctgttggttccaatgctgggattggctgcttttcgtctctaattaacagaagatggcaaagcc

SEQ ID NO: 345376 - DNA, 100 bp, Homo sapiens
agagctgtcgccatttccaaagcccagacttgggaactcagtacctgattgatgtggacatcttcgagccccaggggatcagcaagctggatgcccaggc

SEQ ID NO: 345377 - DNA, 74 bp, Homo sapiens
cgtccataggggtgaatggggcatccgcagtcggaaggctcgagccgtgtatccgtgtgaagcagaacacagct

SEQ ID NO: 345378 - DNA, 82 bp, Homo sapiens
tggaaaactggatgctgcagacactgaacgaggagccagtggtgtggggatattcagctttgccaggtatggcagtgatttt

SEQ ID NO: 345379 - DNA, 75 bp, Homo sapiens
tccactttcgccagcccgtgccgcgagcgcggcctgcaggagggaaattcaactactgaggaggttacggcacaa

SEQ ID NO: 345380 - DNA, 75 bp, Homo sapiens
gttcttcaagaggaaacccaaagtccttggggagcatctttccttgaagaagtacattattgacattgtggttga

SEQ ID NO: 345381 - DNA, 119 bp, Homo sapiens
cccagaccggccgctctcccctcctctcacggcacctcccaccatgaagagccaaatctcctcagccacctgttgaagaagaagatgaacacttcgatgacacagtggtttgtcttgat

SEQ ID NO: 345382 - DNA, 100 bp, Homo sapiens
cgagcagcggacgccggtctctgttccgcaggatggttgaaacaaatgctaaatgaacttatgcgccagcaaaatcagcatccagaaaaacctggaggca

SEQ ID NO: 345383 - DNA, 75 bp, Homo sapiens
ggcgagcggacggggtcgagtcagtgcgttcgcgcgagctcagtaaacgctctgccactgacctgtgtggcagga

SEQ ID NO: 345384 - DNA, 89 bp, Homo sapiens
gaagtttagttgaaatcattgaacatgcttcagaatggaaagtgcaacttaaaaccaaagagttagcccttcagcaggatgttttgggg

SEQ ID NO: 345385 - DNA, 96 bp, Homo sapiens
ggcgttggtgctgtttgcggatgctgatgcaggggcctttatcatctgctggactcctggattggttttgttacttctagacgtgtgctgtccaca

SEQ ID NO: 345386 - DNA, 88 bp, Homo sapiens
ctgtcagagcccggggacggcgaggccctcatgtaccacacggtagttggcaaaaaaggagaaagccactaaggtacaaaagacactg

SEQ ID NO: 345387 - DNA, 80 bp, Homo sapiens
tccataattgagtgagccaattccctggagttgggatacagctacgtggaactgaatgcaagtgacacccggagtaagag

SEQ ID NO: 345388 - DNA, 82 bp, Homo sapiens
cgtctgaactaggatgtcccgacatgaaggctgctctttggcgtaaattgcaatcgattagggatcgtttctcagaatcaag

SEQ ID NO: 345389 - DNA, 82 bp, Homo sapiens
tggccgagagcgggccggagcccaggcctggcgcggcggcgcccgccagcggagcgtgctttggacaccatgaattttgatg

SEQ ID NO: 345390 - DNA, 100 bp, Homo sapiens
atctggattgctccacctgcgggcacaggctgtgtgaatttcatgtacaggtttgcagattccgccagcagcacagcaagctctacagatgagtggctct

SEQ ID NO: 345391 - DNA, 100 bp, Homo sapiens
agcttgatgatgtcacctaccatggcttccccagcctgcaggccctggctgggctgcagaccacaagactgggaaaccacttggaagaccgagtgaacaa

SEQ ID NO: 345392 - DNA, 99 bp, Homo sapiens
ttggatccttgtgggcatgatccataatcggtttcaaggcaaacatcgttgatgattttcaagaatacaactatggaacaatggaaagttaccagacag

SEQ ID NO: 345393 - DNA, 75 bp, Homo sapiens
gagaaggatgacaccggagtttgacgaagaggtggtttttgaggatgcgtattggatagcaatgaatagttctct

SEQ ID NO: 345394 - DNA, 51 bp, Homo sapiens
cgtctcatggcattgctgggacaggatttacaagaccagctagaggatatg

SEQ ID NO: 345395 - DNA, 98 bp, Homo sapiens
ccggagctggacgccgccgccgccaccgccacctgcgcggcagtcatcaaggttattcagcgatagttatgacctcccggttacgtgcgttgggtgga

SEQ ID NO: 345396 - DNA, 100 bp, Homo sapiens
gcggcggcggtggcatctgcggccatggcggcgactactgccaaccccggccactgcagaacaaattagacttgcacagatgatttcggaccataatgat

SEQ ID NO: 345397 - DNA, 83 bp, Homo sapiens
cttcgttgcttgcttgcctgtgcgcgcgtgcgcggacatggcctcaaacgatcttcgtgaagactctgactggtaagaccatc

SEQ ID NO: 345398 - DNA, 100 bp, Homo sapiens
ctggaccctgttcagagggacctctacagagaagtgatgttagagaattatgggaacgtggtctcactgggagttttgtcaagcgcttcagcagcctgat

SEQ ID NO: 345399 - DNA, 101 bp, Homo sapiens
attgtgttgtaatcattcaaaggataaccaaatgtgccgtgatgtatgtgaacaggagcatctttccttgaagaagtacattattgacattgtggttgaaa

SEQ ID NO: 345400 - DNA, 75 bp, Homo sapiens
gtttagcacgatgagctcaatcggcactgggtggaggccatagtggagtttgactaccaggcccagcacgatgat

SEQ ID NO: 345401 - DNA, 51 bp, Homo sapiens
agctgtaatcaattgtgctgacaacacagagctccttaataagcatttata

SEQ ID NO: 345402 - DNA, 75 bp, Homo sapiens
ccaaaactcattgacttctcagcccagattgaggtggtgccttctgcctctgccctgatcatcaaagccctcaag

SEQ ID NO: 345403 - DNA, 119 bp, Homo sapiens
ggctcgttcaagatggcggagctcgaccagttgcctgacgagaatgtaggtgcaaaaaactacagacatctctgtgctgtttattacaacaagaatcctgggtttgagatcattcatgg

SEQ ID NO: 345404 - DNA, 90 bp, Homo sapiens
gcgaaggaggcagaggcacttatgcttgtcaggcctactgaacttgacgcactggtatttggccatctatacaccattcttaccacacaa

SEQ ID NO: 345405 - DNA, 90 bp, Homo sapiens
ccgggatcgtgaccgagaccgtgaccgagagcgtgaccgagagcgcgaatatcgtcatcgttagaagttatggcagagaacgatgtggac

SEQ ID NO: 345406 - DNA, 90 bp, Homo sapiens
gaggacgccggaacaccctggaagccgagaaatggtcctgatccggttccccatgcagaggaacttggtggtgatccccaagtctgtgac

SEQ ID NO: 345407 - DNA, 83 bp, Homo sapiens
acccatcgccgcttctagaccctactgcggtctcggatattgccgggcatttggctttatgtcccgagttgccctacaagcag

SEQ ID NO: 345408 - DNA, 100 bp, Homo sapiens
tgcagtggagagagtgtagaactctggagtgaagagatctgcctggaaccctgactctatcactaggtacctgggccagctggacgacagtgagtttgag

SEQ ID NO: 345409 - DNA, 50 bp, Homo sapiens
tcctgaatgtggcttggttgtagggagcaccaagaactactgaaacaaat

SEQ ID NO: 345410 - DNA, 83 bp, Homo sapiens
cagcatccaaacattatcactctaaaggatgggcttcacaaaggtcagagttcacattcggcaggtcctaatggtgaacgacc

SEQ ID NO: 345411 - DNA, 50 bp, Homo sapiens
cgcctcttctaccggggcaagcagttctccaaggagaagtacatcctgga

SEQ ID NO: 345412 - DNA, 100 bp, Homo sapiens
ggagcgactctcggtcgtgcagcggcggcgagcgctcgcgagcggctgcgggacgcgaggtttccggggcagcgggtggcatgagacgtgggaacatggg

SEQ ID NO: 345413 - DNA, 75 bp, Homo sapiens
tctacactggactaagagaagttgttaccgaacatctcataaataagtgataccaagaagaagcaggggatgaag

SEQ ID NO: 345414 - DNA, 71 bp, Homo sapiens
ggtgtttggaatgacgacagtatggtatctctcctctttgtcacaacctctttgccctgtatgacgagaac

SEQ ID NO: 345415 - DNA, 74 bp, Homo sapiens
cttgggatcccccagttccaaagtgtcttaaaggagaagatggtataaactggtccatcagtgacaaagacatt

SEQ ID NO: 345416 - DNA, 83 bp, Homo sapiens
gacaattccatttggggaccagagatggacggtcactcagcctatggaggtcagcccaaggccaaccccactgtcactctgtt

SEQ ID NO: 345417 - DNA, 111 bp, Homo sapiens
gacggccaaaggattgcttcgaaaccttcgacttccttcagggtttaggagaagcactgttgttttccacacagtgtgtgaacttaaatctccctccatgagtgatttcct

SEQ ID NO: 345418 - DNA, 75 bp, Homo sapiens
gcgaggtgccggccccgacaggacggtgagccgcttacaaacacgcagatggcaagaagattgatggcaggaggg

SEQ ID NO: 345419 - DNA, 60 bp, Homo sapiens
gcccctgctgttgctacaactcaggtatttatgcaagctctcggatcaggagttacgaca

SEQ ID NO: 345420 - DNA, 90 bp, Homo sapiens
accaagtcctcgctggactgctcagggtgccagacctcatcccaggaaatgtgaagaattcacctggaactaagtagaaaactccatgct

SEQ ID NO: 345421 - DNA, 82 bp, Homo sapiens
ctcagctcctggggctcctgctactctggctccgagcatgggtggtaaagtaccacctgctactcagaaagctaaatcagaa

SEQ ID NO: 345422 - DNA, 100 bp, Homo sapiens
ggaccacaggccatcacagtcccctgttccgaggtcaggaggatgcaagtcctgacagattcagcaacactagaggcggatttggtcgtggacgtggtca

SEQ ID NO: 345423 - DNA, 75 bp, Homo sapiens
tcttcattatatgctttaggaactcaggattctacagatatatgcaaactttcttgtctgcacagaaagtcccag

SEQ ID NO: 345424 - DNA, 75 bp, Homo sapiens
atttttattttccaggcttgcacagaaatctggaggcagtatcacctaacgtttaccaagtactggacagaatca

SEQ ID NO: 345425 - DNA, 100 bp, Homo sapiens
atccaccaaaggacttgaagaaacctcgcggaaagaaatgcttctttgtgaaattttttggaacagaagatcatggtgggggaaaagtagctccagctca

SEQ ID NO: 345426 - DNA, 74 bp, Homo sapiens
ggatctgaagagctatggtgaaacaccactgaagcattgccaagacctctgtgagtgaaagccttcagagggaa

SEQ ID NO: 345427 - DNA, 100 bp, Homo sapiens
cccggtttgctgatcgccccagggatcaggaggtcagtttacgttgcgagacatgtatgagcaatttcaaaatatcatgaaaatgggccccttcagtcag

SEQ ID NO: 345428 - DNA, 101 bp, Homo sapiens
ctggcctgagcactgcactggaggccagcctcttcgctgtggtgcccaagtacttctttcagctgcacagttggggatcttcaaaccaagatagatggctt

SEQ ID NO: 345429 - DNA, 100 bp, Homo sapiens
atccccgacgaccggatcctgaggaggcagctgcggtggcagctgctgagttctcggtgaagtcccaggtaaaccaccacagtgctgctagtaatgaaac

SEQ ID NO: 345430 - DNA, 51 bp, Homo sapiens
aaggattccaagtaactcttatttggtgtgggcaagagcagtttactgttg

SEQ ID NO: 345431 - DNA, 50 bp, Homo sapiens
accgactatcacttggtatatgtttttccactactcccaagggcaagtgt

SEQ ID NO: 345432 - DNA, 100 bp, Homo sapiens
tttgagccaggaaagaagaactttctgcatttgacagataaagatggtgaacaacctcaaatactgctgtgtttcctgaggttataggcgggtgtttgag

SEQ ID NO: 345433 - DNA, 82 bp, Homo sapiens
tcccgggtcgctgctgtgttctggaaaggcacattgtaccctggatgcagcaggtcctgctcaatctggaattttgtcagat

SEQ ID NO: 345434 - DNA, 83 bp, Homo sapiens
caaagcctttgctatgatcattgacaaactggaagagatgcagctgtcttctcctcagtgctggcgctctgactacccttccc

SEQ ID NO: 345435 - DNA, 98 bp, Homo sapiens
tgagaaaagagaagcaagtgttagtgcattggggcttttacccagacagcatcatggcagaacaggatgtggaaaacgatcttttggattacgatgaa

SEQ ID NO: 345436 - DNA, 101 bp, Homo sapiens
tggcgctttaagagctgtgcgtgttttgggggagcagacggttgacagtgttgagtttgattgaaggatcactactcttggaatcaaagataaatccaaat

SEQ ID NO: 345437 - DNA, 100 bp, Homo sapiens
gggtcaacgtcttccacaaaacctcagtcatcgtcacgagtcctgagtcggttaaggtaaaaatgcatttgcaaagggagaaaatgaaggccaaacagaa

SEQ ID NO: 345438 - DNA, 73 bp, Homo sapiens
ggaaagcgtcacttggggaaaacaaggtggacccgggaagagggccacccgttcatcgtgcagttcaatgatg

SEQ ID NO: 345439 - DNA, 82 bp, Homo sapiens
ttgtgtgtccgactcggcagcagtggtgctgactgggttacttttttaaacactaggaatggtaatttctactcttctggac

SEQ ID NO: 345440 - DNA, 100 bp, Homo sapiens
tcagttacgacaagaagaaaaacggcaacgtgtaatcagaaggcacagattagaggaaggaagaggggacggcaaaacagaacagaaaggcggagataaa

SEQ ID NO: 345441 - DNA, 74 bp, Homo sapiens
aatgtaagtctgccttatgttcctccagccaattgcaaaggagttgtggaaagtaaaaatgtagccctaccaaa

SEQ ID NO: 345442 - DNA, 76 bp, Homo sapiens
aaaaggactgaagtggggttaagaacatctgtggaatttaagaacagtatggagctcatcagagtatatcattgaa

SEQ ID NO: 345443 - DNA, 95 bp, Homo sapiens
aaggcccctccggccagggccgggagccgggccggcctagccaggtgtcgtgaaaactacccctaaaagccaaaatgggaaaggaaaagactcat

SEQ ID NO: 345444 - DNA, 98 bp, Homo sapiens
cctgtatcgttttgagaaccagacaggcttccctccccctgatagcagatttgatgcctactgctttaaacctcgatgcattctatttctcatcattt

SEQ ID NO: 345445 - DNA, 73 bp, Homo sapiens
caggtgtcagcacatcaagaggcaggcagctcccaggcagactcagacgatgccctgctgaagatgaccatca

SEQ ID NO: 345446 - DNA, 85 bp, Homo sapiens
ctttgccttatggaaggcctctaagcccggagaaccgtcctggccgtgcccttggggaaagtagagacggggtttcgccatgttg

SEQ ID NO: 345447 - DNA, 50 bp, Homo sapiens
tggaattatggtaccctccctcagaggtgttatgaacataaacagtatag

SEQ ID NO: 345448 - DNA, 49 bp, Homo sapiens
agtgagtcccccacttatcactcagttaagtgggcagaccaacatccac

SEQ ID NO: 345449 - DNA, 78 bp, Homo sapiens
gacgggctccgtggctggttcccggcgagctacgtgcagttgctggagaccacatggttgagaaaggagaaagagaaa

SEQ ID NO: 345450 - DNA, 75 bp, Homo sapiens
ctcaaggaccgggctgcagaggggcgagcatcctccaatctagggtttttggagtctctggatgatttttacatt

SEQ ID NO: 345451 - DNA, 75 bp, Homo sapiens
cttccaggaggttgtattggaaagcagtagtgtggacgaattgcgagagaaggtttggctctttaaccatggatg

SEQ ID NO: 345452 - DNA, 99 bp, Homo sapiens
gcgcgctgctggacgaagagctctcctccttcttcctcaactatctcgctgacacgcagctgccaaggggccaagggatgagctggggccctccttccc

SEQ ID NO: 345453 - DNA, 50 bp, Homo sapiens
agcatatgaaagtggattatggctatatcgagaagtttactgactttctt

SEQ ID NO: 345454 - DNA, 75 bp, Homo sapiens
ttagaaagaacacgtcagcgaaacccatctgatcgacatgttattatcgtgttcgacgagtgtcacaaagccaag

SEQ ID NO: 345455 - DNA, 83 bp, Homo sapiens
ctggcttgagagttccggaataccaaaggtagtaaacctattgatggcaattttgctgactgtggaagtgactcatccaaact

SEQ ID NO: 345456 - DNA, 75 bp, Homo sapiens
tcagaaatctttactgattccaatggatgttctgttcttgaaggactgtgtaggcccagaagtggagaaagcctg

SEQ ID NO: 345457 - DNA, 126 bp, Homo sapiens
agcgcccagactgatggcgatggtgatggcagcagttactcgcacaaccccagttaagctgcgctccgggagttccctggatgaaagtgtgggaacagaggaaggatcagagaaaagagaggcccc

SEQ ID NO: 345458 - DNA, 100 bp, Homo sapiens
cctggggctgtgctccatggcgagctggcaaatcctgaaggaacccaaagtggctgcttctgttttgaatccctatgtgaagcgttccattaaagtgaaa

SEQ ID NO: 345459 - DNA, 96 bp, Homo sapiens
aaaggaagtaaaagaaagaaatattttgttatatgggcttctcatatcttacccacaggttgtttttgagcacgttcactctcgcagtgtcagctg

SEQ ID NO: 345460 - DNA, 100 bp, Homo sapiens
tgcaaagcgaactacatatggaggagtgtctggaataagacgagttggaagaagacctgatcaacaacttcagggtgaagggaaaataattgatagaaga

SEQ ID NO: 345461 - DNA, 82 bp, Homo sapiens
gtttcactcaacacgtgccaccagcagatggaacagactgcggtcctggaatggagctttcttcctctatgctggatttgct

SEQ ID NO: 345462 - DNA, 96 bp, Homo sapiens
tctgtaagctttccgggaacatccaaggcaagactggcacccagcacagcaggcgttcaccttggtcgtcctgatgttttacctcagactccacct

SEQ ID NO: 345463 - DNA, 83 bp, Homo sapiens
gaattgggtagagagaccaaagatcttgatgagattccaaaagatgagcatattcttcggttcctccgtgcacgggattttaa

SEQ ID NO: 345464 - DNA, 98 bp, Homo sapiens
cggtgacggagaacagcaaagcctggaagcaagccgccgtggagaaggaagaactgtgctgagggtgagaaggactggcagaaatacgagactgctcg

SEQ ID NO: 345465 - DNA, 100 bp, Homo sapiens
gtaactttctcccttgatccgggagtctttccactggatagggccagatttgagtgtgtgaatttttgagtgaaacctggaacccaaatgagaagaaatc

SEQ ID NO: 345466 - DNA, 101 bp, Homo sapiens
cacagaggctttttgtgtgttttatcatctaaaatccaatccctcggatcgttccaggaagagaaaggagatccatctattaagtttttccatgtgtctag

SEQ ID NO: 345467 - DNA, 100 bp, Homo sapiens
cttgaaagaagctgcagtcatgaaagagatcaaacaccctaacctggtgcagctccttggttggctcaaaaacagaagttgctgagtgcaaggagaaatt

SEQ ID NO: 345468 - DNA, 95 bp, Homo sapiens
ccaagtatgcgcccagcggattctacattgcctccggaggagatttgctctgacccatctgaagtccatatggctctgtatgatgaagacctcct

SEQ ID NO: 345469 - DNA, 100 bp, Homo sapiens
ccgtcttctgcgtcgctcgcgctgggagctgtagaccggagctgttcctattcggccatcttggctcctccacaaatgccttcaattaagttgcagagtt

SEQ ID NO: 345470 - DNA, 75 bp, Homo sapiens
gtctcggggcgggcgccgcgggacctctccgggccatgggtcgcaatggaagaagagatcgccgcgctggtcatt

SEQ ID NO: 345471 - DNA, 111 bp, Homo sapiens
tacaccctcacagtttgctctgctcttccaacaccagtggaagatgatcacatcccaggtttctagagccatctgggctttccgggaacctggaccagactctggcccagt

SEQ ID NO: 345472 - DNA, 97 bp, Homo sapiens
ttgtcgctcactctgcccatcacgtgccacatttgcttggggaaggccgggttctgagcttgttccgcctccctcccccgggaatggcgctatccgg

SEQ ID NO: 345473 - DNA, 100 bp, Homo sapiens
caaatgagagaatttgaagtgttgaaaaaactcaatcacaaaaatattgtcaaattatttgctattgaagaggagaatgcctgtctggggaggtggaaac

SEQ ID NO: 345474 - DNA, 100 bp, Homo sapiens
atgagcctgtttctggggcaaaaacattcaagaatgagagcgagaacacctgtcaagaacctcaagaaggcatgaagccagcccctgcagtgccgtccac

SEQ ID NO: 345475 - DNA, 98 bp, Homo sapiens
ggcgcggcgggactgcggcccgtggcggcgtgcgcggggacctgcgctgactaggtccggggaagcggctggctgtcggcaattggattcttccagta

SEQ ID NO: 345476 - DNA, 90 bp, Homo sapiens
ccaacccagaccacacccttgagcctgagcccgacattattcctgagagtgtgaacatggctacgcctcttcattcccgtccatgccgag

SEQ ID NO: 345477 - DNA, 90 bp, Homo sapiens
acaccagtggaagatgatcacatcccaggtgtatggctgctgctttaaaagatgcaggtgtgcagcctgaggagatatcctatatcaatg

SEQ ID NO: 345478 - DNA, 96 bp, Homo sapiens
ggctcaattattagtcggacagcaaaagttgcagtagcagatttgataatgggctgcattaaaagtaaagaaaacaaaagtccagccattaaatac

SEQ ID NO: 345479 - DNA, 90 bp, Homo sapiens
gtaggccgtctcgctctgggtctccaggcccgcgaccgtccgccagtcgtcccgagccggcacagtcttcactaccgtagaagaccttgg

SEQ ID NO: 345480 - DNA, 100 bp, Homo sapiens
gcttatcacttcagataaaaaggcttgagtttgaagaaacagaagaacctgattttactgcattatgtcagaaattaaagataccagatcatgtcagaga

SEQ ID NO: 345481 - DNA, 123 bp, Homo sapiens
gcatggcgtccgtgacgctgagcgaggcggagaaggtgtacatcgtgcatggcgtccagacgaagttatacggaagcgtctcctcattgatggagatggtgctggagatgatcggagaattaa

SEQ ID NO: 345482 - DNA, 82 bp, Homo sapiens
aaggagttgtatttagtgtgacgactgttgacctgaaaagctcctgcaaaacagctggcacagtccagtgcactggcttccc

SEQ ID NO: 345483 - DNA, 75 bp, Homo sapiens
cgacaagcacacactatggcgctgaaacggattaataagcaagaagatccttataggaagaaaaagcttcaggag

SEQ ID NO: 345484 - DNA, 101 bp, Homo sapiens
agtaaagtcagcatgagcaaaaactccaaactcctctccaccagcgccaagagggccgttgctccagggagaactgcaaatatcttcatccacccccacat

SEQ ID NO: 345485 - DNA, 88 bp, Homo sapiens
cgtccaactggtccctcagtcacacatgccagagattgctcaggaagcaatggagatctggtgctctcatgaaaatctacatcaggag

SEQ ID NO: 345486 - DNA, 100 bp, Homo sapiens
tctggcaaacagtgtttgcctctggttcagctcatacaacagcttcttagatgcctgaaaacttcatgcctcctgttcccatcacatcaccaatcatgaa

SEQ ID NO: 345487 - DNA, 100 bp, Homo sapiens
tgcaagaatcaagtgtgtaatctctgtggatttaaccctacaccacatttgactgaggtatgatctcgtgaaatcttgagagaaactgaatgacgaatga

SEQ ID NO: 345488 - DNA, 100 bp, Homo sapiens
cgccggttgccaggccaaggagtggactagggtcgccggggaagcggggaaaagatgccgttccaccatgtgaccgccggcttgttgtacaaggggaatt

SEQ ID NO: 345489 - DNA, 75 bp, Homo sapiens
cccggactccatcgactcccccggctcttagactactgccactgcagagccccgccatggaagacacgccgttgg

SEQ ID NO: 345490 - DNA, 83 bp, Homo sapiens
cccccaccgtcacctctagtgagcgcctagtcccagacccgccgaatgacctccggcctctcttcagcttctggagacctcac

SEQ ID NO: 345491 - DNA, 101 bp, Homo sapiens
acagagaccactggaaggagtcagataggaaagctggcagttaaggaaaggagtaagtgaaattggagaagatgtggactatgatgaggaactctatgttg

SEQ ID NO: 345492 - DNA, 90 bp, Homo sapiens
ggcccggcgcgcccgtccccggcagcgacaatgaggatatgtgatggcgtccagtttggagctgggataaggttcctgtagccgacaccc

SEQ ID NO: 345493 - DNA, 74 bp, Homo sapiens
caagccgctggcagccgcggatctcaccgccgctcaggacttcagctacgggacggacgagtacgacggagagg

SEQ ID NO: 345494 - DNA, 80 bp, Homo sapiens
agctttgctccgcctccggcagtggcttactcccggtgccaggttcttggagctgtgagttgatattcactgatggactc

SEQ ID NO: 345495 - DNA, 100 bp, Homo sapiens
ttaaggaactagaacaagaagaagaggagaggaaaaaggaagagagcactgcagccagtgaaaccactgagggaaagcaggcaggatgggagagtcgccg

SEQ ID NO: 345496 - DNA, 100 bp, Homo sapiens
gggaaagatattaaagtgtacatgccaaagctacatgaaacagttgatgccactagtgaaactcacatctaccaggagaatgctttattgcaacttttag

SEQ ID NO: 345497 - DNA, 76 bp, Homo sapiens
agctcagccatgccagctctggtgcgctgcaagctttcttcctggtggcagatgacatcatggattcatcccttac

SEQ ID NO: 345498 - DNA, 100 bp, Homo sapiens
agaggagagtgaagaggaagagcaactattggatgattatccgaaatgtttcattgtgggagcagacaatgtgggctccaagcagatgcagcagatccgc

SEQ ID NO: 345499 - DNA, 74 bp, Homo sapiens
gaaaaccctgctgatgtcagtgttatatcctccaggaatactggccagatttgggatgatgaaattgttgcaga

SEQ ID NO: 345500 - DNA, 100 bp, Homo sapiens
cggttctccatacccgtgacctggggatcgctacggaccttaaaatacccgcaacagccccttcgtcccaactgagctgactgctgcccactttggagga

SEQ ID NO: 345501 - DNA, 100 bp, Homo sapiens
agaggcaggatgccagcacgctcatctcagatctccagcggaggttgaggggatcgtcagtagagatgctgcagatacagtttatgtaacttgatggaag

SEQ ID NO: 345502 - DNA, 90 bp, Homo sapiens
ggtacctctccttttccctctccctttccctaagtgagatggaagattttcgaggtatagcagaagaatcatttccaagctttctcacca

SEQ ID NO: 345503 - DNA, 80 bp, Homo sapiens
gatcaattcggaaccgaagattaaaaaactggagccagtccttttgccaggctcagtttatgaacctcttaaaagcatta

SEQ ID NO: 345504 - DNA, 100 bp, Homo sapiens
gacgtctaccgcagcctggaggagctggccgagtcacgagaagagaatgccttctagatgcaaaatcacctccaaaccagaccacttttcttgacttgcc

SEQ ID NO: 345505 - DNA, 75 bp, Homo sapiens
cctgataatgtggctaatctggaggtgggccccctccacccccagcacttcccacctggtcggtcccgaacggcc

SEQ ID NO: 345506 - DNA, 100 bp, Homo sapiens
catggacctgcaggcggtgctgccgcgcgagctctacccagtcgagacatgcttcagcttatcaacaaccaagacagtgacttccctggcctatttgacc

SEQ ID NO: 345507 - DNA, 74 bp, Homo sapiens
tgtctccatcgtatcatcagtccaaaggggatcccactgctaaaaagttgccaccttccagagaagaggtacga

SEQ ID NO: 345508 - DNA, 90 bp, Homo sapiens
gggggagggggggccggagaggagcatgaatggagcaaaatggcggatcatgtgcagcttcccagtgatcctgtccatcgaggagcactg

SEQ ID NO: 345509 - DNA, 75 bp, Homo sapiens
cagaacatcagcctgcccagtgccgccagcttcaccttctccttccacaggattccagcagaagttcaccttcca

SEQ ID NO: 345510 - DNA, 80 bp, Homo sapiens
agacttcttgttgtatttaatcgaggattgattctaatgacagagatccagctccaggtcccacaggggctcttcttccc

SEQ ID NO: 345511 - DNA, 82 bp, Homo sapiens
gacaactatgatagcacaaacatgccattgatgcaaacgcagcaatcttgatgtggaagaaatggaggactcagaaccaagg

SEQ ID NO: 345512 - DNA, 94 bp, Homo sapiens
agtcctgtgatccatcactcggattggcaggacctggggccaaaagccaagccttgcctccccgattgaaagagatgaaaagccaggaatcggc

SEQ ID NO: 345513 - DNA, 100 bp, Homo sapiens
ggctacaggcgtgtgtcactgcgcccagctcccagatggacgtatcatcaaagttgggggagagagatttgaagcaccagaagctttatttcagcctcac

SEQ ID NO: 345514 - DNA, 74 bp, Homo sapiens
cgtcttcatcgtcgcggttctgctgccggtgctattcgagcacataatggtagtcttcagcaccttacttggct

SEQ ID NO: 345515 - DNA, 75 bp, Homo sapiens
tatgcaaggagtgaatgtttcagggtggagaagaatctgcttgtctatgggattttcctaagcccagtgaagaga

SEQ ID NO: 345516 - DNA, 75 bp, Homo sapiens
cctgacccggtccttcagtggactgagaggggctgccgacagctggatctaccatgaaagacttgtgaatccagg

SEQ ID NO: 345517 - DNA, 100 bp, Homo sapiens
atcccaggacctaccagaatctgtattaaaggtggaagaaggtccatatctttttctgtgggtgcttcaagtgttgttggaagtggaggcagcagtgaca

SEQ ID NO: 345518 - DNA, 100 bp, Homo sapiens
ttgagtgtttgaatgccatccttatacatggagttgatattacaaccagtgacactgcaggtttgtggtaaatatgccagctctagaacacatgaatcag

SEQ ID NO: 345519 - DNA, 51 bp, Homo sapiens
gacgcgtacgagctgcaggaggttatcgggtttggattcaggatttgttcc

SEQ ID NO: 345520 - DNA, 50 bp, Homo sapiens
tattgacctcgactcccatgcggcccgatgagagaaagggaaagttaagg

SEQ ID NO: 345521 - DNA, 82 bp, Homo sapiens
gacccggtgtgtggcgcgcccagagccccgcgtttcagccctagggaaggattttttatcaagcagaaatgcatcgaacaac

SEQ ID NO: 345522 - DNA, 88 bp, Homo sapiens
ggaaactagctcatctgtagagactgatttgcaacccttccgggaagccatagctctgcatgttctggaggctgggaagtccaagatc

SEQ ID NO: 345523 - DNA, 50 bp, Homo sapiens
cgggcggcggcgccggcaggaaggtcagttgctctcccctgaaggaagag

SEQ ID NO: 345524 - DNA, 87 bp, Homo sapiens
tttaaggcagatgtctaaacataaaaccgccggtgttccaggagaggagcccaagtgcaacatctgcctagggaagacatcagggcc

SEQ ID NO: 345525 - DNA, 95 bp, Homo sapiens
actcctggacaggatggattgccagggcttcctggcccgaaaggagagcctaggggccgtatggggtctttgctggaagagatgcatccaggggc

SEQ ID NO: 345526 - DNA, 100 bp, Homo sapiens
catccctgccccggcgccgtccgtgcccgcgggacctgacagccgggtcagagtaaaatgtttattggaggcttgagctgggatacaagcaaaaaagatc

SEQ ID NO: 345527 - DNA, 83 bp, Homo sapiens
ctgactcttgcgccgccgccttccacccggagataacgaaggaggcccaacttcattcaataaggagcctgacggatttatcc

SEQ ID NO: 345528 - DNA, 100 bp, Homo sapiens
ccttgatgacgagggccacagtgggattaaaaagaccactgaggagcaggtgcaggacctgaaggagaagaaggagaaggtggaggagaaggcaagccgg

SEQ ID NO: 345529 - DNA, 89 bp, Homo sapiens
cattttggggcagaatacagagatatggaatcaggtgactctcctattccatctgtttcttcgggatcatcttcacctctttcagccac

SEQ ID NO: 345530 - DNA, 80 bp, Homo sapiens
gaggatatcagggcagccctggaggcttactgcaagaagtatgagcagctcaaggccctgggaggagcggggacactgag

SEQ ID NO: 345531 - DNA, 115 bp, Homo sapiens
ggctctcctgtctgccaccatcctgggttgacaattctacacaaggagattcacagtctgagaatgaggcttcaccagtaaaacggccacgactacttgagaatacggaacggtc

SEQ ID NO: 345532 - DNA, 83 bp, Homo sapiens
gaagaattcatgctcatccgggtgctccatacttgcttgcagtgcctacgtggctctggctttgggtgataacctcatggctt

SEQ ID NO: 345533 - DNA, 50 bp, Homo sapiens
aaatggttcccactgccgggcgaggaaacccttttccaaagagaaatgaa

SEQ ID NO: 345534 - DNA, 100 bp, Homo sapiens
aaatttctacacctacccattggtctaaacttgatccaaagacaatgaaggctcgtgaagaagaaatgactgcaaaagtaagggacctgcagactcaact

SEQ ID NO: 345535 - DNA, 82 bp, Homo sapiens
ggaggagcaatgaacatgggagcctacccgttccatcccgggctatcccagttccccactgccagggaaccccacgccaccc

SEQ ID NO: 345536 - DNA, 100 bp, Homo sapiens
ggggcggccgggcagcgccgccaccatgttcctgggcaccggggagccggccttggacacggaaatttggtgagcggcctccacctaaacgacttactag

SEQ ID NO: 345537 - DNA, 100 bp, Homo sapiens
agacccaggggaagacccaaaggcagcaaaaacaagagtccctctaaagcagctcaaaaggtgtcccgacccaggctaagcttgagcatggctgagcagg

SEQ ID NO: 345538 - DNA, 74 bp, Homo sapiens
gtgatttcttctgacttgagcctgcagtgtgctgtgagagatctaccactagagactgggtttcaccgtgttag

SEQ ID NO: 345539 - DNA, 75 bp, Homo sapiens
ctccccttggattcagacgccgattcgcccaggaaacccagcgtttgctggcagaaccagttcctggcatcaaag

SEQ ID NO: 345540 - DNA, 83 bp, Homo sapiens
gctgcatcacgggaggagctattggtttcagagccaaagaagcctaaagccccagacaatccatttcatggcattgtttccaa

SEQ ID NO: 345541 - DNA, 96 bp, Homo sapiens
ggaacttcatcatcatctacttcacaggaattgccatttagccccccaagatgaacccagtggtggagccactgtcctggatgctgggcacctggc

SEQ ID NO: 345542 - DNA, 82 bp, Homo sapiens
aaagtttaaggaaacaggtgtaattaccccagaagaggtactgtgagaatagagatgtttcgaaatatgcagaatgcagaaa

SEQ ID NO: 345543 - DNA, 100 bp, Homo sapiens
cacgaccacaccgctgatgaagacaaggactcacagtggctgcaaggtcctggaggaagagccggctgcagactcagcatttgggacccaggtcttggca

SEQ ID NO: 345544 - DNA, 100 bp, Homo sapiens
gaagcagtgtaagcagtgtgcaaacaaggatggatagaatgacagaagatgctcttcgcttgaatctgttgaagcggagcttggacccagcagatgagcg

SEQ ID NO: 345545 - DNA, 100 bp, Homo sapiens
tcttcggacgggaggggcaagccagccatcctgggaccccaggcgtgcaggttctctttgagggcaccactggatcataccagtgacaagtcacttctcg

SEQ ID NO: 345546 - DNA, 84 bp, Homo sapiens
ataacatcctacatcactgaagatgatgttgtctacagaccaggaggaaagaatgtccagatgttgtttttggagaagaagaac

SEQ ID NO: 345547 - DNA, 76 bp, Homo sapiens
aggaattgctggtgccttcattcatgaaaagcatgcccatacgattaaacctgcttgaccagatataccatctggc

SEQ ID NO: 345548 - DNA, 75 bp, Homo sapiens
ggtcatcaaggaaaacatccatcatattggttcttctgtgtggcagttcagaatgatggatcaagctagatcagc

SEQ ID NO: 345549 - DNA, 98 bp, Homo sapiens
acgcagttcggagttattatgagctcgccctcccctacctgcggaagagtcaagggaatgtcatcaacatctccagcctggtgggggcaatcggccag

SEQ ID NO: 345550 - DNA, 100 bp, Homo sapiens
tcgtttggacagattgaagaatgccggatattgcggggacctgatggcctgagccgaggattaaagcaaggagagccaatcatgactggcaaaacacaga

SEQ ID NO: 345551 - DNA, 102 bp, Homo sapiens
tgaggagatcacaccccgacggcagtccatgacggtgaagaagggagagcgagaaccctctgcccacagtggagattgccatccggaacacgggcgatgcgg

SEQ ID NO: 345552 - DNA, 98 bp, Homo sapiens
agaaactctataatgtcatcagcctcgagtttagccacaccaggctggagaatatggtgcagaggccctccacggtaaaaagatggcctatcagaagg

SEQ ID NO: 345553 - DNA, 112 bp, Homo sapiens
gcaacatccgcgagttcctgcgcggctgcggggcttccctgcggctggaggccggtctaattgaagccaacggagaactcaaggtcttcatagaccagaaccttagtcccgg

SEQ ID NO: 345554 - DNA, 123 bp, Homo sapiens
tcgcttgaaaagactgggcttgtccttgctggtgcatgcgtcgtcggcctctgggcagcagacttaattcagtgcacaaatgagatgaatgtgaacatcccacagttggcagacagtttattt

SEQ ID NO: 345555 - DNA, 100 bp, Homo sapiens
cgatggcatcaaggtctttcccaacgaggaggacctcaccgacctccaggtcaccatcgagggccctgcaggttcaggagaagtggcacctggtggagga

SEQ ID NO: 345556 - DNA, 101 bp, Homo sapiens
gacagcgcggaatctgggtgcagttcctgcagtaccccactctacgatcaggctttatcctgtggataaacgcagagtgaacgagtttggggagtcctacg

SEQ ID NO: 345557 - DNA, 82 bp, Homo sapiens
gcgagcgcgacgagtataagcggagggggatatgagactttctactcggaatatcctgagtgttgcgtggatgtaaaaccca

SEQ ID NO: 345558 - DNA, 50 bp, Homo sapiens
gcccggagcccccagcgcagcggccgcgatcagtgtactgttacccggac

SEQ ID NO: 345559 - DNA, 50 bp, Homo sapiens
agggatccgagaaaggaagacttgggttacagaatgtctgaaggggacag

SEQ ID NO: 345560 - DNA, 86 bp, Homo sapiens
tcaggaccccagatgtctgacagccctgtgtgacaccaagataagtaacggcctgccttaagtgtgaaagtaatgactgatgaaag

SEQ ID NO: 345561 - DNA, 112 bp, Homo sapiens
gcaacttccaaaggagcagttgctagtggccatttacaggaatcagccacttcagttcagtttgtgaagtgtggatatgcaggctctaactttccagaacacatcttcccag

SEQ ID NO: 345562 - DNA, 82 bp, Homo sapiens
agatgaaccctttgtggaacaccatggtcatcggaggctatgctgatggagagaggatcgccccaggacattcgacatgcac

SEQ ID NO: 345563 - DNA, 100 bp, Homo sapiens
tctctgccttctctgaccccaagaagaccaaaccatcccacggctccaaggggcagaaccccttcgagctggccttctccctagaccagcccgaccacgg

SEQ ID NO: 345564 - DNA, 75 bp, Homo sapiens
gatatcagacaccgagcttcagcaagctctctccaacggacttcaaacaagtgtgaagaggctgtgtggcgagat

SEQ ID NO: 345565 - DNA, 98 bp, Homo sapiens
ggtgctcttcatcaccttcgtggtcgtctggtcctactacgcgtacgtggtggagctctgcgtgttgtgcagttcgtgcagccacagaaggcagaact

SEQ ID NO: 345566 - DNA, 83 bp, Homo sapiens
cgctgctcaaggacacggtctacaccgacttcgacggagtacgaccccagcaaagcgacctttgtgaaggtggtgccaacccc

SEQ ID NO: 345567 - DNA, 100 bp, Homo sapiens
agcgaataaagtttatcacgccgggtggtctggaactgaaagtgatgcgtatttctgagttatgcctgtatttaagaagctgagtgaaacccaaagaagt

SEQ ID NO: 345568 - DNA, 88 bp, Homo sapiens
gacttatacgtgtaatttacaacttttgtaattcggtcagagtcatgatgacagcacagctaggtaatattaacggctgctatttgaa

SEQ ID NO: 345569 - DNA, 101 bp, Homo sapiens
cactcagcgcctccagaggcctcaggtaactcagcagttgaaggcgcgattcttaccaagtccagttgttattaagaaacgtattgaaggacttattgaga

SEQ ID NO: 345570 - DNA, 50 bp, Homo sapiens
aagctttggagcagtgtattttgacgagatgagcgacgtagtggttcagc

SEQ ID NO: 345571 - DNA, 111 bp, Homo sapiens
tctgcacttcgcattttggcattgacatttaattttagggtcctttatatagaagggagagtaggacttccacagtcacctgacacggagtgaggtcgtgggttacctggg

SEQ ID NO: 345572 - DNA, 100 bp, Homo sapiens
cgccaagcgcttcgccatcgacatagagaaagaagtgtgtttggaagtcaaaatgtggaggaactgtcttttcctctccgtgtttgaacctgattccaca

SEQ ID NO: 345573 - DNA, 90 bp, Homo sapiens
agaaacctcaggacttgagtaacagcaacatgtcgtggaagtatgggcagggagaagaatgacaagccccttccatctgcaacagctcgg

SEQ ID NO: 345574 - DNA, 96 bp, Homo sapiens
ataaaaggaatacttacattgcccaaaccagtgcatttcaaatcttcagccaaggaaggttccaacctattcaaagtgtgattagagctgggcttg

SEQ ID NO: 345575 - DNA, 82 bp, Homo sapiens
ccaggaacccgcgccgcgagggctccttccctcaggtgccaatgggtcatgtttggttagaaggtgacaatctacagaattc

SEQ ID NO: 345576 - DNA, 116 bp, Homo sapiens
tggaggacatctgggggccacaaatgctccttctcctggagacgcaactcaaggtcccctcttgctgttggctgcacatcaggaaggctgtgatgggaatgaaggtgaaaacttgg

SEQ ID NO: 345577 - DNA, 75 bp, Homo sapiens
atttgattaactcattcaaggttacccagttgattacctaggaacagtacgatttggggttatcacaaataaaca

SEQ ID NO: 345578 - DNA, 75 bp, Homo sapiens
taattttagggtcctttatatagaagggagagtaggaagaacctctctatccagggcctccgctggtggctacag

SEQ ID NO: 345579 - DNA, 100 bp, Homo sapiens
ttttaaagacagaaagctcatggtgcaaattgttatttccaggtgctggagaatctggtaaaagcaccattgtgaagcagatgaggatcctgcatgttaa

SEQ ID NO: 345580 - DNA, 75 bp, Homo sapiens
ccgggagcggcgctggccccaaggcgctgccctgcgcagggatctatcttgggatcccatggctttctttactgg

SEQ ID NO: 345581 - DNA, 98 bp, Homo sapiens
gtcagtcccgtgttaaaagaaaacaaggcgattccgcagtccccccgttccctggaggtcctgtggaatggtgaaagacccctgacaaaagacaatca

SEQ ID NO: 345582 - DNA, 83 bp, Homo sapiens
gccacctcgagctgcggtagcagcgactcatgagagcgcggccggaggacagacggagtctcactgtgttgcccaggctggag

SEQ ID NO: 345583 - DNA, 100 bp, Homo sapiens
cggacatccaggagcccatgttcagtgctgcccgggaacagttgcggcgccgcttcggggacgtgttcagcctgcagctggcctggacgccggtggtcgt

SEQ ID NO: 345584 - DNA, 96 bp, Homo sapiens
cgtcgccggcgcggtcgttgtcgcattgctctcggccgcactcgcgctgtacgggccgccactggacgcagacctcctgccccccgaggtctgcag

SEQ ID NO: 345585 - DNA, 100 bp, Homo sapiens
ccttccacatcctctgtcaccacatgaggttcaacctgaaagaggaaacccagcgtttgctggcagaaccagttcctggcatcaaagccgaaccagatga

SEQ ID NO: 345586 - DNA, 75 bp, Homo sapiens
tctcactggccattggcttctcatggatgggatataagggaattacctccttcttagtagatcgtgatactccgg

SEQ ID NO: 345587 - DNA, 75 bp, Homo sapiens
cctttctacagcaacatcagtaagtcatggctccgatcttcatcttgaagaagagtgacattgggtgactgctgc

SEQ ID NO: 345588 - DNA, 98 bp, Homo sapiens
gaattagcaagagtcctcagaaaacattcagtttttaatgttgaagatcagaaaagagacaccataaatttacttgatcagcgtgaaaagcggaatca

SEQ ID NO: 345589 - DNA, 75 bp, Homo sapiens
gccgcgcactcggagccggcacggctcggcgagtgatcagcagctggactgtgccttggacctaatgaggcgcct

SEQ ID NO: 345590 - DNA, 83 bp, Homo sapiens
cagacggcgacagtggcggcggcgccatggcagggcttgcagggcaacaggtttgtctatgctggctctaactcgggcgtggt

SEQ ID NO: 345591 - DNA, 75 bp, Homo sapiens
ctacagcccaggtggttggcgtgcttaagattcagctgtcggaaaaggtaacagaagatggaactcgaaatccca

SEQ ID NO: 345592 - DNA, 51 bp, Homo sapiens
taagctggacaccaaatacccgtacgaactcatcccaagaacagtatccat

SEQ ID NO: 345593 - DNA, 74 bp, Homo sapiens
atgatgatatccttctcaaccttgtgggatgtgaaaactctgttactgaaggcctcagctgttgaagaacgctc

SEQ ID NO: 345594 - DNA, 97 bp, Homo sapiens
ccggatgtcctctgcgctggaatcagtcactgtcagcgacagacccctcggggtgtccatcacaaaagccgagggcggcgacgacctggaccccaac

SEQ ID NO: 345595 - DNA, 75 bp, Homo sapiens
cgctttgagccgccccgaactaagcagggcggtcggggggaggtgttcctgtgggcttagcatctaaaccttttc

SEQ ID NO: 345596 - DNA, 96 bp, Homo sapiens
aagccgggggcgccttcgacccctacaccctggtccggcagccgcacaccatcctgcgcgtcgtgtcttggctttgggacatccggaagaaagcag

SEQ ID NO: 345597 - DNA, 101 bp, Homo sapiens
gcctagtaaacggggctgctggtgggccgcgtcgaagacatggaccagggctacggagactgtgccctgtccacggtgcctcctgcatgtcctgctgccct

SEQ ID NO: 345598 - DNA, 96 bp, Homo sapiens
caactatggcatcgtgcaccgtgacctcaagcctgacaaggctctggaggccacgggcatgatgcttcgggtcctggtgggggctgtcctccctgc

SEQ ID NO: 345599 - DNA, 73 bp, Homo sapiens
cgcgacttcaacctcctgcaggtctcggagccctcgatcatcacttaccgggactacctgcccctggtgctgg

SEQ ID NO: 345600 - DNA, 83 bp, Homo sapiens
agtgcagcgctccgtgtttgcatcggtggacaaggtgccagcttatatagaattggtgataggatcacaacttctgaggtccc

SEQ ID NO: 345601 - DNA, 98 bp, Homo sapiens
ctgaaacgcaaggagcagacagaacctacaccatccgtgagtgttctaagaacggaagcatctgggctggatggaatttagcatcaagcagagtcccc

SEQ ID NO: 345602 - DNA, 98 bp, Homo sapiens
tgagagctcggccccaggagccaataacctgcagatggatgaggagagtgcccagattgaggaagttctacaaagaggagaagaaatgttacatcaac

SEQ ID NO: 345603 - DNA, 95 bp, Homo sapiens
agacagggacagtactttttgagattgccaaaccttgcgtttcagctgtctgcttttctgtggagactgcgggttgcagacaccagcagccccct

SEQ ID NO: 345604 - DNA, 100 bp, Homo sapiens
cagctgcggccgccgccttcttcctccatgtaattcgccaaaatgacgaacacaaagggaaagaggagaggcacccgatatatgttctctaggcctttta

SEQ ID NO: 345605 - DNA, 75 bp, Homo sapiens
aggaccggtaccggaatcccaaagtgtgggccaaactgaaattgcagaaggcttcagaacgatggcagcctgaca

SEQ ID NO: 345606 - DNA, 50 bp, Homo sapiens
tcagtggtttatgctcacagcaaggaaggaattttacagaagctacagag

SEQ ID NO: 345607 - DNA, 90 bp, Homo sapiens
gaaggaaaatgaggccttgctgctccgattcaagtattacagcttttttgatttgaatccaaagcttgacaaaagtaagctgaagccagg

SEQ ID NO: 345608 - DNA, 90 bp, Homo sapiens
tgcacattctctgttctaagtgccttaagagaggatcgcccaatccacatgcttttccagattttaggtgatgggcaagtcagaaagtca

SEQ ID NO: 345609 - DNA, 90 bp, Homo sapiens
gaggctgtgagccacaatgcatcgctggaagtagccaatcctgcggaccccacaccctgcccctgctggactcagttggctgacctcgcc

SEQ ID NO: 345610 - DNA, 75 bp, Homo sapiens
ctggccgccaggaagcgccctacagctccggctgggcatatcacaaaatttgtccaggatagacatagagctaga

SEQ ID NO: 345611 - DNA, 75 bp, Homo sapiens
tttcctgcatggattgggagatactgggcagaatccagagaccacatttgaagtatatgttgaagtggcctatcc

SEQ ID NO: 345612 - DNA, 75 bp, Homo sapiens
cagccatcctggaggcctggcagaggacatatgtggagggtccctggaacactgcagtcctgagctctgggatgg

SEQ ID NO: 345613 - DNA, 50 bp, Homo sapiens
ccgacatggaacagggactcactgggggtcagcccaaggccaaccccact

SEQ ID NO: 345614 - DNA, 82 bp, Homo sapiens
cctgcttcttcccctaccgcctggtggggcttgccgtgggctggacggcagtctggaaacgaccaatgagatcttggactct

SEQ ID NO: 345615 - DNA, 100 bp, Homo sapiens
catgaatcagtctctctccctgctctacaacgtgcctgcagtggccgaggagattcaggatgaagttggtttgggtgaatgccatcttatgatggcaaaa

SEQ ID NO: 345616 - DNA, 100 bp, Homo sapiens
agagacatgcctcacccgaggatattaaaaaggcccaatggagatcttcgtggatgatgagacgaagttgacgctgcatgggttgcagcagtactacgtg

SEQ ID NO: 345617 - DNA, 98 bp, Homo sapiens
gaacgcgaggccaacagccccggttcttgggtgtctctggggagtccctgggccagaccttcctccagactccagcccacctcttcggagcagctctg

SEQ ID NO: 345618 - DNA, 75 bp, Homo sapiens
tcgcgggccatcgacaatgcggcagatcttctcatattcgggaaggagctaagcgtcaagggttccacactgttg

SEQ ID NO: 345619 - DNA, 75 bp, Homo sapiens
ctgcttttatgccataatgaataagtacattcccagattgtccagaacatcgtgggcacagctctgatgatttta

SEQ ID NO: 345620 - DNA, 123 bp, Homo sapiens
cagaggtacagattgcccgaaagcttcagtgcattgcagaccagttccaccggcttcatgtgcagcaattcctgacggagctgaccagacttttccagaagtgccggacgtcgggcagcgtct

SEQ ID NO: 345621 - DNA, 136 bp, Homo sapiens
cgcccatgccgggctccccatgacgggaggtcgcccggcggacagcgtggcatgagccaggagcccgggccgaggaacttgctactaccagcaccatgccctaccaatatccagcactgaccccggagcagaagaa

SEQ ID NO: 345622 - DNA, 100 bp, Homo sapiens
gtcggacaagggcagtcccggggaggacggtttcgtcccgtcggcgctggggacccgcgagcatatgcctgtggcatcaaagccgaggtggtggggaagc

SEQ ID NO: 345623 - DNA, 101 bp, Homo sapiens
aagactgcctatatttaaatatatatgtcccgactgaggatggtaaaaagatggcctatcagaaggtccatgcagatcaaagagctccaggacactcacag

SEQ ID NO: 345624 - DNA, 100 bp, Homo sapiens
cgcccgggaacacggctcgcaggccgggggcaaggggcggccgggcgcggccgattacctaaaacctcgggcagaagaggagaggaggatagcagcagaa

SEQ ID NO: 345625 - DNA, 75 bp, Homo sapiens
acagggccgtgatgttggagaactacaggaacctggagtctgtgggtgagatcggactggaactgttcggctgcg

SEQ ID NO: 345626 - DNA, 98 bp, Homo sapiens
tctaacacagtacctgttaacaactgactgaagcaaggctgtgtgacattccatgttggagaaaaaaagaaaaaaaaaagctgaatgctctaagctgg

SEQ ID NO: 345627 - DNA, 89 bp, Homo sapiens
atcatgtcgcgttacgggcggtacggaggagttttccaagagataacttcaccaagatgtccagtgataggcaaaggtccgatgatgag

SEQ ID NO: 345628 - DNA, 50 bp, Homo sapiens
gaaaaacctgaggctgatgacccaaagagtgatcagcagctggactgtgc

SEQ ID NO: 345629 - DNA, 100 bp, Homo sapiens
ggtggtgtcttcctgtctcaacgatacctattttctagtgctgagatcctgagacaatggtaagaatgattgatgttggctgatattggagtgctcattc

SEQ ID NO: 345630 - DNA, 97 bp, Homo sapiens
accagaagaactagaacaacgcaatatattgcaacgattatatgcgtcaggcaggagaagtgacttatgcagatgctcacaagggacgcaaaaatga

SEQ ID NO: 345631 - DNA, 82 bp, Homo sapiens
ggatgcggagcccgcagaacctccacagtcaagaggacgctggcaaacgcccttctggaaaaggaagtgataaactatgagg

SEQ ID NO: 345632 - DNA, 83 bp, Homo sapiens
aacgaccaagagggtgttcgactgctagagccgagcgaagcgtttacccaaggtccagcctagcccctaggcaccatgtcgga

SEQ ID NO: 345633 - DNA, 75 bp, Homo sapiens
ctgcggagctgcttcgccgctgcgctcgggttcatgacgctctcgatattcctgtgcagaaacctggaccacgtc

SEQ ID NO: 345634 - DNA, 100 bp, Homo sapiens
aaaagccacttgaagaaaagggtgaaggaggcgaattttcagttgataggtccatgtgaaatctgaggtccttgctgtcaagttgtcacaagaaataaac

SEQ ID NO: 345635 - DNA, 75 bp, Homo sapiens
agctccaagagggcctgagacggagcaatgaggactgtgccaagcagatgcagcagatccgcatgtcccttcgcg

SEQ ID NO: 345636 - DNA, 75 bp, Homo sapiens
atgagttcctggtggtgctgcgctgtgtggaatggatggctcactggaatgccgtctttgacctggcctgggttc

SEQ ID NO: 345637 - DNA, 74 bp, Homo sapiens
gacgcttattatcggcgagtgaagagactgtacagcaattggcggaaaactaaagcagctgcccccggcgtgga

SEQ ID NO: 345638 - DNA, 92 bp, Homo sapiens
gaagattcgatggacatggacatgagccccctgaggccccagaactatcttttcggagccttcacgtaaatgggtccagtcatgcctcccag

SEQ ID NO: 345639 - DNA, 75 bp, Homo sapiens
tgcatgccgcctcctatctgcccgccgctcgcgccgggcccgtggccggtatcgtcagtgaagcaggagcatcaa

SEQ ID NO: 345640 - DNA, 100 bp, Homo sapiens
agaggctggactcggattcgttgcctgagggccccgtggttatgaatgtgcttcagtttcataatgcctcctgctatggcagacatccttgacatctggg

SEQ ID NO: 345641 - DNA, 100 bp, Homo sapiens
atagagtgtgtatcagcagagaccaccgaagactgcatcgccaagatcatgttttaacttctagtcatggcgaatgatcgcaggagagcacagactggac

SEQ ID NO: 345642 - DNA, 74 bp, Homo sapiens
ggcttgtgttgatcaggagtgaattcacagtctaccatgaattggaagaccattaaaaatctcaagtgacgact

SEQ ID NO: 345643 - DNA, 98 bp, Homo sapiens
agcgaaggggctgccagcagcagcgtctgcaaggcagacttctgcgttatgacccggctgctgggctacgtggaccccctggatcccagctttgtggc

SEQ ID NO: 345644 - DNA, 75 bp, Homo sapiens
ccatcttaccctctctgtatctacttgattaaccaaaaatggtatgttgagtctaaaaaggacagagtcacagta

SEQ ID NO: 345645 - DNA, 100 bp, Homo sapiens
gcatgatgtggtgtggaccgaagcttacattgacagcactcaaatggtcagctgagacttctggccgcagcaatgccatgccacatattaagacatatat

SEQ ID NO: 345646 - DNA, 50 bp, Homo sapiens
ccgggaccaggctgggagccccgagccagcgtcccatgctcggtggcccc

SEQ ID NO: 345647 - DNA, 100 bp, Homo sapiens
cgcgcagcgctgcagtgaattttccccccaaactgcaataagccgccttccaagaatgttggctcaattaagaaacatcagggagataaattcaacccag

SEQ ID NO: 345648 - DNA, 71 bp, Homo sapiens
caaaagaaaagaatctcaaagtgaaaggaccagttcgaatgcctaccaagattaacaaaagcagtggcatt

SEQ ID NO: 345649 - DNA, 90 bp, Homo sapiens
gggtgtgcaaacccgagagaactggatggagatgggtgtcgtgagctggtggtgggctacacagaccgtgtggtgcgagctttccgctgg

SEQ ID NO: 345650 - DNA, 83 bp, Homo sapiens
tttacttacaggttaactgaagtccaaaagatgtctaggcagttgcagtggtgcagaatggctgacctcagtcttgcagatgc

SEQ ID NO: 345651 - DNA, 51 bp, Homo sapiens
gaacaacctgcgggtgcactacaaaggcagaatccagagaccacatttgaa

SEQ ID NO: 345652 - DNA, 116 bp, Homo sapiens
ctgggccatgctcgccatcttcatcctggtgatggcaaatgtcgtggacatgaccccaccaacaactgaacgctttggtcaggctgctacaatggaaggaattggggcaattggtg

SEQ ID NO: 345653 - DNA, 100 bp, Homo sapiens
ctggggcactgaccactactgcctggagctgctgcgaagaagccattgaagatgttgaaggacccagtgaaacagctgctgatccagaggagcttgctaa

SEQ ID NO: 345654 - DNA, 98 bp, Homo sapiens
ccaagatggactgtgtgtggagcaactggaaaagtcagggtgagcctgaatttaaatacattgggaatatgcatgggaatgaggctgttggacgagaa

SEQ ID NO: 345655 - DNA, 100 bp, Homo sapiens
gaggtaccgggggtgacagctccgggaccggccgaaaggcgaggaaccggctcttgtcaggatggtgaagctgttcatcggaaacctgccccgggaggct

SEQ ID NO: 345656 - DNA, 100 bp, Homo sapiens
gaagccatccactctcccagagtgctccaacgggactgaaccacatgggctggccagagcacacaccaggcactggtgcctggaatacttattaagaaac

SEQ ID NO: 345657 - DNA, 98 bp, Homo sapiens
ctggacccctactattgcaacaagctattattcatggactatccagtctaacagcttgccagttgagaacgatatacatatgtcagtttttgacaaga

SEQ ID NO: 345658 - DNA, 100 bp, Homo sapiens
gcgtcggaccagccggcgcaagcgggcgaagagatgggcagtagcgaaccccttcccatcgcagatggtgacaggaggaggaagaagaagcggaggggcc

SEQ ID NO: 345659 - DNA, 100 bp, Homo sapiens
aggaaggcggttctgagagcttcagagagcgatggaaagcggaatgggtactgttcaaaaaggaatgccccacaagtgttaccatggcaaaactggaaga

SEQ ID NO: 345660 - DNA, 100 bp, Homo sapiens
aaaagaactcttcaaattgaatcaagataattatattcttcaagccaaggcacttcgatatccttacttccaagttggacacccactaggcagcaccaca

SEQ ID NO: 345661 - DNA, 100 bp, Homo sapiens
cagcggccccggcccggcccccgcccggccccggcgcaggcagttcagaggcagaggagtcgtttgaatttgtggtggtgtccctcactgggcagacgtg

SEQ ID NO: 345662 - DNA, 90 bp, Homo sapiens
aaccaatcaccaaagactacattatgaacccaccactgggcaaagaaagtatccctttattctcaagtccaaagatttaacatctccaac

SEQ ID NO: 345663 - DNA, 90 bp, Homo sapiens
agtatggcaacatgacagaggaccatgtgatgcacctgctccaggttggctatacagtgcgctttgatgatgtcacctcagaagacacca

SEQ ID NO: 345664 - DNA, 100 bp, Homo sapiens
gattgatcgaatgaaggaatcctctccatctggttcgaagtctcagcggtattctggtgcttatggtgcctcagtgatatcagtatcaagataaaagttt

SEQ ID NO: 345665 - DNA, 75 bp, Homo sapiens
gtgcatactcacagagttagagagagggatggtggaacatcatcttcagcgggctatttcagcacagcaggtgta

SEQ ID NO: 345666 - DNA, 98 bp, Homo sapiens
ctgaattggagactgttaggcccagaagaacaattagggtgacgtgtgcattgagtaaacgaacacctcatcaaaatgcagaagcagaaactgcagat

SEQ ID NO: 345667 - DNA, 80 bp, Homo sapiens
tgcgtccgctacagtatgtcaatcgcttgccccagcacaggtggttctacccaggcaataacccctacactgggaccccc

SEQ ID NO: 345668 - DNA, 50 bp, Homo sapiens
gaagtttctaggaaaggccggacaccaggtacatgtcccagagcaagcac

SEQ ID NO: 345669 - DNA, 87 bp, Homo sapiens
cgggagcggagacctcgctgcgctcatggcgtcgcccgggattcaggagcagttccagaaaaatcccgacagttacaatggtgctgt

SEQ ID NO: 345670 - DNA, 107 bp, Homo sapiens
ctactgaagaagcatgatattgagctttacatgcacttgaacagactagaaattgcaccacagatatatgggttaacactgatatttgcatttaatggggaacaaaa

SEQ ID NO: 345671 - DNA, 82 bp, Homo sapiens
ccgcagccttgggcctcgcgccggctatggccgtgccctggggctgagccctcagatattgaaatggattccaggcgtgtgc

SEQ ID NO: 345672 - DNA, 83 bp, Homo sapiens
atgagagcgagaacacctgtcaaggctttgtccagggatctgaaaccactttgcagtcgacatactcggataccagcgctcag

SEQ ID NO: 345673 - DNA, 100 bp, Homo sapiens
ctgaatgacatctacctccatcaggaccccagatgtctgacagccctgtgtgacaccaagataagtaacatttctgctaaacttggaacaaatgttgaga

SEQ ID NO: 345674 - DNA, 90 bp, Homo sapiens
gtcagcagcagcccccagtcgctccagccataaccactgaggccacagcacagtgcataccaggttctggctccttggcagcaatggctg

SEQ ID NO: 345675 - DNA, 50 bp, Homo sapiens
tctccaccaccgaccgcgtcatcaaagttgtatcacggactgattcaccg

SEQ ID NO: 345676 - DNA, 82 bp, Homo sapiens
aaaaagctcaatgcctcagaaattcattgaaactatgttccaacttcctgtcaacaatcttggcagtttaagaaaagcccgg

SEQ ID NO: 345677 - DNA, 100 bp, Homo sapiens
cccaagacctcattgtcagctccacccaacagttcttcaactgagatagaagagtgatggatgtcatttctcgttcacagctttacttggatgatctttt

SEQ ID NO: 345678 - DNA, 97 bp, Homo sapiens
aaaagaggagctggccaggctacggagagaactgactcaccccacacagaccgcgtttctctccagtgtcgacctacacactcactgctcttaccag

SEQ ID NO: 345679 - DNA, 100 bp, Homo sapiens
gcccgccctgcgccccgctctgctgtgggcgctgctggcgctctggctgtgctgcgcggcccccgcgcatggtacatgtcccagagcaagcacacggagg

SEQ ID NO: 345680 - DNA, 100 bp, Homo sapiens
ccgagccctttccacagccccttccggttcgagatcagcttcgagtgcagtgaagccctggcggacgtgaaagaattcttagccaaagccaaagaagatt

SEQ ID NO: 345681 - DNA, 75 bp, Homo sapiens
gtccaccatcgggcccgacctcatccagaccattttgcagactctgatcacagtgaaacgttccatgggaacttg

SEQ ID NO: 345682 - DNA, 100 bp, Homo sapiens
ctcccagtgacgggtctggagtgcgtgggggaccggctgttggcgggccacggcatatgcctccaaggacggggtcctcactgaggccatgatggacgcc

SEQ ID NO: 345683 - DNA, 74 bp, Homo sapiens
aacagagaagggagctctatagtcggagtggagaactgcaagaaataagcgggttttgaaaacaaaaaaaagaa

SEQ ID NO: 345684 - DNA, 100 bp, Homo sapiens
ttaagaaagtggacaaagagaggagtcagatgtccaacatcacagtcacatacagagatggccgagtggcacagctggagcaggtatacatccgtggcag

SEQ ID NO: 345685 - DNA, 51 bp, Homo sapiens
agacatctacaaccttcgatctcctgacgaataaacattgacgatcttgag

SEQ ID NO: 345686 - DNA, 50 bp, Homo sapiens
cccagggggtgccccccagccaagggagtgcatccgccccaacccttttc

SEQ ID NO: 345687 - DNA, 96 bp, Homo sapiens
cgatgggggcgcaggaccggccgcagtgccacttcgacatcgagatcaaccgggagccggattgaccctgctacgggaatggttatgaatctggct

SEQ ID NO: 345688 - DNA, 74 bp, Homo sapiens
ctgctcctgggccaaggagcttcagctgccactgcagagccccgccatggaagacacgccgttggtgatatcga

SEQ ID NO: 345689 - DNA, 88 bp, Homo sapiens
ttggacttgggaccccctcaggggaacagcgagcagatcaaaggcgttgacccggacgacacctataatgagaccccctacgagaaag

SEQ ID NO: 345690 - DNA, 76 bp, Homo sapiens
acctctactcccatgaattcacctttgattccagtgtgaactgtcaatcataagtctgtccatgtgaatgtgctgt

SEQ ID NO: 345691 - DNA, 82 bp, Homo sapiens
cgaccccccactgatcgcgctggataaagatgcgcctctgcgatttgcaggagtagcccatcgaagccagagcagtgaagga

SEQ ID NO: 345692 - DNA, 100 bp, Homo sapiens
ggaagacttcgatgtgttcacaaagggggagaacgtcagtccacggcgccaagcccatctttgtgtgcttgcatccaactgtgatgagcctatgtatgtc

SEQ ID NO: 345693 - DNA, 100 bp, Homo sapiens
tgacatatttttggacctgaaacagaaattctggaacacctatatgatcatcactgccctggaggaggatggcacggcccagaagatgcagctgggctat

SEQ ID NO: 345694 - DNA, 83 bp, Homo sapiens
agttgtttggtgttttgcttcaggttatagatggagagacctataaagaattatatccagatcgagagacagaagattctgaa

SEQ ID NO: 345695 - DNA, 109 bp, Homo sapiens
tgaatcctgaattttccttgatggtcaaaagattaagagccaaggagcaataactgaacgtttaagaagcttcagtatgcatgatttaacaactatccaaggtgatgag

SEQ ID NO: 345696 - DNA, 76 bp, Homo sapiens
gcaaactgtcagaaaagagtagcctgggctgtctggaaatctgaggggagcaatgatgagctatcagagaatgaag

SEQ ID NO: 345697 - DNA, 80 bp, Homo sapiens
gactggaccaagatcgagcccagcgtcaacttcctcaagtcgcccaaagggcatttttggtcgaagagagctgaagtaat

SEQ ID NO: 345698 - DNA, 100 bp, Homo sapiens
ccgagatgtctcgctccgtggccttagctgtgctcgcgctactctctctttctggcctggaggccatcaacgtggagcaggcgttccagacgattgcacg

SEQ ID NO: 345699 - DNA, 100 bp, Homo sapiens
gccacgtccgagacctggagcagccaccgccgcaatcatgtcttcagttcacgatcttctagttgcagcgatgagtgcacgagtgagatcaagatccaga

SEQ ID NO: 345700 - DNA, 75 bp, Homo sapiens
atcctagtgccagcaatggacgcatcaaacagctgcgatcaggtgagagaacgccgagccgtcgccgcagcctcc

SEQ ID NO: 345701 - DNA, 98 bp, Homo sapiens
ggcgggagcgcgaacgagcgacggcggaacccgtgggcctgtggactgcagcctcggcggtcagcagtaatctatgccagcaattatgacaatgttag

SEQ ID NO: 345702 - DNA, 80 bp, Homo sapiens
tcaccgttatgtgggaagcgaatccaataactgtgtccagaggacccccaggccatccgtggataatgtgcaccataacc

SEQ ID NO: 345703 - DNA, 80 bp, Homo sapiens
acgggatccagagcgccgcgcacttcgtcatgttcttcgcgccctgatgtccagctcgccgctgtccaagaaacgtcgcg

SEQ ID NO: 345704 - DNA, 96 bp, Homo sapiens
tgctcacagctgcccagctgaaagccaagtttaagttctgggcatgggacccagaagaggagcgcaggcgacaggaaaaatggcaacaggaacagg

SEQ ID NO: 345705 - DNA, 75 bp, Homo sapiens
ggcccggagcccccagcgcagcggccgcggcagtcttcccgtgtcccagtgagcctgctctcagcaaaaacgagc

SEQ ID NO: 345706 - DNA, 100 bp, Homo sapiens
tctgcctttcccaccaaccatgagaggataagtgagaagaaacttccctccacacagatgagcggtgatgatgaggagtctgatgaggaagctgtgaaga

SEQ ID NO: 345707 - DNA, 75 bp, Homo sapiens
ggagcactggaagtacgggcagttgcagtgttggagctaaaaataacaagcctttgtattcatttgaagataatg

SEQ ID NO: 345708 - DNA, 98 bp, Homo sapiens
tctgggaccagtctcggcaaatattacacttctctccttgacttgcaattgtgaccaaatatattacaaagggctggaaagaagttcatgaattgtat

SEQ ID NO: 345709 - DNA, 51 bp, Homo sapiens
gaccctggcctcttgggatgcaaaggttctgggccggagaaggggcgacgt

SEQ ID NO: 345710 - DNA, 82 bp, Homo sapiens
agaacaatcttgaatcatgaagctactaaccagagccggctctttctcgtcttgactcgtctgctgaacaaatcctctgacc

SEQ ID NO: 345711 - DNA, 95 bp, Homo sapiens
ctgaagtcggtgtctgctgcgttcacggcaggattcggttagctgcctgtggaggaaccgattgtgtccacagatgaggtcatcttcccactcac

SEQ ID NO: 345712 - DNA, 75 bp, Homo sapiens
tggccgacttcgatgatcgtgtgtcggatgaggagaagctgggatagatgggcagcagaagatcatgtgcttcgt

SEQ ID NO: 345713 - DNA, 80 bp, Homo sapiens
ttggggatggagtgcctccaaaggttgctgagatgccctccaaatccttggttatggaatatttggctcatcccagtaca

SEQ ID NO: 345714 - DNA, 83 bp, Homo sapiens
ccagatgaaagagaagtttctggtcactccccaggattatgcgcggcgccatgtcagaaccggctggggatgtccgtcagaac

SEQ ID NO: 345715 - DNA, 83 bp, Homo sapiens
caagccgctggcagccgcggatctcaccgccgctcaggggtcactcagctgccgcaaggagcaaggcaagttctatgaccatc

SEQ ID NO: 345716 - DNA, 83 bp, Homo sapiens
aaagaaggggttcctggtcatacaccagtactaccaaggacagcttttttcctgcaaggagaacttgcgcctgtcaggggctg

SEQ ID NO: 345717 - DNA, 50 bp, Homo sapiens
gagatgcagtaccctaaagtgcagaacgtggaccctgccagcagccaggc

SEQ ID NO: 345718 - DNA, 100 bp, Homo sapiens
atgttcttcccaggaaggctggagactttcacaggaatgacagcatctatgaggaggaatatattattcgagtgcaaagaggaatttctgtggaaaacag

SEQ ID NO: 345719 - DNA, 75 bp, Homo sapiens
ttgggaagagaaagaaaatgccgaaggcactcagacagatggggtcgaggatttggtcttttgggttccattttt

SEQ ID NO: 345720 - DNA, 100 bp, Homo sapiens
cgaggaggtgaaccggctcacggagagcacctaccggatctaaccatgagctaccctggctatcccccgcccccaggtggctacccaccagctgcaccag

SEQ ID NO: 345721 - DNA, 102 bp, Homo sapiens
ccttagctgtgctcgcgctactctctctttctggcctggaggctatccagcgtttcccggtcctctggcgaggatcctccaaggcgtctcacatgaaccggc

SEQ ID NO: 345722 - DNA, 75 bp, Homo sapiens
gcgtgtcaccagtttatcacagggaaagtcctggaggtttggaaggtttgcagttgctgctcttcagtccaaagt

SEQ ID NO: 345723 - DNA, 83 bp, Homo sapiens
caatatctgtcttcggtggactccttcggcagtccacccaccgccgccgcctcccagggacttgccatgaggtgttgaagcct

SEQ ID NO: 345724 - DNA, 50 bp, Homo sapiens
ggaagaaataaaattttcccatactgatgtttcctgaggttataggcggg

SEQ ID NO: 345725 - DNA, 75 bp, Homo sapiens
ggttctcgggaatcttaaaagaaagggttgacatgatgaacaatcggtttcggaaggatatgatgaaaaatgcta

SEQ ID NO: 345726 - DNA, 98 bp, Homo sapiens
tctttgcacactcggacttcaaaactgttccagggccagtatcggagtttgtttctcctggcggcgctggtcctgtctctcattctgccgaggagcag

SEQ ID NO: 345727 - DNA, 100 bp, Homo sapiens
aagcccaggcacagccgacgccgcgggaagactgtgcagtctttgtaactgatgaagagcaaggctttgtctctaattctgcccagttaaagtgcaggcg

SEQ ID NO: 345728 - DNA, 100 bp, Homo sapiens
gggccctgggctccctagccggctgcggtgtgagaatggagtgggcaggaaagcagcgggactttcagaacccttaggagaaatcttgagagtggacagc

SEQ ID NO: 345729 - DNA, 83 bp, Homo sapiens
ggccgaggccgcctccgagcgccaggtgaaaggtgtagcagtcactcggcctacacccacagcatcgaccttgtgaacccagc

SEQ ID NO: 345730 - DNA, 100 bp, Homo sapiens
ctttggcttctcgactcggtcctgtttcgacagcgaacatgtcgcggcctgtcagaatgttgtaccatctttgggtaggcagacttccctgacgacatca

SEQ ID NO: 345731 - DNA, 100 bp, Homo sapiens
cttagagccaggcaccatggacagcgtgcggtctgggccttttgggcagcttttccggcctgacaacttcatctttggtgtctgatgatttgtgagcctc

SEQ ID NO: 345732 - DNA, 75 bp, Homo sapiens
ctcatgggctgagtggataaaccacaaaatgggtaatatactataggtgtgcccccgagagcctgaagacacgca

SEQ ID NO: 345733 - DNA, 80 bp, Homo sapiens
taacacagtagcagctggaaccatgacaggcatgttgtataaatgtacaggcatccgtgtcattctggaccttactccca

SEQ ID NO: 345734 - DNA, 100 bp, Homo sapiens
tacactgtcatccttaccaatcccatttcaaaggagaagcagagccatgtggtctctctggttgtgtatggttctcctgaaaagaaagctgaacattcat

SEQ ID NO: 345735 - DNA, 88 bp, Homo sapiens
tcctgaaagctgtcacccacaaccccacaccagtgagaagcatcagcaccgtgaacttgtctgagaatagcagtgttgtcatcccccc

SEQ ID NO: 345736 - DNA, 98 bp, Homo sapiens
acaaaggcgcaagtcgagaggaaactgttgtgcctcttcatattggcgatcctgttgtgccccttcacagatgtagtcactacaaatcttaaattgcg

SEQ ID NO: 345737 - DNA, 75 bp, Homo sapiens
cattaagacagttgccatccacagtgatgttgatgctagttctgtcatgcgcatcgtggataatgttcgtcctga

SEQ ID NO: 345738 - DNA, 50 bp, Homo sapiens
acatactgcaagtgtttacagaaagttgatttccaggtggaacttctttt

SEQ ID NO: 345739 - DNA, 75 bp, Homo sapiens
gatggtgtttctccaaaagatgttggacacaatatctatattctggcccatcagaaagcgaaattattattgacg

SEQ ID NO: 345740 - DNA, 51 bp, Homo sapiens
ctggaacacctcgccaaagcagagaaatactttatgctgaaaaggtggcca

SEQ ID NO: 345741 - DNA, 98 bp, Homo sapiens
ctttctcctcctcctcagggctccagtcaggccgatccgctccgctcacgttgtgtcagtctgtgatgcctgctggtgttgataaaatctccactgct

SEQ ID NO: 345742 - DNA, 90 bp, Homo sapiens
gtcatttcacatcgaagccatgatttaaatatcggcgttaaggtgaccatggaggctggtggcctccccttggagctgtggcgcatgatc

SEQ ID NO: 345743 - DNA, 100 bp, Homo sapiens
gccctggacctactccggggcctgccgcgtgtgagcctggccaacttaaagccgaatcccggctccaagaaaccggccccatctccttggctaacccctg

SEQ ID NO: 345744 - DNA, 112 bp, Homo sapiens
ctaggtgtaaggaaggtgatgtcgtaaagccgggagtgtcgtaaaccaggtctcctctgagcctccggcctccataagacccaaaacagatgacacctcttcccagtccccc

SEQ ID NO: 345745 - DNA, 75 bp, Homo sapiens
ctggctgccagcccgggccttggtggaagaggcccttgcccagcgattccagttgattggctgcataatcgggcg

SEQ ID NO: 345746 - DNA, 90 bp, Homo sapiens
ggccctgcgcgcctgatgggtcgaggcggacgcgcggctgcgtcagttagccaggctctaccccaacatgaacctggaactccagggatc

SEQ ID NO: 345747 - DNA, 100 bp, Homo sapiens
agaagctcaagaagcggatgcagggccccatccccgagcgcattctgggcaagatgacagtggcgctccctgctgtggtctggaggaagcagcggcctgg

SEQ ID NO: 345748 - DNA, 90 bp, Homo sapiens
caatgaggcagccagcggatcttgggtctcggcgcggaagatggccggcggcgtggacggccccatcgggatcccgttccccgaccacag

SEQ ID NO: 345749 - DNA, 89 bp, Homo sapiens
cgtcccagctctctctgggcatctggaaaggctctgaccacctccgagagaaggatggcctgtgggctgtcttggtctggctctccatt

SEQ ID NO: 345750 - DNA, 75 bp, Homo sapiens
ggcttcatacgctattgtcctgcccgacgagattgaggagctgcgggccgagatgctggagatgcgggacgtcta

SEQ ID NO: 345751 - DNA, 75 bp, Homo sapiens
tggaaatgaagtataataccaagaaagccccacttgccaaactgaaatcggtaaaggaggttttacacttttctg

SEQ ID NO: 345752 - DNA, 98 bp, Homo sapiens
gtgaagagaccaccaaacaggctttgttcaggatttgcatgaagatgtcgaagaagctggtgcactgcagaaaaatcatgctcttgtgacatctgcaa

SEQ ID NO: 345753 - DNA, 75 bp, Homo sapiens
gcccccagactcagagggccccctactcaggaccccaggggtcggcaccaggaattattatagaaagatcggcta

SEQ ID NO: 345754 - DNA, 75 bp, Homo sapiens
ctgggtgaactttcacggacaacctcagaggacaacgaagtgttcggagtgcctgtgaagaaaacggggtattgc

SEQ ID NO: 345755 - DNA, 96 bp, Homo sapiens
cgaagccgaggctccactaatctctttagtaaattaacttcaaaactcacaaggaggtctctaattaacagaagatggcaaagcccagccacagca

SEQ ID NO: 345756 - DNA, 75 bp, Homo sapiens
gtctgtctgctcctggcatgccctgccacagccactggttctcttgctgcaaatggccctaccaccttggttgat

SEQ ID NO: 345757 - DNA, 82 bp, Homo sapiens
tttctctgctgcaccgacctcgacgtcttgcctgtgtcccacttgttcgcggcctatagggctggtgaattaccatatctcc

SEQ ID NO: 345758 - DNA, 90 bp, Homo sapiens
aagagcacaggcggccagctgaggccacctcctctcccacatctcctgagagatgcacagatagccatgatgcagcagcgcattgaccgc

SEQ ID NO: 345759 - DNA, 75 bp, Homo sapiens
cggcggcctgcctccgggcacacccggctccccggacgcctcgatcttcagtgtctattggatttttccaagaga

SEQ ID NO: 345760 - DNA, 83 bp, Homo sapiens
agcgagctgagtggttgtgtggtcgcgtctcggaaaccggtagcgcttgcagcatggaaggtgctcgggtcttcggggcactg

SEQ ID NO: 345761 - DNA, 90 bp, Homo sapiens
attcgtggggacttctgcattcaggttggcaggaacgcgctggagtgaagatgatcttaattcaggacggatctcagaatacgaatgtgg

SEQ ID NO: 345762 - DNA, 123 bp, Homo sapiens
gttgaggatctttgctcttccatccgcctttgatcgtcttcctcttcagccatccagtgacttctgacagctctctccatggaaggaggcggcggccgcgatgagccttcagcctgccgggca

SEQ ID NO: 345763 - DNA, 75 bp, Homo sapiens
tcgggctgggagcgtgctttccacgacggtgacacgcttccctggattgggatgaatttcatcctttcatcgaag

SEQ ID NO: 345764 - DNA, 98 bp, Homo sapiens
gggcgctgctgctctgcgccggcggcgggggcgggggcgggggcgccgcgcctacggttgttgccacctcctccctttcatggttccatcagccgcct

SEQ ID NO: 345765 - DNA, 75 bp, Homo sapiens
gcggaagctggtgggcactcagcaccctctgcttaccacagccaggctaagtgctatttatggaggtacctatat

SEQ ID NO: 345766 - DNA, 96 bp, Homo sapiens
ttcctggctttgtagctcgctcaagatggcggcgcagccaccccgcgggatacgcctcagcgcggtcgccactgggacactgtgaaccaggagtga

SEQ ID NO: 345767 - DNA, 100 bp, Homo sapiens
atccttctgaggagaagaaatacagacctgcagagttccactggaagttgaatcaggacggcccccaagttacatgaactacctgctagactcacacccc

SEQ ID NO: 345768 - DNA, 75 bp, Homo sapiens
gtactgccctgacccttacatccagcgcagcagccgctcttctaaaacattcaaaccaaagaagaatatccctga

SEQ ID NO: 345769 - DNA, 82 bp, Homo sapiens
tggtgaagcagatcgagagcaaggacatggatttgattgacatactttggaggcaagatatagatcttggagtaagtcgaga

SEQ ID NO: 345770 - DNA, 98 bp, Homo sapiens
tggaaatggcacctatggacaagtctataaggaagcgttgttgacgaccatggacatcatccacgatggatttggattcatgctggcttttggagact

SEQ ID NO: 345771 - DNA, 100 bp, Homo sapiens
tcattggccacctacagaaacaaaatgtcaacaaattgatggatgctgaagagtttctggcagaaggtttgcggaatgagaacctcagcgctgttgcaag

SEQ ID NO: 345772 - DNA, 76 bp, Homo sapiens
cttgcagaaatcacattggaccctcctcccaactgtaggtggtccattatggctgacatgcaaaatctggtagaaa

SEQ ID NO: 345773 - DNA, 75 bp, Homo sapiens
aaagtttgtggtcaagaggaagtgctgcagaagcgatcattatttcgaagttctagtattctggatcaccgtgaa

SEQ ID NO: 345774 - DNA, 100 bp, Homo sapiens
gactccacctttacttttacctacgttggcggccccagaagaagaagcgcacgctgaaggggtccattgagctctcccgaatcaaatgtgttgagattgt

SEQ ID NO: 345775 - DNA, 100 bp, Homo sapiens
tgccaacggggccatcgagctggacaccggcaaccggccccgggacctccacaaaaagtactcgtacatccgcaagaccaggcctgacggcaactgtttc

SEQ ID NO: 345776 - DNA, 50 bp, Homo sapiens
cataatatggtgaacggccgcctggcagatgctgtgggccctgagggaaa

SEQ ID NO: 345777 - DNA, 90 bp, Homo sapiens
gatgtagcaaggaagaaattgttcagttcttctcaggagaaaatgctgagaagcttctgcagttcaagcgttggttctggtcaatagtag

SEQ ID NO: 345778 - DNA, 100 bp, Homo sapiens
ggtgggcgtctacaacggcaagaccttcaaccaggtggagatcaaggattctgaaaccttccttgtatccctcctgagacatctttgctgcaagatcgag

SEQ ID NO: 345779 - DNA, 98 bp, Homo sapiens
cgtgctcctcgaccccccactgatcgcgctggataaagatgcgcctctgcgatttgcagtttgaagaaaacaggtctgaaacaaggtcttacccccag

SEQ ID NO: 345780 - DNA, 82 bp, Homo sapiens
ccacacgccccccctccttcacgccacacacacgtgagaagccctaccactgcaactgggacggctgcggctggaagtttgc

SEQ ID NO: 345781 - DNA, 96 bp, Homo sapiens
acgtggtagtgaactgtgaggagtttgaggggtctgaagactgaaagagtcgaatggtttgttggcaggttgaagccatccttgtcaatatatttg

SEQ ID NO: 345782 - DNA, 100 bp, Homo sapiens
ttgaaatccatttcaaatgtctctggcaaagatattcagccgttaataaagcagtgggttggtcgtttttgatgctcgatgaatgctgggaattcagagg

SEQ ID NO: 345783 - DNA, 98 bp, Homo sapiens
ggtgatccagcaaggtcggcagagcaaggggcttacgcagaaggacctggccacgttggaatcgaagcctcttaaaatggcagatgacttggacttcg

SEQ ID NO: 345784 - DNA, 100 bp, Homo sapiens
tggctccacagtgctggtggaaggagggtatgatgcaggtgccagatttggagctggggctactgctggcaacattcctttgattggctgcataatcggg

SEQ ID NO: 345785 - DNA, 83 bp, Homo sapiens
ggacgctgacaacatctacattttcttggagctctgcagccgaaaggtgttggagagcacaatggctgaacaagtccttcctc

SEQ ID NO: 345786 - DNA, 75 bp, Homo sapiens
aaaccacagacatgactgagtcctccatgaagacccgcggcgccatggctcacgtcggctcccgcaagcgctcga

SEQ ID NO: 345787 - DNA, 75 bp, Homo sapiens
aggtggagccaccagcctctccttggtaatatatgctttaaacactaaaaatgatgagcatgaatctgcaattca

SEQ ID NO: 345788 - DNA, 87 bp, Homo sapiens
acaaggaggttcagtggacccttggagccatcctctacaggacccgctttctaccattaaggagaggagaggcagcagcatggcgag

SEQ ID NO: 345789 - DNA, 82 bp, Homo sapiens
cttttagctatggcgactttgacttcctgccaaaatcctgttaccctagcaacagtgttctaagaacggaagcatctgggct

SEQ ID NO: 345790 - DNA, 100 bp, Homo sapiens
accacggtgtgctgaagataaccatctgtattcgccatgaagtcagcgtaaataatgtaacacataaactgtgcagtaaccattgctttaataagtacag

SEQ ID NO: 345791 - DNA, 101 bp, Homo sapiens
gggagacgccgccgccgccgcctccagggtgggcgcctttcgccgtggacgccgaccgtccgggacgagaatcattgatcagcgattcgagaaggtttcct

SEQ ID NO: 345792 - DNA, 83 bp, Homo sapiens
ccaggctcggagcgcggcacggagacggcggcagcgctggactaggtggcagtttgatgaaggccggaacaactttgaagggg

SEQ ID NO: 345793 - DNA, 85 bp, Homo sapiens
ggatggacagcaggccccgcgccgggctggagtgaagtggcacgatctcggctcactgcaacctctgtctcccgggttcaagcaa

SEQ ID NO: 345794 - DNA, 83 bp, Homo sapiens
cccaccgccgccccctccggcgtgttcatgcccccgggatcgacgacatcgcggatggcgccgtgaagcccccacccaacaag

SEQ ID NO: 345795 - DNA, 90 bp, Homo sapiens
cgactacaaacggaacttgccgcgtcgaggactgtcggacgcaaacatgcagatctttgtgaagaccctcactggcaaaaccatcaccct

SEQ ID NO: 345796 - DNA, 75 bp, Homo sapiens
aaggattctcgctgtgacagagacaacaccgagtatgagaaggacttgagtgagaacgccatccaggccatcccc

SEQ ID NO: 345797 - DNA, 101 bp, Homo sapiens
ccacacctagactgatgcttattagtcatcaccgttattcctactaacgtcctgtgtcactgaggaggatacttcatcgagacttaaagtcaaagaatgta

SEQ ID NO: 345798 - DNA, 100 bp, Homo sapiens
tccaaggacaactgcaagggggaagtagagagataacaaaagctgctcagagtctcaatgaacttggaaattgacaatggcccttcagctatgctaggtc

SEQ ID NO: 345799 - DNA, 96 bp, Homo sapiens
tcttctggagctggagatgaactcggacctcaaggctcagctcagggagctgaatattacggcagctaaggcaatgctcctgacagctgtaaagtg

SEQ ID NO: 345800 - DNA, 77 bp, Homo sapiens
acttggttccccctccctcagcttccgccccaaaagacaagttggatggcttgaggactggtactaaaaggaaacgt

SEQ ID NO: 345801 - DNA, 100 bp, Homo sapiens
ccctgcaccggcaggtgagaggcggatctacagacataggttaaataggattgcgaatcaggtggccattcagcggaagaagcagtttgtggagcgagcc

SEQ ID NO: 345802 - DNA, 83 bp, Homo sapiens
cccgcggcggcgcgctcacccgccccgttcagagacacctatggctgccgatgaaggctcagcagagaaacaggcaggagagg

SEQ ID NO: 345803 - DNA, 90 bp, Homo sapiens
tggggacaaggcgtcgggcgggggagccagcgctcaggcctgaattgcagttcctgtgccctggcactaagactggcacctcctgcggcc

SEQ ID NO: 345804 - DNA, 107 bp, Homo sapiens
gggcgtctgcggctctccgccgtccccagccctgcctctccctgggctctgacctgcgaccgcatcaagcagtccgccagcggaaccaagcggcgcgtgttcatcat

SEQ ID NO: 345805 - DNA, 76 bp, Homo sapiens
aaagaaccattgaaaaatttgagaaggaggctgctgaggaacagcatatgccatatatgagctggctgtggcttca

SEQ ID NO: 345806 - DNA, 100 bp, Homo sapiens
atcttctccctgttggccaacatcaccatgctggtcagcttggtcatgatctaccagttcattgttcaggaatggaagttggatacactttgtgacttgt

SEQ ID NO: 345807 - DNA, 100 bp, Homo sapiens
ggcattggccgccgcgatgtcagctcagtgctgtgcgggccaggcctatgaaaggaggttccctacatgtcctttgattccgatgttcgtgggcagtgac

SEQ ID NO: 345808 - DNA, 90 bp, Homo sapiens
tgaaggctctttaaaaaaaaacgagcagaattttaaacttgcagcaaaccagtccagctacgggggcccagccagccagcagctgagtgg

SEQ ID NO: 345809 - DNA, 97 bp, Homo sapiens
tgaggggcacaaggccagcttctgtctggaggacacaaactgccccacagggatggagtctgctggcatccatgaaaccacctacaacagcatcatg

SEQ ID NO: 345810 - DNA, 87 bp, Homo sapiens
attcctttgcagttcacccttggagcctaccaggacatcctcggaaagtatttattctaggccaggctccagtattcctggctcacc

SEQ ID NO: 345811 - DNA, 100 bp, Homo sapiens
tttccagtgccctgaaaaatatacatccagcagtggtcattcgacaacgaaagtcataccgtagaaaagatggcgtgtttctttattttgaagataatgc

SEQ ID NO: 345812 - DNA, 82 bp, Homo sapiens
ccgcgctgcgcatctccaacagcgacctgagcgggaaatcctcattgacgattcaatttgttgaaggccaatttgtggactc

SEQ ID NO: 345813 - DNA, 73 bp, Homo sapiens
ctactaccttggtttcagaagagtgaaccctctggattatcacatgaaggttctcaacccattttacattttc

SEQ ID NO: 345814 - DNA, 100 bp, Homo sapiens
tctgagttagaggaagtgaaacggtgcatggagagaaaagacaaggagaaagcacatttggcatcacaagtagagctggcgctacgtacatctttgggaa

SEQ ID NO: 345815 - DNA, 75 bp, Homo sapiens
aaaggaatctgcacagaagacggtattctctatgctggaataatgctgaccaagaatggcccaaaagttctagag

SEQ ID NO: 345816 - DNA, 100 bp, Homo sapiens
gagcaatctttggtaaaactaagatccagaatgctgttcactgtactgatctgccagaggatggcctattagagattagccgatgaattacatatgccat

SEQ ID NO: 345817 - DNA, 100 bp, Homo sapiens
tggaagagcagctgtcactcatcagtggttgtcccaatatccaagaagcagtagagggtgccatgcacattcaggttctttggcatggacacaagttcag

SEQ ID NO: 345818 - DNA, 80 bp, Homo sapiens
gtccgacagccaggcccgggagaagtccgcgggagagctgtggggcttggtgagtgtttcgtggcctctcgggttggtca

SEQ ID NO: 345819 - DNA, 82 bp, Homo sapiens
ctgtgaaggcacgagtgtggaacagcaccttcatcgagaaacaccatctgattcagatcacaagaagaagaaaaagaaaaaa

SEQ ID NO: 345820 - DNA, 77 bp, Homo sapiens
tcgcatctcttgggtcggagaagccgtcaagccacctggtttccatcgggcctatagttccccactctacagcaacc

SEQ ID NO: 345821 - DNA, 89 bp, Homo sapiens
aattcctggagctccacagctctgccgctaaatgcttctacaactgtcccttcagaattgcccaggtgtgcctaccgcatgttgccgct

SEQ ID NO: 345822 - DNA, 100 bp, Homo sapiens
cagacagcaaggactcacccaaagacagggaagtggcagaaggaggccttccccgggcggagagcccctctccagtcaagggttatacacggaaagccgc

SEQ ID NO: 345823 - DNA, 75 bp, Homo sapiens
agaaatgccccttcactggtaatgtgtccattcgagggcggatcctctctggtgctggagaatctggtaaaagca

SEQ ID NO: 345824 - DNA, 96 bp, Homo sapiens
ttgtggcaaagctctaagtcaatggcgaagagaagcactggccttcagcaactattggatgattatccgaaatgtttcattgtgggagcagacaat

SEQ ID NO: 345825 - DNA, 75 bp, Homo sapiens
tggcagctataacttacacaatgcgaaccacccgcaaggtctccgtctggcctgtgggcctggttggtgggcggc

SEQ ID NO: 345826 - DNA, 90 bp, Homo sapiens
ctccaccaagcatcccattacagatagaagaggcaagctttgttgcttctgaaaacaggacagatatttctttggatgaccccaactttt

SEQ ID NO: 345827 - DNA, 82 bp, Homo sapiens
ggatgaagctattaagataaccaacaggcgtgtaaatgccattgaacatggtaaatttggaaggcaaagccagccctctgtc

SEQ ID NO: 345828 - DNA, 82 bp, Homo sapiens
tggctactctgcctcggggacgaaagcaggaataaacatcatcctgaccttcatctctgggcttgttccgggaagcgaaaag

SEQ ID NO: 345829 - DNA, 75 bp, Homo sapiens
ctggaaccagggaggaggcaggaggctattcaggcagctatcagccaggcctttaaaaccccagaggtcatcaga

SEQ ID NO: 345830 - DNA, 74 bp, Homo sapiens
tgccatttcgcctttatcgtggtggagtccaccctggctgtgcgggacgaccctgggacagtctccactggggc

SEQ ID NO: 345831 - DNA, 74 bp, Homo sapiens
gacaaggtgtcaacaatgtgccgcatggtgacatggaccagaaggagagagatgttatcatgagggaattccgg

SEQ ID NO: 345832 - DNA, 100 bp, Homo sapiens
cgccctgcaggatccgggctggaagcctctcggagtgctgcctccagccaagattcatgatgttgctatcaaaagttgagaaattgtcagaagaaatcat

SEQ ID NO: 345833 - DNA, 100 bp, Homo sapiens
ccacctcaggaggtggggcgcatccgggagcaacagctgtcagccaacatcatcgaggagctcaggtcacagtcgaactgttattggaattgaagagaaa

SEQ ID NO: 345834 - DNA, 82 bp, Homo sapiens
caggatttaaatgaagatcatgatgccaaatgagaaagatcagtctaaagaaaaggagaagaaagtgaaaaaaacaattcct

SEQ ID NO: 345835 - DNA, 119 bp, Homo sapiens
tccgcggtggaggtctgcgttgctcttgcttttcctcgctggggtgtacgtggccgtcctacgggtggaagcactgaccgtatccagaagttgcggaaagagtattatcaggctcggag

SEQ ID NO: 345836 - DNA, 100 bp, Homo sapiens
atttgtctcacaaggagaaactctacctgagagagctaaatgtcattactgaaactcagtgcactctagggaacgtgtgaaagaagaattgtggggaaaa

SEQ ID NO: 345837 - DNA, 83 bp, Homo sapiens
tttctgacaacaaactcgaagactggcatgaggtgaacaccttccaggccgtcctagtgtccgatggctcctatacattcacc

SEQ ID NO: 345838 - DNA, 139 bp, Homo sapiens
cagacatccaaaagactgctgagatagtttatgcagccaccaccagtttgcggcaagcaaatcagggtgattatgggagtgctattgagacactggtaactgcaatttctttaattaaacaatccaaagtatctgctga

SEQ ID NO: 345839 - DNA, 80 bp, Homo sapiens
acgagcgtgagaaggcgctgcgcaggcaggcggaggagggccatgaagcccccaggaggagaatcgagcaatctttttgg

SEQ ID NO: 345840 - DNA, 75 bp, Homo sapiens
cagagtgtatcatctcctgaagcaacatctggttctacagtggatccaaacttctacagcaaaaacttacttctt

SEQ ID NO: 345841 - DNA, 100 bp, Homo sapiens
aaggaatatatcctgactgattgatcatgcggccagatgatgccaacgtggccggcaatgtccacggggggaccatcctgaagatgatcgaggaggcagg

SEQ ID NO: 345842 - DNA, 98 bp, Homo sapiens
gggtttcccaagcaaggttccttggaagaagatgtctgcagaggcatgagccatgagcccaagtccccttcgctagggatgctttccaccgcgaccag

SEQ ID NO: 345843 - DNA, 100 bp, Homo sapiens
gccgggcagcccaatgtctcctgcacgtgcaactgcaaacgctctttgttccagagcatggagatcagtcagtgggaccatgtacaacactggaagacac

SEQ ID NO: 345844 - DNA, 96 bp, Homo sapiens
acctgaacgccgccttggacctcctgggaggcgaggacggtctctgccagtataaatgcagtgacggatattgtacctgtggatgcatcttatgaa

SEQ ID NO: 345845 - DNA, 100 bp, Homo sapiens
ctcggcctccggcgcagcccggaaatgtccggcaagatcgagaaagcaggttctgcggggagtgtctccagccctgcctgcaggtgccatccccgctgtg

SEQ ID NO: 345846 - DNA, 83 bp, Homo sapiens
cggatattacctgtggagaccctcctgagacgttctgtgcaatgggttatgtaccgaaggactctaccgtgtcagcgggaata

SEQ ID NO: 345847 - DNA, 87 bp, Homo sapiens
tcccgcacgcaatctgcctcggagacgttgataacgatacggtgatgtgctctatgaactccttcagcatattctgaagcagaggaa

SEQ ID NO: 345848 - DNA, 142 bp, Homo sapiens
ccggcagtgaccgtgtgtcagaacaatcttgaatcatgaagctactaaccagagccggctctttctcgattcaccagaccagagcacttgggcagcagcgccaagatcaagtgcagcggttgccatagctaccaggagtcca

SEQ ID NO: 345849 - DNA, 99 bp, Homo sapiens
gatgcagagttgaatgtcttctatgaggaaagtgtgcattttgacagagatcttccagaatttggatggcaggagaggagaacttcaaggaagagctca

SEQ ID NO: 345850 - DNA, 75 bp, Homo sapiens
agcagatagccagcccatacaagatcgtgattgttaaaatgagtcttcggaagcaaacccctagtgacttcttaa

SEQ ID NO: 345851 - DNA, 99 bp, Homo sapiens
ggacaccaggacctggcctgaagacatttcctctcctcccctctggatttctcagagttctccatggcaactcagtcctccagcagacccctgcataca

SEQ ID NO: 345852 - DNA, 74 bp, Homo sapiens
aagctttgataaatgaaatcttcctaagtatagacttaattcagtgcacaaatgagatgaatgtgaacatccca

SEQ ID NO: 345853 - DNA, 109 bp, Homo sapiens
tggagaactacaggaacctggagtttgtgggaatactcccccagttgcaagaggcgcaggaccgtggaagacttcaacaaattctgcacctttgtcttggcctatgctg

SEQ ID NO: 345854 - DNA, 82 bp, Homo sapiens
ccggtactgtcttcgtgatgaataaaaacatttcaactccctacagttgtgccatgcatggtgtcctactcttctgtcctca

SEQ ID NO: 345855 - DNA, 100 bp, Homo sapiens
gaaaatcaaaagaaacttttgcccttatcagtaacacctgagatctcactgatgaaaaggcctccaggtttttcacctttccgatcatcacgaatagggg

SEQ ID NO: 345856 - DNA, 129 bp, Homo sapiens
cgctgacgggcacgctgactggaggctggcggacaggcgacagcgacctgcggcagtgtccaccaaaggagacagggctgggagcgctgcccggggcccaggtcctccctaatgacagcatgcacgaaa

SEQ ID NO: 345857 - DNA, 101 bp, Homo sapiens
gcagggctgtggctaccatgttctctcgcgcgggtgtcgctgggctgtcggcctggaccttgcagccgcaatgaggaggaagatgactatctctttgatga

SEQ ID NO: 345858 - DNA, 100 bp, Homo sapiens
ctctgacatcagctctcctgggaccctccaagagcactagtgtctagaaggcactaagggctgaaggtgatgtggccgccctcaaccgacgcatccagct

SEQ ID NO: 345859 - DNA, 74 bp, Homo sapiens
cacaagtgtgaggagttgctaaatgctcagtgttctaagaacggaagcatctgggctggatggaatttagcatc

SEQ ID NO: 345860 - DNA, 112 bp, Homo sapiens
gatcctgaggaggcagctgcggtggcagctgctgagttctcggtgaagccctgggcgctgcctatggcacagccaagagcggtaccggcattgcggccatgtctgtcatgcg

SEQ ID NO: 345861 - DNA, 90 bp, Homo sapiens
cggcagcccgtcggccgccgccaactacctgctctgtaccaactgccggaaagtgctgcggaagaatctcattttcagcttctgccagag

SEQ ID NO: 345862 - DNA, 50 bp, Homo sapiens
cccgggcccacgcggaacgacggggcgagcttcggaaccaaaaagaagct

SEQ ID NO: 345863 - DNA, 75 bp, Homo sapiens
ctctgaccagcatcgtctgtaaagggatgctctcaaacttgtccagttgaaacaaacgggcaagattaccgagtc

SEQ ID NO: 345864 - DNA, 100 bp, Homo sapiens
ttgtatctcagttaaagaagatgaagaagtcttcaggggagattgtctactgtgggcaggtcaagtctggcaccatctttgacaacttcctcatcaccaa

SEQ ID NO: 345865 - DNA, 100 bp, Homo sapiens
tgccacacaggctaccggctcacagaggatgggcacacgtgccaagtgcctgtatggagtggaatgaatgttgctggtgtctctctgaagactctgcacc

SEQ ID NO: 345866 - DNA, 90 bp, Homo sapiens
ggcgacgcctttggcggtaaattcggcccaataggggcacaaaacgtccccgggatgatgaagaggaggagcagaagatgcgtcggaaac

SEQ ID NO: 345867 - DNA, 100 bp, Homo sapiens
atcacagccctgttaaaggatggctttggctttgcagacagcacagtcttacaggtcaacaaaaatctctcatttacttcaccaccagcagtttcctcac

SEQ ID NO: 345868 - DNA, 75 bp, Homo sapiens
gctcgatcttgggacccaccgctgccctcagctccgagtccagggcgagcgtctgttcctcacacaccccgccca

SEQ ID NO: 345869 - DNA, 75 bp, Homo sapiens
ttgttaaggattccaagtaactcttatttgtgttttaaccaaacagttgtggctactcatggtgaggaatgaccg

SEQ ID NO: 345870 - DNA, 90 bp, Homo sapiens
gaaagagtgatgacccgcagctatggggccacagccacatcaccgggatctcactggcatcgaatctatggatcagtgtcgccatacctt

SEQ ID NO: 345871 - DNA, 82 bp, Homo sapiens
cgcaggggcgcgcagcgcggggagctgccaggaaataatgcaaaaggtgtcccaaggctcctgaccagtgaacaaagatttg

SEQ ID NO: 345872 - DNA, 82 bp, Homo sapiens
tgaaccttcgcattcagaatttgaccatcttggtgagaaacattaagacctactaccagcaaccaaccagtggttcatccca

SEQ ID NO: 345873 - DNA, 50 bp, Homo sapiens
tatttacttcagatggtctgcatgctgagcactattcctgatcagagaac

SEQ ID NO: 345874 - DNA, 83 bp, Homo sapiens
gcgtgttcgcgggtgtgtgctgcgttcacaggtgtttctgcggcagatcatcatgctcaggaacgacatttaccgctgccgag

SEQ ID NO: 345875 - DNA, 98 bp, Homo sapiens
aaaaccaaaagagaaagtggatgctctatcacagtttgatctcaacaattatgcaagaaagcagagatccccggaaacttcactggctttttgaactg

SEQ ID NO: 345876 - DNA, 83 bp, Homo sapiens
cagaagtcgcgtgtctaggtgagtcgcggtgggtcctcgcttgcagttcagcgaccacgagctccacgcaggagatcggtgag

SEQ ID NO: 345877 - DNA, 80 bp, Homo sapiens
cctttgccttggaatacaggaggccatcatcaacagcactgtcactcccaacatgaccttcaccaaaacttcccagaagt

SEQ ID NO: 345878 - DNA, 100 bp, Homo sapiens
ttgaacacactactaagccaattcttcgtagttttttgaatggatataattgcacaggcctgttacatgaacagaatatggcaaaaatgagactacttac

SEQ ID NO: 345879 - DNA, 95 bp, Homo sapiens
ctcgagaaagaagcattcattgaatttgttgttcgtggatagaattatttatattattactgtaatggttgattgcattgacttctcaccatata

SEQ ID NO: 345880 - DNA, 80 bp, Homo sapiens
cttcgatctgcttctgatgaagtatcatgatattagctggtttgacatcaagtcatttgtgagtcatcagatcttctcct

SEQ ID NO: 345881 - DNA, 100 bp, Homo sapiens
tgttaagtgtactgggccttggagaccttgcagacttgacggtaacaaatgatgcagactatagttatgataaagcacagctgagtacaagctaactgga

SEQ ID NO: 345882 - DNA, 50 bp, Homo sapiens
tctgaaaaacctaagtcctttagattggcggcagtaagcacacaatgaat

SEQ ID NO: 345883 - DNA, 71 bp, Homo sapiens
agggcggcctgcttggttcgggtctcttcgtgttctcgctcactgttttcttcttagtgacagcatttttt

SEQ ID NO: 345884 - DNA, 90 bp, Homo sapiens
ccgagggcagccattctatgctgtggaaaagaaagcatactgcgagccctgctacattgatctcactctgttgcctaggctggaatgtgg

SEQ ID NO: 345885 - DNA, 100 bp, Homo sapiens
actacaagatttgtaagaaacaaatttatttccaagaatttacatagtacatgacgaagttaaggataaagcttttgaactagaactcagctgggttggt

SEQ ID NO: 345886 - DNA, 75 bp, Homo sapiens
tgccagaatggaagcatacagatctgggaccgaaatttgactcctgaaagaatagacccaagcgcatcacgacaa

SEQ ID NO: 345887 - DNA, 100 bp, Homo sapiens
agcagctggctgggtacatcctggccaatgctgacaccatccagcacttctgcacccagcacatgatcacggaagccttggcccaaggtgggatgcacat

SEQ ID NO: 345888 - DNA, 83 bp, Homo sapiens
gtcctacatcaaatctgcttcttttggaccttggtcatctaaaggaatctggtgaacagtaacaaactttggtgaaatttcag

SEQ ID NO: 345889 - DNA, 98 bp, Homo sapiens
atctggagcaaggaaaagagccctggaatatgaagcaacatgagatggtggatgaacccacagtcattgaaattatgagactatcattcaaatggaag

SEQ ID NO: 345890 - DNA, 100 bp, Homo sapiens
tcttttctacaaactctgtgcctcaacaaccatttctaagtgcaggatgaagttaaaggaagtagatcgtacagccatgcaggcatggagccctgcccag

SEQ ID NO: 345891 - DNA, 50 bp, Homo sapiens
cggcactgagggccccgacccagttcccagaaatgaatgctatgatcatg

SEQ ID NO: 345892 - DNA, 75 bp, Homo sapiens
aggacaaggggaaatggaaggggcctccagggtctgcagacaaggcaggtgaaggtggtgtttttaaggctcatc

SEQ ID NO: 345893 - DNA, 97 bp, Homo sapiens
ctccactccgtcccccgcgggtctgctctgtgtgccatggacgggccgggctctcgccatgggtcactgtcgcctctgccacgggaagttttcctcg

SEQ ID NO: 345894 - DNA, 99 bp, Homo sapiens
gcagaaggctagactctccgacccccagggagcctggtgtgggctgcagggacagaacgcttctcagaggagtctcggaagggtgctgacctggaccgg

SEQ ID NO: 345895 - DNA, 101 bp, Homo sapiens
actgatgaagctgcagaaccaacgaggtggccgaatcttccttcaggatatcaaggcccgccaagctgccccctgtgtgctattctttgatgagctggatt

SEQ ID NO: 345896 - DNA, 78 bp, Homo sapiens
tggaagcacctcaacctcatcgacatgtgcttgaggcaaaagatgtgattgaagagcatggtccttcagaaaaggcaa

SEQ ID NO: 345897 - DNA, 97 bp, Homo sapiens
cttacattttatgtaagagaaacagaccagagttcctccgatggccaggaaccttttagtacttccgaaatgcactcggtgatggaaagagagccac

SEQ ID NO: 345898 - DNA, 99 bp, Homo sapiens
gcattctttctttccttaggaaaaagtccactcagctgttgaagaaatggatggattagatgatgttgaaaacagcatgttgtactataatcaagcagt

SEQ ID NO: 345899 - DNA, 75 bp, Homo sapiens
catgaatggagcaaaatggcggatcatgtgcagagattgagaatttatcacaagttgatggtcctcaagtggaag

SEQ ID NO: 345900 - DNA, 50 bp, Homo sapiens
agacatttcttcggcattctgcaacagaacatccagtcatggataaaaat

SEQ ID NO: 345901 - DNA, 83 bp, Homo sapiens
ggcaattgggtttggccggaagtcgcctttgtctaacaggaactcttaacattcagggatgtggccatagaattctctccaga

SEQ ID NO: 345902 - DNA, 101 bp, Homo sapiens
ttctaagtcagagacatcaaaacctggaccttctggattacaggccaaattagcaagtgtctgtgggaggttatgtttatttgagacttctccatcgggat

SEQ ID NO: 345903 - DNA, 75 bp, Homo sapiens
ctgctgctatgctggaagtactgtgcctgctgcaaggagacgaagtcgcagacgtcggtgacactcagcatcgtc

SEQ ID NO: 345904 - DNA, 101 bp, Homo sapiens
ttggagcttaacctggaggattttgatattcatgaactacatagagctcatgcaaatgaacaacccccacagaacctttattgtgtaagtttgctgatgga

SEQ ID NO: 345905 - DNA, 83 bp, Homo sapiens
ggaaatcgggctgaagcgactgagtccgcgatggaggaaataatgcaaaaggtgtcccaaggctcctgaccagtgaacaaaga

SEQ ID NO: 345906 - DNA, 50 bp, Homo sapiens
atttctccacgatctatagaagatgagaactgagggtgatatggggcatg

SEQ ID NO: 345907 - DNA, 100 bp, Homo sapiens
ttcctcggcaagaaatgtgtgatttggagcaagaggtggtggtggccttcccccgaagaaatttggtaatcctggggagcgtttgcgtaaaaaaaagtgg

SEQ ID NO: 345908 - DNA, 75 bp, Homo sapiens
gcgaagatccggactctgggtgttttgctaccgtgaccgtttagagaattcggtcaacagtggatgaaaaagaac

SEQ ID NO: 345909 - DNA, 101 bp, Homo sapiens
gcggaggcggcggtcgccccggggctccggcggcggttgccgaggtactgtctgaatgccgcctgctcgcctacatatcccaggtgcccacgcagatgtcc

SEQ ID NO: 345910 - DNA, 96 bp, Homo sapiens
cgccgtgacaactttcgtttccctctgagggaattgggaggtcggcggccccaaaacataagcagtactataatggatgtagacagcacaatttcc

SEQ ID NO: 345911 - DNA, 98 bp, Homo sapiens
tctctgccctcagtatcaacaatgattgctcaagacttctttgtggctttgctaaaggacagcatcaacaacagcaacttgtgattggcggtgaccgg

SEQ ID NO: 345912 - DNA, 99 bp, Homo sapiens
agcccccttcgccagccattttctctacaaagctgggggaggctcatatattgctgcagcaagagtgagccatggagctacgtgtggggaacaagtacc

SEQ ID NO: 345913 - DNA, 74 bp, Homo sapiens
cacgccagtacggggatgagtccactctggccttccagcagggtgagaactctgtctcagtcgacgggaagtgc

SEQ ID NO: 345914 - DNA, 82 bp, Homo sapiens
ttgcaggggtgcagtgtgtctggtcttatgaggaaaatggatgtctgtctgatagtgatatgttttctcaagctggattgag

SEQ ID NO: 345915 - DNA, 90 bp, Homo sapiens
aacagcggtcgcgccggcaagagcagcgggagcggcgcggggaagggggcggtgtccgcagagcaggttaatgacaacaccaacacagcg

SEQ ID NO: 345916 - DNA, 83 bp, Homo sapiens
cggaagttacacagaggacaatgcttcccaggctcgagttgatgcccacagccgcttacaaacacgcagatggcaagaagatt

SEQ ID NO: 345917 - DNA, 90 bp, Homo sapiens
cctttagccatgtggatacctacggagcacgagaaatacggcgtgggtaagaatgattgatgttggctgatattggagtgctcattcaca

SEQ ID NO: 345918 - DNA, 100 bp, Homo sapiens
caaagttgctgtgtccgacatgaaaaaggactttgagagctgccttggagccaagaggagaggagacgccgtgagcgggacgaccagatgtaccgagagc

SEQ ID NO: 345919 - DNA, 118 bp, Homo sapiens
ctttgtcaattatggaggaggaaaatattggtacttcaaacatgcaagttggaatggtacaattggtcatgtagctcatgggaaatccacagtcgtcaaagctatttctggagttcat

SEQ ID NO: 345920 - DNA, 85 bp, Homo sapiens
gacccagtggatgtaaaccccttccaggtcagtgaagtttaacaagggctatactgctcttagccagagtccagatgaaaacctg

SEQ ID NO: 345921 - DNA, 75 bp, Homo sapiens
gacgtgttctccactgatgacctcaccggatttttacaggtaaagagaaatgtgtatgaccttacaagtatcccc

SEQ ID NO: 345922 - DNA, 80 bp, Homo sapiens
tcttggagctgtgtccagcagcctggaccacctcaaggccctgtccctgagaaaggtggtaatcactcaaggaaaaggaa

SEQ ID NO: 345923 - DNA, 75 bp, Homo sapiens
ctggaatgaaaaaggcaaagaggcaaaatgtgcaagggcccatctggaaccaagattaaaaggagcccaagcccc

SEQ ID NO: 345924 - DNA, 74 bp, Homo sapiens
cggcagcggcgcacgcgcacggagaggaggctacttgccaggccctggaggaagcactgagcatccaaaccccg

SEQ ID NO: 345925 - DNA, 100 bp, Homo sapiens
gaagccccgccagcccagctaaagcagacggctcgcactgcgacccgaagtgtgaagcctcagtttaggtcatctggtggttcagaacactcaacagagg

SEQ ID NO: 345926 - DNA, 100 bp, Homo sapiens
cggcgcctcccctcacccccggccgccttccctccatccgttccagggacctcaccctcgggggagtcaagaagatctaaatcggaaggtagcacacaga

SEQ ID NO: 345927 - DNA, 50 bp, Homo sapiens
agagggggcgctgagctgttggggctcattggtgggcagtattacttatg

SEQ ID NO: 345928 - DNA, 82 bp, Homo sapiens
gccgctgctgtcctgcgaccccaagcagatagcctgggctggaagctcttctacgtcacaggctgcctgtttgtggctgtgc

SEQ ID NO: 345929 - DNA, 83 bp, Homo sapiens
gggtgattcacgtgtgcccaggccctgaggtgggccggacctgggagtggcaggattttttatcaagcagaaatgcatcgaac

SEQ ID NO: 345930 - DNA, 83 bp, Homo sapiens
ctgatggcggaggcttcgagtgacccgggtgccgaggagcgggaagagttgctgggcaaattgtggctactaatttgccccct

SEQ ID NO: 345931 - DNA, 101 bp, Homo sapiens
gcaaaagcaaagacccctcggggctgctcatctctgtgatcaggcgatatgagtctcatccagtctgtgctgatctgcaggccaaaattcttcagtgttac

SEQ ID NO: 345932 - DNA, 82 bp, Homo sapiens
acgggtcctgctgctcaccaagtgttatagttttgccgctggactcttccctcccttcccccaccccatcaggatgatatga

SEQ ID NO: 345933 - DNA, 83 bp, Homo sapiens
ggcgcctggtgccccgcccaggaccctgacgtgggaagccatggagcagatacgtgaggactcttgtgaagatatgagttgtg

SEQ ID NO: 345934 - DNA, 90 bp, Homo sapiens
caaaagatgttggacacaatatctatattctggcccatcaggctgctgatactttggctgtgaggcaaaaaaggagaatttatgatatca

SEQ ID NO: 345935 - DNA, 83 bp, Homo sapiens
ggtgagaagcccttcgcctgcacctggccaggctgcggctggagtactgtcaagatgataagcatggaataaagcttcagaag

SEQ ID NO: 345936 - DNA, 144 bp, Homo sapiens
cagcaacctttctgaactcgaccgcctgctgctggaactgaacgctgtacagcataacccgccaggcttccctgcagactgctgcctcatatccgggggaatgtgggctttgtgttcaccaaggaggacctcactgagatcagg

SEQ ID NO: 345937 - DNA, 100 bp, Homo sapiens
cggtgcgcggggcgttgggtcagcgggtctgggactggtggcaccggcggcggcgtaggacggaggcgtcgctaggactcagaattcatgattgaagaaa

SEQ ID NO: 345938 - DNA, 51 bp, Homo sapiens
caaacatgtcacaagagtcggacaagatggaacaaaattcatctgtattgg

SEQ ID NO: 345939 - DNA, 75 bp, Homo sapiens
cggggaggccaacgtgaagaacaaattgtggctactaatttgccccctgaagatcaagatggctctggggatgac

SEQ ID NO: 345940 - DNA, 74 bp, Homo sapiens
gttcttcttcgagtatttgtagaaggaagctggattatatcacatacctgtccatctttgaccaattatttgac

SEQ ID NO: 345941 - DNA, 82 bp, Homo sapiens
gctcgcgctactctctctttctggcctggaggctatccagccctgtggagcatccttttggaggtggcaaccaccagcacat

SEQ ID NO: 345942 - DNA, 100 bp, Homo sapiens
acttgtaaatatgcagattatatttctagggacaaacctatcacatttactcagttcttcatcctgctgctgattatcctccttgctgaggtgaccttgg

SEQ ID NO: 345943 - DNA, 98 bp, Homo sapiens
gcggctataataatagcaaacatcgatggcctactggggataacattcatgcagaacatcagttaagtgggcagaccaacatccacctcagcaaaaac

SEQ ID NO: 345944 - DNA, 125 bp, Homo sapiens
cgacgagcaggcactggaagaccacttcagcagtttcggacctatctctgagggactttgaggatgatcctcgggccctgggggcccgtgggcaccgtcgttctgtcagcagaggctcctaccag

SEQ ID NO: 345945 - DNA, 97 bp, Homo sapiens
ggcagtctgcggcggtgttctggtgcacccccagtgggtcctcacagctgcccactgcatcaggaagagtgtgaggaagaggctgtctgtgtcatta

SEQ ID NO: 345946 - DNA, 82 bp, Homo sapiens
gcatatttgagtcatttccttcgtacccacagtgcttcatgagagctgcagaaccttggcctgaaaatgctacattatatca

SEQ ID NO: 345947 - DNA, 98 bp, Homo sapiens
cgcagtctggaaagctttaggagttcacagtaaataaacatatctgcggaggatcattgataaaggagagttgggttcttactgcacgacagtgtttc

SEQ ID NO: 345948 - DNA, 73 bp, Homo sapiens
tgcaaggggaggacgccagatacctcaaaagatggaacaagaggctgagaggcgcaggcagccacaaataaag

SEQ ID NO: 345949 - DNA, 88 bp, Homo sapiens
tcagccccaaacaggacgaaggcgtgctgaaggtcctgaacgaggctgtgggggccctgatgtaccacaccatcactctcaccaggga

SEQ ID NO: 345950 - DNA, 75 bp, Homo sapiens
gtcggctctgggactcgtctggcgtccctcaggtaagtaaggaggtctctgtaccatggctcgtacaaagcagac

SEQ ID NO: 345951 - DNA, 96 bp, Homo sapiens
ctcctggaccaatgcatcttcccaccaccttaaaccactgattgatatcagtaaatgccattatttagtggatttggacaccatgagagaaacacc

SEQ ID NO: 345952 - DNA, 100 bp, Homo sapiens
tcaattgaatgagtttttagcacagacgctccagagggtggagggagcaaagtcctgcacactggagtggtgtactagcggatcaagtatggacactgac

SEQ ID NO: 345953 - DNA, 96 bp, Homo sapiens
catctctaaagtggatatgcacgatgactcattgaatacaacggcgaatttaattcggcataaacttaaagaggttattgcagctgactgcaaaag

SEQ ID NO: 345954 - DNA, 97 bp, Homo sapiens
aagaagttaaagctcgtgcgcacgactggtccaaggtcggctcccatgagcagccctcaggcgccactctgcagcggaggaaggaccgagtggagct

SEQ ID NO: 345955 - DNA, 50 bp, Homo sapiens
ccatggctccctgcagtaccctttaacggacatgaaagatcagatgtcaa

SEQ ID NO: 345956 - DNA, 100 bp, Homo sapiens
cttcctgttaagcctgtgaaactgtcaagaagaagagagattggccctagaaactgccctgatgtacggagctaaaaagcccctcaacacagaaggtgtc

SEQ ID NO: 345957 - DNA, 74 bp, Homo sapiens
gagattggtgcagagatggcattacgaacctttggccacttgcctgggccgagccagtggcccccagaggatga

SEQ ID NO: 345958 - DNA, 85 bp, Homo sapiens
cggctgagcgcggtggcctgtgggcttctgctgcttcttgtccggggccagggccctcgggaccaaggatcacgtcatgactccg

SEQ ID NO: 345959 - DNA, 100 bp, Homo sapiens
gacagttatagtcaacatggttgacgttgcaaaggcgcttaatcggcctccaacgtcactggatgtgtgtgagaagtggggagaaatgccaccactacaa

SEQ ID NO: 345960 - DNA, 101 bp, Homo sapiens
ctctgggacagaaggaaagctgtgggaagaaaagcagggtgctggtttctaggacactaaacctcatggagcggcctattgccaattcatggacatgctct

SEQ ID NO: 345961 - DNA, 75 bp, Homo sapiens
tggcagcgaagaagatcgaaaattaaacctcaggagcactggccagagtccaggtattcgggaagtggcacagtg

SEQ ID NO: 345962 - DNA, 100 bp, Homo sapiens
agagaaggcggcgcgggaggtgaagttgctgctgttgggttctgcggggagtgtctccagccctgcctgcaggtgccatccccgctgtgcccactctgcc

SEQ ID NO: 345963 - DNA, 75 bp, Homo sapiens
atctcaatactttttcataacaccaaagctcctgcccctcctaaagctgaagccaaagcgaaggctttaaaggcc

SEQ ID NO: 345964 - DNA, 72 bp, Homo sapiens
gaggagccttaacaagcgcacggagccctcaagagcatctgctgcacccaagcctgagccggttcctgttca

SEQ ID NO: 345965 - DNA, 83 bp, Homo sapiens
cgcctcggaggcgttcagctgcttcaagatgaagcattttgaaagcgaagcagaagccgtagaatcagcggcgagcctgttga

SEQ ID NO: 345966 - DNA, 96 bp, Homo sapiens
ggtggacagggaaactgacgagttcttcaagaaatgcagagtgatcccatctcaggagcacctgaatggcgaggcggctttgcacaaggtggacat

SEQ ID NO: 345967 - DNA, 74 bp, Homo sapiens
aggaggtggaaagagcttatgttaccagttaccagcattatgttcagatggattgccatatgaacttcaggact

SEQ ID NO: 345968 - DNA, 76 bp, Homo sapiens
cttcaaggagctgaactacaaaaccaattctgagtctccctctgtcacggtctcctcctccaggccgcgcgcggat

SEQ ID NO: 345969 - DNA, 82 bp, Homo sapiens
ctcggcgccaagatcccagtcacaattatcaccgggtatttaggattacaagggccagaagctagctgaacagatgtttcag

SEQ ID NO: 345970 - DNA, 101 bp, Homo sapiens
cgggcaccaccaagcgctttcccgagaccgtcctggcgcgatgcgtcaagtacactgaaattcatcctgagatgagtatgccttcaagacagtgtgttggc

SEQ ID NO: 345971 - DNA, 82 bp, Homo sapiens
gtcgcttggggtgatcatgtatgagatgctcatcggatatggtggtaccaggagacgataaagtagaaagttggagtcaaac

SEQ ID NO: 345972 - DNA, 100 bp, Homo sapiens
ctggtatagacgcagaatctgtttcacacaacaactgctatttgaagagtgtgaacatggctacgcctcttcattcccgtccatgccgagcccccgactg

SEQ ID NO: 345973 - DNA, 82 bp, Homo sapiens
ttcatagcattcgcctactccgtgaagatatggctcgtggacagcagaaaattcagtctcagcagaaaaatgccaaaaagca

SEQ ID NO: 345974 - DNA, 101 bp, Homo sapiens
ggaaaagaagcagttcctgatgttacaaatgaacaaggatctcccagaggtcaaccagaatcaagatgtctgggactgaggaagcaattcttggaggacgt

SEQ ID NO: 345975 - DNA, 75 bp, Homo sapiens
gagataaagttgctttttactggatctatcttgggatcccatggctttctttactgggctctggggccccttcac

SEQ ID NO: 345976 - DNA, 96 bp, Homo sapiens
ccgcgagtgccgaaccttcggctggttgaaggggcccggccaggactcggggaagggtggcctgagagcagcgatgacctctggggtcactgtccc

SEQ ID NO: 345977 - DNA, 75 bp, Homo sapiens
atcgcggagtcccaatgaaacgggcagccatggccctccacagcccgcagtttaccaagtactggacagaatcaa

SEQ ID NO: 345978 - DNA, 100 bp, Homo sapiens
ctggtgggatcattggctatgtaaaagcaggcaatggcgtccacagaggaaaaagcctatgagatcatgagggagctcgatgtcagctatgtgctggtca

SEQ ID NO: 345979 - DNA, 100 bp, Homo sapiens
gcctggcccccgggactccctgtgccttgcttggagctgacgccgacgggattggtagcttatgtcgatcttgatgaaagagcaattgatgctctcaggg

SEQ ID NO: 345980 - DNA, 75 bp, Homo sapiens
ccgccgccgccgccgctgccgctgccgctgccgcacctccgtagctgactcggtctggaaatctctccaggcacc

SEQ ID NO: 345981 - DNA, 74 bp, Homo sapiens
gggcgatgtgtagtgccttccatagggctgagtctgggaccgaggtcttttagataaccctgaacttcgtgtgg

SEQ ID NO: 345982 - DNA, 83 bp, Homo sapiens
ccgcagccttgggcctcgcgccggctatggccgtgccctggggctgagccctcaggtatcatgatattagctggtttgacatc

SEQ ID NO: 345983 - DNA, 90 bp, Homo sapiens
ttcgacgtgcggcccgaatgccagcgcctcttctaccggggcaagcaggttaaagtattgcacaatcagctggtccttttccacaatgcc

SEQ ID NO: 345984 - DNA, 82 bp, Homo sapiens
ccaagaacgtgctcttcgctcacctggatgacaacgagaggagggtctccgtctctccaccgggggcttcatccttccaggg

SEQ ID NO: 345985 - DNA, 51 bp, Homo sapiens
tggttctggaatcctcagttcaaggaattacatgaatgacagtcttcgaac

SEQ ID NO: 345986 - DNA, 82 bp, Homo sapiens
ttttaagaaagtggacaaagagaggagtcaggtgacttaagagattaaaattaatttggttgctgttggttctgaacaaata

SEQ ID NO: 345987 - DNA, 100 bp, Homo sapiens
gtggccgtccgcccactccgcggcgttcggggaaatggctgcgagaccctagaggcctgcggtgctggagaatctggtaaaagcaccattgtgaagcaga

SEQ ID NO: 345988 - DNA, 104 bp, Homo sapiens
cacagctcagaacagctggatcttgctcacactctttcaagagaagcttccttggtcctggctataagtcaccatggcacagcaagctgccgataagtatctct

SEQ ID NO: 345989 - DNA, 75 bp, Homo sapiens
attgggggttgatacagcagagacgtcatacttggaaatggctgcaggttcagacaacatggccaatctttccta

SEQ ID NO: 345990 - DNA, 102 bp, Homo sapiens
gtggcaatgagaccagtggaagcagcaccatcggggagacaagcaaatggccgccctgctcccccaatgaaaggccagcttcgaagaaaagctgaaagggag

SEQ ID NO: 345991 - DNA, 90 bp, Homo sapiens
ggtacttcttccaaggacctaggtctctcgcccatcggaaagataacgaaggaggcccaacttcattcaataaggagcctgacggattta

SEQ ID NO: 345992 - DNA, 75 bp, Homo sapiens
cacactatggcgctgaaacggattaataagatgcggtgacctgccagcacctgccgcagccttcgtccgggagtc

SEQ ID NO: 345993 - DNA, 75 bp, Homo sapiens
gaaccgcgcggccgaaccctccggcttctcacggcattcagcagcagcgttgctgtaaccgacaaagacaccttc

SEQ ID NO: 345994 - DNA, 100 bp, Homo sapiens
ggtgaactggaggagcgatttgccatcgtgctggcttgaagatgcagtggacgccagagcatgcccagtggccagaacagcactttgacatcacctcaac

SEQ ID NO: 345995 - DNA, 75 bp, Homo sapiens
aaggattccaagtaactcttatttgatataaagatgaagcgcagctgtataaagaagagcacctgaggaatcggc

SEQ ID NO: 345996 - DNA, 75 bp, Homo sapiens
catcgaagtgttgtgtaaaggctacccttgacgaccatctggacccaccgcgtccgcttcctggaagagcaggcc

SEQ ID NO: 345997 - DNA, 82 bp, Homo sapiens
gtggactatgacagacagtccgggagtgcagtcatcacgtttgtggagattggagccaaaacctattgatgtacaagtcatt

SEQ ID NO: 345998 - DNA, 75 bp, Homo sapiens
tcggcttctcgctggccatgcactggcaactgcagcccgaggacaagcggctgctggaggctctcaggtcatttt

SEQ ID NO: 345999 - DNA, 100 bp, Homo sapiens
ccgcccgctttcggctcgggcctcagagacctacagagttgaaacagtgaaacctggaaagattgtctggcaggaagaccctcgtttacaagacagcagt

SEQ ID NO: 346000 - DNA, 75 bp, Homo sapiens
ctgtctgtccacgatagtgccaggcctatgttggagggcagtcagggcgacagcaagaatgccaagaagaagaac

SEQ ID NO: 346001 - DNA, 99 bp, Homo sapiens
ctgataactggaaagttcctcaagatggagactttgactttatatttggtttccaggcaggactgacgtctttggattgcagtggatcttactgcttac

SEQ ID NO: 346002 - DNA, 83 bp, Homo sapiens
cgtgtccgcgaggatgcgtgttcgcgggtgtgtgctgcgttcacaggtgtttctgcggcagagaagcagggccctgagcggaa

SEQ ID NO: 346003 - DNA, 100 bp, Homo sapiens
taaggacaaaagccaagaggaggacagttcgctacacagcaatgcatcgaggaccagtcctgcctctgttgtagaagacatgtggtgtatataaagtttg

SEQ ID NO: 346004 - DNA, 83 bp, Homo sapiens
ccaaaacaagtggctgcggccgtcgcccaggagtcatcggacgccagaatctggttttgggatttgagattgacgcggtgaac

SEQ ID NO: 346005 - DNA, 75 bp, Homo sapiens
gcagaagtaagaggatttatagatcagaatctcagtccaacaaaagggtgatcttggaaaaagaagggcctcgtt

SEQ ID NO: 346006 - DNA, 82 bp, Homo sapiens
ctaaagcagcgtgcgttcagccctgggaggccggtagaggactgtgaaccaaaagttgtcccccaggatggacttcaccgcg

SEQ ID NO: 346007 - DNA, 100 bp, Homo sapiens
agattatttacaatgctaccctgctttttctggtgtcctgaacctggaagttgtgctttttaaggtgtcgtgaaaactacccctaaaagccaaaatggga

SEQ ID NO: 346008 - DNA, 90 bp, Homo sapiens
ccggcgggtacctgcggccaattcggtggaacgaggacgcggactgcgaaggcaggctgaccggttccctgatgtgttacctgcttctgc

SEQ ID NO: 346009 - DNA, 83 bp, Homo sapiens
ccgacatgacgcccgaggacccagaggaaacccagccgcttctggggcctcctggcggcaggacggggaggtttactgcatcg

SEQ ID NO: 346010 - DNA, 83 bp, Homo sapiens
ctctcccaaggaagataccgagtgggagaaaagatcctcttcattagggccaaagatgaagaggaagcctttctggattggag

SEQ ID NO: 346011 - DNA, 83 bp, Homo sapiens
aatggcagcaaggtgggcccggacggcacaccctacgttaccgtgctcaaggggaacgcccttttgcttgtgactggcagggc

SEQ ID NO: 346012 - DNA, 75 bp, Homo sapiens
cttggcctcggaggatgcagcctttggactcaagttggatatgtcaagtgaccagatagctgccaatctgcaagc

SEQ ID NO: 346013 - DNA, 83 bp, Homo sapiens
ttgattcatcagattttgcattggatattcgcatgcctggggttacacctaaacagaaccacgaagctgccctgagacgctca

SEQ ID NO: 346014 - DNA, 83 bp, Homo sapiens
ctagagcaaataaccgttttgaaattatcgtaaagctgaaaattgaaatcatgaaagtagacaggactaaactgaagaagaca

SEQ ID NO: 346015 - DNA, 97 bp, Homo sapiens
attacaagaaagcgtcacctggaaagaggctcctgaagcacaaatgcaggggatcactgagattctgatgaacagaccttctgcccgcaatgccttg

SEQ ID NO: 346016 - DNA, 75 bp, Homo sapiens
ctcgaatcctctcctggtttagggaggggaagacgcccactattgcttggttctacttcctttatcccgattggc

SEQ ID NO: 346017 - DNA, 90 bp, Homo sapiens
cctggaggcctctgaggaagtggagcttggtctgaaggggcgtctcgattacctgagctctctgaaggtgaagggccttgtgctgggtcc

SEQ ID NO: 346018 - DNA, 76 bp, Homo sapiens
ataaggaccagtacctgcccaggaaactgggctacttctacaagtccgaacagccagtccagcaaaatgaacagca

SEQ ID NO: 346019 - DNA, 75 bp, Homo sapiens
aagaagccaaagaactggctaggcaaataagctttaagcaaacggggattcagcgtccgatcctttggaacaggg

SEQ ID NO: 346020 - DNA, 97 bp, Homo sapiens
tttatatagagatgtgatgttggagaactacagaaacctcgtctccctggtagtcgtgaaaggtgccaaattggcagaggctcacgtttcttctctt

SEQ ID NO: 346021 - DNA, 83 bp, Homo sapiens
gaattccggcggctgccgtgactccagtgcaaattggcggcagtaagcacacaatgaatgatcacctgcatgtcggcagccac

SEQ ID NO: 346022 - DNA, 75 bp, Homo sapiens
aggaactcaggcgcctcttcttagttgatgatttagttgattctctgaagaactctaagaaggagctgatgtgga

SEQ ID NO: 346023 - DNA, 100 bp, Homo sapiens
ctcccaaggtgctgggattacagatcgggcccagcacaggcagcgtcagtgcaaacttcccccaccccgccttccacccatgtgtgtcaaccctacccca

SEQ ID NO: 346024 - DNA, 96 bp, Homo sapiens
cgaggccctgctgtctatctacaagcagacccaggctgcctccgcctcccagggctccgcctctgctgctgaagagaatccatcggtctgctgcaa

SEQ ID NO: 346025 - DNA, 75 bp, Homo sapiens
tcgccacagcggcctcggcctccccttggattcagacgccgattcgcccagaaccttctgataacttaagagaga

SEQ ID NO: 346026 - DNA, 97 bp, Homo sapiens
tcatgttcagctccatcgtctgcagcgtcccgcacacctggcagcaaaagaggaggaggagaacggggctgaggaggaagaagaagaaactgccgag

SEQ ID NO: 346027 - DNA, 51 bp, Homo sapiens
gtccttctttgtggagagcaagacaccaactctacaacattacctgtcata

SEQ ID NO: 346028 - DNA, 74 bp, Homo sapiens
cagcacttcattatgcagctaagctgggatctagcaattgggaggcagcagacttgggtaatgaagagagaaaa

SEQ ID NO: 346029 - DNA, 100 bp, Homo sapiens
tcaagaacttcctcgcactgtgacatgtctgatcccttgctcccatccctgcagcatgaacaagctgttccatttcctccaagtcaccggcttacagcaa

SEQ ID NO: 346030 - DNA, 88 bp, Homo sapiens
tgggcctgacagagaaggctcactcaaggatcagttggctttagcaattgacacgatgaggcgagtggtacgacagagcaagtttcgg

SEQ ID NO: 346031 - DNA, 83 bp, Homo sapiens
gcctcctgcgccggccttgcctcgggtattagaaaactactcggatgctccaatgacaccaaaacagattctgcaggtcatag

SEQ ID NO: 346032 - DNA, 74 bp, Homo sapiens
gccaaacagtgtcactcccaccacccaccagggcccctgcaaccatgtccaagggacctgcagttggtattgat

SEQ ID NO: 346033 - DNA, 100 bp, Homo sapiens
ggcggctgctgctgctgctgcccgcgtccgaggctcgcgggcggcgggcccgggtacccactgatggtaatgctggcctgctggctgaaccccagattgc

SEQ ID NO: 346034 - DNA, 90 bp, Homo sapiens
gtgcgaagtcccacaaggtctccttcagattttggtttcagtaacctcttcactcctgggcagctgctgaagacctggtgtggcagccct

SEQ ID NO: 346035 - DNA, 83 bp, Homo sapiens
agcagacgctgcagttggagcaacagtccaagctcaaaattccagctaagaaagagtcttgtccaaacactggaagagacaaa

SEQ ID NO: 346036 - DNA, 101 bp, Homo sapiens
ctgctggtgggactcaatgttctcgatgccaatctctgcttgaaaggagaagacttggattctcagatcctccaggtcctattgacaatactaagattgca

SEQ ID NO: 346037 - DNA, 97 bp, Homo sapiens
agaacgcggggagaagcccacccgtgaggagccagctgccgcgacggggcatggtctagtggcccagtcaggacgcggaaacactccctggaggttc

SEQ ID NO: 346038 - DNA, 110 bp, Homo sapiens
caaggtgatccagcaaggtcggcagagcaaggggcttacgcagaaggacctggccacggtcatctccgcggtgtcgaggctctccctgcacagcatcgcgcagaacaaag

SEQ ID NO: 346039 - DNA, 83 bp, Homo sapiens
tgttgccataatcatagaggcaagtgggggaggagcgttccttgtcctccctctgcacaagtgtcttctcagaaacaaccagc

SEQ ID NO: 346040 - DNA, 50 bp, Homo sapiens
cagaaaccagagcaagttatcaaagaggacagagaaaagtgacagtttca

SEQ ID NO: 346041 - DNA, 76 bp, Homo sapiens
ccgggagaacctgcggcggccggagcgagatcctgaaggagctagacgagtgctacgagcgcttcagtcgcgagac

SEQ ID NO: 346042 - DNA, 100 bp, Homo sapiens
tcggagctacatccagtgaataaggttatgagtgccagtgagccgccttagatagaagcatcgtcagcactttattaatgatggatagtgagaataaacc

SEQ ID NO: 346043 - DNA, 90 bp, Homo sapiens
ctcctggactggtttaaaacggtcactgaaggagatccacacaacttaaagatctgctgccgagtgaatggggaagtggtccagagcggc

SEQ ID NO: 346044 - DNA, 88 bp, Homo sapiens
tttggctgctgcaggagccattttagattttcagttcacccactagaggcaaagacgtaagagagctaccagcgtattgagaggagat

SEQ ID NO: 346045 - DNA, 98 bp, Homo sapiens
aagaaatgaaaatgaagggcgccctggaataggttcgccgaagagagagtgttctaagaacggaagcatctgggctggatggaatttagcatcaagca

SEQ ID NO: 346046 - DNA, 82 bp, Homo sapiens
tgagtttcctgatcgactccagcatcatgattacctcccagctattgacctgaaaagtggttctggaaaagtgtaccaaggc

SEQ ID NO: 346047 - DNA, 100 bp, Homo sapiens
tggaagagtgtttcctcctctggccgtaaagcaggtactctctgcagcaccagggacacggccaacacggtgaaggaaaagttcgggaggaagctttatg

SEQ ID NO: 346048 - DNA, 78 bp, Homo sapiens
cagaactcaccgccagagcctgagcacgtgcccccggagctgtgggagcccttctataccgaccagtacgcgcaggag

SEQ ID NO: 346049 - DNA, 100 bp, Homo sapiens
ctcccccatgggcccccactccatgtcggtgcccaccacacccaccctgggcttcagcactggcagcccccagaggaagatggatggccgagagtaccca

SEQ ID NO: 346050 - DNA, 82 bp, Homo sapiens
ccgcagtatcatgctggccaagaagatcatcattaaggacggaggcacgtcttccgtgtgtgctaagatcgtgcagctcctg

SEQ ID NO: 346051 - DNA, 75 bp, Homo sapiens
agcgagccacgggagcgagccaggagcttgaagaaatccgcaaatgtgggatgaaaaacttccgtaacatccagg

SEQ ID NO: 346052 - DNA, 74 bp, Homo sapiens
ttatcccagctaagctccagggcgttgacccggacgacacctataatgagaccccctacgagaaaggtttctgc

SEQ ID NO: 346053 - DNA, 97 bp, Homo sapiens
gtgagccccatgcactgcctggacgaggaaggcgatgactcagatggggaaagaccacagcaagattctttcattcgtctcctcctagcctggggga

SEQ ID NO: 346054 - DNA, 100 bp, Homo sapiens
gagaaaacagcaggcacccaagcgggcggcagggtttggaaatcccttgtctccaggttgctgggattgacttcttgctcaattgaaacactcattcaat

SEQ ID NO: 346055 - DNA, 80 bp, Homo sapiens
aaatgtcatttccatcactgacggacagcacattttctgtgacaagtttccaaacctagcagtcggacaggatgagcaag

SEQ ID NO: 346056 - DNA, 100 bp, Homo sapiens
aactcgacttgaccggcgccaaacagaacacaggagtgtggctagtcaagatctgttacctaaagcaataaaaaatggccagaggatcagtgtccgatga

SEQ ID NO: 346057 - DNA, 100 bp, Homo sapiens
ctcaaaggcctttgtgggccagaagagttccttcctggtggactgcagcaaagctgacagcacccaagaaaacctcatttggctcgctgaaggatgaaga

SEQ ID NO: 346058 - DNA, 100 bp, Homo sapiens
tggaaatcctaatgacagtctccaaattcgcctccatctgtaccatgatgatgattattctccaccgtctaagagaccaaaggccaatgagctaccgcag

SEQ ID NO: 346059 - DNA, 74 bp, Homo sapiens
tcgtagtcctgggagcacagcagaagtgagcctcctcaacaagcccaagagtgagatgaccccagaggagctgc

SEQ ID NO: 346060 - DNA, 75 bp, Homo sapiens
cgggcttctgtgaaacatggcggtaggctgggaccataacacaaggcactactgcagtcttcagttaagcaacaa

SEQ ID NO: 346061 - DNA, 74 bp, Homo sapiens
aaagcctctgggagcagaagggaggctccaagacctcatcaacaattaagattagcctgaggcctgctcagtcg

SEQ ID NO: 346062 - DNA, 90 bp, Homo sapiens
ggtgccggcctagcgtcctggaattacttcaatcaaaattccaagtcaaattctgttccaattatcctggccatcgtgggattgatgctg

SEQ ID NO: 346063 - DNA, 74 bp, Homo sapiens
gagtgcttctttcttggagctgaccatgggatgacacggtcaaaaaatgaacttggccgaaatgaagacttcat

SEQ ID NO: 346064 - DNA, 100 bp, Homo sapiens
atctgatcgaacacctaaaacgccacttcagggagaaatcccagagatgaatctggggtattggtgttgcaactcagaaggttaacttgaatcagattcc

SEQ ID NO: 346065 - DNA, 100 bp, Homo sapiens
tgggggcaggagctgttggagctttgcagctgacctacatctcgaaggtgccgacgccaccgccgagcccatgatcctggaacagtacgtggtggtgtcc

SEQ ID NO: 346066 - DNA, 114 bp, Homo sapiens
tggggaagacctgcgtcctttttcgtttttcggatgatgccttcaatactacctttatttccaccatagatcatggaagggaagtggttgctgtgtatgttactggtgcttgga

SEQ ID NO: 346067 - DNA, 95 bp, Homo sapiens
ttcagatcatccaagtggaggttcctacagagattcatatgagagttatgaacaagttgaaatcatcgcagaaggataaagttcgtcagtttatg

SEQ ID NO: 346068 - DNA, 75 bp, Homo sapiens
cgtcagctcccgcgggaggcccggcgagagaaggacccggtgtggacactgccagcggctgcagccgacttggaa

SEQ ID NO: 346069 - DNA, 100 bp, Homo sapiens
tgtaaactagctcgtaagtggggctataccgtgaagggcattcagaaatacaaagcaaagattgtttttgcagtggatgacagcactggagttataaact

SEQ ID NO: 346070 - DNA, 74 bp, Homo sapiens
cgagaaaccgcagcactacacatcttgagccagatgattgtgcatccatttacatctttaatgtagatccacct

SEQ ID NO: 346071 - DNA, 75 bp, Homo sapiens
gaacgaggacacgaccttcctgcccttcacgctccaggagctaggtcttgaggaccggcccagctcaggctcctg

SEQ ID NO: 346072 - DNA, 100 bp, Homo sapiens
cgggaagtgcttggggatggagtgcctccaaaggttgctgagatcctgaggaggatgaaggggctggccctggaggccgagagtgagctggagagacaag

SEQ ID NO: 346073 - DNA, 51 bp, Homo sapiens
gcagctgcctcagttcttagcgcaggaccgccgggagagcctgcccacctc

SEQ ID NO: 346074 - DNA, 100 bp, Homo sapiens
aaatcaacaccaggactacagtaaggctgaaatcattgaagtgcttggagtgcagaactgaaagaggtgacagagctgaatgaacctctctccaatgaag

SEQ ID NO: 346075 - DNA, 83 bp, Homo sapiens
caccagctacatcctggtcttagaaatacaatgcagatcttcgtgaagactctgactggtaagaccatcaccctcgaggttga

SEQ ID NO: 346076 - DNA, 87 bp, Homo sapiens
cgggttcagttcgtcatggggctgtttggaaagacccaggagaagccgcccaaagaactgagttgtctctgtgggaagtttgtcctc

SEQ ID NO: 346077 - DNA, 100 bp, Homo sapiens
ggagcccacctgctttgagaagagcaatgacattgggggcctgtggaaattttcactcattcttggaatcccagaacaggccttaagtcttctccacatg

SEQ ID NO: 346078 - DNA, 100 bp, Homo sapiens
gcagatggcggatgccctgcagtacctgcagaaggtctctggagacatcttcagcagggggaaatttgcagtggtgagaaaatgtataaagaaagattct

SEQ ID NO: 346079 - DNA, 125 bp, Homo sapiens
gcaaacctcacgcaaggcgaagaccagtactatctgcgggtcaccacgggcagcaggatgggtgtggaagcagtgatggcacttttggaggggaccccagataccccagcctgtgtagtgagcct

SEQ ID NO: 346080 - DNA, 75 bp, Homo sapiens
ccgggctcctggacttcgcctttcccgagccctggaggtggggagaaaaggacagagcgggatgccaccagcttg

SEQ ID NO: 346081 - DNA, 83 bp, Homo sapiens
ggccaattcggtggaacgaggacgcggactgcgaaggcagaacaccttccaccatgaccacctcagcaagttcccacttaaat

SEQ ID NO: 346082 - DNA, 80 bp, Homo sapiens
aatattggaagcgctttgatttacagcagctgcagggggatatgagactttctactcggaatatcctgagtgttgcgtgg

SEQ ID NO: 346083 - DNA, 100 bp, Homo sapiens
tgccttcaatggacaaatatgctgtgtttaaaggaattgcagctgacaagtcctctgaaaatactgttccacctggaggattctcaaagttggattggtg

SEQ ID NO: 346084 - DNA, 90 bp, Homo sapiens
cttcgagaagcggccgcgggcctccttccacactattcgttatacttggcatatcgaaattttatgattgacacgtatcgtctaaacccc

SEQ ID NO: 346085 - DNA, 105 bp, Homo sapiens
gaaaatgctggcgtcagcatcggaagatcattttattgacattgctgaagtggagacagattacgatgaggacctggtgcaggaagcttcatctgaagatgtcct

SEQ ID NO: 346086 - DNA, 75 bp, Homo sapiens
aatgactgtgtccagcaagttgtggaacttctacaggaacgggtatcctggtcagatataggaggactggaaagt

SEQ ID NO: 346087 - DNA, 97 bp, Homo sapiens
cagagttcaaggaggccttccagctgtttgaccgaacagttggaatcgaagcctcttaaaatggcagatgacttggacttcgagacaggagatgcag

SEQ ID NO: 346088 - DNA, 83 bp, Homo sapiens
ccgaccctggccgccccgagcggagcctggaggctggcgcccatgcggctctacacgctctccaagcgccactttgtcctcgt

SEQ ID NO: 346089 - DNA, 89 bp, Homo sapiens
agaaacagtgctgaagcctttaaatgcagcatctgcgatgtgaggaaaggcacctccaccagatctgggacatgagcgatgatgagacc

SEQ ID NO: 346090 - DNA, 90 bp, Homo sapiens
cccaagtcgtccccctctccgccccccaggaggggcgagagggagccgcagctgatgtcaggcatgttatgttacccagagaactttcca

SEQ ID NO: 346091 - DNA, 90 bp, Homo sapiens
gatggttccatcatggcgtcaatgcagtcaagctgtattagtcgacaggaccatttacatttcaggacagataggcatggacccttcaag

SEQ ID NO: 346092 - DNA, 51 bp, Homo sapiens
cccagaattcaattaaagtggctcagcgaaggcttgtcaaatctcttgaag

SEQ ID NO: 346093 - DNA, 75 bp, Homo sapiens
cctggactccctggagaagcagatggaaaagattatggattggatatgtctacttctggatgcaaattttactgt

SEQ ID NO: 346094 - DNA, 100 bp, Homo sapiens
cccgacgagcaggacttcatccaggcctacgaggaggtgcgcgagaagtacaaagggggggccctcagcctcttggccttgaacgggctgttcatcttga

SEQ ID NO: 346095 - DNA, 75 bp, Homo sapiens
ccggcgcggcgttgtcccaggcgggttgatgagcaatgtgaagagactacggccacggctcagtgctattctctt

SEQ ID NO: 346096 - DNA, 98 bp, Homo sapiens
tgctactggccctgctgggctggctgctgctggccgaagcgaagggcgacgccaagccggaggatgtcctgccacccggagctgaatcagtatatcca

SEQ ID NO: 346097 - DNA, 83 bp, Homo sapiens
atgaccactagacccacagctgttaaagcaacagacttaattcagtgcacaaatgagatgaatgtgaacatcccacagttggc

SEQ ID NO: 346098 - DNA, 100 bp, Homo sapiens
gcccgggtgtggtcgctgatgagatgtctatacctgagatccgacaatgtggtagaaggcaactgtgctgatgaattactacaaaactcccatcgcgtcg

SEQ ID NO: 346099 - DNA, 75 bp, Homo sapiens
agatcatgttcgaatatgggaagttttaaagacagaggagctgtttggggctcagctaagtgaccacacaggaga

SEQ ID NO: 346100 - DNA, 75 bp, Homo sapiens
aaaaaccgcgaagtcatggggctctgtcgggaaggcaatgaccagagtgagattggatttcttggatcaactagc

SEQ ID NO: 346101 - DNA, 100 bp, Homo sapiens
cggacttctgtgtatatgttatactgattctactctgcttttatcctttggagcctgggagactccccaaaaagcagtctctggtcccagcccaccccat

SEQ ID NO: 346102 - DNA, 80 bp, Homo sapiens
gactagtaagcctatgtcatttcatccaccacattacttaggctggctacagcaaacatcattcaagatgtccagcaaag

SEQ ID NO: 346103 - DNA, 75 bp, Homo sapiens
gagacagcggctgaaatggaagcatatgttctagaagacattcttgaggaacaagagttgaatgctcgagcccgg

SEQ ID NO: 346104 - DNA, 101 bp, Homo sapiens
cgaacatgcgcttttgacacattggaggctccagtgatcattctacatatattgtacaaacactagattttcacctgggtcataatactatggttaccaaa

SEQ ID NO: 346105 - DNA, 101 bp, Homo sapiens
gtgaatactgctacagaagtagagccaaaggatggtgagattgttggcctttcaggaagagtgcttaagcttagaccatgctcagcctccaagcagccttg

SEQ ID NO: 346106 - DNA, 101 bp, Homo sapiens
cagagctccccaggggacttctccatctctgtcagtgcaggctgtggaagaacaggtgccatttgtgccatagattatacgtggaatttactaaaagctgg

SEQ ID NO: 346107 - DNA, 75 bp, Homo sapiens
cgacaagcacatcaccactctgcagctcctccatttacaacctacaaagataaaagaaagtggaagccaaagttt

SEQ ID NO: 346108 - DNA, 75 bp, Homo sapiens
caacagttgaatcaaagtatggacacaggaaactggagcacccatcctaactgatgatgttagcctgcaggtgtt

SEQ ID NO: 346109 - DNA, 100 bp, Homo sapiens
tctacattgctgaaagtgatggatagaagctttggagaaaatgaatgaagatcacgttcagaagaatggaaggaaagctgcttcatttttgaaagatgat

SEQ ID NO: 346110 - DNA, 90 bp, Homo sapiens
gcgggatgccgttccttcgcgcgtgaggctgcggctctgacggacttcagggccacaggtgctgccaagatgctccagggcacctgctcc

SEQ ID NO: 346111 - DNA, 75 bp, Homo sapiens
tctacgtgcccacggaagatgcatcaacaacaggtggcccaggctgttgaacgtgccaaacaggtgaccatggca

SEQ ID NO: 346112 - DNA, 100 bp, Homo sapiens
gtggaagctcttcatctacaacccgaccaccggagaattcctggggcgcaccgccaagagctggggaagaaaggcgaaggttgaaaaatgcaataattat

SEQ ID NO: 346113 - DNA, 88 bp, Homo sapiens
gctgtgtcccgggagacacagtgactattactggaattgtcaaagtctcaaatgcggaagaagtatgaaaacccatggacaatcccga

SEQ ID NO: 346114 - DNA, 100 bp, Homo sapiens
atgaggtgcctcggcccgtcaccctccggaccaataccttgaaaacccgacgccgagaccttgcacagcccctggcaaccactaatctgctttctatcta

SEQ ID NO: 346115 - DNA, 134 bp, Homo sapiens
gccacgggggccgccgcagcaccatggcgaccaccgtcagcactcagcgcgggccgtaagactttgaccccgacgcaggcttcagtgattgccgcggatcagaagcctgagcactttggctcgagacaattaag

SEQ ID NO: 346116 - DNA, 78 bp, Homo sapiens
gatccatccaagacttgactgtaactggaacagaacctggtcaggctgaagaaaatcttggtatggtgatgattttta

SEQ ID NO: 346117 - DNA, 96 bp, Homo sapiens
gtggaggtggtgtccccactgagctcttggaagagagataaagactatttcctgattgtgattcagaatccaaccgaataagccactctcttggct

SEQ ID NO: 346118 - DNA, 87 bp, Homo sapiens
ggagatccacagctaagacgccgggactccctggaaacctagaaatggtctcctctgagcctccggcctccataagacccaaaacag

SEQ ID NO: 346119 - DNA, 75 bp, Homo sapiens
gcagtgattaatgcgcttttcctgaaggctcctgatgagaggaggcaggtactccaaagattcaggtttactcac

SEQ ID NO: 346120 - DNA, 100 bp, Homo sapiens
aaagtcctcgctcgtcaccagcaagcttgcgggacctcaggatatcattgtgtttgtaattggaggagccacctatgaagaggctctaacagtttataac

SEQ ID NO: 346121 - DNA, 82 bp, Homo sapiens
ccatcacagacaccgcctacaggagtatgatgcaagttcccgtgggagccatgaagctgaacgagaggagtgtagcccacta

SEQ ID NO: 346122 - DNA, 75 bp, Homo sapiens
ctttgaacatgctggtgccgctagccaagctgtcctgcctggaaacctccacagctgttgagaaaaaggagaaac

SEQ ID NO: 346123 - DNA, 89 bp, Homo sapiens
gccgatctccagcccaagatgattccagcagtggtcttgctcttactccttttggttgaacaagcagcaccgacagtaaatggttcacg

SEQ ID NO: 346124 - DNA, 74 bp, Homo sapiens
atgcactttctcaaaccaaggctgctggtagggctctacttcactgggcctgtgatcgaggacataaggaacta

SEQ ID NO: 346125 - DNA, 51 bp, Homo sapiens
gcggcaccgggaggccgggccgagcggtttcttctgggtccattcaagaga

SEQ ID NO: 346126 - DNA, 100 bp, Homo sapiens
gggtaccatggacgtgggcgaacttctgagctaccaggtccagagggagccaacctgttcatctaccacctgccccaggagtttggtgatcaggacctgc

SEQ ID NO: 346127 - DNA, 122 bp, Homo sapiens
tctttccctttaagatatgtgcaggatcaagttgcggcaccttttcagcgtactccaaagattcaggtttactcacgtcatccagcagagaatggaaagtcaaatttcctgaattgctatgt

SEQ ID NO: 346128 - DNA, 98 bp, Homo sapiens
gtgctctctggtgatccacttgatctgaaaatgtttgaggctattggatgggtgatgaatggtgctatccttcaacaagtgtttgtggtggattatgt

SEQ ID NO: 346129 - DNA, 95 bp, Homo sapiens
gatggtcaagaatcgctctataagatctgcaagttgtggacatcggatacccaaggagacgaagctgaagcaggagaaggaggggaaaattaacc

SEQ ID NO: 346130 - DNA, 101 bp, Homo sapiens
caatgatgatacatttgggtcaggtgcagttgatcagtgctgctctggcaaaggggacatgagcgatgaagatgatgagaatgaattttttgatgcacctg

SEQ ID NO: 346131 - DNA, 100 bp, Homo sapiens
ggaggatcgggacagccctgggccccaggtgccagaccccaaggtccaggaactccaggccagcatggcgcagcacagaaataactgaagtgaagtgatg

SEQ ID NO: 346132 - DNA, 75 bp, Homo sapiens
gacgcctccattgtttgaccacaacaagggccggattctcacccaggataaagtggccagtgtgtacgaagcccc

SEQ ID NO: 346133 - DNA, 88 bp, Homo sapiens
gcggatgggatccagctgttagtcgggctccactttgaggctctgatgaacattccagtgctggtgttggatgtcaatgatgattttt

SEQ ID NO: 346134 - DNA, 95 bp, Homo sapiens
cgcacattaccattaaccagtacctgcagcagatatccatctctcctcgaacaacaaattctttccacttaccagatgacccctcaatccccatc

SEQ ID NO: 346135 - DNA, 100 bp, Homo sapiens
cagatctgcttgacatttacctggaaggatgctttcgataaaggttcactttttggaggctctgtaaaactggattttaccaaatgttgcaagaactctg

SEQ ID NO: 346136 - DNA, 75 bp, Homo sapiens
ccaaggccaacagagagaagatgactcagaccctgagagccctattccagtacaaaccccagaacgtggatgagc

SEQ ID NO: 346137 - DNA, 76 bp, Homo sapiens
agactccagttatggctcaacccaaagaaggttatgatgtgattgctcaagcccaatctgggactgggaaaacggc

SEQ ID NO: 346138 - DNA, 100 bp, Homo sapiens
ggtctacaaaggtctggacactgaaaccaccgtggaagtcgcctggtgtgaactgcagtttgtacctgttcaagctaggcctggcccctcagattcaaga

SEQ ID NO: 346139 - DNA, 89 bp, Homo sapiens
ggagagtgagcgagccttcacctacagcatcgtgggcgccggctcccagtttgggtgccatcgcctgcaggattctttattcagctctg

SEQ ID NO: 346140 - DNA, 75 bp, Homo sapiens
gcggttaaccacgtctcgtccacgacctccctaggtctcaccaacggctttgggggtgcgaggagcgagcaggag

SEQ ID NO: 346141 - DNA, 51 bp, Homo sapiens
gtctgcagtgccaaatgtgtgacccagtgtgatccagctttgcttcctgag

SEQ ID NO: 346142 - DNA, 80 bp, Homo sapiens
ccttcggccagagcggcaagttcaagatccacatcccaggtttacccaaggtccagcctagcccctaggcaccatgtcgg

SEQ ID NO: 346143 - DNA, 100 bp, Homo sapiens
actgcagagtgctgaagacggggtagccacgaggcgtctactagaaaaatctcagagggtagaagccatcattgcatctatgcaggctactggtgcagag

SEQ ID NO: 346144 - DNA, 100 bp, Homo sapiens
tctgcaaagaacatggctttgccggatggtttgaaacctctgcaaagaactgtcaagtaatccacctctggctaccatccttattcctcctcatgctcgg

SEQ ID NO: 346145 - DNA, 75 bp, Homo sapiens
cgcggatgggatccagctgttagtcggatgccaaagggacaattcgggaaattgtcctgcctaagggcctggacc

SEQ ID NO: 346146 - DNA, 100 bp, Homo sapiens
aaaaaaattcatctgggcggtatctggaacttgatttccaactgataccatacagcgctcaaaatggatcagggctgttaatcgtgtggaccccagaagc

SEQ ID NO: 346147 - DNA, 102 bp, Homo sapiens
tctctaaatgcagattccagaaaaattacagcacatctcagtgaatttgcaagtgacatatctgaagagatggattaagaatgctttggattaaggattgtg

SEQ ID NO: 346148 - DNA, 75 bp, Homo sapiens
atgaggccaaaggcagttgtattggtttactcctggcttgggggcattaggaagcactggaggctcttcgggaac

SEQ ID NO: 346149 - DNA, 115 bp, Homo sapiens
ggagctgcctctacggctgaggaagcagccaagaaaaaaagacgaaagaagaagaagagcaaagggccttctgcagacaatgcagatcttcgtgaagactctgactggtaagacc

SEQ ID NO: 346150 - DNA, 100 bp, Homo sapiens
gtccagtttcccttatgggagtccttaaaagggcccagaagacacctgctttgagtttggtgtttttcctgccatcctgagtttcccacttgattacccg

SEQ ID NO: 346151 - DNA, 82 bp, Homo sapiens
ccagtactggtggaatagtctttggccaggtattagaaaactactcggatgctccaatgacaccaaaacagattctgcaggt

SEQ ID NO: 346152 - DNA, 74 bp, Homo sapiens
catcttaggctgtgctgtgaactgtgaacagaagcaagtctctgtagaaacgctggaaaagaatttgaggcaga

SEQ ID NO: 346153 - DNA, 96 bp, Homo sapiens
tggtgctgcgctactgcgagaacaagtttaacgacaagcacatcaccactctgcaggcttaagcaggtaaagcagtcactgtgaagaaaataacat

SEQ ID NO: 346154 - DNA, 100 bp, Homo sapiens
gaaaagagccacaaaggagctgctcagtacaatcacagatccttctgttattgttatggctgattggttaaaggaattgaatgatctggcacgggaccct

SEQ ID NO: 346155 - DNA, 80 bp, Homo sapiens
agcccccagcccttgccaggaaaggaccatgggctccatgttccggagcgaggaggtggccctggtccagctctttctgc

SEQ ID NO: 346156 - DNA, 90 bp, Homo sapiens
gggccatgcccggtgaccacttttggaccaaaggcctgtgtgctgcagaacccccagaccatcataaggaagaggcccagcagaagggac

SEQ ID NO: 346157 - DNA, 50 bp, Homo sapiens
ctgtctgaactggatcataaatgacaggaatctttccctgaaattaacaa

SEQ ID NO: 346158 - DNA, 75 bp, Homo sapiens
gttaaggattccaagtaactcttatttggcatcaagcatgatggaaccatgtgtgatacctgccgccagcaacca

SEQ ID NO: 346159 - DNA, 97 bp, Homo sapiens
tccagcgtgtctccagccgtgcgcccgggggctggagaaggccaggcagcagctgcaggaggagctccggcaggtcagcggccagctgttggaggag

SEQ ID NO: 346160 - DNA, 100 bp, Homo sapiens
cttttgtagagaagtgctgcaaggctgacgataaggagacctgctttgccgaggagggatataactggtgccatgaccggaatgtagtaacgattttcag

SEQ ID NO: 346161 - DNA, 100 bp, Homo sapiens
gacaaggatctgcaaattgaagtgcaggttcctaagtggtagcagagatggaacagcacggatttggagatttgagcagttagaatggaggagcatttta

SEQ ID NO: 346162 - DNA, 83 bp, Homo sapiens
tgcggatccagacagtgaaatagctacaaccagcctaagggtttctctactatgtccagtctacaggtccaactgctgccact

SEQ ID NO: 346163 - DNA, 101 bp, Homo sapiens
aacgctctgctgcccgctgtgagggaaaagtgctgggcctaaaggagataacatttatgaatggagatcaactatacttggtccaccgggttctgtatatg

SEQ ID NO: 346164 - DNA, 75 bp, Homo sapiens
tagggctactgttgattttgactatcttcttagtggccgaactacacgcagtacatccctctgtccatatatgac

SEQ ID NO: 346165 - DNA, 100 bp, Homo sapiens
gccgggcgagcatggggcgcctggcctcgaggccgctgctgctggcgctcctgtcgttggctattgacctgaaaagtggttctggaaaagtgtaccaagg

SEQ ID NO: 346166 - DNA, 76 bp, Homo sapiens
gctgcattttagacatagctggcaagagtattttcgtgccatcctggggtctccagctagtggaattcaaaacaca

SEQ ID NO: 346167 - DNA, 100 bp, Homo sapiens
aaacagagaaagataggcggccatggtccaaccttgaaggcagaatccagagaccacatttgaagtatatgttgaagtggcctatcccaggacaggtggc

SEQ ID NO: 346168 - DNA, 87 bp, Homo sapiens
gattcatatgtgtgaagaggaagagggagatcttcttcttttcttaactggtcaagagttaccagatgtatgctactcatggtgggt

SEQ ID NO: 346169 - DNA, 82 bp, Homo sapiens
attgtcccagatatagccgttggtacaaagggagtgcatccgccccaacccttttccccctcgtctcctgtgagaattcccc

SEQ ID NO: 346170 - DNA, 100 bp, Homo sapiens
ctgtgaagctaaactcaatgctgctgtgtgggaagaagatttgtaaagaaaactcttagtctgatgatttgaagaagagaagagagcctcacatctccac

SEQ ID NO: 346171 - DNA, 74 bp, Homo sapiens
ggattggctgcagcagctacattagcagggagatgtcctttgcttctcagatgtaaatgcactttaagtttgtt

SEQ ID NO: 346172 - DNA, 75 bp, Homo sapiens
ggatccagtgttcaccatcctggccccggaagcattccaaaatatgcccggtgctatccgcccagctgctcctag

SEQ ID NO: 346173 - DNA, 107 bp, Homo sapiens
gggtcaccgacctggccgagctgcccagcgagatcctcggggccccagaggccgcggacaccgacctggagatgccttcaattaagttgcagagttctgatggagag

SEQ ID NO: 346174 - DNA, 50 bp, Homo sapiens
gaaaaatctggagcagtataatggcaaactctttgattctacaatagctg

SEQ ID NO: 346175 - DNA, 82 bp, Homo sapiens
aagcagaggacagaatgaagacagggacagtggcattgctcgatcaggatctggaaatagtatattcctatttacatggtat

SEQ ID NO: 346176 - DNA, 96 bp, Homo sapiens
tcacctaacaccgcagcagcaaccgggcccggccaggttcggcgttccgtgagtgaacgctgcctactgaatcactcttctatcgtgctgttcttc

SEQ ID NO: 346177 - DNA, 98 bp, Homo sapiens
gtgatgtcaccgagatgcagaggatactcagtcaaccaacatttactgagcatctacttcgtgccgtaaaaatgcatttgcaaagggagaaaatgaag

SEQ ID NO: 346178 - DNA, 100 bp, Homo sapiens
cggcggtgggaaagcctggcccacacacgtggtctgtagcgacagcggcttggaagtgctctaccagagttgcggttcaagcactgtcttcctgttggcc

SEQ ID NO: 346179 - DNA, 49 bp, Homo sapiens
gtcaccactcgcaaacaccactggaaaatgtttcaacgtgcgcaagagt

SEQ ID NO: 346180 - DNA, 82 bp, Homo sapiens
tccagagccggactgattctctcaatttgcgtacttaaagctttcaccaaaacacccagaatcaaatactgctggaatggac

SEQ ID NO: 346181 - DNA, 98 bp, Homo sapiens
ggctgcgtggctcggttcttgtgagcgaagctttgtccggttcggcaatggacgggcgcatattaaatttcctattgactacccctattcaccaccta

SEQ ID NO: 346182 - DNA, 87 bp, Homo sapiens
gcccctccttgggcctgcggctctctacgtccctgcggagcagccgaatgaaactagtgatcgagaagatggcctccccaaaggaca

SEQ ID NO: 346183 - DNA, 99 bp, Homo sapiens
cgaagcgccgggcagctcgggaacatggccctggagcggctctgctcggtcctcaaaggttctagtaaataccgcttgctgtgttttgatgttggtggc

SEQ ID NO: 346184 - DNA, 82 bp, Homo sapiens
gcagatcatctacgacgagaaccgggttacaggaggttccagtggcatcgggaagtgcattgctatcgagtgctataaacaa

SEQ ID NO: 346185 - DNA, 74 bp, Homo sapiens
ggcggattaattagcccaagaaacattatattcatgtgtggatccggagttgtatgagttaacaacttctaagc

SEQ ID NO: 346186 - DNA, 50 bp, Homo sapiens
cctgtcggggtgacgggcccatggggcggtagagacggggtttcaccatg

SEQ ID NO: 346187 - DNA, 100 bp, Homo sapiens
ccgggatcgtgaccgtggaggatttgcttgtaaatgcatcacgaagaggcagcccagaatgaagaaagcaagcaggagtgttggctcagtgcctaaagtg

SEQ ID NO: 346188 - DNA, 50 bp, Homo sapiens
ccgggccgcgcacgccgcctcagacctgagcatgcagaattccgagggtg

SEQ ID NO: 346189 - DNA, 98 bp, Homo sapiens
tacaagtgggagaagttgttactactatacctatggaaatcctgactgctcgtcagaagaaagcagaagaactaaagagactcactgaccttgccagt

SEQ ID NO: 346190 - DNA, 83 bp, Homo sapiens
acaccttctaagagtttggcgagtcagtgactgaagcgcccgtccattccaagcattttgaaagcgaagcagaagccgtagaa

SEQ ID NO: 346191 - DNA, 83 bp, Homo sapiens
aacaagaggacaggaggtgtcgttccagcacagacgcagtcttcagcaaggaagtgctgggaacgccctggagtgaacccagg

SEQ ID NO: 346192 - DNA, 116 bp, Homo sapiens
tacagcctcctcaacgaatacggcgacgacatgtatgggccagaaaaggttatcaatactctggctgaccatcatcatcgtgggactgactttggtggaagtccttggttacatgt

SEQ ID NO: 346193 - DNA, 73 bp, Homo sapiens
atcacatatcccaactgtcagaggagcagggtgaacttctcacctgagggctgtaaagactcgtttgaaaatg

SEQ ID NO: 346194 - DNA, 98 bp, Homo sapiens
ttcgaaggcgacttcaagacgcggcccaaggtgtcccttggcggcgcgagcaggaagggcttcataaacttcacttaccaaatacttcaagggattca

SEQ ID NO: 346195 - DNA, 100 bp, Homo sapiens
tttgccccggtagttgctccaaaacctaagtacaacccatacaaacaacctggaggtgaggatgtagccatagctgtaacgtataaccatgatgggtctt

SEQ ID NO: 346196 - DNA, 82 bp, Homo sapiens
gcagaaaagaggtcacatcagcgttctgcgtcatgggggagtgctgatcaactaaaagaggaacactgtccattggcatggg

SEQ ID NO: 346197 - DNA, 100 bp, Homo sapiens
tcctcaatttaagcctgatctaacccctagaaacagtatttccaacttggggatgtttggcatcgacgaatttactgcagtgattaaccctcctcaggcc

SEQ ID NO: 346198 - DNA, 73 bp, Homo sapiens
gccgcgccgcccggcagcctcggcaggaacttgcttgctagaaaacaaagtgcaaggcttgacaaacacaatg

SEQ ID NO: 346199 - DNA, 74 bp, Homo sapiens
ccatgctattatgcatagaaagatatttgatcaagttccttgcaaagcttgctcagaccagcgatgtgaataaa

SEQ ID NO: 346200 - DNA, 100 bp, Homo sapiens
aaagcgtggcagcgcaggcgcaagcgcagagagcggaggcggtggtggtggcggccgctggccagtgcttggacttaaggatcagcaggagagagaaatc

SEQ ID NO: 346201 - DNA, 156 bp, Homo sapiens
ccgcatccgctgcgctgtagcctggaggctccgggcgcggggaagtcatgctcgcttcacggaggcaatagctagccggtactagcaaaggccagacgtcttactcaacaacttccctgccaccacctccaccatcccatccggccagccaaccac

SEQ ID NO: 346202 - DNA, 74 bp, Homo sapiens
atatttccaggggatagtggtgtggatcagttggtagaaataatcaaggaaaatcctgccttgcttcgttgggc

SEQ ID NO: 346203 - DNA, 96 bp, Homo sapiens
ataatctaaagtcatacggagatgaagaagaagagccagccttctctacattaatcatactcctccaccactgtccaagagtaaggagagagaaat

SEQ ID NO: 346204 - DNA, 82 bp, Homo sapiens
ttagataaaatgacgacgtccttctggaagaggcgaaactggagcttactccacgggaacagcctctagataatctgagttg

SEQ ID NO: 346205 - DNA, 75 bp, Homo sapiens
gacaaataaacatggagtccatcttccacgagaaaattaataaagaactcttcagaattcctggtgtttcatcat

SEQ ID NO: 346206 - DNA, 100 bp, Homo sapiens
aataccaccagcagcaccagcaacagtggcaatgagaccagtggaagcagcaccatcggggagacaagcaaattggttcgagtgagtaaaaactaccgat

SEQ ID NO: 346207 - DNA, 100 bp, Homo sapiens
gttccacgtgtacagacatctgcgccggagagaatatcagcgacaggactacatggatgccatggctgagaagaatgaatctgagctttttggacgtaca

SEQ ID NO: 346208 - DNA, 80 bp, Homo sapiens
gggttcaagcgattctcctgtctcagcctctcaagtacctggaattacaggtcaaaatgcagatcttcgtgaaaaccctt

SEQ ID NO: 346209 - DNA, 85 bp, Homo sapiens
tttgatgtcttagagaaacttggagaaggataatgagcttcagtccccaagatctgcgaagacgtttgtgggtgatttttccagg

SEQ ID NO: 346210 - DNA, 75 bp, Homo sapiens
gaagagctgcttctgtatcttaaggtgggattgttcctccagcagctcaacagcttcacagagaaaatattcaac

SEQ ID NO: 346211 - DNA, 100 bp, Homo sapiens
ctcccgcgcccctgccaagcgggcgcctatcctctccgagcaagatggcaaccccggcggcggtcaaccctccggttacagatgtagagctaaaacgact

SEQ ID NO: 346212 - DNA, 75 bp, Homo sapiens
ggaacatgtacacctcatccctgtacgggtgcctggcctcgcttctgtcccagttgctccttgagggcaggacag

SEQ ID NO: 346213 - DNA, 96 bp, Homo sapiens
agaacccgaagcacctcccggcgccgggacgcttcttctggtttgtggatgcacttagatgtttgcaatgagcactgtggctggcatgccccagtg

SEQ ID NO: 346214 - DNA, 75 bp, Homo sapiens
acctggattcaaatgcagatctcttccttactagatgggcatgcttgggtcgattgagctatccacatccaggaa

SEQ ID NO: 346215 - DNA, 100 bp, Homo sapiens
agcctgcgtacgtggatttatcgctgccacggtctgcgtagctccagaggtttaaccataggatagagaaaccagatggcagaagattttcaagtcccgg

SEQ ID NO: 346216 - DNA, 100 bp, Homo sapiens
cattaagttggagcagggagaggagctgtggataacgggaggtgaatttccatgtcaacatagtcctggtgatgttcacggaggaggatgtgaagtttta

SEQ ID NO: 346217 - DNA, 100 bp, Homo sapiens
gaggcagctgcaggagcagatccggagcctggaggaagagaaggcagctgtgactgaggcagtgcgggccctgctgagcgtcacggggttcggacgtcag

SEQ ID NO: 346218 - DNA, 51 bp, Homo sapiens
tttgttcaagtacacatttcatcagcaacgaagtaaacgaggaggttggtc

SEQ ID NO: 346219 - DNA, 83 bp, Homo sapiens
atgataaatggctctctcttgatttggagcaggttaagaaggcttttttgctctgtagcctggacgtactttgaagcccctcc

SEQ ID NO: 346220 - DNA, 50 bp, Homo sapiens
caggatatgaataatattcttctggaagaatggatcttggagaatgtctg

SEQ ID NO: 346221 - DNA, 82 bp, Homo sapiens
attcaacttcacccgtaacccaccgccatggccgaggaagggtcagggaagtcaaagatgcatccctgagttcttcctagca

SEQ ID NO: 346222 - DNA, 75 bp, Homo sapiens
agtgatcagttccagctaggaagagcaatgaattgaatgatctggcacgggaccctccagcacagtgttcagcag

SEQ ID NO: 346223 - DNA, 78 bp, Homo sapiens
gcctaagagaactatggcaacatcaggtgactgtcccagaagtgaatcgcaggccttcacctaccaccatatccagga

SEQ ID NO: 346224 - DNA, 100 bp, Homo sapiens
taccaccaggactcagaggccgccatcaaccgccagatcaacctggagctctacgcctcctacgtttacctgtccatgggtgatattcatgaggattttt

SEQ ID NO: 346225 - DNA, 74 bp, Homo sapiens
gaagttgagaatcttatattagaaaatacacaactgttggaaaccaaggttgacatgatgaacaatcggtttcg

SEQ ID NO: 346226 - DNA, 80 bp, Homo sapiens
aaaaccacgcagaagcaggagctgaagacctcagaccggcaccagctccagtgatccacaagctcagaaatacatcgcgg

SEQ ID NO: 346227 - DNA, 75 bp, Homo sapiens
agtccctggccatagctccgccgctgcccggagcagtatagcatcaagttctagaggaattgggagccattgcaa

SEQ ID NO: 346228 - DNA, 75 bp, Homo sapiens
cacaattataaaatgtcagcttttaaggtttgcaggtcgaagtaagaaggaaaccaaatattctcttaaggctgt

SEQ ID NO: 346229 - DNA, 87 bp, Homo sapiens
ggattccaagtaactcttatttgtttagcccgatggccaaaggctctcaaagatacatggtttccactggtgctgatgggacagttt

SEQ ID NO: 346230 - DNA, 75 bp, Homo sapiens
gaatcttgcacttgcactagcagcgaacgattcgctgagatctgtatctgtggacctgaatgttgatccctcgct

SEQ ID NO: 346231 - DNA, 100 bp, Homo sapiens
attggacaagcaggcaaagctgagaaaccagcctggacaccaagtctgtgtcagaaggccacctcaagaggaacatcgtggtgaagaccgtggagatgcg

SEQ ID NO: 346232 - DNA, 100 bp, Homo sapiens
tccaaccgcctcctcctcctcagtaacgcgggtccaacctaaacatgtgaaggaagctttccggttactgaataaatcaatcatccgtgtggaaacacct

SEQ ID NO: 346233 - DNA, 100 bp, Homo sapiens
cctgaggctgctcaataaactgaccaaatggaaacattcccggaccatggttctgtacagagtaatgagatgtgtgacggctgcaaaccaggtgtttttt

SEQ ID NO: 346234 - DNA, 99 bp, Homo sapiens
ggagaaagagcagctcatcgagatggggaacaggctccgtgcagagctgggccgacccgaaaacttcccaagtaagaagcggaagaggagccgctggaa

SEQ ID NO: 346235 - DNA, 74 bp, Homo sapiens
aaagaaccacagaattctggacaatcaaaacttaactcctggatacaggttgctggtgttgtcggccgtgcaga

SEQ ID NO: 346236 - DNA, 90 bp, Homo sapiens
tggtggaagaaatccaggaacaactgtgtcagcagctagcccttttcctcaaggtacttccaatgaggtagcccagtttctctccaagga

SEQ ID NO: 346237 - DNA, 90 bp, Homo sapiens
aaggcaccaggtggccccatgcttttgccgcagacatacggagcggtgacagcagtattcgctattttgagatcacggatgaatccccgt

SEQ ID NO: 346238 - DNA, 50 bp, Homo sapiens
tgggaactctttccagcttgtgtctggtagttgtgtcaactaacatagca

SEQ ID NO: 346239 - DNA, 75 bp, Homo sapiens
tattcgagtgaccgagaccgcggccgggaccgagggccacgtgctgtacgccgacatcaagatggagaatgggaa

SEQ ID NO: 346240 - DNA, 101 bp, Homo sapiens
ggcgggatagccctggtcctttctccaaccattaaaaatctcaagtgacgactttgggaaactctggttatccttcgcaaatgatgtgaaacaaaatgtaa

SEQ ID NO: 346241 - DNA, 100 bp, Homo sapiens
gaggaaacttgatgcttctgggccaccatttgccagggcctcgctcgaggtcagtttaggggctggtgcaaaggatgagttgcacattgttgaagcagag

SEQ ID NO: 346242 - DNA, 75 bp, Homo sapiens
cgctagtctgaccctccgccaggcaaaaggaagtctccagcttgtacctcatatcagatgactccgcaagggcac

SEQ ID NO: 346243 - DNA, 100 bp, Homo sapiens
agaataaggagaaggataagtcgaaggggaaggcgcctgaagaggacgaaggtactgctataaccagaatttggtagaaaaaggatttacttgttggggc

SEQ ID NO: 346244 - DNA, 83 bp, Homo sapiens
ccagcagatggcggatgccctgcagtacctgcagaaggtctctggagacatcttcagcaggaaggcaacagcccccaggggag

SEQ ID NO: 346245 - DNA, 100 bp, Homo sapiens
agagttcaaggaggccttccagctgtttgaccgaacagaaggggaaactgaggcccaaggaaattgagtatctctgcaaagtcaccagctgagttcgaac

SEQ ID NO: 346246 - DNA, 75 bp, Homo sapiens
ggaaaccggtagcgcttgcagcatgggcaaagagattgaaagaggggagtcacataatcagcatacgtttatgaa

SEQ ID NO: 346247 - DNA, 100 bp, Homo sapiens
ggaaattaaccggagaatggcagacgacaataagctcttcagggaggaattcaacccccctctgcagctcttcatgggggtccactcaagtcagaagcca

SEQ ID NO: 346248 - DNA, 75 bp, Homo sapiens
ccggatcaatccagatggcagccagtcagtggtggagttgtgtaaaaaacagtttcagtacagtgcctctttgcg

SEQ ID NO: 346249 - DNA, 82 bp, Homo sapiens
ggtaacccgatcgcctcccccaggtacaaggaaatggtagaactagtgatctcacccagcctcactgtaaacagcgattgtc

SEQ ID NO: 346250 - DNA, 51 bp, Homo sapiens
tccgggtctgtgccagcgacactgtcgagttatagcagtgctggattggga

SEQ ID NO: 346251 - DNA, 99 bp, Homo sapiens
aaaaagttctgaaaacatgttggagggccgcaagaacgagatgctgctgtccaaggtgaaagcgaaggcctcctgaacatccccagccgtggctgtatg

SEQ ID NO: 346252 - DNA, 75 bp, Homo sapiens
cacgttccatccggcgctcagctgggcttgagtctgaaccaatcagagtccttgtgactggagcagctggtcaaa

SEQ ID NO: 346253 - DNA, 119 bp, Homo sapiens
gctctgagggagggtccgagccagccgctgttttgccggaggagcccctcaggccaaggcctttgagccctacttagagattttggaagtatactccacaaaagccaagaattatgtaa

SEQ ID NO: 346254 - DNA, 50 bp, Homo sapiens
gttccatgatgggaagtgacatgatgtttcagaaagaacaagtggatcct

SEQ ID NO: 346255 - DNA, 98 bp, Homo sapiens
gtgactgagcggagcccggtgacaggatgacctgcaggctgggacaatgaaaagaaaatagctattttacatgaaaattttacaaccgtgaagccgga

SEQ ID NO: 346256 - DNA, 100 bp, Homo sapiens
tgcccagagtccgcggccggggcgcgggaggaggaattttgttgtcagagaataaaaggaggttgtccataattgactttaagcagcaatcagtaaaaca

SEQ ID NO: 346257 - DNA, 97 bp, Homo sapiens
cgcggaccgcggcagcccagagcagcttccagaggagattggaaaacttgaagataaagtggaatgtgctaataatgccctgaaagcagattgggag

SEQ ID NO: 346258 - DNA, 99 bp, Homo sapiens
caaagaaccacagaattctggacaatcaaaacttaactcctggatacagagaaaattcctgttccaagagaaaataaggcaacatcaatgaaggagaga

SEQ ID NO: 346259 - DNA, 95 bp, Homo sapiens
catgtcctgaaagtagacttaggctgcacatcggaggaaaactcgcttgaaattttgacaaacttggcaaatgaagccaacatatcaactcttct

SEQ ID NO: 346260 - DNA, 100 bp, Homo sapiens
ctgtgatccaggattatccactgatttatgaaattattttttgggaaaacacttcaaatgctgaggaactctgtgaatctcttgaagaagattacaaaga

SEQ ID NO: 346261 - DNA, 100 bp, Homo sapiens
ctcctccaggcgctgcccagccccttgtcagccagggctgaacccccgcagggaggagctttatctttatatactgcccttaccacacagcagaaactgg

SEQ ID NO: 346262 - DNA, 126 bp, Homo sapiens
ttccttcctccccacccattcctttaaatccggagggggaaaaaatcccaaggtctgcaaaggtgaaaggtgtagcagtcactcggcctacacccacagcatcgaccttgtgaacccagcgacctg

SEQ ID NO: 346263 - DNA, 100 bp, Homo sapiens
agacaggtgctctcggttgcacaataaaccgacgtttagccagaattaaacaaccaccatgtcgagcaaaaaggcaaagaccaagaccaccaagaagcgc

SEQ ID NO: 346264 - DNA, 100 bp, Homo sapiens
ctaatgagatgtggcgatcaggggatagtgaagtttaccaactggtatctggagtccatctttcaccatcttctcctgagattgtactggaccgtgacca

SEQ ID NO: 346265 - DNA, 100 bp, Homo sapiens
cgctcgacccgtccttcactcacgccatgcagctgctgacggcagtcaagctacaacttcaagcagaagagagaggagttgtgtctatcaaaggagtgtg

SEQ ID NO: 346266 - DNA, 100 bp, Homo sapiens
tcacgctcattggccggaggaagctcaccttcgacgaggaagcttataaaaatgtggttgaagctgtctccaagcccttcttcccgtgtgacagtatccc

SEQ ID NO: 346267 - DNA, 100 bp, Homo sapiens
agttcccatcgtcactcaagccccaggagctcagcctcttcagatccaaccaggtctgcttgcccagatggcccctgagttctgcagcctcgaggaaggc

SEQ ID NO: 346268 - DNA, 75 bp, Homo sapiens
gactgcgctggaacaatggataacttcttcaccgagatgatgatgtgcctgcagatatggttgcagaagaatcag

SEQ ID NO: 346269 - DNA, 74 bp, Homo sapiens
ggagacactgcgaaagcaaaccgaggaggtactacaaacctggcttgctgatgatgtgcttcatcctgcccacg

SEQ ID NO: 346270 - DNA, 106 bp, Homo sapiens
gagctgaaggaattctttgccaaggcacgggctggctctgtgcggctcatcaaggttgtgattgaggacggtggcccacaaactctttaacaacttgaaataaatg

SEQ ID NO: 346271 - DNA, 98 bp, Homo sapiens
aaagtaaatgggaaaatccaaagtacctatgaccaagaccacacagtgccaatgttttcagttgcaccaagcttagccaccaatgcatcagcagccgc

SEQ ID NO: 346272 - DNA, 112 bp, Homo sapiens
aacctagtgggtgtaatacatcatgaactgcaggagacaaagcatggaggacacaagaatgggaggaaaggcggactctcaggaacttcattcttcacgtggtttatggtga

SEQ ID NO: 346273 - DNA, 50 bp, Homo sapiens
gaatatcaattatctgactctaccaaataatgtttgagacggaggcagat

SEQ ID NO: 346274 - DNA, 76 bp, Homo sapiens
gacaactttctggcttttgaaaggctccttcttcagcatttgacattgtgcagcaaagaaatggttatggagaagc

SEQ ID NO: 346275 - DNA, 83 bp, Homo sapiens
gagaaagctcttgaagcagtatttggcaaatatggacgaatagtggaaggcatcacgttgggtggtttccatttagaccgagg

SEQ ID NO: 346276 - DNA, 100 bp, Homo sapiens
ctgtggatcatcatcctagccatcctgtttggcctcctgctcctaggtctactcatctacatcctctacaaggcagacctgttatcctaaactaggtgag

SEQ ID NO: 346277 - DNA, 90 bp, Homo sapiens
gaaaatttgaagaaggatcttgtgaggaggatcaaaatgttggagtatgctcttaaacaggaaagtaatgcgtcagaatgtgaagcgagc

SEQ ID NO: 346278 - DNA, 110 bp, Homo sapiens
atgccgtgggccgcagccactcaggactgtcaaagatttgtcttcagcgaagcggaagtttgcagattccttaaatgaatttaaatttcagtgcataggagatgcagaaa

SEQ ID NO: 346279 - DNA, 95 bp, Homo sapiens
tctcagccttctgagtagctgggacaacaggcgagaaccactgtctctgatcaacgtgcggaagaggaacgtggaatctggggaagaagagctgg

SEQ ID NO: 346280 - DNA, 100 bp, Homo sapiens
gccgctcagccaccggggcctgccgcgcctgtcctggatcgacaccctctacagcagacaggctgcgggaggagctgcaggactgaggtacagaggccag

SEQ ID NO: 346281 - DNA, 96 bp, Homo sapiens
tcatgtcttgagaattcttcccgacccaccagtactatatgggttagcatgctggcaagaggaggacagttcaattttgtggggaaattgcttgga

SEQ ID NO: 346282 - DNA, 82 bp, Homo sapiens
ccgcctccgcctcccaggatgagctgacctagtgtgttaattgtaacctacaaggagcctgcaaaatcatctactcagtttg

SEQ ID NO: 346283 - DNA, 100 bp, Homo sapiens
agaaatcccagccagacttgcccatctccaagattgatcagtggctggaacaatacacccaggccatcgagctggttgtcttcttgcctgccctgtgtcg

SEQ ID NO: 346284 - DNA, 100 bp, Homo sapiens
tggcggcggcattagcgaggaggaggcggcacagtatgaccggcagatccgcctgtggggactggaggcccagaaacgatgccatggacaatattaccag

SEQ ID NO: 346285 - DNA, 82 bp, Homo sapiens
gaaaaactggagagcttcatcaaaaatagtgatagctttgataagtgatgatgaacagtctacacagatggctgcaagttgg

SEQ ID NO: 346286 - DNA, 75 bp, Homo sapiens
cgactgccgctgtgtgagccgaatcagaactctctttatctctcctacagaaaaggcgacggcggattgacagaa

SEQ ID NO: 346287 - DNA, 89 bp, Homo sapiens
gcaatgcaagagtcgctttgttacacctttcaagtgtctcgctgctgtgacttactcgaagcctcgattggccacattttggtactacg

SEQ ID NO: 346288 - DNA, 95 bp, Homo sapiens
atacccaataaccaggtgcttggcaaaatcgagcgggccattggtgctgtccttattcccagcccagtcaagagctaccggggctggctagtcat

SEQ ID NO: 346289 - DNA, 75 bp, Homo sapiens
cctgatccccaagattgaagatggaaatgattttggggtagcaatccaggagagactcttgcttctcgagttgca

SEQ ID NO: 346290 - DNA, 96 bp, Homo sapiens
gccgccgagtcgcgcggaggcggaggcttgggaacgtgctggccaaagcgctctatgacaatgtggccgagtccccggatgagctctccttccgca

SEQ ID NO: 346291 - DNA, 95 bp, Homo sapiens
acctcttaggcgccgggaccctcaggctcagatcagtggccgaggccccagagatgccaaagacctggatcagctgggccgaaataagatcacac

SEQ ID NO: 346292 - DNA, 82 bp, Homo sapiens
catggtcatgagctttgtgaacctggtcagagcaccataacatggtgtgggaagtgaagacaaatcagatgcctaatgcagt

SEQ ID NO: 346293 - DNA, 100 bp, Homo sapiens
tcctaagactccacttcctccagaattagctgatgttcaggcataaggttgtttacagattatctcaactttggtctcctgggaccactcgttgctgaca

SEQ ID NO: 346294 - DNA, 83 bp, Homo sapiens
ctgaccctgggagacatcgacggttttaaaatcaaagatgggaaaatcggagaaaattgcccttccccatggccagcttgttc

SEQ ID NO: 346295 - DNA, 100 bp, Homo sapiens
ctgcccggtgcccgaggaggcagccaagctcgtagcctgccactccgtgcgtgctcaaaaatgtgataactttgctgaaaaaagacccctccttggtgtt

SEQ ID NO: 346296 - DNA, 74 bp, Homo sapiens
aacaatttgagttggatatggaagaggccattcaaaaggttatacattggctcttcaaagacgttcacctcatc

SEQ ID NO: 346297 - DNA, 75 bp, Homo sapiens
gcctggagaggacatggggaagataatcagacagctaaatggagtctgagcagctgttccatagaggctactata

SEQ ID NO: 346298 - DNA, 100 bp, Homo sapiens
ggcccgaaaagtacctggggtgaccgccattgagttgggtgaagagacctgcactttccgcatctatggggaggaggtagaagaggatgatccagtgcct

SEQ ID NO: 346299 - DNA, 96 bp, Homo sapiens
gatcgattcagcccgaggagaaggagcgcattggccagttcgtctttgcccgggacgctaaggcagccatggtttgggccccatggtatccctgtg

SEQ ID NO: 346300 - DNA, 99 bp, Homo sapiens
tacattttatgaaacattaccagtggcaattaatggaaatggacccaccaaggtacatcaggaacgtctctatcaagaatacaatttcagcaaggctga

SEQ ID NO: 346301 - DNA, 90 bp, Homo sapiens
tgacgaaattgaaattacctccgagggaaacaagaaaacatcaaagaggtctagcaaagatgaggtttcgcataagctcttggagatgta

SEQ ID NO: 346302 - DNA, 95 bp, Homo sapiens
gtgacccaccaccccctctctgaccatgaggccactgagaatgcaaaggaggaagtgaggcgaattctggggctgctggatgcttacttgaagac

SEQ ID NO: 346303 - DNA, 75 bp, Homo sapiens
gaccgagcacccgcctccgggcatcttcaactgtctaggcgttttacactgagattctccactgccaccctttct

SEQ ID NO: 346304 - DNA, 100 bp, Homo sapiens
ggtgagcgggagctgaggctgaggagaggggagcttggggggcgcctgctgccaagggtccgtggcactcaggtagttggttctgacatgactgtgacag

SEQ ID NO: 346305 - DNA, 51 bp, Homo sapiens
ggtggcctttcagccctccatacttactggcatttgcaagtaaaatcactg

SEQ ID NO: 346306 - DNA, 74 bp, Homo sapiens
cctgaagggagtgacggcggttgggtgcccgcggccacttttgccttcccggaggcaaatttctggagatgtgc

SEQ ID NO: 346307 - DNA, 100 bp, Homo sapiens
agatgatgccatccagctggtagccaggaagtgagtgatggattggaactgagaccgaaatataatggaattttacattgcttgactaccatttggaaac

SEQ ID NO: 346308 - DNA, 82 bp, Homo sapiens
catcgatctcctgggaggtcgcaacattccaatcacaggccctctccggaccagacactattttagaggctgaggatacatc

SEQ ID NO: 346309 - DNA, 102 bp, Homo sapiens
ggcgccctttcttggcccttgttcccccaaatgtctgactctgactctcggactgagaaacgcaagacatctgaatgggactccgagtgccttacatccctg

SEQ ID NO: 346310 - DNA, 88 bp, Homo sapiens
aaactgaggcatggaaatgttaaagtgctttagcctggattgcacagcagcaatcatttggggaagaatctacagttgctgatggaca

SEQ ID NO: 346311 - DNA, 73 bp, Homo sapiens
gccggtgccggcctagcgtcctggaattacttcaatcaaattgtccgtgtggagcccttggtgaccatgggcc

SEQ ID NO: 346312 - DNA, 101 bp, Homo sapiens
ctccatctcttcatcaccccaaaaggacctgactcaggcaaaggagcagttcattgagctgtgcaagacgctttacaacatgttcagtgaagaccccatgg

SEQ ID NO: 346313 - DNA, 82 bp, Homo sapiens
cccagctccacgactcattgtcttggtgtggccgacgacgatgccctcgctgaggagcgcatgcggagaggccagaacgccc

SEQ ID NO: 346314 - DNA, 100 bp, Homo sapiens
tatccaccgtgttgcagatatatctgggcctggaattgtctcgccatttaaacgagtattcctaaaaggtgaaaagagtagagataagaaagcccatgag

SEQ ID NO: 346315 - DNA, 75 bp, Homo sapiens
ggaaaatttcaggctgaaggtttagcgggtgccgattgtgcttcaagaagaccatagggaagaacgcattttcat

SEQ ID NO: 346316 - DNA, 90 bp, Homo sapiens
tgctattcctggtctacatcctgcgggtgcctttgaaaatcaacgacaacttgagcacagtttctgatgaagaattgaaaagaagagtag

SEQ ID NO: 346317 - DNA, 98 bp, Homo sapiens
gggggccacaaatgctccttctcctggagacgcaactcaagccgactccacgggaacccactccctctacacgatgtaccaggactacgagatcatgt

SEQ ID NO: 346318 - DNA, 96 bp, Homo sapiens
cgacgggaaatcctatcaagtgccaatgctggcccagctctccgtgttccggtgtgtgccaggtggagctcaacaggaaagtcctagcggatctgg

SEQ ID NO: 346319 - DNA, 75 bp, Homo sapiens
tgggagccgcaccacctaacgctggccgacaacagcctggcgtccgccacggagctgacatggacccaaatcctc

SEQ ID NO: 346320 - DNA, 89 bp, Homo sapiens
tggatgagcaatcacaaggaatgcaagggccacctgttcctcagttccaaccacagacatttgtcttcaccgacagcccagacaaaggc

SEQ ID NO: 346321 - DNA, 86 bp, Homo sapiens
cagaaggtggcgatgttggtccaagggaactgggtggtgaagagtggttcctctggagattaaatgtacttcacagaacctcagcg

SEQ ID NO: 346322 - DNA, 100 bp, Homo sapiens
ctgcaaacctggagccagaaacattaccgtcatattccacccattactaaggcttctctacagtttagcctttaatgccaggtttctgagacatctttgg

SEQ ID NO: 346323 - DNA, 50 bp, Homo sapiens
ctttagcttatttttgtcaagctggatgagtagtatgtcagcactctttc

SEQ ID NO: 346324 - DNA, 100 bp, Homo sapiens
cctcaaaaatcctctgccggaagcagaagctgggaaaattgaggagagtcctttcagtgtcgaggttcgagaacttgtcttggacaattgcaaatcaaat

SEQ ID NO: 346325 - DNA, 100 bp, Homo sapiens
atggagccaggtgacgaggacctagactgtgacaacgaccacgtctccaaaatgagtcgcatcttcaacccccatctggtcagtttgaaaaggaggatcg

SEQ ID NO: 346326 - DNA, 97 bp, Homo sapiens
gaggaggcgggtgcgccgggcgacctgcactgcatcctcatttcggaggaggaagccaagaatctggtgagcgaagccatcgcagctggcatcttca

SEQ ID NO: 346327 - DNA, 100 bp, Homo sapiens
aattactcggaggcagcaaaggtggctgctaatgcaccaaagatcgaagatttatcccagcaagcacaactagcagctgctgagaaattcaaagttcaag

SEQ ID NO: 346328 - DNA, 75 bp, Homo sapiens
gcccctgccagagaggctggaggttatcaatactctggctgaccatcatcatcgtgggactgactttggtggaag

SEQ ID NO: 346329 - DNA, 148 bp, Homo sapiens
tgcaccttcagaaacagtgctgaagcctttaaatgcagcatctgcgatgtgaggaaaggcacctccaccagtgtaaacaggaacatcgataagtagtgtaaaaacttgcacaatgaaatccgaagccaaggatggagaggaggagagt

SEQ ID NO: 346330 - DNA, 97 bp, Homo sapiens
gggttatcagtgtaaactcctctgagagatatcaggaaaagcaggaagaagcctctgggacccttcgggaggttcatcatgcctagtggcgtataag

SEQ ID NO: 346331 - DNA, 100 bp, Homo sapiens
cgacgagctggactcgctcttctcctacttcgacgcaggggccgcaggggctggccctcgcagaagtcctggctgagcaaggttggaagccctagttctc

SEQ ID NO: 346332 - DNA, 101 bp, Homo sapiens
cgcgatgcgtcaagtacactgaaattcatcctgagatgagacattccacttcttccatctattacatctctgagtctaaatgaaaatgaagagaagaccgg

SEQ ID NO: 346333 - DNA, 101 bp, Homo sapiens
tttaaggataggtggacaagttcatgctgtccaggctttagtgcagcttttagagctctttgacagtgaagatcctcgggagagagattttcttaaaacca

SEQ ID NO: 346334 - DNA, 75 bp, Homo sapiens
tcgatagagacgttttccggagggattccatcataggttctgcggggagtgtctccagccctgcctgcaggtgcc

SEQ ID NO: 346335 - DNA, 100 bp, Homo sapiens
attttcttcctgcccctcgttgatgagagcattcgaagtgacctcagcagggcatccaggtctcagcatcagaggagcccaggaggaggaccctcccgat

SEQ ID NO: 346336 - DNA, 49 bp, Homo sapiens
tagacatcttctccctcccttgcctcagctgcgccttcctgcactgaag

SEQ ID NO: 346337 - DNA, 98 bp, Homo sapiens
ccggtgcaactattcgcagtccgagcgccaagaaaaccatgtgggaaaggctgacagcccctgaagatgtatttagcaaattacagcgagaaaacata

SEQ ID NO: 346338 - DNA, 101 bp, Homo sapiens
ctctcttggctcctgtcccgctggccctctgtctgcctgtgtccctgaccatggctccctgcagtaccctttaacgggccatcgatgcacccctcggagct

SEQ ID NO: 346339 - DNA, 100 bp, Homo sapiens
aaagtcccatggttagaaaatatgcatttcatatgatattggcaggccatcgatttagtaaagcagggcagatccaggatgagaagactgataaaagaag

SEQ ID NO: 346340 - DNA, 98 bp, Homo sapiens
gaacacttgaaacatgatgaaagagccacagagttggcagaactgtttgaaaatgctctgagcgggctttggacaccatgaactttgatgtgattaag

SEQ ID NO: 346341 - DNA, 101 bp, Homo sapiens
gacagccattaccatcctggttccagtgagtctgccaaaaaagaggtggttgctgaagtggtaaaagccccgcaggtagttgccgaagcagcaaaaactgc

SEQ ID NO: 346342 - DNA, 100 bp, Homo sapiens
attctgcctaagccaactcgaaaaagccgtacaaaaaataagcaaaagcgtcccaggaggtagttctcactggaattggtgcagatgagcaacttgcagg

SEQ ID NO: 346343 - DNA, 83 bp, Homo sapiens
gctgcccgcgcgcatctggctgcagctctgcggggcgcaggaggcggtgcacagcgccaagttacagaatgtctgaaggggac

SEQ ID NO: 346344 - DNA, 96 bp, Homo sapiens
gtttaacatggtcagggaggtgaagatcgattctcagggcaagcatgagattgcagcggagcacagtgacaggtgcggtcttgctctgttgcctag

SEQ ID NO: 346345 - DNA, 75 bp, Homo sapiens
cgcacctcgtcaccaaggccaagggaagtggcactaaggtccaaaggaagctacatatgggtggtccctgctaca

SEQ ID NO: 346346 - DNA, 99 bp, Homo sapiens
ctgtgcggctgcccggcccccgccgcgggctcttgtcaggatggtgaagctgttcatcggaaacctgccccgggaggctacagagcaggagattcgctc

SEQ ID NO: 346347 - DNA, 49 bp, Homo sapiens
atggcacctatggacaagtctataagtttgctaatccagactttacaca

SEQ ID NO: 346348 - DNA, 100 bp, Homo sapiens
gaaccagtccttcaatgccttagtcaactacaccaacaggaatgcggcttcccccacatcagtcagtaccagtactggaacaccaaggctcggcgcaacg

SEQ ID NO: 346349 - DNA, 82 bp, Homo sapiens
gcctgcagcccgcactccttgaggatcggtcagcccaaggccaaccccactgtcactctgttcccgccctcctctgaggagc

SEQ ID NO: 346350 - DNA, 100 bp, Homo sapiens
cgggggtgctgcagaggacacgaggcggcgggctggagacatggaccgcggcgagcaaggaacaagatcactcaaggtgaaggataatctactaatacca

SEQ ID NO: 346351 - DNA, 110 bp, Homo sapiens
gtgctttccccagtcctgggtggagcttgtcggcaggatctcaaagatttcatgagacaagctggggaagtaacgtttgcggatgcacaccgacctaaattaaatgaagg

SEQ ID NO: 346352 - DNA, 82 bp, Homo sapiens
ctttgagtctagcaagtgttattatttctgccctttgtacccttacaagctgctctcccatgggtgatggtgatccagaggc

SEQ ID NO: 346353 - DNA, 89 bp, Homo sapiens
tgatgtttaagaacatgacgccgtcacccttcctgcgattctacttagctgccaatttgtggtgtctgaagaccaagactacacagctc

SEQ ID NO: 346354 - DNA, 98 bp, Homo sapiens
gggagtggtctctgaggcggcggcggcggcggggatcgtctccggcaattcacggcccttccacagtaccttccacaataccagtgctaatctgactg

SEQ ID NO: 346355 - DNA, 75 bp, Homo sapiens
catgacggtcggctccttcgtgtgtacctcctgctccggcagcctgctatttttatgattcccacaaatccacca

SEQ ID NO: 346356 - DNA, 75 bp, Homo sapiens
agcagaaacacaagaccttcgtggaaaaatacgagaaacagatcaagcactttgaaatctctgcccctgttagaa

SEQ ID NO: 346357 - DNA, 100 bp, Homo sapiens
gccgcgggagccgcacgcggcgatatggaagaggagggcaagaagggcaagaaggctgtgatgcgccgctggctgcctgccggagacgccttgttgcaga

SEQ ID NO: 346358 - DNA, 100 bp, Homo sapiens
tgtgtatacggcatctattccagctttactgtgcaacttggatcccaccaaatattttggttgtgagctgggagcacagacccagtttgatgttaagaat

SEQ ID NO: 346359 - DNA, 100 bp, Homo sapiens
aagtcgctttgtggtggcagcagcttagaatcagtatttgtggttgggaaagatggacttacgggagcttgggggcagctggcattttatgctatgtggg

SEQ ID NO: 346360 - DNA, 100 bp, Homo sapiens
tccgggtaaatggctgggctaccctattcctccgaaccagcatccccaccatcaacatggagaacaagaccacgtggagagtggttagatacattctcaa

SEQ ID NO: 346361 - DNA, 100 bp, Homo sapiens
cagacaccctccgaagaggtggccctgcctgcgctcctcctggctgcagagtaccccaccagcgcaactgtcagaccttcagcagcctcagctgcctgag

SEQ ID NO: 346362 - DNA, 75 bp, Homo sapiens
tccggggcttgccctggtcttgctcggccgatgaagtgcagaggtttttttctgtcagggactatgcggcgcaaa

SEQ ID NO: 346363 - DNA, 75 bp, Homo sapiens
ccaatctttatataaatgtgaagctgaaggctgctgaagagagacgagttgtactgctgtcacaggaaatggacg

SEQ ID NO: 346364 - DNA, 108 bp, Homo sapiens
cagaccctggagcctcagttggaagcagccgatccagcctgcggagcctgtggggcaggtcaaaatgcagatcttcgtgaaaacccttaccggcaagaccatcaccct

SEQ ID NO: 346365 - DNA, 98 bp, Homo sapiens
gtggctgcacggccctcattgtgatttgccttttggggaagctgtatgttgcaaatgctggggatagcaggaagctgaatatggtgggcatgatcaga

SEQ ID NO: 346366 - DNA, 82 bp, Homo sapiens
ttgacgccatgtcgggttattcgagtgaccgagaccgcggccgggaccgagggtgagtgttgtgcaagattctgtcaacatt

SEQ ID NO: 346367 - DNA, 98 bp, Homo sapiens
tcggcatctgcccctgccatgaccactgtggagaacaaatccaagattagcacagaacctcaagaaggcatgaagccagcccctgcagtgccgtccac

SEQ ID NO: 346368 - DNA, 90 bp, Homo sapiens
ctcgacctgctaacagaactggaccttttcggtactaggttttgacaagcttgcatcatgcgtgagtataagctagtcgttcttggctca

SEQ ID NO: 346369 - DNA, 80 bp, Homo sapiens
ttaactatggtagcccacccagcattgtctgcgggccaggcatcgacatccgcaacgactatcagcagctgaagcgcctg

SEQ ID NO: 346370 - DNA, 83 bp, Homo sapiens
cttttatattcatctcaaaaacaaaattctgaactcaggacttggcaaatgcctgaaaacttcatgcctcctgttcccatcac

SEQ ID NO: 346371 - DNA, 74 bp, Homo sapiens
aggcctgacagctctgcggctcgggccctgaggggggacacagcgattgccacgcgccattggaatgtccctgg

SEQ ID NO: 346372 - DNA, 100 bp, Homo sapiens
agtccccactacgtccattccacgagatggtgatggaatttcctgataatgtgttaaatctcgatggacatcagaataatggtgcacagctaaagcagtt

SEQ ID NO: 346373 - DNA, 100 bp, Homo sapiens
gaggaggtggcaggcctcggcggaaacaatgtgatgagaaccattcatggggtgggagagatgatgacccagatggtactcagtagaggctccatcttcc

SEQ ID NO: 346374 - DNA, 50 bp, Homo sapiens
ggtgaaggaagactgcaaagtccaagacaatgcaaactccagtgaacatt

SEQ ID NO: 346375 - DNA, 75 bp, Homo sapiens
ccttcccagtagctgggaccacaggctaaactgtgaaaatgcagtcctcaaagagaatttgaaagtgaaaacaga

SEQ ID NO: 346376 - DNA, 83 bp, Homo sapiens
tgttgccacactcctcatggatgtcatgtcctacttcaatggatgctgtgtgctgtggacccacctggggttcatggagtggg

SEQ ID NO: 346377 - DNA, 110 bp, Homo sapiens
ggcctgggcaggtgtcttcctcgagaggcaggcaggggatcccggacgagcagatgtctcaagtattagatgccatgtttgaaaaattggtcaaagatggggagcatgta

SEQ ID NO: 346378 - DNA, 100 bp, Homo sapiens
cacccagctggtgctcagcgccctgccccacgcgctcctcgccgtgctcagtgcctgttacttgggcaccccgagagatcccatttcattctgaaggccg

SEQ ID NO: 346379 - DNA, 100 bp, Homo sapiens
ggcagggacccgctaagctgatctcctgtacagtagtgctacttaaaatatgctggggaccatcaccatcacagagaccaagaagcgggacgttcaccat

SEQ ID NO: 346380 - DNA, 98 bp, Homo sapiens
ccggcattccaaccaggctcacggatgccaagcccagagcctgaccacctgcgaggtctgcggtgcctgctttgagacccgaaagggcctgtccagcc

SEQ ID NO: 346381 - DNA, 75 bp, Homo sapiens
attttgagcaatggggaacgctcacggactgtgtggctgtggaaaatctctgttctcacaaagtctccccaatgc

SEQ ID NO: 346382 - DNA, 98 bp, Homo sapiens
gaagctctttaccctgtacctcagcatgaactgcagcaaggacaaaaacctgatttctcctctggtgcaagtgtggtagctattgacaacaaaatcga

SEQ ID NO: 346383 - DNA, 98 bp, Homo sapiens
ggacacccgcgaggccggaaaatgggagggcaatgagccaggggagaccactcagatcacataccatcagcttctggtccaagtgtgtcagttcagca

SEQ ID NO: 346384 - DNA, 100 bp, Homo sapiens
gctttgacctgctcacaccccatcgctgcttcagtactatactggcaattgctggagaagattttgcaattgttgcttctgatactcgattgagtgaagg

SEQ ID NO: 346385 - DNA, 100 bp, Homo sapiens
ctttcagcgaggcagtctgttctggttcacagtcatcaccctcagctttggctactacacattttcggctttgtgagaaaccttaccatcaaacacgatg

SEQ ID NO: 346386 - DNA, 85 bp, Homo sapiens
gtgaagtgctccgtcgcccttgcctccagaatctccgccacctccctactctcggctgtctcctcgcgacgagtacaagccactg

SEQ ID NO: 346387 - DNA, 100 bp, Homo sapiens
gtgtggacatcaggaccatgtcaagtagagatttgctcaatgcattgaagtcagtcattaatgaccctatgccgggattatgaaaagaataaagtctgca

SEQ ID NO: 346388 - DNA, 97 bp, Homo sapiens
aatgagaaccctacttgcctaaatgaggaatgtctttcctaccatctaaaatacgaaggtttctggctgggatgaaactgattccaagacagcctcc

SEQ ID NO: 346389 - DNA, 80 bp, Homo sapiens
cttcaacaagaggacccaggagaaattcgccctcaaacatacagtgaagttgttctctgaagttcctcatctgccttaag

SEQ ID NO: 346390 - DNA, 51 bp, Homo sapiens
ctcctgagtagctgggatttcaggtgtgaaatctaagaatcccctgccaac

SEQ ID NO: 346391 - DNA, 97 bp, Homo sapiens
tggttctggaatcctcagttcaagggaatgtttaattcagccttggaagtggccaaatttgaaggtgctgtgattcgaactgtcagtgggataaggg

SEQ ID NO: 346392 - DNA, 75 bp, Homo sapiens
cagaacactgctgggagtcctaaaacctgcgacaggaagaaattccatcttctaaaccaaaactcattgctcagc

SEQ ID NO: 346393 - DNA, 75 bp, Homo sapiens
taaaaacaagactggggctgctcccatcattgatgtggtgcgatcgaatgcctctctgtatggaacataaaattt

SEQ ID NO: 346394 - DNA, 88 bp, Homo sapiens
gagggccccgagcccgagcgccccagcccggatgagcagcaccagcagtaagagggctccgaccacggcaacccagaggctgaagcag

SEQ ID NO: 346395 - DNA, 75 bp, Homo sapiens
aagaaataatggcaaataacttttccttggagagtcataacatatcactgactgatgcagtggcagaacgtggag

SEQ ID NO: 346396 - DNA, 130 bp, Homo sapiens
gaaagcaagaatatctgttcctgcaactgcactgattctagaaacactctctattcgaactctcatgagggctggtgaattaccatatctccgtcaagtgcagtaaccagttcaagttggaagtgtgtct

SEQ ID NO: 346397 - DNA, 100 bp, Homo sapiens
gaggcggccggcggcgaccacgaaaccgagagcaccagcgacaaagaaagtccatcagcttgataatggaggagaacaatgactccacggagaaccccca

SEQ ID NO: 346398 - DNA, 100 bp, Homo sapiens
ctgccaggacaaagacaatacactacgtgaggaatgggacaacaaccagatccagcctttggtcgagtgtctagtcctcccaatgcaatgatgtcgtcaa

SEQ ID NO: 346399 - DNA, 107 bp, Homo sapiens
gtatcccaagcaccatccctactgactcagaagtgaccttcctgaaagcgctgggagattctgagtggttcccacagtactgtaagattgatgttaaaggcatggtg

SEQ ID NO: 346400 - DNA, 146 bp, Homo sapiens
tcaggatgaccctgagcaatttgaggtcatcaagcaacaaaaagaaatcattgaacacggcatcgagctaaactggcgatggaatatgagaggagccctctggaaagaaaaggacagaccctgtgctttcatgaaagtgaagatct

SEQ ID NO: 346401 - DNA, 90 bp, Homo sapiens
cctacaaagtacagtggccactacatattctcttcaccccagctgtcctggaaaagccaaggcagaggcttcctcaggagaccatcccac

SEQ ID NO: 346402 - DNA, 100 bp, Homo sapiens
ctggaggcggcccgcttcctggaatggcaagcgcagcaacaacagagagcacgtgcagttggaattgatcacaccttttcagttgtacttcaatcctgaa

SEQ ID NO: 346403 - DNA, 90 bp, Homo sapiens
tcccggacggtacttctgccactgctgctccgtggagatcgtcccgcgcctgccggagctgtttgatcagtgtgagaacaagaggcggac

SEQ ID NO: 346404 - DNA, 83 bp, Homo sapiens
tgtgtggcgatggtcttcctgctggggctcatgtttgagtctctgctttctatccgtcaagatgataaagtcgtgtgcccgag

SEQ ID NO: 346405 - DNA, 90 bp, Homo sapiens
ggaggaggaggtcatcgacggcttcgccatcgccagcttcagcaccctggaggccctggagagctgaagaagcaggtggagagtgccgag

SEQ ID NO: 346406 - DNA, 82 bp, Homo sapiens
tgccctgctctgaggactacgacagtcaccgcaggttcgaagatatggctcgtggacagcagaaaattcagtctcagcagaa

SEQ ID NO: 346407 - DNA, 100 bp, Homo sapiens
ggtagcggtaccttgagtggcaacaggttacaagatgttcacctaagattgagacctagtgactacatttcctacgggaacaaataaatggtttttcatc

SEQ ID NO: 346408 - DNA, 82 bp, Homo sapiens
ccaccgctgccctcagctccgagtccagggcgagtgcacgtgccggaaggacatggtcaagatctccatggacgtgttcgtg

SEQ ID NO: 346409 - DNA, 100 bp, Homo sapiens
ctgtggagaataacggctgcacctggagattgacgcagagtgggcggcggtggtgagccaaataactatcggaccatgcatggccgggcagtaaatggca

SEQ ID NO: 346410 - DNA, 83 bp, Homo sapiens
atgtttcatcattactaacaggatattcctcatgacattgctgtctgagttacatccatatgggagaatagtctccagatcac

SEQ ID NO: 346411 - DNA, 75 bp, Homo sapiens
tctcaattattctcgttctctagctgaagattttgcagaacttcagtgaagatttcatacattggcctcatgacc

SEQ ID NO: 346412 - DNA, 50 bp, Homo sapiens
ctcaacggcagcatcctgagtgcgagtgatagacagccaagcagagaaac

SEQ ID NO: 346413 - DNA, 88 bp, Homo sapiens
tctgggtgactatgtggacagaggctatttcagtatagagactggattatggacagaacttggaaatattgagaataatttcttaaag

SEQ ID NO: 346414 - DNA, 75 bp, Homo sapiens
ttcgcattttggcattgacatttaattttagggtcctttatatagaagggagaggaggcggacctcatcttcctt

SEQ ID NO: 346415 - DNA, 74 bp, Homo sapiens
gatgatatccttctcaaccttgtgggatgtgaaaactctgttactgaaggatgcgactctgtacaagtgtcaca

SEQ ID NO: 346416 - DNA, 75 bp, Homo sapiens
ccaaactagagaagattttgagcaaacagaggtatattgaagcaagtcaaagattacattaaacagtgtagcaaa

SEQ ID NO: 346417 - DNA, 100 bp, Homo sapiens
gctgctgctcttcccgctgctgctcttctccaggctctgtgcattaaagggcagtatttaaagtcagttggcaagcagtggaataagatttttgtaaaga

SEQ ID NO: 346418 - DNA, 100 bp, Homo sapiens
ggaagacccaaggagaacaaggggaacagaaccaaccaggctttacaggtgaacatgattaaagatgatgggacagttattcatttcaacaatcccaaag

SEQ ID NO: 346419 - DNA, 100 bp, Homo sapiens
cgtggaggcagaggtggcatggggtaatctgtaagtcagatgctccaacaggggatgttcttcttgatgaagctctgaagcatgttaaggaaactcagcc

SEQ ID NO: 346420 - DNA, 74 bp, Homo sapiens
tgcagagtgctttactttcaacaagcggaagatccatccaaaagctatgtgaaattacgagactttgtgcttgt

SEQ ID NO: 346421 - DNA, 109 bp, Homo sapiens
tctcaatatctgtcttcggtggactccttcggcagtccacccaccgccgccgcctcccagtttggcaatgaggagcagcagctggcgtgggccaagcgggagagcgaga

SEQ ID NO: 346422 - DNA, 109 bp, Homo sapiens
ccggccgcctcagccatggacgcgtccctggagaaggttcgctgtgatcctgagattcaagaactgcgtcagtggcagaagaaacttcgcgaggccaagcacattcacc

SEQ ID NO: 346423 - DNA, 98 bp, Homo sapiens
gcttttctggaaaaccttcttgctgtataaccaagggccagagtatcactacctccaccagatgttggggggtccccttctgcttgttatagccccag

SEQ ID NO: 346424 - DNA, 96 bp, Homo sapiens
ggagccgcacgcggcgatatggaagaggagggcaagaagggcaagaaggcccgacaacaagctcaaatacgtcaccaaatggcagaggacagcaaa

SEQ ID NO: 346425 - DNA, 98 bp, Homo sapiens
ggcagagctgtgggcggtggagtctagacttccccaaggcgtgtacccagatgtctttggtggacttgggaaagaggttgctagaagcagcaagaaaa

SEQ ID NO: 346426 - DNA, 50 bp, Homo sapiens
ctttcggagtacatgggcaatgcagacatctggtccctgggcataacagc

SEQ ID NO: 346427 - DNA, 97 bp, Homo sapiens
ggacagctgggaattgctgaattagaactgcagaggttcctctacagcaaggtcttgttcagcgttgcgtaatcatccagaaagatgacaatggatt

SEQ ID NO: 346428 - DNA, 100 bp, Homo sapiens
aatccaaagagtgtctgacatttcttttgtgcaagatgagcctcaagtgcttctgcattacagacacattcagctaacgtattttagcaggtggagtgag

SEQ ID NO: 346429 - DNA, 87 bp, Homo sapiens
gccgcagtttttctcatgatcgaagaagtggtccacctcacagaggactgagatctgtatctgtggacctgaatgttgatccctcgc

SEQ ID NO: 346430 - DNA, 126 bp, Homo sapiens
gcagagacaccagcctatctggtttcaaagacctcttcagcatgaagcctaagactttgaccccgacgcaggcttcagtgattgccgcggatcagaagcctgagcactttggctcgagacaattaa

SEQ ID NO: 346431 - DNA, 77 bp, Homo sapiens
tggtcgccctggacaagaacttccacatgaagtgttacaagtgtgaggtggagtctcgctctgtcgcccaggctgga

SEQ ID NO: 346432 - DNA, 100 bp, Homo sapiens
ccggagacagcggcacagaggtgcttctgccagtaattcgccaaaatgacgaacacaaagggaaagaggagaggcacccgatatatgttctctaggcctt

SEQ ID NO: 346433 - DNA, 101 bp, Homo sapiens
cagccatgatgggaaaatgctggcgtcagcatcggaagatcattttattgacattgctgaagtggagacaggtgaacctatgggtcgtggaacaaaagtta

SEQ ID NO: 346434 - DNA, 131 bp, Homo sapiens
gccaccaggagttttatttcgggagcaagggggctctgctgcatcttccaatcttccaggctgcagaagcagaaccacagactatgacttggtcggaggcgatcagctcaactgtcacttcggctccatcc

SEQ ID NO: 346435 - DNA, 49 bp, Homo sapiens
gtctcaggcctttagtgatgatgattcctgaatttgacaacttgtacct

SEQ ID NO: 346436 - DNA, 96 bp, Homo sapiens
cttagaatcagtatttgtggttgggaaagatggacttacgggagcttgcgatggcaagccggcaggtggatattgcaactcagggctggttcattg

SEQ ID NO: 346437 - DNA, 75 bp, Homo sapiens
accataataattcagaatattggaggtacctactgtcaacaacgggaagtggaggccattactgaaggtgtagag

SEQ ID NO: 346438 - DNA, 100 bp, Homo sapiens
cggcgtctggcgtccccggtgcccagcattctgcggggcaggcggccttataatgggactaattttacgatatgctacagcaccaactgatattgaaagt

SEQ ID NO: 346439 - DNA, 75 bp, Homo sapiens
cccagtcacccaggcctccgcttctccggcctccctgctcttaccgggagaaaatgtggacacagacttgccagg

SEQ ID NO: 346440 - DNA, 100 bp, Homo sapiens
gccagcgtgcgtcctgacgcacaggagagagctgaagggaaagcaggcaggatgggagagtcgccgatagaaccacctcttccctgcctcctgggcttgg

SEQ ID NO: 346441 - DNA, 100 bp, Homo sapiens
cacatgcagattcgggtgaatgcggagcctgctgctttctacaggtataaagaaatatgaggccccaattggaacagcagcatggagggtcccagttggg

SEQ ID NO: 346442 - DNA, 51 bp, Homo sapiens
aaccagagtttacttcttcacacaaggtctgtgttctgttaaaatatggaa

SEQ ID NO: 346443 - DNA, 80 bp, Homo sapiens
caatcagaattactagattttctctcaaactacgagcagattgctgttccccgcaatgatgaatgggcacggtttggccg

SEQ ID NO: 346444 - DNA, 75 bp, Homo sapiens
ctgcctcagcctcccaagcagctgagactacagaccccatatcatgtgaacctcctcctggctggctatgatgag

SEQ ID NO: 346445 - DNA, 90 bp, Homo sapiens
agacatcacaatcccattattcagagcgcgtatggagtggaaacgcttgtagggtttcaccaggatgtacagttacccagcacgtgtacc

SEQ ID NO: 346446 - DNA, 100 bp, Homo sapiens
gagaggcaccgggatcgtgaccgagaccgtgaccgagagcgtgaccgagagcgcgaatatcgtcatcgttagaaggaatgtctgaatctgaacaggctct

SEQ ID NO: 346447 - DNA, 75 bp, Homo sapiens
gacagtggagaaggcccagccaatgaagatgaagacataggagggaccagttactctccacaagaaaattcacac

SEQ ID NO: 346448 - DNA, 75 bp, Homo sapiens
agcgtccctgatccagaaggtggttagagccacagctgaaacaactacaaacaaaatatgatgaacttaaagaga

SEQ ID NO: 346449 - DNA, 87 bp, Homo sapiens
acagaatggagtggaaaacatgatgttgtttgaagttgttaaaatgggcaagagtgctatgcaggatgctttaatctggatcccaat

SEQ ID NO: 346450 - DNA, 50 bp, Homo sapiens
cgagatcttccgccactacgatgtcaaaattagcgacctgctatggcaat

SEQ ID NO: 346451 - DNA, 75 bp, Homo sapiens
gcggctgcacacggtcaactccaggcacgaggccagcctgaagttgtacaagggagccgatatgtggatttactc

SEQ ID NO: 346452 - DNA, 83 bp, Homo sapiens
cctcaagccgaagccttcagtgggactcccccagcagatacattctcaggcatacatcacagaaggaagccatggaagtaagc

SEQ ID NO: 346453 - DNA, 100 bp, Homo sapiens
cgctgcctacggaggtggcagccatctccttctcggccgagacgcatccagagctttcgtgaccggggactgttctgaagcaggcctcgtggatgacgta

SEQ ID NO: 346454 - DNA, 99 bp, Homo sapiens
gccggccgtacgcggtgctgcgagggcagaacctggatgcccccaagtttatatcaaaccaaacaatttattactcttgggaaggaaatcctatcaata

SEQ ID NO: 346455 - DNA, 87 bp, Homo sapiens
cgcggcatgagccggtgaccaagctcggggccgagcgggaggcagccgtggccgagcagcaaaccctctgctttgctccaccgcccg

SEQ ID NO: 346456 - DNA, 100 bp, Homo sapiens
gttacagatctccgccctggcgtccggggaaggatgggacaggctgctgagacatccacgacagcgatggcagttccagcagcagccaccagagcctcaa

SEQ ID NO: 346457 - DNA, 100 bp, Homo sapiens
atcaccgacaagatcaccacggacgagatgatcaaacgcctgaaggtatgagaaagtgccagtcatcttggttgggaacaaagtggacctggaaagtgag

SEQ ID NO: 346458 - DNA, 83 bp, Homo sapiens
cagaaaattagtcccaaatcaactgactttgattcctggtttgatacaaacaactgccttggggatcaaaaactagttgagag

SEQ ID NO: 346459 - DNA, 100 bp, Homo sapiens
cttccctgaagcacttgctggaaacaagcactttgccaataaaaacgagagaggccttacctgaaagtggaatggcccccgtgcttccaagtgtcctgaa

SEQ ID NO: 346460 - DNA, 89 bp, Homo sapiens
caccactacagccaccctggagggggtggggagcagctggctatcaatgagcttgatcctctcccagaaaaggttttacagcaaagacc

SEQ ID NO: 346461 - DNA, 101 bp, Homo sapiens
ggccattaaagaataaacatggggcttagaggtgtcttggccaccaaacacagataacaacgaacttgatgcaagtgataggtttgccaaggtcagacctc

SEQ ID NO: 346462 - DNA, 99 bp, Homo sapiens
cccgccctgcgccccgctctgctgtgggcgctgctggcgctctggctgtgctgcgcgacccccgcgcatgcaaaatgatgcttcaacacccaggccagg

SEQ ID NO: 346463 - DNA, 90 bp, Homo sapiens
tctaaaccaatttgtggtgcacactgtacagttcctcaaccgcttttctacagtttgtgaggaggtaactataactacccaatattgcag

SEQ ID NO: 346464 - DNA, 83 bp, Homo sapiens
cgccccgcgtcatgcggctcctcggctggtggatgcctaaatcaaaggaacttgtttcttcaagctcttctggcagtgattct

SEQ ID NO: 346465 - DNA, 74 bp, Homo sapiens
tgtcgaagcagctcttgtgtctaagatctcaagtccttcagataaaaagacaatgcagatcttcgtgaagactc

SEQ ID NO: 346466 - DNA, 82 bp, Homo sapiens
tggccagcaatgtggagctgtgcctgtgccccgccagctaccggggggactcatgccagaccaccatcatggcagtggagtt

SEQ ID NO: 346467 - DNA, 82 bp, Homo sapiens
cgcgctgctcgccgacaaggctgcacaacaggctgcctgctgtttcccggggagatcatgaaacgaggtcgccttcccagca

SEQ ID NO: 346468 - DNA, 75 bp, Homo sapiens
gctgcctctgtgtacgctgaggggggagctggcattcctcgttcagtattgaaagattggcgtaaagtcaagaag

SEQ ID NO: 346469 - DNA, 75 bp, Homo sapiens
aaatccacaaggattcttttcaatacatcctaaaacagccactgaggcggctcccagctgcgttggcgacatggc

SEQ ID NO: 346470 - DNA, 75 bp, Homo sapiens
gatgaaacttcgagctcctctgctccttgctcggattgaacgtatggaaaggcggatgcagctggtaaagaagga

SEQ ID NO: 346471 - DNA, 83 bp, Homo sapiens
ttggagtctttgtccaggacgacaccattcgcttttcacccaagatgatttgatgtcttataaaactctgatgaaccatgatg

SEQ ID NO: 346472 - DNA, 75 bp, Homo sapiens
tggatgaataaagtattggggagaagcctacccacctgccttccaggtaaaaatgcatttgcaaagggagaaaat

SEQ ID NO: 346473 - DNA, 83 bp, Homo sapiens
gggactgtctagttgcaggaaaacaagctcagggctcccacggattctacattatggggccagtgtcattcaaagatgtggct

SEQ ID NO: 346474 - DNA, 75 bp, Homo sapiens
gaggacaaaagcaacgacttcgtatggtagttacttttggtgacgctgtccagttcccacaatgtatcattcctt

SEQ ID NO: 346475 - DNA, 100 bp, Homo sapiens
gcacctgtcggagacccgccagtccgccggccgcgaaaaggtatagtttggcagtggggcctccaaaaaaagacccaaaagttaaaggtgtccaatcagc

SEQ ID NO: 346476 - DNA, 90 bp, Homo sapiens
aaggcctgggcctgagaactgaatcagtttgcagttaacatgtttcgaacattaccaccttcctccaatcctacgggagcggaatttgac

SEQ ID NO: 346477 - DNA, 89 bp, Homo sapiens
cgcaccgcggacgcccgctgagcttggcgcacgggccgaccaggagcgcagctcagctgggctggaactgccctcctggaactccccca

SEQ ID NO: 346478 - DNA, 107 bp, Homo sapiens
cctttgttgctgctgcacattaggttgcagtatgtggccagttatttgcctcagtaaaagaaaagtgactgagaccgaagatgatagtgatagtgacagcgatgatg

SEQ ID NO: 346479 - DNA, 75 bp, Homo sapiens
agacctggagaggatccgcacacttctggaggctggatgagaatgaggatatgcacagtctcctactgactgaca

SEQ ID NO: 346480 - DNA, 82 bp, Homo sapiens
ctgtgatgcctgcagagctgtggcttaccaggccaggagcacctctccacccactgctgctggtctgaccgccttcctggaa

SEQ ID NO: 346481 - DNA, 100 bp, Homo sapiens
gctggagaacttcgtgggccggcctatgaaaggaggttccctacatgtcctttgattccgatgttcgtgggcagtgacactgtgaatgaattcaagagcg

SEQ ID NO: 346482 - DNA, 100 bp, Homo sapiens
cagcagagatcagcaatccttggctcactgaggaggtttgatcagtggcttgttactagaaggatgtagttttgatggaaatcaactttctgaaaatcag

SEQ ID NO: 346483 - DNA, 100 bp, Homo sapiens
tcaggctgctgtcgccgctgctgggagatgggcctactcgcccgccaccctgcgctgccgccgctctgaggagttaaagccagtaatgttaaagtagaga

SEQ ID NO: 346484 - DNA, 100 bp, Homo sapiens
catcactgtcatggacaaggacaagctcagccgcaatgacgtcatcggcaagatgccatggacaatattaccaggcagaaccaattctacgatacccaag

SEQ ID NO: 346485 - DNA, 100 bp, Homo sapiens
gatcctacatctacacttggcatctattttgaagttgtcaatcaggcctgtgacactcctctgcaccccctgggcaggcttgtggagacactggttgcag

SEQ ID NO: 346486 - DNA, 82 bp, Homo sapiens
acaggccatgttccactatttccaggtgccaaatgtgacatccagatgacccagtctccttccaccctgtctgcatctgtag

SEQ ID NO: 346487 - DNA, 90 bp, Homo sapiens
cttcgcgctgaggagccctcgttttcgagatcaggcctgaccgggataagctccaggttgggggccgtcccgctcctaaggcaggaagat

SEQ ID NO: 346488 - DNA, 97 bp, Homo sapiens
ccaactcttcgttcgattattagctttagtgaaatgggctaataatgctggcaaagtggaaaaatgtgcggcctccaagcctttgggagtagcttct

SEQ ID NO: 346489 - DNA, 90 bp, Homo sapiens
gaaccgcagtatcatgctggccaagaagatcatcattaaggacggaggcacggaagaaggtagataatgactataatgcccttcgagaaa

SEQ ID NO: 346490 - DNA, 75 bp, Homo sapiens
agccatggccctccacagcccgcagtcccatcagggccctggatcccaagactcagcatccaaggtcccctccag

SEQ ID NO: 346491 - DNA, 100 bp, Homo sapiens
gtctgagctagagggtgaagctggcggagcaggaggatgggcgaaagatgtagcacttaagcctcaggaacgtgtggagaaacgccagacgcccctgacc

SEQ ID NO: 346492 - DNA, 75 bp, Homo sapiens
cacttgtggagagctcgaattccagaatgatgaaattgtgtattgcgcagcgatgcacggccatcaagtaccact

SEQ ID NO: 346493 - DNA, 75 bp, Homo sapiens
cctcgtcagactcggagacgtctgacagtgacgatgagatctgcgagtgaagagggacgagggaaaagaaacaaa

SEQ ID NO: 346494 - DNA, 88 bp, Homo sapiens
gcgcacagaacaggctggggcatccctcgccctggctctttgagcccggaccagacaggacctcagcagccatgtcgaagccccatag

SEQ ID NO: 346495 - DNA, 100 bp, Homo sapiens
tttgtcgttggcttcgtgttacccagtgctgagacagacctctgcatcccaaattcaggatctggatggctagctattgtggacgatgaaaggctctctg

SEQ ID NO: 346496 - DNA, 50 bp, Homo sapiens
gacctaccccttgcacacctaccctaaggacattgtgacaaatgtttccc

SEQ ID NO: 346497 - DNA, 100 bp, Homo sapiens
ggagcaaggtgcaagagtccacaaagggacctgatgaagcgaagatcaagtgaaagccctgtgtaaggaatgtgtagtagaacgttgtcgcatattgcgt

SEQ ID NO: 346498 - DNA, 100 bp, Homo sapiens
cttgtttaatgactttggtgccctcaacatctctcagagacgaaagatatcttaatgcaattcagacaatgtgtccacacattcttcgctatttgactac

SEQ ID NO: 346499 - DNA, 82 bp, Homo sapiens
atacaatctcatctctaaaggatttaattacaaagatgcaactgcaaagagaagccgaggtggaagagaaacctgatgtcac

SEQ ID NO: 346500 - DNA, 74 bp, Homo sapiens
aaagaattcttcgaaaattggtcctcctcgccctctgactaatatgaatgacaccatggttagccacatgtcct

SEQ ID NO: 346501 - DNA, 82 bp, Homo sapiens
aataggtgtatcaagtaatggtgcaaagcctgaacgtccagaggaccagaggttaatttattctgggaagctgttgttggat

SEQ ID NO: 346502 - DNA, 46 bp, Homo sapiens
cttttggcagcatgaaagttagcagaaccttcagaagtttagtctt

SEQ ID NO: 346503 - DNA, 75 bp, Homo sapiens
acccgcctgctgagtggacccgggtaagggacaatggagaacattgcagcccaggctctggagcacattcactcc

SEQ ID NO: 346504 - DNA, 100 bp, Homo sapiens
acggtctcacagacaacgttgaggtacatggactatatcgcacaacaggtgctagttttgagaaggcccaacaggagtttgcaacaggtgtgatgtccaa

SEQ ID NO: 346505 - DNA, 90 bp, Homo sapiens
cgattttctgcagaagatgaagctttgagtaacattgccagagagggaactctaatgatccaggacaaagaagttaccctggagtatgta

SEQ ID NO: 346506 - DNA, 98 bp, Homo sapiens
accaacagccagtgatatgctatacatgggccgttgctccagggagaactgcaaatatcttcatccacccccacatttaaaaacgcagttggagataa

SEQ ID NO: 346507 - DNA, 48 bp, Homo sapiens
ctccccaggccgcctccgcccgtgaagctacatctggtaccttggctg

SEQ ID NO: 346508 - DNA, 75 bp, Homo sapiens
ggagagcccaggagcaggggagacatggcttctcgtcagtgcctcgcaggatggtaaacttatcatctgggacag

SEQ ID NO: 346509 - DNA, 82 bp, Homo sapiens
gccggaggagtcagtcagaggggcgagcaggagcgattccgtcgccaaacaggattttttatcaagcagaaatgcatcgaac

SEQ ID NO: 346510 - DNA, 100 bp, Homo sapiens
cgaggaggcagccaagctcgtagcctgccactccgtgctgcaccgtccaggtgaggttagagctggggcatcgcgcccaactgcgcaagaagcccaccac

SEQ ID NO: 346511 - DNA, 82 bp, Homo sapiens
tgctgctgacgctgctgctgcccggcctcggggaatgggacgcgagagataaagattctatccgacgagtagtacaacacag

SEQ ID NO: 346512 - DNA, 74 bp, Homo sapiens
gaaaaggaagtcaccaccgtggcctgcgacgattccagcaagattatggaagagcatagctacatacaaaagga

SEQ ID NO: 346513 - DNA, 98 bp, Homo sapiens
tggttttgagcggctgaaggagcctggtgagaagacaggctggctcattaacatgcatcctacctgtgaccgcatcaagcagtcagcagctggcacca

SEQ ID NO: 346514 - DNA, 95 bp, Homo sapiens
gaagatcctggagccaaagatgttgtccaccttgacagtgaaaagagtgaaccagaggaaatgcctccagaagcaaagatgaggatgaagaatat

SEQ ID NO: 346515 - DNA, 74 bp, Homo sapiens
gcggttagtgcaagcatctgggccatcttcaatcctagatattatcctactgaagatgtgcctcgaaagctgtt

SEQ ID NO: 346516 - DNA, 98 bp, Homo sapiens
gagaaattggccatggaagctttggagcagtgtattttgcaaatacgccatgcgagacctagtccacaggcttccaggagggaacaacagcaacaaca

SEQ ID NO: 346517 - DNA, 98 bp, Homo sapiens
ttgaatcagaacaccttgctgctggggaagaaggtggtccttgtaccctacacctcggagcatgtgcccaggttggtgttcgaggaagagacattgtt

SEQ ID NO: 346518 - DNA, 83 bp, Homo sapiens
ggagttctctggccgctctctggacagatgccaacaagattcagaagaactgttgaaactagcaacatctataagtgaaacct

SEQ ID NO: 346519 - DNA, 100 bp, Homo sapiens
aaggatgttggcggtccctgtgacctgtggagacacggccagatctgccctccaaaactgcttatcaataacagctgtagcactgtggcttttctccatg

SEQ ID NO: 346520 - DNA, 75 bp, Homo sapiens
tgtcactccaacctcttttcgctgattggcggcagtaagcacacaatgaatgatcacctgcatgtcggcagccac

SEQ ID NO: 346521 - DNA, 71 bp, Homo sapiens
acaacgagcgctgcccggacgcccggagccagctacaggtgcctgcaggccctgcagcgacgctgagctgc

SEQ ID NO: 346522 - DNA, 89 bp, Homo sapiens
gcgagctgagtggttgtgtggtcgcgtctcggaaaccggtagcgcttgcagcatgctaagaagaaatttcctgacttgtttgtcttctt

SEQ ID NO: 346523 - DNA, 100 bp, Homo sapiens
cctgcttccatctctggaaggtttcagccgctgccggaagccatgaaggagaaggaagtgcgtccgaagcacgtgaagaaaaatggctacaaacttccta

SEQ ID NO: 346524 - DNA, 51 bp, Homo sapiens
tgaagaggacgaggtcattgacgagatgacggtggatattccatgaatttt

SEQ ID NO: 346525 - DNA, 75 bp, Homo sapiens
tacagccttgtgcctgacaggaccgtggccgaccggcagctgggattgtcaatgaggcagatcagattccgattt

SEQ ID NO: 346526 - DNA, 50 bp, Homo sapiens
cgtggaacggctgcttttggaaggtggatattccatctattataaccaag

SEQ ID NO: 346527 - DNA, 101 bp, Homo sapiens
ccctcacgttctttcgcttttttacctgccaatcaaactgctacaagacaacaccctgatctggcatggacatggcatgatcgcactgcgcaggggtgcca

SEQ ID NO: 346528 - DNA, 75 bp, Homo sapiens
aactgcttcccgaggagcattggaagttggttaccacagagaagcgcttcctcaaagacagtttgtacaatgaag

SEQ ID NO: 346529 - DNA, 100 bp, Homo sapiens
aaagcatgttgtggctgttccaatcgctcctgtttgtcttctgctttggcccagtgatttcctgaaggaaatataatgatctgttcatcgaagtagaaga

SEQ ID NO: 346530 - DNA, 100 bp, Homo sapiens
gcaggccgctgatgccgcccgcggcgaggtggcccggaccgcagtgccccaagagagggggacttgatctcatcttcatgccaggccttgggtttgacaa

SEQ ID NO: 346531 - DNA, 100 bp, Homo sapiens
cgggccatggccgccgccgatgccgagggcagctggtggaatttttgaagaaaatggaatctcgaggccccctttcgtgcgacacggttctgaagatctt

SEQ ID NO: 346532 - DNA, 75 bp, Homo sapiens
cccaaggccaacagagagaagatgactcaggatctcatagatcagaacatactggagcctgtaacccgtgcacag

SEQ ID NO: 346533 - DNA, 90 bp, Homo sapiens
gtggccgtgaagcacctgcacatccacactccgctgctcgacaggtgactagttgtgcttgggtgcctgacagttgccagctgtttactg

SEQ ID NO: 346534 - DNA, 100 bp, Homo sapiens
cagagagcagagacatcccgatctggggaaggagaactggagaagttaaatcagtccacggatgatatcaacagacgggagactgaacttgaggtacaga

SEQ ID NO: 346535 - DNA, 105 bp, Homo sapiens
cgggaccccacccccgctggacagtgggggaaactgaggcctgagcggaatcgtccgcactaaagtcccctgcagcgtgaccatgtcgagaccccggaagaggct

SEQ ID NO: 346536 - DNA, 83 bp, Homo sapiens
ctgtctcgccgagcgcacgccttgccgccgccccgcaggttttaaaatcaaagatgggaaaatcggagaaaattgcccttccc

SEQ ID NO: 346537 - DNA, 96 bp, Homo sapiens
agtgtgtttgattttactcatccatgtgaccatgaggaaatgagagaaatgcttacacacagaaatgagttgtaaagatgtggcacctgtggagaa

SEQ ID NO: 346538 - DNA, 50 bp, Homo sapiens
ctcatggaggctgagcatttattcaggcaacagcattattgagaaaagcc

SEQ ID NO: 346539 - DNA, 141 bp, Homo sapiens
ccaggcctctgcactgactgtggctgaagaggtgtggcaaaggtcaggttgagggatctggtgaggcaagaggaggaacgacgtagaagagaggaagagatgatgattcgtcaacgtgagatggaagaacaaatgaggcgc

SEQ ID NO: 346540 - DNA, 75 bp, Homo sapiens
atacactctgtacaaaggcttcaaccaacacagtaagagcctctggacgagaccagccagatgagcgacctcccg

SEQ ID NO: 346541 - DNA, 50 bp, Homo sapiens
cagcatccttgatgataaaccagtaaatcaggtttggatgcatctgctca

SEQ ID NO: 346542 - DNA, 83 bp, Homo sapiens
gtcgcgtctcggaaaccggtagcgcttgcagcatgcatgatgccttcttctgtagagtgggcgctttgcagaatacgtgttga

SEQ ID NO: 346543 - DNA, 75 bp, Homo sapiens
cctacaagcaagctgaatggaggccagatagtaccatgatagctgtatcaaacaaaatccagtctcatagcagag

SEQ ID NO: 346544 - DNA, 100 bp, Homo sapiens
agccacatctcggaggagctgaccacaactacagactggagctctcaaacactgctgtcctgcaccagatgcggcgggaccaggtgacagacacgtgccg

SEQ ID NO: 346545 - DNA, 75 bp, Homo sapiens
aaaacttcaagccaaacatcaagcagaatgtgatttgcttgaagatatgagtggaatgcagtagccctctgggcc

SEQ ID NO: 346546 - DNA, 75 bp, Homo sapiens
tgtaccagtacacggcccacgttgccaggagttggtggtgaccccgcccagttggcccagaggatctcttctaac

SEQ ID NO: 346547 - DNA, 82 bp, Homo sapiens
gcagaaaccccgttgacaaggcactgctttttcatgacggttttcgacgctggggaagtgtttgggatcatgcaagtggagg

SEQ ID NO: 346548 - DNA, 74 bp, Homo sapiens
aatcaagtacttcagtaagagatggggatcgaatcatcaatttagttgttggcagcttaacatccttattgatt

SEQ ID NO: 346549 - DNA, 100 bp, Homo sapiens
gatcggaaaacttcgaggaattgctcaaagtgctggttagatgagatcatgtgactggatccctcatgatgagatgagtgcccccaaaagaagacaccag

SEQ ID NO: 346550 - DNA, 50 bp, Homo sapiens
ccgggaccctgagatggggggaaagccgccaatcctgaggcaaaagaaac

SEQ ID NO: 346551 - DNA, 80 bp, Homo sapiens
acgccgcgcactcggagccggcacggctcggcggtctcctctgagcctccggcctccataagacccaaaacagatgacac

SEQ ID NO: 346552 - DNA, 80 bp, Homo sapiens
ggttcttggtgggatctgagcaggactgggaggtgctggtcctagggaagctcaagtgggacctggctgctgtgattgca

SEQ ID NO: 346553 - DNA, 100 bp, Homo sapiens
cgacggccgtcttaaggagtagattcagttgtggaaattctttttgaacaagataatgaagagcaatcagttgccactttaatattggattcccttatac

SEQ ID NO: 346554 - DNA, 51 bp, Homo sapiens
cggcggtggcggcgaaggccgaggcgtggaagcaagcaatttcttcaaccg

SEQ ID NO: 346555 - DNA, 98 bp, Homo sapiens
gtggaggagctgtgcagccgcgaggaggcgcgggaggtgttcgagaacgaccccgagacgcctgtccctgaaatcagtcagcgcattaaagccctgaa

SEQ ID NO: 346556 - DNA, 87 bp, Homo sapiens
ataatgatgacaacagtggctgtagtggggaaaataaaccccgggaaatggatacaagtagaagaaaattccatttataaagtactg

SEQ ID NO: 346557 - DNA, 100 bp, Homo sapiens
tgtcttccccaacgccccggagccgccggccgctagcgtcagcgccagccaggatagcactataatatgcagaaatctacaaattctgatacttccgtgg

SEQ ID NO: 346558 - DNA, 139 bp, Homo sapiens
tagaaatttacaccagccttgagaaggccagcattgtgtacagctttgtagctgccatcccactacccagagtcaagggtccagagaaggaggagaagttgagacaggcggtcaagcaggtgctgaagtgtgatgtgac

SEQ ID NO: 346559 - DNA, 82 bp, Homo sapiens
ttggccagccaggccatgattgagaagatcctgagcgaggacccccggtggcaagcaaacggggattcagcgtccgatcctt

SEQ ID NO: 346560 - DNA, 100 bp, Homo sapiens
gaattatggcagcccagtcaagtgttatagttttgccgctggactcttccctcccttcccccaccccatcaggatgatatgagacttgaaagaagacgat

SEQ ID NO: 346561 - DNA, 90 bp, Homo sapiens
acggcgagcagtctcaggcctttagtgatgatgcttcgcagaatcaagaacggctatgtgcgtttaaagatccgtatcagcaagaccttg

SEQ ID NO: 346562 - DNA, 100 bp, Homo sapiens
cacagcaggtcttctccactgagtttgaggtgaaggagtacgaatcatattctaagaactcagccactcaggtatccaccatggtgctgggtcctgaaca

SEQ ID NO: 346563 - DNA, 75 bp, Homo sapiens
cctcaaccggcccacccgccagccagccagcgccttcatcctggggctgcgatgtaactctcaggagccttctcc

SEQ ID NO: 346564 - DNA, 82 bp, Homo sapiens
tcctggcctgggcgctccggtggcggcggagcgaggaagaaaggacccggtttcaggagctgctggccagtccggcctacag

SEQ ID NO: 346565 - DNA, 111 bp, Homo sapiens
ggagagcccgggagtgcgttccggggctttcggagcagcggtgtgagatggcttccttagcggtatccaactggcctaagcccatgccattgattccatgcctgtcttggt

SEQ ID NO: 346566 - DNA, 101 bp, Homo sapiens
cctgactctctgaggctcattttgcagttgttgaaattgtccccgcagttttcaatcatgtggaagcattgacatttcctccttcttctggaaagtcattc

SEQ ID NO: 346567 - DNA, 87 bp, Homo sapiens
cgtcaccgccgcccccccagacaagatggacaccgcggaggaagaatgccgggacattctgcttcctgtcatcaccaaagagctgaa

SEQ ID NO: 346568 - DNA, 75 bp, Homo sapiens
gactcatccccgggagtgttgaagacttatgccaggatcccaccataaaagagctggaatcgattataagcaaaa

SEQ ID NO: 346569 - DNA, 82 bp, Homo sapiens
aattcagaaggagctggcggacatcactttagaccctccacctaattgcagacagaatgttgctgcgggatgtaaaagctct

SEQ ID NO: 346570 - DNA, 75 bp, Homo sapiens
cttgatgtcatgctcaaggggctctttaagactgaggctgatgtgaatccaaaggcctatccccttgccgatgcc

SEQ ID NO: 346571 - DNA, 90 bp, Homo sapiens
gctgccgccggcgaaggaggaggcgttgccgggtggtataagttgaaatccaaaccaggaaagaaggacaaggagcgaggagaaattgag

SEQ ID NO: 346572 - DNA, 100 bp, Homo sapiens
gcgaacgcttcgctggccatttaggagctctgctcaaagccagacggtgcatggctgcctcctaatcccatagtccagaggaggcatccctaggactgcg

SEQ ID NO: 346573 - DNA, 142 bp, Homo sapiens
ccgagcctgggaggccggccggtgccagcacctttcggcttctgagacggcggcagcagcggcattcagtttcggagcaacatcccctgtcacctggttgatatctcttgcggattaccctgcagtgccacgctaccatgtg

SEQ ID NO: 346574 - DNA, 90 bp, Homo sapiens
cagaggcctgcacgcggggcgcgggccccgaaggctctccatcgaaggcaacattgcctgtaccagagattaaagttgtgtcaaatctgc

SEQ ID NO: 346575 - DNA, 75 bp, Homo sapiens
atggtgaagttggtccttctggtcctgtgggcccgccgagcactgcagcctgtggtgttgaggctcacagcgatg

SEQ ID NO: 346576 - DNA, 81 bp, Homo sapiens
cggaagactaatgaccgaagcttcaagactttgacatgtgtgaaaacatgaaatgatgccaccggaaatgtcatcttctcc

SEQ ID NO: 346577 - DNA, 51 bp, Homo sapiens
cttatgcagagtggccgacttgatattgatgatgttaagaagttcaaaccg

SEQ ID NO: 346578 - DNA, 83 bp, Homo sapiens
ccgacatgttcacgcacgggatccagagcgccgcgcacttcgtcatgttcttcgcgccctgatgagcagcaccagcagtaaga

SEQ ID NO: 346579 - DNA, 73 bp, Homo sapiens
cagatgctaaagccaagataagaaggcttaggcaggaattgaattcctcctgatcagcagagactgatctttg

SEQ ID NO: 346580 - DNA, 97 bp, Homo sapiens
tcctgtcctcctgaccctcacaaagggatcgagatgtggtatggtgtattcctgtgggcactggtgtcttctctcttctttcatgtccctgctggat

SEQ ID NO: 346581 - DNA, 76 bp, Homo sapiens
ttgataataatctagattctgtgtctctgcttatagaccatgtttgtagtagcccacatttttggattatgtccgg

SEQ ID NO: 346582 - DNA, 98 bp, Homo sapiens
ctcaatgatcgtgtcatgagatgcccaccagaagtatgtccgacaagcctggcagaaggcagacatcaatacaaaatgggcagccacacgatgggcca

SEQ ID NO: 346583 - DNA, 83 bp, Homo sapiens
cgcaccttggagtccaagcttgtgctctttgcggagctggagtttgttcagatcatcatcatcgtggtggtgatgatggtgat

SEQ ID NO: 346584 - DNA, 82 bp, Homo sapiens
aagatcaagactagtgtgagcaacaaagttggtcttggacaactgcacctgcacggagggcgtggagtagaacagaatcatc

SEQ ID NO: 346585 - DNA, 50 bp, Homo sapiens
gcgcaggggagattacttttctggaagctgtggaaatacaaagaactctg

SEQ ID NO: 346586 - DNA, 74 bp, Homo sapiens
agccccgaggtgtgcgaagccaccaaggttccttggatatcacccagagtattgaagacgacccacttctggat

SEQ ID NO: 346587 - DNA, 90 bp, Homo sapiens
gctgacagtgagaagaacaatgttgcagttactgttcgagagatttataggcatatggcctggaagaatagtgccaaagtcaacgtatta

SEQ ID NO: 346588 - DNA, 96 bp, Homo sapiens
gggagcgaggagcgcgcggagccggccatgggcaagtcagaaccgtgcccggaaaaaaaggctgaatattattattgtggctgaaggagcaattga

SEQ ID NO: 346589 - DNA, 90 bp, Homo sapiens
gttggaatttgtgcaatgtttagccaacccaaattaccttaattatacttggcatatcgaaattttatgattgacacgtatcgtctaaac

SEQ ID NO: 346590 - DNA, 75 bp, Homo sapiens
cttcaaccgggaacagagaatgtttaaggtttgggtacccagaccccacctacctgacccgggtgcaagaggagc

SEQ ID NO: 346591 - DNA, 75 bp, Homo sapiens
gaggagctgcgctcggagaacgactatctcaaggatgaatttttagatgtgatctactggttccgacagatcatt

SEQ ID NO: 346592 - DNA, 82 bp, Homo sapiens
agcgccggcaagagctcggtgctggagaacttcgtgggccgagacgtctcccacaacctgctccgggcgctggacgttgggc

SEQ ID NO: 346593 - DNA, 75 bp, Homo sapiens
gtgccctagcaccccgagaaccgtcagtttgagccagatgatcccggagatcgcccgccatggctttacttactg

SEQ ID NO: 346594 - DNA, 98 bp, Homo sapiens
ctcacaagaggggaagctgacagagatacctacagacggagtgctgtgccacgtcacggtctagatcacattctcgatccagaggaaggcgatactct

SEQ ID NO: 346595 - DNA, 50 bp, Homo sapiens
ctcgatccgcctgcctgcgcacctgcagggctacttctccaggagaacag

SEQ ID NO: 346596 - DNA, 82 bp, Homo sapiens
ctttacccgactctttgggccgttatctcacgcctgggttctgaggaaaacgcaatggtggccatggacttgggctctccct

SEQ ID NO: 346597 - DNA, 97 bp, Homo sapiens
gagcgtgaccgagagcgcgaatatcgtcatcgttagaagttaatagccaagataccaaccatcacggcagtttgcaacttgcacggggagaagctgc

SEQ ID NO: 346598 - DNA, 109 bp, Homo sapiens
gcccagttggcccagaggatctcttctaacatccagaagatcacacagtgttaaaacctacagagatttccgattgcaaggggtcctggactccaccttaaacagcaag

SEQ ID NO: 346599 - DNA, 100 bp, Homo sapiens
tcgcaaactggctttgaagatggctccgtgggccagttttctttttaaaagcggaaggagagttttacatggaagtggcttacagaaacttggcgctgag

SEQ ID NO: 346600 - DNA, 85 bp, Homo sapiens
tttgtgtccattgatctcttggagcagctggggatcatgcatgatggaagtggttcattgcatgatattcaactgtcattgccat

SEQ ID NO: 346601 - DNA, 74 bp, Homo sapiens
tgttctgcttcctgctgctctgtctcagcgccgcctccctgcttcttaacagtactatactggcaattgctgga

SEQ ID NO: 346602 - DNA, 100 bp, Homo sapiens
ccgatgcaccctttttgtcagattatcaggatgaggccgagaccgacccgcccgcccgcggccccgcagcagctccaagaaggaaccaagagaccgaggc

SEQ ID NO: 346603 - DNA, 51 bp, Homo sapiens
cagcgccgtgtggcacgacacaaaaatcagatgacgggcgccgggccacca

SEQ ID NO: 346604 - DNA, 83 bp, Homo sapiens
ggccctctccatggtggcttgtgggaaggtttttagaacttcagccataaaaatgggcagaattttccttgatcatatcggtg

SEQ ID NO: 346605 - DNA, 100 bp, Homo sapiens
ggagcggcgccccctcccccctccggcgcggaccccgcgtgcgccttgctcgcccgcagccccgagaccgcaggacctcagcagccatgtcgaagcccca

SEQ ID NO: 346606 - DNA, 82 bp, Homo sapiens
aaaagactcaggacggacaagcacagtcttcggaagtttggtgccctggttgtcagatgttggaaagcagtaggacggaaca

SEQ ID NO: 346607 - DNA, 109 bp, Homo sapiens
aaacaagtgaccaacagttgaatcaaagtatggacacaggttatcctgaatacatgtctaacaattttccttgcaacgttagctgttgtttttcactgtttccaaagga

SEQ ID NO: 346608 - DNA, 100 bp, Homo sapiens
gggatcggcccaaggccagttctccgcagaggcctttgaaattgttgttcgccatgccaagaactacaccaatgccatgttcaagaacaactacccaagc

SEQ ID NO: 346609 - DNA, 98 bp, Homo sapiens
ttcctgctaaggggaggtgcaggagaccctacagcttggggcctgggctcctctgaccatcctcattgagaaaggaaagtgagtccagagaagttgat

SEQ ID NO: 346610 - DNA, 101 bp, Homo sapiens
cctcagtccagctctgtcatcactcaggcaccttccaccaaccgccagatcggaaaatatttacaccagcagctccagttcataccaataaagaagatcct

SEQ ID NO: 346611 - DNA, 100 bp, Homo sapiens
cgacctcattgccgtgtccaatcattatggagccatgggggttggccacttcttgcgccccaggagtcttcagtgtgtgagcctccatctcctgtccaat

SEQ ID NO: 346612 - DNA, 75 bp, Homo sapiens
cacacatttatctatcactgtgaaaaccaatttatttgactgtctcgaggatgcctacggagctggctgcacttc

SEQ ID NO: 346613 - DNA, 50 bp, Homo sapiens
tttctcttcttctgaaaaagagatcttgttggtctcttcccatggcgatg

SEQ ID NO: 346614 - DNA, 80 bp, Homo sapiens
tagactccatggcaccgggctgagcgggtatagtcgtctccccctccaccacggcaagtcctgcagagggaaccagctct

SEQ ID NO: 346615 - DNA, 83 bp, Homo sapiens
gggggtaccacacaacaccccagcaaacctccgggcccccaggcatggctagctcggtgagaagccctaccactgcaactggg

SEQ ID NO: 346616 - DNA, 100 bp, Homo sapiens
gttcttatcttgatacaaagaaaattactccagactcctatgcactcaactggagtggagactgctgcacggactctggaaccatgaacatatttgatcg

SEQ ID NO: 346617 - DNA, 82 bp, Homo sapiens
cgccttcctcaacgacgcggacatggtcatgagctttgtgaacctggtctctgctttctatccgtcaagatgataaagtcgt

SEQ ID NO: 346618 - DNA, 101 bp, Homo sapiens
gtttatctcaaggcctgagtagccggtaacaaacgagggttcccgggattggaccgacgcagccatggctgaccggttccctgatgtgttacctgcttctg

SEQ ID NO: 346619 - DNA, 75 bp, Homo sapiens
gagaaaatgaaaccagcagacagaatttgtcagcccatctacagcaagcagtcggtgttcttcgtctgggaactc

SEQ ID NO: 346620 - DNA, 147 bp, Homo sapiens
aagttgtcttctcctgataatgtaaattgccgcgatacccaaggcagacattcaacacctttacatttagcagatcctgataacttaagtgactctctcttttccggtgatgaagaaaatgctgggactgaggaaataaagaatgaa

SEQ ID NO: 346621 - DNA, 82 bp, Homo sapiens
tgggatccggttccttggtgtcatccagccttagcaaaccagagtcgagcaaaagatgtgataataccagcaaagccacctg

SEQ ID NO: 346622 - DNA, 75 bp, Homo sapiens
caggatcctggtatccgctaacagtaggagctgtggcgcggggccttccaggagtctgagctatgagtggcccct

SEQ ID NO: 346623 - DNA, 83 bp, Homo sapiens
cagcgtgcgttcagccctgggatcaccgaagtggccttggagtacaacaactgtcatggggaccaggtggtggagcgtctcct

SEQ ID NO: 346624 - DNA, 100 bp, Homo sapiens
gagcctgccccgccctggggacgaagagctgcagctcctcctgtgcgggaacagggtctgttccacaaaaaagacagtgccaatcaaggctgtgttcgaa

SEQ ID NO: 346625 - DNA, 75 bp, Homo sapiens
gacggtggaggttcgcggctctaacggggctttctacaaggtactgtgagaatagagatgtttcgaaatatgcag

SEQ ID NO: 346626 - DNA, 100 bp, Homo sapiens
tttaattacttgagaatttataatggaattggagtcagcagaactgaaatagtactatactggcaattgctggagaagattttgcaattgttgcttctga

SEQ ID NO: 346627 - DNA, 82 bp, Homo sapiens
cgtgcgccgcagcccgggcccaggccccggcagcgcctgggacaagactttaagtttgccatgtacccaccgtcgatgatcg

SEQ ID NO: 346628 - DNA, 101 bp, Homo sapiens
aaatgttggaatgtattgcacggagcttcaggaagcagccggaagaaggcctgcgggcatatatggtgctggttgtctcattacggaaggatgtcgtggag

SEQ ID NO: 346629 - DNA, 88 bp, Homo sapiens
tcaggaaagccctgagcagaaatgtctgtgcttgtggtcggtaacttttgctgctgttgttctgctgctgtctgccattccattcgcc

SEQ ID NO: 346630 - DNA, 98 bp, Homo sapiens
gaggaacgcgctaaggcaaagcacctggaaatacaactggagcacgcaaagcaagcctttgtgcaacgggacaatgctaggactgggagagtcacagc

SEQ ID NO: 346631 - DNA, 82 bp, Homo sapiens
gtagcattcatggataccaaagggaaaatggatgcagaggccaggatgtgggcccagccctgtgccaggaggctggctggaa

SEQ ID NO: 346632 - DNA, 82 bp, Homo sapiens
agcaggactgcgccgcgtcttcctcaagtgggtaattccagaattgattggccataccattgtcactgtattactgctcatg

SEQ ID NO: 346633 - DNA, 104 bp, Homo sapiens
ttgggcctcgcgccggctatggccgtgccctggggctgagccctcagacccaacatgagtgaagtttcctgcaagaaacgggacgactatttggaatggccaga

SEQ ID NO: 346634 - DNA, 100 bp, Homo sapiens
tcgaatctcttctccctccccttcttgggcagactttgacgacactgcgacatactcagcagtggccaccaatgcccacggacaagtgtccaccaacgcg

SEQ ID NO: 346635 - DNA, 74 bp, Homo sapiens
atcgacaccgaaaactccaccgtagcccttgccaaaggacatcggcagaaactagatgatcagaccaagcccgg

SEQ ID NO: 346636 - DNA, 98 bp, Homo sapiens
gaaggtgttcactttttacacactcgtgatgtagttcatcttgatttgaagattatctttctcaaggaatagatctttctggaatagaagtgatagaa

SEQ ID NO: 346637 - DNA, 100 bp, Homo sapiens
ccggagaggacaccctgagcgattcaggatgagctcatggcggaattagaagaactagaacaggaggaactagacaagaatttgctggaaatcagtggac

SEQ ID NO: 346638 - DNA, 75 bp, Homo sapiens
gctatcagcaaacacctccccaaggaccttttcctctaaatgaagtgcttgctgaatgaggaatgggactttcca

SEQ ID NO: 346639 - DNA, 75 bp, Homo sapiens
ctgaagatcagcatccgccagctcaagtggaaggaggactcacaccacccggcaagaactgctcactacggctcc

SEQ ID NO: 346640 - DNA, 104 bp, Homo sapiens
cacaggcttccagtacgagctggttaggaggcacagggcgtcggacctgcacgagctgtctgcaattctgtggtgttcttggtcacacatttatggagtttctg

SEQ ID NO: 346641 - DNA, 75 bp, Homo sapiens
tcctctgagtttgagattgtcaaggccataaaagaagtgttggtgtctgtccagtcccttatattagtagctgag

SEQ ID NO: 346642 - DNA, 75 bp, Homo sapiens
tttctccaaggtttgaaaagcagctggcctgcaagatttcttcggtgcagaaaaaaaatgaagatttaggacagg

SEQ ID NO: 346643 - DNA, 75 bp, Homo sapiens
ctcagatgctgccagggtccctgaagagggaagacacgcggaaacagatttcaggtatgctgctgaaagtgggaa

SEQ ID NO: 346644 - DNA, 76 bp, Homo sapiens
caccatgctggtcagcttggtcatgatctaccagttcattgttcaggttgcccccaagtttcctggcagtgtgtga

SEQ ID NO: 346645 - DNA, 100 bp, Homo sapiens
gtttccctctgtgcggcggccggcgggaccataagggcttaactcatatatttaacccccctccaaaaagggatggtttagacaacagtgtagcttcacc

SEQ ID NO: 346646 - DNA, 83 bp, Homo sapiens
gaaatttgctctgctaaaaggctccttcagtgagcaaggcatcaacgagtttctcagtgccggtggtggtgtgcacattgagc

SEQ ID NO: 346647 - DNA, 75 bp, Homo sapiens
ataaattatgatctacctaccaatcgtgaaaactatattcacagtatgggtatggcccttatcagccagttccag

SEQ ID NO: 346648 - DNA, 82 bp, Homo sapiens
ctgaaacaactggaaactgttttggatgatcttgaccccgagtcattgaaagaaaatcttgcaaggtgttggacacttactg

SEQ ID NO: 346649 - DNA, 75 bp, Homo sapiens
aactgtttccagtatatacatcaagtcactgaggtctatgctccatcagcaagcactgccgactacaatagggac

SEQ ID NO: 346650 - DNA, 75 bp, Homo sapiens
agtcggcactgctactgcgaagacagctggcagagccaagattttcttcttcactcctcgcttggtggctcccag

SEQ ID NO: 346651 - DNA, 75 bp, Homo sapiens
aatgtgattttgcctatgaaaccatgggaactattgaagtacaaaggcagtttgaagagaacacatgaagaagag

SEQ ID NO: 346652 - DNA, 90 bp, Homo sapiens
ggtggtgatcgtggcaggttcaaatggctggtataattataggcaccagtgttgttaataacagtactggtagtggaagggattgccgtg

SEQ ID NO: 346653 - DNA, 100 bp, Homo sapiens
gtctatttcacgaccaagaagcagcaagcagatctgatatcattaggaaaagttgtgttggctttggcttgcaactctttggcaggaattcagcgagaga

SEQ ID NO: 346654 - DNA, 97 bp, Homo sapiens
ccggcctcctcagtgcgaagaagctgcagccgcacctggccaaggtccacctctggaggtatgaaggaggctatccagccctcacagaagtcatgaa

SEQ ID NO: 346655 - DNA, 90 bp, Homo sapiens
cgccgaagaagcatcgttaaagtctctcttcaccctgccgtcatgtctaagtcagaggaacaagatcttgatatttggcctctttgaaga

SEQ ID NO: 346656 - DNA, 101 bp, Homo sapiens
tgtaaagaagactattcagaaaaagatgattgacgctaaaggcttcccaactgatgcaactcttgatgacataaaagaatggttagaagataaaggtcaag

SEQ ID NO: 346657 - DNA, 100 bp, Homo sapiens
tgatctatctactggaacatggacaggaactgtggacagtgaagagaggcctctcccaaagcacctgcgcagggctgacaggacaactggatcagtttca

SEQ ID NO: 346658 - DNA, 99 bp, Homo sapiens
tcaaaaaggataaggagatcatagcagagtacgatactcaggtcaaagagccttttgaatggactgatgtgttctaagcccgaagatccagtagaatac

SEQ ID NO: 346659 - DNA, 75 bp, Homo sapiens
taaaaggcaaactcttcacctgggtcctgaggacaccgtgagccagccaggcctggccgctgggcctgaccggcc

SEQ ID NO: 346660 - DNA, 101 bp, Homo sapiens
agaacaccagttttttcctttttagatctcacttactggaaaagatccgagatcagcttgttgttggacagctgattccagactgctatgtagaacttgaa

SEQ ID NO: 346661 - DNA, 82 bp, Homo sapiens
gaaaacatttttgaaaagacaagccatcaaaactgccttcagaagcaaaaggtgtgatgaatgcagactctgctaccatttt

SEQ ID NO: 346662 - DNA, 82 bp, Homo sapiens
ccgccccggcccttcgacccacacgacttgtatggaattactctgatcaccaaagaggaagcctctggaagttctgtcacag

SEQ ID NO: 346663 - DNA, 117 bp, Homo sapiens
ctgaagtagcaaaggcaagaaggcaacgacgttccatctgtggaaggacctaccaaccagggatttcttccagaaagcatgtatgaacgtattctcactggtcccgttgtgagagag

SEQ ID NO: 346664 - DNA, 75 bp, Homo sapiens
caggatttatcaaatcgagtcactgtcaaaatatcaacacctttgagaacagaatgttaatgcttgatgggatgc

SEQ ID NO: 346665 - DNA, 138 bp, Homo sapiens
gactcgagggtgacgctcgctccgctcgtcccgctcgtcatggcctacccgggatacggaggagggacttaattcagtgcacaaatgagatgaatgtgaacatcccacagttggcagacagtttatttgaaagaacta

SEQ ID NO: 346666 - DNA, 74 bp, Homo sapiens
agaacagtgaagagctccgagaaattatgggtacccctgaatatgtggattatgatgaagatgactatgatgct

SEQ ID NO: 346667 - DNA, 50 bp, Homo sapiens
gccgtggaggcagaggtggcatggggtgtgttgctgggcattgccatccg

SEQ ID NO: 346668 - DNA, 100 bp, Homo sapiens
cgccatcaatgcacgcaagatgaaatttgctctgctaaaaggctccttcagtgagcaaggcatcaacgagtttctcagatggaatcttgctctcttgctc

SEQ ID NO: 346669 - DNA, 88 bp, Homo sapiens
gcggtgctgaggcacctggagaccttcgagcaccccaacgtggtcaggccagcgcaggacatctcattgccattgtcagccaggaact

SEQ ID NO: 346670 - DNA, 100 bp, Homo sapiens
ccgccgccgcgcacctgccttcgctcccgcaccgttaaatcgtcgatctgaaattgttgctaatagctctggtgaattcatcttgaagacatatgtaaga

SEQ ID NO: 346671 - DNA, 101 bp, Homo sapiens
gaaacgagatcctgcgttcacttatgaagtgatagtagttgatgatggcagtaaagatcagacctcaaagcagattgcacagagtttgaaagatgaacaga

SEQ ID NO: 346672 - DNA, 83 bp, Homo sapiens
cagaaattctggaacacctatatggctcccgagccagccgggaggacacttactacagctgctcagaagcaccactggaaact

SEQ ID NO: 346673 - DNA, 98 bp, Homo sapiens
gtgcgtgttgctgcgagtgggacgcgcactggtcggtgccggctcaggagccgggggaatgcagtggtgtcttttgaaagaagaggatgtcattcctc

SEQ ID NO: 346674 - DNA, 100 bp, Homo sapiens
gagagcaagaaagctgcctcaagcctacagacttccagatggaatttcgtttccctctcaggactttgagcaggactggaatgtcacgtggaataccagc

SEQ ID NO: 346675 - DNA, 74 bp, Homo sapiens
cagatttcagtgtcctccttagctctgcagggagtggagcaactgctgtagtccaagcagcttattgtgcccct

SEQ ID NO: 346676 - DNA, 100 bp, Homo sapiens
ggaaggggcagtacaagcttacgtctctgctcttcagtacaatcctgaaacccgaaccctagcggagattgccaaagtggagctggacaatatgccactc

SEQ ID NO: 346677 - DNA, 100 bp, Homo sapiens
ccagaagccacgatccagaccgcaattaacaatggtacagattgcagagggaatggcatacatcgagcggaagaactacattcaccgggacctgcgagca

SEQ ID NO: 346678 - DNA, 82 bp, Homo sapiens
cttcggcaacccgaagccacaggatggaggagggggatcccagcaaagataacgaaggaggcccaacttcattcaataagga

SEQ ID NO: 346679 - DNA, 88 bp, Homo sapiens
ggcacggagtcgccgcggagcgcaggtgaatctggattgggaaagtcgacattaatcaactcattattcctcacagatttgtattctc

SEQ ID NO: 346680 - DNA, 90 bp, Homo sapiens
caatgaatctgtgtgtgagattatgcagtcttgcttccggatctgctttgaaatgaggctcagtggttcctcctgcacaccagcttcctg

SEQ ID NO: 346681 - DNA, 100 bp, Homo sapiens
cggctccatcgacctcaaggacatcaacttccggccgcagatgtcccagatcagcttgaacgggtctttttacgacttggccatgctgaaacagatgaac

SEQ ID NO: 346682 - DNA, 95 bp, Homo sapiens
agagcttcatcaaaaatagtgatagctttgataaactttgagaatcactacaagaaaaactccttgtggtgaaggttctaagacgtgggatcgtt

SEQ ID NO: 346683 - DNA, 74 bp, Homo sapiens
cagtggagaagctgggggcctatgagctgtttttcagaagaagtgaagtcaagatgaagaaccatttgcttttc

SEQ ID NO: 346684 - DNA, 80 bp, Homo sapiens
ctgatgggagcaagttgactaccaccagtggagtccaggatgaggattttttatcaagcagaaatgcatcgaacaacgag

SEQ ID NO: 346685 - DNA, 85 bp, Homo sapiens
gtcctggctcttgccctcatcctggttctggaatcctcagttcaaggatattagaaatggctactccccagtcaattttcatctt

SEQ ID NO: 346686 - DNA, 83 bp, Homo sapiens
cctcggctgtggaccgggcggcacgcacgcggtgcagggtaacatggcggatgcggaaggagtgatttgggccccgatgttgg

SEQ ID NO: 346687 - DNA, 97 bp, Homo sapiens
gggtactcggaaggcgcgggcaggagcctggcgaggatgcaccttcccctgccttggaaaggtgaccttgaggaaccctgggagctcaggaaggaag

SEQ ID NO: 346688 - DNA, 83 bp, Homo sapiens
gcgcgcccagagccccgcgtttcagccctagggaaggtctggccgtgggcctgggcttcggggcactggcagaggtcgccaag

SEQ ID NO: 346689 - DNA, 101 bp, Homo sapiens
caaagtttgatgagcagagaactgctactctgatgatgggagaaccagttactaccttctctaacacaggctccatcctatctcttcatctcttcttgcca

SEQ ID NO: 346690 - DNA, 76 bp, Homo sapiens
gagacactggcattggaacttcctgttctgatagcgtggaagcataagctgtggccatgactactgaagtaggctc

SEQ ID NO: 346691 - DNA, 97 bp, Homo sapiens
acaccaccttcatctccaccatcgaatcccctactttgaaactagtgctgccaatgggacaaacataagccaagcaattgagatgcttctggacctg

SEQ ID NO: 346692 - DNA, 90 bp, Homo sapiens
aaaataagtatgaaaacgtggatttgctttgtaaacttgagaatacattttgttgccaacaaaaagatcactgtgtccactactatgatc

SEQ ID NO: 346693 - DNA, 74 bp, Homo sapiens
ggctgttgttcttttcttttccatgatatcattatatggacagtttaggatcattaagcagcttcgagtctgga

SEQ ID NO: 346694 - DNA, 75 bp, Homo sapiens
cacatccctagcgccaagaatgttttaaccaaacagttgtggctactcatggtgaggaatgaccgctaagagttt

SEQ ID NO: 346695 - DNA, 96 bp, Homo sapiens
cacacagacaactatgatagcacaaacatgccattgatgcaaacgcagcaaaataagcgggttttgaaaacaaaaaaaagaaggagtggaagaggg

SEQ ID NO: 346696 - DNA, 100 bp, Homo sapiens
tggcaactgcagcccgaggacaagcggctgtacaagaaaattccccaggacacagagctggtttggagcctttctttgattttattgtttctattaatgg

SEQ ID NO: 346697 - DNA, 75 bp, Homo sapiens
ctgctcctgctcatggacgacgacgcgccagcggagctccggctccttcgccctggacgcggaggccgcggtgtg

SEQ ID NO: 346698 - DNA, 100 bp, Homo sapiens
caagatggaggtggactacagcgccacggtggatcagcgcctacccgagtgtgcgaagctagccaaggaagggcctgtcccagtcggctttaccctatcg

SEQ ID NO: 346699 - DNA, 100 bp, Homo sapiens
tgacaattctgtcgtgtcccgaaatctcctgcaaagaagctgagccatgcaattagtaaatctttggggtgtgtacccacgagagaacccccgcatcctg

SEQ ID NO: 346700 - DNA, 83 bp, Homo sapiens
actgctttggacgtgggagtcacctgaaagccaggaaatggtgctggagaatctggtaaaagcaccattgtgaagcagatgag

SEQ ID NO: 346701 - DNA, 100 bp, Homo sapiens
tgacgataagcaaccaacgttcagagcactctatgaagcaatacgggatatgccaacgtccggcggtacctccagctgacacagtcagaactcagcagct

SEQ ID NO: 346702 - DNA, 75 bp, Homo sapiens
gtaattcagctacagggtgaccaacgcaagaacatatgccagttcctcgtagagctcagatcgtctgatagaaga

SEQ ID NO: 346703 - DNA, 97 bp, Homo sapiens
tgcaatcaaagctcgacttctcaatcccaagtggccaaaggttcgagaacttgtcttggacaattgcaaatcaaatgatggaaaaattgagggctta

SEQ ID NO: 346704 - DNA, 100 bp, Homo sapiens
ccaatggcaactatgtttggatgttggatctacactttctcaagcactgtgatcttcaaatcaaactgaaaccgtgtcagttcagtcttcggtattgggg

SEQ ID NO: 346705 - DNA, 75 bp, Homo sapiens
ctttgccctgatgagctcctgtttagccactgcaggaccttctaccgctttgaggctgtgtgggatagctctctg

SEQ ID NO: 346706 - DNA, 75 bp, Homo sapiens
cggactgtgtccggcgatgggcacgggggtgtccgcaatgttgccagtgtctgtctgcagattggctacccaact

SEQ ID NO: 346707 - DNA, 51 bp, Homo sapiens
ctggccctgaccgagacctgggccggtaagagtgatgagcaacgtgcagct

SEQ ID NO: 346708 - DNA, 83 bp, Homo sapiens
cttctaagctgaataaagctgttttggaactgtcaggtacctcaaagcaacatacatatgatagttgagaaagacacatattc

SEQ ID NO: 346709 - DNA, 80 bp, Homo sapiens
gggaaggtcaacagagccaagtccattgagggatatcaagagaagccagagtaaaccccattctgtgtctggctgactct

SEQ ID NO: 346710 - DNA, 75 bp, Homo sapiens
aattgatcctgctcccttccagctggtggagcggacctctttgcacaaggctggtctcgaactcctgggctcaag

SEQ ID NO: 346711 - DNA, 75 bp, Homo sapiens
ccatgggatcggatttacccataattgagaagaaacttgagaggtggagtaactaatacggcacaatatcagaac

SEQ ID NO: 346712 - DNA, 88 bp, Homo sapiens
catgcggggtccgagcggggctctgtggctgctcctggctctgcgcaccggtccgcgggagagctgtggggcttggtgagtgtttcgt

SEQ ID NO: 346713 - DNA, 83 bp, Homo sapiens
cgcgtgtcctcggagcgcggtccctgtattggtctcctgctcctagagtacaaaattggacagctgtacatgatcagcaaaca

SEQ ID NO: 346714 - DNA, 100 bp, Homo sapiens
cgccggcgacctgaggggagagggaacgcagctgaaagcgtgaactgtcccgttttacggagaagacttttactgtgaaattcctcggagctttcgtcac

SEQ ID NO: 346715 - DNA, 82 bp, Homo sapiens
ggcgccgaacttgggctcgggaagccggcggaccgcgtcctgcgccggagcaggaattatctgtattagcaggaaattttcc

SEQ ID NO: 346716 - DNA, 82 bp, Homo sapiens
tatcagcaggctccgggctgaagattgcttctcttctctcctccaagagttgtctgctggttctcagcttgaagaagattct

SEQ ID NO: 346717 - DNA, 90 bp, Homo sapiens
ccccacatcgacaatttggaggtggcaaacagcttcgcagtcactaatgcttgtgtctggtggcctgacatgcaccgcctggctgaccgc

SEQ ID NO: 346718 - DNA, 75 bp, Homo sapiens
ccattgtgtgctgtgaggtaaaggagtattgtgaggattgagatgactggagtgtgtgtggcctggagagttgct

SEQ ID NO: 346719 - DNA, 90 bp, Homo sapiens
ccaccctcctccaccgtcgcctcccactgcaaaaaggcctgggtgtctggaaatgaagtatggaaatgaaatcatgaataaagacccagt

SEQ ID NO: 346720 - DNA, 100 bp, Homo sapiens
gctactgttagctcataaagactgcccagtcactgcactacagaaaaagactcaaggctatttagatttcagccttccaagttctgatgtaacaaacaac

SEQ ID NO: 346721 - DNA, 100 bp, Homo sapiens
gtgatcctttgcaccctgcttggagacggacttgcttccggtcagcccaaggccaaccccactgtcactctgttcccgccctcctctgaggagctccaag

SEQ ID NO: 346722 - DNA, 90 bp, Homo sapiens
ggagagtgtgcggctccaggtgggctcacgcgggaaaacttgttattggacacaatatgctcttggacgtcatgcacacagttcatcagt

SEQ ID NO: 346723 - DNA, 100 bp, Homo sapiens
tcggcgccgagtgggaggatggcggaaaacatccagtcatggataaaaatgagctggttcagaaggccaaactggccgagcaggctgagcgatatgatga

SEQ ID NO: 346724 - DNA, 76 bp, Homo sapiens
tgctcgccatcttcatcctggtgatggcaaatgtcgtggacatggccccagatgagaccaccctaaaggagctggc

SEQ ID NO: 346725 - DNA, 98 bp, Homo sapiens
ggctctgagccccggcggcgcccgggcccacgcggaacgacggggcgaggacatggatttgattgacatactttggaggcaagatatagatcttggag

SEQ ID NO: 346726 - DNA, 83 bp, Homo sapiens
aggcagggagcttccaggttatagacaatgcagatcttcgtgaagactctgactggtaagaccatcaccctcgaggttgagcc

SEQ ID NO: 346727 - DNA, 100 bp, Homo sapiens
caccctgaacgggatttatacacacatcactaaaaattatccctactacaggactgcggacaagggctggcagtatatacatcctgcagatgctgtgaag

SEQ ID NO: 346728 - DNA, 82 bp, Homo sapiens
cgaacatgcgcttttgacacattggaggttcccaacaaggctacgcagaagaacccccttgactgaagcaatggaggggggt

SEQ ID NO: 346729 - DNA, 100 bp, Homo sapiens
cgaggaggtgaatacacctctgattttaatcagttctgcgtttgaaaggaaacccggtaaacgctgcatttctacaacagccacctgtgcaggccctgca

SEQ ID NO: 346730 - DNA, 75 bp, Homo sapiens
ccggtgccggcctagcgtcctggaattacttcaatcaaatgaagaaggtgtaacattgacagtagatcgctttga

SEQ ID NO: 346731 - DNA, 50 bp, Homo sapiens
ttaatgggaccctaaagcattaccagatgggcaaaacatgtagctgagaa

SEQ ID NO: 346732 - DNA, 80 bp, Homo sapiens
cagtgctacgtgtccctggcattttaggtgtcggttgggtagcttccccgggcgctgcctggacaggcctgcctgcgtgc

SEQ ID NO: 346733 - DNA, 50 bp, Homo sapiens
gcgtgcaggctgccaaggccagcggggtttgttaaagttgttaagaataa

SEQ ID NO: 346734 - DNA, 75 bp, Homo sapiens
atcctgctgggcttcgtccagatcgggaagggacagaatgctttgacctccaagctgttttaaatctagtagata

SEQ ID NO: 346735 - DNA, 90 bp, Homo sapiens
ctgccagcgagagccgcgggagagtgtgcagccgagtcactactgcctgcctgcctgcctgctacgacctcctgccccccgaggtctgca

SEQ ID NO: 346736 - DNA, 73 bp, Homo sapiens
tgaaaaaactattaatcagcaaagaattcatgctaccatttaagattaaaggacaaccagaaagtggaattct

SEQ ID NO: 346737 - DNA, 74 bp, Homo sapiens
cctaccatggtatgacactgaaatctgtaacggtctcatatcttttgggtgaacagaagtctacctttgtgggg

SEQ ID NO: 346738 - DNA, 75 bp, Homo sapiens
tgtttccacatcggtcagaaaaagatttttctggatatgccgcagaaggatccgtgccagaagcaagcctgtgag

SEQ ID NO: 346739 - DNA, 75 bp, Homo sapiens
gaaaaagcaagagtttgttatatagcattttaccgggcagaagttgaagccctccattcttcgggtatgacagca

SEQ ID NO: 346740 - DNA, 76 bp, Homo sapiens
aactctttggcggagacaaacacccaaactcctttatccccttgctggactgtgctgctgccatctcggctcactg

SEQ ID NO: 346741 - DNA, 83 bp, Homo sapiens
acttggatgcctgcaaagcgaggctgaagaaggccaaggctgcagaagccaaagccacgctctccttcctccactaagagcgg

SEQ ID NO: 346742 - DNA, 110 bp, Homo sapiens
cttcaacaaccccaccacggagttccggtacaagctcctgcgggccggcgggacaatgcagatcttcgtgaagactctgactggtaagaccatcaccctcgaggttgagc

SEQ ID NO: 346743 - DNA, 75 bp, Homo sapiens
ccgagcctgacggagccggaggctgggagccgcggcggcctgggaatgacagcccatatcaaggcggtgtattct

SEQ ID NO: 346744 - DNA, 100 bp, Homo sapiens
tgcaacaagtgtctttggttataaattatgatctacctaccaatcgtgaaaactatattcacagttcacagtgagtacattggatgatgtgaagaattct

SEQ ID NO: 346745 - DNA, 75 bp, Homo sapiens
acaaatagagctgccagaggttccctccgagccccttcctgagaagatcccagagatggggtctcgctatgttgc

SEQ ID NO: 346746 - DNA, 100 bp, Homo sapiens
gggccttactccttcacagatcgacctggccataagggacacctttgtgaatgcctctcggaccctgtacagcagcagccccagagtcctaagcaacaac

SEQ ID NO: 346747 - DNA, 97 bp, Homo sapiens
atggtgccgagagggacaggcttctccggaaggaacagattttagctgtggccaggagtccaacctataccttctcagggaggcaaactagaaatag

SEQ ID NO: 346748 - DNA, 90 bp, Homo sapiens
ggtttggaaccagtggctttgggactgtaagaggatggacaaagagctcgtccgcatggtgctgaatggctgaggaccttcccagtctcc

SEQ ID NO: 346749 - DNA, 90 bp, Homo sapiens
cagcaggggactcctgacacttccccttccccaccgaaccgcgaaatacatgctacaggatttaactatcagaatgaagatgaaaaagtc

SEQ ID NO: 346750 - DNA, 88 bp, Homo sapiens
tgcataaattccttaccattccgagactggaagaactttacaacactgtttccctaatgtgggaaagtcctcgctgatcaatgggctg

SEQ ID NO: 346751 - DNA, 82 bp, Homo sapiens
tgctttccactcggctcctgtcgtccgttctctcaggctcccgttcaggtttgcctgcaatgagatttcattctctacattt

SEQ ID NO: 346752 - DNA, 96 bp, Homo sapiens
tgaagtcggtgtttggagaaaaggactcagcctaaacccaccaagggacgaatgcgcatccactgcttagagaatgtggacaaggcccttcagttc

SEQ ID NO: 346753 - DNA, 83 bp, Homo sapiens
tccagcaacccatacctgatccggagaatcgaggagctcaacaaggaagctcttcgtgggcggtcttgactggagcacgaccc

SEQ ID NO: 346754 - DNA, 75 bp, Homo sapiens
gcgagccattctaccttgtatcaaggggaagatggagagttggaagaaggtgaattggaagatgatggggcagag

SEQ ID NO: 346755 - DNA, 83 bp, Homo sapiens
ctggacgttaaagggaagcgggtcgttatgagttcccatggagaatgttgcaacaattgctgattgtgccagtgtgattgaag

SEQ ID NO: 346756 - DNA, 74 bp, Homo sapiens
cttcaatactacctttatttccaccataggcctgtgatacttgggctgtgatcctctagagccagcttggactc

SEQ ID NO: 346757 - DNA, 88 bp, Homo sapiens
ggaatattttctgtcttcaaacacactgcaggtgaccaagaatatggcccaggtgaccaaagccctggacaaggccctgagcaccatg

SEQ ID NO: 346758 - DNA, 90 bp, Homo sapiens
ggaccctgctgaatagctggggctacaggcgtgtgtcactgcgcccaggtcctaggcctacttacaagcctccagtctcaaattatccag

SEQ ID NO: 346759 - DNA, 75 bp, Homo sapiens
gtccaggtaccagccagtccagacaccgttccacagccttctctcaggagccagatgaccaagatgctccagatg

SEQ ID NO: 346760 - DNA, 100 bp, Homo sapiens
ccgggatttgggtcgcagttcttgtttgtggatcgctgtgatcgtcacttggcgagaaccactgtctctgatcaacgtgcggaagaggaacgtggaatct

SEQ ID NO: 346761 - DNA, 96 bp, Homo sapiens
tcagaactgtgttcgcaattcttacgatgtcttctctttgctacggctgttcgctgctacgaatctttaatcttaaaagctgaaggaaaagtggag

SEQ ID NO: 346762 - DNA, 75 bp, Homo sapiens
cccaactacccattcatcaacattcggtcaagtggtcaaaatgcagatcttcgtgaaaacccttaccggcaagac

SEQ ID NO: 346763 - DNA, 73 bp, Homo sapiens
cagccgcggcccccggacaagggcagcttcccgctggatcacttagaggctgggaggcggcagaatgcagcca

SEQ ID NO: 346764 - DNA, 101 bp, Homo sapiens
ctgggaaggtggagccaccagcctctccttgcatgcatatgcgctagaacttctatttgatcagttgcatgaaggagctaaagctcttgatgtaggatctg

SEQ ID NO: 346765 - DNA, 100 bp, Homo sapiens
cggaatgtcaactattcaacatggaggcggaggtcgataagctggaactgatggtttggtgcacctcgatttggaggaagtagggcagggcccttatctg

SEQ ID NO: 346766 - DNA, 90 bp, Homo sapiens
tacctgagggaaactgcctgggctcaggagttctgaatgtcagcatctgcaagaatgtatccctctgaagaagatatgatcgaatgggcc

SEQ ID NO: 346767 - DNA, 100 bp, Homo sapiens
gaaaacaacttcgagggcagactgagatgagtgaactgagtgtggcacagaaaccagaaaaacttttggagcgctgcaagtactggcctgcttgtaaaaa

SEQ ID NO: 346768 - DNA, 95 bp, Homo sapiens
actgtttcagttgcagactttaggcctgaaaggaaaattgcctaagaattatgacccaaaagttaccccagatccagaaagatggctgccaatgc

SEQ ID NO: 346769 - DNA, 82 bp, Homo sapiens
ccacccaccgccgccgcctcccagtttgggatatgagattgaaaatgacgactcggaattttcctgagagagaagtaccctg

SEQ ID NO: 346770 - DNA, 82 bp, Homo sapiens
cggagatggtgcagaagatggaggagtaacctttggaaacatcagaagctactctccattgacctggacaaggtggtgttac

SEQ ID NO: 346771 - DNA, 82 bp, Homo sapiens
gacagaattgaatcacttgaaaagaggctcgaggaactgtggctgcaccatctgtcttcatcttcccgccatctgatgagca

SEQ ID NO: 346772 - DNA, 78 bp, Homo sapiens
acgagccggccctcatgttcagcatccccaggctggccatcgtgtggagcgatctctctttgagtcggcatggaagaa

SEQ ID NO: 346773 - DNA, 75 bp, Homo sapiens
atcccagtcacccaggcctccgcttctccggcctccctgctcttaccgggagacatgcacatgatggtgtccaag

SEQ ID NO: 346774 - DNA, 100 bp, Homo sapiens
cctggagcagcatcgaggcccgggaggaatcagagatcattgatttcttcctgggggcctctctcaaggatgaggttttgaagattatgccagtgcagaa

SEQ ID NO: 346775 - DNA, 101 bp, Homo sapiens
tgcagttgcagctctttctgcagatgccctgagagaggaggtggcaggatcccattttctcactggcgactcccctgcgtgctggtgaagaaggcagccac

SEQ ID NO: 346776 - DNA, 100 bp, Homo sapiens
taacacaacaagtttagggagtccatggccagaaaacttttgggcacttgctctgaaatttggggactgagtacaccaaatacgatagatcagtgggata

SEQ ID NO: 346777 - DNA, 103 bp, Homo sapiens
ggaagaagctaatcttgtacttcaagaggaggaatcacgctcggaaacaatgggtgagaagccctaccactgcaactgggacggctgcggctggaagtttgcg

SEQ ID NO: 346778 - DNA, 98 bp, Homo sapiens
tttgttattggagaaacatgcagattatatcgcatcctatggctcaaagaaagatgattatgtttctgctttgggacaaccatacatctaattcctta

SEQ ID NO: 346779 - DNA, 100 bp, Homo sapiens
taccatgggcaccctctgggcatcgggccctgtctgcaatacacctgcaggaagagctcgatcaggttcaggttatcaatactctggctgaccatcatca

SEQ ID NO: 346780 - DNA, 108 bp, Homo sapiens
tggaaattatacctgtgaattaaaatatggaggctttgttgtgagaagaactactgaattaactgttacagtaaaggcatgacttcctggcaccacagggaaaatcgg

SEQ ID NO: 346781 - DNA, 100 bp, Homo sapiens
agagtgaactttccatccggataggtagagctgggcttctttcaggacagaactgtaccgctctctttttggccagctccaccctcccgacgaaggccac

SEQ ID NO: 346782 - DNA, 100 bp, Homo sapiens
tcccagtgctgaagtcccaaggagccgccctgcagaggtcggatccgcagctgcttgcccggttctactatgccgacgaggagctgaaccaggtggccgc

SEQ ID NO: 346783 - DNA, 75 bp, Homo sapiens
ggctccgcccacccagcccatgggctccctgaggcccgcccagccgactttgaagatggcatcctggacacttgc

SEQ ID NO: 346784 - DNA, 80 bp, Homo sapiens
cttgcctccctgcttcctgctgctggcactggtccttgtcccctcaggtactccaaagattcaggtttactcacgtcatc

SEQ ID NO: 346785 - DNA, 100 bp, Homo sapiens
ctcccaggctcaagcaatcctaccatgtcagccttcccagtagctggaactacaggtgtgcggcgacatccatggacaattctatgacctcaaagagctg

SEQ ID NO: 346786 - DNA, 100 bp, Homo sapiens
ccaactcgtccaactgacaagcccttgcgcctgcctctccaggatgtctacaaaattggtggtcagcttttgccaactgttttcaaatcacatgcatggg

SEQ ID NO: 346787 - DNA, 75 bp, Homo sapiens
acgcgcagaccttcgttgccctctgtgccacagggcgaccattgacgaggtggagacggacgtggtggagattga

SEQ ID NO: 346788 - DNA, 101 bp, Homo sapiens
cggaaggcggcgtccgcgacgcagctgttcacgcttaggtgggcgacgtgggcgcaggtgggcgcagatcccgactgggcctcctacactctgggcgtctt

SEQ ID NO: 346789 - DNA, 100 bp, Homo sapiens
ggtgaagttatgattttgcagcaagattctgggagcaggccagcatctacatctgttctaaactatatggcattcgccctgaaaatgtgattatatatgg

SEQ ID NO: 346790 - DNA, 80 bp, Homo sapiens
ctccctcagaagcatcgtgaaaagcctccttctggttccaaatggttcctccccgggcagaagaaatcaccattccagct

SEQ ID NO: 346791 - DNA, 96 bp, Homo sapiens
gcgacctggggccctgggtgaagtgctccgccgcccttgcctccaggacccggtcagcccaaggagcaggggtccagcagctctgcggaggcatct

SEQ ID NO: 346792 - DNA, 83 bp, Homo sapiens
cgcacaggccgtcgctatgagcgggaccaccctgggcacagcaggcatcggaggcacaaatcctgaagagcccgtgggcgtgg

SEQ ID NO: 346793 - DNA, 83 bp, Homo sapiens
ctctgggatccccgccgctctgtctacaacccgagaatagcctaacatggcagaccagagacagcgctcactgtctacctctg

SEQ ID NO: 346794 - DNA, 100 bp, Homo sapiens
gtcggtgcgaggagccgacgccgacgccacggagtcagcacaagtctcatcagattgttgaacagataaatacgaaactgccatcatcatttgtagaaaa

SEQ ID NO: 346795 - DNA, 111 bp, Homo sapiens
cggcgaaaggagctggtgcctgtgcaagttgttgaggccgaatacatcaagcaatggtaacatctttaaatgaagataatgaaagtgtaactgttgaatggatagaaaatg

SEQ ID NO: 346796 - DNA, 50 bp, Homo sapiens
tcccggccaccagcaattgtccggagttgtatcccgcattttgtattcac

SEQ ID NO: 346797 - DNA, 82 bp, Homo sapiens
ttcctgtccaaagctgggcgaatcaggtatggcctcacaagtcttggtctacccaccatatgtttatcaaactcagtcaagt

SEQ ID NO: 346798 - DNA, 83 bp, Homo sapiens
aacgaaagcagtgacggaggagcttgtaccaccggttggttcctgtataccttgggccagagagcaaacataggtggcctgag

SEQ ID NO: 346799 - DNA, 97 bp, Homo sapiens
gctggcctgcggcgcctgggcgctctgaggtgtccctggccagtgtccttccacctgtccacaagcatggggaacatcttcgccaacctcttcaagg

SEQ ID NO: 346800 - DNA, 74 bp, Homo sapiens
atactttacttaccatccacacagtgcatgtagacctttgcattgcagctgtaattaaagaatgccatctcgtc

SEQ ID NO: 346801 - DNA, 100 bp, Homo sapiens
ctgttattcgggcattctacggagggagatattcttgaggtggtgaagcagtattttccaatttgaagattcatttgaaggtggctcctgccacctgcta

SEQ ID NO: 346802 - DNA, 76 bp, Homo sapiens
actctgactctcggactgagaaacgcaagatgccttcaattaagttgcagagttctgatggagagatatttgaagt

SEQ ID NO: 346803 - DNA, 51 bp, Homo sapiens
ctcggctccggaggtggcagttaaggaatgtcgttgtctgctgggtcttcc

SEQ ID NO: 346804 - DNA, 75 bp, Homo sapiens
agtgcaacatctgcaaggtccgcttcaccagaacccagcgggtgccgcttctccacccgaggcttccacctccaa

SEQ ID NO: 346805 - DNA, 89 bp, Homo sapiens
cgcggaggagccgcgagcgctgagggtgagtgccgggagctctgaggcttccttcaaaatgtctactgttcacgaaatcctgtgcaagc

SEQ ID NO: 346806 - DNA, 100 bp, Homo sapiens
caatgccaggaggtctggagaaaacgtgtcatcagtgcatttctaaaatcgccagcaatggtgttggggatgtcctttgcactgaccctgaactgccaga

SEQ ID NO: 346807 - DNA, 100 bp, Homo sapiens
agaagcatgtgtcttccccagctctgcagccacatactatccgtttgttcaggaaccaccagtgacagaggacctaatacctatcattgctgctctggaa

SEQ ID NO: 346808 - DNA, 75 bp, Homo sapiens
tagggggcttacccttacccccacagctttatcgtctgcaacaacatgttaagtcagcagataagcagagagccc

SEQ ID NO: 346809 - DNA, 100 bp, Homo sapiens
ggcatgtgccttatgaccctcgtgatcacgaacaaaggtattggcagaagattttggttgatagacaggcaaaacttaatcagcctcgggaaaagaaaag

SEQ ID NO: 346810 - DNA, 90 bp, Homo sapiens
aggaggggccccagcagcccccgaaggccctatcaggacatggagtatgaaagacggttgagataagtcgaagagtgactctggaaaaac

SEQ ID NO: 346811 - DNA, 100 bp, Homo sapiens
cttgtcccgctgcagccgagatgccgggggagcggggccttccacaccccctccgtgggtgtgtgatggagatcttataacaatttttgatagttctgac

SEQ ID NO: 346812 - DNA, 75 bp, Homo sapiens
ggctacgcgcccgcgcccgacggccgcagttgcttgggaagggcctgtcccagtcggctttaccctatcgacgca

SEQ ID NO: 346813 - DNA, 97 bp, Homo sapiens
cagtacacacacgcccgcctccacagatgtttcatgaatcacgtatcctgcatttgtgggctgccttgttccttgttgagttgttgcaagaggtccc

SEQ ID NO: 346814 - DNA, 100 bp, Homo sapiens
ccagcaccacctccagcccctgcgcctcggttctttggtggttaactacccttttgatgatgatgaacaaggacttgccacatatagtaaatcaccagat

SEQ ID NO: 346815 - DNA, 97 bp, Homo sapiens
tatcttctcatgaaggaaggaaccgaaggtgaccaagaatatggcccaggtgaccaaagccctggacaaggccctgagcaccatggacctgcagaag

SEQ ID NO: 346816 - DNA, 51 bp, Homo sapiens
gttccttgtggccgacgtgcaccaagctgctcagataaagaatttgatgag

SEQ ID NO: 346817 - DNA, 87 bp, Homo sapiens
ggcctgcgggcgatcgggccgagaacactctgctccagccaaggtggtgagggcagctgttcctaaacagcgcaaaggcagcaaggt

SEQ ID NO: 346818 - DNA, 50 bp, Homo sapiens
taagcatccactcatgtgaagtcaaatccccgtcgaggtcaagatcaaga

SEQ ID NO: 346819 - DNA, 83 bp, Homo sapiens
gcagtggtgctgtcagcgcggccgtcggagacatgggagacccggggtcggaggcttgggcactgtttaaaggaaagttccga

SEQ ID NO: 346820 - DNA, 88 bp, Homo sapiens
cgagacaagttcaccccgaagtctgccgatgtgcccgtggagaagctggccgccatgccagccttgcgcagcatcaacctccgcttca

SEQ ID NO: 346821 - DNA, 83 bp, Homo sapiens
gaagctgagccggcggcgggaggagctagggctggagcctctccagcctcccgcgaagacaatgcagatcttcgtgaagactc

SEQ ID NO: 346822 - DNA, 100 bp, Homo sapiens
tcacagacaactccaccaattgtacagtactatactggcaattgctggagaagattttgcaattgttgcttctgatactcgattgagtgaagggttttca

SEQ ID NO: 346823 - DNA, 98 bp, Homo sapiens
aggggctagtgagccgccgtgaagctgccctgaaggaggatttccgcagggaaactgctgctcgcatccaggaagatatggggatgacatatgcggag

SEQ ID NO: 346824 - DNA, 51 bp, Homo sapiens
gacagaaagtcagcctcttgtgtgtggggctgccttccaggaggatgatgt

SEQ ID NO: 346825 - DNA, 75 bp, Homo sapiens
cctgaacatcatgaattcccaagaaggagcctccacagccacggggacaccctgcacctattcccacgggacagg

SEQ ID NO: 346826 - DNA, 96 bp, Homo sapiens
ttggctactcactcttctgttaacagggtcctggcagttcgatcctttggtacagaagacagaccgacagatcgtccaataccacctcgagatgaa

SEQ ID NO: 346827 - DNA, 76 bp, Homo sapiens
ccgggccaggccgcggccggggcaggagcgcagggcacagaccatcatgaaggctcgtttaaagggagcacagaca

SEQ ID NO: 346828 - DNA, 100 bp, Homo sapiens
ccctcaacatcccggagcagctgccacaatgggacatgtgcaaaaaatgtggacacagacttgccaggcagcctggggcagagtgaagagaagcccgtgc

SEQ ID NO: 346829 - DNA, 75 bp, Homo sapiens
tcggaatccattatctttcgggaaagctctctggggcaggggaggtacatggtcagtggagaaggtgatccaggt

SEQ ID NO: 346830 - DNA, 74 bp, Homo sapiens
catctccaactgtgggaactctttccagcttgtgtctgggatctccatccaccaagcgaaggggtcagatgtta

SEQ ID NO: 346831 - DNA, 51 bp, Homo sapiens
gtttgttcaggaaccaccagtgacagagaagagagaagggcacagttacct

SEQ ID NO: 346832 - DNA, 98 bp, Homo sapiens
gggagacgagaagcctgaaaagtcgcagcgagctggagccgccggagacggtctggaaaatcccgaagcagaagcccgtattcatctaggcattcaag

SEQ ID NO: 346833 - DNA, 100 bp, Homo sapiens
ccagacatgacgcatgtcatccacaagctctcctttggggacacgctacagactctgtttgctggctacacggacaacctggtgcgagtgtggcaggtga

SEQ ID NO: 346834 - DNA, 100 bp, Homo sapiens
gcctgccccgccatgaatgaggagtacgacgtgatcgtgctgggcaccggcctgacggaatttagataatgggctgtgtgcaatgtaaggataaagaagc

SEQ ID NO: 346835 - DNA, 100 bp, Homo sapiens
cttctacttcaaatggaacagactccacccaaacatctggttggcaatatgatactcagtgttcactggcaggagctgtgctccattgaagtgacttgtg

SEQ ID NO: 346836 - DNA, 75 bp, Homo sapiens
atataagccaggcatgtctcccgaggagtgcaggcgcttcaccacagacgactatacttgtagcaagcagaaaca

SEQ ID NO: 346837 - DNA, 74 bp, Homo sapiens
aaacgccacaaaaagaaatgcatcttcctgggcacggtccttggagtgcctgaaacagtacatgcagctggcaa

SEQ ID NO: 346838 - DNA, 98 bp, Homo sapiens
gacctctggttctacttcacactgcagaactgggttctggactttgggcgtcccattgccatggacagtcattttgtttactcattcagccctgttgc

SEQ ID NO: 346839 - DNA, 96 bp, Homo sapiens
gaaaaccaagaaggagattttgaagatgcagatacccagcaacagcttgaagaagaggcagctaaacctcctgagcctgagaagcccgtgtcccct

SEQ ID NO: 346840 - DNA, 100 bp, Homo sapiens
tgctcaccggtttctcccacatcgacctggttttccaacctattggtggtatgtctgacagtggatcacaacttggttcaatgggtagcctcaccatgaa

SEQ ID NO: 346841 - DNA, 83 bp, Homo sapiens
gagccctgtaatattaatatttggatctaaaatcagaactgccattggatgtccagaatcccctgtagttgataatgttggga

SEQ ID NO: 346842 - DNA, 100 bp, Homo sapiens
ggaaactttcctcctccaccacctcttgatgaagaggctttcaaagtacagcacccccaaattcagaaggagtcccagtatatcaagtatctctgctgtg

SEQ ID NO: 346843 - DNA, 101 bp, Homo sapiens
gccgcctgctcgttcctgacagaatgtgaggagcaaaagaagggatccacctattcagttccaaaatctaaggagaagttgatggagaagcattcccagga

SEQ ID NO: 346844 - DNA, 100 bp, Homo sapiens
atttgatagaccaatgcacgtcaagatggatgagtgctacaactatattcgtgttcttgttccctgggactcccagacgctccttgcctgtggaacgaac

SEQ ID NO: 346845 - DNA, 90 bp, Homo sapiens
cagcgacggagctggggccggcctgggaccatgggcgaggacgggaggggcaagctgcggccaaccaaggccaagagcgagcggaagaag

SEQ ID NO: 346846 - DNA, 75 bp, Homo sapiens
gggggttgatacagcagagacgtcatacttggaaatggctgcaggttcagacatgcagtttctgaatatttatta

SEQ ID NO: 346847 - DNA, 98 bp, Homo sapiens
gtggtaggaaaaatccgcagagaaattcagaacctcaagcttttcaggcatcctcatataattaaactgattaaccacaatgaacggttggaattcct

SEQ ID NO: 346848 - DNA, 138 bp, Homo sapiens
ctcccttgccagaatgaaatgaacagaattcagaagctgagtaaggggaaaagcctgttgggttctcttattcaagtaccttccgttgagagggggaaacttagtaaagttcgcctgggttcgttgtctttgaaaaag

SEQ ID NO: 346849 - DNA, 75 bp, Homo sapiens
ctatctcttcaagtacatcataatcggcgacacaggttactataacaacagtaccaaggtggctgtgaaaaccct

SEQ ID NO: 346850 - DNA, 89 bp, Homo sapiens
ctgtggactcaacagtttgtggcaagacaagctcagaactgagaagctgtcaccacaggcctgtgatacttgggctgtgatcctctaga

SEQ ID NO: 346851 - DNA, 75 bp, Homo sapiens
aggcggcggcggcggaacgccaggcaggtccgcgggagagctgtggggcttggtgagtgtttcgtggcctctcgg

SEQ ID NO: 346852 - DNA, 90 bp, Homo sapiens
ctcgttgcggccatcgccctgccggaccgcgcctcaggctcccccaggctactgcagcactggggtgtcagttgttggtccgacccagaa

SEQ ID NO: 346853 - DNA, 51 bp, Homo sapiens
cagttctgcacacgtgcgtcaaaggccatcatcaacagcactgtcactccc

SEQ ID NO: 346854 - DNA, 87 bp, Homo sapiens
cctcacattcaagctgataggctgcgctaccggaatgtcatccagcgagtgattagcaggggacctcctcgcccacgacctgcccca

SEQ ID NO: 346855 - DNA, 90 bp, Homo sapiens
ttcagcggcaagaggaaatccgggaaggacttcgtgaccgaggcgctgcagagcagaacaccttccaccatgaccacctcagcaagttcc

SEQ ID NO: 346856 - DNA, 83 bp, Homo sapiens
ctccaacaatgagcaactgcccatgctgggccggcgccctggggccccggagagtaaaatgtttattggaggcttgagctggg

SEQ ID NO: 346857 - DNA, 75 bp, Homo sapiens
tccaggtggtgaaaattatggcctttgccggatttggtgctatggagaaatttttggtagaatataagagtgcag

SEQ ID NO: 346858 - DNA, 82 bp, Homo sapiens
gaccctggagcctcagttggaagcagccgatccagcctgcggagcctgtggggcaggacccacgcagccacccagcctcagc

SEQ ID NO: 346859 - DNA, 75 bp, Homo sapiens
tctggtgtaccaggcgaagctggccgagcaggctgagcgatacgacgaaaattgtacaagctggagataaggacc

SEQ ID NO: 346860 - DNA, 75 bp, Homo sapiens
ctggagcctcagttggaagcagccgatccagcctgcggagcctgtggggcaggaatcccagtcagaagttccagc

SEQ ID NO: 346861 - DNA, 108 bp, Homo sapiens
atccagagctgagtaatcatctcaatgagattggtttcattccagatgattttctgccgtctcttggcaaaaatggcaaataatgatgctgttctgaagagactggag

SEQ ID NO: 346862 - DNA, 115 bp, Homo sapiens
gtgttgctgctgctggattcagtgtgggagagtttgcagccctagtgtttgccggagccatggaatttgctgaaggattatggcagggaaagtaaaatgggtcactgatatcgag

SEQ ID NO: 346863 - DNA, 90 bp, Homo sapiens
gagagaggccctgaagaagagcatcttggcatcctgggtatggagatggtccacgtcctcccaagatggcccgatacgacaatggaagcg

SEQ ID NO: 346864 - DNA, 73 bp, Homo sapiens
cgccccagcgatggaagaggatcaggagctggagagctgggatctagcaattgggaggcagcagacttgggta

SEQ ID NO: 346865 - DNA, 75 bp, Homo sapiens
cagccatggaggacgagatgcccaagactctcagcagccgctcttctaaaacattcaaaccaaagaagaatatcc

SEQ ID NO: 346866 - DNA, 51 bp, Homo sapiens
agcagaagaagctgaggatgaagaagatgatcacagtgaaagctgtagccc

SEQ ID NO: 346867 - DNA, 73 bp, Homo sapiens
gcgggaagatggcggctgggttcaaggcaagtgtccagagaatggctgggatgaaagtacacttgaactcttt

SEQ ID NO: 346868 - DNA, 100 bp, Homo sapiens
gaattgatgaattgcaagtttgtgccccatagctgcacagtatctggagtccatctttcaccatcttctcctgagattgtactggaccgtgaccactctt

SEQ ID NO: 346869 - DNA, 101 bp, Homo sapiens
ccaccgacatggcccggaggcagcagaaggtgtggaatatcaaacaaatgattaagttgacacaggaacatatagaggccctattggacaaatttggtggg

SEQ ID NO: 346870 - DNA, 100 bp, Homo sapiens
cggaaagaagtaccttcgccggtcaccggctcctgcagggtgtaattgaaaagtgatcctctcttcagagatgtcaaaaacaaacaaatccaagtctgga

SEQ ID NO: 346871 - DNA, 100 bp, Homo sapiens
caagaggcgggggctgcacttgacaaccagcatgccgagatgagctacattcatgggagcagccaggctcagtttgtggcagaatcacacattattctgg

SEQ ID NO: 346872 - DNA, 90 bp, Homo sapiens
gcttgatattggcggtggctttcctggatctgaggatgtgaaacttaaatttgaagaggtggcacctctgagcatgagaagctgtgccgg

SEQ ID NO: 346873 - DNA, 83 bp, Homo sapiens
atcgcacttcctgcagtgggcattagccacgtccagtttcagagactcctccactctctgggaatgacacggactccctctcc

SEQ ID NO: 346874 - DNA, 98 bp, Homo sapiens
cgggcctcggggcagagccctgggtggctttgaaaggcctgtctgttcgttgtcgccttctaaggtgaaatgacaatggatgctctgttggctcgatt

SEQ ID NO: 346875 - DNA, 76 bp, Homo sapiens
caaaggcgatgatgccacattacctgatcttaattcatatcttgaagataaagtctaccttacagggtataacttt

SEQ ID NO: 346876 - DNA, 82 bp, Homo sapiens
gctcaccccgcggccgcaccttcccgccttctcaggcataatcaccagcaacacccgggacaataatacgggggccacctac

SEQ ID NO: 346877 - DNA, 76 bp, Homo sapiens
aaaaattgcaagagagagactattttcgttattacaagtccaagccttatgcatttgatcgggtgttccagtcaag

SEQ ID NO: 346878 - DNA, 100 bp, Homo sapiens
gaaagaggataaggaggcggtggggctggagaacccgaagcacctcccggcgccgggacgcttcttctataaccatgatgactacacagacttctactat

SEQ ID NO: 346879 - DNA, 50 bp, Homo sapiens
ggagatgaggaggatgggagtcccatcggcaaattctctgaagaccacgg

SEQ ID NO: 346880 - DNA, 100 bp, Homo sapiens
atgattttgaagtcatttcacatcgaagccatgatttaaatatcggcgttaaggtgaaaaaccatttcgctgtgatgaatgtggtatgagattcatacaa

SEQ ID NO: 346881 - DNA, 75 bp, Homo sapiens
cgaacatgcgcttttgacacattggagcaaagccatgaagttctcaagggcctcttttccaagtcagtagaaaac

SEQ ID NO: 346882 - DNA, 100 bp, Homo sapiens
attcgtgggctgatggaagacaccacccagtaagtaaatgccagtccctaggaagagagaaccaaaatgtctaccggaccagatgtcaaggctacagtgg

SEQ ID NO: 346883 - DNA, 83 bp, Homo sapiens
ggcgttcgggccgcacccgcgcgaataccctctaccatctgctttggtcagggtgccgctcgaggatttaaaagcaacaagaa

SEQ ID NO: 346884 - DNA, 100 bp, Homo sapiens
tccctatatgcaaacaaaatcacaacggaattctttgatcctctctttgttgagcaaaattatagggatggcccaggtaatcctcttagacataattatg

SEQ ID NO: 346885 - DNA, 98 bp, Homo sapiens
gtggaccagcacaccccaggagagaggactggggtcccaggagtaggaggagtcggcctggagattctacgccaccaacctctcgcgcacagacctgc

SEQ ID NO: 346886 - DNA, 75 bp, Homo sapiens
ccatgagcatcaaggcaggcacggtggatgaggactcgtcaggctccgaagcctcactttgtcgccaggctggag

SEQ ID NO: 346887 - DNA, 90 bp, Homo sapiens
ggacgaggacgaggacgtcaagttgatcatggccttgccaggttggtgacagtatattgtgagcatggtcataaagctgccaaaatcaac

SEQ ID NO: 346888 - DNA, 90 bp, Homo sapiens
acaccttattacatgtctccttatggcatgcagctgtaccagaattatatgcatccatatcaaggtagaagtggctgcagttcacagagc

SEQ ID NO: 346889 - DNA, 98 bp, Homo sapiens
aatagatcgagcctgcagacaagaaacattcgtttatgagatgagtttcagattgccaaaagacaaaacgggtaccacaaggattggtgacctcgcac

SEQ ID NO: 346890 - DNA, 74 bp, Homo sapiens
ggaaactcagcctccagaaacggtccagaactggattgaattacttagtgttttaaaggacaccttggaaaaaa

SEQ ID NO: 346891 - DNA, 103 bp, Homo sapiens
gattctctcccaggccacaagacatttcctgctcggaaccttgtttactaattaacatccagtcatggataaaaatgagctggttcagaaggccaaactggcc

SEQ ID NO: 346892 - DNA, 87 bp, Homo sapiens
gaaactaggtcgatggtcggcggcgcccggatgggcagctgagctccagccagagcagctggactgtggagctgctcacctgcagca

SEQ ID NO: 346893 - DNA, 100 bp, Homo sapiens
ccctgcagaagctgctggtcatcctggccacggagcagccgctcactgcaaagaagaaggtaccgaaagcacagtaatcactggtgtcgatattgtcatg

SEQ ID NO: 346894 - DNA, 100 bp, Homo sapiens
ggcccggctgccgcgtcctgttccatgtcctgcccctggaggctggcctgacgcccgacatcctcatcccacctggctggagtgcaatggcgcgatctcg

SEQ ID NO: 346895 - DNA, 82 bp, Homo sapiens
acttgtacagcgccggtcaacatcgcggtcatcaagtactgctgaaggtgatgtggccgccctcaaccgacgcatccagctc

SEQ ID NO: 346896 - DNA, 51 bp, Homo sapiens
tcaactggcttgataagaatcagcccgacggccatggaggctgaagagacg

SEQ ID NO: 346897 - DNA, 100 bp, Homo sapiens
ggcctggcaactcttcgtcaatgaggcttcagcgccagtcagcaaagtaaataaatactgtgcttcttccaactttcattccacttggggaaaaaaaaat

SEQ ID NO: 346898 - DNA, 90 bp, Homo sapiens
gggacgtcacacgggacaagaagctctggaggaccttcttcatctctccaggcttaacagcattgcgcagtgatgaagtgattgatttaa

SEQ ID NO: 346899 - DNA, 98 bp, Homo sapiens
atttacactcggtatgtcctcagtcttctgctgcatgacagctatgactacgacctgcaggaacaggaatctcaccagtgacacgcgtttgtgaaaag

SEQ ID NO: 346900 - DNA, 100 bp, Homo sapiens
tgaagcgcccgtccattccaaggttgcttatcaagtgtcccacaaatgaaaaaaatttctacatcttacgaggaaagacggaagcaagctaccgctattg

SEQ ID NO: 346901 - DNA, 89 bp, Homo sapiens
gccgtcggagaagaccttcaagcagcgccgcaccttcggtgctggttgccgaggagaacgtggacttccgcatccacgtggagaaccag

SEQ ID NO: 346902 - DNA, 100 bp, Homo sapiens
gttttgcaaaaaccatcagtgtttgggaatgattctgatgatgatgatgagccatcaagttctctggagaccttcttcgactccctggtgacacaagcaa

SEQ ID NO: 346903 - DNA, 88 bp, Homo sapiens
gaaagagcaccgaagaagcttcgaggatctgggaagacatgtaaggaatttgcataagacagttatgcaaaatggagctggaggagct

SEQ ID NO: 346904 - DNA, 75 bp, Homo sapiens
aaagctttgtatgaacaaaaccagtctgatgtaggcggggtttcaccatgttgcccagactggtcttgaactcct

SEQ ID NO: 346905 - DNA, 75 bp, Homo sapiens
gcgtacttggcttggagactggcgcggcgttcgtgtccgaggtgcaatgtagcaggacaactcatggagcccccc

SEQ ID NO: 346906 - DNA, 98 bp, Homo sapiens
actattcctgctctctttacacttacccacagggaacttggcagaaggtgatacaggtggttcagtcaggagagattaaacagattctagaaaatgaa

SEQ ID NO: 346907 - DNA, 82 bp, Homo sapiens
gccgccgccttgctgctgctcaaagctgctgccgccccttgggctaaaagcattccacgcctacgggaaggcaggcaagatg

SEQ ID NO: 346908 - DNA, 100 bp, Homo sapiens
aagtgccgaggctacccctcctaccctgccttgaaatctcctgcaaagaagctgagccatgcaattagtaaatctttggggtgtgtacccacgagagaac

SEQ ID NO: 346909 - DNA, 100 bp, Homo sapiens
ctgaatgaccacctagagccttggatccaggagaacggcggctggatcacagattctgctggccatattctctactccaaagaggatgcaaccaagggga

SEQ ID NO: 346910 - DNA, 100 bp, Homo sapiens
ctgcgtgcggccctggattcaggggccttccagaggtcacgagaagagaatgccttctagatgcaaaatcacctccaaaccagaccacttttcttgactt

SEQ ID NO: 346911 - DNA, 100 bp, Homo sapiens
tgtttccaagctcactcatgcggcaattggcaggcctgaggtccttgttggctgcttgctggagaggatcaactcactatcctgaaggtccattctccca

SEQ ID NO: 346912 - DNA, 50 bp, Homo sapiens
atgtcagttctgtaacccaaaaccaaatctgcagatctccaggggagccc

SEQ ID NO: 346913 - DNA, 75 bp, Homo sapiens
attcagtctagttcctggttgccggctgaaataacctggaaacttttgagaagaactttgaaagagaaacccata

SEQ ID NO: 346914 - DNA, 100 bp, Homo sapiens
cttaaagggcgagagcggcgcggagccagaacgcggtcggcccggtccccgccgcacccagcccagatcatcttcatggtgggccgaggatatgcctccc

SEQ ID NO: 346915 - DNA, 74 bp, Homo sapiens
accgagagcgtgaccgagagcgcgaatatcgtcatcgttagaaggaggatggactcagacaagttctggaggag

SEQ ID NO: 346916 - DNA, 83 bp, Homo sapiens
tggagaacgaccggctcctgctcaagatctcagagaaggaggaggtgaccacgcgcgaggctccccatcaacccgggcagccg

SEQ ID NO: 346917 - DNA, 100 bp, Homo sapiens
ctgcccctgctgtcgctcctggtcggcgcgtggctcaagctaggtgattccttcaacacccagaatgagccagaagacatgatgaaaaaagagaaaaagt

SEQ ID NO: 346918 - DNA, 100 bp, Homo sapiens
cggagcctggcgggcgtgggaacccaggccccgccgaggcggccaggcagaagcttcatgaggcagatctggagttgcagaggaagcgggagtacattga

SEQ ID NO: 346919 - DNA, 100 bp, Homo sapiens
catcctcaggctggtctctgatcacagggactctggctcaagctcttctccgctggcatgatgctcatcagttctgcagcagaagtgggcagcccaccaa

SEQ ID NO: 346920 - DNA, 100 bp, Homo sapiens
tcaagaccagcgcccactacgaggaaaataaatctcgagctacagagacttctgaagtggagagtctgcgacctcctcggttcttcaatgaagatggagt

SEQ ID NO: 346921 - DNA, 97 bp, Homo sapiens
agtaaagaaggaaaaagcagtaaagccagaggaaggtgtggaaacaggaagagaactagaactggaagtaaagcattgaagatgtgactgaattgct

SEQ ID NO: 346922 - DNA, 82 bp, Homo sapiens
agggcggcggcggcggctgcggtcgaagaaggggacgccgacaaggtttggtgcacctcgatttggaggaagtagggcaggg

SEQ ID NO: 346923 - DNA, 88 bp, Homo sapiens
tgagctgaacgtcttgcaacagtggccgcacgcatagatatttatccccattttacaaggcctggctcttgctgccaaagagtgctcc

SEQ ID NO: 346924 - DNA, 90 bp, Homo sapiens
gaaacttcctcctggaggaatacctggcattgacctctcagatcccaaacaactggcagaatttgctagatgcatagctctcttaggtcc

SEQ ID NO: 346925 - DNA, 105 bp, Homo sapiens
agacttgactggtcttacattgctgcatcaagaaacccaagctgctgagcctcctgacaaggtgatccgggcgggccccgcaggaattttatcccctcaccggcc

SEQ ID NO: 346926 - DNA, 100 bp, Homo sapiens
agtgcgccgggagcggagatatgaccagaatttattacagaattctcaaagctgacggatcggtggcagaatgctgtccagggtgttcggcagaggaagg

SEQ ID NO: 346927 - DNA, 96 bp, Homo sapiens
cttctctcgttacctgccttacatcttcagacctccgaacaccatcctttcttccagctgccacacagaagtccaatatcagatggaaatgatgcg

SEQ ID NO: 346928 - DNA, 100 bp, Homo sapiens
cggctgcccttcaagtaccagtcttcggggacgaggaagccacagccccatgagaactccagacccttgtcccttgagcacccctgggccggccctcagc

SEQ ID NO: 346929 - DNA, 83 bp, Homo sapiens
gcagaatgtgttccctgtctacttgaaacacagtctttggtagatgagtggctggatagctacaagcaagaccaggatgcagg

SEQ ID NO: 346930 - DNA, 82 bp, Homo sapiens
ctgcagcccacccgggcagccctcaccctggtgagaagccctaccactgcaactgggacggctgcggctggaagtttgcgcg

SEQ ID NO: 346931 - DNA, 90 bp, Homo sapiens
tcaccccgcggatctacgtgggcaacgcgtggtgctggacaacacagccctgaaccggattgccacagaccgcctgcacatccagaaccc

SEQ ID NO: 346932 - DNA, 75 bp, Homo sapiens
gtcactagcggactcttcttcgccttcgaatcatccccccgaaggagtggaagccgcggcagacgtatgatgaca

SEQ ID NO: 346933 - DNA, 80 bp, Homo sapiens
acatctccagcaccctcatcgccctggccgacaagcacgcaaggagtgcatccgccccaacccttttccccctcgtctcc

SEQ ID NO: 346934 - DNA, 80 bp, Homo sapiens
agcggagctcccccaagagccggaaagcttgcctacatgtagcctgtgttgtacagcagaaagatgccaggcaatggttt

SEQ ID NO: 346935 - DNA, 99 bp, Homo sapiens
ccgagtggtgcacctgctcaatgaccagcacttgcttactggaggttttggctctgcgtgagtgtggtctacgagctgtttctcatctttatactcttc

SEQ ID NO: 346936 - DNA, 83 bp, Homo sapiens
atggatggcggctacatcaacaatctgccaggacccacctgccatgctgtgaggacacccaggccacatagagagagtgaggc

SEQ ID NO: 346937 - DNA, 106 bp, Homo sapiens
atggctttggtccccagcgcagtgaagtggtgagcctttttgtcactggtacaggtttgcagattccgccagcagcacagcaagctctacagatgagtggctcttt

SEQ ID NO: 346938 - DNA, 100 bp, Homo sapiens
agcgcagcgttccaccgctcgggtttggctggtactgtaagattgatgttaaaggcatggtgttcaccccacttcatcagcgtacataagttatctcttc

SEQ ID NO: 346939 - DNA, 100 bp, Homo sapiens
ttttagaaattaactggacaggactgacgaatcttctggatgtccctggattgaagaatgtttacccttgcggaagttgcatcacttaatgacattcagc

SEQ ID NO: 346940 - DNA, 75 bp, Homo sapiens
acggagagcttggactttcacctgattgttaaaggttgatgataattagaagcatgctttccactgaacttcccg

SEQ ID NO: 346941 - DNA, 98 bp, Homo sapiens
tacaatctagcgacaaaacaaactccaaaagaaggtgtgaaagttaacaagggtgtctgatgccatcaagtgttgcaggagaaacttcagtcttggct

SEQ ID NO: 346942 - DNA, 111 bp, Homo sapiens
cagaccctggagcctcagttggaagcagccgatccagcctgcggagcctgtggggcagggggtgcactatagccatctggagctgagccctggggagccagtgcaggaggg

SEQ ID NO: 346943 - DNA, 75 bp, Homo sapiens
gcaaaagaataagcttcgggcgctgtagtacctgccagctttcgccacaggagacctgtggacagctccagagca

SEQ ID NO: 346944 - DNA, 75 bp, Homo sapiens
ctccgacgcaagactgtcccggcccgggtttcattgtttgcggaacttttcaacgaaatgcttcaaagagatttt

SEQ ID NO: 346945 - DNA, 82 bp, Homo sapiens
tgaatgtggaaaggagattgacagtcacaattttgtaataagttcaaactggaaacaagatggatgatgtgtcaagaagact

SEQ ID NO: 346946 - DNA, 97 bp, Homo sapiens
tctataagtactctccattccgcactgaggaggaagtgatgacccagtttatgaagattcctggggacagcggacttggtggcacaaaatacatctc

SEQ ID NO: 346947 - DNA, 98 bp, Homo sapiens
cgggcggggcctcctggctttgctgctcgcggtctccgccccgctccggctgcaggcggaggagctggagtctgtagaagaggcgacaccagggcttc

SEQ ID NO: 346948 - DNA, 75 bp, Homo sapiens
tgactacttcatcgtggtaggctatgaccacgagaagccagtttctctgcaggtggatattgttcccagccaggg

SEQ ID NO: 346949 - DNA, 74 bp, Homo sapiens
aagaaaattatgcatgcgttagggaagctctgagagaatggctgtggaagagccagtcttggtgctctgtgttc

SEQ ID NO: 346950 - DNA, 80 bp, Homo sapiens
ggactgagtcctgcaggacacagttccagtgtctcgccccatcctcaccctcagggttcccagggcccaggctgtggtgg

SEQ ID NO: 346951 - DNA, 83 bp, Homo sapiens
cactctccagtgtaatgattattgacaacagatggtttagctgcattgtcattttctatcagttctctgaccttgattggaat

SEQ ID NO: 346952 - DNA, 96 bp, Homo sapiens
cttacgcagataatgatcattaacatcagcctctctgatcaaaggtcgtttatacgcaatgcagactggaatgaagatcgatagtaaaactcctga

SEQ ID NO: 346953 - DNA, 100 bp, Homo sapiens
gacctttgccagggcccccaccttcggcatactggacagattggaggactgaagctgctatcgatgatgaggagtctgatgaggaagctgtgaagaaaac

SEQ ID NO: 346954 - DNA, 91 bp, Homo sapiens
tgttcccccaaatgtctgactctgactctcggactgagaaacgcaaggtctcggcgcggaagatggccggcggcgtggacggccccatcgg

SEQ ID NO: 346955 - DNA, 100 bp, Homo sapiens
ccgaagtaccgacccgagttatgcccaccctccaactttgcgacggaaatgtgtcatcgaaagccagttctggcagctttttaacgcgctgacgttgttc

SEQ ID NO: 346956 - DNA, 98 bp, Homo sapiens
ccgcgctgcgcatccccgcggacgccacagcgctaagatgaatccggcctcggcgccccctccgctcccgccgcctgggcagcaagtgatccacgtca

SEQ ID NO: 346957 - DNA, 100 bp, Homo sapiens
gcagtacgccacggggccgctgctcaagttccagatttgaccagcatctcagacatgtcgaaaaagatgttttgatccctaaaataatgagagaaaaggc

SEQ ID NO: 346958 - DNA, 50 bp, Homo sapiens
ccctcagatgggagtaacttcctcagatttcaggtatgctgctgaaagtg

SEQ ID NO: 346959 - DNA, 100 bp, Homo sapiens
cggagcccgagtggatcggggacggagagaacacgagcccatcagttgaaaacgaggcccactgcgactttgtgaagctgcgggagatgctgattcgggt

SEQ ID NO: 346960 - DNA, 83 bp, Homo sapiens
ctgttttctgccggctgtaaagtcatcacctcctgggatcagatgtgcattgaggtaactcaactggacccaaataaatcatt

SEQ ID NO: 346961 - DNA, 100 bp, Homo sapiens
agatccactacttagttcatcctcggctccaacaaaatctggaactcacggagttgtatcccgcattttgtattcacaacggaggctccgaccttgagcg

SEQ ID NO: 346962 - DNA, 50 bp, Homo sapiens
ggacccctactattgcaacaaggtaattcatttgcacacctgttagcaag

SEQ ID NO: 346963 - DNA, 108 bp, Homo sapiens
gtgtggttgcaacggagataaattcccggaaccgcgattcggcgtgtcagttacagaatgtctgaaggggacagtgtgggagaatccgtccatgggaaaccttcggtg

SEQ ID NO: 346964 - DNA, 98 bp, Homo sapiens
gccaatggagtcacatcagcattttctgttgactgtaaaggtgctggtaagatttcttctgaaatcatgaccaccccaggaaaagagaactttcgcct

SEQ ID NO: 346965 - DNA, 82 bp, Homo sapiens
ttcgacatactctccagcttcaagtactaggttttgacaagcttgcatcatgcgtgagtataagctagtcgttcttggctca

SEQ ID NO: 346966 - DNA, 100 bp, Homo sapiens
agttagtggatatagcacaccatccccagccatgatcagggccaaagcggtcagtgagaaggaagtggactctggaaacgacatttatggcaaccctatc

SEQ ID NO: 346967 - DNA, 100 bp, Homo sapiens
atgggcgggaaccactcccacaagccccccgtgtttgacgagaatgaggaagtccatgatggcagtgaagaagaagacgatgactatgggctgatatcca

SEQ ID NO: 346968 - DNA, 88 bp, Homo sapiens
agtggaaggaaatagcaacagtggtgaagactgaacccggtgcctggctcctaccccacacagagctgccaccctcacctgtccccaa

SEQ ID NO: 346969 - DNA, 98 bp, Homo sapiens
gggtgcgcaaggcgtccaggagtgacctggggctgtggagagcgacccgtggccttgtgtttcagtccatttgacgtggaggacatgaccgcatcctc

SEQ ID NO: 346970 - DNA, 100 bp, Homo sapiens
gctctttgaatatgactctgcaaagaccctgtattcagtggatcagctggcaccacccaaatagataaattggcccatctggtcttgtggcccccaccca

SEQ ID NO: 346971 - DNA, 75 bp, Homo sapiens
gttcggccaagggaccaaggtggaaatcaaacaatgagaagactttgggacatttcatgagtcattcaagcaaca

SEQ ID NO: 346972 - DNA, 75 bp, Homo sapiens
cacatcttctcaaccaggacactctgactgtgagagcagaggatcaggtaataatagacgtggatggaatacaac

SEQ ID NO: 346973 - DNA, 101 bp, Homo sapiens
tttgtatttttaggacattcagtcagaagaaggctgctattgaaagagagtatgcacagaagcatcaagtgtacctgatttgtgaacctatcttgcttcag

SEQ ID NO: 346974 - DNA, 85 bp, Homo sapiens
ggaagccgcggctctccaagttctaccagccctacctgaattcttgccgccaggatggggaaacagaacagcaagctgcgcccgg

SEQ ID NO: 346975 - DNA, 83 bp, Homo sapiens
cggggccgccatggagcccgactcggtgattgaggacaagaccatcgagctcatgccaggcgggcaccacggcaggggctgag

SEQ ID NO: 346976 - DNA, 82 bp, Homo sapiens
caattacttacctggcccaggaggatgggcccgttgtggacatgaacaagctgagtggaggcggcgggcgcaggactcgggt

SEQ ID NO: 346977 - DNA, 100 bp, Homo sapiens
ggcagccggctctggtgctcccagaagagtgaagaaagttacaacgtcaatgattattccttaagagatcagctattggtggaatcttgtgacaatgaag

SEQ ID NO: 346978 - DNA, 97 bp, Homo sapiens
ttgcacttcagttcacatactatttatggggtcctgatgaagaagctgttgtggatcttggcaaaactagctcaactgtgaacaccaagtttgaaaa

SEQ ID NO: 346979 - DNA, 101 bp, Homo sapiens
acgccgtgtccgagggtactaaggccgtcaccaagtacaccagcgctaagtaaacagttcgatacaagaggctgttttcctagcgtggcttgctgcctttg

SEQ ID NO: 346980 - DNA, 100 bp, Homo sapiens
tttcatgtccctgctggattactggccctcttcaccctcagacatcacaaatatgagcagcccgacggccatggaggctgaagagacgatggaatgcctt

SEQ ID NO: 346981 - DNA, 75 bp, Homo sapiens
cgcccgaagagccaagagtcagtattccggccagcttcacgaagtcagagaggtttaactatagatcaacacatc

SEQ ID NO: 346982 - DNA, 100 bp, Homo sapiens
cagatgccctgcctgaatggagggacttgtgctgtggccagtaacatgcctgatggtttcatttgccgttgtcccccgaatgagtccctggaacgccaga

SEQ ID NO: 346983 - DNA, 98 bp, Homo sapiens
gaagatgcagagcccatttcagaacctgagaaagtagagactgttatggctgcagcttcgattgccaatattgtaaaaagttctcttggtccagttgg

SEQ ID NO: 346984 - DNA, 97 bp, Homo sapiens
aattatgctgcagcatattgtactggcctgctgctggcccgcagggttaatcaaactgtggcagcattaaaaaccaataatgtgaatgtcagttccc

SEQ ID NO: 346985 - DNA, 90 bp, Homo sapiens
ggcaaatgaataaatggctgaatttcacaccatggagatggaccccttcgaggacacgctgcggcggctgcgtgaggccttcaactgagg

SEQ ID NO: 346986 - DNA, 100 bp, Homo sapiens
ctcatccgcgaggtgaaccgccgcctgcagctgcacctcggcgagatccgcggcctcaagataacgaaggaggcccaacttcattcaataaggagcctga

SEQ ID NO: 346987 - DNA, 75 bp, Homo sapiens
cctgaggaggcgagctagccgggagttacaccgccaccgccagatccactccttataccgccgcacaggtgccag

SEQ ID NO: 346988 - DNA, 98 bp, Homo sapiens
agcaatctcctcctccactgccactacagggaagtgcatcacatgtcagtttggtgaggattcatcaacctccagtatgatgtctgtgaactttgatg

SEQ ID NO: 346989 - DNA, 100 bp, Homo sapiens
gattgatgatattgctttgatcaggatcctggatggaattgaacccatatacgttacttgacatgtgaaacacgtgtgaccctggcagatgatttggctg

SEQ ID NO: 346990 - DNA, 75 bp, Homo sapiens
tcaatagtgctcagactggtagcttcaaacagctcacagttaaggtggtcactaactgccaagagagaatccagc

SEQ ID NO: 346991 - DNA, 100 bp, Homo sapiens
cgccccgcgcagctggctggcggagcatgagcgccccagacaatgcagatcttcgtgaagactctgactggtaagaccatcaccctcgaggttgagccca

SEQ ID NO: 346992 - DNA, 75 bp, Homo sapiens
ctgcggctgtcacagactgctgaagagatggcggccaatctaacaggaatgtttacccttgcggaagttgcatca

SEQ ID NO: 346993 - DNA, 98 bp, Homo sapiens
aacggattgttgttgaaacaacatttagttcagaatccagtcagactctggcaacttttagagtgaaccagaggaaatgcctccagaagcaaagatga

SEQ ID NO: 346994 - DNA, 90 bp, Homo sapiens
tgaaaattatcagagactctactcccaaccaatatatggtgctgataaagtttcgtgcacaggaagatgagaatgtgcctactgctcctg

SEQ ID NO: 346995 - DNA, 98 bp, Homo sapiens
tggtgaaaaaggattttttccccgtgcagtcggaggtccttgtgcatgaagacagatttgttctatggcctcggagttgggtgccagggatgatggag

SEQ ID NO: 346996 - DNA, 101 bp, Homo sapiens
ctcggaagattcgaggcggcgggggacaagtcggcgccccagagcggacgagaagctgcacacatacatgtaagagaagcaaaaatgtcagatgatatcag

SEQ ID NO: 346997 - DNA, 100 bp, Homo sapiens
acaggttcactaacgggggcaaggaggcaagtgaggcctatctggttggcctttttgaagacaccaacctgtgtgctatccatgccaaacgtgtaacaat

SEQ ID NO: 346998 - DNA, 80 bp, Homo sapiens
ttcacaccgtcttcggtctcctggggtcggcgccgagtgggaggatggcggaatgtcaacagcatctccaccctggagcc

SEQ ID NO: 346999 - DNA, 100 bp, Homo sapiens
tggacattggagagagtggtattatggtgtaaacaacgattctttggagttacagcaagctgctgaagtttctcagctgcggggagcaagggtaatcact

SEQ ID NO: 347000 - DNA, 83 bp, Homo sapiens
accagtgggaggatggagcagaggacattctagagaaaggctagagcaggctgacctcattctggccatgctggatgcttctg

SEQ ID NO: 347001 - DNA, 100 bp, Homo sapiens
tcgaccgcatgttcgacaagaatctgcaggacttggtccgcggcatccgtaaccacaaggaggacgagggggggccctcagcctcttggccttgaacggg

SEQ ID NO: 347002 - DNA, 82 bp, Homo sapiens
tctgttttgaagttattgctactctcataagagaagatgtatggtcttatgcaaagggacttcctcacatgtttcagcaggg

SEQ ID NO: 347003 - DNA, 100 bp, Homo sapiens
gggtcatcaaggctgtgctggatggagtgaagtgatcagcctttgagcctttcccacattgaagatggtgaaactagatattcatactctggctcatcac

SEQ ID NO: 347004 - DNA, 98 bp, Homo sapiens
tggattacaatttgatcgctgggaattctccaccttaaagaagtgttgcggcattgccctgactgcggagtgcatcttctttgtatctgaccaacaca

SEQ ID NO: 347005 - DNA, 75 bp, Homo sapiens
tgcagaaaacttctttcttcagtgctgtgctgtggctttcattgagaagctagacgcccagtctttgaatctaag

SEQ ID NO: 347006 - DNA, 90 bp, Homo sapiens
cagaataactgtcaagacaacagtgatgaggaaagctgtgaaagttctcaaggtgttggagcgggccggagagaagtagagtgggctgcg

SEQ ID NO: 347007 - DNA, 90 bp, Homo sapiens
ctctggatgccctggaggcccatgggctctaggccctgggcgctgcctatggcacagccaagagcggtaccggcattgcggccatgtctg

SEQ ID NO: 347008 - DNA, 82 bp, Homo sapiens
ctgagctccaggccgtgcgcatgtttgctgactacctcgcccacgagagtcggagcagcctcccgcgacgatgcccctcaac

SEQ ID NO: 347009 - DNA, 90 bp, Homo sapiens
aaaagactcaggacggacaagcacagtcttcggaagggagtgcatccgccccaacccttttccccctcgtctcctgtgagaattccccgt

SEQ ID NO: 347010 - DNA, 100 bp, Homo sapiens
gagcccagcgtcaacttcctcaagtcgcccaaagtgtttgtggagaaggtgctgcagagactttttcctcctgttccaagtggccaaggaaagagggaac

SEQ ID NO: 347011 - DNA, 96 bp, Homo sapiens
ctgcgaaccaatcagaaacgctccctctacgtcagccacagcatgttccgaagagatgattggaagatggaagtggagggttaaataatgaaatgc

SEQ ID NO: 347012 - DNA, 90 bp, Homo sapiens
gaagcctgtacctgttttatacttgcttttgcttcagcgttctgtggttgtcaacaggttgaatttggaggctttaatcagaactgtgga

SEQ ID NO: 347013 - DNA, 49 bp, Homo sapiens
ccagctcatgcaccagtgcgaggttccgctttgattataccaatgagag

SEQ ID NO: 347014 - DNA, 75 bp, Homo sapiens
gcaccttcacaataactgttgatcagaaaaccttccatttccaggttaattgtgtgaggaacacgccggcctttt

SEQ ID NO: 347015 - DNA, 100 bp, Homo sapiens
cggccacagtgtcaatggggagtacctaaatgttcacatgaaaaatggacaggtggcgacgtctgaaagcccagatgattgagaaaaggtcaaagctagg

SEQ ID NO: 347016 - DNA, 75 bp, Homo sapiens
ccggaggagaccctttgaaggtcccttgtggggactggaaagaggacggatgctgaaaacgccattcaacagatg

SEQ ID NO: 347017 - DNA, 100 bp, Homo sapiens
caaacagcccaccaattccctattcacaaaaacctgccccagaaggatcttgcactacagatggtaacagaaatccaggactggagtgcatcaagcccac

SEQ ID NO: 347018 - DNA, 100 bp, Homo sapiens
gtcagtgccaagtaccgaggtgccttctgtgaggcaaagattaagactgtgaaaaggctggtgaaagttaaggtatacttctcagccatgtgagattgtg

SEQ ID NO: 347019 - DNA, 75 bp, Homo sapiens
aagcgtgcatggcagaagtggagaacaaagaaccggcgctgcaaactgctgcccctggtgatggctgcccccctg

SEQ ID NO: 347020 - DNA, 75 bp, Homo sapiens
tgctgttcaagctgaaaagaaaattgaagttgtaatggccgaacccttgggggaacacacctgaaactagaggaa

SEQ ID NO: 347021 - DNA, 88 bp, Homo sapiens
cggatcggattcctcagctacgaggaggcgctgaggagagttggtcctgagaaaagggtgccagcgatgcctggatcgcctgtggaag

SEQ ID NO: 347022 - DNA, 100 bp, Homo sapiens
ctagcaactactacaaaggagaaaacttcaggaggcagtacgacgagttctacctggcggaggacccctacaagtcttttggtttaccatctattgggag

SEQ ID NO: 347023 - DNA, 98 bp, Homo sapiens
gcgaatcctaaagcgtttcctcgcttgcattcagctcctctgtgtttgccgcctgggtggcccatgtgagcaagtttagtgagaacagtggattgggg

SEQ ID NO: 347024 - DNA, 100 bp, Homo sapiens
cagaagcagcccaagattggctaccacctgctctactacctgagggccagggcggaccaggcactggccactcttaccatgcggaaattctgcgaggaca

SEQ ID NO: 347025 - DNA, 75 bp, Homo sapiens
ggattttggaggccggggccgcgctgagggcgcccagctggacggctgtcctcagcgaggggccgtgcacccgct

SEQ ID NO: 347026 - DNA, 101 bp, Homo sapiens
aagtattgcaagcaacagtagtcgctgttggatcgggttctaaaggaaaggttggtgggacaagtgatgttgaagtgaatgaaaagaaagacagagttaca

SEQ ID NO: 347027 - DNA, 100 bp, Homo sapiens
ccaaagagatacagggcagaggaaaatgcaagaagactgatggagcaggcttgcaatattaaagctgaaaatgatgagaatggacaagcagaaaactttt

SEQ ID NO: 347028 - DNA, 50 bp, Homo sapiens
caccagctccgaaatcaccaccaagggcgccaatgcttcggcattagaga

SEQ ID NO: 347029 - DNA, 82 bp, Homo sapiens
ttggcggccacaggcgatgacggtcagaagctccaccatgaggcgaggtggatggaggaagcgagctgaaaatgatggctgg

SEQ ID NO: 347030 - DNA, 100 bp, Homo sapiens
cagaaaacaagataaaggtggctttggattcagaaaaggtggaccagatgacagaggctttggaggagaagatacggaccacggagacacaggtgcttgt

SEQ ID NO: 347031 - DNA, 90 bp, Homo sapiens
gggggcccggattcccaccctggcctcacggaccttgggctgaccggtctgtctggcttcagagcttggggcttccttggtcgcacccac

SEQ ID NO: 347032 - DNA, 100 bp, Homo sapiens
gtagttactcaaacagagggaactacaacagaggtggaatgcccaacagagggaactacaaccaggacaacgagacattagaggtgcacccacccccgac

SEQ ID NO: 347033 - DNA, 100 bp, Homo sapiens
tgaccgacttgcgaatcaccagggtatctcttgggtcacagattgatttacagaagaagaagcggcgagcgccagctccccctccaccacagccaccacc

SEQ ID NO: 347034 - DNA, 100 bp, Homo sapiens
cctggcctggaaccccgcggggaccctgctggcctcgtgcggcggcgaccggagaatccgcatctggggcacggagggccccatcagccagaagatgtat

SEQ ID NO: 347035 - DNA, 83 bp, Homo sapiens
ccctgggcatccaggggggtcagtccgagtgcctcagcctggccagaggagaaggagtccagctacttgctcttttagttccc

SEQ ID NO: 347036 - DNA, 117 bp, Homo sapiens
accataagcctcttcaaggagggaaaagaaagaatgtatgaggagaattctcagcctagaattcccatttgcagaaaccctatgagattaacctgatggaggaactaactctgaagg

SEQ ID NO: 347037 - DNA, 90 bp, Homo sapiens
gaagccacacaaagaacaaattgcagttgtttgagctagagatgatcgctatggaaaatcctgcagacttgaagaagcagttgtatgtgg

SEQ ID NO: 347038 - DNA, 88 bp, Homo sapiens
aaagcaccaccagaggatgacaatcgagaaattgccacatggcctgggccgaggccactggtgcatatgttcccgggagggataagcc

SEQ ID NO: 347039 - DNA, 100 bp, Homo sapiens
aaggaactttgggtcctgaatcttctgggagctgaggaaccagatatcttgaaaagctgccagaaagatccagtgcacattgcaggacgtcggctcggcc

SEQ ID NO: 347040 - DNA, 95 bp, Homo sapiens
acaggacctgtctgacgatagtccaaaaactgaagaagatggtggataagcccacccagccaatggagatcttcgtggatgatgagacgaagttg

SEQ ID NO: 347041 - DNA, 82 bp, Homo sapiens
ctcaggatatgacaggggtaacacccttccagatgatttttgagtgacttggatatgtcggaattcttaattaatccaaatg

SEQ ID NO: 347042 - DNA, 92 bp, Homo sapiens
attactacaaaactcccatcgcgtcgtggaggagtactttgtggcccccccaggacttcctccgtcaggcagctggcaggacctgaaggatc

SEQ ID NO: 347043 - DNA, 89 bp, Homo sapiens
tgcggaataacatcggaggagaagggctggttgatatgtgaagagccaacctgtcgcaatcgaactcgtcaccttccccttcaattctc

SEQ ID NO: 347044 - DNA, 82 bp, Homo sapiens
ctgaaccgcgcggccgaaccctccgcgccgtgccgtccctgcagtgacaccgaggtgctcctagccgtctgcaccagcgact

SEQ ID NO: 347045 - DNA, 74 bp, Homo sapiens
agaaagtttcatctgtggatggagtattgccaaggtggtgccccagcagatcacgcacacttctcctcggatcc

SEQ ID NO: 347046 - DNA, 97 bp, Homo sapiens
ccacttttgtgtccaggcataagaaatttgacgagtcttcagggagcagtcctctgccaggccagttcactgttcctcacagcttggctcttgtgcc

SEQ ID NO: 347047 - DNA, 115 bp, Homo sapiens
aacaaagccctcccagcccccatcgagaaaaccatctccaaagccaaagggcatcatggtgggaggcttgaagaggaaacactctgatttggaagaggaggaggagaggtgggag

SEQ ID NO: 347048 - DNA, 82 bp, Homo sapiens
tgtagagaattttggtctcgattcaggtacaatgactcttcttgcttttcacctaagttgaataagcaccctgtgcacttta

SEQ ID NO: 347049 - DNA, 90 bp, Homo sapiens
tccagcagatggcggatgccctgcagtacctgcagaaggtctctggagacatcttcagcaggctccttgccagaggcctccactcactcc

SEQ ID NO: 347050 - DNA, 100 bp, Homo sapiens
ggggccgacccggcccgtagtgtggaagcagcttcagccctgccaaggtaaccctgctggggtcagttatcttcacattccagcacacccagcatctggc

SEQ ID NO: 347051 - DNA, 75 bp, Homo sapiens
aaaagtgctcctgggactccaggataccagtggttttatgaagaaacagaaagcagtgatgatgttgaagtgctg

SEQ ID NO: 347052 - DNA, 83 bp, Homo sapiens
ctccccgtcgtcctggtgctgcagcgcaaattgtggctactaatttgccccctgaagatcaagatggctctggggatgactct

SEQ ID NO: 347053 - DNA, 51 bp, Homo sapiens
caaccccgagccgctggtgctacaggttattctcgttcaagttaatccagg

SEQ ID NO: 347054 - DNA, 95 bp, Homo sapiens
gcaatcctcagacgcctcacttaggacaagcaattaagttggaatatgcaaggttggttaagttggcccaagaagacaccccaccagaaaccgat

SEQ ID NO: 347055 - DNA, 151 bp, Homo sapiens
cttgggaaaaggccggagaaggtgaaattctgtgtgctccctccggcgagagactttgtcagctcccgcacagtaacgatgcagcatgtgacagaatctccttcctcgataaggctgaatgacattccaccggaggtatagaccacatttg

SEQ ID NO: 347056 - DNA, 97 bp, Homo sapiens
taagaaaagctctgagggtctccaaagttaccagaggaaggctgaattttatgatcgacattctggtcaacaatggtggaatgtcccagcgttctct

SEQ ID NO: 347057 - DNA, 90 bp, Homo sapiens
cagaagggacgtgagcccagccgaggtaccgctgaagaggaatcaattttggcgatatgaaaggtgaggtctatccatttggcatcgttg

SEQ ID NO: 347058 - DNA, 100 bp, Homo sapiens
ggagatttctgcattttggctacaaaagctgatgaaaatcatcctcaggttcaacagagtttggaaaagatttctaaactggagcaggaaaaagaacatt

SEQ ID NO: 347059 - DNA, 100 bp, Homo sapiens
tggaaacaccattccagaaaatgggattgcccaccacgataatgcagttcttattactagcccatgactgaagagttgctgaaacaacaaaagctgaatt

SEQ ID NO: 347060 - DNA, 95 bp, Homo sapiens
gatctgaggatgtgaaacttaaatttgaagaggaacaggagtacagctgtgtagtaaagatgccttctggtgaatttgcacgtatatgccgagat

SEQ ID NO: 347061 - DNA, 114 bp, Homo sapiens
caggaatggagacacggcttcccccaaggaatatacagacccacccccacagaggcctgaggagacctctgcccagggattccgccagctgctggagctgaacctactggggac

SEQ ID NO: 347062 - DNA, 122 bp, Homo sapiens
gggacatttgcaaaagcacatcatgtgacgacacccctgatggggcaggaggggcctttgcagctcagggagaagagcctgctgagtgcagtgaggccggtctcctgcaggagggagtacag

SEQ ID NO: 347063 - DNA, 100 bp, Homo sapiens
ccaacccgctgcaggacgcgaacctctgctcacgcgtgttcttctgggatttcagtcataatcggttgtctaactggaacatcagcttggaatcacaaac

SEQ ID NO: 347064 - DNA, 90 bp, Homo sapiens
gtttgatgaagcagatcgaatgtttgacatgggatttggaacactttgtgattttccaaaaatacaccatggatttctgtatgatgaaga

SEQ ID NO: 347065 - DNA, 75 bp, Homo sapiens
ggtctctggagacatcttcagcagttgctgccttcactgaagtcttgaacccctcaaagtcattcatgaaatttg

SEQ ID NO: 347066 - DNA, 75 bp, Homo sapiens
aggaaagtctaagggatatggctttgtctcctttttcaacaaatggggcaattgaaggaacagactaaaaatcgt

SEQ ID NO: 347067 - DNA, 90 bp, Homo sapiens
cccgtggccgccgtgcaggcggccgtcagcaacctcgtccggtcctgtccaagaacagcaagcctatccataccaccatcctaaacccac

SEQ ID NO: 347068 - DNA, 51 bp, Homo sapiens
aggaactgtggaaagtagagagcctgtgacctgacctgcccaatgggccag

SEQ ID NO: 347069 - DNA, 100 bp, Homo sapiens
ccgggcggagagcccctctccaggcatccgtgtcattctggaccttactcccaactaccggggtgagaactcgtggttctccactcaggttgacactgtg

SEQ ID NO: 347070 - DNA, 98 bp, Homo sapiens
cactcggcactggccacttgcaggaatcaacagtgagacaattatgaaaccagcttcaatttcagaggaagaattgttgaatttaatcaataaactga

SEQ ID NO: 347071 - DNA, 100 bp, Homo sapiens
gaatggaaaccacttacaccgttctacaaaatgaaggtgcagtagacattgttgcaatcatgatcggcaatctgaaaggcacaaaaattctgcaatctat

SEQ ID NO: 347072 - DNA, 90 bp, Homo sapiens
gtggccagcaggcctgcgagggagagaagatgactgaggaggaggtggagaccgttctggcaggacacgaggacagcaacggctgcatca

SEQ ID NO: 347073 - DNA, 100 bp, Homo sapiens
cacagatgctatagtctggtatcaaaagaaggtagttttggatgttgggtgtggaactggaattctctctatgtttgctgctaaagctggggcgaagaag

SEQ ID NO: 347074 - DNA, 74 bp, Homo sapiens
atgagcgtctcacctctgtctccagctccgttgactttgaccaaagggacaattttaatgcgctgaaggttccc

SEQ ID NO: 347075 - DNA, 100 bp, Homo sapiens
aaggggggatctgcaagctgccaggaagactccgattcactccttctccagttgcacagccacacccttcagctggccttaatgttgactttgaatctgt

SEQ ID NO: 347076 - DNA, 75 bp, Homo sapiens
cgggtctcgggggccgctctgggatcccggccaccagcaattgtccgacacgttggtcgtcattgcctccgagcc

SEQ ID NO: 347077 - DNA, 149 bp, Homo sapiens
gtctccgcgtcccgctcgctgggagagaggtacctctccttttccctctccctttccctaagctggagaatgctggaggagaccttaaggatggccaccaccactatgaaggagctgttgtcattctggatgctggtgctcagtacggg

SEQ ID NO: 347078 - DNA, 100 bp, Homo sapiens
tctgacagaactggttcagcggagaataacatatcttcagttttcggctttgtgagaaaccttaccatcaaacacgatggccagcaacgttaccaacaag

SEQ ID NO: 347079 - DNA, 82 bp, Homo sapiens
cgccgggaacccttgccgctgctgtcctgcgaccccaagcaggtttggtgcacctcgatttggaggaagtagggcagggccc

SEQ ID NO: 347080 - DNA, 75 bp, Homo sapiens
tgaggacattgtggagtggctgaagaagtgtcaccaccccaataaacttagacaatgataaataacagagtccta

SEQ ID NO: 347081 - DNA, 82 bp, Homo sapiens
ccgccctaatggaggtctccagtttagatcatggaagggaagtggttgctgtgtatgttactggtgcttggaactgctattg

SEQ ID NO: 347082 - DNA, 87 bp, Homo sapiens
caaggggatgtcgctgctggttcgggcagagtccgacggtgaccaagaatatggcccaggtgaccaaagccctggacaaggccctga

SEQ ID NO: 347083 - DNA, 85 bp, Homo sapiens
tttgatctgccgtgatcaatatcaggaaaggccccatcttcccttcacacctggtctgtgggttctggcaccacctgagcccact

SEQ ID NO: 347084 - DNA, 87 bp, Homo sapiens
tcgcgacggccaaaaggagcggcgcggtcttcgtggtgttcgtggcaggttatcaagttatacccaaccagcagcaaaactaccaag

SEQ ID NO: 347085 - DNA, 75 bp, Homo sapiens
gcgggatcacctcctcggcgtgagcgacagcggcaaagaaccctgattgctgtccttcaacgtgttcattatgaa

SEQ ID NO: 347086 - DNA, 75 bp, Homo sapiens
tcgctcccatcgtcatctttgcatccaaccgaggcaactgtgtcatcagggtttgtgcctggaactatgcgaaca

SEQ ID NO: 347087 - DNA, 50 bp, Homo sapiens
cagccatgtttggcactgaatcttcatgtgacagagctgaatgaacctct

SEQ ID NO: 347088 - DNA, 80 bp, Homo sapiens
gcttccaaagctcattgacttttctgctcagatatccttggaacagaagatcttattgtggaagtgacttccaatgatgc

SEQ ID NO: 347089 - DNA, 100 bp, Homo sapiens
tcccagacaaatggaagtgttatgatgcccttcgaaaaatgatcaactattgaccatataggtgaagaagctaagtctcagaaagataactcacccaaga

SEQ ID NO: 347090 - DNA, 90 bp, Homo sapiens
cacacctggctatggctgtggcctggggcactgtgtcaggcattggcagaaaatctatttcaggaacttcaggaacattttcaagctctg

SEQ ID NO: 347091 - DNA, 82 bp, Homo sapiens
gctctgcgctggccgggggcgcgggcggcggcgccggcaggaagcattcagcctgtatatggagcacagcatcctcctcttg

SEQ ID NO: 347092 - DNA, 82 bp, Homo sapiens
agtttctccctctatcctcgactgtagtataatccgcgtggaatattcactaatgagtgaagacatttccacctggacacct

SEQ ID NO: 347093 - DNA, 126 bp, Homo sapiens
acggaccaggtctccctggacaagccactgtcctcagctgcccacttggacgatgcaggtgctggagaatctggtaaaagcaccattgtgaagcagatgaggatcctgcatgttaatgggtttaat

SEQ ID NO: 347094 - DNA, 75 bp, Homo sapiens
aggagcggcagtggcgggccgtcatgctcatccaggcagcgctgataaagcagtttgtgtccgacgtggcctggg

SEQ ID NO: 347095 - DNA, 99 bp, Homo sapiens
tttggcttccagtgagatgaaaaagaattggtggattttaaggagagaagcaacatgatctttctaatgaagggacatctctacaccgttcccatccgg

SEQ ID NO: 347096 - DNA, 75 bp, Homo sapiens
aagcatgttgtggctgttccaatcgctcctgtttgtcttctgctttggcccaggaactcaacagaggcaattatt

SEQ ID NO: 347097 - DNA, 82 bp, Homo sapiens
gatggtcttccgtaacctgcgggagaggtttggaattgatgatcaagatttccaggatgttgcttcagagtgtgaagtcaaa

SEQ ID NO: 347098 - DNA, 49 bp, Homo sapiens
aatcctggatctgtatgctttgagcaagccaccaaaaccctcaacaggg

SEQ ID NO: 347099 - DNA, 98 bp, Homo sapiens
gagcggagacaacagcagtgagcaaggagggtgttgatgaatctttcataaaagaagctgttttagcccgattaggtgatgataatatagatgttgtt

SEQ ID NO: 347100 - DNA, 75 bp, Homo sapiens
acccctgctagcctggcttaaggtcatggagaaagcccacatcaacctggtgagaagccaagtacaagaagctgg

SEQ ID NO: 347101 - DNA, 50 bp, Homo sapiens
ccctcatcgagctcttcgtcaaggactttccttatcccagttgattgtgc

SEQ ID NO: 347102 - DNA, 75 bp, Homo sapiens
tgagtggtaatggatgatgcagttcaaataactaaggtggataattactgtaccttcctcatggaaaaagtttta

SEQ ID NO: 347103 - DNA, 51 bp, Homo sapiens
ttccagtacacagacgagcatggggaagatttcacagagatgatgagagcc

SEQ ID NO: 347104 - DNA, 98 bp, Homo sapiens
gacactgtgtactgtgtggcatatgcgaaggatggaatagccaggccagaagaaggaaggcctgtggtgagtgggacaggaaatgacatcaccacccc

SEQ ID NO: 347105 - DNA, 74 bp, Homo sapiens
tggacaagaagatggtggagaagtgctggaagctcatggacaagcatgccaatgaagatgtggaaagaatgtta

SEQ ID NO: 347106 - DNA, 120 bp, Homo sapiens
cgcgcggtgatgctcctgaaaacgtctgcccggcgtagcgggaacccagcatgattttcaggcttttagaatgattccatacccgttagagaaaggacatctattttacccttatcccag

SEQ ID NO: 347107 - DNA, 75 bp, Homo sapiens
caaggacaaacccaccttcatcaaagggccagtgctgccccacaccgccgtgtgccttgtgtgtggcgaggcggg

SEQ ID NO: 347108 - DNA, 116 bp, Homo sapiens
ttcggaagcccgttcggcctggaggagccgcagtgggtcccggacaaggaggtactccaaagattcaggtttactcacgtcatccagcagagaatggaaagtcaaatttcctgaat

SEQ ID NO: 347109 - DNA, 98 bp, Homo sapiens
ccatggcggagcagacctactcgtgaaccgggctgtgggtcggcccaaggggaagctgggcccggcctccgcggtgaagttggccgccaaccggacaa

SEQ ID NO: 347110 - DNA, 90 bp, Homo sapiens
atgctgatggtgatggagattttgatgtggatgatgccaaagttttattagatgtcaagccctccaacatcctagtcaactcccgtgggg

SEQ ID NO: 347111 - DNA, 100 bp, Homo sapiens
ttatgggctctgtcgccgtgggaccatggccaacctggagcgcaccttcatcgccatcaagccggacggcgtgcagcgcggcctggtgggcgagatcatc

SEQ ID NO: 347112 - DNA, 50 bp, Homo sapiens
gagccgagagaggccggtttcccccaccgccacaccatgaggccccagcc

SEQ ID NO: 347113 - DNA, 100 bp, Homo sapiens
gctccggctggtctgtggtgagatgtttgaacagaatcttcaagttgctgctcagataagtgaagatttgaaaacaaaggtactagttttatgtcttcag

SEQ ID NO: 347114 - DNA, 87 bp, Homo sapiens
ggccccgcggggggcgatgaccgtgcgctgaccctgactcactccaggttttgcactgattgcaaaaataaagtcctccgagcatac

SEQ ID NO: 347115 - DNA, 97 bp, Homo sapiens
atcgaccctcgcacactctttgtcactgagatcatatctgaagatattagtgagctacaaaagaatcaaactacatctgtagccaaaattgcacaat

SEQ ID NO: 347116 - DNA, 75 bp, Homo sapiens
ggcagtacaagcttacgtctctgctcttcagtacaatcctgagttgatccctgaattttattatctccctgagat

SEQ ID NO: 347117 - DNA, 101 bp, Homo sapiens
gacctattatcagatcaaccaccaaagtgggaaacattgaaatcaaggactggctggacaatggcccagaacaagctattcaacaagatcctcaaagccct

SEQ ID NO: 347118 - DNA, 75 bp, Homo sapiens
gaaaagagtagcctgggctgtctggaaatctgaggttttcaaatggaacattttgatgcatcacttagtacctat

SEQ ID NO: 347119 - DNA, 100 bp, Homo sapiens
gtgtgatgggaacgtggatcatgcggccactcatattaccaaccgcagagaggaaattgaaaaatggacctttgaaaatgctagatttacaatgagaaat

SEQ ID NO: 347120 - DNA, 80 bp, Homo sapiens
gcctcccccttccctccccttggggaccaccgggcgccacgccgcgaacgcgttctcccggggaagtacttggaagagat

SEQ ID NO: 347121 - DNA, 75 bp, Homo sapiens
tgaatggtaaagacagggagaggtttctgacagccgctccgggaattctgaagttctgggcctttctcagaagac

SEQ ID NO: 347122 - DNA, 97 bp, Homo sapiens
tggcaatgaggtgactccaaccgaggtttatgctaaaactatcgatgggcaacagactattattgcatgtattgaaagccaccagtttcagcctaaa

SEQ ID NO: 347123 - DNA, 96 bp, Homo sapiens
ttgatgaagaaatggagaatgaaatttgcagagtatgggatatgtcaatggatgaggtattttgattccgttcaagctaaagaacagcgaaggcaa

SEQ ID NO: 347124 - DNA, 100 bp, Homo sapiens
cttctgacctttcgccttaacagagcctttatggaagcagcaggagatgaccaggatagtgaaaagtcaaaaccagcaggctcagatggtgagcggcggg

SEQ ID NO: 347125 - DNA, 96 bp, Homo sapiens
aagaaaagcatgggtacaacatggaacaggcagcagaacttgctgaattcactgccaagattgcacttctagaggaagccaagaagaaaaaggaag

SEQ ID NO: 347126 - DNA, 51 bp, Homo sapiens
atcaacatcaactacgtccctctgaaggtcttgggcgtctttggtactggc

SEQ ID NO: 347127 - DNA, 134 bp, Homo sapiens
gaaaaaacaaaacaaatatgaactatgataagctgagcagagccctgcgatactattatgacaaggtactaggttttgacaagcttgcatcatgcgtgagtataagctagtcgttcttggctcaggaggcgttg

SEQ ID NO: 347128 - DNA, 75 bp, Homo sapiens
agtggacagaacaggaaaccctgcttctcctggagagtggaatgttggctgtccgtgaaaaccgctacattgtcc

SEQ ID NO: 347129 - DNA, 96 bp, Homo sapiens
aggaggaggaggattcagggaataggagctggggagcccttctgcgccacagggcaagttaaagtcttcagagccctgtatacgtttgaacccaga

SEQ ID NO: 347130 - DNA, 100 bp, Homo sapiens
gagcgacagagacaagctgagcttgccgcacaaaaagctagagagggttattttggagctgttggagcactccttgagctgttgaagatcccgtgatcat

SEQ ID NO: 347131 - DNA, 82 bp, Homo sapiens
cgagaaagtcctctcgggagaagcagcgcctgttcccggggcagatccaggttcagctggtcagtgagaaggtcggaggggc

SEQ ID NO: 347132 - DNA, 51 bp, Homo sapiens
gaggaatattgctgcccggctggaaatggaagttccagtattaccgaaaat

SEQ ID NO: 347133 - DNA, 95 bp, Homo sapiens
ttcatgacaatgactttgagccctaccttactggacagtcaaatcaggtgtcgtgaaaactacccctaaaagccaaaatgggaaaggaaaagact

SEQ ID NO: 347134 - DNA, 100 bp, Homo sapiens
aaagtcttgattgataatattccagacagctcttccttaattgaagagatatttgttcagtcgaatcaaggtgaagaggaaacaacaagaatttcatatt

SEQ ID NO: 347135 - DNA, 123 bp, Homo sapiens
ctactttatagtcctgattcaagtgttggcggatggaagggaggagactcctgaccctcagaatgacgaagttatacggaagcgtctcctcattgatggagatggtgctggagatgatcggag

SEQ ID NO: 347136 - DNA, 75 bp, Homo sapiens
ccggctggaacccctgcgtgaagaggacctggccaaggggcctgacttgacttcacagagaatgcagttgtcttg

SEQ ID NO: 347137 - DNA, 103 bp, Homo sapiens
ttgtgggagcaaaaccaacgcctggctcggagcagcagcctctgaggatttttagactctgaggagcagttggagctaatccacattatggaaatggaaacca

SEQ ID NO: 347138 - DNA, 85 bp, Homo sapiens
caggacaagtactttatgatagctggactgggcagcctttggggtcatgacccttccctccatcggcatccccctgctattgtgg

SEQ ID NO: 347139 - DNA, 100 bp, Homo sapiens
ggacactttgttattggagaaacatgcagattatatcgcatcctatggctcaaagaaagatgattatatccataaatggactaggacaaatcttagaaac

SEQ ID NO: 347140 - DNA, 101 bp, Homo sapiens
caggaagcgagatgtcgaagccgccacccaaaccagtcaaaccaggtgagggagggatccttctaaagtaaatattctggtacctggtgctggactaggaa

SEQ ID NO: 347141 - DNA, 100 bp, Homo sapiens
ctttaacgtgagcccgctgcaggtgtgcggcccagtccgagacagcagctgactgctcctctggaaattggaatgaggatgaactccagacagctggaaa

SEQ ID NO: 347142 - DNA, 51 bp, Homo sapiens
ggagtgcagaggcatcacctgaaagatccatgaccagaactgtcctttggc

SEQ ID NO: 347143 - DNA, 49 bp, Homo sapiens
acgaagagacagctggatgaaggccaccatcgaggagacctactcgaag

SEQ ID NO: 347144 - DNA, 100 bp, Homo sapiens
aattccttgacagtttaaaagccttggcagtcaagagggtgtaaatccatctgttggaagatcaacaattggaacgagttttggaaatgttcatctggac

SEQ ID NO: 347145 - DNA, 75 bp, Homo sapiens
cgttcagcagcattcccgtctcacggatatgcaagtatggaagctccaaaaggaaagataccagattgatcttga

SEQ ID NO: 347146 - DNA, 50 bp, Homo sapiens
caggaacagcctgttgtaaatgcaggacctgatggctatagaagagacct

SEQ ID NO: 347147 - DNA, 75 bp, Homo sapiens
cgctggcagccgcggatctcaccgccgctcaggaatccacattcatctcaatggaaggatcctgccttaagtcaa

SEQ ID NO: 347148 - DNA, 96 bp, Homo sapiens
cgacaagccgctggcagccgcggatctcaccgccgctcaggagatcctgaaggagctagacgagtgctacgagcgcttcagtcgcgagacagacgg

SEQ ID NO: 347149 - DNA, 100 bp, Homo sapiens
ataaattaactcaggcccagatctttgactacggtgaaatccccaactttccccgaagtacagcttgctctgtcaccatcgccccggaatcctgcagagc

SEQ ID NO: 347150 - DNA, 98 bp, Homo sapiens
gatggactttgttgtcccggtcccagaccaccctcctccaccgtcgcctcccactgcaaaaaggcctgggtaaaataccatgaagattttgaaaaaac

SEQ ID NO: 347151 - DNA, 98 bp, Homo sapiens
aatcaaggggtgtggaattaccttcactctgggaaaaggcactgaagttggagtccttcaataatgttaaacagtggctgcaggaaatagatcgttat

SEQ ID NO: 347152 - DNA, 90 bp, Homo sapiens
ctgtgggcctcatgttatatgagaacagtattgggttgaattgaccaaagcaatggtgatggagaagcctagtcccctgctggtcgggcg

SEQ ID NO: 347153 - DNA, 100 bp, Homo sapiens
tcatgggcgcctcggccgccatggtcttcagcgatctgcagcctcatgagagggggcattgctgagcgagggggcgtccgtgtgggccaccgcatcatcg

SEQ ID NO: 347154 - DNA, 95 bp, Homo sapiens
ccacctcgtctgggctcgcggcgtctccggggaaagccgtggccccgagggcggatccgaggagccgcaaagacagcctggaaagtgacagctcc

SEQ ID NO: 347155 - DNA, 120 bp, Homo sapiens
attggcctgaggaacaagcccccactgccagtacatggaggcagtcagtgtactagacttagtaggcgacttcagaatgcccacactggcctcgacctgactgtgccccagcaccaggag

SEQ ID NO: 347156 - DNA, 157 bp, Homo sapiens
tgggtgcctcagatggggtggacaacaccgtcagaccgggagaccagggcagctcttcacagcccaactcagaagagagtttgaaagatgatgacagtggggaccatgatcagaatgaagaaaacagcacacagaaagatggtgagaaggaaaaaac

SEQ ID NO: 347157 - DNA, 97 bp, Homo sapiens
tttacaagttattttctcttcttctgaaaaagagatcttgttcattatgctgacatatcttttcatgttggcctggctgggagtcacggctttcacc

SEQ ID NO: 347158 - DNA, 51 bp, Homo sapiens
acagcacagaggcagcgccacctcgcttgtctaacaaagtgccagtggtgc

SEQ ID NO: 347159 - DNA, 100 bp, Homo sapiens
acagtgtgattggttccaaggggaccaacccacaaagaaccttgtgaagtttggtcacaaacaagtgccaacaacaacgctgccgtgtgtctgctctacc

SEQ ID NO: 347160 - DNA, 100 bp, Homo sapiens
cgggtctgtcatcatgtcgcgttacgggcggtacggaggaggctgaccccgcactacatctacccaccagccatcgtgcagcccagcgtggtgatcccag

SEQ ID NO: 347161 - DNA, 97 bp, Homo sapiens
cgagtgcctggatctcagcaatggggataccattctggaagacttgcccatccaatctgattctctttgtggccagatgggtttgtatggacaggct

SEQ ID NO: 347162 - DNA, 90 bp, Homo sapiens
cttacttgtacaacaatcttccacaccatgtccacctcacctggtacctctcccacaccgagctggctccactgcgtgctcccctcatcc

SEQ ID NO: 347163 - DNA, 82 bp, Homo sapiens
gctggactgcagtgactatgttctagtttccgttactatggcaatgacggcagggactacaacaacctttcctatgagcaac

SEQ ID NO: 347164 - DNA, 99 bp, Homo sapiens
tgtgattctttactcagctgagtgtgccacacaggtagccctggacggcattcagtgttttggcatggattccgtgaaggaacaacacctaaacccaag

SEQ ID NO: 347165 - DNA, 114 bp, Homo sapiens
cggcgggaggttcggttgtcgcccgttggccgcgcggcgccgcgctcggcggccgccattgcagggcacagtcttttgctgagcgcctgcgcctgggaattgcagtgattcatg

SEQ ID NO: 347166 - DNA, 75 bp, Homo sapiens
gcgggtttgcattctggggtggacgagctggagtgtgtggcaggccccaacatcgccgccatcgtcgggggcacc

SEQ ID NO: 347167 - DNA, 75 bp, Homo sapiens
cctctcagtagccatgctcatgatcggcgtgtttggatgtactttacagatgaagagcatgatctagaagaggat

SEQ ID NO: 347168 - DNA, 98 bp, Homo sapiens
gcacctcgtcaccaaggccaagatggcccactgcgtgaccttggttcagctgtccatttcctgtgaccatctcattgacaaggacatcggctccaagt

SEQ ID NO: 347169 - DNA, 51 bp, Homo sapiens
atagtcggagtggagaactgcaagatgcaggccctgacttcctgtgagtgc

SEQ ID NO: 347170 - DNA, 143 bp, Homo sapiens
tcggggaggagtttcatgaagagcccaaaacctattacgaactcaaaagtcaaccgctgaagagcagtggaatgcagtagccctctgggcctgggatattgtggttgataactgtgccatctgcaggaaccacattatggatc

SEQ ID NO: 347171 - DNA, 100 bp, Homo sapiens
ctggtgcacccccagtgggtgctcacagctgcccattgcctaaagaaatacgtggttgcagtaggattggagtgtggaaagatttgcttatatacctgga

SEQ ID NO: 347172 - DNA, 101 bp, Homo sapiens
cagttttaccatttaggctgggtcactgggactggaggaggaattagcttgaagcatgggtgattgaacaagaaaagcttgaagctcaagattcaggagaa

SEQ ID NO: 347173 - DNA, 90 bp, Homo sapiens
cgtctgcggaagtgcagctgcctcagttcttagcgcaggtcctttctgaaagatctgctactgaagtagacaacaattttagcaaaccac

SEQ ID NO: 347174 - DNA, 100 bp, Homo sapiens
ctgtttgagagtgggaacatgacgcaggtgcaggtgtctcttctcgccctggcggggaagccatgccagtgacggtaacccgcaccaccatcacaaccac

SEQ ID NO: 347175 - DNA, 73 bp, Homo sapiens
gaaaatgcaaaaaaactaatggaattagcctgcaacatgaagagtaaccagagagcacagagaaatgctggtg

SEQ ID NO: 347176 - DNA, 74 bp, Homo sapiens
aaaaagctttctgaacaactccagcagaaaattgagagttttgagagcaaaatgacaacacccagaaattcagt

SEQ ID NO: 347177 - DNA, 90 bp, Homo sapiens
catggaaaacgacttgaaagactagctcaaggctctcaaaattagagagatgtgtaattgtccaccactgtctaatccagaccctcgatt

SEQ ID NO: 347178 - DNA, 74 bp, Homo sapiens
aaaaaaagagggggacaaaatcaatgaaggtgacctaattgcagaggtcattcctgtcccaatcagctgctcta

SEQ ID NO: 347179 - DNA, 101 bp, Homo sapiens
aaacagcagtatccacagaagacgattcccaccataaggctgagctgcgagagctgcggctgcggctcgatcaactcaccgccaacagcgcccggctggag

SEQ ID NO: 347180 - DNA, 122 bp, Homo sapiens
tcgctgccgggatctccactccgccaatcccctgtgcctggcgttgggcggtttcccgaggagcttgggccgccgcagaaaatgcttggacagaagagatgagtactatttccactaaggcc

SEQ ID NO: 347181 - DNA, 72 bp, Homo sapiens
ggcggggaccgtccagcccagcgattctcagtcaggcacaacccgatctcccagagaaggagaagtgcctgg

SEQ ID NO: 347182 - DNA, 75 bp, Homo sapiens
catggagtcgtcttagatgttgattcagcagcctggcatcctcgctacaacctcattgttgtgggccgataccca

SEQ ID NO: 347183 - DNA, 96 bp, Homo sapiens
cacgttctccaatgcaatgctgtttgccctgaacatcatgaattcccaagaaggaggcctttctggagcaatgcattctcaagtgtttcctcacgc

SEQ ID NO: 347184 - DNA, 96 bp, Homo sapiens
tttcaaggacttgctgctgcacgagaaccacgtgaatgttgagggggcgacacacaagcaggtggtggacctgattcgagcaggcgagaaggaatt

SEQ ID NO: 347185 - DNA, 90 bp, Homo sapiens
cgggaagagactggagatgaggaggatgggagtcccatcgacagtactactggtatgacgagcgggggaagaaggtcaagtgcacggccc

SEQ ID NO: 347186 - DNA, 90 bp, Homo sapiens
tggggctcttccccagaactacaggggctctggccatcttcgtgacccctgaatggttggacagtgattcctgccaaaagtgtgatcagc

SEQ ID NO: 347187 - DNA, 101 bp, Homo sapiens
tcgcgctactctctctttctggcctggaggctatccagcgtggcagtagagaagagcatcacagaagttgctcaggagctgacagagctggtggaacatct

SEQ ID NO: 347188 - DNA, 100 bp, Homo sapiens
gctgggggccctcgctctgaccaccgtgatgagcccctgtggaggtgaagacattgtggaactcagcagtaggccttgcctcagatccaaggtcactcgg

SEQ ID NO: 347189 - DNA, 83 bp, Homo sapiens
ctccgggaccggccgaaaggcgaggaaccgatctgaagaagacacttgaatcatgggtgacgttaaaaattttctgtatgcct

SEQ ID NO: 347190 - DNA, 89 bp, Homo sapiens
ggggacattattgcgcgtggaacggctgcttttggaagtgggaatgtaagacggacttagatattgcatacaaatttggaaaaactgtg

SEQ ID NO: 347191 - DNA, 100 bp, Homo sapiens
agcggggaccgagcctgggaggccggccggtgccagcacctttcggcttctgagacggcggcagcagcggcattcagtgacagcctcatcaagggtaaga

SEQ ID NO: 347192 - DNA, 100 bp, Homo sapiens
ctattgtagtgaggtacctcacagatccaaacaatcaggcctcaggagtgcaagtagctgatgaagtatgtcgcattttttatgacatgaaagttcgtaa

SEQ ID NO: 347193 - DNA, 74 bp, Homo sapiens
tgcctttgttgattaactggacaaattcagcacccaccaaggctccggatgtgttccccatcatatcagggtgc

SEQ ID NO: 347194 - DNA, 90 bp, Homo sapiens
tgcgcggttggggccactgcgaggccgttttagatatcaacaagtttctttggatggtccggattggagggagcacagatacaggcaaac

SEQ ID NO: 347195 - DNA, 49 bp, Homo sapiens
cccgcagaaagtgcctgtgcatcaggatgtggagagcatcttgtgcgca

SEQ ID NO: 347196 - DNA, 87 bp, Homo sapiens
gacgagatgggaaggcacagggagaagggataaccctacacccagaccccagaggcggacatctaaccatggtcatgccaggaaaag

SEQ ID NO: 347197 - DNA, 98 bp, Homo sapiens
ccagcctcctcccccatgtaccacacctgtgtggccttcgcctgggtcgccccacggctgaattctcggtgataaaggcgcccactggaccctcccaa

SEQ ID NO: 347198 - DNA, 75 bp, Homo sapiens
gccgctcgtcagactccagcagccaagatggtgaagcagatcgagagcaagaagtccattggaatattaagccca

SEQ ID NO: 347199 - DNA, 96 bp, Homo sapiens
ctctacaccatctgtggtcatgtcaacagtagcacaagggtggttctcttcccaaagtggaagccaaattcatcaattatgtgaagaattgcttcc

SEQ ID NO: 347200 - DNA, 82 bp, Homo sapiens
gtctccaaaatgagtcgcatcttcaacccccatctgtttaactatagatcaacacatcatcttgcatctcatgggttctatg

SEQ ID NO: 347201 - DNA, 100 bp, Homo sapiens
gggaaatgtaagcagtgtggtaaggccaaatttgagtttcatcatggtgactatgaaaaacagtttctgcatgtactgagccgcaaggacaagactggaa

SEQ ID NO: 347202 - DNA, 108 bp, Homo sapiens
acttcgtgctgtgcgggatcgacgcggacagcgggctggagcctgacgagctggcgggtctgcctgaagccaagggagaagatgtggcagctccagtgcagacctcag

SEQ ID NO: 347203 - DNA, 50 bp, Homo sapiens
acggggccgctgctcaagttccagatttgtacaagccagctgccatgttg

SEQ ID NO: 347204 - DNA, 87 bp, Homo sapiens
cggaagaatgtggagagttttctagaagcctgtcgaaaaatgggggtgcctgagtaagactttgaccccgacgcaggcttcagtgat

SEQ ID NO: 347205 - DNA, 101 bp, Homo sapiens
gcccaaccgtgttgtatgtgagtggaggaaatacgcaggcagcctggcatcctcgctacaacctcattgttgtgggccgatacccagatcctaatttcaaa

SEQ ID NO: 347206 - DNA, 100 bp, Homo sapiens
ctgaccctcaaacagcagtatgatgaactggaggctgagtacgacagcctcaaacaggagctggagcagctcaaagaggaaaaatgctggcaggtggtgc

SEQ ID NO: 347207 - DNA, 100 bp, Homo sapiens
accgcgagaaggcccagcgcttcctgcagaaggccgagaagctctacccactgccctcggcccgcgtcactgtgtgcccagtattctgcagacaaacgag

SEQ ID NO: 347208 - DNA, 101 bp, Homo sapiens
cagaggagagttctccaaacatgatcgtttactgcaaagaaatccttttgtactattgctcattcatacttgttcatcaaagcctggagtccttaaggaca

SEQ ID NO: 347209 - DNA, 76 bp, Homo sapiens
cgcgggaggtgttcgagaacgaccccgagacgtacgtttcaggagacggcagcgaggctaccttgcatggtgtggt

SEQ ID NO: 347210 - DNA, 90 bp, Homo sapiens
tctccccgtaccgcgtgcgtgccgtgcccaccggggacgccagcaagtgcactgtcacagccgaggcctgcctggagccccagatcaccc

SEQ ID NO: 347211 - DNA, 75 bp, Homo sapiens
tctagatcttcactatccaatacggtgagggtcccgatgtcctggtgtacagcttggactttggtgggcatctgc

SEQ ID NO: 347212 - DNA, 80 bp, Homo sapiens
tttaagaaaatcagataacttgtactggagagaaatcctacaagtgtggaaagtgactattttaccccacagggagaatt

SEQ ID NO: 347213 - DNA, 75 bp, Homo sapiens
acacggcttgagatgcctgacaacctttacacctttgtgctgaagctggcggcagcagctgaaattgatgaagaa

SEQ ID NO: 347214 - DNA, 75 bp, Homo sapiens
gacccggaaggcttcaaaggctgtcgcaaggaggaaggcttcgcaaggcatggtgggtcagctggcggcacggcg

SEQ ID NO: 347215 - DNA, 100 bp, Homo sapiens
tgctggcacggggctggtgggcatagtggctgccctgctgggtgtcatggagaaactccagctgggcccagagattctgcagcgggaaaatccaaggctt

SEQ ID NO: 347216 - DNA, 75 bp, Homo sapiens
ctgaacactttccagccttgtttttcagcagctttgaggaaaagtatagctatgaaacccacgtagtcgaacacc

SEQ ID NO: 347217 - DNA, 75 bp, Homo sapiens
atttttcacccgagtcagcaccctcccagcaaccagtgaaaaatgtactctgacctgaatcctgaattttccttg

SEQ ID NO: 347218 - DNA, 100 bp, Homo sapiens
gtctcggatagtgggctctgtagaattcgacagtatgccaccattggttcaggcaatcttcagcggtgatccagaggagatccggatgctcatccataaa

SEQ ID NO: 347219 - DNA, 100 bp, Homo sapiens
ctttacagtaagatgggaaacacagcaaccagatttgagttctgtgaacctgcatttgttgttggtaattgcctccagatagcttctgacagtcatcagt

SEQ ID NO: 347220 - DNA, 100 bp, Homo sapiens
caggaagtgacttcgtttatgtcgttgacacccggcctaaaaagcaagaaccagttcacagaagtgtgagtttattcatcagtaaacacctttaagtaaa

SEQ ID NO: 347221 - DNA, 100 bp, Homo sapiens
aaattggactaaattaccagaatgcagggccattgagacccagagcagcagttctgaagagatagtgcccagccctccctcgccaccccctctaccccgc

SEQ ID NO: 347222 - DNA, 90 bp, Homo sapiens
gacctcgcccacgcccagcagcagcagcaacaggatagagggaggaatcagcagcttggaaattcaagcacgtgatctggcgggatgggc

SEQ ID NO: 347223 - DNA, 75 bp, Homo sapiens
gcccggcgacccctgctgctgctactgctgttgctgctgctcgcaccgacagtaaatggttcacggccgacatca

SEQ ID NO: 347224 - DNA, 75 bp, Homo sapiens
gtgaccgagagcgtgaccgagagcgcgaatatcgtcatcgttagaagatgtgccgtttgggggtgctaaagctgg

SEQ ID NO: 347225 - DNA, 98 bp, Homo sapiens
gatggatgaacttcttggaaggcagagaaaagaaggccaatgatgaggccaatcagagtgatacaagtgtctccttgtcagaacccaagagcaaaagc

SEQ ID NO: 347226 - DNA, 76 bp, Homo sapiens
gagcttctcagaagacagagggttttcttttgagaggcggggtttcaccatgttgcccagactggtcttgaactcc

SEQ ID NO: 347227 - DNA, 98 bp, Homo sapiens
gagtgatttgcgccatcatcctcatcatcatcatagggttattttggagctgttggagcactccttgagctgttgaagatcccgtgatcattacctgg

SEQ ID NO: 347228 - DNA, 124 bp, Homo sapiens
ctcggctgcccctacggctctttctgatcattgccaacacaatggcattccagactcagcccgcctgcacccaggtgaaatatacagccttgttgctcacacaaagcctgtttggtggtttctt

SEQ ID NO: 347229 - DNA, 82 bp, Homo sapiens
cggtgtttaagccagcaatgccaagatctgttgtggacacagcattgttggttttgccatgtactattttacctatgacccg

SEQ ID NO: 347230 - DNA, 100 bp, Homo sapiens
aacacaatctcaatcgttgctgaatcctttcatatcctaataggaattaacctccaaataaaacatgactgatacggactcagaggaagacgaagaattc

SEQ ID NO: 347231 - DNA, 100 bp, Homo sapiens
gctgcgaggctcggagaaacaggcgccgcgggctccgcgcccggccggacccgggcccgaggagcgagaacccgagcagcgccatgagcaacactaccgt

SEQ ID NO: 347232 - DNA, 125 bp, Homo sapiens
tccgcctcaccacgagctacctgaagatgcgcgccgtcttccccgaaggctgcaagcatcaggacagcagagaccaaattcatcattgaatcctcaacatctagcacaatatgcctggcataagg

SEQ ID NO: 347233 - DNA, 75 bp, Homo sapiens
ttcgctctaaactgcccttgaaatgaagctggacttggaggcacattgcaagcaacccgtgccttgatggtggtt

SEQ ID NO: 347234 - DNA, 76 bp, Homo sapiens
aacggaagcgcagggagaaggaagaggtgtttgaaaaggatcacagaagaactgcagcttcctggggagcagtttc

SEQ ID NO: 347235 - DNA, 75 bp, Homo sapiens
tggttgtgtggtcgcgtctcggaaaccggtagcgcttgcagcatgcatcaacaacagcaacttgtgattggcggt

SEQ ID NO: 347236 - DNA, 75 bp, Homo sapiens
actccgattcgtgaccctcagcgccggtgcatgtcgatgtttggtgcacctcgatttggaggaagtagggcaggg

SEQ ID NO: 347237 - DNA, 95 bp, Homo sapiens
cgagaagcacagcaagaacatcacccagcgcggcaacgtcgccaagacctcggtcaaaatgcagatcttcgtgaaaacccttaccggcaagacca

SEQ ID NO: 347238 - DNA, 85 bp, Homo sapiens
tggaaaggagattgacagtcacaattttgtaataaggctcagcaggagacacagaaggcagcgctgcggtacgagcgggccgtaa

SEQ ID NO: 347239 - DNA, 82 bp, Homo sapiens
gaaaatactttactaggcttggggaagaagtcattccagagatctgagagactccataccacttctaccctcctcatctttg

SEQ ID NO: 347240 - DNA, 100 bp, Homo sapiens
cttttatattcatctcaaaaacaaaattctgaactcaggacttggcaagcattgaagttgatatcgatgtggagcacggagggaaaagaagccgcctgac

SEQ ID NO: 347241 - DNA, 97 bp, Homo sapiens
ggtgtttggaattagcaagaaatcctttggacccaagactgctgacttcagaattcagaaggagctggcggacatcactttagaccctccacctaat

SEQ ID NO: 347242 - DNA, 51 bp, Homo sapiens
acctatgggaagctgctagctctaacaagtactattaatcccgtagatgca

SEQ ID NO: 347243 - DNA, 100 bp, Homo sapiens
cccgattaaagactgtgttgcattatcaggtgcttcctgggtgagttggggtttagtcaaaggtgctgagattactggtaaggcaatccagaaaggtgct

SEQ ID NO: 347244 - DNA, 100 bp, Homo sapiens
gcacgagtgggcccgcttcgaggtggagagagcccagtgggaggtggagcgggcggagctgcaggatcccctaacaacagtgagagagcaatgcgagcag

SEQ ID NO: 347245 - DNA, 71 bp, Homo sapiens
gagtcgtgctctcgccccaacccgcgcgccaggtcatttaccatgcggtcctccaggttcaacagtatggc

SEQ ID NO: 347246 - DNA, 83 bp, Homo sapiens
gacgacctgtgccgcaacatggacgcgctcagcgagtgggactggatggagttcgtcgtgagatggagaataaagaaactctc

SEQ ID NO: 347247 - DNA, 100 bp, Homo sapiens
gcggcgcgctgctggacgaagagctctcctccttcttcctcaactatctcgctgacacgcaggctactgcagcactggggtgtcagttgttggtccgacc

SEQ ID NO: 347248 - DNA, 100 bp, Homo sapiens
ctgcagtccgtatgctgagaacctggagcaggaatgcggggaagctgatgctgaaattttcttctaaggagaaatatcccttatttacttttgtaaatgg

SEQ ID NO: 347249 - DNA, 83 bp, Homo sapiens
ctccagtgtccgcagccctcatcctgccatacagcctctgcagggtggctgtgccagtgtcattgtgtcattaactactcagt

SEQ ID NO: 347250 - DNA, 75 bp, Homo sapiens
agattcgcagtggtcgcttcttctccttggttgggtatctacagccattggttgctgttcaggtcagctttgctc

SEQ ID NO: 347251 - DNA, 74 bp, Homo sapiens
cgggccggcccagagctcccgggtcgtctttcgtgtggccgcgagcttttcctccgcaaccatgtctgacaaac

SEQ ID NO: 347252 - DNA, 50 bp, Homo sapiens
ggagccctgggctggggcaggagccgtacatgggctgtgttgaagtgctg

SEQ ID NO: 347253 - DNA, 100 bp, Homo sapiens
aagaatcaagtgtgtaatctctgtggatttaaccctacaccacatttgactgagcatttgcaagtgaggaagcagcacaaccctgggttttagataattt

SEQ ID NO: 347254 - DNA, 97 bp, Homo sapiens
aacacttccttcaagaatgcaccactggagtgacaagattggccatgaagcccccaggaggagaatcgagcaatctttttggaagtccagaagaagc

SEQ ID NO: 347255 - DNA, 100 bp, Homo sapiens
ccagcctctcgaatgggcacacctgtgtaggtgtcagctgtgatgcatgtttaaaaggaaattttcgaggtcgcagatataagtgtttaatttgctacga

SEQ ID NO: 347256 - DNA, 109 bp, Homo sapiens
aaaaccagttattgaatatcaagaggaggagttgttgaatagctgaaacctttggacttcaagaaaattatatcaaaattgtcataaataagaagcaactacaactagg

SEQ ID NO: 347257 - DNA, 73 bp, Homo sapiens
tcacattgcccacttatatgaaacccagggcgtctctggccgagcctctttttgtggaaaacgacagcagcag

SEQ ID NO: 347258 - DNA, 100 bp, Homo sapiens
cacgatgctgctcatgaaatcatcgagaccatccgcagttggaattgatcacaccttttcagttgtacttcaatcctgaattaatctttaaacactttca

SEQ ID NO: 347259 - DNA, 90 bp, Homo sapiens
tttccccccttgctcgggatggtgccacaggaggctgtgcgggccccgctccgcttcgaatgggtactactgagcgagtgtgcttgatcc

SEQ ID NO: 347260 - DNA, 50 bp, Homo sapiens
gaagtatccaattgagcttcatgggattgattatatcttggccaagcaca

SEQ ID NO: 347261 - DNA, 87 bp, Homo sapiens
cctttcctgcttttggtttccctggcaggggttgaactgtggagtgtgtggactcagcaggcatgactggagagggaagtcccaatg

SEQ ID NO: 347262 - DNA, 83 bp, Homo sapiens
ggtggactccttcggcagtccacccaccgccgccgcctcccaggttgataaggattttattcctggactcatgtacatccgag

SEQ ID NO: 347263 - DNA, 51 bp, Homo sapiens
gcgacctggagcggggatacacggtatggcccatctcctgtacgcttggag

SEQ ID NO: 347264 - DNA, 87 bp, Homo sapiens
cagatggcaacagaggatgtcaacaattttttggaggacacattcagctaacgtattttagcaggtggagtgaggttgaagattcct

SEQ ID NO: 347265 - DNA, 100 bp, Homo sapiens
ccaggtgcccccggcctgcgctcccatccacacgctcggtatcgagaaccttccctgcgaacttcagaggaacttccagctgatgcgagagctggaccag

SEQ ID NO: 347266 - DNA, 50 bp, Homo sapiens
gaagtagacattggtggaaacatttagttcaaaccttgtactactcagct

SEQ ID NO: 347267 - DNA, 100 bp, Homo sapiens
agcgcgttccggaggcccggccacctctgagaagggagacgacgctgctgggtccgctgagcggggcgacccgaggtgttatcccttttcatggattttc

SEQ ID NO: 347268 - DNA, 90 bp, Homo sapiens
cggcgtcccgggggcgcagggaaggagggcgtccgagtcaacaaccgcttcgagctgggccgagatctggacgataaaattcaggaatat

SEQ ID NO: 347269 - DNA, 100 bp, Homo sapiens
gggtggcttacagacgctgccagcatcgccgccgccaggtacaagaagaacttgaaggccctctacgtggtgcaccccaccagcttcatcaaggtcctgt

SEQ ID NO: 347270 - DNA, 100 bp, Homo sapiens
ctcctctctccttggcctctcctgggatcggcccaaggccagttctccgcagacttaattcagtgcacaaatgagatgaatgtgaacatcccacagttgg

SEQ ID NO: 347271 - DNA, 96 bp, Homo sapiens
ccagctgcgccaacatgccctggctgaaggccttaccgaggaggagtatcaggatctgcaactggaatatggacaaggacaccaaggtggttactt

SEQ ID NO: 347272 - DNA, 74 bp, Homo sapiens
caccaccgccctctggccgttgcctcaccggtaccatggggcgcaagttggaccctacgaaggagaagcggggg

SEQ ID NO: 347273 - DNA, 100 bp, Homo sapiens
gaggttacaacaatgaatcatgaagatctcagtttattaaaggaaattttgaagaggcctgtggatcctataaggggtgtcctactttcgtggacaaaaa

SEQ ID NO: 347274 - DNA, 75 bp, Homo sapiens
gagagctggctgcagtaaaaatcattaaattggagcctggtttgagaaatttctgtggttcattagctcagagaa

SEQ ID NO: 347275 - DNA, 75 bp, Homo sapiens
ttttcaagggacggatacaacgactagagatgagttatcaccaccttgttctgaacaacacaacagggagcaaat

SEQ ID NO: 347276 - DNA, 87 bp, Homo sapiens
ttgcagaagaaccaaagtgacttgaagggccattatgctgtgatgaacaaccccaccagacagcctttggccctaaacgttgcatac

SEQ ID NO: 347277 - DNA, 75 bp, Homo sapiens
gcttcggtttccctccagacagaaactatgttccaacttcctgtcaacaatcttggcagtttaagaaaagcccgg

SEQ ID NO: 347278 - DNA, 76 bp, Homo sapiens
acaggcttagctgttaacgggaaagccgggggccatcaagtataagaccacaggaccacgtgattcataaagaact

SEQ ID NO: 347279 - DNA, 98 bp, Homo sapiens
ggcaggatctcccggctctcggtccgggacgtgcgcttccccacgtcgcttgggggccacggcgcggacgccatggcctatatgaacccaatagcaat

SEQ ID NO: 347280 - DNA, 82 bp, Homo sapiens
gaaaaagcatccccgaggaggaagacgaatcgttaaacatcttaggtcagcctgctgagggatgcccaagaagttccagggt

SEQ ID NO: 347281 - DNA, 74 bp, Homo sapiens
atttcctcccagatgggacctgtgctgcagggtcactcaggatgtgtcaactgtctggagtggaatgagaaagg

SEQ ID NO: 347282 - DNA, 75 bp, Homo sapiens
ccagccacccatcaaatcagagagaaggaatccaccttcttacgctatggcagatgcagatgttggacaaatttc

SEQ ID NO: 347283 - DNA, 98 bp, Homo sapiens
aattaagaaagcagttgctgttcgaaagcatcttgagaggaacagaaaggataaagatggaaagccactcctgccaaaagagtctaaggaacagcttc

SEQ ID NO: 347284 - DNA, 95 bp, Homo sapiens
cgggttgggctgtgacgctgctgctggggtcaggaactcgatcaaaatgccactgaaaaagtccagacaatgttcacagccattgatgaactctt

SEQ ID NO: 347285 - DNA, 98 bp, Homo sapiens
cccaggtccccgcccgcaggtcccgggcagatattgatgatgctcaaatacttccccgctcaactagagtcagacatttttcacaaagtgaagaaact

SEQ ID NO: 347286 - DNA, 100 bp, Homo sapiens
gctggactcggattcgttgcctgaggtactccaaagattcaggtttactcacgtcatccagcagagaatggaaagtcaaatttcctgaattgctatgtgt

SEQ ID NO: 347287 - DNA, 82 bp, Homo sapiens
ctagaaattccccccgaagaagactcccccacatctgggtatttctgggaaaagccagcttctgtttgcactggtcttcaca

SEQ ID NO: 347288 - DNA, 95 bp, Homo sapiens
gggacttcagctcctggtagcagcaggagaacatgatcgtgtatgtggaaaagaaagtgctagaagaccctgccatcgccagcgatgaaagcttt

SEQ ID NO: 347289 - DNA, 100 bp, Homo sapiens
tcaactatgctagacagctgcaagctgaaaagtgcctgcaatttgccatttatttgtaataagggactatgttcggagtgaactggagtttgcctatgag

SEQ ID NO: 347290 - DNA, 74 bp, Homo sapiens
ttttgagcagttggcactacccgtcttgaggaatttacttacacattgggcatgcaaaagctgctcttctgaac

SEQ ID NO: 347291 - DNA, 50 bp, Homo sapiens
gcggctccttcggagacatctatctcgacccagattgatcactatgttgg

SEQ ID NO: 347292 - DNA, 73 bp, Homo sapiens
acgcggagtgagtttttccgtgctgtgtaggggaacttctgttgcaactatgtcgtttggaagatgctgcaga

SEQ ID NO: 347293 - DNA, 100 bp, Homo sapiens
ttctcaacttgaaggtcatttaaccaacctcagctttacaaaccctgaatttataactgacctaaaatgaccaatgtgtgatttcagtggaataaatggc

SEQ ID NO: 347294 - DNA, 100 bp, Homo sapiens
cacagtgctgagtcagtgtgacagtccatatgtaaccaaatattatggatcctatctgaaggcagcagaagatgtcgttttcattggacctgacacacat

SEQ ID NO: 347295 - DNA, 88 bp, Homo sapiens
cagagatccaaagagcccttcgagcaccacgtgaccccgacctggccccgctccaggatgggactgccgagtgtggcccggagctggc

SEQ ID NO: 347296 - DNA, 75 bp, Homo sapiens
gtcgccgctgctcccgctcctgctgggagagggtgctggagaatctggtaaaagcaccattgtgaagcagatgag

SEQ ID NO: 347297 - DNA, 101 bp, Homo sapiens
tgtattgcaatcatggtgcagaaataccagtccccagtgagggtgtacaaatacccctttgaattaattatggctgatttccagatgtgacttgcactcag

SEQ ID NO: 347298 - DNA, 80 bp, Homo sapiens
gggaaatctccaagtcagaaagatggcccactgcgtgaccttggttcagctgtccatttcctgtgaccatctcattgaca

SEQ ID NO: 347299 - DNA, 98 bp, Homo sapiens
tccagtttgatgtttactacaagaaaactgtcgctgaaaagcaggagaagagaaatcaggatcgcttgaggaggagagaggagagggaacgggaggag

SEQ ID NO: 347300 - DNA, 98 bp, Homo sapiens
aggtcgctgagagctgggaagaggcggcagacagcgggatgcctgtgaggagccaccaacatttgaagctatggagctcattggtaaaccaaaaccct

SEQ ID NO: 347301 - DNA, 82 bp, Homo sapiens
cagagtcagcgcgcgtggaaagtgctagcccgagcgaggatcatgaggcacggttttaaaatcaaagatgggaaaatcggag

SEQ ID NO: 347302 - DNA, 90 bp, Homo sapiens
tggcgcttgagttggtcgggggcagcggcagatctaatgaggcgtcaagaagaactcagacgcttggaagaactcagaaaccaagagttg

SEQ ID NO: 347303 - DNA, 100 bp, Homo sapiens
gcgagcgaggccggtgccctcccgggcggcgaccggggcctgggtccacgccgagggcaggacgaacttcaccagaagaaagcccccaggctctcccggc

SEQ ID NO: 347304 - DNA, 73 bp, Homo sapiens
ccaaacaagtctgcgcaaaatttgtcgaggaggtttgccgcggcaggagctcttgtccctggcaaagcgaaag

SEQ ID NO: 347305 - DNA, 76 bp, Homo sapiens
agagaggtgcctttatctgatgatgatgaaagttacacaggcgatgcaaaaactttctggatggagctagaagatg

SEQ ID NO: 347306 - DNA, 75 bp, Homo sapiens
tcagggtcttcatccagaaacgagctccagtggctgttggataattatgaaacagcggaaggtgtgagtctcccc

SEQ ID NO: 347307 - DNA, 98 bp, Homo sapiens
ttagagagtggggacgtccggcttcggagcgggagtgttcgttgtgccagcgactaaaaagagcttcttgttggatctgaggattttgatatccgagt

SEQ ID NO: 347308 - DNA, 50 bp, Homo sapiens
ccgcggtaccatgaggcgccggaattgtcttagaagaaagaaggcaagcc

SEQ ID NO: 347309 - DNA, 98 bp, Homo sapiens
gctcaggggccgctctgccgtggagctgggtgctggcacggggctggtgggcatagtggctgccctgctggatgaagcattggatgatttaaaatccc

SEQ ID NO: 347310 - DNA, 82 bp, Homo sapiens
tggtttccctggcaggggttgaactgtggagtgtgtgggaacatgcttaccctgctgatgaactcatgcctttaacctgtag

SEQ ID NO: 347311 - DNA, 51 bp, Homo sapiens
cagcctccggagtagctgggattacagacagggtctcactttgttgcccag

SEQ ID NO: 347312 - DNA, 50 bp, Homo sapiens
gcgaggaaaatgcgggacgcccagtgatgatgatgatgattttgatgatg

SEQ ID NO: 347313 - DNA, 51 bp, Homo sapiens
atggagggcatcttcaaccacaaaggttatcttgacgaatcagattacaac

SEQ ID NO: 347314 - DNA, 124 bp, Homo sapiens
cgagcgggcgggcgggcaagccagacagctgggccggagcagccgcgggcgcccgaggggccgagcgagggcaaagtatgtttagtccagcaagtatcggtcagccacgaaagacgacattatc

SEQ ID NO: 347315 - DNA, 75 bp, Homo sapiens
ttcaaagggcaggagtgcggccaccaagacttcaccacaatcactggggtgatcctgctggctgttggagtctgg

SEQ ID NO: 347316 - DNA, 82 bp, Homo sapiens
tctaagccaaaccacaccctggtccttctggacaccgagggcctgggcgatgtagaaaaggatatcacattggagtcactgc

SEQ ID NO: 347317 - DNA, 109 bp, Homo sapiens
gccctctttgcaacatttcaggaaaacagagaaagaagtgataggagggctctgtaggtgagaagccctaccactgcaactgggacggctgcggctggaagtttgcgcg

SEQ ID NO: 347318 - DNA, 51 bp, Homo sapiens
ggccctcgcggtggctgcctttaatgcagacagacatgctgaactatctgg

SEQ ID NO: 347319 - DNA, 100 bp, Homo sapiens
acccgagtcggccgtgcactgcagcctgaaggacttcactgaggatgtcaactgtgcttttgagttcctgctgaagctcacccccttgttggacaaagct

SEQ ID NO: 347320 - DNA, 100 bp, Homo sapiens
ttctcctactccataaagacttcaagtgtctgctttttcaacgtgggagaaggagttgcacaagatagtttttgatccccggtacttacttctcaatcct

SEQ ID NO: 347321 - DNA, 50 bp, Homo sapiens
cgcagctggtggcccaaaatggtgctgttgggaacacagaggaagtgact

SEQ ID NO: 347322 - DNA, 50 bp, Homo sapiens
tgtacttgctgtagatgaaaatggccaagctataacatcagaaatggtga

SEQ ID NO: 347323 - DNA, 100 bp, Homo sapiens
gccgcgactgggaggagcgccggaacgccgaggcccagagctgcggtgcaaccctgggcagtttgcgtgtcgcagcggcaccatccagtgcatccccctc

SEQ ID NO: 347324 - DNA, 100 bp, Homo sapiens
cgactgagtactcaacatattgactgtatttgggctgcagcacagaataagacctggaagtttgttgaaggtctccctattaatgatttctcacgtgaga

SEQ ID NO: 347325 - DNA, 97 bp, Homo sapiens
catggaggcgcacaacatcctcagtatcaccttttgccatgatagcatttctttcattggacagttccttacaagggctccactcagtgtctgtctg

SEQ ID NO: 347326 - DNA, 75 bp, Homo sapiens
agcctgcagacaagaaacattcgtttatgagatgaatgatatggaacctagcaaagctgttccactgaatgcatc

SEQ ID NO: 347327 - DNA, 73 bp, Homo sapiens
acgctatggcgcactggagtaccctgttcctggcagaagtcagcctcataccaaaccatccgtttttgtcatg

SEQ ID NO: 347328 - DNA, 98 bp, Homo sapiens
ccgcaaatatgggaactccaatgatgccagataatggagcagtgggttcagcaccacccccttctccaacacctaacaaagagatgaagaacaaagca

SEQ ID NO: 347329 - DNA, 95 bp, Homo sapiens
gggaaagtggcagccgggccgcgggccctgtgtcttgcaggagtaccagcagttcaggcatccgtgtcattctggaccttactcccaactaccgg

SEQ ID NO: 347330 - DNA, 100 bp, Homo sapiens
gccaagcagggaactggcatccatgaaccttgatatagttgacctgcttaaaaaggccaagaattaaagctatagagagtcccaacaaagaagatgatac

SEQ ID NO: 347331 - DNA, 118 bp, Homo sapiens
ggtagcggacggtccttgcattggcctccggcaggcgccccccgggggcgggaagctgaaggaccctctattgtcccaggcctgtgttggctgcctggaggccttgcttgactacctg

SEQ ID NO: 347332 - DNA, 74 bp, Homo sapiens
caaggatgaatacttgatcaacaggttcaaaccttgtactactcagctgatcacaagctgcttgatgggaacct

SEQ ID NO: 347333 - DNA, 98 bp, Homo sapiens
gaaagtcagggggactgcaaaggccaatgttggtgctggcaaaaagattggagctggagggagcatcactgggctgaagtttaaccctctcaatacca

SEQ ID NO: 347334 - DNA, 80 bp, Homo sapiens
gtcggccgtgcactgcagcctgaagcaaattgtggctactaatttgccccctgaagatcaagatggctctggggatgact

SEQ ID NO: 347335 - DNA, 50 bp, Homo sapiens
ccaatgtcaacattgcccagcaagtgtttgcctgagaatacagatcaacc

SEQ ID NO: 347336 - DNA, 96 bp, Homo sapiens
aagcgattctcccgtctcagcctcccgaatagctgggactacaggataagttctgaacgtcgaaaagaaaagtctcgagatgcagccagatctcgg

SEQ ID NO: 347337 - DNA, 99 bp, Homo sapiens
ctcatgaaaacaattgcagtgatgagaaccagttactaatggcatacatcacacatttcagaatcgcctaccatttggtgcaagcaaaaagcaatcagc

SEQ ID NO: 347338 - DNA, 100 bp, Homo sapiens
aactcctctctgttaatggagtggccctggccaacgtcaacattgggagcctcatctgcaatgtaggggccggtggacctgctccagcagctggtgctgc

SEQ ID NO: 347339 - DNA, 83 bp, Homo sapiens
agcacccgaggtcatccttggcatgggctacaaggaaaacgccttgcagtctcatcctactcaagtgtggctctgtatccaac

SEQ ID NO: 347340 - DNA, 86 bp, Homo sapiens
gcctggtgagggtgatgttcgggaggaggccttgtccacaggtgtgcaactgaggaacatggctcaagaaactaatcacagccaag

SEQ ID NO: 347341 - DNA, 75 bp, Homo sapiens
atcccctggatgggggaccacaagatcctcatcgacaggttgacatcatggacatatgtgagtccatcctggaga

SEQ ID NO: 347342 - DNA, 100 bp, Homo sapiens
catcccagacttggccatggaaacctggcttctcctggctgtcagcctggtgctcctctatctgttacattgattacccacctagtacaacatcttacgg

SEQ ID NO: 347343 - DNA, 76 bp, Homo sapiens
tcagacaagttccatcccacctttgagtcagacagcccacctgaggatattgaccataaggactcatatctcatta

SEQ ID NO: 347344 - DNA, 95 bp, Homo sapiens
ctggaagacatggccactccagtcggtgttgagcacggcgagcagtctcaggcctttagtgatgatggcgtcctgcctctgcggctctgccccct

SEQ ID NO: 347345 - DNA, 98 bp, Homo sapiens
gggaaatcagccctggacctggcagatccttcagcaaaagctgtccttacagggcgatgccagtccctccactccagaggagaacgaaaccacgacaa

SEQ ID NO: 347346 - DNA, 100 bp, Homo sapiens
ttctccgattcaacactaaactttccctctacgtgtagccccgggttttctcttccccaatccagtctatatcggcacaggatgaaaacctctcaaaaac

SEQ ID NO: 347347 - DNA, 75 bp, Homo sapiens
cctgggcagagactccaagacaagctcagccgaggtcaccatccaggtcaccttccgcaaccctgtcattgagag

SEQ ID NO: 347348 - DNA, 80 bp, Homo sapiens
aagtggctttcttattgcagcaaaaattcccgtaccaatgtcagtgctagggtgtaccaacattcgaccaggagagactg

SEQ ID NO: 347349 - DNA, 75 bp, Homo sapiens
attcttgatcagtcatacgggaagagagagtaagaggggggtacatggtatggagtagacatcaacaacgaggac

SEQ ID NO: 347350 - DNA, 51 bp, Homo sapiens
atgtacgactcggtgctcgccctgtccgatgttccatttaagcagacctct

SEQ ID NO: 347351 - DNA, 85 bp, Homo sapiens
cggaatgtcatccagcgagtgattagttctcctgtgcctcctgttggctctctttgcatctggcctcatccaccgagtctgtgtc

SEQ ID NO: 347352 - DNA, 90 bp, Homo sapiens
gctgctctgtggggctctggccgcgcctggcctggccgggaccatgtctcctgcagacagatctcagaagattcatgctggtgacgaagt

SEQ ID NO: 347353 - DNA, 75 bp, Homo sapiens
gaggatctttgctcttccatccgcctttgatcgtcttcctcttcagccatccagaatatgaacatcgacatttct

SEQ ID NO: 347354 - DNA, 75 bp, Homo sapiens
ggggaggttacgcagcaaaccatccagaagaaacctctgtagaggagcaggatgcaaccgacaggctgtggccgg

SEQ ID NO: 347355 - DNA, 99 bp, Homo sapiens
cagaggcccagggtacgactcagtgccagagaaccgagcatccagtcatctcctataaaggtcttgtcccatctgttccaagctatttgtccatgtaaa

SEQ ID NO: 347356 - DNA, 100 bp, Homo sapiens
aaggacgttcccgtctgtgcttcggggttccctgacccccccatcctgcagcccaccttcctgcagtgtcgtggcaggagctgaaaatcctggtggacta

SEQ ID NO: 347357 - DNA, 82 bp, Homo sapiens
ctccactccccagctgtgaaagggtgtcagttgtacccgaggcgttctcagcagcagcaagtacctgtggtggatttccagg

SEQ ID NO: 347358 - DNA, 50 bp, Homo sapiens
ccaaagatgattatcctatctaaggtatgtgaggagcagcgctgtgagga

SEQ ID NO: 347359 - DNA, 78 bp, Homo sapiens
gagcaaggggcttacgcagaaggacctggccacggtgaccgggctggtccacaagtgggcatggaccaaagacgacgt

SEQ ID NO: 347360 - DNA, 75 bp, Homo sapiens
ctgtatgcagttttatccttttctgtacaacatcacttcttctgtttgcagtgtatggcgatgaactggcctggt

SEQ ID NO: 347361 - DNA, 97 bp, Homo sapiens
aaacaaaagaggacagcacttccggtcacgccatcgttgctgccttcttcgtcaagcttgataactatggacagcaagaacttgcggatctttttgt

SEQ ID NO: 347362 - DNA, 99 bp, Homo sapiens
ctgggacgttggggagggggctgtgccgggcggagagaactcagcgaggattctgaggccagacgggtgcagggaacaactgggcgaaagggcactaca

SEQ ID NO: 347363 - DNA, 83 bp, Homo sapiens
cgcgcagggcctgcagcgggagctggacggcgagcgcgagcggcgcgagaaatgttttaactcaaatgggtgatgaaaaggac

SEQ ID NO: 347364 - DNA, 51 bp, Homo sapiens
gcactgagcaactgtgtcataatgcttgctgatgaccgtatggcactggtg

SEQ ID NO: 347365 - DNA, 101 bp, Homo sapiens
gccgccgccgccaccgccacctgcgcggcagtcatcaaggacttgcaattgtgaccaaatatattacaaagggctggaaagaagttcatgaattgtataaa

SEQ ID NO: 347366 - DNA, 100 bp, Homo sapiens
tggaatccaagggggccagttcctgccgtctgctcttctgcctcttgatctccgccaccgtcttcaggccagtattggtaaaggttttcaaggtgtcatg

SEQ ID NO: 347367 - DNA, 100 bp, Homo sapiens
cagaagatgctgaagctgaggacacacccaggaaaagactcaggacggacaagcacagtcttcggaaggaaccactcgttttgactattattttatcact

SEQ ID NO: 347368 - DNA, 80 bp, Homo sapiens
ctgctggagcagtttgagaaatcagaaggtagaagaagtatgtcttcctggaccccctggctggtgctgtaacaaagacc

SEQ ID NO: 347369 - DNA, 101 bp, Homo sapiens
ataatccaggataaattcctcctctcaagatgacatgtgaaaaagtccttgatttgatgtgctacatggtactccccattcaagatggaggcaaatcccag

SEQ ID NO: 347370 - DNA, 96 bp, Homo sapiens
agtggacgccgtcgcgaccgccatgcagctgacggtgaaggcgctgcagggccgcgagtgcagcctgcaggctggaagtgatggagagagtattgg

SEQ ID NO: 347371 - DNA, 90 bp, Homo sapiens
ggaagattttgaagacaatcgtcacttatacaggctttgtgccttgggcaaagggcagcttactcctggaagaggactgactcaaggacc

SEQ ID NO: 347372 - DNA, 74 bp, Homo sapiens
tgaatggtaccctctatgaaaaggtgcccctgggcgctgggattgctctagcctgtaagtataatggaaaagat

SEQ ID NO: 347373 - DNA, 100 bp, Homo sapiens
atgggatctgagtcatgatgtatatggcccctggccccaacatggcccgtcgctctcagagctcctcgcagggggacaacccactggcacccgggtacct

SEQ ID NO: 347374 - DNA, 101 bp, Homo sapiens
ggcgctgagaggggctgcggccggagcgggcggctgagacaaaggcgacgcttagaccatgctcagcctccaagcagccttgtcatcgacaaagaatctga

SEQ ID NO: 347375 - DNA, 100 bp, Homo sapiens
ggaccccctggagcccccatgatccctaagaagacagcttgaacctaggtgggctgggggccctgactggacctggcctggccagcttactggggagcag

SEQ ID NO: 347376 - DNA, 75 bp, Homo sapiens
cggctgtgcaagtacctgccagagaacgacctgaaggagcgagcccagggcgtggtgctgaaagtgctcacaaac

SEQ ID NO: 347377 - DNA, 82 bp, Homo sapiens
cggggaccggcggcgctggaggagcgaggcagctgtactaggactgggaacggcgtccgtctccaagagagtatgaagagag

SEQ ID NO: 347378 - DNA, 89 bp, Homo sapiens
ctgaatgggctgaaggaggaggacaaagagcccctcatcgagctcttcgtcaagcaaaatgatgcttcaacacccaggccaggtctctg

SEQ ID NO: 347379 - DNA, 96 bp, Homo sapiens
aagattgagaaaaatcctgctaattgaggacgaggtggatgttatctggtggatgttatagaataatccagaatggctactctgatctatgttgat

SEQ ID NO: 347380 - DNA, 129 bp, Homo sapiens
aatcagcagttatgaggcagagcctaagagaactatggcaacatcaggtgactgtcccagaagtgaatcgcagcctgtggacatctctacagcaatgagtgaacgggcacttgctcagaaaagactcag

SEQ ID NO: 347381 - DNA, 90 bp, Homo sapiens
gctgctgtgatatggaggaagaagagctcagggcggcagggtcaggccatcacgctggtgacacagtacgacatccacctggtgcacgcc

SEQ ID NO: 347382 - DNA, 137 bp, Homo sapiens
tgactttacaagaatatgaattcgaaaagcagttcaacgagaatgaagccatccaatggatgcaggaaaactggtgttgacagctcttctaccacaagcagtgcttctccaatgcccaacagttatgatgccctgga

SEQ ID NO: 347383 - DNA, 100 bp, Homo sapiens
ggaggaggaagaggaagaggaggatgacccacttgtgcagtcattggagaaatcgatgaagaaacagattctgcgcttgatttggggaatattcgagcag

SEQ ID NO: 347384 - DNA, 100 bp, Homo sapiens
acaaggagggcagattcattccgttatcctaaaacagacatagggcctgattacattccaacagaggaagaaaggagagtcttcgcagaatgcaatgatg

SEQ ID NO: 347385 - DNA, 151 bp, Homo sapiens
cgcggatgacgagtggctggataacatggagtcgggcaagatggcgcctcccaagaacgctccgagagatgccttgctcactggacagccagtgctcattggtggcaccatgggaacctgtagttatgttcttactggcactgaacagggc

SEQ ID NO: 347386 - DNA, 82 bp, Homo sapiens
gaggcctgggaagccaacgaccacacgcagttaacacagaaatctgcctcctgggccatgccgcttctaaggcctgtttctt

SEQ ID NO: 347387 - DNA, 76 bp, Homo sapiens
gcaggatgctgatctaaacgtggaaaaaaacatccatgatagcagtcttctgtaaatcgaacttttcaagaattct

SEQ ID NO: 347388 - DNA, 98 bp, Homo sapiens
ccgagtggatgaacatgtgcttggtgtcgtttttccttgagctgaacgtcttgcaacagtggccgcacgcataggctgatagccctgaagagatgcac

SEQ ID NO: 347389 - DNA, 73 bp, Homo sapiens
gcacactctacgattgccttcatagtggaaagacttgggcagattccaggtgatcacccccgaggagattgtg

SEQ ID NO: 347390 - DNA, 100 bp, Homo sapiens
tgctgcagaatggagcctagaagtggaacgtgtactaccgcaactgaaagtcacgattaggactgacaataagatactagagtaaaaggatggtttcttc

SEQ ID NO: 347391 - DNA, 100 bp, Homo sapiens
ggaggaagcacaccctgtcctatgtggacgtcggcactgggaaggtggtgatgatgtccagcaactctgtgaagcaggagaagaggagtttttggaaatc

SEQ ID NO: 347392 - DNA, 101 bp, Homo sapiens
cggccggcagccggcagctttgcagcggagaatagtgacagtggtacaggaaagaaagaaaaagaaaagaaaaacagaaagggcaaagacaaggaaaatgg

SEQ ID NO: 347393 - DNA, 75 bp, Homo sapiens
ggggaacctgctcaaagccctgggtcgcttggaagaagccaaggcaaaagtcaacaactctagcttaattggagt

SEQ ID NO: 347394 - DNA, 100 bp, Homo sapiens
tgatttataccatgaaatgattgaatctggtgttatcaacttaaaagatgccacctctaagagctccagcattgactttctagcaagccagggatttgat

SEQ ID NO: 347395 - DNA, 90 bp, Homo sapiens
agtttcatgatgatgcatcattgcctactcacttgatcaccttcagcattttggaagagatttggagcaagaggtggtggtggccttccc

SEQ ID NO: 347396 - DNA, 74 bp, Homo sapiens
gagacactgccaagcagccttagccctagtgtagaggttggactccatgaaagaattgcacaaaacaaatcgac

SEQ ID NO: 347397 - DNA, 100 bp, Homo sapiens
tgaacagacacgggtgaatgctgctaaaaacaagactggggctgctcccatcattgatgtggtgcgatcgggcttccgttacaagatgaggtctgtgtat

SEQ ID NO: 347398 - DNA, 75 bp, Homo sapiens
gtgggccccagccccacagaccagcccagcattcagggccgagaactactggtggcgtggccagaacacacggac

SEQ ID NO: 347399 - DNA, 74 bp, Homo sapiens
gatgcagatgagaaggttcagttggcaaaccagatatatgacttgctcccagatggacgtatcatcaaagttgg

SEQ ID NO: 347400 - DNA, 50 bp, Homo sapiens
atcatcatttggaatcttagaagctatttccttcgtgctaccatcagccg

SEQ ID NO: 347401 - DNA, 82 bp, Homo sapiens
gtgccctggctaccatggaccatcctgctggtcagcactgcggctgttgtggacatcggatacccaaggagacgaagctgaa

SEQ ID NO: 347402 - DNA, 100 bp, Homo sapiens
gtagtgcgagtggggcggacgcgcgcagcccgcccgcccggcgaccagcaagcttttgtctggtcctctgagccccagtgagagtttcctgaggtacctc

SEQ ID NO: 347403 - DNA, 100 bp, Homo sapiens
ctgcagattttcaccagatgataagcttttggctagttgttcagctgatggaaccttaaaggtaactataactacccaatattgcagccatggagtccat

SEQ ID NO: 347404 - DNA, 100 bp, Homo sapiens
ttggttcgtgctggactacaatgcaggactgctctcctactacacgaaaaagcttgtggtgaaggggggcaaaaaaaagaagcaagttctgaagttcact

SEQ ID NO: 347405 - DNA, 98 bp, Homo sapiens
tggtgggccccaacttccgcgtcggcaagaagatcggctgcggcaacttcggggagctccgcctagatgccatggacaatattaccaggcagaaccaa

SEQ ID NO: 347406 - DNA, 82 bp, Homo sapiens
gcgagatatctggccgcctctgccgcagctggaggtaccctgcatgcatatagctgctgattctactcctgctattgctcac

SEQ ID NO: 347407 - DNA, 82 bp, Homo sapiens
ggaattctaatttgaaccatgtttggattgaagccgcctctgtattacttaccaggggacaccgtggtgtttaaggatggcc

SEQ ID NO: 347408 - DNA, 83 bp, Homo sapiens
acagccagactgctgtcagcctcagagaacttgaggaagagaacacgagcttgaagactgcctctgtcaccgggtccctccac

SEQ ID NO: 347409 - DNA, 82 bp, Homo sapiens
gccgaggcaccgaggcactcagaggagcaatggctgccatccggaagaaactggtgattgttggtgatggagcctgtggaaa

SEQ ID NO: 347410 - DNA, 87 bp, Homo sapiens
aatggaatgctttacctggaatggattctgttcggcacttgaagtactccttgtttaagaaatcactactgggcagtgtttcggata

SEQ ID NO: 347411 - DNA, 101 bp, Homo sapiens
ccttccccctcggaaaatggttcccactgccgggcgagggcgtgatggtgggcatgggtcagaaggattcctatgtgggcgacgaggcccagagcaagaga

SEQ ID NO: 347412 - DNA, 98 bp, Homo sapiens
ccaccctggtggcctttccctccagctctgtctatcctaccaaggatcagcagcaggctcgtcagtctcagcttgctcaggatgagcgtgtgtcccgc

SEQ ID NO: 347413 - DNA, 100 bp, Homo sapiens
ggtcgctgtaggcgctgaggctgcagtttgcacagacatcttattgaacatttaaatgcagagatagtactgcataccatcacggatgtgaatattgctg

SEQ ID NO: 347414 - DNA, 74 bp, Homo sapiens
caaagatcgtgcagctcttggcaggagtagctgatcaaaccaaggatgggtcaggacaatcgcagcaagctccg

SEQ ID NO: 347415 - DNA, 75 bp, Homo sapiens
attttgtccttcactagcccactcataatgaagaagtgtttggattgtgagctatttcagaactgttctcaggac

SEQ ID NO: 347416 - DNA, 82 bp, Homo sapiens
ctgctgctgaagtaatgcaatggtctcaatctctggaaaaacttcttgccaaccaaatgagacggtttaagcggaagcatct

SEQ ID NO: 347417 - DNA, 90 bp, Homo sapiens
gtaaaacaaggcagatagacaaaattcagtgtgctaagacccttattctcagtctgcaacaggaaaaatgctttctgaaagcagctcctt

SEQ ID NO: 347418 - DNA, 100 bp, Homo sapiens
ccggaggcccggccacctctgagaagggagacgacgctgctgggtccgctgagcggggcgacccgagagtttgctctccaaagctcggggaattgattcc

SEQ ID NO: 347419 - DNA, 100 bp, Homo sapiens
acatgctttttattacaagactacggagcataggaggaaaattcatcatctgggtggcctcaggctcctcatccaggagtctgtgtgggatgaagccatg

SEQ ID NO: 347420 - DNA, 83 bp, Homo sapiens
gacgcgctgccgaggagaacccagcggtacaaatggtgatgatcatcaggtcaaggatagtctggagcaattgagatgtcact

SEQ ID NO: 347421 - DNA, 89 bp, Homo sapiens
ttcaagtgggatgtgtagactgttcaatgcaacaaggcaaggtggaccatttgtgctcgtgttaccaacaaaagtcagatccgtacctg

SEQ ID NO: 347422 - DNA, 74 bp, Homo sapiens
ccgataccgtgtaccagatgttttggtggctgatccaccaatagcccgatacttggcatatcgaaattttatga

SEQ ID NO: 347423 - DNA, 109 bp, Homo sapiens
acccgatcccggaggcggcggcggcggggggagccggagccgcctgggatgttcagaagctgtggatcggaaaaggaccacttttattctgatgatgacgcaatagaag

SEQ ID NO: 347424 - DNA, 83 bp, Homo sapiens
gtgcaccgtccgggattttatccaccggcactgccaagatcaggcgcgggcccaggccgaggccctccgcatcagtgatgtgc

SEQ ID NO: 347425 - DNA, 75 bp, Homo sapiens
tgcagctcgcggtttcctggcttctaggaatcagagatcattgatttcttcctgggggcctctctcaaggatgag

SEQ ID NO: 347426 - DNA, 75 bp, Homo sapiens
tcaggtgagctggagctgcccggctcggcagcgggaagtgcaaggatgatgctgaaaggaataacaaggcttatc

SEQ ID NO: 347427 - DNA, 88 bp, Homo sapiens
ctccgtgcgggccatcccctatctccccgggcgggtgtcagcttcctctggtgcaaccagcaagtcttccagtatgaatcccacagaa

SEQ ID NO: 347428 - DNA, 100 bp, Homo sapiens
tgctagaattacctggaacttcatcatcatctacttcacaggaattgccatttaggccattgcccaagtctggccaggctgatgggaccagcgaggagtc

SEQ ID NO: 347429 - DNA, 101 bp, Homo sapiens
tatggtgacagactatggggcctttatcaaaatcccaggctgtcggaagcaagctcaagactgcagtgcagatgacgacaacttccttgtgcccatagcgg

SEQ ID NO: 347430 - DNA, 97 bp, Homo sapiens
tgttccagaagtgctgcctggtgcagaggatcctggaggcctgggaagccaacgaccacacgcaccaggacggcaaccttcccaccctcatatccag

SEQ ID NO: 347431 - DNA, 75 bp, Homo sapiens
cgggcttcagtactcgggcaagaccaccttcgtcaacgtgatcgcgctggagctctcaaacactgctgtcctgca

SEQ ID NO: 347432 - DNA, 82 bp, Homo sapiens
tatttttgccaatatcacactgccagacccagaacgctggacaaacattcctttgctggtcaagatcctaaagctgatcatc

SEQ ID NO: 347433 - DNA, 115 bp, Homo sapiens
ttcattcagatgtggtggaatatgccaaggaaaaactggagagcttcatcaaaaatagtgatagctttgataatgcaaacggttagagcaggagcttcatcatgtgaaagagcag

SEQ ID NO: 347434 - DNA, 75 bp, Homo sapiens
ggctggactacttcagcagcctgtggatgtccctgggccagctgcagtcagcaagaggtgtggcatgtttgggat

SEQ ID NO: 347435 - DNA, 100 bp, Homo sapiens
ccagcaagcggggccggtggcgcccgtgtcggagaccccgcgccggaccctgaggcagcgagttcagattcagaacaagaaagtggacatctctaaggtc

SEQ ID NO: 347436 - DNA, 100 bp, Homo sapiens
atgttccttagaaaggagcagcaggttttataggatcacattgacaaaagtaccatggagttttatgagtcagcatattttattgttcttattccttcaa

SEQ ID NO: 347437 - DNA, 75 bp, Homo sapiens
acatgtctgagactcctgctcagtgtagcattaagttttcggctttgtgagaaaccttaccatcaaacacgatgg

SEQ ID NO: 347438 - DNA, 100 bp, Homo sapiens
ccctggacctggcagatccttcagcaaaagctgtccttacagataaagtaagcatattgtcaaccttcctcgctcctttcaagcacctgagtcctggcat

SEQ ID NO: 347439 - DNA, 98 bp, Homo sapiens
ttcagcacggatggaaagatggagatgaacctctaacacagtggaaaggaaccgttctggatcagtgaagctgtggtctaccaatctagacaactcag

SEQ ID NO: 347440 - DNA, 98 bp, Homo sapiens
aggccatgctatcaggaagacaatttagcatagacccagatctcctggttgattattgctgacagacagaacgccttggaggctgagtggaggacggt

SEQ ID NO: 347441 - DNA, 101 bp, Homo sapiens
ccttttgaagaggaaatgaagggtattgccgctgttactgatatacctttaggccccttcacagatgtagtcactacaaatcttaaattgcgaaatccatc

SEQ ID NO: 347442 - DNA, 82 bp, Homo sapiens
gagaagggccccaccctgggcagtatagagacgtcggacttcacggtttggtgcacctcgatttggaggaagtagggcaggg

SEQ ID NO: 347443 - DNA, 75 bp, Homo sapiens
tactcggacaagtacttcgacgaacactacgagtaccggttcgatacaagaggctgttttcctagcgtggcttgc

SEQ ID NO: 347444 - DNA, 100 bp, Homo sapiens
gctgtgaagagatccagccacatcagtggaagccacctatagagagagaagaacaccggctcccattctggttaaagggtgaaggtacgctcgagcgtgg

SEQ ID NO: 347445 - DNA, 96 bp, Homo sapiens
cttcttgccagccaccactcagtctcctgctcggtttcagagcagcgatggagaaattaaatacttgcaattagcagaggaactgattcgtcctga

SEQ ID NO: 347446 - DNA, 100 bp, Homo sapiens
aaaagcttagtggcaacaacaaataagcattggcctggaaaatccacatcccaacaggctaaacaaggcagggatccagtttggaagtacttgcagactg

SEQ ID NO: 347447 - DNA, 75 bp, Homo sapiens
agcaggtgaccatggcagaactgaacgccatcattggggatttagaagaattctgctttaagttttgcatcaatc

SEQ ID NO: 347448 - DNA, 100 bp, Homo sapiens
agaagcgcaggacaggctgcattggggccaaacacagaatcagcaaagaggaggccatgcgctggttccagcagaagatggagaaggatgaaactgtgag

SEQ ID NO: 347449 - DNA, 90 bp, Homo sapiens
cacttcatttaccaaccctggaaccgcagacctctgggcttcctggcttcacaggctgctcaagaagccgagatcaatgccagaaaagcc

SEQ ID NO: 347450 - DNA, 100 bp, Homo sapiens
caccgagtacctcaggaagctcagcaagactggagtccctgatggaattatgcagtttattaaggttcagtgtatctttgcctgcctacatcaatctgca

SEQ ID NO: 347451 - DNA, 75 bp, Homo sapiens
tggatggtggagagagtggtgtctggaggcctgtgtccagcaattggggcactgaagatgatgagacccagagtt

SEQ ID NO: 347452 - DNA, 75 bp, Homo sapiens
ccgggaggcggcggtgacaacgacggcggtggtgacgggcaccgggctcgcggtcactgtggagcaacatatagg

SEQ ID NO: 347453 - DNA, 50 bp, Homo sapiens
gagagaagatggcggaagcggagtgtctgcctgtatcccagtgttcaggc

SEQ ID NO: 347454 - DNA, 75 bp, Homo sapiens
tctcctcagggaaggggcagcacagttaattcctgtaccaatggtgggttttaaggaacttctccgaagactgaa

SEQ ID NO: 347455 - DNA, 74 bp, Homo sapiens
tacaatgaagaactgaagaagctggagttgctcagacaggggggcatgtgctctgtgtacctgaaggacagtga

SEQ ID NO: 347456 - DNA, 98 bp, Homo sapiens
aactacctgcactttggggagcctaagtcctgactgcaccttttaattttaatgataatgatttgctgccacctacgggctaatgtggaaagagcaga

SEQ ID NO: 347457 - DNA, 98 bp, Homo sapiens
cctttcctgaagaagtggacgtcttcaccgccccacactggcggatgaagcagctggtggggctctactgcgacaagagttcgcagtatgtgcagtgc

SEQ ID NO: 347458 - DNA, 100 bp, Homo sapiens
ggttttcaggccacaaatgctttcacaggattgtgcagactggtgcttaaaatggaagtcgatattaatggagagtctagaagtaccctgaccaccttgc

SEQ ID NO: 347459 - DNA, 75 bp, Homo sapiens
tcagaatgccaaatgtgtttgcatgctggtggatctcttagagttgagtacaacaaatgaaattttcaaacagca

SEQ ID NO: 347460 - DNA, 100 bp, Homo sapiens
cagcgatagcccagtggatggccattccaggctacagcatgctggccatagggattggaaccctgatctacgggcactggagcataatgaagtggaaccg

SEQ ID NO: 347461 - DNA, 96 bp, Homo sapiens
agaatggaacaaaccttacctttattggagacaaaaccgttgaatttagtattagtgacaaacagaggcctggacagcaggttgcaacttgtgtgc

SEQ ID NO: 347462 - DNA, 100 bp, Homo sapiens
gtgatgcagctcttcggcctggttaacacccttctggccaatgacccaacatctcttcggaaaaacctcaggtgtgtgtaactggtgtgtgcaccgtttc

SEQ ID NO: 347463 - DNA, 75 bp, Homo sapiens
cctcccttttttgccaatcaattggaagccaaggacagtcattttgtttactcattcagccctgttgcaggtccc

SEQ ID NO: 347464 - DNA, 100 bp, Homo sapiens
atcagatcctcaacagctacaagccacaggcaagagcagttgaagacatctcttcatcgaggactaacccctacagttatgcaatgagtactgaagaagc

SEQ ID NO: 347465 - DNA, 90 bp, Homo sapiens
ggcagcgacggcagcggcggcggctggactaaacaggtcacctgcagatctgtgacttcctccgcggagccacagtccatagaatcctcg

SEQ ID NO: 347466 - DNA, 97 bp, Homo sapiens
ctgggagctggaggaaccgcgggcatgaccattcggcccctggtagacctgttggctgtgaagaaaaagcaagagacgaagcgctccatcaacgaag

SEQ ID NO: 347467 - DNA, 95 bp, Homo sapiens
cttgataaattggggcaaccgcttctaaatgaaaaccctcagctttccgaaggatgggaaatacccaatggcctggacaatgctggaaagacaac

SEQ ID NO: 347468 - DNA, 82 bp, Homo sapiens
cccggcgcgaagaggctggactcggattcgttgcctgaggtgctgactgggttacttttttaaacactaggaatggtaattt

SEQ ID NO: 347469 - DNA, 100 bp, Homo sapiens
ttcactccaggctgaagttacaggatgatgaggatgataatgcaggcacggagatgaagatactgcggggccactgcggaccagtgtacagcacgaggtt

SEQ ID NO: 347470 - DNA, 100 bp, Homo sapiens
cagtggagaccgcgcctggctcaggtgtgggaccccatccttcctgtcttcgcagaggagtcctcgcgtggaacatgcttaccctgctgatgaactcatg

SEQ ID NO: 347471 - DNA, 90 bp, Homo sapiens
ggcaggcaacgctcaccttgacccaggtgattcctggggctgccagctaaggtcccttatgatttctgctctggctttgcagttttcagc

SEQ ID NO: 347472 - DNA, 100 bp, Homo sapiens
gtggagatatggcgcaactgcggcgcatgtatcctccactcctcgctggccaccatcctgctgcccaacagaagaagctcttctgtctccgatttcctga

SEQ ID NO: 347473 - DNA, 100 bp, Homo sapiens
gaacagctggagcaaggcgacgaaccttggagagaggagaacgaacatcttctggacctttgtccaggaattactctgcttaatgtaagcaagctgaaca

SEQ ID NO: 347474 - DNA, 75 bp, Homo sapiens
ctggaacttgccctgtctcctcgcagatgagccaaaatgaagtttaatccctttgtgacttccgaccgaagcaag

SEQ ID NO: 347475 - DNA, 100 bp, Homo sapiens
tggggaagatttacctagctgccagtttttcagttatgggacaaaaatattatatcaaaacactgaagctttgcaatctaaattcttttcacctcttcaa

SEQ ID NO: 347476 - DNA, 75 bp, Homo sapiens
gttttgccacgtggatgtgaagatttcctctaaaagtccacagatcctggtccctacaaataagcctgctcatgt

SEQ ID NO: 347477 - DNA, 100 bp, Homo sapiens
gttactttacagcttgcctgtgtttgtgatcctggatacattgatgtcttatgtctccagaaaattcagatccacaattccacttggagcacagaggccc

SEQ ID NO: 347478 - DNA, 76 bp, Homo sapiens
gtcgacatgagtgatgtggaggaaaacaacttcgagggcagaaagaagaagaggacagtgctccagtgaaagtgga

SEQ ID NO: 347479 - DNA, 80 bp, Homo sapiens
ttgtatcatcagattccatttcaacttctgccgacaacttttctcctgatttgaggttcgtaatggacctgaaagtggca

SEQ ID NO: 347480 - DNA, 90 bp, Homo sapiens
ggcgcatatcttcaaagcacctagtacctcctaccattgtcaactgggtcatgtaggtacaacagcaaccaagaagatcgatgtctacct

SEQ ID NO: 347481 - DNA, 99 bp, Homo sapiens
ttttctccttctgcgctgaaaccagaaagcaggaactttcgtggtgagagttggcaggggcctcctgttcaggtatacggtattgaaggtcgctatgcc

SEQ ID NO: 347482 - DNA, 95 bp, Homo sapiens
gtggtatcctgttcacaaatcagcatcgtcatggtgtacttccagctgtgtgcagaggtatttggcaccaatgtgatggtgacagtggccaagtc

SEQ ID NO: 347483 - DNA, 75 bp, Homo sapiens
tgccttatcaccttcttgcttgcagggcatggactggaactcccaatacccctgacatgggctgagtcaacgtgg

SEQ ID NO: 347484 - DNA, 98 bp, Homo sapiens
agctccttggggtttccggctgcagggcggtaaggatttcaacatgcctctgacaatctctagttgacctacggcatgatgagctccaatgtgtacta

SEQ ID NO: 347485 - DNA, 75 bp, Homo sapiens
ccatgctgtgcatcccaactacctgatgttcgtgacctgctggcagggccaagctgggctaaggcgctggaggag

SEQ ID NO: 347486 - DNA, 98 bp, Homo sapiens
cgctgaccaagcaggacaccatgctgaaggccatgttcagcgggcgcatggaagtgctcaccgacagtgaagggtctcgctctgttgcccaggctgga

SEQ ID NO: 347487 - DNA, 85 bp, Homo sapiens
cacaccctcttgactccaaaaccacgtcggatgttttaagacaatgcagatcttcgtgaagactctgactggtaagaccatcacc

SEQ ID NO: 347488 - DNA, 97 bp, Homo sapiens
cagccacctgtcctccacgagcagtatgttaagctactgcgacagatacagcgaaggcataaaacatgtcctacagacttttggacccattccagag

SEQ ID NO: 347489 - DNA, 88 bp, Homo sapiens
cacccctgaaacaggttctagaaatgcaggtggcacaagaatggctcaactctccaaatagagagaatttctatcagttgcaagtacg

SEQ ID NO: 347490 - DNA, 90 bp, Homo sapiens
actgtacatgctttttattacaagactacggagcataggaggaaaattcatcatctgggaagtcacccggtctctgaaagatttttcttc

SEQ ID NO: 347491 - DNA, 75 bp, Homo sapiens
gaaagatatgaatcagagttcattggccaaggagtgccccctttcacagaaggtgggtgcggctgctatttggac

SEQ ID NO: 347492 - DNA, 103 bp, Homo sapiens
ccccggcggaatcgggataccatgatgagtcttctgaagactgtggtcattgtgcttgacatatgtagagtgtgtcggtcagaaggaacacctgagaaaccgc

SEQ ID NO: 347493 - DNA, 88 bp, Homo sapiens
aaagacaaagacccagtgaacaaatccgggggcaaggccaaaaagaagggcaagaagtacaagcccctggacctgcggcctaagaaga

SEQ ID NO: 347494 - DNA, 90 bp, Homo sapiens
cagaattctggacaatcaaaacttaactcctggatacagaacttggagcgtgatgcccagaagtgtgtgaactggtctgtgaccacaaag

SEQ ID NO: 347495 - DNA, 75 bp, Homo sapiens
agattttgatgtggatgatgccaaagttttattaggtctgttgcggttctcccacttttccataagcagaacaag

SEQ ID NO: 347496 - DNA, 111 bp, Homo sapiens
gcaaggtgatccagcaaggtcggcagagcaaggggcttacgcagaaggacctggccacggtcaaaatgcagatcttcgtgaaaacccttaccggcaagaccatcacccttg

SEQ ID NO: 347497 - DNA, 83 bp, Homo sapiens
gtaccgtcctgggcctggtgcagaacatgcgtgcgtttggcgggatcctggtgtccctgaagaggaaggagaaggaatatgag

SEQ ID NO: 347498 - DNA, 101 bp, Homo sapiens
tgagtgtgccacacaggtagccctggacggcattcagtgttttgtctgcagatctccaggggagcccaccagcctagtcaacatggcctcggaagacattg

SEQ ID NO: 347499 - DNA, 50 bp, Homo sapiens
cagcgtgcgttcagccctgggggatgtttcagcagcccctgagaaggaag

SEQ ID NO: 347500 - DNA, 90 bp, Homo sapiens
gagcgagctgagcgcctccagcgagaagttgagggagaaaggcgggcccgggaacagagatctgtggtccaggccactccacaagcgccc

SEQ ID NO: 347501 - DNA, 83 bp, Homo sapiens
cctttcccgaggaccggtccgaactggcgcaggggccgctgcggcaagacaatgcagatcttcgtgaagactctgactggtaa

SEQ ID NO: 347502 - DNA, 83 bp, Homo sapiens
agccaaagaatccaattttagagctgctaaaaaactctttggaagcacctttgcatttcaattcagaaacacgagttgatctg

SEQ ID NO: 347503 - DNA, 75 bp, Homo sapiens
ctcaactgcttgttgaggctcgagttcagcctaatccatcaaaacatcccagcccctgtggaggtgaatctgaag

SEQ ID NO: 347504 - DNA, 75 bp, Homo sapiens
ccttagactatttttcaaacaatgatgtgatgccagccacttactgtgaaattgatttagataaagaaaagagag

SEQ ID NO: 347505 - DNA, 75 bp, Homo sapiens
atggagagactgtggagtttgatgttgttgaaggagaaaaggaatcagtaacatgatagccaagcttgccaaaac

SEQ ID NO: 347506 - DNA, 101 bp, Homo sapiens
ccagcttggagaaccaccgcatcaagagcttcaagaacaagggccgcgatgtggaaaaagtggatctcttcagcctgggaattatcttctttgagatgtcc

SEQ ID NO: 347507 - DNA, 83 bp, Homo sapiens
cctacttcaaggataagggcgacagcaacagctctgccggctggaagaaatcatgaccaccccaggaaaagagaactttcgcc

SEQ ID NO: 347508 - DNA, 76 bp, Homo sapiens
cctagtatttgaatttgctagtaacgtcatggaggatgaacgacaggtccaagacaagctgctgctatctgcgtgc

SEQ ID NO: 347509 - DNA, 109 bp, Homo sapiens
tgctgtggctgtgcgacctgcagggactggcagacccgtagctaagacgccaggatttcctggaagcagagaaatgggatcagtgtcatttagggatgtgactatgggc

SEQ ID NO: 347510 - DNA, 75 bp, Homo sapiens
ccgtcatgggcgcctcggccgccatggtcttcagcgagacctgtcggccatggagcctaatgatagtaccagtac

SEQ ID NO: 347511 - DNA, 109 bp, Homo sapiens
atacagcaagaaagaccatcaagtttaccaaaaaagcttgtggtgaaggggggcaaaaaaaagaagcaagttctgaagttcactcttgattgcacccaccctgtagaag

SEQ ID NO: 347512 - DNA, 99 bp, Homo sapiens
gccagaccctctgggagcttctcagccattttccacagatcagccgtgctggtatagaggactctaagaagtggggcatgctgtttctggtgaaccagc

SEQ ID NO: 347513 - DNA, 75 bp, Homo sapiens
cctggccgaaagtcatcctttaatagacgaggtttggtgcacctcgatttggaggaagtagggcagggcccttat

SEQ ID NO: 347514 - DNA, 75 bp, Homo sapiens
cgctgatggagctcaagaccagggccctgcagctggaagaggagctgttccagaaatctctgcccctgttagaaa

SEQ ID NO: 347515 - DNA, 96 bp, Homo sapiens
ggtacaagagagggaaaatggggaaagccctctggaactggagcagctggaccagcaccatgagatgaaggtgaccatggtgtgctcattccaggt

SEQ ID NO: 347516 - DNA, 100 bp, Homo sapiens
gggccccgggcggacgccgcagagcgccgaggaggctttcctgctggtggcaaccgcctacgagacactcaagggtcatcaagactcctgagatagcaaa

SEQ ID NO: 347517 - DNA, 75 bp, Homo sapiens
atgaactccaagccaaaatcacagctttgagtgagaaacagtgaggaaattaaagttcagccaagtcagttcaga

SEQ ID NO: 347518 - DNA, 97 bp, Homo sapiens
gcgcagggaaggagggcgtccgagtcaacaaccgcttcgagctggtgaccaagaatatggcccaggtgaccaaagccctggacaaggccctgagcac

SEQ ID NO: 347519 - DNA, 100 bp, Homo sapiens
ttgccggcaagagggagttaaggacattccaggcagaggcaagaaatgactgctgtccatgcaggcaacataaacttcaagtgggatcctaaaagtctag

SEQ ID NO: 347520 - DNA, 101 bp, Homo sapiens
aaactgaagaagataacaatcaagatgaatatgaccctatggaagcagaagaagctgaggatgaagaagatggacatggatttgattgacatactttggag

SEQ ID NO: 347521 - DNA, 101 bp, Homo sapiens
acagcgccttgttccagcagggcctgatccagatccaggtgattgagaatgatagagccagcagaggaggacaagtttatgccaccaacaccagaggccag

SEQ ID NO: 347522 - DNA, 71 bp, Homo sapiens
acaccacagaagccctccgagcccagagccctatttggagcgcccttcccctactcgccctcttcagcgcc

SEQ ID NO: 347523 - DNA, 90 bp, Homo sapiens
ttttcgtttttcggatgatgccttcaatactacctttatttccaccataggctgacaaacgggctcatcataatgcactggaacgaaaac

SEQ ID NO: 347524 - DNA, 82 bp, Homo sapiens
attcctggtctacatcctgcgggtgcctttgaaaatcaacgacaacttgagcacagagagcgcctgctcgctgtgcccccgg

SEQ ID NO: 347525 - DNA, 76 bp, Homo sapiens
catgcaggactctttcttaatgcagcctgagtttggcttcaacgatgagaagtttgcagatcaagatgacattggc

SEQ ID NO: 347526 - DNA, 87 bp, Homo sapiens
ggacggctctgtaggaaggaacttggttccccctccctcagcttccgccccaaaaggagtgtttctcaggagctatcagaaactatc

SEQ ID NO: 347527 - DNA, 124 bp, Homo sapiens
tgtattcctgaaaatcatggtgaggacatgaggaaaatgtccttccagcgctgcgcccggacagacaaggtcttcgccttgatcgtgttctcctgcatctatggtgagggctacagcaatgccc

SEQ ID NO: 347528 - DNA, 87 bp, Homo sapiens
ggatccacaaacttcctgacagtcagtcaccacgaacaggggcactcggcatgctgccccagcactggagaagcagcgctgtggggg

SEQ ID NO: 347529 - DNA, 100 bp, Homo sapiens
aggaggtgaactgtgtggattgcaaagggggcatcattgtgagtggctccagggacaggacggccaaggactttccaggacctgtccaaacaagtggaaa

SEQ ID NO: 347530 - DNA, 101 bp, Homo sapiens
aaaaacggagacttggatgaggtgaaagactatgtggccaagaatccagcaagctaaagtgcaaattcttcccgaatgtgtgttgccttcaaccatgtctg

SEQ ID NO: 347531 - DNA, 100 bp, Homo sapiens
tttcggcttctgagacggcggcagcagcggcattcagcgcgcaaagagtctgccaaggagaagcagctgaaggaagaagagaagatcctggagagtgttg

SEQ ID NO: 347532 - DNA, 90 bp, Homo sapiens
ttcccccaaatgtctgactctgactctcggactgagaaacgcaagggtttccaggcctgaggtgcccgccctggccccaggagaatgaac

SEQ ID NO: 347533 - DNA, 80 bp, Homo sapiens
cattaaccctttcattttgtttggaagatggaccaaagcgatacattcatcagagaagatatgaaatataaagatgctac

SEQ ID NO: 347534 - DNA, 100 bp, Homo sapiens
tgagcatcaaggcaggcacggtggatgaggactcgtcaggctccgaatgtctttggtggacttgggaaagaggttgctagaagcagcaagaaaaggccaa

SEQ ID NO: 347535 - DNA, 100 bp, Homo sapiens
cagcaaacagagattcgggttctgccgcttatcttcaggagcgaagagctgcttctgtatcttaagtgcacttacatttcaatcgaccaagttccaagga

SEQ ID NO: 347536 - DNA, 100 bp, Homo sapiens
tccctggacgaactcatcaggaagcgcggggcggcggcgaaaggacgatggaagcagagccagcagagcctctcgctgcagcagtggaagcggccaatgg

SEQ ID NO: 347537 - DNA, 83 bp, Homo sapiens
tggggaatccaacagaattctggcagctgctcccaaccccagaacctttgctgtcttgggacggatcaccgctgcaagagggg

SEQ ID NO: 347538 - DNA, 100 bp, Homo sapiens
aagaagtggatgatgtgcttggtggagcagctgcctgggagaatgttgactctactgcagacccagctcatccagatggtggtgtggatgctgcagcgcc

SEQ ID NO: 347539 - DNA, 75 bp, Homo sapiens
catctacctaggcctctcacaaccagtgaaactgaaattgcattcttctgtgaagaagattataagaactacaaa

SEQ ID NO: 347540 - DNA, 98 bp, Homo sapiens
ggaagaggaagctgttggctgaagtatccaggatgggggccccgtttgtctgggccttgggccttttgatgctgcagatgctgctctttgtggctggg

SEQ ID NO: 347541 - DNA, 100 bp, Homo sapiens
gaggacgcgggctctgaggatgagctggaggagggggggcctttacaacaactaaacggacaggcattccagccccacgggaattttcagtaactgtctc

SEQ ID NO: 347542 - DNA, 100 bp, Homo sapiens
ctggtgagactgttcaggaaagaaaacagaaggatcgaaaggcactccatgagctaaaactggaagagtggaactttccgctgtactttttgccatacag

SEQ ID NO: 347543 - DNA, 98 bp, Homo sapiens
tactctagaatatacaaagacaaaaggagattctgatgaagaagttattcaagatggtttccctaggacttctgcatgcccatgccacacatatcctg

SEQ ID NO: 347544 - DNA, 82 bp, Homo sapiens
gaaggaacgaggcaaggagctaaagcagcgtgcgttcagccctggggatgataatgaagataattcaaatgatgggacccag

SEQ ID NO: 347545 - DNA, 100 bp, Homo sapiens
ccgcgctcaacggcctcttctgggcggcgactggcggcgcgatggacctgaccgggctcctgctggacgaagaaggcaccttctccctcgccggcttcca

SEQ ID NO: 347546 - DNA, 91 bp, Homo sapiens
aagatatacaagaaggagatacattaaatgcaatagcccttcagtactgttgtacggaactgtggctgcaccatctgtcttcatcttcccg

SEQ ID NO: 347547 - DNA, 96 bp, Homo sapiens
tgcttttagatgaatttaccactaagcttttggcatcgtgttgcaaaatgacagatcttctagaagaaggttgtttacattcagagctctatcaat

SEQ ID NO: 347548 - DNA, 88 bp, Homo sapiens
aggagctgtgcagccgcgaggaggcgcgggaggtgttcgagaacgaccccgagacgattcttctgatgtagagcgactggaaagattc

SEQ ID NO: 347549 - DNA, 83 bp, Homo sapiens
ggcgtcggaatggacctgtgccacccagttatctccagaagaagaagagaaaaggagaatccgaagggaaaggaataagatgg

SEQ ID NO: 347550 - DNA, 98 bp, Homo sapiens
tcgaattggagaacttgttggagtgctggtgaatcatttcaagaggcacgtgacacaagctgacctcaagagctccacgttttggcttcgagcaagtt

SEQ ID NO: 347551 - DNA, 100 bp, Homo sapiens
caaaaaatactttctcttcaggatctgatctgaatgctgtgaaatcactaggaactccagaggctgacgttcctcagggagtgattcgagtgcaagctcc

SEQ ID NO: 347552 - DNA, 83 bp, Homo sapiens
acgtgccatggagacgcttaacggtcgaattgacataaaacagttgatagcaaagaagataaagttgacagcagaggcagagg

SEQ ID NO: 347553 - DNA, 101 bp, Homo sapiens
attttggagaccgttgtggaaatcaaactgttcaaaggccctaaagttcctaaggacggtctgaagagccaagagctatttgatgaaattagaatgaccta

SEQ ID NO: 347554 - DNA, 75 bp, Homo sapiens
acgggcaccatgaagcacttcctgagactggtcgaattgacaaatcttaccctacagtatgtggccacacaggac

SEQ ID NO: 347555 - DNA, 85 bp, Homo sapiens
gacaaaagcctggaggttcagatttcttaaggaaacggttgcagaaagggattctccccctcataaagttcttaaaggccaccac

SEQ ID NO: 347556 - DNA, 74 bp, Homo sapiens
atctttttggatggctgcttgtcgcaatattgtcttcttcgctttagacaaggacagtatggaaattaccagca

SEQ ID NO: 347557 - DNA, 51 bp, Homo sapiens
aaattatccgaaaccgcctcactgggacaatctctatgggaagcagaaggc

SEQ ID NO: 347558 - DNA, 83 bp, Homo sapiens
cactgatgggaaatcagccctggacctggcagatccttcagcaaaagctgtccttacagatcttgatgtggaagaaatggagg

SEQ ID NO: 347559 - DNA, 100 bp, Homo sapiens
gcggacaacggagaccagacctactgcagccacgcgggcgagcggctgtgtggatgtcggcgaagccgcgggcgagactcggtgaaatacctggagtgct

SEQ ID NO: 347560 - DNA, 98 bp, Homo sapiens
gggactgggagaagaagatgaagagattgatcaattcaatgatgatacatttgggtcaggtgcagttgcaaaacaagctatcgatcagggaagatctc

SEQ ID NO: 347561 - DNA, 96 bp, Homo sapiens
ccgacactctgccaccttctccagcattgtgaaagggtcttactctgtcacccaggctggcgtgccatggtgcagtcatagctcactgcagcctca

SEQ ID NO: 347562 - DNA, 100 bp, Homo sapiens
gaaactagaaaccaatgaattccaacaacttcaaagtaaaatcagtttaatttcagaaaagtgctagttgccgcagaccaatcaaaggggctgcaggccg

SEQ ID NO: 347563 - DNA, 82 bp, Homo sapiens
gagctgggtcagtccgccgctcaccccgcggccgcaccttcccgccttctcaggtgtggatgaggtcaccattgtcaacatt

SEQ ID NO: 347564 - DNA, 75 bp, Homo sapiens
agaggggagcgactcctatgccatcaccttcagggatcatagacggtatttctatgtaaacgaacagtcgggcga

SEQ ID NO: 347565 - DNA, 98 bp, Homo sapiens
ggtgtcgtttttccttgagctgaacgtcttgcaacagtggccgcacgcatagggtgaagttgaacaaattgctatgatgaaaccaaaaggccagactg

SEQ ID NO: 347566 - DNA, 135 bp, Homo sapiens
tggccccgtgtcctgcaggtattgggagatccacagctaagacaccgggacctcctggaagccaaaaatgcaatgctgagctacctcttcatcgtaaaaaatgaactaccctctgccataaagtttctaatggga

SEQ ID NO: 347567 - DNA, 74 bp, Homo sapiens
ggattcgccgaggcaccgaggcactcagaggaggtttccagccaatggattctggtcaactggtggagattggc

SEQ ID NO: 347568 - DNA, 116 bp, Homo sapiens
gtcggcagcaagaacagagagagaggtggacagatctgagagatactgaggtgtcatggagaaactccagctgggcccagagattctgcagcgggaaaatccaaggcttatttatg

SEQ ID NO: 347569 - DNA, 107 bp, Homo sapiens
gtattgcaatcatggtgcagaaataccagtccccagtgagggtgtacaaatacccctttgaattaattatggctatatttggagttcttacaacatggcagacattg

SEQ ID NO: 347570 - DNA, 99 bp, Homo sapiens
cgcccgccgcagggcgctgacggtcccgcacgtctgccgctgccaccggcgcgcccgagagcatattaatgaaaagtgccataaactgaaaaaccaaac

SEQ ID NO: 347571 - DNA, 100 bp, Homo sapiens
gagaagatggcggaagcggactcgatgcattctatttctcatcatttggctcataactggaggaaggcaccacttttggttcttgccaaatctgactgct

SEQ ID NO: 347572 - DNA, 100 bp, Homo sapiens
ccctgagttattcagtggcatgctgaaaatacgaatcgggtatgccattgcattggccttaagggaaaagcagcgtgtaatatttaccagcccaattaag

SEQ ID NO: 347573 - DNA, 100 bp, Homo sapiens
tgttcagaagttcatggatgctgtcaacaagaagagcagttcccaggatctgcataaagggatttttgcacgagaacatggatcaaataagaaattggca

SEQ ID NO: 347574 - DNA, 100 bp, Homo sapiens
acagcccagctcgcgcttcagcgtcccggcgccgtcgcgccactcctccgagatttgaagcattcattaccatctggacttggtctctcagaaacccaaa

SEQ ID NO: 347575 - DNA, 98 bp, Homo sapiens
aagaaatcaagagacgggcgcagtccaacggaaagtggccacaggaattgaaagatgttggccatcgtgatcagatggctgcagctagaggaatcctg

SEQ ID NO: 347576 - DNA, 83 bp, Homo sapiens
ggcgggccggcgcggcgcgacaccgggctccggaaccactgcacgacggggctggacgtgtgatgaatgcagactctgctacc

SEQ ID NO: 347577 - DNA, 75 bp, Homo sapiens
aaaaattcaagaagttgaaaaacgcttttcacgtcacctggagagatgcacagacccctgtccaggatccgggat

SEQ ID NO: 347578 - DNA, 75 bp, Homo sapiens
aaaagaggatacctctgcgatcccgggtcatctccagatgctagggttatgggcctactttaaggctggccaatt

SEQ ID NO: 347579 - DNA, 98 bp, Homo sapiens
gggctttcgcccgggtcctcctagaaattccccccgaagaagactcccccacatctggttacctggctgagcagtgctggaatggcggctttatctac

SEQ ID NO: 347580 - DNA, 90 bp, Homo sapiens
gtgtgtctgtgatgcgtccacagccaggagacacgggcaacaagaaggagcctgagaagttgccagaccatgtgcctctcttttcggaca

SEQ ID NO: 347581 - DNA, 97 bp, Homo sapiens
agaagcaagtctcctcgcagtaagagaaaccgaagtcctcaccactcaacagtcaaagtgaagcagcttcgggctcagaatcaggttctgaaaaaag

SEQ ID NO: 347582 - DNA, 82 bp, Homo sapiens
tcttcaggtgcctcattcacatacgtcaaggaaattgaggtgcagaggccaagaccgttttgcccaagaaggagaaaatgaa

SEQ ID NO: 347583 - DNA, 51 bp, Homo sapiens
ggtcgtcatcttcataggctcgctgctcgtatgagccgcacagcctacacg

SEQ ID NO: 347584 - DNA, 83 bp, Homo sapiens
cgacaagccgctggcagccgcggatctcaccgccgctcaggaagccccatgtgccactcccctgatctgcagcttcggtaggc

SEQ ID NO: 347585 - DNA, 75 bp, Homo sapiens
tattggaaagtttttttaatgtggttggaacaactgaggactcctgatagttcaggatgcttcagagagggcagc

SEQ ID NO: 347586 - DNA, 100 bp, Homo sapiens
tttagaccctccacctaattgcaggtcccgttcaagaagttcttccagttcgcagtcaagatctcgttccagttccagagaacgttcgagatctcgtggg

SEQ ID NO: 347587 - DNA, 50 bp, Homo sapiens
gaagtcgcacaagacccgcaaccaggttttgagcaaaattttggactgtg

SEQ ID NO: 347588 - DNA, 90 bp, Homo sapiens
cggaaatgtgtcatcgaaagccagggaaatcctcattgacgattcaatttgttgaaggccaatttgtggactcctacgatccaaccatag

SEQ ID NO: 347589 - DNA, 100 bp, Homo sapiens
ctaaggggtatgcggtgcccacatgccactgggtcctcagcagtaccacctggacacagcattgttggttttgccatgtactattttacctatgacccgt

SEQ ID NO: 347590 - DNA, 75 bp, Homo sapiens
caaacttgacactcaccctgaccgatttgaagaacccaagtgattcagcagtgcacagcccctttacaaagcgcc

SEQ ID NO: 347591 - DNA, 96 bp, Homo sapiens
gcaaaggccgcatccagcgccagctggagataaataatgcagcaagtgaaggggtgttggccagcttcttcaacagtctgttgagtaaaaagacag

SEQ ID NO: 347592 - DNA, 88 bp, Homo sapiens
atgtcagagagagagcttggttaacttgggagaaagtttcatctgtggatggagtattgctgaactcctttgaacaactttgcatcaa

SEQ ID NO: 347593 - DNA, 51 bp, Homo sapiens
ttcttacaacatggcagacattgacaagctggaatatttcaggagtttaaa

SEQ ID NO: 347594 - DNA, 75 bp, Homo sapiens
ctctgatattgtagaaggcatactgaatgcacatgacaccacaaaggtgaccaagaatatggcccaggtgaccaa

SEQ ID NO: 347595 - DNA, 101 bp, Homo sapiens
gaattatgggagcgcatttccccagggacccagaccagccaaagaaacaaaaaatacttgtggaggagatggcccctctgaaaggagtacaggaacagcag

SEQ ID NO: 347596 - DNA, 98 bp, Homo sapiens
cgcccccctccaccccggccgcgcccaagcgcaggggctcctcgggctcagtggattcatctgaaaactacattaagatgaagacctttgaaggtttc

SEQ ID NO: 347597 - DNA, 74 bp, Homo sapiens
gtttgaacaaactcgaagaacagctgtggaaagaagttgcaaaacactggggctctctttacctatgaaggcaa

SEQ ID NO: 347598 - DNA, 76 bp, Homo sapiens
aaagaggagcagcatggcatttcagtcactggtttgcagagtccagaattatcaggaagcccttcgatacatcggc

SEQ ID NO: 347599 - DNA, 100 bp, Homo sapiens
ctactcaagcagcaaagcaggttcccagaacagtctcatctaccacagcaagaaagccagtcacaagagctgctaatgggctccgtaggcaccaactgca

SEQ ID NO: 347600 - DNA, 100 bp, Homo sapiens
tccaggtggaattgctgatagacatgggggcctcaaacgtggagatcaactcctctctgttaatggagtggcttatgtgccttcagaggaagagaaaaat

SEQ ID NO: 347601 - DNA, 97 bp, Homo sapiens
ggggagtggaggcggaggggagcggagcccggagcgtcgtggaaaggtacgcatagctgctaaattcatcactcatgcacccccaggggaatttaat

SEQ ID NO: 347602 - DNA, 100 bp, Homo sapiens
agagcgggactccattccaaaaaaataagaaaaacagaaaaataataattacatctgcaaagaccttatttccagatcaacaaactccatttatgtaaac

SEQ ID NO: 347603 - DNA, 100 bp, Homo sapiens
caacggaggattgtgcctgagaagaacccacagagacctgcaggctgggacaatgaaaagaaaatagctattttacatgaaaattttacaaccgtgaagc

SEQ ID NO: 347604 - DNA, 96 bp, Homo sapiens
gttcctcatctgggacactgctggtcaggaacgggaagtgtttggattgtgagctatttcagaactgttctcaggactcattattttaacatttgg

SEQ ID NO: 347605 - DNA, 95 bp, Homo sapiens
cggcgaaaggagctggtgcctgtgcaagttgttgagttgtctattcataagaaccccaacacatcggagccccaacacctgttggtgatgaaggg

SEQ ID NO: 347606 - DNA, 100 bp, Homo sapiens
atgtgatttgcttgaagatatgagtgtttgatgatggtgatgagcgaacattgagacgtacctcactttgtctgaaaggagagagacattttgcagagag

SEQ ID NO: 347607 - DNA, 100 bp, Homo sapiens
tctcaggacaacccagatgtgcaacaaagtgcgatgtccattgaagacttgaacaagtgggccctatttcttgtgtctccttttatacttgaagcagaac

SEQ ID NO: 347608 - DNA, 50 bp, Homo sapiens
aaagaaggttgggttcagaagaggggtgaattatgtaacctcattacgct

SEQ ID NO: 347609 - DNA, 100 bp, Homo sapiens
ggagttgtcataagggtgttggccttgccagggccttcctgggtgaggcgaagaagggaagatacgaccatatgtgggatgtttggtacaatatttgccc

SEQ ID NO: 347610 - DNA, 100 bp, Homo sapiens
atgatggagcagagatacgcccagtatggggaggatgacgaggagacgggtggacttcccgctggatcgaatccaaacacaagtcagattttggcaaatt

SEQ ID NO: 347611 - DNA, 50 bp, Homo sapiens
caggtctactggacagtggcgtgtgttgctgatcatctgggctgtgatcc

SEQ ID NO: 347612 - DNA, 100 bp, Homo sapiens
tgctggcagctgagcccgaggctgacaaggccaagtcctgtatctgccatgtctgtggcgtccacctcaacaggctgcattcctgcctctactgtgtctt

SEQ ID NO: 347613 - DNA, 83 bp, Homo sapiens
ctgcgaggagctcactgcggtcctaaccccgccgcagctcctcggacgcagttcaacttcctcaattgctttgcctcactctt

SEQ ID NO: 347614 - DNA, 75 bp, Homo sapiens
gcgttcggtgtgccgtgggtccgcgctgcttccacccaacttcctgttagtcaccttggttctgggacatccgac

SEQ ID NO: 347615 - DNA, 116 bp, Homo sapiens
ccgcgcgcagggcctgcagcgggagctggacggcgagcgcgagcggcgcgagaaagaaatctggcattttttaaagtttgcgccccacaaagaggaaatattccaaaggtactcag

SEQ ID NO: 347616 - DNA, 75 bp, Homo sapiens
gtagaaacagcttgcaaagaatacaaacacagttttaagcaggtcctgggaactccaacaagggagcaaatcaga

SEQ ID NO: 347617 - DNA, 80 bp, Homo sapiens
aatggtgaagtttctctaacttcaggacatgctatcatcaggactcccatggggatctgggattggcacaagactctgct

SEQ ID NO: 347618 - DNA, 99 bp, Homo sapiens
tagagccataaagaaagcaaagcgcagaaatgttggatttgaatttgcagctcaccttgtgaagatgaaatatccaagaatctgtattctagatggtgg

SEQ ID NO: 347619 - DNA, 132 bp, Homo sapiens
ggctgtcgtcgggcgctcatttcgagtgaccattccaacagatttgattgcctccagtggagatatcatcaagggaactctaatgatccaggacaaagaagttaccctggagtatgtatcaagcctggattt

SEQ ID NO: 347620 - DNA, 100 bp, Homo sapiens
agggagacgacgctgctgggtccgctgagcggggcgacccgagcctacaaggagaagatgaaggagctgtcggtgctgtcgctcatctgctcctgcttct

SEQ ID NO: 347621 - DNA, 75 bp, Homo sapiens
ttgagttggtcgggggcagcggcagaattaaacaaccaccatgtcgagcaaaaaggcaaagaccaagaccaccaa

SEQ ID NO: 347622 - DNA, 83 bp, Homo sapiens
atcactgtgcggcacatcgcagacctgtcaccaggagacaagagacaagaggagcagcagcggcaccgcccctcaccctggag

SEQ ID NO: 347623 - DNA, 98 bp, Homo sapiens
aagaagcatcgttaaagtctctcttcaccctgccgtcatgtctaagtcagagagccggtgccatctgtgggggctttgggccaggggtctccggacag

SEQ ID NO: 347624 - DNA, 99 bp, Homo sapiens
catctgtagaaacgggagttgcgaggcggatgagtgactgcaggtcagatgatgatgatgcggagagtaggagctccagggtgactcaactttgcactt

SEQ ID NO: 347625 - DNA, 75 bp, Homo sapiens
tccgtctccctgggtcagaccatactgtgcattggcagagacaagagcagctattgaccctgttcctaacaccca

SEQ ID NO: 347626 - DNA, 82 bp, Homo sapiens
ccactgcctgtggaactccaggctatgtcgacagcccacctgaggatattgaccataaggactcatatctcattacaagaag

SEQ ID NO: 347627 - DNA, 100 bp, Homo sapiens
aaattgctgctttctgcgctcatgtgtcggaactagatctttctgacaacaaactcgaagactggcatgaggtgtgagttcttgatacgaatgaaaggcc

SEQ ID NO: 347628 - DNA, 75 bp, Homo sapiens
aatatgtttgcagtacacaactcccagctgaaagttcctccgtgtcacaaagcagtacctgccccacgtggcgcg

SEQ ID NO: 347629 - DNA, 75 bp, Homo sapiens
cacctttcaaggcctgatatctctaaggattctctattgacctgaaaagtggttctggaaaagtgtaccaaggcc

SEQ ID NO: 347630 - DNA, 75 bp, Homo sapiens
cctgggtctcgtctttgtgtcctcattggaatgaaaaatgccacttgttggttgagcatgagactcagaaactga

SEQ ID NO: 347631 - DNA, 83 bp, Homo sapiens
agactccttgggggtcgagcacataacggggttcgggtgtctcgtgtgtgaacatcacagccgagagggtgacctctctgggc

SEQ ID NO: 347632 - DNA, 99 bp, Homo sapiens
gccagaggacgcgggctctgaggatgagctggaggaggggtgtgtttcctgtaacaaatcgttcaagaaactctggtcccttcatgaacatatcaagat

SEQ ID NO: 347633 - DNA, 100 bp, Homo sapiens
aatttgaacaactttccgaatctgcaaaagaagaatccaggaattgatgtctgatgatcagagagaagcaggtcggattccacgaacaatagaatgtgag

SEQ ID NO: 347634 - DNA, 100 bp, Homo sapiens
caagattaaagtcaagagaagccttgaggatgagccaagagtaagccatatcaaagacttcattgaaaaataccaaggatctcaaagaagtcctccgttt

SEQ ID NO: 347635 - DNA, 90 bp, Homo sapiens
aaaatcgcttggttaaaacctgacacttttaacagtttggcaatgaggagcagcagctggcgtgggccaagcgggagagcgagaaggcgg

SEQ ID NO: 347636 - DNA, 82 bp, Homo sapiens
gtgggatttggatgtgggatccggttccttggtgtcatccagccttagcaaaccagaggcttacatcaaaatctatcaagga

SEQ ID NO: 347637 - DNA, 82 bp, Homo sapiens
acggccgttttcatggctgcttaaaatggtctatggtctgtctctgaagccatcttcgacaagagcacagggaaggttgttt

SEQ ID NO: 347638 - DNA, 100 bp, Homo sapiens
caactatctgaagggctaccagcgccgctggttcgtgctgggcaatggtttgctctcttactacagggtaaccaggagccgacaacaactcctgacgcaa

SEQ ID NO: 347639 - DNA, 75 bp, Homo sapiens
acactcctgagctacagagactgaagaggactcaggagcaaatcagtaatactaggactcaatgaaattgctgcc

SEQ ID NO: 347640 - DNA, 74 bp, Homo sapiens
tttgtgaacatcaattcactatcattgtggcagaacttcagaaggttttcttccgccatctgtgacagcttctt

SEQ ID NO: 347641 - DNA, 50 bp, Homo sapiens
ctcaaatcaaccacaagctggagagatactttctagttgggagcaataat

SEQ ID NO: 347642 - DNA, 96 bp, Homo sapiens
ggacaaagcggctcggggccaaggatgacttcgtgctggacgtcattgctcctccttatacctctgacttcgtgcaacttttcctccccatcctgg

SEQ ID NO: 347643 - DNA, 75 bp, Homo sapiens
gcatctggctgcagctctgcggggcgcaggaggcggtgcacagcgccaaggaaagtatgtgatggtgatgggagt

SEQ ID NO: 347644 - DNA, 100 bp, Homo sapiens
gagagcggggaggaggcggtggccgtggtgcgggctctgcagcgagcgctcgatggaacctcatcccaggagaacaaggggtctgtggaaatcatgagaa

SEQ ID NO: 347645 - DNA, 100 bp, Homo sapiens
gtccagacagtttagcagaacagcctccgcggctccggggagaagagatcctgagtcatgtgttccagtggcttgggttcacagtgcatatacacaataa

SEQ ID NO: 347646 - DNA, 91 bp, Homo sapiens
ccgcgcgcagggcctgcagcgggagctggacggcgagcgcgagcggcgcgagaaattacagacgttccacgttccgtctccctgtgccagc

SEQ ID NO: 347647 - DNA, 100 bp, Homo sapiens
cttctggttgcagaatgcgaagtctgtggtttatcattgtaatcagcttcttaccaaatacagaagatggcagaaacggtggacacaagcgaaatggtca

SEQ ID NO: 347648 - DNA, 82 bp, Homo sapiens
tatcaggaaatattcgagtggcaactgcatcaactgcttggaccagcatgttcggaagtcccccgagagcgttgctttgatc

SEQ ID NO: 347649 - DNA, 101 bp, Homo sapiens
gcccggccgggtcgctgcggctgggctggagtgttttccaagcagtgaagcacttgccgtgttgaactgaatgcactactggagaatgttctgggtccaag

SEQ ID NO: 347650 - DNA, 100 bp, Homo sapiens
ccgccatcccaatttcctggtggtggagaaggatacaaccatcaatgagatcgaagacactttccgaaaaatatgtcgtaactgcaagtgtggccaagaa

SEQ ID NO: 347651 - DNA, 101 bp, Homo sapiens
atggtgaacattgttgttggagagaagatggcgaattagaagatggtgaaatagacgatgcaggatttgaagaaatacaagaaaaagaagcaaaagagaat

SEQ ID NO: 347652 - DNA, 100 bp, Homo sapiens
agtgctcattctgatggacttttgtagagtatacagaagatgaagctaggaaaataggagtggttggctgggtgaagaataccagcaaaggcaccgtgac

SEQ ID NO: 347653 - DNA, 130 bp, Homo sapiens
ctgagggtggcggcggtcgacatgttccaggtcccggatagcgagggcggccgcgccggctccagtgaggccgtctgggagaacatggcgcgcatgtgcgtgaagacccagcggctggacgtggccaagg

SEQ ID NO: 347654 - DNA, 83 bp, Homo sapiens
ctccttcggcagtccacccaccgccgccgcctcccaggaatggtcctcgtccgaagtgagaatgggcagttgttaatgattcc

SEQ ID NO: 347655 - DNA, 101 bp, Homo sapiens
ggccgccctgggccgggccccaccggacggtactaggttttgacaagcttgcatcatgcgtgagtataagctagtcgttcttggctcaggaggcgttggaa

SEQ ID NO: 347656 - DNA, 75 bp, Homo sapiens
aaaggaacccaacagagatctcttctgttctccactgctagatgtcatgtggcctgtgttttggaccgtggttcg

SEQ ID NO: 347657 - DNA, 100 bp, Homo sapiens
ctgctgtctggagggggcggcgcggcaggagcgcgttgagggactatgaaggtcaccgtgtccaaagggggcgaccgggacagtgacgacgacagcgtcc

SEQ ID NO: 347658 - DNA, 82 bp, Homo sapiens
gcaccatgccgctcctaagcctgcacagccgcggcggcagcagcagtgagagggctccttcacctaccaaacgcaaagaccg

SEQ ID NO: 347659 - DNA, 135 bp, Homo sapiens
gaaaactgggctggacccaacccttgtgggcatttgtggtgagggaaccgagtctgtgcaaagcctcctgcttgcctggcctcgccctgtggatgatgatggccttgcccccgtgagctacaacctggccttcag

SEQ ID NO: 347660 - DNA, 75 bp, Homo sapiens
gctcgaggacttcggtcttttgttctgttgcagctgggtttgctgttgctagggagcttgtcaggaagatcggag

SEQ ID NO: 347661 - DNA, 75 bp, Homo sapiens
gacggctgtcactgctggccagactcagttggtcgcattatgtttcagctcttctcagacatatgtccaaaaaca

SEQ ID NO: 347662 - DNA, 139 bp, Homo sapiens
ctccccctgcgtctctggcctcgccggtcttggggggatggttccatcatggcgtcaatgcaggtactccaaagattcaggtttactcacgtcatccagcagagaatggaaagtcaaatttcctgaattgctatgtgtc

SEQ ID NO: 347663 - DNA, 98 bp, Homo sapiens
attgctcctgctgtaaggagtgcatgctgtgtcttggggccctttgggacgagtgctgtgactgtgttgggcaagaggattatgacagattacgaccg

SEQ ID NO: 347664 - DNA, 75 bp, Homo sapiens
tttcagatgacaatgctccctctccttatatggattatttccattcaatacttggacctggaaacatcaaaaaag

SEQ ID NO: 347665 - DNA, 100 bp, Homo sapiens
ttctcgacctgctaacagaactggaccttttcggaagacataggccaaggagccagacttcctgtgttaactccttcctctgccactttttaccttgggg

SEQ ID NO: 347666 - DNA, 89 bp, Homo sapiens
aggtcggagaccgagaccatcgaaggccacaggagaagaaaaaagccaagggtttgggctcaagcacggacatcagtgaggactgggag

SEQ ID NO: 347667 - DNA, 74 bp, Homo sapiens
gggaaacccatagaagttgagcactcggtcccaaaaaggcaaagatgctgcctggaaacattggccagaaagta

SEQ ID NO: 347668 - DNA, 100 bp, Homo sapiens
aagttcttcgtggagcctcatctcatcttacaggagcagactagaggaggaacccgttttcactagacaagacagcaatcgcagtgaaaaggaagccaca

SEQ ID NO: 347669 - DNA, 100 bp, Homo sapiens
tgctgatattcagggacacccgttcttccgaaatgttgattgggatatgcaatactacatcctgctgatcctgacggacggcgtggtgaccgacatggcc

SEQ ID NO: 347670 - DNA, 100 bp, Homo sapiens
ctcgccttggagagcccaggagcaggggagacatggacatgatccacatcgcggacaccaaggtcgccaggcgttatggggatttcttcatccgtcagat

SEQ ID NO: 347671 - DNA, 75 bp, Homo sapiens
gcagccttctcagccaaacgccgaccaaggttcagcagctccacagaacagagcagtgcctcacgcctgatgaga

SEQ ID NO: 347672 - DNA, 75 bp, Homo sapiens
cgctgggggtcggcaccttcggcaaagtgaaggggtgtactctgtgtgaccgcgcctatccctcggactgtcccg

SEQ ID NO: 347673 - DNA, 82 bp, Homo sapiens
gtcagtcagaggggcgagcaggagcgattccgtcgccaaacaggcctccaccatggacagaggccaggccctgcccctccca

SEQ ID NO: 347674 - DNA, 83 bp, Homo sapiens
cggataaaatctctaagagctacattacagattttttcaacaggaagtatcacagtaacagatcgaagccgcggtcaaggccg

SEQ ID NO: 347675 - DNA, 119 bp, Homo sapiens
ccgcatcccggacggtacttctgccactgctgctccgtggagatcgtcccgcgcctgccgttccagggtctccctccactgctgtagtaacccgggtccggggcctcggtggtgctcct

SEQ ID NO: 347676 - DNA, 88 bp, Homo sapiens
ctggctcttgccctcatcctggttctggaatcctcagttcaagggggatatgagactttctactcggaatatcctgagtgttgcgtgg

SEQ ID NO: 347677 - DNA, 100 bp, Homo sapiens
catcaggtgcagagctgtgggtctggttccaagacactgtcactgagtttttgaatctgaaaattcaagaaggtgaagctcacaacattttttgccctgc

SEQ ID NO: 347678 - DNA, 83 bp, Homo sapiens
cccagcaactggagcagcttcatcttccaggaagcggggagaggtggtgagagatgacccctgttgaggatttcattggtgtc

SEQ ID NO: 347679 - DNA, 75 bp, Homo sapiens
gtggatgacaggctagtcacaatgcagaagttagccaagatgaacttaatgaaatcaatcagttcttgggacccg

SEQ ID NO: 347680 - DNA, 96 bp, Homo sapiens
tgccccctcccgaaccctagactcacagctacactctatgggttcatgccagaacccaacctgcctcccctggtgctctacgacgccacatctctg

SEQ ID NO: 347681 - DNA, 46 bp, Homo sapiens
tcctcttgcctcagcctcccaaacttaacagagcgttccaaaaaga

SEQ ID NO: 347682 - DNA, 75 bp, Homo sapiens
cgattatatcatctcagtcttgaatttactcatgctgacattccagctgcagctcttgtctcctagcagcagcat

SEQ ID NO: 347683 - DNA, 95 bp, Homo sapiens
cacttacctgaatgaccacctagagccttggatccaggagaacggcggctggatataaaccacagtacttcaggatcccattatgaaaattccca

SEQ ID NO: 347684 - DNA, 100 bp, Homo sapiens
gtaccggctgggccggaagatcggcagcggctccttcggagacatctatctcggtgacttaagagattaaaattaatttggttgctgttggttctgaaca

SEQ ID NO: 347685 - DNA, 100 bp, Homo sapiens
cttaatgagcatgttgacagcatcgatgctagacagacagacctgatcccaaccttgaagaaagtcctaaaagaaaaaatattacatatgaggaattaag

SEQ ID NO: 347686 - DNA, 100 bp, Homo sapiens
gctgttccaatcgctcctgtttgtcttctgctttggcccagtttccaggaatatggatctactggaacagcccatgctgatagtgaatatgaaagaagaa

SEQ ID NO: 347687 - DNA, 82 bp, Homo sapiens
gaagttttctactgtaaagtcaccaacgagatcttccgccactacgagtggcgacatgtctaagaatgtgagccagtcacag

SEQ ID NO: 347688 - DNA, 90 bp, Homo sapiens
tgacttcccggacgctgggaaatggttgatccaatgctcaccccagaagagcgtcacctgaacaagatgcagaaccatggctatgagaac

SEQ ID NO: 347689 - DNA, 82 bp, Homo sapiens
accggcgctcctgcccccggggtgacgcgcagctcccagccggttcacgcctacatcatcagctccctcaagaaagagatgc

SEQ ID NO: 347690 - DNA, 102 bp, Homo sapiens
ccagttctactcaagccttattgaagagataggaactcttggttgggataactttccccacaaataaaccagagaaagatgcaagacatgtagtaaaagtgg

SEQ ID NO: 347691 - DNA, 116 bp, Homo sapiens
taaatgaaccagaggtgaaaaatagtggattacttcaagacctagaggatcaagacataatgggagcatttttagacaagccaaagatggaaaagcataatgcccaggggcagggt

SEQ ID NO: 347692 - DNA, 100 bp, Homo sapiens
cgccagccgcaacctgttccccaaagacactttaatggtcggcatcgtggggcggacgggagctgggaagtcgtccctgaccctgggcttatttcggatc

SEQ ID NO: 347693 - DNA, 90 bp, Homo sapiens
gctcgcgctactctctctttctggcctggaggctatccagccccaggatggcggcccaggtgactctggaggacgcgctgtccaacgtgg

SEQ ID NO: 347694 - DNA, 50 bp, Homo sapiens
gtccgcggctccggtcacgtcaccgttgacaccacagccaaagccctatg

SEQ ID NO: 347695 - DNA, 100 bp, Homo sapiens
gctgcagccctggccgcgcactcgcctcagctgagcctggctgcactgggtgttcaacagccatcactccttggagcatctcctaccatttatacacagc

SEQ ID NO: 347696 - DNA, 74 bp, Homo sapiens
gctccaaaagatgggctataaaagtggtcaggcacttggcaagagtggacccatggatgaaggaccagatcttg

SEQ ID NO: 347697 - DNA, 100 bp, Homo sapiens
ggttgttctgccttccctcacagagaaagccagagagatgacacgggggaaattcctcaatattctagagaagcccaagaagtagcagctgcttgcggac

SEQ ID NO: 347698 - DNA, 90 bp, Homo sapiens
ctcttgttggaagaatactaccaggcgtggtgtccctcgtggccgttcacccctccaccgtcaacccgctcgggaagcagctcttgccaa

SEQ ID NO: 347699 - DNA, 95 bp, Homo sapiens
ccaaccctgatttcctgcttctccttttcatgagtgttcctgtggtctctgcacctcctttctctggacagtgccacatcgcttatccaggcagc

SEQ ID NO: 347700 - DNA, 83 bp, Homo sapiens
gttcaacatcctcctggccaccgactcctacaaggcggtgcgtctttctacgtgaataggattttgtggctggccagatacac

SEQ ID NO: 347701 - DNA, 74 bp, Homo sapiens
gggaagcccttcagctgcgggatctgcaacaaggcctaccagtgggactccatcaacgaggtggacgagtcctt

SEQ ID NO: 347702 - DNA, 100 bp, Homo sapiens
ggaatccctgggccactggagtcaaggcttgaagatttctatgcaggaccccaaaatgcaggatgtctcccgtgctaagctagcagctataattccggac

SEQ ID NO: 347703 - DNA, 100 bp, Homo sapiens
tccaggcccagcctctcgaatgggcacacctgtgtagtatcgtcgtcctccccgcagtcaggctgcccatcacccaccattccagcaggtaaagtcattt

SEQ ID NO: 347704 - DNA, 96 bp, Homo sapiens
cattgacatgtgtgcgatcatagacaggggagatcttcagtggaatgctggagagaaaaagttgactggtggagccaactggcagcctaaagtagc

SEQ ID NO: 347705 - DNA, 99 bp, Homo sapiens
ccttaggcgtggtgaggctgccgggtctcctgttccaactccacctagatttgttcccgacaaggagttttctggttcagaccgtagacagagaggccg

SEQ ID NO: 347706 - DNA, 98 bp, Homo sapiens
ctcctcaagtggatcatcaaatccaactatcaaggcctcccagtacgttgtgtgaagagtatcattcgacaggctggactctgtgaagctgagcagga

SEQ ID NO: 347707 - DNA, 50 bp, Homo sapiens
caaccacaagacgactcaataggaggaagatgaggacggggacttggttg

SEQ ID NO: 347708 - DNA, 75 bp, Homo sapiens
ctgcgaagaagattcctggaatctcatcaactgaacaccttccaccatgaccacctcagcaagttcccacttaaa

SEQ ID NO: 347709 - DNA, 87 bp, Homo sapiens
agtgttggaggacagacattaacagtatttactgagagctcatcaggcgtccacccaacggcccatgatcatcttgtaaccagtgca

SEQ ID NO: 347710 - DNA, 100 bp, Homo sapiens
cctcccgagtggctgggattacagactggatgactatgcctgccagtaagaaatctactgtcaaggcagagattcctgaagaagaattggatcaatggac

SEQ ID NO: 347711 - DNA, 101 bp, Homo sapiens
caaggatatcactgtgtgtgaacctccgaaagctcagcacacactcccgcaggatcccgccattgttcagctgaagaaaattcgatcactgcttgttgctg

SEQ ID NO: 347712 - DNA, 90 bp, Homo sapiens
aaaggacagaattgaatcacttgaaaagaggctcgaggcaagaaactatattcagtctttgactcagatgccgaagatgaactttgcgaa

SEQ ID NO: 347713 - DNA, 100 bp, Homo sapiens
aaatgctgctgctatgaatatgggtcgaccattccaaaaaaatcgtttaatggatcgagaagtggcgttgcttgctgaaatggacaaagtgaaagctgaa

SEQ ID NO: 347714 - DNA, 100 bp, Homo sapiens
gcgcctcccgccgcgcccgggatgtattcgtccccgctctgcctcacccagaacccagcgggtgccgcttctccacccgaggcttccacctccaacgagc

SEQ ID NO: 347715 - DNA, 100 bp, Homo sapiens
ggagtgagaagcaagaaggccctggacacagcaatatctctgggctttcacagggtgattctgggggtccacttgtctgtaatggtgtgcttcaaggtat

SEQ ID NO: 347716 - DNA, 90 bp, Homo sapiens
aagagaagcagtctgagttactttggaggtgtctgttctcgcacaagaggagttggtgtgaatgaggtggtggctaatgccgtagcggca

SEQ ID NO: 347717 - DNA, 90 bp, Homo sapiens
gaacccgtccctgctggggatcctctacgggaagaagtacgaggcggacatgtgcgtgagctcacggatgattgatatccagaccaggat

SEQ ID NO: 347718 - DNA, 50 bp, Homo sapiens
cggaccctcgccagtgctctgcgcagagatgtatctctaaagaacgaatg

SEQ ID NO: 347719 - DNA, 82 bp, Homo sapiens
cgccatcgttgctgccttcttcgtcaagacaatgcagatcttcgtgaagactctgactggtaagaccatcaccctcgaggtt

SEQ ID NO: 347720 - DNA, 75 bp, Homo sapiens
atccagacttcactgtgaatgatgtcaaaatgtgtgtgggaagctcctcagggtgctcccactgccgagtgagaa

SEQ ID NO: 347721 - DNA, 75 bp, Homo sapiens
gcagattttaatttcagtgactgaattaaaaggtgtcaagaagctcagaatgttgaagcttcttgtcatgacggg

SEQ ID NO: 347722 - DNA, 90 bp, Homo sapiens
caacaccagaagaaattgccaacccttgcagcccccacagaacctttattgtgtaagtttgctgatggaggacagaaaaagagacagaac

SEQ ID NO: 347723 - DNA, 100 bp, Homo sapiens
cctgctcaagccgctcttccccacctgcccggtgcccgaggaggcagccaagctcgtagcctgccactccgtgcaatctccctggaaaaggagacatgaa

SEQ ID NO: 347724 - DNA, 75 bp, Homo sapiens
tttagagctgcggaacaggacgccctctgatgagtgcgccggtctcggggaaatgcccggttccttcgtgcccac

SEQ ID NO: 347725 - DNA, 87 bp, Homo sapiens
ggaggctgggaaagctttggactactacatgctccgaaatggggcacagaaaactgaatctgtagataacgagggagaatgaattgt

SEQ ID NO: 347726 - DNA, 75 bp, Homo sapiens
gtggacccggccaacgacacatttgacattgatccgatggtggttactgatcctgcagctccaccaaagaaaccg

SEQ ID NO: 347727 - DNA, 75 bp, Homo sapiens
attcgatgccatcgtgatggcggatgagagggttacacatcattttggaatgactgtatatcatctggattacgt

SEQ ID NO: 347728 - DNA, 138 bp, Homo sapiens
gctccctcagcaagtcggacaccagactgcacgagctgcaccggggcccgcgcagcagcagggcagaagaaggaggaggagtcggcgggcggcaccaagggcagcagcaagaaggcgtcggcggcgcagctgcggatc

SEQ ID NO: 347729 - DNA, 83 bp, Homo sapiens
ctgcggtgcatcaagtacctgctgcttggcttcaacctgctcttctgggagaatggggtactaagagaaaagcacgaagctgt

SEQ ID NO: 347730 - DNA, 94 bp, Homo sapiens
cgccaaggagatcgtctctctcatcgaggcccaaaccgccaagtttgagttcatgatcgagtccatcctgtatgcccgggatgcctggctgaag

SEQ ID NO: 347731 - DNA, 50 bp, Homo sapiens
ttcgcctccatctgtaccatgtgaaaatgcctcgtgtaaaagcagctcaa

SEQ ID NO: 347732 - DNA, 75 bp, Homo sapiens
ccttcgcctccttcaccgccgcagaccccttcaagttctagtcatgaatgagctgaaagccagtggtggcgaaat

SEQ ID NO: 347733 - DNA, 75 bp, Homo sapiens
ttgaacatgctggtgccgctagccaagctgtcctgcctggaaagcgaaacgactgatagtgtgcccagcgatgaa

SEQ ID NO: 347734 - DNA, 100 bp, Homo sapiens
gaaaagactaccgcactgaaaggtttattcttcagtccaaggaagcaattcacagtcagctgttagagaagcagaaaatagcagaagaaaaaattaaaga

SEQ ID NO: 347735 - DNA, 83 bp, Homo sapiens
ccccgtcgtcctggtgctgcagcggtttttagaacttcagccataaaaatgggcagaattttccttgatcatatcggtggtac

SEQ ID NO: 347736 - DNA, 100 bp, Homo sapiens
atttcctgctcggaaccttgtttactaattgtactccaaagattcaggtttactcacgtcatccagcagagaatggaaagtcaaatttcctgaattgcta

SEQ ID NO: 347737 - DNA, 50 bp, Homo sapiens
cagcaggcccaaacccccacagaaagaatcttcaagagggagacataggg

SEQ ID NO: 347738 - DNA, 100 bp, Homo sapiens
gctccgggcaccaggagcatatcaagccactattgaactctgcagtacccatgcaaatgatgcctctgccctgaggattctgttttcttccctgatcctg

SEQ ID NO: 347739 - DNA, 97 bp, Homo sapiens
cacacgttactcagcccctgcgaacctgtatgtgcgagctattgacctgaaaagtggttctggaaaagtgtaccaaggccctgcaaaaggtgctgct

SEQ ID NO: 347740 - DNA, 100 bp, Homo sapiens
gcttttggacatggattttcaagcctacttagcttcctctagtgaagatgaagaggagatagaagaggagctacaaggagaaaactgatgtggaaggaac

SEQ ID NO: 347741 - DNA, 100 bp, Homo sapiens
cctctacttgctgcctttactactcaaggtctccttcttggggtcacaaacagcagtaaggaagaggaatatatagcaactcagggcctgggaattgtgg

SEQ ID NO: 347742 - DNA, 97 bp, Homo sapiens
aaccgtcagtttgagccagatggggtgagcccctccagactccgaataggagatcaagagtttgattcattgcctgctttactggaattctacaaaa

SEQ ID NO: 347743 - DNA, 82 bp, Homo sapiens
tgaacagattggcacccgaattgccaaagttttggaaaagaggtaccagcagaaaggtcccctcgtagacggagtatctcag

SEQ ID NO: 347744 - DNA, 74 bp, Homo sapiens
tttataataaagacacttatcttgcccaagagctggggtgtaccagtgatggcaataagaaacaaaatgatatc

SEQ ID NO: 347745 - DNA, 101 bp, Homo sapiens
gtaatcaaagacggcaacgcgcttatcagcgctatgagaaggtatatttcagaaatcgctgggtaaagactgtccacccagttgtgcatcagtactgtttg

SEQ ID NO: 347746 - DNA, 120 bp, Homo sapiens
cccaacctcatgaatctcatcgccaccatctttgtctttgcagtggtcatctatttccagggattgtcaatgaggcagatcagattccgatttgacgggcaaccaatcaatgaaacagac

SEQ ID NO: 347747 - DNA, 82 bp, Homo sapiens
ccatgccagcatcctgtctgtaccccacaccaacggaccaatcaatccagggcccaggaacgggaggatgaaattgctacta

SEQ ID NO: 347748 - DNA, 75 bp, Homo sapiens
gggagtttgaggaagaaaaggtgaaacggcagaatgaaatcgccaagaagcggaatgatgagaagacagcagctg

SEQ ID NO: 347749 - DNA, 75 bp, Homo sapiens
aagcatgtggtttggcacccaagtcaggagctgtttgagggcatgaaggcgttcaaaggcaaagaccagcaggtg

SEQ ID NO: 347750 - DNA, 117 bp, Homo sapiens
ggtgtcaggatctgaagagctatggtgaaacaccactgaagcattgccaagaacccagtgacttgattgtaaaaatttacagagcggaatcatatgctggtctccaagagtttaaag

SEQ ID NO: 347751 - DNA, 100 bp, Homo sapiens
aacctgcagactacattggaaaggagatttgctatttactctgctcgagatgatgaggaattggtccatccacagtcttcctggagttttggaaaaggag

SEQ ID NO: 347752 - DNA, 50 bp, Homo sapiens
gctttctaaccaaccactcaccaagttctaaatggcttctaagaagttgg

SEQ ID NO: 347753 - DNA, 89 bp, Homo sapiens
ataaagccaacattcgcaccgtcatggtcacagggcaattgaaggaacagactaaaaatcgtgtcctggaaggaaactacaggtactac

SEQ ID NO: 347754 - DNA, 88 bp, Homo sapiens
gaccctctggagacccctatcaaggatggcatcctctaccagcagcatgtcaagtttggcaagggcaccacctaccagaagacggatg

SEQ ID NO: 347755 - DNA, 73 bp, Homo sapiens
tcttctgcctcagtctcccgagtagctgggactttagtctatatcggcacaggatgaaaacctctcaaaaaca

SEQ ID NO: 347756 - DNA, 100 bp, Homo sapiens
atgacaaaggctttgccgcagttcatcttcctccctgtgtactttccatttgccttcctggatgctgcctggaaacattggccagaaagtaacactgagg

SEQ ID NO: 347757 - DNA, 83 bp, Homo sapiens
atcaagcctcatttacaacaaaaagaaccctcaattgatgaaaggcctcaggcccaggcccaaggccaagtgagagagcccag

SEQ ID NO: 347758 - DNA, 97 bp, Homo sapiens
cctcccaacgtgctgggattacagatgaggaccttgagattgaattggttgaggaagagcctccattcctgagagggcacactaagcaaagcatgga

SEQ ID NO: 347759 - DNA, 100 bp, Homo sapiens
gcaggccattcgggaggcaagattgaaggagatcaaggaagagcttctgcattctgagaagcttaaggcccagagtgagccttacacaaccatccaccag

SEQ ID NO: 347760 - DNA, 100 bp, Homo sapiens
cgcccgggcctcgcccgcccgcctgcccgccatggtgtcatggatcatctccaggctggtggtaacaccttccaccatgaccacctcagcaagttcccac

SEQ ID NO: 347761 - DNA, 100 bp, Homo sapiens
ggcttcctgccagccatgaaacagattggcaatgtggcagccctgcctggaattgttcatgtttttgccaatccagaagactgtgtagcatttggcaaag

SEQ ID NO: 347762 - DNA, 83 bp, Homo sapiens
cgcgggagcctttggggcaccacagagatgcgggcttgggcactgtttaaaggaaagttccgagaaggcatcgacaagccgga

SEQ ID NO: 347763 - DNA, 75 bp, Homo sapiens
agtgacccgggtgccgaggagcgggaagagttgctgggcatcaagatggtgctcatgtggaccagtggtgacgcc

SEQ ID NO: 347764 - DNA, 90 bp, Homo sapiens
ctcctggccaacagcactgcactagaagaggccatgctccaggaacagcagaggctgggccttgggctggggagcggccggagctttgcc

SEQ ID NO: 347765 - DNA, 75 bp, Homo sapiens
actcagtgacacacacaactcgggcctccccagcgacagtgtaaacgtcctactttggggcaacttgccagagat

SEQ ID NO: 347766 - DNA, 100 bp, Homo sapiens
ctcacggcctttgttctcatctcgctgcaggaggctaaagatatttgcgaggagcaggtcaacgaccatcagcacgtgcccatcgacatccagaccagca

SEQ ID NO: 347767 - DNA, 75 bp, Homo sapiens
ttctcaggtagcaagtacatggggagccttgtcagacccaagcagtagactttcaacttctcctcctcctccagc

SEQ ID NO: 347768 - DNA, 82 bp, Homo sapiens
atgctcactcccttaatctgtccgtctagaggtttggcttctacaaaccaagtgcatgggcgctgtccaacctctggtgctg

SEQ ID NO: 347769 - DNA, 56 bp, Homo sapiens
acataatccccaatggctttgatctgtgatgaagacatatcacatgtacaatgccg

SEQ ID NO: 347770 - DNA, 83 bp, Homo sapiens
gggcgactctgtgcctcgctgagggattatatctgtccaagatgcgagtctggttttatcgaggagcttccggaagagaccag

SEQ ID NO: 347771 - DNA, 101 bp, Homo sapiens
gaaccacatgggctggccagagcacacaccaggcactgctggttttcccatgggctatgcagcagcagctcctgcctattctcctaacatgtatcctggag

SEQ ID NO: 347772 - DNA, 74 bp, Homo sapiens
gcgaggcctcccgggctccgggaaaactacactggccaggttgctgcttttgctcagaggacatccatgaccct

SEQ ID NO: 347773 - DNA, 80 bp, Homo sapiens
gacatggtcatgagctttgtgaacctgggccctgggctgcatcttgtacctgctgtgcttccggcagcacccttttgagg

SEQ ID NO: 347774 - DNA, 82 bp, Homo sapiens
ttgaagaggaagaactgaccagagctgatcccgagcagcgtcatgtacccctgcacagatagatcattatctaggacttgca

SEQ ID NO: 347775 - DNA, 80 bp, Homo sapiens
cggattcatttagagctgcggaacaggacgccctctgatgggctttgaccacgacctttgaagagcttcattttgagatc

SEQ ID NO: 347776 - DNA, 83 bp, Homo sapiens
ggagcagtgttcaatgccttgaactactggctgaccatgtttcgaatcagggaaatcctcattgacgattcaatttgttgaag

SEQ ID NO: 347777 - DNA, 102 bp, Homo sapiens
tgatgcctgagttcagccctcagcagatgggatggggtgacctcggggtgtatggagagccctccagagagaccccgaatttggaccggatggctgcagaag

SEQ ID NO: 347778 - DNA, 89 bp, Homo sapiens
tgggacttaggagggcaggaagagctgcagtctttgtgggacaaggaatggtcctcgtccgaagtgagaatgggcagttgttaatgatt

SEQ ID NO: 347779 - DNA, 75 bp, Homo sapiens
tgcggccgcccgaagaggagagagcgcgggcctctaggaagggtgatattcatgaggatttttgcagcgtttgca

SEQ ID NO: 347780 - DNA, 100 bp, Homo sapiens
tctcggaaaccggtagcgcttgcagcatgatgagcgtgaagccgtgcagaagaagaccttcaccaagtgggtcaattcccaccttgcccgtgtgtcctgc

SEQ ID NO: 347781 - DNA, 83 bp, Homo sapiens
ctcctgcagtctctctgtgtggctgtaacttacgtgtactttaccaacgagctgaagcaggtggctttctagaagatgaccat

SEQ ID NO: 347782 - DNA, 75 bp, Homo sapiens
agcaagatctacgtggatgatgggcttatttctctccaggtgaagcagaaaggaatctacttgaaaatggatcgg

SEQ ID NO: 347783 - DNA, 100 bp, Homo sapiens
actgtatagctatcctctttttaagggctgggagaactcaggaagcctgccagtatcttgaaaattatctctggatgaattattctcctgaggtatctag

SEQ ID NO: 347784 - DNA, 100 bp, Homo sapiens
gggacagcacctcatcccctggatgggggaccacaagatcctcatcgacaggactgcatcgacgtaggctggtgggaaggagagctgaacggcagacgag

SEQ ID NO: 347785 - DNA, 100 bp, Homo sapiens
agggccccgggcggacgccgcagagcgccgaggaggctttcctgctggtggcaaccgcctacgagacactcaagctgcgtttggatgaagcacaggaagc

SEQ ID NO: 347786 - DNA, 89 bp, Homo sapiens
tatcagaatcttgttgactacataaagtcttttgagggcaacaacaactatgatacacctgagctgcggacttttccagctctctccac

SEQ ID NO: 347787 - DNA, 75 bp, Homo sapiens
cttaacaaaattgaaatttaaggaagatgacacacgagctgaatttcaatatgctgaaaccgtatttcgagataa

SEQ ID NO: 347788 - DNA, 90 bp, Homo sapiens
aaactcttcaacactgttattgtaaacaaagagtttttggtcatgaagaggaagagaggcaggcctaaggggtccacgaagaagtccagc

SEQ ID NO: 347789 - DNA, 80 bp, Homo sapiens
aggtgggcggctttgaccgagaggctgctggagctcgtgtttggacgcttggtgttggtattaggagatctgcacatccc

SEQ ID NO: 347790 - DNA, 75 bp, Homo sapiens
aatggaaaccagtcaactgatattgatagtacattggccaacttcctagcggagacggtggctcagggagtaaag

SEQ ID NO: 347791 - DNA, 75 bp, Homo sapiens
ctttgtctccttcgacttggagtctttgtccaggacgaaggggaaactgaggcccaaggaaattgagtatctctg

SEQ ID NO: 347792 - DNA, 83 bp, Homo sapiens
ttccttgtggagccggagctgggcgcggattcgccgaggcaccgaggcactcagaggaggattatatctgtccaagatgcgag

SEQ ID NO: 347793 - DNA, 100 bp, Homo sapiens
gcgtctcttggttactgtgtggaacagggccagccagtccaggaattacatgaacgacagccttcgcaccgacgtcttcgtgcggttccagccagagagc

SEQ ID NO: 347794 - DNA, 75 bp, Homo sapiens
agctgttgtctcagggagcacagaaaaatatgtgccgtatcacgaatttctaagaaagaaattggtcggtgtttt

SEQ ID NO: 347795 - DNA, 80 bp, Homo sapiens
cgacccgagttatgcccaccctccaactttgcgacggaaatgtgtcatcgaaagccaggaatagctattcagtcagacag

SEQ ID NO: 347796 - DNA, 100 bp, Homo sapiens
ccgaaatccggcagcagcgctggtcctgggcaggggccctgcaccacagctctccaggacataagaccagctgccaagccaagctacacttttgtgactc

SEQ ID NO: 347797 - DNA, 98 bp, Homo sapiens
cccatggctgatgcagcaggcatcatccgctatgcaattggggctatgtccaaactgggtcttcggcaggttacaggagttactagagtcactatccg

SEQ ID NO: 347798 - DNA, 73 bp, Homo sapiens
ggaggaacatgacatcgcggaggatttgaagcctagcaacattgttgtgaaatcagactgcaccctgaagatc

SEQ ID NO: 347799 - DNA, 74 bp, Homo sapiens
agccttcccagtagctgggaccacaggggtggcactgaatcaacaagacaagcaactcaattgattaatgcttt

SEQ ID NO: 347800 - DNA, 100 bp, Homo sapiens
ctacaaagctgctttcattggaatagcatgcatatgcgctagaacttctatttgatcagttgcatgaaggagctaaagctcttgatgtaggatctggaag

SEQ ID NO: 347801 - DNA, 75 bp, Homo sapiens
caactctggctgatcaaagaagagcagcccatgagcatcgaactggctccacacaaagtcctcggacacaacctc

SEQ ID NO: 347802 - DNA, 100 bp, Homo sapiens
gtacgagtctgaggcggagggagtaatggtgctgggtaggccaggtttcagcatcgcagacaagaagcgcaggacaggctgcattggggccaaacacaga

SEQ ID NO: 347803 - DNA, 74 bp, Homo sapiens
cgggatgattataggcgtgatgatagagagatgcgggccttggcagaactcctgggcccctatggcatgaagtt

SEQ ID NO: 347804 - DNA, 75 bp, Homo sapiens
gccgccgcgggcaggacgcgcgctgcagggcaggagcgcttcacctctatgacacgattgtattatcgggatgcc

SEQ ID NO: 347805 - DNA, 100 bp, Homo sapiens
tattcagacatatcctatacttggtgaaaaaatcacccaagatacactgtactggaacaactataagctgtggatggaaaagcaccacttgctactggag

SEQ ID NO: 347806 - DNA, 101 bp, Homo sapiens
tgtaatcccagcgaccgccaggggcttaccagcaacatcagatatcaaagacgttgacagtttgatgaggatttctggcagaattgagtgtgaaagtccaa

SEQ ID NO: 347807 - DNA, 50 bp, Homo sapiens
tcctccaatgttggcgaggtcgtctggctgaccaactgactgaagagcag

SEQ ID NO: 347808 - DNA, 100 bp, Homo sapiens
gccaagatcccgatctacaagttccctaaggactgcagaggcagtttgggtcaaagaattgactgtagatccaactgctgctggtgatgttcgtccaata

SEQ ID NO: 347809 - DNA, 98 bp, Homo sapiens
ggcgcctgggactgcaccgcaccgagggcgagctccagatgtcttcaattgctgtggtgacaagaacatagtgaatataagctgctgaaagtagagct

SEQ ID NO: 347810 - DNA, 74 bp, Homo sapiens
aacaacaagccattcatgggccggttttatgagtgggaaccatttgcagaagactctaaaatagagctcaagct

SEQ ID NO: 347811 - DNA, 83 bp, Homo sapiens
agagcatcaaccctgatgaagctgttgcttatggtgcaggagaaaagccatatgtttgtacagttcctgggtgtgacaaaagg

SEQ ID NO: 347812 - DNA, 75 bp, Homo sapiens
gcggggtggaggccctgactaccctggaagtagcaggccgcatgcttggagacttcccaagtaagaagcggaaga

SEQ ID NO: 347813 - DNA, 90 bp, Homo sapiens
ggaccctacccagggttctagaaatccaggcaggcatctatcttgaagtgacagaagaagcagatgtcaccgtggggccactgatcttcc

SEQ ID NO: 347814 - DNA, 75 bp, Homo sapiens
tgagtgcaaccgatgggctccagacatctactgccctcgaggctctcgaacagtgtggcctgatgaaactatggg

SEQ ID NO: 347815 - DNA, 144 bp, Homo sapiens
tcagaatctttttgtcttttggacttcagccatgtccatgatgcctaccctgtgaagatctctcaccatccaaaaaatgtcttcatacagtttggagcaagagtcgaatggcgagattgagcacgtgaccaagcgggccatcag

SEQ ID NO: 347816 - DNA, 100 bp, Homo sapiens
cgtcgcggcggggaccatgttgcttccgaacatcctgctcaccggctgagagcacagacaaaacaacaactcttagaatataaatcaatggttgatgcaa

SEQ ID NO: 347817 - DNA, 74 bp, Homo sapiens
aagctgtggaaggctctggataaggaccagtacctgcccaggaaactggaaccactcgttttgactattatttt

SEQ ID NO: 347818 - DNA, 82 bp, Homo sapiens
ccgggggcctggctaaggaaaccctattacctccagggtaaaccagacttgaatacaacattgccaattagacaaacagcat

SEQ ID NO: 347819 - DNA, 74 bp, Homo sapiens
gccatcacggcggccgcagtggcgtcctggagccctcctcagggtggccattcagggcaactggggccttcgtc

SEQ ID NO: 347820 - DNA, 82 bp, Homo sapiens
cttaagtagtgatatttctcttttgtctgcccctattgtaagtgcagatggaacacaacagaagcacagatcagatttctaa

SEQ ID NO: 347821 - DNA, 100 bp, Homo sapiens
atgattgctctagtagacaaccttgcatcaaagggacaggctggcctgacatggaaggtgaaacaaggcagcagcccctgcctccaggagaactctgcag

SEQ ID NO: 347822 - DNA, 100 bp, Homo sapiens
gcggcctcacagtcatggatctggaagctgagggcacgtgtttgcggttcagccctttgatgaccgcagcagagtcgtgtcccaaatgcgaacatcctcg

SEQ ID NO: 347823 - DNA, 96 bp, Homo sapiens
gggaagtttggggagttctgtcatgggtgctccctgctgatgacagggccttttatgcctcgccgctcctgctatttgccaaccgccgggacgtac

SEQ ID NO: 347824 - DNA, 101 bp, Homo sapiens
gcctcctacgtttacctgtccatgctggatgccctggagttcctccatgagaatgagtatgttcatggaaatgtgacagctgaaaatatctttgtggatcc

SEQ ID NO: 347825 - DNA, 100 bp, Homo sapiens
cgagttacccctcttaccaccgtcatggcagtcccaggacttcctcgttctgcccatcttcctaacaaggctatggctgataacagcagtgatgagtgtg

SEQ ID NO: 347826 - DNA, 75 bp, Homo sapiens
ggcgtgtctccctgcgggtgctgagtgagcgcctcctacacaagagcatccagctgaaagtgcccactacggaaa

SEQ ID NO: 347827 - DNA, 100 bp, Homo sapiens
cgcggttcctttttgcgagctttccgagtgccaggcgccggccggctgcgaagacgcggtgggccgcccctccggtgcttacactccagagcccctcagc

SEQ ID NO: 347828 - DNA, 100 bp, Homo sapiens
aagggcctccgtctggatttccaaggaagaatttcctctgaagcaccggtcgccgccctggagaggcaggtgtttgacttcctgggctaccagtgggcgc

SEQ ID NO: 347829 - DNA, 51 bp, Homo sapiens
cccaggactgttatgattgggggcaagcgatctagggcagccctgcagagg

SEQ ID NO: 347830 - DNA, 100 bp, Homo sapiens
atggaggggccgcctccaccggacgcctgccctgaaaagagagtagatgacttctccttcattgatcctgccttcaaaggcctcaccttcactgacctgc

SEQ ID NO: 347831 - DNA, 100 bp, Homo sapiens
caggaacaagacccggacattccaggccacagtcctgggaagtcagatgggattgaaaggcttgcagggtggcccccgctccgacttcgacatggcctat

SEQ ID NO: 347832 - DNA, 75 bp, Homo sapiens
cccgctgttcgcgctgctgctgctctgcgcgctgctcgcccggctgcagttgttataccacatttgcataagtta

SEQ ID NO: 347833 - DNA, 98 bp, Homo sapiens
tgcggaggctgagccggccgcgggcgcgaccggaggcagtgccggtggtggtgtgcacattgagccccggtatagacagttcccccagctgaccagat

SEQ ID NO: 347834 - DNA, 75 bp, Homo sapiens
ggggaggcagcgcgggatcccagcctcaggcgtgcgcggacggtgtgcgggttacctgtcctgctgccgattcct

SEQ ID NO: 347835 - DNA, 90 bp, Homo sapiens
ctgtcctgttcgggctgctgctcgtcctggctgtcttctgccattcaggtcatagcaaatgacagaagtcccttggtgggcaaaattcac

SEQ ID NO: 347836 - DNA, 109 bp, Homo sapiens
ctgttgataaatgcaaaacagtggctgttgcaggtctggctctgggagaggagtggacagcagctggttgagatacatccccatctggagacaggactgccactgacag

SEQ ID NO: 347837 - DNA, 100 bp, Homo sapiens
tttcaggaggaagcgatggcttcagacagcatatttgagtcatttccttcgtacccacagtgcttcatgagagttcacaagattcctttgcagttcaccc

SEQ ID NO: 347838 - DNA, 100 bp, Homo sapiens
gatctccagcgccggcctcctcagtgcgaagaagctgcagccgcacctggccaaggatcctctccggcccctggagttcctgaggacttccctggggggc

SEQ ID NO: 347839 - DNA, 83 bp, Homo sapiens
tgaacattgtattgagaacaatatagatttgcagtttcgccgtgaggaagatgcggaaaaggctgtgattgacttgaataacc

SEQ ID NO: 347840 - DNA, 98 bp, Homo sapiens
cccatccgaaaggatgatgaagttcagacaaactttctgcctccttggaaagctctacatctccttgtgattggagtgtgggtttcaagattccagaa

SEQ ID NO: 347841 - DNA, 101 bp, Homo sapiens
agctctgatgggctatttgggtgatacccagtgcagtgaactgcagtgacctgaaaaaaatgtctggatttctagagggcttgagatgctcagaatgcatt

SEQ ID NO: 347842 - DNA, 100 bp, Homo sapiens
gttttttcctgtatgaagcggttggcaccactgaagtgaccgaatgagcctcaaggaataggttctcctagtgtctatcatgcagttatcgtcatctttt

SEQ ID NO: 347843 - DNA, 83 bp, Homo sapiens
ccccacgcgccgcgtgcccggccgcgcccagcaggacgtggcccagtggaacatcgggagcctccggaccatcctggacatgg

SEQ ID NO: 347844 - DNA, 75 bp, Homo sapiens
agcaaaaagaatgccctgtgcagaagactatgtggtgaaggcatttgtggtcctggcctcgcagttcctgtccca

SEQ ID NO: 347845 - DNA, 96 bp, Homo sapiens
aagaagttaatgatgccatcaaacaaatgaagaaacacctaaagctggccaagattattcttggagaaaccctgtctgtttactgtaaccttttgc

SEQ ID NO: 347846 - DNA, 100 bp, Homo sapiens
aaacacccggccttactgaggaacaaaggcaagagtgagccatggagctacgtgtggggaacaagtaccgcctgggacggaagatcgggagcgggtcctt

SEQ ID NO: 347847 - DNA, 90 bp, Homo sapiens
gatcaattgaatatggacccaagagtcagcggtatattagttcagttaccactaccagatagctttggctctgcggcactgtcacttgtt

SEQ ID NO: 347848 - DNA, 101 bp, Homo sapiens
tgcgagggagcgatgcggtgcagcgcgagataattgacgaccttgccaacctagtggagaacacagatgaaaaacttcgcaatgaaaccaggcgggtaaac

SEQ ID NO: 347849 - DNA, 112 bp, Homo sapiens
agaccctggagcctcagttggaagcagccgatccagcctgcggagcctgtggggcagggatcatagacggtatttctatgtaaacgaacagtcgggcgagtctcagtgggag

SEQ ID NO: 347850 - DNA, 90 bp, Homo sapiens
gcaagattgtcattgactttgattcaattaacagcagaccgagtcaaaagcttcaacctacaacaagaaaggggcctcccgaaggaaaga

SEQ ID NO: 347851 - DNA, 50 bp, Homo sapiens
ttcaaccaggatttaaggatgccactctgatgctgaccctggaggaagaa

SEQ ID NO: 347852 - DNA, 101 bp, Homo sapiens
ctgacagacgcaagatggcggacagtgcggaactaaaggtgaaagaacttgtcctggacaacagtcggtcgaatgaaggcaaactcgaaggcctcacagat

SEQ ID NO: 347853 - DNA, 74 bp, Homo sapiens
tgggtgacatctgcctgagagatctccaagaattacagaaatcgagctatagcagattatcttcgttcaaatgg

SEQ ID NO: 347854 - DNA, 100 bp, Homo sapiens
cccgggcccaggccccggcagcgcctgggacaagaacgccaatctgaattgccaacgcaaagcaaagcgagcttccccagtattctcagtgacccagacc

SEQ ID NO: 347855 - DNA, 82 bp, Homo sapiens
cacccaaacaatcggctgagaatgagaagaggtgttggagcgggccggagagaagtagagtgggctgcgaggagaaggaaac

SEQ ID NO: 347856 - DNA, 82 bp, Homo sapiens
aagtcttgaagaatagagccataaagaaagcaaagcgcagaaatgttggatttgaaacttcatcctgtgaagccaatgaatg

SEQ ID NO: 347857 - DNA, 83 bp, Homo sapiens
aaaccaacgcctggctcggagcagcagcctctgagttgagaagctgatgtctcctcgacttccaactggaaccttgaaccccc

SEQ ID NO: 347858 - DNA, 98 bp, Homo sapiens
agaccaccacgactttgacaacgtctccatgaccatgcaagccgcttacaaacacgcagatggcaagaagattgatggcaggagggtccttgtggacg

SEQ ID NO: 347859 - DNA, 75 bp, Homo sapiens
aggaggtggaggaggcgccggaccgggggggcattgaatgccccagaggagcccgaaacctcccaggcttggtgc

SEQ ID NO: 347860 - DNA, 96 bp, Homo sapiens
tgtgccagataccattgatgaaggaaatgctaaagcgattccaaggtatgagagaatcgaaatcccaatccatattgtacctcatgtcactatcgg

SEQ ID NO: 347861 - DNA, 50 bp, Homo sapiens
ggaggaactgagacgtttcgaattccagggtctactgctgagccagtttc

SEQ ID NO: 347862 - DNA, 95 bp, Homo sapiens
gccgtgaaggcgtcggccggaggacaccccatcgtgcaggaatcccttggcaccatgtcctgtgtgcattataaattttcctctaaactcaacta

SEQ ID NO: 347863 - DNA, 74 bp, Homo sapiens
aattttccccccaaactgcaataagccgccttccaagggcgtgatggtgggcatgggtcagaaggattcctatg

SEQ ID NO: 347864 - DNA, 100 bp, Homo sapiens
cctgccccgcggctgggaggagggcttcacggaggagggcgccagctacttcatcgagaagggcctgtcccagtcggctttaccctatcgacgcagcgtc

SEQ ID NO: 347865 - DNA, 75 bp, Homo sapiens
cgcatcttcagggacagttatctgctttttaaaggagtataccaacagatgttttaaagattgtgtattctgtgg

SEQ ID NO: 347866 - DNA, 83 bp, Homo sapiens
gagagaatgggcgggtgctggccgggcagaccctgggtgcaccccctgtggatgtgctccgggccctgaggttcccctccctc

SEQ ID NO: 347867 - DNA, 100 bp, Homo sapiens
agactgagctggctaagcaggtgctgcagacggagctggagcgaccgagagaggaactctattttaagaacctctcaaaacgaaacaagcaaatcatgga

SEQ ID NO: 347868 - DNA, 96 bp, Homo sapiens
tgcatcttccaggatgacaagaaagtcttctgccagaaacacactgatctcctggatggcaagggcctcaagatccctgagtgagggccaccccac

SEQ ID NO: 347869 - DNA, 80 bp, Homo sapiens
caagaagtggagacagagcttaaaatgtgctgcctgctgtttcccggggagatcatgaaacgaggtcgccttcccagcag

SEQ ID NO: 347870 - DNA, 100 bp, Homo sapiens
ggagtgaaaattgaatttgatgaagatgatggtccaatcacagaatctgctttcagatgaaagactgtgtcagagtgaagcactttatgccttcttgagc

SEQ ID NO: 347871 - DNA, 82 bp, Homo sapiens
cccgcatgctctttgtcactccccggcggcagcacgaaagtaccatattctgcatatacagactcatgaaaaattcatcaga

SEQ ID NO: 347872 - DNA, 99 bp, Homo sapiens
gagcaagtgtgaatgaccttgatgaaagaggctgcacacccctgcactatgcagctacatcagacacagatggcaatgtgaagcctcagtttaggtcat

SEQ ID NO: 347873 - DNA, 101 bp, Homo sapiens
agaagtcagcaagagtgacataggagaagtgattcttgtgggtggcatgactaggatgcccaagggcccagctgtgctgctgtgttaacctggaggcatta

SEQ ID NO: 347874 - DNA, 100 bp, Homo sapiens
tctctcgcgggcgggagaacggaaaactcccaacttcctggtggtgatgatgtccagcaactctgtgaagcaggagaagaggagtttttggaaatcatgg

SEQ ID NO: 347875 - DNA, 101 bp, Homo sapiens
gcattctttcttcaaacaacctccctaccaaggatcttctttcagagaggtgtgggaaatggaactggatagactcaagaatcaggatggcgaaataaata

SEQ ID NO: 347876 - DNA, 100 bp, Homo sapiens
cggcggccctcgtcctggcggcaggagaagatcacccggaccaaggaggaggccctggagctgatcaacgggtcttgctctgttgcctaggctggagtgc

SEQ ID NO: 347877 - DNA, 83 bp, Homo sapiens
gctgatcttccagctcccctcacccaacgtcgtgtactccaaagattcaggtttactcacgtcatccagcagagaatggaaag

SEQ ID NO: 347878 - DNA, 75 bp, Homo sapiens
tagaaaaggaatccttgggacctcttcttttggagttggcttaaataactgtgattgatggccatgcaggagaaa

SEQ ID NO: 347879 - DNA, 51 bp, Homo sapiens
ctttattttggatttctatgagaaggttatggaggttttgatgactatggt

SEQ ID NO: 347880 - DNA, 74 bp, Homo sapiens
ccttggcaaatgcttcagatgcagaactctgtgacattgcaggtccaagcatctcattttgaaggcctaatcac

SEQ ID NO: 347881 - DNA, 82 bp, Homo sapiens
ctcccccacggctggtgatgagcatccgggatgggatccacggacccctgctgtgatggcttctctgactggatgactgagc

SEQ ID NO: 347882 - DNA, 72 bp, Homo sapiens
agcagctgtcaatgcattccaggaagcagctagtcttttgagtctcccagttgcacgaaaaggtgctgtgtc

SEQ ID NO: 347883 - DNA, 100 bp, Homo sapiens
acacagactatgcagatgggagtattggtaaaggttttcaaggtgtcatgaaaagatggggatttaaaggccagcctgctacgcatggtcaaacgaaaac

SEQ ID NO: 347884 - DNA, 60 bp, Homo sapiens
ctgaagttcccgatgcgtacaacatggtgactcgctctccgtctccagcaatgacgccag

SEQ ID NO: 347885 - DNA, 87 bp, Homo sapiens
cccttggcctctgacgccagcaccccagtggccctgttccagtattggttatgagtcttctgttcatcgcttctgtatttatgttgc

SEQ ID NO: 347886 - DNA, 75 bp, Homo sapiens
aggaaggaacgaggcaaggagctaaagcagcgtgcgttcagccctgggccacccgcgagtcggccttcgttcacg

SEQ ID NO: 347887 - DNA, 82 bp, Homo sapiens
gcccgaggaggcagccaagctcgtggcctgcctctgcgtgcggacccagacatggagctgcgggaagaagcctggtctccgg

SEQ ID NO: 347888 - DNA, 82 bp, Homo sapiens
agaagttatgcttgttggaattggtgacaaaatcagaggcatactttataggttgcagatatcaagaaagtcaacaacttca

SEQ ID NO: 347889 - DNA, 100 bp, Homo sapiens
cggctcttgagtacttgcactcgcgggacgtggtataccgcgacatcaaggaagatgagaatgtgcctactgctcctgatcctccaagtcaacatttacg

SEQ ID NO: 347890 - DNA, 108 bp, Homo sapiens
gataatgtggtgaattgcttataccatggagaaggagcccagattcaagatggaaaaggtgatgtaaccattacaaatgatggtgctaccattctgaaacaaatgcaa

SEQ ID NO: 347891 - DNA, 74 bp, Homo sapiens
gaatgctcttcaggatagtatcttggccagggaactcaaacagcagatgcaggaatgttttaaaggaagttggg

SEQ ID NO: 347892 - DNA, 100 bp, Homo sapiens
gggaacttgggaggatcccacctcagccttcgtgactagtgaggttgaattgaccaaagcaatggtgatggagaagcctagtcccctgctggtcgggcgg

SEQ ID NO: 347893 - DNA, 100 bp, Homo sapiens
attccatccaaaaccggcagctgttagccgagcaaagtctccgggaccattatggcagtcaagtggacgggtgggcattcttctcctgtcctctgcctga

SEQ ID NO: 347894 - DNA, 100 bp, Homo sapiens
agggacggacgtcagcaaagaggccgccaacatgatcctggtggatgatgacttctcagccatcatggctgttgataatcaggtgtatgtggccacagcc

SEQ ID NO: 347895 - DNA, 82 bp, Homo sapiens
tgagggaggagctggggacggcgaccctaggagaggtccagaggtgtccttctaaagctggtagaggtttcacgagtcatca

SEQ ID NO: 347896 - DNA, 98 bp, Homo sapiens
gctgctgtgctggcctataacaatctgtctgtgttcagacagcaaatgaaaccaacctggagagttcatgatcaatgtaaccactgtgcgggaatatc

SEQ ID NO: 347897 - DNA, 75 bp, Homo sapiens
taaactgcagaaggaatttaaacgtcatacttcatcgcagtaggaatggcagccccatctatgaaggaaagacag

SEQ ID NO: 347898 - DNA, 111 bp, Homo sapiens
ccgcctgaagcagctgctgtcccgggcctaccccctggactccctggagaagcagatggaaaagcgctaagctgcaacgaaaacgacgcagagcacctggaccgtgaccag

SEQ ID NO: 347899 - DNA, 75 bp, Homo sapiens
cttcgccaaggagatcgtctctctcatcgaggcccaaaccgccaagtaaaggcatgacttcctggcaccacaggg

SEQ ID NO: 347900 - DNA, 100 bp, Homo sapiens
cgtgcatggggctgctccccaggacctgagcaggaacctggagttttcagaactcagcctcctcccaagctccctgtgggtcctagccacaagctctcca

SEQ ID NO: 347901 - DNA, 100 bp, Homo sapiens
ctttcagagggctctctgcaggaaggacaccgattatggattggcaacctggaccccaaaattaccgaataaagtcctgtttatgaccacagctgtagat

SEQ ID NO: 347902 - DNA, 95 bp, Homo sapiens
gggcgaccagatcaacgccagcaagaacgaggaggacgcggggtctcggcgcggaagatggccggcggcgtggacggccccatcgggatcccgtt

SEQ ID NO: 347903 - DNA, 75 bp, Homo sapiens
tcagagcactggcctccaattgaaccctaaggactctgcaatatgaataattccctagagaacaccatctccttt

SEQ ID NO: 347904 - DNA, 100 bp, Homo sapiens
gccaatcccaggaggaaaaacgccatgaagatggacctacagctaaaaaattaaagactgagcaagggggagcccacttcagcgtctccagtctggctga

SEQ ID NO: 347905 - DNA, 100 bp, Homo sapiens
ctggatgttatcagatcacagaccatggtctcagcggagctccctgggtcctcagcagtgaggctggcctccctgcgtgacctgcccgcccagctcctgg

SEQ ID NO: 347906 - DNA, 97 bp, Homo sapiens
tttgctcttccatccgcctttgatcgtcttcctcttcagccatccaggtcctaggcccgtgcctgatccaggatccaagctcccggaagctggcact

SEQ ID NO: 347907 - DNA, 90 bp, Homo sapiens
agcaatgggctaaagcctctggaagaggtgaagttgggaaactgcggattgccaaggtgtaccccagttgtcagtctgcttgtcagaaga

SEQ ID NO: 347908 - DNA, 83 bp, Homo sapiens
attctgtcagtgctgttctccaagaggcccagagacatgctgaaacatcgaaggtagcctttccagtaaatatatgactcagg

SEQ ID NO: 347909 - DNA, 98 bp, Homo sapiens
tcaaggacccgggactagtggaccagctggtgaaggcagacagcgagtggcgacgatggcacttgatgacattagtgaaagcatcaaagagcttcagt

SEQ ID NO: 347910 - DNA, 98 bp, Homo sapiens
acccagggtggtttgctttctctgtgccagtagtgggcatgtagagtctgaacaacccagtcctgccagctccagctccagctccagctccagcttca

SEQ ID NO: 347911 - DNA, 101 bp, Homo sapiens
tgcgcggcggccgcagctgccacaaaccagattacaacagcagtgaattgaaaacagcctgcaggaagcatgagctgtatgtgagtttccaagacctggga

SEQ ID NO: 347912 - DNA, 75 bp, Homo sapiens
tgattcttctgcctaatcctcccaaagttcttagattacaggcacctgaatggacagaagaggacctcagccaac

SEQ ID NO: 347913 - DNA, 136 bp, Homo sapiens
ggtcggcggagttggctttctctctccctgcattgcctctggccgagctgcaaccgcctccgcctattacagaggttcacaatctatacagttgcataaaagtagcagaagactttgtatctccagaacatgtaaa

SEQ ID NO: 347914 - DNA, 75 bp, Homo sapiens
tccagcgggcctggactgtgggctggtgtgtggaactgattgcgcagtctctttgtggagaggacttgatcatta

SEQ ID NO: 347915 - DNA, 75 bp, Homo sapiens
gcaccctgtcatgtctgtgtcttacaaggaagtggatcgctatgatgccccaggaactggaagaggaggcaacag

SEQ ID NO: 347916 - DNA, 98 bp, Homo sapiens
ctggatctattaaagggagcattccgatcatctgaggaacagcagtctcttcaagaaaatgaggaggaggagattgggaacctagagcttgcctggga

SEQ ID NO: 347917 - DNA, 109 bp, Homo sapiens
ggcgaatatcttcccttacaagggttatatatggaattatggtaccctccctcagttcaagacccggcaggccccctaagcgttctttgggagtgttgcaggaaaatgc

SEQ ID NO: 347918 - DNA, 84 bp, Homo sapiens
ggcggaggcggaggcagaggtggaggcgctttgaaaggtgagaagccctaccactgcaactgggacggctgcggctggaagttt

SEQ ID NO: 347919 - DNA, 100 bp, Homo sapiens
atctgccagaatcagaaagaattcatcacactgtgccctacatggacgcggtcgtctccctggtcactctcatgttggacacgggcctgccctgttttcg

SEQ ID NO: 347920 - DNA, 87 bp, Homo sapiens
gctcggcggcggcggccaggtccctgctgaatcacacgccgccatccgggaggcccagggaagccctggcaggtgcccggcccgccc

SEQ ID NO: 347921 - DNA, 98 bp, Homo sapiens
ataggtgtatcaagtaatggtgcaaagcctgaagtcctggaagccatacgggtgacccgtcacaagaacgccatggcagagcgctgggaatcccgcat

SEQ ID NO: 347922 - DNA, 75 bp, Homo sapiens
acccctgacgagcgcagcaaagagggctctatctggaaccaccaggcaattcgaagttttcaagtagcccttcac

SEQ ID NO: 347923 - DNA, 75 bp, Homo sapiens
aaatgaacagttttgtggaatagatgaccaaatcaggaggagcaatctcagaactgttatgaagaccttcgaagt

SEQ ID NO: 347924 - DNA, 49 bp, Homo sapiens
cgacgaggaagaggaggtttctgaggaatgttttaaaggaagttgggct

SEQ ID NO: 347925 - DNA, 101 bp, Homo sapiens
atatggaacccaagcagtggcgaagggaatcgcaaggctcttccctgaccattttctactgtccctgcgcgaggtgtacgtgaacggagagtgggtgacca

SEQ ID NO: 347926 - DNA, 83 bp, Homo sapiens
caaagactgtggaacttttaagtggagtggtggatcagaccaaagatgggggcaacaccctccactaaagagtcaagccagcc

SEQ ID NO: 347927 - DNA, 89 bp, Homo sapiens
tttcctctcaccaacagcagcaactgcagggagaatttgtgaaaaacgcatgggctgatattgaacgcttcaaagaacaaaagaaccga

SEQ ID NO: 347928 - DNA, 100 bp, Homo sapiens
gattgatgctgccaaacatgcccataagttttgtaacacagaagatgaggagactatgtatctgcggagacaactgacatatatccacaagaagtgccat

SEQ ID NO: 347929 - DNA, 75 bp, Homo sapiens
gtcctcaccatgcccttctgcttcaaacaggtacggacattgctgcaggagaagaggttgccatcaagcttgaat

SEQ ID NO: 347930 - DNA, 74 bp, Homo sapiens
gccgccaagagtgagcgagcggacccgcgatggagttgatctctctaatgtattagatcttcatgcctttgata

SEQ ID NO: 347931 - DNA, 90 bp, Homo sapiens
ggcgaatccgaggaccactgcttgctcaggttgatgacaacaagaaactaggagaatgggtaggcctttgtaaaattgacagagagggga

SEQ ID NO: 347932 - DNA, 83 bp, Homo sapiens
gcgacagcggcgagcagaactacggcgagcggctgacaagctctctactgatgatctgaactccctcattgctcatgcacatc

SEQ ID NO: 347933 - DNA, 100 bp, Homo sapiens
ctgcggtccacggccaggtgaacaatggagcttactccacgggaacagcctctagataatctgagttgttgaaaatacgaagcctgttactcgtgaacag

SEQ ID NO: 347934 - DNA, 75 bp, Homo sapiens
ctttcggagtacatgggcaatgagtcttttagtcctgctatacagctgcaccttgtacatcaagctccatgtaat

SEQ ID NO: 347935 - DNA, 100 bp, Homo sapiens
ttccgccgtctcttcgagttcttcgtgctgctcaagatcgcaccccctccctccctggcggagcccctgaaggagctgttcaggcagcaggaggccgtcc

SEQ ID NO: 347936 - DNA, 97 bp, Homo sapiens
ctgagtggttgtgtggtcgcgtctcggaaaccggtagcgcttgcagcatgatgttccatttaagcagacctcttccatagctgtagctggagcggta

SEQ ID NO: 347937 - DNA, 51 bp, Homo sapiens
cgaatctttccaaaggagatgcccggctaattcacctaaataagattgatc

SEQ ID NO: 347938 - DNA, 83 bp, Homo sapiens
gtgacatatcgttggacccagaattgagactcattctgatgaaggaaagagcgtccctgtgcagctgcgtgtccttcagttct

SEQ ID NO: 347939 - DNA, 82 bp, Homo sapiens
cttcagctcatcttaggctgtgctgtgaactgtgaacagaagcaaggtgttggagcgggccggagagaagtagagtgggctg

SEQ ID NO: 347940 - DNA, 73 bp, Homo sapiens
tgctgaattagaactgcagaggttcctctacagcaagaatgactcccggcgtggctcgggctccccggaagac

SEQ ID NO: 347941 - DNA, 98 bp, Homo sapiens
cggcggagcagaggaaccacacgctgatcatggttctccagaagctggggaaggcagatgagaccaaggatgagcagtttgagcagtgcgtccagaat

SEQ ID NO: 347942 - DNA, 87 bp, Homo sapiens
tcaagctggccaagcacaaagagcttgctccctacgatgagaactggttctacacgcgagctggcatagaatgtcaagctaaccagg

SEQ ID NO: 347943 - DNA, 101 bp, Homo sapiens
acggaagcagctggataaagaacagatcatagaagaagatgctgctcttgtagaaataggacctcgttttgtcttaaatctcataaagattttccagggaa

SEQ ID NO: 347944 - DNA, 100 bp, Homo sapiens
gggaggaaccaattattacattgaatctctgctctggaaagttcttgtcaataccaaggtgcagataaaactctagactccagtgcagaggatcatactt

SEQ ID NO: 347945 - DNA, 100 bp, Homo sapiens
aggacgaagtggtccgctttgccaagaagatggacaagatggtgcagaagaagaacgcggcacggatgggcagaagcctttgcaggtatcagaagttcac

SEQ ID NO: 347946 - DNA, 100 bp, Homo sapiens
ggttgggggagctgatgacaatctcagggaaaccatctgccgtgtgactggtgggatgaaggtaaaggcagaccgagatgaatcctcaccatatgctgct

SEQ ID NO: 347947 - DNA, 100 bp, Homo sapiens
cagcctcccgccggccgtctccttaacaccgaacaccaatttaagggacgctgtgaagcaatcatggatgcaatgaagagagggctctgctgtgtgctgc

SEQ ID NO: 347948 - DNA, 96 bp, Homo sapiens
cggagaagctcaccatcctcaacgaccggggcgtcggcatgctcacccgcctctacaacatcaagaaggctgatgtaatctctaaactcaacatga

SEQ ID NO: 347949 - DNA, 49 bp, Homo sapiens
gatgagacaagaggaatggttacacagacgaggacctattaaacttgga

SEQ ID NO: 347950 - DNA, 74 bp, Homo sapiens
aacaattgctgcacgaaacactgaaattttggcaggcggggagacaaccccttccccaagaatgctgatgggac

SEQ ID NO: 347951 - DNA, 100 bp, Homo sapiens
cgggcggcggcgagcgcctttacaatggccctgaccctgtttggaaatctactttcttcaatgtgttaaccaatagtcaggcttcagcagaaaacttccc

SEQ ID NO: 347952 - DNA, 98 bp, Homo sapiens
ctgaactgggacccctgctagaagagaagggcaaacgggtaatcgccaacccacccaaacacctggctgagcacgcagacactgtgcagctggtgtcc

SEQ ID NO: 347953 - DNA, 75 bp, Homo sapiens
tgaatgtgttactccattgctgaggagtgtcaaataaagtgcccgtggtgcagccatcccatgcggtccatcctc

SEQ ID NO: 347954 - DNA, 96 bp, Homo sapiens
tgatattcagtggtgtttttctcaggtgaaaggagcagtagatgatgatgtagcagaagggaaactgaacagccaagactcctataacaattttac

SEQ ID NO: 347955 - DNA, 82 bp, Homo sapiens
aaggatacagctatgcaaatatagaacactaaagtgttacatgacagatgtatgaggcctgatggaattgggactgtttcag

SEQ ID NO: 347956 - DNA, 98 bp, Homo sapiens
tgcccagaagcagaaaatttccttcttggagaataacctggagcagctcaccaaagttcacaagcagatgttaaaacatggccgtgctggagttccaa

SEQ ID NO: 347957 - DNA, 100 bp, Homo sapiens
agggcaaggaaagcagcatagagaatgagatagccgtcctgagaaagcgcattctacattctaaaggggagctcagtgaagatagacataaacagtatga

SEQ ID NO: 347958 - DNA, 83 bp, Homo sapiens
ggagaggcggggtcggcgggagccagcgagccacgggagcgagccaggattttttatcaagcagaaatgcatcgaacaacgag

SEQ ID NO: 347959 - DNA, 75 bp, Homo sapiens
ctgggagggagccgcgcgcctttgtgcgcgcgccgaggtgcttttggatgctctgtagccacccggggcccagga

SEQ ID NO: 347960 - DNA, 82 bp, Homo sapiens
ggcgggcccgggctgcggcgtgtgcgcgcccgccagctgctccggagatacggcaaactcttccacatagactttggatata

SEQ ID NO: 347961 - DNA, 100 bp, Homo sapiens
ggtggatgcggccaactccaatgggcctttccagcccgtggtccttctccatattcgagggaggaaataatgctggccatacagttgttgtggattctgt

SEQ ID NO: 347962 - DNA, 100 bp, Homo sapiens
cttgatcctccggacaaaacttgagaaaggaagtactcgccgagtggaacgggcaatgaggcagacacaggagtttgggctttgcaaaactgagaacaaa

SEQ ID NO: 347963 - DNA, 90 bp, Homo sapiens
acccacctaactacggaaaacctgatcccaaaattattgaaaacactcgaagggtaaaaagaacgtattctcatggtacttacagagctg

SEQ ID NO: 347964 - DNA, 75 bp, Homo sapiens
cctgtggcaggagagacaacaaagcgctattatcctaagatgccatcagcgctgcgaatccccgggttatcgacg

SEQ ID NO: 347965 - DNA, 100 bp, Homo sapiens
tgctacgctaacctatcgggttctctctccgcgcgttcaggtctgtaaacagatttggctaggattatttgatgatagatcttcagcaattccagacttc

SEQ ID NO: 347966 - DNA, 98 bp, Homo sapiens
atatcaaggacatcaggacaccgggagtgggagagattggactgggagactcagcagggtcaaggtggaaggtccaaggactgagaaagaccctcgaa

SEQ ID NO: 347967 - DNA, 100 bp, Homo sapiens
acgcgctacacaagtggagctccttttcctccacctaccttcccgatgctgggcctaaaggagataacatttatgaatggagatcaactatacttggtcc

SEQ ID NO: 347968 - DNA, 115 bp, Homo sapiens
tactacagagcacccgaggtcatccttggcatgggctacaaggaaaacgcttgtacatgcagtggccatgcaaatatctgtcatctgcacacaggaaaatgtttctgcacaacta

SEQ ID NO: 347969 - DNA, 107 bp, Homo sapiens
aatgaactaaacatagttttggaactagcagatgctggcgacctatccagaatgatcaaggtgaaaaaccatacaagtgtcaaatttgcaatcagtcttttagaatt

SEQ ID NO: 347970 - DNA, 73 bp, Homo sapiens
acttctggatgaaacttctgcacaatcaaggagaccgcgaaggcgtacattcccgggtgttgcttccaggaga

SEQ ID NO: 347971 - DNA, 75 bp, Homo sapiens
ccttcggcagtccacccaccgccgccgcctcccagcatctgtccgatctttcctgtttcccccactccattccct

SEQ ID NO: 347972 - DNA, 75 bp, Homo sapiens
gaatttcagaagactgtatccaccatgtactacctctggatgtggtctgttcctggtttcccagatgcataaagg

SEQ ID NO: 347973 - DNA, 90 bp, Homo sapiens
ccaagacctcatcaacaattaagatgcctgaaaacttcatgcctcctgttcccatcacatcaccaatcatgaacccgttgggtgaccccc

SEQ ID NO: 347974 - DNA, 73 bp, Homo sapiens
ccgtgggcgtaggaccctctgagccagagccagtcttggtgctctgtgttcacctggttcatctgaggagctg

SEQ ID NO: 347975 - DNA, 80 bp, Homo sapiens
cggtggttagtttctgcgacttgtgttgggactggttaacacagaaatctgcctcctgggccatgccgcttctaaggcct

SEQ ID NO: 347976 - DNA, 97 bp, Homo sapiens
cctcgctgcgctcatggcgtcgcccggagacggtaaagaacaggtccaagaaaagctcaaagaaagcaaataccagcagcagcagtagcaacagcag

SEQ ID NO: 347977 - DNA, 75 bp, Homo sapiens
tttgttttggattacataaaccagtcacccaagtgcattgcctttggaaacgagatccaatggatttgaacagaa

SEQ ID NO: 347978 - DNA, 50 bp, Homo sapiens
gggatccttcacccgtgtctggaggcaggtggaagtcatcataaagtttc

SEQ ID NO: 347979 - DNA, 100 bp, Homo sapiens
cgccgccactgtgacttgcagtcatcatccattaccacaaaattagaaggagatccggttggcagctaaaccgcgctgggaacaggggcctgagtcctgg

SEQ ID NO: 347980 - DNA, 73 bp, Homo sapiens
gggaactgactgctgtagttcagaagaggttgtggggtgatcatgggcaagaggctttagaatctgctcatgt

SEQ ID NO: 347981 - DNA, 100 bp, Homo sapiens
atggagggctcttcctgctagctgatgtctcccataaggtcattcggaatgactgtgtgctggatgtcatgctgtgctcctgtgtctgctggatttattc

SEQ ID NO: 347982 - DNA, 123 bp, Homo sapiens
tccgccaggctccgcgggatgcaccgtggtagccgagggcggaggcgacactctcaggtatgtgacgcattcccagactcttcagccaactgagcatcagcttcttcacagcaattgggtcct

SEQ ID NO: 347983 - DNA, 75 bp, Homo sapiens
agctctgactgcagacctaccaaaacagaaactgaggcttcttgaagagcttgaagacacttggctcccttatct

SEQ ID NO: 347984 - DNA, 75 bp, Homo sapiens
tgccgacgacgccatgaccctggtactaaagaaagagcttgttgcggacataagcagctctatgaccaatagcac

SEQ ID NO: 347985 - DNA, 82 bp, Homo sapiens
ctgcaggccagagagggcctcgggaagagatgcgaggatgacaaggagttgggctgttcctacacagatgttgctgctcagg

SEQ ID NO: 347986 - DNA, 98 bp, Homo sapiens
tttagcgctcgcccagctagccgcaggtatttgacctgtccaaagacgacttgatacctctataatgtaacagaaaaggtcagaaaatattaagcaag

SEQ ID NO: 347987 - DNA, 96 bp, Homo sapiens
gttgtgaaaaaactactaggatcacgcggcatgtattgaggtgttaactaaggaccttgaaaggcatgcagctgagttacaagcccaggaaggatt

SEQ ID NO: 347988 - DNA, 100 bp, Homo sapiens
tggagcgagctgagagctcgagaccctgtacacgtatcctgaaaactggagggccttcaaggctctcatcgctgctcagtacagcggggctcaggtccgc

SEQ ID NO: 347989 - DNA, 75 bp, Homo sapiens
gcggctgcgctggcgcggcttttggcggcctttctgctcctcgcggcccaggagggctccccgaggactttctga

SEQ ID NO: 347990 - DNA, 100 bp, Homo sapiens
ctgctgcggcccgggccgggccctgaggggagggctgaggactatgggcctgtggaggtgatctcccattggcaccccaacatcaccatcaacatcgtgg

SEQ ID NO: 347991 - DNA, 100 bp, Homo sapiens
aagaccatttatatgttcaactgatgaaaacactgattgaaatcagcaagggatgtggttaccagaacaggacactcattggccttggggtccctacata

SEQ ID NO: 347992 - DNA, 100 bp, Homo sapiens
ccgagtggagagagcgagctgagtggttgtgtggtcgcgtctcggaaaccggtagcgcttgcagcatgatctttaatctcatgaagtacgacagctacag

SEQ ID NO: 347993 - DNA, 75 bp, Homo sapiens
gaagagcttcaactctgttcacctgcttgcagggctattgagtggccagacttccccaacaaatgccaaattgga

SEQ ID NO: 347994 - DNA, 100 bp, Homo sapiens
ccattggaaatgcagcaaagagccaggttctttgcagatgtagttccagcagtcaggaagtggagagaggccggaatgaaggtgtacatctattcctcag

SEQ ID NO: 347995 - DNA, 83 bp, Homo sapiens
caccgacatggcccggaggcagcagaagtcagagcaccataacatggtgtgggaagtgaagacaaatcagatgcctaatgcag

SEQ ID NO: 347996 - DNA, 74 bp, Homo sapiens
ctttccagcagtcagttgaacaagacaacttatttgatgggtccacattcagtcgtcccagactgtggagtcga

SEQ ID NO: 347997 - DNA, 100 bp, Homo sapiens
ttcgggacaagtacatgtttgctacaaaggtggtgttcctctgtgacgagggtgcaggtatctctggggactacatcgatcgcgtggacgagcccttgtc

SEQ ID NO: 347998 - DNA, 98 bp, Homo sapiens
aaagatgctgctgctaaaggtatccaggaaattgctgactctgtaaagattctgatgcaaggcaaaaatccagggatagcttggaagtatgcacttcc

SEQ ID NO: 347999 - DNA, 75 bp, Homo sapiens
aatgactgtcctcgtaagataacaggcccactggaaaatgacttggtagttcatgtggcacttatagcagaaagc

SEQ ID NO: 348000 - DNA, 98 bp, Homo sapiens
accagcaagaatgacttctccctctccctcaagtatgacccacggcacaaccgctggttccagatccagtccctgcagcaggagcacgccgacctgtc

SEQ ID NO: 348001 - DNA, 75 bp, Homo sapiens
ctagtggtggaacgggaccacacggccatgttacaggagctgaattttggtgcatatttgggtcttccagctttc

SEQ ID NO: 348002 - DNA, 90 bp, Homo sapiens
agtaacaggagcaaatactgggaaaatatttgccatgaaggtgcttaaaaaggtctatgttaacaatgaatgggcaaccagtgttgggga

SEQ ID NO: 348003 - DNA, 90 bp, Homo sapiens
cctgtgttctgcttttttcattgttccactggacgctcatcagagggaagatctttttcctcaattggtacaaacacaagtgcgccttgc

SEQ ID NO: 348004 - DNA, 98 bp, Homo sapiens
cgaggagcccatttccgtgagtcaggaacacaaggtgcttttgactggcacccctctccaaaatacagttgaagaactatttagtcttcttcactttc

SEQ ID NO: 348005 - DNA, 100 bp, Homo sapiens
tgctggctaagatcaccaacacagacgtggttgcatcataaatacaaaggactgaagttataaaagagaaaagagaagtttgctgctaaaatgaatctga

SEQ ID NO: 348006 - DNA, 100 bp, Homo sapiens
agaaatggctgtttctgagctacctggtaaccccaacgctgtctggacagtgcgtcgacacattgaagggagagatgacatgctggacgtggagaccgat

SEQ ID NO: 348007 - DNA, 100 bp, Homo sapiens
gcagcgacggcggcgacagcagggggatatgagactttctactcggaatatcctgagtgttgcgtggatgtaaaacccatttcacaagagaagattgaga

SEQ ID NO: 348008 - DNA, 83 bp, Homo sapiens
gcgcagggcctgcagcgggagctggacggcgagcgcgagcggcgcgagaaaaccacaccaccccagagccaagtgcaccgagg

SEQ ID NO: 348009 - DNA, 75 bp, Homo sapiens
gcctgcgcaccgacatcgatgcgacctgcacgccccgccgcgcaggtccgaggggtgaaagaggcccccggggca

SEQ ID NO: 348010 - DNA, 82 bp, Homo sapiens
cccttctactttctgtctctaggaatttcactactctaggatgaaaactttgacctgtcaaaaagactgagtgagaacgaaa

SEQ ID NO: 348011 - DNA, 116 bp, Homo sapiens
cgctgagcacgttcttccaagaaaccaacattcccaacagccaccaccaccaccagatgctgacagtgaagatagtactgtgtccatccagataaaattagaaaatgaaggcagtg

SEQ ID NO: 348012 - DNA, 83 bp, Homo sapiens
acaagaccaccaccatcctgctggacggccggcgcgtgaagctggagctctgagctccacgcaggagatcggtgaggagctga

SEQ ID NO: 348013 - DNA, 97 bp, Homo sapiens
tggggaacatgtctgagtcggagctcggcaggaagtgggaccggtgtctggcggatgcggtcgtgaagataggctgcacatggtccgtctaatgctg

SEQ ID NO: 348014 - DNA, 100 bp, Homo sapiens
aagcggccgcctgcagagctgggagtcctgccaagccccggatcgttgttagagttggaagcttggcagttggcctcccttcttcccatggaggacgggg

SEQ ID NO: 348015 - DNA, 75 bp, Homo sapiens
gccttttgcctcccaccgtgattctgaggcctccccaaccatgtgcaattagtcattcaggagagcaggaaagaa

SEQ ID NO: 348016 - DNA, 75 bp, Homo sapiens
ttcccaaacctgaaggacttcatctcccgatttgagctgccactgcagagccccgccatggaagacacgccgttg

SEQ ID NO: 348017 - DNA, 100 bp, Homo sapiens
cggaccggctggttccccagcaactacgtgcgcgaggtcaaggccagcggttacctacctgggcaaagtctccaccactggcatgcagtttttgtcaggc

SEQ ID NO: 348018 - DNA, 83 bp, Homo sapiens
gcgagggacaagactccgactccagctctgacttttttcgcggctctcgacaatgcagatcttcgtgaagactctgactggta

SEQ ID NO: 348019 - DNA, 100 bp, Homo sapiens
gcagaagccgagttcaacatcctcctggccaccgactcctacaagcctcctgacaaggtgatccgggcgggccccgcaggaattttatcccctcaccggc

SEQ ID NO: 348020 - DNA, 75 bp, Homo sapiens
attaaagtctaactctccaaataagacccttttgaggacttctttgggaatcgaaggggtccccgaggaagcaga

SEQ ID NO: 348021 - DNA, 83 bp, Homo sapiens
tcccgggcccgccggccctgagctcccggcggcgcagtgatgatgacagcctcttcatctatgactgcagtgctgcagaaaag

SEQ ID NO: 348022 - DNA, 100 bp, Homo sapiens
cgagaaggaaagcaccatgacgtccatccatttcgtggttcacccgctgccgggcaccgaggaccagctcaatgacagaactcaagacatggctgcccag

SEQ ID NO: 348023 - DNA, 75 bp, Homo sapiens
ggcggcccaccgggactcgccgttggtaacctggatgaggacatcattgcagaagagaacatcgtttcccgaagt

SEQ ID NO: 348024 - DNA, 75 bp, Homo sapiens
ctgggaccttaacagggagccatggacacatgacggaagtgtgtatttttgggccactccacggcaggtccctag

SEQ ID NO: 348025 - DNA, 75 bp, Homo sapiens
cacatcaacacctgggtctcaaaaaagaccgaagatttcttcctgaccactatgcccactgactccctcagtgtt

SEQ ID NO: 348026 - DNA, 83 bp, Homo sapiens
tgtggttggaatccttgctgtgctgaatcctggctgtgtgaccccaaagcgatcgtcttctgatcaaaggaggtaaaattgtt

SEQ ID NO: 348027 - DNA, 89 bp, Homo sapiens
ttggagcagctggggatcatgctttgcagttcctgaccccttaatgcctgacccttccaagcaaccaaagaaccagcttaatcctattg

SEQ ID NO: 348028 - DNA, 83 bp, Homo sapiens
ctccgcctcgccgcagtcggggcagccgctcgcccctcttttccatgtatccgtccagaaaactttagaaactgttcctttgg

SEQ ID NO: 348029 - DNA, 101 bp, Homo sapiens
ccctgtatgcatggtgtggggttggtgtgattagcttcgcagtctggaaagctttaggagttcacagtgggaatatgagccgaggaaatagcttatttttc

SEQ ID NO: 348030 - DNA, 101 bp, Homo sapiens
ctgaaccccaaggccaaccgcgagaagatgacccagcaaaagcgcaaaggcgttgaagggctcatcgacatcgagaaccccaaccgggtggcacagacaac

SEQ ID NO: 348031 - DNA, 90 bp, Homo sapiens
gctgatgccgcccgcggcgaggtggcccggaccgcagtgccccaagagaggacctgggctatcccttggagcttggctatcagaacttcc

SEQ ID NO: 348032 - DNA, 82 bp, Homo sapiens
ggagcatgaatggagcaaaatggcggatcatgtgcaggtatcgagaaccttccctgcgaacttcagaggaacttccagctga

SEQ ID NO: 348033 - DNA, 99 bp, Homo sapiens
cggcggggcagtcgcgggatgcgcccgggagccacagcctgagagacaggatctcactctgtcacccaggctggagtgcactggcatgatcatagctca

SEQ ID NO: 348034 - DNA, 73 bp, Homo sapiens
gggctttgtcctgcatgtagaaagggcggcgactggcggcgcgatggacctgaccgggctcctgctggacgaa

SEQ ID NO: 348035 - DNA, 100 bp, Homo sapiens
aagagggtcatctcttctattgtacctgcagtttttcccaggtcatgagtctcgggctacagaagctttgtgctgggcagaaggacagcgactctttagt

SEQ ID NO: 348036 - DNA, 82 bp, Homo sapiens
gggtcttccagagcgtgaagatcaagatcgatgcagctgactttgcctgtagcctcatagaacccatcccatggctgcagtg

SEQ ID NO: 348037 - DNA, 100 bp, Homo sapiens
ctaaagtcttcattgacaaacagaccaatctgagcaagtgctttggttttgctgttactgctcagtgtagtcacaccttgaataagaaatggaaaacctt

SEQ ID NO: 348038 - DNA, 83 bp, Homo sapiens
cctgcacatctaccacgccgtcaaggaccggcacaaggacgttctcaagtggggcgatgagatggggcaccctggcatgcatt

SEQ ID NO: 348039 - DNA, 50 bp, Homo sapiens
tgggatggagcccgaaggcgtcatcgagcaaactctggcctgttctattc

SEQ ID NO: 348040 - DNA, 156 bp, Homo sapiens
cagaagatcttcaatgacaacagcctcagtatggaggccttccagcaccgttctgtgtcctggtcgcagttcaacaagagttcgaggaagggctgctggacagatgtcctgccccaggaccccatcccgcgctggtggagggtcgcaggagcagcg

SEQ ID NO: 348041 - DNA, 75 bp, Homo sapiens
gtgacactcacggaccttagccaccgccgccgccatcgccaccatgggcatttccctggaaatggcagctgtgac

SEQ ID NO: 348042 - DNA, 110 bp, Homo sapiens
cgacgctgctgggtccgctgagcggggcgacccgagcacacgtcacatggagatgggcgtcaagaagttacctctcgtaccagccgctcaggagctcggtgtagaaactc

SEQ ID NO: 348043 - DNA, 100 bp, Homo sapiens
cacggcaggttcccgcccggaagaagcgaccaaagcgcctgaggaccggcaacatggtgcggtcggggaataaggacctgggaggaaggcaaggtgctca

SEQ ID NO: 348044 - DNA, 100 bp, Homo sapiens
acagagacaggaaggggaaaatggatgtgaccaactcagctgaaaagacacaatgtttgcacgaggactgaagaggaaatgtgttggccacgaggaagac

SEQ ID NO: 348045 - DNA, 100 bp, Homo sapiens
gagcgcaggcctcgtgccgttacggccatcacggcggccgcagtggcgtcctggagccctcctcagatcttagacgaattttacaatgtgaagttctgca

SEQ ID NO: 348046 - DNA, 75 bp, Homo sapiens
ggatggggcacgcacagagtgcaagacgctgagcaatgcaggacgtggccgctttggagagtcagcctttattag

SEQ ID NO: 348047 - DNA, 75 bp, Homo sapiens
ccatggagccatgcgtgtgctgacagtccctacagatgaagaagatgaaatggaggagtccacaaatcgaccaag

SEQ ID NO: 348048 - DNA, 98 bp, Homo sapiens
agggaccccagaaactgatccgcaaagtgtctacctcggggcagatccggaccaaggacccagatgatgtggtaccagttggccaaagaagagcctgg

SEQ ID NO: 348049 - DNA, 109 bp, Homo sapiens
ggaagaccgcgcgcagggcctgcagcgggagctggacggcgagcgcgagcggcgcgagaaatttggtgccctggttgtcagatgttggaaagcagtaggacggaacata

SEQ ID NO: 348050 - DNA, 96 bp, Homo sapiens
caggtgactgtcccagaagtgaatcgcaggaggagagacttcagcatgcaaaccttcatctgttcggcttgcaccgtcattttcattccatgctgc

SEQ ID NO: 348051 - DNA, 96 bp, Homo sapiens
gctgatgcaggtgaacgacactctgacttccgaagatgccggactccggaacagcaagaactgcaccgaaccagaggcagaggaggtggacacggt

SEQ ID NO: 348052 - DNA, 96 bp, Homo sapiens
cccagagtcagctcccctttctcgcccagcgcccccaggccgctcccggggctcacggaaattgggatggcggttcttgttaagctcccctatgcc

SEQ ID NO: 348053 - DNA, 98 bp, Homo sapiens
cgcatatcttcaaagcacctagtacctcctaccattgtcaactgtttgctaatccagactttacacaacctatctcagaagttgtagatgaagtaatt

SEQ ID NO: 348054 - DNA, 73 bp, Homo sapiens
gagaacgtccactgcgggccggcgaaagctgggtgtgagatggcagacaggtttgcaggaaaccctcagaaag

SEQ ID NO: 348055 - DNA, 100 bp, Homo sapiens
ttgtgctgagccaactcgagccaggctgcaaaaaggcggcttacagggagaacacagttggcctccaccgtttctgccccacagaaaacgtagcaaagat

SEQ ID NO: 348056 - DNA, 82 bp, Homo sapiens
tctgcttcgacaaggacgagttcatgaagcctctgcctgtgagtttctggatattgtagagctgctgctccagtctggtgct

SEQ ID NO: 348057 - DNA, 75 bp, Homo sapiens
tcatcctgccttgtgctcacagcttttgtcagaagtgtattgataaatggtgctcagattgatgacaacattccc

SEQ ID NO: 348058 - DNA, 100 bp, Homo sapiens
ccgaagcccaaaaagctgaaggtggaggcgccgcaagcgctgagtttccgttactatggcaatgacggcagggactacaacaacctttcctatgagcaac

SEQ ID NO: 348059 - DNA, 74 bp, Homo sapiens
agtactgggtgtgattttgcaattgatgtacagctatatattttgtcctttctttcacctcatgatctgtgtca

SEQ ID NO: 348060 - DNA, 100 bp, Homo sapiens
atacttgctgaaaaggaagttttctggaatggggaggaaataatgctggccatacagttgttgtggattctgtggaatatgattttcatctcttacccag

SEQ ID NO: 348061 - DNA, 50 bp, Homo sapiens
ggaacattccagaaactttggataacgaaggaggcccaacttcattcaat

SEQ ID NO: 348062 - DNA, 75 bp, Homo sapiens
tggaaaggaagtaccaggacttgcacagttcctgcgacctgaaatacacagaaggagtacagtccctcaactgga

SEQ ID NO: 348063 - DNA, 51 bp, Homo sapiens
cagcctcccaagtagctggaattacaggcctccctattccctgagacacaa

SEQ ID NO: 348064 - DNA, 100 bp, Homo sapiens
ctattcctgagtggatccaaacgctacctctcagacctggcccgggacatgctcatgcagttgccatcaagattatcgacaaaacccagctgaatcccag

SEQ ID NO: 348065 - DNA, 114 bp, Homo sapiens
ggggagcggacgcagtgatttgctccccctcgtgcagcaacccccacacccagcaccagacgaagttatacggaagcgtctcctcattgatggagatggtgctggagatgatcg

SEQ ID NO: 348066 - DNA, 83 bp, Homo sapiens
gtggatcgctgtgatcgtcacttgggagccagcgccggcagccaccatggcgtcacgcatagggttgcgcatgcagctcatgc

SEQ ID NO: 348067 - DNA, 82 bp, Homo sapiens
gtcaagccgccgcctcgacccagggcccgcgggccaggagagcgctcggcgggattgtcagtggcttcgccccgaggagagc

SEQ ID NO: 348068 - DNA, 100 bp, Homo sapiens
ggcttctcgactcggtcctgtttcgacagcgaacatgtcgcggcctgtcaggcgcatattaaatttcctattgactacccctattcaccacctaccttca

SEQ ID NO: 348069 - DNA, 100 bp, Homo sapiens
tagtgaaacagctgcaaaggttgcattgatgaaattaaagatgcatgctgatggcgataagtcattaccacaggttgaagctccattcataccaaagttt

SEQ ID NO: 348070 - DNA, 83 bp, Homo sapiens
ctctgcttctccatcttctccacagaagcttgcagaccaggattctataaagcttttgctgggaacacaaaatgttctaaatg

SEQ ID NO: 348071 - DNA, 75 bp, Homo sapiens
gaggacgatgactgcttagaccacagcgacgaggacgactgccgtctcctctgagcctccggcctccataagacc

SEQ ID NO: 348072 - DNA, 96 bp, Homo sapiens
tgaatgagaaccctacttgcctaaatgaggaatgtctttcctaccatctaaaatacgaaggtttctggctgggtagatgatgagctggagatcaag

SEQ ID NO: 348073 - DNA, 89 bp, Homo sapiens
gcacgccatgagggccctgtgggtgctgggcctctgctgcgtcctgctgaccttcgcaatggctgccatccggaagaaactggtgattg

SEQ ID NO: 348074 - DNA, 89 bp, Homo sapiens
gctgcaacctttagactaatgactgtccgaaacatcgcctccatctgtaatatgcaacttgagttggtggaaccaagtggctggattca

SEQ ID NO: 348075 - DNA, 98 bp, Homo sapiens
aatgaatttgcaaaacttactgtaggtcctggaagccatacgggtgacccgtcacaagaacgccatggcagagcgctgggaatcccgcatctacgcca

SEQ ID NO: 348076 - DNA, 96 bp, Homo sapiens
ctgctctgtctcagcgccgcctccctgcttcttaacaggtaagaagcgcaattccacactctacataaccatgttactcattgttccagtcatcgt

SEQ ID NO: 348077 - DNA, 75 bp, Homo sapiens
agatccagtccccacaggagtgggaggcgatccaggccttgacgaagagcttaaagcagcgcctgggtaagagta

SEQ ID NO: 348078 - DNA, 97 bp, Homo sapiens
agctacatctacaatggcaaaggagcgccctggtcctggccttccgaggagcccaccggaagcaggaagagcaacgccggaagttggagcagcagat

SEQ ID NO: 348079 - DNA, 90 bp, Homo sapiens
tctggcaaacagtgtttgcctctggttcagctcatacaacagcttcttagggacctcccgaattccctggtaacagtgttcattctcttc

SEQ ID NO: 348080 - DNA, 100 bp, Homo sapiens
aacacagcagcgggagcagcaacaccagcactgccaacaggtacacactggcagctcaggacctggtgatgcgtgcccggggtgtgctgaaggacagagg

SEQ ID NO: 348081 - DNA, 96 bp, Homo sapiens
gaaatcaaattgaagagagcagttgaagaagtgaagaaattattggtacctgcatgaactccggagacggcattgactacagccagcagaagaggg

SEQ ID NO: 348082 - DNA, 100 bp, Homo sapiens
agcagtgccgagtgtcagactacggatactccaagctgattgagttattagaagcagtgcctcatgtattgcaggtcctctggacacagacatgcagcag

SEQ ID NO: 348083 - DNA, 90 bp, Homo sapiens
acttattcttcaactctacattcttctggagcatggacaagcgaatttcagtcagtagcaaggtccgtggtcctgtcagtggaagcccgg

SEQ ID NO: 348084 - DNA, 75 bp, Homo sapiens
caactattcaacatggaggcggaggtcgataagctggaactgatggttcctccggtttaggctcagctagcagca

SEQ ID NO: 348085 - DNA, 100 bp, Homo sapiens
cttatggatctctgagaaggcgcagcgttgaaagggcacctgaatggacagaagaggacctcagccaactgacaagaagtatggttaagttcccaggagg

SEQ ID NO: 348086 - DNA, 82 bp, Homo sapiens
ggcaagctggtgattaacaaagacctcgcggaggaagacaatgcagatcttcgtgaagactctgactggtaagaccatcacc

SEQ ID NO: 348087 - DNA, 82 bp, Homo sapiens
gcctcagttggaagcagccgatccagcctgcggagcctgtggggcagaataattgcctgtctcgacctaacatttttctgtg

SEQ ID NO: 348088 - DNA, 100 bp, Homo sapiens
ttccagtgctggtgttggatgtcaatgatgatttttctgaggaagtaaccaaacaagaagacctcatgagagagggtgtgccatgtgacttggtgacagg

SEQ ID NO: 348089 - DNA, 99 bp, Homo sapiens
aagtcagacctcaaacagctaagacaggtgaaatgacaatggatgctctgttggctcgattgaaacttctgaatccagatgaccttagagaagaaatcg

SEQ ID NO: 348090 - DNA, 100 bp, Homo sapiens
cactaccacggccacactcaccactccatggccacacaggccatgtttttggtatactgtgcactggagaaagaacctgtgccaatgtccttgcctccag

SEQ ID NO: 348091 - DNA, 75 bp, Homo sapiens
cgatgtgttttggagcctcgccccccggggaagcggtggatggtggagccatcgaagcccccacccacaggctga

SEQ ID NO: 348092 - DNA, 100 bp, Homo sapiens
gggctgtgaaccctggcgaccactgcttctccgtgggcagcattggcgaccagcgcttcacggtctttgaagaaactggttttgatatcaaagactatat

SEQ ID NO: 348093 - DNA, 82 bp, Homo sapiens
actcattcacttctagacgacaaaatgcaaaaaaggaggccaaagacttttattggtaaaggttttcaaggtgtcatgaaaa

SEQ ID NO: 348094 - DNA, 50 bp, Homo sapiens
cgggctgccaactgcactcggacagagtctcgctgtgtcgcccaggctgg

SEQ ID NO: 348095 - DNA, 51 bp, Homo sapiens
caagtaatggtgcaaagcctgaagtaagaaccttgatgctgtccatgatat

SEQ ID NO: 348096 - DNA, 101 bp, Homo sapiens
ctgaagaagcagcgtaccaagaaaaataaagaagaggctgcagaatatgctaaacttttggccaagagaatgaaggaaggcctgtgagattgagcgtggca

SEQ ID NO: 348097 - DNA, 98 bp, Homo sapiens
tttccacggtgtgttctatgccgggggctttgccattgtgtattacctcattcaaagtgctggagaatctggtaaaagcaccattgtgaagcagatga

SEQ ID NO: 348098 - DNA, 75 bp, Homo sapiens
cagctcacgcccgaggtgcagctggccatcgagcaggaacagatggagtcggataactgttcaggaggagatgat

SEQ ID NO: 348099 - DNA, 98 bp, Homo sapiens
gagacttttgcagcgacctgcaagaaactccacgaccacattgagttggaggtatggcatttcaaatatagatacaaccattgaaggaacgtcagatg

SEQ ID NO: 348100 - DNA, 98 bp, Homo sapiens
tcgctgtgggggctcctgtttctctccgccgcgctctcgctctggccgacgagtggagaaagtatggcgtgagtcccgagaacattatcctctatggt

SEQ ID NO: 348101 - DNA, 82 bp, Homo sapiens
agataggcggccatggtccaaccttgaaggcagctagtacaccactgaatcctttaagctttcagtgtgaatttgtaaaact

SEQ ID NO: 348102 - DNA, 83 bp, Homo sapiens
caaggaaataggatttaaccgctctctgcctcccagatgccatggacaatattaccaggcagaaccaattctacgatacccaa

SEQ ID NO: 348103 - DNA, 82 bp, Homo sapiens
ggagcagacatccagtcagccggtcatcgccaaagctttgcagcagctgaagttccagtgtctcgccccatcctcaccctca

SEQ ID NO: 348104 - DNA, 82 bp, Homo sapiens
tcccggaccgggccgcgcacgccgcctcagaacatccagtcatggataaaaatgagctggttcagaaggccaaactggccga

SEQ ID NO: 348105 - DNA, 100 bp, Homo sapiens
ctgtggttcactgtgcatcgcccactccagaagtagcatggaaatggagggcatcttcaaccacaaaggcatgggactcgctgtgctggagaagtggcag

SEQ ID NO: 348106 - DNA, 83 bp, Homo sapiens
catgtctgagactcctgctcagtgtagcattaaggtctccgatgatgacctcgacccatcctttactgtctcaaccagcaaag

SEQ ID NO: 348107 - DNA, 101 bp, Homo sapiens
gatttcctcatcctgaaccggactgtaaccccagtgaagctgccagtgaagaaagtaacagtgagatagagcagctcctgaagctgaaggagaagtgccag

SEQ ID NO: 348108 - DNA, 119 bp, Homo sapiens
aacctggggtcacagagatggacatggaatcgagggcagaagatctgggtttgagtccagcagtgctttaggtattgggaaatgagagagcagcgcacccccactttgaaaggcaagct

SEQ ID NO: 348109 - DNA, 95 bp, Homo sapiens
tgccactgctgccgccgcccccggagctgctggtttcattcgaggtttcgggccggaaacccagcgtttgctggcagaaccagttcctggcatca

SEQ ID NO: 348110 - DNA, 90 bp, Homo sapiens
gggccagccccgccgccctcgcaacctggcagccgccgccgtggaaggaaacccagcgtttgctggcagaaccagttcctggcatcaaag

SEQ ID NO: 348111 - DNA, 82 bp, Homo sapiens
aatgattaatccagtgccgcctggaggcagccggtccaacgagcagctgatgagccagatccgggagacgcagcagctctgc

SEQ ID NO: 348112 - DNA, 90 bp, Homo sapiens
cgggcaagcgctgttcaaacccatgaaggcgccctgcgtccggcagaggaggcgagcatcccgctcaggtgatgaggaacccctcgcgca

SEQ ID NO: 348113 - DNA, 90 bp, Homo sapiens
cggcttctcccctacgcgctacacaagtggagctccttttcctccacctaccttcccgataagtacaaggtggactgtgcatgcctcaaa

SEQ ID NO: 348114 - DNA, 89 bp, Homo sapiens
ccaggctgccctgaaactggaacacattgatggggtcaatctcgaagagagaagggcacagttacctaagtatcaacgtaatcttcctc

SEQ ID NO: 348115 - DNA, 87 bp, Homo sapiens
gactttggtgccctcaacatctctcagagacgaaagcttggctgaagaggaaataaaaacagaacaggaggtggtagagggcatgga

SEQ ID NO: 348116 - DNA, 100 bp, Homo sapiens
aaaagtttttaagactctcaggcttactgtggatctggattctaaggcaacacttccttgaagaaacaagcttacaggctgccctgaggatctgtgtttg

SEQ ID NO: 348117 - DNA, 101 bp, Homo sapiens
aaaaacgtcaacaacagttttacgcggcaacctttggcactgcatccatgagcatgcccacaggattcggcactcctgctccctacagtcttcccaccagc

SEQ ID NO: 348118 - DNA, 82 bp, Homo sapiens
ccggatcgtggcctctcgagagcaaggtttttagaacttcagccataaaaatgggcagaattttccttgatcatatcggtgg

SEQ ID NO: 348119 - DNA, 82 bp, Homo sapiens
gtctgacggcgccggttcgctgcccggtccgcccgcggtgagagggctgaaatctctttaatgatggagggaagcaggcaga

SEQ ID NO: 348120 - DNA, 100 bp, Homo sapiens
ttctgtttttaagcttctaattaaagagctatttcaagaagcccctgaatatctactttggatttattcctgaaataatcttcatgacctctttgtttgg

SEQ ID NO: 348121 - DNA, 50 bp, Homo sapiens
cgaagaagcttcgaggatctgagtcgacttcaatgttcctatgaagaaca

SEQ ID NO: 348122 - DNA, 155 bp, Homo sapiens
ttacattgatgtactgtctggctctaagaaagactacaagctgaacttcttttcccacaaggagggaacgtacgctgcaaaggcattctgaaggcaaatcctgtttagacccaggcaaaggttcctggtgacccaggctctcatgagcagattgt

SEQ ID NO: 348123 - DNA, 100 bp, Homo sapiens
ctcattactctggagaagagaggctatgtgaaggctgggctctggactccagaggcagtgatagaacacccagacgcagatacttggttcactgtcttca

SEQ ID NO: 348124 - DNA, 100 bp, Homo sapiens
cccggaaaagggcactcgtctccgtgggtgtggcggagcgcgcggtgcatggtattttgaaggtggcgtctcatctgtctacctctgggatctggatcat

SEQ ID NO: 348125 - DNA, 100 bp, Homo sapiens
ccgtcccccccaacacctgagccaggtgaagggccccgtaaattggaaggatgcacaagttccaaggttacgtttcactcctcttttgacttggactatg

SEQ ID NO: 348126 - DNA, 99 bp, Homo sapiens
gagaaggcagctcagatgcatctggttcttctaaaggagcaattctccaatacttacagtaatctcatattaacaggaggtgttcctgctcatatgttt

SEQ ID NO: 348127 - DNA, 83 bp, Homo sapiens
tacttcaaggataagggtgacagcaacagctcggcgggctggaaggtttggtgcacctcgatttggaggaagtagggcagggc

SEQ ID NO: 348128 - DNA, 100 bp, Homo sapiens
cagagctcagacacagagcagcagtcccctacaaggagtctcaggagcaggggctgcggcagaggctgctggacgagcagttcgcagtgttgcggggcgc

SEQ ID NO: 348129 - DNA, 75 bp, Homo sapiens
gaaatttggagtgtgcgtgcgcgccgagcggtacactgaggaggggacggctccgtcttcacattgtgcacagat

SEQ ID NO: 348130 - DNA, 83 bp, Homo sapiens
cgagaagagccgcagtgagttgggcaggttcttggccaagcagaaccctgccatcagcatcactgaaaacgtgctgcatttca

SEQ ID NO: 348131 - DNA, 100 bp, Homo sapiens
ccaaattagtgacatgtcaacactgctgagagaaatcaatgacgtgtttgaaggaagacgagccaaggtagctttagtaaaatgtcgggacttgcactgg

SEQ ID NO: 348132 - DNA, 83 bp, Homo sapiens
aagcccttcgcctgcacctggccaggctgcggctggaggactgcctccgggcctgccaggagcagatcgaagccctgctggag

SEQ ID NO: 348133 - DNA, 82 bp, Homo sapiens
cggcagccgattcctggccacctccatagcaagcagacaatgcagatcttcgtgaagactctgactggtaagaccatcaccc

SEQ ID NO: 348134 - DNA, 51 bp, Homo sapiens
catagtcaactgcgtggaagagaagttgctgccaaacaaggtgaatccgac

SEQ ID NO: 348135 - DNA, 75 bp, Homo sapiens
ttaaaaattaaacttcaacacaatgagaatggaagcttcttgcctagagctggccttggaaggggaacgtctatg

SEQ ID NO: 348136 - DNA, 98 bp, Homo sapiens
aattgatcaggatttttggcctaccctccaaagaaaagatacttgtttgccttgcaacttaagagagacctgctggaagagcgtttgacctgtgctga

SEQ ID NO: 348137 - DNA, 100 bp, Homo sapiens
ctcaacaccctgagtgcggatttctgctatgatgacagacattattgcaagagcatctcaagcagacgtcgttacaatcgtgatttggaacaggatgaag

SEQ ID NO: 348138 - DNA, 83 bp, Homo sapiens
aacgaggcaaggagctaaagcagcgtgcgttcagccctggggagatggtaacctgcacctcaatgtgacggcggaggccttca

SEQ ID NO: 348139 - DNA, 75 bp, Homo sapiens
ccagcaccacagtccttctgcagtccctcgtccagccacccccaggcctcccccagggaagaacttcactatgcc

SEQ ID NO: 348140 - DNA, 90 bp, Homo sapiens
aaaaggatggattaaacgatgatgattttgaaccttacttgagtccacaggcaaggcccgtggtgttcccactgatgaagagcaggcgac

SEQ ID NO: 348141 - DNA, 85 bp, Homo sapiens
tggagctggcggagatcgaggccatccaggaaagcctgcagccctctgggtttcctgaggctcaagctctaggactggaggtgtt

SEQ ID NO: 348142 - DNA, 75 bp, Homo sapiens
tcacagattccagcttcggaacaagagaccctgtttctgtagaaaatgtttcctgactgcaatgagggaaagcgg

SEQ ID NO: 348143 - DNA, 83 bp, Homo sapiens
gggagcaagtctgcatcgcagaggccaggggcgaccattgacgaggtggagacggacgtggtggagattgaggccaaactgga

SEQ ID NO: 348144 - DNA, 100 bp, Homo sapiens
caaggcccaatgacccaggcgaaatgggatcttggttcctggccagcacccggcctctctgcacctcatagacactgcaaatccttactcagtgacttca

SEQ ID NO: 348145 - DNA, 100 bp, Homo sapiens
aaagtacaatcaagctaaggagaaactgcagcgagctgcaattgcccagaaaaaggaagctgaatatggtgggcatgatcagatagatttgtatgacgat

SEQ ID NO: 348146 - DNA, 74 bp, Homo sapiens
aaagggaccacggtcaccgtctcctcagaatgtatgacaacatgtccacaatggtgtacataaaggaagacaag

SEQ ID NO: 348147 - DNA, 51 bp, Homo sapiens
taaagtaacagatgatttagttgtctgggaggggctgaacgtggtgaagac

SEQ ID NO: 348148 - DNA, 75 bp, Homo sapiens
ctaggagccacctagactggatgcagagcatgatttgcttgtaaatgcatcacgaagaggcagcccagaatgaag

SEQ ID NO: 348149 - DNA, 89 bp, Homo sapiens
ccggctctactgcgtctaccagagcatggtgctcttcttcttcgagaattacaccggggtccagcaatgctggggtgaaaacaacacgg

SEQ ID NO: 348150 - DNA, 90 bp, Homo sapiens
cccagcggctggagctcctgaagaaggaggccttgcggaaccaccagacgccccgggctccacgtgttccccacgtttgtggcgtacgag

SEQ ID NO: 348151 - DNA, 89 bp, Homo sapiens
attcatcaaggagctcatcaaggacgggaagtcactcataagcgcgctcaagaaaatcaacgaccgggagcagaagttgcatgccctta

SEQ ID NO: 348152 - DNA, 100 bp, Homo sapiens
ttatgcaggatattttgattggaaggactgcctgcctccaacaggtgctggagaatctggtaaaagcaccattgtgaagcagatgaggatcctgcatgtt

SEQ ID NO: 348153 - DNA, 82 bp, Homo sapiens
ctggcacctcaacggctgatgatttctggtatggcctcacaagtcttggtctacccaccatatgtttatcaaactcagtcaa

SEQ ID NO: 348154 - DNA, 100 bp, Homo sapiens
ccgagcagcgccagcggccgagcgggcggcttcctggcctgggcgctccggtggcggcggaggaccccaccttccttatcaccaggtcttctccactggc

SEQ ID NO: 348155 - DNA, 100 bp, Homo sapiens
gccagaatggcatccagagagaggctctttgaactttggatgctttattgtacaaagattggccctgtgtactcctctgtctcgtctgaagcaagaagta

SEQ ID NO: 348156 - DNA, 82 bp, Homo sapiens
cgctgcttcacctcttcgccggcgggtttacccaaggtccagcctagcccctaggcaccatgtcggacagtgatctaggtga

SEQ ID NO: 348157 - DNA, 80 bp, Homo sapiens
ctcattatgctgtgaaaatattagctgtgatgcagatccatccgccctagcaaaatatgttctggctttggtaaagaaag

SEQ ID NO: 348158 - DNA, 83 bp, Homo sapiens
ccggacggcacaccctacgttaccgtgctcaagagcaacaagatatggatttggatatagaatttgatgtacaccttggaata

SEQ ID NO: 348159 - DNA, 75 bp, Homo sapiens
tgggttttggagaccaaagaagtctacagggatgctgaaaacgccattcaacagatgggtggccagtggcttggt

SEQ ID NO: 348160 - DNA, 82 bp, Homo sapiens
ttcgcgaagctgccaaagccttagacaattgaagactgggatagtttccaagctattttggatcatacctacaaaatgcatg

SEQ ID NO: 348161 - DNA, 98 bp, Homo sapiens
tcaagggggatcagctctattatttcaaagatgaagatgaaaccaagcccttgggtgaagcagaaagagactgtgataacaagaaaatcagactggag

SEQ ID NO: 348162 - DNA, 83 bp, Homo sapiens
agcccacttggcgatgggttacagtaagaggacgagcctgtggagtgggagacacctgacctttctcaagctgagattgagca

SEQ ID NO: 348163 - DNA, 98 bp, Homo sapiens
tccttcgtccctgacatcatctctgtgcactgataataaccctgcagggctggagcggctctgggctccggaatcgcccgcagccggtactgcgggac

SEQ ID NO: 348164 - DNA, 83 bp, Homo sapiens
cccgggtggacgacgccgtggctgccaagcacccggaggactccctcaatgtggctgacttgacttccctccgggccccactg

SEQ ID NO: 348165 - DNA, 100 bp, Homo sapiens
gggaacctgatttgagatcaattcttggagaacacaaagaagtgtgatgaagctaccaatggtgcggtgccccagggccagcgaccaccgcctcgtatca

SEQ ID NO: 348166 - DNA, 75 bp, Homo sapiens
aaatgatttcctcaggactccagattatctacaacactgatgaggtgaccaagaatatggcccaggtgaccaaag

SEQ ID NO: 348167 - DNA, 119 bp, Homo sapiens
cccccaaatccctgttgcgccaccccgaggccagatccagctttgatgagatgcttccaggttggatggcaagcatgtggtgtttggcaaagtgaaagaaggcatgaatattgtggagg

SEQ ID NO: 348168 - DNA, 76 bp, Homo sapiens
aactggtcttggtagcggaggcacccgaatgctgcccgggtgagggaggttatattcaaaagaaaaaggaactgtg

SEQ ID NO: 348169 - DNA, 79 bp, Homo sapiens
cagccgatccagcctgcggagcctgtggggcagctttaatgaagcaccagttgagattcccagtccttctgaaacccca

SEQ ID NO: 348170 - DNA, 74 bp, Homo sapiens
cgcaaacatgctccgccagatcatcggtcaggccaagaagcatccgagctgtactaatggtcacttgatgtgcg

SEQ ID NO: 348171 - DNA, 75 bp, Homo sapiens
ccggaggcgggaggacgggctgccgcaggacacattcagctaacgtattttagcaggtggagtgaggttgaagat

SEQ ID NO: 348172 - DNA, 108 bp, Homo sapiens
gagcagcagctgggcctggagatccagaagctgactgcacagatccagctggttatattctgggcactaaatgaaggcgtttctaggcaatttgattcgttcagagat

SEQ ID NO: 348173 - DNA, 100 bp, Homo sapiens
cccaaccagccacccacagcggcccacactgcaaacttcctcctcaacgccagcgggagcacatcgcaaaagtactttgactcaggagactacaacatgg

SEQ ID NO: 348174 - DNA, 83 bp, Homo sapiens
ccaggtccctgctgaatcacacgccgccatccgggaggcccagggaaggatgatcggctgaatgtaacagaggaactaacgtc

SEQ ID NO: 348175 - DNA, 98 bp, Homo sapiens
tcagaccaacggccccctgtgacccggtctgtggacactgtcaatgggaggaggtcatgacgccagtcagatcacactagccttgggcacagctgcct

SEQ ID NO: 348176 - DNA, 50 bp, Homo sapiens
cttgtccaagacgtactggtggcgagagataatcattcaggtcttcgtga

SEQ ID NO: 348177 - DNA, 98 bp, Homo sapiens
gtgaccagctacctcctgatgttcagtgatagtggctggaactggaaacaatatcgccaagaggacagcatctggtactatactggcaattgctggag

SEQ ID NO: 348178 - DNA, 75 bp, Homo sapiens
cttagtctagggactgaggagtcgccgccgccccgagtcccggatcttaagattgaaagtgatgttcaagaacca

SEQ ID NO: 348179 - DNA, 50 bp, Homo sapiens
ggtgagaccctcacttcatccgggttgacatgatgaacaatcggtttcgg

SEQ ID NO: 348180 - DNA, 75 bp, Homo sapiens
gtggcccgagggaggcagatggacgccgtggaggaccggctggacaggaacctgtggcccttcgtatccgacccc

SEQ ID NO: 348181 - DNA, 90 bp, Homo sapiens
tggacaaccagaaccacaaaacaaggttccggctgaggaccttacattgacattcaggaaaatgcagagcaatccagagcggccatcaac

SEQ ID NO: 348182 - DNA, 82 bp, Homo sapiens
gcatgagcgagctctaccctctgcagatctcccccgtgtcttcctatgcaggtcagttctacagcaacggagggcattctgg

SEQ ID NO: 348183 - DNA, 105 bp, Homo sapiens
cagctgcagaaaatgacagatggccgtggattcagggcagcagaagaagcctttgtaaatgacattgacgagtcgtccccaggcactgagtgggaacgggtggcc

SEQ ID NO: 348184 - DNA, 120 bp, Homo sapiens
cagacatggacccctcgcgagccatccagaacgagatcagctccctcaaaggtcgccgccctggagaggcaggtgtttgacttcctgggctaccagtgggcgcccatcctggccaacttt

SEQ ID NO: 348185 - DNA, 80 bp, Homo sapiens
tgtacatggtgaatggaccaccacattttacagaaagcacagtgtttccaagtgtttcctgaggttataggcgggtgttt

SEQ ID NO: 348186 - DNA, 82 bp, Homo sapiens
cctgattgtaggtggtgtccagctccagactgtgggttatacattggctcttcaaagacgttcacctcatcagagaaatccc

SEQ ID NO: 348187 - DNA, 100 bp, Homo sapiens
cttaccttaacatgttcttgaagtaccatggcgtggattaaaagtgaaacaaagagtcctcttcgtggaaaagaaaaaaatacgctccctttaaacggtg

SEQ ID NO: 348188 - DNA, 100 bp, Homo sapiens
tgtcaggctacatcagcaaagggatgtcagtattgaatatggtggtgaggcgtgaccctggcaacactgaacctgtgaaagccaaggaagagctcatatt

SEQ ID NO: 348189 - DNA, 100 bp, Homo sapiens
cgagaaaatgaccgcaatctctgccagcaccttgggaagagaaagaaaatgccgaaggcactcagacaggttatgatgtgattgctcaagcccaatctgg

SEQ ID NO: 348190 - DNA, 98 bp, Homo sapiens
acaaaacgccaggcggatctcagaaggccagttcaaaggttcccgaaggaaaagtagtcgttctcaatttccgattcatagacctcgagagtgacaac

SEQ ID NO: 348191 - DNA, 87 bp, Homo sapiens
cttccggtgggctaggtactgagcgcgcgagctgctcctgctaaggccaagccggctgaagctcctgctgctgcagccccaaaagca

SEQ ID NO: 348192 - DNA, 75 bp, Homo sapiens
gacgtcatcttcttctaaaagggccgtgactcaaggaatactcccccagttgcaagaggcgcaggaccgtggaag

SEQ ID NO: 348193 - DNA, 75 bp, Homo sapiens
gctcaacttcctgatagatgtacactgaaaactggacattataacattaattctttatagctccaagctctacag

SEQ ID NO: 348194 - DNA, 100 bp, Homo sapiens
taggattagatgatccaagtcaccaagaaattactgtctcaagtgatacgcgagtaaccagctcataaatcacatcgaacagtttttggatactaatgaa

SEQ ID NO: 348195 - DNA, 98 bp, Homo sapiens
taatagataacactaatatacaagcttgggaaatgaagccatatgtggaagtggtggtgtaaattggtccaatgtaacttgccaggcaactcagaaaa

SEQ ID NO: 348196 - DNA, 99 bp, Homo sapiens
gatgaagtgcagaggtttttttctggttgcaatgaggtgtcgctgcagcagcatgcacttcttggtagcagaatggaatgaaccatccatcaacttcta

SEQ ID NO: 348197 - DNA, 100 bp, Homo sapiens
taccatgggacctggcaaagtacttcagaacttttattccttccagaagcaggtatcctggatacagccatcgttgatcgggggaggaatgtggtgtctg

SEQ ID NO: 348198 - DNA, 83 bp, Homo sapiens
ggacgcggcgccatcgcagtcaggtgacttaagagattaaaattaatttggttgctgttggttctgaacaaataatgagttct

SEQ ID NO: 348199 - DNA, 51 bp, Homo sapiens
acggcaggaggaagagagagagaggatttaatccagagactgacttcacta

SEQ ID NO: 348200 - DNA, 82 bp, Homo sapiens
ggaaacgtttagcatcagtgactcacaaatcagcaacacagaatttctgcaagtaattgacaagatgaaccttccaatagca

SEQ ID NO: 348201 - DNA, 75 bp, Homo sapiens
gcaaaggctgctctgaagcgcacgacctccgactactttctccttcaaggtataaagatggctgtgaccacatcg

SEQ ID NO: 348202 - DNA, 82 bp, Homo sapiens
gttactgtaaatgggaaggacaggcagagctaaacaagatacttgcactggtttctcagcagaagaagaagaagaagaggag

SEQ ID NO: 348203 - DNA, 88 bp, Homo sapiens
gataaaacatttagaacgatgtgaacatcgaatcatggaatcccttgcatggctctcataaatacctgggcacaggacttcaaagcaa

SEQ ID NO: 348204 - DNA, 82 bp, Homo sapiens
ccgggcagtccctggagcgggccaggaaacatttactagggacaacttttgagtgtcagaccctgtggacacaaagaaaaag

SEQ ID NO: 348205 - DNA, 100 bp, Homo sapiens
cccgccacgccgcccagcccggccccgcccgcgccggaagagccacgccggtgcagcggaactgctgcctgacgctctgcaacttcagcatccccgagga

SEQ ID NO: 348206 - DNA, 87 bp, Homo sapiens
agagaggtacctctccttttccctctccctttccctaaggctggcctgccactcctcctgctatgatgcctgggcagatcccggacc

SEQ ID NO: 348207 - DNA, 100 bp, Homo sapiens
aagagcggcccggtcgcgggcgccgccaccgccgccgctgccagcctacaacacagcagtcccctcaggatgagcaggaaaagctcttggatgaagccat

SEQ ID NO: 348208 - DNA, 83 bp, Homo sapiens
cccggctggctgactacttcatcgtggtaggctatgaccacgagaagccagtgtgcaaagatccaccttacaaagtagaagaa

SEQ ID NO: 348209 - DNA, 75 bp, Homo sapiens
accccagaggatcctgcagtgcagatcatggaggacacccaggctattgactgggatgttgaagaagaggaggag

SEQ ID NO: 348210 - DNA, 83 bp, Homo sapiens
attgggtcagatgaacatcaagatatagatgtagcaatacttactgcactgctaaaagcactgaacctaccagatgtatttgg

SEQ ID NO: 348211 - DNA, 98 bp, Homo sapiens
tcggcccaaggccagttctccgcagatcctttcccggagttcagttatgggtgtgagaggtttgcaaggatttgtgggaagtacctgcccacatatat

SEQ ID NO: 348212 - DNA, 98 bp, Homo sapiens
gggcgcgcagcgcggggagctgccaggcaccatggctgaggaaacagctccagcagttcttgagcggcaccagggggccctgtactccctctttcctg

SEQ ID NO: 348213 - DNA, 83 bp, Homo sapiens
ctcaaattcctcacaggctttgaaaccaagaaacctgcccctggccatcatcatctccctgcccatcgtgacgctggtgtacg

SEQ ID NO: 348214 - DNA, 89 bp, Homo sapiens
tatacactcttagtgctgtccagatggaggagatgtataagaaagctcatgctgctatacgagagaatccagtctatgaaaagaagccc

SEQ ID NO: 348215 - DNA, 96 bp, Homo sapiens
aacaagattactatcactaatgacaagggtacaggtttgcagattccgccagcagcacagcaagctctacagatgagtggctctttggcatttggt

SEQ ID NO: 348216 - DNA, 51 bp, Homo sapiens
ggagtcagcttgctcctttctggtcctgaatctgtgcctccttcccttctt

SEQ ID NO: 348217 - DNA, 100 bp, Homo sapiens
actcggttattaaatggcctagcccagcaaatgatcagccttgcaaataatcacagattagctatacacattccagttttcctgatggtgaacaaatagg

SEQ ID NO: 348218 - DNA, 75 bp, Homo sapiens
caacagggacatggccacctgggacgaaaaggtgtggcacttgctgaaggatttcatgcaagattacaggaattt

SEQ ID NO: 348219 - DNA, 82 bp, Homo sapiens
tacgcagaaggacctggccacggtgtccctggccagtgtccttccacctgtccacaagcatggggaacatcttcgccaacct

SEQ ID NO: 348220 - DNA, 82 bp, Homo sapiens
taaaagccccgcctctgccttcggataggcactaaaacaggtgcagatcttagtgatggtacttgtgagcctggactggctt

SEQ ID NO: 348221 - DNA, 100 bp, Homo sapiens
ggaaggtggggggcggcggcactgccggcggggaccgctgggaaggcgaggacgaggacgaggacgtcaaggtttgaagatgccgcatttggattggatg

SEQ ID NO: 348222 - DNA, 75 bp, Homo sapiens
aaagacagggatatgagtgaagaaaacacagagccaccctggaaagagtgcctggtgaagaatgtgatgggatca

SEQ ID NO: 348223 - DNA, 74 bp, Homo sapiens
ccagcagacgatggggagcttgcagcccctttgccactcaggttgctccttgagggcaggacagttcttatggc

SEQ ID NO: 348224 - DNA, 99 bp, Homo sapiens
tttgggcaggacgaatagcaagcacctcattttctagaggaacatatgcagcagaaaaaagaggaggaagaagttcttaaagaagtaactgcacatttc

SEQ ID NO: 348225 - DNA, 96 bp, Homo sapiens
cggagctggtgttcactctgggtgactgtgacgtcatccaggccctggagatgtacaaggatgattggaacaaagtgtcggaacatgttggaagtc

SEQ ID NO: 348226 - DNA, 50 bp, Homo sapiens
agaagccgcaaccagagccgccgccacgaaatgcactcggtgatggaaag

SEQ ID NO: 348227 - DNA, 78 bp, Homo sapiens
tttgatcattttagtgctggagaatctggtctccaattgagaaacatggcactgtttttcctgcactctacccaccta

SEQ ID NO: 348228 - DNA, 100 bp, Homo sapiens
tgcgagggcgctctacgtacttgtggtctacggacttcctcgttctgcccatcttcctaacaaggctatggctgataacagcagtgatgagtgtgaagag

SEQ ID NO: 348229 - DNA, 100 bp, Homo sapiens
catgtatggagaatggctggtctcctactcccagatgcatccgtgtcagtgtcatggagaaactccagctgggcccagagattctgcagcgggaaaatcc

SEQ ID NO: 348230 - DNA, 100 bp, Homo sapiens
gaaggatctctggaatgatgggtgttcgaaatccgcaccactgatgacctcactgaggcctggctccaagaaaagttgtctttctttcgttgatctctgg

SEQ ID NO: 348231 - DNA, 83 bp, Homo sapiens
ggagcgaagagctgcttctgtatcttaaggccagaagcggactcctagaagaggggagcagcaaggatggaatgacagccgtg

SEQ ID NO: 348232 - DNA, 100 bp, Homo sapiens
cctggaatatgaagagacatgcgatggtagatcaacccccagcggccctccaggcactgaagcgtaagaagaggtatgagaagcagctggcgcagatcga

SEQ ID NO: 348233 - DNA, 83 bp, Homo sapiens
cacgtcatccgcggctacgtgggcaaccgggcggccacgttcccgctgcagctgaataccactagaaacatacctgtaaccag

SEQ ID NO: 348234 - DNA, 90 bp, Homo sapiens
caacatcctcctggccaccgactcctacaaggcaatggtggcttgctatccgggaaatggaacaggttatgttcgccacgtggacaaccc

SEQ ID NO: 348235 - DNA, 82 bp, Homo sapiens
tcagcgcttcaatatgagaagttcttgaatagctctcggagcagattcagagggccctgcagctggaggaggagaggaagcg

SEQ ID NO: 348236 - DNA, 75 bp, Homo sapiens
gtttttttaatgtggttggaacaactgaggttgaaatcacaaagattagacacctttttagataggtgttcttca

SEQ ID NO: 348237 - DNA, 83 bp, Homo sapiens
gctgaaaaagaaatgtactccttgtgtcttttagcaacattaatggaaaatggtgtgaatggaacattaacttcaaatgtagc

SEQ ID NO: 348238 - DNA, 82 bp, Homo sapiens
ggggaaccaaggagacgctcctggcactgcaggagcccagcagccggggccgccctattacaccgacccaggaggaccgggg

SEQ ID NO: 348239 - DNA, 100 bp, Homo sapiens
gaacagtgggccacaggggccccgaagaactcccacaatgccacaggaggaggcagcaggagtacaagcgcaagctagccagagtttccctggtgcgcaa

SEQ ID NO: 348240 - DNA, 95 bp, Homo sapiens
gtcgagtatctggtgaagtggaaaggatggcccccaaagtttggtgcacctcgatttggaggaagtagggcagggcccttatctggaaagaagtt

SEQ ID NO: 348241 - DNA, 75 bp, Homo sapiens
ggatatgtagcgaggaggaacgcgctaaggcaaagcacctggtgtcttctgtttatgaagcaagatgtacaggag

SEQ ID NO: 348242 - DNA, 101 bp, Homo sapiens
gcgtggggcagatctgcgtggagcagaagcagcagctggaagccgggcctgaaaaggtggagtattgctcctggaaaatccaaaaggtgacaataggttgg

SEQ ID NO: 348243 - DNA, 75 bp, Homo sapiens
aaacatgcagattatatcgcatcctatggctcaaagaaagatgattatgcagcctgcttctgcaaagtggtacga

SEQ ID NO: 348244 - DNA, 101 bp, Homo sapiens
gcaggcggacgaggcggaagaccgcgcgcagggcctgcagcgggagctggacggcgagcgcgagcggcgcgagaaagatcacagaagaactgcagcttcct

SEQ ID NO: 348245 - DNA, 96 bp, Homo sapiens
aagtcttctaaccattccaaaatctctttcaggatgcctttgtggaactgtacggccccagcatgcggcctctgtttgatttctcctggctgtctc

SEQ ID NO: 348246 - DNA, 90 bp, Homo sapiens
tggaattgctgatagacatgggggcctcaaacgtggagatcaactcctctctgttaatggagtgatgagtgatgtgtctgcaggaggagc

SEQ ID NO: 348247 - DNA, 98 bp, Homo sapiens
caggcctccccagaaaaagatgctgccatgcttcctgtacagcctgcagaacatgctgtgttaaatgagaataatgtgcccctccccaaagagtctct

SEQ ID NO: 348248 - DNA, 75 bp, Homo sapiens
gccgtggcttccccctccctacagagagatgctgtcccgtggggcgacatggagtccaatgggaaatacatcacc

SEQ ID NO: 348249 - DNA, 114 bp, Homo sapiens
gaagagttctatgcactctgtgaccagctggagctgtgcctggcaatttcttgcaaccaccaccgaggccccgaaaagcactggtcgtcagggagctcctccccttggccccca

SEQ ID NO: 348250 - DNA, 137 bp, Homo sapiens
ctacagaacagcacgtaccagaggtggaagtccaagtcaaacgcagaaggactgcctcactgagcaaccaagagtgaatctggattgggaaagtcgacattaatcaactcattattcctcacagatttgtattctcc

SEQ ID NO: 348251 - DNA, 100 bp, Homo sapiens
ccatgtgaccctgcccttctaccccaagagcccacagtgctaatgtctcttcatgaaatgttcccagcagtacatgcagcagaaatggccgtccagcaaa

SEQ ID NO: 348252 - DNA, 50 bp, Homo sapiens
cagtgctcaaactcaccgaccagtattgaatttgaccgggattgtgacta

SEQ ID NO: 348253 - DNA, 100 bp, Homo sapiens
cagacatctgattgctgacctgggtgagcccctccagactccgaataggagatcaagagtttgattcattgcctgctttactggaattctacaaaataca

SEQ ID NO: 348254 - DNA, 98 bp, Homo sapiens
agcggtgacaggagcagcggccgggagcccttagggaggcaggtttggcaaacatcgaaaagatgacaagattgagaaaacgggtaaaataaaaatac

SEQ ID NO: 348255 - DNA, 73 bp, Homo sapiens
agagcttactggaatccagcagtttcggagcaacatcccctgtcacctggttgatatctcttgcggattaccc

SEQ ID NO: 348256 - DNA, 75 bp, Homo sapiens
gctattgccttattttttctcatggatgttcttcttcgagtatttgtagaaggcatccctaaagggtttgaagcc

SEQ ID NO: 348257 - DNA, 80 bp, Homo sapiens
ccactgtagccataacaaccagcccaaccacatctgcaacaaccagcagcatcagaggttgcaataaattgacagaccag

SEQ ID NO: 348258 - DNA, 95 bp, Homo sapiens
cattgaagaatgttcttttgttagtgacaaagatgcaagcctggcattttttgatgattgtgtagataaactgcagaaccttggcctgaaaatgc

SEQ ID NO: 348259 - DNA, 90 bp, Homo sapiens
aacaaaagaggacagcacttccggtcacgccatcgttgctgccttcttcgtcaaggcctgccgaggaggaactgaagacgaagaacatgg

SEQ ID NO: 348260 - DNA, 100 bp, Homo sapiens
tcgcctatgccaactccacgcttcgagaacaggtctcactgaaggggccaacaggacaaaactctacgacatgatagctgatctgggagatgatgagctg

SEQ ID NO: 348261 - DNA, 74 bp, Homo sapiens
ggccgtgtttggggagagcggcgggggaggcggcagcggagaggtctctaattaacagaagatggcaaagccca

SEQ ID NO: 348262 - DNA, 100 bp, Homo sapiens
ccgcacacagccttcctcggagaacaagactgcccacctccacaagggcttcctggccctctaccaaaccgtgggttacaataccaggtgggccaaaatt

SEQ ID NO: 348263 - DNA, 82 bp, Homo sapiens
tgaagtgcttcctggagctaagttttctggatatgccgcagaaggatccgtgccagaagcaagcctgtgagatacagaaatg

SEQ ID NO: 348264 - DNA, 132 bp, Homo sapiens
ttgaaacctcgtcattaattggacacagtgccagagtgtatgcactttactacaaagatggacttctctgtacaggcttcatagagcccagtgtgcaattaaacagactcaggtaactgttcagaaaattgg

SEQ ID NO: 348265 - DNA, 74 bp, Homo sapiens
atcgctactaccccgcagttcccggacatgatcctctccgcctctcgagttttcagcattgcaaataacaatct

SEQ ID NO: 348266 - DNA, 88 bp, Homo sapiens
cgagctgagtggttgtgtggtcgcgtctcggaaaccggtagcgcttgcagcatgtgaaaatgcctcgtgtaaaagcagctcaagctgg

SEQ ID NO: 348267 - DNA, 75 bp, Homo sapiens
cggcgctgccgctcccgggcggccgcgggcgggccaagactaaggggctgcagagcggggtggacattggcgtca

SEQ ID NO: 348268 - DNA, 49 bp, Homo sapiens
gcgtttgagatctactgtgaagtggagactgctgcacggactctggaac

SEQ ID NO: 348269 - DNA, 100 bp, Homo sapiens
ggcaaagtggcagacatggctcttcattatgcaaataaatataatatcatgttagtgaggtgtgatccctcacatccacaaatctctgattggaaagaag

SEQ ID NO: 348270 - DNA, 98 bp, Homo sapiens
aagacaagacttgaagggtttggaagagacagtggtatgtgcaagaggtgaaataattggcgtgaaagttctaggcatattggctatgattgacgaag

SEQ ID NO: 348271 - DNA, 83 bp, Homo sapiens
aagttcctgatgatgaacagtttgtcccagattttcagtctgataaccaaggcggtcaccttctccttactatagtcgtggag

SEQ ID NO: 348272 - DNA, 50 bp, Homo sapiens
aattcaccctgttcgtctatgttcaaaagaatgctgaaccgggagctgac

SEQ ID NO: 348273 - DNA, 74 bp, Homo sapiens
cagagtcttttacgaatgcttttcaagcgaaatcctgcaaacagattaggaatggaagttggatacactttgtg

SEQ ID NO: 348274 - DNA, 90 bp, Homo sapiens
attcctccccagcatgtcagcatgaccaagcgcctctactacctctggatgtagcgtcacggggttcggacgtcagatgatcgagaaaac

SEQ ID NO: 348275 - DNA, 101 bp, Homo sapiens
actgagcctgttggaggaactggcccggaaacaggaggacgacgtgttcctcatgatccggcgccacaagaccaccatcttcacggacgccaaggagtcca

SEQ ID NO: 348276 - DNA, 75 bp, Homo sapiens
ctcttcttcgggatcactggattgctgacggcagccctctcagaacatccagtcatggataaaaatgagctggtt

SEQ ID NO: 348277 - DNA, 101 bp, Homo sapiens
gctttttatcactgcatggagaaatctggtcaagacatcagagacttttatgaaatgttagccgaaagaagtgccaggtggagctcaacaggaaagtccta

SEQ ID NO: 348278 - DNA, 82 bp, Homo sapiens
agttggagaagtatccaatagggatattgtagaaactgtctttaacctgcctcattatctggtttggagacatgaactttcg

SEQ ID NO: 348279 - DNA, 100 bp, Homo sapiens
aaaaaatacatatctggttttgagagtaatgccttctagctttttcctgctgttgcggtttttcttgagaattgatggggtgcttatcagaatgaatgac

SEQ ID NO: 348280 - DNA, 98 bp, Homo sapiens
ctctttctccaagtttgatggctgatcttgaaggtttacacttgtcaacttcctcttcagtcatcagtgcacgtgtggttctcaaatataggcattct

SEQ ID NO: 348281 - DNA, 89 bp, Homo sapiens
ggagccagtcctgagttacagaaacagattcgacaactggagagccacctgagccttggaagaaagcgagagtcaagccctacccgtcg

SEQ ID NO: 348282 - DNA, 75 bp, Homo sapiens
tgggacgccagtcaccagcaggagcagccaaccagcagcagccatcatggagctgcaagctttcttcctggtggc

SEQ ID NO: 348283 - DNA, 50 bp, Homo sapiens
tccgggtggagttcagtgaaagggcagatgatgattattccccaccttct

SEQ ID NO: 348284 - DNA, 100 bp, Homo sapiens
gtcgtcaagccacaggttttccagtcgcactgcggggccttgccttagagatgtctctgaacaatttggaccctgacaagaagggtcaaggagaaatcgg

SEQ ID NO: 348285 - DNA, 50 bp, Homo sapiens
gaacgcgctaaggcaaagcacctgacctcccagtgccaagtgtataagcg

SEQ ID NO: 348286 - DNA, 83 bp, Homo sapiens
aaggagctaaagcagcgtgcgttcagccctggggcttcagggatgacttcttagggggcaggggaggtagtcgcccaggcgac

SEQ ID NO: 348287 - DNA, 82 bp, Homo sapiens
cagggctgcagcccaggagcctcaaggcggcccggcgggcgactggacggccggacagggagtaccctgacttctaccggaa

SEQ ID NO: 348288 - DNA, 100 bp, Homo sapiens
taaaagtgcgggcagaacaactggtctggtttccactggagtaccactctgagctcttcaaggtggacccccaaaagtacaagggcatatttaacggatt

SEQ ID NO: 348289 - DNA, 75 bp, Homo sapiens
attttcctgttccattttgtgcctcctggacacctcaggcatcgaaagcagaaagtgtctgtgatggacaagctg

SEQ ID NO: 348290 - DNA, 75 bp, Homo sapiens
aagtttgcagatcgggagcgcaaggtcgccctcaaggccatgatcaaaacgtcacgagaagagaatgccttctag

SEQ ID NO: 348291 - DNA, 82 bp, Homo sapiens
caagcggaagctgcccttcaccgcgggcgccaatggggagcagaaggactcggacacagattctgaggttgggaccaagaag

SEQ ID NO: 348292 - DNA, 82 bp, Homo sapiens
cagatggcagccagtcagtggtggagcagctaccaagggggtgccagctggaaacagtgacacagaggggggccagcctggt

SEQ ID NO: 348293 - DNA, 102 bp, Homo sapiens
cctgagttgggagccagtggccctgagcaatagcacgaggcctgttgtctaccaagtgcagtttaaatactgttaggcaattttcttcagtggtatggcatt

SEQ ID NO: 348294 - DNA, 83 bp, Homo sapiens
gacctcatagctgttacaccaagctgaaggtgatgtggccgccctcaaccgacgcatccagctcgttgaggaggagttggaca

SEQ ID NO: 348295 - DNA, 51 bp, Homo sapiens
ccacctcatcgtctgggaccagcaggttccgagtctgaggaagacataacc

SEQ ID NO: 348296 - DNA, 83 bp, Homo sapiens
gggctccaccccgtcgcctcgacagagagcgcctgctcgctgtgcccccgggttatgacgacccccaataaaggaaacaaggc

SEQ ID NO: 348297 - DNA, 100 bp, Homo sapiens
gcaaaacggaaaagcgtgtgtaggggagcggaaaaggaagtcaccaccgtggcctgcgacgacagatttgaccagttttgggccatcaatcggaaactca

SEQ ID NO: 348298 - DNA, 100 bp, Homo sapiens
ctcagagtttgaaggttgtgaccaaaagaggctccggtacccactgatggtaatgctggcctgctggctgaaccccagattgccatgttctgtggcagac

SEQ ID NO: 348299 - DNA, 100 bp, Homo sapiens
accagaatgaaggagaaccagaaacatatctattatatcacaggtggccaagactaagcagcagattgaggagcagcgggtgcaggtgcaggtggtggag

SEQ ID NO: 348300 - DNA, 100 bp, Homo sapiens
aggattccaagtaactcttatttgggcaaggggacgcgagataaggtcctgatcagaatcatggtctcccgcagtgaagtggacatgttgaaaattaggt

SEQ ID NO: 348301 - DNA, 50 bp, Homo sapiens
cggcgagcagaactacggcgagcggaattcctagaggacctgtgcaacaa

SEQ ID NO: 348302 - DNA, 75 bp, Homo sapiens
gtcggcggagcttcgccaaggctggcgcagtcgtcttcccttggaccagacgcttcctcgccagggtcctggcca

SEQ ID NO: 348303 - DNA, 100 bp, Homo sapiens
gcgaagccttgaaaaagctgccctgagacggtgtcccgccgaaaggtggatggaagtttgcttagttgaagaattgccaccaaccactgaattggaagaa

SEQ ID NO: 348304 - DNA, 74 bp, Homo sapiens
gactgtgaggatggagtggctgcaaacaaaaaggttaagaatagacccaccagcatttcgtgggatggtcttga

SEQ ID NO: 348305 - DNA, 51 bp, Homo sapiens
accaggagtttctagcactgaaggtgcagacatggccaagtccaagaacca

SEQ ID NO: 348306 - DNA, 83 bp, Homo sapiens
ccagcatgaagaccccggcggacacagcaggttacgggcaggacttgagtggcttcggacagggcttctcagaccccagccag

SEQ ID NO: 348307 - DNA, 90 bp, Homo sapiens
catagatgggtgatcagagctggctctggaaccaggctgctccaggagtaagttctttattggtgaaaacatgaatccagatggcatggt

SEQ ID NO: 348308 - DNA, 74 bp, Homo sapiens
cttgaacatcctttgactggttagccagatatctccggagcatttggataatgtgacagttggaatgcagtgat

SEQ ID NO: 348309 - DNA, 82 bp, Homo sapiens
gtaaagctgctggacaacaccatggaaatatttgacattgaggttaaccccaaagattggctttccttggagtgaaatcagg

SEQ ID NO: 348310 - DNA, 90 bp, Homo sapiens
gaaactaggtcgatggtcggcggcgcccggatgggcagctgaggtgaaaacttttggcccgtttggaagcggcagccaggacaacctgac

SEQ ID NO: 348311 - DNA, 100 bp, Homo sapiens
gaaagtttgaggaactactacgaacaatggggaaagcttacagactgtgtgggtcaactgctatgatgtgtttggagcccagtcaccctttggtggctac

SEQ ID NO: 348312 - DNA, 74 bp, Homo sapiens
gtgcagatcctttggattgaggctgctgtgcacaggaatatggatcctgaaacctgcaagtgcccactctccga

SEQ ID NO: 348313 - DNA, 82 bp, Homo sapiens
gaaactcagttttcaaatatggggatggaagatgttcccctcgccaccagtaaaaagctaattgccattgccccaaatggag

SEQ ID NO: 348314 - DNA, 74 bp, Homo sapiens
agaacccatcgggcagctacacatcttgaaagagaagctcttcctgtgagctctcttggcctcctagtttctac

SEQ ID NO: 348315 - DNA, 98 bp, Homo sapiens
tgatggcatcttcaaagctgaactgaatgagtttcttactcgggagctggctgaagatggctactctggagttgagcccaagatttctctacatttgg

SEQ ID NO: 348316 - DNA, 82 bp, Homo sapiens
gcctttccttccccctcggaaaatggttcccactgccgggcgagacctcctgccccccgaggtctgcagtctcctgaaccca

SEQ ID NO: 348317 - DNA, 100 bp, Homo sapiens
cgccctggtcttcgggctgtcgctcgtctacttcctcagcagcaccttcaagcagaaagccttgagccgggccatgcttctcacatcttacctgcctcct

SEQ ID NO: 348318 - DNA, 100 bp, Homo sapiens
ttgcggcggcgggaacgattgggctgagcagaggacgacatgttgcttttcgtggagctgagatctgtatctgtggacctgaatgttgatccctcgcttc

SEQ ID NO: 348319 - DNA, 95 bp, Homo sapiens
caatgcagggctgctgggccgaatgctggatgagaaaacccctccctcaccctcagatgtgaacgagtgtgaaacactacagggtgtatgtggag

SEQ ID NO: 348320 - DNA, 51 bp, Homo sapiens
agccagtcaccaatgccacaggaaagagcggcccttctcagcattcctggc

SEQ ID NO: 348321 - DNA, 90 bp, Homo sapiens
tggggaaaatcagcaagagctttctggaagaaaggaaatgttaggatcactttattctgctctgctgtgtgcgtgcaccagctgcctcca

SEQ ID NO: 348322 - DNA, 75 bp, Homo sapiens
tttatgtgcctgtaaaagaatacccagatgctatagaaagcgcaattggtggtaacgcttatcaacacagcaaag

SEQ ID NO: 348323 - DNA, 75 bp, Homo sapiens
gcccctttgttcaatgagaaggccacattattactggaatccagtggatgtttccaaggattgtcttcagtcatg

SEQ ID NO: 348324 - DNA, 99 bp, Homo sapiens
gttgcagagcctgcggggcaagatctccttagattgtaagcaaaagaaatcaaggtcaagatctggaagcaagaagaaaatgctaacattacctcatgg

SEQ ID NO: 348325 - DNA, 75 bp, Homo sapiens
ttccttgaggaggtttgaaaaagtgagaagccatttacttgtgaaatctgtggcaaatctttcacagcaaagagt

SEQ ID NO: 348326 - DNA, 100 bp, Homo sapiens
cagcgggagctggacggcgagcgcgagcggcgcgagaaaccccatggctgggggttatggagtgatgggtgacgatggttctattgattatactgttcac

SEQ ID NO: 348327 - DNA, 75 bp, Homo sapiens
ccaataaaggagcaagatggctagggctgagatctgtatctgtggacctgaatgttgatccctcgcttcagattg

SEQ ID NO: 348328 - DNA, 85 bp, Homo sapiens
aagtagctttagcgatcgggagacagccgggcgctgcaagaatccagcaactatcacaagaatactccttagccacttcaattgg

SEQ ID NO: 348329 - DNA, 98 bp, Homo sapiens
tctgatgtcaatcttgagggctaggcaaccacgagacagacaacatgaaccagatctacggtttcgagggtgaggtgaaggccaagtacacagcccag

SEQ ID NO: 348330 - DNA, 83 bp, Homo sapiens
cctggtcatgagcttcgttaacatggatgcctgtgaggagccaccaacatttgaagctatggagctcattggtaaaccaaaac

SEQ ID NO: 348331 - DNA, 100 bp, Homo sapiens
acagaaagagtcaacagcagtggcaacagagtgatcagcagctggactgtgccttggacctaatgaggcgcctgcctccccagcaaatcgagaaaaacct

SEQ ID NO: 348332 - DNA, 46 bp, Homo sapiens
gtctctgctcttcagtacaatcctcttgctgatgaccgtatggcac

SEQ ID NO: 348333 - DNA, 100 bp, Homo sapiens
gatcttccggctcaacaccattcccctgtttgtgcagaggagaaggcagagcccccccaggctatgaatgccctgatgcggttgaaccagctgaagccag

SEQ ID NO: 348334 - DNA, 51 bp, Homo sapiens
actccatcactattcggcaggagatagattccttcctcagagatcacctat

SEQ ID NO: 348335 - DNA, 100 bp, Homo sapiens
caaaaagagggcaaaactccaacaggagaacagcgaggagacggatgagaacgaggcggaggaggggtggcaaaatatgcctgacggatcatttcaaacc

SEQ ID NO: 348336 - DNA, 49 bp, Homo sapiens
cgaaggtgctaccatcgtgagagtaaggccttgtgaaaaagggtaaaga

SEQ ID NO: 348337 - DNA, 48 bp, Homo sapiens
ccggaagctgagtttttatccgtgtccctggccagtgtccttccacct

SEQ ID NO: 348338 - DNA, 50 bp, Homo sapiens
ctcggattctcgtagctgtgccggatggggtttcactcttgttgcccagg

SEQ ID NO: 348339 - DNA, 83 bp, Homo sapiens
caaaccttgtgtctcaatttggctacaaaagggggatatgagactttctactcggaatatcctgagtgttgcgtggatgtaaa

SEQ ID NO: 348340 - DNA, 100 bp, Homo sapiens
caaagagaaaggaagcaggcccgttggaagtggttgtgccatcatctctcagcaaggtgacatatttgtttttgacctggagacctcagctgtcgctccc

SEQ ID NO: 348341 - DNA, 100 bp, Homo sapiens
cagaactaaagaaagctttaaaagaaaaagaaaacagattattattgcaacaaaggtacatcgagtacatgtgtgacatggtggcggaggagcccatcac

SEQ ID NO: 348342 - DNA, 82 bp, Homo sapiens
cagcggcagccgagcccgcccgcgcgccggtgagaagccctaccactgcaactgggacggctgcggctggaagtttgcgcgc

SEQ ID NO: 348343 - DNA, 98 bp, Homo sapiens
aagagatctcagcgctcaccgacttctctggtcgtgtgggcaactagtaacagaatcggttgtgccattaatttgtgtcataacatgaacatctgggg

SEQ ID NO: 348344 - DNA, 100 bp, Homo sapiens
ggaatggcggcttccatctctgaggcgagcgacgctatggatcccacaggacatggatttgattgacatactttggaggcaagatatagatcttggagta

SEQ ID NO: 348345 - DNA, 100 bp, Homo sapiens
ttcaagatgatgaagttggtgatggcactacctctgttaccgttttagcagcagaattattaaggattcatgttacatgtaaagctgtcctcatttgtga

SEQ ID NO: 348346 - DNA, 100 bp, Homo sapiens
ggcactgtgacggtgcccacctcgtggggtgtgtgagggccgagtgaaatcgtgcatttgcggatgtacagttacccagcacgtgtacctcctcctcctc

SEQ ID NO: 348347 - DNA, 50 bp, Homo sapiens
cgacgatctccatatttcattgcaagctgtgaaagttgtgtagatttact

SEQ ID NO: 348348 - DNA, 90 bp, Homo sapiens
ggcttactgtggatctggattctaaggcaacacttccttgaagaaacaagcttacaggctgtggaaaatctctgttctcacaaagtctcc

SEQ ID NO: 348349 - DNA, 100 bp, Homo sapiens
atagctggattcaacttccacccatgcaggaaaggttggcgtgcagtggtgtgatctcagctcattgcaacctctgcctcccggactcaagcaatcctcc

SEQ ID NO: 348350 - DNA, 101 bp, Homo sapiens
cctttgaattaattatggctgtttctagagccatctgggctttccgggaacctggaccagactctggcccagtaggatgtccccgtgtcctccccagcaga

SEQ ID NO: 348351 - DNA, 100 bp, Homo sapiens
cgtgaccgagaccgtgaccgagagcgtgaccgagagcgcgaatatcgtcatcgttagaagcagaaacagtcctgctccagctgtaacagcagcatctgtg

SEQ ID NO: 348352 - DNA, 83 bp, Homo sapiens
cgcccgtccacacccgccgccaggtcctcgaggccacacgggttaatcgaagaaagagcgcactggctttgcgctgggaagca

SEQ ID NO: 348353 - DNA, 48 bp, Homo sapiens
catcaaccacctcaaagacactggttctgaagaagcatctgtagggaa

SEQ ID NO: 348354 - DNA, 100 bp, Homo sapiens
gcgcgagtgaggaaaggaggtactgtagaatggctgcagtctgtccaggccaccatgatcctgtcgatcatcttcagcattctgtctctgttcctgttct

SEQ ID NO: 348355 - DNA, 75 bp, Homo sapiens
ctgaaatttcatctggagaaaggtccacagatttgaggcttaagcaacttcttccggggaagagtgccagtgcag

SEQ ID NO: 348356 - DNA, 100 bp, Homo sapiens
ctcagatcttgctggactgtggagaagacaacatctgtgtgcctgacctgcagctggaagtgtttgggcaatttcttgcaaccaccaccgaggccccgaa

SEQ ID NO: 348357 - DNA, 100 bp, Homo sapiens
tgccaatcccccctcacccaggcccctgtcaagaaggtgccggtggtgcgagtcttcggagcgaccccggcaggttttgctgatttgggaaaataaagac

SEQ ID NO: 348358 - DNA, 75 bp, Homo sapiens
caaaagaagaggaaatggatgcaagccttcccagaacaacaggaatatagtttccactgtaaacctggcctgtaa

SEQ ID NO: 348359 - DNA, 75 bp, Homo sapiens
ctccagcagtgctaaggctgacacctccaaacccagcacggtttctaagcatgaattgaggaacagaagaagcag

SEQ ID NO: 348360 - DNA, 150 bp, Homo sapiens
tgaccagggccctgcagatgtcgccaggaaagtggtgatccaggcaggaccaggctgcactgaagggacagagccctgtgaagccagaggagatggactggtctgagctatacccagagttcttcgctccactcactcaaaatcagagcc

SEQ ID NO: 348361 - DNA, 75 bp, Homo sapiens
gacggtcatcccgaaaggccggccccagtggatgaggatcgcagtacggaacctgaccgattgcaggtgtttcac

SEQ ID NO: 348362 - DNA, 75 bp, Homo sapiens
ggtgaattacatcttctttaaaggttatgatgtgattgctcaagcccaatctgggactgggaaaacggccacatt

SEQ ID NO: 348363 - DNA, 75 bp, Homo sapiens
gaaatactacagtaatctgtggagttaaagcaattggcacttctctgtttgatgaagagggagccaagattgtca

SEQ ID NO: 348364 - DNA, 107 bp, Homo sapiens
ttcaagtctgatatctgggcagttggctgcgtcatttttgaactgcttaccttaaagaggacgtttgatgctacagctctatcacatcacactctggaccttcctcc

SEQ ID NO: 348365 - DNA, 100 bp, Homo sapiens
ggaaggatcataggtggcactcatgtctcactgccccactcaggtttgatctgtggatgaaatgaatcatgattttcaagctcttgcattagaatctcgg

SEQ ID NO: 348366 - DNA, 88 bp, Homo sapiens
tccgtcgggctccgtgcggcgcagccatcagaagacctggtgccctatgacacggatctataccaacgccaaacgcacgagtattacc

SEQ ID NO: 348367 - DNA, 100 bp, Homo sapiens
tgcgccgcaacgccgagcgcaccgacatctgcctgctcaaaggtctctaattaacagaagatggcaaagcccagccacagcagctatgtccttcagcagc

SEQ ID NO: 348368 - DNA, 75 bp, Homo sapiens
aggcattttgctgtctcctcctaatacgctcaatctgaaattgaagtgtctgtctctgcaaggaatatcagaagg

SEQ ID NO: 348369 - DNA, 75 bp, Homo sapiens
cggctcaacccaccgctgccgaaatgaagtataaggttacaactgatggaaaaccaaaaatcgttgatatcattg

SEQ ID NO: 348370 - DNA, 83 bp, Homo sapiens
cgggcgagcggggctttggacgccggtggagacgcaggcgagcatggaggagcaggacttggagcgaaggttcgagctgctga

SEQ ID NO: 348371 - DNA, 100 bp, Homo sapiens
gggggcgagcatggccgctccgcgagggttcagcaccacccccttctccaacacctaacaaagagatgaagaacaaagcagttctttgcaaacctttaac

SEQ ID NO: 348372 - DNA, 89 bp, Homo sapiens
tgctggcgccgcgacctccggatgacccgggcttcggcccccaccagagactcgattatactgacctggccatgagcacggtgaagcag

SEQ ID NO: 348373 - DNA, 75 bp, Homo sapiens
tcggaacccctccttgaagctgatggtgaatgtgtgcggacacactctgaagacaactgttagttttgtggctta

SEQ ID NO: 348374 - DNA, 75 bp, Homo sapiens
ctccgctctcttcggctgccccaatccccggcagctctctcagccgagcctcttgaagccattcttacagatgat

SEQ ID NO: 348375 - DNA, 75 bp, Homo sapiens
ctgggaagatggcgaaggtctcagagctttacgatgtcacttgggaaggttgctccttgagggcaggacagttct

SEQ ID NO: 348376 - DNA, 76 bp, Homo sapiens
aagttcctgtcctatgcactcataggtgttggagcgggccggagagaagtagagtgggctgcgaggagaaggaaac

SEQ ID NO: 348377 - DNA, 75 bp, Homo sapiens
ccgccagacggccagaaagttccgccatgagctggggcacggagctgtgggtacaccagaggatcgcttcctggc

SEQ ID NO: 348378 - DNA, 80 bp, Homo sapiens
atttaaaagacagtcctcgtcagcactgactttcagctatggaatcgaaaactttagaaactgttcctttggagaggaaa

SEQ ID NO: 348379 - DNA, 100 bp, Homo sapiens
ggaggatgttaaaagttacctgtttcggaatgcttttgtgctgctcacagtcaccgctgtcattgtggagagattccccttccacttccagacagtcccc

SEQ ID NO: 348380 - DNA, 100 bp, Homo sapiens
atgaatatttgagctcattcaaagtggcccagtatgtggtacgggaagaagaaatgggggatacttatccgctttttccccttggagtcctggcagattg

SEQ ID NO: 348381 - DNA, 100 bp, Homo sapiens
agtagctgatgtgcagtttggccccatgagatttcatcaagatcaacttcagccttatgtttgatcatcggccaaggtcctggcgagaactgcctctgcg

SEQ ID NO: 348382 - DNA, 95 bp, Homo sapiens
cgcggacctccctgcgaccgtcgcggaccatgggcgacaaagggacccggattgaaagaaggtggcaagaggaagaagcagaagcagagagagga

SEQ ID NO: 348383 - DNA, 51 bp, Homo sapiens
ggagattttgaagatgcagatacccagagccctccctgccctcctcggaag

SEQ ID NO: 348384 - DNA, 48 bp, Homo sapiens
gcagctggctggcttcagtggaccatgagaaatgttttagatgaagat

SEQ ID NO: 348385 - DNA, 50 bp, Homo sapiens
cagcaacagcaagctcccgggcagcggcaacctttggcactgcatccatg

SEQ ID NO: 348386 - DNA, 99 bp, Homo sapiens
taggtgttccttctgcaacagaaataataaaagcttccagcaaagatgccatcagggaattacttttaaacgtgtaggtgttccttctacaatggattt

SEQ ID NO: 348387 - DNA, 75 bp, Homo sapiens
ctgcaggcctcctacacctacctctctctggccctgggaggagcggggacactgaggacctctctccaaattggc

SEQ ID NO: 348388 - DNA, 75 bp, Homo sapiens
ccgatttaaagctgagctgcgaggaaaatggcggcgggagagaaatctgggcccgatttctagcatttgaaagta

SEQ ID NO: 348389 - DNA, 100 bp, Homo sapiens
tccttgcacaggcagtgtctacccagctttatgaaccagatcgactccaagaactcaagtctatccttcactggagtctgatgatgatgaccctgctttg

SEQ ID NO: 348390 - DNA, 75 bp, Homo sapiens
aatgctcttcaggatagtatcttggccagggaactcaaacagcagatgcaggaaacctaacgaagcatatgaaat

SEQ ID NO: 348391 - DNA, 100 bp, Homo sapiens
tgatattaagccatcaaatgtggaacctatggaaaagtacataccgagcatcaaatattaaggcacccggagaacagacagtaccagccttgaaccttca

SEQ ID NO: 348392 - DNA, 80 bp, Homo sapiens
tgagagcattgcctggggtggatccaaatgactttagtaaatgcatgctgcaagctttcttcctggtggcagatgacatc

SEQ ID NO: 348393 - DNA, 100 bp, Homo sapiens
tttaattttagggtcctttatatagaagggagagtaggtctctggacactatgggcacacgactcctcccagctctgtttcttgtcctcctggtattggg

SEQ ID NO: 348394 - DNA, 50 bp, Homo sapiens
agatgccccagaaaaagactgtggaatttctgtggagccacacgacggag

SEQ ID NO: 348395 - DNA, 50 bp, Homo sapiens
catataccgaaatgtttttgataagggcagctgcaatgactctccgcacg

SEQ ID NO: 348396 - DNA, 82 bp, Homo sapiens
gcagggacccggtgacagcgtgagagccaagacaatgcaaactccagtgaacattcccgtgcctgtgctccggctgccccgg

SEQ ID NO: 348397 - DNA, 100 bp, Homo sapiens
ctggggagtcttgagggacccccgactccaagcgcgaaaaccccggatggtgaggagcagatatggctcgtggacagcagaaaattcagtctcagcagaa

SEQ ID NO: 348398 - DNA, 100 bp, Homo sapiens
gccaaggaaaaactggagagcttcatcaaaaatagtgatagctttgataatctgctgaacaacaaccacatcagaaagatttccagaaatgcttttgaag

SEQ ID NO: 348399 - DNA, 75 bp, Homo sapiens
ccggggctctccgggcctcccgccgcttagcctgatgctggaaggacgaagaggccgggaagttaaacttgtagc

SEQ ID NO: 348400 - DNA, 99 bp, Homo sapiens
ccgcgctttatcaagattatcgagtttcagtcattcagtcagtaccgctgtaagactgccaagaagtcagaggaggagattgactttcttcgttccaat

SEQ ID NO: 348401 - DNA, 100 bp, Homo sapiens
cttcatttctctgaacatactgccttatgggacagatcaaactacacttgctgctttgaaggatgaagttgtatctgttgaaaatgaactctcagaattg

SEQ ID NO: 348402 - DNA, 101 bp, Homo sapiens
cggggctgggcgagcgcaaagatgtccgcgcccgctgccgggaggcgagctttaatcgccttgacttacctccatatgaaacctttgaagatttacgagag

SEQ ID NO: 348403 - DNA, 75 bp, Homo sapiens
ctagacccacagctgttaaagcaacagactgctgagaaggaagaatttgaacatcaacagaaagagctggagaaa

SEQ ID NO: 348404 - DNA, 74 bp, Homo sapiens
cggagctgacggtggaggttcgcggctctaacggggctttctacaaggtgaaatgacaatggatgctctgttgg

SEQ ID NO: 348405 - DNA, 100 bp, Homo sapiens
tgcctggaggagaagcctggagaccgtggcaagctggcccgggcatcagggaactatgccaccggtggttctcttcccaaagtggaagccaaattcatca

SEQ ID NO: 348406 - DNA, 74 bp, Homo sapiens
attgataccaatggagctggagatgcatttgttggagattctctcgggcctagccgtccttggaacccgatatt

SEQ ID NO: 348407 - DNA, 74 bp, Homo sapiens
gtggactgcgacaacggctcagacgagcaaggctgtcgctgcaggccaacttcaccatccgggaagatgccaac

SEQ ID NO: 348408 - DNA, 85 bp, Homo sapiens
cagaggagatccggatgctcatccataaaactgaagatgtgaatactctggggggtcctgtggagatccttcccttcctctacct

SEQ ID NO: 348409 - DNA, 83 bp, Homo sapiens
ttttaattgactatgacaccaaaagggcttccgagtggacctgccaatcaagtcggcccgctaccgtggccagtacaacacct

SEQ ID NO: 348410 - DNA, 49 bp, Homo sapiens
ctgaggagtccccgctgcttgaaattacagaagacatccccgtgaagac

SEQ ID NO: 348411 - DNA, 100 bp, Homo sapiens
aaatggaagcccagtcctctcctgttcttatttgctttatatatcatgtgtgttcctcactcaggtgtcatggagaaactccagctgggcccagagattc

SEQ ID NO: 348412 - DNA, 143 bp, Homo sapiens
cctcagatggaaagcaggatgacagcaaagaagatctgccagtaacaagaaagagaaagcgacatgctattgaagcagtattaacttcacagaaaagtagtgaataccctataagccagaatccagaaggcctttctgctgac

SEQ ID NO: 348413 - DNA, 99 bp, Homo sapiens
gtttggggagttctgtcatgggtgctccctgctgatgacagggccttttatgcaaaagctggcaggctgacagaggcggcctcaggacggaccttctgg

SEQ ID NO: 348414 - DNA, 126 bp, Homo sapiens
agcgtggtcattgaggacaagtcgacgagagatcccgagtacgtctacagtcagccttacgacgaagggaacgtcatcgtttggaaagcgtcgcaataagacgcacacgttgtgccgccgctgtgg

SEQ ID NO: 348415 - DNA, 98 bp, Homo sapiens
tacagatcattcctggtgctaagcatggaaacatccaagtcagctgtgtggagtgttctaaccaacaaggaagagtgcactacatcctccaggaggtg

SEQ ID NO: 348416 - DNA, 98 bp, Homo sapiens
cgggcggggacgtccgccgggcacgggagggggccaagatgccgaccgattattgaccgacctattcgaggtcgtggtggtcttggaagaggtcgagg

SEQ ID NO: 348417 - DNA, 96 bp, Homo sapiens
cgagtcagcaccctcccagcaaccagaacatacatatgatagttgagaaagacacatattctgatcatgaagaaataaacacaagttaaatatgac

SEQ ID NO: 348418 - DNA, 133 bp, Homo sapiens
ggaaaacttcgaacttctacaagaatattacaagatatttatggaaaagatgcctcctgatttttcaccagtgatcattaaagaatgggcagcttacaaaggaaagtctcctcaaaccccggaactggttgaa

SEQ ID NO: 348419 - DNA, 90 bp, Homo sapiens
cggccatcacggcggccgcagtggcgtcctggagccctcctcaggttgtttacattcagagctctatcaataagaggaatacatattaca

SEQ ID NO: 348420 - DNA, 82 bp, Homo sapiens
cctggtcgttttgcacgtggcactgactggtgacatctccagcaacatccagggctgaaatctctttaatgatggagggaag

SEQ ID NO: 348421 - DNA, 90 bp, Homo sapiens
gcacccccatgtttgtggtcaaggcctatctgcccgtcaacgagtcctttgggaacaggcacggtctcctggtacccaacaataccaccg

SEQ ID NO: 348422 - DNA, 102 bp, Homo sapiens
cttggatttacaatgagagtttggttccagaacagtgcaaccctgaaactcgtcctgttgagaaaaaaataagatcagctcttcctaccaaaaccgtaaagc

SEQ ID NO: 348423 - DNA, 100 bp, Homo sapiens
gcagcaggcagatgatgcagaggagcgagctgagcgcctccagcgagaagttgagggagaaaggcgggcccgggaacagatatttggagttcttacaaca

SEQ ID NO: 348424 - DNA, 74 bp, Homo sapiens
acccggttccccggcccacagtgggggtgtgcaaacccgagagaactgggtcccagtagggatggcacaatcag

SEQ ID NO: 348425 - DNA, 90 bp, Homo sapiens
atgaaaacatcctcagcctctgcactggagaagaagcaaggacagctcaggacacgtccaaatatgggactggacctacagagacatctg

SEQ ID NO: 348426 - DNA, 128 bp, Homo sapiens
ctcaccgccgtgaacttggagcatccagagatgctggagaaagcgtcccgggagctgtggatgcgcgtctggtcaaggggacaatgaagcctttgaagtgccagtctatgaagaggccgtggtgggac

SEQ ID NO: 348427 - DNA, 50 bp, Homo sapiens
ctgtcattcacaaccccctgaaagcttgctgattgttggaggttcttttg

SEQ ID NO: 348428 - DNA, 75 bp, Homo sapiens
ctatgatatgctaagaaagaatcttgtcactttagccactgctactacaggttttggcccgaaccgcgacttcaa

SEQ ID NO: 348429 - DNA, 82 bp, Homo sapiens
gggaaccctggtcaccgtctcctcagtccttcagtgaatctacagacctattttctcaggagctcagcctggccttacttca

SEQ ID NO: 348430 - DNA, 103 bp, Homo sapiens
ccctggagcctcagttggaagcagccgatccagcctgcggagcctgtggggcagggcgaccattgacgaggtggagacggacgtggtggagattgaggccaaa

SEQ ID NO: 348431 - DNA, 100 bp, Homo sapiens
gtccaaaatccaccaaagaaagtgacctctgagaaagtgagccagaaacatgctgagcctttgacagagcctggcccaactagagaatctgtgcaaacag

SEQ ID NO: 348432 - DNA, 75 bp, Homo sapiens
gagagcagaggtcaaacctgaaagaccccagttatggatgggaggttgggataattcttcactattccacccttg

SEQ ID NO: 348433 - DNA, 100 bp, Homo sapiens
gtttgaggcacctacaatagtcaaggtgttcagggttgccctgctgtcagacgtctatcctgagaaaatcttgccggacttgttggctcaatatgacagc

SEQ ID NO: 348434 - DNA, 77 bp, Homo sapiens
attggagcacagaggctcagaagcaagtccagacagtgaccaacaccttcaggacgaacaatatccagatccagagc

SEQ ID NO: 348435 - DNA, 100 bp, Homo sapiens
caacaggcgcccagacagcgcggagcgtctactgtcagcaggaaaaggggaagatagtgatgtactcagtataaatgcagatgcttatgacagcgacata

SEQ ID NO: 348436 - DNA, 75 bp, Homo sapiens
acagcccaaaggcaacatgacggaaccttgccaaagggtcaggagagtgctggtattgtgactagtgatgggagt

SEQ ID NO: 348437 - DNA, 76 bp, Homo sapiens
gaccaacatgggcattttgtttatgagcaaggtgggagaaggagaagcacgaagacggggtgaagtggagacagct

SEQ ID NO: 348438 - DNA, 90 bp, Homo sapiens
gtgcatcatgaattccggagttgccatgaaatatggaaacgactcctcggccgagctgagtgaggcatccagtaccctgctgactctgac

SEQ ID NO: 348439 - DNA, 101 bp, Homo sapiens
tgcctgtgtgagcagtctctggacaagatgaccacactccaggaatgccagtgcatcttttgcacagctggtgctgataagactgtgaaaggcccagatgg

SEQ ID NO: 348440 - DNA, 100 bp, Homo sapiens
agacaagggcatcgccgcctcagccgccgccgccgccgttttcgcctgcagctgctcaccgtctctaacgaagtgccggagcacccatgtgtatcccctg

SEQ ID NO: 348441 - DNA, 88 bp, Homo sapiens
ccatgcggggtcgaatctatctggaacccccgaccatgcgtaagaagcgactactagacagaaagatgatgaggagtctgatgaggaa

SEQ ID NO: 348442 - DNA, 51 bp, Homo sapiens
cgaacctctgctcacgcgtgttcttctgaattctgcttggtcagaatcgtg

SEQ ID NO: 348443 - DNA, 82 bp, Homo sapiens
accattgacgccatgtcgggttattcgagtgaccgagaccgcggccgggaccgaggcccatggcgaattgtggatgattgcg

SEQ ID NO: 348444 - DNA, 75 bp, Homo sapiens
gtgagcccaagaaaaagcagcctccaccaccagaatcaggtcctggtgaacgccatcatcaacagtggtccccgg

SEQ ID NO: 348445 - DNA, 100 bp, Homo sapiens
ctgctgctgaggagaggagcgtcaacagcagcaccatggtccaagtggtaagaagttcagaagcaagcctcagttggcaaggtacctgggaaatactgtt

SEQ ID NO: 348446 - DNA, 98 bp, Homo sapiens
cgggaggctccgcggagccgaggcgtggaggtgtcatggagaaactccagctgggcccagagattctgcagcgggaaaatccaaggcttatttatgcc

SEQ ID NO: 348447 - DNA, 75 bp, Homo sapiens
ttctgctccgtcatccatgccactcgtcatcacgtagacataaccaagaaacttcacccaaatcaagctggcctg

SEQ ID NO: 348448 - DNA, 82 bp, Homo sapiens
cctgaattttccttgatggtcaaaagattaagtatatgaaaatgatgatcagctcctgtgggaccctgagtacttaccagaa

SEQ ID NO: 348449 - DNA, 100 bp, Homo sapiens
acagccaagcctagcagctcgggcaaggatggtggaggcgagaacactgaggagggtgaccatcgggatgaggaggaagagacccacatgaagaagtcag

SEQ ID NO: 348450 - DNA, 125 bp, Homo sapiens
aaaagacacttcaagctaccaaccagaccaggacttaataaagcacaacttgttgaggttcaatcaattctcctgcttcaacctcccgagtagctggaactacaggcacatgccaccacgcccag

SEQ ID NO: 348451 - DNA, 89 bp, Homo sapiens
atggacagacccttcctctttgtggtccggcacaaccccacaggaagggcctgtcccagtcggctttaccctatcgacgcagcgtcccc

SEQ ID NO: 348452 - DNA, 82 bp, Homo sapiens
ctccttcggcagtccacccaccgccgccgcctcccaggtggacgacatccttggagaaggcagcgacgacagcgacagcgag

SEQ ID NO: 348453 - DNA, 74 bp, Homo sapiens
aaaagaaccattgaaaaatttgagaaggaggctgctgagaatggacagcaaattatggatgaacctatgggaga

SEQ ID NO: 348454 - DNA, 90 bp, Homo sapiens
tttacacagacgtggggcgatgcttgtgaccctgcagctcctcaaaacatgcgtcgggatgtccaggaaatttttcgcatgaccccccac

SEQ ID NO: 348455 - DNA, 82 bp, Homo sapiens
caggaggcaacaaagttcttctgctctcaattcagaatccgctttatccaattacagtgggattaaagcctgtggtttccac

SEQ ID NO: 348456 - DNA, 75 bp, Homo sapiens
gcgcgcggtcgacgcgggcctgagctccctccaggtagttcgaggacactacaaaggtcagcaaattggcaaggt

SEQ ID NO: 348457 - DNA, 100 bp, Homo sapiens
gtacagatgattttgactttgctggctcatttcaagctgtcccctttcctccaacccaacggcttactttcaaggaagtatttgagaatgggaaacctaa

SEQ ID NO: 348458 - DNA, 124 bp, Homo sapiens
gccttaaagtacgtccgcgggttgctgcagacagagccccagaacaaccaggaagctgtgctgaatggtttggtggccactgaggtgttgatgtggttttatgtcggagagattataggcaagc

SEQ ID NO: 348459 - DNA, 101 bp, Homo sapiens
caacggccaacttcggcaagatccagatcgggatttacgtggagatcaagcgcagcgatgttaccttatcccatatcacacaactggtcctcagccataac

SEQ ID NO: 348460 - DNA, 74 bp, Homo sapiens
gcagcagcgctgccgccgcgtcctcagccaccgctccctcttcccacgtgcctacaccaactaatgttacaatt

SEQ ID NO: 348461 - DNA, 75 bp, Homo sapiens
ggctggaaaaccacccacctgctctttagcctgggagctgtgtgtctggacagtgctgtccccggcataggtcca

SEQ ID NO: 348462 - DNA, 88 bp, Homo sapiens
tgatccacaaagtcccctttgtgttcacataatgctgtcaggaactgtgaccaagagaacctctcatctgattcgtccctctccagcc

SEQ ID NO: 348463 - DNA, 120 bp, Homo sapiens
ggttagtgtgctctgagggagggtccgagccagccgctgttttgccggaggagcccctcaggccctctagccggcccggtccttggactgaaagaatgcaccaggggctcggcagtgtgg

SEQ ID NO: 348464 - DNA, 100 bp, Homo sapiens
agatgacagacttggacaacatgtcccaacattacatcccagcggccttctgatctgtttaccacgtgagcaagcagctcggttctgtgcagagataaag

SEQ ID NO: 348465 - DNA, 74 bp, Homo sapiens
caaccgagcaaattgaagagacgttaaaatacttccgagggaaaacccctgatcctaaaatgaatgctaggact

SEQ ID NO: 348466 - DNA, 95 bp, Homo sapiens
cgaaaattcccattctacaagaacaaggagcagagtgagcaggaaaccagtgatcctgaacgactcattaccagagaagctggctgtgcatgaga

SEQ ID NO: 348467 - DNA, 75 bp, Homo sapiens
ccagtcaataggaagtacgagtaggagaaggcagagcccccccaggctatgaatgccctgatgcggttgaaccag

SEQ ID NO: 348468 - DNA, 78 bp, Homo sapiens
caatgcccaagacattataaacgaaattgaacagcgattacagcagcaggcagccctctcccccactacggctccagc

SEQ ID NO: 348469 - DNA, 95 bp, Homo sapiens
gatgagtacgataccgaagcgggctgtgtgccccttctccacccagaggagtccatagaggccactgtattctattgaagaacatgtctaacagt

SEQ ID NO: 348470 - DNA, 100 bp, Homo sapiens
gccatctcctgggccgcctggcggccatcgtggctaaacaggtactgctgggccagcggaagcctgccacctcctatgtgcggaccaccatcaacaagaa

SEQ ID NO: 348471 - DNA, 75 bp, Homo sapiens
aaactcttcaacactgttattgtaaacaaagggattgtgggactttaccaaatcggtttgtaataacacctagaa

SEQ ID NO: 348472 - DNA, 75 bp, Homo sapiens
cgagtcgcatctgctcaacgacgaggacctgacgcagcttgttcagattattatcaatacaacacatttggagaa

SEQ ID NO: 348473 - DNA, 90 bp, Homo sapiens
tatgacaagaaggtgaagcaggcggccaaggagaaggaccgtataatagacgctggccccaaaggaaactactctcgatttatgaatcac

SEQ ID NO: 348474 - DNA, 100 bp, Homo sapiens
cccctacccacgctgaacgagagggacacggagcaggatctaaaatgtccactgaggcacaaagagttgatgacagtccaagcactagtggaggaagttc

SEQ ID NO: 348475 - DNA, 49 bp, Homo sapiens
caagtcgacaggggatgggaccctaggtcacatggtgggctttaaggaa

SEQ ID NO: 348476 - DNA, 100 bp, Homo sapiens
aacgaggcaaggagctaaagcagcgtgcgttcagccctggggaagttccaggttaaaggcagcctcagctcacggggcagttgatggtggtagagaacag

SEQ ID NO: 348477 - DNA, 98 bp, Homo sapiens
ggctttcttcgccgtgctggccgcggcccgcctcagcatctggtacagccgaagtgaagtcaccctgctgagaaatgaagtggcacagctgaaacagc

SEQ ID NO: 348478 - DNA, 83 bp, Homo sapiens
ggacaagatcccgtccatgaatcaggagggtgaggacaaaatcttcttaatcaacaagcttcactccatctacgagaggaagg

SEQ ID NO: 348479 - DNA, 100 bp, Homo sapiens
gtccactgtacccatggtttaaacaggactggctacctcatttgcagcgtgctcttgctaaaactggagctgaatctatcagtttgcttgagttatgtcg

SEQ ID NO: 348480 - DNA, 100 bp, Homo sapiens
gctccggtgctggtgcggcgggggactgcggggccagcctcaggttcatatttggtgcttagacaaattcaaaatgaggaaacatcggcacttgccctta

SEQ ID NO: 348481 - DNA, 100 bp, Homo sapiens
ggcctgggcaggtgtcttcctcgagaggcaggcaggggatcccggacgtgctgatgtatggacagccgtatcgtgttaccttagagcttgagctgccaga

SEQ ID NO: 348482 - DNA, 100 bp, Homo sapiens
cagaggttccaagaccaattccccccattgcacctttgtcatagaagcgttgaagtctttgccatcagatgtggagagccgagaccgccaggcccgatgc

SEQ ID NO: 348483 - DNA, 100 bp, Homo sapiens
ggaggagatggatgaatgtgagcaggcgctggctgctgagcccaaggccaaggaccccttcgctcacctgcccaagagctatcagttgagggatttgcag

SEQ ID NO: 348484 - DNA, 71 bp, Homo sapiens
aaaatagtgatgtttccccagaaacgggggccgtggagcccatgcagatcgacgtggacccccaggaagac

SEQ ID NO: 348485 - DNA, 98 bp, Homo sapiens
acatactatccgtttgttcaggaaccaccagtgacagagttgcacgttttcaaaaaatacctaatggtgaaaatgagacaatgattcctgtattgaca

SEQ ID NO: 348486 - DNA, 100 bp, Homo sapiens
cagcagccgtccggagccagccaacgagcgtgtactaatggtcacttgatgtgcgctggctgttttatccacctactagcagatgcccggctgaaggagg

SEQ ID NO: 348487 - DNA, 74 bp, Homo sapiens
ggaatgtgctgcattgcgggtccggcactcaagtgattgttttaccactttgcctgagaatacagatcaaccca

SEQ ID NO: 348488 - DNA, 90 bp, Homo sapiens
tttggatcggcatctagtctttccgcttcttgaatttctctctgtaaaggagatttcatgaacgtctactaccagatacgctccagccag

SEQ ID NO: 348489 - DNA, 101 bp, Homo sapiens
aaataattgtcagtctaacagaatcctgtcggagttgtagccatgccctagccatggaattccatgaacacttgcacagcataggcaccaaggaaggtttg

SEQ ID NO: 348490 - DNA, 88 bp, Homo sapiens
gaaaagagaatccaattacaccttccaaagatggggtttcactcttgttgcccaggctggagtgcaatggtgcaatctcggctcaccg

SEQ ID NO: 348491 - DNA, 88 bp, Homo sapiens
ggagtcttcagacagtctagctgcagagattgttacacctgaaatcaggtcacggtctagatcacattctcgatccagaggaaggcga

SEQ ID NO: 348492 - DNA, 50 bp, Homo sapiens
gcctcctgagtagctgggattgcaggacccagtggcctttgaggatgtgg

SEQ ID NO: 348493 - DNA, 90 bp, Homo sapiens
tggaatgatgccgcagatgatgccccctatgggagggccaccaatgggacaagatcacctgctgttaccagctaccacccataacaagac

SEQ ID NO: 348494 - DNA, 75 bp, Homo sapiens
agcactccggcgaggccaaggccttccaggactatgtgccaagtcctgccctgccaacttcttggcagctgccga

SEQ ID NO: 348495 - DNA, 82 bp, Homo sapiens
ccgccgccggggccgggccccctcgccgctgccccgggaaggaggtacatccagacactgaaggaccacaggccccggatgg

SEQ ID NO: 348496 - DNA, 75 bp, Homo sapiens
gcggatctggaggagcagttgtctgatgaagagaagaatgcaggctcaacagtaccagcagcagcgtcgaaaatt

SEQ ID NO: 348497 - DNA, 100 bp, Homo sapiens
catggagcccgactcggtgattgaggacaagaccatcgagctcatgaatgttctcctgggcagcgttgtgatctttgccaccttcgtgactttatgcaat

SEQ ID NO: 348498 - DNA, 74 bp, Homo sapiens
tttgacgcacacggcaccaaacttgggaagttgctgaggtggttttggaggtgttttataaattgctcagagat

SEQ ID NO: 348499 - DNA, 75 bp, Homo sapiens
acttgtacaaacaggacctgcctaattaccttcaaacctggagcttactccacgggaacagcctctagataatct

SEQ ID NO: 348500 - DNA, 132 bp, Homo sapiens
ggttttgagaacagagtgctgttttagagctggcagcagcatctcagcccaagagaagtgaataccagggcctggtgaagcacacaggaggctgccactgtggagcagttcgttttgaagtttgggcctcag

SEQ ID NO: 348501 - DNA, 83 bp, Homo sapiens
tgctggccacttgcttgggatcctttatcctggtcatcttctatttccaaagctccataaaaatacagactcaccagttcctg

SEQ ID NO: 348502 - DNA, 75 bp, Homo sapiens
ctcctctatcagcatttttggtgtctcccagtgatcaaaaagagagtggttgtgtattctccaagcatgacgatg

SEQ ID NO: 348503 - DNA, 50 bp, Homo sapiens
ccgaggactccgctcctgcccagggcactgtgtttagtcttgagtcagag

SEQ ID NO: 348504 - DNA, 100 bp, Homo sapiens
ccagtgaggcagaatatgtatcggggatatagaccacgattccgcagccatggccctacgctaccctatggccgtgggcctcaacaagggccacaaagtg

SEQ ID NO: 348505 - DNA, 134 bp, Homo sapiens
gagaaatgcaacaacctctggctcttcctggagaccgggcagctccccaaagacaggagcacagctccacggagaagaactgctgcgtgcggcagctgtacattgacttccgcaaggacctcggctggaagtgg

SEQ ID NO: 348506 - DNA, 82 bp, Homo sapiens
ctgtgtcccacttgttcgcggcctatagatctctggaaacatggctacagaacatgttaatggaaatggtactgaagagccc

SEQ ID NO: 348507 - DNA, 75 bp, Homo sapiens
accaggagaggcccgcggtgaccgaggcctgggccccggggttttggtgcctttgaacgctcaatcttgactcag

SEQ ID NO: 348508 - DNA, 101 bp, Homo sapiens
catgaaacccccagcacacgaagaggccaaccccagtgctgatctctactacacttccttcagtgaccctctctacctgaccatgttcaagatgctgcgtg

SEQ ID NO: 348509 - DNA, 76 bp, Homo sapiens
gccggttgcgccacccgaggacaagacccagagaagagctgccagccagtgttggagactctgcgccaggccatgg

SEQ ID NO: 348510 - DNA, 100 bp, Homo sapiens
cggtggttagtttctgcgacttgtgttgggactggggccctcctcgccaaagacagcctagagaggacggcaatgaagaagataaagaaaatcaaggaga

SEQ ID NO: 348511 - DNA, 73 bp, Homo sapiens
agacagacagctggcaagaggcagcctgggggccacagctgcttcactctgtggcactctgtaagctgctcca

SEQ ID NO: 348512 - DNA, 83 bp, Homo sapiens
ctgcacagccgcggcggcagcagcagtgagagggcgaactttctgaccaagtatacaactacccagagggcctaggagaagtg

SEQ ID NO: 348513 - DNA, 100 bp, Homo sapiens
gtgtgcaaacccgagagaactggaatgtccctcttccagtggaaagcccaaccatgcagacatcttgctcataaacttacagtatgtttcagaagtggaa

SEQ ID NO: 348514 - DNA, 82 bp, Homo sapiens
ctcagctccgagtccagggcgagcatcaagatggtgctcatgtggaccagtggtgacgccttcaagacggcctacttcctgc

SEQ ID NO: 348515 - DNA, 90 bp, Homo sapiens
tccagggaaaggatgacatatttttggacctgaaacagaaattctggaacacctatatgggctggacatccacttcatccacgtgaagcc

SEQ ID NO: 348516 - DNA, 131 bp, Homo sapiens
ggcctgcaggtctctgtcgagcagcggacgccggtctctgttccgcaggatggagatctattgggaaactgattataaccactcgggcaccatcgatgcccacgagatgaggacagccctcaggaaggcag

SEQ ID NO: 348517 - DNA, 98 bp, Homo sapiens
gtcgcttcactgtggctcatacatgccgattcgaagacagtctcttacacctcctcctcagaacactattacatgggaagaatatatatctgctgaaa

SEQ ID NO: 348518 - DNA, 100 bp, Homo sapiens
agacagcgagcacattcttgctacctccagtcaagacaattctgtgaagacattcttcttttggccgatgaaaaatttgacttcgatctttcattgtctt

SEQ ID NO: 348519 - DNA, 75 bp, Homo sapiens
aacttagtgatgaagagatgagtttgtttacagctgttgtcctggtatctgcagctgcaggtctgttggagtttg

SEQ ID NO: 348520 - DNA, 98 bp, Homo sapiens
ggcttatacccctacctgtgtcattggccttaacaaggacttaaaggccagattacctgtccctaatactgagcagaagctggtgaatgaaacaggag

SEQ ID NO: 348521 - DNA, 88 bp, Homo sapiens
tttcctgggagcggcggccacggaggcaccatgaagaagtcttactcaggtggatccataaagaacccagccaacccgcagagggagg

SEQ ID NO: 348522 - DNA, 75 bp, Homo sapiens
ggtcaagcagggggcgaattcaatccacccgaccgacgacaatgcagatcttcgtgaagactctgactggtaaga

SEQ ID NO: 348523 - DNA, 80 bp, Homo sapiens
ctcgtggacaagtttgcagatcgggagcgcaaggtcgccctcaaggccatgatcaaaactcacgccgatgatggagctga

SEQ ID NO: 348524 - DNA, 100 bp, Homo sapiens
agctagccagcctgggcaataccagaggcggccctcggcgcgcgcaggggaccgagctggtcgccccaaccgggctgccaatagctacctgcgagaccag

SEQ ID NO: 348525 - DNA, 98 bp, Homo sapiens
aagaaatacctgtgatttgctttctcggagcaaaagtccttttatgtcacctcggtaccctggaggtccaaggcccccattgaggatacctaatcagg

SEQ ID NO: 348526 - DNA, 74 bp, Homo sapiens
tcccaggacagcggaggtggaacttcgtcgcgctgcaacccccggctcgggtatgcagtgccattcagaatcag

SEQ ID NO: 348527 - DNA, 85 bp, Homo sapiens
gttggacgctatgctggaagaatttaagaaaggtccacagttttatgtgtgagcaagatggaggctgacctgtctggctttaaca

SEQ ID NO: 348528 - DNA, 74 bp, Homo sapiens
gttcacccctactgggggccttggtctgaacctggccctgatcctggatgcactaatcgtgagcatggatgtga

SEQ ID NO: 348529 - DNA, 75 bp, Homo sapiens
acagttacccgagatcagccacgcagagtcctgccttcctttggatttgatggtagagtggtggcaaagcttcct

SEQ ID NO: 348530 - DNA, 83 bp, Homo sapiens
cttcggcagtccacccaccgccgccgcctcccaggttgctccttgagggcaggacagttcttatggctttatccgttgcgtaa

SEQ ID NO: 348531 - DNA, 87 bp, Homo sapiens
tcacctgtccttctacattttcgatagagacgttttccggagggattccatcataggtacatgtcccagagcaagcacacggaggcc

SEQ ID NO: 348532 - DNA, 83 bp, Homo sapiens
gagcggtccgcgagccaccgaggcccaggaccaagaatcgccttcagccctgtctggtgcatccttggcagaaagtgaggagg

SEQ ID NO: 348533 - DNA, 101 bp, Homo sapiens
ctttatggagaccctgaaagacatcgtggagtattacaacgacagtaacgccaaaactggacaagccaaggcatctgtagccaaagtaaacaaatctacag

SEQ ID NO: 348534 - DNA, 100 bp, Homo sapiens
tgggatacgacccctatcaggaaatattcgagtggcaactgcagatggtaagcggatgtttggcacctattttcgtgttggtttttatggaaccaagttc

SEQ ID NO: 348535 - DNA, 100 bp, Homo sapiens
tgcatgggaaaatcatggaagttgattactcagtctctaaaaagctaaggacattggctccctggattatcaagagtttgtagttgacattgaatccagg

SEQ ID NO: 348536 - DNA, 83 bp, Homo sapiens
tgacaagagagacgactctgatcttgtaaggatgccactgccgccaggagccctgtaacatcagccatcgtcaaccccaccgt

SEQ ID NO: 348537 - DNA, 90 bp, Homo sapiens
ctggaagtacgggcagttgcagtgttggagctaaagactcctcacaaatcccaggccgacacaacagcagagaaaacagcagacaatgtc

SEQ ID NO: 348538 - DNA, 100 bp, Homo sapiens
gtagacacagagaggaaatgtggagagggcacaaaccgcaaggtgctgcaggcccgagactctttaccatacaccagattgatgcctgcactaacaacct

SEQ ID NO: 348539 - DNA, 100 bp, Homo sapiens
tttcggttgaagtgatgcacaccaccaacattcttggcattacgcaggccagcaactcccagctcaatgcaatgtggcagctgaaatatcctaaactaat

SEQ ID NO: 348540 - DNA, 82 bp, Homo sapiens
tggcacatggcccaggcagaccttgcagtcaaaagccaggctttcgaggactgactcctccaattccttgggaacatgcacc

SEQ ID NO: 348541 - DNA, 100 bp, Homo sapiens
ctcacctccctaaactggttaatagtggcatggaagatccatttgctctaagcgaaagacatgaggcctcagcctgaaatgaggttgttttgaggtcatc

SEQ ID NO: 348542 - DNA, 75 bp, Homo sapiens
aacttgccctgtctcctcgcagatgagatggcttgttcaatcagtatatcagtcaacaggaatataagccacgat

SEQ ID NO: 348543 - DNA, 82 bp, Homo sapiens
caatcacccacccagtgtgcggtgacttaagagattaaaattaatttggttgctgttggttctgaacaaataatgagttctt

SEQ ID NO: 348544 - DNA, 107 bp, Homo sapiens
ctcaagatgaggctgtgggacctgcagcagctgagaaaggagctcggggactcccccaaagacaagttaagtgggcagaccaacatccacctcagcaaaaacttctt

SEQ ID NO: 348545 - DNA, 94 bp, Homo sapiens
gcatgttgtggctgttccaatcgctcctgtttgtcttctgctttggcccaggtgctggagaatctggtaaaagcaccattgtgaagcagatgag

SEQ ID NO: 348546 - DNA, 75 bp, Homo sapiens
agcttgagaaaagggactttggaaaaaggctgtctctagacagcagtcttgtgcccacatatgacagtggacata

SEQ ID NO: 348547 - DNA, 98 bp, Homo sapiens
gaatgatgtcatcaccgtcatcgagggaagggagtaccctgacttctaccggaagctctacggcctcttggacccctctgtctttcacgtcaagtacc

SEQ ID NO: 348548 - DNA, 100 bp, Homo sapiens
cacactttccagcaagatgggtcctgactcaaaacccagtgagagatggtggccacacagcaggagatgatggacgcgcagctgaggctccagctgcggg

SEQ ID NO: 348549 - DNA, 75 bp, Homo sapiens
gaggtggactacagcgactcactgacggagaagcagtggctcaagtaacagtaacgagtagccagagtactcctg

SEQ ID NO: 348550 - DNA, 90 bp, Homo sapiens
gttgaaataaaagaatctgttcgtggccaagatattttcattatacagacaatacccagggattaatgaaaatcaagttccatcctcaga

SEQ ID NO: 348551 - DNA, 76 bp, Homo sapiens
tcatggatgttcttcttcgagtatttgtagaagggctctcaaaattagagagatgtgtaattgtccaccactgtct

SEQ ID NO: 348552 - DNA, 75 bp, Homo sapiens
agatggcagcagaagctgcatatcaaactgctgatcttgcatctttaatggataaaacatttgagagaaagttgc

SEQ ID NO: 348553 - DNA, 75 bp, Homo sapiens
agtatttgaggagaaagcatttggtagttgatgtcacttggcgatattcctgcaaacatgaagaggtgattgcca

SEQ ID NO: 348554 - DNA, 100 bp, Homo sapiens
ctgctggtgcgattcaaggatggtgctttcctggcggggaccttcatctccaccgtaggcattgacttccgggccagcgagaccgaggagaatggctccg

SEQ ID NO: 348555 - DNA, 102 bp, Homo sapiens
tcaaaggcgaactccagactcgaccttctcagagaccttcaaggaaggcgttcaggagggccacccagtgctcctgcagaagatcgttcaggaacacccgac

SEQ ID NO: 348556 - DNA, 100 bp, Homo sapiens
caccacattggcgtggccgtcaaggagctggacctctacctggcctacttcgtgcgtgagcgaggtggactattccataatagcatcacaagccggagcc

SEQ ID NO: 348557 - DNA, 75 bp, Homo sapiens
ctcaatttaagcctgatctaacccctagaaacaggtgatgggcagaggcttcagtgtccccttcgcctccgcagg

SEQ ID NO: 348558 - DNA, 75 bp, Homo sapiens
cgccgccaccacccactccggacacaggtacatgtcccagagcaagcacacggaggcccgggagctcatgtactc

SEQ ID NO: 348559 - DNA, 100 bp, Homo sapiens
gtctcacccgcatggggtgaagcgttcagcctccccagacgacgatccataaccagcagaccacagcattcaggcatcctgtgacgggacagttttctcc

SEQ ID NO: 348560 - DNA, 100 bp, Homo sapiens
ggttactttttcgcagtactcgaacgttgttattttcggtgtgcctcagatgctacgactaatagactggggtttggctgagttttatcatcctggccaa

SEQ ID NO: 348561 - DNA, 90 bp, Homo sapiens
gcgccctctctgagcccagcgctactgtgaccattgaggagctcgagcccccctccatgcgcctgaaggcccgacccagcagccctggct

SEQ ID NO: 348562 - DNA, 82 bp, Homo sapiens
gtgagggggttccgggaagatggtgctgatcaaggaattttattttaccaagaaaatggtttgcacgactttgaacatatac

SEQ ID NO: 348563 - DNA, 75 bp, Homo sapiens
ggacatggtgtttcttaggacttcagaaaaagcagccgccccgggggaaggtgcggaggacgcagacagcgggcc

SEQ ID NO: 348564 - DNA, 99 bp, Homo sapiens
ctgtttcgggccagcgacccgctgctcagcgtcctcatgtggggggtaaaccactcgattaaatgccttaatggataaagaaaaattggatgttaagat

SEQ ID NO: 348565 - DNA, 97 bp, Homo sapiens
ccgggccgccacgctctcgggctctgcctcgaaacgcttcgttaagggactcaggcagtacgggaagaacttcttcagaattagaaaggagctgctt

SEQ ID NO: 348566 - DNA, 100 bp, Homo sapiens
gtttttggagccgtgagggatacagcagtttggtcaatattgtcttaacatgcttcaaataaatcaggtgtgatgaatgcagactctgctaccattttgg

SEQ ID NO: 348567 - DNA, 100 bp, Homo sapiens
ggtgtcggtgagcgcgtttcccgcctgagcgcaactagcggcgggtcgtgggcacctccagcctcgccgctcctgctatttgccaaccgccgggacgtac

SEQ ID NO: 348568 - DNA, 88 bp, Homo sapiens
aaactgtgagcctatgattgggctggtacccatcctcaagggaggccgtttctaccagctctctgatgtaaaggatggagtaaatcaa

SEQ ID NO: 348569 - DNA, 78 bp, Homo sapiens
atgccttctgatgtctacaggcgctgacggccacccctccaggtcactggaaggactgagcgcattcaggagcctgga

SEQ ID NO: 348570 - DNA, 98 bp, Homo sapiens
tggaggctcaacggcagaagcttcaccacaaaagcgaaatgggcacaccacagatccctttaagatgtaccatgatgatgacctggcagatttggtct

SEQ ID NO: 348571 - DNA, 75 bp, Homo sapiens
gtcgggacaccccggaagctgggaaatgccgtgcttcctcaaagactgggaaatgcacgtccacttcaaagtcca

SEQ ID NO: 348572 - DNA, 75 bp, Homo sapiens
cagatggcagccagtcagtggtggagaggcaccttccactagcaacagtctccccaggcacaacacagctaacac

SEQ ID NO: 348573 - DNA, 71 bp, Homo sapiens
gcgggaacgtggcggcgcggcgggttgtgccggagtgtggcaaaggagcagagaactttgacaagttcttc

SEQ ID NO: 348574 - DNA, 90 bp, Homo sapiens
attctcctccgaaccccttcatgcccaaatcccggaaactccagcgtgtctccagccgtgcccgtggaacacagagcattcctaatgaca

SEQ ID NO: 348575 - DNA, 98 bp, Homo sapiens
ctggatttccagaagacgaaatacgcgagacatagggcctgattacattccaacagaggaagaaaggagagtcttcgcagaatgcaatgatgaaagct

SEQ ID NO: 348576 - DNA, 100 bp, Homo sapiens
cagctcttacagaaatgtgtcttgttgcatttggtaatttagcagaacttggtagtgggcagcagtcagtgacaggtgtaacctctgtggatgacagcaa

SEQ ID NO: 348577 - DNA, 93 bp, Homo sapiens
tttggcattgacatttaattttagggtcctttatatagaagggagagtagggattgtcaatgaggcagatcagattccgatttgacgggcaac

SEQ ID NO: 348578 - DNA, 50 bp, Homo sapiens
tcatctgtagcattcaagacttcaaactgcggccctccaggcactgaagc

SEQ ID NO: 348579 - DNA, 100 bp, Homo sapiens
aggaaacacctcaggacacggcctacaacaccaagagtttgcattgagactccttgcattccgccagatacacaaagttctaggcatggatccattaccg

SEQ ID NO: 348580 - DNA, 90 bp, Homo sapiens
gatctccattcctgaggaggagaaactgctctgtgaaaaattagaggaacagttgcaggatttggatgttgccttaaagaagaaagagcg

SEQ ID NO: 348581 - DNA, 100 bp, Homo sapiens
attgaatgctgtcattgtttccattgaatgcaggacaagtactccaaaagtggcattgcttgtttcttaaaagaagatgacagttattgggaccccaatg

SEQ ID NO: 348582 - DNA, 96 bp, Homo sapiens
tgaaatccgaaatttcttgggtgaaaaatatatccgcagggttcggatgagaccaggtgtgcggccgcctgagcccgagccaggagcactagagag

SEQ ID NO: 348583 - DNA, 75 bp, Homo sapiens
ctcgccccgaacgggggtcttcctcctccgccgttgacaggaagctcttcgtgggcggtcttgactggagcacga

SEQ ID NO: 348584 - DNA, 90 bp, Homo sapiens
gacaccgtgacttcccggacgctgggaaatgctacgagagtacaaggtagtgggtcgctgcctgcccacccccaaatgccacacgccgcc

SEQ ID NO: 348585 - DNA, 101 bp, Homo sapiens
tggccccgtctcccatccccagaagggtattcactggggattctgagctttggctactccagtttcccacgacacatgtgctggtggacggacagccatgt

SEQ ID NO: 348586 - DNA, 75 bp, Homo sapiens
tttgttatgtggtgacgggctctcgctatgttgcccagctggtgccgacaagaaagccgaggctggggctgggtc

SEQ ID NO: 348587 - DNA, 75 bp, Homo sapiens
gaaagtcaggaccgcgacggcagcagagcagttgacaatggtctccaggatggtctctaccatgctatctggcct

SEQ ID NO: 348588 - DNA, 75 bp, Homo sapiens
agaaagaagatagtggttgaagccccagcaaagggcctggttgcagtatgcctgaaatttgggatgtagaagatc

SEQ ID NO: 348589 - DNA, 51 bp, Homo sapiens
ggcaggcgccccccgggggcgggaagctggaaatgcaacctcaccacaagt

SEQ ID NO: 348590 - DNA, 83 bp, Homo sapiens
ttccttgacagtttaaaagccttggcagtcaaggaagatgagaatgtgcctactgctcctgatcctccaagtcaacatttacg

SEQ ID NO: 348591 - DNA, 90 bp, Homo sapiens
gacttaaggattcagagaaagagaactctttgttaaagaagagaataagatttttggaagaaaagatggaagggatggatgatgaccccg

SEQ ID NO: 348592 - DNA, 100 bp, Homo sapiens
ctgcttgttatctacagaactcaaagttgtcaatacgtagaggagaaagctttgcagaattcagatctgcaggaactgatgatggtttcaccgattttaa

SEQ ID NO: 348593 - DNA, 97 bp, Homo sapiens
attgtctcccaagacaacttcctcaccagcaccttacaggacaccacgacgtccgtgcgcattggccttatgatggaagagatgatcttcaaccttg

SEQ ID NO: 348594 - DNA, 95 bp, Homo sapiens
gcaaaatctacaagatgatgcagggaggaggagtccaaaactacttacctggaagaccttccaccaccccctgagtatgaattggccccgtccaa

SEQ ID NO: 348595 - DNA, 87 bp, Homo sapiens
ggacttcactgctctgctgtctcctgcaagaactggctcaagaaatttgcctcgaaaaccaaaataactgtgtagaatacattgagg

SEQ ID NO: 348596 - DNA, 50 bp, Homo sapiens
gaatttttgaagcaacataattcagctggcagtgatggggccaagattgg

SEQ ID NO: 348597 - DNA, 90 bp, Homo sapiens
gctcttgacagccaggtaccaggaacaggagtacagctgtgtagtaaagatgccttctggtgaatttgcacgtatatgccgagatctcag

SEQ ID NO: 348598 - DNA, 100 bp, Homo sapiens
tgaagagagatacaagatgaagagcaagcccctaggaatctgcctgataatcgattgcattggcaatgagacagagatgggatttcgccatgttgcccag

SEQ ID NO: 348599 - DNA, 75 bp, Homo sapiens
attttgcacaagggcagtcaccatgaaaggtctgctgagaacagacccagtccctgaggaaggagaagatgttgc

SEQ ID NO: 348600 - DNA, 73 bp, Homo sapiens
taaagcttgaaatgctacatttccaaggtcagtgtgagaagaagattgtttctgagcttgagaagcttctgga

SEQ ID NO: 348601 - DNA, 75 bp, Homo sapiens
acactgccaaccttgataagatggcttcggagggaatgaggataaaagaatcagagtgtctcaacccttgacaag

SEQ ID NO: 348602 - DNA, 74 bp, Homo sapiens
ctggcagactccatccccagcagccctgcttcttcacagttaaggaagactcgccagccagatgccaaagatgg

SEQ ID NO: 348603 - DNA, 100 bp, Homo sapiens
cttacgtctgcggaagtgcagctgcctcagttcttagcgcagggcactccacagaaggatgttattatcaagtcagatgcaccggacactttgttattgg

SEQ ID NO: 348604 - DNA, 108 bp, Homo sapiens
cttctacggggccttctacagtgacggggagatcagcatttgcatggaacacatggtcatcatcagatttgaaatatttaaagtggatacaaaactatttcagcaatg

SEQ ID NO: 348605 - DNA, 83 bp, Homo sapiens
taccaagaagccagtcaagcggccaggcaaggtgcccggcgacgactgcccgctggtgtggggccagtgctcccactgcttcc

SEQ ID NO: 348606 - DNA, 95 bp, Homo sapiens
actcagaagaacttgtacagagatgtgatgttggagaactatagcaatctggttttcttgggcctccccatggccacccatggaccagtcggcat

SEQ ID NO: 348607 - DNA, 75 bp, Homo sapiens
tcgccgtcctgcggaaccgctggctgtcagacagcttcaaggagacgactattgcagatatcatccgaacatgtt

SEQ ID NO: 348608 - DNA, 100 bp, Homo sapiens
ctgtctggggcaacaagtagggccttgaaggccaggaggtggttgtgtcaaaccgattggtgacatctccatgctgtattgtcacaagcacatatggctg

SEQ ID NO: 348609 - DNA, 83 bp, Homo sapiens
gacacctggttccagctgcagcacgtggacgctgactcggaagtgcagcggaatcggacatgtccaaaccaccgtgttacgaa

SEQ ID NO: 348610 - DNA, 149 bp, Homo sapiens
cggagagcggtgggctgacctgttcctacaccttgcatcatgccagctttgtcaacgggatctgggagtgacactggttctctacttaaaagacaatgactactgatgaaggtgccaagaacaatgaagaaagccccacagccactgtt

SEQ ID NO: 348611 - DNA, 88 bp, Homo sapiens
gagcgcgaatatcgtcatcgttagaagaggctgaggctgcagtggccacccaggagacatccaccgtcaggctaaaggtcagctccac

SEQ ID NO: 348612 - DNA, 95 bp, Homo sapiens
ccctttcataggtcacagctgctcttctggaggtgtcctacaggtgaaaagcccagcgacccatcagcagataagcagagagccctagaagaaac

SEQ ID NO: 348613 - DNA, 51 bp, Homo sapiens
tgagcagtagcccactctatagccgaggactggacctacagagacatctgg

SEQ ID NO: 348614 - DNA, 50 bp, Homo sapiens
ggcagcgaaaacttatcacggttttgagagacaagagagacacctccaac

SEQ ID NO: 348615 - DNA, 60 bp, Homo sapiens
ctgaaatcacaatggaaagtcttgacttgactgatcagccatgcagaagctggggacaga

SEQ ID NO: 348616 - DNA, 83 bp, Homo sapiens
cttaaaccagtacagaagttatttgcaatcattgtaggcaggaccctaaagtaaattggttgaagaaattagatcccaaagat

SEQ ID NO: 348617 - DNA, 100 bp, Homo sapiens
cttacccaacgtttgatggctcatcaaactgcaattacaagccagctgccatgttgtgagcacataccacatagctccatggagatgcccatgtgactgt

SEQ ID NO: 348618 - DNA, 100 bp, Homo sapiens
ccgagatgtctcgctccgtggccttagctgtgctcgcgctactctctctttctggcctggaggctatccagcctattactataacaagcgcattctgcac

SEQ ID NO: 348619 - DNA, 97 bp, Homo sapiens
actgtgggctcctggtgtctctgggtgtctgtgacctttgatgatgtggctgtgactttcacccaggaggagtggggccagctggacctagctcagc

SEQ ID NO: 348620 - DNA, 88 bp, Homo sapiens
gtgaactgtgaacagaagcaagcaggatgaagttaaaggaagtagatcgtacagccatgcaggcatggagccctgcccagaatcaccc

SEQ ID NO: 348621 - DNA, 95 bp, Homo sapiens
acggctgctgaactatttgcttgataatttgtcaggtactgcaaaaagaactgtttgtgatatagggtctgcctcctttaaatatgatatgcgcc

SEQ ID NO: 348622 - DNA, 90 bp, Homo sapiens
cggggcgttgggtcagcgggtctgggactggtggcaccggcggcggcgtaggacggaggcgtcgctagtgctgattcctaaagaaaagcc

SEQ ID NO: 348623 - DNA, 100 bp, Homo sapiens
gaagaaatagatgcaatggatgttcagcagctttcacaaatagtaccaaaggttctcctgaaaagaaagctgaacattcatctataaatcaagaaaatgg

SEQ ID NO: 348624 - DNA, 90 bp, Homo sapiens
ctgaatacaacagaccccaacagtactttatttctcgaatgctggcagccaaaaccgttttggctatccgttatgatgcttttggtgagg

SEQ ID NO: 348625 - DNA, 97 bp, Homo sapiens
tgaccaagaaccatgcctggtggatccagacatgatcaaagccatcaaccagggcaactatgggctgagctggctgaccgacccaatccccctaccc

SEQ ID NO: 348626 - DNA, 98 bp, Homo sapiens
ctgcgtaccatcttcaccagtcctgtcactccagaggagctactgtatacaggcgtatcctggatctaaagactggaacagtgaaaaaggaaggtcag

SEQ ID NO: 348627 - DNA, 100 bp, Homo sapiens
ccgctattcagcagagagctattattccctgtattaaagatgaggtttatataactttccaagacaaggaagttgtgcaaagcctcacagctactaagag

SEQ ID NO: 348628 - DNA, 101 bp, Homo sapiens
atgagttaatctcctcagaaatcactaaatactactctgaggggcttagaaattaacaggtactatactggcaattgctggagaagattttgcaattgttg

SEQ ID NO: 348629 - DNA, 100 bp, Homo sapiens
ggatgtgcctggggtggggtcctttgaaggtgtggcttcggaccgagaggggaactgtgtcaatctgacagaagcactgtcgctctatgaagaacagctg

SEQ ID NO: 348630 - DNA, 100 bp, Homo sapiens
aagaaactgcgcctggacaaggagaacaccggaagttggagaagtgaaggagaacgacctgctcagaatgagaagaggaaggagaaaaacataaaaagag

SEQ ID NO: 348631 - DNA, 116 bp, Homo sapiens
ctcgctccggcgccggcctcgcctcctcgcagcagcgccatgttccagggtctccctccactgctgtagtaacccgggtccggggcctcggtggtgctcctgatgcccctcaccca

SEQ ID NO: 348632 - DNA, 101 bp, Homo sapiens
aggatcatgtctgcgagccaggattcccgttccagggtctccctccactgctgtagtaacccgggtccggggcctcggtggtgctcctgatgcccctcacc

SEQ ID NO: 348633 - DNA, 75 bp, Homo sapiens
cgacggcatctgcagggtgcggctccggcctcacgtcagcccccggcacagtttgtgatggacgcctctgacccc

SEQ ID NO: 348634 - DNA, 99 bp, Homo sapiens
cacgtcccacgggccggacccgcggccgcgttcggtggtctctggttcatcatccagctccaagtatgaccctgagatcctgaaagctgaaattgccac

SEQ ID NO: 348635 - DNA, 100 bp, Homo sapiens
agagccgggagttcaagaagaacactccagagctgtgttggggtggaagaggaggaggcgcccgacatcgacatataccactgcccaaactgtgagaaaa

SEQ ID NO: 348636 - DNA, 98 bp, Homo sapiens
ttttcttctgactattacagccctctgcgggacctgctgttgaagtctgcggatgtggagatcgtcaacacctgcagtggcccagacatcgcacgctc

SEQ ID NO: 348637 - DNA, 111 bp, Homo sapiens
ccttcctgggtcagtgattcccggaccctggaagagaagagggtggctaatgattaagacaaaaagtaaccttcctgaagaggacatgtgattggaagttgtcaattgttg

SEQ ID NO: 348638 - DNA, 75 bp, Homo sapiens
ctgaaatgagacatgcacataatatagatgtcatatggttgagagactctgtgaaagtagaagaggtagcaaatg

SEQ ID NO: 348639 - DNA, 98 bp, Homo sapiens
gcggaccggcgtccccggcgcgaagaggctggactcggattcgttgcctgagcaatccccaaggtgagactggagacaatctatatttgcggagtaga

SEQ ID NO: 348640 - DNA, 96 bp, Homo sapiens
caaagaatgatatttccaaagtttgcagaaaagaatatgagagcctgcaactggtgaaagaaaaaatggatctactgctgttgctgagtctgttgc

SEQ ID NO: 348641 - DNA, 100 bp, Homo sapiens
aaaatctctaaatgcagattccagaaaaattacagcacatctcagtgaatttgcaagtggtgatgcaggttctgaatgctgatgccattgttgtgaagct

SEQ ID NO: 348642 - DNA, 75 bp, Homo sapiens
ttaccaccgttgacaccaaaagcctcttagcaatgcataccacgagttagcacaagtgtattcaaccaacaaccc

SEQ ID NO: 348643 - DNA, 75 bp, Homo sapiens
ggctgtgctggtccccagtagcctccggattggaatcattcccgcaggctttccatctgatggtcccctggtgtg

SEQ ID NO: 348644 - DNA, 100 bp, Homo sapiens
ttgccaattgtgtggccttagcgatctatattccctttccagaagatgattccaacgccaccaattccaacctggttattgcagctgactgcaaaagggt

SEQ ID NO: 348645 - DNA, 96 bp, Homo sapiens
gaaagccgttaggtgatggaaagtttctttctcataaggttcaaaccttgtactactcagctgatcacaagctgcttgatgggaacctactagatg

SEQ ID NO: 348646 - DNA, 74 bp, Homo sapiens
gacgaggctgtcgtgcgctgcaccctctcggctaatatcattgggccactggaggatagtgagctctttaatca

SEQ ID NO: 348647 - DNA, 74 bp, Homo sapiens
ctgtgctgccacttttcagccatggccacaaggcgtctgcggtgttgctgtgggctaccccctggacacggtga

SEQ ID NO: 348648 - DNA, 83 bp, Homo sapiens
tgctgtagctttcatgagcacaggcatcagtcaggcagatgtttgtcgactggaatgggctcacttatgtctgtaaagatggg

SEQ ID NO: 348649 - DNA, 83 bp, Homo sapiens
cccagccacagcctcccgcgcctcgctcagctccaacatgggcaagcgacttggtaatgaaggtggatgctcttctgtcagcg

SEQ ID NO: 348650 - DNA, 100 bp, Homo sapiens
aaggagcaggattaccaaagggagctggaggatcttcagaagaagcctcccccatacctgcggaacctgtccagcgatgatgccaatgtcctggtgtggc

SEQ ID NO: 348651 - DNA, 75 bp, Homo sapiens
gaggagtatgagcaaatcctcaataccaaactagcagttcacacaaaagatgttggacaatttctacaattttgc

SEQ ID NO: 348652 - DNA, 100 bp, Homo sapiens
aagggaggaggaagatggcggcgggggcgaggttctcaagactcagaagttagtgaagagcaaaagagagaaaaaatccttgaactaaagaagaaggaga

SEQ ID NO: 348653 - DNA, 98 bp, Homo sapiens
ggacaccgcagtatgaggcagagtttgtggggacattcatggacaattctttgatttgatgaagctctttgaagtcgggggatctcctgccaacactc

SEQ ID NO: 348654 - DNA, 74 bp, Homo sapiens
cagatccagagagatgctgtcctggactttgtcaaatccaaaattgaagacattagagcagaacaagagagaga

SEQ ID NO: 348655 - DNA, 89 bp, Homo sapiens
aagctgtatgtgatcgggggcagcaacaacgatgccggatacaggagggacgtgcaccaggaattgaatgatctggcacgggaccctcc

SEQ ID NO: 348656 - DNA, 100 bp, Homo sapiens
cctattgtccaaagcagtcgtaagaagaggtcccaatcccccactctttccgccctaatggaggtctccagtttcggaaacattggcaaatttggagcga

SEQ ID NO: 348657 - DNA, 50 bp, Homo sapiens
cagccctgcctctccctgggctctggattcagagactgtttttgatattc

SEQ ID NO: 348658 - DNA, 100 bp, Homo sapiens
ctgagaagctcctggaggaggaggagaagagggtgcagaaggagcgggaggacgaggagctgaacaaccccatgaagctgcaagctttcttcctggtggc

SEQ ID NO: 348659 - DNA, 74 bp, Homo sapiens
ctggtcacacaaccctcgggatcacacttatgattgatatgggacacagcaggacaggaacggttccagtctct

SEQ ID NO: 348660 - DNA, 74 bp, Homo sapiens
gcacccccggaccgaccatgggcagatcccaggcctcattgctacgatttcagagtaccctggtaatagctgag

SEQ ID NO: 348661 - DNA, 97 bp, Homo sapiens
agggatgaagcagctgtatgttctcatgtcctggacactaccacgttgatggctttctaaatccagggtattatagctgcaaatgtccttgtattct

SEQ ID NO: 348662 - DNA, 102 bp, Homo sapiens
tccaacacagatgtccaagctgccaaatggaggagatgtataagaaagctcatgctgctatacgagagaatccagtctatgaaaagaagcccaagaaagaag

SEQ ID NO: 348663 - DNA, 100 bp, Homo sapiens
gcgcgaatatcgtcatcgttagaaggcatgaagaccccgtttggaaaggcagctgcagggcagcggtccaggacgggcgctggccacggcagtgtgtctg

SEQ ID NO: 348664 - DNA, 146 bp, Homo sapiens
cagaacggcgacctcaagaagcagctccacgaaaggcagccgcggatcgccgcgctcagcgacaaacaagggatgaccgctttggaagacgtgttgtcacgttcagctgctgccggatgccaccctcccacgagctggaccaccag

SEQ ID NO: 348665 - DNA, 100 bp, Homo sapiens
tgatgcgcctctggacctaaagattaaagccagtatgatttcagatatgttcactgttgtagctcaacgggacccaggtggagtctgtacagctcaaagt

SEQ ID NO: 348666 - DNA, 101 bp, Homo sapiens
cccagccagccagcagctgagtgggggttacggaggcggctacggtggccagagcagcatgagtggatacgggaaatcctcattgacgattcaatttgttg

SEQ ID NO: 348667 - DNA, 90 bp, Homo sapiens
ttaccagtggtgaatgggaagttcttggccggcatggatctaatggtagatatagcacacctatgcctttacaacctaagtgttattcat

SEQ ID NO: 348668 - DNA, 50 bp, Homo sapiens
aagcctcctgcgccggccttgcctcgggagtacaaaccaccaggaacccg

SEQ ID NO: 348669 - DNA, 76 bp, Homo sapiens
gaacttagcagcagctccactgaacagataagggtttacgcaaatggcatccggaacattgaccttcactatattg

SEQ ID NO: 348670 - DNA, 82 bp, Homo sapiens
gaggagtaggtgcgggtgaagatggcggcagccgaggccgcgaactgcatcatggaggtgtgaacccacatccctgccccca

SEQ ID NO: 348671 - DNA, 50 bp, Homo sapiens
tgctgtccatcctgtgcacaccgagtgtgctgaccaactgactgaagagc

SEQ ID NO: 348672 - DNA, 100 bp, Homo sapiens
gatttatcaaatcgagtcactgtcaaatattcctcttcgtcaagttatagctgaggaatgtgttgcctttatgttaaactggagagaaaatgaatacctt

SEQ ID NO: 348673 - DNA, 100 bp, Homo sapiens
gcaccccttcaaccacagcaaggagcccctgccgctggcggcggcttacagggagaacacagttggcctccaccgtttctgccccacagaaaacgtagca

SEQ ID NO: 348674 - DNA, 75 bp, Homo sapiens
cataagttgtcatttctcttgagtaaatacctaaaagtgggcttgctgggtgtcagttgtacccgaggcgttctc

SEQ ID NO: 348675 - DNA, 50 bp, Homo sapiens
ccggaacatggctgcgtccggtctgttgctggaagtgcaggtgcgggaat

SEQ ID NO: 348676 - DNA, 74 bp, Homo sapiens
cgacggcaaaggtgtcgtggtggtcattaagcggagatccgttatgcaaagggtgacctggacatatcttacat

SEQ ID NO: 348677 - DNA, 100 bp, Homo sapiens
cagagtcaccaaccccaatgccaggctgcgcagtgaagaaaatgagacatgatccacatcgcggacaccaaggtcgccaggcgttatggggatttcttca

SEQ ID NO: 348678 - DNA, 100 bp, Homo sapiens
caggacgaagccggagtgtaggcggcagaggattcgctcccagagcagctgcggccagctgtgattgggttattatacccctgcattgacagacatctag

SEQ ID NO: 348679 - DNA, 82 bp, Homo sapiens
cagcacagttcctgggaaggtggagccaccagcctctccttgctgaataccactagaaacatacctgtaaccagagacagct

SEQ ID NO: 348680 - DNA, 100 bp, Homo sapiens
ctggactctagggaccctgctgaatagctggggctacaggcgtgtgtcactgcgcccaggtgtcatggagaaactccagctgggcccagagattctgcag

SEQ ID NO: 348681 - DNA, 89 bp, Homo sapiens
caactgctgcatcttagatgaaagattcataatctcaggagacactgaagaagggaggctctgtggacagaggagcagtaacaatcccc

SEQ ID NO: 348682 - DNA, 82 bp, Homo sapiens
catttgtttctgctgaccgcgggccctgccctgggctggaacgaccctggtttactcctggcttgggggcattaggaagcac

SEQ ID NO: 348683 - DNA, 100 bp, Homo sapiens
tcgcacagatatggaaaatcttaactccatccggcacaacctgtcactgcatagtcgattcatgcgggtccagaatgagggaactggcaagagctcttgg

SEQ ID NO: 348684 - DNA, 75 bp, Homo sapiens
gaatatttaatggaaaatcgcttggttaaaacctgacacttttaacagggtgataaaagaaaatgtggctgaagt

SEQ ID NO: 348685 - DNA, 74 bp, Homo sapiens
cccgcccccggcgccatcttcccgaccgcgagccgtccaggatgagaacaagttgagcagtgccaacggccatg

SEQ ID NO: 348686 - DNA, 82 bp, Homo sapiens
gtcagctctttccccgtcagcatcccagccgtgctcacgcatcatcggctggttcgtgcgaagcttcaagtacttttacggg

SEQ ID NO: 348687 - DNA, 80 bp, Homo sapiens
gataattttatcccagggtggctgaatcacggaatggtatacttctcagccatgtgagattgtggtggattgtggaccat

SEQ ID NO: 348688 - DNA, 100 bp, Homo sapiens
cagatgaagaaggcgttcgcaccggaaaatgtagcttcccggttaagcctctggaattgctttggcactcgttagatgaatggctagttttaatagccac

SEQ ID NO: 348689 - DNA, 100 bp, Homo sapiens
catctaatcacagactcctatttgaagtatttgacgaaaatagactgccacccacacagaatatgcctatgggtcctggagggatgaatcagagcggccc

SEQ ID NO: 348690 - DNA, 50 bp, Homo sapiens
gcgaggtcaagctgctgctgctcggcgcatattaaatttcctattgacta

SEQ ID NO: 348691 - DNA, 51 bp, Homo sapiens
gtggaaagaagttgcaaaacactgggtgccttagctggaccaattattgtg

SEQ ID NO: 348692 - DNA, 100 bp, Homo sapiens
cgattctcctgcctcagccccctgagtagctgggattacaggcacgcgccaccactcccaggaaataatgaagatgtttcattttcaagaccagcagatc

SEQ ID NO: 348693 - DNA, 100 bp, Homo sapiens
tttcttcccctcggatatagaatagacattcccaagaatggcaagttaaacatacagtcgcctctgacaagccaggtggtgaaactgaaacagatcgaac

SEQ ID NO: 348694 - DNA, 98 bp, Homo sapiens
gagcctccccgctggagagggagccagaacagggaagaacggattcacacaggatggcttgcagaagacgctatttgcagttgcagtggtgcagaatg

SEQ ID NO: 348695 - DNA, 50 bp, Homo sapiens
gagccgcgcacaccaccatcacgatttctgacaggactctgggcccctcc

SEQ ID NO: 348696 - DNA, 75 bp, Homo sapiens
cttcaaatgctgtttgtattccagagactagatacagaagatcattgagacactgacacagcagcttcaggcaaa

SEQ ID NO: 348697 - DNA, 74 bp, Homo sapiens
cgctatgcggaggatgttggggccgtcaaaataactgaagtgaagtgatggactccgatttggagagtagtaag

SEQ ID NO: 348698 - DNA, 82 bp, Homo sapiens
ggatgtggtacagctccatgctcctcgatatcagtctatgagaaggcatcttcacaactatttcacagtgactcttggaatt

SEQ ID NO: 348699 - DNA, 100 bp, Homo sapiens
gtttgctgcggtcagcatcacaactaatcaggctggccgggtgagagcaaaactttcagcaccacttgctggcatgggaaatgccaaggcagattctaga

SEQ ID NO: 348700 - DNA, 74 bp, Homo sapiens
aagagaatgcatcaatttttgtgcattcccaacatgctctaatgcttcaggttgtagctgcttgtgccatgcca

SEQ ID NO: 348701 - DNA, 75 bp, Homo sapiens
ggcggggcggctgtgcggagcgcgcgtgcagacaatgcagatcttcgtgaagactctgactggtaagaccatcac

SEQ ID NO: 348702 - DNA, 90 bp, Homo sapiens
ccctgaccatggctccctgcagtaccctttaacggtttgatctgtggatgaaatgaatcatgattttcaagctcttgcattagaatctcg

SEQ ID NO: 348703 - DNA, 100 bp, Homo sapiens
ggattttatgtgctacagtctgcggaacggagcagtatttcaatgtggaggaggaggcaaaacagattcagaatctgcagaaagcaggcactcgtacaga

SEQ ID NO: 348704 - DNA, 51 bp, Homo sapiens
ttcctttttgcaccatccgtactaccagccatgcgatgatggacctactgg

SEQ ID NO: 348705 - DNA, 95 bp, Homo sapiens
gaggatgctcctgcctcccagagaggggagccggcgaggatcaaaatcttcgaaggagggtatgagaaagtgccagtcatcttggttgggaacaa

SEQ ID NO: 348706 - DNA, 90 bp, Homo sapiens
gaagcacggaaacgaagtctctggctcaaccagcaaaagtgaaccactccccagatgtgaactatgaagactttactttcaccataccag

SEQ ID NO: 348707 - DNA, 96 bp, Homo sapiens
ctgcctctgcctggccgcggctctgggaagtgcgcagtccgggactttgaatccaaagcaaaccatcttggtgattctggtgggactcctgtgaag

SEQ ID NO: 348708 - DNA, 98 bp, Homo sapiens
gccagcacgatcccaccgcacgttcagaagtcggcacaaacatttcactgaagatattcaaacaaggcaatatcgttccttggaagttctaatcggat

SEQ ID NO: 348709 - DNA, 75 bp, Homo sapiens
tgcctatgaccggcgtcgagaatttcaactggtgggcaaacgcagaggcgggaacaaactagccctcaagacggg

SEQ ID NO: 348710 - DNA, 76 bp, Homo sapiens
ccgccgcctccgacctgggcgctcagcccccggatcagcctgcctctggagttcaagctgaagaagatgtggaaaa

SEQ ID NO: 348711 - DNA, 98 bp, Homo sapiens
gacaatgccaatttacgtgtcattatggaactacttatgagcctgcagaattttcttcctgccccttgaactctgatgaagaagtgaataaatggttg

SEQ ID NO: 348712 - DNA, 75 bp, Homo sapiens
gctaaacatccatgtaatgcctcaatgtctgaagatgatgagaaactgaaaaagaggaaggagcgatttgggatt

SEQ ID NO: 348713 - DNA, 101 bp, Homo sapiens
aagtctttccaaaaggtcaaggttcacaagaatcatttgctgtttcaaatagagaactgtgcgatgatgagaaagagttcatacattttccagtatgtgag

SEQ ID NO: 348714 - DNA, 98 bp, Homo sapiens
agaccgcgcgcagggcctgcagcgggagctggacggcgagcgcgagcggcgcgagaaagcagtgaaaaagcagtctggctcccgaggtccacccctta

SEQ ID NO: 348715 - DNA, 100 bp, Homo sapiens
gttcagcaccgccccagaaatcaagtccggagaaggcggcttccttggagtatgactatgagaccatccgcaacatcgactgctacagcacagatttctg

SEQ ID NO: 348716 - DNA, 87 bp, Homo sapiens
ctttgataatgaaggcattgctatttttgcacttcagttcacatactatttatgggttgtctgcattcaaaagagcattctattaaa

SEQ ID NO: 348717 - DNA, 75 bp, Homo sapiens
attgacgccatgtcgggttattcgagtgaccgagaccgcggccgggaccgagggaaacatgccctgaactgtcac

SEQ ID NO: 348718 - DNA, 82 bp, Homo sapiens
agacgggctggtgcagcgactgcagccgacgccgttcaaaggaacgagggagtgcatccgccccaacccttttccccctcgt

SEQ ID NO: 348719 - DNA, 100 bp, Homo sapiens
ttcccagctgctaaaggaagaggaaggggggacacagcgattgccacgcgccattggaatgtccctggccaaggagctcatattctctgcgcgagtcctc

SEQ ID NO: 348720 - DNA, 51 bp, Homo sapiens
atgcgcttcctgagggagtgggtggagagtgtccatgaaactgggaggcga

SEQ ID NO: 348721 - DNA, 95 bp, Homo sapiens
gattcctcctccttggtcgccgcgtccttggctggcgttctgcgctcctcagaccaccggcaggtgaacagcctgatgcagaccgaggagtgccc

SEQ ID NO: 348722 - DNA, 58 bp, Homo sapiens
caaagagcagcaccagaagctgtgggaagctcctagagtggcctcagctaggtaacca

SEQ ID NO: 348723 - DNA, 73 bp, Homo sapiens
atgtacttgtgcttcctgctggccgtgctgctgcagtatgaagtgtaacagaacagactttaccacctgaaac

SEQ ID NO: 348724 - DNA, 82 bp, Homo sapiens
cgctgaagctgccgccgttgcctccgccgccaagagtgagcgagcggacccgcgatgggtctcggcgcggaagatggccggc

SEQ ID NO: 348725 - DNA, 102 bp, Homo sapiens
gtcgggaacatgccagctaacgaggacgctccccagccaggggaacatggcagtgcctgtgagtactataaccaagagtggacattgtgggatcgctttgag

SEQ ID NO: 348726 - DNA, 100 bp, Homo sapiens
aaagtcacaaatcatcctagtaataaagtgaaatcagacccacaacgaatgaatgaacagccacgtcaggtctttgatttgcgtcagtgtcatcgacaga

SEQ ID NO: 348727 - DNA, 74 bp, Homo sapiens
caaagtcatttgcaagtacttcgtggaagggcgctgcacctgggataactgggatgacgatgatgatgaaaaaa

SEQ ID NO: 348728 - DNA, 94 bp, Homo sapiens
ggctttggtccccagcgcagtgaagtggtgagcctttttgtcactggtatctctgcattagccagattggacatatgtaaagggacatcagtat

SEQ ID NO: 348729 - DNA, 110 bp, Homo sapiens
gtgggccgccgtcggcagcaagaacagagagagaggtggacagatctgagagatactgaggtgaaatgacaatggatgctctgttggctcgattgaaacttctgaatcca

SEQ ID NO: 348730 - DNA, 74 bp, Homo sapiens
cttctaaatctgttgatgaagctctttgccatcggctcccagctgtctcctgaacagggaagctcaggcattga

SEQ ID NO: 348731 - DNA, 118 bp, Homo sapiens
ctcgatggcagcgacacaattgtctgtgacagtaacagtacttgggatcccccagttccaaagtgtcttaaagtgttaaagaacccagtatgtaaattatatagatttcccacatctg

SEQ ID NO: 348732 - DNA, 75 bp, Homo sapiens
ctgatgagtgcaatgacaacatcatcttctcagaagtatgccgagattttgctgtcctggaggaccacaccctgg

SEQ ID NO: 348733 - DNA, 82 bp, Homo sapiens
ctgggagctgcctctgaggaacacgccgcaggaggaatcattatagattctaaaaatatattttcccttctctgtggacttg

SEQ ID NO: 348734 - DNA, 100 bp, Homo sapiens
ctcgaccccctctcttggggtttaagtttggcaatgaggagcagcagctggcgtgggccaagcgggagagcgagaaggcggaacaggagaggctggcgcg

SEQ ID NO: 348735 - DNA, 100 bp, Homo sapiens
cagccgcagccgcagccgcagcagcaggtcaaaatgcagatcttcgtgaaaacccttaccggcaagaccatcacccttgaggtggagcccagtgacacca

SEQ ID NO: 348736 - DNA, 100 bp, Homo sapiens
tggatgcacgttttagaagatattgccaaatttttcaaagccatagttggtaaaaacttacctgatgaagaggtaaagattatagttcccaacagcacag

SEQ ID NO: 348737 - DNA, 100 bp, Homo sapiens
aaattctggacttcatgaaggatgtgatgaagaaactcagcaacacttcgtaccaggccacatccacgtcctccgagcctacatcaagacccaagtgaac

SEQ ID NO: 348738 - DNA, 99 bp, Homo sapiens
ctggcagcaccgcatcaaggactatcacagttacatgctacagatcctgaacccgccgccctccccggccacggacccctccctgtacaacatggacat

SEQ ID NO: 348739 - DNA, 76 bp, Homo sapiens
agtgtccagcgacagcttctgggagaattaaacaaccaccatgtcgagcaaaaaggcaaagaccaagaccaccaag

SEQ ID NO: 348740 - DNA, 101 bp, Homo sapiens
attcactgtctccagcgcctcttctttgagaaccaccctgcctccatccctgccaagatcctgcagctcctgaaaggcaagctggtggtgggtcatgacct

SEQ ID NO: 348741 - DNA, 75 bp, Homo sapiens
ctgaggtcgcctggggaccccagaaggtggtgaagaacaacctgaacccggtgtgggaggccttcaaagtctctc

SEQ ID NO: 348742 - DNA, 50 bp, Homo sapiens
agaggatcttgggcgccgccagaacaaggacagggggacatccctacatt

SEQ ID NO: 348743 - DNA, 90 bp, Homo sapiens
gaaagtggtggagattgtccgctcgagcctgaaggaccctgagaaagggggcgacgatggccttctgaggggctgggacaccagggtacc

SEQ ID NO: 348744 - DNA, 75 bp, Homo sapiens
tgcaaaactgcctccagatggaaggatatctcacgaatttgctttgtgatcgaactgtgagaatttggaaggctc

SEQ ID NO: 348745 - DNA, 96 bp, Homo sapiens
caagactggtgggacccagactgacttgttcacatgtggcaaatgtaaaaagaagaattgcacttacacacaggtgtgggaggtgctgaacctttt

SEQ ID NO: 348746 - DNA, 100 bp, Homo sapiens
gactttccaggatgaacaacgtttccagctgggaattatggatgatgctgcagagtgctttctcagtaaacgctctgccactgacctgtgtggcaggaat

SEQ ID NO: 348747 - DNA, 95 bp, Homo sapiens
gacagtggacagtattggccaagcgtataccatgcaatgccttagccctaatttgtttagaactgtaatatgcacagttaaaacaacttgtcctc

SEQ ID NO: 348748 - DNA, 82 bp, Homo sapiens
tctcgctgtcctggtacgcggcactcagcggccagaaaggcgagaaccactgtctctgatcaacgtgcggaagaggaacgtg

SEQ ID NO: 348749 - DNA, 98 bp, Homo sapiens
gcaagatgttgacgttgcagacttggctagtgcaagccttgtttattttcctcaccactgaatctacaggtttccattaactttggaccatgcttcaa

SEQ ID NO: 348750 - DNA, 100 bp, Homo sapiens
gtaacaaagcactctgtgctagtgatgtgagcaaatgcctcattcagagcttctttgaagggcagtctgcaccatgggactcggctaagaaagatgagaa

SEQ ID NO: 348751 - DNA, 82 bp, Homo sapiens
ttttggacaggaaagtgtaacatcagttacagagtcttcccaaaagttatcttctgggaagatgccaatacatgatcacgac

SEQ ID NO: 348752 - DNA, 50 bp, Homo sapiens
gtccgtggtccagtgtgagatcgacgaggacaatctctatgggaagcaga

SEQ ID NO: 348753 - DNA, 100 bp, Homo sapiens
aggaggtgcagaaggtggacagggtaaaagaaagagacttttttctaaagaatgggtacacatctttctggaatgactgcatatcatcaggcctgcgagg

SEQ ID NO: 348754 - DNA, 88 bp, Homo sapiens
gagccaccgcgcccggccctgtaattctcaactccaaagaagcctaaagccccagacaatccatttcatggcattgtttccaagtgtt

SEQ ID NO: 348755 - DNA, 106 bp, Homo sapiens
cgcacaccccccagcccagactccagccctggaccgcgcatcccgagcccagcgcccagacagagctttgctgcaagataacatcgctgatgctgtagcttgtgca

SEQ ID NO: 348756 - DNA, 80 bp, Homo sapiens
tgggcgtaggaccctccgagccagatggtcctagaacaattggagattcatacgcacacaaagaacctcaacccttacct

SEQ ID NO: 348757 - DNA, 75 bp, Homo sapiens
aatggctcatccacaccaagaatcagccacagacggaacaagcatgcaggctttttcttctggggtggatctttc

SEQ ID NO: 348758 - DNA, 75 bp, Homo sapiens
ccagcgctttacaggggttatcgcacttaagcctcggaacaactttaccagatgccagaagtgggtggagaactg

SEQ ID NO: 348759 - DNA, 103 bp, Homo sapiens
gtcatcctgctgctgaagatctggaagacgcgctcctgcgccggtttttagaacttcagccataaaaatgggcagaattttccttgatcatatcggtggtacc

SEQ ID NO: 348760 - DNA, 88 bp, Homo sapiens
gaaaatgtacctattgaacagattccacttgtgaagaaatatggctacacacacctttctgcaggagagctgcttcgtgatgaaagga

SEQ ID NO: 348761 - DNA, 90 bp, Homo sapiens
gtgccggcttctcccctacgcgctacacaagtggagctccttttcctccacctaccttcccgaggtgttcctgaaaagccccatagtgat

SEQ ID NO: 348762 - DNA, 82 bp, Homo sapiens
cgataacgcgcttttgctcctcctgaagtgtctttggtccaacgttgttccagaataccaagctgctattttacacttgaag

SEQ ID NO: 348763 - DNA, 80 bp, Homo sapiens
gcgttacgggcggtacggaggagctccaattaaggaacagctatatcctgcttccttctgtaagcagcatcgacttgtgc

SEQ ID NO: 348764 - DNA, 100 bp, Homo sapiens
ccgccgctgcctgccgccatgaatataacaccagcaatcctgacttgttgctagtcatatttcaagtgacaggcatcagcctcctgccaccactgggagt

SEQ ID NO: 348765 - DNA, 75 bp, Homo sapiens
tgtgatattagggaagatgcaagacttttttacagaactaagggcatgaactacttggaggaccgtcgcttggtg

SEQ ID NO: 348766 - DNA, 90 bp, Homo sapiens
cagattcgcagtggtcgcttcttctccttgcttataggctttatactgtggtgcctcgcctggtcaagtttgtagatattctgaccaatt

SEQ ID NO: 348767 - DNA, 100 bp, Homo sapiens
tccaacttcccgatcggcgagaagcaggatatctgggcatccagggcattgtggatgcctaccgccaagccctgccccaagttcgcctctatggccctac

SEQ ID NO: 348768 - DNA, 75 bp, Homo sapiens
gggaggtcatgcctgatctgtacttctacagagatcctgaagagaaagttgtagctgacctcatgaaccagatcc

SEQ ID NO: 348769 - DNA, 76 bp, Homo sapiens
tacacaaccgtctccagccttggtctgagtggactgtcctgcaggacatggaggagtgaatcagcttgggggggtt

SEQ ID NO: 348770 - DNA, 75 bp, Homo sapiens
ggagctccccagctggtggctggagcgaccccttgttctttggtggcgctgatacttggtgcttgaaaaactgaa

SEQ ID NO: 348771 - DNA, 82 bp, Homo sapiens
gccgaatctccggccgaagagcggcggcggcagcggcggtgtggacactgccagcggctgcagccgacttggaatgacctgg

SEQ ID NO: 348772 - DNA, 100 bp, Homo sapiens
gggggctgctgcaatgacgagggcctggagtgtgtgcccactgaggagtccaacatcaccatgcagcttcttccagaccagctggtcttgcttctggagc

SEQ ID NO: 348773 - DNA, 98 bp, Homo sapiens
aagcattcagcgctggtttcgacaaagacgcaatcaggagaagccaagcacgctgacgaggttctgtgagagcattactatactggcaattgctggag

SEQ ID NO: 348774 - DNA, 99 bp, Homo sapiens
tgatttaaacaagagatttccacagaagtgtcctgttggataaacgttttcgagctgagtgtaagaattatggcgtcatcattccgtatccaccgtcca

SEQ ID NO: 348775 - DNA, 100 bp, Homo sapiens
ccggagcagagccgaagctcgccggagaagaggagccccagcgccccggtttgcaaagcagccatccgcagagccatcctgtgcaaaggaaggagctagg

SEQ ID NO: 348776 - DNA, 82 bp, Homo sapiens
gtctccgcccgcaccatgcggctgggcaggcccactgctcagtggagcgtggaggacgaggaggaggccgtccacgagcaat

SEQ ID NO: 348777 - DNA, 100 bp, Homo sapiens
caatgccatccagagctgtgcctcccagcaccacagtccttctgcagtccctcgtccagccacccccagtttttcaacacatgtcctggtaatgaacaac

SEQ ID NO: 348778 - DNA, 74 bp, Homo sapiens
cctgaatctacccctgcaggaaaccaagaaatgcatgaaaagggacaaggagtaatagaagagaatgaagttta

SEQ ID NO: 348779 - DNA, 100 bp, Homo sapiens
gggacgtggggtccaccggtacaggtcgccgccctggagaggcaggtgtttgacttcctgggctaccagtgggcgcccatcctggccaactttgtccaca

SEQ ID NO: 348780 - DNA, 50 bp, Homo sapiens
gtttttgccaccacactccagcttggtgggagctggtgaggtggccaact

SEQ ID NO: 348781 - DNA, 100 bp, Homo sapiens
cgcgtgtcctcggagcgcggtccctgtattggtctcctgctcctagagttttctggatatgccgcagaaggatccgtgccagaagcaagcctgtgagata

SEQ ID NO: 348782 - DNA, 101 bp, Homo sapiens
aagacaggagtggagtgatatcagacaccgagcttcagcaagctctctccaacggtcccttcaccgatgttgtcaccaccaacctaaagcttggcaacccg

SEQ ID NO: 348783 - DNA, 75 bp, Homo sapiens
cgccccctacccgcttctcgtagtcctgggagcacagcagaagtatgatatcatcaagttgaatcgaaaggaagg

SEQ ID NO: 348784 - DNA, 76 bp, Homo sapiens
gatgagggacaacctctttgaaattgtaacaacgtctcgaactttctatgtgcagtctctgctggatgaaccgaat

SEQ ID NO: 348785 - DNA, 82 bp, Homo sapiens
tgccaccgagccgggcccacctccccaccaaggaaggtaactaggatttctacctcaaccgcgagacctatgcaaggacggt

SEQ ID NO: 348786 - DNA, 90 bp, Homo sapiens
tcccaggacccgcctggctgcgagatatgttatgaagacagtatggagtttccagaccatagtagacatttgctacagtgtctgagcgag

SEQ ID NO: 348787 - DNA, 82 bp, Homo sapiens
gctaacagaactggaccttttcgaatttagtggcatggttctactgtgtaaagtctgtggggatgtggcgtcaggattccac

SEQ ID NO: 348788 - DNA, 82 bp, Homo sapiens
gggaaggcgattggcatcgatctctccatcccttccgaggcccgacttcggcggctatgagaggttttcctccgagtaccca

SEQ ID NO: 348789 - DNA, 101 bp, Homo sapiens
gaagcagcagctctcgctccagaagcttcactttggaatgaatctgaagtctgctgcagtaaaacacagaaggctttaaaatgttttcttgcataaaattc

SEQ ID NO: 348790 - DNA, 83 bp, Homo sapiens
cgaagagctgccgtcgctgcagagaccccgctatggctgtgtcgtgaaaactacccctaaaagccaaaatgggaaaggaaaag

SEQ ID NO: 348791 - DNA, 82 bp, Homo sapiens
cttatatcgccagtccagcagctaaggatattttgtgcaggtcaaaatgcagatcttcgtgaaaacccttaccggcaagacc

SEQ ID NO: 348792 - DNA, 99 bp, Homo sapiens
gatatggagattttcagtattgtgagcaagcaaaatcagtaattgtgaattccttgatctatgaacttttctctgttatggttcattctgggagcgctg

SEQ ID NO: 348793 - DNA, 75 bp, Homo sapiens
gatgcagcaaggaaataggatttaaccgctctctgcctcccagcttttcaggatgtccagcaaagaatcctgtgg

SEQ ID NO: 348794 - DNA, 90 bp, Homo sapiens
tggatgaaagataaagcccttaaggacaaggtggtgtataaggaggccgagaagagcccacagctgggactgggctgcctctccttcccg

SEQ ID NO: 348795 - DNA, 90 bp, Homo sapiens
ccaaaatgcatgtgttgcagataagcacaggctctggaatgggcactctccttatcagcaagatccgagaagaataccctgatcgcatca

SEQ ID NO: 348796 - DNA, 107 bp, Homo sapiens
cccggccggagctgggtctggagacgccgtggcagcctgaacggagtgtgcgacggattgggaggctgcagagactgcaagtctggaagaacagctgcaaggatggg

SEQ ID NO: 348797 - DNA, 89 bp, Homo sapiens
gaggagctgcaggaagcgatccggagggcgcaggagcccaggatgtgcgagttcaagtgctacccgaggtgcgaggccagctcgggggc

SEQ ID NO: 348798 - DNA, 75 bp, Homo sapiens
gtataataatgaagttaaaagagcagcactccaagagaccttttaatcaaagtgaagtttggggaaagcattgag

SEQ ID NO: 348799 - DNA, 101 bp, Homo sapiens
agttcctaggccagcctgtcacgtgggagggaggctcggcgctcagggggaacacacctgaaactagaggaacagcttatgtggtctatgaggacatcttt

SEQ ID NO: 348800 - DNA, 111 bp, Homo sapiens
cagctgccgaagtcagttccttgtggagccggagctgggcgcggattcgccgaggcaccgaggcactcagaggaggtggtgatgatgtccagcaactctgtgaagcaggag

SEQ ID NO: 348801 - DNA, 74 bp, Homo sapiens
aaaaggaagactctacacccttctcgttattcagggatttatcaaagatgttcatgaagactcccttacagttg

SEQ ID NO: 348802 - DNA, 50 bp, Homo sapiens
gaagagggaagacacgcggaaacaggcaatactgaacactgcgcagcttg

SEQ ID NO: 348803 - DNA, 97 bp, Homo sapiens
gccaggacgtcgggaggacctgctgaccacagtggccgagaagtcgcgcgtgctgcagctggaggaggagctcaccctgcgccgaggtgaaatcgag

SEQ ID NO: 348804 - DNA, 100 bp, Homo sapiens
aaagccgaagatggcggtccccgcggcgctgatcctacgggagagccccaggtatttgtggaaacattagacaaatgttttgaaaatgtctgtgagctgg

SEQ ID NO: 348805 - DNA, 88 bp, Homo sapiens
ggcggtgagcgcccatatgggggttctggagagcggggtgtggggggttcggtccgagcccggtgggaggctcccggagcgcagcctg

SEQ ID NO: 348806 - DNA, 80 bp, Homo sapiens
ggagcccagggagcgccgcgcgaccaggaggcggcggcgccgccggctttgttgagaagctgatgtctcctcgacttcca

SEQ ID NO: 348807 - DNA, 50 bp, Homo sapiens
cctacccgggatacggaggaggggaaatacaactggagcacgcaaagcaa

SEQ ID NO: 348808 - DNA, 76 bp, Homo sapiens
tggataggcagaagaaagaagaggagaaggagcagtccgtgctcaatgtcccagaagcttttgttgacaattccag

SEQ ID NO: 348809 - DNA, 97 bp, Homo sapiens
caagctgctgttattaaccttactggagtaggaagttttatgcagtcacaggcagctgaaacgagatcctgcgttcacttatgaagtgatagtagtt

SEQ ID NO: 348810 - DNA, 90 bp, Homo sapiens
gggcgctcgagacttaccagagccacaagacatggagaagggctgtcacttcctgcacatcttggcctgtgctcgcctgagcatccgccc

SEQ ID NO: 348811 - DNA, 82 bp, Homo sapiens
cgagcggctgctggggacggcggggaccgatcagttggccttatttcctcagtggaaatctactcactatgatgtggtagtt

SEQ ID NO: 348812 - DNA, 82 bp, Homo sapiens
cctcgacgtcttgcctgtgtcccacttgttcgcggcctatagcccgagcgggaagaagttccgcagcaagccgcagctggcg

SEQ ID NO: 348813 - DNA, 74 bp, Homo sapiens
ctacgtcccgctgccgtcgccgccgccaccatgcccaagagaaagaagccatgcagtgacacccgctaagactt

SEQ ID NO: 348814 - DNA, 91 bp, Homo sapiens
aggtcctgcaggtggagctccggcagccgccctgcctactttggggataaaggattatttggtcttctggatttggaggcaatcagcggac

SEQ ID NO: 348815 - DNA, 75 bp, Homo sapiens
agaagcttgggctcacttccacaaatctgagtcagtgctgattctctcaaatagagcttgaaggataaatcttca

SEQ ID NO: 348816 - DNA, 100 bp, Homo sapiens
cttggggccctttgggacgagtgctgtgactgtgttggaaaaactcattgtatccaacgaacaagaagttttgcgagttcattacagagctgcaagaaca

SEQ ID NO: 348817 - DNA, 75 bp, Homo sapiens
tggaccctgcagagcgtgctgtggtcagagtcgctggtatataatgtttacatggcagggaggcagctgtgttct

SEQ ID NO: 348818 - DNA, 75 bp, Homo sapiens
caaagagccggatcgcaggctccctgcctactcccccaccggggatttcaggaatggttttagggaagactgttg

SEQ ID NO: 348819 - DNA, 83 bp, Homo sapiens
cggtcggactcccgcggcgggaggagcctgttcccctgagcatggcggacaccgacctgttcatggaatgtgaggaggaggag

SEQ ID NO: 348820 - DNA, 75 bp, Homo sapiens
ctcacagccccggccccaccaggatccaggctattgcggaggaagctatggccacctaccgcacctgcgtggccg

SEQ ID NO: 348821 - DNA, 75 bp, Homo sapiens
ctggagccagactgcctgggtttgaattgtgcggtttcagctacgtggtgaacatgggtctgattgacaaactgt

SEQ ID NO: 348822 - DNA, 141 bp, Homo sapiens
gagcctctacaccaggaagaggatggtctcctacaccatcaccctggtcttccagcactaccatgccaaagatgctcttagtgatcttgcattacactttctgaataaaatgaagatcatggtgattaaggatattgaaag

SEQ ID NO: 348823 - DNA, 90 bp, Homo sapiens
gtttgtggaagcctcgcccgcatcctacagcccagacgagttagataagtaatggaacatcatctgtgatcgtctccagaaagaggccat

SEQ ID NO: 348824 - DNA, 138 bp, Homo sapiens
ggcgatcctaatcttcaacaaccacgggaagccgcggctctccaagttctaccagccctacgccgaatacatcaagcaatggtaacatctttaaatgaagataatgaaagtgtaactgttgaatggatagaaaatgga

SEQ ID NO: 348825 - DNA, 90 bp, Homo sapiens
tcccttttgcctcagatactattttgaaggcccctgtgtccgtctgggatgaggaggaggatggtgccgtgtttaccgtcacaagccgcc

SEQ ID NO: 348826 - DNA, 82 bp, Homo sapiens
gcggggcagttcgggccggctgtcctggcgcgagagcgcctgctcgctgtgcccccgggttatgacgacccccaataaagga

SEQ ID NO: 348827 - DNA, 103 bp, Homo sapiens
gaaggtgaagagttgtcccagctcggcccgcgggggagccccgggagccgcacgggcgtgatggtgggcatgggtcagaaggattcctatgtgggcgacgagg

SEQ ID NO: 348828 - DNA, 119 bp, Homo sapiens
gcgccatagtgaagccacagtctagctcctgttcctatatctgccagcactgcctcgtccaccttggagacattggcttcacaggctgctcaagaagccgagatcaatgccagaaaagc

SEQ ID NO: 348829 - DNA, 90 bp, Homo sapiens
gcgagcggtggtttggacgccggcggagacgcgggcgaggttgtcccagttttggtgcatctcctgtctgctatcagcagtgttaggctt

SEQ ID NO: 348830 - DNA, 90 bp, Homo sapiens
tgcagaggaaagaaaagaatacattcctgattacctgccacccattgtgtcttctcaagaagctggtgggcacggaggatgctcttctgc

SEQ ID NO: 348831 - DNA, 75 bp, Homo sapiens
ggctagtaaaaaggacagaattgaatcacttgaaaagaggctcgagatgacccctaaatccaaaaggaagagtat

SEQ ID NO: 348832 - DNA, 100 bp, Homo sapiens
gggaagtactctgaaaattccacatgtggagaggaagatcttggacttatttcagcttaataaggtggtggacataatgcgagttaacgtggacaaggtt

SEQ ID NO: 348833 - DNA, 101 bp, Homo sapiens
aatagcagcccagccttgtcaggccagctccagttcccagagaatatggcatggaagaggagatggttcgtgttacgcagtggccgtttaactggagatcc

SEQ ID NO: 348834 - DNA, 60 bp, Homo sapiens
tttgcctttctggacacagaagtatttgtgacagcctctcaacattgcctacagccacat

SEQ ID NO: 348835 - DNA, 100 bp, Homo sapiens
gtgcatagcagtagctgttgtttgggctgtgtttcgaaatgaagacaggttattgccgacatggaggcccaggttcacaagttgagagaagaattgatca

SEQ ID NO: 348836 - DNA, 75 bp, Homo sapiens
gagggacacgcagtgacgagcggccgaagcagctttgcggactggaatgtcacgtggaataccagcaaccccgac

SEQ ID NO: 348837 - DNA, 75 bp, Homo sapiens
gccctgtccggcatctgtcttgagctcccagcaaggttagtctgaatgattcccacaatcagatggtggtgcact

SEQ ID NO: 348838 - DNA, 100 bp, Homo sapiens
tcgcatttgtgcagctgtcctctgcaatgaaacaccatctgattcagatcacaagaagaagaaaaagaaaaaagaagaggatcctgaacggaaaaggaag

SEQ ID NO: 348839 - DNA, 98 bp, Homo sapiens
ctggaacttcatcatcatctacttcacaggaattgccatttctgacattatctctacggtagaattcaaccacacgggagaattactagcgacagggg

SEQ ID NO: 348840 - DNA, 100 bp, Homo sapiens
tcctacgtgaaatcactgtggcaaccgggggtgggactcttccctggacactgtgttgagttaattaaccaaaaagttccccagtcagtgaccaactcag

SEQ ID NO: 348841 - DNA, 75 bp, Homo sapiens
ggaaacctttccaacacagatgtccaagctgccaagtttactcctggcttgggggcattaggaagcactggaggc

SEQ ID NO: 348842 - DNA, 88 bp, Homo sapiens
tacacacgggccaatctggctagtaaaaaggacagaattgaatcacttgaaaagaggctcgagacatcgctattgcggttccgaggca

SEQ ID NO: 348843 - DNA, 83 bp, Homo sapiens
acccttgccgctgctgtcctgcgaccccaagcagccacgccgcaatgaagagcttcttacagtgaaagcaaagtaggtcgagt

SEQ ID NO: 348844 - DNA, 101 bp, Homo sapiens
cgagactactggccgaaggggcgtctgcggctctccgccgtccccagccctgcctctccctgggctctgatttcctttgacctcgctgagtacactgcgga

SEQ ID NO: 348845 - DNA, 128 bp, Homo sapiens
gcagccagtagagctgctgcttccttcggccttgtccgagcaaacagaggcgctcatccacagagccacatctgttagcaacgcacctcttgctttttcctccaaagtatgttatgttaagtttcgtg

SEQ ID NO: 348846 - DNA, 98 bp, Homo sapiens
ttccacgtcatccgcatcaacaagatgttgtcctgtgctggggctgacagagcggcaacacccttctcagactcgtggtactacccgtcctatcctcc

SEQ ID NO: 348847 - DNA, 100 bp, Homo sapiens
ctggcagctcgtgcaattgttgccattgaaaaccctgctgatgtcagtgttatatcctccaggaatactggccaggaagaaggaccatggaaatctcagt

SEQ ID NO: 348848 - DNA, 75 bp, Homo sapiens
aaggtgtaaccagcatttcagctgacacccataaggtggataagattgtggaccagctgcagcagttaatgcagg

SEQ ID NO: 348849 - DNA, 83 bp, Homo sapiens
tctttctatctcgagatcttcgatgagtccccctctacacaagaatctggatgcacgagaaaagtctaccttcagagaggaaa

SEQ ID NO: 348850 - DNA, 101 bp, Homo sapiens
ctttctgcgctcatgtgtcggaactagatctttctgacaacaaactcgaagactggcatgagatacagtttatgtaacttgatggaagaaaatggaattac

SEQ ID NO: 348851 - DNA, 50 bp, Homo sapiens
gcagaatgattgctggccaggttttaggaatctctgaaggaagaagatga

SEQ ID NO: 348852 - DNA, 75 bp, Homo sapiens
gaagtattctgatgtttcaggtctgcttcatgcttgagagttcaaaccggcttgatgaagaacacaggctaattg

SEQ ID NO: 348853 - DNA, 100 bp, Homo sapiens
tttgacagtcgtagatacaaatttttggatgatgatggatccatttctcctattgaggagtcaacgaagatgagaatgtgcctactgctcctgatcctcc

SEQ ID NO: 348854 - DNA, 75 bp, Homo sapiens
gcagccgccgagccggacgtgtccgcgaagatggcgggccgggtcacaaggcacttaaagcattgttgaggtcat

SEQ ID NO: 348855 - DNA, 50 bp, Homo sapiens
tttcccacaggctgcagggcaggaaagccgtgttgaaatccttgtctcct

SEQ ID NO: 348856 - DNA, 100 bp, Homo sapiens
tccttgatgttctcatcaagcccacgagtttagacaatgcagatcttcgtgaagactctgactggtaagaccatcaccctcgaggttgagcccagtgaca

SEQ ID NO: 348857 - DNA, 75 bp, Homo sapiens
ttgttggtggaggaggtggcaggcctcggcggttttgaacgaagaatgtgatcagaactggtacaaggcagagct

SEQ ID NO: 348858 - DNA, 87 bp, Homo sapiens
cagacttcgctcgtactcgtgcgcctcgcttcggtgtttcagtcacctccagtaacacgggcgtgccagatatctcgggttctgtgt

SEQ ID NO: 348859 - DNA, 75 bp, Homo sapiens
aggtttcccctgaagtactagcaaaggttaagaatagacccaccagcatttcgtgggatggtcttgattcaggga

SEQ ID NO: 348860 - DNA, 101 bp, Homo sapiens
ctggttggcattgacaacaaaatcgagcaagccatggtgtacaagaacttacagctctttatggagaacaaggacccccgggacgacctcttcgacaggct

SEQ ID NO: 348861 - DNA, 75 bp, Homo sapiens
aagggtggggggctggctcaggccgcctaccctgcccaggtggtgaacatcccgtccttcattgtccgcctggat

SEQ ID NO: 348862 - DNA, 75 bp, Homo sapiens
gaatgaagggaaaactgtttttatcagaaatctgacccggtcgtctcgtaccgcgagacggtcagtgaagagtcg

SEQ ID NO: 348863 - DNA, 82 bp, Homo sapiens
gtggccgtgttgctgatcgcctgggtggttgttggcgtgtccctgcagcgaaggatcctgcccgtggaccgggagcccgtgg

SEQ ID NO: 348864 - DNA, 128 bp, Homo sapiens
ccggaatgctgcccgatggccctgggtcctcgctgtggggcaatccgggcttgcagacgaggtcacggagctgctggacgtctccatggagctgggctgtttcctggctggagcgctcgtctcctctc

SEQ ID NO: 348865 - DNA, 100 bp, Homo sapiens
atcggatcggagcggatcggagcacaccggagcaggctcatcgagaaggcgtctgcgagaccatggagaacgggttgaagatgaaatccactgaggaggg

SEQ ID NO: 348866 - DNA, 100 bp, Homo sapiens
ccgccatgggctcctcgcaaagcgtcgagatcccgggcgggggcaccgagggctaccacgttctgcggatgtgtagcactttgtagtttaggtatttgga

SEQ ID NO: 348867 - DNA, 100 bp, Homo sapiens
gtttgctgcggcaaggacgagccggggcgctgaagttttcggctttgtgagaaaccttaccatcaaacacgatggccagcaacgttaccaacaagacaga

SEQ ID NO: 348868 - DNA, 110 bp, Homo sapiens
ccactttgcagtcgacatactcggataccagcgctcagcccacctgtgattatgagtgcctggtgaagaatgtgatgggatcactagcatgtctgcggagagcggccctg

SEQ ID NO: 348869 - DNA, 110 bp, Homo sapiens
cggggttagcggagcaatgcgcaggaataaggaagcgacctgcaaccgacgaatccacattcatctcaatggaaggatcctgccttaagtcaacttatttgtttttgccg

SEQ ID NO: 348870 - DNA, 100 bp, Homo sapiens
ggcgagagatggtcaggtctggagctcgaccgggccagagcctccattatggcatgctgaatttaccaaagaagaattggttcagaagctcagttccacc

SEQ ID NO: 348871 - DNA, 100 bp, Homo sapiens
tgccggcttcaccctcctaatggccaagattgacagacacctaatattcatgacttgagaatattctgcagctataaattttgaaccattgatgtgcaaa

SEQ ID NO: 348872 - DNA, 75 bp, Homo sapiens
gcatcctccacaccgacaccatctggaggaggcgttgccgtgagggtgtggagattcacttggagagctctgaca

SEQ ID NO: 348873 - DNA, 100 bp, Homo sapiens
gggagtcaccactggacctccaaggaagccacgtgcagacatctacaaccttcgatctcctgacgagttttgaacgaagaatgtgatcagaactggtaca

SEQ ID NO: 348874 - DNA, 100 bp, Homo sapiens
gcgagagtgggcgagaacgtccactgcgggccggcgaaagctgcttgctgagcgagagcgagaagcggcccttcgtggaggaggcagagcgccttcgcgt

SEQ ID NO: 348875 - DNA, 50 bp, Homo sapiens
gggcgccgcgggacctctccgggccatggactcggtgaaatacctggagt

SEQ ID NO: 348876 - DNA, 99 bp, Homo sapiens
acaggaggcagtagccaaacacccaggttgatgccggcccaggatggatcagacctgtgaactacccagaagaaattgtctgctgcccttttccaatcc

SEQ ID NO: 348877 - DNA, 96 bp, Homo sapiens
agatgtaggcttggagcagaatcaccaagcatcgccagcaccagattcaaccctatgaaaagataaaggccaggggcttgcctgataatatatctt

SEQ ID NO: 348878 - DNA, 98 bp, Homo sapiens
ctactgaaacaagggtcagtgcagaaggcattcccatcaagagcaccatggacaaccccaccaccacccagtatgccagcctcatgcacagcttcatc

SEQ ID NO: 348879 - DNA, 83 bp, Homo sapiens
cgcctgtgggcacagacaaggagctcagtgacctcctggacttcagcatgattcctaagcggctgtacaaggccctctccctg

SEQ ID NO: 348880 - DNA, 100 bp, Homo sapiens
aagaagggaaggcgcgagtgaggaaaggaggtactgtagtgtaatgaacaagtctggggtgaatcgtgtagtttggaaacgacctcgactcactcacaat

SEQ ID NO: 348881 - DNA, 100 bp, Homo sapiens
tctttctgagtgatggaaaacttaagtcgaatctctaccagccaggaaaattacccagtgacatcacagcaggtgtcgtgaaaactacccctaaaagcca

SEQ ID NO: 348882 - DNA, 76 bp, Homo sapiens
ctggaggggatggtcagggggaaggaggaatgacgctcaacctgcccaggtgacagacggttccttggtggcattg

SEQ ID NO: 348883 - DNA, 82 bp, Homo sapiens
cgcttcgatcgcctcgcgccggctgctctttccgggacacctgctccacttcaccttttgccatgagtaaaagctccctgag

SEQ ID NO: 348884 - DNA, 101 bp, Homo sapiens
cgggagcgcgaacgagcgacggcggaacccgtgggcctgtggactgcagcctcggcggtcagcaggatgacagtgatgggattccgtggtcagaagaacgg

SEQ ID NO: 348885 - DNA, 88 bp, Homo sapiens
actcttggaggaagcaaccatttcagtctgcaggtcattagggatgtcaagaaagcagagttgcatctgtctacagaaagggccaaag

SEQ ID NO: 348886 - DNA, 75 bp, Homo sapiens
ctgattactggacgctatgtagaagccagatgaagatttcgaaacagctgtcaagaaacttaatggaaaactata

SEQ ID NO: 348887 - DNA, 100 bp, Homo sapiens
ctgctgacagagcagatggcctggagattcatgacaaaatcatggagacatatctgaagagatggattaagaatgctttggattaaggattgtggagcac

SEQ ID NO: 348888 - DNA, 96 bp, Homo sapiens
acaacccgcagagacttctactggctgcgctcctttctggccggaggcagcacacttctgcttttgttccttcatcaggacgaatttactcttttg

SEQ ID NO: 348889 - DNA, 100 bp, Homo sapiens
caggaagatggattcatacctgctgatgtggggactgctcacgttcatcatggtgcctggctgccaggcaggaatgtatcctgtcaggtataatgtcagt

SEQ ID NO: 348890 - DNA, 75 bp, Homo sapiens
tgatgaagaaactttggctgataatattgcagcattttccaggatgaccagtgtcccagtgaaggaacgagtgaa

SEQ ID NO: 348891 - DNA, 50 bp, Homo sapiens
ttcagcaaaagctgtccttacaggttatgatgtgattgctcaagcccaat

SEQ ID NO: 348892 - DNA, 82 bp, Homo sapiens
ctccggatattacctgtggagaccctcctgagacgttctgtgcaatggagtacaagcgcaagctagccagagtttccctggt

SEQ ID NO: 348893 - DNA, 74 bp, Homo sapiens
cgatccaggcctacatcatcccatcgggagatgctcatcaggcaacgtgttggaccttccggagcttctcagaa

SEQ ID NO: 348894 - DNA, 82 bp, Homo sapiens
agatggccggcagagccgccgagacgccgaagagcccgccgcccgcgcgaggttatcaatactctggctgaccatcatcatc

SEQ ID NO: 348895 - DNA, 75 bp, Homo sapiens
atcttcattcatgactccagacaggtgtaatcgaatcctggaccggaaaggggaagcagtgccattcaagaataa

SEQ ID NO: 348896 - DNA, 100 bp, Homo sapiens
cgcatcacccgctcaatggctaatgaggccaacagcgaggaggccatcaccccccagcagagcgccgagctggatgctgagccagggaggcggcccttcc

SEQ ID NO: 348897 - DNA, 87 bp, Homo sapiens
tttgtggggtgaatagcgaaccaagcctcttgccttacagataattgacgaccttgccaacctagtggagaacacagatgaaaaact

SEQ ID NO: 348898 - DNA, 91 bp, Homo sapiens
ggcggtggcgacggccgcggggactcggagctgagaggagctgctgctcggaccagcgcgattgtgtcaaaatctcaattgccatctgaga

SEQ ID NO: 348899 - DNA, 74 bp, Homo sapiens
ggtccagcaaactccgcttccgattgggctaccacgccattccgagtatgagggaaatttgtgcacagagataa

SEQ ID NO: 348900 - DNA, 100 bp, Homo sapiens
ggggattgcctggcaggacgtgaaggggaagaggcccaccctggagtaaccctcactggagaatccagaggaaaatgttggggcttttcaggaagcataa

SEQ ID NO: 348901 - DNA, 90 bp, Homo sapiens
cgagcgggcctggcagagtctggccaaccacgccgtggcagaggaacccgcgggcacgtactacgacgtccccatcgccaccctggactt

SEQ ID NO: 348902 - DNA, 82 bp, Homo sapiens
cgggactcccgccgctgctaaatatatccgtaggaatggagagggaccggatctcaggtcagttcaccgggacctggaggcc

SEQ ID NO: 348903 - DNA, 100 bp, Homo sapiens
tcccgtccgccccagccgcgtctgggccaggagaaaagataaagtggagaattttcatgaagaacatgaaaagaatagtcaccatattcacaaaaatgct

SEQ ID NO: 348904 - DNA, 100 bp, Homo sapiens
agcagcaacagcagcagcaagttagtggattaaaatctcccaagaggaatgacaaacaaccagctcttcagtattgcctaagtgtaatcttgaacatggg

SEQ ID NO: 348905 - DNA, 100 bp, Homo sapiens
tggagaaaaggaaccttcattaacagatgccattccctctcacccaagagtgtttctgaaagatctatccagcactccgatggccagcaacaacaccgcc

SEQ ID NO: 348906 - DNA, 100 bp, Homo sapiens
gtgtggtttggattccatcagtctgttcggcctgccatgtggaaaatgatgcttaatatcgatggagaatgtactactcatcacctcccacctgtgaaag

SEQ ID NO: 348907 - DNA, 50 bp, Homo sapiens
ctgagctggagctggagctgtcggaaggttctacatgaaacattttctca

SEQ ID NO: 348908 - DNA, 74 bp, Homo sapiens
cttcgtgcaccggggcggtccgttgccaaagccaggagtctactcttcatcttgtgttgagacttcgtggtggt

SEQ ID NO: 348909 - DNA, 78 bp, Homo sapiens
actggggatgattacagttcttcctaaaaaaggtggtctgagctcggcctatgggggcctcacaagccccggcctcag

SEQ ID NO: 348910 - DNA, 100 bp, Homo sapiens
gggctctctctgctgtctccacgcagcagaagaaggcagacagggtggagctggaacgagccaagacgcagctgacatcaatgctcatgatgaacctgga

SEQ ID NO: 348911 - DNA, 83 bp, Homo sapiens
agccggggaatgaagctggctgagatcaagactagacgcttgaagcaaagctgccatcccagaagacgacatgctctcagcaa

SEQ ID NO: 348912 - DNA, 100 bp, Homo sapiens
cccttctgttacccgccacacacgtcgccgctggggactgggaaatcagggcatcggagagtgccacattaatggaacacttcagttatggaagatcaaa

SEQ ID NO: 348913 - DNA, 100 bp, Homo sapiens
ccccgccggggtagagatccggagcgccaccggcaaagaggtgttgcagaacctcggccccaaggacaaggaccgagaaaagctcatccgtagaagaaag

SEQ ID NO: 348914 - DNA, 100 bp, Homo sapiens
agcaaatcttttgcctggatttcttagattacaagaattgggagaagagaagtttacctttattgagaaatgtaacaaccctcgttctgtcacattattg

SEQ ID NO: 348915 - DNA, 100 bp, Homo sapiens
gtgttgcttgtgtgaagaaagcctcctaccttgattgcatcagggccattgcgtcaccaggagactaaagtccatcaaaaacatccagaaaattaccaag

SEQ ID NO: 348916 - DNA, 82 bp, Homo sapiens
aaaatgacagccttcatttctctgaacatactgccttatgggacagatcaaaactcccccactggaaaggattctgaaagaa

SEQ ID NO: 348917 - DNA, 85 bp, Homo sapiens
aaaaacaatagctcaaggaaacctttccaacacagatgtccaagctgccaaatgagcccattattgaagagccaagccgcctcca

SEQ ID NO: 348918 - DNA, 96 bp, Homo sapiens
gaattgattgtatatacatacttcttttctgcctcagaagaagtggttcctgagttgaggagctcaagcttgggaaaatggtgtgcattccttgta

SEQ ID NO: 348919 - DNA, 100 bp, Homo sapiens
ttcaatgatcccagcaacctcaccacctggctgttccttctctctacaagatgacacctttgaggccctgtgcatcgagccgttttccagcccgccagag

SEQ ID NO: 348920 - DNA, 80 bp, Homo sapiens
taccagttcctagctgaaaaaggtgatgtacaagcacagattggtccttcccgattccgggcccctgagttgctcttcag

SEQ ID NO: 348921 - DNA, 75 bp, Homo sapiens
aagaggctgaccgcaaatacgaggaggtggacccaagtggagagattgtggaactggcgaaaggtgcatgtccct

SEQ ID NO: 348922 - DNA, 100 bp, Homo sapiens
ctggaccccaactcagccttcctgcataccctggaccagcagaaacctagagtgtgggaagaagtcagtggctacgatgaaaacctgaacaccatccgca

SEQ ID NO: 348923 - DNA, 74 bp, Homo sapiens
tgctatccaggctgccattgacctcacagcgggggctgcagaatctaggtcaacctattaagatacgtttccag

SEQ ID NO: 348924 - DNA, 95 bp, Homo sapiens
ctgttggtatatccaggagcttttaatctgaccactggaccagcccattgggagttacttcagcgaagccggcaaagcactggcatattgaaaac

SEQ ID NO: 348925 - DNA, 100 bp, Homo sapiens
gagatatcctaaaatttcctgaagaactggaacacgtagaaagtgcaagcaaaggaaagaccacagcaagattctttcattcgtctcctcctagcctggg

SEQ ID NO: 348926 - DNA, 80 bp, Homo sapiens
aacagtgctcggaaagcatctattgtgaaaaacctaaaggataccttagaccctctttcccagctgcccgctcctcagca

SEQ ID NO: 348927 - DNA, 99 bp, Homo sapiens
aaccagactcagtgatgccgttaagcaactacaagcagcagagagagataagtatgctgtgcgcttcatccctcgggagaatggcgtttacctgattga

SEQ ID NO: 348928 - DNA, 83 bp, Homo sapiens
gatctaaagtcacccggcggccaaaggccagtgactaccaacgtttggaccagaaggtgatgactgaaaaagggaaactgtgc

SEQ ID NO: 348929 - DNA, 90 bp, Homo sapiens
aaatctcccaagaggaatgacaaacaaccagctcttcagatccgtggccgttcacatggtttcaaggcacaatgagactcactggccctt

SEQ ID NO: 348930 - DNA, 51 bp, Homo sapiens
tactgacctgtaaatcatcctttagacacgagtggctttgacgagctccag

SEQ ID NO: 348931 - DNA, 88 bp, Homo sapiens
cttcacttggaaacagaatcacgccttgtgaagagatcatccctaagcaggagagaagctactaaagtctcaacagatcaccccccaa

SEQ ID NO: 348932 - DNA, 100 bp, Homo sapiens
cctggagtgatgtggctgaataccgcatgatctgaagactgcactggtggctgcggttgaggaaacgtcccatgcagtcaactgttgctacttaaatgca

SEQ ID NO: 348933 - DNA, 50 bp, Homo sapiens
agcggatcagagagtatttaaaggccaacaggaaggccgggtgtgcagtc

SEQ ID NO: 348934 - DNA, 90 bp, Homo sapiens
gtagggcactcctaaaacacctggaagacaacagcagttctgtagagagtttaaatatgaaggaatggcaggacgggctaagggcacttc

SEQ ID NO: 348935 - DNA, 75 bp, Homo sapiens
gtggagatggcgacgctctctctgaccgtgaattcaggagaccctccgctagtgcagtcattggagaaatcgatg

SEQ ID NO: 348936 - DNA, 76 bp, Homo sapiens
cagagaacagaaagctccagttcaagcctggtcatgtggttatgggtaacaatgcagtctcaccctatcagcaagt

SEQ ID NO: 348937 - DNA, 74 bp, Homo sapiens
tttggactttatccagtcacacctgcggaggttctgccttcagtcactgagcaagaaccctggctacatcaaac

SEQ ID NO: 348938 - DNA, 99 bp, Homo sapiens
tgaagatcatgacattgtagtacagtatccaagtggcaatagagtgcagacatcctcagcaccatcggctatgacaacattatccaacatctgaacaat

SEQ ID NO: 348939 - DNA, 97 bp, Homo sapiens
cgcagcgaaaccggggcccgcgccaggccagccgggacggacgccgatgcccggggctgcgacggctgcaggtggcgagagaagcatgtccggtcac

SEQ ID NO: 348940 - DNA, 98 bp, Homo sapiens
gcctgattacccaggtggataagctatctgaagacattgacctgctgaaatccaggatagagagtgagccaatttaattcaggagatgaattctgatg

SEQ ID NO: 348941 - DNA, 75 bp, Homo sapiens
gaaggagaaatctgagcctcagcaagagaaattaaccctatacctctgacccagatgtcggccccgcactccgcc

SEQ ID NO: 348942 - DNA, 50 bp, Homo sapiens
aggaggagattctgaagataaggaggcttctccagggaaagtgaccgagg

SEQ ID NO: 348943 - DNA, 80 bp, Homo sapiens
cagatgcgggccctgctggaccagctcatgggcacggctcgggacgactctccagaaagagcaacagtaatggagtacat

SEQ ID NO: 348944 - DNA, 75 bp, Homo sapiens
aggagctggcggacatcactttagaccctccacctaattgcaggaaacatgccctgaactgtcacagaatgaaac

SEQ ID NO: 348945 - DNA, 82 bp, Homo sapiens
tgggtttaggagaagaaaccaatgaggaggatgaggaggaaagtgacaaccagatgatgatgccaattcctacgagaatgtg

SEQ ID NO: 348946 - DNA, 75 bp, Homo sapiens
cgaatgccccccagccaccagctcgaccacagcaagctcctgggggagctcgaggagcagcacggcatccactgc

SEQ ID NO: 348947 - DNA, 98 bp, Homo sapiens
tgatggataagaaacactttaagctgtggcggcgcccaattacaggcacccacctttaccagtaccgagacttcacagagaatgcagttgtcttgact

SEQ ID NO: 348948 - DNA, 76 bp, Homo sapiens
cgtacccacagtgcttcatgagagaacaactctgctcatggtgattacatgcaaaataacgagagcagcttaatag

SEQ ID NO: 348949 - DNA, 75 bp, Homo sapiens
attggaaggggaagccccacatcagagctgttcagcttctcccgttggcaacggttacatcaagcctccggttcc

SEQ ID NO: 348950 - DNA, 83 bp, Homo sapiens
atcatcctgctcctgggtgccgtggcatgtcgatttgtccttcactacagagtcttgctatggagatacacttcaattcctac

SEQ ID NO: 348951 - DNA, 100 bp, Homo sapiens
gcggagcgcgagagcttcgagcggactcagaccagagcagataatcagctcaacactgtcgtcaccatcaagtaatgccccagacccatgtgcaaaggag

SEQ ID NO: 348952 - DNA, 98 bp, Homo sapiens
ggagtagaggagccgcaggccagagcctgtgagcagatgtgtcttgctgaatcagggctctcttatccctgccatcgacttacagtgggaagaagatc

SEQ ID NO: 348953 - DNA, 82 bp, Homo sapiens
gccggcgccagctggagagcagcttcgcggagcgactggagagccagagtcacggaacagcaaatttctgagaagttgaaga

SEQ ID NO: 348954 - DNA, 96 bp, Homo sapiens
ccacaatgcatcgctggaagtagccaacttcaccacaagcaggaatgcagactcagcctcagatagcaactgctgcacaaataccaactgctgcct

SEQ ID NO: 348955 - DNA, 99 bp, Homo sapiens
ccaaagcctgcccagacggctcacctgtgcgggatggaacaaaagtgccggtggtggtgtgcacattgagccccggtatagacagttcccccagctgac

SEQ ID NO: 348956 - DNA, 74 bp, Homo sapiens
gtcgaggcaggcgaaccgtggcaccgagagcaagaaaatgatttcagaggctttgaaaaaatttggtatctcag

SEQ ID NO: 348957 - DNA, 75 bp, Homo sapiens
ggcccgcgggggagccccgggagccgcacgcctacaacacagcagtcccctcaggatgagcaggaaaagctcttg

SEQ ID NO: 348958 - DNA, 100 bp, Homo sapiens
accattatgagatgggggaggagctgggcagatgctgctggtggagttctacaagggttcccctgacctcgtgaggctccaggaaccctggagccaggag

SEQ ID NO: 348959 - DNA, 100 bp, Homo sapiens
tttatccaatcaagtgcccttggacaaagcctgaaaccagaacttatggtttttgctggacaaacaccagacaccacctatgattggagaggaagcgatg

SEQ ID NO: 348960 - DNA, 100 bp, Homo sapiens
gacaatcgagaaattgccacatgctggtgggtgctggtcagctacggagtcctcttggtcaccctgggagccttcatcttcggccagaccacagccaacg

SEQ ID NO: 348961 - DNA, 75 bp, Homo sapiens
acttcgaggcactcaagtcctggctcagcaagactctcgagcccatgtatcctttgtgtggctgatcagtgtcac

SEQ ID NO: 348962 - DNA, 100 bp, Homo sapiens
ccgcggagaaccgctcccggactggaggcgcccgcggcctcgggtgcgtccgctgcgccaggtgctggagaatctggtaaaagcaccattgtgaagcaga

SEQ ID NO: 348963 - DNA, 98 bp, Homo sapiens
tgggactctccggccctgtgcagtatgatggaaaattatcctttgaagaattcaaagcatattttgcagatggtgttctcagtggagaagaattacac

SEQ ID NO: 348964 - DNA, 90 bp, Homo sapiens
aagctatctagggacgagatctagaatcaactgagagagatgcttaaaaatcaccagttactttaatgaagacagggtttcgccatgttg

SEQ ID NO: 348965 - DNA, 76 bp, Homo sapiens
cttatgtggtgaacattacatgctttcgacataaggtcaaccccaacgtgtggcggcatgattttgtgcacggatg

SEQ ID NO: 348966 - DNA, 100 bp, Homo sapiens
ctgagagctacaacttggagaatggaaaagaaccattgaagcttgagagaaaagcccccaaaagcagctattcagttaaacacagtgggaatatcacttt

SEQ ID NO: 348967 - DNA, 75 bp, Homo sapiens
ttcaagctgcattttagacatagctggcaagagtattttcgtgcccattgcagatgcaaaggctcctgagaagcg

SEQ ID NO: 348968 - DNA, 50 bp, Homo sapiens
gtttccgcagcgagagcgaggaggagattgagaggatccagaatccagat

SEQ ID NO: 348969 - DNA, 82 bp, Homo sapiens
cggtgctggcgagacctcacctgcatggacttccactatgagacgctccatcctcgggagatgacgaagacggggaggacga

SEQ ID NO: 348970 - DNA, 100 bp, Homo sapiens
gcaacactttctcattgtattgaactaatggttaaacgtgaggacagctggcagaagagactggataagtcgtcattgaattttgagaagcattctgaaa

SEQ ID NO: 348971 - DNA, 90 bp, Homo sapiens
gcactgagggtgaagtggcaggaggaggaggaggggctccggctggtctgtggtgaggcacgaaggcagttccagtctcagctggctgac

SEQ ID NO: 348972 - DNA, 100 bp, Homo sapiens
gaaatactggttcttgaaccgaagactcataatgatgcagaaggctatcaacaggctgagcaggcttctgaaacctggcgggatgatgcttctgcgagat

SEQ ID NO: 348973 - DNA, 98 bp, Homo sapiens
tcgctgttcctgtgggtgggggccacgccgcacctgcgcaacctcgccgtggccatgtgcagccgctacgtggagccccctgagctgcccgctgatct

SEQ ID NO: 348974 - DNA, 75 bp, Homo sapiens
aggctgtttgacagagcagacttaccctgaagtagttagaatgagagaaaaggaacagttccgtaagctctttat

SEQ ID NO: 348975 - DNA, 50 bp, Homo sapiens
gtcgccctcaaggccatgatcaaaacggaagacactgatcaaggtggcag

SEQ ID NO: 348976 - DNA, 116 bp, Homo sapiens
ggagctgggtatcaccgccctacacatcaaactccgggccacaggaggaaatagcaagtgcagccgcggagccctgtacacaggcttttccatcctggtgactctgctcctcgctg

SEQ ID NO: 348977 - DNA, 51 bp, Homo sapiens
catacacaagtgtgcattaatggggctgaagccgacgtagcttctctgaac

SEQ ID NO: 348978 - DNA, 88 bp, Homo sapiens
gaggcggaatttctgcagaagctgcttccaggatactacatgacatttctcttgggaagttgtgcatctgacaggaatatagtactgt

SEQ ID NO: 348979 - DNA, 51 bp, Homo sapiens
cgaaaagatctaatcttaaggcttacgtaaactgtcttgagccccaccctc

SEQ ID NO: 348980 - DNA, 83 bp, Homo sapiens
gtcacatcagcgttctgcgtcatgggggagtgctgatcaactaaaagagaatcccctactttgaaactagtgctgccaatggg

SEQ ID NO: 348981 - DNA, 75 bp, Homo sapiens
tcccgaccctggccgccccgagcggagcctggagaacatgaaaggctcccggagcagcgctgactcctccaggaa

SEQ ID NO: 348982 - DNA, 132 bp, Homo sapiens
tctgaactagatgaagaatacctaatagaactggaaaaaaacatgtcggatgaagagaaacaggtttgggccccatggtatccctgtgacagtatttcccaaaagggaatataaggataaaccagaagccat

SEQ ID NO: 348983 - DNA, 51 bp, Homo sapiens
ggcggtcaccaagtacaccagctcgaagtatataatgtttacatggcaggg

SEQ ID NO: 348984 - DNA, 100 bp, Homo sapiens
caacatctcatctcacgtccatcagtaaaaacgagtttgcccagagatcagaacaatggcctagaagatgagaatgtgcctactgctcctgatcctccaa

SEQ ID NO: 348985 - DNA, 98 bp, Homo sapiens
ttactctgctcagcactggcactctggttccaagaccaaagattaaattaagagaaggtaaagctggacaaaatctgctggaaatgatggcctgtgac

SEQ ID NO: 348986 - DNA, 74 bp, Homo sapiens
ctctcccgccgcccggagaggctctgcagccatgaagccaaccgtcccgaggttttacctcacaaaaactacta

SEQ ID NO: 348987 - DNA, 75 bp, Homo sapiens
caacagcaaaccggggtctccctcccaggacacaggagtcaagtttgaaagatgatgacagtggggaccatgatc

SEQ ID NO: 348988 - DNA, 75 bp, Homo sapiens
cgaccgagggactgggagtcgttagtgagtcccatgaagctgaggtcttgaagcagctggctgagaaacgagagc

SEQ ID NO: 348989 - DNA, 90 bp, Homo sapiens
cagattttatacaccaccaaactttgttcttgctcttgttttgccctcaattgtaattctggaaaaagatgctatggacgtatggtgcaa

SEQ ID NO: 348990 - DNA, 50 bp, Homo sapiens
gttgcgtcaagccattggtcttatgggtggtgaagcagtattttccaatt

SEQ ID NO: 348991 - DNA, 90 bp, Homo sapiens
tctaatcacaggaagcgattgcaggcagttcaggccagactgcatgcaatatctatattaggtgatgctactaggaggtggagcctttgg

SEQ ID NO: 348992 - DNA, 97 bp, Homo sapiens
gttccccccccgcccagagtcatggcggcagcagccgctctgagggcgcctgctcagcgggtccatatggaatatttgctggtagggatgcctccag

SEQ ID NO: 348993 - DNA, 83 bp, Homo sapiens
acgatgctgctcatgaaatcatcgagaccatccggtgtctcccagtctgctaaagccctaaggccatcaccatggacttccag

SEQ ID NO: 348994 - DNA, 90 bp, Homo sapiens
tttgaagctgatggccctaaacagatgaaggtgtaatcgaatcctggaccggaaaggggaagcagtgccattcaagaataaagacagaga

SEQ ID NO: 348995 - DNA, 82 bp, Homo sapiens
aaagaagtgatgctggaaaatctcaggaatctggtctcattggatgacgacaacccccccgtgtcttttgtgaagttctccc

SEQ ID NO: 348996 - DNA, 96 bp, Homo sapiens
ctggaatatgaagagacatgcgatggtagatcaacccccagggaaatttgtgcacagagataacacaggggatatgccatatgaagatgaaggcag

SEQ ID NO: 348997 - DNA, 82 bp, Homo sapiens
tcctcctcctccttccctcgctggctgcactagctctgagacaatgcagatcttcgtgaagactctgactggtaagaccatc

SEQ ID NO: 348998 - DNA, 96 bp, Homo sapiens
gccgggggagcggggccttccacaccccctccgtgggtgtgtggtcccaggtgtgacaccttcagcaggtctcagggaagatggcagccctagggg

SEQ ID NO: 348999 - DNA, 80 bp, Homo sapiens
aggaactgggatttcaacctgaaagtggaggctgcgaaaataggatcaaaatggtttcaatcccagaatactatgaaggc

SEQ ID NO: 349000 - DNA, 100 bp, Homo sapiens
ggatctcagggcctgccgccccattatgatgatgtcgaggactgcagcattccagaaatagagcttttcccacaatctgacccagcctgttgtcctgtct

SEQ ID NO: 349001 - DNA, 101 bp, Homo sapiens
acagcagcgactttggggcccgtcaccctcagccgccaagctgagccaccaaagaaggaggctgccaccacggggccgcaggtgaagagagcagatgagtg

SEQ ID NO: 349002 - DNA, 97 bp, Homo sapiens
ctttaaattcatcattcctaatgttgtaaaatacagcccgaactgcaagttgcttattgtttcaaatccaggtgaatcagtggctaacctggttaga

SEQ ID NO: 349003 - DNA, 83 bp, Homo sapiens
aagagcgacaagccgctggcagccgcggatctcaccgccgctcaggtgtcagagatggctttggattccccgttctgtgtgct

SEQ ID NO: 349004 - DNA, 75 bp, Homo sapiens
cagccgtagacaccagctccgaaatcaccaccaaggaaagccatcaccaagtcgggcctccagcacctggccccc

SEQ ID NO: 349005 - DNA, 75 bp, Homo sapiens
tggaaattaattgctatcaatgcgaatgatcctgaagcctcaaagtttcatggcaatctataagatggtttcctc

SEQ ID NO: 349006 - DNA, 88 bp, Homo sapiens
ttaagcagtcttctcaccagagaagtttaagggccaggttgtactggcttcagatgcatgttcctggtcattcgggatttataggcaa

SEQ ID NO: 349007 - DNA, 98 bp, Homo sapiens
gctgaggctacctgtgaacagtacgcagtgaatgttgttagcatggcctcattgaaagaactagatcaaagactctttgaaaattacatcgagttgaa

SEQ ID NO: 349008 - DNA, 82 bp, Homo sapiens
ccgtggccttagctgtgctcgcgctactctctctttctggcctggaggctatccagcacatcaacgagtgtgtgacggacct

SEQ ID NO: 349009 - DNA, 85 bp, Homo sapiens
agaaacacttcttttattttcctgtaatatatctgtatcatcggaggtgtcactctgcaaacctgaatggtgtatactacagcgg

SEQ ID NO: 349010 - DNA, 100 bp, Homo sapiens
accgagagcgcgaatatcgtcatcgttagaaggtaggagcaacggtgggaatgccctctgaggaatgcagtgatgtccatcagtcacctctcacccagag

SEQ ID NO: 349011 - DNA, 92 bp, Homo sapiens
ctcctcccagtgacgggtctggagtgcgtgggggaccggctgttggcgggtacctgcaccagtcaggggccctgaccatggaggccctggag

SEQ ID NO: 349012 - DNA, 100 bp, Homo sapiens
agcctgaccttctacagagaccaaatcaccgccctgctggggacaaacggtgccgggaaaaccactatcatattcaaccctatgaaaagataaaggccag

SEQ ID NO: 349013 - DNA, 75 bp, Homo sapiens
acgtccactgcgggccggcgaaagctgcatttaaatcaaacggtattgagatggattgggttatgaaacataatg

SEQ ID NO: 349014 - DNA, 99 bp, Homo sapiens
cagcaagatgtggaagacacaaagcctgcgaaagtgctcgggaagagggagagcaaacttggctcagcccaggaactctaatgatccaggacaaagaag

SEQ ID NO: 349015 - DNA, 100 bp, Homo sapiens
ccctgtgtactttccatttgccttcctggaattaaacaaccaccatgtcgagcaaaaaggcaaagaccaagaccaccaagaagcgccctcagcgtgcaac

SEQ ID NO: 349016 - DNA, 90 bp, Homo sapiens
gagcggcgttggaggccaccgtttccagccacagcagaacgggatctctccgcgcatgtttaaggcctttgtaagcaagagccacccgga

SEQ ID NO: 349017 - DNA, 100 bp, Homo sapiens
ggtgctggcagctgagcccgaggctgacaagaaaaagcttgtggtgaaggggggcaaaaaaaagaagcaagttctgaagttcactcttgattgcacccac

SEQ ID NO: 349018 - DNA, 100 bp, Homo sapiens
ctagtgatcctttgcaccctgcttggagacggacttgcttccgggtccccgtgaaggaagcactccccggcatcattaagcagggggtgaactgcttaga

SEQ ID NO: 349019 - DNA, 100 bp, Homo sapiens
ctcaactcatcctgaaggttacctgtttggagagaacagcgatctgaactttctggggaacagaccagttgtgaacgagcctctgactccaggttatcat

SEQ ID NO: 349020 - DNA, 50 bp, Homo sapiens
gaccaccttcgtcaatgtcatcgcgggaatgcagagagcaaccaatgtca

SEQ ID NO: 349021 - DNA, 74 bp, Homo sapiens
gaagcggttggcaccactgaagtgaccgaatgagtaccaaacgattccctggttatgattctgaaagcaaggaa

SEQ ID NO: 349022 - DNA, 100 bp, Homo sapiens
caaggacaaacccaccttcatcaaagggaggctgacccgcggctgattgagtccctctcccagatgctgtccatgggcttctctgatgaaggcggctggc

SEQ ID NO: 349023 - DNA, 97 bp, Homo sapiens
gtctctctgctgcggcgcggggaccgctgtgctctcggagatggtaacctgcacctcaatgtgacggcggaggccttcagcccctcgctcctggctg

SEQ ID NO: 349024 - DNA, 75 bp, Homo sapiens
gcctccaaagtagctgggaccacagatgccttattggaggaactggaacgctccacccttcaggacagtgatgaa

SEQ ID NO: 349025 - DNA, 50 bp, Homo sapiens
ttgtgaatggtttgtttgtagtccagaagcctccacaaatgggaagtgtt

SEQ ID NO: 349026 - DNA, 101 bp, Homo sapiens
cctccctgcgaccgtcgcggaccatgggcgacaaagggacccggaagagccaggacttctgaatttaccttgaatacagacaggaggatgttgcctaagga

SEQ ID NO: 349027 - DNA, 75 bp, Homo sapiens
gccacacattgttcccaatgtgctattggcaaagagagaggagcatttcctccctctgctatttatacacggaaa

SEQ ID NO: 349028 - DNA, 75 bp, Homo sapiens
ttttatggtggaactccctatggaggtcaatattcttcgctgctgctgccttaccgccgagaaccaccacccgcc

SEQ ID NO: 349029 - DNA, 90 bp, Homo sapiens
ggccagtgcgggaaccagatcggcaccaagtaaaggcatgacttcctggcaccacagggaaaatcgggtgcaagcccagaaactatttcc

SEQ ID NO: 349030 - DNA, 100 bp, Homo sapiens
agaacttcgtgtgaaaattttcctgggtgtcccttttgatgagaagaataagcctcattctgattcaacagcagagatcaaagaaaagacttctgttttc

SEQ ID NO: 349031 - DNA, 90 bp, Homo sapiens
cgcggcgcccgggaaccagccgcagccgcagccgcagcagcagacatattactgatgccacacttgccattgtgaaaggagagacagttc

SEQ ID NO: 349032 - DNA, 74 bp, Homo sapiens
agcttgtgccaccgccgtgctgggcaatcaggcctggacagcgagtccgcctccagcagcatccgcttcagcaa

SEQ ID NO: 349033 - DNA, 98 bp, Homo sapiens
ctgaaggagcttcagctgcccctgaagaaggttaccactacaacgacctggtgtctccacagtacctgaacctcatcgcaaacctgtcgggctgtacc

SEQ ID NO: 349034 - DNA, 75 bp, Homo sapiens
acgggtccgatgaggatgcggcgtttgcaggatgctgctgaaaatctattgttagatgccgatatgaacattaaa

SEQ ID NO: 349035 - DNA, 113 bp, Homo sapiens
tgggacttccttgagggcaggcctgtcttgcatctgtttctccaccacctagcctggaatatagtacaccagaggatcgcttcctggcagaatttgggagctgtttattgcag

SEQ ID NO: 349036 - DNA, 96 bp, Homo sapiens
gggcaggacgaggtgtcggcgcgggagcagcacttccacagccaagtgcgggagtccacggttcattttccagacactgaaagagcagaatggcta

SEQ ID NO: 349037 - DNA, 100 bp, Homo sapiens
atccaggataacggaggctgggtgcattggatcgttgtgtgatggggataacagcagttgagattctaaacgcttgtgatgaagctgttcctgctgctgt

SEQ ID NO: 349038 - DNA, 82 bp, Homo sapiens
ggaccatcctgggtgctggccctgtgctggaggaaatgggtcctgatgaatatgaagagatggaagaagaggaggaggagga

SEQ ID NO: 349039 - DNA, 100 bp, Homo sapiens
agcctgccgcctcgctgtccctgcggcttctgggggggcagaggcctggcctccaggggtttgtcttaaatatgtcgggggagaccaatttggacatgtg

SEQ ID NO: 349040 - DNA, 75 bp, Homo sapiens
tcagaagaaggctgctattgaaagagagtatgcacagaaatgactgctgtccatgcaggcaacataaacttcaag

SEQ ID NO: 349041 - DNA, 100 bp, Homo sapiens
tctctacaaaaaggtgcatataccactgatcgtctcctctgcctccaccgacctccaggactacacctactacttcgtcccagcaccctggctctcggtg

SEQ ID NO: 349042 - DNA, 75 bp, Homo sapiens
tgggaccaatggttttgatgataatcattgcaaaggtcgactgcaaggaagtactagacatcatttgtaatctgg

SEQ ID NO: 349043 - DNA, 100 bp, Homo sapiens
ggtgtggaacgaggagaagccgtcgcagcctcgggagctgcggccgccgcggcattcggggaatctgcagggcaggaattgtcttagaagaaagaaggca

SEQ ID NO: 349044 - DNA, 90 bp, Homo sapiens
caccaacacaagcaagaaggccctgaaacagtatcgagctgggctccttctcctgaaaaagccgaggaggagagtgagaggcttctgagg

SEQ ID NO: 349045 - DNA, 82 bp, Homo sapiens
cagccccgccgccctcgcaacctggcagccgccgccgtggaaggcctgctggtgggtacccttgatgttgtgttggactcca

SEQ ID NO: 349046 - DNA, 101 bp, Homo sapiens
aacttgatatggtggaggacacagaagtggtgccaccgaacatcgcagaactgaagaatttggaggtgctcaacttttttaataaccaaatcgaggagctg

SEQ ID NO: 349047 - DNA, 80 bp, Homo sapiens
tagggtcctttatatagaagggagagtaggcttctccagggaaagtgaccgaggcagtgaaagaggccattgacgcaggg

SEQ ID NO: 349048 - DNA, 83 bp, Homo sapiens
caccatccttgggaccgcctgcctggccattgcgagcggcatctacctactgagctggctttatgtgctggggcagaagagat

SEQ ID NO: 349049 - DNA, 100 bp, Homo sapiens
tgtgaagatgctgtaaaaagattgaaagctacggcgaggggaccgacctgtttgccgtggctgtccatgagtttggccacgccctgggcctgggccactc

SEQ ID NO: 349050 - DNA, 90 bp, Homo sapiens
gccacgggcctctccgggcgggagcccagggtggcggcgcctgcggccgagcgccgggagcagagacacctatggctgccgatgaaggct

SEQ ID NO: 349051 - DNA, 75 bp, Homo sapiens
cgagcacccgcctccgggcatcttcaactgttattacgacctattgccctgctaacaacgagccaatagcaagag

SEQ ID NO: 349052 - DNA, 50 bp, Homo sapiens
tcatatgcaccagaaggagatgaaggttgagactgagctaaagttaatct

SEQ ID NO: 349053 - DNA, 100 bp, Homo sapiens
gcagctcatccctggcttccaacaggctgaagattgccctgcagattgcagccttcttcgctgagtctctgcccagtgtgggagggcagatcattccccc

SEQ ID NO: 349054 - DNA, 100 bp, Homo sapiens
acctgaggtttttgcaaacaattgtaaaagcagatggtaaatatgtgaagaaatgccaggatatggtaatgacagagtaaagccatcaataaggcctatg

SEQ ID NO: 349055 - DNA, 75 bp, Homo sapiens
aaatcggtttcagctacagctcctcagggagaggtctccaattgagaaacatggcactgtttttcctgcactcta

SEQ ID NO: 349056 - DNA, 98 bp, Homo sapiens
ccaagatgtcggagacacggtggaaacgcttatgcttcaagtctggatagtcagaagtttgtgacagtgccctccagtaatgaagtggtaactaacct

SEQ ID NO: 349057 - DNA, 100 bp, Homo sapiens
acctcacacttgaagactatcccttgatgattgaaatctgagaatgaagatgacagcgagtgggaagatgtggatgatgagaagggagatagcaatgatg

SEQ ID NO: 349058 - DNA, 75 bp, Homo sapiens
ctggacttacgaggagcagtttaagcaggtacggcttcaggtccagagcgtggagaagcctcagtaccgcgggac

SEQ ID NO: 349059 - DNA, 80 bp, Homo sapiens
cagattcgcagtggtcgcttcttctccttggaccctgatgctcccataagacagaaaatgccccttgatgatctggatag

SEQ ID NO: 349060 - DNA, 95 bp, Homo sapiens
tgtatagagatgtgatgttggagaactacagaaacctggtctccctaggatttggtgctatggagaaatttttggtagaatataagagtgcagtg

SEQ ID NO: 349061 - DNA, 100 bp, Homo sapiens
agctaaactcaatgctgctgtgtgggaagaagatttgtaaagaaaactcttaggtatgctccagaatgtttaatgcaatctaaattttatattgcctctg

SEQ ID NO: 349062 - DNA, 75 bp, Homo sapiens
ggaaatcctaatgacagtctccaaattcgcctccatctgtaccatggcgtggtgtccctcgtggccgttcacccc

SEQ ID NO: 349063 - DNA, 75 bp, Homo sapiens
gcccagatggtggctcccggagtccaggacatggatttgattgacatactttggaggcaagatatagatcttgga

SEQ ID NO: 349064 - DNA, 100 bp, Homo sapiens
attggattcataacctgctccatgcttgaaaacatggggattggaattcgcaggaagctaggaaacctggcagtgccagctgatgagaagtggaaagcgg

SEQ ID NO: 349065 - DNA, 82 bp, Homo sapiens
ttgaggacatggcctccgacgaggacatcttcctgggtctgcaggtccagccggctggcaccctccatgtacccaggggaga

SEQ ID NO: 349066 - DNA, 75 bp, Homo sapiens
agcgacaaagaaaacttcctgaagaacatgccagaaactggcgatggaatatgagaggagccctctggaaagaaa

SEQ ID NO: 349067 - DNA, 100 bp, Homo sapiens
caggacttggtccgcggcatccgtaaccacaaggaggacgaggccaccaggaacacacctgtagcccagcaaagttgaggccatcgactggctcatcaca

SEQ ID NO: 349068 - DNA, 75 bp, Homo sapiens
tgttttcagcagcaatttgccctcagagatcaaagatccagctaacaggcgctacgaggtgcccttggagacccc

SEQ ID NO: 349069 - DNA, 98 bp, Homo sapiens
cctctattccaaatgttctcagatggctgataatggagaaagatcacagcagtgttccaagttctaaagagtaagtacaaggtggactgtgcatgcct

SEQ ID NO: 349070 - DNA, 99 bp, Homo sapiens
ccagagactgctgaaaagctggcccgtgacctgaaggctgtcaagtatgtggagtgttctgcacttacacaggaggtgctcctgtaccctggccacagc

SEQ ID NO: 349071 - DNA, 125 bp, Homo sapiens
aacagggcggcactggcccgccacagcgacgccggcgccgagggacaccgcagtatgaggcagagtattctaccttgtaaatactgttatttgtatatactgtaaatgatgacatcggtgggcac

SEQ ID NO: 349072 - DNA, 100 bp, Homo sapiens
gtgattcaccactctccatgaagagctgaactggcacaagtggcaacgaacttataatcaaaactgtattaagctcggcaagagatgagccctctggtcc

SEQ ID NO: 349073 - DNA, 97 bp, Homo sapiens
agtgcatcaagtgccagatgaccttcgagaacgagagagagatccaaatccacgttgccaaccacatgattgaaatgggatttgaccgatacaaaat

SEQ ID NO: 349074 - DNA, 50 bp, Homo sapiens
gtgctgtctggcgcttctcagaagccgctgatggtgagaccattctaaaa

SEQ ID NO: 349075 - DNA, 100 bp, Homo sapiens
ctccaacaatggaggccagtggctggtctcaggttatgtgaaattacctccagagaaatttgcacctaagaaacagggcgatggtggtaaggacctcccc

SEQ ID NO: 349076 - DNA, 83 bp, Homo sapiens
ggctatggtgacgctatcaactgcagagattggaaccactcgttttgactattattttatcactctttgtgaaacttcacaat

SEQ ID NO: 349077 - DNA, 80 bp, Homo sapiens
aggcagacctggtgtctccagctgatgatttgtccctgtctgaaggttgtaaacatgttaaaggcatcctgttatatgga

SEQ ID NO: 349078 - DNA, 99 bp, Homo sapiens
tggaaggcgagttctcggaaggctacgatcctacagtggagaatagtgggagatgccatcccagcagtggaggtgtttgaaggggagccagggaacaag

SEQ ID NO: 349079 - DNA, 100 bp, Homo sapiens
ttgggatcaaacagctgatcagactcctggtgccactcccaaaaaactatcaagttgggatcaggcagaggatgaaattgattctgcagtaaagatgttg

SEQ ID NO: 349080 - DNA, 75 bp, Homo sapiens
agaaaaaggagcattctacagcagacttaaccaccaccatgtcgagcaaaagaacaaagaccaagaccaagaagc

SEQ ID NO: 349081 - DNA, 82 bp, Homo sapiens
actgaactaaaggctgactttccagacaacgaatgggatggtctagtaaggataacctttgttaggaaaaacaagacactct

SEQ ID NO: 349082 - DNA, 82 bp, Homo sapiens
caatggatttttggtaccagtcttggctcctgctctccataaggattacttccttaggatagattgccagaagtggagttac

SEQ ID NO: 349083 - DNA, 73 bp, Homo sapiens
aattaaatgccgagaaggccagtacgctgactggaaataccggcatgcaggattgatggccttatctgccatt

SEQ ID NO: 349084 - DNA, 78 bp, Homo sapiens
cacagacgcctccagggggcagcactcaagcgcatcttaggaatgacagtggatggcattcccaatgacagtagtgat

SEQ ID NO: 349085 - DNA, 75 bp, Homo sapiens
ttggagctttgcagctgacctacatctcgaagcatggaggaatctatgtaaagcgcagtgccaaatttaacgaga

SEQ ID NO: 349086 - DNA, 100 bp, Homo sapiens
gccttgaggacctactcacagataggaattgaagtgtgaagcctcagtttaggtcatctggtggttcagaacactcaacagagggctctgtatccttggg

SEQ ID NO: 349087 - DNA, 100 bp, Homo sapiens
cggaatgtggcaaaattactgtatatgcacatgctgggctaccctgctcactttggacagtctcaaaccatgaattatgtgggacagctggctgggcagg

SEQ ID NO: 349088 - DNA, 101 bp, Homo sapiens
gcagagttattttctgagtcagtttcaggaatgaatctgaagtctgctgcagtaaaacacagaaggctttaaaatgttttcttgcataaaattcaaaactt

SEQ ID NO: 349089 - DNA, 82 bp, Homo sapiens
cacttgtccgggggagaccttgaatttggtgtggaagaaataacatcagtagttcagtgttctaagaacggaagcatctggg

SEQ ID NO: 349090 - DNA, 75 bp, Homo sapiens
tggagaggatggctactatttcaccaatctgcacagccatgacagtgcagatcctgctgaagctggaccgcctgg

SEQ ID NO: 349091 - DNA, 75 bp, Homo sapiens
cctgaaggaattctcagtcaaagaggaactcagcgagatgctgtacacagaccggcccgactggcagagtgtgat

SEQ ID NO: 349092 - DNA, 50 bp, Homo sapiens
cgacgggccgagcctgccactaaaatgcatccgatgcagatttatggctc

SEQ ID NO: 349093 - DNA, 100 bp, Homo sapiens
cgagccgggtgtgagctgcctgaaaatgcactcggatgccgccgctgtcagagattacctggggcaattgatgttatcggtcagactataactatcagcc

SEQ ID NO: 349094 - DNA, 100 bp, Homo sapiens
ccggcagtttccgctgcgaatgcaagacgggttactattttgacggcatcagcaggatgtgtgtcgatgtcaacgaatgcagccaggagaacgggggctg

SEQ ID NO: 349095 - DNA, 87 bp, Homo sapiens
ctgtgagcccataattcagaacttctgccacgatctagtttgaagcactaagaagaataagacatcagtttgaaaagaggctctatc

SEQ ID NO: 349096 - DNA, 96 bp, Homo sapiens
tggccaatgaggagtcagagcacaatcaaggtgtcatggagaaactccagctgggcccagagattctgcagcgggaaaatccaaggcttatttatg

SEQ ID NO: 349097 - DNA, 98 bp, Homo sapiens
cccgcgtccctgcgaccgccgcggcgaagatggtgggcaccatgtccttgaagcttcaggcaagcaatgtaaccaacaagaatgaccccaagtccatc

SEQ ID NO: 349098 - DNA, 74 bp, Homo sapiens
ccatggaggaaggtcaatattcaggctgagaagaaagccaaggtcattgcaggaatgaatgctgtggaagaaaa

SEQ ID NO: 349099 - DNA, 100 bp, Homo sapiens
gaagaatgaggtgttcttggacgtcatcgagtctgtcaacctcttggtcactacaggaaaagatatcttcattaaagtgcaacagcacactgagagcaac

SEQ ID NO: 349100 - DNA, 83 bp, Homo sapiens
cgaggatgcgtgttcgcgggtgtgtgctgcgttcacaggtgtttctgcggcagatataattgaccctgcaatcctgcgcccgg

SEQ ID NO: 349101 - DNA, 100 bp, Homo sapiens
ctttgaattggtggaacttgttggaaatggaacatacgggcaagtttataagcaacaaggagtgaggatcttcataatgctctacaaagaggtggaactc

SEQ ID NO: 349102 - DNA, 50 bp, Homo sapiens
actgcaaagatggctctgacgagccagagggctttaaggaagcagcggag

SEQ ID NO: 349103 - DNA, 100 bp, Homo sapiens
tggctgatgaagtaatttgcagtgaaattttaagcgactgtgactctgctgcaagttccccagatcttgagggccaagaccagcttcaagtctccatggt

SEQ ID NO: 349104 - DNA, 74 bp, Homo sapiens
cgcggatgggatccagctgttagtcgggtgctgggagaccgtgaagtgcaaagcagatggagtccaggccctcg

SEQ ID NO: 349105 - DNA, 75 bp, Homo sapiens
ctccacccagaccgaaaaccccagagatcttcagagaacactggatctaatgaacggaacatctatattgtggtg

SEQ ID NO: 349106 - DNA, 120 bp, Homo sapiens
cggccctgtgactgcagccatggccacaggcttagctgttaacgggaaaggtcccagcacaactatttaagaatcactcgtattcttaaaagccttggtgagcttggatatgaaagtttt

SEQ ID NO: 349107 - DNA, 75 bp, Homo sapiens
ctgaaattccagagggcgtggtgtctcagtgcatgttacaggtcagtgtgagaagaagattgtttctgagcttga

SEQ ID NO: 349108 - DNA, 53 bp, Homo sapiens
ctccgcccggcagctgccccgtctgagaaatttggtgcggcatgaaaggatga

SEQ ID NO: 349109 - DNA, 75 bp, Homo sapiens
tggtgtaccaggcgaagctggccgagcaggctgagcgatacgacggtatgcgccaggggaacgaccatggcactc

SEQ ID NO: 349110 - DNA, 91 bp, Homo sapiens
gactgtgacaacgaccacgtctccaaaatgagtcgcatcttcaacccccatctaggctgtggccaggccagctgggctcggggagcgccag

SEQ ID NO: 349111 - DNA, 50 bp, Homo sapiens
gcggagaagaacggggagccaggattactacagcatcccatttcccacac

SEQ ID NO: 349112 - DNA, 75 bp, Homo sapiens
tcggaaccgagccccgacaggctatgacgtagtgatggcttggacaacagtgtagcttcccccagcacaggtgac

SEQ ID NO: 349113 - DNA, 100 bp, Homo sapiens
caggtttcacagttttacaagcatccatagatgctgccattatacaggatgaatgctatcaagtaagacaagtgtttgcccagaaacttcacaaaggcct

SEQ ID NO: 349114 - DNA, 87 bp, Homo sapiens
aaggcaagagtaacagcagcgccgtcccgtccgacagccaggcccgggagaagttgtctgcattcaaaagagcattctattaaagct

SEQ ID NO: 349115 - DNA, 99 bp, Homo sapiens
gaaaagaaatgaaccagtattcttaaattgatttcaagtttgaacaaggcattctgaaggcaaatcctgtttagacccaggcaaaggttcctggtgacc

SEQ ID NO: 349116 - DNA, 100 bp, Homo sapiens
tcaaaacttaactcctggatacaggttcatctctaacaagtatttagtgaaacgacagagcagagactatgatgtggaatggggctatgcttttgatgtg

SEQ ID NO: 349117 - DNA, 50 bp, Homo sapiens
tgctctccgctgtgtccacagcgttcaagacatcgatgagtgtgctgaag

SEQ ID NO: 349118 - DNA, 76 bp, Homo sapiens
gtttctacacaacaaaacattcatggagggggaatatgccaccacgggctgttccctgaccctgcaccatacggag

SEQ ID NO: 349119 - DNA, 96 bp, Homo sapiens
gccgcaccatgccgctcctaagcctgcacagccgcggcggcagcagcagtgagagcgccgtgccgtccctgcagtgacaccgaggtgctcctagcc

SEQ ID NO: 349120 - DNA, 125 bp, Homo sapiens
caacggccaacttcggcaagatccagatcgggatttacgtggagatcaagcgcagcgatggtcaaaatgcagatcttcgtgaaaacccttaccggcaagaccatcacccttgaggtggagcccag

SEQ ID NO: 349121 - DNA, 100 bp, Homo sapiens
ctctgtggcagcattttttccagaacacaaaaggtgaacctccaaaatcaggggatcgcagcggctacagcagccccggctccccaggcactcccggcag

SEQ ID NO: 349122 - DNA, 88 bp, Homo sapiens
tttttgactgctctgctcctctatgctggacatcaaatttccaggaactctgtgaatctcttgaagaagattacaaagacatagaaca

SEQ ID NO: 349123 - DNA, 100 bp, Homo sapiens
tttcaacctccggggccacaatagcgagtactatactggcaattgctggagaagattttgcaattgttgcttctgatactcgattgagtgaagggttttc

SEQ ID NO: 349124 - DNA, 108 bp, Homo sapiens
aataattttgaaaatgctttgtgcagaaaggaatcaaaagaatatttagaatgcaggatggagaggttggatggcaagcatgtggtgtttggcaaagtgaaagaaggc

SEQ ID NO: 349125 - DNA, 90 bp, Homo sapiens
cgcgcctgggctgccggcacttcgcggcagggaaatcctcattgacgattcaatttgttgaaggccaatttgtggactcctacgatccaa

SEQ ID NO: 349126 - DNA, 90 bp, Homo sapiens
cgggttcagttcgtcatggggctgtttggaaagacccaggagaagccgcccaaagaactgccaatcgcgccgggcgaggagctcctggtc

SEQ ID NO: 349127 - DNA, 100 bp, Homo sapiens
agtgtatgaccacaaacagccatcaaggtgtgctgatgtatcgggactaccccctggaactattcatggcccagtgctatggcaacatcagtgacttggg

SEQ ID NO: 349128 - DNA, 75 bp, Homo sapiens
gaggtggccgtggaggcagaggtggcatggggttccaaagtctggcacgccccagcttgtgagtatttttgcctg

SEQ ID NO: 349129 - DNA, 82 bp, Homo sapiens
aaaaattacagcacatctcagtgaatttgcaagtgggctccagtggtccagaatcttttactgtctaccactacaatggatt

SEQ ID NO: 349130 - DNA, 74 bp, Homo sapiens
tgtctccttcgacttggagtctttgtccaggacggtctccaaagcggcgtctgacctcatgagctactgtgagc

SEQ ID NO: 349131 - DNA, 98 bp, Homo sapiens
tgcgcgcctgcgacctgcccgcctggagaatggatcttggagaatgtctgaaagtccatgacctggctttaagagcggattatgaaattgcatccaaa

SEQ ID NO: 349132 - DNA, 82 bp, Homo sapiens
tcggccgtgggccagttcgtgtccctggacggtgtctcgtgcctctgctggaccctgactctgggctcctggtcctggcagg

SEQ ID NO: 349133 - DNA, 82 bp, Homo sapiens
gggagcacacggagcactgcaggcgccggaataccctctaccatctgctttggtcagggtgccgctcgaggatttaaaagca

SEQ ID NO: 349134 - DNA, 83 bp, Homo sapiens
actgagactagatgcgggtgcagctggttgatccacagatagctccttcctccccgccccttcctttttgtttggaggtccca

SEQ ID NO: 349135 - DNA, 100 bp, Homo sapiens
aaggcttcaacaagaacgatgcccccctccacgagatcaacggaaacaaaccatcaggcctcccagaaagtatccgggatctgaaaatcaccaaatcacc

SEQ ID NO: 349136 - DNA, 107 bp, Homo sapiens
ctccaagatgcagttttttgatgctgaggagctcctggtcgatgaagaggatgatgtttttggtgaaggtgaacctgttctctgacccaccccagcccaaccacagc

SEQ ID NO: 349137 - DNA, 80 bp, Homo sapiens
agccagcctgagttgggagaagagctccagagaaaagttactgtggcccatgtcctaaaaactggatatgttacaaaaat

SEQ ID NO: 349138 - DNA, 74 bp, Homo sapiens
agactgtggagccgggagccggcaggtgcgctggtacccttcctctgacaccacccagcaaggatggaagtacc

SEQ ID NO: 349139 - DNA, 50 bp, Homo sapiens
cgcctgctgagtggacccgggtgtcggcttcttcaagcggaaccggccac

SEQ ID NO: 349140 - DNA, 83 bp, Homo sapiens
ctctagggagccgggttgatttttaaagcttcaaaatcctaagactcagcactgttgcgggacccgaccgcatgtctgtcatg

SEQ ID NO: 349141 - DNA, 82 bp, Homo sapiens
cgctgcctacggaggtggcagccatctccttctcgttttaaccatgctgaccaacgaaactggctttgaaatcagttcttct

SEQ ID NO: 349142 - DNA, 96 bp, Homo sapiens
tgggtctctgatcattgtcgtcagtaccatatcccatgtccttatcagaattctaccttgtcaaagattcctgctttacagggtagcacaaagtcc

SEQ ID NO: 349143 - DNA, 88 bp, Homo sapiens
tctaccacaaacatgaccctgctttgccacgtcttgccattcagctgctgaaacgtctggccacgggcgacatggagtccaatgggaa

SEQ ID NO: 349144 - DNA, 100 bp, Homo sapiens
cccgagcaaaccccagcaagatgcggaggctgcctcggcggagcagaggaaccacacgctgatcatggcagcacaacaagattcgcagcgtggaggggag

SEQ ID NO: 349145 - DNA, 83 bp, Homo sapiens
aagccgaaaaaggcagcagcgaagacattgctgtcgaactgctccagaaggcagcccccagccctattcgccgactccagaag

SEQ ID NO: 349146 - DNA, 83 bp, Homo sapiens
ccccttcatgcatgcgcggaggccgcctgctagcaagcattttgaaagcgaagcagaagccgtagaatcagcggcgagcctgt

SEQ ID NO: 349147 - DNA, 82 bp, Homo sapiens
caaaagcaggcaaatggagtcgttgggaataattggcagagggggtcgatttgggaggaaaggtgtggctataaactttgtt

SEQ ID NO: 349148 - DNA, 100 bp, Homo sapiens
ccaccatcttcgacttgagcgaagttttatgcaagagaggcgtttccatcaaccagttttgcaaggagttcaatgagaggacaaaggacatcaaggaagg

SEQ ID NO: 349149 - DNA, 100 bp, Homo sapiens
ggaggcttccagaggaattgactactatgacaggaacctggcactgtttgagaattgatgtgactgaagtgcaaatcttcataataatcatgcatttgct

SEQ ID NO: 349150 - DNA, 99 bp, Homo sapiens
cctgaagttaatggttctatgaaacagtgtatcaaagtgtggactgagggttattggggctgtgccatcggcaaagccaggcaagctgcaaagacggaa

SEQ ID NO: 349151 - DNA, 90 bp, Homo sapiens
gctgaatcctgcccgcgtgaaccacatgcccagcacggtatggtttgaagtggtgaacatggatttttctcggcttcacatgtacagtcc

SEQ ID NO: 349152 - DNA, 90 bp, Homo sapiens
gaagacccagtacagctggacgtttgccgtccactctgaggtccagggagtcggtagtaagggatggcgggacgtcaccacctttttttc

SEQ ID NO: 349153 - DNA, 74 bp, Homo sapiens
gcattcaattcgtctttctggagtggaagaccacgtgaaaaactttaggaaattactctgcctaaccttggagc

SEQ ID NO: 349154 - DNA, 75 bp, Homo sapiens
ttatgaaagtgtgatgttcgcgtatttcttgacagttggaggctggcagcgaagaagatcgaaaattaaacctca

SEQ ID NO: 349155 - DNA, 95 bp, Homo sapiens
aaatggaccaacttctttggcaagtggacattttactggctcaagttctaaatgagaagaaacttcaagaggttgatagtttatggaaagaattt

SEQ ID NO: 349156 - DNA, 75 bp, Homo sapiens
acgaggccgaccacagacatgagtgcagtgaacgtgagcacgctgaaggcttacttcagatgcgatggctacaag

SEQ ID NO: 349157 - DNA, 83 bp, Homo sapiens
tcaagacggggattacaatggagaaagagtaattcacgcagagccggctttgcaggctgcccttccaaaggccaccatcctgg

SEQ ID NO: 349158 - DNA, 89 bp, Homo sapiens
gaaaatcattgagactgttgcagaaggagggggagaacttggagttcatatctctgtgacctgcctgctgcctccctcaacgaccagtt

SEQ ID NO: 349159 - DNA, 105 bp, Homo sapiens
tcacagcaccagccagctctcccagaaactgaagaccacttacaaggcttccaccagcaagcatcctgaggttagcattacacttctcccagtggagcccatgac

SEQ ID NO: 349160 - DNA, 101 bp, Homo sapiens
gatttacgtggagatcaagcgcagcgatgctgagctgactgctgcccactttggaggaggcggtgggctccttcacaagaagactcaacaggaaggcgagg

SEQ ID NO: 349161 - DNA, 75 bp, Homo sapiens
tcagaaggagcaggattaccaaaggcctctcatccatgtctttgcaaagaacctggtagcgtttgtgtctcaaga

SEQ ID NO: 349162 - DNA, 76 bp, Homo sapiens
ctccactttcgccagcccgtgccgcgagcgcggcctgcaggagccgaacgaccctgtcaccaacatttgccaagca

SEQ ID NO: 349163 - DNA, 75 bp, Homo sapiens
aattaaaaaggaagctattcaccattgagccatccaacatattctttacaatggatgatgtggtcaaggttggag

SEQ ID NO: 349164 - DNA, 90 bp, Homo sapiens
ggggacggagagaacacgagcccatcaggagtcgatggatggagatgaaaaggaactagagagcagcgaagagggaggctcagccgagga

SEQ ID NO: 349165 - DNA, 100 bp, Homo sapiens
cgcgtctgcccggccaagaggcaaaggggaggttacgcagcaaaccatccagaagtggttagcaggaagaagatgagccttaagtctgaacgccgaggaa

SEQ ID NO: 349166 - DNA, 74 bp, Homo sapiens
tggagaccaaattttgaacctcctcagtttgtcactgtgcagaccatttctggaactggagccttaaggatcgg

SEQ ID NO: 349167 - DNA, 137 bp, Homo sapiens
cgtgctggatgctgtgatcgccagcgccggcctcctccgtgcggagaagaagctgcggccgcacctggccaagctctctgatgtaaaggatggagtaaatcaagcagcacctgcatttggatttggcagcagtcaag

SEQ ID NO: 349168 - DNA, 100 bp, Homo sapiens
cggcctggcccttggggcactgtttggcgctggctgtgctggtcactaccttccacaagtactcctgccaagagggcgacaagttcaagctgagtaaggg

SEQ ID NO: 349169 - DNA, 100 bp, Homo sapiens
cgcaactctcagttcgagagtaaaggcttacggagttcctatgctagtcagcatagtcagcttgggcaagaccttcgttctgccgtgtctcccgacttgc

SEQ ID NO: 349170 - DNA, 76 bp, Homo sapiens
gtgaaacagagaaagataggcggccatggtccaaccttgaagttatggatgtacaagcattcgagaggcttctggg

SEQ ID NO: 349171 - DNA, 98 bp, Homo sapiens
cgggccctggctcaggaacagggacagcacctcatcccctggatgggggaccacaagatcctcatcgacaggatcctgaagagcatggtcgtgggctg

SEQ ID NO: 349172 - DNA, 100 bp, Homo sapiens
ggcctgcagcgggagctggacggcgagcgcgagcggcgcgagaaagcaccatgactcctgtgaggatgcagcactccctggcaggtcagacctatgccgt

SEQ ID NO: 349173 - DNA, 100 bp, Homo sapiens
gtgcatgttagtgctcaagagcctcattatctaccacccgagatgccccaaggtgtctgacttccagcaactgctggcctgtgccagggtgcaagctgag

SEQ ID NO: 349174 - DNA, 87 bp, Homo sapiens
ctatccctcgggaggcgcctggccagagcctggtcgagccggaggaagccaccaggcataagatgcacatttttctgctctggagcc

SEQ ID NO: 349175 - DNA, 80 bp, Homo sapiens
aggtcgccgccatggcccgctggatcccgaccaagaggcagaagtacggggttgcttaagagttggacagtggaggacct

SEQ ID NO: 349176 - DNA, 82 bp, Homo sapiens
cccgcctgcccgcccgggagctgtcggccccggcccgactctatcacaagaagggccgcgatgggcctcttggaacattggt

SEQ ID NO: 349177 - DNA, 74 bp, Homo sapiens
atttaacgaatggggttgtgatggcccaggttcttcaaaagatgacatggatttgattgacatactttggaggc

SEQ ID NO: 349178 - DNA, 90 bp, Homo sapiens
ctccagtgagaagggccgaaagacctatcccactgtcaagatccctgtgaagacccgatcagctcccactgctcccacccctccaccccc

SEQ ID NO: 349179 - DNA, 100 bp, Homo sapiens
ggatctgcagcctgtggtaccccctgctgtagtgatactgagctggaagccatctgccctcactatcagcagccagccccataggctccttcaatttccg

SEQ ID NO: 349180 - DNA, 98 bp, Homo sapiens
tcgggcgccccgccggtcacctccgcgcggacaccagggaaagcaggcaggatgggagagtcgccgatagaaccacctcttccctgcctcctgggctt

SEQ ID NO: 349181 - DNA, 100 bp, Homo sapiens
aaaaaaatataataaggctgagtgcggagccaaggctgcaggccaacttcaccatccgggaagatgccaaccccagctcccgacagcgaggactcaagcg

SEQ ID NO: 349182 - DNA, 75 bp, Homo sapiens
ccgcgagcgctgagggtgagtgccgggagctctgagggtctgttgcggttctcccacttttccataagcagaaca

SEQ ID NO: 349183 - DNA, 97 bp, Homo sapiens
tggacgagatgaatgactacaatgagtcaccggatgatggagaggtcaatgagatgggggacaggacggtgcaagccggcacatcacaaaccagtgg

SEQ ID NO: 349184 - DNA, 100 bp, Homo sapiens
tgcaaactacttctggctgatgaaaatggacacgtgggaggtttaaatcttcttgcagctggagccatggcaggtacaggtttgcagattccgccagcag

SEQ ID NO: 349185 - DNA, 127 bp, Homo sapiens
gaaggagcaaagatggggtgccaagacggtgcagggctccgggcaccaggagcatatcaacatcagccactatgtgattgtcatgtccatgaccatctttttggtgttcctcaatggcctggcccag

SEQ ID NO: 349186 - DNA, 100 bp, Homo sapiens
gcggccggcttggagaggccgagggtttgatgaaggtggaggcagcgcggctctcaggaatgaccatacctgaagaagacgctgatgtgggacaaggcag

SEQ ID NO: 349187 - DNA, 88 bp, Homo sapiens
tggaactgggatctctcctggcaaagactggacaagctgcaggtaactcatccacgttacttgaagaactccctggtttaccacccac

SEQ ID NO: 349188 - DNA, 75 bp, Homo sapiens
gttcttgtttgtggatcgctgtgatcgtcacttgcactcaggaggccttgaagagcgggcactttgtcaacgtcc

SEQ ID NO: 349189 - DNA, 87 bp, Homo sapiens
cctgcctccgccggctacagcgggaagagcgggccggtcactccgcgcaagtttgggttcctgttttagaactgccacctaagcccc

SEQ ID NO: 349190 - DNA, 74 bp, Homo sapiens
agatcctgagacccggacagtggcagtgaaacaggtagacaagggcgtggtccccctggcagggacaaatggcg

SEQ ID NO: 349191 - DNA, 98 bp, Homo sapiens
aaattccacagttccgtggtttgtaaagcaatgcattgaagctgttgagaaaagagtttggaaattttagcattcaggtgccaggaatgcagatggga

SEQ ID NO: 349192 - DNA, 82 bp, Homo sapiens
gggagggctggccaacttctgctacagacgactcagtgcagcggaactgctgcctgacgctctgcaacttcagcatccccga

SEQ ID NO: 349193 - DNA, 74 bp, Homo sapiens
gcggctaccggcggcggcgcgcagcgtgtcaggcggagagacccgccgccagatacactctgtgcagttttaga

SEQ ID NO: 349194 - DNA, 100 bp, Homo sapiens
ggccgctcacgggaagctgcggcgggagcgggggctgcaggctgagtatgagacgcaagtcaaaggtccagcactcctggggagaagacagagacgctgg

SEQ ID NO: 349195 - DNA, 100 bp, Homo sapiens
accatctcgcactaccctgactacagctggagcgcccagaggcgagccctggtggaggaagaggggacaacctgcagacagcggtgactgtggcccgggg

SEQ ID NO: 349196 - DNA, 100 bp, Homo sapiens
acctggaagcggcagagttaggtgaaatttcagacatacacaccaaattgttgagagacttctgtaacgataagagttatatttcagaagagacaagagt

SEQ ID NO: 349197 - DNA, 83 bp, Homo sapiens
aaaaaatctggagggactccaacttcaatggcacagaccccacaggctcctcggacactgggtccatcacctcctgccccatc

SEQ ID NO: 349198 - DNA, 101 bp, Homo sapiens
ggctccaaaatgtatggtctaaagagctacatcgaatatcagctaacacctactacagccgctccgaccgctggtcccagatgccagcaagcagcggctga

SEQ ID NO: 349199 - DNA, 100 bp, Homo sapiens
ctggaatccagcttaaccccaacaaccatctacagtgggtgtttcttcccgatcaagatcagagatctcagttaatcctcccacccccagttcatgttga

SEQ ID NO: 349200 - DNA, 82 bp, Homo sapiens
gcgaacacgccgcggtcctcgtcgtgggtcagcagcctctggacccgtgaaagagctggtcggttccgttggtggggccgtg

SEQ ID NO: 349201 - DNA, 100 bp, Homo sapiens
ggggacaagaaactagagcaaataaccgttttgaaatttactaaggctcgtacgtctgcatcgattatcttacgtggggcaaatgatttcatgtgtgatg

SEQ ID NO: 349202 - DNA, 95 bp, Homo sapiens
agctggggataccgcgagcacaacgctatgtcaagctacctcttcatagtgaaatatgagttgcctttggtgatccaggcattaacgaacattga

SEQ ID NO: 349203 - DNA, 50 bp, Homo sapiens
ctggcctccatcactgctgagtgcggcttccagctggtctttttaccctt

SEQ ID NO: 349204 - DNA, 100 bp, Homo sapiens
tgaacctgcaagagaacggcatccagagagtgtgcaccccagattccttgtagtactcctattgctactgaaaggacagttgcacatttgaacactctga

SEQ ID NO: 349205 - DNA, 101 bp, Homo sapiens
gggctgacgctgctgctgtgtgcggtgctgctgagcttggcctcggcgtcctcggccaaaactggacaagccaaggcatctgtagccaaagtaaacaaatc

SEQ ID NO: 349206 - DNA, 82 bp, Homo sapiens
ttcgtgtcgtacgtacgccctgagacaatgcagatcttcgtgaagactctgactggtaagaccatcaccctcgaggttgagc

SEQ ID NO: 349207 - DNA, 75 bp, Homo sapiens
gacagcccaaatatcctcggaagagcgctcccaggagaaacaaatttgtcccatcagatgaaaagaagaaacaag

SEQ ID NO: 349208 - DNA, 100 bp, Homo sapiens
ccagactcggtgctgtacccgccatctatccatactaatggaaatgtaactggaactgactctgatgataaaatcaaggaccatcaagcaagatcatgca

SEQ ID NO: 349209 - DNA, 109 bp, Homo sapiens
ggagaacatcgccctgtacctcacccatatgctgaagcctgtggagcatccttttggaggtggcaaccaccagcacatcggcaagccctccaccatccgcagagatgcc

SEQ ID NO: 349210 - DNA, 100 bp, Homo sapiens
ttcggcctggaggagttgtacggcctggcactgcgcttcttcaaaggttacctgtcctgctgccgattcctggatgacaatcagatcgtcaccagctctg

SEQ ID NO: 349211 - DNA, 75 bp, Homo sapiens
ggagcagtactgtgtagccaggatgctgctgattgggcagaaagtggcccatgctctggcagagggactcggagt

SEQ ID NO: 349212 - DNA, 90 bp, Homo sapiens
gagatggagcaggtgtttgagatgaaggtcaaagaaaaagttcaaaaactgaaggactctgaagctgagtgataaaaagttgattgcaga

SEQ ID NO: 349213 - DNA, 100 bp, Homo sapiens
ccgcgaaggagcccgagaagcagccacgatgtgcgtgaacagagtatctgtcaggcaagagctgctgtgatggtttatgatgatgccaataagaagtggg

SEQ ID NO: 349214 - DNA, 90 bp, Homo sapiens
gtttcccgaggagcttgggccgccgcagggagcgcttgtgagtgccttggctgatgacaccttacacttatggaatttacgtcagaagag

SEQ ID NO: 349215 - DNA, 75 bp, Homo sapiens
ggggacagctgcagagcgcgcttctgatcctggggtgcaaagttccccatcaagtggacggcccccgaggcagcc

SEQ ID NO: 349216 - DNA, 51 bp, Homo sapiens
ccaacctcctccagggctggcagaacaggaggaggcccagcctcgtgatga

SEQ ID NO: 349217 - DNA, 74 bp, Homo sapiens
ggacgagcaaaagatgcttaccgaatccggagatcctgaggaggagagaaggatattcctggactgactgatac

SEQ ID NO: 349218 - DNA, 101 bp, Homo sapiens
gaatagacacggcagcgcagtgcagatccgcaggcgcaaggcttcaggcgacccgtactgggcctactctggcgaagctgctctcaggggagaacccagaa

SEQ ID NO: 349219 - DNA, 90 bp, Homo sapiens
tgagagtggccccggctgcatgagctgcaagtgtgtgctctcctgacgcagaatctccggcctgtgaaactgtgaggggattcggccaag

SEQ ID NO: 349220 - DNA, 96 bp, Homo sapiens
gaggctccgttgcctgctcccggagggagacgcgctgccgaggagaacccagcggattagtttttagaggcatgtctatatctcgcccaaatgctg

SEQ ID NO: 349221 - DNA, 100 bp, Homo sapiens
tcgcttcccggcgcggtcgcagccctcagcccacttaggataatggcgacagctgagggccctcagtaccgcctggagaagcagagcgagcccaatgtcg

SEQ ID NO: 349222 - DNA, 50 bp, Homo sapiens
tggcgccgggtcccgcggggaaaggagaagaaatgggtgaccgttggtga

SEQ ID NO: 349223 - DNA, 100 bp, Homo sapiens
cgggggtcgcggggaccatgcagcggaggtgggtcttcgtgctgctcgacgtgctgtgcttactggtcgatgatgattattccccaccttctaagagaca

SEQ ID NO: 349224 - DNA, 83 bp, Homo sapiens
cacagtcgccttttccagtttggagagacgttgagatcatcacctccatcctgctgagcgggcggatcgggcccaacatccgg

SEQ ID NO: 349225 - DNA, 51 bp, Homo sapiens
gcgaaagatccgagatcaacaccttgtttaccgagctgatacccagacata

SEQ ID NO: 349226 - DNA, 96 bp, Homo sapiens
aggataatggaggcctggactctgaggaatcctatccatatgaggcaacagtctaaatctcaaaacatcctcagcacagaggaggaacgaactact

SEQ ID NO: 349227 - DNA, 83 bp, Homo sapiens
cagcccgtgccgcgagcgcggcctgcaggagcgtccagcctgcatgccgtgcggactgcacccaccagcaaggtgatcaagac

SEQ ID NO: 349228 - DNA, 100 bp, Homo sapiens
gaataacccgcccccagcgggatgtgaaggactccgggtgaggccggccacgccccgcacgagcggcttgggtaaatccaccttaatcaacaccctcttc

SEQ ID NO: 349229 - DNA, 100 bp, Homo sapiens
cccccctccccaccttccctcgccctaatcccccaacgaggaaggaaggagcagttggttcaatctctggaccctacagcttggggcctgggctcctctg

SEQ ID NO: 349230 - DNA, 90 bp, Homo sapiens
gtggatggatcagggagaaagacaatgacttgcactgggaaccaatcagggacccagcaggagaagtattcttgcagattaaagggccac

SEQ ID NO: 349231 - DNA, 83 bp, Homo sapiens
cccgtggaccacaggccctcgttgcccagatatgaaggtcaccgtgtccaaagggggcgaccgggacagtgacgacgacagcg

SEQ ID NO: 349232 - DNA, 90 bp, Homo sapiens
ctgctcttacttgtcctgctcctgctgctcgaggacgctggagcccagcaaggttgctgaaaagccaggagtcaaaatgactgagcgctt

SEQ ID NO: 349233 - DNA, 75 bp, Homo sapiens
gaacactcaagtgaagcaaaagccttccatgattacgtctcagaaatattccagtatatacaataaatcgcatag

SEQ ID NO: 349234 - DNA, 51 bp, Homo sapiens
ctcaagggaggccgtttctaccagtctattatcctcccagtccacaacgct

SEQ ID NO: 349235 - DNA, 100 bp, Homo sapiens
gtttgaagacttgctagttaggattttattactggcagcatgtatatcttttgagtggagtcaacatatcaatggagcaagtcacagtcgtcgatgccag

SEQ ID NO: 349236 - DNA, 83 bp, Homo sapiens
gtgaatcagatcatcaaggacttggcctccatggtgtcagagcaaggagaagctgttggaggatgctggtggtggaggtggcg

SEQ ID NO: 349237 - DNA, 82 bp, Homo sapiens
ctcggaaggagcggcccacggcaaagatgctgagggttggaaaagcaaaagcagatgtgtggcccaaaactgctccaaagaa

SEQ ID NO: 349238 - DNA, 100 bp, Homo sapiens
ccaggtggtcccggaggagcaggtgcagagcactgcgctgtcagcgatagcccagtggatggccattccagttactgtaaaatggggaaaggagaaattt

SEQ ID NO: 349239 - DNA, 87 bp, Homo sapiens
ggagtctcccgtcactcaggacatcatctgcgacgtggggatgtactctgtggatatccccttggacaaaactgtcgtcaataagga

SEQ ID NO: 349240 - DNA, 74 bp, Homo sapiens
ggctgggagcctcgtggaggctgagatgatgttgaatttgaagtatcatcggaccgacggactgggaaacccat

SEQ ID NO: 349241 - DNA, 90 bp, Homo sapiens
gcaagcggagctcccccaagagccggaaagtgctctggtctggggtctctctgtgaaacacaatcctcagaaagtgggtaaagaccatac

SEQ ID NO: 349242 - DNA, 101 bp, Homo sapiens
gcctgcccagacggctcacctgtgcgggatggaacaaaagagctgcggtgcaaccctgggcagtttgcgtgtcgcagcggcaccatccagtgcatccccct

SEQ ID NO: 349243 - DNA, 75 bp, Homo sapiens
cacagaaccccagtgcccaggcactgggcctgggcaaacataattactgccgaaaaatggctacaaacttcctag

SEQ ID NO: 349244 - DNA, 100 bp, Homo sapiens
aaagaggccaaatcacaagcaacaagacacatgcggacaaaatggaaaaggagaaaacaattttggaagctcaaagggatgttgtgaaacaaaagctgac

SEQ ID NO: 349245 - DNA, 101 bp, Homo sapiens
ggcctgtcgctggagcacaaaagagtctccgcggtggaggtctgcgttgctcttgcttttcctcgctggggtgtacggtgtatactcttgatgtaccagat

SEQ ID NO: 349246 - DNA, 101 bp, Homo sapiens
ccgggccgctcctggaggaggaggtgggagagggggtcatcttaaatgagaaaagcttccagggtgctttggagtttaagaacgtgcattttgcctatcca

SEQ ID NO: 349247 - DNA, 100 bp, Homo sapiens
ggccctgagcccggcgagcaggagaggaggtcttccgggccgcggcctccgagcgcgcgggatttgcagggttgtctcctcacagactatgagctccttg

SEQ ID NO: 349248 - DNA, 82 bp, Homo sapiens
cgtacctcctcaccatacacctgaaggaaggccggaacctggttgtccgagatcgctgtgatggagtctcactctgtcgccc

SEQ ID NO: 349249 - DNA, 110 bp, Homo sapiens
atctgctctgggaagcaccagggtgtccccgccgccctcagctcgaagtcagccaccatggaggcgcaggcacaagatttccaggtggaacttcttttggataaactcaa

SEQ ID NO: 349250 - DNA, 54 bp, Homo sapiens
gcggttcctctgcggtgtggtggaaggtgctggaggtggtgagagccaactatg

SEQ ID NO: 349251 - DNA, 97 bp, Homo sapiens
gtaatgaaaacaaatgacattgttcgatacagggtgtatgagatgcctgaagaacaggcattcagtgttctggtcaagatcatgtttgactatgggc

SEQ ID NO: 349252 - DNA, 114 bp, Homo sapiens
cgaaaggagagcccgtcattagcgtgaaaaccacaagcaggtccaaagagagaagtctctggtaagaagagtgaaagcaaagaagccaagaagtctgaagaaccaagaattcgg

SEQ ID NO: 349253 - DNA, 82 bp, Homo sapiens
agctgctggaggacgagggccagctgacggagatggtgcagaagatggaggagatcttcgtgaagactctgactggtaagac

SEQ ID NO: 349254 - DNA, 100 bp, Homo sapiens
aggagatccgcagaggacagtcatcagcatcatcggctggttcgtgcgaagcttcaagtacttttacgggctccgcttcgaggtgcgggacccgcgcagg

SEQ ID NO: 349255 - DNA, 74 bp, Homo sapiens
gtaaaaggtgcttggaatggttctatgaatatgcagatgtctcgaagtcggagtccttctccaataagatgtgg

SEQ ID NO: 349256 - DNA, 100 bp, Homo sapiens
ggacaagttttggtggcacgcagcctggggactctgcctcgtgccgctgagcctggcgcagatcggtgctggagaatctggtaaaagcaccattgtgaag

SEQ ID NO: 349257 - DNA, 80 bp, Homo sapiens
acttgtgcccatatgatctgtaacatggaggagctggaaaaggtttgatggtgatgagctcaccacagatgaaaggatac

SEQ ID NO: 349258 - DNA, 75 bp, Homo sapiens
cactgcacctggctgctgagaaatctttgcctacagtgagggtatgagactgagagaggaatacgtctaacagtg

SEQ ID NO: 349259 - DNA, 50 bp, Homo sapiens
ctggccgttgctgtggagacgcctggtatccaagcccaccaatgggatct

SEQ ID NO: 349260 - DNA, 98 bp, Homo sapiens
ccagcctcagccacagggacgcctccaaggaactgttcaggtttgatctgtggatgaaatgaatcatgattttcaagctcttgcattagaatctcggg

SEQ ID NO: 349261 - DNA, 60 bp, Homo sapiens
cctgatgagttgctggggaatgcagaagaaccttcaataatcatggaagggaagtggttg

SEQ ID NO: 349262 - DNA, 114 bp, Homo sapiens
aggctgtcaagtatgtggagtgttctgcacttacacagttgtccagtgtacagaagcttactggaaggagtggccaactagttaaaggtttgacacctcaatatcaacaaaatg

SEQ ID NO: 349263 - DNA, 75 bp, Homo sapiens
ggtgttcctgctcgcgatcagcctgctcaactgctccaacgccacgtgtactaatggtcacttgatgtgcgctgg

SEQ ID NO: 349264 - DNA, 100 bp, Homo sapiens
ccatgacgctctgaacatcatcgacatggccctgagtgaatacccagaaaatttcatgcttgaccactatgctatcatcaagtttccgctgaccactgag

SEQ ID NO: 349265 - DNA, 95 bp, Homo sapiens
gctccgcgaggaaaacgagggcgtgtataatggaagctggggaggccggggagaggagaagatggtataaactggtccatcagtgacaaagacat

SEQ ID NO: 349266 - DNA, 82 bp, Homo sapiens
cgagaggagctgagcgagcgcggaagcaaaccgtggggaactgtgggtcagagactctccagcatccttggaagtggcctct

SEQ ID NO: 349267 - DNA, 90 bp, Homo sapiens
ctgtgccgcccgcgccccggggcagcagcgcgtcccaggaggagcaggacgaggagatttggacacctcccacactgagtccccaacccc

SEQ ID NO: 349268 - DNA, 89 bp, Homo sapiens
aaaggcaacatcctgtcacaggccatgctctggcaaaaacgaactgtggctgcaccatctgtcttcatcttcccgccatctgatgagca

SEQ ID NO: 349269 - DNA, 98 bp, Homo sapiens
cccgggagtgccgtgcgccgcagcccgggcccaggccccggcagcgcctgggacaagttaataacgacatgatagtcactgacaacaacggtgcagtc

SEQ ID NO: 349270 - DNA, 80 bp, Homo sapiens
gagcagcggccgggagcccttagggaggcagataagtttataccatggatagcacaaaggagaagtgtgacagttacaaa

SEQ ID NO: 349271 - DNA, 100 bp, Homo sapiens
agatgagtctgaggtggtggtggagcgggacatcatcctggacaaccccaccttgaccctggagatgcagatcgagagcctgaatgaagagctagcctac

SEQ ID NO: 349272 - DNA, 100 bp, Homo sapiens
ccaagctatggctatcagttcccagattgtaaaccatggctgtgtggatacaagctcagcagctccaaggagaagcccttcatcagatgcaagcgttata

SEQ ID NO: 349273 - DNA, 82 bp, Homo sapiens
cctgccagcttctcctacggattctggacttgccagccccacaatcatcttaccctgaaagaagcagatcccagttcaaaag

SEQ ID NO: 349274 - DNA, 100 bp, Homo sapiens
ctggcgggctccgtggaagcgtggccggcagcgtcccggacgaggagagtgtgaacatggctacgcctcttcattcccgtccatgccgagcccccgactg

SEQ ID NO: 349275 - DNA, 74 bp, Homo sapiens
ctcgatccgctgctcgcacgggagccagctgggtggggtctgtcctccagcctcagcagatgagacttttacgc

SEQ ID NO: 349276 - DNA, 83 bp, Homo sapiens
aagagaacagcttacagaatataatggaacagataattgtacagctcatgaacacaaccagtttaaggaagaaatctctaaac

SEQ ID NO: 349277 - DNA, 100 bp, Homo sapiens
tagaagattctacaagtgacttaagaagcaaaaaattcaagaaactgactaaagctatatgtggactgattgaccctgctacgggaatggttatgaatct

SEQ ID NO: 349278 - DNA, 100 bp, Homo sapiens
cattaaccttacgtggagttatttcctgcatttcctcctttcgtctttacaaggtagccgtttggcgtcgtgagggaaatcctcattgacgattcaattt

SEQ ID NO: 349279 - DNA, 100 bp, Homo sapiens
aaatccaaagttctcgcccactatcctcagaatatagaatggaacccttttgatcaagatgcggtgaacatggtggtggctaatgccgtagcggcattat

SEQ ID NO: 349280 - DNA, 103 bp, Homo sapiens
caccatcaagttcttcaggaatggagacacggcttcccccaaggaatatacaggaactgtggctgcaccatctgtcttcatcttcccgccatctgatgagcag

SEQ ID NO: 349281 - DNA, 75 bp, Homo sapiens
ggccggcctcgcaaggcgcttcccctttccagagagccagaaagaaagcatctgctgcacccaagcctgagccgg

SEQ ID NO: 349282 - DNA, 74 bp, Homo sapiens
tgctttgctttatttgtgaaatttggcaaagagggtttcctgaggctcaagctctaggactggaggtgttccat

SEQ ID NO: 349283 - DNA, 93 bp, Homo sapiens
ggaaggagggcgtccgagtcaacaaccgcttcgagctgcaaacggggattcagcgtccgatcctttggaacagggactcacgtgaagcttcca

SEQ ID NO: 349284 - DNA, 79 bp, Homo sapiens
cgcaaccccagatccatttacactttacagcccaggctgcaagcacaaaggaagtttgctcagtctcagccgaatagtc

SEQ ID NO: 349285 - DNA, 95 bp, Homo sapiens
aaactccaaccagataaagattctgggaaatcagggctccttcttaactaaagacttaattcagtgcacaaatgagatgaatgtgaacatcccac

SEQ ID NO: 349286 - DNA, 101 bp, Homo sapiens
aacatgatggttcactttttcaagcagtaggaatttgctacaaggtgagctgcctggaaatccctgggccctctggccccaagggctaccgtggacagaag

SEQ ID NO: 349287 - DNA, 90 bp, Homo sapiens
agtgcagtgacatacctaaacagcacaatgcaccctgggacccggaagagaggagctctggaagatcatcgcagaaccagtaacatgacc

SEQ ID NO: 349288 - DNA, 133 bp, Homo sapiens
gtaccctcccccgggagagcaagccgggcggcctgccccgccggagcagcatcatcaagatctgggacatgagcgatgatgagaccatctgagatggccccgctgtggggctgacttctccccggccgcctgc

SEQ ID NO: 349289 - DNA, 100 bp, Homo sapiens
gacactgcacccatcccggctgcttttgctgcgccctctcagcttcccaagaaagatgccttcaattaagttgcagagttctgatggagagatatttgaa

SEQ ID NO: 349290 - DNA, 92 bp, Homo sapiens
aaagactcaggacggacaagcacagtcttcggaaggtgctgaccggatatctgaactacatggtccagctggggaagctgctgggcggcggg

SEQ ID NO: 349291 - DNA, 84 bp, Homo sapiens
cctggcgcgatgcgtcaagtacactgaaattcatcctgagatgaggtgacttaagagattaaaattaatttggttgctgttggt

SEQ ID NO: 349292 - DNA, 96 bp, Homo sapiens
cgatcgacccggtaccaagaaggggagtgcccgcggcagggccctgtggccgagtgtgtccagcccagtgtcatggggagcttccatatctcatgg

SEQ ID NO: 349293 - DNA, 90 bp, Homo sapiens
attttgcactcaccattaaatctatcagtgtggcaaaggagcagagaactttgacaagttcttcacacgaggacagcccgtcttaacacc

SEQ ID NO: 349294 - DNA, 50 bp, Homo sapiens
agaaggttctggtcttgcactaaggatccattccaaggagcacttcaagg

SEQ ID NO: 349295 - DNA, 98 bp, Homo sapiens
taccgctgaagaggaatcaattttgctttggtgtcatccccagcactcctctggccatccatacaccactgatgccaaaccagagcattgatgtctcc

SEQ ID NO: 349296 - DNA, 83 bp, Homo sapiens
aggaaagcctctccagactggaacagccagatttattgctaaacatgggtgcatttttggataaacccaaaactgaaaaacat

SEQ ID NO: 349297 - DNA, 83 bp, Homo sapiens
gaagcacttcaacgctggacgaaggagaagatgttcgtggaagaggtgtccacaggccaggagtgtggagtggtgctggacaa

SEQ ID NO: 349298 - DNA, 100 bp, Homo sapiens
gtctttctcaacctcatcttctgggtcagtatgggaatcctttaaataaatatatcagacattatgaaggattatcttacaatgtggattcattacacca

SEQ ID NO: 349299 - DNA, 83 bp, Homo sapiens
tgaagcgcaggctgcggggcgcggagtcgggaggtgtccctggccagtgtccttccacctgtccacaagcatggggaacatct

SEQ ID NO: 349300 - DNA, 100 bp, Homo sapiens
atattaggaagctgtgattttcaaagctaattatgaaaacatttatcattggaatcagtggtactatactggcaattgctggagaagattttgcaattgt

SEQ ID NO: 349301 - DNA, 100 bp, Homo sapiens
atttgagatcaattcttggagaacacaaagaagtgtgatgatgcatatgaaacagccaagatgctgtgtgaacagtattacctggtagctccagagctgg

SEQ ID NO: 349302 - DNA, 107 bp, Homo sapiens
tgccaactccttcttcccacgctgctactgcctgggggctgaggatgacaaaaaagccttcatagggaaatgtttcaacgtgcgcaagcgttgcggcggcgggcaga

SEQ ID NO: 349303 - DNA, 98 bp, Homo sapiens
ctttctaccacgtcaaaaacaacgggaagattgaactcatcagacactcatgaggaccatgatacttccactgagaatacagacgagtccaaccatga

SEQ ID NO: 349304 - DNA, 90 bp, Homo sapiens
gcagtcggtgaccgcgcgactcggcgcccgcccgcggcgatggatgactacagtgtgatcggccgctccctgttcaaaaaggaaaccaac

SEQ ID NO: 349305 - DNA, 100 bp, Homo sapiens
cgcggaacggtcgtggagaagaagagctgctgatgaggactgggacagacgttatgaagaggacatgtactggaggagaatggaggaagaacaacatcat

SEQ ID NO: 349306 - DNA, 100 bp, Homo sapiens
tctttgaggccatactgaatgatgaggtggtctaccctacctggctccatgaagatgccacagggatcctaaaatctgaagaaagacatgagtcacggag

SEQ ID NO: 349307 - DNA, 100 bp, Homo sapiens
tcctttggaaatgtgctcacactgtacagcagggaagaactggaaactcagagaaagaaactgcccttccatctacaaaagctgagtttacttctcctcc

SEQ ID NO: 349308 - DNA, 100 bp, Homo sapiens
tcttacgtctgcggaagtgcagctgcctcagttcttagcgcaggttgtggttcaccttgaaactattctaggagcctcagttcaacatgttaaactgaag

SEQ ID NO: 349309 - DNA, 102 bp, Homo sapiens
cggcgcctcctcggagtccttggggacggagcagcgcgtcgtggggcgagcggcagactgtgccctgtccacggtgcctcctgcatgtcctgctgccctgag

SEQ ID NO: 349310 - DNA, 75 bp, Homo sapiens
gtccaattttatggattttgatgaaactggtcttactgaagtaacacaaagcttaaaaatggaaaatgaagagtt

SEQ ID NO: 349311 - DNA, 98 bp, Homo sapiens
tgcacaccaccaacattcttggcattacgcaggccagcaactcccagctcaatgcaatgccaagctacatcagtgatgtgggaccccctggtcgaagc

SEQ ID NO: 349312 - DNA, 99 bp, Homo sapiens
agaaacacttcctataaatctcgcccaaacaggaaagtaatgggggcctagcagacatcttcacggtctttgccaagacaccagttacagatccagcca

SEQ ID NO: 349313 - DNA, 50 bp, Homo sapiens
gtggccgacttcttgcagtgggaggatttcacagtgcagctgtggccaag

SEQ ID NO: 349314 - DNA, 82 bp, Homo sapiens
ggaggccggggagccgacgcctgctctggagcctcccagctcaattgcctgggatttatacaagataaaattacagtgtgtg

SEQ ID NO: 349315 - DNA, 100 bp, Homo sapiens
taaatgatgatgattttgagccatacttaagtagccagacaaatcagaaaacacgagatttttctcctatttcagcagttggccacaacttcattgctgg

SEQ ID NO: 349316 - DNA, 100 bp, Homo sapiens
gctcatgcttgttaccggctccatcaacacgctctcggcaaagtctcagtccggcacaggaaaaacagccaccttcagtatctcagtcctccagtgtttg

SEQ ID NO: 349317 - DNA, 75 bp, Homo sapiens
tttgaaatgatggagaaggatgagctatgacttgctaaacaatctgttggaacaagagttgaatgctcgagcccg

SEQ ID NO: 349318 - DNA, 100 bp, Homo sapiens
caagagaatgtgtcagccgatgcaccgagtccagcccaggaaaatggagagatctttgtggagttcacctctgtgtttgactgccagaaagccatgcagg

SEQ ID NO: 349319 - DNA, 50 bp, Homo sapiens
cttcggatggtgaactcattagaagagctggaatatcagaagtctcagcc

SEQ ID NO: 349320 - DNA, 100 bp, Homo sapiens
ttgtcattactgtgacggctatcaaacagaaactaaagttacagagtggagaggtaacaaaagaagagaggcagcctgcatcagcccagtccaccccaag

SEQ ID NO: 349321 - DNA, 97 bp, Homo sapiens
caagagtcaccgggatccctacgcgacctccgtgggccacctcataggcttatgtacataaaagcgtgatggaggaactgaagagaataattgacga

SEQ ID NO: 349322 - DNA, 101 bp, Homo sapiens
aagtaagtggatcacacgcgccggctgctgctactactaccactttgggctgatggcaactgggcgatgccagtccctccactccagaggagaacgaaacc

SEQ ID NO: 349323 - DNA, 100 bp, Homo sapiens
agacatggcgagcgactccccggctcgaagcctggatgaaatagatctctcggctctgaggacaatgcagatcttcgtgaagactctgactggtaagacc

SEQ ID NO: 349324 - DNA, 87 bp, Homo sapiens
tcctcccaaacaactgcttcctgaatctacccctgcaggaaaccaagaaatgggggacaatgatggagagagaaagcatcaaaagct

SEQ ID NO: 349325 - DNA, 83 bp, Homo sapiens
agctgccacctgcctttgacctttttgaagcctttgcaaaaaggttttaaaagactacatcaagccagatggggaatatttgg

SEQ ID NO: 349326 - DNA, 98 bp, Homo sapiens
cgctgggccgaccccagagcggcgctggacagaactgaagcgctgcggcatggcgcgcgcctgcctccaggccgtcaagtacctcatgttcgccttca

SEQ ID NO: 349327 - DNA, 100 bp, Homo sapiens
tttgaaatctgataagaaagtacggaccataataatcaggagtgaagtcccagggatattctgtgctggcacttcaaaaaacgtatcagaagatacttcg

SEQ ID NO: 349328 - DNA, 74 bp, Homo sapiens
ctggctgcagtaaaaatcattaaattggagcctgcttgcaagtagaagtctcaggcaacagattaaaccagcag

SEQ ID NO: 349329 - DNA, 100 bp, Homo sapiens
cttttactactgtgacaacattaacgaaaatatttacaccagcagctccagttcataccaataaagaagatcctgctacccaaactaatttgggatttat

SEQ ID NO: 349330 - DNA, 75 bp, Homo sapiens
cttcatcaaaaatagtgatagctttgataataaactgtttcacgttagacctgtaacccaaggagatgtgtatag

SEQ ID NO: 349331 - DNA, 75 bp, Homo sapiens
gagaaagtttcatctgtggatggagtattggcctccaggcccaaggtcagcatcccactgtcagccatcattgag

SEQ ID NO: 349332 - DNA, 90 bp, Homo sapiens
ccgacggcagccggcacctgacggcgtgaccgacccgagccgaaggtgttgagctggcgagttcgcggaggctactattcaggaaatctt

SEQ ID NO: 349333 - DNA, 100 bp, Homo sapiens
agacaaggttcaaaaactaagcatccagaggccctgagcagctttcagcactggaggcttactagaaagcagcacccgcctgaaacctcacgaagcccag

SEQ ID NO: 349334 - DNA, 100 bp, Homo sapiens
cttcaagtcccggaccttatccgtgcgccgcttcggtttgcaggccctgggaggagcggggacactgaggacctctctccaaattggcctctcaactcac

SEQ ID NO: 349335 - DNA, 73 bp, Homo sapiens
ccacagagctgggaaaattgttgtgaacctcacaggcaggctaaacaagtgggtaattccagaattgattggc

SEQ ID NO: 349336 - DNA, 100 bp, Homo sapiens
caagactctaggtcgagagttccacaggattgcacttggaggagtatgtgatcagtctgacattcgaggacacaggtggtaccatagaaacattaccaga

SEQ ID NO: 349337 - DNA, 96 bp, Homo sapiens
ctgcggaacaggacgccctctgatctacgagttccagggagctctgtcctggtgaccgtgcccgggttatgacgactaatcccaaaccgaataagg

SEQ ID NO: 349338 - DNA, 114 bp, Homo sapiens
cccagaccctggagcctcagttggaagcagccgatccagcctgcggagcctgtggggcagcttaaagcttttcaagccaggccaagaagctgtgaagtaccagggtcctcggga

SEQ ID NO: 349339 - DNA, 75 bp, Homo sapiens
tggacttagctttgtcatgcaaagctgtcatttgctgtcgtgtgaagcctcagtttaggtcatctggtggttcag

SEQ ID NO: 349340 - DNA, 100 bp, Homo sapiens
ggcttctgactgcagttcttctgagtgtgctgctataccagtggatcctgtgccaggatatacatcaggggatgtgagagtgtgggacacccgcacctgg

SEQ ID NO: 349341 - DNA, 75 bp, Homo sapiens
ggcgggggaggcggcggcccagccacgatggaaaagagcactggttgccattggtacccatgatttggacacttt

SEQ ID NO: 349342 - DNA, 100 bp, Homo sapiens
tcaactcaccgatgtcccccgccctggtggatgttcaccctgaagacacccagcttggaagctgaagagggaactacccttttcattccgatcaattaat

SEQ ID NO: 349343 - DNA, 100 bp, Homo sapiens
ggcggatctggaggagcagttgtctgatgaagagaagctttctctcctttgaaaacactaagaataatgtcactgcatcagtttttactagagccaatca

SEQ ID NO: 349344 - DNA, 100 bp, Homo sapiens
gacggatgaaaagaatgaacactgtccttcaaaacgagtacttggtaatcaaataatgcctggatttcttaatatgaagataaagtttgtgtgcgcccag

SEQ ID NO: 349345 - DNA, 100 bp, Homo sapiens
tctcaacccagagcaaattgagacgtccgggtgagagtccgtgagtcccttcgagtttaaagtggccctgagggtcctgaggacaccgtgagccagccag

SEQ ID NO: 349346 - DNA, 83 bp, Homo sapiens
gacagggatcacttcatccgaaccctcagcctcaagccgctgctcttcggaactgtggctgcaccatctgtcttcatcttccc

SEQ ID NO: 349347 - DNA, 100 bp, Homo sapiens
cctggccctcatgtacgagtccgagaaggttggggtcgcctcttccgagctgtcaaagctcgaaaaacagcagcagaggaaagaaaagaccagagctaag

SEQ ID NO: 349348 - DNA, 50 bp, Homo sapiens
tggggccacgtggagctgctggagggtgaaatgacaatggatgctctgtt

SEQ ID NO: 349349 - DNA, 75 bp, Homo sapiens
ccgctgctaactcggctacaacatttggcagagttctctcctgcgctatggtggaaacctgtccctccaaagtgc

SEQ ID NO: 349350 - DNA, 98 bp, Homo sapiens
tgaagaggattgcatcaagcaggaacttcaagattcctacctgttgcccatctcggaggacaaggtcatggagggaaaaggccaaagcccctttgacc

SEQ ID NO: 349351 - DNA, 100 bp, Homo sapiens
cacacccaaggtcacagagcagctcatgaaactggatgaacaagggaatgtggaggctgtggacccacgaggtcgaacattattgcatcttgctgtttcc

SEQ ID NO: 349352 - DNA, 75 bp, Homo sapiens
ctttgggcgtcccattgccatggaaactttgaaaagcaccccaaagaactgatcagggggcccatatggcttcga

SEQ ID NO: 349353 - DNA, 125 bp, Homo sapiens
tcccggcgctctcctggctcccttctgccccagctccgtctcggcggcggcggcaatggctgccatccggaagaaactggtgattgttggtgatggagcctgtggaaagacatgcttgctcatag

SEQ ID NO: 349354 - DNA, 100 bp, Homo sapiens
aagtccggctagtacgcgaattggagaaaaagttcagtgggaagcatgtcgtctttatcgctcagttctcctgtgcctcctgttggctctctttgcatct

SEQ ID NO: 349355 - DNA, 115 bp, Homo sapiens
ctggaagctgagggcacgtgtttgcggttcagccctttgatgaccgcagcaggtcggatcatgctaaaaggagataatattactctgctacaaagtgtctccaactagaaatgat

SEQ ID NO: 349356 - DNA, 101 bp, Homo sapiens
cccccctcctaggcgggagggggggtggtgcgcacgcccccgaggacgcaggtgagaagccctaccactgcaactgggacggctgcggctggaagtttgcg

SEQ ID NO: 349357 - DNA, 90 bp, Homo sapiens
agcacctttcggcttctgagacggcggcagcagcggcattcaggttatgatgtgattgctcaagcccaatctgggactgggaaaacggcc

SEQ ID NO: 349358 - DNA, 75 bp, Homo sapiens
gctgtcgctcctggtcggcgcgtggctcaagctaggagcctcagggaacccagccagcacagcagcagcagcctt

SEQ ID NO: 349359 - DNA, 90 bp, Homo sapiens
gaggccggcgtgacaggctctgtcactaaaataggaatctgcaagcagaatatgaccgtctaaagcagcagcacgaacataaaggcctgt

SEQ ID NO: 349360 - DNA, 90 bp, Homo sapiens
gcgagtgggagcaccaggatctcgggctcggaacgagactgcacgatatgtgctgattagaaggctcacttgtgcagtgtggaggataac

SEQ ID NO: 349361 - DNA, 100 bp, Homo sapiens
ggacttcccgtccgcggcgtggagggtcagcccaaggccaaccccactgtcactctgttcccgccctcctctgaggagctccaagccaacaaggccacac

SEQ ID NO: 349362 - DNA, 75 bp, Homo sapiens
gccgccgcccctcaccagacagatcgctgtcaaaaccctagattttggatttagtaaaggggacacattaccagg

SEQ ID NO: 349363 - DNA, 100 bp, Homo sapiens
ctgaagaccctccagcagcagaccttcaagatagacattgaccccgaggagacgagtaattccctcctggtcccagacagtctaagaggcacagataaac

SEQ ID NO: 349364 - DNA, 75 bp, Homo sapiens
taccaggaggccaggggtgtcgccatgccaagacaatgcaaactccagtgaacattcccgtgcctgtgctccggc

SEQ ID NO: 349365 - DNA, 97 bp, Homo sapiens
gcagacaaggtcccaaagacagcaggcctcctcgctggggaggcagagtcctcgcgtggtctcctgcctcgagcacagcctgtgcccaggggagccg

SEQ ID NO: 349366 - DNA, 98 bp, Homo sapiens
caaagctggaggaagctgagcataaggttcagagcctacaaacagggctggtgaattaccatatctccgtcaagtgcagtaaccagttcaagttggaa

SEQ ID NO: 349367 - DNA, 82 bp, Homo sapiens
tacaaggccaagttcatctcctccgtcaccagccacatctaccaggtggaagttaaacgagctgagcctcgggacagcaaga

SEQ ID NO: 349368 - DNA, 83 bp, Homo sapiens
cattggtaaattgatcaggatttttggcctaccctccaaagaaaagatgaaggatttgggggcagagcacttggcaggtcatg

SEQ ID NO: 349369 - DNA, 75 bp, Homo sapiens
gatgatgcaaaggcagcaagagatgcacaggaggtcactactgtttttaatgaagccacatcatctttcgattta

SEQ ID NO: 349370 - DNA, 75 bp, Homo sapiens
cagaagagccgacagaggcagacacagaaggccgacaccctgcacctggtctatcatatgcaagtcacacggttg

SEQ ID NO: 349371 - DNA, 75 bp, Homo sapiens
ctggtctacatgctagagggcttgggcattcacacgagatgggatttcaccatgctactcaggcttgtcttgaac

SEQ ID NO: 349372 - DNA, 96 bp, Homo sapiens
atctcagcaatggggataccattctggaagacttgcccatccaatctggcgtgcaatggaattgagttttgccctggtaaatgggaataatatccg

SEQ ID NO: 349373 - DNA, 50 bp, Homo sapiens
gggagatagacgctgctgcctaaccagacataagttcagaggaatctgtc

SEQ ID NO: 349374 - DNA, 82 bp, Homo sapiens
ctgggccctgaggctgcaccaagtggcgaaggagccggctccaagataacgaaggaggcccaacttcattcaataaggagcc

SEQ ID NO: 349375 - DNA, 100 bp, Homo sapiens
gactgcagctcagccaaggccaggggagacctgggtgccttcagcagaggtaaacgcaaagcactgaagttgaattttgcaaatccacctttcaaatcta

SEQ ID NO: 349376 - DNA, 75 bp, Homo sapiens
aaagaatcccggccagacgtgcgaacagctccagctgggtctagatgttgatggaatatatcgagttagtggcaa

SEQ ID NO: 349377 - DNA, 96 bp, Homo sapiens
tcatataactcctgagaatagtggttcttaactctatctatcctcaggagagacacagcataagagttcctgaatcgggagaacattatgaactgc

SEQ ID NO: 349378 - DNA, 74 bp, Homo sapiens
cggaacctggaggaggtggagttctgtgtggaagcaaacggggattcagcgtccgatcctttggaacagggact

SEQ ID NO: 349379 - DNA, 75 bp, Homo sapiens
accatgttaaggaggattttacagaggttgatattcactgatggactccaaagaatcattaactcctggtagaga

SEQ ID NO: 349380 - DNA, 75 bp, Homo sapiens
gccggaagatgcatatgaagactttattgtgaaacctcccgtgagaaaggtgcccgagaatatcatgtccagttt

SEQ ID NO: 349381 - DNA, 75 bp, Homo sapiens
ctcgcagcacttggagcgcagaaccggccgcgcccggttacagagccatcacggtgcggaagctcatgcaggtag

SEQ ID NO: 349382 - DNA, 101 bp, Homo sapiens
gacgagggccggttgccgggcgcgggcgagaaaggtactccaaagattcaggtttactcacgtcatccagcagagaatggaaagtcaaatttcctgaattg

SEQ ID NO: 349383 - DNA, 100 bp, Homo sapiens
ttcctgaccaagctgtggaccctcgtgagcgacccggacaccgacgcgctcatctgctggagcccgagctgaagaagcaggtggagagtgccgagctgaa

SEQ ID NO: 349384 - DNA, 80 bp, Homo sapiens
cgccgcccccgggctcgcggcctgcaggctctacagattctcccctgcccctggagaaggaggagcaggtccgacttcag

SEQ ID NO: 349385 - DNA, 90 bp, Homo sapiens
aactatgtgtgttgtcagaatgctcttaatgagccacccacacagaatatgcctatgggtcctggagggatgaatcagagcggccctccc

SEQ ID NO: 349386 - DNA, 75 bp, Homo sapiens
cctggacagacagctactccacgtgcaatggaccatcagcacgtgcccatcgacatccagaccagcaagctgctc

SEQ ID NO: 349387 - DNA, 50 bp, Homo sapiens
cggcaaccaaatcggcgccaaggctgaccccgcactacatctacccacca

SEQ ID NO: 349388 - DNA, 96 bp, Homo sapiens
cgcaggccgggccacagcctggaggccgagcgcgagcagttcgacaagacccaggagaatgactatcttcaagactgcctcgatgccatccagcaa

SEQ ID NO: 349389 - DNA, 82 bp, Homo sapiens
gcggcccaggttcgccagcagcccaagagcctcaaaccaggcccagacatgtccgtccttgtaagttaaaagcttccatggg

SEQ ID NO: 349390 - DNA, 82 bp, Homo sapiens
ccaggggccaattaagccttaccagcaggggcgacaacagcatcaggtgagaagccctaccactgcaactgggacggctgcg

SEQ ID NO: 349391 - DNA, 101 bp, Homo sapiens
aggaacgcaagaacagaatgaagaaagtcagggggactgcaaaggccaatgttggtgctggcaaaaaggatgcccaggctgaggaagagatcaagcaagag

SEQ ID NO: 349392 - DNA, 73 bp, Homo sapiens
tgggacacccgggagtcaggaaatgggaccactgacatttagggatgtggccatagaattctctctggaggag

SEQ ID NO: 349393 - DNA, 100 bp, Homo sapiens
gcagctgcacaaacagcccccacctcgggagccagctcgggcccaggcccccaaccaccgagtgtgagagccacgagccaaggtgggcacttgatgtcgg

SEQ ID NO: 349394 - DNA, 83 bp, Homo sapiens
cacacagatgtggtgaaatgtacccagttagtaagagccctggtacctgacagtgtaaagaaggagctcctacaaagaataag

SEQ ID NO: 349395 - DNA, 75 bp, Homo sapiens
agttagaaaggctcaacgagaacaagctatcagctatgtttccagtgtcctctgggtgtttccaagagcaacaag

SEQ ID NO: 349396 - DNA, 83 bp, Homo sapiens
ctggttgtgagaagacgtctgtgtcgtgcgcaaaagactgttgaagtagagagcattttgcccagctcactcggattctttgc

SEQ ID NO: 349397 - DNA, 100 bp, Homo sapiens
cccgcgctgcctatatctacatccgaggggaattctacaatgaggcctccaatctgcaggaaggtaaatactacagtgaggaggccgaggtggatctgcg

SEQ ID NO: 349398 - DNA, 75 bp, Homo sapiens
ggatgccctgcagtacctgcagaaggtctctggagacatcttcagcaggctgtgagaagacatttatcacagtga

SEQ ID NO: 349399 - DNA, 100 bp, Homo sapiens
tgagaccaaaaacccaccaattctggacacattgggattaaaggcagggcaagaatcctttcgttccatcacaaggtcgtattacagaggtgcagcagga

SEQ ID NO: 349400 - DNA, 100 bp, Homo sapiens
ccagcatctaactaacacggtttttattgacagagctctgatagttgttccttgtgcagaagctgaaaatactccttgatcaagttgaagaagcagtggc

SEQ ID NO: 349401 - DNA, 90 bp, Homo sapiens
atgtcaccaacccggccttcaccaaactccctattcatggaagaagtaaggaaaaggagagagctagtctagataaaaaaagagataaag

SEQ ID NO: 349402 - DNA, 98 bp, Homo sapiens
tggagatgcttctggtttattttgtggctaccgctgttactgcttggagtgcctcaccgagccagttcgcccattgagccgagagatcacaatgagcc

SEQ ID NO: 349403 - DNA, 51 bp, Homo sapiens
gtttccacatcggtcagaaaaagatgttcgggatgagtatcggcaggacta

SEQ ID NO: 349404 - DNA, 75 bp, Homo sapiens
tccacatgcgcttgggcctggccacaaattcctagaggacctgtgcaacaacctcttgaggatcgaatcttcact

SEQ ID NO: 349405 - DNA, 100 bp, Homo sapiens
cagcagcagtgactccttcggagcccctccacaagttccatctaggcctacgagggccccgcccagtgtcccaagaatgtcgagtggtaaagtccacttc

SEQ ID NO: 349406 - DNA, 101 bp, Homo sapiens
gcagcttctcctgtcatcggaaatgccaggccaaggaaataatgaagatgtttcattttcaagaccagcagatcttgaccttattcagtcaactcccttta

SEQ ID NO: 349407 - DNA, 100 bp, Homo sapiens
ctgcctgaagggcttcaccaagtacgctgcccagctggacgtcaagaatggctattcatatgaaaaggaagcaatggaaaattggatcagcaaaaagaaa

SEQ ID NO: 349408 - DNA, 51 bp, Homo sapiens
agttcggatccagatttcatgtatgaactgcttctacacagctttgcggaa

SEQ ID NO: 349409 - DNA, 75 bp, Homo sapiens
gtagagtatttcaaccataaagacatcttaattgggcacgaaagagagatggtgaattgtctttgagtcggtcac

SEQ ID NO: 349410 - DNA, 75 bp, Homo sapiens
agagagcttggttaacttgggagaaagtttcatctgtggatggagtattgataccccagaatcttccatgctccg

SEQ ID NO: 349411 - DNA, 87 bp, Homo sapiens
aacaaggaaataaattagtggcagagtaagggtgacttggacttgaaaatactggaaatctgtccggatccaaattattttgcaagc

SEQ ID NO: 349412 - DNA, 100 bp, Homo sapiens
tgtgttctctgcagattctaagagtgcctgtgaagaaaacggggtattgccctgaggcttatattctgcctcagttgtcttttcttgaaatattataaat

SEQ ID NO: 349413 - DNA, 75 bp, Homo sapiens
gtgacaccaagataagtaacagccatcatgaagctgaatggccaccagttggagaaccatgccctgaaggtctcc

SEQ ID NO: 349414 - DNA, 78 bp, Homo sapiens
attcagttgaaacagttacactgcttgtagctcttaagtctctgctggatgaaccgaatcctaacagtccagccaata

SEQ ID NO: 349415 - DNA, 83 bp, Homo sapiens
aaaagaggcaaagcaagcgagaagtcgcgggcccagcccacagcaggcccgtggaccgggagcccgtggaccgggagccggtg

SEQ ID NO: 349416 - DNA, 88 bp, Homo sapiens
aaagaatgttagaacgactttccaagtttgaagttggagatgctgaaaatgttgcttcatatgagttcaaaccttgtactactcagct

SEQ ID NO: 349417 - DNA, 90 bp, Homo sapiens
agccagcacactcctcgcgagcaagccgatcactggagctgacttccgcaatcccgatggaataaatctagcacccctgatggtgtgccc

SEQ ID NO: 349418 - DNA, 75 bp, Homo sapiens
cccggttccccggcccacagtgggggtgtgcaaacccgagagaactggatctccagcaccctgccggtggcacta

SEQ ID NO: 349419 - DNA, 101 bp, Homo sapiens
gacatgcatgggttcctgaccaatgtcatccttgcagacctcaacctctcagatcccgggggcataactgctggcagcaccgacgaacccccaatgctgac

SEQ ID NO: 349420 - DNA, 51 bp, Homo sapiens
tatttttaccaaggttttaagcgatgataagaccatcatcatgtggaaact

SEQ ID NO: 349421 - DNA, 100 bp, Homo sapiens
cacacgcataatggatgaaaggaaccgacaggtgatgaaacttatcaggacatatttcgtgatttttcccaaatggcatccaataatccagagaaactaa

SEQ ID NO: 349422 - DNA, 98 bp, Homo sapiens
ttgactcccccaaggccgaggtccgcggccaggtgctggcgccgctgcccctccacggaggtgaaattattttggcccttcatcaattagatcttctt

SEQ ID NO: 349423 - DNA, 90 bp, Homo sapiens
aagaaaaagaagcgctagtcaaattacttttaaaactagattgcacttttattaagagtgaggtaatgcatgccaggactgtgcaaagag

SEQ ID NO: 349424 - DNA, 90 bp, Homo sapiens
actacgagtaccagcactccaatttgtatgccatatcaggtcacgcaatatttaaactcacgtatctaagcaatcacgactataaacacc

SEQ ID NO: 349425 - DNA, 123 bp, Homo sapiens
ctgagcgtatgtgccacgccgcccaggagacccctctgctgcaccacttcatggcacacaagaattgtgggcagatgagtgagattgaggccaaggtccgctacgtgaagctagcccgttctc

SEQ ID NO: 349426 - DNA, 82 bp, Homo sapiens
cgcagtgaggccaacgccgtgttcgacatcctggccgtgctgcaggattatatctgtccaagatgcgagtctggttttatcg

SEQ ID NO: 349427 - DNA, 50 bp, Homo sapiens
acccctctgggaccgctctcttctagcagtgtaatgacaatagtaaagtc

SEQ ID NO: 349428 - DNA, 83 bp, Homo sapiens
acgtgggcttcaccatggacaagctggtgcagaacattgcgcggcagctggtactcctggttaatcaacagcttcgtcaacgg

SEQ ID NO: 349429 - DNA, 101 bp, Homo sapiens
gggagccggcgtgggcggcggcaacggggcactgacctgggtgtgctggacccaaaggagacaacatttatgaatggaggtcaactatattgggaccccca

SEQ ID NO: 349430 - DNA, 82 bp, Homo sapiens
ctggtgggccgcgtcgaagacatggaccagggctacggagcttccccgggcgctgcctggacaggcctgcctgcgtgctggg

SEQ ID NO: 349431 - DNA, 100 bp, Homo sapiens
gaattggtgggttcttggtctcactgacttcaagaatgaagccgcagaccctcgtggatgctgacagacagcaccaagaagtaattgcaatttatcggac

SEQ ID NO: 349432 - DNA, 100 bp, Homo sapiens
aggccctgagcatgttttccgatgactttggcagcttcatgcggccccactcggagcccctggccttcccagcgcacaactacgggattggcgccgccgc

SEQ ID NO: 349433 - DNA, 75 bp, Homo sapiens
ggaaccctggtcaccgtctcctcagggctcagaaacacttatgggattttctaagcacggagggttcacttcctt

SEQ ID NO: 349434 - DNA, 100 bp, Homo sapiens
aacatccagtttgatgtttactacaagctgtcaccactgactaaagaagagaaaactgcggcagagcaattcaaatttcacatgccagatttatgaagaa

SEQ ID NO: 349435 - DNA, 75 bp, Homo sapiens
gttgaatccttgcagcactaaaatttggaactgtggaaggtgcatcagtgaagaaatggaccaatgtgtataatc

SEQ ID NO: 349436 - DNA, 100 bp, Homo sapiens
gagagtttggagccctgcagactgtccgcctggagcgttacaaggccttctacattaccggatcctaagcacttcaagtcagagaagacaggacggggac

SEQ ID NO: 349437 - DNA, 80 bp, Homo sapiens
tgcaggccgttgttggtcgagctggcgggtcccgcgggccaggccgtggagccgattcgaagacagtctcttacacctcc

SEQ ID NO: 349438 - DNA, 100 bp, Homo sapiens
ctcaaccttcactgtcctaaaacgttaccagcagctgaaaccaattggctctggggcccaagggattgtttggcacttggaggtgtcccaggaagtcagc

SEQ ID NO: 349439 - DNA, 100 bp, Homo sapiens
tcggcccgcgggggagccccgggagccgcacggatgctgatatgctaactggtgatgagcaagtatggaaggaagttcaagaatccctgaaaaaaattga

SEQ ID NO: 349440 - DNA, 100 bp, Homo sapiens
ggtccttccgaggaagctaaggccgcgttggggtgagaccctcacttcatccggtggacgtgcacccagagcagcatcagcccccagtacaatatctgcg

SEQ ID NO: 349441 - DNA, 100 bp, Homo sapiens
ctgaaactgatctcaaacagcgacgagagatccgtgcaggcacagccttttacattgatcagataaccgtctcctcaggaggaatgttggttcagaaact

SEQ ID NO: 349442 - DNA, 97 bp, Homo sapiens
tggaagctctttgcggtggcgttggtgctgtttgcggatgctgatgcaggtgtcatggagaaactccagctgggcccagagattctgcagcgggaaa

SEQ ID NO: 349443 - DNA, 82 bp, Homo sapiens
cgcgcctgggctgccggcacttcgcggcaggcgtccgagctgggccacagcctgaacgagaacgtcctcaagcctgcgcagg

SEQ ID NO: 349444 - DNA, 82 bp, Homo sapiens
catcaacatcaagacactcaatgagtgggattccagggacaagaggaccctgccttggtgtgagagtgagggaagaggaagc

SEQ ID NO: 349445 - DNA, 82 bp, Homo sapiens
ctgacagcttcagctaataagaagaaacactttgtgctactctgtggggctttggaaaagcatgttaaatgtgatattaggg

SEQ ID NO: 349446 - DNA, 90 bp, Homo sapiens
gtttgcagaaattacacgaggaccttaaaggatacaatatagaggcagaaggccttttttcaaaggttgaaaggattgttgacaaaagga

SEQ ID NO: 349447 - DNA, 82 bp, Homo sapiens
cagagagggaagagattcagccagcacactcctcgcgagcaagacttaattcagtgcacaaatgagatgaatgtgaacatcc

SEQ ID NO: 349448 - DNA, 75 bp, Homo sapiens
cccatgtcttctgtgaagctctccccagtgcccgggccccgtcgcgctggttgggctttctcgggaaggcgaccc

SEQ ID NO: 349449 - DNA, 98 bp, Homo sapiens
gttgatctcatagacaagtttgtacatccaaagttcaattcccatgaaagtgcagcacatgcaattgtttctgttaatggtactaccattgaaggtca

SEQ ID NO: 349450 - DNA, 76 bp, Homo sapiens
tggaacagacagctccttctttattgagcacaggaagcttggaaacatgactgtgacggtgaagaagactgtcccc

SEQ ID NO: 349451 - DNA, 74 bp, Homo sapiens
tgaagactgtgtaaataatatcagggttagaaaaaggttcttggaacatcgggaagaaaccattacaatagatc

SEQ ID NO: 349452 - DNA, 100 bp, Homo sapiens
cttatagggtcaccttcgagtcacccctggagctctcagcccaaggctgctgtccccaaggcccagcctcctcaccccgactggcgacccccgggccaat

SEQ ID NO: 349453 - DNA, 77 bp, Homo sapiens
acggagattgacaatcaatgggccatcttggacgaaaacaaccctttttgctgcacatgtaagtggagctgtgctta

SEQ ID NO: 349454 - DNA, 100 bp, Homo sapiens
gcccgcggcgtccccggtttggtgttgcggcgcccaccttcgggaggatcagtcaaataaagtgcccgtggtgcagccatcccatgcggtccatcctctc

SEQ ID NO: 349455 - DNA, 100 bp, Homo sapiens
attacatgtatctgaggcagctattccgcattcttttcagcaagggcaagtattttgtaaccttcccatatccatatatgaatggacgccttcatttggg

SEQ ID NO: 349456 - DNA, 75 bp, Homo sapiens
acccttgtagagtcattcctgcctttgagcggactcccttttaaggtagttacttttggtgacgctgtccagttc

SEQ ID NO: 349457 - DNA, 100 bp, Homo sapiens
ttatagattttgatattgaaggaaatgaagcgaagcctaaatgaaaattcagctcgaagtacagcaggtattctgaccttttcagctagcagaggatgag

SEQ ID NO: 349458 - DNA, 83 bp, Homo sapiens
tgacagcgcgcacttcacccgcagttgggtttggaaatcccttgtctccaggttgctgggattgacttcttgctcaattgaaa

SEQ ID NO: 349459 - DNA, 83 bp, Homo sapiens
ggctggacgtgcacgcagcccggcgggaggataaagaccaccacggagcatcagatccatgctgctgctgactcggagcccca

SEQ ID NO: 349460 - DNA, 96 bp, Homo sapiens
tacaagctcatggatcatgtggggactgagccatccattaaggaggacatggtccggcgaggagagatcatcgacaatgacaccgaggaggagttc

SEQ ID NO: 349461 - DNA, 100 bp, Homo sapiens
cgggctgacctcatcctgccttgtgctcacagcttttgtcagaagtgtattgataaatgacccttctcaggtgcagccagagagacactagcccactgat

SEQ ID NO: 349462 - DNA, 74 bp, Homo sapiens
cgacttcctcacccgcgcctgcgacctcgtacggcaagaagaagctgaaatacctgccctacaatcaccagcac

SEQ ID NO: 349463 - DNA, 100 bp, Homo sapiens
atatctgtcttcggtggactccttcggcagtccacccaccgccgccgcctcccagaaggatatggccctgaagccacatgagcggaaggagaagtgggag

SEQ ID NO: 349464 - DNA, 100 bp, Homo sapiens
ctcagctttaccatccctggaggagacctggcagcaggacccattccaacaatctcgtaaaacatggtggattactatgaagttctaggcgtgcagagac

SEQ ID NO: 349465 - DNA, 75 bp, Homo sapiens
gggatggcgtgcagcgcaaccacgagacggccttccaagaagtggtccaaaggcaaagttcgggacaagctcaat

SEQ ID NO: 349466 - DNA, 100 bp, Homo sapiens
cctgtaccccactcacaagtctctgaagccgtgcccgttcttcctggagggaaagtgccgctttaaggagaactgcagatggagtctcgctgtgtcgccc

SEQ ID NO: 349467 - DNA, 105 bp, Homo sapiens
gaattaaaagccttttgtgctgatcaacttgatgtctttttacaaaaagacctttccaaagtgaaactgatgagatttgatgatccactgttggggcctcgacga

SEQ ID NO: 349468 - DNA, 99 bp, Homo sapiens
ttttccttgatggtcaaaagattaaggtcccaaaccagttgtcttcctgcaacatggcttgctggcagattctagtaactgggtcacaaaccttgccaa

SEQ ID NO: 349469 - DNA, 100 bp, Homo sapiens
ttcagaaatcagaaaaacatttgggaggtgtctagcccagtggaccttctgaagattattgctcagttgtaactattgtggaccagacaaatgtaaaact

SEQ ID NO: 349470 - DNA, 100 bp, Homo sapiens
tagatgcattgaggatgtgtttaagataacaacgaacttgatgcaagtgataggtttgccaaggtcagacctctcatcatccggatgaactgcaatttcc

SEQ ID NO: 349471 - DNA, 100 bp, Homo sapiens
caccaatggaaagtgcgtcatcctaaggaacatcgacgtgaccaagtcagccatcggggtgctctaactgggggttattatgacacaaggaagtctcgac

SEQ ID NO: 349472 - DNA, 100 bp, Homo sapiens
caagaaaccccgatcacaaagatacgaatctcttaaggggattctgtgaggagaccaggaggaattttgaagccaccttaggttggctacaagaacatgc

SEQ ID NO: 349473 - DNA, 76 bp, Homo sapiens
ccggccggtagctgcagctggagcagtggcgtttggaggagactcgatatttggagttcttacaacatggcagaca

SEQ ID NO: 349474 - DNA, 100 bp, Homo sapiens
caaaaaagtaagaaaagacaagaagaggaatgaacattaatacctgaaactataggaaaggccaaagcgtttgagttaagctacctcgagaaggttccag

SEQ ID NO: 349475 - DNA, 80 bp, Homo sapiens
gtacctccaggacctggagtgtactggaagaaatggtgcagtccagcggagctggagtttgttcagatcatcatcatcgt

SEQ ID NO: 349476 - DNA, 98 bp, Homo sapiens
gtgtatgttgtcaactatccaaaaggtttctctactcggacgaggtgcagattggcccggagacggtgatgaccacgctatacaccgccaagaagtac

SEQ ID NO: 349477 - DNA, 90 bp, Homo sapiens
acagtacctcattgctctttggcgactcttattgagcctggcccaactagagaatctgtgcaaacagctgtatgaaaccacagacacaac

SEQ ID NO: 349478 - DNA, 75 bp, Homo sapiens
ggaaaagtgagaggtcagactcctaagttccagaaagctgagtctgatctggattacattcaatacaggctggaa

SEQ ID NO: 349479 - DNA, 89 bp, Homo sapiens
ctgacctccgcgcgacgtacccgccgccgccgttggctggagagagcgaaatgtcatcagtgcagtcacaacaggagcagttgtcccag

SEQ ID NO: 349480 - DNA, 74 bp, Homo sapiens
cggcgtctgcgtctgcagctgcaggggaggaggactggaatattccctgggcttttgaggcaataaagcaagca

SEQ ID NO: 349481 - DNA, 83 bp, Homo sapiens
ctccgcccagcacgccgcggtcaacttcggccaggccccaggggaagtcctatctgtacttcacacagttcaaggcagaggtg

SEQ ID NO: 349482 - DNA, 50 bp, Homo sapiens
tgaggggcagagccaccgcctgcggctgagacggggttttgccatgctgc

SEQ ID NO: 349483 - DNA, 76 bp, Homo sapiens
cggtccctgtattggtctcctgctcctagaggaacaagatcactcaaggtgaaggataatctactaataccagcac

SEQ ID NO: 349484 - DNA, 104 bp, Homo sapiens
agaccctggagcctcagttggaagcagccgatccagcctgcggagcctgtggggcagcaaaagctggcaggctgacagaggcggcctcaggacggaccttctgg

SEQ ID NO: 349485 - DNA, 100 bp, Homo sapiens
gaatgctgtcttccaagaacagaagaaaatgatccaggcccagggaacctcaggacctgacccaaccactgtctacgtggacatgagagccctgagacac

SEQ ID NO: 349486 - DNA, 87 bp, Homo sapiens
ggagcgtccggagctagctggatcctctaggcagcatcctgaggttagcattacacttctcccagtggagcccatgacttctgatca

SEQ ID NO: 349487 - DNA, 83 bp, Homo sapiens
cccgcgcaggaggcgctcctccttcccaccgattgattttgtagcccatgatgatattccttattcatctgctggcagtgatg

SEQ ID NO: 349488 - DNA, 98 bp, Homo sapiens
gtgtatcaagtaatggtgcaaagcctgaagatacaacttcagtattaaaggaggaacatgttacaacctttgaagatgaaggatcctatataattcaa

SEQ ID NO: 349489 - DNA, 88 bp, Homo sapiens
aggacctagactgtgacaacgaccacgtctccaaaatgagtcgcatcttcaacccccatcttgtcgacttcttccactacaaaatctc

SEQ ID NO: 349490 - DNA, 137 bp, Homo sapiens
gatggcggacggcgtggaccacatagacatttacgcggatgtcggcgaagagttcaaccaggtccagtgggcttgttgctccagacctcatgccttctggacccagacatctctgcaatctcggaactggaatacac

SEQ ID NO: 349491 - DNA, 90 bp, Homo sapiens
caacgccttccagggggtcttcatcttcgtctttcactgcgccttacagaagaaggaggtggtccaggccacgctggtggtcctggcctt

SEQ ID NO: 349492 - DNA, 100 bp, Homo sapiens
ggccggtgggcgaaggacacccgcaggaactcggcagaggagaaattcagacggctcccgaggatcttcagtgtctattggatttttccaagagaaagtt

SEQ ID NO: 349493 - DNA, 80 bp, Homo sapiens
atacagcaagaaagaccatcaagtttaccatgcctacaccaactaatgttacaattgaatcctataacatgaaccctatc

SEQ ID NO: 349494 - DNA, 100 bp, Homo sapiens
agaccgctgcagccgctggctgagcctcggcaagacgcgcaggaagaccagcgcgcgggatgcgtcccccacgcccagcacggacgccgagtaccccgcc

SEQ ID NO: 349495 - DNA, 93 bp, Homo sapiens
ggaaaatggcggtgtctacagtgttctcgacttcgtcgctgagttgtcaggggagtgtccattggcagcacctgcctcctgagtgtctcccag

SEQ ID NO: 349496 - DNA, 100 bp, Homo sapiens
gggagagccggatcctttcccagaagaatgagaatgagcgagtgatagacagccaagcagagaaactgaaggagcttgacaaggagatccggcccttccg

SEQ ID NO: 349497 - DNA, 82 bp, Homo sapiens
ctcctgtcgtccgttctctcaggctcccgttcagtgtcaacagcatctccaccctggagcctgtgagccggtgccagcgcct

SEQ ID NO: 349498 - DNA, 96 bp, Homo sapiens
gcccggggctccggggacggcgagatgggcaagcccaggaacgtggcgctcatcaccggtatcacaggccaggtactgaacgacacctgggtctcc

SEQ ID NO: 349499 - DNA, 103 bp, Homo sapiens
acaaatccagcagggaggtccagatgaaaaagaaaagactaccgcactgaaagagttttggaggctggaaaggcaaatgttattttaccaaaaagttcaccaa

SEQ ID NO: 349500 - DNA, 87 bp, Homo sapiens
cagatcgattttaccttggataccctgctttgggtgatgatgaacagtctacacagatggctgcaagttgggaagatgataaagtta

SEQ ID NO: 349501 - DNA, 98 bp, Homo sapiens
aatggacttcagactggtggactgttcatcattctgttgaagaaacgcttaacccagtgtcccagctgtatttcagctcctcagggaagctgtgttcc

SEQ ID NO: 349502 - DNA, 75 bp, Homo sapiens
gtgattttcagaggggaatgctaagaggtgctgggtaggccaggtttcagcatcgcagacaagaagcgcaggaca

SEQ ID NO: 349503 - DNA, 80 bp, Homo sapiens
caacgacgcggacatggtcatgagctttgtgaacctggttgatattcactgatggactccaaagaatcattaactcctgg

SEQ ID NO: 349504 - DNA, 100 bp, Homo sapiens
agctgaagaggccatgaaacatgtgtactttcgaagtctgggaccaagaatacatgctttaccagaaaaccctcgagtcttccatccagggcctccggat

SEQ ID NO: 349505 - DNA, 100 bp, Homo sapiens
cagcacttcctggcaatgatagatacatcagtgtgggaagccaagcagatacaaccaaagcaaaggacttccgttataacttatcagaggtgcttcaagg

SEQ ID NO: 349506 - DNA, 82 bp, Homo sapiens
gtgggagcaaaaccaacgcctggctcggagcagcagcctctgaggctccataaaaatacagactcaccagttcctgctttga

SEQ ID NO: 349507 - DNA, 98 bp, Homo sapiens
cccagcgtgggtgaagataggatcaagatggccatgtggcagggttgcgtaggaggctctgtctggtatcttgaaagaagaactatacaggactcccc

SEQ ID NO: 349508 - DNA, 98 bp, Homo sapiens
aacgatgaatctctgaacatcatcataaatgtgtcatggagaaactccagctgggcccagagattctgcagcgggaaaatccaaggcttatttatgcc

SEQ ID NO: 349509 - DNA, 74 bp, Homo sapiens
ccttcggcagtccacccaccgccgccgcctcccaggtaacgtgaagcacctggttctcttcctccatgaggctg

SEQ ID NO: 349510 - DNA, 73 bp, Homo sapiens
ttctccactggttcctgggcaccgaaagggaatgggtactgttcaaaaaggaatgccccacaagtgttaccat

SEQ ID NO: 349511 - DNA, 100 bp, Homo sapiens
tgtccctttgcctcatcccaggttgccttggaaaatgccaacgccgtgtctgaagctcactgcaaatctaacttcatcatggtgaactaatttagagcat

SEQ ID NO: 349512 - DNA, 82 bp, Homo sapiens
tcggtttcatgaagtaccccacataacagtgagattcataggaccaaagcatggggaggtgtctgtgacctttgatgatgtg

SEQ ID NO: 349513 - DNA, 99 bp, Homo sapiens
cttacaacatggcagacattgacaagagacgttgatccagcagcacgtgtcatttcattaggtcctgtatctgatgttgtggttagtggagtcctccag

SEQ ID NO: 349514 - DNA, 74 bp, Homo sapiens
tgcaggtgctagcgctgctgggggccgcccatgaaagcgcagccatggcgggatgtggagagcatcttgtgcgc

SEQ ID NO: 349515 - DNA, 83 bp, Homo sapiens
ggaccaaggtggaaatcaaacggagcatttcctgaagacgtagtcatgcagcacgtcagcagctcccagagcagccagcgcca

SEQ ID NO: 349516 - DNA, 101 bp, Homo sapiens
gccaggccagctcgaagaaggcgagcagggtgcgggagagccccttgcagaagacgccgtacgagattcagaatggacagtttagaagaacctcagaaaaa

SEQ ID NO: 349517 - DNA, 97 bp, Homo sapiens
agctgctcggacagatgaagctccccaaggagctgcaggtcatcctcgatttttcaaccagctctccactggattggatattattggcctagctgga

SEQ ID NO: 349518 - DNA, 83 bp, Homo sapiens
cttctttctggttccgtgttcatcaaggaatccatgtttcttccaagaagcaggattggtccaaaggaagattttttccattg

SEQ ID NO: 349519 - DNA, 100 bp, Homo sapiens
aacggggggagattctgctcacggaactgcaggatgaacgtgaagccagagaaaatgtgaagagagagcaagatgaggcctatcgcctttcacttgaggc

SEQ ID NO: 349520 - DNA, 74 bp, Homo sapiens
gcagggcagagcaggaggccccccgagtgggcatccccaccatcagatggtgcggggcagagggggactacaac

SEQ ID NO: 349521 - DNA, 78 bp, Homo sapiens
cgaggcgccggcccagactccactccccagctgtgaaagggtgaccattgtgaggtagatattttgttctaattttcc

SEQ ID NO: 349522 - DNA, 75 bp, Homo sapiens
gtccctgagccgcccctacacccacagcctcctgttcaggtatacggtattgaaggtcgctatgccacagctctt

SEQ ID NO: 349523 - DNA, 75 bp, Homo sapiens
tgaagaacacacagcggtggaaaaggtaattattcgaggtggaggacatattttaccctatgaccagcctctgag

SEQ ID NO: 349524 - DNA, 50 bp, Homo sapiens
tatggtttctgaagtcaatatgagagcagtcatgatggcctgcactccac

SEQ ID NO: 349525 - DNA, 100 bp, Homo sapiens
ccctgcggaacctggaggaggtggagttctgtgtggaaggtacaccaggggttggaaaaaccacactaggcaaagaacttgcgtcaaaatcaggactgaa

SEQ ID NO: 349526 - DNA, 99 bp, Homo sapiens
aaaaaatcaaggtatttggtcccggaacaaagcttatcattacaggtgcagtggcttctatgttttgggttgatgctgaattagggagtgatatttatc

SEQ ID NO: 349527 - DNA, 75 bp, Homo sapiens
gatggccttcctggcacacattcgcactcacacagctgtgatgcagatccatccgccctagcaaaatatgttctg

SEQ ID NO: 349528 - DNA, 75 bp, Homo sapiens
cccattgctgagccagcggagctgcttggtatttaggaatccttacaactacggctgcttggacaactggaaggt

SEQ ID NO: 349529 - DNA, 100 bp, Homo sapiens
taccttgtgacagaatatgccaaaaatggagaaatttttgcgccacacagattttatactactgtgaggcccagaacatctgacaagccacacatcagac

SEQ ID NO: 349530 - DNA, 97 bp, Homo sapiens
ttgcaacccttccgggaagccatagctctgcatgtgttctgtggctgtggagatgagagcaggatcccagctgggacctggatatcagcatcacgca

SEQ ID NO: 349531 - DNA, 88 bp, Homo sapiens
ttccagcccgtggtccttctccatattcgaggtatgcaaggcagatgagaaatttaatcagctggtccattttcttcgcaatcataag

SEQ ID NO: 349532 - DNA, 88 bp, Homo sapiens
acagagatcactatggaaacaagagattggatcttgctgggccgctgcttgcattcttatttagaggacgccagcatgtctccggacg

SEQ ID NO: 349533 - DNA, 50 bp, Homo sapiens
tatctaccacccgagatgccccaagcctgtgcctactacactggcacaag

SEQ ID NO: 349534 - DNA, 83 bp, Homo sapiens
cctgtaatcgctattgacagctttaggcatatgtatgtgtttggagacttcaaagatgtattatgtgaatctggctacactgg

SEQ ID NO: 349535 - DNA, 100 bp, Homo sapiens
ggtccagaagcccttcctcagaccggttggacgtgataagtatgagcctgcagctgtttcagaacaaggtgataaaaagggcaaaaagggcaaaaaagac

SEQ ID NO: 349536 - DNA, 50 bp, Homo sapiens
cagggtttccaccgttcgttcaaggagggtgaggacaaaatcttcttaat

SEQ ID NO: 349537 - DNA, 100 bp, Homo sapiens
gcaagaagaattttgtctaatcgcacagaaaggcctactgaacttgacgcactggtatttggccatctatacaccattcttaccacacaattgacaaatg

SEQ ID NO: 349538 - DNA, 100 bp, Homo sapiens
ggcttcaatgccactgtctttgcctatggtcagacgggctcagggaagacatacaccatgggggaggccagtgtggaatcctgttacacctgggatttag

SEQ ID NO: 349539 - DNA, 100 bp, Homo sapiens
cgagtgcctcacctcgaggaccactttgcgcatgcgccccagctcttggaggagggccaaacatgtgggctattacctctgaagaacgtactaagcatga

SEQ ID NO: 349540 - DNA, 96 bp, Homo sapiens
caaacaaagaggccgcggaggagaagccggaggaggacaacgactaccaccgcagcgacgagcaggccgggctcggtggctcatgtctgtaatccc

SEQ ID NO: 349541 - DNA, 131 bp, Homo sapiens
cttgcatactgtctcaatgatggcgagtgctttgtgatcgaaaccctgaccggatcccataaacactgtcgatatgaattgagaattcgttatttgccaaaaggatttctaaaccagtttactgaagataa

SEQ ID NO: 349542 - DNA, 100 bp, Homo sapiens
gccatcccagagatgcccatgtttgaaaacagagtgcaagacgatgacttgcaaaatgtcgcagctggaacgcaacatagagaccatcatcaacaccttc

SEQ ID NO: 349543 - DNA, 89 bp, Homo sapiens
ccggtacaagctcctgcgggccggcggggtctcggcgcggaagatggccggcggcgtggacggccccatcgggatcccgttccccgacc

SEQ ID NO: 349544 - DNA, 98 bp, Homo sapiens
tgcagctgcatgttcaagaagtggccggagagttctgcatgttgattcgtggctagaggtgcaggtagctaatttaacaagtccacagcgctgggtgc

SEQ ID NO: 349545 - DNA, 75 bp, Homo sapiens
cgcaactggcattctttttttgaaaagaagaacctcagaactgaaaagctccatcattggcaagaagaagccagc

SEQ ID NO: 349546 - DNA, 88 bp, Homo sapiens
ggcgcgcccagagccccgcgtttcagccctagggaaggatggacaaccggaaattttctacacattttggaattcagttactcaggca

SEQ ID NO: 349547 - DNA, 57 bp, Homo sapiens
gttaaggattccaagtaactcttatttgagtatgctcaggtaatcaaaatgttggga

SEQ ID NO: 349548 - DNA, 90 bp, Homo sapiens
aggggtcagtggtggaagtgagaccgaaatagactctgaagtaatatctggactttgaaattgtattggcatactccacacatctgtacc

SEQ ID NO: 349549 - DNA, 75 bp, Homo sapiens
cttccctggggaatgttttctttggatccatttggcttttccagatggcgggtgaaaaagttgagaagccagata

SEQ ID NO: 349550 - DNA, 82 bp, Homo sapiens
gcaatcaagcccaatctcatgcagacactggagatgaagggcaatcacagccttaaaagaagacacgctgaaatggttcagg

SEQ ID NO: 349551 - DNA, 75 bp, Homo sapiens
ggaggggcgaaggcgggcggcagaggcgatcagacctaggctactctgaagcaggtggcttagccctggccctgg

SEQ ID NO: 349552 - DNA, 100 bp, Homo sapiens
gctggaaccctgcgtccaggcgtgacggtcatcccgaaaggccggccccaggctaccggctctctgaccagttccacgacatcctcattcgaaagtttga

SEQ ID NO: 349553 - DNA, 100 bp, Homo sapiens
ggcgaaggtctcagagctttacgatgtcacttgggaaggagagcacacagctgctacaaatgccgtcagtgcagttttacagctgccgatactcagtcac

SEQ ID NO: 349554 - DNA, 80 bp, Homo sapiens
ctttcagagtacatgaacaacgagactttgtgatcctactcaatgcagggatgagcactcgacaagccttgctattcaac

SEQ ID NO: 349555 - DNA, 51 bp, Homo sapiens
cgtccaagcccgagaccgcggctcctatgcagaggccgtgaagaaggcagc

SEQ ID NO: 349556 - DNA, 90 bp, Homo sapiens
ctatgggataaaacccgagtggatgatgatccaccgaatcctcaaccacagcctttgaagaagatggtggagagaattcgcaagttccag

SEQ ID NO: 349557 - DNA, 75 bp, Homo sapiens
caagaggcgtttctataagaattgctgtgaggtggagcagtgggactcggatgagcccatccctgccaaggagct

SEQ ID NO: 349558 - DNA, 83 bp, Homo sapiens
agccgctgtcctccccgccaccaccggtgccgggcaccaggacatagatctgattgacatcctttggcgacaggatattgatc

SEQ ID NO: 349559 - DNA, 97 bp, Homo sapiens
caatgtcaagatggctctggatatagagatagccgcttacaggttcaaaaaggcatttgaatctgagccaacactacagtcaggaattaattatgcg

SEQ ID NO: 349560 - DNA, 96 bp, Homo sapiens
ccgagaggagccacaatggagacgccgccgctgcctcccgcgatggcactggatctttaaaacgcagtggttcctttagcaaactccgggcttcca

SEQ ID NO: 349561 - DNA, 51 bp, Homo sapiens
gaaagattcatcaggccaatggggcagatgatgatctatgcgaagtttgac

SEQ ID NO: 349562 - DNA, 107 bp, Homo sapiens
gccatgtcgggttattcgagtgaccgagaccgcggccgggaccgaggcaaattgtggctactaatttgccccctgaagatcaagatggctctggggatgactctgac

SEQ ID NO: 349563 - DNA, 75 bp, Homo sapiens
ctgcccctacatttggagcctggacacgcagtacagcaagtgggcgctctacctgttcctggttaaatgcacgat

SEQ ID NO: 349564 - DNA, 75 bp, Homo sapiens
cccgccccaccggcccccggcgccgtccagcccggagggacctgggaagtctgttagaactgctgtgctgatcaa

SEQ ID NO: 349565 - DNA, 100 bp, Homo sapiens
tctcctccctcttctcccgactatttggcaagaagcagatgcgcattttgatgggtgctggagaatctggtaaaagcaccattgtgaagcagatgaggat

SEQ ID NO: 349566 - DNA, 100 bp, Homo sapiens
caataacggccgccaccaccgaatggacgagttctcccggggaaatgtaccgtccagcgagttgcagatctacacttgcggcaacctttggcactgcatc

SEQ ID NO: 349567 - DNA, 83 bp, Homo sapiens
cgagtatgcttcgtttttcgccgtcatgggcgcctcggccgccatggtcttcagcggtgactcccacacgggtcatgctgttg

SEQ ID NO: 349568 - DNA, 100 bp, Homo sapiens
tcgcaccaagaccttggcggaccttttggaatgaggagatgttaaagtaacccatcttgcaggacgacattgaagattggtcttctgttgatctaagatg

SEQ ID NO: 349569 - DNA, 90 bp, Homo sapiens
gatggtgaaatcatacctcatatcccaggttatgaagacagtatggagtttccagaccatagtagacatttgctacagtgtctgagcgag

SEQ ID NO: 349570 - DNA, 82 bp, Homo sapiens
gcaggccctgagcacgctgctgtgtgagcagcagagctcccagctcctccagcagccgacaggaggcccgtcaagatgcagg

SEQ ID NO: 349571 - DNA, 75 bp, Homo sapiens
gcggcttcctggcctgggcgctccggtggcggcggagggatccaggtccggcacgatcaagacccaggctacatg

SEQ ID NO: 349572 - DNA, 83 bp, Homo sapiens
tgaagagcgacaagccgctggcagccgcggatctcaccgccgctcagggtgctgctgcatgaggaggcgggtgattctggctt

SEQ ID NO: 349573 - DNA, 90 bp, Homo sapiens
gcaagaataaaggaatgaatgaatggaagaatgatataatgccacagaactttcaaagggagccacagtagcagaaattaaaaaacaata

SEQ ID NO: 349574 - DNA, 90 bp, Homo sapiens
ggtggaacagattcagaaggagcaggattaccaaaggaaaactgtcgctgaaaagcaggagaagagaaatcaggatcgcttgaggaggag

SEQ ID NO: 349575 - DNA, 75 bp, Homo sapiens
tttaccagatcgaatctgggccaaatagaaagggtgatcagcccatgacctaaacctccagacaaaataaaacgg

SEQ ID NO: 349576 - DNA, 82 bp, Homo sapiens
ggagagcacaaccatcgcagttggaagcccatggggcagctcggagcccaagatcctcttctcctacaaatgccaagtggac

SEQ ID NO: 349577 - DNA, 76 bp, Homo sapiens
tatacaggaacaatattgatgatgtagtaagactgcctctgtcaccgggtccctccacccttgtctcctgtgcggc

SEQ ID NO: 349578 - DNA, 82 bp, Homo sapiens
gattcctttcccgtgcagacatggcctctggcaccaccaccaccgccgtgaaggaatgtatcctgtcaggtataatgtcagt

SEQ ID NO: 349579 - DNA, 100 bp, Homo sapiens
cttgagctccaggagttcgtctcttacgtctgcggaagtgcagctgcctcagttcttagcgcagatgggggctccggaggtggcgcccaggctctgagct

SEQ ID NO: 349580 - DNA, 87 bp, Homo sapiens
aattgtaatggaaagcatatggacaggtctacgccacatcacttagaggaatggcttcttgtgggaaccaaacaaggacatcttctt

SEQ ID NO: 349581 - DNA, 75 bp, Homo sapiens
caaagtacagcttctggaggaacagaattttgtccttgaagtggagattgcattttgaatttgtaacgtcccgag

SEQ ID NO: 349582 - DNA, 100 bp, Homo sapiens
tcggtgacacagttcacatcctggagatgtacgaggaccactaaggcttttcttcctacgatgctggagattaatcatggtcatattgtgacagttgcaa

SEQ ID NO: 349583 - DNA, 98 bp, Homo sapiens
cgcctggttacccaagtgtcgatgttccatttaagcagacctcttccatagctgtagctggagcggtaattggagctgttcttgcccttttcatcatt

SEQ ID NO: 349584 - DNA, 75 bp, Homo sapiens
ctgttgcagcttgcgtttggggctttcgacatgacaggtcactagagggctgaacccatcagaaccactgtcttc

SEQ ID NO: 349585 - DNA, 100 bp, Homo sapiens
ttttgactttgctggctcatttcaagcaaatgcagccctgaggatttggctactgcatataacaacagggggcaaatcaagtacttcagggttgattttt

SEQ ID NO: 349586 - DNA, 83 bp, Homo sapiens
agccacttccggatccggggcctccttcccctccaaggcatgctggtcagcccaaggccaaccccactgtcactctgttcccg

SEQ ID NO: 349587 - DNA, 75 bp, Homo sapiens
cctgccatcatggagggttatccagcacctggaggatacctgctacctgtttatcttgcagattatggactttcc

SEQ ID NO: 349588 - DNA, 50 bp, Homo sapiens
aagaagtttctaggaaaggccggacaccagaactgaaaagctccatcatt

SEQ ID NO: 349589 - DNA, 82 bp, Homo sapiens
gggctcatcgtgatcccggcgacatactacctctggccccgagatcagaatgccgctcaccatggatgatgatatcgccgcg

SEQ ID NO: 349590 - DNA, 99 bp, Homo sapiens
gggaatccgcctcgactgggatgaccggaccatgaatgatctggaggacagctatggacaggagtgggactatgagagtaaattgcaggccttgcagaa

SEQ ID NO: 349591 - DNA, 48 bp, Homo sapiens
ttgccctgtctcctcgcagatgagattcatgatgttgctatcaaaagt

SEQ ID NO: 349592 - DNA, 75 bp, Homo sapiens
ccacggaggaagagccgggcagtccctggagcgggccagaaccgtgggtaccgatggatgtggccgagagccctg

SEQ ID NO: 349593 - DNA, 100 bp, Homo sapiens
ctcattaaagcagccggtgtaaatgttgagcctttttggcctggcttgtttgcaaagtggctacacaaacaagctgaggcacgaagagcaatgaatactg

SEQ ID NO: 349594 - DNA, 75 bp, Homo sapiens
ttttggtcgcaccaccactccacagcagaccaagtttgggtacccagaccccacctacctgacccgggtgcaaga

SEQ ID NO: 349595 - DNA, 87 bp, Homo sapiens
gcaagaagctgatcgagcccctcaccaatctcatccacagctgtgagccgtgagctttgaggcggtgggatgtgtcagcagaatgtc

SEQ ID NO: 349596 - DNA, 50 bp, Homo sapiens
gaggaatacacttatttatgaatctcttgcatggcaccaagaatgttacc

SEQ ID NO: 349597 - DNA, 74 bp, Homo sapiens
ctccgcttgttggactgctgctgcaaaacttttctagatgaattacttactgagccaaagcaactcccagaaaa

SEQ ID NO: 349598 - DNA, 100 bp, Homo sapiens
actctctaggctgccgggcgctggtcgtcagcgccgaggctgggctgaggcgccgcggtaccatgaggcgccgataagccaatggacacgtcagtgttat

SEQ ID NO: 349599 - DNA, 75 bp, Homo sapiens
cccagaaagagtcatacctggagcagcagggttggatgggctgtctgagcgctgtgcccagtacaagaaggacgg

SEQ ID NO: 349600 - DNA, 100 bp, Homo sapiens
ttcgtgctggtggcgttcgggccgcacccgcgcgagctctgagctcttcaccctgacctatggtgccctggtcacccagctatgtaaggactatgaaaat

SEQ ID NO: 349601 - DNA, 51 bp, Homo sapiens
aaccttcgatctcctgacgagatgccttccgtgccttccatcaagatctca

SEQ ID NO: 349602 - DNA, 83 bp, Homo sapiens
cctgacggctgtacttgagcagtcacctggcacagaatgtgagcatttgatccgccatatgttggtgttagatcccaataagc

SEQ ID NO: 349603 - DNA, 51 bp, Homo sapiens
aaagcttcaagttcttggaacaaattctgttcttccaggttggaaagagaa

SEQ ID NO: 349604 - DNA, 83 bp, Homo sapiens
cgacaagccgctggcagccgcggatctcaccgccgctcaggccggatccagagcaatgtagaaggcctatacctgactgatgg

SEQ ID NO: 349605 - DNA, 97 bp, Homo sapiens
gggcgcaccgcgtgcggccgctgcaggacgcggccgaagacctcaaggctgatctactggctgacctttgccgtgggccgctccttccgaggcttcg

SEQ ID NO: 349606 - DNA, 98 bp, Homo sapiens
gcacatcagcgaccgggagaacatagacgtggtgccaccgaacatcgcagaactgaagaatttggaggtgctcaacttttttaataaccaaatcgagg

SEQ ID NO: 349607 - DNA, 144 bp, Homo sapiens
gtggtggtggtggtgtcttcctgtctcaacgatacctattttctagtgctgagatcctgagacaatggtgaatgaaaactttgccattgatttgatagcagagcagcccgtgagcgaggtggagactcgggtgatagcgtgcga

SEQ ID NO: 349608 - DNA, 100 bp, Homo sapiens
gggcaatcattccttctcacttggcctatggaaaacggggatttccaccatctgtcccaggtaagactgtgccaaaatcccaaacttcagttgaaaaata

SEQ ID NO: 349609 - DNA, 74 bp, Homo sapiens
aggattccaagtaactcttatttgcttgcgcgatctctggcctcttcaactgcatcaccatccaccctctgaac

SEQ ID NO: 349610 - DNA, 50 bp, Homo sapiens
cttggagttaatggtctaatttatgatagaaaaattggaagctccaccac

SEQ ID NO: 349611 - DNA, 90 bp, Homo sapiens
gagcgccagatggtggaggaatacacttatttatgaacgcctgaagggaaacgatcctcaggcctgacagccgtttgggtcgctcgaaat

SEQ ID NO: 349612 - DNA, 100 bp, Homo sapiens
cacagggccccagtgccaaaccagcactgactactgtgtgtctgagcactgcagtttcctcctgaaggctggctccggctctccctcaataatggcagca

SEQ ID NO: 349613 - DNA, 90 bp, Homo sapiens
gccaagtctgtgacttgcacggatattcatccgttctatgctgatttgatgaatattctctacgacaaggatcattacaagttggctctg

SEQ ID NO: 349614 - DNA, 75 bp, Homo sapiens
gttgacacgggcatggttaaagcaaagaagtataaccctgcaggtttggatgcatctgctcagactacttctcat

SEQ ID NO: 349615 - DNA, 75 bp, Homo sapiens
cttggaaagagcaagatcggcagccctaaaaagtccaaggcttgcgagaaggtcatttccgtgggtcaaacggtc

SEQ ID NO: 349616 - DNA, 83 bp, Homo sapiens
caatgaaaaaaggggagacactgcgaaagcaaaccgaggagaaaatggacccaagtggggtcaaagtgctggaaacagcagag

SEQ ID NO: 349617 - DNA, 82 bp, Homo sapiens
cacccgcgccaggaggccgaacgcggactcgccacccgggccatcatctctcagcaaggtgacatatttgtttttgacctgg

SEQ ID NO: 349618 - DNA, 88 bp, Homo sapiens
tttggacaaataatggaaattcgagtctttccagataaaggatattcatttgttcggaaccactcgttttgactattattttatcact

SEQ ID NO: 349619 - DNA, 75 bp, Homo sapiens
gatgtagaaaatgagcagatactgaatgtaaaccctgcagccgaatttgccacatacctgaatttctgccgttcc

SEQ ID NO: 349620 - DNA, 100 bp, Homo sapiens
cggcccggtttccctcggcgtgctactgtgcgctcgatccagcaccatggggaagcgggacaatcgggtgctctacgtctcctccgagagccgcttcaac

SEQ ID NO: 349621 - DNA, 98 bp, Homo sapiens
ttcaaggaggccttccagctgtttgaccgaacagggtgaggtggctttgaccccgggttgcccggccagcacgaccgaggaggtggctggacagctgg

SEQ ID NO: 349622 - DNA, 131 bp, Homo sapiens
tgggacacacctccattggatttaaaagacagtcctcgtcagcactgactttcagctatggaatcgcctacaacacagcagtcccctcaggatgagcaggaaaagctcttggatgaagccatacaggctgt

SEQ ID NO: 349623 - DNA, 75 bp, Homo sapiens
tagaaatcatgaaaaagtttgtgccccctgactacaagatccataggcatcatgtgcatggaccacctggaggag

SEQ ID NO: 349624 - DNA, 100 bp, Homo sapiens
gggccaacggcctggacgccccaagggcgggcgcagatcgcggagccatggattgcactttcgaaggtgttcttccgggcgggcaccttggcacggctgg

SEQ ID NO: 349625 - DNA, 80 bp, Homo sapiens
agagtagcctgggctgtctggaaatctgaggtgtccctggccagtgtccttccacctgtccacaagcatggggaacatct

SEQ ID NO: 349626 - DNA, 75 bp, Homo sapiens
attatcatcttcaccaacacgtgcaagggccaaaccagtgctcctgccacctctctggctgccccctagagcctg

SEQ ID NO: 349627 - DNA, 86 bp, Homo sapiens
gagcgcggcggagacgatgcctgagatcagagtcacgcccttgggttaaacactttaagatgagaaaaattgatctctgtctgagc

SEQ ID NO: 349628 - DNA, 100 bp, Homo sapiens
aggtgatcagttcagctgttgacgccttgcagaggctttgtagagcatctgcagagacaccagcagaggagcagtgtgcaagatgacctgccacaagaag

SEQ ID NO: 349629 - DNA, 82 bp, Homo sapiens
aaggagctaaagcagcgtgcgttcagccctgggattgcattcacagagtggattgaaccacctaaacgagaaagaaaagcca

SEQ ID NO: 349630 - DNA, 85 bp, Homo sapiens
gttacagatttttgttatcttctggataaatctaagcaactgttcaatgggttaagattgagatggccatcctgcggttccctta

SEQ ID NO: 349631 - DNA, 75 bp, Homo sapiens
gcaagccagccacggggagacctttcatgtgctttacctaactacaggggttctccaggacaaggacctcttctc

SEQ ID NO: 349632 - DNA, 75 bp, Homo sapiens
gcctactgcgaccagatcttccaggacgagacgggcaagaaccgtgtacctggatggaacaaaatctgaagagga

SEQ ID NO: 349633 - DNA, 75 bp, Homo sapiens
gcccagttccccagttctggcagattctggaaactgtacattgaagcagaggttttgggatttgagattgacgcg

SEQ ID NO: 349634 - DNA, 100 bp, Homo sapiens
cgagactgagctggctaagcaggtgctgcagacggagctggagcgaccgagagagcccaataggggcacaaaacgtccccgggatgatgaagaggaggag

SEQ ID NO: 349635 - DNA, 100 bp, Homo sapiens
tatttacagtcggaggagtactcggtgaaatcctgtcctgaagactgtaagggtgcccgggaaacatttgagaattactaccgaaaacagaggcgaaaac

SEQ ID NO: 349636 - DNA, 97 bp, Homo sapiens
gggacccggagaagatgtcttcgcggacggtgctggccccgggcaacgatcggaactcggacacgtctcgcccaagaacttcaaggtgaaaatgatc

SEQ ID NO: 349637 - DNA, 134 bp, Homo sapiens
ggagcaaggaaaaaaaccttcgactatgcagagacatgagatggtagccaacccctcagctatgacttcacacctatggattcttctgcagtttatgtgttaagtagtatggctcgccagcgtcgtgcatcttt

SEQ ID NO: 349638 - DNA, 74 bp, Homo sapiens
gttaagtcccccaaagatgagatttacctgtgagatgtttcatcccaacaggaggtggggaagacagggctcca

SEQ ID NO: 349639 - DNA, 100 bp, Homo sapiens
tcacggaatgtatcctccgaagctatggcctgaagacgggattctttaggtgtgccacggaccacaatgtggacaacaccacagagatgctgcaggagtg

SEQ ID NO: 349640 - DNA, 75 bp, Homo sapiens
cgcggcggccccagaccctgctccgggtcgcgtcctggggtttccaggcctgaggtgcccgccctggccccagga

SEQ ID NO: 349641 - DNA, 75 bp, Homo sapiens
gcgaccccactccggcggcgcgtcccccgagcttggggttgtgtccactgtggtccccgactctgcccacaagct

SEQ ID NO: 349642 - DNA, 88 bp, Homo sapiens
gagcgcgtggaggagccggtgctgcagaaccagatccgggagcacgtcatcgccatcgaagctttaccgatttgttacaactcaagca

SEQ ID NO: 349643 - DNA, 80 bp, Homo sapiens
cgaatggccacagcttgtaaaagattactgtggcatgatcctccaccattcacactctaccctggactctgggaagggac

SEQ ID NO: 349644 - DNA, 102 bp, Homo sapiens
aagaggagcagcatggcatttcagtcactggtttgcagagtccaggtgggaacctaaattattctgcaagacaaagggaagaaataaaattttcccatactg

SEQ ID NO: 349645 - DNA, 82 bp, Homo sapiens
acaaatatcactgaaatgattcatttctggaagcattctactatcacaaacaacatcgacccagtgggaagaatccaaatgc

SEQ ID NO: 349646 - DNA, 89 bp, Homo sapiens
ctcgggagctctgggagcccgggtgaccgcgtagcacttgcacctcctgcgccgccgccccccatccaaggatatgccttcaagcctcc

SEQ ID NO: 349647 - DNA, 89 bp, Homo sapiens
acatgcggagcatgttgcatcacagggaacttgagaacctcaagggcagccctactgccaataaagggaaaataagagatgctcatcga

SEQ ID NO: 349648 - DNA, 75 bp, Homo sapiens
tggctttaagaagaaggacaagggaggcattaatctcacagccactcagattgctgttccccgcaatgatgaatg

SEQ ID NO: 349649 - DNA, 100 bp, Homo sapiens
cggcaaaggggtatgaggctcgggagctggagctagcagagctggaccagtggccccaggaacgggagtctgaccagagctgaggcttcgaagacctcag

SEQ ID NO: 349650 - DNA, 74 bp, Homo sapiens
gaaagatctggcgatgacctacaaacagagaactgataaatttcaaacggaagagagtggcagcatttagaaag

SEQ ID NO: 349651 - DNA, 73 bp, Homo sapiens
gagttgtcccagctcggcccgcgggggagccccgggagccgcacggctgatcagctgaccgaagaacagattg

SEQ ID NO: 349652 - DNA, 82 bp, Homo sapiens
cgaggagacgctggaggacagcccgcagagcaatatactttgctgcttattcaaactgcaaggaaaagttgaatgatgtatt

SEQ ID NO: 349653 - DNA, 97 bp, Homo sapiens
cgcgcctcggcctcggtgcaggcagcggccgccgccgccgagacagctgcgcgggcgagcatccccacgcatgatgactcgtggcactgcctccagc

SEQ ID NO: 349654 - DNA, 75 bp, Homo sapiens
gaagaatgtgacatgaaaaaaatgcattatgtggaccctgaccatgtaaagatccttcccagcctgcaggccaac

SEQ ID NO: 349655 - DNA, 75 bp, Homo sapiens
tgcgcccagaaacggacccgcagaggtggtaagttttcttcatacagttcttttgtgtgacaaactggatttcag

SEQ ID NO: 349656 - DNA, 75 bp, Homo sapiens
ccgggctgagcttcctggagaagaggaagggaaacactactatgaagtatcctgtcatgaccaagggttatgcag

SEQ ID NO: 349657 - DNA, 80 bp, Homo sapiens
aagagaacctcctaagagtcacccaaacaatcggctgagaatgagaagagtttgaaggaagaaagtactgtgaacatgac

SEQ ID NO: 349658 - DNA, 75 bp, Homo sapiens
cggaggccgtgggcggcgacatgcagcagctgaaccagctgggcgcgcagataagaaacctgatcgggaagaaat

SEQ ID NO: 349659 - DNA, 90 bp, Homo sapiens
atgcgcttttgacacattggagggagtgcatccgccccaacccttttccccctcgtctcctgtgagaattccccgtcggatacgagcagc

SEQ ID NO: 349660 - DNA, 83 bp, Homo sapiens
ggcggatctcatatcttcacttggcaaactcaacaaggagagtggtagaggcacagaagatgatgaggctgttgaactgtgga

SEQ ID NO: 349661 - DNA, 100 bp, Homo sapiens
atcaaaaatagtgatagctttgataactgactcaggtgttgacaccttggcagtgtttatggccagcagcggaactacagacgtcacaaatcggaacagc

SEQ ID NO: 349662 - DNA, 76 bp, Homo sapiens
gaaataatccaggcgactacaattagcagctttccccaactgaagaggcacaaagaccagcatctcagacatgtcg

SEQ ID NO: 349663 - DNA, 100 bp, Homo sapiens
gcctcgagccagcccgccagcatgccccagtccaaagcccctgcggatccgccggcttctccgtcccttcttcctgctgcagaactcctctatgatgaag

SEQ ID NO: 349664 - DNA, 100 bp, Homo sapiens
ggagtttgaggggtctgaagactgaaagagtcgaatggtttgttggcagactgcctgaagttacatttagagactgaaatcactgcaccttaaaaacaaa

SEQ ID NO: 349665 - DNA, 97 bp, Homo sapiens
cttggttccgcgttccctgcacacctggagatgcccaaagatgagctgcccaaccataactgcattaagcacctgcgctcagtggtacagcagcagc

SEQ ID NO: 349666 - DNA, 75 bp, Homo sapiens
gcggcggcgactggcaatgtttggcctcaaaagaaacgcggctctattccgttcgctggttcgccacctcagggg

SEQ ID NO: 349667 - DNA, 100 bp, Homo sapiens
ggaagcgctttgatttacagcagctgcagacttctatgaggaaatccaggagtttgtgaaagatgtcttttcacctataggggagagactgggctgggac

SEQ ID NO: 349668 - DNA, 100 bp, Homo sapiens
ctcagcactctctaaaggagcaacagtttacagcccttccagatacagctaccagatgtctttggtggacttgggaaagaggttgctagaagcagcaaga

SEQ ID NO: 349669 - DNA, 98 bp, Homo sapiens
tcttggtctcactgacttcaagaatgaagccacggacccttgcggaagcatcggagagcaagagacaggtccagatcctcctcctcttcctcccagtc

SEQ ID NO: 349670 - DNA, 100 bp, Homo sapiens
acctgaaacagttgacagtgtgattatgggcaatgtcctgcaggtcatgggtttggttcgtcaaagatgtctcgtgcacagacatttcccagctacgccc

SEQ ID NO: 349671 - DNA, 99 bp, Homo sapiens
atagcagctccacttccaggaactagaggtcagcttatttcggatcaagtggcagaaatcgtatctaaatacgaccccaatgtttacagcatcaagtat

SEQ ID NO: 349672 - DNA, 83 bp, Homo sapiens
tgagatgttcttgtcagaaaccgacaaatactccaagtttgatgaaaatcttcctgcctgacacagctcacttcaagaagtgc

SEQ ID NO: 349673 - DNA, 100 bp, Homo sapiens
ggctagtccgcggccctgctgagagggaaaaggacgccgcggtcttcccaggcgtcgcggagagcagggcaccatgccggtggaaaggatgcgcatgcgc

SEQ ID NO: 349674 - DNA, 100 bp, Homo sapiens
cttggttaacttgggagaaagtttcatctgtggatggagtattgctgtattcttcaggacttgtggaatgtgaggatcaggatccacttaatcctgatag

SEQ ID NO: 349675 - DNA, 98 bp, Homo sapiens
tcccagctattcaggaggctgagacattccattattgttccattgacctttccctcatcactgagtcctttggagctgagttatgtcaacagctgcct

SEQ ID NO: 349676 - DNA, 97 bp, Homo sapiens
gcaaaaccactgctaagttatccactagtgctaaaaggtgcgttgaaaactatacaggagctcgttgtgaagaggtttttctcccaggctccagcat

SEQ ID NO: 349677 - DNA, 50 bp, Homo sapiens
aagaccgaagcgttcgtatctggaagcacacttccaccctgggcagcgtg

SEQ ID NO: 349678 - DNA, 75 bp, Homo sapiens
caggtgtaagcgcagaaagcaggcgaacccgcggcgcaataacgggattgaagaggttaatgaccatttgccaga

SEQ ID NO: 349679 - DNA, 75 bp, Homo sapiens
tagaactgcagttgggaaagacagtgattgttataatcaaagttggtggttctgtcagatgaaagcaaagcgagg

SEQ ID NO: 349680 - DNA, 87 bp, Homo sapiens
tgacgctgacattaaggaccagccagaaaatggactatcggacaaaacctttctgctgcagcgcttgtccattttcctcaaaattct

SEQ ID NO: 349681 - DNA, 90 bp, Homo sapiens
gttggaatggtgacaacatgctggagccaagtgctaacgtgcaggttaaagattcgcttgaccagttggtaggaggagtcccagtaacac

SEQ ID NO: 349682 - DNA, 75 bp, Homo sapiens
ctgtcatcatgtcgcgttacgggcggtacggaggaggagtgcgccggtctcggggaaatgcccggttccttcgtg

SEQ ID NO: 349683 - DNA, 118 bp, Homo sapiens
gccttcggcattggccgccgcgatgtcagctcagtgctgtgcgggccagatgccgctcctacgaggactgctgtggctccaggtgctgtgtgcgggccctctccatacagaggctgtg

SEQ ID NO: 349684 - DNA, 50 bp, Homo sapiens
ctctgcctggcggcagtcacggccaaggtggaatgaatcttacttgttga

SEQ ID NO: 349685 - DNA, 83 bp, Homo sapiens
gagccagccctgacgtgaactcattttatctgccacgacccagaaggattgtgaccagatccacgttgatgacgtctcatcag

SEQ ID NO: 349686 - DNA, 75 bp, Homo sapiens
cattaccaaaccactcattttaggtgggaatgatggttagatgctgccgaacatacgaagaagtgtgcgaaggtg

SEQ ID NO: 349687 - DNA, 100 bp, Homo sapiens
ctctgaccgaggcgcctcgctggggcggggaccttgccttgcccgggcctctgaagagccaatccattcaggatgggaaaccacgcaggcaaacgagaat

SEQ ID NO: 349688 - DNA, 98 bp, Homo sapiens
cgcgccgggcgtggacggtgtggggcggtcccggccccgcaggatccttgccacggctggaactgacttcgacctgcgaacactgagggctgtgcgtg

SEQ ID NO: 349689 - DNA, 100 bp, Homo sapiens
ctgtgaggagattcgggccgtcaccctgcctcccctgcgtcccgccaccggccgcttctgtcctcggagtggaaacaaaatgtcagtcagtgtgcatgag

SEQ ID NO: 349690 - DNA, 113 bp, Homo sapiens
actaaacgggacgtgtaccaggagcccacagaccccaagtttcctcagcagtggtacctgagcgggcagagaagatgggccagaatctcaaccgtattccatacaaggacaca

SEQ ID NO: 349691 - DNA, 75 bp, Homo sapiens
gagaagttacgagactacatctggaacacactcaactcaggacggtggctgtcgctgggcgcggactccaacggg

SEQ ID NO: 349692 - DNA, 51 bp, Homo sapiens
tagccgggagttacaccgccaccgccaggcttcaacggaccacaccaaaat

SEQ ID NO: 349693 - DNA, 100 bp, Homo sapiens
tcgagtgttctctctgcatgagctaatttcttgagatagaggacagagaagatgactcgttcccatagatttgaagatctgatttataccattataccag

SEQ ID NO: 349694 - DNA, 83 bp, Homo sapiens
ggcgctggagctgggtcagtccgccgctcaccccgcggccgcaccttcccgccttctcaggagcaggccgggctctcgccatg

SEQ ID NO: 349695 - DNA, 80 bp, Homo sapiens
tgagaaacttaaggagtgtgtgttgcgtgacgtattaaaggtggaagaaggtccatatctttttctgtgggtgcttcaag

SEQ ID NO: 349696 - DNA, 98 bp, Homo sapiens
aaggagcggaagaatggcagtgctcaaactcaccgaccaggtgatcacgaaactcgctggcatggaggaggaagacttggcgttttcgacaaaagaag

SEQ ID NO: 349697 - DNA, 50 bp, Homo sapiens
gcccgaagccttcctttatcgctttcagatcattggaaattgtgtgtcca

SEQ ID NO: 349698 - DNA, 100 bp, Homo sapiens
gcattactgcggatggaatgtgaggcacccgacaggaggatcctttattcgtccgaacaaggtaaattttggaacagactttcttactgcaattaagaac

SEQ ID NO: 349699 - DNA, 75 bp, Homo sapiens
ctattccagggctcccaggcagcagaatctgcccacagagttcgggtaagaatgattgatgttggctgatattgg

SEQ ID NO: 349700 - DNA, 88 bp, Homo sapiens
caaagggacctgatgaagcgaagatcaagattgcgcagtctctttgtggagaggacttgatcattaaaggaatcagcgttcatatatc

SEQ ID NO: 349701 - DNA, 87 bp, Homo sapiens
accttccctacagatatcaagaatacttcagtcaccaacgtgccaaatatggtatgatctcgtgaaatcttgagagaaactgaatga

SEQ ID NO: 349702 - DNA, 98 bp, Homo sapiens
ttggtccccgcgcagccccagctcaacgtgtgcaactgggcggtcatggtgaccaagaatatggcccaggtgaccaaagccctggacaaggccctgag

SEQ ID NO: 349703 - DNA, 75 bp, Homo sapiens
caccgcgagctatatctgcgcgtggagctgagtgacgtacagggttgtggataccccctggctgggcttcatgga

SEQ ID NO: 349704 - DNA, 98 bp, Homo sapiens
acgactcagtgccagagaaccgagcatccagtcatctcctataaagacacaacctgtgtgaaggactgcccagagggctattatgccgatgaggacag

SEQ ID NO: 349705 - DNA, 101 bp, Homo sapiens
tgaggcggcgagagatggtcaggtctggagctcgaccgggccaggaggcagcacccagggtcattcctggagcataaacgatccctgcagaacatgggcta

SEQ ID NO: 349706 - DNA, 87 bp, Homo sapiens
atcatcagttcgaagagcagcattggaaactctgtttacgttattatcaacacaggaccaggtaatgctggaggatggaagaagcaa

SEQ ID NO: 349707 - DNA, 90 bp, Homo sapiens
cacaaggaagcaaccagctcatgaacaccctcatgcgaaaatccaaagcagctgatgagaagagacgctccttggctaaacaagcacgag

SEQ ID NO: 349708 - DNA, 120 bp, Homo sapiens
agttccttgtggagccggagctgggcgcggattcgccgaggcaccgaggcactcagaggagagacaagaggagcagcagcggcaccgcccctcaccctggagggtcctgtacaatctcat

SEQ ID NO: 349709 - DNA, 100 bp, Homo sapiens
aaaattggtatcaccttcaaggagcacaagtagctgctcttccaagcaaggaagtcgacagataatctggagctttcaaaatgtttgccaaagcaaccag

SEQ ID NO: 349710 - DNA, 98 bp, Homo sapiens
agaagaaaagccatcgtaagagaagatctattaagtgcaaaagtttgtgacttgaagtggatacatagcctgctgaaaatgactgaatataaacttgt

SEQ ID NO: 349711 - DNA, 75 bp, Homo sapiens
tagctgctcctttggttgaatccccaggcccttgttggggcacaaggtggcagaaagaacattggagctatcatg

SEQ ID NO: 349712 - DNA, 82 bp, Homo sapiens
tgttaaatgtgatcagccttgaattttcagatacaaaccgagcccaggaagtgcgtcccctccgtggtcgtgggcgtcgtgg

SEQ ID NO: 349713 - DNA, 83 bp, Homo sapiens
ctcgagcagcgacaacccgtcctctcccgagtttttcatgtgtcttcagtgccctgggtttgcctgtgacccaatgcccactg

SEQ ID NO: 349714 - DNA, 100 bp, Homo sapiens
tccctactatgatggtgtgtatgatggcctggcgacccattcaggcacttatggccatttcagccatctctgctggatgaaccgaatcctaacagtccag

SEQ ID NO: 349715 - DNA, 90 bp, Homo sapiens
tgactagtttaaggagactggccgaagctctgcccaaacaatgcgacggagtgggagacatctgtgagtctgactttgaccaggaccagg

SEQ ID NO: 349716 - DNA, 80 bp, Homo sapiens
cggtggcggcggcggcagctgcagtgacatgtccagcatgaatcccgaataagaaagcggcactattggcgcctggactg

SEQ ID NO: 349717 - DNA, 90 bp, Homo sapiens
gccaagcccagccaagcccagccaagccccgccgatcgcgggcaccggagccagccccgcagcggaactacagttcctgaggaagaacta

SEQ ID NO: 349718 - DNA, 100 bp, Homo sapiens
ctcagcagaattttttgcaggggaaaacatccagtgtggtggaaatgtgtaaggcaaacattggtgggcaccgatcttcctgttcattctgcaagaaccc

SEQ ID NO: 349719 - DNA, 96 bp, Homo sapiens
caaaagccaagaggaggacagttcgctacacagcaatgcatcgagatatgaaaaacagtagctccgtatcgaatacattgacaaatggatgtgtca

SEQ ID NO: 349720 - DNA, 51 bp, Homo sapiens
cttgctcgtgcactttacacacatgagttcgttcccacatgcagggcagca

SEQ ID NO: 349721 - DNA, 75 bp, Homo sapiens
actggggccagggaaccctggtcaccgtctcctcaggtaaaaatctctacaccaatgaatatgtagcaatcaaac

SEQ ID NO: 349722 - DNA, 100 bp, Homo sapiens
ccggcgcggggtcggcgctgggctggaggcggcggagcgcgagagcttcgagcggactcaggggtgacaccaagatgtgctacactgaacccaacttctg

SEQ ID NO: 349723 - DNA, 100 bp, Homo sapiens
gaatatgaagagacacagtatggtagccacacccccaggatgccggaccagatctctgtctcggagttcatcgccgagaccaccgaggactacaactcgc

SEQ ID NO: 349724 - DNA, 75 bp, Homo sapiens
cttcggaccccccaacaccctctacgaaggcggctacttcaagatcatggaagggaagtggttgctgtgtatgtt

SEQ ID NO: 349725 - DNA, 95 bp, Homo sapiens
ggctttggaaacgacgtcatgtgttaggaggctactcacagtcgaactacaactccccggggtccggccagaactacagtggccctcccagctcc

SEQ ID NO: 349726 - DNA, 100 bp, Homo sapiens
gcagggcctgcagcgggagctggacggcgagcgcgagcggcgcgagaaagtgaccagaagtcagcagcttcccagaagccccgaagccggggcatcctcc

SEQ ID NO: 349727 - DNA, 100 bp, Homo sapiens
cgtgattgcgttacaagctttgtctccttcgacttggagtctttgtccaggacgaatcagtcggatttgtcagatgaagagctaaatgatgatcttttgc

SEQ ID NO: 349728 - DNA, 100 bp, Homo sapiens
aagtgagagtcattgatcccaggaaacaagagattgttgctgcttatcaggagggcagacttcaaaagctactaaaaatgaacggccctgaagatcttcc

SEQ ID NO: 349729 - DNA, 82 bp, Homo sapiens
tcaggacatggagtatgaaagacgatgcagagaggtgttcataaagagcaatatcagatggcaccccaaaaaaggatatgaa

SEQ ID NO: 349730 - DNA, 100 bp, Homo sapiens
tgacaatcaggacggtcttgtgcttcctgcagatttcacaaaactgcatcttactgacagtctccacccacaggtgacccacgtttcttctagccattca

SEQ ID NO: 349731 - DNA, 50 bp, Homo sapiens
tcatgttgctttccactgacaggacagaattaaaagatgttgatactcgg

SEQ ID NO: 349732 - DNA, 75 bp, Homo sapiens
atggcgaccgggctcggggagccggtctatggactttccgaagacgagggtcagtatagaccttctgatttgctg

SEQ ID NO: 349733 - DNA, 82 bp, Homo sapiens
aggcccaccctgtgatgaggaaggtatcatgatattagctggtttgacatcaagtcatttgtgagtcatcagatcttctcct

SEQ ID NO: 349734 - DNA, 75 bp, Homo sapiens
gagcttaccgtgtctccaatgacaaacgagatgtaaaagtgtcactgtgaactgtggctgcaccatctgtcttca

SEQ ID NO: 349735 - DNA, 100 bp, Homo sapiens
cggcggtctgcggccggcggtgtagacgccccttcgccgggacctggcacccgaatccggcctgccgggtgagaagccctaccactgcaactgggacggc

SEQ ID NO: 349736 - DNA, 83 bp, Homo sapiens
gtggaacggctgcttttggaaggaagccgctctgtgacccacctctgaatcccacaaaactgcaccagagagccgggcgcaag

SEQ ID NO: 349737 - DNA, 75 bp, Homo sapiens
tcgggaagagatgcgaggatgacaagatttggactgagcaacaaatttgaatctgaattcccttcttcattaact

SEQ ID NO: 349738 - DNA, 100 bp, Homo sapiens
agtcttctggcaaacagtgtttgcctctggttcagctcatacaacagcttcttagagctctctttacgagaaaaggaagatcctggctggtcagcatgag

SEQ ID NO: 349739 - DNA, 90 bp, Homo sapiens
ggatgaatttgcttttctggaagggcgtagacagtcaaagaggcagctccggaatgagaaagataagccactgcctccactgctggcccg

SEQ ID NO: 349740 - DNA, 82 bp, Homo sapiens
ctttgacatggacggacttcttctggaatctccggcctgtgaaactgtgaggggattcggccaagacgtcctcttccctctg

SEQ ID NO: 349741 - DNA, 90 bp, Homo sapiens
ggaggaaactgcttattggaaggaactttccttgaagtataagcaaaggttatggaggttttgatgactatggtggctataataattacg

SEQ ID NO: 349742 - DNA, 100 bp, Homo sapiens
tgcgcgtcatctctgacacggcctccctctgctactccatcctgaaagccaagaacgcagggaaagcaggcaggatgggagagtcgccgatagaaccacc

SEQ ID NO: 349743 - DNA, 75 bp, Homo sapiens
cagcccccctctcctgggacagcagcctggaccctctcaggagctgttgaaaatcctacagctacagagattcaa

SEQ ID NO: 349744 - DNA, 100 bp, Homo sapiens
tccccgccggcgggatgtggcgactacgtcgggccgctgtggcctggttgcccgaagctcagcagagagtcggaggctgctttttaaacctgatgccaca

SEQ ID NO: 349745 - DNA, 100 bp, Homo sapiens
cttctcctcatcaactggggatgattacagttcttcctaaaaaagagagaagaagaaggaggttcctgctgtgccagaaacccttaagaaaaagcgaagg

SEQ ID NO: 349746 - DNA, 118 bp, Homo sapiens
gttagacttgtttcttatatgtgatgccattccagcactggactcatggaggctgagcatttattcagcttgcccgctacaccaaggaaggcttcctgcacttgggtgccctggggac

SEQ ID NO: 349747 - DNA, 74 bp, Homo sapiens
ttacgaacctttggccacttgacttacagccagctggcccaccccatccagcaggccaaggcactgggtctcca

SEQ ID NO: 349748 - DNA, 100 bp, Homo sapiens
ggacaaatccttgtggagcaaatgggaaaaggtatgcaaccactcatgtattcggttcaggaagcattaaatgccagaccatggtggattcgtatgggga

SEQ ID NO: 349749 - DNA, 75 bp, Homo sapiens
cgaggtagctctactggctgctgtcaccctcctgggagtcctgctgcaaggctatggaggctatgatgattacaa

SEQ ID NO: 349750 - DNA, 101 bp, Homo sapiens
atggagttgtacttaaatgcagacacaagtttggaaattttagcattcaggtgccaggaatgcagatgggacagccagtgccagaaacaggcccagctata

SEQ ID NO: 349751 - DNA, 100 bp, Homo sapiens
ctgctctctgagaaaaagctgtttggcctgtcactgctcctcatcctcctgagccgtggtgaagacctacagagttcagaccctgctacagaatcaacac

SEQ ID NO: 349752 - DNA, 88 bp, Homo sapiens
gaccaacataactttagtccaagatgtgaccaagaatatggcccaggtgaccaaagccctggacaaggccctgagcaccatggacctg

SEQ ID NO: 349753 - DNA, 51 bp, Homo sapiens
aaataccagctaagactcaatggtgaaatgacaatggatgctctgttggct

SEQ ID NO: 349754 - DNA, 75 bp, Homo sapiens
attcgagtgaccgagaccgcggccgggaccgaggctgccgcaccagtaatcggaaaagcctcatcctgaccagca

SEQ ID NO: 349755 - DNA, 74 bp, Homo sapiens
ctggctttggagcctgagctcgaggcccggctggcgcacctgggcgtgcaggtacatcaggaacgtctctatca

SEQ ID NO: 349756 - DNA, 82 bp, Homo sapiens
ttggactgagtcctgcaggacacagaatgatcaagtctcggcctctggattatacctttgttcctcgaacttggatctttcc

SEQ ID NO: 349757 - DNA, 96 bp, Homo sapiens
catttcacatccagcagaggaggcgggggcagccgctgagacggtttttcacaagccaaaagaatgcaatggtgtaaagattccagttgatgccag

SEQ ID NO: 349758 - DNA, 75 bp, Homo sapiens
agccggcgggaggaacgctcactgtcagcgcctggaaacttgctcacgtaaggagagctgctttgagagaattgt

SEQ ID NO: 349759 - DNA, 80 bp, Homo sapiens
tcaaagagtctcttaccttgtgtttgatgaagcagatcgaatgtttgacatgggatttgatttggagcaagaggtggtgg

SEQ ID NO: 349760 - DNA, 83 bp, Homo sapiens
cgaagaaggggacgccgacaagtgtgtcccggcatggatatccggaacaacctcactaggttgcatgagctggagaattgctc

SEQ ID NO: 349761 - DNA, 75 bp, Homo sapiens
aggccgaggcgggcggattacctgaggttgtgggtctgtcttgaacacaaatggtgaggttgaaatggatgctag

SEQ ID NO: 349762 - DNA, 82 bp, Homo sapiens
ggatattaaaagaagactaattagcccatataagataatgttaattcaagactctcgaagagaagcttcagtgcagatggat

SEQ ID NO: 349763 - DNA, 100 bp, Homo sapiens
atgaaatgattgaatctggtgttatcaacttaaaagatgccacctctaagaaattgaattcccctacattgtcggtgaatagtgacggatttatacctat

SEQ ID NO: 349764 - DNA, 74 bp, Homo sapiens
agacatctacaaccttcgatctcctgacgagctgtgctactcatggacgccgaaaagcgtatccggttactgca

SEQ ID NO: 349765 - DNA, 100 bp, Homo sapiens
cagcagcagaagcagcagaaaggccgcggcatgggcggcgctggccgagacagagtttcactcctgttacccaggctggaggacaatgatgtgatctcgg

SEQ ID NO: 349766 - DNA, 74 bp, Homo sapiens
gatcactcccgctgcgattcagaaggaaccgttttgattaaaagtaacagtggtccgttgatgttggtatctcc

SEQ ID NO: 349767 - DNA, 50 bp, Homo sapiens
cctcaaggtgtatcagggcaaagcattgcagtgtcgagatggctatgaac

SEQ ID NO: 349768 - DNA, 100 bp, Homo sapiens
tccccataccttcccaatttgaactgccaagagagtatcgaaaccgtttccttcatatgcatgagctgcaggaatggtgtgtatgtaatatagattgcag

SEQ ID NO: 349769 - DNA, 152 bp, Homo sapiens
attggtatactgtggtgaagaaagtgagcgaggagtcagaaactcagccactggttgccttggtaggcaataaaatgtggtttattgacaatcatttacaatgccgaagagtgctgtagtgagccagcacagtgggtaacacagcaacggag

SEQ ID NO: 349770 - DNA, 98 bp, Homo sapiens
aggggggatatgtgatcaaagcatcagaagggatcactgagattctgatgaacagaccttctgcccgcaatgccttggggaatgtcttcgtcagtgag

SEQ ID NO: 349771 - DNA, 100 bp, Homo sapiens
tcctgggccgcgtgaaggccttcgatagagacagtgcgcacggccacccccttccccatggtcagcctcttcctcgtgttcacggccttcgtcatcagca

SEQ ID NO: 349772 - DNA, 100 bp, Homo sapiens
gtgcggagccagcctgagttgggagaagagctccagagaggaccattgcaatttagagatgtggccatagaattctctctggaggagtggcattgcctgg

SEQ ID NO: 349773 - DNA, 100 bp, Homo sapiens
ggtcaaggagtcgggcatcctggtgctgggcgccattgctgaggtatggaagctccaaaaggaaagataccagattgatcttgatcacctctgcctcccc

SEQ ID NO: 349774 - DNA, 75 bp, Homo sapiens
cagatgcccaccggaatggagaaggaagaggagtcgcactgtgacttctgccgtgttcaccgtgggagacaacgt

SEQ ID NO: 349775 - DNA, 78 bp, Homo sapiens
aagagctgcagctcctcctgtgcgggggctttgttatgcacctaaagccatattggaagctccagaagaaagagcacc

SEQ ID NO: 349776 - DNA, 100 bp, Homo sapiens
cttgacaagagaaatgataaaacatttagaacgatgtgaacatcgaatcatggaatcccttgcatggctctcaagaaagcgacctcaagatacaactggc

SEQ ID NO: 349777 - DNA, 95 bp, Homo sapiens
aaggaatataaaatgggagtaccaacatatggtgcaattattcttgatgagacacttgaaaatgccccggagaggcccctggtgggtgtcaatgg

SEQ ID NO: 349778 - DNA, 100 bp, Homo sapiens
gccggaggaaagcgggaagactcatcggagcgtgtggatttgagccgccgcattttttaaccctagatctcggatctgtctggctccattgatgacctcc

SEQ ID NO: 349779 - DNA, 87 bp, Homo sapiens
gttatcagataaacagtgggaacaatttcagacactggtgcaggttttaaaatcaaagatgggaaaatcggagaaaattgcccttcc

SEQ ID NO: 349780 - DNA, 100 bp, Homo sapiens
tgagtgagaacaagagagaggacggcagcgccaagcaggagctgaaggacttcagataacaacgaacttgatgcaagtgataggtttgccaaggtcagac

SEQ ID NO: 349781 - DNA, 100 bp, Homo sapiens
ctctgcatcccagccatcacctggatttacctgttttctgggagcttcgaaggaagctgaagagggaactacccttttcattccgatcaattaatacgag

SEQ ID NO: 349782 - DNA, 100 bp, Homo sapiens
cagctggactctctgcgggagaggctgcagcggaggcggaagcaggactcggggcacttgggtgctggagaatctggtaaaagcaccattgtgaagcaga

SEQ ID NO: 349783 - DNA, 73 bp, Homo sapiens
cgggattcgcggcccggagctcgggaccgtgatcggagggtatggttggcatggaattgaatttcatctgtct

SEQ ID NO: 349784 - DNA, 100 bp, Homo sapiens
ccgggatttcgatctggacctggcctggcgggttgcaatgaatgtgtatgagttatcatcagctgccggattaccttgtgagattgatcctgcattggtc

SEQ ID NO: 349785 - DNA, 131 bp, Homo sapiens
gccgcaccttctgtctcttcgtcaccttcgacctgctcttcatctccctgctctggatcatcgaactgaatagctagagccggtgcaggccacgcagaacaagacagggaagtatgtgccgccgagcctgc

SEQ ID NO: 349786 - DNA, 100 bp, Homo sapiens
gtgaagtatgttttatggacttaaatgccacaaacagttaagtccattggcttggagatgacaagcacgagtttctggtgtttaaaagacacaatcccag

SEQ ID NO: 349787 - DNA, 75 bp, Homo sapiens
tctggttgaggatgtacagagagctcctggacaacaggcaggggaaatggaaggtgatgcagtcgaagccattgt

SEQ ID NO: 349788 - DNA, 82 bp, Homo sapiens
tcaatatctgtcttcggtggactccttcggcagtccacccaccgccgccgcctcccaggcttggcactgctgcaccaccaaa

SEQ ID NO: 349789 - DNA, 101 bp, Homo sapiens
tgacaaaagagatatcaacagatactgcaaggagaggccctctaaagataagctggaattgagacggaaacagtttcatgttcttcttagtaccatccatg

SEQ ID NO: 349790 - DNA, 50 bp, Homo sapiens
gcgggacgtggtataccgcgacatcaagacttacagccagctggcccacc

SEQ ID NO: 349791 - DNA, 51 bp, Homo sapiens
ccaagaccgctgcagccgctggctgagcgacattgactacagcaccgtgct

SEQ ID NO: 349792 - DNA, 75 bp, Homo sapiens
aaggatcatgtctgcgagccaggattcccggtgaaatgacaatggatgctctgttggctcgattgaaacttctga

SEQ ID NO: 349793 - DNA, 50 bp, Homo sapiens
ctcagcctcccgagtggctgggattacagtgatgatggccaaagagaagc

SEQ ID NO: 349794 - DNA, 75 bp, Homo sapiens
cagactcgagccttggtcaaccattccggtgtgatgaatgcagactctgctaccattttggctgtttggatcctc

SEQ ID NO: 349795 - DNA, 100 bp, Homo sapiens
ggacattgccatcccatgcaacaacaagaagtggtccaaaggcaaagttcgggacaagctcaataacttagtcttgtttgacaaagctacctatgataaa

SEQ ID NO: 349796 - DNA, 51 bp, Homo sapiens
gttaaggattccaagtaactcttatttggcccaaggaggtgatagcatttt

SEQ ID NO: 349797 - DNA, 50 bp, Homo sapiens
tgcttcaagccctggctcaaaataagtcactcaagggaaaggattaatgc

SEQ ID NO: 349798 - DNA, 89 bp, Homo sapiens
ccaggtgaccaaccccaaggaggacgagggccggttgccgggcgcgggcgagaaagcttgagaattacattgtggaaaacatgaagtcg

SEQ ID NO: 349799 - DNA, 88 bp, Homo sapiens
ccggtttccctcggcgtgctactgtgcgctcgatccagcaccatggggaagcgggacaatcgggtggaatcctatgaggatggttgtg

SEQ ID NO: 349800 - DNA, 88 bp, Homo sapiens
gaccatgatggctcagtttcccacagctatgaatggtgcagtacagaaggtttctaaaaaattagaaatgcacgtttacagcaagagg

SEQ ID NO: 349801 - DNA, 101 bp, Homo sapiens
ttccttgacctttaggtgcttttatattcatctcaaaaacaaaattctgaactcaggacttggcaacttaaagaagtcttctgctgaactgaaaaaaatac

SEQ ID NO: 349802 - DNA, 82 bp, Homo sapiens
caaccaggctgcagctgcacaggctgcagccaccgcagctgccatggaatccttaccagagatccagaaagaacatcgcaat

SEQ ID NO: 349803 - DNA, 101 bp, Homo sapiens
agcccaccgcgccgggccccggacgccgcgcggaaaagagtcttcctgcgagcaattaatcagtatgcagatatgctgaacaaaaaatttctggatcaagc

SEQ ID NO: 349804 - DNA, 100 bp, Homo sapiens
gggtcccgccagacacgccgccgccgcagggcccagtcctatgcggagagactgcgtctgggtttggccgtcattcacggggaagctcagtgcacggaac

SEQ ID NO: 349805 - DNA, 75 bp, Homo sapiens
caaaaagctgaaggtggaggcgccgcaagcgctgaggtgatgatgaacagtctacacagatggctgcaagttggg

SEQ ID NO: 349806 - DNA, 74 bp, Homo sapiens
ggattcatttagagctgcggaacaggacgccctctgattgaaaaatgtactctgacctgaatcctgaattttcc

SEQ ID NO: 349807 - DNA, 100 bp, Homo sapiens
gagaattcaaccttttttgataagaatctgaagttgacaagcagcagcatagaccctggtctgagtatcaagcagttgggtggtttgtatattaatttta

SEQ ID NO: 349808 - DNA, 100 bp, Homo sapiens
ggcggccccgggagccgccgctctcagtctctctaggcgcagctcccttcgccgcttccggagcccctggcagggatgtcttccaagcgaccagcctctc

SEQ ID NO: 349809 - DNA, 100 bp, Homo sapiens
ccgaaagcctgaatctaatgcagtcactaaaacagccggcccaattgcaagtgcacagaaacaacctgcggggaaaggttggggtctgctaggtccccgg

SEQ ID NO: 349810 - DNA, 100 bp, Homo sapiens
tgtctgttagggaggcactcaagatgaaaactacttcaactaaaagccaaccacttgaacaagggatgccagatgatatgaacttcagtgatgtaaagca

SEQ ID NO: 349811 - DNA, 82 bp, Homo sapiens
taccccccaagcagcggcagctgtgtggacgaatgtggaacctcgctctgtggctgtgttcccttggcactccttagtcccc

SEQ ID NO: 349812 - DNA, 105 bp, Homo sapiens
gcggcgactacgacggcgttgatatcggtggtaacgacggcctcagcaggcggggaagatgaaaggcctacaacacagcagtcccctcaggatgagcaggaaaag

SEQ ID NO: 349813 - DNA, 74 bp, Homo sapiens
gactctgacagtcctcccactaagagccgaagagattcctctgaaaatcttggcacacaatggcttggttggaa

SEQ ID NO: 349814 - DNA, 83 bp, Homo sapiens
atgagggaatacaagtgtcatgtctgtggagaaccatggagtctggcagtaccgccgccagtgaggaggcacgcagccttcga

SEQ ID NO: 349815 - DNA, 100 bp, Homo sapiens
tttgcaatgacgcgattgtttcaatctaatgatgccagtctatccatatggggatggggaagccttggcattgtcctttttctgataacctttggaccct

SEQ ID NO: 349816 - DNA, 82 bp, Homo sapiens
tcttttcgatccgggacggccggtcaggctcgccgccgagctgtgtactaatggtcacttgatgtgcgctggctgttttatc

SEQ ID NO: 349817 - DNA, 98 bp, Homo sapiens
ccagagctaatagcatcggttccaccagtgcctcttctgtccccaacacagctttccatgaagtctcagtttacccaaagaaggagcttcccttcttt

SEQ ID NO: 349818 - DNA, 75 bp, Homo sapiens
agaaagtgaagatggccaccaaatcatgccccgagtgcgaccaacaggtccacctcattcatttaaccgagatga

SEQ ID NO: 349819 - DNA, 100 bp, Homo sapiens
gcagctgaagctcatcatgaccttccagaattacgggcaagcgctgttcaaacccatgaaggtgaatttggaagtgaaaagaaaactgctttgcatgaaa

SEQ ID NO: 349820 - DNA, 100 bp, Homo sapiens
gggaacttagggggctcccgcctccccggccacgcgagcgggaacagtctcctccactcggagcggaaacagaccttatcctgacttttaatatatcaat

SEQ ID NO: 349821 - DNA, 100 bp, Homo sapiens
tttatgggaaaattaagcagatgctccagtttgagaaacctggatctgcgatctgtttgtgcgccagcagccctgtggtggcgacgacgatggaccagga

SEQ ID NO: 349822 - DNA, 75 bp, Homo sapiens
ccatctgtgccatcatcgtggtagttattgtaaaacgttctcaggttgaccagctgctgaatatttctttaaggg

SEQ ID NO: 349823 - DNA, 75 bp, Homo sapiens
cctcagcatggccaactccgggcccaacagcaacaggtctcaattgtgattacgtttttgaagaagaaggacaag

SEQ ID NO: 349824 - DNA, 89 bp, Homo sapiens
agatgacaaagcaattgcagcagaacatcgagtgttggataacttctctgacatagtagaaggaaagccaaacttggccctgctggcaa

SEQ ID NO: 349825 - DNA, 75 bp, Homo sapiens
acctgctgcctggatccccggcctgcctgggcctgggccttgagtccttagccaggatggaggctgttgtgaact

SEQ ID NO: 349826 - DNA, 50 bp, Homo sapiens
gcccacccgcctgcccgccatgtttacagaatgtctgaaggggacagtgt

SEQ ID NO: 349827 - DNA, 82 bp, Homo sapiens
agaaaggagctcggggactcccccaaagacaaggtcattgattacaacggggaacgcacgctggatggttttaagaaattcc

SEQ ID NO: 349828 - DNA, 100 bp, Homo sapiens
ggggcggaaccagcctgcacgcgctggctccgggtgacagccgcgcgcctcggccagatcaggagaacctcagtctgacgacattgaagctagccgaatg

SEQ ID NO: 349829 - DNA, 100 bp, Homo sapiens
tcatagcagtggctgatgaagggtggcacattttacagaataagtcagatgactttctgtatcggcttcagctccccaggaatatgattgaaaacagcat

SEQ ID NO: 349830 - DNA, 89 bp, Homo sapiens
gtttatagaagagtgcttcgcatgtatgatgacagaaaccatgtgggaaagagccgggtgtgggctgagccctgcctgattgatgctgc

SEQ ID NO: 349831 - DNA, 95 bp, Homo sapiens
acaagaaaatggactccctggctgctggagagttgaatgccagccaccagccatggagttgtctgctggttctcagcttgaagaagattctgcag

SEQ ID NO: 349832 - DNA, 100 bp, Homo sapiens
aaactctttcgtcatcctcatattatcaaactggagtcatcaagctttggtgtatgtgttggccggttctgaagtcttgaagaagctctgctgaggaaga

SEQ ID NO: 349833 - DNA, 96 bp, Homo sapiens
acgggctgcaacctgcagcacatcagcgaccgggagaacatagacgatgaagtaaagaaggtcttagacaaattttacaagaggaaagaaattcag

SEQ ID NO: 349834 - DNA, 85 bp, Homo sapiens
cccgcttcctggaatggcaagcgcagcaacaacagagagcacgtggattatatctgtccaagatgcgagtctggttttatcgagg

SEQ ID NO: 349835 - DNA, 96 bp, Homo sapiens
agcagatttcccaagagcagcggaaaatgatccagtcacagcacacgtcacatggagatgggcgtcaagaagttacctctcgtaccagccgctcag

SEQ ID NO: 349836 - DNA, 76 bp, Homo sapiens
gaccgagacatgatgaagaaagatcttgcaggagagagagttactgcctgtgaagaaatttgaaagtgagattctg

SEQ ID NO: 349837 - DNA, 75 bp, Homo sapiens
aggacgcgcagtccatctctctcaggtaaacttatgagtgctttgctgagtggcctgacagatcggaacagtgtg

SEQ ID NO: 349838 - DNA, 82 bp, Homo sapiens
gaaaaggcaacatcctgtcacaggccatgctctggcaaaaactgcaggtcgtaatctgaaggagtggctgagggagcaattt

SEQ ID NO: 349839 - DNA, 82 bp, Homo sapiens
gagcagtgtcaagtgccagccctcccgcgtccaccaccgcagcgtcaagagctccacgcaggagatcggtgaggagctgatc

SEQ ID NO: 349840 - DNA, 148 bp, Homo sapiens
cggaaccacggtggactgccacggcacggggctgcaggccattcccaagaatatacctcggaacaccgagcgcctgttaacattcaagatggtacatgctgaagccttttctcgtcctttgagtcggaatgaagttgttggtttaatt

SEQ ID NO: 349841 - DNA, 83 bp, Homo sapiens
tggggcccaagagaagtaccatctcgacaatgcagatcttcgtgaagactctgactggtaagaccatcaccctcgaggttgag

SEQ ID NO: 349842 - DNA, 90 bp, Homo sapiens
cgttgcgagctgcagctgcgatctctgtggtaggcccagaacctccgcacagatattgtcatggatgttggctccagtctaaaccctgcc

SEQ ID NO: 349843 - DNA, 50 bp, Homo sapiens
ctccccagccacgtgaaactatcctctggaccttctccatctacctggag

SEQ ID NO: 349844 - DNA, 80 bp, Homo sapiens
aaagacagtcctcgtcagcactgactttcagctatggaatcggaatatatgcagaacatgtcctgcggcccaagaatctt

SEQ ID NO: 349845 - DNA, 101 bp, Homo sapiens
ccaagatgtctgacatggaggatgatttcatgtgcgatgatgaggaggactacgacctggagaaattgtcgtaaatgaagtcaattttgtgagaaaatgca

SEQ ID NO: 349846 - DNA, 95 bp, Homo sapiens
accttctgaacaaggccaacacctatgcagattccattggccgtgacatccccaaaatgcttgaattatttaaaaatggacatgaaattaaggta

SEQ ID NO: 349847 - DNA, 100 bp, Homo sapiens
gctggccttcacccgcgcaggagacggggtcaggagtgagcagatcttcacccggaccaaagaggatgagcccgtgttctggtactacgtgaaggaggtc

SEQ ID NO: 349848 - DNA, 82 bp, Homo sapiens
agggagtggagcttggtttcgggatctcggtgctgcagacggcgagacctcctgcacaggtacggacattgctgcaggagaa

SEQ ID NO: 349849 - DNA, 90 bp, Homo sapiens
cgacctctggttctacttcacactgcagaactgggttctggactttgggcgtcccattgccatggaatacttttttgatccagatgtgtt

SEQ ID NO: 349850 - DNA, 75 bp, Homo sapiens
caaggattccggagagaggatcaggtgttttcaggttaaccgtcagtgaaagagtttctagccaaagccaaagaa

SEQ ID NO: 349851 - DNA, 83 bp, Homo sapiens
gggacgtccgtctccgacgagccccgtgaagcccagttcccctgccagcaagcctgatggttctggaggctgggaagtccaag

SEQ ID NO: 349852 - DNA, 100 bp, Homo sapiens
gcggatggccccaggtgtaagcgcagaaagcaggcgaacccgcggcgcaataacgacgcatcttctctccagactgccgatcccagaaagccaggtgatc

SEQ ID NO: 349853 - DNA, 100 bp, Homo sapiens
aagatattactcaggatcttcgaaatcatcttgttcacaaactatccccgttgcgcagccatctgtcatggacgacattgaggtgtggctcaggaccgac

SEQ ID NO: 349854 - DNA, 80 bp, Homo sapiens
attgggcgtggcccagagaccaagatcactgataagaaatgttctcgacagcaaggcttacatcaaaatctatcaaggag

SEQ ID NO: 349855 - DNA, 76 bp, Homo sapiens
ggcgctgcggatccagggggtcggctgccaggtacaggaaacaatgtgatgagaaccattcatggggtgggagaga

SEQ ID NO: 349856 - DNA, 88 bp, Homo sapiens
tcagcattgctgcagctcgtgggtgctcaggaaacggaggtggagctgtacaacgaatttcctgaacctatcaaactggacaagaatg

SEQ ID NO: 349857 - DNA, 101 bp, Homo sapiens
gtccttctccactttcgccagcccgtgccgcgagcgcggcctgcaggagatgtggacgagtgctcactagcagaaaaaacctgtgtgaggaaaaacgaaaa

SEQ ID NO: 349858 - DNA, 100 bp, Homo sapiens
ggggctgcccaggccaatccacgaaagcatcaagactctgaaacagttaagtgggcagaccaacatccacctcagcaaaaacttcttcctgacgaatcgc

SEQ ID NO: 349859 - DNA, 88 bp, Homo sapiens
cctattttacatgaagattttgttagcaataatggaacaaccaggaagctatatgagaaaaagcttttgaaactgagggaacaaggaa

SEQ ID NO: 349860 - DNA, 88 bp, Homo sapiens
gccgacttcgatgatcgtgtgtcggatgaggagaaggaactctagccaagaaccacggcctacactctccaacacaatccagaggcca

SEQ ID NO: 349861 - DNA, 75 bp, Homo sapiens
agaatgaacctccggcccctggggacccccagagtgactcgatggaaacagaagaaaagacaagcagtgcatttg

SEQ ID NO: 349862 - DNA, 80 bp, Homo sapiens
cgggcggggagggcatgttccgtggcctcgcccaggccgacgggacttggatgttgtgggtgatggtatgcagtgtcctc

SEQ ID NO: 349863 - DNA, 95 bp, Homo sapiens
gaacatgacctcaaggagcttcctgtcaatgagaagaccaagctgacgcctggcaaagcattgacaagatatctaaagtcacctctcctgtgttg

SEQ ID NO: 349864 - DNA, 83 bp, Homo sapiens
agacctcctgaaaaccaagccgaggactgcggggtccggtgtccacgcagaacccaacatgagtgaagtttcctgcaagaaac

SEQ ID NO: 349865 - DNA, 100 bp, Homo sapiens
ggcacctgggccccaggccatccagcctttgcctttgagccctggggtaaggcctgcgtatgctcttatgccggcagctgggggacagctctggggaggg

SEQ ID NO: 349866 - DNA, 75 bp, Homo sapiens
atgaaatgaagagttattctcaagctgtcacaggagaatgtatcctgtcaggtataatgtcagtgaatggcaaga

SEQ ID NO: 349867 - DNA, 96 bp, Homo sapiens
ggaaaagggacgtaggaagaagggcaggacctgggcggaggccgccaagacgaataccctctaccatctgctttggtcagggtgccgctcgaggat

SEQ ID NO: 349868 - DNA, 75 bp, Homo sapiens
ggcggcgagagatggtcaggtctggagctcgaccgggccagggctctggctgagaacatggccaatgacattgat

SEQ ID NO: 349869 - DNA, 97 bp, Homo sapiens
gttccgcgcattggaaagaagcgaccgcggcggctggcacggatgggcagaagcctttgcaggtatcagaagttcacatatcaaatatatctgcccg

SEQ ID NO: 349870 - DNA, 100 bp, Homo sapiens
atcagggcatcgctaagctgtaccataaagtgagccagtgtggcatgcagcattttggaaggaaaattgaagacgtgttcaagaaaacatgaacagaagc

SEQ ID NO: 349871 - DNA, 100 bp, Homo sapiens
cggcagtcagagtcaaaacagagcttttggaatctgaacaagggctctattaccaggttttaaacttcgccatgatcgtgtcttctgcactcatgatatg

SEQ ID NO: 349872 - DNA, 100 bp, Homo sapiens
ctcatgacactaagaagtaaaattacgaactcactgagctggaagtcattcaacgggaattgaataggacataagcagatgttcaacccaacagaggaaa

SEQ ID NO: 349873 - DNA, 117 bp, Homo sapiens
ctgggctgcagcaagccgcacctggagaagctgaccctgggcatcacgcgcatcctagaaaactgctgcagatggaaaaaggcaagagatcattgttctggattccaagaggagtaa

SEQ ID NO: 349874 - DNA, 87 bp, Homo sapiens
agcaaatctggctatcttctccatccagatatcgtagtaaagtgttatcccgttggctggctggcttaccattgcaacttgctcatc

SEQ ID NO: 349875 - DNA, 100 bp, Homo sapiens
gagaagaggcagctctactatgccatggagcacctggggaccagcttcaaggatcctgtggccggcattcacaagaaggtggcccggaccatcggcattt

SEQ ID NO: 349876 - DNA, 63 bp, Homo sapiens
ctctatgagcttttgaaacttgttaaggcaatgaatcgctccctggctaatgtgattcttgga

SEQ ID NO: 349877 - DNA, 74 bp, Homo sapiens
gctctcaactacaacatcgtttcagggaaatctgaaatagagtactatgctatgttggctaaaactggtgtcca

SEQ ID NO: 349878 - DNA, 82 bp, Homo sapiens
catcagtgatgaggcccaggccgacctggcgctgcggagatataattggtgattacaactttcctctataaattaactcttg

SEQ ID NO: 349879 - DNA, 83 bp, Homo sapiens
gtggatggcaacaagatcaccatcatgcccaagcatgaggacctcaaggtatccaccaacccctcctccaacatcgatccagg

SEQ ID NO: 349880 - DNA, 83 bp, Homo sapiens
gctatgttggggaaatactccaaggagtttttcaccagaaaagatcagtacaatggaacatgaattttcaataaaggaacgtg

SEQ ID NO: 349881 - DNA, 100 bp, Homo sapiens
tccaggatttgcctttgtggaattcgaagatcctagagatgcagaagatgcagtacgaggactggatggaaacggagctggagtttgttcagatcatcat

SEQ ID NO: 349882 - DNA, 101 bp, Homo sapiens
ctatctctaagcactgaagtcggtgtttggagaaaaggactcaggatacattaattgtttggtcagaagcagagaactatgatttggctctgagttttcag

SEQ ID NO: 349883 - DNA, 75 bp, Homo sapiens
tgcgaccccagtcggtgctccggggaggtcacctgacgaggagggtgtcaaattgagaaccaggtagatccccac

SEQ ID NO: 349884 - DNA, 97 bp, Homo sapiens
ccggggcttgccctggtcttgctcggccgatgaagtgcagaggtttttttctgacaagactacttttgcttaaaaatctgttatgtaaacaaggaag

SEQ ID NO: 349885 - DNA, 79 bp, Homo sapiens
accaaaattgtggaaaagtcactctgatccaggatgagaagactgataaaagaagaagctagctgaacagctgtaaaat

SEQ ID NO: 349886 - DNA, 75 bp, Homo sapiens
attctgccaattcgttttcaggagcatctccagatttcaacactacacttgcacaatgtctttgaaaccaagagt

SEQ ID NO: 349887 - DNA, 75 bp, Homo sapiens
cgactcatttctgtttgttactttgagtctgaaaatgactggataaggaagcctgtgtgggtaccaacaatcaaa

SEQ ID NO: 349888 - DNA, 100 bp, Homo sapiens
gcggaggggaggtcgtgatggcggcgccggaggcggaggttctgtcctcagccgcagtccctggaattgagaagttcaaagggcagtacttccacagtcg

SEQ ID NO: 349889 - DNA, 82 bp, Homo sapiens
gagagagacaagatgtccgccagagctgcggccgccaagctgcctgtggaggaaccgattgtgtccacagatgaggtcatct

SEQ ID NO: 349890 - DNA, 83 bp, Homo sapiens
gtacctcattgctctttggcgactcttattgctctcaaaggggaaaacaactgcagaggatgggaaatgctatactgccatgc

SEQ ID NO: 349891 - DNA, 98 bp, Homo sapiens
agaggacacgaggcggcgggctggagacatggaccgcggcgagcaaggaaaatgtttataggaggccttagctgggacactacaaagaaagatctgaa

SEQ ID NO: 349892 - DNA, 50 bp, Homo sapiens
aatgaagtggagcccatcatcctctccgaggcatttcatccttcatgaag

SEQ ID NO: 349893 - DNA, 90 bp, Homo sapiens
ttgacctcactcaatatattctgcagtcacccacaaaagctgtatataatgccagacattggaatcatccagattcagaagaactgcctg

SEQ ID NO: 349894 - DNA, 74 bp, Homo sapiens
gaaaatcaacgacaacttgagcacaggtcttgtagaaatttgcctgatgcaccccctagatgtggtgaaaacca

SEQ ID NO: 349895 - DNA, 111 bp, Homo sapiens
atgaaatttgctctgctaaaaggctccttcagtgagcaaggcatcaacgagtttctcagattcacaatgacatcctttcaagaagtcccattgcagacttccaactttgcc

SEQ ID NO: 349896 - DNA, 100 bp, Homo sapiens
tcgtctcgggttcgagcccagtgggcttagccactcgccatggactcccagaaagttaatgttcgtgaagaaattgaagagttttttccaagaatgtgga

SEQ ID NO: 349897 - DNA, 75 bp, Homo sapiens
ctggccaagaagggccttactccttcacagatcggagacagtgtttcacaaaatgattttccttctgaagctccc

SEQ ID NO: 349898 - DNA, 83 bp, Homo sapiens
ggacaacagacctctgtttggggagacgtccgccaagggttgtgagtcccggcccagcccctccacccccctgcccccccgat

SEQ ID NO: 349899 - DNA, 100 bp, Homo sapiens
atgtggatgatgccaaagttttattagatgccatggacaatattaccaggcagaaccaattctacgatacccaagtcatcaaacaagaaaacgagtcagg

SEQ ID NO: 349900 - DNA, 98 bp, Homo sapiens
attaattagcccaagaaacattatattcattcaagccagcgcctttagaaataaaacctttgccagaatgggaagaattacaagccccagttagatct

SEQ ID NO: 349901 - DNA, 82 bp, Homo sapiens
tgtatgacgagattattgagttaaagaaggactccagaagacctttccagattcgtggttgagctgcagcagagggagcttg

SEQ ID NO: 349902 - DNA, 97 bp, Homo sapiens
ggaaaggtgaccaagcccaaagaggagaaagatgcttctaagggctaatgtaatgcttgaatatgatattgatgaagctcaggcattgttggaaaag

SEQ ID NO: 349903 - DNA, 100 bp, Homo sapiens
gcggcaaaatggcggaccgcttctcccgcttcaacgaagaccgagactttcaggtactctctgaagatggcagaagctcaccaagctgtggcctttcagt

SEQ ID NO: 349904 - DNA, 74 bp, Homo sapiens
agctgattattagaaatgctacgttgttaatccagctaatggagaaggatagatgcacgctacttggtttagaa

SEQ ID NO: 349905 - DNA, 90 bp, Homo sapiens
gaggagctgcggctctaccccccggagtaagtaaggaggtctctgtaccatggctcgtacaaagcagactgcccgcaaatcgaccggtgg

SEQ ID NO: 349906 - DNA, 100 bp, Homo sapiens
gtgctcaacgtgtacgacatggttgtctgcattcaaaagagcattctattaaagctaccttaatttggcgcttatttttcttaatcatgtttctgacaat

SEQ ID NO: 349907 - DNA, 90 bp, Homo sapiens
ccaggggggcggcagcgctggacacccagcctccaggcaacaagattgacctggctgaaaggagagaggtttcccagcagcgagctgaag

SEQ ID NO: 349908 - DNA, 74 bp, Homo sapiens
cacagctaagacgccaggacccactggaagcctagaaatgctttctgaaaaggatatgagcatgctcgaggaga

SEQ ID NO: 349909 - DNA, 83 bp, Homo sapiens
tgagtggtttttcggatcatgtctggtggctccgcggattataacaggaaatctggcattttttaaagtttgcgccccacaaa

SEQ ID NO: 349910 - DNA, 75 bp, Homo sapiens
ggccagggtgcttttggaaacaaagtggatttcgataacaacatacagttgtctctcacactggctgcactatcc

SEQ ID NO: 349911 - DNA, 100 bp, Homo sapiens
gcaacagctgaacagatgcgtctcgctcaagtgatctttgataagaatgattcagattttgaagctaaagttaagcagaactctcttgatagagcccaag

SEQ ID NO: 349912 - DNA, 75 bp, Homo sapiens
gttggaaccgaagagagctctgttgttgcaactctgggacatctggagaaagctgtagtcttggaattaactttg

SEQ ID NO: 349913 - DNA, 83 bp, Homo sapiens
gaaatttgtcatcaagcccattgacaaaaaagccccgcgaggccccagcttctcccagcactcaggaggccatccagggcatg

SEQ ID NO: 349914 - DNA, 100 bp, Homo sapiens
gactttccttacctgtttttccagctcacccactgccagcagaggtgccctttcccaccatggtggctctgctgtgcatgtggttcgggatctccctgcc

SEQ ID NO: 349915 - DNA, 100 bp, Homo sapiens
gccctgagggccttcgagagctaccgcgccagacaggaggtggtccaggccacgctggtggtcctggccttggccatggtgcccatcctgctgcttggca

SEQ ID NO: 349916 - DNA, 74 bp, Homo sapiens
cccccattgctgagccagcggagctgcttggtggcgtacacctttgacgcgggccccaatgccgtgatcttcac

SEQ ID NO: 349917 - DNA, 75 bp, Homo sapiens
cagcaacctagtcagtctgcatttggctctggaacaactcctaattctaataaaagcttcgatgatgaagaatca

SEQ ID NO: 349918 - DNA, 100 bp, Homo sapiens
tgacaaggcactgctttttcatgacgatccgagtgaagcctgacaggaccggtgtggtcacggatggtgtgaagcactccatgaaccccttctgtgagat

SEQ ID NO: 349919 - DNA, 101 bp, Homo sapiens
tctgcaaacagaaataaagaatcagttatgtgacttggaaaccaaattacgtaaagaagaattatccgagattaattgcctaaggaattgcaaaacctatc

SEQ ID NO: 349920 - DNA, 50 bp, Homo sapiens
catcactcatgtccataaggagaatggagatttacagacagtcatctggg

SEQ ID NO: 349921 - DNA, 90 bp, Homo sapiens
ggactcggagctgagaggagctgctgctcggaccagcgcgatgtgcctggcatcagaagggatgaaaatggaagaatcaaagctaataaa

SEQ ID NO: 349922 - DNA, 82 bp, Homo sapiens
gatgaaccatcttcctgcacacagccacgatttgcaaagagtgaacctctgtatgtgcctgtgaaattccatgatcttccaa

SEQ ID NO: 349923 - DNA, 83 bp, Homo sapiens
gtttatcgcctctggactaatggctggccatgaagcccccaggaggagaatcgagcaatctttttggaagtccagaagaagct

SEQ ID NO: 349924 - DNA, 75 bp, Homo sapiens
tctacggggctgacatcagcggctctttgtatgatgacctcaagaggtttggatatggaccttcttcaattcctg

SEQ ID NO: 349925 - DNA, 75 bp, Homo sapiens
catggtaacagaagagtttgtgaaaccatcacagaacatcagctttccaaaccagatgtggtatctcagttagag

SEQ ID NO: 349926 - DNA, 76 bp, Homo sapiens
ctcatgggcacggctcgggacggatgggagtcccagcttctggagacggggttcctggggatcttcctgtgccctc

SEQ ID NO: 349927 - DNA, 75 bp, Homo sapiens
catttctggagtctgggtcttccgaggccaggagcttgcctttccgttgtgtgacttcattgagacacattacct

SEQ ID NO: 349928 - DNA, 99 bp, Homo sapiens
taccatcactggatctgctgccagcattagcctggctcaatatctaatcaatgtcagggttggaagcccagcgaggctagaggccagtcccaaagtttc

SEQ ID NO: 349929 - DNA, 88 bp, Homo sapiens
aagctcgtagcctgccactccgtgcgactggaatgtcacgtggaataccagcaaccccgacttcaccaagtgctttcagaacacggtc

SEQ ID NO: 349930 - DNA, 90 bp, Homo sapiens
aaacgggcagccatggccctccacagcccgcaggtaacaaacctgaatttggcaactggcatcataaacagaagcagtgcttcagctccc

SEQ ID NO: 349931 - DNA, 83 bp, Homo sapiens
ctggcctgggcgctccggtggcggcggaggggcgttccacatacgttgtcccgacacagcagtaccctgtgcagccaggagcc

SEQ ID NO: 349932 - DNA, 101 bp, Homo sapiens
gatgaaaaggaatatgcattgaagcaaattgaaggcacaggaatatccatgtcggcttgtagagagattgcaggctaccctgagaggaatctacatgcaga

SEQ ID NO: 349933 - DNA, 100 bp, Homo sapiens
ggttcttccaaagtgcccggacccaaaacaggaatgcatttgcccagtataacatggatcagttcacgcctgtgaagatagaaggatatgaagatcaggt

SEQ ID NO: 349934 - DNA, 87 bp, Homo sapiens
cagggaaccaagcagtcaaagctcaaagccttgcagaggccaagattccttttaagattgggcagcccaagaaacagattgtgccca

SEQ ID NO: 349935 - DNA, 82 bp, Homo sapiens
ccagatttctgtggcagaagatgatgatgaaagtaacatacatatgatagttgagaaagacacatattctgatcatgaagaa

SEQ ID NO: 349936 - DNA, 100 bp, Homo sapiens
ggagaatcagcatctgaaaagccataatcagcgcctggtggagcaggtgggatcccttcaagatgcgctagaagagcccgaacccagccctcaccttctg

SEQ ID NO: 349937 - DNA, 96 bp, Homo sapiens
ctacatcccgtcctttcgctatgaagagagcgacctggagcggggatacacggtttccactgtatccaaaaggaggggagaagttgcagtttgatt

SEQ ID NO: 349938 - DNA, 75 bp, Homo sapiens
cagggctggcatagcagcgaaagggccttggagagagtgccaagcatggtgatggtgtggatccacggtggtgcg

SEQ ID NO: 349939 - DNA, 100 bp, Homo sapiens
cgagccgggatctcaggtcctcgggggcggcggccacgccaaggacggatcttcccagacccgtcagattttgaccgctgctgcaaactgaaggaccgtc

SEQ ID NO: 349940 - DNA, 75 bp, Homo sapiens
agagtgatgctgaaccaagagagaggttacagcttagcttccaggatgatgatgcaactgcagatagaagacctg

SEQ ID NO: 349941 - DNA, 50 bp, Homo sapiens
ggtgagagaggagttgttggaccacagggtgctcgtggtttcccaggaac

SEQ ID NO: 349942 - DNA, 101 bp, Homo sapiens
ccggagacgagaccagaggccgaactcgggttctgacaagatggccgggctgccccgcaggatcatcaagaatgctggaagccaagcttgcacattctagg

SEQ ID NO: 349943 - DNA, 100 bp, Homo sapiens
attcaagttaatcatcagactgtggtgttcctccaagaaaagctggttatattgaagacctggttttgatgctgcctcagaacatttgggataacctata

SEQ ID NO: 349944 - DNA, 80 bp, Homo sapiens
gagcgacttgcgcgccttgtcactggagtgcaagaagaaattcccacctgtcaaagagaatgacagcccatatcaaggcg

SEQ ID NO: 349945 - DNA, 74 bp, Homo sapiens
ttgtggcctttgcatggttgggagttgttcctcttacagcatgtcctaggcctacttacaagcctccagtctca

SEQ ID NO: 349946 - DNA, 97 bp, Homo sapiens
acaagaagacgtccaatctgagcgtgctgcggacggcgctgcggtacatccagaacatccagtcatggataaaaatgagctggttcagaaggccaaa

SEQ ID NO: 349947 - DNA, 75 bp, Homo sapiens
tttcgcctgcagctgctcaccgttggtggaccaactgggtgatccctgccatctctgcagtggccgtcgccttga

SEQ ID NO: 349948 - DNA, 96 bp, Homo sapiens
aactgctcgtttgggacctccttggagcaaaaatcagtgagagaatacagggccacacagtgcagattgctgtctgaagctcccttgtttatctac

SEQ ID NO: 349949 - DNA, 90 bp, Homo sapiens
agcttattggttacattagaagttgtgaaatttacccaggcatacttcataaattgggcattgccacctggggtatcgttgtcatggcag

SEQ ID NO: 349950 - DNA, 75 bp, Homo sapiens
cgctaaacgtgccctactctgccccgggggagaggacggcatcagaattaatgtaactacactgaaagatgatgg

SEQ ID NO: 349951 - DNA, 106 bp, Homo sapiens
tggaaggtgcgtgtggggctgggtctcggagtgggagacgtggagtgcagcaggtcgagtcccgggcgctcaccatgttccgggacattgcccagcaactgcaggc

SEQ ID NO: 349952 - DNA, 82 bp, Homo sapiens
atacttcctggcgctgaccttctttgtcgcagcgttccatcaacccaaggagatctgtgcgctggttgggttctgtgatgag

SEQ ID NO: 349953 - DNA, 51 bp, Homo sapiens
cactttagaccctccacctaattgcagcaccagcagacgtttttgaatcaa

SEQ ID NO: 349954 - DNA, 100 bp, Homo sapiens
gagagaccaacctgaagcggcggcaggtggtccgcggcttctcggagcttttgcagagctattttgctgcatgtgaggatgagatccctgccatccggaa

SEQ ID NO: 349955 - DNA, 101 bp, Homo sapiens
cagctgactgcacttcttttttgagaaaggaaggaatatatcctgactgattagcgggcagagaagatgggccagaatctcaaccgtattccatacaagga

SEQ ID NO: 349956 - DNA, 82 bp, Homo sapiens
aatgccatgatgcctggtgccccattacaacccgtgaggcaaatttctggagatgtgcaatgatctcttagctagagtggag

SEQ ID NO: 349957 - DNA, 97 bp, Homo sapiens
atggattcttacaaagctgccaggagaaatggaaaaacaaaaatgaatgaatcaagagtgatttgttaatagtccgcttagtggaaagaggatcccc

SEQ ID NO: 349958 - DNA, 74 bp, Homo sapiens
gcctcttcctatttcacaagtagggaaactgaagcccagggctccataatcgtgggaattgattacgactgccg

SEQ ID NO: 349959 - DNA, 75 bp, Homo sapiens
ggacgctgagcggagcagctgcgccacgtgagagggtccaagcctggtaagaatgtccagcttcaggagaatgaa

SEQ ID NO: 349960 - DNA, 75 bp, Homo sapiens
ggaaaactcgtggcacgttaccataaggttgaaatcaaggaagcaggtggtactactacaagtaataatccggaa

SEQ ID NO: 349961 - DNA, 100 bp, Homo sapiens
tcctatgagttcaccactctgacgtgtattcctggggtcattgaaattatgtttgagaccttcaacaccccggccatgtacgtggccatccaggccgtgc

SEQ ID NO: 349962 - DNA, 98 bp, Homo sapiens
ctggagcctcagttggaagcagccgatccagcctgcggagcctgtggggcagtggttggatttcatcccttactggtctcaaccaaaatattcctgtt

SEQ ID NO: 349963 - DNA, 100 bp, Homo sapiens
tgaggccccaggcatcagagatcatgagaggcaaatactctatctggatcttctctcagtcaggcaccatctcatatgtatggcaatagatcaaattcat

SEQ ID NO: 349964 - DNA, 82 bp, Homo sapiens
ccatggtgttctggatcaacaaggaagactatgaccgtctgaggcctttatcttacccaatgaccgatgtcttccttatatg

SEQ ID NO: 349965 - DNA, 100 bp, Homo sapiens
acaaaacatacgagctggtacccaggcagttttgcagttcatcagagaagatatgaaatataaagatgctactaataaacacagccatctgcacagagaa

SEQ ID NO: 349966 - DNA, 100 bp, Homo sapiens
ggcagcatgaagcgcaccccgactgccgaggaacgagagcgcgaagctaaggttcttgctctgtcacctaagctggagtgcagtagggtgatcgtaactc

SEQ ID NO: 349967 - DNA, 90 bp, Homo sapiens
aaaagaaggactgggggcatctgaagcagtggccgacatcaagttttcctctgcagagcgcttgcatcaaacacccctaactcagaagtg

SEQ ID NO: 349968 - DNA, 83 bp, Homo sapiens
cggggtccccgagtggttccatggtgcaatctcaagagaaacctgagagccagaagcaacaaagatgccaaggatccaacgac

SEQ ID NO: 349969 - DNA, 96 bp, Homo sapiens
gtggcaaccagaacctcttgttcctcctgtcccaaaagaccatcctgctctcaactacaacatcgtttcagggagagctggaggtgtttcagaaag

SEQ ID NO: 349970 - DNA, 74 bp, Homo sapiens
gagaatgaagccatccaatggatgcaggaaaactggttagctttatacgtctacgaatatttactgcacgtagg

SEQ ID NO: 349971 - DNA, 100 bp, Homo sapiens
gagtaggcgaagcaaggactgtagaatgtaagaaagctcagccgaaagaagtcatgttcccacctgggacaagaggccgggcccggggactgccttacac

SEQ ID NO: 349972 - DNA, 75 bp, Homo sapiens
aagcaattaatcccaagttgcttcagttggtcgaagacagaggttcagttttactcccaaaaaagaagaggagga

SEQ ID NO: 349973 - DNA, 97 bp, Homo sapiens
gctaagactgaacaggatattcagagaagttctgtaaaatgtcggttccaggaccttaccaggcggccactgggccttcctcagcaccatccgcacc

SEQ ID NO: 349974 - DNA, 100 bp, Homo sapiens
agctggaggaagacctgtatgacggccaggtgctgcagaagctcttgggattatggtgtcacacctgaatacatatgtaagcgaaacgaggaaataaaga

SEQ ID NO: 349975 - DNA, 97 bp, Homo sapiens
cctcagcctcccgagtggctgggattacagaagaagctgtgaataaggtgaaaattcaggccatgtcagaagtacagaaggccgtcgctgaggcaga

SEQ ID NO: 349976 - DNA, 100 bp, Homo sapiens
cggcaaatggcggacttcgacacctacgacgatcgggcctacagcagcttcggcggcggcagaggcagtctctggtcccagcccaccccatggcccctcc

SEQ ID NO: 349977 - DNA, 75 bp, Homo sapiens
cagtatctcacctccctaaactggttaatagtggcatggaagatccatttggttgtgggtctgtcttgaacacaa

SEQ ID NO: 349978 - DNA, 100 bp, Homo sapiens
ctgaaatccacagccttgttcatcggctcccagagaaaaatcggcagatgttacagctgctcatgaaccacttggcaaaaatcttatggcaagggcctta

SEQ ID NO: 349979 - DNA, 98 bp, Homo sapiens
ggagctccgccgccccgaaactttcaccgcgagcgggttgcactgctgtgatccatcctcatctcctaaagatgcatcctgacttatctccacacttg

SEQ ID NO: 349980 - DNA, 90 bp, Homo sapiens
gctaactaccagacgatgaaagaacatttcctctagtttctggataatgagcaggcacacaggccgttgatgctcactgccatcagctgc

SEQ ID NO: 349981 - DNA, 87 bp, Homo sapiens
caggtccagggcagaggaccaacatgggcattttgtttatgagcaagacatgggaaagcggaaccaccaaaaggagtgatgatcaac

SEQ ID NO: 349982 - DNA, 100 bp, Homo sapiens
gcaaggaccctttggaaggccgggtgggccgagttatggctgcagcttcgattgccaatattgtaaaaagttctcttggtccagttggcttggataaaat

SEQ ID NO: 349983 - DNA, 83 bp, Homo sapiens
cgactctaaacggactcatgtactttgtcagtctctgctttctatccgtcaagatgataaagtcgtgtgcccgagaaccaaag

SEQ ID NO: 349984 - DNA, 97 bp, Homo sapiens
acagtgttctgctttcatggagttcacagaagagtcgaggaggagtacaagcgcaagctagccagagtttccctggtgcgcaaagaactcaggtccc

SEQ ID NO: 349985 - DNA, 100 bp, Homo sapiens
gagccgtcgccggtggcatgttggatcggatccttctggagtccgtgtgccagcaacagagctgggtccgggtgtacgcaatgtctcaggctgtgcagac

SEQ ID NO: 349986 - DNA, 118 bp, Homo sapiens
cggcggtggcgcctgcggacctaactagctccaggttaggccgagctttgcgggaaagcagcggtgccctacgagacgctgaacaaacgctttcgcgccgctcagaagaacattgacc

SEQ ID NO: 349987 - DNA, 97 bp, Homo sapiens
tggagattcatgacaaaatcatggagatcctcagtttgtggtctgccagctaaaggtgaagatatattcctccaattcaggacccacacgacgggaa

SEQ ID NO: 349988 - DNA, 92 bp, Homo sapiens
cctgctctcacccacgaaaggcatctgtcccaagcaggagaacattgcagtgaacagagtatctgccaagcccgggcttccgtgatggtcta

SEQ ID NO: 349989 - DNA, 100 bp, Homo sapiens
ccgatgtctgcgggaataggacctatggcgtggtggcccagtactaccggcccctgcatgcccttccttctaccatgattatagtagcagtttattgtcc

SEQ ID NO: 349990 - DNA, 88 bp, Homo sapiens
tccctccgccgccgccgccttgctgctgctcaaagctgctgccgccccttgggctaaaaggttaggtcttctgaatcattaatgagtg

SEQ ID NO: 349991 - DNA, 83 bp, Homo sapiens
ccttagctgtgctcgcgctactctctctttctggcctggaggctatccagcgtagcagtagctgatgtgcagtttggccccat

SEQ ID NO: 349992 - DNA, 99 bp, Homo sapiens
gatcttcactgaggtggagatgacaacgttagagaaagtcatcaatgagacctgggccctggccaacgtcaacattgggagcctcatctgcaatgtagg

SEQ ID NO: 349993 - DNA, 100 bp, Homo sapiens
tcatcaacttcgtcttccatgattattgatgcccagatctcaatgaacgagataattgggagagacatgtcccagatttctgtttcccaaggagcagggg

SEQ ID NO: 349994 - DNA, 98 bp, Homo sapiens
caggtattgggagatccacagctaagactccaggaccctctggaagcctagaaatgagcaggttgttgccctggatgcccaaaatattgtagctgttt

SEQ ID NO: 349995 - DNA, 126 bp, Homo sapiens
acctgccagcttcaggatgcagatgggaagttcctctccaatgacacggtgcagctgaacgtgaagcgtacaggtttgcagattccgccagcagcacagcaagctctacagatgagtggctctttg

SEQ ID NO: 349996 - DNA, 148 bp, Homo sapiens
agggcccggggccgtggggcttccgcctcgtgggcggcaaggacttcgagcagcctctcgccatttcccgggaaacttggatttaactggccagaagcaggtattcaaagcagagaacaatccctgggtgacccccattgcagaccag

SEQ ID NO: 349997 - DNA, 100 bp, Homo sapiens
cttcacgaccgtcaccatggaagtgtcaccattgcagagaggcgtttccatcaaccagttttgcaaggagttcaatgagaggacaaaggacatcaaggaa

SEQ ID NO: 349998 - DNA, 48 bp, Homo sapiens
ccggcgccgcaccagcagaacggttgtggcagcactgcctgaaggtat

SEQ ID NO: 349999 - DNA, 90 bp, Homo sapiens
gaggcctccccagccacatggaactagacccactgctaaggagttattgaagcacaagtttatactacgcaatgcaaagaaaacttccta

SEQ ID NO: 350000 - DNA, 83 bp, Homo sapiens
gctgacggagatggtgcagaagatggaggagatacctgaaaaaagcggcagtctgcaacccagaagagggccttacttggaac

SEQ ID NO: 350001 - DNA, 82 bp, Homo sapiens
cgcgggtgtgtgctgcgttcacaggtgtttctgcggcagcgtccgtctccaagagagtatgaagagagtgcgtctgtagggc

SEQ ID NO: 350002 - DNA, 90 bp, Homo sapiens
catgaactagtgacctggaaagtgttcagactgcatcacagtgcttccgatacaagcgacaaaaatcgagttaaaagcagattaaagaag

SEQ ID NO: 350003 - DNA, 90 bp, Homo sapiens
tggagagggagtgatgtcttccagactcggtgctgtacccgcccggcccctttgttgctttatgcaaacagacgggacttgcgattggtt

SEQ ID NO: 350004 - DNA, 93 bp, Homo sapiens
gccatccccatcctgagggcagccctgaagctggaaccttccaacaaggattctgtttcactgaggccatctatccgatttcaaggaagccaa

SEQ ID NO: 350005 - DNA, 50 bp, Homo sapiens
tcagctggggctggatgagttggaagcatcagttcacagcagtaatgcac

SEQ ID NO: 350006 - DNA, 90 bp, Homo sapiens
caacgccagttatccaggctctgcgaaggacccgcatccgcgccgtcatggtgacaggtgatgatgaacagtctacacagatggctgcaa

SEQ ID NO: 350007 - DNA, 83 bp, Homo sapiens
ccgggcagtccctggagcgggccagggtttgccttcccggattgggcctacaagccagagtcgtcccctggctcaaggcagat

SEQ ID NO: 350008 - DNA, 90 bp, Homo sapiens
cgggcgctccggctgtaaggagccgcggcggggggaaaatggagcccttcaccaatggctgtgaatttttcaaggaatataaagatcggg

SEQ ID NO: 350009 - DNA, 87 bp, Homo sapiens
gctctcggagctgccttccaacctcagcgtcttcacctcctaccttgggcgacagatgcgaaagaaacgagttccagtgccaagacg

SEQ ID NO: 350010 - DNA, 96 bp, Homo sapiens
ttcctgggtcagtgattcccggaccctggaagagaagagggtggctaatgattaagagcatatcatgtcccgagtgggaaaatattagctgtaaag

SEQ ID NO: 350011 - DNA, 75 bp, Homo sapiens
ccgccgctcaccccgcggccgcaccttcccgccttctcaggtactgaacgacacctgggtctccttcccttcctg

SEQ ID NO: 350012 - DNA, 90 bp, Homo sapiens
ctggcttttagctgaactaaggagaaagtcctacaacagtttggcgtgcaacatggggcttgagaaaggtagggacggggtttcaccgtg

SEQ ID NO: 350013 - DNA, 75 bp, Homo sapiens
gtgatcctttgcaccctgcttggagacggacttgcttccggtctgttgcggttctcccacttttccataagcaga

SEQ ID NO: 350014 - DNA, 129 bp, Homo sapiens
gaagccatcaaactggagaccggggttgtcaaaaaactctacactctggatggaaaacaggcatagttcaacactatgggtcctcctctgaagctcttcaaaaaccagaaataccaggaactgaagcag

SEQ ID NO: 350015 - DNA, 95 bp, Homo sapiens
agctcagagttctacagagtcaccactgaacaatatcagaaagctgctgaagaggtggaagcaaagttcaagctcttgatggaaatgtgtatgat

SEQ ID NO: 350016 - DNA, 80 bp, Homo sapiens
gtccgtatgctgagaacctggagcaggaatgcggggaagctggctcttgatggaaatgtgtatgatcatctcaaggatta

SEQ ID NO: 350017 - DNA, 87 bp, Homo sapiens
ggcgggagcgcccccgatccggacaaagaaacgagcgctcgctatcagttgagggatttgcagttgataaaatggctggagaggtta

SEQ ID NO: 350018 - DNA, 75 bp, Homo sapiens
aataattaaatattcttaccgaggagaatccagctttggcggttgcaattaaaacatgtaaaaactgtacttcgg

SEQ ID NO: 350019 - DNA, 50 bp, Homo sapiens
ggccttcctgcagaagcacctcgctgctcactcccaaagcctgacaagtt

SEQ ID NO: 350020 - DNA, 74 bp, Homo sapiens
gcaggacctgggcggaggccgccaagacgggaggaaataatgctggccatacagttgttgtggattctgtggaa

SEQ ID NO: 350021 - DNA, 89 bp, Homo sapiens
cgattacccacttcgagtcctttattgtggaggtcctcagccagcagagccacgttccttatgagcaccgtgggtttatttcattttcc

SEQ ID NO: 350022 - DNA, 75 bp, Homo sapiens
ccacgcaaccccagatccatttacactttacagtctgtagcatctctgtctgttggagaaggcacaggtgtcaga

SEQ ID NO: 350023 - DNA, 100 bp, Homo sapiens
cggggtgtctcgcgcacgggccctcaggaagttggaatcgaagcctcttaaaatggcagatgacttggacttcgagacaggagatgcaggggcctcagcc

SEQ ID NO: 350024 - DNA, 100 bp, Homo sapiens
caggagtacctggaggctcaacggcagaagcttcaccacaaaagcgaaatgggcacaccacagagcaattgggtgccacgccgaggggatcagggtccca

SEQ ID NO: 350025 - DNA, 74 bp, Homo sapiens
tgggccgacctcttccaggccgcgggcgccaaaatatcgtatctactccagtgaaaatcaagctgatagacatg

SEQ ID NO: 350026 - DNA, 90 bp, Homo sapiens
ctccatacccgtgacctggggatcgctacggaccttaaaatacccgcaacagccccttcgtcccaaagaggtgtcatgggcttccaaaag

SEQ ID NO: 350027 - DNA, 75 bp, Homo sapiens
aagcaaacccggattccccgatgagccaatgcggaaatgagccgtcagactgctacagcattacctaccggtacc

SEQ ID NO: 350028 - DNA, 100 bp, Homo sapiens
aaaaatacgttgttggcctcattatcaagacgtcatctgacccaacttgtgtagagatgatgtcagttcatacagactgtattgtgtcagtgcagatttt

SEQ ID NO: 350029 - DNA, 75 bp, Homo sapiens
tcgacctgcagggagcagaggggacagaggcaccaaggacctccaagacagaacctgcacttgttgccaagtctt

SEQ ID NO: 350030 - DNA, 75 bp, Homo sapiens
gaggttgtcatagccttagctcaagcaatagaggacaagaattttgggcagatttgaatgccatgaacgtgtatg

SEQ ID NO: 350031 - DNA, 50 bp, Homo sapiens
cagtgccagaatgaattttcttggaactgaggttgcagataagtcatgtt

SEQ ID NO: 350032 - DNA, 100 bp, Homo sapiens
caacatcaaccagagcagattccagcctccacatgtacatataaattgcaggtgctgcagtgtctgaaatttccgggcctttctcaacagaggatgtagc

SEQ ID NO: 350033 - DNA, 90 bp, Homo sapiens
atttgttaaggattccaagtaactcttatttggctcacgaggcccagggaatcctctggaccatcagattaccaatgaaagaggagaatc

SEQ ID NO: 350034 - DNA, 82 bp, Homo sapiens
cgcctgccttctgccgccggccggcgcgtcgtccccacagatagcctgggctggaagctcttctacgtcacaggctgcctgt

SEQ ID NO: 350035 - DNA, 90 bp, Homo sapiens
cgcgagtgaggaaaggaggtactgtagctggggtatggccgtcaatgtgtactccacatctgtgaccagtgaaaatctgagtcgccatga

SEQ ID NO: 350036 - DNA, 83 bp, Homo sapiens
aacaaactcgaagaacagctgtggaaagaagttgcaaaacactggggcttttttccagacttcaagctcccattccaacagta

SEQ ID NO: 350037 - DNA, 100 bp, Homo sapiens
aggaaggcttgcgaagcctgcagccctgggcgtggacactgaagaggatcggggaactttctaaaacgatacgcaggtagagaggaacactgggttggac

SEQ ID NO: 350038 - DNA, 82 bp, Homo sapiens
gctgaacattgtgaacgtagtctggaagacttgcttcgagaaaggaaacctgtgaggtggagtctttcattttggatcagga

SEQ ID NO: 350039 - DNA, 100 bp, Homo sapiens
tcatcttctcccagatggtgcgctgcctcgacatcctagaagattacctcatccagagaagattggctcacagtggttgattgatcaaccccattggacg

SEQ ID NO: 350040 - DNA, 75 bp, Homo sapiens
gttagtcgcagccagcaacgaggttgtactcgtaaaacaaggatcatcgatgttgtctacaatgcatctaataac

SEQ ID NO: 350041 - DNA, 87 bp, Homo sapiens
ttcaggttgtccgagcatctgggaaattccgtcctatttcagtgttccgggaagccaatgaagatgagagtggcttcacctgctgtg

SEQ ID NO: 350042 - DNA, 96 bp, Homo sapiens
aattatgcagttgctcgatgtgcctcctggtgaagacaaggggggatatgtgatcaaagcatcagaagaaagcgtggatacccatcaacgaagttt

SEQ ID NO: 350043 - DNA, 100 bp, Homo sapiens
atatggtattcttggacaggctgtgtgtcggccggcggggattcaggttggctggctcctctggctgatggcatgttgaggtacatgggccagcggcagc

SEQ ID NO: 350044 - DNA, 90 bp, Homo sapiens
cgtgagcccgctgcaggtgtgcggcccagtccgagacagcagagctgtaggtaaaacttgcctactgatcagttacacaaccaatgcatt

SEQ ID NO: 350045 - DNA, 103 bp, Homo sapiens
cccacatgacagcaggagcgatggccgggatcctggagcactcggtcatgtacccggtggactcggtgaaggtcgcaatggaagaagagatcgccgcgctggt

SEQ ID NO: 350046 - DNA, 75 bp, Homo sapiens
ggcacacctgcacacggcagacctggagcgccacgccatcttcacagaggaaggccaggcccctgaccccagccc

SEQ ID NO: 350047 - DNA, 100 bp, Homo sapiens
agcacagtcctcccagccggtggcatggggataatcggacaatacaactctccacccttttttatggtttgctgagaagcacaactttgcaaaacccaat

SEQ ID NO: 350048 - DNA, 157 bp, Homo sapiens
catttgttggggagaagaggattggaggtgtcagtgttaaaggaacctctacaacgaaggtgaagccacggaagataagaacatccagtcatggataaaaatgagctggttcagaaggccaaactggccgagcaggctgagcgatatgatgacatgg

SEQ ID NO: 350049 - DNA, 100 bp, Homo sapiens
ggctctcggccgaagtcaagaacaagttactaaaccaaggagatttaactgaaagacggacatgagcgtgggtgctgactcctggaagagcaactctatc

SEQ ID NO: 350050 - DNA, 100 bp, Homo sapiens
accaggaaattctgaaagtccctttggccttgcagacctctatagaggagcgtgtggctcatctacgaagagtccagggtgaaaatgggatggaggattg

SEQ ID NO: 350051 - DNA, 75 bp, Homo sapiens
gaggttctgcagaaggttgtgactttagtatacaaattacatgatgcgtaatgctgtgctggcagccatggcgga

SEQ ID NO: 350052 - DNA, 100 bp, Homo sapiens
gcggggggagcggaccctgacaagttccaggagctgaaaatcctggtggactacgacgagaaaggctacctcctgcagatcttcaccaaaccggtgcagg

SEQ ID NO: 350053 - DNA, 75 bp, Homo sapiens
cgcggtaagaagctgcgcggtagcgcggtgaggacactgatgaaattcaagttaactatcctggaatgtttgaat

SEQ ID NO: 350054 - DNA, 50 bp, Homo sapiens
tttcaaagggtggtgaagaactaaggtgccagcgagatttcagattcctg

SEQ ID NO: 350055 - DNA, 100 bp, Homo sapiens
agtcagagcgagaacattccagagcttttcctccgcaaccatgtctgacaaacccgatatggctgagatcgagaaattcgataagtcgaaactgaagaag

SEQ ID NO: 350056 - DNA, 75 bp, Homo sapiens
ccaagaccgctgcagccgctggctgaatggagatcttataacaatttttgatagttctgacctttcctttgcaat

SEQ ID NO: 350057 - DNA, 100 bp, Homo sapiens
ctgtagaggagcgcaggcctggtgcaaacagactcaagaggctcggagaaccagcttggaggtgtctgcacttccatgtacaacaaacgctccgggaaat

SEQ ID NO: 350058 - DNA, 100 bp, Homo sapiens
gcgctgcagggggctgcgcctgcctgctccgccccagacctgtcggcgaaaggtgtgagccactgccccatgttgtgttgatgccaatctgccatgctag

SEQ ID NO: 350059 - DNA, 75 bp, Homo sapiens
tcaactaattggcatcatcacagctgaagggtatgtgattggcagctgtattaaacacattccaatcgcaggacg

SEQ ID NO: 350060 - DNA, 100 bp, Homo sapiens
ctgaggctctcaaagatgcccaggagaagctggagctggcagagaaaaaggccaccgatgatggatggtcacaataccactttgtagcctcgtcttcaac

SEQ ID NO: 350061 - DNA, 75 bp, Homo sapiens
aaccccgtaaagtggttggttgcagttgtgtagtagttaagggctgacaggacaactggatcagtttcattaaaa

SEQ ID NO: 350062 - DNA, 100 bp, Homo sapiens
ttttcatttccatttctaccttgtatgcctcaatttgctggatttaagcactgctgcactttatgagaaggaagaggcccagcagaagggactcgctgag

SEQ ID NO: 350063 - DNA, 75 bp, Homo sapiens
tgagctacagagactgaagaggactcaggagcaaatcagtaattgccgcagaatggaattcggcattgttcctac

SEQ ID NO: 350064 - DNA, 75 bp, Homo sapiens
caattttctgtacaccaatggaaagtgcgtcatcctaaggaacatcgactgcttatgaggtgatcaaactcaaag

SEQ ID NO: 350065 - DNA, 83 bp, Homo sapiens
cccagagccgcgccgtccgcgccgcccgttctgacgagccaaactcaggctgtaccttgagcagctcaagcaactggtgcccc

SEQ ID NO: 350066 - DNA, 100 bp, Homo sapiens
gttgtcatttcagcagcgctccacaagtggttgtgggagacaagtagccaacagtatcataactggcaacaaaattgtgaatggaaaaagctccctggag

SEQ ID NO: 350067 - DNA, 82 bp, Homo sapiens
ttttcgatccgggacggccggtcaggctcgccgccgagctggccaccagcttgggctccccacggagggcagcaagtgggac

SEQ ID NO: 350068 - DNA, 100 bp, Homo sapiens
caatatgtgccgccagtgtttccgtcagtacgcgaaggatatcggtttcattaagaatctcactctgttgcccaggctgaagttcatggcgcgatctcgg

SEQ ID NO: 350069 - DNA, 100 bp, Homo sapiens
aaaccgcgaagtcatggggctctgtcgggaaggaggctgggatgcagatggaaaaggcccttgtgtctgggacacatttactcatcagggaggagagaga

SEQ ID NO: 350070 - DNA, 100 bp, Homo sapiens
gattttattcccaacgcatggcaggccagaatggtacttcagaatcttagtcctgaagcagatttgagtccagaaaacatgatcaccatgtttccacttc

SEQ ID NO: 350071 - DNA, 90 bp, Homo sapiens
ccgcccggaggtgaaagcgggtgtgaggagcgcggcgcggcaggttattccaggatctttggagacccgaggaaagccgtgttgaccaaa

SEQ ID NO: 350072 - DNA, 104 bp, Homo sapiens
cattccagagtctgctggacgcccaggcggacgaggccgtgttagttggttgaatctggcgatgtggaacccatggatatggagggctgactatatacaccatg

SEQ ID NO: 350073 - DNA, 98 bp, Homo sapiens
ttggggccctttgggacgagtgctgtgactgtgttggatacaatgtctctttgctatatgaccttgaaaatcttccggcatccaaggattccattgtg

SEQ ID NO: 350074 - DNA, 100 bp, Homo sapiens
cggctgcgcttccgacggggcggccgggggctcagagatccaagtgcgcgccctggcgggtccggaccaaggtggcttctggcacagcagcttaattgac

SEQ ID NO: 350075 - DNA, 90 bp, Homo sapiens
gaatgatgaggtggtctaccctacctggctccatgaagatgccacagggatcctaaaatctccattggtttagccctggggctaggacag

SEQ ID NO: 350076 - DNA, 100 bp, Homo sapiens
ccatggaaacatgggttcttgtggctaccagcctggtactcctctatataatcctcactatggatgggctcattgaggacattaagcatcggcggtatta

SEQ ID NO: 350077 - DNA, 96 bp, Homo sapiens
taggacagcacttgaatggcttagggctcaaatatgatgaagatcacagtggtgatgataaagtcttcctggactgcttctgtaaaatagctgctg

SEQ ID NO: 350078 - DNA, 97 bp, Homo sapiens
cgcagaataaatcccgccgcctgccgcgaagccccggcgcaccgcaaacttcaatgactttgggaaattgctgctggctgaggccctcctggagcag

SEQ ID NO: 350079 - DNA, 51 bp, Homo sapiens
accttaacgtggagctctccaagttccgccatggagtcatagttgcagctg

SEQ ID NO: 350080 - DNA, 90 bp, Homo sapiens
caggagggcctgttccctaattcttgccgtatatggtaagcctgtaattgctgctgcccagaatcaacagcagcacccagagaacattta

SEQ ID NO: 350081 - DNA, 82 bp, Homo sapiens
cgttggctgggaccgtgcgcgtgcgcctgggggcaccgctgccgttccgagccctgggcgctgcctatggcacagccaagag

SEQ ID NO: 350082 - DNA, 101 bp, Homo sapiens
gagaatggagaagaaggttgattccagcagagtgacaaagacctcgatgatgccttggataaactctctgacagtctaggacaaaggcagcctgacccaga

SEQ ID NO: 350083 - DNA, 75 bp, Homo sapiens
agtacctgcagaaggtctctggagacatcttcagcagctacgagttccagggagctctgtcctggtgaccgtgcc

SEQ ID NO: 350084 - DNA, 74 bp, Homo sapiens
gcgtctgtctctgcggcttctggttctcacttgtcgggtgagaaggactggcagaaatacgagactgctcggcg

SEQ ID NO: 350085 - DNA, 101 bp, Homo sapiens
aggacgaatcctctcattccgttgttccagcaaccacttgtacaggagctctggacatcctgagcccaagtcccccacactcagtgcagtgatgagtgcgg

SEQ ID NO: 350086 - DNA, 82 bp, Homo sapiens
gaacgaggacgcggactgcgaaggcagctcaaactggaggattataaggatcgcctgaaaagtggagagcatcttaatccag

SEQ ID NO: 350087 - DNA, 99 bp, Homo sapiens
gccaaggaccgcttacaacttctagatcctatgaatgcactccagagcctgactggcggacctgctgcgggagccgctggaattggcatgcctcctcgg

SEQ ID NO: 350088 - DNA, 121 bp, Homo sapiens
gagccgctgctcgagctgctgctggattgaactcagagaagccgggaaccttctgataacttaagagagattctccaaaatgtggccagattgcagggagtatcaaatatgagaaagctag

SEQ ID NO: 350089 - DNA, 80 bp, Homo sapiens
ccttccacaccccctccgtgggtgtgtgttggaattgatcacaccttttcagttgtacttcaatcctgaattaatcttta

SEQ ID NO: 350090 - DNA, 75 bp, Homo sapiens
cgctgtggtacttctcgcagtccccgcgcgtggtcatccaggtggccaaggtggaatacgtcaggaagaagccaa

SEQ ID NO: 350091 - DNA, 50 bp, Homo sapiens
gataaagttgacagcagaggcagaggaggcttggagtacccataatacag

SEQ ID NO: 350092 - DNA, 101 bp, Homo sapiens
gggacggcggaaggacgcgcgcaccgaggctcagggggtccggccgcgcgccgaggagtcgcttgtaggtacatgtcccagagcaagcacacggaggcccg

SEQ ID NO: 350093 - DNA, 88 bp, Homo sapiens
gagctgtaatcaattgtgctgacaacacagcatcccagccatcactcttccacctgctccttagagaagggaagatgagtgagtcgag

SEQ ID NO: 350094 - DNA, 50 bp, Homo sapiens
ctgcctcctgcagcccccatagcagggtgtctgatgccatcaagtgttgc

SEQ ID NO: 350095 - DNA, 50 bp, Homo sapiens
cgcctcccggccgagctgacgatctattaatgagatgaagcggttggaag

SEQ ID NO: 350096 - DNA, 100 bp, Homo sapiens
cctctatcataagtcgccaaaaacaaatggggcaggaaattgggaatgaattggatgaacaaaatggtgctggagaatctggtaaaagcaccattgtgaa

SEQ ID NO: 350097 - DNA, 90 bp, Homo sapiens
tggggctaactccagaatcccccattggtaggcgaaaaccaagagtacatcggcctcgttctcctatattggaagaaaaagacatcccgc

SEQ ID NO: 350098 - DNA, 75 bp, Homo sapiens
ctggaacttgccctgtctcctcgcagatgagcatcaacaacagcaacttgtgattggcggtgaccggatattcag

SEQ ID NO: 350099 - DNA, 75 bp, Homo sapiens
ccccttacctcctctctctggctcgggagctggctttgccagcgccgagtaccaggaggccctcagcaggatcac

SEQ ID NO: 350100 - DNA, 80 bp, Homo sapiens
gtcaagagggaatcttatgcaagagaaagaaggacacattcagctaacgtattttagcaggtggagtgaggttgaagatt

SEQ ID NO: 350101 - DNA, 75 bp, Homo sapiens
acaaagctgcgatcacctccttggacctcagccccaacggcaagcaacttgctgtgattgggttattatacccct

SEQ ID NO: 350102 - DNA, 100 bp, Homo sapiens
aaacagtggataattttgtggccttagctacaggagagacaacaaatgaagttgttttggctgtggagtttcacccaacagatgcaaataccataattac

SEQ ID NO: 350103 - DNA, 83 bp, Homo sapiens
ccctcatcctggttctggaatcctcagttcaagaatgtcaagctgtcagctgaggtggagccatttattccccagaagaagag

SEQ ID NO: 350104 - DNA, 94 bp, Homo sapiens
cgccgcgtgtcctcggagcgcggtccctgtattggtctcctgctcctagaggttgcacagtgaattaaaagatgctgttgaaaaaaaattggag

SEQ ID NO: 350105 - DNA, 75 bp, Homo sapiens
cgagatccgggccgtgaacgaaagcagtgacggaggagcttgtaccaccgatgtatccagttaaagcaggcaata

SEQ ID NO: 350106 - DNA, 100 bp, Homo sapiens
ttctccgagccagcgagccagcgagccgccgacccgccgagcaaaatggttttaaaatcaaagatgggaaaatcggagaaaattgcccttccccatggcc

SEQ ID NO: 350107 - DNA, 75 bp, Homo sapiens
actgagagttcccaattaataatgaagcagagatggatttataaaagctattggtcctgctgatgttattcaaag

SEQ ID NO: 350108 - DNA, 50 bp, Homo sapiens
cgaaactttcaccgcgagcggtttggaaattttagcattcaggtgccagg

SEQ ID NO: 350109 - DNA, 88 bp, Homo sapiens
tataccttcacccagcatttcatccctcgtcgaaaggattggattggcatctttagagtgcgaagcccagcggtgcagagtccagcaa

SEQ ID NO: 350110 - DNA, 100 bp, Homo sapiens
cggaggaggaggaggtggactctgccgacaccggagagaggttcctgggtggagctacccatgaacagcagcaatggcaatgataatggcaatgggaaaa

SEQ ID NO: 350111 - DNA, 100 bp, Homo sapiens
gctgtgaggctcgtcttccaggacttcgacctggagccgtcccaggactgtgcaggggactctgtcacagacagagcgggatgccaccagcttgtccaaa

SEQ ID NO: 350112 - DNA, 90 bp, Homo sapiens
tgacgttcctgtctaaggaaatgtgacagagttagtccttgataattgcctgtgtgtcaatggggaaattgaaggcctgaatgatacttt

SEQ ID NO: 350113 - DNA, 90 bp, Homo sapiens
aatatcggattcctctgccaatgaccgtggaggagtaccgcatcgcccagctgtacatgatacagttaccggtattgtaagaacaagccg

SEQ ID NO: 350114 - DNA, 75 bp, Homo sapiens
tctattttgcaccagacctagtctttaatgaatgttagtaggcaggaagaggcggagggagagctcagtgaagga

SEQ ID NO: 350115 - DNA, 85 bp, Homo sapiens
ggactttattgattgcttcctgatcaaaatggagaaggtctgcaataatttccctctactcattgattgtttcccaggaactcac

SEQ ID NO: 350116 - DNA, 95 bp, Homo sapiens
agtgagagccggacgggcactgggcgactctgtgcctcgctgagggtatataatgtttacatggcagggaggcagctgtgttctaagcggtaccg

SEQ ID NO: 350117 - DNA, 99 bp, Homo sapiens
gtccggataagccgggcgggagcccctcggccagatggcctaccaggtggtggagaagggcgcggccctgggcacgctggagtcggagctgcagcagag

SEQ ID NO: 350118 - DNA, 100 bp, Homo sapiens
gggcaatcaagttggcaaactttatgtttgggatttagaagtagaagatcctcataaagccaaaagtctctattatctgggggaatgtatcagaatttgt

SEQ ID NO: 350119 - DNA, 96 bp, Homo sapiens
cgaagctggccaaagcctgcccagacggctcacctgtgcgggatggaacaaaagaactgggcacctccgggctgtgaaaagttagggaagtgtctg

SEQ ID NO: 350120 - DNA, 100 bp, Homo sapiens
gatggagaaattccaagttcagattctccagtttcagagtcaagtggtgagatcaaagacttttcaccaaaaaatgtcatttatgatgactcatcccagt

SEQ ID NO: 350121 - DNA, 74 bp, Homo sapiens
gctgtcggcactgtaactctgaattctctgagctggtgacaggtgccacaggcactggggatctcaccagaaag

SEQ ID NO: 350122 - DNA, 62 bp, Homo sapiens
gaaaggaaggaatatatcctgactgattgaatgaatctgaagtctgctgcagtaaaacacag

SEQ ID NO: 350123 - DNA, 100 bp, Homo sapiens
gctcgtgctgtcttggaaagagaatttaacaaccttttggtcatggggactgatagaaggtttgatgaaatggagtttgacgagaaggacttacgacggg

SEQ ID NO: 350124 - DNA, 75 bp, Homo sapiens
tcaggccagtcgcctccaggccaagagggatccttcacccgtgtctgtgttgttacagatcttataacagtcggt

SEQ ID NO: 350125 - DNA, 100 bp, Homo sapiens
ggagagcatgtcggaggctgatcgcgcccagaaggatttttgtccctgagtcatggaagacagaagagctgaaaagtcatgtgaacaagcatgtgaatca

SEQ ID NO: 350126 - DNA, 75 bp, Homo sapiens
cgggagtattatgaaaagatcgaagcgttgggagatgttgtttattgtagtctccctgaagttgggacaaaattg

SEQ ID NO: 350127 - DNA, 51 bp, Homo sapiens
aggagctttcgaggagagaacgcaagtgcagccgcggagccctgtacacag

SEQ ID NO: 350128 - DNA, 89 bp, Homo sapiens
cgttaaagtctctcttcaccctgccgtcatgtctaagtcagagcaaagtggaagatgctttctacaaaggtgaactcaggctgaatgag

SEQ ID NO: 350129 - DNA, 82 bp, Homo sapiens
gtctggctgggcaagcactacaagaagggctgaagaagatgcagagcagcctgaagctggtggactgtatcatcgaggtcca

SEQ ID NO: 350130 - DNA, 100 bp, Homo sapiens
gatcctctgttgaagcaagaagacaaactgtatggtggagaaagaagtgggaaggatctgcgcgggttcactaccttatggttctgtctgccaactgggc

SEQ ID NO: 350131 - DNA, 100 bp, Homo sapiens
gcccccagcacgccgccgagtcccgctcgccatggagttgtggaaagtaaaaatgtagccctaccaaaaggaactattgtactggcttctccaggctgga

SEQ ID NO: 350132 - DNA, 98 bp, Homo sapiens
gggcgtacgggcctcttttgaaagcctgagttacgatgtattgagcgcgtcgtatgcggccagcactaaggtgatctacatgggccgcaacccccggg

SEQ ID NO: 350133 - DNA, 74 bp, Homo sapiens
ggacaagtcgccggcggcgcccgacggagcagacttatgaaaatatgcatcagtttaatactgtcttggaattc

SEQ ID NO: 350134 - DNA, 75 bp, Homo sapiens
actggaacccactcggggactctgccttttaccggacctacaagaacagtgaggagcttcggtctcgtattgtgt

SEQ ID NO: 350135 - DNA, 82 bp, Homo sapiens
ctcatcctggcctacgtcatcggctgtcattcttctctacagaagagcttctcctcatcaactggggatgattacagttctt

SEQ ID NO: 350136 - DNA, 88 bp, Homo sapiens
ccgaaagattcgggccagagacgacaacccgggcctccgagacggcaaatggatacatcttgttttttcatattacatctacaagagg

SEQ ID NO: 350137 - DNA, 82 bp, Homo sapiens
agacaaagggacgcttctacacagacagcaatggccgggagatcctggagaggagatggagtttgacgagaaggacttacga

SEQ ID NO: 350138 - DNA, 75 bp, Homo sapiens
ttccagcttcggaacaagagaccctggtggatccataaagaacccagccaacccgcagagggaggggaggggctg

SEQ ID NO: 350139 - DNA, 83 bp, Homo sapiens
atattcccaagaggatctggggagatgatgacacgttctccagttaagaaatgcattgacattctaattgagaaagaatattt

SEQ ID NO: 350140 - DNA, 100 bp, Homo sapiens
ttctcttttcccgttgaaggtgctaccgctgacgacacccctggtggatggcgaggatgagagtagtgagttgaaactcttggaggaagcaaccatttca

SEQ ID NO: 350141 - DNA, 88 bp, Homo sapiens
tcttgatgcttgctttattagtgtttatactatggaaggttgctccttgagggcaggacagttcttatggctttatccgttgcgtaag

SEQ ID NO: 350142 - DNA, 100 bp, Homo sapiens
ctacaaggaatctgagggtgccctcaatgagcacatgaccagcttagcttctgtcctaaagatgtttctttctcagcaaaatagaggagaagcttacccc

SEQ ID NO: 350143 - DNA, 50 bp, Homo sapiens
gtcgcgcggaggcggaggcttgggataaacttctgcactggaggggcctc

SEQ ID NO: 350144 - DNA, 75 bp, Homo sapiens
caaaatctgtacctggctggaaatcaaagtccaccatgtgcttttgcacatccacttgttctaaagacgaagggg

SEQ ID NO: 350145 - DNA, 75 bp, Homo sapiens
cggaggagccgcgagcgctgaggaactgccattggatgtccagaatcccctgtagttgataatgttgggaataag

SEQ ID NO: 350146 - DNA, 98 bp, Homo sapiens
aatgatccatttgccaatatataggcatctccgaagatttattttgtcagtgaaagtggaagatgcgaagattgcaattctcacatgtccatttgaac

SEQ ID NO: 350147 - DNA, 90 bp, Homo sapiens
gttgaccagagttcaagccgtggaccccgacattgtgtgagtgaagacactcaggatggctcaaggatccggggatcaaagagcagtggg

SEQ ID NO: 350148 - DNA, 87 bp, Homo sapiens
ctgccggctgtgcgggcgctccggagagaccgacagaagttctcgaggctggacagtccaagatcaaggtgcctgcatctggcgtct

SEQ ID NO: 350149 - DNA, 112 bp, Homo sapiens
cgtctgcccggccaagaggcaaaggggaggttacgcagcaaaccatccagaaggctgaccccgcactacatctacccaccagccatcgtgcagcccagcgtggtgatcccag

SEQ ID NO: 350150 - DNA, 101 bp, Homo sapiens
ctacattccagttaagagcaacctgagcgatctgctagaaaaacttaaatgggcgaaagatcacgatgaagagggaagtgttcgccagttactacatgaaa

SEQ ID NO: 350151 - DNA, 50 bp, Homo sapiens
ctgtgcctcaacaaccatttctaagtggtggaatatgtgatcaagtgtga

SEQ ID NO: 350152 - DNA, 90 bp, Homo sapiens
gcgctgtcgtgctcctctactcgacaaagccacagacccaagcatgtcggaacaggattggtcagctatccagaatttctgtgagcaggt

SEQ ID NO: 350153 - DNA, 100 bp, Homo sapiens
cccagccatcatggtgtccaacatgctagcacaggacagccacctgctgtcgggccagctgcccacggtgaatggaagagaatccgaagaagaaaatctc

SEQ ID NO: 350154 - DNA, 50 bp, Homo sapiens
aaatacccctttgaattaattatggcttctttaacacctctgtgtgaaga

SEQ ID NO: 350155 - DNA, 78 bp, Homo sapiens
acactaccactgctggcgctgaccttcatcacagacaacagcctggtggcagcggcatacttctccgccttcccacca

SEQ ID NO: 350156 - DNA, 96 bp, Homo sapiens
ccgggaggtgcttctgcggctgtacggagccatcttgcaggcgggcaaaactgttccgatttgcctctgagaacgatctcccagaatggaaggagc

SEQ ID NO: 350157 - DNA, 135 bp, Homo sapiens
gcaaatctgtctgcaaaggtgctgagctgtgttgatcaactgaagcccgtgacgtctcatccttgcagttggagggtgttttgaatgctgtatcaaatgcctggggggcattccctatgcctctctgattgccac

SEQ ID NO: 350158 - DNA, 75 bp, Homo sapiens
gagggctccgtcaatggcttcatcagcactttggggccgccatggcatcagatgaaggcaaactttttgttggag

SEQ ID NO: 350159 - DNA, 100 bp, Homo sapiens
gtttttcttgagaattgatggggtgcttatcagaatgaatgacacgagactttaccatgagccgccgccatgtctgcgcatctgcaatggatggtcgtgc

SEQ ID NO: 350160 - DNA, 49 bp, Homo sapiens
gggaacccaggccccgccgaggcggccagcttgccttgcgccatggact

SEQ ID NO: 350161 - DNA, 98 bp, Homo sapiens
gtgctgggtatggaagctatgggtacggaggcaactcggcgacagcaggctacagaatataaatagtttctggaaaggacactgacaacttcaaagca

SEQ ID NO: 350162 - DNA, 83 bp, Homo sapiens
gagctgggcgcggattcgccgaggcaccgaggcactcagaggagcagaaaaatatggctcaggagactaaccagaccccgggg

SEQ ID NO: 350163 - DNA, 100 bp, Homo sapiens
gtcgccagaaggaagatggcggatctggaggagcagttgtctgatgaagagaagtgcttagatgagtacgaagatgatgaagcagggcagaaagagcgga

SEQ ID NO: 350164 - DNA, 82 bp, Homo sapiens
ttcatgagtgttcctgtggtctctgcacctcctttctagtgtgacaagtttaaccaatgtgggacatgcaatgaattcaaag

SEQ ID NO: 350165 - DNA, 75 bp, Homo sapiens
ccatggtacacaatggttatggatttttctaccatatcagagatgacaggactttttttatgaagacatggagtc

SEQ ID NO: 350166 - DNA, 50 bp, Homo sapiens
cagtccatcaagcaactgaagggtcaaatctgtgtgccaatgtcagtgga

SEQ ID NO: 350167 - DNA, 74 bp, Homo sapiens
ctgccgccatacgcgctctccctgtttaggacagagcgggatgccaccagcttgtccaaagggaagttccagga

SEQ ID NO: 350168 - DNA, 100 bp, Homo sapiens
tcgacttggttacctgcctgtccagacagttcttgaaggtgacaacttagagacagttcctggaataactattgctacagatattatctgtggttttcct

SEQ ID NO: 350169 - DNA, 75 bp, Homo sapiens
aagagtgggcggcctgaagagctggtgtcctgcgcagactgtggacgctctggtactactgagcgagtgtgcttg

SEQ ID NO: 350170 - DNA, 98 bp, Homo sapiens
ggacttcagcagcatcatccagacgtgcagcggcaacatccagcggatcagccaagccagtctagtgacggagcccgcgcgcggcgccaccatgcggc

SEQ ID NO: 350171 - DNA, 88 bp, Homo sapiens
aacaggccagcaaaacactcagctgcaagtccaaagccacaaggacactctgattgtgtggtctgaagcagaaaattatgacttggcc

SEQ ID NO: 350172 - DNA, 100 bp, Homo sapiens
ctctgcctccctccaggaccagcactgcgagagcctgtccctggccagcaacatctcaggttgaaatcacaaagattagacacctttttagataggtgtt

SEQ ID NO: 350173 - DNA, 100 bp, Homo sapiens
gtccgccaggccctgcaggacctgctttcggagtacatgggcaatgccctcctcacagtgggaagactgctttagctgcaaaaattgcagaggaatccaa

SEQ ID NO: 350174 - DNA, 95 bp, Homo sapiens
gatctagaagatgggaacttccttaaacttgcaaataatggcactgttctcagcacccagtcagcttgaagagtttcaaatggaccctaccactg

SEQ ID NO: 350175 - DNA, 50 bp, Homo sapiens
cccggtgcagctagaagtccatatcggagcagtgaggagaatgaatacct

SEQ ID NO: 350176 - DNA, 100 bp, Homo sapiens
tggaggcggcggagcgcgagagcttcgagcggactcaggtgctcttacagcctgttccaagtgtggcttaatccgtctccaccaccagatctttctccgt

SEQ ID NO: 350177 - DNA, 98 bp, Homo sapiens
gaggagcagctggaagccgtggctgcgctctcttccctctgctgggcgtcctgttcttccaggaatgctgcgtttttatatggccttggtttggtcta

SEQ ID NO: 350178 - DNA, 75 bp, Homo sapiens
catgaagcgcaccccgactgccgaggaacgagagcgcgaagctaagtggggggactgcaccgttttcccccaaca

SEQ ID NO: 350179 - DNA, 97 bp, Homo sapiens
tggtcgtgttcgtcctcggcggccccggcgccggcaaggggacccagtgcgcccgcatcgtcgaggatgatcacggacgtgcagctcgccatcttcg

SEQ ID NO: 350180 - DNA, 98 bp, Homo sapiens
caacttcagggttggcaagaagataggatgtgggaacttcggagagctcagattaggaaagaccacagcaagattctttcattcgtctcctcctagcc

SEQ ID NO: 350181 - DNA, 100 bp, Homo sapiens
cggagcgcggtccctgtattggtctcctgctcctagagaatgtgaaaacctttgcatcttctgatagtctagccaaggtccaagaagtagcaagctggct

SEQ ID NO: 350182 - DNA, 83 bp, Homo sapiens
cttcgcggcgcgtcctccgcagaggcccccgacggagacaaggacgtgcctccggagccagcgtggtggccatagacaacaag

SEQ ID NO: 350183 - DNA, 138 bp, Homo sapiens
aggtgatggcaacggccaacttcggcaagatccagatcgggatttacgtggagatcaagcgcagcgatgtgtatgtggtagaagaccaaagaagagatgagctaggaccatccacctgcctcacagcctgctggacgg

SEQ ID NO: 350184 - DNA, 101 bp, Homo sapiens
ggaggacacacctaaacatgtggaatcccaatgccgaaactggcagacctttcacttcgtatccaacaaattgaaacaactctcaatattttagatgcaaa

SEQ ID NO: 350185 - DNA, 98 bp, Homo sapiens
cagttcctggagaaggatgccactctgacagagcacgtctacaagtcccggaagattggccgtatcctggccgttgaccgcctgtgcctgggtgtgcg

SEQ ID NO: 350186 - DNA, 100 bp, Homo sapiens
ggctcggagaaacaggcgccgcgggctccgcgcccggccggacccgggcccgagagatggagttttgccatttgcccaggctggactcgcagtcctggac

SEQ ID NO: 350187 - DNA, 101 bp, Homo sapiens
agggccgtgatgttggagaactacaggaacctggagtctgtggtggtgctgattactatgattacggacatggactcagtgaggagacttatgattcctac

SEQ ID NO: 350188 - DNA, 78 bp, Homo sapiens
aaaaaccccggagtcttcctgatccatggacccgatgaacatagacacaggctgaccaactgactgaagagcagattg

SEQ ID NO: 350189 - DNA, 78 bp, Homo sapiens
gaggacctgcaccgccaagccaagctcaacctcaaatcagtactgagggatgcgtctgttactagagtggagagtcta

SEQ ID NO: 350190 - DNA, 100 bp, Homo sapiens
ttatatgctttcctatttagttgggagaccagttgtatacaaatacctaacagagaaagcagtaaaatggtcacagcagattttgaagatgtaactgagt

SEQ ID NO: 350191 - DNA, 100 bp, Homo sapiens
ggcagcgtcgtcgcttcactgtggctcatacatggtatttatgagcctccatttcttatactactgcagtgaaccaacattggatgtgaaaattgccttt

SEQ ID NO: 350192 - DNA, 83 bp, Homo sapiens
gcggcggcttcgcggcgcgtcctccgcagaggcccccgacggagacaaggacggctggcctgccactcctcctgctatgatgc

SEQ ID NO: 350193 - DNA, 93 bp, Homo sapiens
cttctctgtcagctctttccccgtcagcatcccagccgtgctcacgatgtgaagttcatttccaatccgccctccatggtggcagcggggagc

SEQ ID NO: 350194 - DNA, 100 bp, Homo sapiens
cccgtatctttcactgacatctggggatgtgaccaagcgccttctcattcagaagaactgcctcctcttgctcaagacagacattgggtgtaggacagtg

SEQ ID NO: 350195 - DNA, 100 bp, Homo sapiens
gggtggcgaacggggcgagcctggaggattgtcactccaacctcttttcgctggtaaaaatgtctccatcgtatcatcagtccaaaggggatcccactgc

SEQ ID NO: 350196 - DNA, 75 bp, Homo sapiens
aacctgcggaatggactttaattgctatggtgttgctgtcattttcttcagtgccctactccacagccaaaacac

SEQ ID NO: 350197 - DNA, 90 bp, Homo sapiens
cctgtacagcctgcagaactatagggatgaggaagaaatgaccaaacgagatgacaaaagagatatcaacagatactgcaaggagaggcc

SEQ ID NO: 350198 - DNA, 114 bp, Homo sapiens
gcgagtttccgatttaaagctgagctgcgaggaaaatggcggcgggagcttagaccatgctcagcctccaagcagccttgtcatcgacaaagaatctgaagtttacaagatgct

SEQ ID NO: 350199 - DNA, 100 bp, Homo sapiens
agaaccatcacctgcattggttccatccttgactgttactacagaaaaagacagggtgtgggccaatgtggggaagagcctgaactgcattattgctatg

SEQ ID NO: 350200 - DNA, 75 bp, Homo sapiens
gtcacagacctgcccaatgcctttgatggaccaattaccataaggtgaaaatcctatttataagagtgccgtaac

SEQ ID NO: 350201 - DNA, 74 bp, Homo sapiens
aattgcaacaggattcagaaatcatggaaagcaggaagggaggcaataataagttaataaagatctatcaccgg

SEQ ID NO: 350202 - DNA, 75 bp, Homo sapiens
agttgcagatacaaacttggattttttccagtctgatccttttgttggcaaatctacctgttactcgtattttgg

SEQ ID NO: 350203 - DNA, 98 bp, Homo sapiens
ttagggctaaatccaaatgctgattcagactttagacaaagggtgtgcaagcatttcctggaagctattgaaaacaacaagtatggctggttttgggt

SEQ ID NO: 350204 - DNA, 50 bp, Homo sapiens
acgaaaggcatttttactgctggtgtgaaatctaagaatcccctgccaac

SEQ ID NO: 350205 - DNA, 50 bp, Homo sapiens
gagctcgagaaagaagcattcattggtgcccctgggcgctgggattgctc

SEQ ID NO: 350206 - DNA, 96 bp, Homo sapiens
cgccctggcctccctcaccttggacacctcgcttgggtcaaaatgcagatcttcgtgaaaacccttaccggcaagaccatcacccttgaggtggag

SEQ ID NO: 350207 - DNA, 75 bp, Homo sapiens
tcgagagactactggacattatttcagaggaggggaacagtgatggaggtaaaatgtccagtgatcgagctttga

SEQ ID NO: 350208 - DNA, 100 bp, Homo sapiens
gccgatccatgaaaatgctttggaaattgacggataatatcaagtacgaggactgcgagaatggccaacatgcagggactggtggaaagactggaacgag

SEQ ID NO: 350209 - DNA, 90 bp, Homo sapiens
ggaggagccttctcaagaacagagggataaagtaattcctaataaagtggggacatattgtatccagtttggttttatgatggataaaac

SEQ ID NO: 350210 - DNA, 125 bp, Homo sapiens
ctaccctctactttgtattttgtgtggattcctcagagagtgaacttggaatcttggacctcatccagttgactaatctccttcagaatcaagcagtgaaaggaaaagttgctggagcactcctg

SEQ ID NO: 350211 - DNA, 100 bp, Homo sapiens
cggtggactgagagatggctattatatccaaggaaaatttctaccttgaaccgtatctgaaagaggttattcgggaaagaaaagaaagagaagaatgggc

SEQ ID NO: 350212 - DNA, 73 bp, Homo sapiens
agaaaacattttattaaggatattcgtcatcttcctgataacttcaagtgatgtacgaaaaggtttggagttc

SEQ ID NO: 350213 - DNA, 90 bp, Homo sapiens
tgacagcactgtagaacagctttatgaaacagcttgcttcctacaggagtagatcccataatagatcacgttcaagacagaaagacagac

SEQ ID NO: 350214 - DNA, 100 bp, Homo sapiens
gcctcccgggccacagggacccccgggagaaatagactatgaagaaatcgggagtgcactttttgactgtagattgttcgaagacacatttgtaaatttt

SEQ ID NO: 350215 - DNA, 90 bp, Homo sapiens
gaaaataagggagttcctctgcatgggggtgatgaagacagaccctttccagcattcagcctgtatatggagcacagcatcctcctcttg

SEQ ID NO: 350216 - DNA, 100 bp, Homo sapiens
taaacagaaatcaccttcagctgtttcctgagttgctgtttcttgggactgcgaagctatacaggctgctaatcttgcacaactattgagagattctcag

SEQ ID NO: 350217 - DNA, 75 bp, Homo sapiens
ccgccagtcaataggaagtacgagtgaattgaatgatctggcacgggaccctccagcacagtgttcagcaggtcc

SEQ ID NO: 350218 - DNA, 75 bp, Homo sapiens
gagcgctgcaggtgcgcaccgggaagttcagacctgcctagagctggaacgttacctccagagcgagccctgcta

SEQ ID NO: 350219 - DNA, 87 bp, Homo sapiens
tctgcgaaggccgggacccggttccccggcccacagtgggggtgtgcaaacccgagagaactggacatagggcctgattacattcca

SEQ ID NO: 350220 - DNA, 82 bp, Homo sapiens
tcattttctttccctgcaccaactagcaggtcctatcagcagtatcctggtgaataaatatggaagtcgtatagtcatgatt

SEQ ID NO: 350221 - DNA, 100 bp, Homo sapiens
tcccgggccctgcgccctggggcttcaggctctcagggggcatagacttcaaccagcctttggtcatcaccaggtggtggtctcaaggaaaacgacgtca

SEQ ID NO: 350222 - DNA, 100 bp, Homo sapiens
cctgcctccgccggctacagcgggaagagcgggtttgccttcccggattgggcctacaagccagagtcgtcccctggctcaaggcagatccagctgtggc

SEQ ID NO: 350223 - DNA, 98 bp, Homo sapiens
ataaaaaacattatttaatctatctgggatttactccggcttatgatttgaggaatagcgggttttgcagcaattgttgcatatggattatataaact

SEQ ID NO: 350224 - DNA, 82 bp, Homo sapiens
acctgtgagatctttgcctggtgcccgttggagacaagctccaggccggaaaggaagaggcccagcagaagggactcgctga

SEQ ID NO: 350225 - DNA, 82 bp, Homo sapiens
aagatcatccgcaaggaaataccagccaaaatcatttttgaggatgaccgggatgagacctgcacgcagtggctcacagcag

SEQ ID NO: 350226 - DNA, 83 bp, Homo sapiens
gggaattttgcaaaagtaaaattggcaagacatatccttacaggcagagaggtgctgttacactaccaaactgtcagtgaacc

SEQ ID NO: 350227 - DNA, 134 bp, Homo sapiens
tactgtgcagctccagagagacgtgaaacatgtgaacactcaagtgaagcaaaagccttccatgattacggccaaaagagaaacattggctactttgacaaccttaaagcggactccaggaatatcaccaacag

SEQ ID NO: 350228 - DNA, 75 bp, Homo sapiens
aaaggaaaaacccacaaacatgttcacaacgggcatgctcatttagaggcgagttttgaggaggtagagaacaac

SEQ ID NO: 350229 - DNA, 74 bp, Homo sapiens
gatggggaacccctgagccgcatggactcggaggacagatgttgcaagagcaattgaattactggaaaaactac

SEQ ID NO: 350230 - DNA, 87 bp, Homo sapiens
caaccagccacagatactattaggaggataccccatgtttccccatcactcgaggagtctgggcagagactggactacaccgtggga

SEQ ID NO: 350231 - DNA, 105 bp, Homo sapiens
gtccggctgctggatggaggggattttgtcagcttgtcgtcaaggtcaaaatgcagatcttcgtgaaaacccttaccggcaagaccatcacccttgaggtggagc

SEQ ID NO: 350232 - DNA, 100 bp, Homo sapiens
ggattccccgggacggggccttcctgatccggaagcgagaggggagcgactcctatgccatcaccttcagaactctccatccaaccgtctctcaacgcca

SEQ ID NO: 350233 - DNA, 75 bp, Homo sapiens
aagcagtgttcatggagttcattgaattatggcatagatcttgggaaaattgcgacatgggatgtagagctggaa

SEQ ID NO: 350234 - DNA, 140 bp, Homo sapiens
tccagtcgtcagcccacttcctagctgaacagcgcgaggcggcggcagcgagccgggtcccaccatggccgcgaatgtggtccagcatgacccatgtcggggcggagcagggtattggaacagccttttccgtttcaagc

SEQ ID NO: 350235 - DNA, 75 bp, Homo sapiens
cttctccgtgggcagcattggcgaccagcgcttcacggtgaaaaaccttttgaatgtccaaattgtcatgaacga

SEQ ID NO: 350236 - DNA, 100 bp, Homo sapiens
ttacgcggatgtcggcgaagagttcaaccagatgctgtctttgcaggtgccatgcctacaatggcaagcatcaagctgtctacacttcatcccattgtga

SEQ ID NO: 350237 - DNA, 75 bp, Homo sapiens
gctgattgaggctgccaagaggaacgacttctgtaaggtacaagcccccgccgagcgaatgtaacccggccttgg

SEQ ID NO: 350238 - DNA, 75 bp, Homo sapiens
ggcggccaaggacctggccgacatcgcggccttcttccgatccgggccatcgatgcacccctcggagctaatagc

SEQ ID NO: 350239 - DNA, 90 bp, Homo sapiens
ctcgggtggtcgggaacccctttgatagcaagaccgagcaggggccgcaggtggatgaaatctacacagtaccagaggtggggactgttg

SEQ ID NO: 350240 - DNA, 50 bp, Homo sapiens
cagcaagctcactcgcctattgcagggtctttgtccccgattacacgcgg

SEQ ID NO: 350241 - DNA, 100 bp, Homo sapiens
tgaatgtgtataaatctgaggattcacttggtctcaccattacagataatggtgttggctatgcttttataaaggagggacagttctctgctccactgaa

SEQ ID NO: 350242 - DNA, 110 bp, Homo sapiens
cacacttgattctcttatacgctacttttactcagagtttgaaggttgtgaccaaaagaggctccggcttcattccagcgctccaatagtcatgacaaagtaaggagaat

SEQ ID NO: 350243 - DNA, 100 bp, Homo sapiens
ggggatagtgtcatcggttcggtaaagtttctgttctctgtttggtgccctggttgtcagatgttggaaagcagtaggacggaacatactcttcgtggtt

SEQ ID NO: 350244 - DNA, 83 bp, Homo sapiens
tttgccaagcaaaacagtttccaccacatgtgatgctgatccttcagccttagccaactatgttgtagcactggtcaagaagg

SEQ ID NO: 350245 - DNA, 82 bp, Homo sapiens
cctggttaatcaacagtcttttcaggtctcagctgagtctgctctgatcacccaacaagacctagctccccagcagagagcg

SEQ ID NO: 350246 - DNA, 101 bp, Homo sapiens
cccgaggtccctctttggggtggctctttgctaagtgctgctgttgcttcccgtgtagaggtatggcatttcaaatatagatacaaccattgaaggaacgt

SEQ ID NO: 350247 - DNA, 100 bp, Homo sapiens
gctgccgtctcttaccagccagccccaccaagtgctggccagtgagcccatcccgttctctgatttgcagcagaatcaggaaacccaggcccaacggcag

SEQ ID NO: 350248 - DNA, 82 bp, Homo sapiens
gaggaagctacacttttcaccaaggaactggtgctgcagcgagaggcagcaatgaatgtggatcacgaggttaacctcttag

SEQ ID NO: 350249 - DNA, 100 bp, Homo sapiens
caactcttcgttcgattattagctttagtgaaatgggctaataatgctggcaaagtggaaaaatgtgcgcgtttatgtcatggttggtgcagatgtcccg

SEQ ID NO: 350250 - DNA, 51 bp, Homo sapiens
cttggatcttgcacaggaaggaattaaagctaaaccaggtggacaggtgaa

SEQ ID NO: 350251 - DNA, 75 bp, Homo sapiens
aatgctaccctgctttttctggtgtcctgaacctggaagttgtgctttttaaggaaaatatatgcagatgatgaa

SEQ ID NO: 350252 - DNA, 90 bp, Homo sapiens
ctaaaaacaagactggggctgctcccatcattgatgtggtgcgatcgatagtccactgtgtgcagaggcatgggagttgtcatgttggga

SEQ ID NO: 350253 - DNA, 95 bp, Homo sapiens
tcaagcacgaggacacaaaccttgcctccagcaccattcaatcatatttgatgaggtggatctgacagatgccagcgtagctgaatccagtacca

SEQ ID NO: 350254 - DNA, 74 bp, Homo sapiens
tagtggtgtggatcagttggtagaaataatcaagggcgaactttctgaccaagtatacaactacccagagggcc

SEQ ID NO: 350255 - DNA, 100 bp, Homo sapiens
tctgcgccgtggaagccgtgatcaggagttccaccatcttcctctgaagacgtagccatcttgctccatgaaggtcaggacaatctgacatgcacttgtt

SEQ ID NO: 350256 - DNA, 51 bp, Homo sapiens
ctcggccgccatggtcttcagcgaattggctgtgaaaggactgaggcagcc

SEQ ID NO: 350257 - DNA, 88 bp, Homo sapiens
ctgtctgggtctcagccgccaaagaccccgtccggtagttccagggtctccctccactgctgtagtaacccgggtccggggcctcggt

SEQ ID NO: 350258 - DNA, 75 bp, Homo sapiens
cctggacgacgcccggcgccagcacatcgcaggtgctgcccaccaaccctgaggagagctggcaggtgtacagct

SEQ ID NO: 350259 - DNA, 75 bp, Homo sapiens
gaagacaatgttctccaaagataaggaaggatcgagatcgagaccgggatcgtgaagatcggtctaaagatcgag

SEQ ID NO: 350260 - DNA, 100 bp, Homo sapiens
tctcacaaagatctattaagattgtcacatcttaaaccttccagtgaaggtgctggtaaaccgcctatgtttggtgattatgaagctcagagacactggc

SEQ ID NO: 350261 - DNA, 75 bp, Homo sapiens
attgatattattacagcttcatatgcaccagaaggagatgaaggttcgatacaagaggctgttttcctagcgtgg

SEQ ID NO: 350262 - DNA, 87 bp, Homo sapiens
gccggccccctgcctgcccgcgcctagaccccattcaccgcggcgagtcctttgcacatgttggcaacacacgcatccgcatcggcc

SEQ ID NO: 350263 - DNA, 82 bp, Homo sapiens
tgatggacgtcccaccgggcaggatgaaggcagagcgtgtggcatctccacctcaagggtgtactttcggctccatgcttcc

SEQ ID NO: 350264 - DNA, 90 bp, Homo sapiens
tgttactccattgctgaggagtggagagaagatgactgaggaggaggtggagaccgttctggcaggacacgaggacagcaacggctgcat

SEQ ID NO: 350265 - DNA, 83 bp, Homo sapiens
gttcttgatcgctgcagcaaatggcaacttgtgcagaatgtatgacaacatgtccacaatggtgtacataaaggaagacaagt

SEQ ID NO: 350266 - DNA, 78 bp, Homo sapiens
gcaaagttgaccagatccgagccagagtggagcgtaacgcagtgaagtgaccggggaggtgcgtcctcatcatgggaa

SEQ ID NO: 350267 - DNA, 51 bp, Homo sapiens
gacttccccaaggcgtgtacccagctgttctgtaggaagttatacaatcaa

SEQ ID NO: 350268 - DNA, 74 bp, Homo sapiens
ggtgaaggcagacagcgagtggcgacgatgtgacaaacagcatgtttggtgcttcaagaaagaagtttgtagag

SEQ ID NO: 350269 - DNA, 83 bp, Homo sapiens
ctttaatatgctggatgagctgctgaagcccaccgaattaggatgccggctccaggagcagcagtggaggtcgggaacgcctc

SEQ ID NO: 350270 - DNA, 83 bp, Homo sapiens
ctcagttggaagcagccgatccagcctgcggagcctgtggggcagggttagctgagttggcacatcgagaatatcaggcagga

SEQ ID NO: 350271 - DNA, 96 bp, Homo sapiens
ccgcccggctgccgggagccgacagcttcgcgccgggacatccaggcctgctcggccgcctggaaggctgacggcgtgtgctccaccgtggccggc

SEQ ID NO: 350272 - DNA, 50 bp, Homo sapiens
atgcaatcttcaggaaagtaagaggaacggctaaagtggcttctggccag

SEQ ID NO: 350273 - DNA, 100 bp, Homo sapiens
gacagtcctcgtcagcactgactttcagctatggaatcgggctccgtaggcaccaactgcaaggacccctccccctgcgggcgctcccatggcacagttc

SEQ ID NO: 350274 - DNA, 88 bp, Homo sapiens
cggccgggccagttctcttgagaagtgaggcccggccccggacagccttcaggctctacacacagatgatcctctcacttgggattat

SEQ ID NO: 350275 - DNA, 100 bp, Homo sapiens
ccctgttccgaggtcaggaggatgcaagtcctgacagattcagcaacactaaaaagcttgtggtgaaggggggcaaaaaaaagaagcaagttctgaagtt

SEQ ID NO: 350276 - DNA, 75 bp, Homo sapiens
ctcagtcatgaagatgtcatattgggagaattactgggcaaggacgtagacaagtttggcaacgagatcacccag

SEQ ID NO: 350277 - DNA, 74 bp, Homo sapiens
aagcttagagcgtctggccaagaatcagaggaagtggacagagtttcactcctgttacccaggctggaggacaa

SEQ ID NO: 350278 - DNA, 88 bp, Homo sapiens
gttgattgaaattatctctggtgctgcagctctcaaagaacagtctgaacttgatcaagatttggatgatgttgaagaagtagaagaa

SEQ ID NO: 350279 - DNA, 88 bp, Homo sapiens
aacaggctgggcggcgcaggcgaggacggcaagaggccgcagcctctctggcatgtcgggaaagccatcaccaagtcgggcctccagc

SEQ ID NO: 350280 - DNA, 102 bp, Homo sapiens
ctcggcgattatggacccggccgaggcggtgctgcaagagaaggcactcaagtttatggcgtccgagctgggccacagcctgaacgagaacgtcctcaagcc

SEQ ID NO: 350281 - DNA, 71 bp, Homo sapiens
ccttcaagcaattcccaagatatggtacaaacattgctgctgggaaagctatgggagtggtggtagcaact

SEQ ID NO: 350282 - DNA, 90 bp, Homo sapiens
ttcgcagtggtcgcttcttctccttggacctgcaagcgcaggaccgagcccaccgcatcgggcagcagaacgaggtgcgtgtgctccgcc

SEQ ID NO: 350283 - DNA, 90 bp, Homo sapiens
gcaaagtgatcattgttgacaattcccctgcctcatacatcttccatcctgagaatgcagtgcatcccaaccctaatcgccccgctcatc

SEQ ID NO: 350284 - DNA, 90 bp, Homo sapiens
agagttcagtgtcagaaaatgtgtcaaattctggaataaattctgcagaaatagatagagtggaacagatgtgcattcagattaaagaag

SEQ ID NO: 350285 - DNA, 113 bp, Homo sapiens
gatacagggcagaggaaaatgcaagaagactgatggagcaggcttgcaatattaaagagtttccagatgtcttggaatgcactgtatctcatgcagtagaaaagataaatcct

SEQ ID NO: 350286 - DNA, 83 bp, Homo sapiens
ccaaaaatgtcaacagagtgctgagtgctgaggccctgaagcctggcatggaggagatgttaaagtaacccatcttgcaggac

SEQ ID NO: 350287 - DNA, 75 bp, Homo sapiens
gcagcccctgccttccacgccggtcagccccatcgaggatgaaacaggcgcctatttaatcgacagagaccccac

SEQ ID NO: 350288 - DNA, 101 bp, Homo sapiens
gtgtctcccaccagagcacggaacatgaaggactttgaaaatgatgtaatccctgttcattactacttaatacctccaccaacaaagactaagaatggcag

SEQ ID NO: 350289 - DNA, 141 bp, Homo sapiens
tgtcaaataacctacggagggtcttcctgaaacccgcagaggaaaattcaggcaacgcctcgcgttgtgcacttggaggctcctcagctcttcatatcccagcttttccaggaggaggatgtctcattgattacgttcctc

SEQ ID NO: 350290 - DNA, 75 bp, Homo sapiens
agactccgtgggcgtaggaccctccgagccaggaaactctgatgaggaagaaagtgcttcagaatctgaactttg

SEQ ID NO: 350291 - DNA, 90 bp, Homo sapiens
cgatggtaggcgtccctggagcggccgccttccagcgctcagctcttgccaggccaaattgagacatgtctgacacaagcgagagtggtg

SEQ ID NO: 350292 - DNA, 113 bp, Homo sapiens
tcagcccaggacctccaggggaacaatgaggcctacgcagagctcatcgtccttggcctgtagtggtggagacacgcccagtggatgatcctactgctcccagcaacctctac

SEQ ID NO: 350293 - DNA, 100 bp, Homo sapiens
cctgtcctcgtccgtctcatcaaagcaatttgagaactggcgagagaaccagccggacaatttcttcgcgggtggcgaggactgtgtggtgatggtggcg

SEQ ID NO: 350294 - DNA, 95 bp, Homo sapiens
gcgtaacgtcttatggcatgggtttgcgtcacctgaagaaattcctccaaaggagaccactgtaattttagccatgacatcgaactcccaaagaa

SEQ ID NO: 350295 - DNA, 139 bp, Homo sapiens
gccaggcgtggaggaagaggcattgaggactttccttacctgtttttccagctcacccactgccagcagaggagctcttgtccctggcaaagcgaaagcgcagtgactctgaggagaaggagccgcctgtgagtcagcc

SEQ ID NO: 350296 - DNA, 98 bp, Homo sapiens
ctgctgctgccgctgagagcagggccccttagcctctgggtttgcgctagcagcgtaaggtagtaagcattaataatgtctttcatctttgagtggat

SEQ ID NO: 350297 - DNA, 83 bp, Homo sapiens
attttcttcagcctccttgtcctaggacatcgctgccggctcccatgttcagcagaagcgacttcagcgtgtggaccatcctg

SEQ ID NO: 350298 - DNA, 50 bp, Homo sapiens
ggaacttccccaaggagctgctgaagctccctcccatgccccagagctgc

SEQ ID NO: 350299 - DNA, 100 bp, Homo sapiens
aacttcctcgaatttcagcgtaaactgcagcatgatgttctgaagcttgagaccatttaatttggcagagcggaaagctagcgcccattcaatagtagaa

SEQ ID NO: 350300 - DNA, 80 bp, Homo sapiens
gggcatcttggctcctccttgagtccgaggaggcaaacaaagccttctctgcagctgtgcagatgcacgatgtgctggtg

SEQ ID NO: 350301 - DNA, 89 bp, Homo sapiens
acactggcattggaacttcctgttctgatagcgtggaaggttacctgtcctgctgccgattcctggatgacaatcagatcgtcaccagc

SEQ ID NO: 350302 - DNA, 93 bp, Homo sapiens
aagcctgcccagacggctcacctgtgcgggatggaacaaaagcacatgattaagtaccggtacatcccgttcacacatgggaagagaaggtac

SEQ ID NO: 350303 - DNA, 100 bp, Homo sapiens
gtctactttgtctgcaattattctccaaagagtacgagagggcctccaaagtggaccagtttgtgacgcgcttcctgctgcgggagacggtgagccagct

SEQ ID NO: 350304 - DNA, 80 bp, Homo sapiens
cacaggggccactcagagtcgcccgagaagccggatcacctcaacagtcacgtcagacaagtgcactcaacagaacggcc

SEQ ID NO: 350305 - DNA, 100 bp, Homo sapiens
gctccggagtctgcggactggagtccccggcaggcacagctcggccgtcgatcacctccgggcacaggatgcgaggcatagaatgtcaagctaaccaggc

SEQ ID NO: 350306 - DNA, 88 bp, Homo sapiens
cagctggagcgcccagaggcgagccctggtggaggaagagggcgtggactccctggtgctagaaagcgtgatgttcgccatacttgcg

SEQ ID NO: 350307 - DNA, 100 bp, Homo sapiens
cgacaggcggcgcgggcggcggtcagccatgtcatctgagcctcccccaccaccacagccccccacccatcaagcttcagtcgggctgctggacacccct

SEQ ID NO: 350308 - DNA, 100 bp, Homo sapiens
caggacctcaaccggttgttgaaaggcaaaaagggagagcagatgaatagtgctgtattgccagaaatggagaatcagtgctcccaagaagatattgctg

SEQ ID NO: 350309 - DNA, 100 bp, Homo sapiens
catattgtcactgtggcttcggcagctggacatgtctcggtccccttcttactggcttactggctcacttatctaaagaatatgaggaggctaatttcag

SEQ ID NO: 350310 - DNA, 100 bp, Homo sapiens
ctttgctgctgaattcaagttggtcgaccagtccggacctcctcacgagcccaatactggtgcgataccagcgggaggatggcaaagtccacgccgtgaa

SEQ ID NO: 350311 - DNA, 100 bp, Homo sapiens
ctcatggtatatttgcagccagtactctatatgaacaatccgtctggatcacggatgtaggaagtggtcagaaagacctcctgactccatgttacagtag

SEQ ID NO: 350312 - DNA, 100 bp, Homo sapiens
aattcagacatgaacagagatcacaaagagtgtcaccaacctgcacagacgaaatctcacaaaactgtcccttatcttcagtcacatgctggcagaaatc

SEQ ID NO: 350313 - DNA, 82 bp, Homo sapiens
ccgtctctggaggagtactggcaacaggatattagaaatggctactccccagtcaattttcatctttgcaatctgcatttta

SEQ ID NO: 350314 - DNA, 100 bp, Homo sapiens
gaagaaatgaaatttcatgagttcgttgagaaactgcaggatatacagcagcgaggaggggaagagagggcatccgcttcgatcctgaaattccgcaaac

SEQ ID NO: 350315 - DNA, 75 bp, Homo sapiens
cgggagcgggatccccagcaggagcaggagcgggagcgggagtacgagagggcctccaaagtggaccagtttgtg

SEQ ID NO: 350316 - DNA, 89 bp, Homo sapiens
cgaggccggacgcacctctgtttgggggtcctcaggggccctggtgaaaacagatgaacaagaagtaatcaactttttattaacaacag

SEQ ID NO: 350317 - DNA, 83 bp, Homo sapiens
ctgagaggagcgtggctgtctcctctctccgccatgatgactgtccaagtgcctccaaagtgtacaaagcatcagattcagca

SEQ ID NO: 350318 - DNA, 82 bp, Homo sapiens
cgcagtggtcgcttcttctccttggagctagaaaagctaggccttggcgacagcgtggacctgcatgtgtacgagattccgg

SEQ ID NO: 350319 - DNA, 51 bp, Homo sapiens
gccagtgactaccaacgtttggaccagaagacggagtcttgctctgtcacc

SEQ ID NO: 350320 - DNA, 100 bp, Homo sapiens
gtcacagaagtctctaccaatggtgcttcagaagtttcatactttcagggcagcctgtgagcagcaagctgtggctctgactctgcaggaggacagagca

SEQ ID NO: 350321 - DNA, 100 bp, Homo sapiens
ccctcatcgattcctacgagtcttctagcttcatgttcctggtgtttgacctgtatcttggagatggccgcttccatctggagtctgtcatgattgccaa

SEQ ID NO: 350322 - DNA, 98 bp, Homo sapiens
cgccgcgccggggcggaccgagggggtccttgaaaggcaaggagcgccgccagctgcaggccagggagatgtgtcttgctgaatcagggctctcttat

SEQ ID NO: 350323 - DNA, 100 bp, Homo sapiens
caatctattttggattctttggagactgtggccaagacataatacagttgagttttgccaaatttgacagttcacgcaagccccaccacaatcaagatat

SEQ ID NO: 350324 - DNA, 98 bp, Homo sapiens
gcacgacttgaagacacgcacttatcattcagtggagatgtggtactggatcttcctctgggctctcttctcttctctgtttgtccatggtgctgcag

SEQ ID NO: 350325 - DNA, 90 bp, Homo sapiens
ttgaatgaagcttgtgaatctgtaatccagacagcctgcaaacatataagatctggagacccaatccttatgtttgatcatcggccaagg

SEQ ID NO: 350326 - DNA, 73 bp, Homo sapiens
ctcaacatctctcagagacgaaaggatcaagtcttccataccagggaccaggccaaaaccagactgccactgc

SEQ ID NO: 350327 - DNA, 98 bp, Homo sapiens
gaaagaaaatggcttgtgctgagttttcttttcatgtaccaagtcttgaagagcttgctggagattaaagagtctattgttggggaaatcagacggga

SEQ ID NO: 350328 - DNA, 83 bp, Homo sapiens
cgacttcaacaagaacctgaacgaggacacgaccttcctgcccttcacgctccaggagctagtttgtgatggacgcctctgac

SEQ ID NO: 350329 - DNA, 75 bp, Homo sapiens
gggaaatccatcatggactgtgggctgctcagtggatgtcagagtagttagaaacaaacctgtggcaaggcaggc

SEQ ID NO: 350330 - DNA, 88 bp, Homo sapiens
attgatgccctttgcctttttctttctggaatcagaaggctttgctggcctgaaaaaggtccagtggcattgcagagcacggatggtt

SEQ ID NO: 350331 - DNA, 74 bp, Homo sapiens
gtctgatgatgagaacacagccacgcttacgggattaatgaaaatcaagttccatcctcagacaagaggtaaag

SEQ ID NO: 350332 - DNA, 98 bp, Homo sapiens
aaatacttcatatttggcttcaatgtcatattttgggtagctacagcaagctgggtagcaggcagatccaaaggatatcatgaagtttccagggcctt

SEQ ID NO: 350333 - DNA, 72 bp, Homo sapiens
tcacaaataaagaagtccagcttgcacagatttttgagcttatcaaaatactgcacttggacggacaatttt

SEQ ID NO: 350334 - DNA, 100 bp, Homo sapiens
ccgagaatgggaattctcttcactagaatatggagactgttcaatcaccagggaagaaacatattgccgagtggatgccgccgcgcagcgtgtttgcttg

SEQ ID NO: 350335 - DNA, 87 bp, Homo sapiens
aggtcctcgcggtgcgcaccgtttgcgacttggacatttcattaccatccagaagtgtctcccactgaaggcatccgtggttgtttt

SEQ ID NO: 350336 - DNA, 75 bp, Homo sapiens
ttgacggaggaaattctgaatatagggacaccacagtggctgaatccacagaggagcctgctggttctaatcggg

SEQ ID NO: 350337 - DNA, 85 bp, Homo sapiens
gcccttctgctctgatgaagactggataatctcaggagacactgaagaagggaggctctgtggacagaggagcagtaacaatccc

SEQ ID NO: 350338 - DNA, 101 bp, Homo sapiens
tgaaacgtctgtgggttacgccatctttaagtcactccatggattcctttgggcaacccagaccagaagataatcagtcagtagtcagaagaatgcaaaag

SEQ ID NO: 350339 - DNA, 85 bp, Homo sapiens
gacacccggctgaacttcatccaggtgtcaaagctgcttaaagaagtgcaggatgagaacaagttgagcagtgccaacggccatg

SEQ ID NO: 350340 - DNA, 75 bp, Homo sapiens
acggccgccggagccgcgaggccaagattttttatcaagcagaaatgcatcgaacaacgagaatcaagatcactg

SEQ ID NO: 350341 - DNA, 76 bp, Homo sapiens
gacacctaccaggtggacggcacggacgacagaagcgactttggtgagactctggcagggaatgtggtaacaggag

SEQ ID NO: 350342 - DNA, 100 bp, Homo sapiens
taaaaggtcatcccttttttgaaggtgtcgactgggagcacataaggttacagtcttcttcataccttgatgattcgagtccaacaggtttaatgaaaga

SEQ ID NO: 350343 - DNA, 49 bp, Homo sapiens
gattagtccacagtcttcctctatagagagaagtggagatcctgatgtt

SEQ ID NO: 350344 - DNA, 100 bp, Homo sapiens
cccggaagggcggacacctccacatcgccttttgccacctttccctttatttccggaggtatccgttacagcactgatgtgagtgtagatgaagtaaaag

SEQ ID NO: 350345 - DNA, 74 bp, Homo sapiens
gacagtgcactccgggccgcagttactcttcagggatgtgctgaccctggtgtccatccctggtcaggactctt

SEQ ID NO: 350346 - DNA, 75 bp, Homo sapiens
cataaattcgacatgatccaggggctggcggagcacagtgctggagaatctggtaaaagcaccattgtgaagcag

SEQ ID NO: 350347 - DNA, 51 bp, Homo sapiens
ccggcgccggagacgatgccgttaagtcaaatccttcctgggaggatgaag

SEQ ID NO: 350348 - DNA, 114 bp, Homo sapiens
gcgcctgcggacctaactagctccaggttaggccgagctttgcgggaaagcagcgttaggatccatcaaagaagcagaactactttgtgagctaaagacctatggaattgtggg

SEQ ID NO: 350349 - DNA, 82 bp, Homo sapiens
tctggctagtaaaaaggacagaattgaatcacttgaaaagaggctcgaggtttggtgcacctcgatttggaggaagtagggc

SEQ ID NO: 350350 - DNA, 99 bp, Homo sapiens
cagacactgccaccctcaaggagttcacgttcatgggcgagggaacagatgagaaacccggcaatgaaagctggagtgcaatggcaccatctcggctca

SEQ ID NO: 350351 - DNA, 82 bp, Homo sapiens
cttcttgctggcgttggtgggagccgtgctctacctctatccggatctctcaccccgtcactcagggtggcgcaatcacgac

SEQ ID NO: 350352 - DNA, 90 bp, Homo sapiens
caacgagaatgaagccatccaatggatgcaggaaaactggttgctgaatgctataaagccaggacttgttaaaaagatcaatagattgcc

SEQ ID NO: 350353 - DNA, 100 bp, Homo sapiens
ggaggatccgagtgtgaatttcctgaagaacgttggggagagtgtggcagctgcccttagccctctgggttggtcaaagaaaaagtgatgtatgaaaaag

SEQ ID NO: 350354 - DNA, 98 bp, Homo sapiens
cattcagatgggatctttccggatcaatccagatggcagccagtcagtggtggaggtaaggagtgccaatggaccgatgcctgcctgtctcatccctg

SEQ ID NO: 350355 - DNA, 75 bp, Homo sapiens
ggccttttgacaactccaatgttgactgacggagaacgtgaccttgaagaagccagaaacttttccaaaaaatca

SEQ ID NO: 350356 - DNA, 75 bp, Homo sapiens
tcagagtccgactctcccacctgctaagaatcagcatgattcttcagaggctcttcaggttctcctctgtcattc

SEQ ID NO: 350357 - DNA, 98 bp, Homo sapiens
aacaagccaggaaaaccccgaaaacgcaagaagcgtggtgattctgggggtccacttgtctgtaatggtgtgcttcaaggtatcacatcatggggccc

SEQ ID NO: 350358 - DNA, 101 bp, Homo sapiens
gcatgcttcagttgccatgagagccatgaacggagagacagaagccctgcagcagctgcagaaggactctgaggccatccgcagccagtacgctcactact

SEQ ID NO: 350359 - DNA, 83 bp, Homo sapiens
aaaaacaaaatcaaccgggaccccagcttttcagaactgcagggaaacagccatcatgagggtggcccagttgaaatccttcc

SEQ ID NO: 350360 - DNA, 51 bp, Homo sapiens
tgaatgacctgcagctggtcacagagctggagaatgctggaggagacctta

SEQ ID NO: 350361 - DNA, 75 bp, Homo sapiens
cttgtttgtggatcgctgtgatcgtcacttgttaccggtattgtaagaacaagccgtacccaaagtctcgcttct

SEQ ID NO: 350362 - DNA, 88 bp, Homo sapiens
gaccgctgccgcccagcacgtccaggtgcaatggatgagcttcatagtctggatccaagaaggcaagagttattggaagctagattta

SEQ ID NO: 350363 - DNA, 89 bp, Homo sapiens
aagaatgtgattgcagcattaaattcccgaactggggagatctagacgagttgtactgctgtcacaggaaatggacgctggattacaag

SEQ ID NO: 350364 - DNA, 82 bp, Homo sapiens
tggcaagcacggccacgccaagaattatgatctagcccttaagtatttccagaaagctgctgaacaaggctgggtggatggg

SEQ ID NO: 350365 - DNA, 88 bp, Homo sapiens
cagagagggaagagattcagccagcacactcctcgcgagcaagtttgaaggatgacctctaggaagaaagtgttgctgaaggttatca

SEQ ID NO: 350366 - DNA, 100 bp, Homo sapiens
gtgtttgttggggatttgagtccagaaattacaacagaagatatcaaatcagcatttgccccctttggtaaaatatcggtaaaaaacttgttgctgcaag

SEQ ID NO: 350367 - DNA, 50 bp, Homo sapiens
gacgattacgagctgcaggaggtgatcgttggatgaaaaatctgacaaac

SEQ ID NO: 350368 - DNA, 90 bp, Homo sapiens
gttccccggcccacagtgggggtgtgcaaacccgagagaactgggcatcgtcctggattcaggtgatggcgtcacccacaatgtccccat

SEQ ID NO: 350369 - DNA, 100 bp, Homo sapiens
tagggataaaaaatttatgactcttgatcctgtctctcaggatgcacttcctccaaaacaggtaccatctccagggagagcaaggttggagcctaagggg

SEQ ID NO: 350370 - DNA, 99 bp, Homo sapiens
cagcacttttcacagcatcagcagtcatctcactagttatgttcaaaaaaaaacatcctctaccaccttgatgaaaagacaagccggttttcaatactt

SEQ ID NO: 350371 - DNA, 50 bp, Homo sapiens
tggaagattctgaatgagattgatgctgtttacacagtaaacaatgtgaa

SEQ ID NO: 350372 - DNA, 117 bp, Homo sapiens
ctgcgggctgagcggcgagtttccgatttaaagctgagctgcgaggaaaatggcggcgggagaacaccttccaccatgaccacctcagcaagttcccacttaaataaaggcatcaag

SEQ ID NO: 350373 - DNA, 82 bp, Homo sapiens
gtttgatcttgttgactatgaggaagttctaggagctagagttaatgccaaagacagcaaatggttgacacctttacacaga

SEQ ID NO: 350374 - DNA, 75 bp, Homo sapiens
tgccgggggagcggggccttccacaccccctccgtgggtgtgtggacaggctgcgggaggagctgcaggactgag

SEQ ID NO: 350375 - DNA, 83 bp, Homo sapiens
ctgaaaagtcgcagcgagctggagccgccggagatgctctctgtgtgggtatgtgtgtagccatcctccttctttgaagtctc

SEQ ID NO: 350376 - DNA, 75 bp, Homo sapiens
aactacctggcattgccttttgttgagctgtaagaaaagcctggagtgcacgaagttgtgcctaccccagattga

SEQ ID NO: 350377 - DNA, 50 bp, Homo sapiens
gcccccttgctggattatatctacagggttcttccaggttggaaagagaa

SEQ ID NO: 350378 - DNA, 88 bp, Homo sapiens
atggaaccgcacagagccgcgggccctttgcagctgcgattttcgccctacgttttcaacggaggttcattccttggaagaagctgta

SEQ ID NO: 350379 - DNA, 83 bp, Homo sapiens
ttttagaacaacagaactcttcaaggtgtgatgaatgcagactctgctaccattttggctgtttggatcctcctttgaaaaag

SEQ ID NO: 350380 - DNA, 100 bp, Homo sapiens
acaaaattaggattgcaactggacagatagctggcgtggataaagatggaagggtacgagtggctgctttacagaatctggtgaagataatgtccttata

SEQ ID NO: 350381 - DNA, 109 bp, Homo sapiens
gggaggacctcacttccccggggtgtaataatgttaactgaggtgtgatgaatgcagactctgctaccattttggctgtttggatcctcctttgaaaaagtctcctaaa

SEQ ID NO: 350382 - DNA, 100 bp, Homo sapiens
agggaagacatacaccatgggggaggccagtgtggccgaatttgccacatacctgaatttctgccgttccttgcgttttgacgacaagcctgactactcg

SEQ ID NO: 350383 - DNA, 99 bp, Homo sapiens
ttgttgaagaagaaggacccccgcatttatcagaaagatgccaccttctataacagaacaggtaacctggatgaggacatcattgcagaagagaacatc

SEQ ID NO: 350384 - DNA, 78 bp, Homo sapiens
ccataccgttgaccgctcctccaactaaccaatacactgcctctaggactgggacagatagccactgagtacctgctt

SEQ ID NO: 350385 - DNA, 98 bp, Homo sapiens
cgccgtcagagccgccctatcagaccaagatcactccatggatgaaatgacagctgtggtgaaaattgaaaaaggagttggtggcaataatgggggca

SEQ ID NO: 350386 - DNA, 71 bp, Homo sapiens
ttggggaattcatgtggaggtcagagtggaagcagtgtgatcagtttgtggcagagtacgagcccgtgctg

SEQ ID NO: 350387 - DNA, 101 bp, Homo sapiens
gacatggaatggaggctcacaaaggccgcggagctggtgacccagaactgcgaggcttatgaggcccacatgagggacgtccgcgactacctggaagagag

SEQ ID NO: 350388 - DNA, 88 bp, Homo sapiens
cctctggctcaagttttcacttatcatctattccaccgtgttctggaccttatgcaaagccaaatattcctacagcatcctgagcaac

SEQ ID NO: 350389 - DNA, 98 bp, Homo sapiens
cttttggatttctttttaataatgtgtgacccttcacctttgatcccctgacctgcattaccttgggtgtgggccgaagatatgctcatgtggtgttg

SEQ ID NO: 350390 - DNA, 97 bp, Homo sapiens
gcacctggacctgctcctccagtttgtacccctcaaaacaccccatcaccgtggagatcaatggaatcaacccagacagagccgctaccctggagga

SEQ ID NO: 350391 - DNA, 50 bp, Homo sapiens
ctctttacttcctttgtggagcccctttctaaggcacaaaatgatgtgat

SEQ ID NO: 350392 - DNA, 100 bp, Homo sapiens
atgaagtggccgcacagtatagtgaagataaagccaggcaaggggctcgtggtcccaagaagcatctgaagcgggtggcagctccaaagcattggatgct

SEQ ID NO: 350393 - DNA, 82 bp, Homo sapiens
cgccaatgtgatgcagaggctgcaagacatcacggctgcagccctggctacgggtgcctgcatcgtaggaatcctctgcctc

SEQ ID NO: 350394 - DNA, 83 bp, Homo sapiens
gtggacgaccccgaactccaggacagcatccaggcctcattggacagcattcgagcacatggattaattgatgtatgttgagt

SEQ ID NO: 350395 - DNA, 100 bp, Homo sapiens
gacagaatcccactgagacgcttcggagagtgttgccaaaagtcagactctttcgacgtgtagcagcagctttgccgggaatggaaagcacacaggacag

SEQ ID NO: 350396 - DNA, 75 bp, Homo sapiens
gtgactgccgccgcggcctcggacgactcgccttcagaagctgtcccagaaaatacttgacaaattggaggacta

SEQ ID NO: 350397 - DNA, 100 bp, Homo sapiens
caacatggcagacattgacaagtggcacaagaatggctcaactctccaaatagagagaatttctatcagttgcaagtacgaaaatttcctgccgattata

SEQ ID NO: 350398 - DNA, 100 bp, Homo sapiens
cagaagtacctgcttcagagacatgagaagattcatactggtgcagtgccatacttacactgggtactgctggtgtgtcaccccggatgggaagcccatc

SEQ ID NO: 350399 - DNA, 100 bp, Homo sapiens
ttgaggttgatctcttcacctcaaaaggggtgaagacatcttaaaccagaggaatgactctctagttgtggaatttcagtcatcagccagcagatgcagg

SEQ ID NO: 350400 - DNA, 90 bp, Homo sapiens
cccgtcccgaccctggccgccccgagcggagcctggaggtttttagaacttcagccataaaaatgggcagaattttccttgatcatatcg

SEQ ID NO: 350401 - DNA, 75 bp, Homo sapiens
acactttccagcagcatcacctgcacagaccaggaaagcgtctctagcagctgatatccccagacttggatatag

SEQ ID NO: 350402 - DNA, 101 bp, Homo sapiens
agcctttaatcggttagacttctcaagtgcaattcaagatatccgaaggttcaattatgtggtcaaagcgacaggttgagtgggagcctgccagcaatttg

SEQ ID NO: 350403 - DNA, 101 bp, Homo sapiens
aaaggaatttacaaacaagaaaaaaaagaagtttggaatcggattcacaggatctgggcttggaaatgcctcagcttggaatacacgaagactctcaaaat

SEQ ID NO: 350404 - DNA, 82 bp, Homo sapiens
ccttccgccgtctcttcgagttcttcgtgctgctcaagagctccacgcaggagatcggtgaggagctgatcaacggagtcat

SEQ ID NO: 350405 - DNA, 100 bp, Homo sapiens
gagcgctggacggagaggaaagcgacaatgcagatcttcgtgaagactctgactggtaagaccatcaccctcgaggttgagcccagtgacaccatcgaga

SEQ ID NO: 350406 - DNA, 75 bp, Homo sapiens
ccgcctgtggggactggaggcccagaaacgatccagctccaggtcccacaggggctcttcttccccacgaaaaag

SEQ ID NO: 350407 - DNA, 135 bp, Homo sapiens
acccatcctgccgtccttctccactttcgccagcccgtgccgcgagcgcggcctgcaggaggccgccatggcatcagatgaaggcaaactttttgttggagggctgagttttgacaccaatgagcagtcgctgga

SEQ ID NO: 350408 - DNA, 101 bp, Homo sapiens
ggaaggacgtgctcccgtggttgcgggcgcagcgggcagtgtcggaggccagcggggccggaagcggcggcgcagctctagaggacaaaatcccagtcctt

SEQ ID NO: 350409 - DNA, 90 bp, Homo sapiens
aatcgcataacccccaggatcagtaacaaatgtggcaattattttggatctatcacctgtcatcataactggcttctgcttgtcatccac

SEQ ID NO: 350410 - DNA, 90 bp, Homo sapiens
gggatcggttcctccaggagaagttagcttcagagttctttgtggatggacttgattctgatgagagtctgcgggccaggcatcgacatc

SEQ ID NO: 350411 - DNA, 82 bp, Homo sapiens
gtgcatccggacggtggccctcaaagctcagctcacctatgaaccccgtcagcagcagcgaggacatcaagccccccctggg

SEQ ID NO: 350412 - DNA, 82 bp, Homo sapiens
cgcggcagcggagggacggcagtctcgcgcggctgaaggtgatgtggccgccctcaaccgacgcatccagctcgttgaggag

SEQ ID NO: 350413 - DNA, 82 bp, Homo sapiens
gcccacagcagcaaccttggagcaggcaggcggctatgagaggttttcctccgagtacccagaattctgttctaaaaccaag

SEQ ID NO: 350414 - DNA, 100 bp, Homo sapiens
gctaaattacatattccagtaatggtggatgaagttgttcattgtttgtcaccacaaaaaggacagtgtatgggtttcgacagaccatgatgaaattgag

SEQ ID NO: 350415 - DNA, 75 bp, Homo sapiens
ggttacctatgtacctgttaccactttcaaaaaacctgcacttgttgccaagtcttccatcttactagatgtgaa

SEQ ID NO: 350416 - DNA, 100 bp, Homo sapiens
ggggaggacattttcaccggcgccgcggtggtcgagtccaaaactacttacctggaagaccttccaccaccccctgagtatgaattggccccgtccaagt

SEQ ID NO: 350417 - DNA, 100 bp, Homo sapiens
gggcctttgtccgtgttcggtgaccgcagcactggggaaacgatccgctcccaaaacgtctatccagaagttaaaggagagattgctcgtaaagatgaaa

SEQ ID NO: 350418 - DNA, 132 bp, Homo sapiens
ctggccctgctggcaattgctgtggaccgctacctccgggtcaagatccctctccggtgcatcacctggatcatgaggtcacccctctgctggctcctcccacttctcatcttggcctcagtggcccaaggc

SEQ ID NO: 350419 - DNA, 50 bp, Homo sapiens
agaagtctctgatattggaagccaaggctttatcctgtggataaacgcag

SEQ ID NO: 350420 - DNA, 75 bp, Homo sapiens
ttgctgctgacgctctgggtgaagaatggaagatctcttccgttccctgctggcagttcatcagctggatcagcc

SEQ ID NO: 350421 - DNA, 83 bp, Homo sapiens
aaggcatggaaagttccagccggttcgagagctaggccaagactaaggggctgcagagcggggtggacattggcgtcaagtac

SEQ ID NO: 350422 - DNA, 100 bp, Homo sapiens
tgtgctgtgaggaactttcttccaagataatgtccagtttggaagatgaaggcttttctgtcacaagctacctaactaagaagtttgctgaactacgcag

SEQ ID NO: 350423 - DNA, 100 bp, Homo sapiens
cacaatctgaacagattctcgggcgctccttctctccttccatcactacaggatcatagacggtatttctatgtaaacgaacagtcgggcgagtctcagt

SEQ ID NO: 350424 - DNA, 75 bp, Homo sapiens
tcttccctggatttttcttcaccttttccttactcatgagccaggtgctgactgggttacttttttaaacactag

SEQ ID NO: 350425 - DNA, 82 bp, Homo sapiens
cgaacctgttacttcaaggaaaacaactgttaccaatataaaattcaagcttgtgaatcaaaaactctggttttaagcaacc

SEQ ID NO: 350426 - DNA, 90 bp, Homo sapiens
caatgctgaagtaagattgtcttggaaatactaagttggaggactactgagcccagccaggctgtatgccattgctgccaaagaaaaaga

SEQ ID NO: 350427 - DNA, 100 bp, Homo sapiens
cctgcgtcctcggggccactgcactgggtgattcacgtgtgcccaggccctgaggtgggccggacctgggagtggcaggctggtcttgaactcctgacct

SEQ ID NO: 350428 - DNA, 75 bp, Homo sapiens
aacaggacctgcctaattaccttcaaacctggttggatttggtctagggagtcccagaaagaagtagaaaaagag

SEQ ID NO: 350429 - DNA, 102 bp, Homo sapiens
caaataacgtcgttttggaagcgcccttcctagttggcattgaaggttcactcaaaggcaggtaagaatgattgatgttggctgatattggagtgctcattc

SEQ ID NO: 350430 - DNA, 100 bp, Homo sapiens
atcttcggaccccccaacaccctctacgaaggcggctacttcaaggtttgatctgtggatgaaatgaatcatgattttcaagctcttgcattagaatctc

SEQ ID NO: 350431 - DNA, 90 bp, Homo sapiens
tacatttgcccattctcaggaagagcttgaaaatcctcctgcatatgcccaagaggattgggagtggaatggacaccagcagaagcacca

SEQ ID NO: 350432 - DNA, 100 bp, Homo sapiens
ggaaacagcggatgattctggaactgggagaagatggctttaaagaatacacttcaacggatgaccaccaggctctcatctgggacatccagcaaatgcc

SEQ ID NO: 350433 - DNA, 75 bp, Homo sapiens
ctgggcttgatctccattctctgctttgctgcatctaccttcccgtgtagtattgagtcctgtttgagctattgt

SEQ ID NO: 350434 - DNA, 75 bp, Homo sapiens
agatcgtcgagatgtctacttcgaagactggcaagcacggccacgccaaggtggctgctgccaaggtggaagccg

SEQ ID NO: 350435 - DNA, 76 bp, Homo sapiens
gccgccgcccccggagctgctggtttcattcgaggtttcgggccgttgggcatcgatgggctgattgttacgaaca

SEQ ID NO: 350436 - DNA, 100 bp, Homo sapiens
cctgtgaacctggaactagcgtcaaccttgaaggcatcgtgtggcaggaaacagaagatgaagcatcaagtgtacctgatttgtgaacctatcttgcttc

SEQ ID NO: 350437 - DNA, 90 bp, Homo sapiens
ccctgcagtacctgcagaaggtctctggagacatcttcagcagccgcctgtcttggttagatggctctggattaggattctcactggaat

SEQ ID NO: 350438 - DNA, 101 bp, Homo sapiens
ctgtgtttccacagaacccagggactcatgatcatgaaaacagtgtacaaggggcccaactgcattgaatttgagttctgtgaacctgcatttgttgttgg

SEQ ID NO: 350439 - DNA, 75 bp, Homo sapiens
ccggggacaagaaactagagcaaataaccgttttgaaattgaagattgttgatcgaatcgacaatgatggggatg

SEQ ID NO: 350440 - DNA, 82 bp, Homo sapiens
tttttttctccagccgagaggacgcggctgtgatatacgaagtggtacatgatcagcattgtccacatttacaatcgatgga

SEQ ID NO: 350441 - DNA, 50 bp, Homo sapiens
gctcctctctggccttgcaaaggtcctcttcctgatggatgggaacaagc

SEQ ID NO: 350442 - DNA, 82 bp, Homo sapiens
tggctcacgagctgcagggagtgcaccagatctgactgcagccatgagcagcaatgagtgcttcaagtgtggacgatctggc

SEQ ID NO: 350443 - DNA, 100 bp, Homo sapiens
tttgctccatttcttactttacaacttgcgtacatgggattatacaaatattttcccaagttaagtgggcagaccaacatccacctcagcaaaaacttct

SEQ ID NO: 350444 - DNA, 100 bp, Homo sapiens
gagggaaagggataggagaaggatgtggactgcagtgctgcagtgccagggtgaggcgctcaggcaagttctggtcaaccgttactatggaaacgtcaga

SEQ ID NO: 350445 - DNA, 95 bp, Homo sapiens
cacaacccgcagagacttctactggctgcgctcctttctggccggagagtttgaaacagctgagacacttctaaattcagaagttcatatgcttc

SEQ ID NO: 350446 - DNA, 100 bp, Homo sapiens
tttgacgagctgacagccacatacaagtcagatcgtcagcggctggctgaaggcggtgcaggtcctcatggtgctctccctcattctctgctgtctctcc

SEQ ID NO: 350447 - DNA, 100 bp, Homo sapiens
gtgtccggaggtttgcaggggtgcagtgtgtctggtcttatgagctcaaccagaacgtaagttctttccaaagaaaatttgttggtgaggtgaagaggtg

SEQ ID NO: 350448 - DNA, 101 bp, Homo sapiens
gcggaggcgggggctgggcagacccccgaacgtgcctgagcctgctgtcgctggggacgtgcctgggcctggcctggtgatgatgaacagtctacacagat

SEQ ID NO: 350449 - DNA, 90 bp, Homo sapiens
gccagatcagacctttagtctgaaccgggatcttacaggagaattagagtatgctacaaagctgattcaccccaagagtggccgttccta

SEQ ID NO: 350450 - DNA, 82 bp, Homo sapiens
ggccttagctgtgctcgcgctactctctctttctggcctggaggctatccagcgagatggtaacctgcacctcaatgtgacg

SEQ ID NO: 350451 - DNA, 100 bp, Homo sapiens
ccccgcttgccgcagccgcctcagaacccgaccaacatccagaacttccagctgcccccagagtgatcagcagctggactgtgccttggacctaatgagg

SEQ ID NO: 350452 - DNA, 96 bp, Homo sapiens
ctgattgggacaacattcagacccatttccagtcatgagtctgcagcccagagggcaccttctgcaaacatgtctgtggatcccctatccagcaaa

SEQ ID NO: 350453 - DNA, 97 bp, Homo sapiens
cacgccctcctgcgatctagaatgctcctgcttcaggtgcagaaatacagcgatttccagtgccagctgttgagccagtgccagcaccaggggcaga

SEQ ID NO: 350454 - DNA, 100 bp, Homo sapiens
acagaattatcaaagacttcatgatccaaggaggtgacccaacagggacagctgtaggcattcagatgaaacttgaatttttccaaaggaagttctggac

SEQ ID NO: 350455 - DNA, 75 bp, Homo sapiens
tagaagcggatacttatttgcctgtggatgaaaccctgattcctacagctatgtgatgatgatgccatttaaacg

SEQ ID NO: 350456 - DNA, 75 bp, Homo sapiens
tcatcattactaacaggatattcctcatgacattgctgtctggtatgagaaagtgccagtcatcttggttgggaa

SEQ ID NO: 350457 - DNA, 76 bp, Homo sapiens
cagccgtggtgtccagcctcctgggcagccccttgcccttggacaggacttcctcgttctgcccatcttcctaaca

SEQ ID NO: 350458 - DNA, 100 bp, Homo sapiens
ttcactactggaattgttgtttctgcctttggatttcctgttattcttgctcgtgtggctgtggagcagtatcagtttctctacaaagtgatcctcagcc

SEQ ID NO: 350459 - DNA, 75 bp, Homo sapiens
acctggagacattccctagagatcctgagaaagctgttgtgagaaactaattcgagatgttgctcattgtcatgg

SEQ ID NO: 350460 - DNA, 50 bp, Homo sapiens
ctccggcggcgctcggggagggagccagtttgccagtgctctgagcaagt

SEQ ID NO: 350461 - DNA, 90 bp, Homo sapiens
aagaaggagacatttgatgatttgccgaaatggatgaagatgattgataagactgaaactgttgaggagcccatggaggaagaagaagca

SEQ ID NO: 350462 - DNA, 75 bp, Homo sapiens
cctggactgcacggcccggcagcaggttaaggcggctcagaaacaagacagctcaccagatgaaggttcagcact

SEQ ID NO: 350463 - DNA, 90 bp, Homo sapiens
gtaaactgcagcatgatgttctgaagcttgaggatctcactggcatcgaatctatggatcagtgtcgccataccttggaacagcataact

SEQ ID NO: 350464 - DNA, 100 bp, Homo sapiens
aaatagatgcaatggatgttcagcagctttcacaaatagtaccaaaggtgctaactgccaaagaaaggaaaactcaaattgatgatagaaacaaattgac

SEQ ID NO: 350465 - DNA, 82 bp, Homo sapiens
cccgggcccctgagccatgcccatcgcagccgccccgaaggagccagatcctcgttcctagctgcctgccagcgtcctcggc

SEQ ID NO: 350466 - DNA, 60 bp, Homo sapiens
tcccagtgtctctgctgctcaaaatttctcttccagcgcgatgtacaatacggtgtggag

SEQ ID NO: 350467 - DNA, 50 bp, Homo sapiens
agcctccggagtagctgggactacagggctaaggaatatgagagtttaat

SEQ ID NO: 350468 - DNA, 80 bp, Homo sapiens
gacctgccgtgggaccccagagattcccaaagccccatgtgccactcccctgatctgcagcttcggtaggccggtggacc

SEQ ID NO: 350469 - DNA, 90 bp, Homo sapiens
cccaggttcaagagattctcatgcctcagcctcgcgagtagctggaattacagagtgaagacatagtccagagagggaagtgtaaagcta

SEQ ID NO: 350470 - DNA, 50 bp, Homo sapiens
cacagctgccttgtctggagaagcaggtctgtgctgccaacatagtctca

SEQ ID NO: 350471 - DNA, 51 bp, Homo sapiens
gaggagtccagggagcccagcacagctcatgatggagcagtccaagaagtc

SEQ ID NO: 350472 - DNA, 73 bp, Homo sapiens
gagacacggccagatctgccctccagttgcagagcctgaggcctgtgatcagatgtacgagagcttagcgcga

SEQ ID NO: 350473 - DNA, 100 bp, Homo sapiens
ttcatctgtgccctaccttctaggtgtcaacaacctggaattcaattggctcttgccttatattcttggtgccaccattgagaactccaggattgtcctg

SEQ ID NO: 350474 - DNA, 101 bp, Homo sapiens
ccccgacatttcctcagttagccagagtcggggggctcagacatctgattccaggagggcttcgtgtatggacctcaagcgttggaggtagcagacttttc

SEQ ID NO: 350475 - DNA, 98 bp, Homo sapiens
aacctggcacttatgtcctccctggcattttgaaagcgaagcagaagccgtagaatcagcggcgagcctgttgaaagaacccacaggtgcatttcaca

SEQ ID NO: 350476 - DNA, 83 bp, Homo sapiens
cgcgtccagctcgcccagctcgcccagcgtccgccgcgcctcggccaagcaccgaacaagatttgtgatgaaatggagcctgg

SEQ ID NO: 350477 - DNA, 82 bp, Homo sapiens
cctcggccaccgagatcctgctgacgccggctagggaccaagaatcgccttcagccctgtctggtgcatccttggcagaaag

SEQ ID NO: 350478 - DNA, 104 bp, Homo sapiens
cggccaaacggtgcctgcggtgcctgagctgagtgaggccgaggccgggaggccgtgcccggaggtgctggagaatctggtaaaagcaccattgtgaagcagat

SEQ ID NO: 350479 - DNA, 100 bp, Homo sapiens
gtcggcacagttctagagataggagcagagaacgatccaagaggaggttaatgttgaagaaggaaaatgcggaagtcgtcatttgacaagttttataaat

SEQ ID NO: 350480 - DNA, 88 bp, Homo sapiens
agaaacacctttaacaatgcttcagagtcaggaagctgaatatggtgggcatgatcagatagatttgtatgacgatgtcatatctcca

SEQ ID NO: 350481 - DNA, 83 bp, Homo sapiens
aagacttgaacttaatacagcaagaaagaccatcaagtttaccaactggtcgaattgacaaatcttaccctacagtatgtggc

SEQ ID NO: 350482 - DNA, 90 bp, Homo sapiens
cgaatgaatgaacagccacgtcaggtgaaagaaaagatgttgtcccggttaagagtagtttccaccacttgtactttggcatgtcgacat

SEQ ID NO: 350483 - DNA, 75 bp, Homo sapiens
gtgcatgggagattcctgcatcttttgcgctctcaaggagccagtgaccttcagggacgtggccatctacttctc

SEQ ID NO: 350484 - DNA, 75 bp, Homo sapiens
tgtgagcgccaagaccggctgaaggccagctgcgggccgtccagcggctgtgccacttctacagcgccgtcatgc

SEQ ID NO: 350485 - DNA, 75 bp, Homo sapiens
cctgaggcactcttccagccttccttcctgggcattctgctaggtgctgggaatcaagaacaagaccactggtcc

SEQ ID NO: 350486 - DNA, 75 bp, Homo sapiens
agaccgcggccgggaccgaggaacacgatgatgaacgcgttaatttccctcaaagaaagaagaaaggccggggtc

SEQ ID NO: 350487 - DNA, 75 bp, Homo sapiens
agcaccatcttcaaatttgtggaagcttatgtacgaacctcctgccccaaatccaggcctgtagaagcagctgcc

SEQ ID NO: 350488 - DNA, 75 bp, Homo sapiens
tagcttttctgagaatacttgctgaaaaggaagttttctggaatggaataatccagaatggctactctgatctat

SEQ ID NO: 350489 - DNA, 98 bp, Homo sapiens
tacaaccacccacccttccgagacatgaagaaagaagggatggaaaccctattttcttttctccaagaccatggttggtctgcttccctcactcgggc

SEQ ID NO: 350490 - DNA, 50 bp, Homo sapiens
cagctgtgaaaaaagccatttccgaagtgtaatgttcaagctcagaaatg

SEQ ID NO: 350491 - DNA, 98 bp, Homo sapiens
gaaactgcaccggaaatgtgcctaccaggctatgaccagggccagagcactcagatctcagtcagaggagtctgcttctgcctttagtgctgatgacc

SEQ ID NO: 350492 - DNA, 75 bp, Homo sapiens
gtggacttggacacgtcccagctctctctgggcatctggaaagagccagcccctgggcaacaaagtggaaatgga

SEQ ID NO: 350493 - DNA, 120 bp, Homo sapiens
atgacttctgccttcaagctggatttcctcccggacatgatggtcgagggccgcctgctcgttcctgacagaatgttgaaatcacaaagattagacacctttttagataggtgttcttca

SEQ ID NO: 350494 - DNA, 105 bp, Homo sapiens
gccggccagaagcgggcggcgcgggggagatggtgtacgaagccatcgacagcagagatggagcatcttgtgcagagttggtgtcttttaaacatcctcatgttg

SEQ ID NO: 350495 - DNA, 112 bp, Homo sapiens
gattttgatgtggatgatgccaaagttttattagcttgggcaatggtagatggtggttcaaatgtgaaagcccgctcttcctacaatgagaagaccccaaggatcgttgtgt

SEQ ID NO: 350496 - DNA, 76 bp, Homo sapiens
gcgcagttttggatacgtgtgagggggattttcagggcatgcccaagagaatcgtaaatgcaaaaattgcttgcct

SEQ ID NO: 350497 - DNA, 90 bp, Homo sapiens
tatgaccttcacctcattaacagtatatttgaaggctcccatgattctgaatggagtctgtgttatctggaaaggctggattgatctcca

SEQ ID NO: 350498 - DNA, 100 bp, Homo sapiens
aatagaaagtattaaagacagcagcatgggagggcaagaagagccaccgccagctgaggtcacacctgtggatgctgtcccctttcctccaacccaacgg

SEQ ID NO: 350499 - DNA, 51 bp, Homo sapiens
atgtggagtttagacccagccagaatttaagaagaggattacctcaggttc

SEQ ID NO: 350500 - DNA, 100 bp, Homo sapiens
aatccaaaatcggatcaacagacaacatcaaataccagcctaaaggggggcaggtttcagagggagttcacacaaggagtaaagcctgactggaccattg

SEQ ID NO: 350501 - DNA, 126 bp, Homo sapiens
ccagggtagcggctaccggagcgctgcagggggctgcgcctgcctgctccgccccagacctgtcggcgaaagggaagctctccaccttcagtgcatacttggaggaccacagctacaacgtggagc

SEQ ID NO: 350502 - DNA, 80 bp, Homo sapiens
tctgaaggcgaacgcttcgctggccatttaggagctctgctcaaagccagacggaggcaaaaccttcaactgaggacttg

SEQ ID NO: 350503 - DNA, 51 bp, Homo sapiens
tattcttctgatgtggatccagatattgatactagacgcagggctgcttgt

SEQ ID NO: 350504 - DNA, 74 bp, Homo sapiens
gagcagacgctgcagttggagcaacagtccaagctcaaagaagagagaagggcacagttacctaagtatcaacg

SEQ ID NO: 350505 - DNA, 95 bp, Homo sapiens
cgcagatgttgtcaaggtggcctaccaggaggccaggggtgtcgccatgaaaaatagtagtctagtcattcaagtgaaaggtccaagaaaggaag

SEQ ID NO: 350506 - DNA, 100 bp, Homo sapiens
agcgcctctgtcgctgggacccttcaggatctcaaagatttcatgagacaagctggggaagtaacgtttgcggatgcacaccgacctaaattaaatgaag

SEQ ID NO: 350507 - DNA, 138 bp, Homo sapiens
tgctgggaatggggctaagcgaggcggaggcgatcggtgctgattcggcgcgatttgaggagctgctgctgcaggtgaaaggtgtagcagtcactcggcctacacccacagcatcgaccttgtgaacccagcgacctg

SEQ ID NO: 350508 - DNA, 75 bp, Homo sapiens
accggaagtgctccagaactcaaggccttggacaagattcgctatgagagcctgacagacccttcgaagttggac

SEQ ID NO: 350509 - DNA, 100 bp, Homo sapiens
gccggaagtgccccttagcgggtgggggaagctggtaggcacgggcggctccgcagtgaccggactcgggggagagatgggcagtagcgaaccccttccc

SEQ ID NO: 350510 - DNA, 100 bp, Homo sapiens
aacaatgagtacaactaccgctgctggaccacaaaccgctgccagaaaagccagctacagatgcatgcatattgtgaaaacccagatatagtgctgtgtg

SEQ ID NO: 350511 - DNA, 75 bp, Homo sapiens
aagactgtggaacttttaagtggagtggtggatcagaccaaagatgggttgatagatccacagactcaagtatca

SEQ ID NO: 350512 - DNA, 100 bp, Homo sapiens
gtgttattctgcatattgcagttcttgtcaatgacctggctggtaaattgtcacctctcacccattgattgtgaagtccttgctggccttctaaccaaca

SEQ ID NO: 350513 - DNA, 101 bp, Homo sapiens
agagggtgagatggatgagtccagcattctaagacgaagagggctccagaacattgacatcaccaatttcagcagcagctggagcgatggcctggccttct

SEQ ID NO: 350514 - DNA, 95 bp, Homo sapiens
tacgtctgcggaagtgcagctgcctcagttcttagcgcagagtgcctggaagagctgggatgtctggttgagtcctatggcatgaatgtttgcca

SEQ ID NO: 350515 - DNA, 75 bp, Homo sapiens
gactatagccttcactttccctcgagtcatgtgctgttcctggggcttggatgatgtaggggaagcaaggtgaaa

SEQ ID NO: 350516 - DNA, 75 bp, Homo sapiens
cgcggggcaagtggctcggaacacaggaaaaccagtagattcccagacatcgcgaagtgaatctgaaattgtgcc

SEQ ID NO: 350517 - DNA, 88 bp, Homo sapiens
ggagctgttcctattcggccatctttgctcctccctgcaactaactccattcttaattggaaactgtttactacagcgggcagctgga

SEQ ID NO: 350518 - DNA, 90 bp, Homo sapiens
ttgccctggtcttgctcggccgatgaagtgcagaggtttttttctgcacccaagaaaacctcatttggctcgctgaaggatgaagaccgg

SEQ ID NO: 350519 - DNA, 98 bp, Homo sapiens
aatggttgaaaacagatatacaggattcagtttagctgcatttaaaagaaacaagaggaaactagagctggcagaaagggtggacacagattttatgc

SEQ ID NO: 350520 - DNA, 51 bp, Homo sapiens
tgaaagaaaatgccagcgagggtggagccgccaccaaaatgcagattttcg

SEQ ID NO: 350521 - DNA, 100 bp, Homo sapiens
ggagcccagatgagctgccctcggcgggcggcgacggcggcaaatctaagaaatttggttttgacccaccacatcagagtgacacaagaaccatctacgt

SEQ ID NO: 350522 - DNA, 50 bp, Homo sapiens
tttggttctgccatgccgatgtaccagagacggcgtttcaccatgttggc

SEQ ID NO: 350523 - DNA, 100 bp, Homo sapiens
tggggagcccaggccaagccatccattcttgggtcctttggagcttttgcctctaatgacagagcagctacagtggatgccatttgtgaatatcaaactt

SEQ ID NO: 350524 - DNA, 100 bp, Homo sapiens
cggtcttggggggatggttccatcatggcgtcaatgcaggtgatctgcaactctttcaccatctgtaatgcggagatgcaggaagttggtgttggcctat

SEQ ID NO: 350525 - DNA, 101 bp, Homo sapiens
atcgagctgatagagaccctagtaacatggatgtggtaccacagattgtcccacctacacagcaggcttcaggacttgctgaagggaggagtcatatatcc

SEQ ID NO: 350526 - DNA, 83 bp, Homo sapiens
agtccacccaaggtctcctcggatcgcctggagaggcactcggacctgggcgtgatggtgggcatgggtcagaaggattccta

SEQ ID NO: 350527 - DNA, 95 bp, Homo sapiens
tcccagggggccacacgccccccctccttcacgccacacacacacaatgcagatcttcgtgaagactctgactggtaagaccatcaccctcgagg

SEQ ID NO: 350528 - DNA, 90 bp, Homo sapiens
ctcagcatgggggaacatggcctggagctggcttccatgatccccgccctgcgggagctgggcaggttgggtatctacagccattggttg

SEQ ID NO: 350529 - DNA, 90 bp, Homo sapiens
tttttctctgtgtctggatgtttataggcatcatattaacaggctctcccctggacaagttggtgtccagcacatcagacctgccaaaac

SEQ ID NO: 350530 - DNA, 83 bp, Homo sapiens
gtcatcgatgggagcaacgtggccatgaggctttatcctgtggataaacgcagagtgaacgagtttggggagtcctacgagga

SEQ ID NO: 350531 - DNA, 100 bp, Homo sapiens
gaagatcattaatgaagtaaagcccacagagatctacaaccttggagcccagagccacgtcaaaaatcccacgtggcgaagtctcgattttggaattatg

SEQ ID NO: 350532 - DNA, 83 bp, Homo sapiens
ggccggcaaccagctgtaagcgagatttcatgcagaaagagctattggtatcattacccacatcctacctgaagatcatcttc

SEQ ID NO: 350533 - DNA, 75 bp, Homo sapiens
tgcgtgtcctgggctctaatgtcagagaatttctacaggcagccctgatggaaagctcccgcctgaaagagctgc

SEQ ID NO: 350534 - DNA, 100 bp, Homo sapiens
tgaagacaacaaggatgaagacctttatgatgatttacttccgcttaataaatacctagagaaactaagactgaaagaagacaaaaaattgaagagaaag

SEQ ID NO: 350535 - DNA, 115 bp, Homo sapiens
ctcagcgactcttctgacctccgcgcgacgtacccgccgccgccgttggctggaggtgagaagccctaccactgcaactgggacggctgcggctggaagtttgcgcgctcagacg

SEQ ID NO: 350536 - DNA, 111 bp, Homo sapiens
gaagacctattatcagatcaaccaccaaagtgggaaacattgaaatcaaggcattatcctgcactgaaaactctggaacatctagagcatacctacctgcctcaagtaagc

SEQ ID NO: 350537 - DNA, 100 bp, Homo sapiens
aagcatttcaacgtgcgtgtcacccacgcagacatcttcagccgctgccagctatgacatggtgcattacggccactccaaccagctgcgccaggcacgg

SEQ ID NO: 350538 - DNA, 98 bp, Homo sapiens
tttcacagtacatcatccaaaagaggagtccatgatggaggcagaggtaaacttggagagggctgctggtcaacctctccctcatcccagtcatgggc

SEQ ID NO: 350539 - DNA, 75 bp, Homo sapiens
gacaccatggtgatgtaatggatttacagagacaaagcatggaggacacaagaatgggaggaaaggcggactctc

SEQ ID NO: 350540 - DNA, 75 bp, Homo sapiens
tggactagaacacgttcctctgggttggagttactggtatgccttggagtgtacatttacaaagatgcgttcaaa

SEQ ID NO: 350541 - DNA, 83 bp, Homo sapiens
ttcgcgtctctctgctgcggcgcggggaccgctgtgctctcgccacacccactcgcccgggtctatggccacggtcggagagt

SEQ ID NO: 350542 - DNA, 100 bp, Homo sapiens
gcggaggtgagcggtccgggagggaaacacgcggccggccaagggcccagggtgcggcgggagattttgggtgaagagctccctggctgggccccaggag

SEQ ID NO: 350543 - DNA, 122 bp, Homo sapiens
actgggtcgtcttctcggcgacaactgccctgctcttcatcccagatgcctggaatgatgtcgtcagtaatgcctggaatgatgatgtctcatatgtctcaggcttccatgcagcctgcctt

SEQ ID NO: 350544 - DNA, 92 bp, Homo sapiens
ccactcacgctccactgcaacatcacgggaaatcctcattgacgattcaatttgttgaaggccaatttgtggactcctacgatccaaccata

SEQ ID NO: 350545 - DNA, 76 bp, Homo sapiens
gattgcgagggtcccacgactcccgcctgagtgtgaacatggctacgcctcttcattcccgtccatgccgagcccc

SEQ ID NO: 350546 - DNA, 100 bp, Homo sapiens
ctaacatcacctgcttcatccttgtttaatgactttggtgccctcaacatctctcagagacgaaaggttcagcgtcttccatttctttcaagctcaaatc

SEQ ID NO: 350547 - DNA, 103 bp, Homo sapiens
ctcgccgcccgccgggcgctctcgcttcagtcagtcgggccgcgccgcgcctcagctctgtgcctccggagccagcgtggtggccatagacaacaagatcgaa

SEQ ID NO: 350548 - DNA, 98 bp, Homo sapiens
tttcgtcgagagattcactatggaatcgaatatgacagatacctagcatctagcaaaataatggcagctgcttaccttgaccccaacttgaatcacac

SEQ ID NO: 350549 - DNA, 82 bp, Homo sapiens
gaatgcagcgcgctcggaggcctcttccagaccatcatcagcgacatgaagcctcccgcgacgatgcccctcaacgttagct

SEQ ID NO: 350550 - DNA, 50 bp, Homo sapiens
gttcagcatccccaagcagggggagactctgctaactggaatggcttatt

SEQ ID NO: 350551 - DNA, 100 bp, Homo sapiens
gtttactttgccatcctctttgccatgcacagcaatgggctcttcgacatgtttcccaaccagttccggtttgtggagggcaaggagttggtgcacacct

SEQ ID NO: 350552 - DNA, 75 bp, Homo sapiens
ttcagatatttccagagaatgaccacaacctcttcagtagaagctgcccaaactccaaaatgatggtagagaatt

SEQ ID NO: 350553 - DNA, 101 bp, Homo sapiens
gtgcccgctttgttcagctgcagcatggagagatagataaacggtggtcagtatatatccgagccgctgtccgaaaagagaaaggcctgcccatcctcgtg

SEQ ID NO: 350554 - DNA, 50 bp, Homo sapiens
gaaaaagctgcagatgagagtgagaggtcttgggcgtctttggtactggc

SEQ ID NO: 350555 - DNA, 98 bp, Homo sapiens
gtggacggtgtggggcggtcccggccccgcagcctgacatttaccccggtaactgctgggcatttaaaggctcccaggggtacctggtggtgaggctc

SEQ ID NO: 350556 - DNA, 100 bp, Homo sapiens
ataaacataaatcctgttcggagtgtttaacagccacagaccctcactgcggttggtgccattcgctacaaagcacttgcacctcctgcgccgccgcccc

SEQ ID NO: 350557 - DNA, 75 bp, Homo sapiens
gttgactgcagctcactgtaacttgaatggtggttccttctaagaccaaaattgtgtgccacttttctactcttg

SEQ ID NO: 350558 - DNA, 87 bp, Homo sapiens
tctctacagaagagcttctcctcatcaactggggatgattacagttcttcctaaaaaagatggatagctcccagttgatccattgtc

SEQ ID NO: 350559 - DNA, 98 bp, Homo sapiens
tccttcgatactcccgatgattccatacggaataagctcattttaattgccagaaacaaaggtgctggaggacggccggcagtggtggaagctgcgca

SEQ ID NO: 350560 - DNA, 115 bp, Homo sapiens
tgcaccgctaggccgtccccgaccttgcctgaacaaggcatcagaacacaccatgatggctgtgacctaagaccctcaggaagccccggggtcatggcccagaagcaccccggag

SEQ ID NO: 350561 - DNA, 101 bp, Homo sapiens
cgaaattaagggaaaatggatgtagaaaatgagcagatactgaatgtaaaccctgcaggggactcattctcacagttccggtttgctgaggagaaagaatg

SEQ ID NO: 350562 - DNA, 83 bp, Homo sapiens
cgtcgctgctggcacttcaggctctggtgagaagccctaccactgcaactgggacggctgcggctggaagtttgcgcgctcag

SEQ ID NO: 350563 - DNA, 100 bp, Homo sapiens
tcgccttcatggaatgtcttcaaagaatattaaaaaatctggagggactccaacttcaatgatggcttgttcaatcagtatatcagtcaacaggaatata

SEQ ID NO: 350564 - DNA, 100 bp, Homo sapiens
ccatctcctaccgaggtggcggcacctacaccaagggcgccttccagcaagccgcggtatctctggagacaaagtagagatagaccctgttacgaatcag

SEQ ID NO: 350565 - DNA, 90 bp, Homo sapiens
ttgacagctattaaaaccagggctccacagttaggagcaatggccaatgtacatggtggactatgccggcctgaacgtgcagctcccggg

SEQ ID NO: 350566 - DNA, 75 bp, Homo sapiens
ccagtcttctctaaagctgaaacaaggagacgaaaccagacagagggtcaagtttacagatgaccgtgtctgcaa

SEQ ID NO: 350567 - DNA, 75 bp, Homo sapiens
cctgccttgtgctcacagcttttgtcagaagtgtattgataaatgggtacaggcatccttcacctgctattgttg

SEQ ID NO: 350568 - DNA, 80 bp, Homo sapiens
accgcgcgcagggcctgcagcgggagctggacggcgagcgcgagcggcgcgagaaagctggagtacagtggcacgatctc

SEQ ID NO: 350569 - DNA, 100 bp, Homo sapiens
taacgcagatcatctctggaaaggatattgatccgcctcatgtaaagtatgcttagttcctttccagtggttttgtggggacattcatggacaattcttt

SEQ ID NO: 350570 - DNA, 83 bp, Homo sapiens
tacatcctgcgggtgcctttgaaaatcaacgacaacttgagcacagtgcacttacatttcaatcgaccaagttccaaggacct

SEQ ID NO: 350571 - DNA, 119 bp, Homo sapiens
ggaggagctgtgcagccgcgaggaggcgcgggaggtgttcgagaacgaccccgagacgggcagctgtgcggagggtagtggcagccatgaaccggatggaccagaagaagcacgagaag

SEQ ID NO: 350572 - DNA, 96 bp, Homo sapiens
cttctactgacgaagcttggaagttgcagaagatcacagttgaaaactttggtgcaacagaagtgaaagagctggttctaaatggtgcagacacag

SEQ ID NO: 350573 - DNA, 100 bp, Homo sapiens
ggctgctcctgtacgtagtcacggtcttgtgctctaaggacttcctccgtcaggcagctggcaggacctgaaggatcacatgcgagaagctggggatgtc

SEQ ID NO: 350574 - DNA, 99 bp, Homo sapiens
gagcaagaacaaggtgacacatattctgtctgtccacgatagtgccaggcctatgttggaggttgcagagcctgaggcctgtgatcagatgtacgagag

SEQ ID NO: 350575 - DNA, 98 bp, Homo sapiens
aggccacctctttctttgtgggccggatgggtccttgagttggtggccaccacatcgaagaatgccaatgcctccctggtgtactccttcctgtataa

SEQ ID NO: 350576 - DNA, 100 bp, Homo sapiens
caggggcaacagaagaagccctttgaggagcactggaggaagcacaccctgtcctatgtggacgttggcactgggaagagtaaaagccaccaccagtctg

SEQ ID NO: 350577 - DNA, 100 bp, Homo sapiens
gtcgaccaagaactgtgaagagaggagttgagaacatctctgttgacattcattgtgctaattgcagagacgacatgacctgtgtgaaggaagagatctt

SEQ ID NO: 350578 - DNA, 83 bp, Homo sapiens
gccctctttgcaacatttcaggaaaacagagaaagaagtgataggagggctctgtagatgatatcatcaagttgaatcgaaag

SEQ ID NO: 350579 - DNA, 101 bp, Homo sapiens
atgcatagcaaacaaaatctgaagattattacagtaaaaacaaaagaaaggcaagagaatacttactagttaaaggtcttctgagctacgataattttttg

SEQ ID NO: 350580 - DNA, 100 bp, Homo sapiens
gaccatcatgctgcgcggccttcccatcaccatcacagagagcgatcatccctggatgtgaatgaggaccctccttaaacaggaatggagaggttgagct

SEQ ID NO: 350581 - DNA, 75 bp, Homo sapiens
aacaaaggtgccatgatgggctgttctaacccccacccccactgccagaagcactaccacaggaagagcaagaag

SEQ ID NO: 350582 - DNA, 74 bp, Homo sapiens
gacgtgggactgcccggggtgtctcgcgcacgggccctcaggaaggcacgtctgagaatggtggatgtggtgga

SEQ ID NO: 350583 - DNA, 90 bp, Homo sapiens
cttctactattcctatatgccgacagtcagccacctcagccctgtgcatttctactacaggacctccaggacctccagcacctccccaga

SEQ ID NO: 350584 - DNA, 75 bp, Homo sapiens
ctcttccgtcaatttcgcggaattctccaagaagtgttcggagagatggaaggatgtcttccaagcgaccagcct

SEQ ID NO: 350585 - DNA, 83 bp, Homo sapiens
agagtctgaagttgttaccaatggtgaaactacatgttcagaaagaaagtgatgaagcattgggcccaacaatgatgagttgg

SEQ ID NO: 350586 - DNA, 75 bp, Homo sapiens
gcagacagcgagtggcgacgatggagtgcatccgccccaacccttttccccctcgtctcctgtgagaattccccg

SEQ ID NO: 350587 - DNA, 80 bp, Homo sapiens
tggccttgcatggtttctgcagatccactccttcacagctataccaaacttaaaggtctcggcgcggaagatggccggcg

SEQ ID NO: 350588 - DNA, 101 bp, Homo sapiens
gctactaaccagagccggctctttctcgatttcctcctctgatgctcctcttcagcctttggtatcctctccttctctgcaagctgctgttgacaaaaata

SEQ ID NO: 350589 - DNA, 110 bp, Homo sapiens
gggtcatgaggatgtaagtgcgtttgaaggcttccacaccctctactccagggggaatcccggaggcaagacacttgaggagaggcgctccagcctggacgctgagattg

SEQ ID NO: 350590 - DNA, 83 bp, Homo sapiens
cccggagagctgacaatgatgaatctcagaagacaatggtgtaaaattggttgatcctttgggtgaaatgttggcaccatcct

SEQ ID NO: 350591 - DNA, 100 bp, Homo sapiens
cggccggagcgcccccgcgagctcggaccaggagctcagtctgaatattcttggagaaagatgctgagtggcattgcagccttcctacttgggctaatct

SEQ ID NO: 350592 - DNA, 100 bp, Homo sapiens
cgcgggtcccagtcctgcggctcctactggggagtgcgctggtcggaaggagaataaaggcagccccgttgatgactgaaaatgacaaagcatccaccta

SEQ ID NO: 350593 - DNA, 50 bp, Homo sapiens
tgggaacttcggagagctcagattagaaaaactgattgcttatcaacgag

SEQ ID NO: 350594 - DNA, 100 bp, Homo sapiens
cttgggagatttccagccttccaagctctactgtgacttcagagacactgccaagcagccttagccctagtgtagagcttacatcacgagaaaaagcagc

SEQ ID NO: 350595 - DNA, 85 bp, Homo sapiens
caaagcctccagaggacataccacctccaggatcaggatgcagaggttgcacagagcattgaggatcaccatcaggaagtgattg

SEQ ID NO: 350596 - DNA, 98 bp, Homo sapiens
tgctcttccatccgcctttgatcgtcttcctcttcagccatccagagcactgaagcatctccaaaacgtagtgatgggacaccatttccttggaataa

SEQ ID NO: 350597 - DNA, 74 bp, Homo sapiens
tcatctcatcagtgcagcggcctggttattttggagctgttggagcactccttgagctgttgaagatcccgtga

SEQ ID NO: 350598 - DNA, 75 bp, Homo sapiens
ctcggggctgtggcctggacttcctcaacaggttatcaatactctggctgaccatcatcatcgtgggactgactt

SEQ ID NO: 350599 - DNA, 78 bp, Homo sapiens
tgagactccctcagatccagtgataattgacagatgcttcctttaaataccaatattcgacttgcgtactcaaatgga

SEQ ID NO: 350600 - DNA, 50 bp, Homo sapiens
aatttctgcccagatagtgtctgcagctgagaaactcccatgtatggaat

SEQ ID NO: 350601 - DNA, 75 bp, Homo sapiens
tggctgctcgcgcctccccaactcgggcccagctgagagccagcctggaggttacccagcagcaggccacccagg

SEQ ID NO: 350602 - DNA, 100 bp, Homo sapiens
ggagagatgaagaacctgagtcaggacgtaaatggaaccctgatagaagcagatttgggatatcctggaggtaaagcaagaattattcataaggaatctg

SEQ ID NO: 350603 - DNA, 100 bp, Homo sapiens
tggcttctcctggctgtcagcctggtgctcctctatctatttttgatgaaattgagtcatgaaactgtaaccattgaattgaagaacggaacacaggtcc

SEQ ID NO: 350604 - DNA, 50 bp, Homo sapiens
ctaagagtccactccacttagctatagccgcaatggctgaaaatggtgat

SEQ ID NO: 350605 - DNA, 100 bp, Homo sapiens
ctagactttttggacgatgtgcggcggatgaacaagcggcaggtaatcaatattatcaatgctgcccaggaaagtagtcccatgcctgtgacagaagccc

SEQ ID NO: 350606 - DNA, 75 bp, Homo sapiens
tgggagaaaccaatgctggaccaggcagtgcccacaggtcaaaatgcagatcttcgtgaaaacccttaccggcaa

SEQ ID NO: 350607 - DNA, 100 bp, Homo sapiens
ctctgcagccacatactatccgtttgttcaggaaccaccagtgacagaaacatccagctggtggcagacggctgctgtaacctccagaagcaaattcaga

SEQ ID NO: 350608 - DNA, 118 bp, Homo sapiens
cgacagaaggcgtctcatggcgttggaataccggctctcagcggctcatgacgacagagatgatggtgtggattattgggccaaaagaggaagaggtcgtggtacttttcaacgtggc

SEQ ID NO: 350609 - DNA, 101 bp, Homo sapiens
ttggactgacttttcttatgctgggatgtgccttagaggattatggggcttatttcaaaacctttgtccctcagttccaggaggcagcatttgccaatgga

SEQ ID NO: 350610 - DNA, 82 bp, Homo sapiens
aaataaggacaaaagccaagaggaggacagttcgctacacagcaatgcatcgagtgtcttctcagaaacaaccagctgagaa

SEQ ID NO: 350611 - DNA, 104 bp, Homo sapiens
gacagagcgagcgcggcgcggggccaccatgggggcccagctcagcacgatgaagactggcccatttgcagagcactccaaccagctgtggaacatcagcgccg

SEQ ID NO: 350612 - DNA, 74 bp, Homo sapiens
ggagctgggcgcggattcgccgaggcaccgaggcactcagaggaggactttccttatcccagttgattgtgcag

SEQ ID NO: 350613 - DNA, 75 bp, Homo sapiens
cacgggcggctccgcagtgaccggactcgggggagagatgtggtatggtgtattcctgtgggcactggtgtcttc

SEQ ID NO: 350614 - DNA, 80 bp, Homo sapiens
cgctggagcggagccggccgtacgcggtgctgcgagggcagaacctggatttgataatgggctgcattaaaagtaaagaa

SEQ ID NO: 350615 - DNA, 75 bp, Homo sapiens
gccgcctaccagcgggcacgagcactggcccaggagatcctgccccaggccctcaaaacacagcgttggcagcga

SEQ ID NO: 350616 - DNA, 99 bp, Homo sapiens
ggaaatgaagctttcaactcaggagattatgaagaagcagtgatgtattataccagtttgcagaaaaaacttcagcatgtgccaggaacacaacctcac

SEQ ID NO: 350617 - DNA, 98 bp, Homo sapiens
gccagcgacggggccaggaagcaattctggaagcgcagcaacagcaagctcccgggcaggtggactcccattattgtcccagttgtttagaaaatatg

SEQ ID NO: 350618 - DNA, 75 bp, Homo sapiens
cggcgtaactatcgcctgacaggcgggctgacgcacgaggcacacaggaaggaggtggagcaggtgtatctgcgc

SEQ ID NO: 350619 - DNA, 82 bp, Homo sapiens
gcgcacttcgtcatgttcttcgcgccctgtgtggacgaatgtggaacctcgctctgtggctgtgttcccttggcactcctta

SEQ ID NO: 350620 - DNA, 100 bp, Homo sapiens
tctctatcagatgctgtgtggaatcaagcaccttcattctgctggaattattcatcgggggtcaggcccagccccaggcccagtggtattactgaattca

SEQ ID NO: 350621 - DNA, 88 bp, Homo sapiens
caaagaggaaatagttcagttctttcaaggaaggtgtcttgctgcaggtaactaatgaagaagtggtcaaccacagagtcttcaagaa

SEQ ID NO: 350622 - DNA, 122 bp, Homo sapiens
gctgaggaaccatgtctccatccccgaccgccctcttctgtcttggttatcaatactctggctgaccatcatcatcgtgggactgactttggtggaagtccttggttacatgtcattattgc

SEQ ID NO: 350623 - DNA, 97 bp, Homo sapiens
gacaaggagctcagtgacctcctggacttcagcatggtattgttgcagcatctggcagtgagactgaggatgaggacagcatggacattcccttgga

SEQ ID NO: 350624 - DNA, 83 bp, Homo sapiens
cctcagaaaaagctatggtgcagcagcttcttcagaagaaagtacctgtgaaggaaatcaaagcagcccgacggccatggagg

SEQ ID NO: 350625 - DNA, 75 bp, Homo sapiens
atccctaagaagacagcttgaacctaggacgcaaagtaccacatgcagcgctgcattgactctggcctctgggtc

SEQ ID NO: 350626 - DNA, 98 bp, Homo sapiens
cgcctctgcttcaatgtgggccgggagctgtacttctatatctacaagggggtccgcaagagtcattcaggagagcaggaaagaaaaggccatccctg

SEQ ID NO: 350627 - DNA, 75 bp, Homo sapiens
gaactttctgcggtgactgtgtcgggtcatgtatacaataatcagttgagaaagatcagtctaaagaaaaggaga

SEQ ID NO: 350628 - DNA, 83 bp, Homo sapiens
gtttcggtcatctaaaggaggttttaaacagtataacagattctgaaggaagatttccattaggtaatttgtttaatcagtgc

SEQ ID NO: 350629 - DNA, 131 bp, Homo sapiens
ggcgtggggcttcccagatctatgctggttacacctgctcctttgctgtcagtgaagtggggtcctaaaaaggtggggacgctgtggcgagaagccgggcttagctggaaggaatttctacctgaaggcca

SEQ ID NO: 350630 - DNA, 82 bp, Homo sapiens
tgatcagccagatctttattacgagtactacccgcacgtgtaccctgggcgcagggaacccctggcagcggttggtcaaaag

SEQ ID NO: 350631 - DNA, 74 bp, Homo sapiens
cgatccagcctgcggagcctgtggggcaggaacgactgaagctggtgactgttttgggtgctggccttctctgt

SEQ ID NO: 350632 - DNA, 90 bp, Homo sapiens
ttaggaattattggcatcaacttggtggagaatagaaggcaaatgggtatttgaagtataccatacaactgttttgaaaatccagcgtgg

SEQ ID NO: 350633 - DNA, 75 bp, Homo sapiens
cgaaggcctcggcctttcacattcgggaagcgtcgggattaggtgaaagagccagcaccgctctttgaccttgcc

SEQ ID NO: 350634 - DNA, 90 bp, Homo sapiens
gaaaaagctgcagatgagagtgagaggatccagtttgtgtgttctctgtgcaaataccggaccttctatgaggacgagatggccagccat

SEQ ID NO: 350635 - DNA, 82 bp, Homo sapiens
agcccatgacgacgctgctggccagggtccagaaggccggggtcagaaagaaaaaagagggtcccggggccgaggcaggagg

SEQ ID NO: 350636 - DNA, 99 bp, Homo sapiens
aacggaaccgcatcgactacgtcagctccgccgtccgtatcgaccacgccccggaccttccgcggccagagatatcttcaaaggaggaagaagaaaggg

SEQ ID NO: 350637 - DNA, 83 bp, Homo sapiens
cgccgctgctacctgcagcgccgtgtggcacgacacaaaaatcagaaacatggtggtggctttgaaggagctgtctattcggg

SEQ ID NO: 350638 - DNA, 100 bp, Homo sapiens
ggaacccgaagtcgtcttcatcggggactccttggtccagctcatgcaccagtgcgaggatctaagcattgaagaacagtcagagtgtgctcaggatttc

SEQ ID NO: 350639 - DNA, 73 bp, Homo sapiens
ggatggaggggattttgtcagcttgtcgtcaaggactggaatgtcacgtggaataccagcaaccccgacttca

SEQ ID NO: 350640 - DNA, 51 bp, Homo sapiens
attcaacccgtgtacgtgcctgtgcctaaaaaatgaatactgcattgaggg

SEQ ID NO: 350641 - DNA, 143 bp, Homo sapiens
cccgacttgtccactgaagtaacagcagcaatgaccttccctcgggaattccacctctgcgtttttccctccagggacaaagtggccttcatcacaggaggcggctctgggattgggttccggattgctgagattttcatgcg

SEQ ID NO: 350642 - DNA, 74 bp, Homo sapiens
atgtgaccattttggcagctactaaccgtccagataggatagacaagagatcagggaagatgtgccttggagag

SEQ ID NO: 350643 - DNA, 97 bp, Homo sapiens
agctggctggcttcagtggaccagtcagtactcctgcatttgtaccaacgaaaactcacgtgctgcttcatcgaatgagtggaaaaggactagctgc

SEQ ID NO: 350644 - DNA, 82 bp, Homo sapiens
cggctccggcttctgctgttgctcttctccgccgcggcactgatccccacaggtgtcttcaaaaacaaacatatttaaaaga

SEQ ID NO: 350645 - DNA, 90 bp, Homo sapiens
tgcacctgttcagcctgtgtccctgcccagccccacctccacagacgtttcacgtgccacgatcatggtgccacggtactgcagtatgca

SEQ ID NO: 350646 - DNA, 101 bp, Homo sapiens
caaaacctttgataaccttaagacaaatgctgtgcttcatgaagttaaaagagaggggctccccgtggaacaaaggaatgaaatcttgactgccatccttg

SEQ ID NO: 350647 - DNA, 101 bp, Homo sapiens
gcctggcgccgaggcggcggtacgcaaggctggagccgcagcgggagcccccgttggtagctggcagtgttgtgatggcttttgaagaagtatgcccggac

SEQ ID NO: 350648 - DNA, 100 bp, Homo sapiens
tcaagtgcaattcaagatatccgaaggttcaattatgtggtcaaaatcgtaaagctgaaaattgaaatcatgaaagtagacaggactaaactgaagaaga

SEQ ID NO: 350649 - DNA, 75 bp, Homo sapiens
acctttgtagtgaatatgtgaaagatatttatgcttatctgagacaacttgagtgccttgctttccatgacattt

SEQ ID NO: 350650 - DNA, 82 bp, Homo sapiens
cccggcagcgcccggcgacccctgctgctgctactgctgttgctgctgctcgatgagagtccggagtgttgtcatgtgaagc

SEQ ID NO: 350651 - DNA, 100 bp, Homo sapiens
ttacgtctgcggaagtgcagctgcctcagttcttagcgcaggcctaatgggattgtttgaaaaacgtcgcttcaggaaattcctagtgtatgttgccaac

SEQ ID NO: 350652 - DNA, 100 bp, Homo sapiens
agactctgaagatgatcagacaaggcaaagcgaaattggtcattctcgctaacaactgcccagctttgaggtatgaggatacatgggctgcacttcacag

SEQ ID NO: 350653 - DNA, 74 bp, Homo sapiens
tgtgcactgataataaccctgcagggcaattgaaggaacagactaaaaatcgtgtcctggaaggaaactacagg

SEQ ID NO: 350654 - DNA, 75 bp, Homo sapiens
tgcaaactctggaaaaaaacttgggaggaagttaacatccctaataggagggttctggttactggtgccactggg

SEQ ID NO: 350655 - DNA, 100 bp, Homo sapiens
gatggccccaggtgtaagcgcagaaagcaggcgaacccgcggcgcaataacggcctccctccctgacatggagagtaacctgtctggcctggtgcctgct

SEQ ID NO: 350656 - DNA, 74 bp, Homo sapiens
ttgaaaaacagtattccaaagaactcggagatgcctggaatacagtaagtatgccaccacgggctgttccctga

SEQ ID NO: 350657 - DNA, 82 bp, Homo sapiens
tgaactagatgacctgcttgattctgcacctgaaactaatgaaactgttatgaaaggacctaagtgtgaaataccccgaaga

SEQ ID NO: 350658 - DNA, 95 bp, Homo sapiens
ccattgttagtgaacgtggacaaagctgttgtctcagggagcacagaaaattctgcttggtcagaatcgtgatggcattgtgttcagcactgatg

SEQ ID NO: 350659 - DNA, 100 bp, Homo sapiens
atgtaccacctttctggcaatgagtatcctagaaggaaaacatcaccatggctacagaaattggttctcctcctcgttttttccatatgccaaggttcca

SEQ ID NO: 350660 - DNA, 82 bp, Homo sapiens
gctgtatgattaggccacaatcttcaatgagtaaacatattcctcgcccgggggctggagaaggccaggcagcagctgcagg

SEQ ID NO: 350661 - DNA, 75 bp, Homo sapiens
ggagagctgcgccggcgagaagcggccgagccagcagcagagacggagtcttgctatgttgcccaggctggtctt

SEQ ID NO: 350662 - DNA, 88 bp, Homo sapiens
ttcaaccaggagaaaagacagcaatggaccgagttttacagctcccagcacagtaggaaagagaaatttgagtcctagtcaagaggaa

SEQ ID NO: 350663 - DNA, 74 bp, Homo sapiens
ctgctgagcccgtccgtccgccgccaccacccactccggacacagtggccacagatgtctttaattccaaaaac

SEQ ID NO: 350664 - DNA, 100 bp, Homo sapiens
cagccagacccaggccatcctcaccaagctcaagtgtgccgcagctggcagagaggctgatgacatcgtgaactggctgaagaagcgcacgggcccggct

SEQ ID NO: 350665 - DNA, 50 bp, Homo sapiens
aaagcatactgcgagccctgctacattgacgtgttcctcatgatccggcg

SEQ ID NO: 350666 - DNA, 75 bp, Homo sapiens
cgtttggtctcctgccgtgcccggttgacatcatggacatatgtgagtccatcctggagaggaagcggcatgaca

SEQ ID NO: 350667 - DNA, 100 bp, Homo sapiens
ctcctgccaaaaggaaatgcatctttatgtcagaaacacaaagcagcccaaccaaaggcagttgcagcaatcacatctaccccggcagcacctccagcca

SEQ ID NO: 350668 - DNA, 76 bp, Homo sapiens
ctggagaaaaactggatgttggtagaaaaagcaagagtttgttatatagcagtcatgatgatgggcagcgcccgag

SEQ ID NO: 350669 - DNA, 83 bp, Homo sapiens
agctattgaacgtttgacatgtggcaagtttgaattgagatgtgctccaaaagaatgcaatggtgtaaagattccagttgatg

SEQ ID NO: 350670 - DNA, 74 bp, Homo sapiens
gaagatgtagtccaacccacatcagcagggattaaagcctgtggtttccacagaagcaccacctatcatatttg

SEQ ID NO: 350671 - DNA, 75 bp, Homo sapiens
ccccaggcctgcgtccgagtctccgccgctgcgggcccgctccgacgcggaaggagcatggcctgttcttattga

SEQ ID NO: 350672 - DNA, 100 bp, Homo sapiens
taggttgcatgcctccgcctgtgtcttctgcagtgattttaaccaaggcagttggtggaaatgagattcagaccaggatgtagcactcaaacttgcccag

SEQ ID NO: 350673 - DNA, 95 bp, Homo sapiens
ctcccggcagctctggagactcctgctgtcacgtcacctggcccctcaccatcaccatcctcatctctcttggacatgcgtcgggatgtccagga

SEQ ID NO: 350674 - DNA, 74 bp, Homo sapiens
ggagaagttctcccagctggcagaagcctatgaggtggttccacgagtgtttgggcgcatggtgggtaaaagcc

SEQ ID NO: 350675 - DNA, 97 bp, Homo sapiens
cgtaaaccttgtggagatagattattttgggctacgttactgtgacagaagccatcagacgagtgctgcagcagctcccagtccagtgctaggaaac

SEQ ID NO: 350676 - DNA, 98 bp, Homo sapiens
ccgggaaggagcatcccaggacctaccagaatctggttagcatggcctcattgaaagaactagatcaaagactctttgaaaattacatcgagttgaaa

SEQ ID NO: 350677 - DNA, 100 bp, Homo sapiens
taaggaacttacgcacttaaaataattgggcagaagagaagcagtgaaggagtgcagaggcatcacctgaaagaaattacaggggacatcagggccactg

SEQ ID NO: 350678 - DNA, 90 bp, Homo sapiens
actgtttgagcccggaagcgcagaagctggttgttctccaaagaagtatggaacgagtacagtccttttttcagaaaaataaatgccgtc

SEQ ID NO: 350679 - DNA, 100 bp, Homo sapiens
cagctcgcagcgcatccccgcgcacagctgtgagccgtgagctttgaggcggtgggatgtgtcagcagaatgtctcctgcccccgagagcgaccccgagg

SEQ ID NO: 350680 - DNA, 74 bp, Homo sapiens
aaggatttcagcaacaatgcctctgttcaaactcccaggagcttgaagaaatccgcaaatgtgggatgaaaaac

SEQ ID NO: 350681 - DNA, 90 bp, Homo sapiens
tggcacacactctaactgaaagcagagtattaaagaacactagacatccctttttaacaggcacacgtgtttcacgttgacaggtttgct

SEQ ID NO: 350682 - DNA, 75 bp, Homo sapiens
ggggcgcaggaggcggtgcacagcgccaagggaggtggggaagacagggctccagctaccacaggacgggctctg

SEQ ID NO: 350683 - DNA, 101 bp, Homo sapiens
ctcgggagccgtggccctgatccagacctgggcaggttccttcaatggtgccttagctgctgttcctgtccaggacctgggctccactgtcatcaaagaag

SEQ ID NO: 350684 - DNA, 74 bp, Homo sapiens
gaactctttatctttctgtggatccttacatgagagacaagagagacacctccaacttcgacaaagagttcacc

SEQ ID NO: 350685 - DNA, 122 bp, Homo sapiens
gagtctccgcggtggaggtctgcgttgctcttgcttttcctcgctggggtgtacggtaagtaaggaggtctctgtaccatggctcgtacaaagcagactgcccgcaaatcgaccggtggtaa

SEQ ID NO: 350686 - DNA, 100 bp, Homo sapiens
cttgaacccgggaggcagaggttgcggtgtagtggtgttgagcactttattttggaagtgatcgggcgtctccctgacatggagatggtgatcaatgtac

SEQ ID NO: 350687 - DNA, 75 bp, Homo sapiens
aacaatttctcctgctctgcagcttctgttcagatgaaatcatgcaccaggacatcgtcccgctctgtgctgccg

SEQ ID NO: 350688 - DNA, 102 bp, Homo sapiens
acgacctgcgctacctgtcggaggaggctgaactagatgcagagcacgcccagaaggtcctggaaatggagcacacccagcaaatgaagctgaaggagcggc

SEQ ID NO: 350689 - DNA, 87 bp, Homo sapiens
gcgcttcctggtgagcatgccctccaaataccgcaagaacatctggatcaagagagaccgatttgggatgttgcccctggatgagcc

SEQ ID NO: 350690 - DNA, 100 bp, Homo sapiens
ccgaggaacccggctgaggcggcagaccaaaccaatgcacaactcctacgtactgatggtggtcttacgtttccctaagtttctgccgactaaactgtgc

SEQ ID NO: 350691 - DNA, 100 bp, Homo sapiens
agtacatcatcaaagacaagcacatcctcgccaagtttaagtgctgtggggctgctaactacacagattgggagaaaatcccttccatgtcgaagaaccg

SEQ ID NO: 350692 - DNA, 100 bp, Homo sapiens
attaagccttaccagcaggggcgacaacagcatcaggttcttgggtgtctctggggagtccctgggccagaccttcctccagactccagcccacctcttc

SEQ ID NO: 350693 - DNA, 100 bp, Homo sapiens
caaacaagccttcagaatcagatgaatggaggacctttttatagccagaatccaggaaaatatgttgtgttcttcttttaccctcttgacttcacctttg

SEQ ID NO: 350694 - DNA, 74 bp, Homo sapiens
ttatgaacaaagaagtctcccaggtggactgtgcattgtcacttattcgacttgggatggagcggaatattcct

SEQ ID NO: 350695 - DNA, 50 bp, Homo sapiens
ttgtgaccctgcagctcctcaaaatcatggaagggaagtggttgctgtgt

SEQ ID NO: 350696 - DNA, 98 bp, Homo sapiens
ctcgccagtcttggggacagtgtcagcatgatgctgaataatcccctatttgctggaaatcctcagcttcaagaacaaatgagacaacagctcccaac

SEQ ID NO: 350697 - DNA, 97 bp, Homo sapiens
tgtgaacacgcaccgtgacaagccaactataatttttatggtgggacgaggatacctgtctccagatctcagtaaggtacggagtaactgtccaaaa

SEQ ID NO: 350698 - DNA, 96 bp, Homo sapiens
tgtcttttccagtggacagtagttctgctgttgggctctttccaaattttaacacagacctcagcagccatgtcgaagccccatagtgaagccggg

SEQ ID NO: 350699 - DNA, 75 bp, Homo sapiens
agaatcgctctacagccagcattcaggtcatttatagcaaatacactgacctggttccaaaggaggttatgaatg

SEQ ID NO: 350700 - DNA, 76 bp, Homo sapiens
gggcccgttgcggctgcaggcaccatggaccgagcccccacggagcagtctccaacctgtcccagtatttcagccc

SEQ ID NO: 350701 - DNA, 99 bp, Homo sapiens
ataatttctttctcgctgatcgcctaacttctactgacgaagcttggaagttgcagaagattttggactcagcaaggagtcagtagatcaagaaaagaa

SEQ ID NO: 350702 - DNA, 100 bp, Homo sapiens
tggcggatggccccaggtgtaagcgcagaaagcaggcgaacccgcggcgcaataacgagttacactgttagaccttatgatagccaagataacgagtgat

SEQ ID NO: 350703 - DNA, 87 bp, Homo sapiens
cggggctccaatggcgctttctacaaggacatggatttgattgacatactttggaggcaagatatagatcttggagtaagtcgagaa

SEQ ID NO: 350704 - DNA, 98 bp, Homo sapiens
gcccctctaagcccggagcccggcgctttccccgcaagatggacggtttcgccggcagtctcggtggctgaagccatactattttatagaattaatgg

SEQ ID NO: 350705 - DNA, 75 bp, Homo sapiens
acgcttgtctgaggattacggcgtgctgaaaacagatgagggcattgcctacagagcaaacatgaacgttggagt

SEQ ID NO: 350706 - DNA, 87 bp, Homo sapiens
cacatcaaagacagctttcacagtttgcgggactcagtcccatcactccaaggagagaaggtctctaattaacagaagatggcaaag

SEQ ID NO: 350707 - DNA, 75 bp, Homo sapiens
agcctcttctgaaacactggggagacggtggctcagggagtaaaggaaggccagttgagcaaacagaagtgttcc

SEQ ID NO: 350708 - DNA, 100 bp, Homo sapiens
attttctatgaagcacaatacaaagaagtaaaagtggtggctaatccctggtacctgacagtgtaaagaaggagctcctacaaagaataagaacattcct

SEQ ID NO: 350709 - DNA, 100 bp, Homo sapiens
ggcgccgccgccgccgcacttccgggtgccattgcaggctgttttggagtcagcggaagatcaccaaggccagggagtggttccaccgcactgtgaagat

SEQ ID NO: 350710 - DNA, 98 bp, Homo sapiens
ccgccgccgccgggcagcccaatgtctcctgcacgtgcaactgcaaacgctctttgttccagagcatggagatcacacacttccaccctgggcagcgt

SEQ ID NO: 350711 - DNA, 100 bp, Homo sapiens
caagaaggcaatcctctaaggatcaccagcttctacctataagacttcaactcaagatgcagggcccaccagctctgagcagatcatgaagacaggggcc

SEQ ID NO: 350712 - DNA, 50 bp, Homo sapiens
attaaatgccgagaaggccagtacgcgtgagtgcatctccatccacgttg

SEQ ID NO: 350713 - DNA, 50 bp, Homo sapiens
caagaatgaagccacggaccctcgcggaaagaccacagcaagattctttc

SEQ ID NO: 350714 - DNA, 100 bp, Homo sapiens
agcccgggaccgtgtgggaggcaggacttacactcttaggctccagcggcgccatgagcaaatgaaaaagaatttggaagcacagcacaaagaattggag

SEQ ID NO: 350715 - DNA, 100 bp, Homo sapiens
cacggtcaacgtggacggcttgacagccctgcaccagaaactgcttatcaataacagctgtagcactgtggcttttctccatggactcatggtggtcttt

SEQ ID NO: 350716 - DNA, 90 bp, Homo sapiens
ctgattcacaattatggagactgttaatctatgccagcaattatgacaatgttagcagaccatgcagctcgtcagctgcttgatttcagc

SEQ ID NO: 350717 - DNA, 75 bp, Homo sapiens
ctgtggattaactcagtggctcaacaggctgaagggagggcaagtgtccagagaatggctgggatgaaagtacac

SEQ ID NO: 350718 - DNA, 83 bp, Homo sapiens
ccctggcggacgcaggagcgatggcagcgaccgatatagctcgccaggtgcgggctgacgcacgaggcacacaggaaggaggt

SEQ ID NO: 350719 - DNA, 96 bp, Homo sapiens
caagcaatcctaccatgtcagccttcccagtagctggaactacagtctcaggccctaattgaagagctgttgctatacaagcgctcagaagatcag

SEQ ID NO: 350720 - DNA, 100 bp, Homo sapiens
tacaagttccaaggaacttagtaggccccttcacagatgtagtcactacaaatcttaaattgcgaaatccatcggatagaaaagtgtgtttcaaagtgaa

SEQ ID NO: 350721 - DNA, 98 bp, Homo sapiens
ggcaatatgtacgacgcggatgaggttgaccatgttgttcctgaacctgggtccagcctactgacctctttcgagaagtggcacgaagcagctgacac

SEQ ID NO: 350722 - DNA, 98 bp, Homo sapiens
tggaagatggaccaaagcgatacaacacaacatttgcctgcaacaaggacagcggccagtggcactactttgatgacaacagcgtctcccctgtcaat

SEQ ID NO: 350723 - DNA, 100 bp, Homo sapiens
tgagcatccccgtcatggtggtcaccctggtggcctcatcctgcatgactcgcctgtcccggtctcgtacagcctctctgaccagtgcagcatccgttga

SEQ ID NO: 350724 - DNA, 90 bp, Homo sapiens
tatggatgatcgagaggatctggtgtaccaggcgaagctggccgagcaggctgagcgatacgacggactcagtggtctttgaggatgtgg

SEQ ID NO: 350725 - DNA, 100 bp, Homo sapiens
gactacgcggccgcggagacctacctgcggcgtcggcagctgctgctccgagggcacagtcttttgctgagcgcctgcgcctgggaattgcagtgattca

SEQ ID NO: 350726 - DNA, 98 bp, Homo sapiens
aacaatccgtctggatcacggatgtaggaagtgaaaaagtcccagactctccagaaaatgagctgaaatccagatgggaaaacctgttgggtcctgat

SEQ ID NO: 350727 - DNA, 90 bp, Homo sapiens
gatccgcgtggtcatccatgacctgcagcagacgacctgatggccaaaagaaaggaagaaaatttttcctctcctaaaaatgccaaaagg

SEQ ID NO: 350728 - DNA, 74 bp, Homo sapiens
taatgttcaccaatcaatctgaagattctgaaagtaactctcaggagccttctccgcagttggcttcctcggta

SEQ ID NO: 350729 - DNA, 50 bp, Homo sapiens
ccattgaacgggagtatgggcaggaggagatgttaaagtaacccatcttg

SEQ ID NO: 350730 - DNA, 100 bp, Homo sapiens
gatcaaagactgcatgaagaaggtggtggctgtccacctccaccagacggtccaggtggctattatcatggaaaactaatttttcccagagaatttcctt

SEQ ID NO: 350731 - DNA, 75 bp, Homo sapiens
tccagaagcagatatcggtgagtctggcttcagccttgtcatgaaccacccagcctgtgtcaatgagattgctct

SEQ ID NO: 350732 - DNA, 75 bp, Homo sapiens
ccaaacttggtgtcttttctacaaactctgtgcctcaacaaccatttctaagtgtaaaatgtttattggaggctt

SEQ ID NO: 350733 - DNA, 101 bp, Homo sapiens
tttcctcttgacactgcagctgcagtcaacctcttccccaatttcaatgcgattaaatgccttaatggataaagaaaaattggatgttaagattgaatatt

SEQ ID NO: 350734 - DNA, 92 bp, Homo sapiens
gtcaaatgtgggtgtagagattatggaaaaattcaatacaattagtgtctccaaatgcaacatgcattctgtgctacctgacacctattggg

SEQ ID NO: 350735 - DNA, 75 bp, Homo sapiens
acacatttgacattgatccgatggtggttactgcttctgcagaaagccgtcattacacctgattttgaaaaaaac

SEQ ID NO: 350736 - DNA, 75 bp, Homo sapiens
agtgtatagggaaacctgggggctccctggacaactccgagcaggacgccaacaaggagagcagcaagacctcca

SEQ ID NO: 350737 - DNA, 98 bp, Homo sapiens
tgtatctgtggcccttccaaataagcggcataaagcaattgagaattcagaggggtctggttgctgcttacagtggtgacagtgacaatgaggaggag

SEQ ID NO: 350738 - DNA, 90 bp, Homo sapiens
gatgtcgggacaccccggaagctgggaaatggcctcaggagtgcaagtagctgatgaagtatgtcgcattttttatgacatgaaagttcg

SEQ ID NO: 350739 - DNA, 98 bp, Homo sapiens
cgacctggagctgggccaggccgtggagggattaaagcctgtggtttccacagaagcaccacctatcatatttgccacaccaactaaactgacctccg

SEQ ID NO: 350740 - DNA, 90 bp, Homo sapiens
ccagccccgcggccagtgcccggttcccctgcccgggacgcacccgcagaaggcctcccgaggagcccagacagctgcagccacagctcc

SEQ ID NO: 350741 - DNA, 99 bp, Homo sapiens
caagtaaagtcccaagtgaaaacaaggatgcgcagttgtgtagcagttgagtaatgctggttagctgttaaggtggcgtgttgcagtgcagagtgcttg

SEQ ID NO: 350742 - DNA, 101 bp, Homo sapiens
ttgagtcctgcagtgtaccacgaaaaatcaatgtcagcccaacaacttacagactactgtcagaggatgtaggaatggacatcccctttgaagagggcgtg

SEQ ID NO: 350743 - DNA, 82 bp, Homo sapiens
gaagaatggcagtgctcaaactcaccgaccagaagaacttctgcttgggtggctgaactctgatcttgacctagagtcatgg

SEQ ID NO: 350744 - DNA, 82 bp, Homo sapiens
gacaaccaggcaatgctggatagataccgaattcttatcacaaaggtaatggagagtgaagagttcatgttgcttccagcca

SEQ ID NO: 350745 - DNA, 100 bp, Homo sapiens
ctcggattaaggaataatttatgaagctccgttgactaccgtggagagatcataatttggggttcaagattccaggcctctccttggtggtgggcttggt

SEQ ID NO: 350746 - DNA, 50 bp, Homo sapiens
ccctaatggaggtctccagtttcgaaatgtctttcctccaggacccaagt

SEQ ID NO: 350747 - DNA, 74 bp, Homo sapiens
ttcagcacccccacaagcatgcaggtgttctccttctcaacgctgtcctcacggttcgtgcccatcaagccaac

SEQ ID NO: 350748 - DNA, 88 bp, Homo sapiens
cagccaccggtaccttcttccagacttcccaagtaagaagcggaagaggagccgctggaaccaagacacaatggaacagaagacagtg

SEQ ID NO: 350749 - DNA, 75 bp, Homo sapiens
ggcttgggccgccgagctggacccggaccggttttgggcatctcgtccccggtgaagaagacagagatggacaag

SEQ ID NO: 350750 - DNA, 75 bp, Homo sapiens
gacctgctggcgcaggacgccgacatcgtgtgccgctgccagcgtggggtagagcagcggctgccatgctcttct

SEQ ID NO: 350751 - DNA, 83 bp, Homo sapiens
catcagattctgaatgtatgagatacatagcaaccatcactgataagtgttcctctgaacaacagggagaatatctctgatcc

SEQ ID NO: 350752 - DNA, 90 bp, Homo sapiens
cttctctaagagatgcctgcagcctgccatgggacgtggggtccaccggtacagccggcacagtcttcactaccgtagaagaccttggct

SEQ ID NO: 350753 - DNA, 100 bp, Homo sapiens
ctcggacccggccacgcagtccccaggggcccggcccggggcgcgttgaaggtaaacactacacgtgaagagtggtgaaagggaacattgattactgaag

SEQ ID NO: 350754 - DNA, 102 bp, Homo sapiens
agcaggacatcttgaccatcttcaagcgcctccgctcggtgcccactaacaagacaatgcagatcttcgtgaagactctgactggtaagaccatcaccctcg

SEQ ID NO: 350755 - DNA, 75 bp, Homo sapiens
gatccagcctgcggagcctgtggggcagcattaaagggcagtatttaaagtcagttggcaagcagtggaataaga

SEQ ID NO: 350756 - DNA, 82 bp, Homo sapiens
agggcaaagagctggtggcctcaggtgaaaagactgggaggtgctggtcctagggaagctcaagtgggacctggctgctgtg

SEQ ID NO: 350757 - DNA, 50 bp, Homo sapiens
ccgagctccagccgaaggagaaggggggctgcctgctgtttcccggggag

SEQ ID NO: 350758 - DNA, 99 bp, Homo sapiens
aaagctggtgttattgctgttattgtggttgtggtgatagcagttgttgctggaattgttgtgctggtatgcagaatctgtgggagcaaaacattatca

SEQ ID NO: 350759 - DNA, 100 bp, Homo sapiens
actcctggagaagggattgcccagtcagcaaaggttcagccctccaagatttaaggaccatagtacagctatggatactgaaccaaacccgggaacatct

SEQ ID NO: 350760 - DNA, 83 bp, Homo sapiens
acttctagacgacaaaatgcaaaaaaggaggccaaagactttgttgatgataattagaagcatgctttccactgaacttcccg

SEQ ID NO: 350761 - DNA, 95 bp, Homo sapiens
ccaggtcttagaggctcccggagtgtatgtctttggagaacttctggagctggccaacgtgcaggaggtctatgttaacaatgaatgggcaacca

SEQ ID NO: 350762 - DNA, 80 bp, Homo sapiens
tgctgagggggcgcgaggggaacggaggccagagctgcgggccaattcctgtccccccagcagcatggcatcgtgtgctg

SEQ ID NO: 350763 - DNA, 49 bp, Homo sapiens
acagcagcaaccttggagcaggcagcctctaaagagagcaatcactaca

SEQ ID NO: 350764 - DNA, 98 bp, Homo sapiens
gaaaggcaaagccaaaggcaccccgattgtcgatgggctcgctccagaggacatgagcaaggagcagattcttggtgccaccattgagaactccagga

SEQ ID NO: 350765 - DNA, 100 bp, Homo sapiens
tacctcagccaccgagaaggctacggcaccatgtacatgaagacacggcttttccaggctccataaaaatacagactcaccagttcctgctttgatgtga

SEQ ID NO: 350766 - DNA, 90 bp, Homo sapiens
ttgagctccaggagttcgtctcttacgtctgcggaagtgcagctgcctcagttcttagcgcaggcgctgaagtatgccttccagacccac

SEQ ID NO: 350767 - DNA, 100 bp, Homo sapiens
aaccaagacatctgaggggcaaccaggaggtgcgtgtggctgcagagcacacagatccacagtcgactcttctcatcccccaaagatcattctgcctggg

SEQ ID NO: 350768 - DNA, 83 bp, Homo sapiens
tgtgcactgaagggggccaggccggccatgagcagggcagctctagccggcccggtccttggactgaaagaatgcaccagggg

SEQ ID NO: 350769 - DNA, 90 bp, Homo sapiens
ctttgagcttggacctcggggaattaggccagcgggagccctaggggcccggaccttgctcctggtctcgcatgaatttgccttgaattt

SEQ ID NO: 350770 - DNA, 82 bp, Homo sapiens
tgaagagcagacccgtttgggttctccacgcattctagactcccgaagagcacagagatactcctgagaataaccctgatac

SEQ ID NO: 350771 - DNA, 90 bp, Homo sapiens
cgcctgggggtgcgcgcctgcgacctgcccgcctggctcaaactttggaacaaataccgaatttccaacattccatcactaatattcctc

SEQ ID NO: 350772 - DNA, 97 bp, Homo sapiens
gccatctcctatgaagaatggaatgaccctcctgctgtgtgacttctgacagctctctccatggaaggaggcggcggccgcgatgagccttcagcct

SEQ ID NO: 350773 - DNA, 96 bp, Homo sapiens
tgctgaggaggccagccttggaagactatgtagtattgatgaaaagagggactgccataacattcccaaagataagtttataccatggatagcaca

SEQ ID NO: 350774 - DNA, 83 bp, Homo sapiens
ccggcggctgctgctgctgctgacgctgctgctgcccggcctcggggtgagaagccctaccactgcaactgggacggctgcgg

SEQ ID NO: 350775 - DNA, 83 bp, Homo sapiens
gagtatggctgcagaggatccatctgtcttagcaaggctgtcatcacagtaccgaggagaaggcattgtatatgggacactag

SEQ ID NO: 350776 - DNA, 83 bp, Homo sapiens
atcccctgaagatttgcctgccctcagtggttaacttttttgctgcaatcacaaaatcatgtatcagttggaggacttggaga

SEQ ID NO: 350777 - DNA, 100 bp, Homo sapiens
aactcacgcagtgaccccaagcttcaagaactgatgaagtttttgaagaatgccggccagtcatcgagtgcccttggtttgggtacaaggtgcgttttcc

SEQ ID NO: 350778 - DNA, 98 bp, Homo sapiens
gcttccgccgccgcctgccgtgcttgatgtgcagaaagaagccggacaccatgatcctaacactggtgaagcagcgcttgcagatgtacaactcgcag

SEQ ID NO: 350779 - DNA, 82 bp, Homo sapiens
cggacagccgcgcgctgagggtctcggggcgggcgccgcgggacctctccgggccatggattcccaacttcttctggagcct

SEQ ID NO: 350780 - DNA, 102 bp, Homo sapiens
gaaggcgccgcgccaggccgggcgggcggtgtgatgaatgcagactctgctaccattttggctgtttggatcctcctttgaaaaagtctcctaaacagacag

SEQ ID NO: 350781 - DNA, 50 bp, Homo sapiens
ctcagccttccaattttttaagaagcgggaaacacatgaaattgtggcga

SEQ ID NO: 350782 - DNA, 100 bp, Homo sapiens
gcttgctgcaggctctggggagtcgccatggtaactaggatttctacctcaaccgcgagacctatgcaaggacggtgtggaccaactcgcgcccgcggca

SEQ ID NO: 350783 - DNA, 100 bp, Homo sapiens
atcaaatgctgaaatatgtttcaacatctgaatcagatggtacagattgctgcagtggaaaatcaggacagagcgggatgccaccagcttgtccaaaggg

SEQ ID NO: 350784 - DNA, 100 bp, Homo sapiens
aggatttgcagctccaggaagcgagatgtcgaagccgccacccaaaccagtcaaaccagaaaatggacccaagtggggtcaaagtgctggaaacagcaga

SEQ ID NO: 350785 - DNA, 131 bp, Homo sapiens
cttggagccctaacagaggaagagctgaggaccctggaaaatgagctggatgagctggaccctgatatcccaattttgttcgtacttttcttaccacatatcgttcattttgtaaaccacaggaattgctg

SEQ ID NO: 350786 - DNA, 82 bp, Homo sapiens
ttcgctcgtactcgtgcgcctcgcttcgatcgatctggaatagaaaacgtcaactctgtggaggctttgcaggaaactctca

SEQ ID NO: 350787 - DNA, 75 bp, Homo sapiens
aaaggacagttagaagacagtagaggatctgaagaggcaaaatgcagtattacaagctgcacaagatgatttggg

SEQ ID NO: 350788 - DNA, 82 bp, Homo sapiens
aacgaaacagctggattcagatcattcaggacacaatcaacaccctgtcaagaaatccctgaggagggacgggaagtagagg

SEQ ID NO: 350789 - DNA, 75 bp, Homo sapiens
cagattcgcagtggtcgcttcttctccttgttccagaaagctgagtctgatctggattacattcaatacaggctg

SEQ ID NO: 350790 - DNA, 98 bp, Homo sapiens
ggaaagtcgctcaagcagtggacagagcggagaaagcgacttcgggacactcatgaggaccatgatacttccactgagaatacagacgagtccaacca

SEQ ID NO: 350791 - DNA, 100 bp, Homo sapiens
cacgcagcgagccagggatgtgagcggcgccccgcggcatggcagcctcagccccttggatctcccttcgtggagacgacaccggggtcctcctgcccac

SEQ ID NO: 350792 - DNA, 83 bp, Homo sapiens
cctgcatcaacctgatcaccagccaggagtacgccgtcaaggtaactaggatttctacctcaaccgcgagacctatgcaagga

SEQ ID NO: 350793 - DNA, 71 bp, Homo sapiens
agaaggaaattgtcccgaatccctgcaggcccagagccatggctatctcctcttcctcctgcgaactgccc

SEQ ID NO: 350794 - DNA, 75 bp, Homo sapiens
agagaaaattcaagcaagtagcggaggcatatgaagtgctgtcggatgatgtatcggcaagcagtgtaaacggag

SEQ ID NO: 350795 - DNA, 123 bp, Homo sapiens
actgaatttgggcagtcaattaacataaataggctgcttggagaaaatgatggggaaacaagagctttggatgaaaactttcggaagagaaagttgcctgtggtaagttcagttgttaaagta

SEQ ID NO: 350796 - DNA, 88 bp, Homo sapiens
atcatggccgcagccgctctggggcagtggactaaagaggatggacatagaacttccacctctgctgtccctaacctgtttgttccat

SEQ ID NO: 350797 - DNA, 100 bp, Homo sapiens
atggcagcagacgctttggctactgcaggcgcttactgccgcttacaaacacgcagatggcaagaagattgatggcaggagggtccttgtggacgtggag

SEQ ID NO: 350798 - DNA, 87 bp, Homo sapiens
acttcacggagctctggagaaacatgaagttcgggactatcttctggctgtgaggatatcattgctgagagcatctcattagatacc

SEQ ID NO: 350799 - DNA, 100 bp, Homo sapiens
tggctgcaacaggaccacagtcaagacgatcatagtcactgaaactggcgatggaatatgagaggagccctctggaaagaaaaggacagaccctgtgctt

SEQ ID NO: 350800 - DNA, 100 bp, Homo sapiens
ccacagtttttgagtcctgaagcgcagagtcttttacgaatgcttttcaagcgaaatcctgcaaacagattagctctcaaaggtctatggccctgtgttc

SEQ ID NO: 350801 - DNA, 83 bp, Homo sapiens
atgggatctttgtcctttgggatttctgaacttcagaaagccagtgttgatggctgcacagtccagaagcgtgagctggtgaa

SEQ ID NO: 350802 - DNA, 57 bp, Homo sapiens
caatatagtttggtgtttcggaagccaagtaactaacatcttgacaaagaggataaa

SEQ ID NO: 350803 - DNA, 75 bp, Homo sapiens
taaagcagcgtgcgttcagccctgggccagcgacgtgccccaggacgggctgcttctgcacggccccttcgcacg

SEQ ID NO: 350804 - DNA, 74 bp, Homo sapiens
ggagccctggaagcagcagctcaccgaggacggggactcagtgaaattcacatgtctgaagaagctatacagga

SEQ ID NO: 350805 - DNA, 100 bp, Homo sapiens
agaaggatgaaggacaaacagaagaagaagaaggagcgcacgtgggccgaggccgcgcgcctgggctttgtatcccccatccgaaggctggtgttcccca

SEQ ID NO: 350806 - DNA, 98 bp, Homo sapiens
gtcgcgtgtctaggtgagtcgcggtgggtcctcgcttgcagttcagcgaccacggtttcatggcatgatctccagagaagcagccgaccagctcttga

SEQ ID NO: 350807 - DNA, 50 bp, Homo sapiens
atcttctggtcagagatacttcttaaagatatgacatgtctacatttatt

SEQ ID NO: 350808 - DNA, 101 bp, Homo sapiens
agaagttctttgtcgggaacagcagcatgtcatggaagaattatttcaatccagtttcaggaggattgccagaagagacaaagcatggaggacacaagaat

SEQ ID NO: 350809 - DNA, 50 bp, Homo sapiens
ctgacacgcatgcgcgagtgtggagacagccgctccgaccgctggtccca

SEQ ID NO: 350810 - DNA, 100 bp, Homo sapiens
ttgcttttgaaaatgctttcgagagactactggacattatttcagaggaggggaacagtgatggaggttctctacttaaaagacaatgactactgatgaa

SEQ ID NO: 350811 - DNA, 120 bp, Homo sapiens
aagattttgaggagatgaggaaggctggtatctttcagagtgtaaagtaatcttggaatataaagaaaaatggctacaaacttcctagcacatgagaagatctggttcgacaagttcaaa

SEQ ID NO: 350812 - DNA, 100 bp, Homo sapiens
ctgtgggcggtggagtctagacttccccaaggcgtgtacccaggttttttgccctgacatctcttcgtcttgtgtttttacttgcatttggcttgatgat

SEQ ID NO: 350813 - DNA, 100 bp, Homo sapiens
tgatgagctgtgtacagcaatggctgaggaattgaatgctgtcattgtttccattgaacgatgggccctactccaaaggaggcaaggacgcaggaggggc

SEQ ID NO: 350814 - DNA, 96 bp, Homo sapiens
gcagttccttcccaatggcaactatgtttggatgttggatctacactttctcaagcactgtgatcttcaaatatgaggaaaatgaggcccaaagaa

SEQ ID NO: 350815 - DNA, 100 bp, Homo sapiens
gcactcgtaacctggatcccagaaggtcgcgaaggcagtaccgtttcctcagcggcggcgaaaccccaaagagtcaggtagggaccctgctcttccgcag

SEQ ID NO: 350816 - DNA, 129 bp, Homo sapiens
tttggtcagtgaacagacacgggtgaatgctgctaaaaacaagactggggctgctcccatcattgatgtggtgcgatcgaacagagtgtgaggtgtgagacaagtacttcagttcaagagtgtatttag

SEQ ID NO: 350817 - DNA, 100 bp, Homo sapiens
caggaggaagcgatggcttcagacagcatatttgagtcatttccttcgtacccacagtgcttcatgagaggtacccactgatggtaatgctggcctgctg

SEQ ID NO: 350818 - DNA, 97 bp, Homo sapiens
gcggccctcggtgcgggctccagggcatgctcgggaccccccgcggctccagcccagacgccccggcctcaggaaccctaaggactctgcaatatga

SEQ ID NO: 350819 - DNA, 97 bp, Homo sapiens
gcagcagcaacagcttcgaaggcgaccttccttgctttcagaatttcacccaggttctgacagaactttcacgatggccgtaaagcacagcagcaca

SEQ ID NO: 350820 - DNA, 90 bp, Homo sapiens
acttgatgaaggtacacccaatagagaggtgatctgcaactctttcaccatctgtaatgcggagatgcaggaagttggtgttggcctata

SEQ ID NO: 350821 - DNA, 101 bp, Homo sapiens
ctcaggacttgagtaacagcaacatgtcatatttgatcagaaattggatgaaccttcgggatgctgagacagggaagatactctggcaaggaacagaagac

SEQ ID NO: 350822 - DNA, 99 bp, Homo sapiens
agatatttatgcttatctgagacaacttgagggaactgctcgcagaaagaagaaggtggttcatagaacagccacagcagatgacaaaaaacttcagtt

SEQ ID NO: 350823 - DNA, 90 bp, Homo sapiens
gccttctctaggccctggctgctacaaggccatgtccggacccacactggtggacccaagagccatatcagtgctagcaaaatggcagaa

SEQ ID NO: 350824 - DNA, 96 bp, Homo sapiens
cagatgggacttccccgcgtgacagcacagagataacggccagccctgggcgaagcatgcttttcacttccactgcatctctcgctggctcaaaac

SEQ ID NO: 350825 - DNA, 82 bp, Homo sapiens
atttcgatggcttcgtggtggaggtctggaaccagctgctaagccagaagcgcgtgtgagccaccagctgggcagcatcatg

SEQ ID NO: 350826 - DNA, 75 bp, Homo sapiens
tggcaaaatcagcaaagttaattcaacagcagctggagaaagaactgatatttgggatataccagtggcctttcc

SEQ ID NO: 350827 - DNA, 100 bp, Homo sapiens
tgaagtttgggacaagatatttatctaacttctggagaactgtgtttatgaaactgtagttttgcctttggatgaaagggcatttgagaagactttaaca

SEQ ID NO: 350828 - DNA, 83 bp, Homo sapiens
gcggcttcctggcctgggcgctccggtggcggcggagacctcctgccccccgaggtctgcagtctcctgaacccagcagccat

SEQ ID NO: 350829 - DNA, 75 bp, Homo sapiens
ctgatgcccagtggggcattcgtcttggtaaacttggtacagctcagcagctcctcctcctatagtggggacatc

SEQ ID NO: 350830 - DNA, 88 bp, Homo sapiens
agaggaacagggaagatggcggctgtggtggagaatgtagtgaagctgctatgactttgcagccgtcctggagtggttcgcggagcgt

SEQ ID NO: 350831 - DNA, 100 bp, Homo sapiens
cctgctgacagagcagatggcctggagattcatgacaaaatcatggaggcactactgcagtcttcagttaagcaacaagtagaagctattgaaaaacagt

SEQ ID NO: 350832 - DNA, 98 bp, Homo sapiens
aatctgttccatcgccagggcttctcctatgactacgtgttcgactggaacatgctcaaatttgagctggtgagcaggctgctgcacctgcacttcaa

SEQ ID NO: 350833 - DNA, 100 bp, Homo sapiens
ctcaagtgcaattcaagatatccgaaggttcaattatgtggtcaaaacacggcatcagcgaggagatacgcatcctctaaccttagatgaaattttggat

SEQ ID NO: 350834 - DNA, 100 bp, Homo sapiens
cggcccgcagcgcgttctcccgggagagatggacgacgaagacacgttgttacctaggaagttacaggcagctctggagcaggctctggagaggaagaat

SEQ ID NO: 350835 - DNA, 82 bp, Homo sapiens
agacccttgtgctcgttgtcgccgcggtcctgctgttgtcggcccccacaaggaatttgctgtgaccatgagacctacagaa

SEQ ID NO: 350836 - DNA, 74 bp, Homo sapiens
ttactgtgaacattcatgcacaaatttttatgtggagcatcctgaggttagcattacacttctcccagtggagc

SEQ ID NO: 350837 - DNA, 98 bp, Homo sapiens
ggcctccacagaggctgtttgatgctgagaagatcaggtcgccccacggctgaattctcggtgataaaggcgcccactggaccctcccaacgcccaat

SEQ ID NO: 350838 - DNA, 100 bp, Homo sapiens
agaagaaagacgtggcagcaagcgggagtcggggatagtgtcatcggttcgctccagtgatccacaagctcagaaatacatcgcggaaagtaaatgttta

SEQ ID NO: 350839 - DNA, 75 bp, Homo sapiens
ttggagtcggctggtcttagccctcagctgttgttgactggattatggacagaacttggaaatattgagaataat

SEQ ID NO: 350840 - DNA, 76 bp, Homo sapiens
aaaaacatacctcaacccttggaaaaaaatcgattctgctcctctagatttatcatccatcatgttatgaagatta

SEQ ID NO: 350841 - DNA, 100 bp, Homo sapiens
taaaggagcagccctggtgtcacctatcagtaaaagaaccgagattaagcgtagctcctgaaatggatatcatggactactgcaaaaaagaatggagagg

SEQ ID NO: 350842 - DNA, 126 bp, Homo sapiens
tggtctttacctgcttcatcgtgaccaccggcctggtattgggatgatggctattcatatgaaaaggaagcaatggaaaattggatcagcaaaaagaaacgtacaagtcccatgacaaatcttgtt

SEQ ID NO: 350843 - DNA, 100 bp, Homo sapiens
ccaccatgttcacgtgacatcaagaggaagcggaaaccagtggccacagcatctttgtctagccccagtgcagtctattgaagacaatgaagtatatttg

SEQ ID NO: 350844 - DNA, 75 bp, Homo sapiens
ggagcctcagttggaagcagccgatccagcctgcggagcctgtggggcagaggaatgtttgctgggggattgaag

SEQ ID NO: 350845 - DNA, 90 bp, Homo sapiens
ggccagcacgctggactgcgagacggcccggctgcagcgagcgctggacggagaggaaagcgtacgtaggaagcctggacgtgccaaggc

SEQ ID NO: 350846 - DNA, 83 bp, Homo sapiens
gggagattcagccgtgaagcaagtgcagatagatggccttgttgcagatatcaagaaagtcaacaacttcatcagagaacaag

SEQ ID NO: 350847 - DNA, 90 bp, Homo sapiens
ctttctcctggggaacccgttcagctctccagtgggacagcgcatcgggttaccttcccgccaatgtagaccggagaccagccactctcc

SEQ ID NO: 350848 - DNA, 100 bp, Homo sapiens
gcggcggcggcggctgctgctgctgctgcccgcgtccgaggctcgcgggcggcgggcccgggacactggggttgggaaatcaagcatcgtgtgtcgattt

SEQ ID NO: 350849 - DNA, 98 bp, Homo sapiens
aaaaatagtgatagctttgataattcctgggcttcccgatggactcgagtttttactatgtgagcatcccggtgcctgcacagcaaggactctcattg

SEQ ID NO: 350850 - DNA, 78 bp, Homo sapiens
cataatcgtatatatatttgtgagaacaaagaaaaactccagaaatttttgaggcattgccagtggacctgagcaaca

SEQ ID NO: 350851 - DNA, 100 bp, Homo sapiens
ggtggcttgtggtgcggcctcaccatacaggaacagggcagacgttagcgtgagtgatcactctcaatcccgggttggacacgagttgccgctggttgtc

SEQ ID NO: 350852 - DNA, 100 bp, Homo sapiens
gccagatgtcagaagctacaccatcacagggagaaaactggttgtcctggatgtttgaaaagttggtcgttgtcatggtgtgttacttcatcctatctat

SEQ ID NO: 350853 - DNA, 89 bp, Homo sapiens
aggaaagaccaacaactgctgcaggcacaagcttggaccggctgattcctgcaagctggacaaatccctcaggcaaatatcatattggc

SEQ ID NO: 350854 - DNA, 100 bp, Homo sapiens
aagatgatcagacaaggcaaagcgaaattggtcattctcgctaacaactgcccagctttgaggttttgatacttatagaggactcccttcaatttccaat

SEQ ID NO: 350855 - DNA, 100 bp, Homo sapiens
gggtaaccgccatgtcgacgcaaaccagccttcagcagtcggctacgaaacagcagcggaagtagccgggctcgtggtcccaagaagcatctgaagcggg

SEQ ID NO: 350856 - DNA, 100 bp, Homo sapiens
ccaagcagcgcccggtcgccagatcgaaaatcaagcactatgagatgcttgctaatcgaacagctgcaaatggtcactgcattgatatttatgcttgtgc

SEQ ID NO: 350857 - DNA, 75 bp, Homo sapiens
taaaggagcagccctggtgtcacctatcagtaaaagggaggtggggaagacagggctccagctaccacaggacgg

SEQ ID NO: 350858 - DNA, 82 bp, Homo sapiens
ctcccctcccagccccagcacccccaaccacaggcgcacacggactccttgaacaccctcgtggcactccaccagctctacc

SEQ ID NO: 350859 - DNA, 50 bp, Homo sapiens
ctttatgggctccaccttcaacatcaggagcctgctgcagtcggtccagg

SEQ ID NO: 350860 - DNA, 74 bp, Homo sapiens
ctgtgggcttggggataaagggatccccgtggatgacactgacagggaagctttgctgaaaacctttcatttct

SEQ ID NO: 350861 - DNA, 100 bp, Homo sapiens
gctggacagttcagtgatttgcctgaggccccacagcaggttgaggtggtggagggtgtggctggagaagaggatcatcatgatgaacaggaagaacacg

SEQ ID NO: 350862 - DNA, 90 bp, Homo sapiens
cgggccgcgaagtcgcagcgccagacccaaggcccccgagtgagcgcgggcgccgagccttgaaaagatcttttgaggtcgaggaggtcg

SEQ ID NO: 350863 - DNA, 75 bp, Homo sapiens
ccactcagagtcgcccgagaacttgcattggacacacactactggacttggatcaaccattttgtcatctggggg

SEQ ID NO: 350864 - DNA, 75 bp, Homo sapiens
ccccctacctcctggggcccgacaagaacttcacgcgggagcaggttgagcttcagcgacagcgagagtgacaac

SEQ ID NO: 350865 - DNA, 100 bp, Homo sapiens
ggtttatatcaatgaagtccgagtcatacccccaggagtaagagcccatagcagtctgccagacaatagagcatatgggaatgtatcctgtcaggtataa

SEQ ID NO: 350866 - DNA, 82 bp, Homo sapiens
cggcgagaaagcacggggtgaaactgaccacagtgctcaccacccaccaccactggtgaaatgacaatggatgctctgttgg

SEQ ID NO: 350867 - DNA, 80 bp, Homo sapiens
gattgttctccttggcaaaatttatgctggcacaccacgcttctttcctttagggagtgcatccgccccaacccttttcc

SEQ ID NO: 350868 - DNA, 75 bp, Homo sapiens
ctgttggtgtcattggtggtcattcttcctttgtcgctgtttagaaatttaggacacagcattgttggttttgcc

SEQ ID NO: 350869 - DNA, 83 bp, Homo sapiens
cctcttgtcatctatctctatgaagaaggattggctagacctgtcatttactccatcctttatagtgatgctacaggacgaag

SEQ ID NO: 350870 - DNA, 83 bp, Homo sapiens
tgttctgcacctcaggagggaattcagcctcagtgatgtccatgaggtgctgctgcatgaggaggcgggtgattctggctttg

SEQ ID NO: 350871 - DNA, 83 bp, Homo sapiens
cagcctattcctaactgatctgtacccagaaagagtcatacctggagcagcagctgctgataaagatgatagttcagaagaca

SEQ ID NO: 350872 - DNA, 100 bp, Homo sapiens
ccaagctggtgtcgaactcctgggctcaagcgatctacccaccttaccctcccaaagtggtgagattacaggagtcaagtgactctaacccaggttcttc

SEQ ID NO: 350873 - DNA, 101 bp, Homo sapiens
ctccacgtcctcgtgaaccagctcagcgagaacctcaagagagtgtttctcagctacctcagtgcctgtgaccgcctgttacgtcagggatatgaggaagg

SEQ ID NO: 350874 - DNA, 98 bp, Homo sapiens
ctgtctgctctgtggactcaacagtttgtggcaagacaagctcagaactgagaagctgtcaccacagagtatgtattcccgtgtgccagagtgccagg

SEQ ID NO: 350875 - DNA, 100 bp, Homo sapiens
tacaagagatttcgactgtggaagatcctatagcaatggaactcagcgatgcaaatctgcaaacactaacagaatatttaaagaaaacacttgatcctga

SEQ ID NO: 350876 - DNA, 90 bp, Homo sapiens
acagctcagaacagttggatcttgctcagtctctgtcagaggaagatcccttgcaaaattcctgcctttctaaatgtggtggatattgct

SEQ ID NO: 350877 - DNA, 80 bp, Homo sapiens
ccctggatgagggggaagggcctcaaagccagaagacaggggcaagtgtccgagtggtgaatcagctacttacagagatg

SEQ ID NO: 350878 - DNA, 75 bp, Homo sapiens
tgggccctgcctgcattttcctgcgcaagggcttcgctgagaacaggcagcctaacattggcaaaaagatgtcct

SEQ ID NO: 350879 - DNA, 75 bp, Homo sapiens
atctactaaagcagcacctggagattactggtgggcaggtgtttgagaagtcccccctgcgggtgaagaacttcg

SEQ ID NO: 350880 - DNA, 83 bp, Homo sapiens
ggactcctcgcctggctcggaagttggaatcgaagcctcttaaaatggcagatgacttggacttcgagacaggagatgcaggg

SEQ ID NO: 350881 - DNA, 74 bp, Homo sapiens
cggggctgtccaggcacgcgaggcccctcaggttctggctccttggcagcaatggctgtatttgaagataagtt

SEQ ID NO: 350882 - DNA, 97 bp, Homo sapiens
gtggaaaggctctcagtgaaaaaggtgcttttgaagatgatgatatcacgcacgttgaaggaagtgtagatcctattcgagatatagaaataataca

SEQ ID NO: 350883 - DNA, 85 bp, Homo sapiens
tttcctgaaggggaagagcaagatgcagtcagtggaggtgacagaatcaactcagatttaatccaccgaatctgcttgccatggt

SEQ ID NO: 350884 - DNA, 99 bp, Homo sapiens
ggcgcttcaggactaccgcaagaagttgcttgaacacaaggagatcgacggccgtcttaaggagtgaagatgatccctatgatcttgaagatgtttctg

SEQ ID NO: 350885 - DNA, 88 bp, Homo sapiens
aagctatatactttggttacctatgtacctgttaccactttcaaaagcctcatggcggtccgagcttcgttcgagaacaactgtgaga

SEQ ID NO: 350886 - DNA, 89 bp, Homo sapiens
acagcggcatacagaatgcctatgaccggcgtcgagaatttcaactgggccagagtgaagaccctggctccctcctttccttgttccgg

SEQ ID NO: 350887 - DNA, 100 bp, Homo sapiens
cagaaccggtcgaaaaccgtgtatgagggattcatctcggctcaggtctcctctgagcctccggcctccataagacccaaaacagatgacacctcttccc

SEQ ID NO: 350888 - DNA, 98 bp, Homo sapiens
gcgcggccccttattcgctccgacaagagcccaatgacgaaagtggagctaacgtggatgcgtccaaaatgtggcgcgatgaccgggagcagttctat

SEQ ID NO: 350889 - DNA, 75 bp, Homo sapiens
aggaagcgacctgcaaccgacgtcctgacacagctctccctgaggagcagccacattccagctcccagtgcgccc

SEQ ID NO: 350890 - DNA, 80 bp, Homo sapiens
ctggcatattagcgctagccctgcagacagaggtgtgctgacgacctgctacaacagaaatgctcagcctacagaaggag

SEQ ID NO: 350891 - DNA, 100 bp, Homo sapiens
cgctgctgcccgcccgctgcctgcctgcctggcatctctctctcccggcaccgggagcctggccgctgcagtggagacagcctcgggacgccaggccctg

SEQ ID NO: 350892 - DNA, 75 bp, Homo sapiens
agattctacatcagtttggtttcactcagaccggggagtaaccatggatgttggtatgacaaagtttgaaaccac

SEQ ID NO: 350893 - DNA, 100 bp, Homo sapiens
cggaccgctcaccgcaaccatggtctccaaatccgaccaattgctcatcgtcgtgtccatcctagaagcactgatagccattgggcgatacagcatgaca

SEQ ID NO: 350894 - DNA, 83 bp, Homo sapiens
tgctgacaagcctgtacgcatcgcctttagcctcaatgacgcctcaggtcagctacacaacctggatcttaccacagtttgga

SEQ ID NO: 350895 - DNA, 100 bp, Homo sapiens
ctctgtgccaccagagagtttcgtgtgcggcaccgaccgtcacgagctaacttcctggaagagctttccgtctattttcaaattctttaccgaagcctca

SEQ ID NO: 350896 - DNA, 74 bp, Homo sapiens
gttcaatacacctcccacctgtcctcaggcatatcaaaggcattatattgtacttctagcaagtgcaccaacag

SEQ ID NO: 350897 - DNA, 96 bp, Homo sapiens
caaaagaaaagtgacgtggaggatcactcggtgcacctgcttttttctgcaaatcgctgggaacaagtggacatatttggagaagactgtgtaagt

SEQ ID NO: 350898 - DNA, 100 bp, Homo sapiens
ctcagagagcaaaatcgcgacgactaaatacccgtgtctgaagtcttcaggcgagctcaccacatgctacaggagtatgctgctgctgttccgctttgcg

SEQ ID NO: 350899 - DNA, 90 bp, Homo sapiens
cagaagggaggtgctagtcggaggcgctttgggaagcccaaggcccgggagaggcagcgaggtaccaggatcatctatgaccggaaattc

SEQ ID NO: 350900 - DNA, 100 bp, Homo sapiens
gaccaactgcccgctgtatatcaccaaggtgatgagcaaaagctctgctgaggtcatcgcccaggcacggaagaagggtactccaaagattcaggtttac

SEQ ID NO: 350901 - DNA, 75 bp, Homo sapiens
gcgccgctccgggagccgggcccggggtcccgccaccaccgcgcgcggacaatgcagatcttcgtgaagactctg

SEQ ID NO: 350902 - DNA, 83 bp, Homo sapiens
tgctccaggaatgggacctcgagtcactgtgtgtactaatggtcacttgatgtgcgctggctgttttatccacctactagcag

SEQ ID NO: 350903 - DNA, 96 bp, Homo sapiens
gcaaaaagaaactggagccaccatcaagctgtctaagtccaaagatttttacccagatgacctcttggtacttcatctctctgacctcattcgcat

SEQ ID NO: 350904 - DNA, 145 bp, Homo sapiens
ggatagtaattatttgttaaccgggggacaggataaactgttacgcatatatgacttgaacaaacctgaagcagtgtggcccagagttgctcagaattggagcagagcctgagacgtatctgcagatcctgtcatcagctggcaa

SEQ ID NO: 350905 - DNA, 96 bp, Homo sapiens
aaaaaccaaagctccctgctgcataagaccttgtcagagttcagagtcgtgacacttcaagaggtgggcagattattcatttgtgaatgaacagca

SEQ ID NO: 350906 - DNA, 88 bp, Homo sapiens
cctaaagttcgtgaatctcaacttggagaagatgtcaaccggacactagaaggtggaaggaaacctcttcattatgcagcagattgtg

SEQ ID NO: 350907 - DNA, 100 bp, Homo sapiens
ggactccctggctgctggagagttgaatgccagccaccagccatggttctcagcacagatattctacacctcacgccttcacctttaacacctccagtcc

SEQ ID NO: 350908 - DNA, 97 bp, Homo sapiens
gttggaacttcgttgcttgcttgcctgtgcgcgcgtgcgcggacatggcctcaaacggtgctggagaatctggtaaaagcaccattgtgaagcagat

SEQ ID NO: 350909 - DNA, 100 bp, Homo sapiens
cagcatgtttcctcagatttgcagggaacaaactccagaaggccaaatgctacccactgctgaaactccccttgccaggaacaggacctgtggaattcac

SEQ ID NO: 350910 - DNA, 97 bp, Homo sapiens
gccttccacccatgtgtgtcaaccctaccccaggagggaccatctctcgagccggcccaggcctttgtggtgaagcggggcgtccacgtgtcaggag

SEQ ID NO: 350911 - DNA, 82 bp, Homo sapiens
cagggaccaggcggaggcgtcgcgggagcctttggggcaccacagagatgcgggacttaaccaccaccatgtcgagcaaaag

SEQ ID NO: 350912 - DNA, 98 bp, Homo sapiens
tgaagttggcactgcagcagacagctccctgggcaccaggcagctaacagttaatgttggagaagattgtccagtgtttgatggactctttgagtttt

SEQ ID NO: 350913 - DNA, 49 bp, Homo sapiens
gccagaagctacatgacccctaaacgctcttggtgctggacaggcatct

SEQ ID NO: 350914 - DNA, 100 bp, Homo sapiens
aggaggaccacaaagtggaagagtcctgtgccattaaaaacaacaaggaagctttcagtgaaatttgcgagaatccccgatttatcattgatggagccaa

SEQ ID NO: 350915 - DNA, 101 bp, Homo sapiens
agccgctacacacgggccaatctggctagtaaaaaggacagaattgaatcacttgaaaagaggctcgaggccataggaaaaggatacagagtagagtttca

SEQ ID NO: 350916 - DNA, 82 bp, Homo sapiens
tcagagcccttgcccgctcgggtatgaagatcgggcggattgaggcagccttccaagttttccacccctgagtacacagtgg

SEQ ID NO: 350917 - DNA, 50 bp, Homo sapiens
aggagttccaggcacgttaccggcagctgtgacagacatcacacctccag

SEQ ID NO: 350918 - DNA, 75 bp, Homo sapiens
tatattcatctcaaaaacaaaattctgaactcaggacttggcaaaatatgcttttaaggctattaaccagggtgg

SEQ ID NO: 350919 - DNA, 74 bp, Homo sapiens
gacaacttcaacaacacttacatctccaccatcgttttaaccatgctgaccaacgaaactggctttgaaatcag

SEQ ID NO: 350920 - DNA, 98 bp, Homo sapiens
aaagattacagagaaaaaaccaacaccttcctgtgcagtcctgttggaatttgatttgaactcagaggatcaaaaagccttcagtgttgaacatacaa

SEQ ID NO: 350921 - DNA, 100 bp, Homo sapiens
cagcaatcacagaagccgacaaggcgttcaagcgaaaacatgaccgctgagcccatgaggtcaaaatgcagatcttcgtgaaaacccttaccggcaagac

SEQ ID NO: 350922 - DNA, 50 bp, Homo sapiens
gtccgagtcaacaaccgcttcgagctgggcgtgatggtgggcatgggtca

SEQ ID NO: 350923 - DNA, 75 bp, Homo sapiens
aacgggaagctgggcagctacaaaatcaatggccggacgaaagcacgtgtggttctcaaatataggcattctgat

SEQ ID NO: 350924 - DNA, 75 bp, Homo sapiens
gtcgtcttccggacagactatggtcaggcactttccacacatgaggagaagaagagcttctgtttagaagacacg

SEQ ID NO: 350925 - DNA, 75 bp, Homo sapiens
cgacgaaccttggagagaggagaacgaacatcttctggacctttgtccaggtacaaacccgtagtgctgatgaac

SEQ ID NO: 350926 - DNA, 100 bp, Homo sapiens
gtttgacaaggaggggaacggcaaagtcatgggagcagagctcagacatgttctcaccacccttggatgaaactgattccaagacagcctccccgtggaa

SEQ ID NO: 350927 - DNA, 100 bp, Homo sapiens
gtgtcctcaagtggctggacggaccggtaattaggcagaacgagtccctggagaggcagatgcgcgagcaggaggagcggcacgtgcgggaggcggccag

SEQ ID NO: 350928 - DNA, 90 bp, Homo sapiens
ctaaatacaagagtggcctattgcaatttttccagctagtcaaattacgaaagcttggacttagtgataatgaaattcagcggctccctc

SEQ ID NO: 350929 - DNA, 100 bp, Homo sapiens
ccagaaacttcacacgatgcagaccccaggttgatctcctatcaagagtttttggcatttgaatctgttttatgtgctccagattccatgttcatagtgg

SEQ ID NO: 350930 - DNA, 100 bp, Homo sapiens
tgaacatgagcctcctcctctccttctacctgctggggttgcttgtcagtagcgggcaagaccaggtgataggtttgatcgagacagaccgttgagagga

SEQ ID NO: 350931 - DNA, 101 bp, Homo sapiens
ggctccgggcgcggggaagtcatgctcgcttcacggaggcaatagctagccggtttttagaacttcagccataaaaatgggcagaattttccttgatcata

SEQ ID NO: 350932 - DNA, 100 bp, Homo sapiens
tatggccacagaagttgctgctgacgctctgggtgaagaatggaaggttacattgattacccacctagtacaacatcttacgggaagagcatagtatttc

SEQ ID NO: 350933 - DNA, 82 bp, Homo sapiens
taactgcccctgcagaaggagcaatggccttggctcctgagaggtgccccacctcaaccagaatgcctggaacaacctggag

SEQ ID NO: 350934 - DNA, 89 bp, Homo sapiens
gttgtacgagacgtggcctgtggcgctaaccacacgatccctgggtatcagtatgtgtcacctgaaggcaattgtatagaacatgttca

SEQ ID NO: 350935 - DNA, 95 bp, Homo sapiens
ccccaacacgtctctgttcgtcaggaacgtggccgacgacaccagctctgaggatgaagtggatgtgcttttacatggaactcctgaccaaaaac

SEQ ID NO: 350936 - DNA, 49 bp, Homo sapiens
ctgaaggactcgccccgcttcagggaagcagctcgagagtgtcgtagaa

SEQ ID NO: 350937 - DNA, 89 bp, Homo sapiens
taattttagggtcctttatatagaagggagagtagatataaagatgaagcgcagctgtataaagaagagcacctgaggaatcggcagca

SEQ ID NO: 350938 - DNA, 100 bp, Homo sapiens
aacaaggggatgacacagctgctgagaggctagagaaggtgctggtgattgggtgtggcaactcagaactgagtgagcaactgtatgatgtgggctatcg

SEQ ID NO: 350939 - DNA, 76 bp, Homo sapiens
cgctgcacaccagcaggccctgccaattgactgcttttacagtgagtgaaatgagccgtcagactgctacagcatt

SEQ ID NO: 350940 - DNA, 87 bp, Homo sapiens
gaagaacgctctcatccggaggcaggaccagctgcagctgctgtcccgggtggattctaagaccctgacccgtaacacgaggatcat

SEQ ID NO: 350941 - DNA, 75 bp, Homo sapiens
ctgagttaatgtcaaatgacagcaaagcactgtgtggctgaataagcgagccatccaaaactctgtttgtcaaag

SEQ ID NO: 350942 - DNA, 83 bp, Homo sapiens
atggaccagtacagctactgcaccccgtcccacatccctttctccaacaggttcagtggcagtggatcaggcacagattttac

SEQ ID NO: 350943 - DNA, 100 bp, Homo sapiens
gtgccacatcaacgtgtatccacacaagcaggatgatggcttggaaaaaagtccaatgaaaaaaaaacagaagaagaaagagaacaaggagaacaaggag

SEQ ID NO: 350944 - DNA, 98 bp, Homo sapiens
cctgaatggttgtgttacaacagatgatgctttgcaagaacttgtggaactcatctatcaacaggccactgagaatgcaaaggaggaagtgaggcgaa

SEQ ID NO: 350945 - DNA, 103 bp, Homo sapiens
gccttagctgtgctcgcgctactctctctttctggcctggaggctatccagcttgtattccaacactccactcgctaagaggccctgatcccagctcattcag

SEQ ID NO: 350946 - DNA, 90 bp, Homo sapiens
atttgttaaggattccaagtaactcttatttgattaatgttcttcataaaccaccatatgaacatccaaaagacttgaagctcagtgatg

SEQ ID NO: 350947 - DNA, 100 bp, Homo sapiens
aacattgtaacatcgttgcctactttgggagttatcttagtttaattggttggggtcagataagaagaggagtgacaatcaagccaacagtagatgatga

SEQ ID NO: 350948 - DNA, 82 bp, Homo sapiens
aaaacttcaagccaaacatcaagcagaatgtgatttgcttgaagatatgagagctctctgttacttgaagctgtgccagttt

SEQ ID NO: 350949 - DNA, 75 bp, Homo sapiens
agcaatgcaggaatacgaagagcagctgaaagaaaatgccagcgaggctgaggaaactgaaacccagagaagttt

SEQ ID NO: 350950 - DNA, 98 bp, Homo sapiens
caactatcgacttggagtactcggacccactgatctcagcatgaagagacaattggcgactagctcaggatcctccagcagctcaaactccagacccc

SEQ ID NO: 350951 - DNA, 100 bp, Homo sapiens
gaacctctaacacagtggaaaggaaccgttctggatcagattggttttcacagaattccatggactttaactgctgaaccaatgatgcactgattttgtc

SEQ ID NO: 350952 - DNA, 82 bp, Homo sapiens
ctcggtcccactgctccctgcaccgcagctctgattatacaaaaccaggagacattgaccctacatcagtagcaagtcccaa

SEQ ID NO: 350953 - DNA, 100 bp, Homo sapiens
aggaagcgcgagaccaggacggcgcgggaactctacgccaacgtggtgctggggcacattcaggaccccgcgagccagcggctgacgtggaacaagtccc

SEQ ID NO: 350954 - DNA, 100 bp, Homo sapiens
gggggacgcgacgcacaaccaggcgatggtgcactggacgggcgagaacagcagcatgaagatctccttcaacgacaaaagcctgcagaccacatttgag

SEQ ID NO: 350955 - DNA, 100 bp, Homo sapiens
agcaacagatctaaagccctggtggcctgatcaaccccgtataaccaaagatgtaatttgttttcatgctgaagatttcttagaagtagttcaacgaatg

SEQ ID NO: 350956 - DNA, 88 bp, Homo sapiens
cgccggagaggctgggcggctgccggtgacagtcctgatcctggaggccatcgagaaccacaacctcgcagacacggtgctcaagatc

SEQ ID NO: 350957 - DNA, 90 bp, Homo sapiens
gctcatcaagccagagctggagtatctcagccattatttggaaagcaggtctataaatgagaaagattatcatagtcgacgctacattga

SEQ ID NO: 350958 - DNA, 143 bp, Homo sapiens
aagaggcccaggaaggatcctccgagcgctgtggggagcggcaacgccggtggctcggggccccgcggaaaagtgatgaatcaccaacaccagcagcagatggcccccagtaccctgagccagcagaaccaccccactcagaa

SEQ ID NO: 350959 - DNA, 75 bp, Homo sapiens
gagtcgcagggagcccaccgggcgggcctggccaaggtgtggacactgccagcggctgcagccgacttggaatga

SEQ ID NO: 350960 - DNA, 90 bp, Homo sapiens
gcttctctacgcagaacccgggagtaggagactcagaatcgaatctcttctccctccccttcttgacaagttggatggcttgaggactgg

SEQ ID NO: 350961 - DNA, 75 bp, Homo sapiens
cagcctcccaagtagctgggattatagggtcttcaagacccctggcctgcgtactccagcagcaggagagcggat

SEQ ID NO: 350962 - DNA, 75 bp, Homo sapiens
cggacttctcacccccaggatgtcatcgaggcctgatcctgcctgaagatggtgccactggtggctgtggtatca

SEQ ID NO: 350963 - DNA, 75 bp, Homo sapiens
agccggtctatggactttccgaagacgagatagttttgaggcagctgtgccatcaaatagccacattgtttcgga

SEQ ID NO: 350964 - DNA, 100 bp, Homo sapiens
tcacaaaagaccacactgtcagacagaaagaggaagtatctccaggaaagtgatgaagcattgggcccaacaatgatgagttggaatgcagttgaaaagt

SEQ ID NO: 350965 - DNA, 73 bp, Homo sapiens
tgtggccagggccaggcgatttatgggaaagaggcagacattttcctggtaagactttgaccccgacgcaggc

SEQ ID NO: 350966 - DNA, 90 bp, Homo sapiens
ccactttttagtaggcaaagacacttctaccacaacaatcagggttttcagaataggaggctaaagaaaagccagcccaggacctgggct

SEQ ID NO: 350967 - DNA, 75 bp, Homo sapiens
agccgacggcaaaggtgtcgtggtggtcattaagcggagatccggtgcaggtggtaccattataacgaattttga

SEQ ID NO: 350968 - DNA, 88 bp, Homo sapiens
accactggaaggagtcagatagagaaactccagaaaatcttgccaaacttctgaccaggatgtatttaaaatcagaagtcataggtga

SEQ ID NO: 350969 - DNA, 74 bp, Homo sapiens
accttcaactatggcaaatattgtgaaaggcctgtataccctcagaccagggcttcgtgggacacatatgcaac

SEQ ID NO: 350970 - DNA, 100 bp, Homo sapiens
tgcgtgttgtccacccaagatggagttcctcctggggaacccgttcagcacaccagtggggcagtgcctcgcttgtcagctcatttgcagcttacatttt

SEQ ID NO: 350971 - DNA, 50 bp, Homo sapiens
gggaatacaagtgtcatgtctgtgggccccttcacagatgtagtcactac

SEQ ID NO: 350972 - DNA, 82 bp, Homo sapiens
cgcgcagccgcctgcagacccggaagtggatggcgtggagatatggcgcaactgcggcgcgccagcatccttcagaaaaagc

SEQ ID NO: 350973 - DNA, 50 bp, Homo sapiens
atagtttccagatggctctaacctcagtgcgatgtgcattttgtaagcac

SEQ ID NO: 350974 - DNA, 98 bp, Homo sapiens
acaaatgttcttaatggcatctagaatgggtgtttgtgaaccgaagtttagcaatggaaaagataaagtgttttggttttgatatggattataccctt

SEQ ID NO: 350975 - DNA, 75 bp, Homo sapiens
agaaacaaaaatgaatcaaagaagcagtcgttctcataccatctttaggatgtcagattctgaggaagatgaacc

SEQ ID NO: 350976 - DNA, 98 bp, Homo sapiens
tccgacgccgatccggacagcggcacagaggagggagggagagtggtgaatatcagtagtttgcagtgtttaagggcttttgaaaactgcagtgaaga

SEQ ID NO: 350977 - DNA, 75 bp, Homo sapiens
atatctaggaggactcttctctcccaaactctctcaaaggtctatggccctgtgttcactctgtattttggcctg

SEQ ID NO: 350978 - DNA, 90 bp, Homo sapiens
ggaagcgccaggacaatggggacccgggacgacgagtacgactacctattcaaaggctgacggggtacgggatccaccactgctttgcca

SEQ ID NO: 350979 - DNA, 51 bp, Homo sapiens
cgagcgccgcgcgcaccactgtgaagaggaagaaaagttccaaatcagagg

SEQ ID NO: 350980 - DNA, 75 bp, Homo sapiens
ggatgcttggattgtctgcttcaagccctggctcaaaatagattcaagatgaccaacgaagaacctcttcccaag

SEQ ID NO: 350981 - DNA, 101 bp, Homo sapiens
ctgcggtagcagcgactcatgagagcgcggccggaggacagcctgaaaactggttttttaaaatggaagccagattatgacagtgccgcttctgaatatgg

SEQ ID NO: 350982 - DNA, 82 bp, Homo sapiens
ccaccgtcggccgcatccgtttccacgactttctgggagactctaagactttgaccccgacgcaggcttcagtgattgccgc

SEQ ID NO: 350983 - DNA, 87 bp, Homo sapiens
ccaccggccgcttctgtcctcgcacttttcaggattagaagaggctgtgtatagaaacatacaagcttgcaaggagcttgcccaaac

SEQ ID NO: 350984 - DNA, 75 bp, Homo sapiens
ccacctaccccagcggccagatcggcttcatgctgtgcagcaagaacccgtgtgggccaaactgaaattgcagaa

SEQ ID NO: 350985 - DNA, 75 bp, Homo sapiens
cgcacaggctgtagcaggttccggcggacggcgttgcgaaggaaacgggattatgaaggttatttatgctccctg

SEQ ID NO: 350986 - DNA, 92 bp, Homo sapiens
ggcgttcggtcctgctgttgcggccgctgccccagggctgcggggacggtgagaagccctaccactgcaactgggacggctgcggctggaag

SEQ ID NO: 350987 - DNA, 100 bp, Homo sapiens
gccctggcacccagcacaatgaagatcaaggcttttcatcttataaaagctgtgtcagtgttgctgaacttttcccaagaggaggagaacatgctcaagg

SEQ ID NO: 350988 - DNA, 98 bp, Homo sapiens
tcctccttcttcccccttgttgtcctcctgctcgccggcagcggcgggtccgggccccggggggtccagggcctggtctccaagtcctctcctaagaa

SEQ ID NO: 350989 - DNA, 83 bp, Homo sapiens
cggggaagtaatggtatccggccaattgagattcggagttaaaacaggcagcaaagcacctgctctgagtggccatggggaag

SEQ ID NO: 350990 - DNA, 100 bp, Homo sapiens
ttagaacagttgccaagagtcacagtgactcatgcattctttcttcaaacaacctccctaccaaggatcttctttcagatgcgtctgttactagagtgga

SEQ ID NO: 350991 - DNA, 100 bp, Homo sapiens
atggcatcattttccatggattgctctccaagtttttgtgttcctggcctttggaaccccttcatcatattccgcaggctgtgggtgagcgtggaggatg

SEQ ID NO: 350992 - DNA, 96 bp, Homo sapiens
ggaaacctaggcccgcgagtgcccgggcccagcccggcctagttcaggagatatctgaagagattataggatcacccatcccagaacctaggcaac

SEQ ID NO: 350993 - DNA, 100 bp, Homo sapiens
aagctaaagacatagttcctggtgatattgtagaaattgctgttggaggacgagtaagtcgtgaattaaattatactcgccagaagattggagaagaggc

SEQ ID NO: 350994 - DNA, 90 bp, Homo sapiens
cggccaccggagcttgacctcctgcatcgaccgccctgctgagaagagggattgtggagcttctcttgacctctgatggtgagaaacatg

SEQ ID NO: 350995 - DNA, 82 bp, Homo sapiens
tatgagccacacatccccgaccacttgcggcctgagtatgctacgagttccagggagctctgtcctggtgaccgtgcccggg

SEQ ID NO: 350996 - DNA, 102 bp, Homo sapiens
cagaactctaaggaaagatcaagtagaactgggagtacgagacccaatctagtgcagaagccaaatttgtgaagcagctagaccaatgtgaaatgattcttc

SEQ ID NO: 350997 - DNA, 98 bp, Homo sapiens
ccgccgcccccccagacaagatggacaccgcggaggaagtcgtgagatggagaataaagaaactctcaaagggttgcacaagatggatgatcgtccag

SEQ ID NO: 350998 - DNA, 100 bp, Homo sapiens
cgcagggaggatgtcgggacaccccggaagctgggaaatggcttcaacggaccacaccaaaatgccatctcaaatggaacacgccatggaaaccatgatg

SEQ ID NO: 350999 - DNA, 98 bp, Homo sapiens
ggggactgttggtctcggccctgcggaagtcgtgtctgttcaaaccggcacggtctgatccggaaatatggcctcaatatgtgccgccagtgtttccg

SEQ ID NO: 351000 - DNA, 75 bp, Homo sapiens
gttactcttcagtacaatgtcaccctcccagcaacaggcatccagggcattgtggatgcctaccgccaagccctg

SEQ ID NO: 351001 - DNA, 82 bp, Homo sapiens
attccttgcagagacagctcaacacggcacttccacaggtttttagaacttcagccataaaaatgggcagaattttccttga

SEQ ID NO: 351002 - DNA, 102 bp, Homo sapiens
cctcgggtctcgggggccgctctgggatcccggccaccagcaattgtccggtgtcgtgaaaactacccctaaaagccaaaatgggaaaggaaaagactcata

SEQ ID NO: 351003 - DNA, 95 bp, Homo sapiens
ccccggcccacagtgggggtgtgcaaacccgagagaactgggaacttgtaatagctggcatcgttgagaatgaatggaaaagaacgtgctccaga

SEQ ID NO: 351004 - DNA, 82 bp, Homo sapiens
cgcgggaggtgttcgagaacgaccccgagacggtgagacacagtaacctggttgaactctgcatctggaaagctgaagactg

SEQ ID NO: 351005 - DNA, 96 bp, Homo sapiens
acaaaggaaaacgaggaaagtcccaggatgactactgtgtcaaccacagggtcgactcatggatgatacctctattgctgctgcatgatgttcaag

SEQ ID NO: 351006 - DNA, 90 bp, Homo sapiens
gttgactatgaggaagttctagctgctgggcatgctgtgtgcttgcatcgtgttgtgcagaaggagtagagatcctgcttacgagctcct

SEQ ID NO: 351007 - DNA, 100 bp, Homo sapiens
aatttattcactcaagactaaaaactaaaggcctgggcctgagaactgaatcagcagttccaagagcctctgagttcctgccttttttcatctctgaatc

SEQ ID NO: 351008 - DNA, 119 bp, Homo sapiens
ttgcttctggcggccatggtgttgctgctgtactccttctccgaaacatgttccaaatcaagtatagatattgagaatgggtttatttctgaatctcagtatacatatgccttaaaaga

SEQ ID NO: 351009 - DNA, 75 bp, Homo sapiens
gacgagatctccattgacctctacgagctggaggaggagtattactcgtccaggaccgagatctcactcagcaga

SEQ ID NO: 351010 - DNA, 100 bp, Homo sapiens
gtggaatggaacagtgaagaagcattgggtccaatgatgcatcagcagcctccttctcagcaatacaatatgccacagggaggcggacagcattaccaag

SEQ ID NO: 351011 - DNA, 98 bp, Homo sapiens
tggggagaccagacaacactgcaaggatttttgacacattttctcagggaagaatatggaaccttcagcctggcaattcttcagttagatagtcctga

SEQ ID NO: 351012 - DNA, 83 bp, Homo sapiens
cttaagaagaggtcccattaccccactctttccgccctaatggaggtctccagtttagggaatcgctgtgtgaaaggagattc

SEQ ID NO: 351013 - DNA, 83 bp, Homo sapiens
gtcgatttgtccttcactacagggctacttctacaagtccgaacagccagtccagcaaaatgaacagcattgtctaccagaag

SEQ ID NO: 351014 - DNA, 154 bp, Homo sapiens
tttatcctggaaaaacaacatacggtggggcagcagctgctgtaagacagtctaaactacgaaatacaccttatcaggtgcaagtgcaacctgcacgccaacctgtgctccatgcgcgagggcagcctgcagtgcgagtgcgagcacaacacca

SEQ ID NO: 351015 - DNA, 75 bp, Homo sapiens
gggctattaagcggcgaccagggatgaagaagatgatgatgactatgttgaagaaggggaagaagaggaagaaga

SEQ ID NO: 351016 - DNA, 75 bp, Homo sapiens
gttccaaagcctcctggaccgtccaagaagaactgtggctgcaccatctgtcttcatcttcccgccatctgatga

SEQ ID NO: 351017 - DNA, 75 bp, Homo sapiens
gcctcctgaatagctgggattgcaggtttggcagttctctaccagtggaccaatcttttcatccccgtgtacctc

SEQ ID NO: 351018 - DNA, 100 bp, Homo sapiens
gaggagatattcatagtgggacagcattaccgacaagcaaggtgaccaagaatatggcccaggtgaccaaagccctggacaaggccctgagcaccatgga

SEQ ID NO: 351019 - DNA, 90 bp, Homo sapiens
ctgatctttgttggagagatatcaagttcaaaaccagccatttcaaatttaaaggcccgtaagcagaagacttcctcctcccaaagtttg

SEQ ID NO: 351020 - DNA, 80 bp, Homo sapiens
gatccagcctgcggagcctgtggggcagcaaggatggaacattactgtggacctggtcattggccctaaagggatccgcc

SEQ ID NO: 351021 - DNA, 98 bp, Homo sapiens
agacactgactggcagagtcctgcaatacgaggattctctccaccacatagaatctgcagttttgaagaggcaaagggtttggataggatcaatgaga

SEQ ID NO: 351022 - DNA, 98 bp, Homo sapiens
gacctgctaacagaactggaccttttcgcctgatgaccgtggtacaatcaatgacatctctgtgctgagagtgactcgccgtggggaacaggctgatc

SEQ ID NO: 351023 - DNA, 100 bp, Homo sapiens
aaccagcttctccctcccaatccctctcagctccaccccaggcttctgtacagccattggagttattcctgatgaagctaaagctttgtctctgttggca

SEQ ID NO: 351024 - DNA, 82 bp, Homo sapiens
agggatttgaaagctggtaatattcttctgggtgaggatggttcagtacaaatagcagcctgcctagggtagttaaaagacg

SEQ ID NO: 351025 - DNA, 75 bp, Homo sapiens
cccgccgggcacacaagaatggtcactgcatgtcgggccccaggcctgtggtgctgagcgggccttcgggagctg

SEQ ID NO: 351026 - DNA, 100 bp, Homo sapiens
aagaaagaagggctttattcggccgggatcttcggcaagactcacgtctccaacaaccaagctccccaagtgtcagttgtacccgaggcgttctcagcag

SEQ ID NO: 351027 - DNA, 98 bp, Homo sapiens
ctggacagtctgggacatccaggggaagagaaggtggactttgagaagaaaggaaacatgccctgaactgtcacagaatgaaaccagcgctcttcagc

SEQ ID NO: 351028 - DNA, 99 bp, Homo sapiens
tacaccatcctggattctggaggcatcattgtggccattgagcacagcagccgtcctatcaatgtgattaaaatcaaactgatggctgaaggcgagttg

SEQ ID NO: 351029 - DNA, 77 bp, Homo sapiens
ttcttcctgcaatacagtggatacaatttgtcatggctactctgagccaatggagatcttcgtggatgatgagacga

SEQ ID NO: 351030 - DNA, 98 bp, Homo sapiens
ccggcccctcagggccacggctttagcggtgtcttttgcggtcaccacctcccacagccctgctgcaccaggggagcaaggcttcggggaatgcctcc

SEQ ID NO: 351031 - DNA, 100 bp, Homo sapiens
tccctgggtggactggaggaggccgcgccgatgaacctgaccgaggttatgaagacagtatggagtttccagaccatagtagacatttgctacagtgtct

SEQ ID NO: 351032 - DNA, 83 bp, Homo sapiens
cttttaaaagagagagcttgtgaaactgagggaatagttcaaatctgaacatcaatgatgtactagggaactactcattgact

SEQ ID NO: 351033 - DNA, 100 bp, Homo sapiens
gtggcactggacggggaatcaagagacccggtttctaatccctgctctgtcactaacaagctgcgtgatcttcgaggcaagaatctgcatcaaagagccc

SEQ ID NO: 351034 - DNA, 96 bp, Homo sapiens
ggggaatgggatttctgacgagtatcacgtgatccggcacgccatgaacctggaggccgtgaacacctacgaaggctttgtccagggatctgaaac

SEQ ID NO: 351035 - DNA, 98 bp, Homo sapiens
ccatattgtctgtgtgagcagaggggagagcggccgccgccgctgccgcttccaccacaggaaatctgaaatagagtactatgctatgttggctaaaa

SEQ ID NO: 351036 - DNA, 75 bp, Homo sapiens
cagatgaaaaagtgtgacttggcagctgctgcagtatctctcttcctgaggtccagaggccattaaagaataaac

SEQ ID NO: 351037 - DNA, 100 bp, Homo sapiens
cattgaccacgggttggaacagctggagacatggagtttttcggagctgtacacgctgtcgctgcaggagcctagccggcggggggccccagatcctgtg

SEQ ID NO: 351038 - DNA, 100 bp, Homo sapiens
ccggaacgccaaatacttggtcgtctacacaggcgcgggaatcagcacgcccctggcaaccactaatctgctttctatctatggatttgcctattctgga

SEQ ID NO: 351039 - DNA, 51 bp, Homo sapiens
taaaggagcaagatggctagggtattgcctaagtgtaatcttgaacatggg

SEQ ID NO: 351040 - DNA, 51 bp, Homo sapiens
cagaggcagctcttcagcctatgggcttttgctctgcatgcctgcaggaat

SEQ ID NO: 351041 - DNA, 90 bp, Homo sapiens
gccgagcaggctgagcgatacgacggcatcatggccgccctcagaccccttgtgaagcccaagatcgtcaaaaagagaaccaagaagttc

SEQ ID NO: 351042 - DNA, 100 bp, Homo sapiens
tttacattgaccacaacacgcgccagacgtcgtggatcgacccccgcgaccgatatggccgcgtggaaagtgtcaaaattcttcccaagaggggatctga

SEQ ID NO: 351043 - DNA, 83 bp, Homo sapiens
tgtccattccgctgtgttgattgaggacgttcccttcacggagaaagattttgattacagaatgtctgaaggggacagtgtgg

SEQ ID NO: 351044 - DNA, 98 bp, Homo sapiens
ttcttcaggctcttcttggaagaaacttaatggaagagagaagggcacagttacctaagtatcaacgtaatcttcctcggccaggacaggcccccatc

SEQ ID NO: 351045 - DNA, 82 bp, Homo sapiens
tgcgttgtagcagcagcgggagccaggactaaggacaagcaggagctgggagccccagagacctttggccagagcaagacat

SEQ ID NO: 351046 - DNA, 134 bp, Homo sapiens
aaccggatttctcttcccagaaacttcaacatctggaacatgtgatggaaaattatactcagtggctgcaaaaagtggtattaaagataatcaaacattatcaagaagaaggacaaggaactgaagttgttcaa

SEQ ID NO: 351047 - DNA, 98 bp, Homo sapiens
acttcttcacctcccagatgatcaaagactgcatgaagaaggtggtggctgtccacctccaccagacggtccaggttcaagggcagcaggaaagacga

SEQ ID NO: 351048 - DNA, 100 bp, Homo sapiens
ttgtctttctcagcaccttggcgaagccttgggtttctttcttaaaggactgatttttagaactccacatttgagagcttattggaaagtgatgttgaaa

SEQ ID NO: 351049 - DNA, 87 bp, Homo sapiens
ggacaagcaggtctaccgggccacgcaccgcctgctgctgctgggtgagaagccctaccactgcaactgggacggctgcggctggaa

SEQ ID NO: 351050 - DNA, 51 bp, Homo sapiens
aaaatctccccggtgactttcagtctcttgcatggcaccaagaatgttacc

SEQ ID NO: 351051 - DNA, 75 bp, Homo sapiens
gtctcagtttggggcaagtttatacgggcaacaaaattctgaagggagtggtaatggaagtgaagatgcttcaaa

SEQ ID NO: 351052 - DNA, 74 bp, Homo sapiens
cgagtgccgccagcatgtctgacaaactgccctacaaagtcgaatagcctaacatggcagaccagagacagcgc

SEQ ID NO: 351053 - DNA, 98 bp, Homo sapiens
atgttgaagatactatggtggagaccattgctctttgccagagaaattcacataatttgaaccagcagcaacgtgagatgcccccctcggaagcctgg

SEQ ID NO: 351054 - DNA, 75 bp, Homo sapiens
gtgctggcccgttatgccagtatctgccagcagcacagatagcagagagtcttttcagcgtgtggagctgctcaa

SEQ ID NO: 351055 - DNA, 98 bp, Homo sapiens
ggcgcccagcaatcacagaagccgacaaggcgttcaagcgaaaacatgaccgctgagcccatgagttcgaagcattcagcaaacaatggcaaggcaga

SEQ ID NO: 351056 - DNA, 100 bp, Homo sapiens
tgtggtccaccgggacttgaagctggaaaatatactgctcgatgacaactgcaatattaaggcggctgagtgacagcccatcaatgaaaaaggagagcga

SEQ ID NO: 351057 - DNA, 100 bp, Homo sapiens
gcaggcgtcccctctgcaagcgttagacttctttgggaatgggccaccagttaactacaagatttcaggtatgctgctgaaagtgggaatcctctacatt

SEQ ID NO: 351058 - DNA, 138 bp, Homo sapiens
gtcgctcccgccgggcgagcatggggcgcctggcctcgaggccgctgctgctggcgctcctgtcgttggctaaagtctccagtgaatattgaattgctgaggattttgggaaaagacaaatcaaagttcccattccat

SEQ ID NO: 351059 - DNA, 102 bp, Homo sapiens
ctacgctatcaggaggccctgagtgagctggccactgcgacagtcattttgtttactcattcagccctgttgcaggtcccaataaactcttcataaggttga

SEQ ID NO: 351060 - DNA, 100 bp, Homo sapiens
gaagtggtgagcctttttgtcactgtccagaagcactggaaatccatggatcattcacatggcttggacaaacacagtataaacttcaacttaaaagcca

SEQ ID NO: 351061 - DNA, 75 bp, Homo sapiens
agacatctgccaaggagccctgggttattgataaggaaactatagatttattggcgttcacctctgttgcagaac

SEQ ID NO: 351062 - DNA, 90 bp, Homo sapiens
agcaccgccgggtgcgctttctgcacgagaccgggctggccatgatctatggagagcttgtttcatatccatatcccactgtattcctgc

SEQ ID NO: 351063 - DNA, 100 bp, Homo sapiens
gctcattaagagcttggaggcggcccgcggatcacgcctggtggatttccagacccactgccatcccatggacatcctaggaacttgtgcaacagagcag

SEQ ID NO: 351064 - DNA, 90 bp, Homo sapiens
agaactgatatctgagaacaacttaaacggcgattttagtgaagttgacgctcaagagcagctataacatgttcggacacttcaagttct

SEQ ID NO: 351065 - DNA, 100 bp, Homo sapiens
tgctttggctcaagaatatctcatggagtgtattattcaggaactagaagatcttctgccatctagaccggaagttcctaacataattggagaaacagag

SEQ ID NO: 351066 - DNA, 87 bp, Homo sapiens
cacatgaccaaagcattcctcttctatggtactaggttttgacaagcttgcatcatgcgtgagtataagctagtcgttcttggctca

SEQ ID NO: 351067 - DNA, 100 bp, Homo sapiens
gttgagcgggctaagaagtatatccttggaaatcctctgaccccaggagtcactcaaggccctcagattaaaaggagcccaagccccatctcatcctagc

SEQ ID NO: 351068 - DNA, 100 bp, Homo sapiens
ggagcggagccggccgtacgcggtgctgcgagggcagaacctggtaaggaagagcccaacactgctggaagtgagcatgccccatttcatgagaaccaac

SEQ ID NO: 351069 - DNA, 100 bp, Homo sapiens
ctgctgggtccgctgagcggggcgacccgagcacctggctgcagtggaagaaagaaagatcaagtccctggtagctctcttggttgagacacaaatgaag

SEQ ID NO: 351070 - DNA, 75 bp, Homo sapiens
cccctggctctgcaacgcttctcagtactgagccactaatgggcagtagtttgcttgaagaggcttcagtaccca

SEQ ID NO: 351071 - DNA, 89 bp, Homo sapiens
cagggtttcagggcagaaagcagtcgggctttgcagctaccagccaacctggccctcggctccccttcatccaacacagccagaacccg

SEQ ID NO: 351072 - DNA, 102 bp, Homo sapiens
gagctgtgcagccgcgaggaggcgcgggaggtgttcgagaacgaccccgagacggtggaagttaaacgagctgagcctcgggacagcaagagccaagcgccg

SEQ ID NO: 351073 - DNA, 83 bp, Homo sapiens
tgatcattgaaaacttcgaggcactcaagtcctggctcagcaagactctcgagcccatttatttctcaaactctgaggctgcg

SEQ ID NO: 351074 - DNA, 89 bp, Homo sapiens
gtctggagcagtggagcccaaagacccctggagacatgttacagaatgtctgaaggggacagtgtgggagaatccgtccatgggaaacc

SEQ ID NO: 351075 - DNA, 83 bp, Homo sapiens
caaaggcatggaagtatgaaaatggattttttatcaagcagaaatgcatcgaacaacgagaatcaagatcactgagctaaatc

SEQ ID NO: 351076 - DNA, 100 bp, Homo sapiens
cacccccagtgggtcctcacagctgcccactgcatcaggaaatgaaggtcaccgtgtccaaagggggcgaccgggacagtgacgacgacagcgtcctcga

SEQ ID NO: 351077 - DNA, 100 bp, Homo sapiens
atcggcttctctcgggctttgtccccttgctggctgcccctcaggacccctgctacgtggagaaaacctcggataagaggttggaaagaaccatgactgt

SEQ ID NO: 351078 - DNA, 100 bp, Homo sapiens
ctgaccggagccttcagcggggggagctcggagccctcccagcctgctgtccagcaggtgatctgctgtgaggggaatgctgggttttatgaggtgggct

SEQ ID NO: 351079 - DNA, 90 bp, Homo sapiens
agcgtttcgtgcccctcggacccggccacgcagtccccaggggcccggcccggggcgcgttgaaggagtcagaaataccatcagaggagg

SEQ ID NO: 351080 - DNA, 88 bp, Homo sapiens
gggatagccctggtcctttctccaatggcaggagaggagaacttcaaggaagagctcagatcccaggatgcttccaggaacttgaacc

SEQ ID NO: 351081 - DNA, 50 bp, Homo sapiens
gagcggctgatcgcagtccggaggaaagccgtggagagctgctccgacgt

SEQ ID NO: 351082 - DNA, 50 bp, Homo sapiens
atgcggtctttagcagggcttttggagtatggacttcactaacagggaac

SEQ ID NO: 351083 - DNA, 98 bp, Homo sapiens
aggaccaaagccgtcctgtgtatggtggtggcaggggccatcgctgccgtctttcacacactgataggaaaaccagtagattcccagacatcgcgaag

SEQ ID NO: 351084 - DNA, 100 bp, Homo sapiens
taaaaactggagaatggttctatgaggaacgagccaagaaatttccaactggaggtgagcgagtgctgtgctttcatgggcctcttctttatgaagcaaa

SEQ ID NO: 351085 - DNA, 75 bp, Homo sapiens
aagggactttggaaaaaggctgtctctagacagcagtcttgtggccaagaagcttgagagaagaaaaatttcaga

SEQ ID NO: 351086 - DNA, 136 bp, Homo sapiens
ttaaagaaatcattcaccagacatcatggagcctatatatccttttgcacggccccagatgaataccaggatcccctaacaacagtgagagagcaatgcgagcagttggagaaatgtgtaaaggcccgggagcggc

SEQ ID NO: 351087 - DNA, 101 bp, Homo sapiens
ctgctcctgctgctcgaggacgctggagcccagcaagatgtgactacccctgaatctacaaagaatcttgtggagtcatctatggtgaatggaggtttgac

SEQ ID NO: 351088 - DNA, 71 bp, Homo sapiens
cggtctcacagacaacgttgagtgttctggacttggtgcctctttctgttatatgctttcctatttagttg

SEQ ID NO: 351089 - DNA, 82 bp, Homo sapiens
tttatctcaggagtgtcattgctcatatagaagacccagaggacactaaccaaggaggagctgatggatcagacatatagga

SEQ ID NO: 351090 - DNA, 89 bp, Homo sapiens
ccgctgcttgggtcaggttcgccggtcgcgggagccccgccgtgcagtcggaggtgaagcaaaaaatttattgccatatcttggacccc

SEQ ID NO: 351091 - DNA, 90 bp, Homo sapiens
gagatgtgatgttggagaactacagaaacctcgtctccctgggtaagagcttctgttcgtgtgcagggaaagcagctcacagacgccgtt

SEQ ID NO: 351092 - DNA, 75 bp, Homo sapiens
tccgctttgccaagaagatggacaagatggtgcagaagaagaacgcgaaatgaagctgttgtcatttctggaagg

SEQ ID NO: 351093 - DNA, 96 bp, Homo sapiens
ctcggacagatgaagctccccaaggagctgcaggatgtacagttacccagcacgtgtacctcctcctcctcctattgctcgggctgtagtgccctc

SEQ ID NO: 351094 - DNA, 99 bp, Homo sapiens
tagctactccggaccttacggggacatgcgaatgaccgaagaagcatgccgaacacggagtcagaaacgagcgcttgaacgggacccaacagaggacga

SEQ ID NO: 351095 - DNA, 83 bp, Homo sapiens
gtccgccgccaccacccactccggacacagcagcccctgtcaaagggaacaggaagcagtccacggagggtgacgccctagac

SEQ ID NO: 351096 - DNA, 75 bp, Homo sapiens
ctatgccagtgagaggcccaagtccctaggtggccatggtggaggtgcagctggagagtgaccacgagtacccac

SEQ ID NO: 351097 - DNA, 74 bp, Homo sapiens
agacatgagacagtagtcaaatactcagatatgagatcctgactccaaactccattcccaagggtttcatggac

SEQ ID NO: 351098 - DNA, 90 bp, Homo sapiens
ttctgctggtgtgagtgccctcaggggttccccaggaatatcgatacaacaccaacaggctgtggatctttccattgatgagtccagctt

SEQ ID NO: 351099 - DNA, 101 bp, Homo sapiens
tagggacccatttctcctcctttgacagggacatcagtggagccttctcagacccacagttaccttatcccatatcacacaactggtcctcagccataaca

SEQ ID NO: 351100 - DNA, 100 bp, Homo sapiens
ccagagaaaggacgagcagcaagtcagggagcttaaggctgagtcatcactagagagtgggaagggcagcagcagcagagaatccaaaccctaaagctga

SEQ ID NO: 351101 - DNA, 82 bp, Homo sapiens
acttgcctaaatgaggaatgtctttcctaccatctaaaatacgaaggtttctggctggtcccagaaatcctggatagaaagc

SEQ ID NO: 351102 - DNA, 90 bp, Homo sapiens
cgtgtgtcagaacaatcttgaatcatgaagctactaaccagagccggctctttctcgggtgaggacgcttgagcggaagttagaagcaaa

SEQ ID NO: 351103 - DNA, 100 bp, Homo sapiens
cctggaggcctctacagagacataatgttggagaacttctgccacatggcagtgctgggtacaggtttgcagattccgccagcagcacagcaagctctac

SEQ ID NO: 351104 - DNA, 74 bp, Homo sapiens
cgcgattgtttcaatctaatgatatcatcatggcaaaaccagctggtgggcccaagcctccaagtgggaagaaa

SEQ ID NO: 351105 - DNA, 100 bp, Homo sapiens
cctggttctgccttctggacaatctttccggtgtcagttgtacccgaggcgttctcagcagcagcaagtacctgtggtggatttccaggctgaactgagg

SEQ ID NO: 351106 - DNA, 82 bp, Homo sapiens
cgccaccctgcgctgccgccgctctgaggagttaaagacctgcctagagctggaacgttacctccagagcgagccctgctat

SEQ ID NO: 351107 - DNA, 99 bp, Homo sapiens
tgccctgcagtacctgcagaaggtctctggagacatcttcagcaggtgctgaaggtcgccatcctggctgagaagtacgcggtggactacacctggtat

SEQ ID NO: 351108 - DNA, 82 bp, Homo sapiens
aaaaatccagaagtacaagcagtctgttggattggatgctgctggcaagacaaccattctgtataaactgaagttaggggag

SEQ ID NO: 351109 - DNA, 88 bp, Homo sapiens
ggagatgggcgaggcctttgccgctgacatcccccgcatcctggtggccgggttcatgggcgggggtggtgagagctgcagcctcatc

SEQ ID NO: 351110 - DNA, 100 bp, Homo sapiens
aaggggagcgcgttgacttcgatgccaccctcatcaacgagtactcctcagtggtccagccggtgcagctggccttccagcagcagatccagaccctcaa

SEQ ID NO: 351111 - DNA, 100 bp, Homo sapiens
gtttggacctgatggagcatggggctggttgatatgtgaagagccaacctgtcgcaatcgaactcgtcaccttccccttcaattctcccgaactgggcct

SEQ ID NO: 351112 - DNA, 83 bp, Homo sapiens
cgcctctcgctcctggctccgaagacaactttgccaggacagagcgggatgccaccagcttgtccaaagggaagttccaggag

SEQ ID NO: 351113 - DNA, 75 bp, Homo sapiens
acggaagatcatttatatacacatgtgcttagatgagtacgaagatgatgaagcagggcagaaagagcggaaacg

SEQ ID NO: 351114 - DNA, 100 bp, Homo sapiens
gcggcagcggcggctgcggcgcgcgcgagccgagtgtgagcggaaaggggcccggcgtctgcctcgagactgaagaccgagccagccccagtgcctgctg

SEQ ID NO: 351115 - DNA, 73 bp, Homo sapiens
attttctttaaggatggtttagaaatggaaaaatgtgtgcccctgggcgctgggattgctctagcctgtaagt

SEQ ID NO: 351116 - DNA, 90 bp, Homo sapiens
agagagaagtgactttagttcatgtgacagactggatagagaagaaactggagcaagagtttcagaaatgcactcggtgatggaaagaga

SEQ ID NO: 351117 - DNA, 90 bp, Homo sapiens
gagcagtaccctgatggagtcccttgcagcactctcgagtggaccctgaggagctcttcaccaagctcgaccgcattggcaagggctcgt

SEQ ID NO: 351118 - DNA, 75 bp, Homo sapiens
cttcaagccccgcgagtcgcatctgctcaacgacgaggacctgacgcaggaagtgaatactctggcaatgcctat

SEQ ID NO: 351119 - DNA, 97 bp, Homo sapiens
cgacttctgatccatggatgccatcaggtgtcatggagaaactccagctgggcccagagattctgcagcgggaaaatccaaggcttatttatgccag

SEQ ID NO: 351120 - DNA, 142 bp, Homo sapiens
gatcggatcattaccattacaggaacacaggaccagatacagaatgcacagtatttgctgcagaacagaacattaaccaggtggtatttgttggaaatttcttgagaattaatacgatcgccatgcggcttttggcatatgc

SEQ ID NO: 351121 - DNA, 100 bp, Homo sapiens
cattttttaaccctagatctcgtctgatcatcggatatcatggagtctggcaagacggcttctcccaagagcatgccgaaagatgcacagatgatggcac

SEQ ID NO: 351122 - DNA, 100 bp, Homo sapiens
acctctacttagctcagcaattcttaccttctccaaagacaacaggccctccctctgccctcccgtctgtgagctccctgcccagcaccacctcctgcac

SEQ ID NO: 351123 - DNA, 105 bp, Homo sapiens
gcaggtagctgccaagtttatgcctgtatccagccttattgtggccgtggtccttcagcatatctctgtgctgcagacaacacaccttcctgatggaggtgcccg

SEQ ID NO: 351124 - DNA, 115 bp, Homo sapiens
aagactcgaaggcagcacaggacctggaaaaattacataactcttcatcttggcttatacctatactgcctgatatgctccgacacatttttcagttctgtgttttggaaagcag

SEQ ID NO: 351125 - DNA, 74 bp, Homo sapiens
cacaagagcaccatactttgagggtttatggttggctgtgggagatgtgatgactggtttcatggtgattgtgt

SEQ ID NO: 351126 - DNA, 96 bp, Homo sapiens
gtttctttacttatttgtggttggaatgagggacgaccatatttatttcagtcagatccatctcttagcagtgtctgcaaaaacgaatcttttcct

SEQ ID NO: 351127 - DNA, 82 bp, Homo sapiens
agcggcctcagggttcaggcaatgcaaataagatattgcaatggcaaaatcagcaaagttaattcaacagcagctggagaaa

SEQ ID NO: 351128 - DNA, 111 bp, Homo sapiens
tggagctggtcgcagatcctgagacccggacagtggcagtgaaacagagatggagtctccctatgttgcccaggctggtctcaaacttcctgtgctcaagttatcctcctg

SEQ ID NO: 351129 - DNA, 100 bp, Homo sapiens
ggagcaccgatgatgtgcagatcaatgacatttccctgcaggtcatccccttgaaaggcctgtgggaggatgtggcacccaccctgcctgacggtcactt

SEQ ID NO: 351130 - DNA, 83 bp, Homo sapiens
gggattttgtcagcttgtcgtcaaggtgatgtgtccaatctagatcccaacttctcatttgaaggcaccaaactggatgtggg

SEQ ID NO: 351131 - DNA, 88 bp, Homo sapiens
agtcggcaaggagagacgtcgctgaggggcttgcctgaagcgaggggttctggctccttggcagcaatggctgtatttgaagataagt

SEQ ID NO: 351132 - DNA, 97 bp, Homo sapiens
gacggctcacctgtgcgggatggaacaaaagccggcccaggcctttgtggtgaagcggggcgtccacgtgtcaggagcgtctcccgagagcatcagc

SEQ ID NO: 351133 - DNA, 100 bp, Homo sapiens
atggtgctgggacatgaagcttcgggaacagtcgaaaaagtgggatcatcggtaaagcacctaaaaccaggtcgagtctatgctgtcttgtcaaagagag

SEQ ID NO: 351134 - DNA, 88 bp, Homo sapiens
gccagggaaccctggtcaccgtctcctcaggccagctgcgggccgtccagcggctgtgccacttctacagcgccgtcatgcccagcga

SEQ ID NO: 351135 - DNA, 50 bp, Homo sapiens
agattctcagggcaacccagatctgccaataagccctcttctggatcaaa

SEQ ID NO: 351136 - DNA, 133 bp, Homo sapiens
ccggccagcgccagccggaccccagacaagccccggagcgcggccgagcaccgcaagccggcgtaaaggccgtgcctctgagcacaaagaccagctctctcggctgaaggacagagaccccgagttctacaag

SEQ ID NO: 351137 - DNA, 100 bp, Homo sapiens
tttgaatttgagtcggccacacagtgttctaagaacggaagcatctgggctggatggaatttagcatcaagcagagtcccctttctgttcagagtgttgt

SEQ ID NO: 351138 - DNA, 96 bp, Homo sapiens
ccggaggctgcacggagagcggtgcccgcgtcagggggaaatttgcagtggtgagaaaatgtataaagaaagattctgggaaagaatttgctgcaa

SEQ ID NO: 351139 - DNA, 82 bp, Homo sapiens
ctgagtggttgtgtggtcgcgtctcggaaaccggtagcgcttgcagcatgaccatggtgaatccgggcagcagctcgcagcc

SEQ ID NO: 351140 - DNA, 100 bp, Homo sapiens
ttcgaaacgtgataagaagcacctggatgagacatttgctacagcatcccacattaagtcaacgaacatgttcttcaagtatacatggaataactttttg

SEQ ID NO: 351141 - DNA, 135 bp, Homo sapiens
ccgctggcaaggagatgcccgccaaaaagctctgaaggacttgctgaaatgggtcttagagatcagcttgaacgggtctttttacgacttggccatgctgaaacagatgaacaattacagaatattatatctaaa

SEQ ID NO: 351142 - DNA, 100 bp, Homo sapiens
atgtctgacaaactaaagaaagacttgtgttacgaaacatgccctgaactgtcacagaatgaaaccagcgctcttcagcgtcctgtgtgagatcaaagag

SEQ ID NO: 351143 - DNA, 50 bp, Homo sapiens
ttgacacttatatcctccctggggatttgtcttggctgttactatgacac

SEQ ID NO: 351144 - DNA, 77 bp, Homo sapiens
accaattatgggagggctggccaacttctgctacagacgactcagaacaagttccagttccagtctaccacccaaca

SEQ ID NO: 351145 - DNA, 90 bp, Homo sapiens
aagggccaggcccctctggagtggagagtctcctatgccccatgtcctcccacctcagcttggcacaggcaactccgaagtcaagcccgc

SEQ ID NO: 351146 - DNA, 75 bp, Homo sapiens
tgctcgcgctactctctctttctggcctggaggctatccagcggacagagtccccaagtgggtgcacgtgttaat

SEQ ID NO: 351147 - DNA, 103 bp, Homo sapiens
agcctccggagctcgcccaagccgcgtccccagagagcgccctgagagaacagggtggccgcttggtccagctacttttccaggtatgtgggagagaacaata

SEQ ID NO: 351148 - DNA, 100 bp, Homo sapiens
ggaatggttaagaaaaagacatggcctctgactgctccaaaaaaggataagcagggcttcacagaagaggtgacaggaggagaagccaggcgtatcaggg

SEQ ID NO: 351149 - DNA, 82 bp, Homo sapiens
aacctgcgcccccagatgtcccaggtattagaaaactactcggatgctccaatgacaccaaaacagattctgcaggtcatag

SEQ ID NO: 351150 - DNA, 90 bp, Homo sapiens
tagctgttacctcgacgagtacatcgcaaggatggttcaaacatttccccagaggagctcaaaatggagttgccggagagacagcccagg

SEQ ID NO: 351151 - DNA, 83 bp, Homo sapiens
aggggcccggcgtctgcctcgagactgaagaccggttttaaaatcaaagatgggaaaatcggagaaaattgcccttccccatg

SEQ ID NO: 351152 - DNA, 98 bp, Homo sapiens
tctccaccattgccgagggctctcacccaaatgttttgaacgaagaatgtgatcagaactggtacaaggcagagcttaatggaaaagacggcttcatt

SEQ ID NO: 351153 - DNA, 123 bp, Homo sapiens
cgagtattgggacatccctagctgacgccaggacacccgggaagccgaggaatgccatgtgaagatgtgcttgcttcccctttgccttctgccatgattctaagtttcctgaggcctccccag

SEQ ID NO: 351154 - DNA, 50 bp, Homo sapiens
ttagtccacagtcttcctctataggaaacttggatttaactggccagaag

SEQ ID NO: 351155 - DNA, 96 bp, Homo sapiens
ctgatgagaacgaccaggtcatcgtgaaaatcatcggacatttctatgccagtcagccgccgccatgatcctgctggaggtgaacaaccgcatcat

SEQ ID NO: 351156 - DNA, 100 bp, Homo sapiens
ccaacagtcagtttaattatgatggcgttcaggaagtggcttatattcactcaaaccagaatgtaattggatcgagcaaagctgaaaatcacatgagccg

SEQ ID NO: 351157 - DNA, 97 bp, Homo sapiens
gccatcaggggccttgacaacacagagtttcaaggtgacttcatggtcatgacgattttcttcaatgtgagcaggcggtttggctatgttgcctttc

SEQ ID NO: 351158 - DNA, 103 bp, Homo sapiens
tgcgaaggccgggacccggttccccggcccacagtgggggtgtgcaaacccgagagaactgggttcttgatcaatatgaacgagaaggatttaacttcctagc

SEQ ID NO: 351159 - DNA, 101 bp, Homo sapiens
cacatgcggagactccgaggtggaggaggagtccccaggaaagcgcctggacgcagggctgatggagttatgagaacaatgaacacagaaaaactcctaaa

SEQ ID NO: 351160 - DNA, 75 bp, Homo sapiens
gtgcgcaaaggcctgcagtgcgcgcaggctgggaggcggcagaatgcagccagaggagggcacaggctggctgct

SEQ ID NO: 351161 - DNA, 82 bp, Homo sapiens
ccgcaccatgccgctcctaagcctgcacagccgcggcggcagcagcagtgagagataacgaaggaggcccaacttcattcaa

SEQ ID NO: 351162 - DNA, 100 bp, Homo sapiens
gaattcttggccttgtaaaagcaaggaggagtggaatgaaatacggcaccagattggaaacacactgatccgattctggaagttacggtcagtctggggg

SEQ ID NO: 351163 - DNA, 100 bp, Homo sapiens
gctcagagttcctgcctccagctgccaggggggacagccagccagcagcaggaggagtgaagatagtccaagtcctaagagacagcgcctctctcattca

SEQ ID NO: 351164 - DNA, 95 bp, Homo sapiens
tttcctgataactggaaagttcctcaagatggagactttgactttgatgaccatgaaagctgtggttctaattctaccaaccgtagtactgctga

SEQ ID NO: 351165 - DNA, 51 bp, Homo sapiens
tgtgtgcccaggcagacttcgagggaatgagtccctggaacgccagatgcg

SEQ ID NO: 351166 - DNA, 90 bp, Homo sapiens
gaaggtgaagagttgtcccagctcggcccgcgggggagccccgggagccgcacgcctgatcctgcctgaagatggtgccactggtggctg

SEQ ID NO: 351167 - DNA, 111 bp, Homo sapiens
cgcccgggaggaaggaacgaggcaaggagctaaagcagcgtgcgttcagccctgggggcgaccattgacgaggtggagacggacgtggtggagattgaggccaaactggac

SEQ ID NO: 351168 - DNA, 107 bp, Homo sapiens
agaatcctgaagacactaaaacccaagtgattttgcagttacagcctgtgcaacaaggcagaaccttctaagtctcagacacgtaaacccaagtgtggcaaaggaac

SEQ ID NO: 351169 - DNA, 75 bp, Homo sapiens
ttctgtacagcctgcagaactgttcctaaaagtaaagctttagaggccaccaaattggcaattgaagctggcttc

SEQ ID NO: 351170 - DNA, 75 bp, Homo sapiens
tctgatgggggaagccaccaggattacatcatctgctgaacagctgaatagatttgctggatttggtattggact

SEQ ID NO: 351171 - DNA, 100 bp, Homo sapiens
gacccggagaaccccacgaaatgttacgttatatataggattcgtgttcgccgtggtggccgaaaacgcccagttcctaagggtgcaacttacggcaagc

SEQ ID NO: 351172 - DNA, 50 bp, Homo sapiens
ccattacctaggtattaagcccgagacagcatctcactatgttgcccagg

SEQ ID NO: 351173 - DNA, 75 bp, Homo sapiens
gagcgtcggggaggcaagatgatccaccagcggttccatcctacacttggagaaagatgctggtttcgagttttg

SEQ ID NO: 351174 - DNA, 100 bp, Homo sapiens
gacggctctatcagcatgggaaacttacactgctgcataatggagaacctctctacattccagtaacccaggccacggaaaggtatgatatatttgatcc

SEQ ID NO: 351175 - DNA, 78 bp, Homo sapiens
ccgagccctggacaccaactattgcttcaggtttcgagacaaggagtggatcaggccagataagtatggccatttctc

SEQ ID NO: 351176 - DNA, 106 bp, Homo sapiens
ccccggtcgggtgtgtggctgcgcgcgccgggagagatgctgagttttcggctttgtgagaaaccttaccatcaaacacgatggccagcaacgttaccaacaagac

SEQ ID NO: 351177 - DNA, 50 bp, Homo sapiens
tggagtagaagggagcgatactacagtcatcagcagtgaggactctgaag

SEQ ID NO: 351178 - DNA, 82 bp, Homo sapiens
ggagcggagccttcagtccttagggacaccgagtgacacgcaggagcttcgggacagcctgatttttagactctgaggagca

SEQ ID NO: 351179 - DNA, 101 bp, Homo sapiens
atctggttcagctttatctatattttttgactgctctgctcctctatgctggacatcaaatttccagctgatgttctaatcatgtcagataaagatgatat

SEQ ID NO: 351180 - DNA, 102 bp, Homo sapiens
gtgaatatatgcctgatgttgctaaatgtagacaatggttagagaagaattttccaaatgaatttgcaaaacttactgtagccaacttctctttgcctgaaa

SEQ ID NO: 351181 - DNA, 101 bp, Homo sapiens
gtcatcctggctaaaggagcagaggaaatggagacggtcatccctgtagatgtcatgaggcgagctgggatgctgggctcttgcactgtttggtggaaatg

SEQ ID NO: 351182 - DNA, 75 bp, Homo sapiens
cgccgccgcgcacaaccgcacgtgcagcttggcttgtggagatgttgaaggaaagtttgatattttattcaatag

SEQ ID NO: 351183 - DNA, 75 bp, Homo sapiens
aagatggcgaaggtctcagagctttacgatgtcacttgggaaggttttttgcatgtctgacacccatgactccac

SEQ ID NO: 351184 - DNA, 80 bp, Homo sapiens
aagctgccccgtgcccgggagggagcgggcgcaccgcggcccccaggacacgcgctttccagggtctccctccactgctg

SEQ ID NO: 351185 - DNA, 88 bp, Homo sapiens
ctaaagagcaagcctaactcaagccattggcacacagaacacagatatgtagaactcttcttgaattctacagcaggagcaagcggtg

SEQ ID NO: 351186 - DNA, 74 bp, Homo sapiens
ctcccgcctgccccctcagccctgtggctgggggcagagctcaggttggaattgtacagtatggagaaaacgtg

SEQ ID NO: 351187 - DNA, 75 bp, Homo sapiens
acagagtatgaccaccactattaagcatttccggagagttcttttgaagtcacttcagaaggatctacatgagga

SEQ ID NO: 351188 - DNA, 75 bp, Homo sapiens
cgatgaccagtccaccaaggccatcgacatccagaacgcttatttgaatgccctaccacttatgtcttggatgaa

SEQ ID NO: 351189 - DNA, 75 bp, Homo sapiens
agtcggcactgctactgcgaagacagctggcagaaatggtggagtcaatgaagaaagtagcagggatggatgtgg

SEQ ID NO: 351190 - DNA, 100 bp, Homo sapiens
acacagcctagccagctcccacagaaactccagctgctgagaactagccctagacctctgcgtgagggttcttctgccgaagacatcaccagtgtgtgga

SEQ ID NO: 351191 - DNA, 100 bp, Homo sapiens
aaatgttctacaaaaaagaagtatttctgagtaatctggaagaaacctgccccatgacatgtattctcggtagcctttccagtaaatatatgactcaggg

SEQ ID NO: 351192 - DNA, 100 bp, Homo sapiens
tgaacccaacctagtgggtgtaatacatcatgaactgcaggcaacacatgccatacttccggaagcggatggtctgggagatcctccaccgaaaactctt

SEQ ID NO: 351193 - DNA, 82 bp, Homo sapiens
ccggctcccattctggttaaaggttgactatagtcaatggggccaatggagccaagtgtatggaaacccacaacagtatgga

SEQ ID NO: 351194 - DNA, 100 bp, Homo sapiens
ctggatggaagatagcttgaacagggctgacaacatttttccttttccgtgtttgatgatggtgatgagcgaacattgagacgtacctcactttgtctga

SEQ ID NO: 351195 - DNA, 100 bp, Homo sapiens
gcggagactgcgggcccgtagctgggctctgcgaggtcgggcccaagtgcaagaattctgtgactatggaaccaaggaggagtgcatgaaagccagtgat

SEQ ID NO: 351196 - DNA, 100 bp, Homo sapiens
caagatcgggtacagcaacaacggctcggactggaagatgatcatggatgacagcaaacgcaaggcgaaggatctcaaagatttcatgagacaagctggg

SEQ ID NO: 351197 - DNA, 100 bp, Homo sapiens
tcccaagttactcaggtgatagaggctgactggaaataccggcatgcaggattgatggccttatctgccattggtgaagggtgccaccagcaaatggaag

SEQ ID NO: 351198 - DNA, 90 bp, Homo sapiens
gtagctgttaggttaattattcgggagggagcaaaggagtttgctgctgctctcaccgctgagcggataaagaccccaccaaaacgtcca

SEQ ID NO: 351199 - DNA, 75 bp, Homo sapiens
tgcgcagcctgcaagattgtggtgcacacgccctgcatcgagcagctggagaagaatttacatagtacatgacga

SEQ ID NO: 351200 - DNA, 95 bp, Homo sapiens
gaagaatctacagatgagtctgaggcatgggcaagaaggacgaccccaagctgatgcaggagtggttcaagctagtgcaggagaagaacgccatg

SEQ ID NO: 351201 - DNA, 99 bp, Homo sapiens
gtgtattgtgggatgactccaaaacatcagtgtactgttacccggacatacctattccttcacaagttctggttcttcagtgctgcttactattttggt

SEQ ID NO: 351202 - DNA, 98 bp, Homo sapiens
tgactttcagctatggaatcgggtggcattgtgtgtcccagagtgccggagcgagtcccagaagagaggcgaggctaagcccagagcgctgggttgct

SEQ ID NO: 351203 - DNA, 99 bp, Homo sapiens
gagcgggcacagggcaaggcggcggacggctgcgtcgcccgaggcgaggaggagcgctggcgcatttttgaaacgttggggttgttggagtggttggat

SEQ ID NO: 351204 - DNA, 75 bp, Homo sapiens
gtggcaaattttttcccaaagaagttattagaacttgatagttttctgaaggcttcaccggccagaactgtgagg

SEQ ID NO: 351205 - DNA, 75 bp, Homo sapiens
tgagctctcggattccttatgcagagtggccgacttgggtctttacggaataaaggatgatgtcttccttagtgt

SEQ ID NO: 351206 - DNA, 75 bp, Homo sapiens
aagccatgttcccaccagccagggggaaggtgtccccaggtgtcattgccaacccctttgcggcaggcatcggcc

SEQ ID NO: 351207 - DNA, 100 bp, Homo sapiens
aaaagctatatggagataaatggaattcttttaccatcttattaattcactctgttatgtgaagaactttttgagaaaatcaatgacaactgtaatgaag

SEQ ID NO: 351208 - DNA, 50 bp, Homo sapiens
ttcggcccgggccgctcaggtgcagagctccaaacgagaatggaagccgc

SEQ ID NO: 351209 - DNA, 100 bp, Homo sapiens
gaggagcggccggcgggacggaggtcaccatggctgttattggctcccttgctgtccccagctgttccccaggtcacctccccaccttgctgcctgtgtc

SEQ ID NO: 351210 - DNA, 90 bp, Homo sapiens
gtctttcttggagctgatgttcaagcaatttcagggttattggccaatatgggtaagcatgggaggaaggaagatggcgacagatgaaga

SEQ ID NO: 351211 - DNA, 98 bp, Homo sapiens
cagggagtgatggtcagctaggactcatgactactgaggattctgtggcagtgcccaggaaaatatgagagccacacccgtgttcacacaggtgagaa

SEQ ID NO: 351212 - DNA, 80 bp, Homo sapiens
gtcctaagttggatctgggcttcaaggaaggacaaaccatcaagttgtgtatcgggctgattgggcagaaagtggcccat

SEQ ID NO: 351213 - DNA, 87 bp, Homo sapiens
caggttccctacacggtctcctgggtcaagatgccagcttggagagtcacgtgagagcaagagagtagctttctggttgtcctggtg

SEQ ID NO: 351214 - DNA, 75 bp, Homo sapiens
ggctgagccggccgcgggcgcgaccggaggcagatcagctatagcagtataagatcatttgatcctgcagttcca

SEQ ID NO: 351215 - DNA, 75 bp, Homo sapiens
ctgaacatcatgaattcccaagaaggaggaaagcgtctctagcagctgatatccccagacttggatatagttcct

SEQ ID NO: 351216 - DNA, 80 bp, Homo sapiens
caccatgggggagaaacccgggaccaggttatgaagacagtatggagtttccagaccatagtagacatttgctacagtgt

SEQ ID NO: 351217 - DNA, 90 bp, Homo sapiens
tgaaggcctggagagccgcccagcagcacaacacagggaagcttggggagtatgacgccgtgcccatccagtccagcgtggtgttatgtt

SEQ ID NO: 351218 - DNA, 74 bp, Homo sapiens
acaagaaacagttctctcaatacataaagaacagcgtaactccagacatgggagtatatgttgctgcagtacgg

SEQ ID NO: 351219 - DNA, 100 bp, Homo sapiens
tctccgaacagagccacacgactcccgctggctcaatgcttcccaagctcttccttcagtcccacgactacagtctgtattccttggatgtggaattcat

SEQ ID NO: 351220 - DNA, 100 bp, Homo sapiens
cacctggagctgaggaaccggaccccggcagctactgattttgcacgatttagcggaacaaatgtggaaactgactttgtagaggtgccatcgcaaatgc

SEQ ID NO: 351221 - DNA, 100 bp, Homo sapiens
cgctactacctggtgcagggcctgattgaggactgccagctggcgctgcaggttctaatagaagactgtatcccggtactgaagaggtacgccaaagaag

SEQ ID NO: 351222 - DNA, 98 bp, Homo sapiens
accaggcacggctggcagagaccagggaactagtcgccatcaagaaggttctccaggacaagaggttcaaggatcccaaaatggctgggcgaaaactt

SEQ ID NO: 351223 - DNA, 91 bp, Homo sapiens
tcaagaaaccccgatcacaaagatacgaatctcttaagggggtcaccaagctccagcagctctcaagccatgcggtcccctttgccacacc

SEQ ID NO: 351224 - DNA, 75 bp, Homo sapiens
gctgaagaagcagttctacaaggcgagccaggttcagcggacagtggggatgtcacatgaccggcatgttgctgc

SEQ ID NO: 351225 - DNA, 74 bp, Homo sapiens
tgctgtccaggctggtgtgctctctggtgatcaagatacaggaattacatgaacgacagccttcgcaccgacgt

SEQ ID NO: 351226 - DNA, 100 bp, Homo sapiens
cctggaggagacaacctggaagaacgatttaaaggctcttcgtcagattgggcagaggacgataagcactgcttcccgcaggcattttaaaaataaagtt

SEQ ID NO: 351227 - DNA, 73 bp, Homo sapiens
atgaagcgcaccccgactgccgaggaacgagagcgcgaagctaagatcagctggacatcatctccatggcgga

SEQ ID NO: 351228 - DNA, 100 bp, Homo sapiens
cagtggagacccagctttgagcagagccctgcctaaggtccagggctcgatctggccctaaccacagagtcaccttgagaggagaaggcagagccccccc

SEQ ID NO: 351229 - DNA, 100 bp, Homo sapiens
ggaaaacctccttatgctgatatacatccaatgagggggctgcttgctctcggtgactacatgaatgtccagtgccatgcctgcattggaggcaccaatg

SEQ ID NO: 351230 - DNA, 51 bp, Homo sapiens
ctgcgagctacgaacaatgctaaaagggtgcttcattgaagaggtccaagt

SEQ ID NO: 351231 - DNA, 95 bp, Homo sapiens
gagaaactgatgaagctgcagaaccaacgaggtggccgaatcttccttcaggatatcaagattagtgatgatgaaccaggttatgaccttgattt

SEQ ID NO: 351232 - DNA, 96 bp, Homo sapiens
gtgccttattgtggattttagcaaccctgaggaggtgcaaaaaaagtcttttgaagagaaatatgaagtcttcatggatgtttgccaaaattttca

SEQ ID NO: 351233 - DNA, 83 bp, Homo sapiens
aggagctaaagcagcgtgcgttcagccctggggactttgtgttttatgccccacgtctgagaatcaacaagcggatcctgcag

SEQ ID NO: 351234 - DNA, 100 bp, Homo sapiens
agccggtgccgcagctgcgatggccgtggccgtggggagaccgtctatatgaggccccaggattcctggcgaggtcctcctccccttttccagcagcaaa

SEQ ID NO: 351235 - DNA, 100 bp, Homo sapiens
gcaaccactccagaaactttccctccttcaggagcctgtgttggaagagatggtgatgggcctgggcgttttgttgttggtcttcgtgctgggtctgggt

SEQ ID NO: 351236 - DNA, 90 bp, Homo sapiens
caaagatggcggcagggaccagcagttactgggaaggtgacatttgctctgaactggatgatacgaatgatgtcagatttggaatctaac

SEQ ID NO: 351237 - DNA, 83 bp, Homo sapiens
cggagctgcggtggcgtctccacacgcaataagagctaactgccatcaagagccatcagtatgtcttcaagctgcatgcccag

SEQ ID NO: 351238 - DNA, 100 bp, Homo sapiens
agacagatcgctgtcaaaaccctaggtacggggctgatgttgacgtcaaccaccacctgactcctgatgtccagcctcgattctcccggcggctcacctc

SEQ ID NO: 351239 - DNA, 75 bp, Homo sapiens
gcctgccgctccggagagccgcccgccgaggatgcgacgcaccgcagcccgagcgggaagaagttccgcagcaag

SEQ ID NO: 351240 - DNA, 75 bp, Homo sapiens
taccgctcactgtagaccatctcaagcagtggaatcccccaaagaaggtaaagggagcaagccttccccactgtc

SEQ ID NO: 351241 - DNA, 95 bp, Homo sapiens
gtcttcagaatctcccaccaaggctgtacctctggaggagttctaggtttggatttggtcatctcaagaaggtatgttgagtcgatgggatgata

SEQ ID NO: 351242 - DNA, 90 bp, Homo sapiens
ccgggaggaaggaacgaggcaaggagctaaagcagcgtgcgttcagccctgggactatgtcttcagcagtggtgcagttatatgcagcag

SEQ ID NO: 351243 - DNA, 100 bp, Homo sapiens
cgctgctcaaggacacggtctacaccgacttcgacgagagaagaagaaggaggttcctgctgtgccagaaacccttaagaaaaagcgaaggaatttcgca

SEQ ID NO: 351244 - DNA, 96 bp, Homo sapiens
agaatttctcaccaaacatcttagggcagataatgcctttatgttacttactcagatacaggtatccccgtttttacaacagatgttcatgcccct

SEQ ID NO: 351245 - DNA, 100 bp, Homo sapiens
tggctgcgagcacatgatggcgatacgggagctcaaagtgtgccttctcgggggagagctggtgacggcctccaaggccatcattgaaaaggagtaccag

SEQ ID NO: 351246 - DNA, 81 bp, Homo sapiens
ggggagccgagctggagctgccgcggcgcagccaggtgctggagaatctggtaaaagcaccattgtgaagcagatgaggat

SEQ ID NO: 351247 - DNA, 75 bp, Homo sapiens
ccatccttatacatggagttgatattacaaccagtgacactgcaggtgctaaagtggaattttactaccccacgg

SEQ ID NO: 351248 - DNA, 100 bp, Homo sapiens
cccgattaaagactgtgttgcattatcaggtgtttgtaaaatgtatgaagaacatctgaaaagaatgaatcccaacagtccctctatcacatatgacatc

SEQ ID NO: 351249 - DNA, 75 bp, Homo sapiens
ccgcgcctgggctgccggcacttcgcggcagtgctgctcacggccgtgaactgctacagcgtgaaggccgccacc

SEQ ID NO: 351250 - DNA, 82 bp, Homo sapiens
tgaaccatccctagccaatggagcattcatgcccaaggaattggctcgggaaaaggtaatgcgagaagttaaagccttagcc

SEQ ID NO: 351251 - DNA, 50 bp, Homo sapiens
ctggcgggcgctggccatgctgcagcaggacccagtgctccataaaggat

SEQ ID NO: 351252 - DNA, 90 bp, Homo sapiens
gccgatcatggcggatggcccccggtgcaagaggcgcaaacaagccaatcccaggaggaaaaacgttggaggctggcagcgaagaagatc

SEQ ID NO: 351253 - DNA, 89 bp, Homo sapiens
gaaactggatgcagcaaggaaataggatttaaccgctctctgcctcccagcaggtagagcagagccggagccaggtgcaggccattgga

SEQ ID NO: 351254 - DNA, 100 bp, Homo sapiens
gcgtggtgatcggcggcgtccgcaaccagcagacccttgggcaggattatttgttgcctgaagcagaagaaattactatgattagtattcagcttgctgc

SEQ ID NO: 351255 - DNA, 75 bp, Homo sapiens
tcagccagaaggaagcaaatgtaccaagtgttcctgcactttgacgaaggatcagagattggtgtattcgggcag

SEQ ID NO: 351256 - DNA, 83 bp, Homo sapiens
ttcgaattgcctatgacaggcctcggggtcgtcccatgtccaaaaagaagacagggcctcagacctaaggcaggagcaccccc

SEQ ID NO: 351257 - DNA, 90 bp, Homo sapiens
aggcttttacctttgacgatgaagacgatgagctttcacagattccaggtacaacctccttaggcatgtctgtttttaacctaagcaacg

SEQ ID NO: 351258 - DNA, 100 bp, Homo sapiens
gaagaggatgccatgcagaactgcacactcagtccctctgtgctccaggactccctcaataatggacattgacaaggtagatgaactgatgactgacatc

SEQ ID NO: 351259 - DNA, 99 bp, Homo sapiens
gttgtctaccaagtgcagtttaaatacgtccttgagactttgtgctgcgcggggtgctcactcaatcttggctacgtgtacagatgcacgcccaagaat

SEQ ID NO: 351260 - DNA, 100 bp, Homo sapiens
tttgacccagttcctgtcaagcaagaggccatggaccctgtctcagtggatatcgacagcactgatcatgacagatggtgtgaatacattatgtatcgag

SEQ ID NO: 351261 - DNA, 96 bp, Homo sapiens
tttgaggtcactttccagcagtccagcacggccaagtcagccacctggacggcgtccgagctgggccacagcctgaacgagaacgtcctcaagcct

SEQ ID NO: 351262 - DNA, 87 bp, Homo sapiens
tctgacgagtatcacgtgatccggcacgccatgaacctggaggccgtgaacacctacgaagatggtggatgcttccaaaagcatcga

SEQ ID NO: 351263 - DNA, 100 bp, Homo sapiens
ccagcacagagactgcatcctcatgaagtgatgcagaggatggaagttcaaaggaggaggatgatgcagcatccaacattgtctacaacctgttgtctct

SEQ ID NO: 351264 - DNA, 73 bp, Homo sapiens
atgtgtccaggcttggctggggagtggtcaagtttgcaggcctattgcagcatgatcgggagggtttactgag

SEQ ID NO: 351265 - DNA, 75 bp, Homo sapiens
cggtcaggccaagaagcatccgagcgagccagcaccgctctttgaccttgccatgcttgccttagatagtccaga

SEQ ID NO: 351266 - DNA, 88 bp, Homo sapiens
gcgctggtttcgacaaagacgcaatcaggagaagccaagcacgctgacgaggttctgtgagagcatgcagacctgttatcctaaacta

SEQ ID NO: 351267 - DNA, 75 bp, Homo sapiens
tgcaaatgaagctctcgaggctgctaagagactaagtactttggaagttcgtcttatgggctgccaagatatcct

SEQ ID NO: 351268 - DNA, 100 bp, Homo sapiens
ggtgcatcccgggcgcctggcagtgtgacgggctgcctgactgcttcgacaagagtgatgagaaggagtgccgtctggggagcagacagcccttctttag

SEQ ID NO: 351269 - DNA, 75 bp, Homo sapiens
gaagggaacagtaaatttttgagtgactgtgaagtgctgaccacactcaccccagacactggccgtatcctgtcc

SEQ ID NO: 351270 - DNA, 101 bp, Homo sapiens
tgggagcattaacatgtctgtggacatcgatggcaccacctatgcaggtgctggagaatctggtaaaagcaccattgtgaagcagatgaggatcctgcatg

SEQ ID NO: 351271 - DNA, 107 bp, Homo sapiens
gtgcggggtgcgccggcagaggatccagtgttcaccatcctggccccggaagtaagactttgaccccgacgcaggcttcagtgattgccgcggatcagaagcctgag

SEQ ID NO: 351272 - DNA, 98 bp, Homo sapiens
ggacgtgagcccagccgaggtaccgctgaagaggaatcaattttggaatgtatcctgtcaggtataatgtcagtgaatggcaagaaagttcttcatat

SEQ ID NO: 351273 - DNA, 100 bp, Homo sapiens
aatacctcgacatccccaagatgctggatgcagagggaaggtgtcttgctgcaggtaactaatgaagaagtggtcaaccacagagtcttcaagaaataag

SEQ ID NO: 351274 - DNA, 83 bp, Homo sapiens
ccggcgtcggtcaaggtcaattggcagacctcctgccccccgaggtctgcagtctcctgaacccagcagccatctacgccaac

SEQ ID NO: 351275 - DNA, 60 bp, Homo sapiens
aacgtggatcgttgttttgaaacgttttaccaattcttgagattctgtatcatgttgaag

SEQ ID NO: 351276 - DNA, 75 bp, Homo sapiens
agaaaagccctacagatgcccctggtgtgactacagggctccttggtaatgaccagtctaagggattaggaccag

SEQ ID NO: 351277 - DNA, 74 bp, Homo sapiens
ggagctgcctggaggcggccgcactcggccagagactgctgctactttgaaacgtacgatagaggccctgatgg

SEQ ID NO: 351278 - DNA, 89 bp, Homo sapiens
gtctttggcgagtccctgctcaacgatgctgtcaccgtgacttgaaactgcatctgcagagcactgattatggtaacttcctggccaac

SEQ ID NO: 351279 - DNA, 100 bp, Homo sapiens
gtatatgtctggacatacttcagaaccgttggagtccaacctatgatgtgtcttccattctaacatccatacaggtgaaaagcaatcacagtgttaaaag

SEQ ID NO: 351280 - DNA, 101 bp, Homo sapiens
ggcgggatgcggcgcgccgcgcgtatcaagtggggcagctgtattctgtggctgaggccagtaaaaatgaaacgggtggtggcgaaggcgtggaggtcctg

SEQ ID NO: 351281 - DNA, 100 bp, Homo sapiens
tgcttccagaaaaatctcaaggaaaagtattgcaagcaacagtagtcgctgttggatcgggttctaaaggaaagcaatgaagcttggagatacatgggtg

SEQ ID NO: 351282 - DNA, 95 bp, Homo sapiens
atctcaaaaacaaaattctgaactcaggacttggcaactttgggctctgctgcatttcattatgccaacattatttgattcacatgaggaattta

SEQ ID NO: 351283 - DNA, 75 bp, Homo sapiens
atgaaatacaccagtgagaaattccttgaaatttgcaaggtgctacagaatattttagaaacagaaaatgaatat

SEQ ID NO: 351284 - DNA, 82 bp, Homo sapiens
attacaacagactgagaagagaagtggagcaccaggagactgcctatgacacaaatgccagaccctaagaccttcaagcagc

SEQ ID NO: 351285 - DNA, 83 bp, Homo sapiens
ccaagaaccaaccctgccagcacctggaccttggacattcagacttcagaatggttcagccctatgtagctacaacctaaagc

SEQ ID NO: 351286 - DNA, 83 bp, Homo sapiens
aacagatatacagatgtggagaagggggattttggcaattgcttggagcatggcagatcctgaattgttactgagctgtggaa

SEQ ID NO: 351287 - DNA, 75 bp, Homo sapiens
tgacactcagcactttgcgccaccttactctaaccagtttgcaggcctttcagatatatccatctcacaagacat

SEQ ID NO: 351288 - DNA, 97 bp, Homo sapiens
gagcgggcggcttcctggcctgggcgctccggtggcggcggaggtgatgtgtccaatctagatcccaacttctcatttgaaggcaccaaactggatg

SEQ ID NO: 351289 - DNA, 90 bp, Homo sapiens
cctacggtctggagagcagctgcattgcaggcacagggcccgatgagccagagaagcttggggccacctacagatgctcctgcagtggac

SEQ ID NO: 351290 - DNA, 90 bp, Homo sapiens
caaggattgatagaaaaggcagttccacgaggcgaggattaaatccaccacacagggtgaaatctatctccatgacaacattcacacaac

SEQ ID NO: 351291 - DNA, 100 bp, Homo sapiens
tgcacatgatcagaaaacagctctggaaaatgacagccttcatttctctgaacatactgccttatgggacagatcaacttatgttcctgaggaagaattg

SEQ ID NO: 351292 - DNA, 100 bp, Homo sapiens
cgaggacacgaccttcctgcccttcacgctccaggagctaggtgcacattcaggttcccgagcacaaacatcaagataacgttcactgccctgtccagcg

SEQ ID NO: 351293 - DNA, 82 bp, Homo sapiens
ctgtctcccatggtcgtcatgaagaatgtgcttgtcaaacaggtgttggagcgggccggagagaagtagagtgggctgcgag

SEQ ID NO: 351294 - DNA, 75 bp, Homo sapiens
agaatcttgaatcagaaattgagaagctgagtttatgtggccgaggcagacaagtggaattaggccttgctgcag

SEQ ID NO: 351295 - DNA, 75 bp, Homo sapiens
accaccagagcatcctggacatgatgggcatggaaaagaccttgccagagcctgtgggcacccaagtcagcatgg

SEQ ID NO: 351296 - DNA, 83 bp, Homo sapiens
ggcgtctacaactgctgggagttcccgtccatgctggccctctctggattttttatcaagcagaaatgcatcgaacaacgaga

SEQ ID NO: 351297 - DNA, 90 bp, Homo sapiens
cgaagatgatgaggatgacgatgacgatgaggaagatgctttcaagatgttagaaagttcaagccagaagtttcttcagggtttggtcta

SEQ ID NO: 351298 - DNA, 100 bp, Homo sapiens
aagatttggaaaaccaactgagaataactcaagtatcagcacctccagaacatcatttacagcgagcaatttcagcacagcaagtgtttagagaaaaaaa

SEQ ID NO: 351299 - DNA, 97 bp, Homo sapiens
gcccccacccctctccgtccatggccccagatgacacttcagcctcaaaataaattcgctgctctggacaatgaagaggaggataaagaagaagaaa

SEQ ID NO: 351300 - DNA, 74 bp, Homo sapiens
atctacgttccaattggggccgtaccatggcggagaagactcaaaagagccccatggctgggggttatggagtg

SEQ ID NO: 351301 - DNA, 75 bp, Homo sapiens
ccgcgtcggcaagaagatcggctgcggcaacttcggggagctccgcctagcgcacgtaccgggtgccgaaggagg

SEQ ID NO: 351302 - DNA, 101 bp, Homo sapiens
tgttggaccttccggagcttctcagaagacagagggttttcttttgagcattccaggatgccttgaagattttctgtaggataaaaggtggtcgagtttca

SEQ ID NO: 351303 - DNA, 100 bp, Homo sapiens
gattgatgtctacctctatgaggtagatattaaaccagacaagtgtcctaggagagtgaacagccatccagtccaatggatcagatgggcaagatgagac

SEQ ID NO: 351304 - DNA, 100 bp, Homo sapiens
tttgagtacgaagggtgcaaagtgggacgcggcacctacggtcacgtctacaaggcgaggcggaaagatgggttgtaaacatgttaaaggcatcctgtta

SEQ ID NO: 351305 - DNA, 80 bp, Homo sapiens
aagcgaagccttgaaaaagctgccctgagacggtgtcccgccgaaagaaatacaaacctggtcgatgtgatgatattttg

SEQ ID NO: 351306 - DNA, 50 bp, Homo sapiens
tacctccgggtgaagagcttcttccaagcaacatctgaatgaattgatga

SEQ ID NO: 351307 - DNA, 74 bp, Homo sapiens
ccggcgccgtccgtgcccgcgggacctgacagccgggtcagaggaatactcccccagttgcaagaggcgcagga

SEQ ID NO: 351308 - DNA, 100 bp, Homo sapiens
ccttccatgaatcacaaatgttcttaatggcatctagaatggccaatggaagcagtgctgtgatgaaatcatgaaaattgaaactcctgctccccggaaa

SEQ ID NO: 351309 - DNA, 75 bp, Homo sapiens
ctggagactagcgttaaccggcggggcggccggttgatgataattagaagcatgctttccactgaacttcccgac

SEQ ID NO: 351310 - DNA, 80 bp, Homo sapiens
gaggacgaggacagagaagccaagaggaagaaggaggaggaaggacagtcattttgtttactcattcagccctgttgcag

SEQ ID NO: 351311 - DNA, 98 bp, Homo sapiens
ccggccggggaaacagtattttctggaagggagcgggcagagaagatgggccagaatctcaaccgtattccatacaaggacacattctggaaggggac

SEQ ID NO: 351312 - DNA, 100 bp, Homo sapiens
ccacactcgaccgcggagcccttgcagccatgagggaacagctcaaagggatgctccaggatgaaacgccataggcctgtcagcagcagtgacagttcag

SEQ ID NO: 351313 - DNA, 85 bp, Homo sapiens
aacagctccaatgctggagcagggaaatgatgtcactctgaaactcaggctggaatacactggcatggtcatacctcactgcggc

SEQ ID NO: 351314 - DNA, 75 bp, Homo sapiens
acttttgagattggtgctcgtttggaggcactggactacttacaaaaatggtcttcatcctccaggtccaccttt

SEQ ID NO: 351315 - DNA, 75 bp, Homo sapiens
ggggagcttcgagggtgatttgaaggtcggaagtctatgcgtcagtctacagctgagcatacacgacaaacgttc

SEQ ID NO: 351316 - DNA, 101 bp, Homo sapiens
agggggcgcccgcgcctttgcccccgtgcgcacccccgccccgctcaccttagccccgcgcccgagtgctgggcctaaaggagataacatttatgaatgga

SEQ ID NO: 351317 - DNA, 90 bp, Homo sapiens
gtctgcacgaaataaagctcctgggcaaggggacgtctgcagctgagttatttggcagctaattctagatttggatcattgcccaaagtt

SEQ ID NO: 351318 - DNA, 100 bp, Homo sapiens
gtaggtgagcactctcccagcctggagcagccggaccagcccagaaggcagcggcggcccaggccagcattcccgcagtttggtgcacctcgatttggag

SEQ ID NO: 351319 - DNA, 96 bp, Homo sapiens
cccgcgcttcctcgaaggccccagcccggctcagtcggccgagagcgagggaggagccccccgacccagaacactctgctccagccaaggtggtga

SEQ ID NO: 351320 - DNA, 51 bp, Homo sapiens
cggacgcgtcttctttcaggctgaggaaccagtgctgtggcgcatatggcc

SEQ ID NO: 351321 - DNA, 137 bp, Homo sapiens
ttgtgactgactgtaaaccgaatggagagactgacatttcatctatcagtatttttactggaattaaggaattcaagaaacaagacactggccaggttcttctggatatggtgcacaaccacctgggtgtgactgaa

SEQ ID NO: 351322 - DNA, 50 bp, Homo sapiens
ctgtgcagaccacatcgagcggtcttgtggatgagcagcagaaagttcgg

SEQ ID NO: 351323 - DNA, 100 bp, Homo sapiens
ggaagctccttttaatttggtacctcatgtggacaacattgagacagccaacagttttgctgtaacaaacgcctggctgatcccttatccaacatggttc

SEQ ID NO: 351324 - DNA, 98 bp, Homo sapiens
gtgctcgtcgccagcgtcgggtgggctttcgcccgcggctcctgagggatcggtctcagccgcgcggagctcccagctcctccagcagccgacaggag

SEQ ID NO: 351325 - DNA, 100 bp, Homo sapiens
ttgacatcatccagacaaatccctgccctgagggcccaaagctggccaggcactcccaaggccactgacttcattgacttaactagagagaccagaccaa

SEQ ID NO: 351326 - DNA, 82 bp, Homo sapiens
cgctgttttcgacaggtgtgcaggtttcggcacatggagattgattttgcagaagctgcctgtgatgtggtccatgtgatgc

SEQ ID NO: 351327 - DNA, 101 bp, Homo sapiens
gggtttgggaaacaaggcttccagtgccaagggcgccaatgcttcggcattagagaaagagattggtccagaacagtttccggtcaatgagcactattttg

SEQ ID NO: 351328 - DNA, 100 bp, Homo sapiens
cctgtactcctcaacaagttcctcctcttgacatttgcagtagacatagctgacattgagaatgaagagaaccgctactgtctattcatggaactcctgg

SEQ ID NO: 351329 - DNA, 82 bp, Homo sapiens
ctaacagtggacaaccagaaagaaagtttatgcaaacctttgttctggctcctgaaatttggttgatgaagacctttcacat

SEQ ID NO: 351330 - DNA, 98 bp, Homo sapiens
agatggaggacctgcggcgggagaaggatgctgccgagatgctgggcgccaagatcaaggtgttgggatggccaccaactgggggagcctcttgcagg

SEQ ID NO: 351331 - DNA, 75 bp, Homo sapiens
gcaacggctccagcgccaacatcccgcccctcaagcctctcctcctcccagttctcctctggatcgcagtcatcc

SEQ ID NO: 351332 - DNA, 93 bp, Homo sapiens
ttgccgacgccatcaggctcaacgaggaactcaaagtggatgaggaaattacagaatgtctgaaggggacagtgtgggagaatccgtccatgg

SEQ ID NO: 351333 - DNA, 73 bp, Homo sapiens
cgccgctcaccccgcggccgcaccttcccgccttctcaggcatcataggcgagtattagtggaatggctaaga

SEQ ID NO: 351334 - DNA, 98 bp, Homo sapiens
tgctcctgtttgccacacagatcaccctgggaatcctcatctccactcagcgggcccagagtggaatgttggctgtccgtgaaaaccgctacattgtc

SEQ ID NO: 351335 - DNA, 90 bp, Homo sapiens
ggaaacctcctacctccgttgaaaggagagccagttactaacttgccttcccttcttcttggtggtgttcttgagtaagataatctggac

SEQ ID NO: 351336 - DNA, 75 bp, Homo sapiens
ttcaacaccaccttcatctccaccatcgtttggaaattttagcattcaggtgccaggaatgcagatgggacagcc

SEQ ID NO: 351337 - DNA, 96 bp, Homo sapiens
tttcaatgctgcgaaagctgccaaaagtgacatgcagcatacctccagataatctctctattcaagagtttcaaagaaatgaaaatattgatgtcg

SEQ ID NO: 351338 - DNA, 78 bp, Homo sapiens
tcagtcagtcaactttggttttagtaactgggttgtatatgatggagaaaatttcactggtaatcaatacgtgttgga

SEQ ID NO: 351339 - DNA, 101 bp, Homo sapiens
taccaccaggactcagaggccgccatcaaccgccagatcaacctggagctctacgcctcctacgtttacctgtccatgaaactgccagaggcatgcagcat

SEQ ID NO: 351340 - DNA, 75 bp, Homo sapiens
ttgctggatattgatgcgccagtcactgttgatattcactgatggactccaaagaatcattaactcctggtagag

SEQ ID NO: 351341 - DNA, 82 bp, Homo sapiens
cgagaggaaactgttgtgcctcttcatattggcgatcctgttgtggcgatgccagtccctccactccagaggagaacgaaac

SEQ ID NO: 351342 - DNA, 75 bp, Homo sapiens
tcaacttttattttaagcttccacgtgtgagtgagaacatcacagtgtctcctttcctcttgggccgggcacttt

SEQ ID NO: 351343 - DNA, 50 bp, Homo sapiens
ttaaggaacagcttggcgctcaacgatgggtcatcagttaaggaagttga

SEQ ID NO: 351344 - DNA, 51 bp, Homo sapiens
cagaattttcctaccaaagccaggattcactccttctccagttgcacagcc

SEQ ID NO: 351345 - DNA, 101 bp, Homo sapiens
tctgcccggccaagaggcaaaggggaggttacgcagcaaaccatccagaagaaaccaaggtgtatgttggtaacctgggaactggcgctggcaaaggagag

SEQ ID NO: 351346 - DNA, 75 bp, Homo sapiens
gcaggtcttcacccaggccctggagtgcatgcgcagctgcagaaccttggcctgaaaatgctacattatatcagc

SEQ ID NO: 351347 - DNA, 90 bp, Homo sapiens
aagacactttctcagttacagagagggacagagcagaatgggctgatatagatccggtgccgcagaatgatggccccaatcccgtggtcc

SEQ ID NO: 351348 - DNA, 80 bp, Homo sapiens
tggttagagaagaattttccaaatgaatttgcaaaacttactgtagcatggtggggagttatatttcagtgacgtctata

SEQ ID NO: 351349 - DNA, 90 bp, Homo sapiens
ctggaagattgtcactgtaacctcttctgcctgttgactggtctgagtgtctccaatggaaaggaccaacttgtagtgttccatacgaaa

SEQ ID NO: 351350 - DNA, 82 bp, Homo sapiens
gccgagaggccgtgcgggacgcgggcgccaggaccggccgaacgcagagtaagactttgaccccgacgcaggcttcagtgat

SEQ ID NO: 351351 - DNA, 75 bp, Homo sapiens
tgtgccaccagctccagaaaagagtatagtagtgttcctaaacccaaaggaaagaaaaccaaagatatgaaaaaa

SEQ ID NO: 351352 - DNA, 100 bp, Homo sapiens
attcagtttgcatctctccctcctttaaacagcttctccgggtctcagcatgctgcagaaccttggcctgaaaatgctacattatatcagcaattgaaag

SEQ ID NO: 351353 - DNA, 101 bp, Homo sapiens
tggctcaggaggcgttggaaagtctgctttgaaaaccatgagctgttttccaagagcttcatctccatggaagtgcctgtcatggtagtaaatggcaagga

SEQ ID NO: 351354 - DNA, 99 bp, Homo sapiens
acaaaatggatctggtacaggaggatcaacgggacctggtcgcaatggaagaagagatcgccgcgctggtcattgacaatggctccggcatgtgcaaag

SEQ ID NO: 351355 - DNA, 93 bp, Homo sapiens
cggtgcaggcgttgaagcgcgcgggcaaggaagtgctgctggaagtccaatatcagatggaaatgatgcggagccttcgccatgtaaacattg

SEQ ID NO: 351356 - DNA, 76 bp, Homo sapiens
gaccacagcattcctgaaatacatccaggaaagacatggagattctcttaaaaagtctcagaccagtatccttcag

SEQ ID NO: 351357 - DNA, 100 bp, Homo sapiens
cacctttagatattgcggaggaggaggcaatggaagagctacttcaaaatgaagttaatcggcaaggttggccttcattccacgatgtgatcaattctga

SEQ ID NO: 351358 - DNA, 74 bp, Homo sapiens
ccaagattaaccaggacccccagaatgctgaccccctgaaggtgtacccgccactgaaggggagcttcccggag

SEQ ID NO: 351359 - DNA, 90 bp, Homo sapiens
gtttgcaaggttcatttatgttcatggtatggatcctggcgggagccagtcaacccctattatgtcaatgccggctatgccctggcccca

SEQ ID NO: 351360 - DNA, 75 bp, Homo sapiens
cttttcctccacctaccttcccgattttaaggagatgttcaaatgtggcaaaaccaaaacagtccaacaaaaagc

SEQ ID NO: 351361 - DNA, 96 bp, Homo sapiens
aagagtcactcaggagtcacggagtgctgttggaagttcaatactcttcttcaatacatgaccgagaaattagatttggtcgtattgggcgcctgg

SEQ ID NO: 351362 - DNA, 100 bp, Homo sapiens
cgcgacggtcgccgcccacggcgagattcatgatgttgctatcaaaagttgagaaattgtcagaagaaatcatggagataatgcaaaatttaagtagtat

SEQ ID NO: 351363 - DNA, 101 bp, Homo sapiens
ccagcggaaaggagcgcgcctctttttggcttggggagctgcagcgttcgtgccggtggtggtgtgcacattgagccccggtatagacagttcccccagct

SEQ ID NO: 351364 - DNA, 100 bp, Homo sapiens
cacaaatacacgttctgatcttggagaaatggtagccttaaaaaaagtacgtctggataatgaaaaggaaggctttccaattacagcaattcgagaaatt

SEQ ID NO: 351365 - DNA, 101 bp, Homo sapiens
gtacagaccaagtatgtggaagccaaggactgtctgaacgtgctgaacaagagcaacgaggaaataccttgtaactgtaatttcctgaggctgcatatcca

SEQ ID NO: 351366 - DNA, 98 bp, Homo sapiens
ggccagcaaaacactcagctgcaagtccaaagccacaagataacgaaggaggcccaacttcattcaataaggagcctgacggatttatcccagacggt

SEQ ID NO: 351367 - DNA, 82 bp, Homo sapiens
aggaatctcactctgttaaagctggtctgttctaactgaggaaagcttgtggctcttgcagttattgatgagaaaaatacat

SEQ ID NO: 351368 - DNA, 90 bp, Homo sapiens
caacaagggcccctcgtacgggctgtcggccgaggtcaagaaccgggtctggtccgagagcaggaggctgggctgctgcagttcctccgc

SEQ ID NO: 351369 - DNA, 74 bp, Homo sapiens
gtcccgaccctggccgccccgagcggagcctggagggagatcttgtgcgaaaactcaaagaagataaagcaccc

SEQ ID NO: 351370 - DNA, 76 bp, Homo sapiens
cgaacagagccgggagttcaagaagaacactccagaggacatgtcctcatagagatttcaagtacccacaagaaac

SEQ ID NO: 351371 - DNA, 100 bp, Homo sapiens
gccctctggaccctggagtacaccccgcagcacagccgcgacttcaagcttctcaataggtttggcatggacaagatctatgaaggccaagtggaggtga

SEQ ID NO: 351372 - DNA, 100 bp, Homo sapiens
caaggccagcaggccatgtcactggccatcctccgtgtcatccggttgggctctggctgagaacatggccaatgacattgatgagctcattggcattccc

SEQ ID NO: 351373 - DNA, 90 bp, Homo sapiens
cgggtggcggcgaacgcggagagcacgccatgaaggcctcgggcacgacctgcctagagctggaacgttacctccagagcgagccctgct

SEQ ID NO: 351374 - DNA, 97 bp, Homo sapiens
gcccggtgaaactgaacttataatcgtcactggattagttgtctgctggttctcagcttgaagaagattctgcagtccttattgatcctttttcttg

SEQ ID NO: 351375 - DNA, 100 bp, Homo sapiens
gtactctaattgatccagagaacatgctggctacaactaatgtttgatctgtggatgaaatgaatcatgattttcaagctcttgcattagaatctcgggg

SEQ ID NO: 351376 - DNA, 82 bp, Homo sapiens
tgctttgtgatcgaaaccctgaccggatcccataaacactgtcgataacgaaggaggcccaacttcattcaataaggagcct

SEQ ID NO: 351377 - DNA, 90 bp, Homo sapiens
ctgaggtcttattttgttgagtcgaaagtgaaattttcctttggccaacgtgacaggaaaatgtttataggaggccttagctgggacact

SEQ ID NO: 351378 - DNA, 98 bp, Homo sapiens
ccccgagtggttccatggtgcaatctcaagagagatcgaagagtcagaccaaggcccttatgccatcatcctggctcccacccgtgagttggctcaac

SEQ ID NO: 351379 - DNA, 95 bp, Homo sapiens
gaggatgtgatctcctccatacggaactttctcatctacgtggccctcctgcgagtcaaatgtaacacactctggaaggcacaaaggacagaagt

SEQ ID NO: 351380 - DNA, 75 bp, Homo sapiens
cttgcgcgcgggaagcagcaccaagttcacggccaacgccttggcactagggctcatgcgcagtgtggtggcagc

SEQ ID NO: 351381 - DNA, 99 bp, Homo sapiens
cgcctccaggccaagagggatccttcacccgtgtctgatgacttgtggggggaccacagtctggaggtggaggctggcctgcctcctggctggaggaag

SEQ ID NO: 351382 - DNA, 100 bp, Homo sapiens
ctgaaataacccttgatcctcctcctaattgcaggcatgaatgctttacagttgcagaacctggcgacgctggctgctgctgcagctgcggcccagacct

SEQ ID NO: 351383 - DNA, 83 bp, Homo sapiens
gctgtggaagtcgactgcgctcccccttcagttggaatcgaagcctcttaaaatggcagatgacttggacttcgagacaggag

SEQ ID NO: 351384 - DNA, 83 bp, Homo sapiens
attttgttgagtcgaaagtgaaattttcctttggccaacgtgacaggaatgaatctgaagtctgctgcagtaaaacacagaag

SEQ ID NO: 351385 - DNA, 50 bp, Homo sapiens
gagcgaataaagtttatcacgccgggtagtgagttgaaactcttggagga

SEQ ID NO: 351386 - DNA, 75 bp, Homo sapiens
gcccctggacatggaggagaaggtccgcttcaatgtctgagcccttcctacctgcccctgcgatgtatggccgga

SEQ ID NO: 351387 - DNA, 50 bp, Homo sapiens
ttcgccaaggctggcgcagtcggctggggccgggctggcggggccctccc

SEQ ID NO: 351388 - DNA, 100 bp, Homo sapiens
aaagcaccatgacgtccatccatttcgtggttcacccgctgccgggcaccgaggaccagctcaatgacaggtgagaagccctaccactgcaactgggacg

SEQ ID NO: 351389 - DNA, 100 bp, Homo sapiens
cggtcctactggtcctattggaagccgaggtccttctggacccccagggcctgatggaaacaagggtgaacctggcaaacaaggtccctctggagcaagt

SEQ ID NO: 351390 - DNA, 101 bp, Homo sapiens
aaaagctgaaagggagacgtttgcagtgtgatccctcacatccacaaatctctgattggaaagaagggacagcagaaaactgcttagagggatgctttaac

SEQ ID NO: 351391 - DNA, 51 bp, Homo sapiens
gaaatcttccaagtccaaggatgtaggatgtactgagtaaagatgctgggg

SEQ ID NO: 351392 - DNA, 87 bp, Homo sapiens
cgcactgctacaaggtccatgaccaaacaagtcaccaagctctccagaacatgcccaaagtgctccgtgatgttgaagccctaaaac

SEQ ID NO: 351393 - DNA, 74 bp, Homo sapiens
caagactatgtatgaggttttccaaagaggactcgctgtgtctgggatatttgcttgaagccaggatctctgaa

SEQ ID NO: 351394 - DNA, 100 bp, Homo sapiens
tgtcctttcctaaggcgcccttgaaacgattcaatgacccttctgctgctgttggagcatttctcatctacattagctcagattatgtatttgatggaac

SEQ ID NO: 351395 - DNA, 98 bp, Homo sapiens
agaatatacaggatctgattatcagtacgtaggcaagactgagaactatgagcagagaatacgtgaacaacaggaacagctgtcacttcaacagacta

SEQ ID NO: 351396 - DNA, 98 bp, Homo sapiens
ggcctatgatgtgctaagtgaccccaagaaacggggcctgtatgaccagtatggggaggaaggggccctaaccacccaggatgaaaatggccagacca

SEQ ID NO: 351397 - DNA, 75 bp, Homo sapiens
agtgccatgggctgcatccctttatcgtgcaggagggatttgttcgtgttgaccgagattatgtgctgaagtctg

SEQ ID NO: 351398 - DNA, 83 bp, Homo sapiens
ggaaactttggtggtagcaggaacatggggggaccatatggtggagccatcactggtgcaagctatatttaacggagatcctg

SEQ ID NO: 351399 - DNA, 90 bp, Homo sapiens
ccttccctgattacagaatcttggcactgccagtgaaagatgtagaagataaacctgaacaacaaaccagaacaagagagactgacaaat

SEQ ID NO: 351400 - DNA, 101 bp, Homo sapiens
cccttcctcagggccgggctcagcggctctgactctggaggaggagctgcaggaagcgatccggagggcgcaggctggagtgcaatggcgcaatctcggct

SEQ ID NO: 351401 - DNA, 74 bp, Homo sapiens
cgcccctcaaggacaacctcggcctgagacaccggaggaccgggttgttcctcaaagtcattcaagctgtactc

SEQ ID NO: 351402 - DNA, 50 bp, Homo sapiens
gttccgaatagggatgaggcatacgtgatctcaggaaacaggctcgacag

SEQ ID NO: 351403 - DNA, 101 bp, Homo sapiens
gcccgcgccgccagtggagcccccgcgcgcccggccggcccggagcaccgagctcgcggcacggtaggaggtcagctggccgccggcacctgtgagattgt

SEQ ID NO: 351404 - DNA, 90 bp, Homo sapiens
tcatcggatttttgcagaaacacaatgagagaacatatgatgagctgttactgggagcagcccaggcccatggcctcacgccacgacccc

SEQ ID NO: 351405 - DNA, 100 bp, Homo sapiens
gagaaagctgcccaactaagacctatctccctaccaggagtttctagcactgaaggtactactgagcgagtgtgcttgatccagggaacggttgaagcac

SEQ ID NO: 351406 - DNA, 75 bp, Homo sapiens
gagacccggacagtggcagtgaaacagcagaaaggacccaggagcgataacagtaaatcaaataagatatttgtc

SEQ ID NO: 351407 - DNA, 83 bp, Homo sapiens
tttttctgcaaaggaggagtgcatgctaattcagagaaatacaggaaaaatatattcagggggaagagatgtaatagatttca

SEQ ID NO: 351408 - DNA, 75 bp, Homo sapiens
acggtcctaagagctgggcaccaggaagcgaaggctgagtcatgtgctgttcctggggcttggatgatgtagggg

SEQ ID NO: 351409 - DNA, 90 bp, Homo sapiens
cagggatggaaccatcaacctctctgagttccagcacgtcatctcccgttctccagactttgccaggtgcagtcggctgccctggacgag

SEQ ID NO: 351410 - DNA, 82 bp, Homo sapiens
cgatttggatgaatatacccttagaaaaaatgtggcagtgacagagcgggatgccaccagcttgtccaaagggaagttccag

SEQ ID NO: 351411 - DNA, 100 bp, Homo sapiens
aggcttatgagagagaaaaaaaagtgtgggaagagcatgtctcatcacaactacgtcaaggaagctagaccgagaacagcaagatgaacacatattagag

SEQ ID NO: 351412 - DNA, 74 bp, Homo sapiens
gtgtatactctacaatctaagaaggatttcagcaaatttggagcaggaaatgcaatggcacatcgtgattctga

SEQ ID NO: 351413 - DNA, 83 bp, Homo sapiens
ttcgatgttcttctaatactcctcctctaacatgtcagcgttattgtaatgcaaccctgggcgctgcctatggcacagccaag

SEQ ID NO: 351414 - DNA, 98 bp, Homo sapiens
caagaagtttctaggaaaggccggacaccagctcccctgggacctgtggccgccgcccacagaccatgctcctggggcgcctgacttcccagctgttg

SEQ ID NO: 351415 - DNA, 50 bp, Homo sapiens
cgtgggccgctaccaggaggtcaaccccgaagcccccgagcgcccacagc

SEQ ID NO: 351416 - DNA, 100 bp, Homo sapiens
tgctgcttccggatgactttaaggctccccaaaaaggccacaaagacagccccacctgccctgcctacaggttatgattcagaggaggaggaagagagca

SEQ ID NO: 351417 - DNA, 87 bp, Homo sapiens
tgcagctgctgcacaagaagatccaggtttcccatccacataccaagctgatgaggatcccatcgttcttccccagtcctgaggagc

SEQ ID NO: 351418 - DNA, 82 bp, Homo sapiens
ccgaactcccggcccgaactccaggtgagaagccctaccactgcaactgggacggctgcggctggaagtttgcgcgctcaga

SEQ ID NO: 351419 - DNA, 100 bp, Homo sapiens
tgaagaccccgaaggaaaaggaggaattcgccgtgcccgagaatagctccgtccagcagattgtgaagaggtctcttgaagtttggggtagtcaagaagc

SEQ ID NO: 351420 - DNA, 73 bp, Homo sapiens
gggtggtgggatctgaatacacacgggtgtccgcaatgttgccagtgtctgtctgcagattggctacccaact

SEQ ID NO: 351421 - DNA, 85 bp, Homo sapiens
gtggctgccatgatgatttccattgtgggggtgctagcttcccttaatcttccagcagcaattgaagatgtgtctggagacactg

SEQ ID NO: 351422 - DNA, 86 bp, Homo sapiens
ccttgtgaagagatcatccctaagcaggagagaagctactaaagcccgccgccgccatgcccttctccaacagccacaacgcactg

SEQ ID NO: 351423 - DNA, 74 bp, Homo sapiens
agacatagttcctggtgatattgtagaaattgctggtccagttatcttttgactgccacatatggaccccaaaa

SEQ ID NO: 351424 - DNA, 100 bp, Homo sapiens
aattgatactcagcagctggaccggcaaattaaagcaattatgaaagaagtcattccttttttgaaggttttattgctctgcaggtctccaccctggcag

SEQ ID NO: 351425 - DNA, 75 bp, Homo sapiens
gcagaatggctggcaccacctcaggttctagctgtcaacattcttggtcgcttcctactcaacagtgacaggaac

SEQ ID NO: 351426 - DNA, 100 bp, Homo sapiens
acctccttcaagtggctgataacagaaaatatttacaccagcagctccagttcataccaataaagaagatcctgctacccaaactaatttgggatttatc

SEQ ID NO: 351427 - DNA, 82 bp, Homo sapiens
cagaccctggagcctcagttggaagcagccgatccagcctgcggagcctgtggggcagtttgtatctacttgaacaagaatg

SEQ ID NO: 351428 - DNA, 100 bp, Homo sapiens
cacacctgcagcctcagcccagccttcaggctcggggggctttccatttaaccagtctccagcagcatttacagtgggacatctttccaggaacagcgtg

SEQ ID NO: 351429 - DNA, 75 bp, Homo sapiens
ggcccaggctcctgctgacccgggcagagaaggattttttatcaagcagaaatgcatcgaacaacgagaatcaag

SEQ ID NO: 351430 - DNA, 98 bp, Homo sapiens
ctaaatgccgactcagtggaacaatcttttgttggattgaaacagctaatcccagagactgctgctactttgaaacgtacgatagaggccctgatgga

SEQ ID NO: 351431 - DNA, 99 bp, Homo sapiens
ctccagccccatgggccggacatctactgggtcagcttcatcctcggcggcggtggccgctagctccaaggaagcgaatgctgatgtcttaaaggcgat

SEQ ID NO: 351432 - DNA, 74 bp, Homo sapiens
gcttttgagaggacaagcccagattccaaaacttatgtcaacatacaagacagtatctggagtcaatggtccac

SEQ ID NO: 351433 - DNA, 85 bp, Homo sapiens
ggctccggaacatgaactgcatcgatgtggatgagtgtgagaaccacctcgcatgccctgggcaggagtgtgtgaactcgcccgg

SEQ ID NO: 351434 - DNA, 100 bp, Homo sapiens
cgccgccaccacccactccggacacaggcacaggtaacagcatcatggtcatgaaaatgaatggatccctccatcaagaattgaagattgaggagaactt

SEQ ID NO: 351435 - DNA, 51 bp, Homo sapiens
gagccactatgaggagggccctgggaagaacagcttggttattgacactcc

SEQ ID NO: 351436 - DNA, 98 bp, Homo sapiens
gaagctcatcgaacagtacgcactgagggaagaggctgtgttctagatcctcagaaaggaaccaccgtggggaggtccttttctctcagctggcggag

SEQ ID NO: 351437 - DNA, 83 bp, Homo sapiens
gagacggcggcgcagcggtacagcgcccgactgctgcaggccggctacgagcccgagagcggaaggagagttttacatggaag

SEQ ID NO: 351438 - DNA, 100 bp, Homo sapiens
ggggaacatggacatgaagaggaggatccacctggagctgaggaaccggaccccggcagctgaagctcttcgtgggcggtcttgactggagcacgaccca

SEQ ID NO: 351439 - DNA, 134 bp, Homo sapiens
ggccagcagatgcaggaaaatttcgatattgaagtgtcaaaatccatagatggaaaagatgggtgctgataagactgtgaaaggcccagatggactgaccgcctttgaagccactgacaaccaggcaatcaaag

SEQ ID NO: 351440 - DNA, 98 bp, Homo sapiens
ggggagtctgccccaccaacatggcccgcagagttaatgcagggcttggcacgatacgtgttccagtcaggtctcttgtggctcagagcataatttgg

SEQ ID NO: 351441 - DNA, 100 bp, Homo sapiens
tcctctacacggagccccgtgactccatgcagtacgtgctctacgtgcgcctgggcaaatcctgatcctaactgttgtcttggagtatttgggctgagct

SEQ ID NO: 351442 - DNA, 75 bp, Homo sapiens
ctggaaacaatggcatttacagaaagagtcaacagcagtggcaacagctcccatggctattgaagaacaagtggc

SEQ ID NO: 351443 - DNA, 100 bp, Homo sapiens
caaattgaggcgcaatgatgagaggatgtggtggtctactctgatgtcaatcttgagggctagaaagtgaagtcactgcttttgctgtcttggatcaaga

SEQ ID NO: 351444 - DNA, 50 bp, Homo sapiens
tgtatttggttaatggctccgaggagaaggcagagcccccccaggctatg

SEQ ID NO: 351445 - DNA, 96 bp, Homo sapiens
gttccccggatccagcttcctggacttgggggatctgaacgagtcggacttcctcaacaatgcggctcacagaacatttcctgcctgttgctcaca

SEQ ID NO: 351446 - DNA, 100 bp, Homo sapiens
aacgaggcaaggagctaaagcagcgtgcgttcagccctggggagtccgctcagaatttgatcagatcgacacatccaacccaaactgtgtggtaattgca

SEQ ID NO: 351447 - DNA, 100 bp, Homo sapiens
agatgcagacagctgcacaatacctgtgtgggacaggcactggcctcagaccggggccacactgaggtctgcccttctcccgctggccgccacccaagac

SEQ ID NO: 351448 - DNA, 46 bp, Homo sapiens
tgaagcgactgagtccgcgatggagaacccttaggagaaatcttga

SEQ ID NO: 351449 - DNA, 101 bp, Homo sapiens
tgagaggaccatcacaacctgagcagcacagaacgacaaatcctccacccctgggctcaagtccaacacaccaaccccaaggaacgacgccccaactccag

SEQ ID NO: 351450 - DNA, 82 bp, Homo sapiens
cctgggatggttgtgagggaagggacaagaagatactgccctgctgcgccaacggaggaggctactaccactattcctactc

SEQ ID NO: 351451 - DNA, 95 bp, Homo sapiens
taagcatcatggctggcagcctcacaggattgcttctacttcaggcagtgtcgtgggcatcaggtagaaaaactggcacggacacttttcttgtg

SEQ ID NO: 351452 - DNA, 75 bp, Homo sapiens
aggggatgctaataaaatgcaggattttggacactgagcaagagcctggagacacaggccccatccttcccaatg

SEQ ID NO: 351453 - DNA, 89 bp, Homo sapiens
cttccggatcgggggcaagcggaaggtgatgcccaagatggaccagatcatcaatgctgtggtactgttgattttattgagtgccctgg

SEQ ID NO: 351454 - DNA, 82 bp, Homo sapiens
cacctgcgctgtgatgcctgcagagctgtggcttaccagatttggtacacacagaggggcagcttcaaaatgaagaaattgt

SEQ ID NO: 351455 - DNA, 82 bp, Homo sapiens
ccctgccttctccagcgacagccgacaatgcagatcttcgtgaagactctgactggtaagaccatcaccctcgaggttgagc

SEQ ID NO: 351456 - DNA, 50 bp, Homo sapiens
ctctgctgcctgcattgagggggaatgacagaggaagaggaagacaaact

SEQ ID NO: 351457 - DNA, 100 bp, Homo sapiens
gtgagctgcctgaaaatgcactcggatgccgccgctgtcagcagcgtctatcccagactaccggggccctaatggagtgtggacactgcttcagaaaggg

SEQ ID NO: 351458 - DNA, 98 bp, Homo sapiens
ctggaggctgtgcgcatgcagcacctgaaatattattcatctgtgccagaggaaggaggggcaacccatgtctatcgttatcacagaggcgagtcgaa

SEQ ID NO: 351459 - DNA, 75 bp, Homo sapiens
catgtatgaagggtacccactctggaagccatgaatgacctggtgcagtccatggtcctagcaggacagtggaca

SEQ ID NO: 351460 - DNA, 100 bp, Homo sapiens
tccacctggagctgaggaaccggaccccggcagctgtcaaaatgcagatcttcgtgaaaacccttaccggcaagaccatcacccttgaggtggagcccag

SEQ ID NO: 351461 - DNA, 75 bp, Homo sapiens
gggacctgcagcagctgagaaaggagctcggggactcccccaaagacaagagtcttgctgtgtcacccaggctgg

SEQ ID NO: 351462 - DNA, 100 bp, Homo sapiens
gacagagccaaaatcagagctggaacctgaggagagagaacaccttccaccatgaccacctcagcaagttcccacttaaataaaggcatcaagcaggtgt

SEQ ID NO: 351463 - DNA, 83 bp, Homo sapiens
gagttgaaggctgcagtgagccctgtttttgccaccacactccagcttggatatccctcctaaatgtacaatcaaggatttgc

SEQ ID NO: 351464 - DNA, 75 bp, Homo sapiens
ccacaatgaagcagtcggacgcgtctccccaagaaaggcgccaagcccatctttgtgtgcttgcatccaactgtg

SEQ ID NO: 351465 - DNA, 101 bp, Homo sapiens
gaaagaagcaagaagagcaggccaaacgtcagcaagaagaagaagcagctgctcagatgaaggacagtatggaaattaccagcagtgaaaaagtacttaca

SEQ ID NO: 351466 - DNA, 98 bp, Homo sapiens
aagacatggaaggaaatgagggcaacttctgaagacttcaacaagcttgataactatggacagcaagaacttgcggatctttttgtgaactataatgt

SEQ ID NO: 351467 - DNA, 83 bp, Homo sapiens
tcctcggctgcgccgcgtgtcctcggagcgcggtccctgtattggtctcctgctcctagaggacatggatttgattgacatac

SEQ ID NO: 351468 - DNA, 88 bp, Homo sapiens
cccaagcagcagccgccggagcccgagtggatcggggacggagagagcacgagcccatcagaactgataaatttcaaacggaagagag

SEQ ID NO: 351469 - DNA, 82 bp, Homo sapiens
tgtcaccataggagacatggacgaagccttcaaatccatcaagctcatcaaaaggtcacccgtgtgaacagaaagtgagagg

SEQ ID NO: 351470 - DNA, 50 bp, Homo sapiens
caagaaattactgtctcaagtgatacggtgcaattaaaaactagcatttc

SEQ ID NO: 351471 - DNA, 98 bp, Homo sapiens
ggctctgtgtgcccaggatgcgccggcctccagaaggtgatttactacctctgcatcttattgaaagatccagtggaaccacatgggatatcccaagt

SEQ ID NO: 351472 - DNA, 75 bp, Homo sapiens
tcatccattatgctggctgttatgtacgcaggaggttaaagtattgcacaatcagctggtccttttccacaatgc

SEQ ID NO: 351473 - DNA, 51 bp, Homo sapiens
caaagacgtagaaagaaatcttagcagattgatgactcttccgcgtctatt

SEQ ID NO: 351474 - DNA, 100 bp, Homo sapiens
agccgtgagagccgcagtggatggctggaggtgcagggccaggaggaacatgagataacaactattccacaccaaatgagagaggagaccacaatagaac

SEQ ID NO: 351475 - DNA, 82 bp, Homo sapiens
cttgtccacctgccagcagggggaggatccacttgactggacagtggagaccatcctgggcctcacaggagcgaccatggga

SEQ ID NO: 351476 - DNA, 90 bp, Homo sapiens
ggcgggcggtccggcccgggactcgggtttgggcgaccaggaggtgccggtggccgcgctcggacccgggatagctgggagtatggccac

SEQ ID NO: 351477 - DNA, 50 bp, Homo sapiens
gcctaaatcagccaaacacaggaccatcttgattcaaaacatctatcgta

SEQ ID NO: 351478 - DNA, 50 bp, Homo sapiens
ggccactcagagtcgcccgagaaggctgaaatctctttaatgatggaggg

SEQ ID NO: 351479 - DNA, 110 bp, Homo sapiens
atgatccccgagctgctggagaactgaaggcggacagtctcctgcgaaaccaggcaatgggctgaccccgcactacatctacccaccagccatcgtgcagcccagcgtgg

SEQ ID NO: 351480 - DNA, 75 bp, Homo sapiens
tcctggggcactcagagagaaggcatgtctttggggagtcagatgaggcagggcctggtcactgaccaagtctca

SEQ ID NO: 351481 - DNA, 58 bp, Homo sapiens
agcttacaacagtgactttgaggaatcagatcctgatgaatttgagcgaatatatgag

SEQ ID NO: 351482 - DNA, 100 bp, Homo sapiens
cgcagcgtccgggtcttcatcagcgccaaccctgaagcttcctccattctcaaaagggagaaacgactgaggacaaagaatgtacattttagttgtgtca

SEQ ID NO: 351483 - DNA, 96 bp, Homo sapiens
acctcgtcccgggctgaattctctctccactcttcgagattggcacacccagagatcctgaaggagctagacgagtgctacgagcgcttcagtcgc

SEQ ID NO: 351484 - DNA, 73 bp, Homo sapiens
ctcagatctggagcatcggctgcaggggtcagtgatggagctgcttcagttttcggctttgtgagaaacctta

SEQ ID NO: 351485 - DNA, 51 bp, Homo sapiens
tcactgcattcaatacctagatgatatcaaacttggacatagatcagaagc

SEQ ID NO: 351486 - DNA, 74 bp, Homo sapiens
cttcagagaatggcagccatttatttgtcccgtggacctgatcccaaccttgaagaaagtcctaaaagaaaaaa

SEQ ID NO: 351487 - DNA, 89 bp, Homo sapiens
cgctcagactggaaacaaaggagctggcccagcaactttcccagaacgcaccgcaagctccctcctcgagaatggatcttggagaatgt

SEQ ID NO: 351488 - DNA, 110 bp, Homo sapiens
tatggcacacacagtgggacctagacaaagggagagggtgaccgacatcccaactagacgtgcagttcctggcctcggtgctgcccccagacacggatcctgcgttcttc

SEQ ID NO: 351489 - DNA, 100 bp, Homo sapiens
ggaaaagtgaacttttcgaggcatttgacttgtttgatgttcgtgactttggaaagccccactgtgttctccttgcctcaaaagaaaactcggcacctgt

SEQ ID NO: 351490 - DNA, 51 bp, Homo sapiens
gagagtctccgggtccctggaaagtataccaaatactacattcaccgaatt

SEQ ID NO: 351491 - DNA, 88 bp, Homo sapiens
tcccgtgtcatcggcttcactgtcctcacagaggcagaccctgcagccagacagtcattttgtttactcattcagccctgttgcaggt

SEQ ID NO: 351492 - DNA, 101 bp, Homo sapiens
tcaaagtgccagcagattcagtgtcatgtgaggacgtgcttcctgcttcatagataagagacattcttcttttggccgatgaaaaatttgacttcgatctt

SEQ ID NO: 351493 - DNA, 106 bp, Homo sapiens
ctaccgagggcagagctgcatgaagaggcacggcattcccatgagccacgttgcccggcaggcaatttgaatcaacccatagaagtgacagcgctgtattcatttg

SEQ ID NO: 351494 - DNA, 75 bp, Homo sapiens
caccttcccagcgagtttctactagtccagttgggcacaagagactatagtccccggcagatggcagttcgcgag

SEQ ID NO: 351495 - DNA, 83 bp, Homo sapiens
cgcaccgcggcttaaatgatgtattttgtgatcgcagcgatgaaaggttgaggcctctggtgtctacgcagccagcaaagaag

SEQ ID NO: 351496 - DNA, 51 bp, Homo sapiens
ctgcacttccactcctgtcaagcttattgcaggagtgaccaggacactacc

SEQ ID NO: 351497 - DNA, 75 bp, Homo sapiens
ggttctgagactctaggcaggctggcaggcaacaccttaggatatcttaatgcaattcagacaatgtgtccacac

SEQ ID NO: 351498 - DNA, 99 bp, Homo sapiens
gtcttggaggaaatagcttcttttggagaaaggattaagaaacatctgaatgggactccgagtgccttacatccctgcagccccttcctcttcctacac

SEQ ID NO: 351499 - DNA, 75 bp, Homo sapiens
cgagacgttgttgagtcccctgtgtcctcttctgggcagctatcaatggtgtaataccacaggaaaatggcattc

SEQ ID NO: 351500 - DNA, 100 bp, Homo sapiens
ccagatccgcttcagcaacatttccgccgccaaagcaaagaatggctcaagaagtactgacacatttaaaggagcatcctgatgcttggacaagagtcga

SEQ ID NO: 351501 - DNA, 100 bp, Homo sapiens
cggcggaggcgacggtggcggctctcggagccggcgcgaatccggcccccgcagcgggacccggcccgtggaccgggagcccgtggaccgggagccggtg

SEQ ID NO: 351502 - DNA, 98 bp, Homo sapiens
tcgcctcctcgcagcagcgccatgagtttatgtggccgaggcagacaagtggaattaggccttgctgcaggggacttcatttccttctcagtactgga

SEQ ID NO: 351503 - DNA, 102 bp, Homo sapiens
aacgaggcaaggagctaaagcagcgtgcgttcagccctggggtcagcccaaggccaaccccactgtcactctgttcccgccctcctctgaggagctccaagc

SEQ ID NO: 351504 - DNA, 82 bp, Homo sapiens
cccagaaataagcgtgtcgagaagagcacaagcagaggatgaaatgacatcggagagagagacaagatcacagagaatccag

SEQ ID NO: 351505 - DNA, 100 bp, Homo sapiens
aggcctgctcctccgtttgcaaggtggccagcatcgaaatgttcagccttttagtgatgaagatgcatcaattgaaacaatgagccattgcagtggttat

SEQ ID NO: 351506 - DNA, 98 bp, Homo sapiens
cttttgtgtccaggcataagaaatttgacgggtgataaaagaaaatgtggctgaagttacccgaagttcagcttgcagtgtaattcagaagagttaag

SEQ ID NO: 351507 - DNA, 75 bp, Homo sapiens
ctggcggcgctgcggatccagggggtcggctgccaggtacagttacagatgaggacacagtaaagaggtattttg

SEQ ID NO: 351508 - DNA, 98 bp, Homo sapiens
ccatcagttttctgtgacagaaaggggcattgctcccaaaatagagttttctacaaggacagccatcagagaatgtgtgtttctgcatagaaacagat

SEQ ID NO: 351509 - DNA, 80 bp, Homo sapiens
aagttagatgccgattacccacttcgagtcctttattgtggaggttgttggatatgggaagtatgaactggaagaggatg

SEQ ID NO: 351510 - DNA, 82 bp, Homo sapiens
gacgttttccggagggattccatcatagcgtggcccagggaagccaaaagattgcacactcctgcagtagaatataggcggc

SEQ ID NO: 351511 - DNA, 100 bp, Homo sapiens
ctaatggtgtggggaagagtacgctactcctgctgctgactggcaagctgacaccgcagcaacatgaagcgagcagcctccttgaactatctgaaccaac

SEQ ID NO: 351512 - DNA, 101 bp, Homo sapiens
tgaagaccgtggagatgcgggatggagaggttgatttataccaattacaagtaaatacacttaggagatacaaaagacacttcaagctaccaaccagacca

SEQ ID NO: 351513 - DNA, 100 bp, Homo sapiens
aaagaatcccttgaagaaagtattggcaaggccacgaaactggctactgctttcggatgtccttaagaaattgaaaatgtcctcccgcatatttcgctgc

SEQ ID NO: 351514 - DNA, 97 bp, Homo sapiens
agtactccacagaggataaatttcaacctccggggccacaatagcgaggttggcagtggcaatgacccctggtcagcctggagtgcctccaaatctg

SEQ ID NO: 351515 - DNA, 50 bp, Homo sapiens
cagacgtgcaacaaagtgcgatgttcccagtgacctgacagcagaggagc

SEQ ID NO: 351516 - DNA, 75 bp, Homo sapiens
gcccgagcccaccgcgccgggccccggacgccgcgcggaaaagtaatctatgccagcaattatgacaatgttagc

SEQ ID NO: 351517 - DNA, 75 bp, Homo sapiens
ttgcatgggcatcctatgatcagacaggttcttgggtgtctctggggagtccctgggccagaccttcctccagac

SEQ ID NO: 351518 - DNA, 100 bp, Homo sapiens
agcctaaacgtcagaaatccagtactaaactttctgagcttcatgacaatcaggacggtcttgtggagttattcctgatgaagctaaagctttgtctctg

SEQ ID NO: 351519 - DNA, 100 bp, Homo sapiens
caccaagaccacagtgacaagaatcggctgctggaactggagacaagattgcgggagatgtccagctcgccgctgtccaagaaacgtcgcgtgtccgggc

SEQ ID NO: 351520 - DNA, 100 bp, Homo sapiens
tgcaaaagaagttagagatgacggaactcctgcttcaacagaaaaatggctacaaacttcctagcacatgagaagatctggttcgacaagttcaaatatg

SEQ ID NO: 351521 - DNA, 74 bp, Homo sapiens
aaagtcgtcttccacttgcacgaaagctttcctaggccaaaaagaggcctcaggagtgcaagtagctgatgaag

SEQ ID NO: 351522 - DNA, 100 bp, Homo sapiens
tgctggaaaaacagtggctgccaaatatatcatgagctacatctccagagtgtctggaggagggaccaaagtccagaccatcatcaaagaggggatgctg

SEQ ID NO: 351523 - DNA, 50 bp, Homo sapiens
aggagcggtgtcctcttaagaaaatgtggagcccacagtgaccatctccc

SEQ ID NO: 351524 - DNA, 74 bp, Homo sapiens
gggagctcgggccaatcagagggacggccccagaatggcatggctcagatcaccatgaaagtaatccaaggctt

SEQ ID NO: 351525 - DNA, 50 bp, Homo sapiens
ttaagactgagggagccactctaagcatcgacatagggcacacagcggcc

SEQ ID NO: 351526 - DNA, 75 bp, Homo sapiens
gagggaggagatgcgactcgaagcagaaagtaacaatttggacaagacagcaaatgctattgtcgaagttttcta

SEQ ID NO: 351527 - DNA, 100 bp, Homo sapiens
ggaggataaagactgccccatcaaggaagaaaaaggaagccccttaaatgccgcaccctacggcatcgaaaggcagctgacaccctagctgtacgccaga

SEQ ID NO: 351528 - DNA, 75 bp, Homo sapiens
tggactttgtttttcctgggaactgcagacaatgcagatcttcgtgaagactctgactggtaagaccatcaccct

SEQ ID NO: 351529 - DNA, 74 bp, Homo sapiens
tgggtcagcttcatcctcggcggcggtggccgctagctccaaggaaggtggaattctactaagtatcagtcggc

SEQ ID NO: 351530 - DNA, 99 bp, Homo sapiens
aagttgaacagaacgcggctcccagccacaccaagttcagcccgaaaacctcctgtatgccacgccctttgaggactcgaagatcatggtctctgactt

SEQ ID NO: 351531 - DNA, 100 bp, Homo sapiens
agtgtagtgtgcaagtattttcagcgagggtactgtatttatggagaccgctgcagtggatcaatgagacaatattagtgccacttgttcaagagattga

SEQ ID NO: 351532 - DNA, 100 bp, Homo sapiens
ggaagcatttacaggccccaccgaaaaaccttaaagggctgagagcttgagggcaggtgaaaggtgtagcagtcactcggcctacacccacagcatcgac

SEQ ID NO: 351533 - DNA, 100 bp, Homo sapiens
caatgaggagggcccttcacagaaccggggattctggactctacttataatatccctaactgctggattctcctgttgcagcttttcttggacagtgact

SEQ ID NO: 351534 - DNA, 93 bp, Homo sapiens
tgaatataaaaggacttcatctcctcaacatggaaactaagattcccaaatgctggaaaatcctctttgctaagttgtgtttctcatgcaaaa

SEQ ID NO: 351535 - DNA, 119 bp, Homo sapiens
tgaagaggaaataaaaacagaacaggaggtggtagagggcatggatatctctactcgctccaaagacaatgcagatcttcgtgaagactctgactggtaagaccatcaccctcgaggtt

SEQ ID NO: 351536 - DNA, 75 bp, Homo sapiens
ggctcggagaggtgctcggattctcgtagctgtgccggtggaatgcagtagccctctgggcctgggatattgtgg

SEQ ID NO: 351537 - DNA, 75 bp, Homo sapiens
tggcgcagcctccctctattaccaggcccagctgagagccagcctggaggttacccagcagcaggccacccaggc

SEQ ID NO: 351538 - DNA, 100 bp, Homo sapiens
cctgccccttgtcctggccccggtacatgtcccagagcaagcacacggaggcccgggagctcatgtactcgggagccctgctcttcttcagccatggcca

SEQ ID NO: 351539 - DNA, 73 bp, Homo sapiens
ggagttctccaggaagcagatcaaggacatggagaagatgttcaagcagctgaccccgcactacatctaccca

SEQ ID NO: 351540 - DNA, 100 bp, Homo sapiens
ttcgggtctcttcgtgttctcgctcactcacggatgataccatcggggaccttaagaagctgattgcagcccaaactggtacccgttggaacaagattgt

SEQ ID NO: 351541 - DNA, 100 bp, Homo sapiens
ccgggcaatattagaccatcaacagtttgactacataataaggatgatgaattgtactctacaggagccctggtattccttgaacatgcatacctttccc

SEQ ID NO: 351542 - DNA, 82 bp, Homo sapiens
cattaatgaagtaaagcccacagagatctacaaccttggagcccagagccacgtcaaaggtatttgaagtataccatacaac

SEQ ID NO: 351543 - DNA, 100 bp, Homo sapiens
cttggtgaagagagaaatcccactagcaagtattaccgggcagacctccttatgctgcttcagcagaagaagtggccaaagaacttaagtcaaaatctgg

SEQ ID NO: 351544 - DNA, 99 bp, Homo sapiens
tggaatccaccctgtctgtgcagaggtccttatgtcgtcagaagatcgagaagctcaggaggatgaattgctggccctggcaagtatttacgatggaga

SEQ ID NO: 351545 - DNA, 75 bp, Homo sapiens
cgactacgctctccgaaacctcatgggcagtttctcccgccggcgatattcattccacttaaaacctgaaaacat

SEQ ID NO: 351546 - DNA, 83 bp, Homo sapiens
ctacctcgcccacgagagtcggaggaaccctaaggactctgcaatatgaataattccctagagaacaccatctcctttgaaga

SEQ ID NO: 351547 - DNA, 74 bp, Homo sapiens
cttacaacatggcagacattgacaagccctggccaacgtcaacattgggagcctcatctgcaatgtaggggccg

SEQ ID NO: 351548 - DNA, 100 bp, Homo sapiens
ataaagatgagtataagcagtgatgaggtcaacttcttggtatatagatacttgcaagagtcagttggactaaatgctcttccttcagaggattatccgg

SEQ ID NO: 351549 - DNA, 89 bp, Homo sapiens
acttcatgacatcatccataccaaggagacgctgacacttgtgtttgaatatgtgttgacgaaggatcagagattggtgtattcgggca

SEQ ID NO: 351550 - DNA, 97 bp, Homo sapiens
gccaggcgattcggtgaagcgattcctgcaggcgttggttcccctctttgacctgtcaagagaatccatcccattaaatgacctgaagtcagaagta

SEQ ID NO: 351551 - DNA, 100 bp, Homo sapiens
gtgtggaccctattcctggtttgcaggtggcagagcgagctctctattactggaataatgaatacatcatgagtttaatcagtgacaacgcagcgaagat

SEQ ID NO: 351552 - DNA, 83 bp, Homo sapiens
cctggcagccccgctctctgcattgttggagttgcagtaatttgtgttgtcccgtacagatatcttcaaaggaggaagaagaa

SEQ ID NO: 351553 - DNA, 75 bp, Homo sapiens
tttgaacctcttgttcgagacatcaacctacagtaacagagattcaaaggtaccttcagaaggaaagaaatctct

SEQ ID NO: 351554 - DNA, 100 bp, Homo sapiens
ggagaatggaaaagaaccattgaagcttgagagaaaagcccccaaaagcagctattcaggggcctttacaacaactaaacggacaggcattccagcccca

SEQ ID NO: 351555 - DNA, 98 bp, Homo sapiens
caagcttacgtctctgctcttcagtacaatcctgctccaggaggccagagctctactgaagcggcggcggccccgggggccagggggccggggactac

SEQ ID NO: 351556 - DNA, 143 bp, Homo sapiens
gctggaccacctggtcggggaggagaccatggctgactacctgctgtacaccctcaacaaacaccagcgctttgggtagaagaagaaaggtgccactccggcatgaagacagactcgcttagtcgccagtcacttaagctgag

SEQ ID NO: 351557 - DNA, 75 bp, Homo sapiens
tttgcatcggaaatcagctctacagttcaggacccatgccccctttgtgatgaagccaaggaagtactcaagcct

SEQ ID NO: 351558 - DNA, 101 bp, Homo sapiens
gttgctatacagaatctttggatatgtgcatcagtggtttatgccaatcatctcaactcgaactccacctccaccttcaccgttgccatttccaacacaag

SEQ ID NO: 351559 - DNA, 100 bp, Homo sapiens
tggggaccttggacctagggggagcctccacccaaatcacgttcctgccccagtttgagctttcatccatcccaggggaatcacttacctatgccagcac

SEQ ID NO: 351560 - DNA, 100 bp, Homo sapiens
tgatcagtttgtgtcagccaccttgttctctaaagctcatttagaggcgagttttgaggaggtagagaacaacctgctgcatctggaagacttatgtggg

SEQ ID NO: 351561 - DNA, 97 bp, Homo sapiens
gtgcagtgaagccgcgacatcccaggctcaagtgatcctcccacctcagcttcctgagtagtttttcagtactaccagctctccaatactggtcaag

SEQ ID NO: 351562 - DNA, 98 bp, Homo sapiens
cgcgctgctggacgaagagctctcctccttcttcctcaactatctcgctgacacgcaggtttacccaaggtccagcctagcccctaggcaccatgtcg

SEQ ID NO: 351563 - DNA, 100 bp, Homo sapiens
tagaaaatattcatcaacctagagctgccaagaagcattcttcatctaaagataagatgctgagctttttataccaccaaagatcaacagaagaacccag

SEQ ID NO: 351564 - DNA, 90 bp, Homo sapiens
gagatagccaaacaaaattggctggcagagcaacagaaaatgcaggaacaacagatgcaggccaaagaggtgctgaaaaaatatttggag

SEQ ID NO: 351565 - DNA, 83 bp, Homo sapiens
aagataagaaaatcactgtgttactggatgaagttgcagaagttgtggacatcggatacccaaggagacgaagctgaagcagg

SEQ ID NO: 351566 - DNA, 100 bp, Homo sapiens
tgcacccatgtcccaggtgtatggagcgccacatctcctgagattatttgctttcaccaacaatcaccagtggtttacacaacattgcaaggagcattga

SEQ ID NO: 351567 - DNA, 128 bp, Homo sapiens
tgtctccagcgccatcttcttcgtgccgggcttcctgttgttggtgcctggagacatgtccttccgcaaagtggtccggcagagcaaattccggcatgtgttcgggcagccggtcaagaacgaccagt

SEQ ID NO: 351568 - DNA, 83 bp, Homo sapiens
cggatggccccaggtgtaagcgcagaaagcaggcgaacccgcggcgcaataacggactggttgccataaaggaagcccacgac

SEQ ID NO: 351569 - DNA, 74 bp, Homo sapiens
ggcacttcattggccacctacagaaacaaaatgtcaacaaattgatggatacactgaagagatggtgccttggc

SEQ ID NO: 351570 - DNA, 101 bp, Homo sapiens
gaagattacaacagactgagaagagaagtggagcaccaggagactgcctatgctggagctctcaaacactgctgtcctgcaccagatgcggcgggaccagg

SEQ ID NO: 351571 - DNA, 99 bp, Homo sapiens
agagtaaaagttgtttctggaattgatctcgccaaaaaggacatctttggagccagccatgaaccagagaatcagtcagagtgctccagtgaaacagcc

SEQ ID NO: 351572 - DNA, 75 bp, Homo sapiens
cgctagcgttcgccttcagccaccatggggaatgggatgaacaagatgaaggatttgggggcagagcacttggca

SEQ ID NO: 351573 - DNA, 75 bp, Homo sapiens
accactccagggggattttgggcaaccatgtccaagggacctgcagttggtattgatcttggcaccacctactct

SEQ ID NO: 351574 - DNA, 96 bp, Homo sapiens
tcgggagaatgtccaggatgtgctgccggccctgccgaatccagatgactattttctcctgcgttggctccgaggaattgaatgatctggcacggg

SEQ ID NO: 351575 - DNA, 50 bp, Homo sapiens
accgtattggatccagatctgcgaatggatgactacgacaaccatactgg

SEQ ID NO: 351576 - DNA, 80 bp, Homo sapiens
cgctcgggtggcgacttcctccccgcgccccctccccctcgccatgaaggtgtcgtgaaaactacccctaaaagccaaaa

SEQ ID NO: 351577 - DNA, 100 bp, Homo sapiens
ctttttcctggacctggagcccatcccgggagccttggacgctgtgcgggagatgaacgacctaccggagtccagctgggagctccccgacctccaggag

SEQ ID NO: 351578 - DNA, 98 bp, Homo sapiens
atgagatgcaaacatgaaagacaagaggaagaagaaggaccgcacctgggccgaggctgcccgcctgctctgtcagctgcagagaaggatgcacacac

SEQ ID NO: 351579 - DNA, 75 bp, Homo sapiens
ctgggaccagtctcggcaaatattacacttctctccttgaaacctcgacctgtctcccagttggttgcacagcag

SEQ ID NO: 351580 - DNA, 100 bp, Homo sapiens
gaggctttggcattaatgaatcggaatctggacattttggaaggagcgatcacatcagcagcagatcaggtgctgttacactaccaaactgtcagtgaac

SEQ ID NO: 351581 - DNA, 96 bp, Homo sapiens
gaccctgacctgcctgtcgtcgtggtggccaacaagcaggtagtttctctccctggctcatcttgcatgcttgctctgatggaaaaggtcacctgg

SEQ ID NO: 351582 - DNA, 97 bp, Homo sapiens
ggcagcagcgtggcctccgccaccgtgcacatccgaatggaatcatcggactcaggtacatctgtgagtgagaacaggtgtcaccttgaaggtggga

SEQ ID NO: 351583 - DNA, 88 bp, Homo sapiens
aaacctggaagaaggaggaacatggagaggagagcagcgggcccaggctgggcagcctctgcaagctttcttcctggtggcagatgac

SEQ ID NO: 351584 - DNA, 100 bp, Homo sapiens
cgccttccagcacggcatctgctttgaggccaagcatctgtacagcatccaccttgccgaacagcctgaggactgtactatgcagctggctgaccacatt

SEQ ID NO: 351585 - DNA, 100 bp, Homo sapiens
ctgctccccaggacctgagcaggaacctggagttttcagacttccaccgctgtcagaaggcaatgaccgctaaaggaggcgatatctctgtgtgcgaatg

SEQ ID NO: 351586 - DNA, 100 bp, Homo sapiens
cggcccgctactctccgggaggggcgcttcccgacgccaagcgtcgtctcggagatgcagccaagaaagccatcagtaaattgacaaccaggacagtaaa

SEQ ID NO: 351587 - DNA, 100 bp, Homo sapiens
ctcaacttcaaagacgttctcaaggagaaggcagacctgggtgatgcttttccttggacgatcagcttgcataatttcagcatatatacccttcttggaa

SEQ ID NO: 351588 - DNA, 75 bp, Homo sapiens
cacttgcagccagggactgggcatccacccggccaggttcccaggaaggcccgatgagagaaagggaaagttaag

SEQ ID NO: 351589 - DNA, 75 bp, Homo sapiens
cggccgcggggcccgagcgcaggcccactgctcagtggagcgtggaggacgaggaggaggccgtccacgagcaat

SEQ ID NO: 351590 - DNA, 100 bp, Homo sapiens
ttgacgatgagtatgaggacgaggaccagtgggaggatggagcagaggacattctagagaaaggtggcattggaaggccttcggcctaccatcccaccag

SEQ ID NO: 351591 - DNA, 90 bp, Homo sapiens
ggattctgttacgttaatgatattgtgcttgccatccttgaattactaaagatagtgatgaggaagaagaagacactgaaaatgttgagg

SEQ ID NO: 351592 - DNA, 100 bp, Homo sapiens
gactttgcagaaatgtgtgcagactacatggcatctaccatagggggcctactctaggtgcggtacttcactatagtttataaaagatggtccctgtcag

SEQ ID NO: 351593 - DNA, 74 bp, Homo sapiens
aaggctataccaaagaccaagtagatggagttctcaggtccaaagaggactggtgatctacgtgtgctttttca

SEQ ID NO: 351594 - DNA, 75 bp, Homo sapiens
cgtgggggacgtgccaccagaaccctacttaggggcgggatgtcactccgaggtgtggatgaggtcaccattgtc

SEQ ID NO: 351595 - DNA, 82 bp, Homo sapiens
gcggcggcacgatgccctttgacttcaggaggtcgtcgtcccgcagacacacaatccagaagtcactttcctcgagacattg

SEQ ID NO: 351596 - DNA, 48 bp, Homo sapiens
tctcatagcagattcaaatccaatggtcctcttcctgatggatgggaa

SEQ ID NO: 351597 - DNA, 100 bp, Homo sapiens
caagcccagtgggagaggctgctgactacatttgaagggaaggagtggatcctcttctttatagatatttggagttcttacaacatggcagacattgaca

SEQ ID NO: 351598 - DNA, 75 bp, Homo sapiens
agcctgaacccggggctggtgggcctttctgtgtcctactccttgcagcatggggtcctgtcccagcaattcgtg

SEQ ID NO: 351599 - DNA, 94 bp, Homo sapiens
ttatggcggcgctggagagggggcgctgagctgttgggacctgcctagagctggaacgttacctccagagcgagccctgctatgtttcagcctc

SEQ ID NO: 351600 - DNA, 75 bp, Homo sapiens
tatttatcggcatcgcaaggaccatgataaaacatcacttattcaggaaggcccgaacaagacaggaacgtcctg

SEQ ID NO: 351601 - DNA, 98 bp, Homo sapiens
acacccttgagcctgagcccgacattattcctgaggccagcactccttgcccgaggacagagatggcgagcgcccggattggggatgagtatgcggag

SEQ ID NO: 351602 - DNA, 100 bp, Homo sapiens
ccgccggcgcggaaggacgaggctgaggcgagaaacgaggtgtcatggagaaactccagctgggcccagagattctgcagcgggaaaatccaaggcttat

SEQ ID NO: 351603 - DNA, 75 bp, Homo sapiens
gctgtggggcaatccgggcttgcagacgagatgaaatcatgcaccaggacatcgtcccgctctgtgctgccgaca

SEQ ID NO: 351604 - DNA, 100 bp, Homo sapiens
cgggggcagaacctggtctggccagagacctgctggaagagtaatcaagtcagaggattatatgacttttatctgcctagagaagaactatggatctaca

SEQ ID NO: 351605 - DNA, 88 bp, Homo sapiens
gaagaaatggcttctctagaggaggaagcctgcagccttaaggcttgcagccctgagtgatcgagagactcggctgcaggaggtgcgc

SEQ ID NO: 351606 - DNA, 126 bp, Homo sapiens
ggctgatagcttttacatcatagagtctggcgaagtgagcatcttgattagaagcaggagcatcctggccagaacaagccaaggagccaagacgagagggacacacggacaaacaacagacagaag

SEQ ID NO: 351607 - DNA, 98 bp, Homo sapiens
gaaaagtggaggggtgaatcagtatgttgtgcaagaggtactgtccatcaaacatcttccaccacagcttagaggtattttgaccaacgtgatttagc

SEQ ID NO: 351608 - DNA, 90 bp, Homo sapiens
gcaacggcggcgggagcatgaacgcccctccagccttcgagtcgttcttgctcttcgagggcgagaactctcagatctggctcgagacca

SEQ ID NO: 351609 - DNA, 83 bp, Homo sapiens
tcaatatctgtcttcggtggactccttcggcagtccacccaccgccgccgcctcccagtcttcaggcagtgacagtggtggga

SEQ ID NO: 351610 - DNA, 100 bp, Homo sapiens
cccattctggtgcccgatcctggcctgctgcatccctgccttctcctcccgggcactcagcctgcaggtggagccccctgagctgcccgctgatctgcag

SEQ ID NO: 351611 - DNA, 100 bp, Homo sapiens
tctgaagacctgatcttaattggaaatgaactagaccttgcgtgtggagagagaattcgactggagaaggtccagatggctgtggaggccaagtttgtcc

SEQ ID NO: 351612 - DNA, 101 bp, Homo sapiens
cggagacggcggaagcggagagcaacagcgcgccgctgctgctgaagggaaaggcagaagtggggaagacttttttcaaaaggtaagttgtcttttactct

SEQ ID NO: 351613 - DNA, 100 bp, Homo sapiens
gggtgttcgactgctagagccgagcgaagccaatggctgccatccggaagaaactggtgattgttggtgatggagcctgtggaaagacatgcttgctcat

SEQ ID NO: 351614 - DNA, 75 bp, Homo sapiens
cgagaagcaagcggaacttcctgaggtgtgcccttccccatcattgtggcctgggccattgggaagctgtactac

SEQ ID NO: 351615 - DNA, 98 bp, Homo sapiens
agcggcggcggctggactaaacaggtcacctgcaggttgctccttgagggcaggacagttcttatggctttatccgttgcgtaagcacagagaggtct

SEQ ID NO: 351616 - DNA, 97 bp, Homo sapiens
aattccatccaaaacttccactgaattggtctcgtctacagaggactggtctttcaatagcaagttttcacttcatcgacaacatcacgaaggtggt

SEQ ID NO: 351617 - DNA, 75 bp, Homo sapiens
gccatcatcatgaaggacgtgcccgactggaaggagctgaagaagaagctgttcaaacgccggcgggtgttgaat

SEQ ID NO: 351618 - DNA, 82 bp, Homo sapiens
cgcggtgggattaaaagcagcgaacctcgagaccaacgtggaggagctgtgggtggaagagttcctgagttggaggtagaag

SEQ ID NO: 351619 - DNA, 90 bp, Homo sapiens
ggacttagcttcaaagaaggcaatcagatattgtactccaagatacttggattacgaagatttggagcgcaagtactggaagaacttaac

SEQ ID NO: 351620 - DNA, 100 bp, Homo sapiens
tgacggtgctcagagccttcccttgtcggagccggctcggggacgcagagactgcagctgccatcgaagaggagctggaagccgacactgagtatttaga

SEQ ID NO: 351621 - DNA, 82 bp, Homo sapiens
agaaaagaagtggtttatcaaaatcacgttataatcagattttgaccaagcattttgtaagttaagggaagaaagtcggagg

SEQ ID NO: 351622 - DNA, 96 bp, Homo sapiens
gcacgtaccagaggtggaagtccaagtcaaacgcagaaggactgcctcactgagcaaccaagaaggacgatagagagctatgtggataaacgaatg

SEQ ID NO: 351623 - DNA, 75 bp, Homo sapiens
tgctgctaaaaacaagactggggctgctcccatcattgatgtggtgcgatcgaagacacgggcatatcataggct

SEQ ID NO: 351624 - DNA, 50 bp, Homo sapiens
tgatgatgtcctggatctgaatatgaggccccaggattcctggcgaggtc

SEQ ID NO: 351625 - DNA, 75 bp, Homo sapiens
tcttccaagaacagaagaaaatgatccaggcccaggcgttggagaccagggccagccctggccacaccccaggct

SEQ ID NO: 351626 - DNA, 101 bp, Homo sapiens
ccgggagttcaagaagaacactccagaggtgagcggagaattagagtacatacactttgtttgccagtggtaagttcactagcagatgtatatgcgggagt

SEQ ID NO: 351627 - DNA, 100 bp, Homo sapiens
ccgtttaaagtcttatttctgaagaataactgaagtgaagtgatggactccgatttggagagtagtaagacgtgaaaggaatacacttgtgtttaagcac

SEQ ID NO: 351628 - DNA, 75 bp, Homo sapiens
tgatgagcattccccaccacatcattgtcaagttcccacagaaactaattctgaagcaagcccttatagttgtgc

SEQ ID NO: 351629 - DNA, 48 bp, Homo sapiens
agttgtgttggtaatgaagaaaagtgtattggaacaacacaaactaac

SEQ ID NO: 351630 - DNA, 80 bp, Homo sapiens
ctccacctcccatgtcggcacagaacatgcctcaaaactactcttttgccactcgttaaccacttccgtttgtggggacc

SEQ ID NO: 351631 - DNA, 100 bp, Homo sapiens
catgagcaagaaaagcctctgggagcagaagggaggctccaagacctcatcaacaattaagccagtacttagccgcggagcggaaagcagtgctcatgaa

SEQ ID NO: 351632 - DNA, 97 bp, Homo sapiens
tgcttctggcggccatggtgttgctgctgtactccttctccgagtcaacacagactgtccaagctctgcagtattcaactgttgatggtccactaac

SEQ ID NO: 351633 - DNA, 100 bp, Homo sapiens
ttatggaattccactgagtggtaatggatgatgcagttcaaataactaagctctcatgggaggttgaatggagcagctgaacttggctgacagtggcctg

SEQ ID NO: 351634 - DNA, 98 bp, Homo sapiens
aaggatttcacggacattcagcaagattttgtactgggcctaatcgctacgtgcctctttggctatgatgcctatgtcaccttccccgttcggcagcc

SEQ ID NO: 351635 - DNA, 136 bp, Homo sapiens
actttgtgcccttcaatgtttggaaaagctatatggagataaatggaattcttttaccatcttattaattcactctggcagaaatggtgcacagtgctttccaggcccagcgggctttccttctgatggcctctca

SEQ ID NO: 351636 - DNA, 100 bp, Homo sapiens
agtgacccggtgcagctagaagtccatatcgcagtgtttggccagcgcttggatgagactgtggcctatgaacagaaattcggcccccatctggtgccca

SEQ ID NO: 351637 - DNA, 75 bp, Homo sapiens
gctctccagtttttcgtcgagagattcactatggaatcgataacgtgaaggactggagcaaggtcgtcctggcct

SEQ ID NO: 351638 - DNA, 83 bp, Homo sapiens
ctgcgctgcgtctggaagagcttcctcctcgatgcctacaaacaggagtgtggggctgattgtgctaagttccagaagagtga

SEQ ID NO: 351639 - DNA, 74 bp, Homo sapiens
ggaggacctcacttccccggggtgtaataatgttaactgaggtatggaacaggatgtttcttactatgtaatac

SEQ ID NO: 351640 - DNA, 98 bp, Homo sapiens
gtcgtggccggaggagtctcagagctgtcagaaagatgattttcagactgcccaactattggcacttgtattggaattgttaacattttgtgtggagc

SEQ ID NO: 351641 - DNA, 90 bp, Homo sapiens
gtttggagataaaacatttgttgttcagactcagaaccgtgctgcatactatcctcctagccaaattgctcaactaagaccaagtcctcg

SEQ ID NO: 351642 - DNA, 75 bp, Homo sapiens
ggggtcttcaccgagctcattaaaggattcgaggtctgcggggtttccgagaggctcgccgggatttctggcggg

SEQ ID NO: 351643 - DNA, 97 bp, Homo sapiens
tagaactcagttgtgcgttgcggccagtcgccactgctcaacccagactactacggactcatctaacaaaacagcaccgactccagcatccagtgtc

SEQ ID NO: 351644 - DNA, 100 bp, Homo sapiens
agagtatgaacagcccctgctggcaagtcaagtggcaactccgtcagctcgttagaaagcatcaggcactggccaagatgatgctgatggccactcagtg

SEQ ID NO: 351645 - DNA, 82 bp, Homo sapiens
ttccagaagtccaacaagagaatataatcaatcctcaagacctaacaggaaaaaagggttgctcattttgggtatcactgga

SEQ ID NO: 351646 - DNA, 100 bp, Homo sapiens
ctccattaagaaaatgaaacaagcctttgctgaattggagagctgttgattatggaagattcccacaagagtaccacgtcagagacagcacctcaacctg

SEQ ID NO: 351647 - DNA, 50 bp, Homo sapiens
gcgcggcgagcggcgaccctgagtgcagctccttctctccacccaccaca

SEQ ID NO: 351648 - DNA, 98 bp, Homo sapiens
gcggggcgtgcgcgtcctcctccccaggcccgccgcctccctgccaagaggccacaagaggaagctgaatgaagaggacgccgccagcgagtccagca

SEQ ID NO: 351649 - DNA, 101 bp, Homo sapiens
gacttcttcctgctgctgcttttcaggggttttgacaagcttgcatcatgcgtgagtataagctagtcgttcttggctcaggaggcgttggaaagtctgct

SEQ ID NO: 351650 - DNA, 82 bp, Homo sapiens
aaggagctaaagcagcgtgcgttcagccctggggtgctggttgccgaggagaacgtggacttccgcatccacgtggagaacc

SEQ ID NO: 351651 - DNA, 75 bp, Homo sapiens
gctccgaggcgaccactcctgtgatcgttgcggctggggctggaggggaggaagctgcagaaccttggcctgaaa

SEQ ID NO: 351652 - DNA, 100 bp, Homo sapiens
gaggaaagtcccaggatgactactgtgtcaagatctagtgaaaagccatttgatgtatgcggtcagagaagaagtggaggtcctcaaagagcaaatcaaa

SEQ ID NO: 351653 - DNA, 100 bp, Homo sapiens
ctccggtcctgcacgccctgtctgaaggccaacattgagcgtctggaggagtctcgcccaagaacttcaaggtgaaaatgatcatgaagacatcagttct

SEQ ID NO: 351654 - DNA, 82 bp, Homo sapiens
gtctctggagacatcttcagcagctggaaaacctcatgctggacaaagatggccacatcaagatcactgactttggcctctg

SEQ ID NO: 351655 - DNA, 76 bp, Homo sapiens
gtcggggatcggtcgcctgagagattggtgctgaagacatggacggcttccaggcagacacggaggaggaggaaga

SEQ ID NO: 351656 - DNA, 100 bp, Homo sapiens
gggaatccctgccccatctgtcgagatcacaagttgcatgttgactttagggtcatatatcagttatgtgcatgctctgatacatctggtcctactatga

SEQ ID NO: 351657 - DNA, 98 bp, Homo sapiens
ctgaccgctgccgcccagcacgtccagaagagaagctgaatttggacgacagccagtgggaggacatccacgttgtcaccggagcactgaagatgttt

SEQ ID NO: 351658 - DNA, 82 bp, Homo sapiens
ttcaagcagacttcacttgctcttgtacatgagtctgaacaacccagtcctgccagctccagctccagctccagctccagct

SEQ ID NO: 351659 - DNA, 83 bp, Homo sapiens
ggagatcaaaactcgctcggtggagcagacgctactcccgctggtttctcaggatggaggtttgcttctgaataacccttcgg

SEQ ID NO: 351660 - DNA, 75 bp, Homo sapiens
tgacctagtgaagccagctgttgatggttcaatcttatgatccagaaaccaattcttggctacttcgtgcagcta

SEQ ID NO: 351661 - DNA, 98 bp, Homo sapiens
gaactacagaaacctggtctccctagggagaaacaaaggcagcgctgccctcgggggagcattggccctggcggaacgcagcagccgcgaaggatcca

SEQ ID NO: 351662 - DNA, 101 bp, Homo sapiens
aaatctcttttaggggattctgcaccaacactgcacttaaataagggcacacctagtcaggtatatgtaggctttcaggtgcagctagacctgacgggtat

SEQ ID NO: 351663 - DNA, 100 bp, Homo sapiens
aaatttgctacatgctctgatgacggcactgttagaatctgggactttcttcgttgccatgaggaaagaattctccgagacccttctcaggtgcagccag

SEQ ID NO: 351664 - DNA, 50 bp, Homo sapiens
gccaaagcagctcattcacatacagcttgcctttccccatcttcctggtt

SEQ ID NO: 351665 - DNA, 75 bp, Homo sapiens
ggcgctccggagagaccgacagaagatgaggaaaatgaggcccaaagaagtgatgccacttggttaaggtcccag

SEQ ID NO: 351666 - DNA, 75 bp, Homo sapiens
catcacctacccactaatgaaaagaatttcatactggcctcaactagccttgggaactgaagaggagtttggagg

SEQ ID NO: 351667 - DNA, 100 bp, Homo sapiens
cgatagatggctacaggccgcggaggaggaggaggtggagttgctgcccttccggagtccgccccgtgaggagaatgctggtgtcatagatgaagattat

SEQ ID NO: 351668 - DNA, 98 bp, Homo sapiens
tgatttttctggtgatcgaggacttccggggtaatgacagtgatgaaatgcaggggacctggtaccccctgtaccggctgggtggcccacaacttcgg

SEQ ID NO: 351669 - DNA, 95 bp, Homo sapiens
aaaaaaggctaagcaagcatctaaaaagactgcaatggctgctgctaaggcctgggcaatatttaagggaaagtataaggagggggacacaggag

SEQ ID NO: 351670 - DNA, 75 bp, Homo sapiens
cctgagtggaggatgttcccgctgcctaaagaatgattgacttactatactggcaattgctggagaagattttgc

SEQ ID NO: 351671 - DNA, 90 bp, Homo sapiens
ccgcccgcgtcctactgcgccaagctctgcgagccgcaggggcatggtctgcatgggataggagaaactgtccatgtcccatttccattt

SEQ ID NO: 351672 - DNA, 95 bp, Homo sapiens
gctccctcaccctcgcccgacccctcaaggagccctcaggtagtgggcagcagtcagtgacaggtgtaacctctgtggatgacagcaacagttac

SEQ ID NO: 351673 - DNA, 96 bp, Homo sapiens
gctgcttatggcggcgctggagagggggcgctgagctgttggggtgctggagaatctggtaaaagcaccattgtgaagcagatgaggatcctgcat

SEQ ID NO: 351674 - DNA, 75 bp, Homo sapiens
cgcggaggccggggacgcggaggccgaggacgcggaggacgcggctctgccagtagagacggggtttcgccatgt

SEQ ID NO: 351675 - DNA, 74 bp, Homo sapiens
ttgaattcccctcctcacgccagcctaggagaagaagttcgtagtcccagagtgataggacaagaccacgactt

SEQ ID NO: 351676 - DNA, 75 bp, Homo sapiens
gagttcccaaaaagctccgcaggggctgtagggagggaacctccacaaggagctcattttctttccagaagtcta

SEQ ID NO: 351677 - DNA, 100 bp, Homo sapiens
cttgacctttaggtgcttttatattcatctcaaaaacaaaattctgaactcaggacttggcaagaaatatgagctgtacagcatggactgggacctgaag

SEQ ID NO: 351678 - DNA, 88 bp, Homo sapiens
catgtcgcctgatgaaatcaagatcccgccagaaccccctggcagatgttcaaatcacttgcaagaccctgatgctcccataagacag

SEQ ID NO: 351679 - DNA, 100 bp, Homo sapiens
ggacctgccggagcccgagcgctcgccgcgcccggctgccgaaggagatgctggacctgctggccaagataagtctgaggtgccagagactccagaaatt

SEQ ID NO: 351680 - DNA, 100 bp, Homo sapiens
cgaggcggcggcggcggctgcggaggcgcaggcagcaactgaggcagcggcaggctcaggtgcagccgctgatcctgtgcgcaggtggcagtgagtaccc

SEQ ID NO: 351681 - DNA, 74 bp, Homo sapiens
tgtgcgccttcctctcgctgtcctggtacgcggcactcagcggccagaaagcagcgtccgtctccaagagagta

SEQ ID NO: 351682 - DNA, 123 bp, Homo sapiens
cttggcctgtccctcacatccgatgcaccctttttgtcagattatcaggatgaggatatccttggaacagaagatcttattgtggaagtgacttccaatgatgctgtgagattttatccctgg

SEQ ID NO: 351683 - DNA, 83 bp, Homo sapiens
ctcactttcggcggagggaccaaggtggagatcaaacttgctgccaaacaaggtgaatccgacccagagaggaaagaaacaag

SEQ ID NO: 351684 - DNA, 100 bp, Homo sapiens
cgctatctggcatcctggacaaagatctctcggaccgcagcaatgacattgagcgatatctgaagtggctctgatgcctttgccacactcctcgcatctc

SEQ ID NO: 351685 - DNA, 75 bp, Homo sapiens
tcaggacgtaaatggaaccctggagtcagtggatcggtggggaaaatgctgcttaccctgggccctgggctgtag

SEQ ID NO: 351686 - DNA, 100 bp, Homo sapiens
cgatgtgtagtgccttccatagggctgagtctgggaccgagataagccaatggacacgtcagtgttatctgaagaaggaggagagccttttcagaagaaa

SEQ ID NO: 351687 - DNA, 101 bp, Homo sapiens
gagttgcagcttacaacaagaaaaagaagcgtatggactactatgactctgaacagtattcccagttccaagatgaatacagtttagatgaagtgatggca

SEQ ID NO: 351688 - DNA, 88 bp, Homo sapiens
acttgcatatatttgactgcaaaaggcggtcaccttctccttactatagtcgtggaggatacagatcacgttccagatctcgatcata

SEQ ID NO: 351689 - DNA, 75 bp, Homo sapiens
aatctggaacgggtggccgattactgcgagaacaactacatacagacaggtgatttggcttctgcacagttagga

SEQ ID NO: 351690 - DNA, 75 bp, Homo sapiens
aaatgctcagctatctgcccggaggcaccacaggactgcagctccccagcacgtggagacggagtttcaccgtgt

SEQ ID NO: 351691 - DNA, 74 bp, Homo sapiens
gttgtctcttagaagtgggagctgaacggatcactactcttggaatcaaagataaatccaaatactgcatatca

SEQ ID NO: 351692 - DNA, 100 bp, Homo sapiens
gcaagatgccgctgccggttcaggtgtttaacttgcaggtaaggggcctggataccaagaagtgactgctcatctaatccataaagctatgttaacagat

SEQ ID NO: 351693 - DNA, 98 bp, Homo sapiens
atggccccagtgagttcgcactctacatcgttcacgagtctgggggatcgccccaggacattcgacatgcactcactggagagttcactcattgacat

SEQ ID NO: 351694 - DNA, 75 bp, Homo sapiens
tgcgggtctccagccagaggaaggacttcatggagggtctgccctgaagcgtctctgcctaggcaaagaacacag

SEQ ID NO: 351695 - DNA, 100 bp, Homo sapiens
taaatcctctttacatcatagactttcagctacttgaagatagccatcagccgctacgtgactcttttctccaggtggtgatggcacttctcaaatactg

SEQ ID NO: 351696 - DNA, 98 bp, Homo sapiens
tttgcacgagaacatggactcatcttcatggaaacgtctgctaagactgcttccaatgtagaagaggagacccccttcccacagaaagccgactcatg

SEQ ID NO: 351697 - DNA, 75 bp, Homo sapiens
gaaaaatattccacgcatcacgactctcaaaaggatttggaaaatgatccatcagtaaattctcaggcgcaggag

SEQ ID NO: 351698 - DNA, 145 bp, Homo sapiens
gaaacttccccattcggtgcaccaagagcagcctcacatggtgtgggccgacatcaagagctgcgagatccaacagagagacaagagagacacctccaacttcgacaaagagttcaccagacagcctgtggaactgacccccact

SEQ ID NO: 351699 - DNA, 97 bp, Homo sapiens
gcggcccctgtaggccaaggcgccaggcaggacgacagcagcagcagcgcgtctccttcaggtctccatcacttttgacccgtttctttatctgccg

SEQ ID NO: 351700 - DNA, 90 bp, Homo sapiens
attcaagtccacatccccagaaacgaggataatgcttggcacaaggatgtgtactctggcacacccaccaaggtgagacacatggacagt

SEQ ID NO: 351701 - DNA, 82 bp, Homo sapiens
catgatgctgccatctttccaggaggctttggagcggctaaaaacctaaagaagcttccggttctgaggtcctggaggtgcc

SEQ ID NO: 351702 - DNA, 89 bp, Homo sapiens
acaggtgaatttaaaggagcagccctggtgtcacctatcagtaaaaggttgtttacattcagagctctatcaataagaggaatacatat

SEQ ID NO: 351703 - DNA, 96 bp, Homo sapiens
ggcctgggaggtgcgtcagatccgagctcgccatccagtttcctctccactagtccccccagttggagatctggtaatcctggccggccgggtctc

SEQ ID NO: 351704 - DNA, 74 bp, Homo sapiens
catggggggaccatatggtggaggcagaggagatatggaacagaatgactctgacaaccgtagaataattcgct

SEQ ID NO: 351705 - DNA, 100 bp, Homo sapiens
aaagactactgcatcctctacaacccgcagtgggcccatcttccgcacgacctcagcaaggcagacctgaaggagaagaaggagaaggtggaggagaagg

SEQ ID NO: 351706 - DNA, 101 bp, Homo sapiens
ctgctcaccaacagatgaagacagatgcaccaacgagatcttggcatatacagaagggctgcatggaaaatggctgttcacagagatacgatcaatctttt

SEQ ID NO: 351707 - DNA, 74 bp, Homo sapiens
gtgtttggaatgacgacagtatgactaagaaaaatggctttgtcagcccaacagatacccagatggtttaactc

SEQ ID NO: 351708 - DNA, 83 bp, Homo sapiens
cctcaacaaacaccagcgctttggagctcaggccccggggcctccagcggcaccagcggagaccacggtgagctcgtcgtccg

SEQ ID NO: 351709 - DNA, 83 bp, Homo sapiens
caagatattaaagttactgctgttaaaaagggatgaattcatttaaccccatgtccttggggaacgtccagttgccacaagca

SEQ ID NO: 351710 - DNA, 80 bp, Homo sapiens
agccagggactgggcatccacccggccaggttcccaggaagatgaaaaacacagactcttgagccaagttgtacgacctc

SEQ ID NO: 351711 - DNA, 101 bp, Homo sapiens
aagtgtctttggttataaattatgatctacctaccaatcgtgaaaactatattcacagcctactttggggataaaggattatttggtcttctggatttgga

SEQ ID NO: 351712 - DNA, 100 bp, Homo sapiens
ggggttgctacgcctggccattcggcttctccggagagaagagatcagtgctcagggaaatgtttcaacgtgcgcaagcgttgcggcggcgggcagagga

SEQ ID NO: 351713 - DNA, 82 bp, Homo sapiens
aactcattttatctgccacgacccagaagattatacactaagcctaacttctggttcctaggtaagtcagtaatgttgtatg

SEQ ID NO: 351714 - DNA, 100 bp, Homo sapiens
caactctgtaggaggaagctatctagagctggccaacacactatctgctctatgcaagcacttagacaacctatgggaagaacaccgtggcagcgtggtc

SEQ ID NO: 351715 - DNA, 100 bp, Homo sapiens
cagattctgttgcgaaggcagccatctttagttcgtctttcctagagaggccaggagtggtggctcacacctgtaatcccagctctgggaggccaaggcc

SEQ ID NO: 351716 - DNA, 75 bp, Homo sapiens
cagtccccagtgagggtgtacaaatacccctttgaattaattatggctatcatgagcgtcttgttgttcatcgag

SEQ ID NO: 351717 - DNA, 98 bp, Homo sapiens
atgtggagcgcttctttaagggctacgggaagatcctggaggtggatctgaagaacgggcatggaagaggagatggttcgtgttacgcagtggccgtt

SEQ ID NO: 351718 - DNA, 83 bp, Homo sapiens
aagatggtgccgggggtcgctggctctgctgctgccgccggcgaaggaggaggcgttgccggcaaacggggattcagcgtccg

SEQ ID NO: 351719 - DNA, 83 bp, Homo sapiens
ctcctcccagtgacgggtctggagtgcgtgggggaccggctgttggcggtgaagatagtgatccggggagacaggaacacggg

SEQ ID NO: 351720 - DNA, 101 bp, Homo sapiens
cttagatcttgtggccaagagttcagaccgtggcgaagtggagagtgacatgcagttggatggcggtgactgcgtggaaggaggagaatcagaaggtcgcc

SEQ ID NO: 351721 - DNA, 50 bp, Homo sapiens
aaataaaagagcagtagatttccaggaacatgacatcgatacaagtgaaa

SEQ ID NO: 351722 - DNA, 100 bp, Homo sapiens
cctgctccttctacatctgcagataaagtggagaggttcttgcacgcattgcaaatgccacgaggccaactattcatctgtgtgagattgtgaacgaacc

SEQ ID NO: 351723 - DNA, 89 bp, Homo sapiens
atgggggcacaggtgaggctgccgcccggagagccctgccgagaaggatggccgagcctcgatttaacaacccctacttctggccccct

SEQ ID NO: 351724 - DNA, 83 bp, Homo sapiens
gattcctttcttggcaactggaggtcaaggcgaatatttaacttatatctgcctgtcaggcgcacgctctccgcccggggcag

SEQ ID NO: 351725 - DNA, 73 bp, Homo sapiens
tgactgcgcacttggaatagtagcaggcggcggcggcggaacgccaggcagatagtcgtgcaagcactgcagt

SEQ ID NO: 351726 - DNA, 73 bp, Homo sapiens
agtacagacagctcaggctgcccagatggtggctcccggagtccaggaagtcctgacggccacgctggatctg

SEQ ID NO: 351727 - DNA, 96 bp, Homo sapiens
ttcctggtgtgggtcaacgaggaggaccacctgcgggtcatctccatgcagaaggggggcaacatgaaggaggtagcggaattggtactggtccag

SEQ ID NO: 351728 - DNA, 129 bp, Homo sapiens
ggaggatggaagggcaggacgaggtgtcggcgcgggagcagcacttccacagccaagtgcgggagtccacgaatcccaggttcccaggcaacctgcagatgagtgaccgccagctggacgaggctggag

SEQ ID NO: 351729 - DNA, 74 bp, Homo sapiens
ggagttggctgaaggacttggggagcccagaagctgccaccgaaccaagtacgaggatgtcgtccaggaaagat

SEQ ID NO: 351730 - DNA, 83 bp, Homo sapiens
cagtccacccaccgccgccgcctcccagggaaccttctgaccagcctcatgggctcctcagagcaggaggatggggaggagag

SEQ ID NO: 351731 - DNA, 80 bp, Homo sapiens
atgtgccctctatgaggagttttggattaaggaactgtggctgcaccatctgtcttcatcttcccgccatctgatgagca

SEQ ID NO: 351732 - DNA, 75 bp, Homo sapiens
gcttcagccatcacgaggatgatttcggaacctggagaaaatcatggccgaaacagaagccctgtcgaagcttcg

SEQ ID NO: 351733 - DNA, 100 bp, Homo sapiens
gaaagacgaggaaagaggaggaaaacaaaagctgctacttatggaagatacaaagggctatcaaaaggagatgtgagagagggtattgagtctggcctga

SEQ ID NO: 351734 - DNA, 101 bp, Homo sapiens
ccccccgccgctgatcgaggagccagccttcaatgtgtcctacaccaggcagcccccaaatcccggcccagcagcctgggcaacctgaggcggcatcagcg

SEQ ID NO: 351735 - DNA, 100 bp, Homo sapiens
gaccaaatgagcaatgcggatagctcccaggagccaaccccgagagcttcggcctctacttcgtgctgggcgtctgcttcggcctgctgctcaccctctg

SEQ ID NO: 351736 - DNA, 95 bp, Homo sapiens
ttcaagcaacaggattccctcagtatgtgcagctttttgaagattaattgggaatcttggctactggaggattctagtcgagctgaattgcctgt

SEQ ID NO: 351737 - DNA, 101 bp, Homo sapiens
tcctttggtctttccagaattagaccagcagctacaggatcttcagggaatgtttcaggtggaggaaggggctcttggtcaatgagcctgaagactgcatg

SEQ ID NO: 351738 - DNA, 101 bp, Homo sapiens
agaaggtgctttgaaacctgcatttgattaagcaagaattcgcttgcaagttaagggacctagatgtgaaggctggtggaggctgtgtaatgaccattgga

SEQ ID NO: 351739 - DNA, 75 bp, Homo sapiens
gggaggaaggaacgaggcaaggagctaaagcagcgtgcgttcagccctgggaaaatgaaactgaagccgtggtca

SEQ ID NO: 351740 - DNA, 75 bp, Homo sapiens
ctggatttccgtagtattgatgataacaacgaacttgatgcaagtgataggtttgccaaggtcagacctctcatc

SEQ ID NO: 351741 - DNA, 51 bp, Homo sapiens
ggtgaggcggcgacgggctccggtcagaatctggagatgtgagtagaaaca

SEQ ID NO: 351742 - DNA, 82 bp, Homo sapiens
cggggagatcagcatttgcatggaacacatgggagtgcatccgccccaacccttttccccctcgtctcctgtgagaattccc

SEQ ID NO: 351743 - DNA, 82 bp, Homo sapiens
ccctggactccctggagaagcagatggaaaagcccagagcctgaccacctgcgaggtctgcggtgcctgctttgagacccga

SEQ ID NO: 351744 - DNA, 100 bp, Homo sapiens
atggctggacacagcctagccagctcccacagaaactccagtgctggagaatctggtaaaagcaccattgtgaagcagatgaggatcctgcatgttaatg

SEQ ID NO: 351745 - DNA, 74 bp, Homo sapiens
gatgctgcagccatggagagcaacgtgaaagtgcagaggtgaatcagtggctaacctggttagaaactgctgaa

SEQ ID NO: 351746 - DNA, 49 bp, Homo sapiens
cgagaaccgtcagtttgagccagatgatggagttttaacattgaatgcg

SEQ ID NO: 351747 - DNA, 82 bp, Homo sapiens
ataggatgtgggaacttcggagagctcagattaggagtggttaatgtgttgctaacaactccactctgggtggtaaacacca

SEQ ID NO: 351748 - DNA, 75 bp, Homo sapiens
ctcagcactatcccaagactgctggcaacagggagaatgtgctacgaaacctagcggataaggcctttgaccggc

SEQ ID NO: 351749 - DNA, 100 bp, Homo sapiens
ttcagaattgcccactgttggcaaagaaagaatgtcactaatttatttacagtgtttaagaccactctgtggaggttaatttctgggaccttagggataa

SEQ ID NO: 351750 - DNA, 98 bp, Homo sapiens
cgtagctgaatccagtaccaaaaacgtcaacaacagttttacggcgcggatcaagaagatcatgcagacggacgaagagattgggaaggtggcggcgg

SEQ ID NO: 351751 - DNA, 90 bp, Homo sapiens
ttctcaccgaggaagagcgggagaaaggggcaagaatatcacggcatgggcatgagtagcttgaaactgctgaagtatgtcctgtttttc

SEQ ID NO: 351752 - DNA, 96 bp, Homo sapiens
cttcctggagcggctggaagcgcggggcggccgggagggggcagtcctcgccggcgagttcagctgttctaagaacggaagcatctgggctggatg

SEQ ID NO: 351753 - DNA, 75 bp, Homo sapiens
ctcaggcagacctggtgtctccagctgatgatttgtccctgtctgaaggtctctaattaacagaagatggcaaag

SEQ ID NO: 351754 - DNA, 90 bp, Homo sapiens
tcccatcgcaaacccaaagatccccgttcctggagattctgattgagggcttggtgatgtttgaggatgtgacggtatatttctccaggg

SEQ ID NO: 351755 - DNA, 88 bp, Homo sapiens
tcactccctttcctctgctgccgctcggtcacgcttggagcctcctcaacaagcccaagagtgagatgaccccagaggagctgcagaa

SEQ ID NO: 351756 - DNA, 101 bp, Homo sapiens
tccctgctgtgcacctgggggtacaggtctaccctgaactgcagatcaccaatgtggtagaagccaaccaaccagtgaccatccagaactggtgcaagcgg

SEQ ID NO: 351757 - DNA, 82 bp, Homo sapiens
aacggggctgctggtgggccgcgtcgaagacatggaccagggctacggaggtcttgaggaccggcccagctcaggctcctgg

SEQ ID NO: 351758 - DNA, 100 bp, Homo sapiens
ctgcagtcggtgaccgcgcgactcggcgcccgcccgcgttttctgagtttaaccagtaatgccattcagttgccaatctcaagcaaagcaaacataagcc

SEQ ID NO: 351759 - DNA, 75 bp, Homo sapiens
agatgctcccttctgctcctggaactgtggctgcaccatctgtcttcatcttcccgccatctgatgagcagttga

SEQ ID NO: 351760 - DNA, 121 bp, Homo sapiens
ctgcagcagcccgtctcgtgggcgccgcagcctcccggggccctacggccgcccgccaccaggtatgaaatctaaggatgccccctctctggagctgcctgcctgtgtttgaatcctgaag

SEQ ID NO: 351761 - DNA, 97 bp, Homo sapiens
ctgagctacatggccccctggtttagggaggatttgggaatggatgatgaaggagatgatgacccagttcctctaccaaatgtgaatgcagcaatat

SEQ ID NO: 351762 - DNA, 99 bp, Homo sapiens
cttcatcctcacctgtacgcttggctatgtgacgctgctggaggaaacacctcaggacacggcctacaacaccaagagtaacggcacagccaacaagat

SEQ ID NO: 351763 - DNA, 100 bp, Homo sapiens
ggaagctgacgggactgccaggagacgagtccccggttgtcatggtgaaaggtgtagcagtcactcggcctacacccacagcatcgaccttgtgaaccca

SEQ ID NO: 351764 - DNA, 75 bp, Homo sapiens
gaagaactgagatcttgtagattcaggtggaagttaaacgagctgagcctcgggacagcaagagccaagcgccgg

SEQ ID NO: 351765 - DNA, 98 bp, Homo sapiens
aagccttcattcctcagtaatgaagaattcacccagctgatgttggagcgggtccatatggaatatttgctggtagggatgcctccagaggactggcc

SEQ ID NO: 351766 - DNA, 100 bp, Homo sapiens
gcgccggcgtcactctggatgaggccagggaaatgttcaggctggagactatgtgctaatccatgcaggactgagtggtgtgggcacagctgctatccaa

SEQ ID NO: 351767 - DNA, 51 bp, Homo sapiens
ggaatctgtctcctgatcatcattcaggttgtttctcccaaagaagagaac

SEQ ID NO: 351768 - DNA, 100 bp, Homo sapiens
agtgtcctgtttcccagaggaacagttcatttcaacagccagggagaaagcctggatgctcaaggttacttcctcagaatgttggcctcctgtatgttgg

SEQ ID NO: 351769 - DNA, 105 bp, Homo sapiens
gtccctgaagagggaagacacgcggaaacaggtgtggggatattcagctttgccaggtatggcagtgatttttatagcatgcactataaaggcaaagtgaagaag

SEQ ID NO: 351770 - DNA, 75 bp, Homo sapiens
gatgaaaaagaaaagactaccgcactgaaagccatacacactgctgctatggatatgctgggaggacctggtatc

SEQ ID NO: 351771 - DNA, 74 bp, Homo sapiens
ccgctgtgtaggcacctgagttaacggacgctaagcggggtaggggaaggaaataatgcaaaaggtgtcccaag

SEQ ID NO: 351772 - DNA, 82 bp, Homo sapiens
gaggagcgcgtcgtgcgcctgggggtgcgcgcctgcgacctgcccgcctggcaaatggagctgctcctggtgaacaagctca

SEQ ID NO: 351773 - DNA, 50 bp, Homo sapiens
ctgttcttcctgggggactggcagttacatcatgctgatgacagcttcct

SEQ ID NO: 351774 - DNA, 112 bp, Homo sapiens
tgagatcttcagcctccaggctctccagtttttcgtcgagagattcactatggaatcgtgaagtacatgcgagaagccacgccctatgtgaagaaaggatccccagtatccg

SEQ ID NO: 351775 - DNA, 98 bp, Homo sapiens
tctacctgcctacccgcgagtacccgtctgaacagaatccagggcagcgacgccggctggactttgggctacatgctgaacctgaccaacatgatccc

SEQ ID NO: 351776 - DNA, 82 bp, Homo sapiens
tttcgccacagttcctaccttatgagctcggttttcttatgcttataagagtggaacagccccctcggaaaaccacactgag

SEQ ID NO: 351777 - DNA, 100 bp, Homo sapiens
ctggcagctcgtgcaattgttgccattgaaaaccctgctgatgtcagtgttatatcctccaggaatactggccagagctccaagagtcaggatcgcaagt

SEQ ID NO: 351778 - DNA, 78 bp, Homo sapiens
ccacggccatttccttgatgcgcaagttcattgcctaccagttcacagacacgctgctggagccagttctgcttctcg

SEQ ID NO: 351779 - DNA, 82 bp, Homo sapiens
ttattttccttccgatgttcacgttcacagcagggaatacaggaattccaggcttggactggagtgaagccctcaagatcca

SEQ ID NO: 351780 - DNA, 75 bp, Homo sapiens
gcggaaggaggtgacggaggaggaggctgagaggtttcagaggagcgtgctcgacctttctctccagtggagatt

SEQ ID NO: 351781 - DNA, 75 bp, Homo sapiens
gcagaaaccccgttgacaaggcactgctttttcatgacgcatatggaaaagaaggtgtgaaaatgaacttcatag

SEQ ID NO: 351782 - DNA, 50 bp, Homo sapiens
tgctgtcctggccacccccaggaaccgaatttgaaagacatattggctga

SEQ ID NO: 351783 - DNA, 82 bp, Homo sapiens
aaaaggctccttcagtgagcaaggcatcaacgagtttctcaggagccttcacgtaaatgggtccagtcatgcctcccagtaa

SEQ ID NO: 351784 - DNA, 100 bp, Homo sapiens
ttcagaaggagcaggattaccaaagggcagctgagtatgtcccagagaaggtgaagaaagcggaaaagaaattagaagagaatccatatgaccttgatgc

SEQ ID NO: 351785 - DNA, 83 bp, Homo sapiens
cgcggggtgagcgtcgaggaggcgcaggagactgaccgcaacggcaggatcatggaagggaagtggttgctgtgtatgttact

SEQ ID NO: 351786 - DNA, 51 bp, Homo sapiens
gaaaaggccagtgttgtccctactgcatagctgagtcagtgctgattctct

SEQ ID NO: 351787 - DNA, 149 bp, Homo sapiens
gccgcggagagcgggagctggtgccgagcagcggcgccaggagcccgtgcgcggcccgggcagccgcgctttcccagcttgttgattggtgctggctgtgccctctaccccttgggctgggacagtgaggaagtccggcagacttgtgg

SEQ ID NO: 351788 - DNA, 100 bp, Homo sapiens
ccatggcggcggccgcgctaaggttccccgttcagttctgaagttgttgataagaagatagaagagtttctttctagctttgaggagaagattgagaacc

SEQ ID NO: 351789 - DNA, 97 bp, Homo sapiens
ccacagaatgctaagaaagctaggcttctaccagaaggggaggagacgttggaatcaggacatccccttgaatttttacggaatcagcctcagtttc

SEQ ID NO: 351790 - DNA, 100 bp, Homo sapiens
tgccagccagaagaggcgttcgctgcgcgtgcacattccgtagagacgggatttcaccatgttggtcaggccagtcccgaactcctgacctcaaatgatc

SEQ ID NO: 351791 - DNA, 142 bp, Homo sapiens
caagtttcacatccttgtctgtgaagctaaactcaatgctgctgtgtgggaagaagatttgtaaagaaaactcttaggcatagaatgtcaagctaaccaggcgtccgctacttcagaagagtgtactgtcgcatggggagtc

SEQ ID NO: 351792 - DNA, 75 bp, Homo sapiens
gttttgtcatggaatatgttggagagaggaggaagatgactatctctttgatgatcctctgccaatacctttaag

SEQ ID NO: 351793 - DNA, 90 bp, Homo sapiens
cctcccaggtagctgggattacagactgacatcaatttgccctatcttacaatggattcttctggacccaagcatttgaatatgaagttg

SEQ ID NO: 351794 - DNA, 90 bp, Homo sapiens
cggcaaaatggcggaccgcttctcccgcttcaacgaagaccgagactttcagctccagaacctgggtatcaacccagcaaacattggctt

SEQ ID NO: 351795 - DNA, 100 bp, Homo sapiens
agcaggacatcttgaccatcttcaagcgcctccgctcggtgcccactaacaagagatgccctgtatccaagcccaatatgggacaccagcaccgagtccg

SEQ ID NO: 351796 - DNA, 74 bp, Homo sapiens
aagaagctaactattggaaagatctggcgatgacctacaaacagaggaactaagcgtcttgtagaaggaactat

SEQ ID NO: 351797 - DNA, 50 bp, Homo sapiens
aagcaccactgcacaatttaacttacggtcttaaagaaagtgcagaagag

SEQ ID NO: 351798 - DNA, 74 bp, Homo sapiens
ggattcacccacagcggggcggcggcggcggcggctgcggcccaatatagatacatcgagatatttccaagcag

SEQ ID NO: 351799 - DNA, 100 bp, Homo sapiens
ctggtagcggcgctgttgctgggctcggcgtgctgcggaatgaatctgaagtctgctgcagtaaaacacagaaggctttaaaatgttttcttgcataaaa

SEQ ID NO: 351800 - DNA, 76 bp, Homo sapiens
tgaccggccccgcttcaccgagctggtgtgcagcctcagtgcatcgtccatgccaaagtgtgcggcccttcctgac

SEQ ID NO: 351801 - DNA, 96 bp, Homo sapiens
gggaccggcggcgctggaggagcgaggcagctgtactaggactgggaacgggtgttgacagctcttctaccacaagcagtgcttctccaatgccca

SEQ ID NO: 351802 - DNA, 100 bp, Homo sapiens
ggaggagagacccctggatctgagcaatggaaatttcaggaattaagtcaaccacgttctcataccagcctgaagagtaccaagttcgatccatagcaag

SEQ ID NO: 351803 - DNA, 80 bp, Homo sapiens
agaggacctcagaaaggagctctatgaactttgggaagttattctggtacaagttaacccaggagaagcatttacaataa

SEQ ID NO: 351804 - DNA, 109 bp, Homo sapiens
ggtgctgggcgacctgcaggcagcaccggaggcccaggtctccgtgcagcccaacttccagcaggacaaggaccatcagcacgtgcccatcgacatccagaccagcaag

SEQ ID NO: 351805 - DNA, 51 bp, Homo sapiens
gacttgactcttcaaacacaaaggtgtccctggccagtgtccttccacctg

SEQ ID NO: 351806 - DNA, 100 bp, Homo sapiens
atctggttatagatggacaagagacgatcattctgcaagcaggcaacctgaatacagggctactacaaagttctgggaaagggaaagctcccaaagcagc

SEQ ID NO: 351807 - DNA, 100 bp, Homo sapiens
gctgacttgataagaggcgcaaaagaaaagaatctcaaagtgaaaggaccagttcgaatgcctaccaaggggacagtgggatctattttggaccgaaaag

SEQ ID NO: 351808 - DNA, 58 bp, Homo sapiens
ggagaccccagggcagaggccagcatgaaggcttgactattgacctgaagaattttag

SEQ ID NO: 351809 - DNA, 83 bp, Homo sapiens
gaagtgcagctgcctcagttcttagcgcagagtctgccccaaattctccaagaattggaagcccattgagcccaaagaaaaac

SEQ ID NO: 351810 - DNA, 101 bp, Homo sapiens
tgaatcatttgacaaactgctttcccatagagggtgttgaaagcagcaggggcctagaagacattaaaccgataccacagaaatacaaaggatcattagag

SEQ ID NO: 351811 - DNA, 74 bp, Homo sapiens
aaagttccacatggtagatggcaacgtctctggggaatttactgatctggttcaaaccttgtactactcagctg

SEQ ID NO: 351812 - DNA, 101 bp, Homo sapiens
gggagcggcgctgcctgtggagatccgcggaggccgacaggattcgttggctgccgtccccgctgctgtgcattgggtactccaaagattcaggtttactc

SEQ ID NO: 351813 - DNA, 50 bp, Homo sapiens
caggcgacagcgacctgcggcagggagtgcatccgccccaacccttttcc

SEQ ID NO: 351814 - DNA, 75 bp, Homo sapiens
gaggcttccgcttcatcagtgagcagtctgcgctcctcagaccaccggcaggtgaacagcctgatgcagaccgag

SEQ ID NO: 351815 - DNA, 82 bp, Homo sapiens
ctccagtggagagctcatgttcctgatgaaatggttattggagtgatgagtaaagaatacataccaaagggcacacgttttg

SEQ ID NO: 351816 - DNA, 76 bp, Homo sapiens
agacttgaaagtcttgtgtaatgaagcagacttttggaacagcgatcgtaatcaatcctgagaaagacaaagacat

SEQ ID NO: 351817 - DNA, 100 bp, Homo sapiens
gtgaagtagatgataaagatgatgatatccttctcaaccttgtgggatgtgaaaactctgttactgaagctgtcggaaaaggtaacagaagatggaactc

SEQ ID NO: 351818 - DNA, 83 bp, Homo sapiens
cggctctgctcggtcctcaaagactaatagggatgccaaaggaaaaatatgatcctccagatcctcgcagaatttataccatc

SEQ ID NO: 351819 - DNA, 99 bp, Homo sapiens
tcgactttggagaaaccaccgtgctggaccgcttttacaatgcaggtgtggatgaggtcaccattgtcaacattttgaccaaccgcagcaatgcacaga

SEQ ID NO: 351820 - DNA, 100 bp, Homo sapiens
gcgtctcctctgccaaaacccagggctggaagatgtggcagccggccacggagcgcctgcagatgcaaccttaaaatcagtgacaagaaacattccaaac

SEQ ID NO: 351821 - DNA, 75 bp, Homo sapiens
gaaaagtcttatgatttcctcacaggcggcgactggcggcgcgatggacctgaccgggctcctgctggacgaaga

SEQ ID NO: 351822 - DNA, 75 bp, Homo sapiens
agaaaagttgtcagtccttactgttcaggacgttggtcaggtgatgcctggaggatgaagcctgctgggagcgtg

SEQ ID NO: 351823 - DNA, 74 bp, Homo sapiens
ggcagcgcgcggtcgacgcgggcctgagctccctccaggactcgctcagcagcagcctgaaaacttgctacaag

SEQ ID NO: 351824 - DNA, 90 bp, Homo sapiens
gtgggtgaaggcatccccctgtatgagagtgctgtgaccaggcctcacacagcggttcagcgaggaagaatgcctccaacccagcccaat

SEQ ID NO: 351825 - DNA, 50 bp, Homo sapiens
caaggaactggtgctgcagcgagaggcccgccatgttcatagaggataaa

SEQ ID NO: 351826 - DNA, 75 bp, Homo sapiens
gaagaggagcgcgtccccggggaaatgaggtggattctccacagttttcctcgtgcgtactcacggtggaatccg

SEQ ID NO: 351827 - DNA, 75 bp, Homo sapiens
ttttggtcgcaccaccactccacagcagaccaagcctctcttctgtggaaactctgaagccgaccagttgggcaa

SEQ ID NO: 351828 - DNA, 55 bp, Homo sapiens
ccagggagtagagacgaccgactggaggtttgcatcgccagcttctatatattac

SEQ ID NO: 351829 - DNA, 75 bp, Homo sapiens
tgacgcggccgactacaatcccgagaaccaccgggaggaactgggccattctaacacccgttgctaccatgctgg

SEQ ID NO: 351830 - DNA, 100 bp, Homo sapiens
cctgctcttacttgtcctgctcctgctgctcgaggacgctggagcccagcaagaagcatcagatggtgaaggagaaggagacacagaagtgatgcagcag

SEQ ID NO: 351831 - DNA, 80 bp, Homo sapiens
aagaccttgtaccaggaggtgatgatggagaactatgacaacttagtctcattggtggctgacaagattttgaaaaagaa

SEQ ID NO: 351832 - DNA, 75 bp, Homo sapiens
agcgccgtaagcgaggcctccttctcctacaagctcacaggtgcagtgcggtcttcagcgcgcttgaaagcacga

SEQ ID NO: 351833 - DNA, 100 bp, Homo sapiens
aaataaattcttttgaactagatcgagctgatagagaccctagtaacatggcatgcacacgatcgcagcccagctgctgggctctggagccgccatcaat

SEQ ID NO: 351834 - DNA, 90 bp, Homo sapiens
gccatcacagacaccgcctacaggagtatgatgcaagctttcaccaacaatcaccagtggtttacacaacattgcaaggagcattgaaac

SEQ ID NO: 351835 - DNA, 100 bp, Homo sapiens
acttatggcagtggtttctggcctacagagtgccccaattttcaggttgactaaaacatgggcgctcatctctggtatcacgaattcttcaggaggcttg

SEQ ID NO: 351836 - DNA, 75 bp, Homo sapiens
tgtggatcccaaagggcgagccgttatgattagaagcccctccgcttggccagaatggagcagccgaagggagtt

SEQ ID NO: 351837 - DNA, 100 bp, Homo sapiens
ctgagggagagccggatcctttcccagaagaatgagaatgaggcccagaagaatctgtatctgcatcaacaccagcagagctcaaataaatcctgatgca

SEQ ID NO: 351838 - DNA, 100 bp, Homo sapiens
atccgcatgaaggagctggagcggcagcagaaggagcctcctgacaaggtgatccgggcgggccccgcaggaattttatcccctcaccggcctcacacta

SEQ ID NO: 351839 - DNA, 82 bp, Homo sapiens
cggctcctgctcaagatctcagagaaggaggaggtgaccacgcgcgagggctgggttacgacccctacaaccctgagctgcc

SEQ ID NO: 351840 - DNA, 90 bp, Homo sapiens
gcacctgggggaccgcttgcagcggggacgcgaggacccgggctgggctttcctcacccggctttaccgatttgttacaactcaagcaag

SEQ ID NO: 351841 - DNA, 74 bp, Homo sapiens
ctggagggggcagtcccgggagaacctgcggcggccggagcggacttgggaccctggaggactgacgctgctgg

SEQ ID NO: 351842 - DNA, 100 bp, Homo sapiens
gggtcggccggggccgcttcaccacttacgaaatcagggtcaagatgaataatacggcagctagtccaatgtctactgcaacttcaagtagtggaaggag

SEQ ID NO: 351843 - DNA, 82 bp, Homo sapiens
ggaatatgccaaggaaaaactggagagcttcatcaaaaatagtgatagctttgataatatgtgccaagagttgtaacctctg

SEQ ID NO: 351844 - DNA, 74 bp, Homo sapiens
aggatagtatcttggccagggaactcaaacagcagatgcagccaatccgggggacccaggacatgccccagcta

SEQ ID NO: 351845 - DNA, 75 bp, Homo sapiens
ccttgtaatgcgactagcaaccaaggaacaagagatgcaagagtgtactgaccaaactcttacccaggatctact

SEQ ID NO: 351846 - DNA, 75 bp, Homo sapiens
cggcctgtgtggtggactgtggcacggggttgctgaaaagccaggagtcaaaatgactgagcgctttgactgcca

SEQ ID NO: 351847 - DNA, 75 bp, Homo sapiens
gaaatcgccaatgccaactcccaacagtccacaggaagaggttgaactaaagaagttgaaacatttggagaagtc

SEQ ID NO: 351848 - DNA, 100 bp, Homo sapiens
tgactgaatctgatacagcttcagttaatgaaaatgggctaggagcagcatggacctgtcagcaactaaggaacaaaagtaatgaagatttacacaaact

SEQ ID NO: 351849 - DNA, 100 bp, Homo sapiens
agtcccgtattctcagagtaaaagttgtttctggaattgatctcgccaaaaaggacatctttggagccagggcgtgattgactacattttctattccaag

SEQ ID NO: 351850 - DNA, 75 bp, Homo sapiens
gaagaagaagttgcgaaggatccccaacggggaggccaacgtgaagaaagacaagaggagcagcagcggcaccgc

SEQ ID NO: 351851 - DNA, 82 bp, Homo sapiens
gctgaatccagtaccaaaaacgtcaacaacagttttacggtatgatcagcaacttgcttgggaaaggagccgtggaccagct

SEQ ID NO: 351852 - DNA, 88 bp, Homo sapiens
cgactccaagcgcgaaaaccccggatggtgaggagcaggccactgagaatgcaaaggaggaagtgaggcgaattctggggctgctgga

SEQ ID NO: 351853 - DNA, 98 bp, Homo sapiens
ttcagcggtactggtgtataatagagcttttcatcctactataaaggaggatttgaacagaaaatgagtaggcgagaagctggtcttattttaggtgt

SEQ ID NO: 351854 - DNA, 75 bp, Homo sapiens
atgctgaagagcagaatcagcatgaggagcagacaccccaggagagatggagtttcgctcttgtcgcccaggctg

SEQ ID NO: 351855 - DNA, 50 bp, Homo sapiens
gtatcaagtaatggtgcaaagcctgaatggacgtgatgctgaatccaggc

SEQ ID NO: 351856 - DNA, 82 bp, Homo sapiens
ggaaagtctaagggatatggctttgtctcctttttcaacaaatgggttggatggcaagcatgtggtgtttggcaaagtgaaa

SEQ ID NO: 351857 - DNA, 75 bp, Homo sapiens
attctgacgcccaatgggaatgaagacaccacagctggcatccccaatggattggacaattgccctaaagtcccc

SEQ ID NO: 351858 - DNA, 83 bp, Homo sapiens
cccggcgccaagccgccgtcatcttcttcctgtgccagggtatttgaagtataccatacaactgttttgaaaatccagcgtgg

SEQ ID NO: 351859 - DNA, 73 bp, Homo sapiens
tttgtctgaggacttctctggtccacaaaatgcttcatctcttgaaaagtgtttaagcttctaaaatgtcatc

SEQ ID NO: 351860 - DNA, 100 bp, Homo sapiens
aatactggaagcaccactggttccatagtgtgtggttacaatggttggtctgatttacccatatgttatgggggacttgatctcatcttcatgccaggcc

SEQ ID NO: 351861 - DNA, 75 bp, Homo sapiens
ccttcttgactcacccagcaaaaccatgtctattaaagaaaggcactcaaggagttgcccctggtcctgtaattg

SEQ ID NO: 351862 - DNA, 75 bp, Homo sapiens
gggtagatgtcgttctgaaacgcagacttaattcagtgcacaaatgagatgaatgtgaacatcccacagttggca

SEQ ID NO: 351863 - DNA, 75 bp, Homo sapiens
cccggcaccccccgccgacaaggagggtcaccctgctgattgccttcatctgtgtgcggagctccctgtggacca

SEQ ID NO: 351864 - DNA, 95 bp, Homo sapiens
gtacggcaaaggcaagagtaacagcagcgccgtcccgtccgacagccaggcccgggagaaatgaggacggggacttggttgccttttccagtgac

SEQ ID NO: 351865 - DNA, 79 bp, Homo sapiens
tctcatcaagtatggacatttaagagtgaatcagaccttcaactggaatacaagaaaggcagactacaagttactgagc

SEQ ID NO: 351866 - DNA, 49 bp, Homo sapiens
ctgcctgagcctctcggattacagatttgtttagtgaatgaccctaggc

SEQ ID NO: 351867 - DNA, 100 bp, Homo sapiens
ttccattttccattattatgtggactaccggagcgacagcgcagtccaagaccttgcagaggccacaagaggaagctgaatgaagaggacgccgccagcg

SEQ ID NO: 351868 - DNA, 100 bp, Homo sapiens
caggccattagatccaaagccattcccaaattatagagctaattacaactttcggggcatgtacaatcagaggtaatgtttgaaacttaccagttttccg

SEQ ID NO: 351869 - DNA, 100 bp, Homo sapiens
ttaaaagtccttgagtattttgcttttcatgatcttgctcactgcaacttccgcctcccaggttcaggtggttatcactaggctaaaactggacaaagac

SEQ ID NO: 351870 - DNA, 100 bp, Homo sapiens
caggaacagccaggaggcgtttattaggggggcggggggaaagagccccagcaccgcccctcctggaagaaggaagagcaatacgagaattggagaccca

SEQ ID NO: 351871 - DNA, 82 bp, Homo sapiens
gggagagcaagaccatcatgctgcgcggccttcccatcaccatcacagagagcgatgcattccttcacagaagatcactatg

SEQ ID NO: 351872 - DNA, 100 bp, Homo sapiens
tctatgtttgccagtggtttattttacaggccttagattttagtgatgatgaaaaagagaaggaagccaaacagaggaaaaaatctcagattcaaggccg

SEQ ID NO: 351873 - DNA, 98 bp, Homo sapiens
ttttagctatggcgactttgacttcctgccaaaatcctgttaccctagcaacaggagaatggtgttgaacgcgtgtgtcctgagagcctgctgcagtc

SEQ ID NO: 351874 - DNA, 75 bp, Homo sapiens
ggaagccggcatgctggagaagctggagttcgaggacgaagacccagacacttttgaaccccaaaaattcttcca

SEQ ID NO: 351875 - DNA, 82 bp, Homo sapiens
tacagttactcccggaccggcggcgtgaaagtcgtgatatcatcgttgaactgtttgctgtaatggcacaagagtatttgtg

SEQ ID NO: 351876 - DNA, 101 bp, Homo sapiens
tgactttctgaagctgagaaccatgctcataaagatcaactgaaatcggcaaacttctgagttcctacttgcaaaagaaaagtgacgtggaggatcactcg

SEQ ID NO: 351877 - DNA, 90 bp, Homo sapiens
cagaggggagagcggccgccgccgctgccgcttccaccacaggagaaaggatcctgggttatgctgaggagccctgctatctctggtttg

SEQ ID NO: 351878 - DNA, 75 bp, Homo sapiens
gagagactcaccagaggaaaatgtacaaagcaataagatggacctttctggagttcgttcccacatgcagggcag

SEQ ID NO: 351879 - DNA, 101 bp, Homo sapiens
gagcccccaggagaaaagccagtattgcttgtgctcctaacaacctgtctcttggttacaggaaatacaggaggcagaggaacaaataaaagacaccacga

SEQ ID NO: 351880 - DNA, 98 bp, Homo sapiens
tcgccgcggggcagttcgggccggctgtcctggcgcgctcattgctatggacagtgctatcaccctgtggcagttccttcttcagctcctgcagaagc

SEQ ID NO: 351881 - DNA, 48 bp, Homo sapiens
tctggttcagactgcagtaaccagagtctgctacaccatttttgattt

SEQ ID NO: 351882 - DNA, 82 bp, Homo sapiens
agacggctcacctgtgcgggatggaacaaaagggagtgcatccgccccaacccttttccccctcgtctcctgtgagaattcc

SEQ ID NO: 351883 - DNA, 74 bp, Homo sapiens
cggagctgtgtggtgtgtggacgctgactatatttgtcaggatacgaatcaggttctcttcaagtgctgccagg

SEQ ID NO: 351884 - DNA, 100 bp, Homo sapiens
gttttgataataggacttgtaggaaactgctggcttcgattgctgaggactacagggtggcaagtatacagagtgaacctggtcaacagaacctccttgt

SEQ ID NO: 351885 - DNA, 94 bp, Homo sapiens
ctgccagcgccgggggcatgctcacctacggcgtctacctggcaggttcaggagaagtggcacctggtggaggacctgtcgcgactgctgccgg

SEQ ID NO: 351886 - DNA, 82 bp, Homo sapiens
aagtggaggttcctacagagattcatatgagagttatgttcctgttcccgacatccggacgtgccacttctgcctcgtagaa

SEQ ID NO: 351887 - DNA, 75 bp, Homo sapiens
aaagagaatgatgaagagaaaggcccggagacttccacaagaatcggaatgtcagttaatgctattcgcaagcag

SEQ ID NO: 351888 - DNA, 100 bp, Homo sapiens
gtggtgcgggacgcaccctggaccgccagcagcagtgagaaggttcagcttgttggtttagatgaggagagttcagagtttatttgcagaaacacctttg

SEQ ID NO: 351889 - DNA, 83 bp, Homo sapiens
ctgagcagagctctccgggttccccggctcgcggggcccggcgaagggcaggtctcggcgcggaagatggccggcggcgtgga

SEQ ID NO: 351890 - DNA, 90 bp, Homo sapiens
aacctccttatgctgatatacatccaatgagggttatcaatactctggctgaccatcatcatcgtgggactgactttggtggaagtcctt

SEQ ID NO: 351891 - DNA, 100 bp, Homo sapiens
tagccgttcttcaggcacttgcatccacagtaaacaggattgttgatccatttcagatacttgtggcagcaaacaaagcagttcacctctacaaactggg

SEQ ID NO: 351892 - DNA, 90 bp, Homo sapiens
cgaggatgatgcggaaattaaccccaagatgatgactttgaccagtttgataagcctggcgcggaacggtcgtggagaagaagagctgct

SEQ ID NO: 351893 - DNA, 100 bp, Homo sapiens
cacacttagtggcaaatggctgtcaccaactcagctctaccgcaatggccagcgcttactggaaaagcaaaggttccagttcccaccttcctggctttat

SEQ ID NO: 351894 - DNA, 100 bp, Homo sapiens
ctggacacccaggctaactgcctcctctggtatatggacaacccccaggagattcacttgttacacttaaaagagccttagaagcaaaagaactagctcg

SEQ ID NO: 351895 - DNA, 83 bp, Homo sapiens
tcaggagactagacctcgtaattacattctctcggccagcgcctccgcggctgttagagagtgccatgagtggaaaatacctg

SEQ ID NO: 351896 - DNA, 97 bp, Homo sapiens
caccgggatcgtgaccgagaccgtgaccgagagcgtgaccgagagcgcgaatatcgtcatcgttagaaggaagaagccatggatttaataaatagag

SEQ ID NO: 351897 - DNA, 100 bp, Homo sapiens
aaaattggaaaagtgttgcccgttatgcatgagagtcaccatgctcaaagtgaatatattaaggcccctagcagtcttcttgatgctttggaacaacatt

SEQ ID NO: 351898 - DNA, 83 bp, Homo sapiens
ggaactgggaccaaggtcaccgtcctaggtactgaacgacacctgggtctccttcccttcctggtctgaggactccacgttcg

SEQ ID NO: 351899 - DNA, 80 bp, Homo sapiens
ggctgcgcgctgctcctcgccctcaagttcacctgcagatctctggaaacatggctacagaacatgttaatggaaatggt

SEQ ID NO: 351900 - DNA, 99 bp, Homo sapiens
gttaaggattccaagtaactcttatttgccatttccccaaaggaatgtcttgcatattactgacatttggtatgtttcattcattggaatatttcttat

SEQ ID NO: 351901 - DNA, 82 bp, Homo sapiens
ggcgagcgcgagcggcgcgagaaaaattggctgtgaaaggactgaggcagccatctgggggtagcgggcactcttatcagag

SEQ ID NO: 351902 - DNA, 100 bp, Homo sapiens
acgaggggctccgggtcttccagagcgtgaagatcaagatcggaactcgaatcatttatgacagaaagtttctgttggatcgtcgcaattctcccatggc

SEQ ID NO: 351903 - DNA, 80 bp, Homo sapiens
tatgtttgcagtacacaactcccagctgaaaggaacgaaataattgtctggccgactcgcgagctctgagtgccagccac

SEQ ID NO: 351904 - DNA, 100 bp, Homo sapiens
ttgggtgacatctgcctgagagatctccaagaattacagctgaggatcctgtggaggagaccatcgcagcccgcagtccaccgggatcagagcttcactt

SEQ ID NO: 351905 - DNA, 90 bp, Homo sapiens
caaggttgaagcagaagaataaggagaaggataagtcgaaggggaaggcgcctgaagaggacgaagaattactgggagatgtactcaaag

SEQ ID NO: 351906 - DNA, 74 bp, Homo sapiens
cttgaacagactagaaattgcaccacagatatatgggttagtcacaatggcttcagcctttcgcctttctttga

SEQ ID NO: 351907 - DNA, 50 bp, Homo sapiens
ttagctcagcaattcttaccttcattaaaacttccttttggcaaaacaac

SEQ ID NO: 351908 - DNA, 83 bp, Homo sapiens
gttcgggctcgcgagtctccgtctggggtagggcaggagatggtaacctgcacctcaatgtgacggcggaggccttcagcccc

SEQ ID NO: 351909 - DNA, 50 bp, Homo sapiens
gtgcctaacatggaatttagagtcttacctgcagtggtgaaaaacggaga

SEQ ID NO: 351910 - DNA, 74 bp, Homo sapiens
gagcgggggctgcaggctgagtatgagacgcaagtcaaagccgaggcctgcctggagccccagatcaccccttc

SEQ ID NO: 351911 - DNA, 83 bp, Homo sapiens
gtcggcttcaaagagaaaaggcaacatcctgtcacaggccatgctctggcaaaaacgtcccttaatatggactttgaaaatca

SEQ ID NO: 351912 - DNA, 75 bp, Homo sapiens
agaaactacagtcatcacaatggtctggatggtgaatgattccaattgtgaccaagaacttctttccctgctcct

SEQ ID NO: 351913 - DNA, 100 bp, Homo sapiens
ccaaaacccagggctggaagatgtggcagccggccacggagcgcctgcagagaaggagacctttctggatcctttcgtcctccgggacctcctgcctgca

SEQ ID NO: 351914 - DNA, 85 bp, Homo sapiens
tcgaaagattcttccaggcagagttgcagatttgtcttagacagatgtgccacccgtcggtgtagagagcgttgtccccacccac

SEQ ID NO: 351915 - DNA, 90 bp, Homo sapiens
gggaaatccatagctaagatgccaggaccccctgaaagcctagacatggtggcaaatggtaggatccaaagccttgaggccaccattgag

SEQ ID NO: 351916 - DNA, 75 bp, Homo sapiens
gcctcctccgaggtggcgcggcacctgtctccagagaatacagagggcaaagatggatccaaagtaactaaacag

SEQ ID NO: 351917 - DNA, 88 bp, Homo sapiens
gtatagctgcgaggctgggggccagcggctctccttccatctggatgtcaaaggcaaacgaatgcacgtgcagttgtccaccagccgg

SEQ ID NO: 351918 - DNA, 96 bp, Homo sapiens
aaaggagggactatggcatcaaacagcctcttcagcacagtgacaccatgtcagcaaaacttcttttgggaatgcctaccgcaggaatgggatggc

SEQ ID NO: 351919 - DNA, 100 bp, Homo sapiens
ggtccgcagtttcagcagagccgctgcagccatggccccaatcaagctttagcgtcacctccctcactgggcagcatgggggagaagtcagagaactgtg

SEQ ID NO: 351920 - DNA, 100 bp, Homo sapiens
caagaagttgagaccgagaatgtggaaacagcatttgacattgtgcagcaaagaaatggttatggagaagcccagtccgctgcttgtagggcgggagttt

SEQ ID NO: 351921 - DNA, 87 bp, Homo sapiens
tgattgcgttacaagctttgtctccttcgacttggagtctttgtccaggacgtgctgaagctgctgaaagatggcagaagaagtggt

SEQ ID NO: 351922 - DNA, 96 bp, Homo sapiens
gtccggcgtcccgggggcgcagggaaggagggcgtccgagtcaacaaccgcttcgagctggtgcagcggaactgctgcctgacgctctgcaacttc

SEQ ID NO: 351923 - DNA, 75 bp, Homo sapiens
ctcgaagtgcgcaaacttgacactcaccctgaccggatggggctggtaagtagcaaaaagccggacaaggaaaag

SEQ ID NO: 351924 - DNA, 78 bp, Homo sapiens
ggaccagttctgcaaggagcacggtttcgtaggatggtttgaaacatcagcaaaggactcagtggcctttgaggatgt

SEQ ID NO: 351925 - DNA, 90 bp, Homo sapiens
cggccatcttggctcctcccccgtgctggagaatctggtaaaagcaccattgtgaagcagatgaggatcctgcatgttaatgggtttaat

SEQ ID NO: 351926 - DNA, 98 bp, Homo sapiens
gccgggacccggttccccggcccacagtgggggtgtgcaaacccgagagaactggagcctcagctcaaaggcatcgtcaccaaactgttctgccgcca

SEQ ID NO: 351927 - DNA, 90 bp, Homo sapiens
aagttcttccttgaagaaatacagcttggtgaagagttactagctcaaggcgttgacccggacgacacctataatgagaccccctacgag

SEQ ID NO: 351928 - DNA, 100 bp, Homo sapiens
cctgctggtcagcactgcggctggacaggcgacactaacaggtgaagatctcgggagaccatgactaagaaaagaattgctgtgattgggggaggagtga

SEQ ID NO: 351929 - DNA, 100 bp, Homo sapiens
gaaggcctggagagccgcccagcagcacaacacagggaagcttggggaggaatgtatcctgtcaggtataatgtcagtgaatggcaagaaagttcttcat

SEQ ID NO: 351930 - DNA, 87 bp, Homo sapiens
catcttgacatttccgtggcaaccaaagacgggcgcctatcagtacacaataaggtcatctggggacctggagaatgatgagcaggc

SEQ ID NO: 351931 - DNA, 99 bp, Homo sapiens
gagaagtccagcgggagtacaacctgaacttctcaggaagcagtactattcaagaggtgaccaagaatatggcccaggtgaccaaagccctggacaagg

SEQ ID NO: 351932 - DNA, 75 bp, Homo sapiens
ctgggaccatggagacacccagagtatccagggccccccaggatctgaaggcctcccaggccccccaggcccagc

SEQ ID NO: 351933 - DNA, 83 bp, Homo sapiens
cacgggttgaagggtgtcgtacatcatgaccagcatctcagacatgtcgaaaaagatgttttgatccctaaaataatgagaga

SEQ ID NO: 351934 - DNA, 108 bp, Homo sapiens
cggtactcttcagggatgagtcatgtggcagtggaaaatgcgctcgggctggaccagcagcaattctgtggtgttcttggtcacacatttatggagtttctgaagggc

SEQ ID NO: 351935 - DNA, 100 bp, Homo sapiens
ggggaatcagacgggcagccaaaggagcagacgcccgagaagcccaggaggtgctaatgatgctggataactatgtaagagatttcaaagcattgattga

SEQ ID NO: 351936 - DNA, 97 bp, Homo sapiens
ttcattgttttcagctaacagtaaccccaggtgtcatggagaaactccagctgggcccagagattctgcagcgggaaaatccaaggcttatttatgc

SEQ ID NO: 351937 - DNA, 115 bp, Homo sapiens
aggaacctctacaacgaaggtgaagccacggaagataaggctgacaaacgggctcatcataatgcactggaacgaaaacgtagggaccacatcaaagacagctttcacagtttgc

SEQ ID NO: 351938 - DNA, 100 bp, Homo sapiens
gcgtatctttaagaaattttatcttttgaaacacgttctgattaaccaagggtggacagtgtagtggctgctgagtatgagctggaatacctgttactgg

SEQ ID NO: 351939 - DNA, 90 bp, Homo sapiens
gcagcagcagagatgataacatgtttcagatggcagtcttgggcacgtccatctgtaaacctgctgagagctctggtgacaagaaaggca

SEQ ID NO: 351940 - DNA, 90 bp, Homo sapiens
tagaaggttctggtcttgcactaagtggtacacctgatactgttctatgagaaccggctgaaggaccatcatcttgtgatcccatctgtc

SEQ ID NO: 351941 - DNA, 90 bp, Homo sapiens
tgcactgaaaggaaatgacggattttaggactactgagcccagccaggctgtatgccattgctgccaaagaaaaagatattcaagaggag

SEQ ID NO: 351942 - DNA, 116 bp, Homo sapiens
aaggcacagctgggtcctgatgaaagcaaacagaaatttgtgctcaaaacccccaagggctgttttgctgcagcttctgaagtgttaaagcacttgaaggaacgatttccgcctaa

SEQ ID NO: 351943 - DNA, 103 bp, Homo sapiens
aaagatggtacaaaagagtctttggaggatgcggctttgatggcctacagacctggtacctggatttttgcccgagatgattcctaccaccttactactgacg

SEQ ID NO: 351944 - DNA, 83 bp, Homo sapiens
acatctctttcaatgacaaaaagtttgtcattaaacccatcgacaagaaggcaccttggtttgatgataagaacccaatttgg

SEQ ID NO: 351945 - DNA, 100 bp, Homo sapiens
gatgtcttcgctgaaaacatgaagctcagagaggacacccatcatttgggaatttgctgattcccttggaattccgtttttggaaaccagtgctaagaat

SEQ ID NO: 351946 - DNA, 90 bp, Homo sapiens
gggcgtgcagctccgaagctctttggacctagcaggttcggcggccggggaccctgatgctcccataagacagaaaatgccccttgatga

SEQ ID NO: 351947 - DNA, 80 bp, Homo sapiens
gtcctcatcctggatgaagccaccagcgctttggatgccgagagcgagtatctgagggagacgctgttgcggcagctgga

SEQ ID NO: 351948 - DNA, 83 bp, Homo sapiens
gacaaggagggcatgatcaacctcgtcatgtcctacgcgtcaccttcaggccattcagaggaggaaagagaggggaatatgaa

SEQ ID NO: 351949 - DNA, 90 bp, Homo sapiens
caagacattgtttctctccctctgcccccccttccccacgcaaccccagatccatttacactttacaacagtgagaccgtgcactaccac

SEQ ID NO: 351950 - DNA, 101 bp, Homo sapiens
tcctggcccgcagccgccacctacccagtgaccatgatagcctcccagtgcaacgtcagcttaaagaagcagaggagccgcagcatccttagctccttctt

SEQ ID NO: 351951 - DNA, 90 bp, Homo sapiens
agaacggcccgggatgttggacttcacgggcaaggccaagtgggatgcctggaatgagctgaaagatatccctttaaggaccaacctgcc

SEQ ID NO: 351952 - DNA, 88 bp, Homo sapiens
gagcggcgcgcaccaggcggatgccccagccggggcccagcgaacgccagcttttctgggagaagaggctacaaggacttagtgcatc

SEQ ID NO: 351953 - DNA, 78 bp, Homo sapiens
gacttgctacctcttgggtgaactctagcaattacaagggacagtatgatttggtgaaatgcctggctcctattcgag

SEQ ID NO: 351954 - DNA, 82 bp, Homo sapiens
gccagcagctggactatggcatctatgttatcaaccaggtgacttaagagattaaaattaatttggttgctgttggttctga

SEQ ID NO: 351955 - DNA, 90 bp, Homo sapiens
gcccgggggtggtgacagcaggtctgaggttaaagactcagtctctgagaaaacaattggactgatgcgaatgcagttttggaaaaaaac

SEQ ID NO: 351956 - DNA, 85 bp, Homo sapiens
cagttgtggagagctgattcccaaatctaaaggatacatgaagaagatggccatctgcaaaccaggaagcaggtcatcatgagac

SEQ ID NO: 351957 - DNA, 83 bp, Homo sapiens
caacctggccgaggacatcatgcgcctccgggagaagtgaatgactggcaggaggactgggtcgtgttctatgcccggcagcg

SEQ ID NO: 351958 - DNA, 83 bp, Homo sapiens
cgagtctgaaatcatcccggccagcaacggacacgaggtacctgcaccagtcaggggccctgaccatggaggccctggaggac

SEQ ID NO: 351959 - DNA, 83 bp, Homo sapiens
ctgcctctgaggaacacgccgcagtgaatgagttcacggtgatcaggaagaagttcaagtgtccgtactgcagcttctcggcc

SEQ ID NO: 351960 - DNA, 101 bp, Homo sapiens
gggacacgcagtgacgagcggccgaagcagctttgcggtgctggagaatctggtaaaagcaccattgtgaagcagatgaggatcctgcatgttaatgggtt

SEQ ID NO: 351961 - DNA, 87 bp, Homo sapiens
aggataagcctcgacttagaagctaccgagttaccctaagaaaggtggagccgccaccaaaatgcagattttcgtgaaaacccttac

SEQ ID NO: 351962 - DNA, 74 bp, Homo sapiens
tgcagagacatgagatggtagccaacccctcaggctatgattcccggataggcagtggcagaagagcatttggc

SEQ ID NO: 351963 - DNA, 100 bp, Homo sapiens
aataatagctttcatctcttggcttagagagcagagaccatttttcccaatactttatgtaataaggagcagtatagcatcaagttctagaggaattggg

SEQ ID NO: 351964 - DNA, 90 bp, Homo sapiens
tgaggacaagaccatcgagctcatgagagcgccttcgctgacacgctgacgcccgcgcgcctcagccaggcccgcttcagcgcctgcctg

SEQ ID NO: 351965 - DNA, 98 bp, Homo sapiens
cggctgccacccgcgctccctccgccgccgccgccttgctgctgctcaaagctgctgccgccccttgggctaaaagatcttggagaaattcattcaag

SEQ ID NO: 351966 - DNA, 74 bp, Homo sapiens
tctcgctcggctgcgggaaatcgggctgaagcgactgagtccgcgatggaggcagctgtgtcaatgttgaaaca

SEQ ID NO: 351967 - DNA, 100 bp, Homo sapiens
ggatttcctacctggctgaagctggataagaaggtgtatctgttgctgatcgagaggccagtctggaattaattaagttggacatatcccgtacatttcc

SEQ ID NO: 351968 - DNA, 99 bp, Homo sapiens
tatcaaacagattggcacctttgcctcttttggaccattttcagaaaaatgtgatattactacagcccctgggccaccagatcagtgcaagccccctca

SEQ ID NO: 351969 - DNA, 74 bp, Homo sapiens
gagccaggccccaaggaagagaacgttgacatagaagggatgagaacaagttgagcagtgccaacggccatgaa

SEQ ID NO: 351970 - DNA, 83 bp, Homo sapiens
gcgcccgggaggaaggaacgaggcaaggagctaaagcagcgtgcgttcagccctggggaatgtgggtgccggcaggacaggcg

SEQ ID NO: 351971 - DNA, 100 bp, Homo sapiens
tattcctccccagcatgtcagcatgaccaagcgcctctactacctctggatgtgcatgatgacctgaaggagatgctggacaccaacaaggattctctca

SEQ ID NO: 351972 - DNA, 51 bp, Homo sapiens
cagatgtgcaacaaagtgcgatgtctgcatgaagaaatcagtgatttttat

SEQ ID NO: 351973 - DNA, 82 bp, Homo sapiens
cagctggcgccagtgagtgaccacacggccggggcacaggtgatgtgtccaatctagatcccaacttctcatttgaaggcac

SEQ ID NO: 351974 - DNA, 98 bp, Homo sapiens
tttccctctcccaacatggcggcctcagatggcccactgcgtgaccttggttcagctgtccatttcctgtgaccatctcattgacaaggacatcggct

SEQ ID NO: 351975 - DNA, 100 bp, Homo sapiens
attttatgtgctacagtctgcggaacggagcagtatttcaatgtggagctctactgagatgaagaaagaaaaagaatacctgctcagctccagagacacg

SEQ ID NO: 351976 - DNA, 100 bp, Homo sapiens
ggctgctgcgccagcacggctgccagcgggtgctcgacgtagcctgtggcactgggatccacctctgatgttcactgaagagtaccagaaaagtctgcta

SEQ ID NO: 351977 - DNA, 80 bp, Homo sapiens
aggccacgccagcagtggggcagcacctgcacctacggcgggacgcaaacccggctatttctccttcctggacccatttt

SEQ ID NO: 351978 - DNA, 75 bp, Homo sapiens
tggagcagagatcaggccaagtttggaatcactgggaacagattatggcctttgcaagcaaatgagtactcctct

SEQ ID NO: 351979 - DNA, 75 bp, Homo sapiens
gcgcctcggccgccatggtcttcagcggtactggctgtgatcgaacttctcaaccctcagagacttagatcttcc

SEQ ID NO: 351980 - DNA, 115 bp, Homo sapiens
acactctgcaccgctaggccgtccccgaccttgcctgaacaagctattgacctgaaaagtggttctggaaaagtgtaccaaggccctgcaaaaggtgctgctgatacaacaatca

SEQ ID NO: 351981 - DNA, 51 bp, Homo sapiens
tatgattaccaccaggagattgcaagtgagaaagatcagtctaaagaaaag

SEQ ID NO: 351982 - DNA, 98 bp, Homo sapiens
ctggccttccagaccacttgccacattgtcaggctgaaggcctctgaaagaacgctggtgcagaacgactggatggaggagaaggtccctgtaattgt

SEQ ID NO: 351983 - DNA, 100 bp, Homo sapiens
aaaatggcgaccggcaactactttggattcacccacagcggggcggcggcggcggcggctgcggcccaatatagatctcacttccctgctaaccggtggg

SEQ ID NO: 351984 - DNA, 74 bp, Homo sapiens
aaaatcaggatcgctacattaagaagcctccccagctttctgaggatgatatctggctaaaaagcgagggagac

SEQ ID NO: 351985 - DNA, 75 bp, Homo sapiens
aatacatgaaaggagtgatgagaacaaaggtggatgactgccagggaagtgttcgccagttactacatgaaaaga

SEQ ID NO: 351986 - DNA, 82 bp, Homo sapiens
acgtagataacagcttccgccaggcggtgatgaagaatccccccgaaaggaccccccaggctgatcagctgaccgaagaaca

SEQ ID NO: 351987 - DNA, 110 bp, Homo sapiens
gggaatggagctcggaggcggcgaggagcgcctgcctgaggagagcaggccatttcataattctgaatcatgtctgataacggagaactggaagataagcctccagcacc

SEQ ID NO: 351988 - DNA, 100 bp, Homo sapiens
ggataaacggagagcagcagccgcccgcttcaaccccaggggaccagaggaactcagccctgattgcggtacacagataagctgtttctctccaagttct

SEQ ID NO: 351989 - DNA, 88 bp, Homo sapiens
cctttatatagaagggagagtaggaaggaagagggaatggtttaaaatagaagacgccataaaagtgctgcagtatcacaaacccgtg

SEQ ID NO: 351990 - DNA, 75 bp, Homo sapiens
cagcccttgagatttgaggccttggagactcaggaatggaaactgaaagtggaaatcaggaaaaggtaatggaag

SEQ ID NO: 351991 - DNA, 90 bp, Homo sapiens
caagttcaagctgagtaagggggaaatgaaggaacttctgcacaaggagctgcccagctttgtgggggggaagctggaagatgggacaga

SEQ ID NO: 351992 - DNA, 100 bp, Homo sapiens
ccgtgtggctagaactacctctgatcatctttgggtaatctacagttgctgcagaactgcctggcagtgttaaatggagacacataagccacactccgcc

SEQ ID NO: 351993 - DNA, 90 bp, Homo sapiens
caaaccaagtgggcaaataatggcagttaaatcggttcaggccctgatcaaagacttccaggggaccccgactttcacctacaaagcggc

SEQ ID NO: 351994 - DNA, 97 bp, Homo sapiens
attgtctgcatcttcgagttaagttttattcctcagaaccaaataaccttcgtgaggagctaacccggtgatgatgaacagtctacacagatggctg

SEQ ID NO: 351995 - DNA, 74 bp, Homo sapiens
ccgcatgagcatcgcggagcttgacccgtccatcgctgtggcggaggaagcgctggcggaccatcaagctgctg

SEQ ID NO: 351996 - DNA, 75 bp, Homo sapiens
ccatgcagctattaaccagtgtcagattgatgtacagctatatattttgtcctttctttcacctcatgatctgtg

SEQ ID NO: 351997 - DNA, 75 bp, Homo sapiens
catagacgaactccgcaatgaggacgttcagcttcggaaccaaaaagaagcttcccagagccggggccaggagcc

SEQ ID NO: 351998 - DNA, 76 bp, Homo sapiens
tcaaagcaagagatggctagtgcttcatccagccaaagaggtggttatggatctggtggtggaagtggtggatatg

SEQ ID NO: 351999 - DNA, 100 bp, Homo sapiens
ctggagctgcccggggcggtccctggctgcgtgcacagcgccttgttccagcagggcctgatccaggttctcctgaaaagaaagctgaacattcatctat

SEQ ID NO: 352000 - DNA, 75 bp, Homo sapiens
tctaaaatacgaaggtttctggctgggttcactattatgaagatggcaatgttcagttggttagtcataaagatg

SEQ ID NO: 352001 - DNA, 100 bp, Homo sapiens
gcctgagccttctgtcacccaaagggctccagctggtttttcactcaggcctcactttatcttccaaggaaccactcgttttgactattattttatcact

SEQ ID NO: 352002 - DNA, 101 bp, Homo sapiens
gcttttggaccgagttcatgaagacctcaaccattcagtgaagcagagtggccagcctcctctgaagttacattacttcgttcagaaccatttcacaagtg

SEQ ID NO: 352003 - DNA, 74 bp, Homo sapiens
aacacgcccatttttccagccgaaagctagagttgggaagacatcactgattatgtctctggtcagtgaagaat

SEQ ID NO: 352004 - DNA, 75 bp, Homo sapiens
cctgcctcagcctcctaagtagctgggactacagatcattgagaagcagccaggccacattcggagcagggtttt

SEQ ID NO: 352005 - DNA, 90 bp, Homo sapiens
caatgaaggcggggagtgggaaagggtccggggcggagtgccgttggttaaggagaaagccatgttcagttcgagcgccaagatcgtgaa

SEQ ID NO: 352006 - DNA, 91 bp, Homo sapiens
gtcgatggtcggcggcgcccggatgggcagctgagacaggccgacggtcgcaaggtcctacggtcaagcatccgggagtttctatgcagcg

SEQ ID NO: 352007 - DNA, 100 bp, Homo sapiens
aaaaaggaaaaacatcttgatctggagaaaaactggatgttggtagaaaaagcaagagtttgttatatagcatttcggagcaacatcccctgtcacctgg

SEQ ID NO: 352008 - DNA, 90 bp, Homo sapiens
accactctccagcaccagcttccagttagtggatatagcacaccatccccagccagtatatgaatgacctaaaggtacaaataaagacgg

SEQ ID NO: 352009 - DNA, 75 bp, Homo sapiens
tattcacataaggccaggctcaccgtgaatgatcccacccatgtgatgggcctgtaccctgacctgctgcccaca

SEQ ID NO: 352010 - DNA, 98 bp, Homo sapiens
ctgggtaccatcagcagccctggaggccgggaaccgtgtcctccggcaatacatgtgaagaaactgttcaggttccattatcaaaacgagcaaaattt

SEQ ID NO: 352011 - DNA, 75 bp, Homo sapiens
ctggacgcttgcatggcgcttgaggtcgccactgggacactgtgaaccaggagtgagtcggagctgccgcgctgc

SEQ ID NO: 352012 - DNA, 74 bp, Homo sapiens
agtatccagcgctcattgggaatttagttaaggcgttggagaccagggccagccctggccacaccccaggctgt

SEQ ID NO: 352013 - DNA, 100 bp, Homo sapiens
cgggccacggccatttccttgatgcgcaagttcattgcctaccagttcacagacacgggccgtgggcaagacctgccttctcatcagctacaccaccaac

SEQ ID NO: 352014 - DNA, 100 bp, Homo sapiens
actggagcagtgagaaagcaaaggctgctctgaagcgcacgacctccgactactttctccttcaagatgtcaagccctccaacatcctagtcaactcccg

SEQ ID NO: 352015 - DNA, 98 bp, Homo sapiens
attatacccctttgaagcaaggaaccatgatgagatgagttttaattctggagatataattcaggttcgagaaatggctgctactaccttaagcggtc

SEQ ID NO: 352016 - DNA, 97 bp, Homo sapiens
gaggagctgtgcagccgcgaggaggcgcgggaggtgttcgagaacgaccccgagacgtgggtaattccagaattgattggccataccattgtcactg

SEQ ID NO: 352017 - DNA, 82 bp, Homo sapiens
gaaagagcactggactccggaaggtgaatcaaaaactctggttttaagcaacctctcctacagtgcaacagaagaaactctt

SEQ ID NO: 352018 - DNA, 50 bp, Homo sapiens
gagactggcactgggctctgagggacagagcgggatgccaccagcttgtc

SEQ ID NO: 352019 - DNA, 100 bp, Homo sapiens
ctccctttccaaggaaaagatcgaaaagaaacaatgactatgattcttaactcaagactgcagtgcagatgacgacaacttccttgtgcccatagcggtg

SEQ ID NO: 352020 - DNA, 100 bp, Homo sapiens
gtgattgctcttgaaggagatattgtcaggtttgaatgtttcaagatcaagaactcagtaaactaccatctgctttttaccttagttctattcagtttaa

SEQ ID NO: 352021 - DNA, 100 bp, Homo sapiens
ccagaggatcatggcagctcctatgaggatgtacagttacccagcacgtgtacctcctcctcctcctattgctcgggctgtagtgccctcgaaacgtcag

SEQ ID NO: 352022 - DNA, 100 bp, Homo sapiens
ctccccagcacttcctacacagcctgctgaagaagcagcacgaaagagagaggtccgtctaatgaagaacaggcgcagttgtgtagcagttgagtaatgc

SEQ ID NO: 352023 - DNA, 82 bp, Homo sapiens
gcgggaggtgttcgagaacgaccccgagacggttggtgttcgaggaagagacattgttgttcttggtgtggagaagaagtca

SEQ ID NO: 352024 - DNA, 83 bp, Homo sapiens
ccggctcacctggcggtgcccgaggagtagtcgctggagtccgcgcctccctggagctaaagttgcagacaagatccagctca

SEQ ID NO: 352025 - DNA, 107 bp, Homo sapiens
tatccaatccctgccttttgagtccaggtgaagcatcaagtgtacctgatttgtgaacctatcttgcttcagttggtttcctcctaaatattaggcagatgggattg

SEQ ID NO: 352026 - DNA, 82 bp, Homo sapiens
gccgtggccgctgggggttgcggcggcgctgagccagcggggccgggtctcccttgatctgagaatggctacctctcgatat

SEQ ID NO: 352027 - DNA, 75 bp, Homo sapiens
tcggaatgcactacaacaggaaaatcatattatagatggagtaaaggcccggattgcatttctacaaggcgaaag

SEQ ID NO: 352028 - DNA, 98 bp, Homo sapiens
tggagcctcacacatgactcgcctcctctcagtgaccacaggtgaccatcttggtgctgcagggccggctggatgaggcccgacagatgctctccaag

SEQ ID NO: 352029 - DNA, 100 bp, Homo sapiens
gcgactgtggctctggtgcttctgcctgggcggttgccggctggccgccaggaagcgccctacagctccggctgggcatttgtatatgaacacagatcaa

SEQ ID NO: 352030 - DNA, 100 bp, Homo sapiens
ggtggtgacggaggacgatgaggcgcaggaaagaccacagcaagattctttcattcgtctcctcctagcctgggggaccaggctcgaactgaccctggac

SEQ ID NO: 352031 - DNA, 100 bp, Homo sapiens
tcatggccgagaaggactcgctcgacccgtccttcactcacgccatgcagctgctgacggcaggcttttgatattatgagagtgacacatggcagagaac

SEQ ID NO: 352032 - DNA, 50 bp, Homo sapiens
atttgaactcattcatgttgagaggctcctgggtagaactgcacttcagc

SEQ ID NO: 352033 - DNA, 100 bp, Homo sapiens
ctcggctacagcttcggcggcgaaggtcagcgccgacggcagccggcacctgacggcgtgaccgacccgagccggacctatatccagactttgcctgaca

SEQ ID NO: 352034 - DNA, 95 bp, Homo sapiens
ccagaaccatcacctcggagacccagacaatcacagatgccgctcctacgaggactgctgtggctccaggtgctgtgtgcgggccctctccatac

SEQ ID NO: 352035 - DNA, 95 bp, Homo sapiens
cgccagtaagaacgaggaggatgaagggaacatggagctgatccaggacacctcccgcccgccactggagtacgtgaagggggtcccgctcatca

SEQ ID NO: 352036 - DNA, 50 bp, Homo sapiens
ccatggggaagcgggacaatcgggtgggcaactgtactcctgatgatatt

SEQ ID NO: 352037 - DNA, 83 bp, Homo sapiens
cttgtgggatgtgaaaactctgttactgaaggtctcgtcagcctatctcggcccctctcttttcatgtcctgacaaaaacaag

SEQ ID NO: 352038 - DNA, 75 bp, Homo sapiens
tctgaggaaaattcagttgttgtgcctcatggaggagcatccccccggtccttcagaatccaaacacgctttccg

SEQ ID NO: 352039 - DNA, 100 bp, Homo sapiens
ttgactgaaaaagcgaaggacttttttcaggcagaaaacaagtctcgtctggacgatagtcatttttacttgaaggaagctgcttctacttgggagtggc

SEQ ID NO: 352040 - DNA, 90 bp, Homo sapiens
gtcttaacatgcttcaaataaatcagtgctgaagctgctgaaagatggcagaagaagtggtggtagtagccaaatttgattatgtggccc

SEQ ID NO: 352041 - DNA, 99 bp, Homo sapiens
gacagccagagctattgccacccaggaggagatgttaaagtaacccatcttgcaggacgacattgaagattggtcttctgttgatctaagatgattatt

SEQ ID NO: 352042 - DNA, 89 bp, Homo sapiens
agaagacaagctaaaaatgattcgggaatatcggcaaatggttctgcggcatgaggaatttgaagaaggctgcaaagctgcctgtaatg

SEQ ID NO: 352043 - DNA, 78 bp, Homo sapiens
cagagggtggcccatgagccggttgcgccacccgaggacaagtacaaaattggacagctgtacatgatcagcaaacac

SEQ ID NO: 352044 - DNA, 97 bp, Homo sapiens
ccaagagcttagttgaactccttgttccagcaacagatagaaatgctttaagttcactctggggaaagctggcctctgaaatcttaatgcagaattg

SEQ ID NO: 352045 - DNA, 101 bp, Homo sapiens
accgacaaccttcccagaaagtccaagctcgtggtgggtggaaaagtgttcgccgagaggttccgaaaacagaacagacttttgaagagcgcctgatcctc

SEQ ID NO: 352046 - DNA, 101 bp, Homo sapiens
ttacaacatggcagacattgacaagtatcattgcccagtgcctaagatcttttatgttcagctcactgtaggaaataatgaattttttggggaaggaaaga

SEQ ID NO: 352047 - DNA, 75 bp, Homo sapiens
tgctgtctcaggagtggcaaaggtggaagaaaattcttgtgcatcagcaatgcagaagcacggcagccagggaag

SEQ ID NO: 352048 - DNA, 98 bp, Homo sapiens
agacacagtatagcttctgacagtggagacactggcattggaacttcctgttctgatagcgtggaagattttgatccaaacaatatcttcaaggcatt

SEQ ID NO: 352049 - DNA, 82 bp, Homo sapiens
gccgcgcagctggaggcggcggagcggaagcacctgaactcctggggggaccgtcagtcttcctcttccccccaaaacccaa

SEQ ID NO: 352050 - DNA, 100 bp, Homo sapiens
gatttccttgggtcttccggtaggagctgtaatcaattgtgctgacaacacaggagctaggggaagggggttgtttgccttcttcaggacctgactggac

SEQ ID NO: 352051 - DNA, 100 bp, Homo sapiens
atgactcctttcccgatgatgaactggatgacctctactcggggtcgggctcgggctatgagcagcaccagcagtaagagggctccgaccacggcaaccc

SEQ ID NO: 352052 - DNA, 100 bp, Homo sapiens
ggatcagagagggctaccttgtgaagaaggtcacaatccaaggtccggctcctccgcgtcccagggccggacggagggatgaggcagggggggcccgggc

SEQ ID NO: 352053 - DNA, 75 bp, Homo sapiens
tggacagccagggcaggaaggtggtggtgtgcgacaacggcaccgggaaatatggctacacacacctttctgcag

SEQ ID NO: 352054 - DNA, 90 bp, Homo sapiens
gtctatttcatcacaaaactgtcccgggtgggaagaggaacagcctatgtgggcttccacggaggtttttatttcagggcaataatggaa

SEQ ID NO: 352055 - DNA, 100 bp, Homo sapiens
aatcacacgcataatggatgaaaggaaccgacagaagaacagcttgtgaaaactagaaaaggtggaattcaaacacaactcccttttcaaagacgacgac

SEQ ID NO: 352056 - DNA, 95 bp, Homo sapiens
atgacagcgtggtgcaaagtgggcagctcaaatggcaagacgaactcaaccagcacaacagattttgcaagaacgaggctcaaggatgtgaggga

SEQ ID NO: 352057 - DNA, 96 bp, Homo sapiens
ctgggggcccgggccgccctctctcggagttggcaggaagccaggttgcagggtgtccgcttcctcaggaaaatggctttgtaaagaagtttgaac

SEQ ID NO: 352058 - DNA, 97 bp, Homo sapiens
tgaaagaccactatctggagtttgagaattgcgatggaaacctacatccgccagaggcagctcatcatgtcgcctttgataacatcacacgtgattg

SEQ ID NO: 352059 - DNA, 100 bp, Homo sapiens
ggcagcggcggcggcggcgggagccccaccggggtctgggactggggaactgcctccggcttcacgatgaggaaactgagacccagaaaggtggaagcac

SEQ ID NO: 352060 - DNA, 100 bp, Homo sapiens
ggagtatttgctgggccgggtaccatggacgtgggcgaacttctgagctaccagagtgcttgtgatttcacgtatttttgctgaactcgtaaaagagaca

SEQ ID NO: 352061 - DNA, 101 bp, Homo sapiens
agttcaagttctgatccagcagatgaagagggaggcctgagaggctgctgttctaactcgctcccagagcacgaacttccaggagccggtgcagccgctga

SEQ ID NO: 352062 - DNA, 100 bp, Homo sapiens
cgcaggcatcagaagattattgaagaagcacctgctactattgctactccagcagtatttgaacacatggaacaggtggagatacactacgccttgacac

SEQ ID NO: 352063 - DNA, 144 bp, Homo sapiens
tgaaccaagaaaaccttatcagcactatttgaaacttttatctcatctggcttggcgcctgaggttctcccattaggtgacagagctgaatgaacctctctccaatgaagatcgaaatctcctctctgtggcctacaagaatgt

SEQ ID NO: 352064 - DNA, 75 bp, Homo sapiens
aggctggtctcgaactcccgacctcagcggatgcagtggtgcagtatgacgtggagctgattgcactaatccgag

SEQ ID NO: 352065 - DNA, 75 bp, Homo sapiens
ccctcaacttcctcaacaagagcgtggaagagccgacccaggtaaaccaagggaacatgccagggcttcagagca

SEQ ID NO: 352066 - DNA, 75 bp, Homo sapiens
caacaacctgctgggcaccttcatctggaataagccatgcccggacgtgtactggttcccactgctgtcagaaca

SEQ ID NO: 352067 - DNA, 100 bp, Homo sapiens
ccacagctgtgcacccgagtgtcctttcccccctaagctggcacataggagcaaaagttcactaaccctgcagtggaagatgagttttgatcatcctgag

SEQ ID NO: 352068 - DNA, 100 bp, Homo sapiens
tcctgttccaccagactttaccagagcccacgcttccttccaggatctgctcctcggcccctttactctatttcctgttcatctgtcccttcgtcctgct

SEQ ID NO: 352069 - DNA, 74 bp, Homo sapiens
cgcagtggtcgcttcttctccttgaggctcatccaaaatagaggaagcatgcgaaatctacgccagagcagcaa

SEQ ID NO: 352070 - DNA, 99 bp, Homo sapiens
cgtcactgaggttgcagttggcgtgaaggttaatttcacctaccagtttttgaaaaagaagttctatatatttagccaatttatgtatgatgaacacat

SEQ ID NO: 352071 - DNA, 100 bp, Homo sapiens
gaagagaatggaattgaagtttcaaaaaaacgcacacaatcagatactgatctcacattcttgaaggtggcattgaagagcactaagatcggaagatgag

SEQ ID NO: 352072 - DNA, 100 bp, Homo sapiens
ttattgaaagatgtattgagtacattgaagccacagttaaagcagtccttaagaaaagggagtatggctcaaagtacactcagaataatttcatcactgg

SEQ ID NO: 352073 - DNA, 98 bp, Homo sapiens
ttgcgaagagtattacatgatattagaaactcactgcagaatctttcacaggctcaggaagaattatctgccctaagaaaggaatccacccaaaccac

SEQ ID NO: 352074 - DNA, 81 bp, Homo sapiens
gatggctataatgggtatggaggaggacctggaggtggtggaagctacaatgattttgggaattacaacaatcagtcttca

SEQ ID NO: 352075 - DNA, 100 bp, Homo sapiens
cagcctacttcggcagatgtgggagaggatggacgagggatgcggagagaccatatatgtcattgggcagggatcagcagctaccaagggggtgccagct

SEQ ID NO: 352076 - DNA, 82 bp, Homo sapiens
ggggttccatctcccaacttgtccatcttcctgcagatttcacaaaactgcatcttactgacagtctccacccacaggtgac

SEQ ID NO: 352077 - DNA, 74 bp, Homo sapiens
gaagaagcatcgttaaagtctctcttcaccctgccgtcatgtctaagtcagagcaccatggcactgcaacaggc

SEQ ID NO: 352078 - DNA, 50 bp, Homo sapiens
tgcgtctctggaagtggcatagtgcgatgacatggatcctgcggacaaac

SEQ ID NO: 352079 - DNA, 90 bp, Homo sapiens
cggctggggcccgaggctagcatctctcgggagccgcaaggcgagagctgcaaaggtgctggagaatctggtaaaagcaccattgtgaag

SEQ ID NO: 352080 - DNA, 110 bp, Homo sapiens
tgtagctctccgacatctcataagcttttgtctggtcctctgagccccagtgagagtttcctgaggtacctcacccttccacaagacaacaggcttgccattgatctgca

SEQ ID NO: 352081 - DNA, 89 bp, Homo sapiens
ggagggtggttaccgctgaggagctgcagtctctgtcaagaaacatttgggatgcaagcttagttgtggagagaatattcaagagtggc

SEQ ID NO: 352082 - DNA, 75 bp, Homo sapiens
ttaccaccctcctccctagcataaagccactccctgctgatgcaacatctgggtttgggcagaaaggagggtgct

SEQ ID NO: 352083 - DNA, 80 bp, Homo sapiens
gtccgagtcaacaaccgcttcgagctggcaacatgagtgagaatgaggaagaggaaatttctcagcaagaaggcagtggg

SEQ ID NO: 352084 - DNA, 75 bp, Homo sapiens
agaaagaatgcgtgtattttgtggaaagttccaaactgtctgatgctggaatgtggccccgtcccagagcaccac

SEQ ID NO: 352085 - DNA, 82 bp, Homo sapiens
gccaaggaatcactgaagatcggcgagggaggacagggggttcatcatggaacactctgctccagccaaggtggtgagggca

SEQ ID NO: 352086 - DNA, 82 bp, Homo sapiens
ggagactggagtcgaaggccgtgaggctcccccccaaccaagcggcagcggcggagtcggggccggcccagtggtggtgcca

SEQ ID NO: 352087 - DNA, 100 bp, Homo sapiens
aagtacggagccaaagtataaaccactgggaaaactgaagagagctagaacagttcaccgagactcagattgtcctgggtcacataatgccagctgagcg

SEQ ID NO: 352088 - DNA, 100 bp, Homo sapiens
ggaggcccggcggaggatcgacctcaacctggatatcagcccccagcggcccaggcccaatccgggtcttcctccagcagctcaagggccgcgtagcccg

SEQ ID NO: 352089 - DNA, 75 bp, Homo sapiens
ctttgggcgtcccattgccatggttttgtagtgcatccctgagcatgagcacagaatgaagcggcgtttggatga

SEQ ID NO: 352090 - DNA, 90 bp, Homo sapiens
tgagcagggcttcctctggagcttcttgggacctgtgaccttcatcattttgacccagtggcttattggctcaggaacgcaagctttgcc

SEQ ID NO: 352091 - DNA, 90 bp, Homo sapiens
cgcctgtgctgaggaccaggtgttggacgcagacggcgtcacttgcttggtccccaacgcagtgacaagcctcagcaagcaggactggac

SEQ ID NO: 352092 - DNA, 100 bp, Homo sapiens
ccagctggatttcgtgcaagtgaaagccaagaagtatgatgcgtttttggcctcagagtctctgatcaagcagattccacgaatcctcggcccaggttta

SEQ ID NO: 352093 - DNA, 98 bp, Homo sapiens
aggtcggggcggcggccgcgctgggcgtgaggggggccttagagggcctccccaggccgcctccgcccgtgaagtatgagcaagctgccgatgcagaa

SEQ ID NO: 352094 - DNA, 98 bp, Homo sapiens
aacgtggctggttggaggaggtagatcaccctttctgcgggggacgatttcgtcggtggtaggattgtcagtggcttcgccccgaggagagctgactg

SEQ ID NO: 352095 - DNA, 100 bp, Homo sapiens
gaccgaccaggtggaggtgaatgcccagaacagctccctcgtgaaagatgcttctgttcctctgattgatgttacaaacctccctactcctcgaaaattc

SEQ ID NO: 352096 - DNA, 100 bp, Homo sapiens
ctttatgcgggtggcgctctcagagccccagccagagaggaggagttaacaccgtcaccaccttggtggagaacaagaaagctcagctggtggtgattgc

SEQ ID NO: 352097 - DNA, 75 bp, Homo sapiens
agatatggctgctggatcagacacccctgcagtggaccatgagtcggtaatgcccactgaggacctctgggagcc

SEQ ID NO: 352098 - DNA, 75 bp, Homo sapiens
aaaattgcagaagcacaagccaaactgttcctgacggagctgaccagacttttccagaagtgccggacgtcgggc

SEQ ID NO: 352099 - DNA, 74 bp, Homo sapiens
ggagaggtagccatgatgccccacttggtgaatggagatgcagctcagcagacgcaaacatgcagatctttgtg

SEQ ID NO: 352100 - DNA, 100 bp, Homo sapiens
ctgcaccgcacggagccagctgccagggtggccaggagccccctgaaggagttcgacaaggagaaagcctggagagccgtcgtggtgcaaatggcccagt

SEQ ID NO: 352101 - DNA, 90 bp, Homo sapiens
gcagcggcctgatctgggttccgctgattcctttcgtaaccgcaccacacccgaggtgcactaggccttccaatgagggggatgagcaac

SEQ ID NO: 352102 - DNA, 101 bp, Homo sapiens
tatttgatgaggtggatctgacagatgccagcgtagctgaatccagtaccaaaaacgtcaacaacagttttacgctcagaattctgcaaatgcagattttg

SEQ ID NO: 352103 - DNA, 75 bp, Homo sapiens
ggatcccgtgcacgagtgtggcacccagcctggtccggaattctcttctggcctgtgagtttctcctccagaacg

SEQ ID NO: 352104 - DNA, 101 bp, Homo sapiens
aggaagaagaggatgaagatgtggatctggcccagatgaatgatttcggaatcaagaatatggaccaggtagcccctgtggctaacagttacagagggaca

SEQ ID NO: 352105 - DNA, 100 bp, Homo sapiens
ggaaatacaaatgaaccaagcacacgtgtccgagtgtgctcagtgaaggaacggcatgccagtgaaatgagggatttgccaagtcgatatgttgaaatag

SEQ ID NO: 352106 - DNA, 75 bp, Homo sapiens
cttcactgtcctcacagaggcagaccctgcagccaagttcaaggaggccttccagctgtttgaccgaacaggtga

SEQ ID NO: 352107 - DNA, 74 bp, Homo sapiens
aaggcaaccacagccccagccaccacccgtaacacaggaggcattgaaattttcagcagagaccttccaaggac

SEQ ID NO: 352108 - DNA, 90 bp, Homo sapiens
gtccgggcagctggagcgttgcgagcgcgaatggcacgagctggagggagaatttcaagaactgcagcaggggaaatgctgtctgtagct

SEQ ID NO: 352109 - DNA, 82 bp, Homo sapiens
cccagctcctctcctgtgctaagctccgtgtcaacagcatctccaccctggagcctgtgagccggtgccagcgcctgagtga

SEQ ID NO: 352110 - DNA, 83 bp, Homo sapiens
caagagactgatcaaattgtgagaggaaaacagcctacccggtgttactgcggaaatgcaaaacttagtccatcggcggattt

SEQ ID NO: 352111 - DNA, 98 bp, Homo sapiens
caacttcaagctgccccaggacgatctccagggcatccagaagatctatgcgtgtccggagcggtgactggaaggggtacacaggcaagaccatcacg

SEQ ID NO: 352112 - DNA, 100 bp, Homo sapiens
agccactttcccgagcggaagtcagcccgcggctcggactccggcgggacctgctcggaggaatggcgccgccggagagggagactggtggctggcccac

SEQ ID NO: 352113 - DNA, 90 bp, Homo sapiens
gaactggctaccgttcggactatttgtagtcatgtacagaacatgatcaagggtgttacactgaccatgctcgacagctgaccaaggcca

SEQ ID NO: 352114 - DNA, 100 bp, Homo sapiens
gggcagcagtagaatcacttgggttcattctattcagatacacctatgaagattataagaacactgcagaatggcttctgtctcacactaagcaccgacc

SEQ ID NO: 352115 - DNA, 50 bp, Homo sapiens
atctgtcctgaatgtggcttggttgtagagagacacatctcaattcaaag

SEQ ID NO: 352116 - DNA, 74 bp, Homo sapiens
tcacagattggaatctgcctatcagaaccatctaattctgaaagttttagtgaatgtttctccatcccagagag

SEQ ID NO: 352117 - DNA, 108 bp, Homo sapiens
gcagagtgctgatgtgaaaaataccacgacaaaaccaccctatcgtggcattcctggtggctttccatcagaacaagcagctcatcggtgacagggggctgcttccct

SEQ ID NO: 352118 - DNA, 75 bp, Homo sapiens
ggtggtcgtgaaactgcttcccgaggagcattggaagctctctattggaggcatcatcattctgaaggataccag

SEQ ID NO: 352119 - DNA, 100 bp, Homo sapiens
cgaacagctcggtggcagggcctgactgctgcggaggcctcggcaatattgattttagacagagaagaagctggaggagttctccgtggaagaggccgag

SEQ ID NO: 352120 - DNA, 98 bp, Homo sapiens
tccaaggtcctagaactcaggaagagtgatgtggttttggataaggttcgatacaagaggctgttttcctagcgtggcttgctgcctttggtaagaac

SEQ ID NO: 352121 - DNA, 90 bp, Homo sapiens
cgaacgaccaagagggtgttcgactgctagagccgagcgaagcggatccaggtccggcacgatcaagacccaggctacatgcatcacaag

SEQ ID NO: 352122 - DNA, 102 bp, Homo sapiens
ttgggccggtatctccggcagctggcacgccatcggaacttcctgtggttcgtgagcatggacctggtgcagattcgacacctcttagaggctgcaatccca

SEQ ID NO: 352123 - DNA, 95 bp, Homo sapiens
agcagcctcgaggtggagaagaaggacaagcttgcggactacaaatccctccaggatatcattgccatcctgggtatggatgaactttctgagga

SEQ ID NO: 352124 - DNA, 100 bp, Homo sapiens
atgcccaccaccatcgagcgggagttcgaagagttggatactcagcgtcgctggcagccgctgtacttggtcctgggaactccaacaagggagcaaatca

SEQ ID NO: 352125 - DNA, 100 bp, Homo sapiens
actctgaggcgacagcagttggctcaggatgcactggaagggctcagagggctcctccatagtctgcaagatgcctgaggaaacccagacccaagaccaa

SEQ ID NO: 352126 - DNA, 98 bp, Homo sapiens
cggtggtgcctccggactgcacttgcgaagggagcttggggaggaaattcatgatgttgctatcaaaagttgagaaattgtcagaagaaatcatggag

SEQ ID NO: 352127 - DNA, 90 bp, Homo sapiens
tgaccgtgtgtcagaacaatcttgaatcatgaagctactaaccagagccggctctttctcgaacacttgctgaaatggcagcagccacat

SEQ ID NO: 352128 - DNA, 76 bp, Homo sapiens
atatgatggttacaatgaaggaggaaattttggcggtggtgaacttcacggtagaccagatccgcgccatcatgga

SEQ ID NO: 352129 - DNA, 100 bp, Homo sapiens
cagatcccagacctttggggagaaggagcaaccgcctctggcacagcccatcagggagaaagagcaggtgccatgtttcagaacagagtaagacccctgg

SEQ ID NO: 352130 - DNA, 100 bp, Homo sapiens
tctggctttgggctacgctgctgattcctgcggccgcggtctacgaagaccaagtgggcaagtttgattgattgtgcttcttggtcagaccccgcatcaa

SEQ ID NO: 352131 - DNA, 83 bp, Homo sapiens
cagagggctgccatcctgcagactgagtactgccaaatctgtcgaaagggagataatgaagaactgcttcttctttgtgatgg

SEQ ID NO: 352132 - DNA, 82 bp, Homo sapiens
cacatttttacagttctccagtccttctctttcggatcgaatcatcaatttagttgttggcagcttaacatccttattgatt

SEQ ID NO: 352133 - DNA, 101 bp, Homo sapiens
tcagaagctccgatttggcagccagatcttcatcgagcacgtggccgatgtgggtcctaaaaaggtggggacgctgtggcgagaagccgggcttagctgga

SEQ ID NO: 352134 - DNA, 100 bp, Homo sapiens
gcagctcaaacttctgctccctctaagtaccaccgaactcgatctgggggagccagggatgaacgatatcgatcaggtttgtttctgcgtcacatgatct

SEQ ID NO: 352135 - DNA, 100 bp, Homo sapiens
gccgctgtggccctcgtgctgatgctactgaggagccagcgtctagggcagcagccgcttcctagaagaccaggtaccggcggacgtcgagaaatgtcag

SEQ ID NO: 352136 - DNA, 75 bp, Homo sapiens
aaggaacattccagaaactttggatacagatccacgggttttagaaaaacaagaattacagcagccaacctatgt

SEQ ID NO: 352137 - DNA, 75 bp, Homo sapiens
ggtttagcaaaagttcatctccttctgcatccttaactgagaatgaggatctcactggcatcgaatctatggatc

SEQ ID NO: 352138 - DNA, 90 bp, Homo sapiens
aaaatctacaatttcttcgagacactcatataaagaggcatttcatccttcatgaagccattcaggattttgaattgcatatgagtgctt

SEQ ID NO: 352139 - DNA, 100 bp, Homo sapiens
caagagctatcaggggaagatatgcatcagttccatcgagccattactacagggcttcgtgggacacatatgcaacatgcctatgatttttacaagcctg

SEQ ID NO: 352140 - DNA, 88 bp, Homo sapiens
gagttctaggcttcaaacctaaggaaaaggggaagatagtgatgtactcagtataaatgcagatgcttatgacagcgacatagaaggc

SEQ ID NO: 352141 - DNA, 75 bp, Homo sapiens
tgactgtaagctgtgatctcagtatacaaagattagtcagaagaagttgaaaaaatacgagaaagaatatcacac

SEQ ID NO: 352142 - DNA, 95 bp, Homo sapiens
ccagcactcctggaccaagagctctttgagattctcaaagttggattggtggaaacaatgaaccattgacaggctttacatggcgaggtggctgt

SEQ ID NO: 352143 - DNA, 100 bp, Homo sapiens
ggagattgacaatcaatgggccatcttggacggtcttaaagaaagtgcagaagagatggtcaaaaacaaattggaaggaaaggataaactgaccccttgg

SEQ ID NO: 352144 - DNA, 74 bp, Homo sapiens
caggaatgcttactgttgcgtggttcgttattaacagcttgcaggccacggagcgtgaccatccagccccttct

SEQ ID NO: 352145 - DNA, 75 bp, Homo sapiens
gaccgaggagcagcagcgattctcttaccaacagacagatgatagattggtgtctacagatggatttatgctgaa

SEQ ID NO: 352146 - DNA, 75 bp, Homo sapiens
gaccgtgaccgagagcgtgaccgagagcgcgaatatcgtcatcgttagaaggaatccagacgctctgcagtgtcc

SEQ ID NO: 352147 - DNA, 75 bp, Homo sapiens
gaagaacccatcgggcagctacacatcttgaaagagaagctcttcctgtgagaccctgctctcagcggcccacga

SEQ ID NO: 352148 - DNA, 101 bp, Homo sapiens
ctgaggaggggccccagcagcccccgaaggccctatcaggacatggagtatgaaagacgtgagaaagatcagtctaaagaaaaggagaagaaagtgaaaaa

SEQ ID NO: 352149 - DNA, 100 bp, Homo sapiens
ccccagtgggtgctcacagctgcccattgcctaaagaatgtggataaatcttggaaggagctcagtaatgtcctctcagggatcttctgcgcctctctca

SEQ ID NO: 352150 - DNA, 100 bp, Homo sapiens
agagcattgtgagctccgtattctctgaagcctggaaacgaggcactcagttggaagagtccagcaaggactactgttcgaagatttttggaagaatact

SEQ ID NO: 352151 - DNA, 75 bp, Homo sapiens
ctttggaattccattcttttccttattcttctgatgtggatccagctcctccacccccaccacctgtgatccgaa

SEQ ID NO: 352152 - DNA, 90 bp, Homo sapiens
cggggggctccctctcgccaatatggtccatctgctggaacccttcaagatgagaagaataatgtctggggtgaaggtgaagcacccagc

SEQ ID NO: 352153 - DNA, 141 bp, Homo sapiens
accgggttcaccttctcagccctgcagatcctgccctacacactggcctccctctaccaccgggagaagcagggttctgagcaaggttcaaccagtcaagaacaggccttatctgctcagcaagctgctgttattaacctt

SEQ ID NO: 352154 - DNA, 100 bp, Homo sapiens
agtggcgagaacttggcgccctatcaccccatcaagccccagggcgtgctggtgctgggccaggagcagaaggaagagtcagcagagcaaccagagttct

SEQ ID NO: 352155 - DNA, 100 bp, Homo sapiens
gtcagaagaaatggattcagtcaataatggatatgctccaaagtttttcagttatgggacaaaaatattatatcaaaacactgaagctttgcaatctaaa

SEQ ID NO: 352156 - DNA, 75 bp, Homo sapiens
gctgatggagtgcgtgcagatgcctccgcagcattcctagtgtctctctacataaaggacatctggctgggggct

SEQ ID NO: 352157 - DNA, 75 bp, Homo sapiens
tggagctggagagtgactgtagagcctcaggagctgccgttatactgttctggggggttgcggtttttctgggac

SEQ ID NO: 352158 - DNA, 75 bp, Homo sapiens
gaagagaattgaagaatcttctgaaacttgtgagaagaagtctgagtggagccgccaccaaaatgcagattttcg

SEQ ID NO: 352159 - DNA, 75 bp, Homo sapiens
gatcagggaccggctgctgcaggccatcgacccccagagcaacatgaagaagatgactttatgtgtaagaaggcg

SEQ ID NO: 352160 - DNA, 96 bp, Homo sapiens
ttgtgtcctgagatcaaatggcacttcattggccacctacagaaacaaaatgtcaacaaattgatgggttcttccaggttggaaagagaatatgct

SEQ ID NO: 352161 - DNA, 82 bp, Homo sapiens
cagaagtcgcgtgtctaggtgagtcgcggtgggtcctcgcttgcagttcagcgaccacggttaaacccatccagagtaatgg

SEQ ID NO: 352162 - DNA, 100 bp, Homo sapiens
gtgaaagtgcaagcttcctcttcgaaatgagcccctgagtcctgagttggtggcagctgcatctgctgctctgttttgacaagcaaacaagccagaactg

SEQ ID NO: 352163 - DNA, 83 bp, Homo sapiens
tgtaacttttgatgatcatgatacagttgataaaattgttggtaaagcttgcatttccttcaacaagaaggattacagaggag

SEQ ID NO: 352164 - DNA, 74 bp, Homo sapiens
tggaggcccaggcccatggctggcgtttaagaggcgagttcaggagtccacgcaggtgctacgggagctggaga

SEQ ID NO: 352165 - DNA, 83 bp, Homo sapiens
tgatgattgagttttggtggctttacctgaaataactgaagtgaagtgatggactccgatttggagagtagtaagacgtgaaa

SEQ ID NO: 352166 - DNA, 100 bp, Homo sapiens
cttccccgcggagcccgcgcagtccgcgcagccctcatcgcaactgggcccgcgcgcagataattcgtgtccagtccccggatggagtgaagcggatcac

SEQ ID NO: 352167 - DNA, 100 bp, Homo sapiens
cttgatccattgtgctgttgagagcctctagtaaatttttcagcttttatcaaaatacaactcaaacctagctactccaatagcaattaaagcagtgcca

SEQ ID NO: 352168 - DNA, 50 bp, Homo sapiens
cccttagaccgagaagtaggagaagaagctactatggaggaaactgggcc

SEQ ID NO: 352169 - DNA, 83 bp, Homo sapiens
cctgcgcaccgacatcgatgcgacctgcacgccccgccgcgcacaattctgtggtgttcttggtcacacatttatggagtttc

SEQ ID NO: 352170 - DNA, 99 bp, Homo sapiens
gcccggcccagagatgaagtgcaagaggttgtgtatttctcggctgctgatcacgaaccggagagcaaggttgagatatatgcaaaaaacctggtgaat

SEQ ID NO: 352171 - DNA, 95 bp, Homo sapiens
gtcagacggcgctatgtacgccctcttcctcctggccagcctcctgggcgcgggttcctggtagagttacacagttgtgccgccagtatagcgac

SEQ ID NO: 352172 - DNA, 90 bp, Homo sapiens
acacatttccagcaggctgcagatacgagtggacaagatgcctttgtggaactgtacggccccagcatgcggcctctgtttgatttctcc

SEQ ID NO: 352173 - DNA, 75 bp, Homo sapiens
gcgacgctgctcaaaacctcgctccggaaaggggacacctgcctgcctagggtagttaaaagacgagtgaatgct

SEQ ID NO: 352174 - DNA, 75 bp, Homo sapiens
gcttcagggagtcggaccagcttttcaaacaatacaggtgtgggccatgtttgaggattgccccagcattcagtt

SEQ ID NO: 352175 - DNA, 74 bp, Homo sapiens
aaaagtggaagcgaagccgaaaaaggcagcagcgaagacggtctggaaaatcccgaagcagaagcccgtattca

SEQ ID NO: 352176 - DNA, 75 bp, Homo sapiens
attttcatagagctggactattggaaggtgccgtgagcgatgtggagatgcaggaacactatgatgagttttttg

SEQ ID NO: 352177 - DNA, 100 bp, Homo sapiens
aggagaggaaaaaggaagagagcactgcagccagtgaaaccactgagcaggttacgggcaggacttgagtggcttcggacagggcttctcagaccccagc

SEQ ID NO: 352178 - DNA, 75 bp, Homo sapiens
ctagtggaccagctggtgaaggcagacagcgagtggcgacgatactgctgcacttagagctgtgggcaacattgt

SEQ ID NO: 352179 - DNA, 75 bp, Homo sapiens
gccaaggtggagagagggattacagaaaggagaacaccttatttcagatagggtttaaaccagcaggaggcatcc

SEQ ID NO: 352180 - DNA, 98 bp, Homo sapiens
ttagaagccctcacccaacgtctggagcgagagatggatgctcacccgaaggctgattactttggtactccaaagattcaggtttactcacgtcatcc

SEQ ID NO: 352181 - DNA, 80 bp, Homo sapiens
gtgcatagttttcttcgattgttgcaacatcccttgcgaggaggaggacttcatccaacccagcagccgagaagaggccc

SEQ ID NO: 352182 - DNA, 100 bp, Homo sapiens
atgcatgagtcttctcaacttgaaggtcatttaaccaacctcagctttacaaaccctgaatttataactgaggtgatcagcccatgacctaaacctccag

SEQ ID NO: 352183 - DNA, 90 bp, Homo sapiens
tgtgaagcaatggtatgggaaaattgtttgcagaaggatgaaaaggctttattgccaaactgatttggcttaataaagcttgatttgaaa

SEQ ID NO: 352184 - DNA, 124 bp, Homo sapiens
cggctcaagagtttagccttgcgactggcccagtatccaggtcgaggttctgcagaaggttgtgactttagtatacagtttactcctggcttgggggcattaggaagcactggaggctcttcgg

SEQ ID NO: 352185 - DNA, 100 bp, Homo sapiens
cagagtccagctactgtgagtcaccagaaagggaaaccagttccacgtatagctgaactcatggacaagcaatcatcctcttccagtggtagcgtgtttg

SEQ ID NO: 352186 - DNA, 74 bp, Homo sapiens
cgtgggcagcattggcgaccagcgcttcacgatatgggagaagggactactataaatgcaagtgcagatggcaa

SEQ ID NO: 352187 - DNA, 74 bp, Homo sapiens
gcacggtactggagaacacggatggcacaagaatagccgcccagtgactgccaagtgagtgaaccagcctgctt

SEQ ID NO: 352188 - DNA, 100 bp, Homo sapiens
caggactgcgccgcgtcttcctcaagagtaatcaagtcagaggattatatgacttttatctgcctagagaagaactatggatctacaacatggagactgg

SEQ ID NO: 352189 - DNA, 100 bp, Homo sapiens
agaacatggccatgttggcccagcaaatgcaactagccaatgccatgatgcctggtgccccattacaacccgtggtctacttccccagcaggacagcatc

SEQ ID NO: 352190 - DNA, 82 bp, Homo sapiens
ctggcttcgaggaggaggaggagctgctttccccatcatctggaagacagccctcagcgcctttttccaggagaccaacatc

SEQ ID NO: 352191 - DNA, 80 bp, Homo sapiens
ctcagcccacatgcccgctcacctgcgctgtgatgcctgcagagctgtggcttaccagggtggagccagccatcctgaga

SEQ ID NO: 352192 - DNA, 100 bp, Homo sapiens
aaggatacagcatacagtcccgtgtctcggctgagtcatcgcattccttaataggaaagctcatcatctgcaatgtcactggcattgcccacaggcgtcc

SEQ ID NO: 352193 - DNA, 75 bp, Homo sapiens
cacgcccgtaccccggcgtcacgctcagatctctcaaaggccttggttctgacagaaattggccccaaacgtgac

SEQ ID NO: 352194 - DNA, 83 bp, Homo sapiens
ctgcagtacaggatatgaagaaattgagggttcttgccatgtcaaacgcttcagagaaccaaagcatgaaagacgtccgtgga

SEQ ID NO: 352195 - DNA, 100 bp, Homo sapiens
ggccgggccgtcctcggcggcagtgtcaggacctctgctcttccaggcaagtgaacatgtagccagtagtcctgcattgggggatgtgattccgttcagc

SEQ ID NO: 352196 - DNA, 83 bp, Homo sapiens
cgtgtcagtggggttgttttggatgcctgaaaacttcatgcctcctgttcccatcacatcaccaatcatgaacccgttgggtg

SEQ ID NO: 352197 - DNA, 122 bp, Homo sapiens
aatcagaaaattaatgcccgttggaccacagaggagcagcttctagcagtgcaaggtgctggagaatctggtaaaagcaccattgtgaagcagatgaggatcctgcatgttaatgggtttaa

SEQ ID NO: 352198 - DNA, 100 bp, Homo sapiens
tagtcatgatctatgacgccgagaagcagaggccccgagctccaattaaggaacagctatatcctgcttccttctgtaagcagcatcgacttgtgcaagg

SEQ ID NO: 352199 - DNA, 75 bp, Homo sapiens
tggaagatggacgtactttgtctgactacaatattcaaaagattgttgatccatttcagatacttgtggcagcaa

SEQ ID NO: 352200 - DNA, 50 bp, Homo sapiens
ctcagacatgttctcaccacccttgattttgcatgctgaaacttctcaac

SEQ ID NO: 352201 - DNA, 75 bp, Homo sapiens
aactgctttcaattctaagtgtacatcaggaacgtctctatcaagaatacaatttcagcaaggctgagggccatc

SEQ ID NO: 352202 - DNA, 80 bp, Homo sapiens
ccgtcccgggcctcagcccctctgctgcagaccctcgggatcgtcgctgggcagctggtggaatttttgaagaaaatgga

SEQ ID NO: 352203 - DNA, 75 bp, Homo sapiens
acaaaccctggtcttcaaagtttggcataaaggaggtgaccatgctttgggattttcatagtttgagtaattcct

SEQ ID NO: 352204 - DNA, 96 bp, Homo sapiens
ggaggcagtagccaaacacccagaacatgccagcagaagcattcaccaactgacatgtgccctgaaagaaggcgatgtcactattggagaagatgc

SEQ ID NO: 352205 - DNA, 83 bp, Homo sapiens
ccaccagcggttccatcctacacttgggtacaatgactcttcttgcttttcacctaagttgaataagcaccctgtgcacttta

SEQ ID NO: 352206 - DNA, 98 bp, Homo sapiens
tgaagatggatcaccactgccacactatgataccctggcaactggaataatttattttcatcgcttctatatgtttcattccttcaagcaattcccaa

SEQ ID NO: 352207 - DNA, 100 bp, Homo sapiens
cccggacccaaagtgccatgtctttaatttcgaagcattcagcaaacaatggcaaggcagagccaccagaaacgtacacctgattttcatgacaaatacg

SEQ ID NO: 352208 - DNA, 75 bp, Homo sapiens
acagctcggagagagagagatgccctgcagctggaaatgagcttggtgcagtctattatcctcccagtccacaac

SEQ ID NO: 352209 - DNA, 83 bp, Homo sapiens
gagcgcctcgtcgacatgagtgatgtggaggaaaacaacttcgagggcagagacccattccaacaatctcgtaaaacatggtg

SEQ ID NO: 352210 - DNA, 89 bp, Homo sapiens
agcagttggcacacatggttaaggaacaggaggaaaccattcagaggacagagcgggatgccaccagcttgtccaaagggaagttccag

SEQ ID NO: 352211 - DNA, 98 bp, Homo sapiens
cgaggatggggaaatccaacagcaagttgaagcccgaagttgtggaggagctgaccaggaagacctactgtgcagcggaactgctgcctgacgctctg

SEQ ID NO: 352212 - DNA, 100 bp, Homo sapiens
cagtggaggaagtgggggttatggtgggaggagccgatactgagcttcttcctatttgccatgggaagggcctgtcccagtcggctttaccctatcgacg

SEQ ID NO: 352213 - DNA, 100 bp, Homo sapiens
cttgagtcctggtccttctgcagaggcctgagcaggtgtggctttgatagctggtggtgccacttcctggccttggatgagccgtacgcctctgtaaacc

SEQ ID NO: 352214 - DNA, 83 bp, Homo sapiens
agagacagtgcctgccttttcagagcgtacctgtgccactgtcaccattggaggaatgtggccagcatcgaaatgttcagcct

SEQ ID NO: 352215 - DNA, 97 bp, Homo sapiens
tgaggacgtgcttcctgcttcatagataagagaatgtggccccgtcccagagcaccacccgagacatcaggagcccatcgtgggctagggaagatcc

SEQ ID NO: 352216 - DNA, 75 bp, Homo sapiens
gttaactgaattggtgacacttcgggtctctcacagaggaaggtatctttcagatgaaggcattgaagcttgcac

SEQ ID NO: 352217 - DNA, 71 bp, Homo sapiens
aaaaggaatcgtgctggaaaaagtgctctgcagatggcatggggaggaggttgcactcagcccatgatcct

SEQ ID NO: 352218 - DNA, 99 bp, Homo sapiens
tagcactctacgtatatgaatatctgctccatgtaggagctcagaaatcagctcaaacatttttatcagagcagtcctagagtctgcaccagcggaccg

SEQ ID NO: 352219 - DNA, 100 bp, Homo sapiens
gctggtgcctgtcggagaacatcgccaagcagcaacagctggcagcatcacccccggacagcaaggagttaaagaggattgcactgcctccatggaacct

SEQ ID NO: 352220 - DNA, 100 bp, Homo sapiens
agctccagatggaggaatacctgaaacagaagctgcaagatgaagcttatcagccccaaactggataccacccacatgtccatcatcagtagaatggata

SEQ ID NO: 352221 - DNA, 100 bp, Homo sapiens
atttcctgaagatgtttacagtgcagtcttatcgaaggatgtgcatgaaggacagcctcttctcaatggtcacagggattatggacccagaacagatgct

SEQ ID NO: 352222 - DNA, 100 bp, Homo sapiens
ccgggcgcggctggggcccgaggctagcatctctcgggagccgcaaggcgagagctgcaaagttgcggtatttaccagtggtggcctggatgtagaagca

SEQ ID NO: 352223 - DNA, 98 bp, Homo sapiens
ttggacagtccaatgtcaacattgcccagcaagtgggcatcgagcgcctcaaacgaaagaaccagcccagggagcacatggggagctggcagtcagta

SEQ ID NO: 352224 - DNA, 100 bp, Homo sapiens
cactttcgccagcccgtgccgcgagcgcggcctgcaggagtgtactaatggtcacttgatgtgcgctggctgttttatccacctactagcagatgcccgg

SEQ ID NO: 352225 - DNA, 73 bp, Homo sapiens
aatgaatgtcgaatgtgactgactagcagcttcattttgaaatccagacatttaatgtggatgcaccatgcca

SEQ ID NO: 352226 - DNA, 83 bp, Homo sapiens
cgaagatggggagaaggaagcgagactcatacgcaacctcaatggtatcatgatattagctggtttgacatcaagtcatttgt

SEQ ID NO: 352227 - DNA, 75 bp, Homo sapiens
gcatacacaggaatgttgtcttctagatatgccactgatacatggatcacagaagaactgcagcttcctggggag

SEQ ID NO: 352228 - DNA, 88 bp, Homo sapiens
gacttctattcactaaaaccatgtgtctgaactgaagaagcttgggctcacttccacaaatcatcagaggctccttgaaatgctagat

SEQ ID NO: 352229 - DNA, 90 bp, Homo sapiens
aacgcattcgagaccggcccacctttgaggtaggataattgcggactgaaccctcgggctgcggtcatatatgagaacttgctccgcgcg

SEQ ID NO: 352230 - DNA, 90 bp, Homo sapiens
gattttttaaaaattaaacttcaacacaatgaggggaaggtgtggctcattgactttaatccatttggtgaagtcacagattcactgctg

SEQ ID NO: 352231 - DNA, 96 bp, Homo sapiens
gcgagatcctggcgagcctgcaggatggcgcggccgagtccccgtacggccacccggcggggatcactacttgtgtgatgtgacatgggcaacaca

SEQ ID NO: 352232 - DNA, 75 bp, Homo sapiens
atttcacagcactctgggcgaaaattggatgtgaaaatgaagccagaccgaggttctaaggcccagcagctacta

SEQ ID NO: 352233 - DNA, 80 bp, Homo sapiens
ctggaggacatctgggggccacaaatgctccttctcctggagacgcaactcaaggccaagatcaaggctcgagatcttcg

SEQ ID NO: 352234 - DNA, 75 bp, Homo sapiens
ctcactctggaggatggggtggatgggaggcctaatgggattgtttgaaaaacgtcgcttcaggaaattcctagt

SEQ ID NO: 352235 - DNA, 50 bp, Homo sapiens
cctcagtatcggctctgattggaggtattgacctgatggacatggcttcg

SEQ ID NO: 352236 - DNA, 90 bp, Homo sapiens
cgcgtacgtggtggagctctgcgtgtgtttacaggtacatacattacacccctatttctacaaagcttggctattagagcattatgaaca

SEQ ID NO: 352237 - DNA, 100 bp, Homo sapiens
agctaagcgggcatcagtttgagaactactccttcaagatttcctacatcccggatgaagaggccaaacgtaccaagaaagtcgggatcgtcggtaaata

SEQ ID NO: 352238 - DNA, 90 bp, Homo sapiens
cggcgctgccgcctgaagtgcgggcgcagctggcggagctggagctggagctctcggagggcgaacagctgcttggagaactacaagtga

SEQ ID NO: 352239 - DNA, 75 bp, Homo sapiens
acacttggttaccaagaagccatacatggagcagcatttctttctattactactatctatgctgagactggttca

SEQ ID NO: 352240 - DNA, 82 bp, Homo sapiens
caggcataaagcagtcaccttcaacaggtcagcccaaggccaaccccactgtcactctgttcccgccctcctctgaggagct

SEQ ID NO: 352241 - DNA, 101 bp, Homo sapiens
gaacagactagccactttgcattgactggaaacaatggcatttacagaaagagtcaacagcagtggcaacaggctttgatgcggcctggaagaattgatag

SEQ ID NO: 352242 - DNA, 101 bp, Homo sapiens
cttatcagccttccacaggggaaggcaatgagcaaacggttgcatctggaggtggtggggttggagatggtgttcaagaaccaaccacaggcaactggaga

SEQ ID NO: 352243 - DNA, 82 bp, Homo sapiens
ctaaggatcatgtctgcgagccaggattcccggctcttgtcaggatggtgaagctgttcatcggaaacctgccccgggaggc

SEQ ID NO: 352244 - DNA, 82 bp, Homo sapiens
gcgggagtgttcgttgtgccagcgactaaaaagagtgcctccggagccagcgtggtggccatagacaacaagatcgaacagg

SEQ ID NO: 352245 - DNA, 74 bp, Homo sapiens
cgcgaggagccggcgtggccctggttggaatcgaagcctcttaaaatggcagatgacttggacttcgagacagg

SEQ ID NO: 352246 - DNA, 100 bp, Homo sapiens
gcagacgacagttcaaacaaagaggccgcggaggagaagccggaggaggacaacgactaccaccgcagcgacgagcagacatcgctattgcggttccgag

SEQ ID NO: 352247 - DNA, 83 bp, Homo sapiens
agatcacacccatcttgccccatgactaccagatggattaccgggccttggtgcatgagcgagatgaggcagcctatggggag

SEQ ID NO: 352248 - DNA, 100 bp, Homo sapiens
tcacattggccggcaacttgttccaggattgatttccagagacttatgttacttgaggaagacaccaagaaggcaaagaaaaggagccagggatggctct

SEQ ID NO: 352249 - DNA, 49 bp, Homo sapiens
ggtcaacctgcgcccccagatgtcccagatgttcctcctgctgatcaag

SEQ ID NO: 352250 - DNA, 83 bp, Homo sapiens
ctgacgtcgccagggccatgctttctggcagcctggcatcctcgctacaacctcattgttgtgggccgatacccagatcctaa

SEQ ID NO: 352251 - DNA, 98 bp, Homo sapiens
gcagtctaaacctgtgaccacccctgaagaaattgcacaggctgagctcattggaagtctcacccacaagctggagaccctccaggaggcgaagggga

SEQ ID NO: 352252 - DNA, 100 bp, Homo sapiens
ggcccttccaaataagcggcataaagcaattgagaattcaggtgtcaccacagtgatggcagtggaggacagcacgctgcaagtagtggtacgggtgcgg

SEQ ID NO: 352253 - DNA, 100 bp, Homo sapiens
ggggaaccagggctggctcggtgggacagggcctcagagatccggcactccacccagagcctctttgagtacatgaagggcattcagagcgacccgcagg

SEQ ID NO: 352254 - DNA, 82 bp, Homo sapiens
tttagagctgcggaacaggacgccctctgatatctctgttgaggagctggcgcggaatctggtcatcaaggtcaacagggat

SEQ ID NO: 352255 - DNA, 100 bp, Homo sapiens
gaaccatctgtggaccagggccccggggcaggcatccccagtgccctggttctcatcagcattgttggaccctgatgacatacatggttgagggtggtgg

SEQ ID NO: 352256 - DNA, 105 bp, Homo sapiens
caaggtggcctaccaggaggccaggggtgtcgccatggagctcttgtccctggcaaagcgaaagcgcagtgactctgaggagaaggagccgcctgtgagtcagcc

SEQ ID NO: 352257 - DNA, 100 bp, Homo sapiens
gtcattgaggaagccggaaaagagacagaagagatgggtgatgaagaagttttctcctggttgaagtgtgcaaagggacagtcccacgaaccagagaatc

SEQ ID NO: 352258 - DNA, 89 bp, Homo sapiens
gatggatccatttctcctattgaggagtcaacggtcccgggattcttgagctgtgcccagctgacgagcttttgaagatggcacaataa

SEQ ID NO: 352259 - DNA, 98 bp, Homo sapiens
ccaaagtgggaaacattgaaatcaaggcggagtacgtccagcttgttactgaacttcgaatgacaagagccattcagcctcagatcaatgctttttta

SEQ ID NO: 352260 - DNA, 96 bp, Homo sapiens
gcctggtgcagagccccaattcctacttcatggatgtgaaatgcccagatacccagagagcattgcaccttttggaggaatatcgttcaaaactaa

SEQ ID NO: 352261 - DNA, 75 bp, Homo sapiens
gcccggtgcccgaggaggcagccaagctcatggcctgccactgcgtgcgatatggaatattatcttgtaaaatgg

SEQ ID NO: 352262 - DNA, 95 bp, Homo sapiens
gacttagaagctaccgagttaccctaagaaaggtgtttgaggaactgtggaagagggaaggcaagactccagggcagattgtttcagaaaagcag

SEQ ID NO: 352263 - DNA, 101 bp, Homo sapiens
ctggccttcaggaaaagcatcccggaggaggaagaagaagtgttatatgtcctaaagtaaggtttcagttgatcacagccgagttaaattgacattaaaga

SEQ ID NO: 352264 - DNA, 101 bp, Homo sapiens
gagccagccagcaggaaatacagcatgtttaaggggctcaagccgactgttatccttctctcccgaggaatttccgacgctgaaagcagctggagggcagg

SEQ ID NO: 352265 - DNA, 83 bp, Homo sapiens
ggaaaacaagctcagggctcccagtgattctacattatggagttcatgatcaagtgttgcccacaccaaatgcttcatccaga

SEQ ID NO: 352266 - DNA, 74 bp, Homo sapiens
cgagagcgcgaatatcgtcatcgttagaaggtggatctccttacgtagcagccaaaataaatgaagcaaaagac

SEQ ID NO: 352267 - DNA, 83 bp, Homo sapiens
agaagatggacaagatggtgcagaagaagaacgcgtgggaatgtaagacggacttagatattgcatacaaatttggaaaaact

SEQ ID NO: 352268 - DNA, 60 bp, Homo sapiens
aggtcaccctggaagagtcgctggccgaaggaacttagtgatttggcccgtgaccctcca

SEQ ID NO: 352269 - DNA, 82 bp, Homo sapiens
cttcagcttcctctcgggcatgaccggaaaggccaagggacccagacatggagctgcgggaagaagcctggtctccggggcc

SEQ ID NO: 352270 - DNA, 97 bp, Homo sapiens
caggctgtcctggccaacctgctgctggaggaggataacaagttttgtgcagattgccagtctaaaggtgaagtattacagacacttagcacctgat

SEQ ID NO: 352271 - DNA, 75 bp, Homo sapiens
agcagcccagacgcggcacagagagggcctgggagcttgctgcagcttcagagtccggcagcgtcttctcttgag

SEQ ID NO: 352272 - DNA, 75 bp, Homo sapiens
aatttcttgggtgaaaaatatatccgcagggttcggatgagaccaggttgctccttgagggcaggacagttctta

SEQ ID NO: 352273 - DNA, 100 bp, Homo sapiens
ggggggcgatgaccgtgcgctgaccctgactcactccaggttcaatttcagaagcttcagcaactgcgccttacacagtaccatggaggatccttaccaa

SEQ ID NO: 352274 - DNA, 100 bp, Homo sapiens
gccttccaaagtgctggcattacaggtgtggacacctcaagatcgccagtgtgtcctgagtaccttagcacagttgcttttggataaggactgtactgtg

SEQ ID NO: 352275 - DNA, 74 bp, Homo sapiens
gcggaaggtgatgcccaagatggaccagggaaatcctcattgacgattcaatttgttgaaggccaatttgtgga

SEQ ID NO: 352276 - DNA, 51 bp, Homo sapiens
aagtggaattttggagatattcaaaggtgtgggaaccgctgagcagaacac

SEQ ID NO: 352277 - DNA, 75 bp, Homo sapiens
acccaggaggcatttgaagttccacagagagagatcatcattgcctgaatttagctttgtgactgcaagagcaag

SEQ ID NO: 352278 - DNA, 100 bp, Homo sapiens
ttccgttttatgataactaagctgcagggaaataaatcggctggccctactgcaatctactgcactcgagccccatggctgggggttatggagtgatggg

SEQ ID NO: 352279 - DNA, 100 bp, Homo sapiens
ccacagttcagtgtattcgttctgtgcctgaactcaaagatgcccttaaaagtttctccacagacactacccaaagcagtccttcactacagtggcagac

SEQ ID NO: 352280 - DNA, 75 bp, Homo sapiens
gaaggatgaccaggtcaaaaagtgattacagtggcgagatcttgaacaactgctgcgtcatggagtaccaccaag

SEQ ID NO: 352281 - DNA, 101 bp, Homo sapiens
gcaaaggcggctcgggagattcagccgtgaagcaagtgcagatagatggccttctgaagtgagtagtgaatatagtatggacaaggcaatggttgaatttg

SEQ ID NO: 352282 - DNA, 100 bp, Homo sapiens
agtcctggggctctgccgggcgcgtccccggaacgcactgctgctcctcggtgccgtgagcgatgtggagatgcaggaacactatgatgagttttttgag

SEQ ID NO: 352283 - DNA, 97 bp, Homo sapiens
gattctgaaacaagcagtcttaatcagcaagctttctctgctgaagttgcaactattactgacaggtataaaaatcttcccacagcttcccgaaagc

SEQ ID NO: 352284 - DNA, 75 bp, Homo sapiens
cagtttgcgggactcagtcccatcactccaaggagagaagctgtgaaagttgtgtagatttactgtttgtgagag

SEQ ID NO: 352285 - DNA, 104 bp, Homo sapiens
gcggccttctatgccaagaagatggacaagcccatgctgaagcaggccggctctggcgtccacggtgactccccggacagctcaacaccaaagctttcgcgggc

SEQ ID NO: 352286 - DNA, 100 bp, Homo sapiens
gctgggtccgctgagcggggcgacccgaggatggaggatgaagctgtcctggacagaggggcttccttcctcaagcatgtgtgtgatgaagaagaagtag

SEQ ID NO: 352287 - DNA, 100 bp, Homo sapiens
caccctctgccgagtctcaatatctgtcttcggtggactccttcggcagtccacccaccgccgccgcctcccagaaagaatcttcaagagggagacatag

SEQ ID NO: 352288 - DNA, 74 bp, Homo sapiens
ggccaagtaaagaccaagtgctttgaaatgacgattccacagtttcaggtatacaaaactaggatatgctggaa

SEQ ID NO: 352289 - DNA, 98 bp, Homo sapiens
gaatgtgtttcactgtgaggcacacagaattctctacatttgtgaaagtcagtttctgaggaatttcatcaggtcttgggcgtctttggtactggctt

SEQ ID NO: 352290 - DNA, 99 bp, Homo sapiens
gtttgatcctccccctcacatgagagtacctaccattcctccaaacctggcaggaatccctggggggaaaccggcccatttggaggccagcgctgagaa

SEQ ID NO: 352291 - DNA, 83 bp, Homo sapiens
cccagttcaccaaacttcgccgaggcatggatgaaaaggagtttacagttcaaatcaaagattactgccaaatctgtcgaaag

SEQ ID NO: 352292 - DNA, 80 bp, Homo sapiens
atcccctggatgggggaccacaagatcctcatcgacaggccctgggctgcatcttgtacctgctgtgcttccggcagcac

SEQ ID NO: 352293 - DNA, 90 bp, Homo sapiens
ccacagaagtttttcttccaaacagagctgcagccacccacacagaatatgcctatgggtcctggagggatgaatcagagcggccctccc

SEQ ID NO: 352294 - DNA, 82 bp, Homo sapiens
ccttctctgtcagctctttccccgtcagcatcccagccgtgctcacggattttttatcaagcagaaatgcatcgaacaacga

SEQ ID NO: 352295 - DNA, 90 bp, Homo sapiens
catcatcaaggatcaggaccgcaagtcccgtcttatgggacttgaggccctcaaggatctcatggtccggaatgacaccccctgtggaac

SEQ ID NO: 352296 - DNA, 100 bp, Homo sapiens
cctttctatctgctcacttcttacagactgtaatcctgttggctggatctattattggcaaaggtggtcagcggattaaacaaatccgtcatgagtcggg

SEQ ID NO: 352297 - DNA, 82 bp, Homo sapiens
ggtcagtccgccgctcaccccgcggccgcaccttcccgccttctcagaaactatgttccaacttcctgtcaacaatcttggc

SEQ ID NO: 352298 - DNA, 75 bp, Homo sapiens
gcaatccagtgccctataatgaagcaaaacaagctatcgatcagggaagatctccagttataatagataacacta

SEQ ID NO: 352299 - DNA, 96 bp, Homo sapiens
ttggacttcagaggaaggcagctattctcaggatatgacaggggtaacacccttccagatgatttttgaggttttgctgatctttgcaaaggaaga

SEQ ID NO: 352300 - DNA, 50 bp, Homo sapiens
aattaaggagagaacagctacagaaactgttcaggttccattatcaaaac

SEQ ID NO: 352301 - DNA, 83 bp, Homo sapiens
cgcgccggctatggccgtgccctggggctgagccctcagcccgaccctgcccgccctggactggcagctgccgtcccactcag

SEQ ID NO: 352302 - DNA, 82 bp, Homo sapiens
attcataatggagctactgtactggctattggaaggaggagattctgaagataaggaggtgactctgacatcattagaagca

SEQ ID NO: 352303 - DNA, 100 bp, Homo sapiens
agtgtgccacacaggtagccctggacggcattcagtgttttggaccgctcaggaagtggcagcgaagaagactgagccccgacattccagtctcgacccc

SEQ ID NO: 352304 - DNA, 100 bp, Homo sapiens
atgatttaaacaagagatttccacagaaggtgtgactgcacagaaaagttacaaaacaaatttgactttttgcgctcacagttgaatgatatttcgtcat

SEQ ID NO: 352305 - DNA, 82 bp, Homo sapiens
ggtgggcgcatatcctgggtagcctctaggaagcgctagacacatgtgtccctggccagtgtccttccacctgtccacaagc

SEQ ID NO: 352306 - DNA, 100 bp, Homo sapiens
atgctatagtctggtatcaaaagaagtctacatcggtaaactctgcaaaactccagcagttacagagcctgtgctaggagctacagggtgaagaggggga

SEQ ID NO: 352307 - DNA, 90 bp, Homo sapiens
gcggaagctggagatcacaggcgtgtcttgtcgggacgtctatgcgaagcatgcctgaggaaacccagacccaagaccaaccgatggagg

SEQ ID NO: 352308 - DNA, 100 bp, Homo sapiens
cgtgttgaaccggttcttgggggactatgtggtggacttggacacgtcccagctctctctgggcatctggaaaggtacaccaggggttggaaaaaccaca

SEQ ID NO: 352309 - DNA, 75 bp, Homo sapiens
gaaaagaggctggcccaccccttctccttggccgtctttgagacatgtccttcgataactccctgtttaccgtct

SEQ ID NO: 352310 - DNA, 100 bp, Homo sapiens
cggtcagaaaatgaagagtttgttgaagtgggaagattggggccttctgattattttggagatgaccaggatagtgaaaagtcaaaaccagcaggctcag

SEQ ID NO: 352311 - DNA, 74 bp, Homo sapiens
cccgggagatcccaggcggtgacagagtggagccatggctagagaaaaagatgttgctggtccatttgacgaag

SEQ ID NO: 352312 - DNA, 82 bp, Homo sapiens
ctggagccggcgccgggcacggcatcgggggcctggactgcacggcccggcagcagacaatgcagatcttcgtgaagactct

SEQ ID NO: 352313 - DNA, 100 bp, Homo sapiens
tttagcctgggagctgtgtgtctggacaggtgctaaaatgatgtattttctggacaagtcaaggcaggagaaagcaattgctatagccactagactagat

SEQ ID NO: 352314 - DNA, 98 bp, Homo sapiens
cgagcagcgccagcggccgagcgggcggcttcctggcctgggcgctccggtggcggcggagccttggaccgcagttgccggccaggaatcccagtgtc

SEQ ID NO: 352315 - DNA, 119 bp, Homo sapiens
gtagatggtggctttctttggacccttgacatcaaccagttactatttgcttccacttcaccatcggatgtttgccactcagactgagggggagctcagagtgacccaaattctcaaag

SEQ ID NO: 352316 - DNA, 83 bp, Homo sapiens
gaagcatctgatgcacgttccatccggcgctcagctgggcttgaggtcagcccaaggccaaccccactgtcactctgttcccg

SEQ ID NO: 352317 - DNA, 74 bp, Homo sapiens
tcatcgtcatccgcctctgccagactgaggggccgttccttgtgaaaggccttttccacctcatatccagctcc

SEQ ID NO: 352318 - DNA, 84 bp, Homo sapiens
gtgaagaagctgcgccagtacatcagcgtgaagacgcagagggagacaggtgccgtgagcgatgtggagatgcaggaacactat

SEQ ID NO: 352319 - DNA, 100 bp, Homo sapiens
gagtgaaagagcttttgtctccttagaaggaaggctgagaaactaaagaccaagatcactccatggatgaaatgacagctgtggtgaaaattgaaaaagg

SEQ ID NO: 352320 - DNA, 101 bp, Homo sapiens
taatcccctgcatcggatcaccggcgtgccccaccatgtcagacgcagccgtagacaccagctccgaaatcaccaccaagatatttggagttcttacaaca

SEQ ID NO: 352321 - DNA, 100 bp, Homo sapiens
tgtcgctgctgctcgttcgagtcgcaggtgaactccagtttgcttttgtgtgcttcctgctggggaatgtgtacgaggcatttgagcattggaagcggct

SEQ ID NO: 352322 - DNA, 83 bp, Homo sapiens
agttcccggacatgatcctctccgcctctcgaggtacggactaaggtctcggcgcggaagatggccggcggcgtggacggccc

SEQ ID NO: 352323 - DNA, 100 bp, Homo sapiens
cggctgcaggactgggcacagcatgagatccaaaggcagggcaaggaaactggccacaatcagaaattggctttggaaaaatggaaacctacatcaaatt

SEQ ID NO: 352324 - DNA, 88 bp, Homo sapiens
tggtaatgtcggccattgagaaattgttgaggcaggccagaaatgtacacacaggagagctggctgcagtaaaaatcattaaattgga

SEQ ID NO: 352325 - DNA, 100 bp, Homo sapiens
ctgactggctgcctgagcacaaacccggcagcaggatgggtgtggaagcagtgatggcacttttggaggggaccccagataccccagcctgtgtagtgag

SEQ ID NO: 352326 - DNA, 75 bp, Homo sapiens
tgcagaactagccctgggtgagaacagcgaagtcttgaagagtggccgggctgtgaggatatcattgctgagagc

SEQ ID NO: 352327 - DNA, 83 bp, Homo sapiens
gtcgcgcggaggcggaggcttggggtataaagatggctgtgaccacatcggggagcaccgagatgatgaaagagaactggccc

SEQ ID NO: 352328 - DNA, 82 bp, Homo sapiens
cttcagggatgagtcatgtggcagtggaaaatgcgctcgggctggaccagcagaaagaagatgctgatatgctacaacacgg

SEQ ID NO: 352329 - DNA, 90 bp, Homo sapiens
cggaggcgttcagctgcttcaagatgaagatgtatgtccctgggaagctgcatgatgtggaacacgtgctcatcgatgtgggaactgggt

SEQ ID NO: 352330 - DNA, 75 bp, Homo sapiens
gcggccatggtccaaccttgaagcttcttccagaccagctggtcttgcttctggagcatctcttggagcagaaga

SEQ ID NO: 352331 - DNA, 74 bp, Homo sapiens
acagagtgctgttttagagctggcagcagcatctcagcccaagagaagagtatgctcaggtaatcaaaatgttg

SEQ ID NO: 352332 - DNA, 73 bp, Homo sapiens
taggtggtctgactaccagtggctctgcagagaaatgaaagctcattagcatctacactgaagacgctcctgt

SEQ ID NO: 352333 - DNA, 75 bp, Homo sapiens
cgccaagtccctatgacactgactccctcaaaatcaagatccaatggatttgaacagaagcgctttgccaggctt

SEQ ID NO: 352334 - DNA, 75 bp, Homo sapiens
cagtcaactgccaagcatgtagaaagccggaaggtttttaatgaccacaacaagcaagcatgcagcttactgctt

SEQ ID NO: 352335 - DNA, 121 bp, Homo sapiens
gattagatgatccaagtcaccaagaaattactgtctcaagtgatacgcttccttgtggtcatagatgcaaagagatgtgtcatcctggtgaatgtccctttaactgcaaccagaaggtaaa

SEQ ID NO: 352336 - DNA, 83 bp, Homo sapiens
gctgtggatgaatttgcttttctggaagggttccaggcccggccggagctcctggaggtgttcagcacggagttccagatgcg

SEQ ID NO: 352337 - DNA, 76 bp, Homo sapiens
attgagagcaaaatctacaagatgatgcagggaggagatttaatccagagactgacttcactatagaacccacagt

SEQ ID NO: 352338 - DNA, 75 bp, Homo sapiens
aaggacgggaagtcactcataagcgcgctcaagagtgaaaggtgtagcagtcactcggcctacacccacagcatc

SEQ ID NO: 352339 - DNA, 97 bp, Homo sapiens
gacggggaggaggagcaggagctggaggaggagccgccgccgccagctttgctcagggtccgttgaaagatgccccgaatctcatctgcactcctca

SEQ ID NO: 352340 - DNA, 50 bp, Homo sapiens
gatgctcacactgttggtgtaaggccagtagacaagatttgactctggag

SEQ ID NO: 352341 - DNA, 97 bp, Homo sapiens
gagacgagaagcctgaaaagtcgcagcgagctggagccgccggaggcaagaaataccgcccacgaatggatcaggaagtctctgaccaagccattag

SEQ ID NO: 352342 - DNA, 100 bp, Homo sapiens
accgtttggcatcccgactgtaagcaatctacgaagaccgaggaaaagctgcggacagccttttgattgattatcaatttaccttcagcttattacagga

SEQ ID NO: 352343 - DNA, 90 bp, Homo sapiens
cagcacttctgggacgcacagagaccgtgaagattccaagttcaggagaactcgaccgatcttagcaaagcaatgtctcaagatggtgct

SEQ ID NO: 352344 - DNA, 85 bp, Homo sapiens
cagaagcccacgaggcagccggggcccaggtcgggaaagaggttaaagaagacacgcaagtatgatatcatcaccactccagcag

SEQ ID NO: 352345 - DNA, 98 bp, Homo sapiens
gatatactcaattacacttcgactctcaaagcaataccaggatagctgttgtttcagagaaaggtggtgaggtttctgaagaattatccctgaaactg

SEQ ID NO: 352346 - DNA, 100 bp, Homo sapiens
taatcccaatgctgaagtaagattgtcttggaaatactaagttggccagcacctaaccaagtcacttttcatctgccactacatcgttactatgctatgt

SEQ ID NO: 352347 - DNA, 90 bp, Homo sapiens
gttggaccttttggacaggaaagtgtaacatcagttacagacaacgcacctcttgctttttcctccaaagtatgttatgttaagtttcgt

SEQ ID NO: 352348 - DNA, 100 bp, Homo sapiens
ctggcattagcactaatgatcacttacaaggacgaccaggccaagcttaagaagacaccatcatccgagcagtattgatttttgcagaaggaatttttac

SEQ ID NO: 352349 - DNA, 100 bp, Homo sapiens
agcgggaaaaggctaatggcacaactgtccacgtaggcattcaccccagcaaggtggtcttccgggatccgtatcggtttaagaagcggacggagctgtt

SEQ ID NO: 352350 - DNA, 89 bp, Homo sapiens
ggaggcggaggcagaggtggaggcgctttgaaaggttatgaagacagtatggagtttccagaccatagtagacatttgctacagtgtct

SEQ ID NO: 352351 - DNA, 82 bp, Homo sapiens
cgagcccttcaccctggtggagcgagacggtactccaaagattcaggtttactcacgtcatccagcagagaatggaaagtca

SEQ ID NO: 352352 - DNA, 100 bp, Homo sapiens
cgaatcagtacagcgttcacaagacttcatcacctctttgtacatcttctgcaattactcgggaacctcttactgattgtttaaaggatgttgatttgat

SEQ ID NO: 352353 - DNA, 75 bp, Homo sapiens
cgagtgtaggcgacaggccgctgacggccggaaggaaaatgatattaacctggctgcagagccaaaagtgaaccg

SEQ ID NO: 352354 - DNA, 82 bp, Homo sapiens
cggcagaggatccagtgttcaccatcctggccccggaagggggatatgagactttctactcggaatatcctgagtgttgcgt

SEQ ID NO: 352355 - DNA, 98 bp, Homo sapiens
agatggcgaaggtctcagagctttacgatgtcacttgggaagaaagtgagtgagaaggttggaggagctgaaggaaccaagctagatgatgacttcaa

SEQ ID NO: 352356 - DNA, 50 bp, Homo sapiens
ctgcaggcctccgcgctcagtgctattgacctgaaaagtggttctggaaa

SEQ ID NO: 352357 - DNA, 83 bp, Homo sapiens
cgacgggccgagcctgccactgtctcggcgcggaagatggccggcggcgtggacggccccatcgggatcccgttccccgacca

SEQ ID NO: 352358 - DNA, 98 bp, Homo sapiens
cttccttgagtaacggtgcaaaatgtttttctgccgatttcctggcatatgacataggattaaagcaaggagagccaatcatgactggcaaaacacag

SEQ ID NO: 352359 - DNA, 100 bp, Homo sapiens
gcggccaactccaatgggcctttccagcccgtggtccttctccatattcgaggccagcactccttgcccgaggacagagatggcgagcgcccggattggg

SEQ ID NO: 352360 - DNA, 83 bp, Homo sapiens
gtcgctggtcgtgcgacccaagcccctgcattcctgtacgggtttttagaacttcagccataaaaatgggcagaattttcctt

SEQ ID NO: 352361 - DNA, 100 bp, Homo sapiens
ctttacaaaatcaccaatttgaactaaagaagctgaagtttgcagacctgacagacgctgctgcccgcaacgcggagctgctccgccaggccaagcacga

SEQ ID NO: 352362 - DNA, 90 bp, Homo sapiens
ccacgataggggtggatttccgagaacgagcggtggagattgatggggagcgcatcaagcgcaaatctgtccaaggctgcctggggagca

SEQ ID NO: 352363 - DNA, 98 bp, Homo sapiens
cgcaaggtgtccacgtcgggtcagatccgacagaagatcggcgcctacttcggggcctccctctgctccgtggacgtggacagcaacggcagcaccga

SEQ ID NO: 352364 - DNA, 100 bp, Homo sapiens
cgatgccaatctctgcttgaaaggagaagacttggattctcagagattcagttgtggaaattctttttgaacaagataatgaagagcaatcagttgccac

SEQ ID NO: 352365 - DNA, 74 bp, Homo sapiens
tttggttacctatgtacctgttaccactttcaaaattccacttacttacatgatcatttcgagagatgtaatgt

SEQ ID NO: 352366 - DNA, 82 bp, Homo sapiens
gaaagagtcaacagcagtggcaacagtgcacttgcaggaaagacatggtgaagatttcaatggatatctttgtgaggaaatt

SEQ ID NO: 352367 - DNA, 98 bp, Homo sapiens
agcgctgcccgggcggtgtctcgggaccccgacagctgcggttggcgggcaccataggccgaagcacccggcccgagcgggaagaagttccgcagcaa

SEQ ID NO: 352368 - DNA, 50 bp, Homo sapiens
catccccgagcagcggtggaagctgggcaaggaagtggagcaacagtcag

SEQ ID NO: 352369 - DNA, 123 bp, Homo sapiens
ggggaaagcccaggggtacaggaggcctctgggtgaaggcagaggctaacatggggtgtcatggagaaactccagctgggcccagagattctgcagcgggaaaatccaaggcttatttatgcc

SEQ ID NO: 352370 - DNA, 101 bp, Homo sapiens
ggctgacactgctgcctccagctagttatttcgtcctcttccgttcttcacccctacaccttggatcaccaggagactaaagtccatcaaaaacatccaga

SEQ ID NO: 352371 - DNA, 88 bp, Homo sapiens
gcttgctccctacgatgagaactggttctacacgcgagctgatcctctggaccttctccatctacctggagtcagtggccatcttgcc

SEQ ID NO: 352372 - DNA, 80 bp, Homo sapiens
tggctcacctccggggatttgccaaccagttccagggtctccctccactgctgtagtaacccgggtccggggcctcggtg

SEQ ID NO: 352373 - DNA, 82 bp, Homo sapiens
atcaagccaacaacagtgacggaatgcctccatacataattagtaagctgtgtgggctggactactgctgaagagctgtatt

SEQ ID NO: 352374 - DNA, 75 bp, Homo sapiens
caggacagccgaactggaatctggatgagcagctcaagcagggcgatgccagtccctccactccagaggagaacg

SEQ ID NO: 352375 - DNA, 99 bp, Homo sapiens
gtctccaaggaggaaacccccaagttctgcagccagtgcggagagaggctgcctcctgcagcccccatagcaggtagctttgcagtttggggagggctg

SEQ ID NO: 352376 - DNA, 119 bp, Homo sapiens
cgagcacgagctgtgaggggattcacttgtgtgcggaactcctcggaaccatgacaatgcagatcttcgtgaagactctgactggtaagaccatcaccctcgaggttgagcccagtgac

SEQ ID NO: 352377 - DNA, 83 bp, Homo sapiens
cttaaaaatcaccagttactttaatgattggctggggaacagaccagggaattggtggatttggagaagagccgggaattaaa

SEQ ID NO: 352378 - DNA, 100 bp, Homo sapiens
ctcaccgaggcgaaggggccaaccatgggaaaggagagtggatgggactcaggtgttggctacgtttgtggttttaagaaagcctgagggcctgaaggca

SEQ ID NO: 352379 - DNA, 100 bp, Homo sapiens
gccaacaagacgcacccgtccatcttcgggatcttcgacgggcacgggggagaggtaaaaagatggcctatcagaaggtccatgcagatcaaagagctcc

SEQ ID NO: 352380 - DNA, 74 bp, Homo sapiens
ggaatgaaagccatcatgatggcctctcaaagtcttatgtgtggacatcaggaaggatttgatgccctggatcc

SEQ ID NO: 352381 - DNA, 75 bp, Homo sapiens
gccgcgccctcggcctgcacggaccatggtgaatccgggcagcagctcgcagccgcccccggtgacggccggctc

SEQ ID NO: 352382 - DNA, 96 bp, Homo sapiens
cgaagacataaatccctgagtgcccgggaggagccttaacaagcgcacggagccctcaagggctgaagaagatgcagagcagcctgaagctggtgg

SEQ ID NO: 352383 - DNA, 87 bp, Homo sapiens
caacgcctggctcggagcagcagcctctgagaaatcttcccaaggctgcagacaccgacggatttgctttgggagccagagtagctg

SEQ ID NO: 352384 - DNA, 82 bp, Homo sapiens
gaagggaaggcgcgagtgaggaaaggaggtactgtaggttctccttcttcatcaagaaaaagtggaaccagctgtccctcca

SEQ ID NO: 352385 - DNA, 98 bp, Homo sapiens
gttcaagttaatccaggtgagactttcacaataagagcagaggatggaacacttcagtgcattcaagggccgagatctggacgataaaattcaggaat

SEQ ID NO: 352386 - DNA, 100 bp, Homo sapiens
gggatatgtgatcaaagcatcagaaggactgttccctgatgtgggtggaggttatttcttgccacgactccaaggaaaacttggttacttccttgcatta

SEQ ID NO: 352387 - DNA, 100 bp, Homo sapiens
ctcaatggaggaattggtgctcctattgtacagctgtctgtgatcctggaaacatacgtgtgactgaagctcccaaacacccaatctctgaagaactgga

SEQ ID NO: 352388 - DNA, 90 bp, Homo sapiens
aaagcccagaacttttcctctgttataagagagggagagataaaccaccgcttacagatattgggaacatgtttgacaagctgaaccgtg

SEQ ID NO: 352389 - DNA, 89 bp, Homo sapiens
tgatggaattaaatctgcgagctacaaggaaagagtaggaaactttttggcagacttttacctggtgaatggacttgttttagaatcaa

SEQ ID NO: 352390 - DNA, 100 bp, Homo sapiens
ccctagagcacctatcatgaacgaggagaccaagaaattaggaatggctggccagaagttgggctcctccgctctcctgtgctacatccgccctgacact

SEQ ID NO: 352391 - DNA, 125 bp, Homo sapiens
caaacgtctacactgtacatgctttttattacaagactacggagcataggaggaaaattcatcatctgattccgtctctagagcctttgaggtcactcctgacgctgacatggctgtgaagagct

SEQ ID NO: 352392 - DNA, 75 bp, Homo sapiens
cttctgtccctgctcagtcggccaagaagccctgcccaggtttggtgcacctcgatttggaggaagtagggcagg

SEQ ID NO: 352393 - DNA, 100 bp, Homo sapiens
acccagcctacaccaccctggaatttgagaatgtgcaggtgttgacgatgggcaatggaaagtctttgggttcggaggattccagaaacatgaaggagaa

SEQ ID NO: 352394 - DNA, 82 bp, Homo sapiens
gcgcctcccgccgcgcccgggatgtattcgtccccgctctgcctcacccagcaaacggggattcagcgtccgatcctttgga

SEQ ID NO: 352395 - DNA, 99 bp, Homo sapiens
caccggaaccagtgccagtactgccgtctcaagaagtgcttccgggtgggcatgaggaaggaggaactgaaaagctccatcattggcaagaagaagcca

SEQ ID NO: 352396 - DNA, 98 bp, Homo sapiens
gtagaaaggatggtggaggactacctggcaagtggttatcagctgcctcccgaatgatcaccaacagcctgaaccatgactctccacccagcacaccc

SEQ ID NO: 352397 - DNA, 85 bp, Homo sapiens
attcccaagtccttcacccggtttctgcagaaaaatgtgggccccctccacctattgacaatggagacattacttcattcctgtt

SEQ ID NO: 352398 - DNA, 100 bp, Homo sapiens
ccacgatgagcggcagagtcggcgatctgagccccaggcagaaggaggcattggccaaggtgacagagctgaatgaacctctctccaatgaagatcgaaa

SEQ ID NO: 352399 - DNA, 82 bp, Homo sapiens
gccggccgcccgcacgtccgtccgacagtactactggtatgacgagcgggggaagaaggtcaagtgcacggccccacagtac

SEQ ID NO: 352400 - DNA, 98 bp, Homo sapiens
ctcatccactgctcgctgcctctccagaaagagtctttggagcacactctagaggagaccaaggcccgttacagcagccagttagccaacctccagtc

SEQ ID NO: 352401 - DNA, 75 bp, Homo sapiens
gactacgaccccagtgaccggccccgcttcaccgagctggtgtgcagcctcaggcctccccatggccacccatgg

SEQ ID NO: 352402 - DNA, 97 bp, Homo sapiens
ttgttgccattgaaaaccctgctgatgtcagtgttatatcctccaggaatactggccaggagctgcagaggctggagacagagttgggccaacccgc

SEQ ID NO: 352403 - DNA, 100 bp, Homo sapiens
caatcccgggcatgggcggcaactctttgatgtactactataatgggaaagcgcagtgagtgaaggaccaactacccaacaaccacctatgctgccccca

SEQ ID NO: 352404 - DNA, 75 bp, Homo sapiens
gccctgcagtacctgcagaaggtctctggagacatcttcagcagacctacgtctaccagtggccctggacgctcc

SEQ ID NO: 352405 - DNA, 75 bp, Homo sapiens
catgggttcagttcttttgttccacggagaacaggtcagttcaccgggacctggaggcccagattgcgatcgtga

SEQ ID NO: 352406 - DNA, 89 bp, Homo sapiens
ctgcctacacctgcgtgagtcggctgggcgagctgggcctcgtggagttcagagacattttgcaagaacgaggctcaaggatgtgaggg

SEQ ID NO: 352407 - DNA, 125 bp, Homo sapiens
tcgtgtggaccagcggtatctcagccctggatggtgaatttcagtcagcctcagaggttgacttctacattgataaggctgttgccaaaatggttcaacagtgctgtacttatgttgaggaaatc

SEQ ID NO: 352408 - DNA, 100 bp, Homo sapiens
caccgaggcgaagctgaaaaagctggaggaggagcagatcatcctggaggaccagaactgcaagctggccaagggcatggcctatctgcacgcgcagcac

SEQ ID NO: 352409 - DNA, 83 bp, Homo sapiens
agaagggaaggcgcgagtgaggaaaggaggtactgtaggtgtggtggctcacgtctgtaatcccagcactttgacaggctgag

SEQ ID NO: 352410 - DNA, 100 bp, Homo sapiens
gcaccatgtccaccaaagcggagcagttactatactggcaattgctggagaagattttgcaattgttgcttctgatactcgattgagtgaagggttttca

SEQ ID NO: 352411 - DNA, 75 bp, Homo sapiens
aggtagagaacgttgtccacgaggacttccaggtcacggaggaggtgaaagacttcatagacctcacgttgtcga

SEQ ID NO: 352412 - DNA, 75 bp, Homo sapiens
tgtatataaggcttcattaagcttaactgagaagtatttctctgtagaggataaaagaatcagagtgtctcaacc

SEQ ID NO: 352413 - DNA, 75 bp, Homo sapiens
cttctacgggggcaatggcatcgtgggagcgcaggtggcacaagaatggctcaactctccaaatagagagaattt

SEQ ID NO: 352414 - DNA, 100 bp, Homo sapiens
gattgatgagatcaagatgaccgacgacgacctgtttgtggacttggggagcgggtacctgctcttccgagacttctgcctgaaccacctggaggaggcc

SEQ ID NO: 352415 - DNA, 75 bp, Homo sapiens
tcctgctggggctcatgtttgaggtcaaggtcagcatctcctcgacgatcaagatctatctctcttcgtagatca

SEQ ID NO: 352416 - DNA, 83 bp, Homo sapiens
gatgaaagaggctgcacacccctgcactatgcagctacatcagacacagatggcaatttgttgcatattctaaggacccagac

SEQ ID NO: 352417 - DNA, 100 bp, Homo sapiens
gtcaccttggtcgccattctgtgtactcacaagcactggctgtcattatttgtatcaaaaacaaagaatttgaaaaggcttcaaaaattttgaaaaaaca

SEQ ID NO: 352418 - DNA, 73 bp, Homo sapiens
cgctatgggcggctggcggaccctgctgtcactgactttccaggacagtcattttgtttactcattcagccct

SEQ ID NO: 352419 - DNA, 85 bp, Homo sapiens
cgcagcccccgccgtagccgcctccgagcccgccgccacatcctctgagagtgatcagcagctggactgtgccttggacctaatg

SEQ ID NO: 352420 - DNA, 100 bp, Homo sapiens
ctgagaatgcacttactggctcattcagtatctcccaaaattgtagagatttcttcagatatctccattaatgaagggaacaatattagcctcacctgca

SEQ ID NO: 352421 - DNA, 100 bp, Homo sapiens
ttataggctccctcctgctgtcaggctacatcagcaaagggatgattgagtcgaatgacatttcagaggagacgatcaggacgaaggaaactgtggaggg

SEQ ID NO: 352422 - DNA, 80 bp, Homo sapiens
gaatcaaggtccagagaaggtggaggaatcctgatactgagcgaggctgggaggcggcagaatgcagccagaggagggca

SEQ ID NO: 352423 - DNA, 74 bp, Homo sapiens
ggactggcttacccaaaagcagaccttggagaacagtcagagcagcccgacggccatggaggctgaagagacga

SEQ ID NO: 352424 - DNA, 100 bp, Homo sapiens
gcctttgatgccctggtgaccttctgtgaagaactggggtactccaaagattcaggtttactcacgtcatccagcagagaatggaaagtcaaatttcctg

SEQ ID NO: 352425 - DNA, 100 bp, Homo sapiens
cctggatcatgattcaggaacatgtcaagtccttttcttggcctggaagaaacgctggtttatcctgcggagtggccggatgagcggtgacccagatgtt

SEQ ID NO: 352426 - DNA, 100 bp, Homo sapiens
agaccctggagcctcagttggaagcagccgatccagcctgcggagcctgtggggcaggatttttttcccaggaagccatcccgtcagaggggttcaagtg

SEQ ID NO: 352427 - DNA, 100 bp, Homo sapiens
ctgcttgaatgtctgccgaaatgttcaagtttaccaaaagagaggcaccgctggaacactaatgaggacttttcttggtagagatggaaatccaaataaa

SEQ ID NO: 352428 - DNA, 100 bp, Homo sapiens
agtgaatgggcggatctcatatcttcacttggcaaactcaacaagtatgaaaacccatggacaatcccgaatatgttgtcaatgacgagaattggcttgg

SEQ ID NO: 352429 - DNA, 100 bp, Homo sapiens
cggccgggcagcggggcctgggacgcgccccgaggaggagcggggcggcgcaggcgtactatactggcaattgctggagaagattttgcaattgttgctt

SEQ ID NO: 352430 - DNA, 73 bp, Homo sapiens
gtggatgctgccccctcaaggtgctatctcagagaccaggataacagtcttgctgaagacaatctgaaactta

SEQ ID NO: 352431 - DNA, 90 bp, Homo sapiens
ggccttctacatcctgttcttcaccgttatcatctatgttcggctggacttctccatcaccaaggtgctggagaatctggtaaaagcacc

SEQ ID NO: 352432 - DNA, 100 bp, Homo sapiens
agcccttcaagaaagacttgatggtctggtagaaacaccaacaggatacattgaaagggaagacatctggtttgacgacgtggacccagcggatatcgaa

SEQ ID NO: 352433 - DNA, 100 bp, Homo sapiens
ggactgcagctcgcggtttcctggcttctaggctccaggaggccagagctctactgaagcggcggcggccccgggggccagggggccggggactactgag

SEQ ID NO: 352434 - DNA, 75 bp, Homo sapiens
tctgtatcttcatggtgcggctcatcttcgagaggctaagaaatggcatttcaaaaggcagtgaaagggacgatt

SEQ ID NO: 352435 - DNA, 83 bp, Homo sapiens
ccgcgcctggcctggccgggaccatgaaatctcccaagcctaagaagaagaagcacaggaaggagaaggaggagcggaccaaa

SEQ ID NO: 352436 - DNA, 83 bp, Homo sapiens
atgagatccaggacatctatgagaacagtacctggagtagaacagaaaaattattatgtctgtgttcccttgggactcattgg

SEQ ID NO: 352437 - DNA, 100 bp, Homo sapiens
catctctttcaatgacaaaaagtttgtcattaaacccatcgacaagaaggcacctgaggatctcctgatgcagtccagcaaagaactttcacatgtggac

SEQ ID NO: 352438 - DNA, 96 bp, Homo sapiens
aggcttttatatgccagagaaccctgagtgtgcccctgacatgacaaggagccgtcgtcgttagggccatgatccaaaggaaccagagcagttgag

SEQ ID NO: 352439 - DNA, 99 bp, Homo sapiens
tcctgcaagatactgagagattgaagcatgctctggaaatgttcccagaacattgcacgatgcctcctgcattatctgcatatcagagatattacagtt

SEQ ID NO: 352440 - DNA, 75 bp, Homo sapiens
gtcctcatgtggggggtaaaccactcgtttccgttactatggcaatgacggcagggactacaacaacctttccta

SEQ ID NO: 352441 - DNA, 75 bp, Homo sapiens
gaccgagctctcttggggtttgtactcaaaggaccgtataatagacgctggccccaaaggaaactactctcgatt

SEQ ID NO: 352442 - DNA, 90 bp, Homo sapiens
gcccgcggcgcgcgcctctcccggaccctgcaggctgcagaagaaagatcagcaactggagcctaaaaaaagtaccagccctaaaaaagc

SEQ ID NO: 352443 - DNA, 90 bp, Homo sapiens
ggctggtgtacgtgcactactcgtcctactcggagcgctgtcgcggccatgtctgccaggtggtcattccagcagtacccctggaccaga

SEQ ID NO: 352444 - DNA, 75 bp, Homo sapiens
atggacagcagacgatcccgaacggactgaatttcgctaaggagtttgtgatcagtgatcggaaggagctggagg

SEQ ID NO: 352445 - DNA, 100 bp, Homo sapiens
taatattgcttactatgagtctatatatcctggggaatttaagatgccaaagcagctcattcacatacagccgccaaatcttaaaggcagaccacgcaaa

SEQ ID NO: 352446 - DNA, 74 bp, Homo sapiens
ttagcttcaaaaatgacaagttcgataaaagtgtgcagaccaagttgttttttgaggacagcattgatgatgcc

SEQ ID NO: 352447 - DNA, 100 bp, Homo sapiens
acttgtacagagatgtcatgttggagaactacagcaacttggtctcactgggttctcccagcagagatgtgggtccttccctgggtctgaagaagtcaag

SEQ ID NO: 352448 - DNA, 83 bp, Homo sapiens
cttgaaaagactgggcttgtccttgctggtgcatgcgtcgtcggcctctgggcagcagatgtcatgtggcctgtgttttggac

SEQ ID NO: 352449 - DNA, 90 bp, Homo sapiens
cggtgctgcaagagaaggcactcaagtttatggaattgagtgatctacagcgcgatccacctgctcactgttcagctggacctgtgggag

SEQ ID NO: 352450 - DNA, 51 bp, Homo sapiens
gacggacaagcacagtcttcggaaggtgatctttgcagagctgtttcaact

SEQ ID NO: 352451 - DNA, 100 bp, Homo sapiens
caccgctttcctggaacttgaggaaggggatgattatgaagtcattcctaacagtaatttctatgtatccagaacggcctgcagagataatacttctgtc

SEQ ID NO: 352452 - DNA, 90 bp, Homo sapiens
aggagctgtcctttgttttggattacataaaccagtcacccaagtgcattgcctttggaaacgagcttggaagctcgaagtctggctgtg

SEQ ID NO: 352453 - DNA, 90 bp, Homo sapiens
aatagatgtaatcacaaagacatggaggctaaaagagatgctaagagaatgcctgcaaaagaagtcaccattaatgtaacagatagcatc

SEQ ID NO: 352454 - DNA, 75 bp, Homo sapiens
tgttgtgactgctttggacgtgggagtcacctgaaagccaggaaatggatatgtgatggcgtccagtttggagct

SEQ ID NO: 352455 - DNA, 98 bp, Homo sapiens
cccctctccacccctcgcctgctcatcaacaaggagaaagctggccaggagaggcgggagatttttgagcagcacctgaagagcctgaagctgaccca

SEQ ID NO: 352456 - DNA, 101 bp, Homo sapiens
gcggtttcggcgcgcggccgggctggcgatggaagatggaaggaaggagcgcagcgggcaagttaaagtcttcagagccctgtatacgtttgaacccagaa

SEQ ID NO: 352457 - DNA, 100 bp, Homo sapiens
cgcagggcccctgagtccagccaaggtgaacccagatactggctacatcaactatgaccagctggaggagaacgcacgcctcttccacccgaagctgatc

SEQ ID NO: 352458 - DNA, 76 bp, Homo sapiens
tctgctgcatcatgatgtcaacaaccgtggctcacaagatgaaagagcacgttcctgttgctagagcaagtattct

SEQ ID NO: 352459 - DNA, 82 bp, Homo sapiens
tgtcagttgacctaccccttgcacacctaccctaagggaactctaatgatccaggacaaagaagttaccctggagtatgtat

SEQ ID NO: 352460 - DNA, 96 bp, Homo sapiens
tagcactggccagcagttcatctacagtggctgctccactggcaaagtggttgtgtatgctgatggtagcatatgtttagatatccttcagaatcg

SEQ ID NO: 352461 - DNA, 100 bp, Homo sapiens
tcttgtctgtctctccaaattatacagatgcatagatgtgggaatggagggaggccaggaagctgtggtggtggagcttcagtgttcgcgggactccagg

SEQ ID NO: 352462 - DNA, 100 bp, Homo sapiens
gcctaccacctgcaggaggagttcggctccaccttccccgcagacagcatgctgctagacctcggaaagaccacagcaagattctttcattcgtctcctc

SEQ ID NO: 352463 - DNA, 82 bp, Homo sapiens
tgaaactgaacttataatcgtcactggattgttattggagtgatgagtaaagaatacataccaaagggcacacgttttggac

SEQ ID NO: 352464 - DNA, 76 bp, Homo sapiens
tctggccctgcatggcgttcctggagcccgtggtcctgacaaccaagtccactttgaagggtaccaggtgtccaat

SEQ ID NO: 352465 - DNA, 100 bp, Homo sapiens
accaacttaaaaaacagttttgcctcagcccttcgtctcatcttccccgacctggtggaggggctggtgctggtgaacatcgaccccaatggcaaaggct

SEQ ID NO: 352466 - DNA, 82 bp, Homo sapiens
gccagtcgcctccaggccaagagggatccttcacccgtgtctgaggctgggaggcggcagaatgcagccagaggagggcaca

SEQ ID NO: 352467 - DNA, 75 bp, Homo sapiens
gaaattcttatgccggtctagatccaagcaaccagacgaaatctcacaaaactgtcccttatcttcagtcacatg

SEQ ID NO: 352468 - DNA, 100 bp, Homo sapiens
tggcatgctttagctatctgaacgaaacttccctttggggagttaagttttccaggccggaaggtggtggtcgtacgctgtgaaggcatcaacatttctg

SEQ ID NO: 352469 - DNA, 75 bp, Homo sapiens
aacagaaacgattgtggaaacagggagaaaactaaagttgccaaagttagccaaggagtagaagatgggcccgac

SEQ ID NO: 352470 - DNA, 83 bp, Homo sapiens
tttgtgtgacttgactcttcaaacacaaaggcggctatgagaggttttcctccgagtacccagaattctgttctaaaaccaag

SEQ ID NO: 352471 - DNA, 101 bp, Homo sapiens
aagagccccagcaccgcccctcctggaagaaggaagagacacgatgaggcgagtggtacgacagagcaagtttcggcatgtatttgggcaagcggtgaaaa

SEQ ID NO: 352472 - DNA, 100 bp, Homo sapiens
tcgcagcccaagtcttttctccctctcccagctactccctcagcggaacggactgaacattcttcacgatctgaaaggaaaagaagagattctttcggga

SEQ ID NO: 352473 - DNA, 100 bp, Homo sapiens
gggatttcgttttgcctccggttggggctgctgtttctcttcgccgacgttggaccctgggcgttttttacacatggggacccaggctcgccaaagcatt

SEQ ID NO: 352474 - DNA, 50 bp, Homo sapiens
gacacgctggtgcatctgtttgccggaggactggaccaagaggattgagt

SEQ ID NO: 352475 - DNA, 110 bp, Homo sapiens
cgctggtgcagccaccctcgctccctctgctcttcctcccttcgctcgcaccatgccgcttacaaacacgcagatggcaagaagattgatggcaggagggtccttgtgga

SEQ ID NO: 352476 - DNA, 82 bp, Homo sapiens
gtcttcttcctcctggaggtcttcaacaacatcatccagtaccagtttgatgggtttccaggcctgaggtgcccgccctggc

SEQ ID NO: 352477 - DNA, 98 bp, Homo sapiens
gggtctcctctagcttatttggtgtctccagagctgtccagaatgcaatgtgcaaggaaattattccaactagtgaatttattaacagtaagttaaca

SEQ ID NO: 352478 - DNA, 80 bp, Homo sapiens
ttcaggtgctggaaaggaatgaggagttacagagggccgagaaggacaggatcagtgtccatggaaaacactggcgaaca

SEQ ID NO: 352479 - DNA, 75 bp, Homo sapiens
gctggtcagtaacagccaagatgctgcggaatctgctgatctcttcatgccgctgtaagctcggaggccaaggat

SEQ ID NO: 352480 - DNA, 101 bp, Homo sapiens
agggacaagctccagatctaattggcaagcaagacagtgtgtatgaaggctgttgagctaatggaccgaactgaaatgccatgccaggcattagtgaggat

SEQ ID NO: 352481 - DNA, 98 bp, Homo sapiens
tcatgtttcctgtgtgaaattgcttctgtcaaaggcgatatgagtctcatccagtctgtgctgatctgcaggccaaaattcttcagtgttaccgtgag

SEQ ID NO: 352482 - DNA, 86 bp, Homo sapiens
ttttgttaaagacccagacagacttcaatgatatggaagatgatgatcctcaggtggggtgaccgctctctgttgggacccagtcc

SEQ ID NO: 352483 - DNA, 100 bp, Homo sapiens
agtttctggaatcagaagatgaccctgtcataaagaaaattgcccttcgggaaatccgaatgctcaaggctaaagaattacctccaaagccattgtcaag

SEQ ID NO: 352484 - DNA, 90 bp, Homo sapiens
ggaatcatcctacttctcaccttatgcagtctattccaggcatgcacaatcctgataaatttgagattggaggtggacacaaaggaagag

SEQ ID NO: 352485 - DNA, 76 bp, Homo sapiens
ttaatttgattttgagatttgagaacttggacatacatacttcctatggaagataccatgtttgtgtggaagtgcc

SEQ ID NO: 352486 - DNA, 98 bp, Homo sapiens
gctgtggaagagagcggcggccgctcacaacatgcacagcctggcgacggctgcgatgaacgacaatctccttgagagctggagcgacctcgacgagc

SEQ ID NO: 352487 - DNA, 100 bp, Homo sapiens
taggttatgaagctaatcctggcgttccaccagcaaccatgagtggttccatgatgggaagtgacatggaatgtttacccttgcggaagttgcatcactt

SEQ ID NO: 352488 - DNA, 76 bp, Homo sapiens
caatccaaaccgaaagccagaagaaaccagcaaatatcctagtaatgggagaaggtcctgagagggggagagtcaa

SEQ ID NO: 352489 - DNA, 75 bp, Homo sapiens
ggaagtaggggtgcacctcagcactatcccaagactgctggcaacagatatgagggaaggcaccattggagatat

SEQ ID NO: 352490 - DNA, 98 bp, Homo sapiens
ctggagcccggttaggaagaatggagttggcgactcgctaccaggttactcactataaacaatatccacccaacacaagcaaagtttattcctacttt

SEQ ID NO: 352491 - DNA, 49 bp, Homo sapiens
gttcagcatccccaagcagggggagatgggcaccagttgcgtcttgaag

SEQ ID NO: 352492 - DNA, 75 bp, Homo sapiens
ctcatggctctcaccttgctcacgattcttcaaacttcatgagagaaagtgtgaacctattattatgactgttcc

SEQ ID NO: 352493 - DNA, 83 bp, Homo sapiens
tgggagagctcctgggccacccctcctttcaggtcaagcactccttgctcaagacccctccccagtacctacccttccaggcc

SEQ ID NO: 352494 - DNA, 100 bp, Homo sapiens
cggagcagcactcttcaccctgcacagccttgttaggacaattcagcagtggcttgcaagggtccagtcactcctctactgtaatgagaatgggttttgg

SEQ ID NO: 352495 - DNA, 87 bp, Homo sapiens
agaacaagaaagactccacctactatggagaaattgcaggtgctgcagtgtctgaaatttccgggcctttctcaacagaggatgtag

SEQ ID NO: 352496 - DNA, 75 bp, Homo sapiens
aggccaaggagctactgcaaatgtctttcgtggaagacataagcctgatgaaaacaaaggcgatatgcattatga

SEQ ID NO: 352497 - DNA, 75 bp, Homo sapiens
gtggccttcaacccatcagcgccccaggtgctggagaatctggtaaaagcaccattgtgaagcagatgaggatcc

SEQ ID NO: 352498 - DNA, 75 bp, Homo sapiens
caccactgccacaaacgccgcaccaggtcttgtagcagcgcctcctcggaaggtgctcgggtcttcggggcactg

SEQ ID NO: 352499 - DNA, 74 bp, Homo sapiens
agactcgctgcatacgagcgtttccaaacaagcaggatgcagaaaatgcgattgtgcatatgggcggtcagtgg

SEQ ID NO: 352500 - DNA, 83 bp, Homo sapiens
caaaaatccagaagtacaagcagtctgatggcagaagattttttcatttaatgtctggggtaaaattgcaactttttggaaca

SEQ ID NO: 352501 - DNA, 98 bp, Homo sapiens
tggggagcccctgggcacgtgcagcatatgtggcgtgggcttcttcaggtgctggtggatccctcaggatgagtgttgaatttcatgaaagaggaaag

SEQ ID NO: 352502 - DNA, 74 bp, Homo sapiens
ttgaacttaatacagcaagaaagaccatcaagtttaccagtcattgagactgcctcttctcaaagggacactgt

SEQ ID NO: 352503 - DNA, 51 bp, Homo sapiens
aagcagcaatttcacaactcagggatgatcctagtgctccccacaaaatcc

SEQ ID NO: 352504 - DNA, 84 bp, Homo sapiens
ccgcctccgaagatgggggatttctacgacccggagcacccgacccctgatttcaaaactctgcttcagcaagatgtgaaaaaa

SEQ ID NO: 352505 - DNA, 95 bp, Homo sapiens
ctgctactggccctgctgggctggctgctgctggccgaagcgaagggcgacgccaagccggaggcctcctgctcttcatggatgaagcagacgcc

SEQ ID NO: 352506 - DNA, 75 bp, Homo sapiens
gagaagttcccgcttgtggagcaaacatttttccccaaccataagccaatgatgtaccgaggcttcaccaagatg

SEQ ID NO: 352507 - DNA, 100 bp, Homo sapiens
cacctgcttccagactcagagtgtgagaaaaaaataaactcctatttgtttatggcaagttaccttatcccatatcacacaactggtcctcagccataac

SEQ ID NO: 352508 - DNA, 75 bp, Homo sapiens
atccacggactggaagatcaaaagaggcccaataggggcacaaaacgtccccgggatgatgaagaggaggagcag

SEQ ID NO: 352509 - DNA, 100 bp, Homo sapiens
tgagctctaggagtgccgttctgctggtcgtagagaggagtaaagtcacacccaaagacctgatggccaaaagaaaggaagaaaatttttcctctcctaa

SEQ ID NO: 352510 - DNA, 96 bp, Homo sapiens
gagaccgtgaccgagagcgtgaccgagagcgcgaatatcgtcatcgttagaaggggatgtggagacgctggtagcggggccaggaaggctccggac

SEQ ID NO: 352511 - DNA, 100 bp, Homo sapiens
caaaagtggtattccaccttcctttataacactacagattaaagactttctgaatggaccagggaatatggagccattgatgatgtagatattgatctgc

SEQ ID NO: 352512 - DNA, 96 bp, Homo sapiens
attctctcggcctgtcagcaaagtaatctgtaagtcagatgctccaacaggggatgttcttcttgatgaagctctgaagcatgttaaggaaactca

SEQ ID NO: 352513 - DNA, 80 bp, Homo sapiens
tctccctctgcccccccttccccacgcaaccccagatccatttacactttacagtgcctatggtcctgagcactgggtca

SEQ ID NO: 352514 - DNA, 100 bp, Homo sapiens
cgggacccgcctgctgagtggacccgggtgtatttcgaaaaaagcctggttttggtacagctcttccagaacccacgggaagaacctgttcatcagctca

SEQ ID NO: 352515 - DNA, 59 bp, Homo sapiens
gggagtttgccgcccgagggggcttgaaggtgacgcagccgccaaccatcaccaagcag

SEQ ID NO: 352516 - DNA, 100 bp, Homo sapiens
ctcaggttacttcttcctcaacaccagcaccgcagatgttgtcaaggtggcctaccaggaggccaggggtgtcgccatgattgtgttcacctattgaaaa

SEQ ID NO: 352517 - DNA, 59 bp, Homo sapiens
ggagcagttattcttggtggagtaactaggaatatcttatcaaattaggcaatacagaa

SEQ ID NO: 352518 - DNA, 98 bp, Homo sapiens
aaaagcagaagatggtccgagcagatcccagtttattaggcattttgttcccaacatcacctttggtcaccctgtggtagaaagccttcgaaagcagc

SEQ ID NO: 352519 - DNA, 80 bp, Homo sapiens
tccctcgagaagctccagatggcgtcttccgtgggcaacgtggccgacagcacaggaatcaacagtgagacaattatgaa

SEQ ID NO: 352520 - DNA, 88 bp, Homo sapiens
gaaattgtgatctgcgatcgagcctcggtcaaggagccccgagcctggagatgagggggagccggggcggtcgggactggagcttgaa

SEQ ID NO: 352521 - DNA, 82 bp, Homo sapiens
gtccagcatgggagagtacatgagacgatgaagcaaaggctggagcattggatttgctaaaggagcttaagaatattcctat

SEQ ID NO: 352522 - DNA, 100 bp, Homo sapiens
ctttggcaagactaggaacggaggtggcaatgagggccctgggctttgaacccaagaaagaagaaattaagaaaatgataagtgaaattgataaggaagg

SEQ ID NO: 352523 - DNA, 75 bp, Homo sapiens
atttgtttctcattctcatatttcaccaataaaggtgatggtgtttgtacatgctcgaaatgccactgtaagaac

SEQ ID NO: 352524 - DNA, 83 bp, Homo sapiens
gcggccgtcttcatgtttgctttcgcttccctctacacgcaaatcccaggctttatcctgtggataaacgcagagtgaacgag

SEQ ID NO: 352525 - DNA, 75 bp, Homo sapiens
ctggtgccaggtgtccatccccgtgctgaggtacaaattctgagctgtctaacccctctgaaacggaatctgagc

SEQ ID NO: 352526 - DNA, 98 bp, Homo sapiens
actgtttgaagagaggcgtgctaaacagacagaactgcggcttttggaacagaaagttgagcttgcgcagctgttagtgaagagagtagaatatctcc

SEQ ID NO: 352527 - DNA, 100 bp, Homo sapiens
tgaagaacaaagaaaacagttacaggacatagcaactctggctgatcaaagaagagcagcccatgatcttactgtgccgagatcgctcacaatgtttcct

SEQ ID NO: 352528 - DNA, 83 bp, Homo sapiens
tgagtatgagagagaaccaaatcacaataagtctttagctgcaggtgtgtgggatgagctttgatccaaaccttctccacaac

SEQ ID NO: 352529 - DNA, 100 bp, Homo sapiens
tggaatagttgcagatttatttaaggttttgtagtgcatccctgagcatgagcacagaatgaagcggcgtttggatgaccaggagtcaccggtgtatgca

SEQ ID NO: 352530 - DNA, 88 bp, Homo sapiens
taacaacacggaagtggagaggttttcagagtggaatgcagtagccctctgggcctgggatattgtggttgataactgtgccatctgc

SEQ ID NO: 352531 - DNA, 50 bp, Homo sapiens
tcaagcactgtgatcttcaaattcttatgatgtaatcagcgcgatttcac

SEQ ID NO: 352532 - DNA, 100 bp, Homo sapiens
cgagctgtgcgggcgggcggtgagcgcccatatgggggttctggagagcggggtgtgggggcagcgggtggcatgagacgtgggaacatgggccacctca

SEQ ID NO: 352533 - DNA, 75 bp, Homo sapiens
ggactacatgtcggaggagaagctgcaggagaaaggtggtcttttggtgccttaatgaagagtcggattttgaag

SEQ ID NO: 352534 - DNA, 75 bp, Homo sapiens
cccgaggatgtcaaccctccaaaagacatggtggtggaacaccccgagttcctcaaggcagggaaggagcctggc

SEQ ID NO: 352535 - DNA, 91 bp, Homo sapiens
tcttgtttgtggatcgctgtgatcgtcacttggtttttagaacttcagccataaaaatgggcagaattttccttgatcatatcggtggtac

SEQ ID NO: 352536 - DNA, 75 bp, Homo sapiens
tcaccaccggatcaacttcgacaaatagcagcctggcatcctcgctacaacctcattgttgtgggccgataccca

SEQ ID NO: 352537 - DNA, 100 bp, Homo sapiens
gtgcaggatccgtgctttgcccaaggagatggtctcattaaggagtccttcaataatgttaaacagtggctgcaggaaatagatcgttatgccagtgaaa

SEQ ID NO: 352538 - DNA, 90 bp, Homo sapiens
actgcagaaacagatgccattcggtttttggttgggacgcagtctcttaaatatgataatcaggacccagatgatgtggtaccagttggc

SEQ ID NO: 352539 - DNA, 51 bp, Homo sapiens
ccgggctgtcgcggcccccacctcagaacgtcctgaaggagcacgcagatg

SEQ ID NO: 352540 - DNA, 74 bp, Homo sapiens
gaaaagtggaaaccgaaagactttctgatgccctgcaggagtcattaaatcaaaacttcatgctgatcatcacc

SEQ ID NO: 352541 - DNA, 80 bp, Homo sapiens
gaagacattcagtgaagcttgcctgatgtgggctcgggatgagtttgaaggcctcttcaagcagccagcagaaaatgtca

SEQ ID NO: 352542 - DNA, 100 bp, Homo sapiens
cagacagcgagtggcgacgatcattgcagtgtcgagatggctatgaaccctgtgtaaatgaaggaatgtgtgttacctaccacaatggcacaggatactg

SEQ ID NO: 352543 - DNA, 74 bp, Homo sapiens
aatcaaggacttcctgctcacagcccgacgaaaggatgccaaattacaaaattggacagctgtacatgatcagc

SEQ ID NO: 352544 - DNA, 83 bp, Homo sapiens
taagaaagaagatgttaactttcagcagaatggggaaatggagagagaacctgaaagagccccaaactcgaggacctattgct

SEQ ID NO: 352545 - DNA, 100 bp, Homo sapiens
ggtttgtcgccagaaggaagatggcggatctggaggagcagttgtctgatgaagagaagaacctgcaaccatggtcgtgccactagccagctcggaagcc

SEQ ID NO: 352546 - DNA, 83 bp, Homo sapiens
gtggtttttcggatcatgtctggtggctccgcggattataacaggtaactggggaagaagctaaacaagaatcattggagact

SEQ ID NO: 352547 - DNA, 98 bp, Homo sapiens
tgtggtgcagagctagttcctctccagctcagccgcggctgaagaagatgcagagcagcctgaagctggtggactgtatcatcgaggtccacgatgcc

SEQ ID NO: 352548 - DNA, 50 bp, Homo sapiens
caggattctgacagggatgttgcgaagcttttcggagactgggaagccca

SEQ ID NO: 352549 - DNA, 100 bp, Homo sapiens
ccaaccccagccgaccttgagctccaggagttcgtctcttacgtctgcggaagtgcagctgcctcagttcttagcgcagctatcagttgagggatttgca

SEQ ID NO: 352550 - DNA, 49 bp, Homo sapiens
cctgcatcagttttgttacccagcatgttccctgtattgaacactgata

SEQ ID NO: 352551 - DNA, 99 bp, Homo sapiens
ctcctggaaaaagcaagctgaagacatcaagaagatcttcgagttcaaagagaccctcggaacgtgaagctttgttctaagaatatttgtttcatctag

SEQ ID NO: 352552 - DNA, 100 bp, Homo sapiens
gaggatggaaatcagcgcggagttaccccagacccctcagcgtctggcatctcataactaatgatgccagagaagatgaaatggaagagaacctgactca

SEQ ID NO: 352553 - DNA, 116 bp, Homo sapiens
cttttactggcaaatagtacttcaagagcacagtcttatgtaagattgtctccagctttaagaccacgacatcgagagctgcctgccagctcgtgaaggagtacatcggccaccgg

SEQ ID NO: 352554 - DNA, 75 bp, Homo sapiens
actggcggatgaagcagctggtggggctctactgcgacaagatggagtcatcagaacccactgtgaggaagtgac

SEQ ID NO: 352555 - DNA, 100 bp, Homo sapiens
gagattcaagtattacgcggttgccactggctttttattatggaatgtatgcatatgctggctggattttttatcaagcagaaatgcatcgaacaacgag

SEQ ID NO: 352556 - DNA, 51 bp, Homo sapiens
ggtgacactcaacaggattcccgagtgtgaacatggctacgcctcttcatt

SEQ ID NO: 352557 - DNA, 95 bp, Homo sapiens
tgacacagtgaacaagaccccccacactgcaactctgagggaccgtgactcaatgcggcagataagagcagagggcttaaagaagacatgtgtga

SEQ ID NO: 352558 - DNA, 80 bp, Homo sapiens
aaggataagggcgacagcaacagctctgccggctggaagaaaaagatgttgctggtccatttgacgaagaagtccagagc

SEQ ID NO: 352559 - DNA, 100 bp, Homo sapiens
acgcagaggagggagaggaccggtttgcagatctctgtgctgttgatgagattgtggggaacctgggtgaaggcacctttggcaaggtggtggagtgctt

SEQ ID NO: 352560 - DNA, 50 bp, Homo sapiens
gcaagaaagaccatcaagtttaccagttgctgctgactcagccattctag

SEQ ID NO: 352561 - DNA, 74 bp, Homo sapiens
ggaagaatgtggagagttttctagaagcctgtcgaaaaatgggggtgcctgagtgcagagcagagcgggcggag

SEQ ID NO: 352562 - DNA, 148 bp, Homo sapiens
tcttcataaggttgtagtagcaggagccctctatcttttgttctctggcatggaaggggtcctcagagttactgggagggcaaaagaggatgtgttgcagaaggaggtgagagtgaagattctcaaggacaacatcaagttattagct

SEQ ID NO: 352563 - DNA, 100 bp, Homo sapiens
aagcgtcttgccaccggcttccctttgtaaattgagctctgcacgctggggagtttgttggggtgctggagaatctggtaaaagcaccattgtgaagcag

SEQ ID NO: 352564 - DNA, 100 bp, Homo sapiens
aaaagtggagaaattaaaggtaatggaagtggtggaagcagagaaaatagtactgttgacttcagcaagggtggacggcacgtggattatgtggtagatc

SEQ ID NO: 352565 - DNA, 100 bp, Homo sapiens
gttgaagccacacaaagaacaaattgcagttgtttgaggtgcccagtcccctggaaggcagtgaaggggacggagacactgactgaggcgatgggagctg

SEQ ID NO: 352566 - DNA, 73 bp, Homo sapiens
tttgatcttggctcccacaagagagttggctgtgcagatccagaaggactcagaattcatgattgaagaaatg

SEQ ID NO: 352567 - DNA, 75 bp, Homo sapiens
aactgtcccgggtgggaagaggaacagcctatgtgggcttccacggagggactttgaacatgtcggggatcgccc

SEQ ID NO: 352568 - DNA, 82 bp, Homo sapiens
tcaagaatgaagccgcggacccttgcggtaatctgtaagtcagatgctccaacaggggatgttcttcttgatgaagctctga

SEQ ID NO: 352569 - DNA, 95 bp, Homo sapiens
gccgcgggcgcgaccggaggcagggaaaaagacctcgatgaagttctgcagacccactcagtgtttgtaaatgtttctaaaggtcaggttgccaa

SEQ ID NO: 352570 - DNA, 90 bp, Homo sapiens
caaccgtgacagcaccatactggaacttcaaaaagttctgaaaacatgttggaaaaaccccatcctgaacttctctgctcagccttcgcc

SEQ ID NO: 352571 - DNA, 90 bp, Homo sapiens
actgaatgtaacttcaccgagtaaagaggagtgtggattggtgatagaaaagcagtgctttgatcccacctgtacacacattgttgtggg

SEQ ID NO: 352572 - DNA, 85 bp, Homo sapiens
atcgcatggggaacagggccagatgccggaaaacatgcaaggaagcaatgaggctccccaagaacacacctgaggaaaaggacag

SEQ ID NO: 352573 - DNA, 98 bp, Homo sapiens
tatacggaaccagaagcagattgccaacattgaccgtattacaaagagaggagtcactcacaatttttgtggacaagcggaagttgagcaaacgagct

SEQ ID NO: 352574 - DNA, 100 bp, Homo sapiens
ccattttgtgcctcctggacacctcagctcctcagtgggtagtgcacttccacgaagacgctgctgtgcatatattaccattggaatgatatgtattttc

SEQ ID NO: 352575 - DNA, 100 bp, Homo sapiens
cagctgcagacatcttcaaacactacatgaaggttggaatgttgcatcagcaggtagaagaacatgaaaaaatcaagcaagagatgaccatggaatataa

SEQ ID NO: 352576 - DNA, 75 bp, Homo sapiens
gggttattcgagtgaccgagaccgcggccgggaccgagggtggaacacctgcagcaggagactgctgctctgaaa

SEQ ID NO: 352577 - DNA, 100 bp, Homo sapiens
gggagaagtatgaattccactggatctgggaaaagtagtgggacagtttcaagggtgaaaatcctatttataagagtgccgtaacaactgtggtcaatcc

SEQ ID NO: 352578 - DNA, 88 bp, Homo sapiens
agcatcgttaaagtctctcttcaccctgccgtcatgtctaagtcagaggtgtgaaaatcacaaatgtcaaatgatggaagatccagga

SEQ ID NO: 352579 - DNA, 50 bp, Homo sapiens
acctctctgggctggctattaaggttctctacttttagagtcgaaaataa

SEQ ID NO: 352580 - DNA, 100 bp, Homo sapiens
agatcatgacattgtagtacagtatccaagtggcaatagtaaaatggcgaaactggaggaacttgaagaaattgatctcagtgggaataagctgaaagcc

SEQ ID NO: 352581 - DNA, 74 bp, Homo sapiens
ggaggtcagagcttcattacagaaggtttctgggactcctcgctgaatcctccacaagaaagagggaagccagc

SEQ ID NO: 352582 - DNA, 100 bp, Homo sapiens
cacagctgaaggctgcgagggactaagagcagagtgcctgtgtagatcatcctagaatacctgtgtggtgctgtccttcctcaagactacctcattctca

SEQ ID NO: 352583 - DNA, 100 bp, Homo sapiens
ccataatcggaatgtgatcacagagcctatttacccagaagtagtccatatggtctccaattgagaaacatggcactgtttttcctgcactctacccacc

SEQ ID NO: 352584 - DNA, 80 bp, Homo sapiens
ggtgttgaaagtgaaatgtcatgcctctgaaaatgaagtgacagctggagtatcagccttggaagtatatacgccaaaag

SEQ ID NO: 352585 - DNA, 100 bp, Homo sapiens
tccgcacctcggggacattattgcgcgtggaacggctgcttttggaagccccactgtgttctccttgcctcaaaagaaaactcggcacctgttaaacttg

SEQ ID NO: 352586 - DNA, 90 bp, Homo sapiens
tgggtttccgggtggttcgcgctccttctgaattggcagcgaggtcgcggcaggttcgagatggcaagattattttatcataaaccccag

SEQ ID NO: 352587 - DNA, 97 bp, Homo sapiens
gtatgcagtcccccaggatacagggtcaaaggagagcacaaccatcgcagttggaagcccatggggcaggagaagctgatacggaaagtgacgacga

SEQ ID NO: 352588 - DNA, 80 bp, Homo sapiens
gcgacaagccgctggcagccgcggatctcaccgccgctcagggaccgcagctgaatgcacagctagaaggttggctttca

SEQ ID NO: 352589 - DNA, 85 bp, Homo sapiens
cgggctccgcgcccggccggacccgggcccgagcaaattgtggctactaatttgccccctgaagatcaagatggctctggggatg

SEQ ID NO: 352590 - DNA, 98 bp, Homo sapiens
gttggaaatggattatcattggctgggacgattggacttgtttacactgggcatgtaaacgaaaccatggtcaggtggtctcttacctgttaaaatca

SEQ ID NO: 352591 - DNA, 59 bp, Homo sapiens
ttttgccaccaatcccttcgatcaggatgttgctcagatcgtctgatagaagagacaat

SEQ ID NO: 352592 - DNA, 96 bp, Homo sapiens
cgccaaaaagctggagaagatggtggccaggaagaacacggaaagaccacagcaagattctttcattcgtctcctcctagcctgggggaccaggct

SEQ ID NO: 352593 - DNA, 82 bp, Homo sapiens
cgtggaccacatagacatttacgcggatgtcggcgaagagttcaaccagtggaaggcgggcacagagccatcttcttcaatc

SEQ ID NO: 352594 - DNA, 75 bp, Homo sapiens
ggccacaagagcgaggagaagcgagaaaagatgaaacggacccttttggtgccctggttgtcagatgttggaaag

SEQ ID NO: 352595 - DNA, 75 bp, Homo sapiens
caccgccctggccatctaccatgtggcccttgatgagcctccctatttgacagtgggcactgatgtgagtgctaa

SEQ ID NO: 352596 - DNA, 75 bp, Homo sapiens
caggggtgcagtgtgtctggtcttatgagcctccttctgaagaaataaaaacaggtgaggatgaagatgaggaag

SEQ ID NO: 352597 - DNA, 59 bp, Homo sapiens
tctgctccacactgccaaccggccagaggacgagtgtgaccaagatcactccatggatg

SEQ ID NO: 352598 - DNA, 88 bp, Homo sapiens
ggagcgcgccgagctggatgactcggacggtcacagagatgcggcggaccctgacgcctgccagctccccagtgtcctcgcccagcaa

SEQ ID NO: 352599 - DNA, 90 bp, Homo sapiens
acaatgaagagggcctgaaaatcaggaaccacaggtggaattaagaaatctggcaaaaagtaagctgttccttgtgcctgaggagatggt

SEQ ID NO: 352600 - DNA, 73 bp, Homo sapiens
gcgcctccctgcgactcctggaccaccgggcgctggtctgctcccagccgggaaaagcttcactctgaccatc

SEQ ID NO: 352601 - DNA, 97 bp, Homo sapiens
ccgtgtcggagaccccgcgccggaccctgaggcagcgaaacgtgctggccaaagcgctctatgacaatgtggccgagtccccggatgagctctcctt

SEQ ID NO: 352602 - DNA, 83 bp, Homo sapiens
gcgggcggcttcctggcctgggcgctccggtggcggcggagcctgacatttaccccggtaactgctgggcatttaaaggctcc

SEQ ID NO: 352603 - DNA, 71 bp, Homo sapiens
aaattctggaaaacgcccagagatttaatcaggctccacaattactgctgagatccagggggtgattgatg

SEQ ID NO: 352604 - DNA, 91 bp, Homo sapiens
agtacctgagcagcctccagccccgcctcaacagcatcatgcagtgtggccgtggctgacactaaagactttgtagccatcaacccgagtg

SEQ ID NO: 352605 - DNA, 75 bp, Homo sapiens
agacagtggacagtattggccaagcgtataccatgcaatgccttgtgtaaattttgataccaccattgccgcctt

SEQ ID NO: 352606 - DNA, 100 bp, Homo sapiens
gccacaaatgtacccccagtacacttactactatcctcattatctccaaaccaaggtgctgaccttaaggaaagagccaaaatgagttccagtgaagttg

SEQ ID NO: 352607 - DNA, 75 bp, Homo sapiens
cccacactggccgtcccggccatctcgctgcccgacgatgtccgcaggcgatgaccccacacagaacagaaaccg

SEQ ID NO: 352608 - DNA, 50 bp, Homo sapiens
ctcgggacggccctggaagccgaacaaaatccagtctcatagcagaggag

SEQ ID NO: 352609 - DNA, 75 bp, Homo sapiens
ataaactgcttgaacatcctttgactggttagccagatttgagttctgtgaacctgcatttgttgttggtaattg

SEQ ID NO: 352610 - DNA, 50 bp, Homo sapiens
aaaacaacttcgagggcagagactttttttatgaagacatggagtccttg

SEQ ID NO: 352611 - DNA, 75 bp, Homo sapiens
gccagtcatttaccaccaatgggaacatgcacagaaaacatcggagcagtgtgggtccgagcaaacctgtttccc

SEQ ID NO: 352612 - DNA, 83 bp, Homo sapiens
ctgaacatactgccttatgggacagatcaaaatgaagaagcagtacgacgtctcatctgggaaaagaatctaaagtttgtgat

SEQ ID NO: 352613 - DNA, 100 bp, Homo sapiens
gtttagcagggcccaggagaagaaacaagggcagctgcgttccctgcacctgacatgtgacagcgccccagttgggagccagggcacctggagcaccagc

SEQ ID NO: 352614 - DNA, 100 bp, Homo sapiens
gcttgaaacacatctaattgcacttaaacttgaagaacttattttagaagacacttctctctcaccgggtgatcagcccatgacctaaacctccagacaa

SEQ ID NO: 352615 - DNA, 100 bp, Homo sapiens
gaacactgcatggcctttgagggcattcatctgcctcagaatgtcagcatctcattagatggtgcttggccctgagaccatcagataggccaaccttcga

SEQ ID NO: 352616 - DNA, 90 bp, Homo sapiens
ctgaattgtgctgccttggccaaaagagtggattgtattacacagagcatgaatatacttctttaggttacacgcatggggagatactct

SEQ ID NO: 352617 - DNA, 97 bp, Homo sapiens
cagccatctcacatttccaagtacattctcaggtggagacctgaaccactcgttttgactattattttatcactctttgtgaaacttcacaatgttc

SEQ ID NO: 352618 - DNA, 83 bp, Homo sapiens
ctaaagcagcgtgcgttcagccctgggatcaatgtccgagttaccaccatggatgcagagctggagtttgcaatccagccaaa

SEQ ID NO: 352619 - DNA, 101 bp, Homo sapiens
atttatccaacagctcctcccagaaggccttacgaccggatatgggctataatacattagccaactttcgaatagaaaagaaaattggtcgcggacaattt

SEQ ID NO: 352620 - DNA, 97 bp, Homo sapiens
aggcactcctctttatgctgctcactttcgtccaggacagtatgtggatgtcacagccaaaactgacaaaatgttccctgcctttgggtttggcgcc

SEQ ID NO: 352621 - DNA, 75 bp, Homo sapiens
ggtcattggtcgactgagatctgatgatatttacaaccagaacccagcttagactagaaagtctagaagacacac

SEQ ID NO: 352622 - DNA, 100 bp, Homo sapiens
tatatgaaaatggagtcaatggcattttggctgatgaaatgtctgaacaggaattaagaataactcaaagtgaatttgatcgtcaagcagagattaccag

SEQ ID NO: 352623 - DNA, 75 bp, Homo sapiens
ccgggagacacagtgtcagaattacaagattaaatctcttgatgaacagtgtgtggttggcaaaatttccaagca

SEQ ID NO: 352624 - DNA, 87 bp, Homo sapiens
tggacttggagcatctgctcaggtctgggggtggtggcatctcccctaaaggaagtggtccctctgtggcaagtgatgaagtctcca

SEQ ID NO: 352625 - DNA, 98 bp, Homo sapiens
gtaaacagctgagggggaggagacggtggatccgatcacataggacagtatgcaccttaagatcctgaagaaacggcacaaaatgttcaagtgatgtt

SEQ ID NO: 352626 - DNA, 123 bp, Homo sapiens
actgtcggcggccatgacaccgctcgtctcccgcctgagtcgtctgtggccgccaggtcagcagaggcggaggcccgggctgtggatggccgaggagccgaactcgtgaagccacgttcctcc

SEQ ID NO: 352627 - DNA, 97 bp, Homo sapiens
gccaactgtaagtctccaatacagaagaatgaaggctgcaatcacatgcagtgtgctaagccaacaagtcccaaatttggaaaagctgactcatatg

SEQ ID NO: 352628 - DNA, 82 bp, Homo sapiens
gcgggtccgggattcccagccatggcagattcctccgggcagcaggctgggagtgtccactcgccttccaccagcatggcaa

SEQ ID NO: 352629 - DNA, 83 bp, Homo sapiens
aagtcctccttgccaggccttcaaccactatctcagtgcaatgggtcaaaatgcagatcttcgtgaaaacccttaccggcaag

SEQ ID NO: 352630 - DNA, 75 bp, Homo sapiens
cgcagatgttgtcaaggtggcctaccaggaggccaggggtgtcgccatggctgttgccaaaatggttcaacagtg

SEQ ID NO: 352631 - DNA, 100 bp, Homo sapiens
cggaagatcattgtgtttagtgcctgtcgaatgccccccagccaccagctcgaccacagcaagctcctgggattttctccaaaggaacatccggtgcttg

SEQ ID NO: 352632 - DNA, 100 bp, Homo sapiens
tgttcgtccgcggagatctctctcatctcgctcggctgcgggaaatcgggctgaagcgactgagtccgcgatggagacctggtcctgtagacgggaagga

SEQ ID NO: 352633 - DNA, 100 bp, Homo sapiens
ccacacgtgttcaatacacctcccacctgtcctcaggcatatcaaaggtatctgagagcaagcagcaatagaaatttcctgcttaccatgagaccatttt

SEQ ID NO: 352634 - DNA, 75 bp, Homo sapiens
ctatcccagggagtgcaagcttagagcgtctggccaagaatcagaggaagtgggatcttttgccagaaatgaggg

SEQ ID NO: 352635 - DNA, 100 bp, Homo sapiens
gcggatgtcggcgaagagttcaaccagccctgggcgctgcctatggcacagccaagagcggtaccggcattgcggccatgtctgtcatgcggccggagca

SEQ ID NO: 352636 - DNA, 100 bp, Homo sapiens
cctacagcagccagacagcgcagcagaaggtgacccagtgggcagaagagagggaacgtgctcagtcactttcaatgggcaccaggagaaaggttttggt

SEQ ID NO: 352637 - DNA, 100 bp, Homo sapiens
acgctggcaagcaagattataatcaggaagtggatgcctccatttttaagcaataagagctaactgccatcaagagccatcagtatgtcttcaagctgca

SEQ ID NO: 352638 - DNA, 82 bp, Homo sapiens
caacgagctgctggaggacgagggccagctgacggagatggtgcagaagatggaggaggtggacgacatccttggagaaggc

SEQ ID NO: 352639 - DNA, 75 bp, Homo sapiens
ctttgcctctcagaaccagccttccgactcctcaccttggtctgccggtgtgaccgcaacaagggaaaacatggc

SEQ ID NO: 352640 - DNA, 96 bp, Homo sapiens
tttgttgcttagaaaagcctaggcatttctgtaacatttggtttcgacacagccccaactgctggtacctgagaaactggactatccacacctgga

SEQ ID NO: 352641 - DNA, 82 bp, Homo sapiens
ccgattcccctggcgcggactctggcaccaacaaaactatctctttgaggcgagaaccactgtctctgatcaacgtgcggaa

SEQ ID NO: 352642 - DNA, 100 bp, Homo sapiens
tggaggaggtcattctgccctttcttgggctgtgttcacgataacatgcctggacatttccagcagaggaggtcttggtgtgtcttctagtactgacggg

SEQ ID NO: 352643 - DNA, 101 bp, Homo sapiens
cccccaacttcgccaccatcccgcaggacacggtgaccgaggtgtgcctaccgcatgttgccgctgctgtttctgctgggacgtctgactccagttccttc

SEQ ID NO: 352644 - DNA, 75 bp, Homo sapiens
gcgggcgagcgagaggccgagggcgaggattaaatccaccacacagggtgaaatctatctccatgacaacattca

SEQ ID NO: 352645 - DNA, 76 bp, Homo sapiens
actgagcttgaaggagtcacaggaactgtgatgatgaatgtcttgaacaaaaaccagctcagcccggtaggaaatg

SEQ ID NO: 352646 - DNA, 90 bp, Homo sapiens
catgggacaagctgatgtctccagaccggtaaatccagatgcagttgttgaaggagtattcacagaaggctgtggagattctgcggactc

SEQ ID NO: 352647 - DNA, 85 bp, Homo sapiens
tttggggagttttgccattacgagggttcttgggaatagcaggggatttagtgcaagaagaagaacagttgatggaagaaaagaa

SEQ ID NO: 352648 - DNA, 82 bp, Homo sapiens
aatactttgttgacactgcaagaggatgtcctcggctgtgtctgtgtgaaccctgggcgccttaccaaagggcaggtgggag

SEQ ID NO: 352649 - DNA, 90 bp, Homo sapiens
gtgtgcattacaggagtcctccacttgccactggagcccacaggcggttttgtgagctgcttccccaggagcagcggagcgtggagtcgt

SEQ ID NO: 352650 - DNA, 88 bp, Homo sapiens
tggttcttctcggcctcctccgaggaggagcgcaaggtgactgggggtccgaggacgagtgcaagctcccctcccacccggtcactcc

SEQ ID NO: 352651 - DNA, 80 bp, Homo sapiens
tttccggagtcagtcattttactgtcaagacatttcttcggcattctgcaacagatgcttgctctgtcaaggcacagcct

SEQ ID NO: 352652 - DNA, 98 bp, Homo sapiens
gcagccgcgaggaggcgcgggaggtgttcgagaacgaccccgagacggccaagtcctgtatctgccatgtctgtggcgtccacctcaacaggctgcat

SEQ ID NO: 352653 - DNA, 71 bp, Homo sapiens
tcatcctaaggaacatcgacaaatgagccgtcagactgctacagcattacctaccggtacctcgaagtgtc

SEQ ID NO: 352654 - DNA, 51 bp, Homo sapiens
gcagcttcagcacctcggcccagatcgactagagactgctaacaggcaact

SEQ ID NO: 352655 - DNA, 83 bp, Homo sapiens
gtccacatgtgggtactgcattcctaccggtgtgacagtgtactaatggtcacttgatgtgcgctggctgttttatccaccta

SEQ ID NO: 352656 - DNA, 97 bp, Homo sapiens
cctaacgacaggcgcctccggcccatttacgataaacatgatgctggcaaacctgtacaagaaggctggtcaggagcgcccttcagtcaccagctat

SEQ ID NO: 352657 - DNA, 83 bp, Homo sapiens
cgagtgcagaagatctgggtgcccgtggaccacaggccctcgttgcccagatattctgaaagtcaagaagacatcatccggaa

SEQ ID NO: 352658 - DNA, 88 bp, Homo sapiens
ggcggcggcaccaacggcaccaactattcgcggagctggaatgactggcaacccaggtgtcagttgtacccgaggcgttctcagcagc

SEQ ID NO: 352659 - DNA, 110 bp, Homo sapiens
acccagccggctccatctcagcttctggtttctaagtccatgtgccaaaggctgccaggaaggaggtgcaggctgccccatggatgccacacgtggcagcggggagaaaa

SEQ ID NO: 352660 - DNA, 82 bp, Homo sapiens
caagcttttactgcaacttgtgcctctcattcctgccagaggtggcatctgtgaactgtcagtcttcactgtttccaatgga

SEQ ID NO: 352661 - DNA, 75 bp, Homo sapiens
ctgcggggcaagatggcggcgcccagacaggcctggagcacgtgctacgcatgatggtcggagtaaatatctcag

SEQ ID NO: 352662 - DNA, 128 bp, Homo sapiens
gtggtctaccctacctggctccatgaagatgccacagggatcctaaaatctgataagttctgaacgtcgaaaagaaaagtctcgagatgcagccagatctcggcgaagtaaagaatctgaagtttttt

SEQ ID NO: 352663 - DNA, 78 bp, Homo sapiens
tcgcgtctcggaaaccggtagcgcttgcagcatggcccgcgatgctcccagcccggtgagacctgcctgaatggcggg

SEQ ID NO: 352664 - DNA, 100 bp, Homo sapiens
ctgctcagccagctcctgcgaccgccctgcgcttcgtgcaccggggcggtccgttgccaaagccagacagaccccgtgcggctgacacagctgtatgagc

SEQ ID NO: 352665 - DNA, 75 bp, Homo sapiens
cggaagcggagagcaacagcgcgccggtactaggttttgacaagcttgcatcatgcgtgagtataagctagtcgt

SEQ ID NO: 352666 - DNA, 95 bp, Homo sapiens
ctacctccatcaggaccccagatgtctgacagccctgtgtgacaccaagataagtaacgacctttattgggcttgaggtcacttcagggcatgcc

SEQ ID NO: 352667 - DNA, 74 bp, Homo sapiens
tttaacaaagccacgaataacctataatggagaactgcgacacatcaccaagctgaagccctggagcctctttg

SEQ ID NO: 352668 - DNA, 90 bp, Homo sapiens
ttcgcccctcgcgtccggagtccccgtggccaggtgacctcaaagcagaagctctgaattcacctctcatctgacgactgacagctgctg

SEQ ID NO: 352669 - DNA, 83 bp, Homo sapiens
cgctccgtggccttagctgtgctcgcgctactctctctttctggcctggaggctatccagcgcccagcgcttgagaagtcgga

SEQ ID NO: 352670 - DNA, 80 bp, Homo sapiens
gacttttctcagatgttggatatttgcttggaaaaacgtgtgggtacgaccttgtttctccacagacactacccaaagca

SEQ ID NO: 352671 - DNA, 90 bp, Homo sapiens
aatatcagtgcttcaccattaactagtaaagcagtacaagagaaatgagccgtcagactgctacagcattacctaccggtacctcgaagt

SEQ ID NO: 352672 - DNA, 100 bp, Homo sapiens
tttcagcctttgagaaacatcaatactataatcttaaggacttggtggacatcacaaagcaacctgtgtgattcgcctttgccagtctcatctcgtgtct

SEQ ID NO: 352673 - DNA, 98 bp, Homo sapiens
tgccgaaatgttcaagtttaccaaaagagaggcaccgctggaacactaatgaggatgattatttcagaaactggaatcccaacaagccctttgaccaa

SEQ ID NO: 352674 - DNA, 100 bp, Homo sapiens
agtcatcagtttgaaagaagctaatgtgaaggccctgaaagcagatttggttccatacctcttaaaattactcgaaggcattggccttgaaaacctggac

SEQ ID NO: 352675 - DNA, 96 bp, Homo sapiens
ccgggcctaccccctggactccctggagaagcagatggaaaaggtcatcaacttctatgcaggagcaaaccagagcatgaatgttacctgtgctgg

SEQ ID NO: 352676 - DNA, 58 bp, Homo sapiens
ctcccagagaggatggcatctagaaggcgggggttcatcatgggcatctggaattccc

SEQ ID NO: 352677 - DNA, 107 bp, Homo sapiens
ccacgtgtggccgctggacacgagagacgtggccagtccaaactgtgcagtgcgggggtgctcaaaggatttaaaggagaactaattcatgtatttaacaaacatga

SEQ ID NO: 352678 - DNA, 114 bp, Homo sapiens
ggcactatgtcgtccgaggcccagagatgaccccttatgaagatctcacattcttgaaggtggcattgaagagcactaagatcggaagatgagtgagcttgaccagttacggca

SEQ ID NO: 352679 - DNA, 100 bp, Homo sapiens
gaagaaaattttccttgacctttaggtgcttttatattcatctcaaaaacaaaattctgaactcaggacttggcaattacattacttcgttcagaaccat

SEQ ID NO: 352680 - DNA, 85 bp, Homo sapiens
ccatgtcgggttattcgagtgaccgagaccgcggccgggaccgaggctctacgaactcgacggggaccccaagaggaaggaattc

SEQ ID NO: 352681 - DNA, 82 bp, Homo sapiens
gcggatccagggggtcggctgccaggtacagatttgaaaaagggcgcatctatacgttcattggagaagtcgtcgtttctgt

SEQ ID NO: 352682 - DNA, 98 bp, Homo sapiens
ccccgcggccggacgacccaagcccgctgagcaggatgagggaacttagtgatttggcccgtgaccctccagcacaatgttctgcaggtccagttggg

SEQ ID NO: 352683 - DNA, 100 bp, Homo sapiens
cgccacattctcaacaccacggaattccatgccgccatggcatcagatgaaggcaaactttttgttggagggctgagttttgacaccaatgagcagtcgc

SEQ ID NO: 352684 - DNA, 100 bp, Homo sapiens
tgcctttgcaggggagcctgagagccacaggggaaggtgctattaacctggctttggctcagaaccgaagccaagatgtgagaatgaatggacccatggg

SEQ ID NO: 352685 - DNA, 75 bp, Homo sapiens
ttgtccgggtgcggataagggacccgacactgattaggttgtgacagttggaagtgtcatgtacaacatgcggcg

SEQ ID NO: 352686 - DNA, 85 bp, Homo sapiens
tgactcttctcaaatgccttctcatccccacatagtgaacccagatactggctacatcaactatgaccagctggaggagaacgca

SEQ ID NO: 352687 - DNA, 83 bp, Homo sapiens
caggccctcgttgcccagatctgctgcggactctggagcgtgagaaccagcgcctggaggctgtcctggcgtggcggcgctct

SEQ ID NO: 352688 - DNA, 100 bp, Homo sapiens
ctccggaagcctcttggcgtcactcgcattgctcctctgctgactcccgaagtgaccatctttccaccgtagaaaaggacacaaatggagaagttctgtg

SEQ ID NO: 352689 - DNA, 74 bp, Homo sapiens
ataaaggaaacacatttcatatactgcagatattttccagcagatgccaccgctgagatgctagaagaatggcg

SEQ ID NO: 352690 - DNA, 119 bp, Homo sapiens
acccacttcaacaagggcccttcctatgggctctcggccgaagtcaagaacaagttttctgaagctcagagggacaccttgtattgctggatgataaaaacaggagcaaagtgatgaag

SEQ ID NO: 352691 - DNA, 83 bp, Homo sapiens
ttcagcgccctggtcaagacgctgcagcgggactgcctggtatcacctcttctgggctcaagatggacaacaagaagcgcctg

SEQ ID NO: 352692 - DNA, 123 bp, Homo sapiens
gtttacatcgtttttgtgcagactgcatcatcacagcccttagaagtggcttttcaggatgtccagcaaagaatcctgtgggaaaaaagagacatctcagaggaaagacaccaccacctcatc

SEQ ID NO: 352693 - DNA, 73 bp, Homo sapiens
gcaggacaacggcaggacgtgtaaggcaggtggaggcaatgcccagagctgtggcagccaccttgcagccgtg

SEQ ID NO: 352694 - DNA, 95 bp, Homo sapiens
cattgtggctcaaggtggtggcaagtttcagcaagaaaaacatctgccagccagtgacccggaaaaccttcatgaaaaacaactttgaacacatc

SEQ ID NO: 352695 - DNA, 101 bp, Homo sapiens
ctcattgacgccctggagtcccatcatgacacgtggcccccagcctgtcccccactggagcctgccaaactcctgaggaagaagagattttaaacaaaaaa

SEQ ID NO: 352696 - DNA, 75 bp, Homo sapiens
aaattatgatctacctaccaatcgtgaaaactatattcacaggaatttttatgtggtgggaagggcctggatcag

SEQ ID NO: 352697 - DNA, 107 bp, Homo sapiens
ctactgcacagcagaagctctgaatcgtgttcctgaatgaaagaagtcaggagcagtgaggagaatgaataccttccaagaccagagtggcagctccagtaatagag

SEQ ID NO: 352698 - DNA, 50 bp, Homo sapiens
tccaacatcctgctagacttgttaaggactcgctgattcttgagaagagt

SEQ ID NO: 352699 - DNA, 49 bp, Homo sapiens
ctgcagtaccccactctacgatcagatgacccagcagatggctgggatg

SEQ ID NO: 352700 - DNA, 75 bp, Homo sapiens
tgcgcggagccgtctgcctgcatctgctgctgaccctcgtggtcctcctagccagcagttttgtgcccatttatg

SEQ ID NO: 352701 - DNA, 74 bp, Homo sapiens
ggaagaggaaagcaaaggagtcagggatggctcttcctcagatccacaagaaggtgctgtggtggttctccctg

SEQ ID NO: 352702 - DNA, 100 bp, Homo sapiens
tttagccaacccaaattaccttaattctgcagggaagtcaacatttgtgaatatccttaaacaattgtgtgaagattgggaagtggttcctgaacctgtt

SEQ ID NO: 352703 - DNA, 95 bp, Homo sapiens
cgcgcggcggacgcgcccgggacgcgcggcggcaccgggaggccgggccgagcgttgctgattgttggaggttcttttggtcttcgtgagttttc

SEQ ID NO: 352704 - DNA, 82 bp, Homo sapiens
gcctactcccccaccggggatttcagggatcgtgggactttaccagatcggtttgtaataacacctcgaagacgctatccga

SEQ ID NO: 352705 - DNA, 98 bp, Homo sapiens
ctccaggcagtgtaatctcattccatcttcattcatgactccagacaggtgcctgtcctgagacccatggacctgatggtggaggccaccccacgaag

SEQ ID NO: 352706 - DNA, 100 bp, Homo sapiens
cggaccattaatggacaaaaacatgagtcaatatgtattgtggcattcaaatcctagcactctgggagagttcacagatgccctgacttatgttcacaga

SEQ ID NO: 352707 - DNA, 50 bp, Homo sapiens
ccacacactgggaaacatcattaaatcggctcctgaccgtggaccccgcc

SEQ ID NO: 352708 - DNA, 75 bp, Homo sapiens
tttaactatccctgcctgtgactttcaagagatggacagagacgtatgtgcgttggtctcctaagggcacctacc

SEQ ID NO: 352709 - DNA, 88 bp, Homo sapiens
caaacttcttaacccctagaccggtttttagtccattgactatgcagcctaatgagagccagctgctccccgggaacaacttcaccaa

SEQ ID NO: 352710 - DNA, 87 bp, Homo sapiens
cgccaccatgttcctgggcaccggggagccggccttggacacgggggagtcggtgaagtacttcctggacaacttggaccggatcgg

SEQ ID NO: 352711 - DNA, 75 bp, Homo sapiens
attgccaaccggagttccccaaggtcaaacaggatttatgcatcatccatcattttttacgtctgagccaccaag

SEQ ID NO: 352712 - DNA, 82 bp, Homo sapiens
cagcagcagacagcagtacagacagctcaggctgcccagatggtggctcccggagtccaggagagtcgcggttgctgatcgt

SEQ ID NO: 352713 - DNA, 101 bp, Homo sapiens
cccaccgactttgaggatctggaggacggagaggacctgttcaccagcactgtctccaccctagagtttgcctgagaatacagatcaacccacagaacaaa

SEQ ID NO: 352714 - DNA, 100 bp, Homo sapiens
gctaagtccgtgagcggtggcagtcgcgaccgcgggtgcatccagtttctgcgcccaggtttaagaaaatctacgaagaaacgcagtgagtctccacctg

SEQ ID NO: 352715 - DNA, 98 bp, Homo sapiens
agcctcagttggaagcagccgatccagcctgcggagcctgtggggcagataacgaaggaggcccaacttcattcaataaggagcctgacggatttatc

SEQ ID NO: 352716 - DNA, 51 bp, Homo sapiens
gaactggggggccgactatatcctgattccatgcaagcatgttttttgcta

SEQ ID NO: 352717 - DNA, 83 bp, Homo sapiens
tggacttggacacgtcccagctctctctgggcatctggaaagaatcggcaaggttggaaaccagaagcgtgttgttggtgtgc

SEQ ID NO: 352718 - DNA, 100 bp, Homo sapiens
atcaagtgctcgcccagcctgcacgtcgacgacagagccagccccagtgcctgctgagccgtttgacaacactacctacaagaacctgcagcatcatgac

SEQ ID NO: 352719 - DNA, 82 bp, Homo sapiens
gggtgacccacgcggaggccgtcaaggttcactctgtatgctgtggatacacgagggaggcactcagagctaagcacggtga

SEQ ID NO: 352720 - DNA, 94 bp, Homo sapiens
caggcccagaggtccgtgcggcagcagctccagagctttgtcaaagaacacctggatttcattagcatcatgacctacgattttcatggagcct

SEQ ID NO: 352721 - DNA, 89 bp, Homo sapiens
caagacaggagctcccagcagaaaggccgcctgtccctgcagaatacagggggggccctcagcctcttggccttgaacgggctgttcat

SEQ ID NO: 352722 - DNA, 74 bp, Homo sapiens
agagcctgtccgtcagtccctaggtatccgcactgctcagggtgtaagaagaagcttgggaagctgccacctca

SEQ ID NO: 352723 - DNA, 90 bp, Homo sapiens
ttccgtgggcaacgtggccgacagcacagcctaccgtatgtgaacgggagctgtgtgtgtttgcttttcaaaccctgggagtaatgaatg

SEQ ID NO: 352724 - DNA, 75 bp, Homo sapiens
ctcgacgaccaagaggcgaagagctactctgacctacgacactctccggtttgctgagtttgaagattttcctga

SEQ ID NO: 352725 - DNA, 103 bp, Homo sapiens
cccagctgcccggtgcccgaggaggcagccaagctcatggcctgccactgcgtgctaagagatgctaaaaaccttgtacctatggaccccaatggcctgtcag

SEQ ID NO: 352726 - DNA, 96 bp, Homo sapiens
agaaggttcaaacaaatttgcaaatgatatacaacttctaagggtcctgtattaataggaagttcacatggtggtgtcaacattgaagatgttgct

SEQ ID NO: 352727 - DNA, 100 bp, Homo sapiens
acggtaaccgggacccggtgtctgctcctgtcgccttcgcctcctaatccctagccactatgtttgacaagtatgcgcccaagctggacagcccctactt

SEQ ID NO: 352728 - DNA, 100 bp, Homo sapiens
aatactcctaaccaagaagttgcccagcctcacttgcacaagattgtgaacagctctatggagctcgcgcagactgccaaggaaccctacaactacttct

SEQ ID NO: 352729 - DNA, 74 bp, Homo sapiens
gcctttgggaacgccaagactgtgaggaatgacaactcctcccgttttcttagcagtgtctgcaaaaacgaatc

SEQ ID NO: 352730 - DNA, 75 bp, Homo sapiens
ggccgaagccccgccagcccagctaaagcagacggctcgcactgcgacccgaagatggcaccgaaagcgaaggaa

SEQ ID NO: 352731 - DNA, 51 bp, Homo sapiens
cagcaggaattgggatcgtgtcgctgcggctgaagggtatgtgattggcag

SEQ ID NO: 352732 - DNA, 75 bp, Homo sapiens
gcatcagaagaatcttcaatggatgaggaacagtcaaaggacgcgctccaggagatatataatcagaagggcatg

SEQ ID NO: 352733 - DNA, 90 bp, Homo sapiens
gcctctacaacctcagggggaacaaaagcatctccatgagtgtggctgggtcacgacaagatgagtaatgtctcagggatcctggagaca

SEQ ID NO: 352734 - DNA, 74 bp, Homo sapiens
gactcggtggaaacagtcacgtccatagaacaggaagaagccaatcctgcttgtgcatggtgataagcgagagg

SEQ ID NO: 352735 - DNA, 74 bp, Homo sapiens
cagcacttccggtcacgccatcgttgctgccttcttcgtcaagaacattaaccaggtggtatttgttggaaatt

SEQ ID NO: 352736 - DNA, 127 bp, Homo sapiens
agttgcaggagcaacactatcagcagtacatgcagcagttgtatcaagtccagcttgcacagcaacaggcacgtgtggttctcaaatataggcattctgatgggaacttgtgtgttaaagtaacaga

SEQ ID NO: 352737 - DNA, 101 bp, Homo sapiens
aacactattcacaaagattgcctgcagtttattgagacgcccaagcagatggcctgcgatgaagtttagaagaggctctggacatcctgcctatgctgaag

SEQ ID NO: 352738 - DNA, 92 bp, Homo sapiens
ggatttcaccacaagaagggctgccaggtggattggactctaaatattggagagcaagcccttgacatatgtattgtctctttcaatcagtc

SEQ ID NO: 352739 - DNA, 101 bp, Homo sapiens
tctgaagggaaagctccagatactagacttattttttagggaaaaagatcttgaagaagctctggaagcaggaggttgtgatcttgaaacgttgagaaata

SEQ ID NO: 352740 - DNA, 75 bp, Homo sapiens
cagggcccgcgggccaggagagcgctcggcggccgaacgaccctgtcaccaacatttgccaagcagccgacaaac

SEQ ID NO: 352741 - DNA, 50 bp, Homo sapiens
ggattccacagattctgcattatgggcgcagtgctttcattggcattggc

SEQ ID NO: 352742 - DNA, 100 bp, Homo sapiens
ctttcacaaatttggaatctgccttctactccatcgtgggactcagcagccttggtgctcaggtgccagatgcaaaggtgaagatcccggatctgttttg

SEQ ID NO: 352743 - DNA, 97 bp, Homo sapiens
gacaacttcagtgggcatcgagatgacggcatggagggcatagaatgtcaagctaaccaggcgtccgctacttcagaagagtgtactgtcgcatggg

SEQ ID NO: 352744 - DNA, 101 bp, Homo sapiens
cttggtttgcagtgggatgttactatctcatggtcggtcataaaaatgaacatgccagaagatatctcaggctccagtgatcattctacatatattgtaca

SEQ ID NO: 352745 - DNA, 75 bp, Homo sapiens
gtttcgacagcgaacatgtcgcggcctgtcagatctcccttgagtttagaaatctggctgagaaataccaaacag

SEQ ID NO: 352746 - DNA, 74 bp, Homo sapiens
ggaggaggccggacccaaggagagcagtgaggaaggacgaccctgtcaccaacctgaacaatgccttcgaagtg

SEQ ID NO: 352747 - DNA, 97 bp, Homo sapiens
ccggagtggggtgtcggcgcctcattcgggtggagctgagccggagacaggcctccggtgtggctgtctctgatggtgtcatcaaggtgttcaacga

SEQ ID NO: 352748 - DNA, 100 bp, Homo sapiens
aagcagagcaatggaagcattgttgtcgtctcctctctggctggttgaagaaatatggagatcaacacaaaactgctcatcagtgttacctgtatcagct

SEQ ID NO: 352749 - DNA, 51 bp, Homo sapiens
ccagctcacccactgccagcagagttaaacagggtaaagatggtggaaaag

SEQ ID NO: 352750 - DNA, 75 bp, Homo sapiens
cgtggcggcaagatcatcgtgggcgacgccacagagaaaggctttcaacaccttcattgatgacgtctttgcctt

SEQ ID NO: 352751 - DNA, 98 bp, Homo sapiens
ccctgctggagaggaggcagactgaggcagcagggcagcgaggtcacaggccccacctttgctgatggcgagctcatccccagggaacccggcttttt

SEQ ID NO: 352752 - DNA, 75 bp, Homo sapiens
gtgaggtcaacctgcgcccccagatgtcccagacctctgtgagtgaaagccttcagagggaagctgctaagaagc

SEQ ID NO: 352753 - DNA, 74 bp, Homo sapiens
cacatcttaaagttcacacagcactgatttccatgaggacaacttacaaggacctgtatggcctcattttagct

SEQ ID NO: 352754 - DNA, 75 bp, Homo sapiens
gacgaggctgccgaagacagtggtgaggagggcgcccctgaacctgcaccaggaggatcccttttcccccagaaa

SEQ ID NO: 352755 - DNA, 96 bp, Homo sapiens
agatcgagaccactttggccgtacattctataatcaggcaattatgtcttctaaaaatattgcacaggattcatgcttaacaagtctagcatcatc

SEQ ID NO: 352756 - DNA, 100 bp, Homo sapiens
ccaaggaggactcctatgccaactacttcattcgtaaaaagcttgtggtgaaggggggcaaaaaaaagaagcaagttctgaagttcactcttgattgcac

SEQ ID NO: 352757 - DNA, 50 bp, Homo sapiens
cttcgccacgccggggtcttcaggtcacggtctagatcacattctcgatc

SEQ ID NO: 352758 - DNA, 83 bp, Homo sapiens
gtctccaaatccgaccaattgctcatcgtcgtgtccatcctagaaggtgctgctgttttttcaaacgaaggaaaaggaaaacc

SEQ ID NO: 352759 - DNA, 98 bp, Homo sapiens
agacccaagcatttgacttttactcaagatattttgcaccgtgggttggtgtggctgaagacccagtgacagcccctcggtcgcactacctggctgac

SEQ ID NO: 352760 - DNA, 99 bp, Homo sapiens
tcctgtggatgagattcttcaaatccctccactctcttcaactgcaactctggctgggctaagcagttccaagctttccatgtccaaggccctccctct

SEQ ID NO: 352761 - DNA, 83 bp, Homo sapiens
gggtttagcacgatgagctcaatcggcactgggccgcggcgagtcctttgcacatgttggcaacacacgcatccgcatcggcc

SEQ ID NO: 352762 - DNA, 97 bp, Homo sapiens
ggagctgaaggcggcggcagagaacttgccggtgccagctgagatattctctaagccgctttcatcatgggagaaatagagcagaggccgaccccag

SEQ ID NO: 352763 - DNA, 100 bp, Homo sapiens
aggggttgtggaggaatggttgtcagagtttaaggataacgtcattagcagaatctcaacttcagacccgtcaacaaattaagaaactggaggagttgca

SEQ ID NO: 352764 - DNA, 100 bp, Homo sapiens
ggaagaagagccagggcagcaagaatcctcagaagtactcggacaaggagctgcaggtgcatctgcagacgcagcaggaggtgaagctgcgcatgacggg

SEQ ID NO: 352765 - DNA, 82 bp, Homo sapiens
cggaatctaaaaagccctcagtaccagagacagaagcagatggattcgtccttttaggcatgacagcaagcgctgtggcggc

SEQ ID NO: 352766 - DNA, 96 bp, Homo sapiens
ttggccactgatcccccgaagagcttctgtcgccgctctagggccatcgaagacggcaatttggaggaaatggaagaggaagtacggcttaagaag

SEQ ID NO: 352767 - DNA, 100 bp, Homo sapiens
cgacaggagttcatctacccggagaagcaggagccctactcggcagcttcggaaccaaaaagaagcttcccagagccggggccaggagccccaagcgccc

SEQ ID NO: 352768 - DNA, 83 bp, Homo sapiens
ggccttagctgtgctcgcgctactctctctttctggcctggaggctatccagcgcactatgtcgtccgaggcccagagatgac

SEQ ID NO: 352769 - DNA, 75 bp, Homo sapiens
gttactgggtaacattgaggaaacctagccctgtctattcatttggaaagttactgtggcccatgtcctaaaaac

SEQ ID NO: 352770 - DNA, 100 bp, Homo sapiens
cttgaggagctgttgtgttgaggacccatcaactgtcatgaacatgattctagaagcacaggacagtcattttgtttactcattcagccctgttgcaggt

SEQ ID NO: 352771 - DNA, 85 bp, Homo sapiens
agttggaggctggcagcgaagaagatcgaaaattaaacctcaggatactggtatcgggatgacacaggaagagctggtgtccaac

SEQ ID NO: 352772 - DNA, 82 bp, Homo sapiens
gagaatcaatttggatcggcttatcataaccaggtgaccaagaatatggcccaggtgaccaaagccctggacaaggccctga

SEQ ID NO: 352773 - DNA, 51 bp, Homo sapiens
atgaccctgagcaaggaaaatctgaggtggttccccctggaagtcctgggc

SEQ ID NO: 352774 - DNA, 100 bp, Homo sapiens
acccattcaggcacttatggccatttcagccaatttgatgctgcctggactggtgatgccccctgctggtctgcctcaggtacagaagggcgacctctgt

SEQ ID NO: 352775 - DNA, 75 bp, Homo sapiens
cggaggaaatcaagcaaggcaatgacaatggtttaccaaagatgcaggtcattaggaactattctggaacaccac

SEQ ID NO: 352776 - DNA, 75 bp, Homo sapiens
gggaaggtgcggggagcggagccatggcctccgacgtggacgaatgtcgcgagcgaggcccagccctgtgcgggt

SEQ ID NO: 352777 - DNA, 100 bp, Homo sapiens
ggctgcagcagcaagtcccatcggaggacctccctgccctgtataccgagggaacagaaatatggctacacacacctttctgcaggagagctgcttcgtg

SEQ ID NO: 352778 - DNA, 75 bp, Homo sapiens
aacaggcgccgcgggctccgcgcccggccggacccgggcccgagagcttggggcttccttggtcgcacccaccac

SEQ ID NO: 352779 - DNA, 100 bp, Homo sapiens
agccctacctggatgagcagagagctgtgaaatatctttggcttgcagccaacaatgggctgaagacctaactgcagcatgtctgtatttggagatgggg

SEQ ID NO: 352780 - DNA, 82 bp, Homo sapiens
ggagaacttgttggagtgctggtgaatcatttcaagaggtgtcgtgaaaactacccctaaaagccaaaatgggaaaggaaaa

SEQ ID NO: 352781 - DNA, 75 bp, Homo sapiens
gtactgctccaagtacaacgaagccaccggcgtgtgccccgacggcgacgacccgcatcgccacatccctggatg

SEQ ID NO: 352782 - DNA, 52 bp, Homo sapiens
cctgcaccgccaccggcccgacctcatggagtaccctgacttctaccggaag

SEQ ID NO: 352783 - DNA, 90 bp, Homo sapiens
tgggcaacggagacgacgaggcagctgagttgatgcagcaggtattagaaaactactcggatgctccaatgacaccaaaacagattctgc

SEQ ID NO: 352784 - DNA, 101 bp, Homo sapiens
aggggccgtgggggtcgtgggccggagcgcctccttcgcaggcttcagcagtgcacagagccggaggatcgctggaatgcagtagccctctgggcctggga

SEQ ID NO: 352785 - DNA, 82 bp, Homo sapiens
tctaaatgcagattccagaaaaattacagcacatctcagtgaatttgcaagtggtgtcttcagtgccctgggtttgcctgtg

SEQ ID NO: 352786 - DNA, 100 bp, Homo sapiens
ccagtggccctggaggaggccaagactgaacctccattgaatactccagaaaacagggaatatactgctgaaataatgtttgagtccttcaatgttccag

SEQ ID NO: 352787 - DNA, 100 bp, Homo sapiens
cttcccaagcttccaggtgtcccagaaacccaggaaatcgagactcatgactcccagagaggatggcatctagaaggtactttggtcaataatgtccgac

SEQ ID NO: 352788 - DNA, 100 bp, Homo sapiens
cacattttgaaaaatcctctcattattaacagcattatcgataagccgattccacgactcttctttgcgggagaacatacgatccgtaactacccagcca

SEQ ID NO: 352789 - DNA, 101 bp, Homo sapiens
ctgccactgtcttgttccgaggcggccccagaggtcactctgtgagactgctgggtcagaaaaaggataatggaaggcggcttgggggagcacgattggat

SEQ ID NO: 352790 - DNA, 100 bp, Homo sapiens
cagcaggcctccgggcccggcgccgccgcccgcagcttacagttgaacatgagtcttcttatgattagtgagaatgtaaaattggctcgtgaatatgcat

SEQ ID NO: 352791 - DNA, 100 bp, Homo sapiens
taaacaagagatttccacagaagtgttctggacttggtgcctctttctgttatatgctttcctatttagttgggagaccagttgtatacaaatacctaac

SEQ ID NO: 352792 - DNA, 75 bp, Homo sapiens
ctattgtaagtgcagatggaacacaacagctccagtcagcccggtcaagcatgacagcaactcaaactcggcaaa

SEQ ID NO: 352793 - DNA, 78 bp, Homo sapiens
gactgcaactgctggattgctgcaaggctgagggacgagaacgagtttgcagctcaccttgtgaagatgaaatatcca

SEQ ID NO: 352794 - DNA, 82 bp, Homo sapiens
ccaggcattgctggagatggatctgctgaccggtatattttggaacttcacatccaagatactatatctctgccaatgtaac

SEQ ID NO: 352795 - DNA, 89 bp, Homo sapiens
aagccccagccacccatcaaatcagagagaaggaatccaccttcttacgctatggcaggagtcattgcagttttcagtagaggtgtact

SEQ ID NO: 352796 - DNA, 83 bp, Homo sapiens
ccaggacctacggcaccagtggcctggacaacagacctctgtttggggagacgtccgccaagacaatgcagatcttcgtgaag

SEQ ID NO: 352797 - DNA, 74 bp, Homo sapiens
tgaaaatgttttgaagcaagtaaaggctggacaccaggatctgcaggcccaagaccgagctcaccgcatcgggc

SEQ ID NO: 352798 - DNA, 100 bp, Homo sapiens
tactcctgtatgattgaaaatgacattgccaaagcaacaggggatatcaaagtgacagctagtatgttcaacacaccaggaatgcagagcttgttgcaac

SEQ ID NO: 352799 - DNA, 100 bp, Homo sapiens
gtgatcgcggactatgagagcggacgggccatacccaataaccaggtgcttggcaaaatcgagcgggccattggactttccttatcccagttgattgtgc

SEQ ID NO: 352800 - DNA, 75 bp, Homo sapiens
aaagaagaactggaacgttgtaaagtgcaggcatcccgggcccaaatcctagacaaagccacagaatatatccag

SEQ ID NO: 352801 - DNA, 74 bp, Homo sapiens
ctcaatgagatcattgccgacttcgacgagattgatctggatactattgatgtaagcaacctcaacagacagtt

SEQ ID NO: 352802 - DNA, 75 bp, Homo sapiens
gagcctactatcacgacgggaagctgtgggataaggaagcctgtgtgggtaccaacaatcaaagctacatctgtg

SEQ ID NO: 352803 - DNA, 75 bp, Homo sapiens
cgggatttggagctgcctagcctcgcggtcgatgagctcacagtgcctgcactttaccccagtagccctgaagtg

SEQ ID NO: 352804 - DNA, 50 bp, Homo sapiens
atccagcctgcggagcctgtggggcaggcaattaagttggaatatgcaag

SEQ ID NO: 352805 - DNA, 105 bp, Homo sapiens
ttttccttcccaacgatgaatctctgaacatcatcataaatgggctgcgtattgtcagtttatggacatgctgttccctggctccattgccttgaagaaagtgaa

SEQ ID NO: 352806 - DNA, 76 bp, Homo sapiens
agttaaggacattccaggcagaggcaaggaggactcagagagagtaatgataattaccggaccaaacatgggtgga

SEQ ID NO: 352807 - DNA, 96 bp, Homo sapiens
cggctggagcggatcccacacctccggaccgagggacgcgggtgtaattgaaaagtgatcctctcttcagagatgtcaaaaacaaacaaatccaag

SEQ ID NO: 352808 - DNA, 100 bp, Homo sapiens
gggagaggctaatgctgagctctgtcggtatctttccaaggtcctagaactcaggaagagtgatgtggttttggataagcccatcaaagctcctgagtca

SEQ ID NO: 352809 - DNA, 75 bp, Homo sapiens
aggcgagcgccgcgcgcaccactgcaccagatactgctacaccatctcatcggcatggacctatatgtggcagca

SEQ ID NO: 352810 - DNA, 88 bp, Homo sapiens
cttggtgggctggatgctggagcacacggaggccgtgatgaagacgtaaggcccggcaagccaaggcgcgccgcatcgccccgcgccc

SEQ ID NO: 352811 - DNA, 49 bp, Homo sapiens
tgcagaggtgctggagctggcagggatatatcattcagaaaagagaaat

SEQ ID NO: 352812 - DNA, 83 bp, Homo sapiens
tctcaaagcaataccaggatagctgttgtttcagagaaagaagcgtaaaagatgtgttgttttcaatcaaggtgaattggatg

SEQ ID NO: 352813 - DNA, 51 bp, Homo sapiens
attcgcagtggtcgcttcttctccttggccgccatggcatcagatgaaggc

SEQ ID NO: 352814 - DNA, 73 bp, Homo sapiens
caaggcggcggacggctgcgtcgcccgaggcgaggaggagcgctggcgcatcttcacaactatttcacagtga

SEQ ID NO: 352815 - DNA, 80 bp, Homo sapiens
ctcccgcgcgtgctgcgggtctgctcgggggtctacttcgaggcgtggtgatggtggatgaggcacacgaaaggacccta

SEQ ID NO: 352816 - DNA, 83 bp, Homo sapiens
ccacgcagggcctagggtgggaagatggcaggtgggggcggcgacctgagcaccaggcaatataaagtcctggttcactctca

SEQ ID NO: 352817 - DNA, 50 bp, Homo sapiens
gcccctgtggagtctgcttctctgggaagagctgtaggtaaaacttgcct

SEQ ID NO: 352818 - DNA, 75 bp, Homo sapiens
gtgaaaagagatctgttttcaggaattttggagagtaaaaggctgaaccttgttaaagagaaaaccattaatcag

SEQ ID NO: 352819 - DNA, 100 bp, Homo sapiens
ctggcactctaccgttccatcttggatgcctacatcatcagagcagcacttgaggcatgtcacaagggctggggcgtcagcgtcgtggttggagtagctg

SEQ ID NO: 352820 - DNA, 50 bp, Homo sapiens
gtggaagatgatgcttttatcaaggctgctttgctggctctgcaagaaaa

SEQ ID NO: 352821 - DNA, 89 bp, Homo sapiens
agggctatgagggttctcttataaagctcacatctaaacagataccctgaccataaatgatgaccagtgtttactcctctctgagactg

SEQ ID NO: 352822 - DNA, 87 bp, Homo sapiens
tcaatggaggagagacttatgcctggaggaacttggaaatcaaactcaaaagcagaagccactggagaaaaacggccaagaggcaga

SEQ ID NO: 352823 - DNA, 87 bp, Homo sapiens
tctgcgtggggacggccgcctagagtggttcagccacaaggaggactctccacctctcgacctcgtgtggtcatccaactggagcgt

SEQ ID NO: 352824 - DNA, 100 bp, Homo sapiens
caggttctgagactctaggcaggctggcaggcaacaccttaggaacatccatgatagcagtcttctgtaaatcgaacttttcaagaattctctgaaggaa

SEQ ID NO: 352825 - DNA, 75 bp, Homo sapiens
gtggcagcgacagagccaaaatcagagctggaacctgaggagagagaactctaagaaggagctgatgtggaggag

SEQ ID NO: 352826 - DNA, 100 bp, Homo sapiens
gaaaccattcccttacaggagacctccctgtacacacaggttgaagaagaggatgaacttgaatctggagaccaagaggatgaggatgatgaaagtgaag

SEQ ID NO: 352827 - DNA, 144 bp, Homo sapiens
ccggagtccggccagggccggcgcggcgatgatgaacaggttccgaaagtggctctacaaacccaagtaagactttgaccccgacgcaggcttcagtgattgccgcggatcagaagcctgagcactttggctcgagacaattaa

SEQ ID NO: 352828 - DNA, 98 bp, Homo sapiens
tcgtcgctgccaacctgctgttctggagctatgcctgttccagaccagccttcatcagcctcagagaagacgagttccctgagccccggcttaaacac

SEQ ID NO: 352829 - DNA, 101 bp, Homo sapiens
ttaacaacctccgggcgcactccatcaacctgaaggagatcaacctgaggccgcagatgtcccagtgacagtgctggccattttccatgaactgcacgtcg

SEQ ID NO: 352830 - DNA, 100 bp, Homo sapiens
ggggatgtgtggctggacagctgccgggagatatgcttcctgagagaaaggaccacgcttctcctgtttaccatgctgtctcccactctagcacatcctt

SEQ ID NO: 352831 - DNA, 90 bp, Homo sapiens
cttccactgatatctcaaaaggtgatctggacaaaggaacaggtatctcaggtgttggctacgtttgtggttttaagaaagcctgagggc

SEQ ID NO: 352832 - DNA, 75 bp, Homo sapiens
ttactgatggtgctgctcacatctgtggtccagggcagggccactccaggtgctggcgggcgcagaggcctccca

SEQ ID NO: 352833 - DNA, 100 bp, Homo sapiens
gagaaaatagcaaacgatccagacggcagggagtgcatcaaaggtgtgaacacagatttctgcgccaggagatgaggggcggtagagccctggaatggag

SEQ ID NO: 352834 - DNA, 75 bp, Homo sapiens
tgggacttcagatacgctttaacttgaaatcaaggaatgtagaaatcaggaaagaagctaatcattctgaaggac

SEQ ID NO: 352835 - DNA, 83 bp, Homo sapiens
aggtgttcgagaacgaccccgagacggccatgcggaccctcagttggaagcacaccctgggcctggtgaccatggacgtggag

SEQ ID NO: 352836 - DNA, 82 bp, Homo sapiens
gggagcaaattttactttctgacaatgcagcttctcttgcagtgcaggctttatcctgtggataaacgcagagtgaacgagt

SEQ ID NO: 352837 - DNA, 100 bp, Homo sapiens
ctgaaacagaaaccacctctgccatcctcgcctcagtcaaagaacaggcatgctgagaatttagtaaggaatcatggaaaagataaagattcaagacgga

SEQ ID NO: 352838 - DNA, 75 bp, Homo sapiens
ctcggcccgcgggggagccccgggagccgcacggttcaaaccttgtactactcagctgatcacaagctgcttgat

SEQ ID NO: 352839 - DNA, 75 bp, Homo sapiens
cttcaggcaaatcagtggcgtctgatgtccctgagggacttgattattcttagaaatgcacttgacctgcttttg

SEQ ID NO: 352840 - DNA, 51 bp, Homo sapiens
ggcggtggctgcggttgcgggaccggaacgccgcgatggctgcgcagggag

SEQ ID NO: 352841 - DNA, 75 bp, Homo sapiens
gagctttgcagctgacctacatctcgaaggtgggaccagggagattggatctgctctcaccaggatgtgcatgag

SEQ ID NO: 352842 - DNA, 101 bp, Homo sapiens
cttgcacctgttaacatctttaaggcaggagctgatgaagagagagcagagacagctcgtctggacactttgccaccatcaccttgaccttcatcgacaag

SEQ ID NO: 352843 - DNA, 109 bp, Homo sapiens
aactattcgcggagctggaatgactggcaacccaggaaaaccaattctgtgtcctcggaggaccacagcccagttgggccccaggcgaaacccagcctggagcttgcag

SEQ ID NO: 352844 - DNA, 75 bp, Homo sapiens
gaatactgcaatactatactcatcagagaacaggcaccatatctggaaatcaagaagcaaatggataaacaggac

SEQ ID NO: 352845 - DNA, 82 bp, Homo sapiens
tcggccgatgaagtgcagaggtttttttctggtgacctcacagtgactcaagctaccacttactgttgattgtgacgaaatg

SEQ ID NO: 352846 - DNA, 50 bp, Homo sapiens
gagaagccgcccaaagaactgataagatttgtgaccaaatcagtgatgct

SEQ ID NO: 352847 - DNA, 101 bp, Homo sapiens
cgcttctcggtttttgcactcgctgtgcaccgagttactttcccggcccctcgttgacaccatgtcagtattgaatatggtggtgaggcgtgaccctggca

SEQ ID NO: 352848 - DNA, 100 bp, Homo sapiens
gtagaacacagttatgggtcgcaagaagaagaagcagctgaagccgtggtgctgaaatccctcactttaaggaggttatcatcatggctaccaactgcga

SEQ ID NO: 352849 - DNA, 114 bp, Homo sapiens
cagcaggcggacgaggcggaagaccgcgcgcagggcctgcagcgggagctggacggcgagcgcgagcggcgcgagaaacttgccttgcgccatggactggcagccagacgagca

SEQ ID NO: 352850 - DNA, 98 bp, Homo sapiens
cctgagcgcaccctggaccccaactcagccttcctgcataccctggaccagcagaaacctagagtggtcctggatgcctcatcccttagtttcaacac

SEQ ID NO: 352851 - DNA, 83 bp, Homo sapiens
gctccacctataacaagtcttagtctcctaggaaattttgagtgacaaaggagagcatgcttccagctggagctgagtccaag

SEQ ID NO: 352852 - DNA, 87 bp, Homo sapiens
caacctcacctcctggggggagctgatgaagtccaagtactcagacatcaccatcatgtttgaggcatacttctccgccttcccacc

SEQ ID NO: 352853 - DNA, 100 bp, Homo sapiens
ccatgctacgaagacagcagatcaagccagcagacttcataggaaagcaagcactgaaacagattaaagccaaggggctgaaacgaagactggtctgcct

SEQ ID NO: 352854 - DNA, 90 bp, Homo sapiens
gaaagacattacaccatctgaattgcctgcaaacccagttttctggatatgccgcagaaggatccgtgccagaagcaagcctgtgagata

SEQ ID NO: 352855 - DNA, 75 bp, Homo sapiens
caaggaataaacatgcaatgaacccaaaagggtttcatggggaagggtatcgggaaggctatgaagaaggcagta

SEQ ID NO: 352856 - DNA, 83 bp, Homo sapiens
cagggcggcatcgtcgtctatgggggctactcgaaacaggtgtccctggccagtgtccttccacctgtccacaagcatgggga

SEQ ID NO: 352857 - DNA, 100 bp, Homo sapiens
gtctctggggagcccctcaaaagcctggcttatgtacagaagtacgtcgtgaagaattatttctactattacctattccaattttcagctgctttgggcc

SEQ ID NO: 352858 - DNA, 90 bp, Homo sapiens
gtgataatgtgcgggttttggatttgcctaggtccctagataaggatgatctttccatttcagtggcaatgcccatatattcccctttgt

SEQ ID NO: 352859 - DNA, 88 bp, Homo sapiens
tggtcactgaggaagagatcaatcttaccagagggccctcagaatcctcactatggatgggctcattgaggacattaagcatcggcgg

SEQ ID NO: 352860 - DNA, 90 bp, Homo sapiens
agggtttgactggaggaacctctggagcagctggatttagtgcaagaagaagaacagttgatggaagaaaagaaaaagaaaaaagacgac

SEQ ID NO: 352861 - DNA, 100 bp, Homo sapiens
gacctggggccctgggtgaagtgctccgtcgcccttgcctccaggcattgaatgccccagaggagcccgaaacctcccaggcttggtgcaggaaggagag

SEQ ID NO: 352862 - DNA, 83 bp, Homo sapiens
catgatcacccgccgctccttgggctacgcgtatgtgaacttccagcagccggcggacgattgacgagatgcctgaggctgcc

SEQ ID NO: 352863 - DNA, 100 bp, Homo sapiens
cgatttcttcaatgattaccaccttcaaaatggagatgttgttgggcagcattcatttcctggcaggtgtttaatcaggaaggagaattcatgttgaagt

SEQ ID NO: 352864 - DNA, 51 bp, Homo sapiens
ccgcttctctatacgggattccaggtgcggccgggtgtgtggcaacattac

SEQ ID NO: 352865 - DNA, 100 bp, Homo sapiens
gttccttccaaagtgcagcgctgtgcagtggtagcagcagcagcagcagcagcagcagcagcagcagcagcagcagcagcagcagcagcagcaatgtttc

SEQ ID NO: 352866 - DNA, 50 bp, Homo sapiens
ctcatcctggatgacgtgtccttggtttcccttgggggctttgaaataac

SEQ ID NO: 352867 - DNA, 145 bp, Homo sapiens
ctccttttcggaaacctttgagtcagctaaccaatcaaccaccttgtctggacagcagtcagcatgcctcccgaggagcccagacagctgcagccacagctccccgtatcaagaaatttgccatctatcgatgggacccagacaa

SEQ ID NO: 352868 - DNA, 99 bp, Homo sapiens
cttggtgcaggaaggcagtctttgctacgtacagcaaaaggtggtgaagcagtattttccaatttgaagattcatttgaaggtggctcctgccacctgc

SEQ ID NO: 352869 - DNA, 95 bp, Homo sapiens
aacagtttcagctatctatagagaatttggatacagttgatatattagttggatggcatatagatcatactcagaaaccttcgctcacgcagcag

SEQ ID NO: 352870 - DNA, 95 bp, Homo sapiens
ccactccgtcccccgcgggtctgctctgtgtgccatggacggcgccgtgccgtccctgcagtgacaccgaggtgctcctagccgtctgcaccagc

SEQ ID NO: 352871 - DNA, 100 bp, Homo sapiens
gagaagagcgaccagctcactaagaacatggtggactgcctggaaagtactctagaaaagtcactccaagcaaagtttccttcaaatctcaaggtctcca

SEQ ID NO: 352872 - DNA, 101 bp, Homo sapiens
cgagtatctccgtttcctggatgtgaacaaccacaccttcatcaagcggtccgaggtggaagaagtggattttgccggctggttgtgtaaaaccctgcggc

SEQ ID NO: 352873 - DNA, 74 bp, Homo sapiens
cctggacctggaaaccatttttttccagggtcacccccgagaggacaacaggcatctggaagtgctctctcgcc

SEQ ID NO: 352874 - DNA, 83 bp, Homo sapiens
cggagatggtgcagaagatggaggagctcattgctatggacagtgctatcaccctgtggcagttccttcttcagctcctgcag

SEQ ID NO: 352875 - DNA, 90 bp, Homo sapiens
gtggggtcaactgcttcatgctggacccggaaaatgcagagcaatccagagcggccatcaacaaatgggtgtccaataagaccgaaggcc

SEQ ID NO: 352876 - DNA, 100 bp, Homo sapiens
gcgggcacagggcaaggcggcggacggctgcgtcgcccgaggcgaggaggagcgctggcggtccaactggcccaccttcaacactccctctaagcaccca

SEQ ID NO: 352877 - DNA, 100 bp, Homo sapiens
gcggcacgaggggccttcgccaccacgcactgggtcgtcacggaggacgggaaaatccagcagcagggggagagcaaggacctgctgtttatcttgacag

SEQ ID NO: 352878 - DNA, 76 bp, Homo sapiens
ggccgcctggcggccatcgtggctaaacaggtactgctggctgtgatgaattccactggtggcagtagcagtggcg

SEQ ID NO: 352879 - DNA, 74 bp, Homo sapiens
agaccaggcagctgcgctcttgacagccaggtaccaggagcaagatcttgtgcaaaccctgagttgtttgtcta

SEQ ID NO: 352880 - DNA, 71 bp, Homo sapiens
agcagagcggccggaagcgcggagggagccgcgggatggaccgcaggagagaagatgactgaggaggaggt

SEQ ID NO: 352881 - DNA, 82 bp, Homo sapiens
ctcgcgccggctatggccgtgccctggggctgagccctcaggttcgagaacttgtcttggacaattgcaaatcaaatgatgg

SEQ ID NO: 352882 - DNA, 75 bp, Homo sapiens
ctggagcctcagttggaagcagccgatccagcctgcggagcctgtggggcagttctttatagctccaagctctac

SEQ ID NO: 352883 - DNA, 75 bp, Homo sapiens
cctctaccgcaaactcatcaccaacatcctgggaggctgcatccaggtcagagtggtgctgggaacaactgggcc

SEQ ID NO: 352884 - DNA, 74 bp, Homo sapiens
atttaaacaagagatttccacagaagggttgtgagtcccggcccagcccctccacccccctgcccccccgatgc

SEQ ID NO: 352885 - DNA, 124 bp, Homo sapiens
gttttttcatattacatctacaagaggggacaagtacctttatgaaccagtgtatcccaagcaaatgttctgaaaaagactctgcatgggaatggcctgccttacgatgacagaaatggaggga

SEQ ID NO: 352886 - DNA, 75 bp, Homo sapiens
attccacttgctcgcccggaggtgaaatggacgtacttcctcgcgtattgctaaaggaggagttgaccacaccaa

SEQ ID NO: 352887 - DNA, 100 bp, Homo sapiens
atgtcaaccacttcgccccggacgagctgacggtcaagaccaaggatggcgtggtggagatcaccggtggtcgtcggttttctgagggtacttcagctga

SEQ ID NO: 352888 - DNA, 90 bp, Homo sapiens
tctaaagctaaaattgcctttggacagtctatggatctacattataccaataacgaggtctatgctccatcagcaagcactgccgactac

SEQ ID NO: 352889 - DNA, 74 bp, Homo sapiens
gacgaaagtgtcaaggcattacggctcccattgaggacgactgggtttggattcagaagaggattattatacac

SEQ ID NO: 352890 - DNA, 100 bp, Homo sapiens
tcattatccaggagtccgccctggactaccgcctggatcctcagctccagctgcactgctcagacgaggaacaggagtacagctgtgtagtaaagatgcc

SEQ ID NO: 352891 - DNA, 75 bp, Homo sapiens
cccagaatctttaggtaaatgagggatatcagtatgaacaacattactcagttgccagaagatgcatttaagaac

SEQ ID NO: 352892 - DNA, 100 bp, Homo sapiens
aggacaagggagatgaggaggaggaaggagaagagaaacttgcaagggcaagtattttgtaaccttcccatatccatatatgaatggacgccttcatttg

SEQ ID NO: 352893 - DNA, 75 bp, Homo sapiens
tcattgaggaccagtcaattctaaactaataatccagaatggctactctgatctatgttgataaggaaaatggag

SEQ ID NO: 352894 - DNA, 100 bp, Homo sapiens
cgtcgggtcagatccgacagaagattgtggtggtgccatgcagcaagaatcagagagatgcagagttagagccagaaggcctgacatggcactttatgta

SEQ ID NO: 352895 - DNA, 83 bp, Homo sapiens
ccagctacccctgggaccgggaaatctaagtgttctaagaacggaagcatctgggctggatggaatttagcatcaagcagagt

SEQ ID NO: 352896 - DNA, 90 bp, Homo sapiens
gctctgagggagggtccgagccagccgctgttttgccggaggagcccctcaggccaattcctagaggacctgtgcaacaacctcttgagg

SEQ ID NO: 352897 - DNA, 82 bp, Homo sapiens
cggctctggagctgttggagcccattgaccagaagtttgtggcactgacaatcagacctatgctagttcctgtcatctattc

SEQ ID NO: 352898 - DNA, 90 bp, Homo sapiens
aaatatctttggcttgcagccaacaatgggaattggcagagggggtcgatttgggaggaaaggtgtggctataaactttgttactgaaga

SEQ ID NO: 352899 - DNA, 59 bp, Homo sapiens
ggcgcaagatcgtcttcagctgttcatagcgtaaccttcaaagcatcaagacattcagt

SEQ ID NO: 352900 - DNA, 82 bp, Homo sapiens
gtccaatctgagcgtgctgcggacggcgctgcggtacatccaggtcaatggccagcaaggaggggggtccgagccggcggcg

SEQ ID NO: 352901 - DNA, 97 bp, Homo sapiens
ccacatcaggacagctgttccttggccatcccaaagctattctgggggcaacagagagtacaggggctcaggtccaggtggcaggggatatgctacc

SEQ ID NO: 352902 - DNA, 75 bp, Homo sapiens
agaattcttcgaaacattggtacaatgaatacatttaaggggccatcgatgcacccctcggagctaatagcggag

SEQ ID NO: 352903 - DNA, 75 bp, Homo sapiens
tgtggatggtgttctctttgtttcctttgaatcaaagatattttatgacctggtcagacagataaataggaaaac

SEQ ID NO: 352904 - DNA, 75 bp, Homo sapiens
cataaagtgacacagtacaagaagggcaaggattctctgtacgcccaggcctccttttagaggactcagaagaag

SEQ ID NO: 352905 - DNA, 90 bp, Homo sapiens
agaaaacccaggcctgtttggcaagcaagcacgtgcaagaggcgccaagccggtgttccaggagaggagcccaagtgcaacatctgccta

SEQ ID NO: 352906 - DNA, 82 bp, Homo sapiens
tggaactatacacctctgcatgaagctgctattaaagggaagatcgatgtgtgcattgaatgtgacagtgatgataacatgg

SEQ ID NO: 352907 - DNA, 100 bp, Homo sapiens
tcctcggggagagcgcgccaagaccgctgcagccgctggctgaactacatgaggaaataattgacttttataacttcatgtccccttgtcctgaagaagc

SEQ ID NO: 352908 - DNA, 96 bp, Homo sapiens
ttgcaatggtggagacctcgcagattatttgcaagggatatctgcattacctccacctcctccacctccaccaccaccagcagctcccttgcctcc

SEQ ID NO: 352909 - DNA, 76 bp, Homo sapiens
gatgctgccagggtccctgaagagggaagacacgcggaaacaggagccagcaccgctctttgaccttgccatgctt

SEQ ID NO: 352910 - DNA, 50 bp, Homo sapiens
ctgcctgctcttggccaacaagaaataggaaggttgttgattactcacag

SEQ ID NO: 352911 - DNA, 100 bp, Homo sapiens
aaaaatgcacataacgtggatcacgccagtgttttaactcaaatgggtgatgaaaaggactcttggaaagtgaaaactttagatgaaattcttcaggaaa

SEQ ID NO: 352912 - DNA, 96 bp, Homo sapiens
gccaagttatttactttcccatcaggtttcctgatgtgagcagtgacaggatcacagaatgtgaattttgaacagatctgaaaagttattaagttc

SEQ ID NO: 352913 - DNA, 90 bp, Homo sapiens
caaaattatccgaaaccgcctcactgggacaggaagatgtcacccaagcgcatagctaaaagaaggtcccccccagcagatgccatcccc

SEQ ID NO: 352914 - DNA, 123 bp, Homo sapiens
ggattctgtgtgctgtcggacccagagggtgacggcgccgctaggatgaagctcgtgagaatgctgcttctaaattacttgggcaaaattgggtccaaaacgcctttgatggcagctgcaact

SEQ ID NO: 352915 - DNA, 98 bp, Homo sapiens
gtactttgtcttggataacagtgtcatcctggcaatgctggaacaacctcttggaaatgagcagatgtaaggcaaacattggtgggcaccgatcttcc

SEQ ID NO: 352916 - DNA, 98 bp, Homo sapiens
aggagctcgagaaccgtttggcaatatgtacgacgcggatgaggtcttcccatgcacaagatgattaatacagatcttagcagaatcttgaaaagccc

SEQ ID NO: 352917 - DNA, 100 bp, Homo sapiens
gaaccagataggacaaggccaactggtatagactatgtgatacctaaaacagggttttactgtaagctgtgttcactcttttatacaaatgaagaagttg

SEQ ID NO: 352918 - DNA, 82 bp, Homo sapiens
tctggatctcagcaactgtgaggaggaggcaaaacagattcagaatctgcagaaagcaggcactcgtacagactcaagggag

SEQ ID NO: 352919 - DNA, 80 bp, Homo sapiens
ccacagaacttacctgcctcttcatgcagttctccatcgtgccagtcaaaatgcagatcttcgtgaaaacccttaccggc

SEQ ID NO: 352920 - DNA, 100 bp, Homo sapiens
atcaactgcagcgatggttacattgaatactacatatgtcgagggaatgcagaaagagttaaggaaggcaggtgaaacctcacctgctatccagctgccc

SEQ ID NO: 352921 - DNA, 100 bp, Homo sapiens
aggcgggcactctctgcgggtcccgcggctcccgcggcttccggcccactcagcgcctccagaggcctcaggtgaaaattatctcagtgaacgaggatgt

SEQ ID NO: 352922 - DNA, 75 bp, Homo sapiens
gtttgttgattgtgtttggcaaatgacaaggcagcaatcatcctcttccagtggtagcgtgtttgggtctggaaa

SEQ ID NO: 352923 - DNA, 135 bp, Homo sapiens
aagaggattacctgctttacaagcaaatgaagcaactgaaaaaccccttggaaatagtcagcatacctgactcacagatgaatgcttctcacccggaaacaaacttgccagttgggtatcctcctcagtatccac

SEQ ID NO: 352924 - DNA, 100 bp, Homo sapiens
cggggccatggccggaatgcagtaccctcagcagcagtttttccagaggcctcaaatacagcctcctagagctaccatcccgaacagcagtccttccatt

SEQ ID NO: 352925 - DNA, 82 bp, Homo sapiens
cgactgctagagccgagcgaagcaggttgacggatatattcagacgttacgacacggatcaggacggctggattcaggtgtc

SEQ ID NO: 352926 - DNA, 96 bp, Homo sapiens
actctgcaagattctctcctgaagtcccagggccggtgcataaacttctcccgagttccatctcagtaaaagggaagcaggaagaccaagaaggta

SEQ ID NO: 352927 - DNA, 75 bp, Homo sapiens
agttgagggagaaaggcgggcccgggaacaggagccagatgaccaagatgctccagatgaacatgagtcgcctcc

SEQ ID NO: 352928 - DNA, 74 bp, Homo sapiens
gtgacagcaaaaatgacccaccaatggaagcagctggcttcactgctcaggatggtttcatgttgaagaagaca

SEQ ID NO: 352929 - DNA, 83 bp, Homo sapiens
ccgccccctaaagcggaaccggatcaccgagggcatttacggcagcctcaaggaataggttctcctagtgtctatcatgcagt

SEQ ID NO: 352930 - DNA, 75 bp, Homo sapiens
gaaagaaggttgggttcagaagagggattgatgaactcccagagggcgctgtgaagcctccagcaaacaagtatc

SEQ ID NO: 352931 - DNA, 100 bp, Homo sapiens
cctgacgagacctgcaacaactaccaggccaaggaccagggagacctgtcttctggttacctggatgatactaagcaggaaacagctaatgggcccacct

SEQ ID NO: 352932 - DNA, 105 bp, Homo sapiens
agccaacccagatgaaatcggcaactttataattgaggagtgatttggagaacaatgcatgtaagtctgacatcatgatgtccatccggcaaagaagagaaataa

SEQ ID NO: 352933 - DNA, 51 bp, Homo sapiens
cccagcagcccctcccagtctgtgccagttaagttgataaatgatgcatac

SEQ ID NO: 352934 - DNA, 100 bp, Homo sapiens
tgaccaagcccaaagaggagaaagatgcttctaaggggaaacagaagtacctgtgcgccagcagaaatgattgcactattgataaattccgaaggaaaaa

SEQ ID NO: 352935 - DNA, 50 bp, Homo sapiens
tcgaaaggattggattggcatctttagactgaagggaactgtgcgcccag

SEQ ID NO: 352936 - DNA, 100 bp, Homo sapiens
gaagttgcagctgattaaggactatcgggagaaagtggagtccgagctgagatccatctgcaccacggtgctggtaatagcagtgagtgcccgcctccag

SEQ ID NO: 352937 - DNA, 100 bp, Homo sapiens
gactatcttctgctcaggaaccaaaacgagctgggaggtttattttcttgaaaaggctccaggcttcggcttggaaaatcccaccgccaaaattgagccc

SEQ ID NO: 352938 - DNA, 100 bp, Homo sapiens
tttcagaaagtaaagaaacaactgagtcatttgcaagatgagctaaaaattaaatatagacaatcatacatcttcaggtgaccaagaatatggcccaggt

SEQ ID NO: 352939 - DNA, 100 bp, Homo sapiens
ttgctgagtggcctcttataccccggactgcagcgccctcacaaagccaatgctgaggagatgaccaagtaccacagcgatgactacattaaattcttgc

SEQ ID NO: 352940 - DNA, 49 bp, Homo sapiens
tcatattatagatggagtaaaggagcggacaattgaacgcttaaaggag

SEQ ID NO: 352941 - DNA, 90 bp, Homo sapiens
atcatgacgagctcatctccaagaactgttcgtcaggtggcacaggagcagttctttttaatgtgcaccagatgttgcatgggacaccgg

SEQ ID NO: 352942 - DNA, 74 bp, Homo sapiens
acttgaagtcaagaaccttctggagaaaggcaagactgaacagcaggaccttgcagatgcttcgggagaacctg

SEQ ID NO: 352943 - DNA, 100 bp, Homo sapiens
cccagcgacgccttgctaacaaagtctccagcttgtacctcatatcagatgactccgcaagggcacagggcccctcccaagatcaacccagataactacg

SEQ ID NO: 352944 - DNA, 88 bp, Homo sapiens
atatggtgaccctcatagaagatgtgattgaaatgcttgaagatgaagaggcctgaatatttggacaagatggcagattcatcatcat

SEQ ID NO: 352945 - DNA, 75 bp, Homo sapiens
agtcccgtgggcaatagagtcactgtatttgaccttaaaaagacggctgtcctcagcgaggggccgtgcacccgc

SEQ ID NO: 352946 - DNA, 90 bp, Homo sapiens
aagtcctggacctcattgtcaatggcatttctatcaacagtgcttatacctccaagattctggtaaggagtgccaatggaccgatgcctg

SEQ ID NO: 352947 - DNA, 100 bp, Homo sapiens
gaaaaatgtcacctttgaacatgttaaaggggtctatgaaaattatcctacttatgatttaactgaaagaaaagatttcataaaaacaactgtaaaagag

SEQ ID NO: 352948 - DNA, 83 bp, Homo sapiens
cggactgattctctcaatttgctatgttttagctgttgggagctctgtgttccatgcgatgttttacggagaacttgcagagg

SEQ ID NO: 352949 - DNA, 83 bp, Homo sapiens
gcaagctccagtgctacgtgtccctggcattttaggtgtcggttgggtagacagagtctcgttctgtcacccagcctggtgtg

SEQ ID NO: 352950 - DNA, 98 bp, Homo sapiens
cgcgagtgggagcaccaggatctcgggctcggaacgagactgcacgcctccatcttccaagaagagcgatggttctgggacatatactaagttgcaga

SEQ ID NO: 352951 - DNA, 75 bp, Homo sapiens
cccggccgcgcgttgctgctgctgccggtcgagcagtgggcttggaacaccgggcggaagacggccatgaggagg

SEQ ID NO: 352952 - DNA, 75 bp, Homo sapiens
gaacgagtccctcttcactttcctcggcaagaaatgtgtgattagtgatgatgaaccaggttatgaccttgattt

SEQ ID NO: 352953 - DNA, 75 bp, Homo sapiens
ctgtcagtgagatggcttctaacaaggtgaatcagtggctaacctggttagaaactgctgaagaagaagaatcag

SEQ ID NO: 352954 - DNA, 82 bp, Homo sapiens
cttcacagcacagttcctgggaaggtggagccaccagcctctccttggtgaaagaaaatggcccgaaccaagcagactgctc

SEQ ID NO: 352955 - DNA, 98 bp, Homo sapiens
aggcaagaccgaattcagaaggatatcgacgtcgtgatccagaagtccagagctgaggactgcctgtttgcagattttaggtgatgggcaagtcagaa

SEQ ID NO: 352956 - DNA, 100 bp, Homo sapiens
gggagagtacatgagacgatgaagcaaagggttcacacctccaggaatggatagatcctctccagataacagcccagtgcacgggatgttacgtcaacca

SEQ ID NO: 352957 - DNA, 89 bp, Homo sapiens
cccgcccgggctgccctcgggaccgccagcggccaccgcgcagatgacagcctgggcttactggagctggaccagcggacccacttccc

SEQ ID NO: 352958 - DNA, 75 bp, Homo sapiens
tctgggccttgaacattccgaaactgtcaagattggcaagaatgtgacagtgatgataacatgggtgccaaaaat

SEQ ID NO: 352959 - DNA, 100 bp, Homo sapiens
agaactggtgcaagcggggccgcaagcagtgcaagacccatccccactttgtgattccctaccgctgcttagaaagcgtggatacccatcaacgaagttt

SEQ ID NO: 352960 - DNA, 97 bp, Homo sapiens
tgaaaccacagacatgactgagtcctccatgaagacactgcctgaggcccatctgcttccccggctatgtgcccaactccgcggtgctacagcagat

SEQ ID NO: 352961 - DNA, 100 bp, Homo sapiens
cgcagtatcatgctggccaagaagatcatcattaaggacggaggcacggtatgcagtgccattcagaatcaggatttcactgtgatcgaagactactgca

SEQ ID NO: 352962 - DNA, 100 bp, Homo sapiens
taaatgagcctcttgccaaagtgtcccttttaaaagttggattggatgctgctggcaagacaaccattctgtataaactgaagttaggggagatagtcac

SEQ ID NO: 352963 - DNA, 75 bp, Homo sapiens
tgatgaaaaatagagctgatcaccgttccagccccaacgtagcaaaaactgttcaggttccattatcaaaacgag

SEQ ID NO: 352964 - DNA, 74 bp, Homo sapiens
cgcagtggtcgcttcttctccttgtaaatctttgagaccagaaaagattcctaatcatgtatttgagatagatg

SEQ ID NO: 352965 - DNA, 90 bp, Homo sapiens
aagctcacctgaggactcacactgggattaaagcctgtggtttccacagaagcaccacctatcatatttgccacaccaactaaactgacc

SEQ ID NO: 352966 - DNA, 106 bp, Homo sapiens
gctaccaaatgcttattttctgcttccaaaggtccagagcattcagctgtctcaaatgcaggaaaatgtttataggaggccttagctgggacactacaaagaaaga

SEQ ID NO: 352967 - DNA, 100 bp, Homo sapiens
ggtcatctgtgagcagctaggggacctcttctccaaggcaggagactttcccagggcagctgaggcttaccagaagcagccgatcaaagtccagatctcc

SEQ ID NO: 352968 - DNA, 100 bp, Homo sapiens
tgcttttatattcatctcaaaaacaaaattctgaactcaggacttggcaaacatgcgaggattcatgacagcgcatggacagccagaccagcctcgatct

SEQ ID NO: 352969 - DNA, 100 bp, Homo sapiens
caaaacgccaggcggatctcagaaggccagttcaaaggtgaagcaaaaaatttattgccatatcttggaccccacaaaatgagagattgtttctgtacca

SEQ ID NO: 352970 - DNA, 74 bp, Homo sapiens
ccgactgcaactgctggattgctgcaaggctgagggacgagaacgaggtggattctccacagttttcctcgtgc

SEQ ID NO: 352971 - DNA, 74 bp, Homo sapiens
acagagatacccagacaacaggatcgtctcgtccaagaccctgagacagggaagacctgtctgctgaaagccat

SEQ ID NO: 352972 - DNA, 50 bp, Homo sapiens
agaaattctggaacacctatatggaggaggcgtctccctattccttactt

SEQ ID NO: 352973 - DNA, 75 bp, Homo sapiens
ctttcacctgccaggttcaacacatcttcattacctccactagactggcctttaccagctcattttggacaatgt

SEQ ID NO: 352974 - DNA, 100 bp, Homo sapiens
gagaaaaatggctacttgggccatgtcatccgcaaaggcctcaatgcctacctggaaggttcatggccatctccccggttgttgtgcacagccacgaaac

SEQ ID NO: 352975 - DNA, 100 bp, Homo sapiens
aagttaatccaggtgagactttcacaataagagcagaggatggaacacttcagtgcattcaaggtttggtgcacctcgatttggaggaagtagggcaggg

SEQ ID NO: 352976 - DNA, 50 bp, Homo sapiens
ctcgaccacagcaagctcctgggatgacagatttgaagatctggaagagg

SEQ ID NO: 352977 - DNA, 75 bp, Homo sapiens
cggagagagaggtggagtccggcccccgaaagaggggagagagaaacccctcctcgttttgcccagcatggcacg

SEQ ID NO: 352978 - DNA, 73 bp, Homo sapiens
ggactgcggcctcttctgaggggcagcggggcctggcgggatgacctcctgccccccgaggtctgcagtctcc

SEQ ID NO: 352979 - DNA, 82 bp, Homo sapiens
gtacagatctttgagaggtctgtgtacagtgacagacacttcgtgtatgatcatgtgttcgctgagaagatcacttccttgc

SEQ ID NO: 352980 - DNA, 98 bp, Homo sapiens
cttccaacatgccatgtcagacagtgaaggaaacatgccctgaactgtcacagaatgaaaccagcgctcttcagcgtcctgtgtgagatcaaagagaa

SEQ ID NO: 352981 - DNA, 96 bp, Homo sapiens
cctgtatgaagcggttggcaccactgaagtgaccgaatgagatggcaagattattttatcataaaccccagtttgccattttggatgaatgcacaa

SEQ ID NO: 352982 - DNA, 95 bp, Homo sapiens
gaccgcgctgcgctatggagcaggtcctctgtgtgggaacccgctgcgtttatatggataatgccaatgaaccccataatgtgatcatcttgaag

SEQ ID NO: 352983 - DNA, 50 bp, Homo sapiens
ctgcagtgccagaattcctcggacagtgtggcactgaaggggggccgtgg

SEQ ID NO: 352984 - DNA, 100 bp, Homo sapiens
cccgagtgcactgaagatggcggctgctgtaggacggttgctccgagcgtcggtctgggaggggctgaacgtggtgaagacaggccgagtgatgcttggg

SEQ ID NO: 352985 - DNA, 75 bp, Homo sapiens
gagcggacatgtgcagaacagattgttgccaaaattgaagaagtattgaaactacaagatccccggatcatgacc

SEQ ID NO: 352986 - DNA, 100 bp, Homo sapiens
gccagaaggagtcctggtgcaaacttgccttctacctgctctccttcttctattacctgtacagatgtgccggtgacttcagcgccagtcaccgcgttct

SEQ ID NO: 352987 - DNA, 98 bp, Homo sapiens
ctgatgtggtgcttttgaaccactggaaagtgaggaattttgaagtacaccgtggtgacattgtatcattggtacaaaagctgaccgtatgtcctatc

SEQ ID NO: 352988 - DNA, 99 bp, Homo sapiens
agaatccgcaaacttttcaatctctctaaagaagatgatgtccgccagtatgttgctttcgggtcacctccagcagctcccagttcagctcacgtgatt

SEQ ID NO: 352989 - DNA, 75 bp, Homo sapiens
caaacccctgctttccctcactccatctttaacacctctgtgtgaagatgacaaccaggcacaggaaatcattaa

SEQ ID NO: 352990 - DNA, 106 bp, Homo sapiens
ccgggacccggttccccggcccacagtgggggtgtgcaaacccgagagaactgggggtcaccagtcgttggcacaccaagaagctgccccgcaagacccaccgagg

SEQ ID NO: 352991 - DNA, 82 bp, Homo sapiens
gctgagtggtttttcggatcatgtctggtggctccgcggattataacagcttaaagcttttcaagccaggccaagaagctgt

SEQ ID NO: 352992 - DNA, 100 bp, Homo sapiens
gccctttcttaaggggaaacaagtcaatttggaaaggtcccagcgttgtgacggctctacatttggcctgtgccaatggtcatccagaagtagtaactct

SEQ ID NO: 352993 - DNA, 83 bp, Homo sapiens
cttgttttgagatcctctctaagacaggtgctctagttcacagctataggggaacaggtggaatatttgaagtttgctggaat

SEQ ID NO: 352994 - DNA, 82 bp, Homo sapiens
cggtacccgggtggttaaacttcgcaaaatggcagcacttagatgagttgatcccttcacaccccacccagcagttcgttct

SEQ ID NO: 352995 - DNA, 75 bp, Homo sapiens
ggcgttcgcaccggaaaatgtagcttcccggttaagggaactctaatgatccaggacaaagaagttaccctggag

SEQ ID NO: 352996 - DNA, 100 bp, Homo sapiens
tgatgaaaagtcaatacaaaactaccatccttttgcaggatggcacatttctggtcagagacagctctaaaaaaacaacaaccaatccatatgtcctcat

SEQ ID NO: 352997 - DNA, 100 bp, Homo sapiens
cgcctgtggcagtatcttctgagccgctccatgcgggagcacccggcgctgcgaagcctgaggctgaaaactacccctgagtgtggtcccacaggatatg

SEQ ID NO: 352998 - DNA, 75 bp, Homo sapiens
aagctgccaagttgaaaatggacgagtaatcgcctgctttgattcattgaaattcatcagagaagatatgaaata

SEQ ID NO: 352999 - DNA, 76 bp, Homo sapiens
gaacgattgggctgagcagaggacgacatgttgcttttcgtggagaaatgtggtttggttttgagctggaagagag

SEQ ID NO: 353000 - DNA, 100 bp, Homo sapiens
gagccctggggaggagtgttatgaaagaaggtgtcatggagaaactccagctgggcccagagattctgcagcgggaaaatccaaggcttatttatgccag

SEQ ID NO: 353001 - DNA, 98 bp, Homo sapiens
aacaaagacagaatttgcttacgaatatgtattgctggattttactctacaagatgcatttttgtagaagcattttgaggatgaatgtttgcaaatca

SEQ ID NO: 353002 - DNA, 80 bp, Homo sapiens
gcctcagttggaagcagccgatccagcctgcggagcctgtggggcagatatgaagagaaggctactaaagacttggaacg

SEQ ID NO: 353003 - DNA, 90 bp, Homo sapiens
tgtgggtgccaaagtcttcctcatctacgagacagccccgaagatttttggaggtgaaatcaagactcacatcctgctgttcttgcccaa

SEQ ID NO: 353004 - DNA, 100 bp, Homo sapiens
cctgccgcccttcatggacatcctcctgctgctgctgttcttcatgatcatctttgccatcctcgatggtagcatcgacaaggctccctgtggaccctgc

SEQ ID NO: 353005 - DNA, 75 bp, Homo sapiens
cagcaacagcaagcaaatagtaattcctccaccaacacatcacagtggcctggtttgctttcgaccctggctcgg

SEQ ID NO: 353006 - DNA, 96 bp, Homo sapiens
aaatgctcagggatggagccctctggcggaagccatcagctatggagataggcagatgaaatcagaaactatccctcttgtgatgaaagctgtctc

SEQ ID NO: 353007 - DNA, 98 bp, Homo sapiens
tagaatcagtgctgtgaccccgagtaacaacgcgcgcttgagttggtataaactcctgaagatttggattcaagatgtgaaataatcagcgatgggaa

SEQ ID NO: 353008 - DNA, 76 bp, Homo sapiens
cttctgcaagaccacgaacacaggagctggtggtgcagaaaggctggcggttgccggagtacacagtgacccagga

SEQ ID NO: 353009 - DNA, 50 bp, Homo sapiens
gtgacgacaggcagcaaaagaccagatatctgttccaaaaacccctgcca

SEQ ID NO: 353010 - DNA, 137 bp, Homo sapiens
aagtcttcagaccgtggacaatgtgctctttgcccctattatggagaaaggtgttccctagcaaatgaagctcgtgaccgagaacctgaaggaggaaccaatggaaagcgggaaggagaaggcaacctgagtgccca

SEQ ID NO: 353011 - DNA, 100 bp, Homo sapiens
aagcacctctccagcggggacctgctccgggacaacatgctgcggggcacagggtccaagacgcggaagatcccataccccaccaagaaccccttcacgt

SEQ ID NO: 353012 - DNA, 90 bp, Homo sapiens
gaatgattcgtgaatccggaatgggtgacagcgtcatcacggcattttattgaacaccttccaccatgaccacctcagcaagttcccact

SEQ ID NO: 353013 - DNA, 100 bp, Homo sapiens
tgcagcggggacgcgaggacccgggctgggctttcctcacccgggtcctaaagaagacgaagagaagccttcagcctcagcacttgagcagccggccacc

SEQ ID NO: 353014 - DNA, 60 bp, Homo sapiens
gaatccgctttatccaattacagtggattctgagaaacgaacccctcttcatgtggccgc

SEQ ID NO: 353015 - DNA, 100 bp, Homo sapiens
gcctactatctgtctggagaagaggactcgctgattcttgagaagagtcaaaactggagctctcaaaaaatggaccatattctgatttgctgtgtttgtc

SEQ ID NO: 353016 - DNA, 142 bp, Homo sapiens
agctctcgtgccgccagcaggcggccaacctcatccaggagatgggacagcgtctcaatgtcacggatgataccatcggggaccttaagaagctgattgcagcccaaactggtacccgttggaacaagattgtcctgaagaa

SEQ ID NO: 353017 - DNA, 75 bp, Homo sapiens
gaagcagccgatccagcctgcggagcctgtggggcagggacagtggccttagagctattgagaatttgatgcaaa

SEQ ID NO: 353018 - DNA, 132 bp, Homo sapiens
tcaggagccattgttaagctggatgaaactggaaacctgatgatctcagaagggcattttgcatctgaaaccatacggaaaagttgccagacggccagcattgccactgccagtgcatccgcccaggccagg

SEQ ID NO: 353019 - DNA, 100 bp, Homo sapiens
ccacgccgtcttctttatgatccccacctgggttctggtggacctctcggctttcctggtcagcagcgacttgcggggatctgatgagcttctttcttct

SEQ ID NO: 353020 - DNA, 101 bp, Homo sapiens
gcctgtggctggacaacacggagaacgacctcaaccaggggtgggaagaagagcgctatcctgaaggcatcaagtggaaattcctagaacataaaggtcca

SEQ ID NO: 353021 - DNA, 87 bp, Homo sapiens
gggacttcacctggaacaagagctggaggcagccgcttgcccaggaggcttgtcccctacgcaaacatgcagatctttgtgaagacc

SEQ ID NO: 353022 - DNA, 83 bp, Homo sapiens
ctgagttgctgtttcttgggactgcgaagctatacaggctgatctggaaatagtatattcctatttacatggtatggaagcct

SEQ ID NO: 353023 - DNA, 75 bp, Homo sapiens
cagaattttcatagagctggactattggaaggtccggaccctatttgtcagtggccttcctctggatatcaaacc

SEQ ID NO: 353024 - DNA, 75 bp, Homo sapiens
ccgggagtggaacattgtagagtctgagaaggcccttgtggctggaaatggaacatttaacagggcaaaactgtt

SEQ ID NO: 353025 - DNA, 100 bp, Homo sapiens
acaagaccaacaaattcatcaaggagctcatcaaggacgggaagtcactcataagcgcgctcaagagtgcgtcctggctgagagttggagctctccagca

SEQ ID NO: 353026 - DNA, 82 bp, Homo sapiens
tcttctgacctccgcgcgacgtacccgccgccgccgttggctggagttttccagttctcaagatgaggaggagattgatatg

SEQ ID NO: 353027 - DNA, 100 bp, Homo sapiens
ggagcagcttccccccgcgcctctcttcgcctcgcctcgggacccgcggtccccgctcttgctggtatcattgcccagtgcctaagatcttttatgttca

SEQ ID NO: 353028 - DNA, 75 bp, Homo sapiens
caagatcaccacggacgagatgatcaaacgcctgaagtgccggtggtggtgtgcacattgagccccggtatagac

SEQ ID NO: 353029 - DNA, 50 bp, Homo sapiens
cgtgtatgagggattcatctcggctcagtccctgaaaaacagctgaatga

SEQ ID NO: 353030 - DNA, 97 bp, Homo sapiens
ggttgccttggaaaatgccaacgccgtgtctgaagtgaacctccttggcctgggcgaagctgtgtggaccaagcaagtcaggagtgtggccatgttt

SEQ ID NO: 353031 - DNA, 76 bp, Homo sapiens
ttaagcctgatctaacccctagaaacagcatacttccacaggctgcactcgaggagatccacaaattctcaggaac

SEQ ID NO: 353032 - DNA, 75 bp, Homo sapiens
gggccaggaagcaattctggaagcgcagcaacagcaagctcccgggcagggaggaatgggagctgccctgctgtc

SEQ ID NO: 353033 - DNA, 75 bp, Homo sapiens
gaggtcctctgccccaggacccccacaccaccccagagttgtgaaatctgtcaagaacaatttgaacaatactgg

SEQ ID NO: 353034 - DNA, 100 bp, Homo sapiens
ggcctctccagccatgtggaactgtggataagattgtggaccagctgcagcagttaatgcaggtgtatgacttggctgcccttcgggattattggagcta

SEQ ID NO: 353035 - DNA, 100 bp, Homo sapiens
gtctggatccccgcccaggaagcccctctgaagcctcctcgccgccgtttctgagaagttgccaccttccagagaagaggtacgagatgacaagacaacc

SEQ ID NO: 353036 - DNA, 100 bp, Homo sapiens
aagcagccgtcccctctgcagcctctctgacaagtgcaatactggagtaaccgcttcctaaaccattttgcagaaatgtaagggtgttcggttgcgtgca

SEQ ID NO: 353037 - DNA, 83 bp, Homo sapiens
ccgccatcttgtgggagcaaaaccaacgcctggctcggagcagcagcctctgagaaaccaaggtgtatgttggtaacctggga

SEQ ID NO: 353038 - DNA, 75 bp, Homo sapiens
tggagactgcagttctctatccttcacacagccgaccgctgtaaggaggtacagcagatccgcgaccagcacccc

SEQ ID NO: 353039 - DNA, 100 bp, Homo sapiens
catcgtctgcaagaccgcgaggcgagacctcttgtacaccaggggttggaaaaaccacactaggcaaagaacttgcgtcaaaatcaggactgaaatacat

SEQ ID NO: 353040 - DNA, 100 bp, Homo sapiens
gaagagcgaccagctcactaagaacatggtgcagtcagcctcagtttccaaagccggaaaaggatcctctagtagccacggtgtggcagctgctctgaac

SEQ ID NO: 353041 - DNA, 134 bp, Homo sapiens
cgcaggagccgtgagagcctcaacgtggacgtggtcaagtacgagagtggccctgacggaggggaggaagcaaagatgccttttgatgccaacaaactgtattgcagtgaagtgctggccatattgctccagga

SEQ ID NO: 353042 - DNA, 48 bp, Homo sapiens
gtggaactaaagaatgacctgagaagctcagcatgtcagccagatgaa

SEQ ID NO: 353043 - DNA, 82 bp, Homo sapiens
aggagatcgtggtctatgggatggtcagcgacagctactgcaggatcattgagctgaatgggcagaagccaccccttacata

SEQ ID NO: 353044 - DNA, 76 bp, Homo sapiens
tcccaaggtgctgggattacaggcctccatgaagaagtggactattctgagaaactgaagttcagtgatgatgaag

SEQ ID NO: 353045 - DNA, 88 bp, Homo sapiens
gaaccagacgatgagacagagttgcgaccgcgcggcagcagcagccgctcttctaaaacattcaaaccaaagaagaatatccctgaag

SEQ ID NO: 353046 - DNA, 100 bp, Homo sapiens
aaaatttgagaaggaggctgctgagttctttattggtgaaaacatgaatccagatggcatggttgctctattggactaccgtgaggatggtgtgacccca

SEQ ID NO: 353047 - DNA, 83 bp, Homo sapiens
agcaaatgctgaggactcagaccagtctctgcaagagtatgagggtgctggttgatgctcgagagaagcttcatattccctgg

SEQ ID NO: 353048 - DNA, 75 bp, Homo sapiens
tgccggcattgccgggcaccctgctgcggagcagacgtgaaggtatctgtaattcttgcccaccaaacaagcctg

SEQ ID NO: 353049 - DNA, 50 bp, Homo sapiens
gccagttaccatgactcatccagaaatcatagcccactaatgagttttgg

SEQ ID NO: 353050 - DNA, 75 bp, Homo sapiens
gctctgggaaatgacatctcgctgtaatgcagtgggagtaaatgggggatcttggtctggcgaacctccgaggcg

SEQ ID NO: 353051 - DNA, 100 bp, Homo sapiens
gctgcttccattggccagtatgaagtggtgaaggagtgtgtgcagcggctgaagtggagagatcgcctgagcccaggaggtcaaggctacagtgagccgt

SEQ ID NO: 353052 - DNA, 101 bp, Homo sapiens
gagcacaagaagaaacacccggactcttccgtcaatttcgcggaattctccaagaagtgttcggagagatggaaggaggagatgttaaagtaacccatctt

SEQ ID NO: 353053 - DNA, 75 bp, Homo sapiens
cagagtcacacacggtcctaagagctgggcaccaggaagcgaaggctggccgagacgcatccagagctttcgtga

SEQ ID NO: 353054 - DNA, 82 bp, Homo sapiens
agagagtaccgacgagggggccgaaaccgagaggatggaactgcaggatccaaagatgaatggagccctcccttcggatgct

SEQ ID NO: 353055 - DNA, 83 bp, Homo sapiens
ttgggtgctgccacaaaggatgcctccacacctaccactacccgtgtgccagcgatgcagttggaatcgaagcctcttaaaat

SEQ ID NO: 353056 - DNA, 82 bp, Homo sapiens
tctagatgtaattaatcaaacttggacagctctctatgtttaaaattggtggtgaatggtggacatggatcgattataaccg

SEQ ID NO: 353057 - DNA, 101 bp, Homo sapiens
gctacaggccgcggaggaggaggaggtggagttgctgcccttccggagtccgccccgtgaggagaatgggaagaaggagaaagggccaacccctgaagaag

SEQ ID NO: 353058 - DNA, 90 bp, Homo sapiens
ctcaacaacgccatgtcctccctgtactcggcatacccctcacaaaagccattggctgcctggacccgggacttggccatgcgtgtggag

SEQ ID NO: 353059 - DNA, 83 bp, Homo sapiens
cccaaatcgatgtgcatgcacttacggatttactggaccccagtgtgaaagaggtgttcaaactggatccaaacaataaagaa

SEQ ID NO: 353060 - DNA, 50 bp, Homo sapiens
cccgggcttcggcccccaccagagactcgcaaaacccttgaagatcgttt

SEQ ID NO: 353061 - DNA, 101 bp, Homo sapiens
cgtcccccgcgggtctgctctgtgtgccatggacgggtctcctctgagcctccggcctccataagacccaaaacagatgacacctcttcccagtcccccgc

SEQ ID NO: 353062 - DNA, 50 bp, Homo sapiens
gacatctgcaatgatgttctggtcctatggcagcgtatacaaagctattc

SEQ ID NO: 353063 - DNA, 100 bp, Homo sapiens
gccgccttgctgctgctcaaagctgctgccgccccttgggctaaaaggccaaccaactcaaacttgaagacatgaaatccccaaggagaaccactttgtg

SEQ ID NO: 353064 - DNA, 98 bp, Homo sapiens
tagaacccatcacacagtacaactaacaaatatggtctctttagaaggccttaccaaagtagttgatccttctcagctaactcctgagtttgatggct

SEQ ID NO: 353065 - DNA, 100 bp, Homo sapiens
acctgggcaccagcaggacccgaggccaggagccaggggcccagaagctggctggaggcgtgatcctgggtgtggccctgtggctccgccatgacccgca

SEQ ID NO: 353066 - DNA, 90 bp, Homo sapiens
cctgctaacatggataagcatgccctgaaaaagtatcgtcgagaagcctatcatcgtggaagagaaagccaatacccacctcctcttggg

SEQ ID NO: 353067 - DNA, 90 bp, Homo sapiens
aactttgctacctgggaactgaagactacttaggctgtgacaacatgctgatgggcataaagtctttgaaaatagtgaagaagatgatgg

SEQ ID NO: 353068 - DNA, 82 bp, Homo sapiens
gcaggaccagcgggcgggggcccacgactggcccgagataacttcttccgctgtggtgtgctgtatgaggactccctgtcct

SEQ ID NO: 353069 - DNA, 100 bp, Homo sapiens
ggtgccgtcgctcatcaagcagcaggtccttaaggtgaaatgacaatggatgctctgttggctcgattgaaacttctgaatccagatgaccttagagaag

SEQ ID NO: 353070 - DNA, 82 bp, Homo sapiens
caagctttagagcctggctactcacagttgaagcctgattgcagcagaaaaatatggctcaggagactaaccagaccccggg

SEQ ID NO: 353071 - DNA, 100 bp, Homo sapiens
aagctaccaagtatgccctggaaaggaaaactttcggaaagctacttgtagagggccaggaaggaatactgggagaatcttcggatagcctcaggccggc

SEQ ID NO: 353072 - DNA, 101 bp, Homo sapiens
ccgtcgccccgccgcgccgcgctccaaccgcctcctcctcctcagtaacgcgggcagctaatccaggttgctccctggaagattttgtgaggtggtattca

SEQ ID NO: 353073 - DNA, 74 bp, Homo sapiens
atcctattttttattatgttgcacggaggccaggagtggtggctcacacctgtaatcccagctctgggaggcca

SEQ ID NO: 353074 - DNA, 98 bp, Homo sapiens
cacaaatgttcttaatggcatctagaatgaactgttcgtcaggtggcacaggagcagttctttttaatgtgcaccagatgttgcatgggacaccggcc

SEQ ID NO: 353075 - DNA, 51 bp, Homo sapiens
gccggggccgcgctgagggcgcccagctgaagcgcatactgtgctgcctcc

SEQ ID NO: 353076 - DNA, 100 bp, Homo sapiens
aaacaagttgcagagctacgtggacgcaggaactccaggcgatgccagtccctccactccagaggagaacgaaaccacgacaaccagcgccttcaccatc

SEQ ID NO: 353077 - DNA, 100 bp, Homo sapiens
gcggcggccgtggtcaccaggaaggggacgggacggacggtgatggtggtcgccgcggcggcgtgtgcgcccctcaggcttcattccagcgctccaatag

SEQ ID NO: 353078 - DNA, 108 bp, Homo sapiens
atgattggaccatcccccaatcctctcatcttgtcctacctgaagtatgccattagttcccaggtccaggcgccgtcagcgaggtgagcaacggcacgtcgaggaggg

SEQ ID NO: 353079 - DNA, 75 bp, Homo sapiens
catgggagaaagaggaatgggcctggcctgtgggcaggagtttccagatgtcttggaatgcactgtatctcatgc

SEQ ID NO: 353080 - DNA, 82 bp, Homo sapiens
aaaaaaaggagatgcctggcagccccgctctctgcagacgagattgaggagctgcgggccgagatgctggagatgcgggacg

SEQ ID NO: 353081 - DNA, 96 bp, Homo sapiens
tcgagtgtaatttagagagcagcgtggagagtatcatctcaccaaagcacaatcctggaggaagagaaggctcagcaagaagagcgcatgaggatg

SEQ ID NO: 353082 - DNA, 83 bp, Homo sapiens
cccgggagatcccaggcggtgacagagtggagccatggctagaggctgaaggggatgctaagggagataaagcaaaggtgaag

SEQ ID NO: 353083 - DNA, 50 bp, Homo sapiens
cgtgcacgcgggccagaggcgattgcaaatagaagagtcttccaaaccag

SEQ ID NO: 353084 - DNA, 80 bp, Homo sapiens
gccttttccgttgccggtgccggcctagcgtcctggaattacttcaatcaaggtgtgctgatctgcaaaccctggacaca

SEQ ID NO: 353085 - DNA, 127 bp, Homo sapiens
gctgccgctatggatgatcgagaggatctggtgtaccaggcgaagctggccgagcaggctgagcgatacgacgtcttcaggcagtgacagtggtgggagcagcagcagcagcagcagcagcatcaat

SEQ ID NO: 353086 - DNA, 50 bp, Homo sapiens
ggtctctggagacatcttcagcagtactggagaaaatgaaactgggattg

SEQ ID NO: 353087 - DNA, 100 bp, Homo sapiens
cgccttcacccgcttcaccaaccagacccagggccgggaccgactcttcagagtgatgacagacctaatgctctattaagttcacctgcaacagaaacag

SEQ ID NO: 353088 - DNA, 75 bp, Homo sapiens
gacgacctcaagcggcagaatgctcttctggagcagcaaggcacttctggatccagctgtgtgatagccgcacta

SEQ ID NO: 353089 - DNA, 88 bp, Homo sapiens
ggcgggcgttttcttggatgaattgcttgctttggaggcgcccgctccggccggcaccatggacagcgaggcattccagagcgcgcgg

SEQ ID NO: 353090 - DNA, 100 bp, Homo sapiens
cagcaactggtctattatatcatttaaaccacatggctatctaaagaggtttggttgggatgttccagtaattctgagaaattcagaagagacccagttc

SEQ ID NO: 353091 - DNA, 100 bp, Homo sapiens
cactggtgtctcctgcggaagggcagctgggcacgccttccagaccgagcaacatggccaacgccctggccagcgccacttgcgagcgctgcaagggcgg

SEQ ID NO: 353092 - DNA, 100 bp, Homo sapiens
gctgcccttagccagccagtgttgcccttggccccctcgtcgtctgccccagcccgttttacggagaagacttttactgtgaaattcctcggagctttcg

SEQ ID NO: 353093 - DNA, 97 bp, Homo sapiens
acgctaatctcacagctcttgcagctattggaccaaggaagaagagaccactagaatctggaattgagagatggagtttcgccatgttgcccaggct

SEQ ID NO: 353094 - DNA, 146 bp, Homo sapiens
ctggtccacctgatccagcgcttccaggatgagcacgaggactggtccattatcatcttcaccaacacgtgcaaatttggagaccaagtatgagaccaagaagttatctttagaaaatgacatttatgaaataaatttatcccagt

SEQ ID NO: 353095 - DNA, 80 bp, Homo sapiens
ggcccgcgcctgtcgggctgaactgaggctgcgggcctctcgggtgcttcttgtcggcttgaaaggacttggggctgaaa

SEQ ID NO: 353096 - DNA, 90 bp, Homo sapiens
ctgtaatcaattgtgctgacaacacaggtgaccattgtgaggtagatattttgttctaattttccagatgaggaagctgagaccctaaaa

SEQ ID NO: 353097 - DNA, 82 bp, Homo sapiens
gcccactgcatccgcctggcgctcatccgcttccacgtcaagggagcaatggaccacagaaattctgcattgaaaaagttgg

SEQ ID NO: 353098 - DNA, 87 bp, Homo sapiens
accatggaggacgtgaagctggagttcccttcccttccacagtgcaaggaagacgccgaggtcctctgtgtgggaacccgctgcgtt

SEQ ID NO: 353099 - DNA, 100 bp, Homo sapiens
aatccaagggcggtgttgtgggcatcaaggttcaagattatctaagaagatttgaaagtataccagatatgcttgaattggatcacctcacagtttcagg

SEQ ID NO: 353100 - DNA, 50 bp, Homo sapiens
gggatcggtctcagccgcgcgggttttaaaatcaaagatgggaaaatcgg

SEQ ID NO: 353101 - DNA, 98 bp, Homo sapiens
tcagacaagttctggaggagatgaaagctttgtatgaacaaaaccagtctgatgtcatttcttatactgaagcagtggagatcttaaagcaagcatcc

SEQ ID NO: 353102 - DNA, 100 bp, Homo sapiens
tggctccgtgaaccttagggacaacaccgggacacccgcgaggccggaaaatggcgaggattaaatccaccacacagggtgaaatctatctccatgacaa

SEQ ID NO: 353103 - DNA, 80 bp, Homo sapiens
gtggacgtcactggccctggtggggattgacagccacgggaagtccctgaagaggaaggagaaggaatatgagcatgaaa

SEQ ID NO: 353104 - DNA, 90 bp, Homo sapiens
cgccgggggccgcccgccgcagacacgggacccgcttcgaggccgctttggcgccaaatcctgagaatttctctgcaaagaatgtccaaa

SEQ ID NO: 353105 - DNA, 99 bp, Homo sapiens
cggtcatctgggaagccttgccagcctcagcagccctgctgacagctacaacgagggtgtcaagattcaattagcagagcctcacagacaatggccaaa

SEQ ID NO: 353106 - DNA, 142 bp, Homo sapiens
gaacggcgacctcaagaagcagctccacgaaaggcagccgcggatcgccgcgctcagcgacaaacaagtgtcatggagaaactccagctgggcccagagattctgcagcgggaaaatccaaggcttatttatgccaggctga

SEQ ID NO: 353107 - DNA, 90 bp, Homo sapiens
gactatcttcacagtaataatctcttgaatgtcgtctctcaactagccaaacggaatctgcgactgctggtcctaggccggaagcacatg

SEQ ID NO: 353108 - DNA, 103 bp, Homo sapiens
gacgctttcttgttgttgcggaataattccatccaaaaccggcagctgttagccgagcaagtgtacgaagccatcgacagcagagatggagcatcttgtgcag

SEQ ID NO: 353109 - DNA, 75 bp, Homo sapiens
agacaaataaaaagaagtgttaagaattgcctttgggactctgaaggctgaagtgaataaccctataccttccaa

SEQ ID NO: 353110 - DNA, 80 bp, Homo sapiens
tggtgacgggtgacccgccatgttcaggcccctcctggtctatcttcgggcttgggcactgtttaaaggaaagttccgag

SEQ ID NO: 353111 - DNA, 75 bp, Homo sapiens
tgtttttgccacacttaacagatgtccaaaaagactcctgactgctgagaacggccggtttgtgggcgatgctga

SEQ ID NO: 353112 - DNA, 95 bp, Homo sapiens
gccagctacggtccgcggctggggttccctcctccgtttctgtatccccacgagggactttgaacatgtcggggatcgccctcagcagactcgcc

SEQ ID NO: 353113 - DNA, 82 bp, Homo sapiens
tacctacggagcacgagaaatacggcgtgggttattcagcttctcaaggctggaaaagcgaaggaagtttcctacaatgcac

SEQ ID NO: 353114 - DNA, 75 bp, Homo sapiens
cggcacctcaaccagatgaggaagtacaactttgaggaggttgtggctcactggattgctgaaagccgcattgcc

SEQ ID NO: 353115 - DNA, 73 bp, Homo sapiens
tgccaccgtggaaggacagaatggttggatggcaagcatgtggtgtttggcaaagtgaaagaaggcatgaata

SEQ ID NO: 353116 - DNA, 100 bp, Homo sapiens
ctgggtccttcagtattaccaggtccctgaaaagctaccccccaaagtcctggagctgtgcaaatgccagatgttaatgtaagctgggatggagagggcc

SEQ ID NO: 353117 - DNA, 83 bp, Homo sapiens
ggaaagatctaccttctggaagctactactacgtggtgcttggaaagttggactaaatgctcttccttcagaggattatccgg

SEQ ID NO: 353118 - DNA, 100 bp, Homo sapiens
catgaacataccaccctagtaaaggacactgcccatctctaagataagaacctggaaaggggactctgttggccattggaaattgcagaataatgtctca

SEQ ID NO: 353119 - DNA, 83 bp, Homo sapiens
aggtctcccccacggatgaggagaagaaaactgtcgctgaaaagcaggagaagagaaatcaggatcgcttgaggaggagagag

SEQ ID NO: 353120 - DNA, 100 bp, Homo sapiens
cgagggtctcggcctcgcggtgcaggaagctctatgcagaactgtgccaaggcatcgtggacatagccatttccagtgtcttcccacccccagatgtgga

SEQ ID NO: 353121 - DNA, 50 bp, Homo sapiens
cgcagatcggagacggggcctggagggtaatcaggaagcagccgctgccc

SEQ ID NO: 353122 - DNA, 98 bp, Homo sapiens
tgcttagggtgaaacaaatacctttgaggtttaaatcaggttatgaagacagtatggagtttccagaccatagtagacatttgctacagtgtctgagc

SEQ ID NO: 353123 - DNA, 96 bp, Homo sapiens
ggcgcggggagccaggcctgggccccgggtccccaagacccttgtgctcgttgtcgccgcggtcctgctgttggaccgtataatagacgctggccc

SEQ ID NO: 353124 - DNA, 97 bp, Homo sapiens
caagaagctgtgcattgttggtgggattctgctcgtgttccaaatcatcgcctttctggtgggaggcttgattggttgcaagaaagctcaagtagcc

SEQ ID NO: 353125 - DNA, 50 bp, Homo sapiens
attaaagttactgctgttaaaaagtgccctctggtggtcagaagatgctg

SEQ ID NO: 353126 - DNA, 50 bp, Homo sapiens
gcgagaccctagaggcctgcgcggagctggagtttgttcagatcatcatc

SEQ ID NO: 353127 - DNA, 83 bp, Homo sapiens
ttttggacattttaaagaacatcttcgaaaacatacagcagagagagatcatcattgcctgaatttagctttgtgactgcaag

SEQ ID NO: 353128 - DNA, 75 bp, Homo sapiens
attggagatggtttcacagcacgcagtggcttcgggagtacacagtcattaatgaagcctgccctggagcagagt

SEQ ID NO: 353129 - DNA, 75 bp, Homo sapiens
tctggcatcctctctctcagttgtcgtttctctcctgctaattcctgaagggtgtccgcaatgttgccagtgtct

SEQ ID NO: 353130 - DNA, 83 bp, Homo sapiens
ccagtggccgtgtggagcgggagccagcatcacccgtgtccccttctacgacctggtctctactcggaagaagaagattgcca

SEQ ID NO: 353131 - DNA, 75 bp, Homo sapiens
ttcattgttccactggacgctcatcagagggaagatctttttcctcaattggaggagagacttcagcatgcaaac

SEQ ID NO: 353132 - DNA, 113 bp, Homo sapiens
ttcagatcttcacagcacagttcctgggaaggtggagccaccagcctctccttggtgtggatgaggtcaccattgtcaacattttgaccaaccgcagcaatgcacagagacag

SEQ ID NO: 353133 - DNA, 100 bp, Homo sapiens
cgagagaggcaccgggatcgtgaccgagaccgtgaccgagagcgtgaccgagagcgcgaatatcgtcatcgttagaagttccagtctcatcagattttcc

SEQ ID NO: 353134 - DNA, 98 bp, Homo sapiens
tctaccagatcaacgtcctccgggaccggagtcagaaccctccgcagagtaaaggtcagggaagtcaaagatgcatccctgagttcttcctagcaggc

SEQ ID NO: 353135 - DNA, 97 bp, Homo sapiens
tggctgtagaacccagcagctcagaatccattaaaaggagagctgggaggagagaggtgagagacttcagaggctgccctttcttttcatctgctgc

SEQ ID NO: 353136 - DNA, 98 bp, Homo sapiens
tcttttctaaagaggactccaaaggaaggactggtcatctctttcatatctcaaaaccatggctcagttctgagccaagacgagcactcaaggtaggg

SEQ ID NO: 353137 - DNA, 90 bp, Homo sapiens
aaagggaagcatcgtgctgaagtatgaaccagattctgcaggccacaatcagagaatggaattcctaggtgactccataatgcaactggt

SEQ ID NO: 353138 - DNA, 116 bp, Homo sapiens
cgatggggacaaaggcgcaagtcgagaggaaactgttgtgcctcttcatattggcgatcctgttgtggccaagaccagcttcaagtctccatggtaccagaaaacaacaacctcac

SEQ ID NO: 353139 - DNA, 74 bp, Homo sapiens
tggcagtgcagaagtccagggaatggctggcccagcagctgagatcacagccatgaagctcatgactgctctgg

SEQ ID NO: 353140 - DNA, 76 bp, Homo sapiens
cctcagttggaagcagccgatccagcctgcggagcctgtggggcagtacttggaccatgagactgtttcagccact

SEQ ID NO: 353141 - DNA, 75 bp, Homo sapiens
atacattaaaccaaaatggctacacactggttatcactgggaagaagagctggctttatgtgctggggcagaaga

SEQ ID NO: 353142 - DNA, 82 bp, Homo sapiens
cggcgcggcagagtccccgtacgcctacagtaacggtaactaggatttctacctcaaccgcgagacctatgcaaggacggtg

SEQ ID NO: 353143 - DNA, 75 bp, Homo sapiens
aaaaccagtacgcttgtattggcatttcatggctagagttctaagaaagggctattgcaagacacgaagtccgag

SEQ ID NO: 353144 - DNA, 100 bp, Homo sapiens
tgtaggctgattaatgaagatgtgaatgagcaggttatgcaggtattaggacctgaagacctccagaggttcttggtgagattcaggaaattgtgaaaac

SEQ ID NO: 353145 - DNA, 100 bp, Homo sapiens
gggtgtcagtggcgcaccatctgaaaacaacatcatgcagtggaatgcagttatatttgggaacagcgcttaaagtttttgaaacaacaagatcagcgac

SEQ ID NO: 353146 - DNA, 87 bp, Homo sapiens
catagactcccaaagggaaattcttgggtatttgaagtataccatacaactgttttgaaaatccagcgtggacaatggctactcaag

SEQ ID NO: 353147 - DNA, 75 bp, Homo sapiens
gccatgctgaactcgtatggagaggaatactcccccagttgcaagaggcgcaggaccgtggaagacttcaacaaa

SEQ ID NO: 353148 - DNA, 90 bp, Homo sapiens
gtcagaaagttgaagttccacagccactgagttgcaggagcgagaacccgagcagcgccatgagcaacactaccgtcgtccccagcactg

SEQ ID NO: 353149 - DNA, 100 bp, Homo sapiens
aagggtgggtgccactgctgccgtgcacagggctgcgattccggggtacctcactgcagaggtgctggagctggcaggacctgagggcactcgctttgct

SEQ ID NO: 353150 - DNA, 100 bp, Homo sapiens
ccgggacgcgcggcggcaccgggaggccgggccgagcggtatgcccaagaggacagagaacgaatgcacagaaatattgtcagccttgcacagaatctcc

SEQ ID NO: 353151 - DNA, 75 bp, Homo sapiens
cgccagctgctccggagatacgggaatgaaggatggcagcatgccgtgcattaaaagctgttttggtagatctca

SEQ ID NO: 353152 - DNA, 114 bp, Homo sapiens
ctgagaggatggaaatcagcgcggagttaccccagacccctcagcgtctggcatctacaatgagttacaaggcactaatagttctggatccttgggtggtcttgatgttcgcag

SEQ ID NO: 353153 - DNA, 75 bp, Homo sapiens
ggtggtgagatgctgaggcctgagggtttctagcaagtctggaaaagtttgaaattccagtaaaaattcgtttga

SEQ ID NO: 353154 - DNA, 125 bp, Homo sapiens
gccagcgagcgcgccttcggcattggccgccgcgatgtcagctcagtgctgtgcgggccagacacatgcctcactcctgtcagcagttccaccttttcatggttgaggagcacatgtggtcgcca

SEQ ID NO: 353155 - DNA, 100 bp, Homo sapiens
ggccggcaggctgagaaaagcgagaccgcgtgcgaggaccggtgaccctggcaaagatgagagtgcacatttcgtcctgcctgaaggtccaggagcagat

SEQ ID NO: 353156 - DNA, 80 bp, Homo sapiens
taagcaaggaaattgaactaagaaatggagaggcagcacagcattctcagaagcagtctactgagctcttccagtgcatg

SEQ ID NO: 353157 - DNA, 98 bp, Homo sapiens
agcacctccctctacgccaccaatccgccctggatcttcacccaggaggccccggaggaggggaccgggggcttcgtaacaaatgtggcaattatttt

SEQ ID NO: 353158 - DNA, 100 bp, Homo sapiens
agaaagcctccggaatctaaaaagccctcagtaccagagacagaagcagatggattcgtccttttagagtcaagggtccagagaaggaggagaagttgag

SEQ ID NO: 353159 - DNA, 118 bp, Homo sapiens
tgtccaacagaacgacctagtatttgaatttgctagtaacgtcatggaggatgaacgacagtcattgaagtcaacaagagagacatagtcttcctggtggatggctcatctgcactgg

SEQ ID NO: 353160 - DNA, 82 bp, Homo sapiens
gcaaggtcgccctcaaggccatgatcaaaacgtcccagaagaggaggccagtcacaatggacagcgccggggcctccccaag

SEQ ID NO: 353161 - DNA, 98 bp, Homo sapiens
cgagccgaaccaatgctggacctggaggtagtgcccgaacgctctctggggaacgagcaatgggaattcacgctgggcctgaagacggaagaagggag

SEQ ID NO: 353162 - DNA, 75 bp, Homo sapiens
gaaaacacagtttctgcaggaaaagatctctctacttctcctaagcaactttcatcctttgaaacgtgtgctgaa

SEQ ID NO: 353163 - DNA, 51 bp, Homo sapiens
gacatctacaaccttcgatctcctgacgaccgtggggccaattttttaact

SEQ ID NO: 353164 - DNA, 75 bp, Homo sapiens
agcgcccggagcaagcggagctcccccaagagccggaaagagtgtagcttccattggcaatactttaaacagcgt

SEQ ID NO: 353165 - DNA, 100 bp, Homo sapiens
cggcacaggaaaaacagccaccttcagtatctcagtcctccagtgtttggatattcagctatttgcatgcaaagaacatcatccatagagacatgaaatc

SEQ ID NO: 353166 - DNA, 98 bp, Homo sapiens
cttgttctccatttcctcacttgatctttcacccgacaccacgtacgggccagtgtcattcaaagatgtggctgtggatttcacccaggaggagtggc

SEQ ID NO: 353167 - DNA, 95 bp, Homo sapiens
actgactgggcaacatgttattcagcctgctatgggatggatgaagaagagaaccactatgtctcgcagctcagggaagtctacagcagctgcga

SEQ ID NO: 353168 - DNA, 90 bp, Homo sapiens
ctccgagccaggccgccgcaaagcaggttttggaaggaaggatgttgtagaacacttactacagatgggtgctaatgtccacgctcgtga

SEQ ID NO: 353169 - DNA, 78 bp, Homo sapiens
cctggagaggggccgcggaaacctggagtggaaggatttcgatggggtcctctatcatatttcaaatcctaatggaga

SEQ ID NO: 353170 - DNA, 115 bp, Homo sapiens
cggccgccacttgcgcctctccagcctccgcaggcccaaccgccgccagcaccatggccagcaccatttccgatctggccagccaggagaaggagcggctggaggagaagcagag

SEQ ID NO: 353171 - DNA, 100 bp, Homo sapiens
actacctgcagccttttatcacccagcctgtggtcagctgttagatgaggcacaagtgactttatccttccaagactggctggccagtgtcacagaacgc

SEQ ID NO: 353172 - DNA, 75 bp, Homo sapiens
agggaggcgaggttcccgcaccggatagattatggatgattggccagggtatgacttgaatttattcacgtaccc

SEQ ID NO: 353173 - DNA, 75 bp, Homo sapiens
gaaaaactaagactcacatctacaagcaatgaactggactgtgaaggccttattgttcgctctgccaccaaggtg

SEQ ID NO: 353174 - DNA, 98 bp, Homo sapiens
gcaacctcaggcttcagccagtattcacaacattgtctgtgaccaagcgctctggggcaagcatcctccaggctggctgctgaggttaagccccagtg

SEQ ID NO: 353175 - DNA, 83 bp, Homo sapiens
gccgagtgtgagcggaaaggggcccggcgtctgcctcgagactgaagaccgggatttcagtcataatcggttgtctaactgga

SEQ ID NO: 353176 - DNA, 100 bp, Homo sapiens
cgttgggcctggatgtgtcggtgaccatctcgcaggatgccggcagggcaattgaaggaacagactaaaaatcgtgtcctggaaggaaactacaggtact

SEQ ID NO: 353177 - DNA, 83 bp, Homo sapiens
ctggcagttggtgagcatcatggcaaccgttatgatatcatcaagttgaatcgaaaggaagggaagaagcagaattttccaag

SEQ ID NO: 353178 - DNA, 100 bp, Homo sapiens
gaccagctctttcggaacccgcaccaagctctgctccacactgccaaccggccagaggacgagtgtgagtggcggaggcagtgtaccacccatgaaggtg

SEQ ID NO: 353179 - DNA, 135 bp, Homo sapiens
gaagagtccccccaagtctcctgaagaggaaggagcggtgtcctcttaagaaaatggtcagaatggcggcagtggagcatcgtcattcttcaggattgccctactggccctacctcacagctgaaactttaaaaa

SEQ ID NO: 353180 - DNA, 110 bp, Homo sapiens
tgacttggccaggtcaaggtgtatattatgataacgtctgcagcctggtatagcccagcagtggatccagagcaaaagggaagacattgtgaaccaaatgacagaagcct

SEQ ID NO: 353181 - DNA, 83 bp, Homo sapiens
ccgtggaccacaggccctcgttgcccagatacttgaaactgcatctgcagagcactgattatggtaacttcctggccaacgag

SEQ ID NO: 353182 - DNA, 75 bp, Homo sapiens
gtttgagtccacggacccaagggaggccctccagtacttctatttcctcagattatgtttgagaccttcaacacc

SEQ ID NO: 353183 - DNA, 82 bp, Homo sapiens
tcggcggctgaggaaagcaggaggaggtggcggcggcgggaagatcaattctgtggtgttcttggtcacacatttatggagt

SEQ ID NO: 353184 - DNA, 90 bp, Homo sapiens
ggagaaatgatggatctgcagcatgggagcttatttcttcagacacctaaaattgtggcagataaagtgtttgacaagtacatgactata

SEQ ID NO: 353185 - DNA, 89 bp, Homo sapiens
cagcttgggaggtgctgccaccacagagttatgcccagccaagtcttcagtatatccaggggcaacagattttcacagctcatccacaa

SEQ ID NO: 353186 - DNA, 82 bp, Homo sapiens
gcatctcctactcagaaaaatagaataaaagagaatgtaacatcatgcttccggtggaaaaagcacttacatatgagaaatt

SEQ ID NO: 353187 - DNA, 83 bp, Homo sapiens
acgaggcaaggagctaaagcagcgtgcgttcagccctgggcttcgttccagagcccagcatgaatggatacgcggaatttccg

SEQ ID NO: 353188 - DNA, 75 bp, Homo sapiens
gcgcgagtgaggaaaggaggtactgtagcaatggctgccatccggaagaaactggtgattgttggtgatggagcc

SEQ ID NO: 353189 - DNA, 82 bp, Homo sapiens
gagttaacttctgtttacatggaactcagacatctgcaaatcatggagcttactccacgggaacagcctctagataatctga

SEQ ID NO: 353190 - DNA, 100 bp, Homo sapiens
tattgaatatcaagaggaggagttgttgtcaccagtgccaactcaaggagcccagccagccgctgccactgcccagtgagggctctctggaggacgagga

SEQ ID NO: 353191 - DNA, 100 bp, Homo sapiens
tggagcagttgtatgtgtagaaagtgaaatcagaggagatgtaactatcggatggtgccatgacaatggtgtgaactacaagattggagagaagtgggac

SEQ ID NO: 353192 - DNA, 87 bp, Homo sapiens
tgtgctcgcgctactctctctttctggcctggaggctatccagcgagcaggccgggctctcgccatgggtcactgtcgcctctgcca

SEQ ID NO: 353193 - DNA, 82 bp, Homo sapiens
acagcagtttggtcaatattgtcttaacatgcttcaaataaatcaggtctgctgagaacagacccagtccctgaggaaggag

SEQ ID NO: 353194 - DNA, 76 bp, Homo sapiens
gtccacagtagttacgacgagattgaaggaggtggcttattgggtggtgaccagaagatggaggactggcagggtc

SEQ ID NO: 353195 - DNA, 100 bp, Homo sapiens
agcaggaggaattgctggtgccttcattcatgaaaagcatgcccatacgattaaacctgcgtgactctgacatcattagaagcatgccagaacagactgg

SEQ ID NO: 353196 - DNA, 75 bp, Homo sapiens
ccaccatgaaagctaagctgctgaaggacagagcgggatgccaccagcttgtccaaagggaagttccaggagctc

SEQ ID NO: 353197 - DNA, 87 bp, Homo sapiens
aaaatcccctactgaagaaaagggagagtcccgtattctcagagtaaaagttgtttctggaattgatctcgccaaaaaggacatctt

SEQ ID NO: 353198 - DNA, 106 bp, Homo sapiens
cttgattaaagtaattgaggattttccagcaaaggttacagattatgccattgccaggcgcatagtagatttgcattcaagaattgaggaatcaattgatcgtgtc

SEQ ID NO: 353199 - DNA, 83 bp, Homo sapiens
ccaccgagtccggaccggagactttggggcctaactagggagcatcgagtacagctgtccggcctccaacgagtgtgagatca

SEQ ID NO: 353200 - DNA, 100 bp, Homo sapiens
tgctgacttacactgaactggtactggatgatcaaggtcagctggtccacatgaacaggcttccaggaggaaatgagatcctgtttgaccaaactcagag

SEQ ID NO: 353201 - DNA, 100 bp, Homo sapiens
ttttaaggcagccaaactgatgacagagaaagcagatgcagaagagaatttggaagatgccatggagattctgtttctggcgtctgcatacgcaagtccc

SEQ ID NO: 353202 - DNA, 100 bp, Homo sapiens
cggatcgctctcgcccaccgcccgaaccatgctctacccatggtaccccaggaccagaaggcaaccatatttcagatttaccacttctagacagtcccaa

SEQ ID NO: 353203 - DNA, 100 bp, Homo sapiens
gcagattttactttatgtgagaaaatctacaatttcttcgagacactcatataaaggtatgaggatacatgggctgcacttcacagaagagccaaagact

SEQ ID NO: 353204 - DNA, 100 bp, Homo sapiens
ctgaaccccaaggccaaccgcgagaagatgacccagatgattgtgctccagtccctccataagtaccagccccggctgcatatcgttgaggtgaacgacg

SEQ ID NO: 353205 - DNA, 100 bp, Homo sapiens
tgacatttaattttagggtcctttatatagaagggagagtagtgtgggttgtctcttcatgaagaaccagcggaactcaaaactgctgttcaagaaacct

SEQ ID NO: 353206 - DNA, 100 bp, Homo sapiens
gctagtggtcctctggtcttccctgaccccgcggccggacgacccaagcccgctgagcaggatgaggatgttaaggacatgttcacttccagatctctca

SEQ ID NO: 353207 - DNA, 98 bp, Homo sapiens
gcgccagcaagaagatcctgctgcccgagcccagggccatgaagcccccaggaggagaatcgagcaatctttttggaagtccagaagaagctactcct

SEQ ID NO: 353208 - DNA, 80 bp, Homo sapiens
cgagattcaagattatttgcaacagctcacgggagcaagaacggtatcatgaactgatcactaaatatgggaagttggag

SEQ ID NO: 353209 - DNA, 98 bp, Homo sapiens
ccgcactgaggataaggaggagaacaggaagagcacgatggaggatgatgtggacctggaagccctggtgaacgatatgaatgcatccctggagagcc

SEQ ID NO: 353210 - DNA, 50 bp, Homo sapiens
cgcctatgtgaaaaacctgaagaaggggatttggaatgccctgacagata

SEQ ID NO: 353211 - DNA, 100 bp, Homo sapiens
cgccagcctctcgggcatcgggcaggaactgggcgccggcgcttacagcatgaggaactctaatgaatcattgattgaccagcactattttaccagttgg

SEQ ID NO: 353212 - DNA, 100 bp, Homo sapiens
gcgctatgcacccagctgtgccaagtgcaagaagaagattacaggcaagatcatgcacacccggaagcggcaccaagacatgttccaggacctgaaccgg

SEQ ID NO: 353213 - DNA, 100 bp, Homo sapiens
ccctccagcagcagaccttcaagatagacattgaccccgaggagacgctatctcccctggttcgaggtattttataagctgcttaacatcctggcagatt

SEQ ID NO: 353214 - DNA, 75 bp, Homo sapiens
ctgggaggacccgggcgtccttggcagcccagctggtatccaagcccaccaatgggatctgtctcagcacccaac

SEQ ID NO: 353215 - DNA, 100 bp, Homo sapiens
accccatacagctgtccctactgcggtcaacgtgaccagtgcatcccatgctgtggctccccttcaggaaataaagcagtgagcaggggtgagcgcagcc

SEQ ID NO: 353216 - DNA, 100 bp, Homo sapiens
gaaacatgtattggttattctaacagacatgagttcttatgctgaagcacttcgagagttgcttggaaaagatgctaattaatgaagaggagcaactact

SEQ ID NO: 353217 - DNA, 98 bp, Homo sapiens
gaaggccgggacccggttccccggcccacagtgggggtgtgcaaacccgagagaactggtctgcgggccaggcatcgacatccgcaacgactatcagc

SEQ ID NO: 353218 - DNA, 75 bp, Homo sapiens
ccacagccattctcccatgtctactcgcaggcgtcatgttgggaatcgggttcttgggtgtctctggggagtccc

SEQ ID NO: 353219 - DNA, 75 bp, Homo sapiens
cgaagccccagccaacctatgaggaggacaaccttaaacttccaccacaagaggaatataaagaggtccctcctg

SEQ ID NO: 353220 - DNA, 98 bp, Homo sapiens
aaatcaagagttttcttactgtacctcaggtcaattggcatgattttgctttttttgatcctgtaatgtatgagagtttgcggcaactaatcctcgcg

SEQ ID NO: 353221 - DNA, 82 bp, Homo sapiens
aataaccaggtgcttggcaaaatcgagcgggccattgggtttgccttcccggattgggcctacaagccagagtcgtcccctg

SEQ ID NO: 353222 - DNA, 101 bp, Homo sapiens
ccatgctggcaagtctgaaggtcaaaaatggtggagtcaatgaagaaagtagcagggatggatgtggagctgacagttgaagaaagaaacctcctatctgt

SEQ ID NO: 353223 - DNA, 75 bp, Homo sapiens
gggcttaagatgtcctgcctgaaaggtggctatggaccgccccctgcaggaagaggagcccccccgccaccccca

SEQ ID NO: 353224 - DNA, 100 bp, Homo sapiens
taaagagtttgctgagaagaaatttaaggaggtggccgaggcatatgaagtgctgtctgacagtgatcagcggtcagcaactccccaaagtggacaagac

SEQ ID NO: 353225 - DNA, 100 bp, Homo sapiens
actgcactcgagtgtccagacctgctcgatgaaagcataacccctactgtagaactaaatgcactgtgcatgaaacttggaaaaaaaccaatgtataagc

SEQ ID NO: 353226 - DNA, 83 bp, Homo sapiens
ctcagcgttcccctctggcgcctttgctgctcctctctctgcacggtcactctgactgctgagacctcatgtagctacatttc

SEQ ID NO: 353227 - DNA, 100 bp, Homo sapiens
gcactgactgcattcaataagcgttcatttcatcacccttcaccatggtaggcgaaaaccaagagtacatcggcctcgttctcctatattggaagaaaaa

SEQ ID NO: 353228 - DNA, 81 bp, Homo sapiens
agagggtgttcgactgctagagccgagcgaagcgtcaaaatgcagatcttcgtgaaaacccttaccggcaagaccatcacc

SEQ ID NO: 353229 - DNA, 98 bp, Homo sapiens
gtgaaccacaagcagtacctggaggccaagaggctgttgaaggagttccaggcacgttaccggcagctggcctccccatggccacccatggaccagtc

SEQ ID NO: 353230 - DNA, 100 bp, Homo sapiens
cttctgtcctgcgcgcgcagattctcgcaaatctggaagcggatcgcgtggagtgacggtcacaccgcggcgggcaaacctggtggacctgcagaagaag

SEQ ID NO: 353231 - DNA, 100 bp, Homo sapiens
aacaccgcgccttcggaagcccgttcggcctggaggagccgcagtgggtcccggacaaggagacaatgcagatcttcgtgaagactctgactggtaagac

SEQ ID NO: 353232 - DNA, 74 bp, Homo sapiens
gccccacattggaactaagacaggccataggaaaaggatacagagtagagtttcatgaacctgaaacttggtgg

SEQ ID NO: 353233 - DNA, 100 bp, Homo sapiens
ccctcagggctatggacagcagaaccagtacaacagcagcagtggtggtggaggtggaggtggaggtggaggctgaaggctatgctgagggtgacctcac

SEQ ID NO: 353234 - DNA, 89 bp, Homo sapiens
ctttactccatgtgtgggacattcattgcggaataacatcggaggagaagccctgggcgctgcctatggcacagccaagagcggtaccg

SEQ ID NO: 353235 - DNA, 100 bp, Homo sapiens
tttgaagacaaagagtggacatttgtcatagaaaatcaaagaatggctcaagaagtactgacacatttaaaggagcatcctgatgcttggacaagagtcg

SEQ ID NO: 353236 - DNA, 82 bp, Homo sapiens
taaagtctgagagagggaagtcgcctctgtgctcaggctgaggggatctggcggtggagcgctaggatcagacgcccccgcg

SEQ ID NO: 353237 - DNA, 100 bp, Homo sapiens
gaaatttgtgatacccctcgacgaggatgaggtccctcctggagtggtatagcaggctttgtgactgtggtgtcctgtggtctttacaagctaaagtaca

SEQ ID NO: 353238 - DNA, 100 bp, Homo sapiens
ctccctcactaccgaggccctcagcttcgcgaagacgcccagctccaaggtgtttgcgagtaaaccccaaagggttagatgaagaaagcaaagattacct

SEQ ID NO: 353239 - DNA, 88 bp, Homo sapiens
tatttggagttcttacaacatggcagacattgacaatgaacagagtatctgtcaggcaagagctgctgtgatggtttatgatgatgcc

SEQ ID NO: 353240 - DNA, 82 bp, Homo sapiens
caacggggaggccaacgtgaagaagatttttagactctgaggagcagttggagctaatccacattatggaaatggaaaccac

SEQ ID NO: 353241 - DNA, 90 bp, Homo sapiens
gacgctgctgctgtgtgcggtgctgctgagcttggcctcggcgtcctcgggtacaaactgttttgaagccagttcatcataaggaaggac

SEQ ID NO: 353242 - DNA, 75 bp, Homo sapiens
cgcctggctcggagcagcagcctctgaggatgaaacgaggaggaagagatagtgaccgtaattcatcagaagaag

SEQ ID NO: 353243 - DNA, 75 bp, Homo sapiens
cttagctgctcacatatggatactttcacagttcagtgtgaagcctcagtttaggtcatctggtggttcagaaca

SEQ ID NO: 353244 - DNA, 90 bp, Homo sapiens
ccagcctcatctgccccaggcccaactcatgttgacgggcagccagctagctgggccaccttctgggtgaaccctcagttcaagatccgg

SEQ ID NO: 353245 - DNA, 98 bp, Homo sapiens
ataaatgccagttacgactctgaccaagcaactggccagctccacgtacaccgttcggaacctcacttacatggtgacccgcagggaaaagattaaac

SEQ ID NO: 353246 - DNA, 98 bp, Homo sapiens
gataaggccggcccggtccccaagggcagagaagatgtgaagaggcttctgaaactacacaaggaccgttcacaggaaacgggccgtgcgagatgcac

SEQ ID NO: 353247 - DNA, 48 bp, Homo sapiens
ctcttattgatgtaaatcagtcaaataattctacaataatgcgttttt

SEQ ID NO: 353248 - DNA, 75 bp, Homo sapiens
cttggaccgccatctcagaatccacacggctgcagaaccttggcctgaaaatgctacattatatcagcaattgaa

SEQ ID NO: 353249 - DNA, 101 bp, Homo sapiens
gttccctatgcaaatgccaaaggaattggttatccaggagtctatggtgatgtacatcgagtgaagattatgtttaataagaaagaaaatgccttggttca

SEQ ID NO: 353250 - DNA, 100 bp, Homo sapiens
cgcgcgcgacctccggccctgcgcgtgcgccgtggcgcggcccggctgacagatattggtatcaacttgactgaccctatgttcagaggaatttataggg

SEQ ID NO: 353251 - DNA, 88 bp, Homo sapiens
tagaagtggtgatgcaagaagtttctaggaaaggccggacaccaggtttacccaaggtccagcctagcccctaggcaccatgtcggac

SEQ ID NO: 353252 - DNA, 74 bp, Homo sapiens
ttagcattcgagagaacaaaattaaacaactacctgctgaaattgagttgatctctctaatgtattagatcttc

SEQ ID NO: 353253 - DNA, 85 bp, Homo sapiens
cttggataccacagtatcataaaattcctctaaatgcaggaggctgagaagacaaaactccttatagctgcacagaaacaaaagg

SEQ ID NO: 353254 - DNA, 109 bp, Homo sapiens
tcgtccggtactcagacgctggcgggcgcagtttctcacgacgggccgagcctgccactggggatatgagactttctactcggaatatcctgagtgttgcgtggatgta

SEQ ID NO: 353255 - DNA, 82 bp, Homo sapiens
ctggagcctcagttggaagcagccgatccagcctgcggagcctgtggggcaggttaacacagaaatctgcctcctgggccat

SEQ ID NO: 353256 - DNA, 95 bp, Homo sapiens
aagttcacaagaatatcccttcagtgaatgcaaaattgaaagtagttaagcatttgataagtacaaggattttggccaaatgggatttagactgg

SEQ ID NO: 353257 - DNA, 82 bp, Homo sapiens
cctacccaggccccacacctcccagcatcctgcccagccgacgtggggtggattgtattacacagagcatgaatatacttct

SEQ ID NO: 353258 - DNA, 92 bp, Homo sapiens
ggtgtgattagcttcgcagtctggaaagctttaggagttcacagtaccattaaaaatctcaagtgacgactttgggaaactctggttatcct

SEQ ID NO: 353259 - DNA, 100 bp, Homo sapiens
tgggaggagttcagccgcgctgccgagaagctttacctcgctgaccctatgaaggccccccatcgaggagggagggcagacggaggcccgagagcctccc

SEQ ID NO: 353260 - DNA, 73 bp, Homo sapiens
ctttgtctgctggcagctaggggcgacgaggcgggacgtcatggaagtacctcgaagtagggggaaaactgca

SEQ ID NO: 353261 - DNA, 96 bp, Homo sapiens
gcaaccgcttcttgctgctgctggccctggctgcgctgctggcctttgtgagcctcagcctgcagttctaactctaagaaggagctgatgtggagg

SEQ ID NO: 353262 - DNA, 98 bp, Homo sapiens
acgtgaactccaaagtcctcctgacagagaatgtcccagttacactatcagaggagaaccgttctgaaggaaaagttggttttcaggcctataagaat

SEQ ID NO: 353263 - DNA, 75 bp, Homo sapiens
aacaatttacgcgccgtgtaactgtgaatctttcaaagaagctgcacacatacatgtaagagaagcaaaaatgtc

SEQ ID NO: 353264 - DNA, 51 bp, Homo sapiens
gaagacagagggttttcttttgagtgaaagcccctcagggaaaaaaccaga

SEQ ID NO: 353265 - DNA, 100 bp, Homo sapiens
ctggagtctgcgaaggccgggacccggttccccggcccacagtgggggtgtgcaaacccgagagaactggaggagcccaaggtgggcatcaagaccatca

SEQ ID NO: 353266 - DNA, 75 bp, Homo sapiens
actgaacctaagccacaacccgagatgagatcgtggggctcaccagcgtcccccatggcttctgagtagcgtggg

SEQ ID NO: 353267 - DNA, 90 bp, Homo sapiens
agggaaaggcactcctaggggacataaaattagtgattactttgagatatcttcacagtcatcacttcttggagttggttaccttgcttc

SEQ ID NO: 353268 - DNA, 98 bp, Homo sapiens
aacagttttacgatttaaaacttcgccagaatttgttctctttgtaaagaatccttttctggtcaagtttcttcttcatcactcatgccacttactcc

SEQ ID NO: 353269 - DNA, 75 bp, Homo sapiens
ctggggcagtctctgcatatcatggggagatagacgctgctgcctagagcccgagcccagcacattgtgccctgt

SEQ ID NO: 353270 - DNA, 102 bp, Homo sapiens
gaaggatatcgacgtcgtgatccagaagtccagagctgaggactgcctgtttgcagcttttcttagtgacactaaagatcgaggccctccagtgcagtcaca

SEQ ID NO: 353271 - DNA, 50 bp, Homo sapiens
gaagtttctaggaaaggccggacaccaggagatcacaaatcaacatctca

SEQ ID NO: 353272 - DNA, 95 bp, Homo sapiens
aagcttctgagggaggaggacaacaagtactgcgccgactgcgaggccaaagttttagatggagcagttgtaaaacactacagaattaaaagact

SEQ ID NO: 353273 - DNA, 100 bp, Homo sapiens
ggggtactacggctacagcaaggcctgatcttttggccagaaggagattaaaaagatgcccctcaagatggctgtgcctgtcagctgcatggagcttcgt

SEQ ID NO: 353274 - DNA, 100 bp, Homo sapiens
ggccaagaacttcaacatgaagccgcggctgaagagcattttccgcagaggcctggtcaaggtggctcagaccacaggagaactacgatgacccgcacaa

SEQ ID NO: 353275 - DNA, 97 bp, Homo sapiens
agaagatgagaccgcaattcgagaatcaaagggccgggagcgatgggtcctcaaggtcatagaaccccataaccccattaggtgtcaggggcagaaa

SEQ ID NO: 353276 - DNA, 90 bp, Homo sapiens
ctgcacggtgtggctggcggcctacggactcttcaccctctgcgagacaaagaaggttggcaatacctgtttcccgtgaaggatgcatct

SEQ ID NO: 353277 - DNA, 100 bp, Homo sapiens
gctaccaagttttgggagatgggagatggtgctatacggtctttagggttacgtgaagtcaagtaaaatcgcacactgatggtgttatctgaaaaggtta

SEQ ID NO: 353278 - DNA, 100 bp, Homo sapiens
ccaagatgctgaagccagccctggagccccgagggggcttctccttcgagaactgccaaagaacggcccctgaggctgcagcgctcccccgtcctcaaac

SEQ ID NO: 353279 - DNA, 88 bp, Homo sapiens
cggcgcctggcagcagagaccaccagaaggatgaccctaattttcagtgcaaattcaaaggtctctggagtaaggaaaaatatctatg

SEQ ID NO: 353280 - DNA, 100 bp, Homo sapiens
cggcggcgggtacggcggccccgcgcagcccccggccgcagcgcaggcagcccagcagagacatgaggctgagctggttccgggtcctgacagtactgtc

SEQ ID NO: 353281 - DNA, 100 bp, Homo sapiens
atttgcgccatcatcctcatcatcatcatagcactttgtctggcttagtggagtttgatggctattacctggagagcgatccctgcctggtgtgtaataa

SEQ ID NO: 353282 - DNA, 97 bp, Homo sapiens
attcctcaagtggacttggccatgattggttgtgctggagaatctggtaaaagcaccattgtgaagcagatgaggatcctgcatgttaatgggttta

SEQ ID NO: 353283 - DNA, 83 bp, Homo sapiens
ccgaggtagaggcagtggcgcttgagttggtcgggggcagcggcagggcacagtcagtggtgtgctgctagttacaccaaata

SEQ ID NO: 353284 - DNA, 100 bp, Homo sapiens
aactcttcagataatcagagtggaggaagtacagccagcagtagcaatgaagtgatgaggatactgatctctagaagcctgcttcaggagtagaacccac

SEQ ID NO: 353285 - DNA, 100 bp, Homo sapiens
gatgagagacaaaaaacaaatcagagagccagtagacttacagaaaaagaagaagcggaaacaacgttctcccgcaaaaagtatccggtctaaagtggag

SEQ ID NO: 353286 - DNA, 82 bp, Homo sapiens
atcttgtgtgctccatagtttatcaaaagatgttgaaagtgtgatgaacagtgtggtatccctactcttgatcctggaacca

SEQ ID NO: 353287 - DNA, 83 bp, Homo sapiens
ctggtcagaagagagaagatgatcagggtgcagctgagattcaagagactggtgaactagagaatgctgagtctggaggagac

SEQ ID NO: 353288 - DNA, 90 bp, Homo sapiens
aaggaactcaggcgcctcttcttagttgatgatttagttgattctctgaaggaggaagagctgcgcaaaggtggagaccccaaatatgcc

SEQ ID NO: 353289 - DNA, 100 bp, Homo sapiens
ctgctgcgttgcggctactacaacacggctgtcaagctggcgcgccagagcggcatcgaggatcatccagcagctcgtcaacggcatcatcacgcccgcc

SEQ ID NO: 353290 - DNA, 75 bp, Homo sapiens
atcagcttctcccacgatagaggcccaagccagggaggcaaagtgtcacactgagacagaataacctgccagctc

SEQ ID NO: 353291 - DNA, 75 bp, Homo sapiens
gtgaaaatgaagccagaccgaggtggataatattaatgcagctgtgatggatttgaaaaaaaagaagatccgcag

SEQ ID NO: 353292 - DNA, 97 bp, Homo sapiens
tatggctggttccccaacatgcctcaccctcatctatatcctttggcagctcacagccacagctccggagcaagccccagccccggcccggccatac

SEQ ID NO: 353293 - DNA, 98 bp, Homo sapiens
gagcaggagcgcgtcaagtcggcgggggcctggatcatccacccgtacagcgacttcagcccgagcgggaagaagttccgcagcaagccgcagctggc

SEQ ID NO: 353294 - DNA, 82 bp, Homo sapiens
gcgagtgggagcaccaggatctcgggctcggaacgagactgcacggaacaagagtttgttcagaaacaacagcaagaattag

SEQ ID NO: 353295 - DNA, 100 bp, Homo sapiens
gacaatgccggtggaggaatttgtggctggctggatctctggtggactttgatgctcccctgggctacaaagaacccgaaagacaagtccagcatgagga

SEQ ID NO: 353296 - DNA, 100 bp, Homo sapiens
ctaagagctgggggcggatggaattctcctgcctgcgggtctttaaagactgagacaatgcagatcttcgtgaagactctgactggtaagaccatcaccc

SEQ ID NO: 353297 - DNA, 75 bp, Homo sapiens
gtcgtgatccagaagtccagagctgaggactgcctgtttgcaggtcttgtcaacggaaaggggtccctatccaga

SEQ ID NO: 353298 - DNA, 100 bp, Homo sapiens
ccaaggctccttctcaagctgcttgagtcaatgagggatgtgtctagtccgaatgaagcaggaaggccggagtgggaagtacatgtgtcgtatcatagtt

SEQ ID NO: 353299 - DNA, 95 bp, Homo sapiens
aacaatccgtctggatcacggatgtaggaagtgatcttgcaggagagagagttactgcctgtgaagaaatttgaaagtgagattctggaagcaat

SEQ ID NO: 353300 - DNA, 100 bp, Homo sapiens
taatgctccaacaggtgtagcagtggattcaaatggaaacatcattgtggccgactggggaaacagcaggatccaggccaagcaaataaagtagccaaag

SEQ ID NO: 353301 - DNA, 100 bp, Homo sapiens
ccagacggctcacctgtgcgggatggaacaaaaggtgaattttaagaaggacaccacttccaaggcaattcatagtatatttaagaatgctatacaactg

SEQ ID NO: 353302 - DNA, 83 bp, Homo sapiens
cagagaccttacctgtcaccttggctctcccacccaatggagatggctctaatgatgttgctgacaaaaatgcttctaacaga

SEQ ID NO: 353303 - DNA, 100 bp, Homo sapiens
gcgtcgcctcacgcggagcagagctgagctgaagcgggacccggagcccgagcagccgccgccatggcaagggctgtttgcggggtggggtggggggttc

SEQ ID NO: 353304 - DNA, 74 bp, Homo sapiens
aacatgctgaggacgttcagcagcattcccgtctcacggatatgcaagggctacttctacaagtccgaacagcc

SEQ ID NO: 353305 - DNA, 73 bp, Homo sapiens
tggaatttgattaactcattcaaggttacccagttgtgattcgcctttgccagtctcatctcgtgtctgcttt

SEQ ID NO: 353306 - DNA, 100 bp, Homo sapiens
ttctgcagtccctcgtccagccacccccagaatttgaggaagccaggaagtgggtgtcgaagaagttacactttgaaaaggacgtggacgtcaacctgtt

SEQ ID NO: 353307 - DNA, 83 bp, Homo sapiens
ggacagcgggctggagcctgacgagctggcgggccaaagatgaagaggaagcctttctggattggagtgatgatgatgatgat

SEQ ID NO: 353308 - DNA, 75 bp, Homo sapiens
gccctgggctttaccatctttgtggctgtgcttgccaggcctggctccatttgctggcctagacctgaactcttc

SEQ ID NO: 353309 - DNA, 51 bp, Homo sapiens
agggtgttcccgaactagagtgggttcaaaaaggcatttgaatctgagcca

SEQ ID NO: 353310 - DNA, 100 bp, Homo sapiens
agcagaaccccaggactgcgcccccgggagcgggcgcccagaggctactgcagcactggggtgtcagttgttggtccgacccagaacgcttcagttctgc

SEQ ID NO: 353311 - DNA, 101 bp, Homo sapiens
ccgcggcgggaggagcctgttcccctgagatgatgaataaggtatttggaggtactgtgcacaaaaaaagtgtcagagaagatggagttttcaacattagt

SEQ ID NO: 353312 - DNA, 155 bp, Homo sapiens
ggaggaagcgcggctgctgtcgcccagcgccgccccgtcgtcgtctgccttcgcttcacggcgccgagccgcggtccgagatgaaacgaggaggaagagatagtgaccgtaattcatcagaagaaggaactgcagagaaatccaagaaactgagg

SEQ ID NO: 353313 - DNA, 75 bp, Homo sapiens
ggaacgtggcgctcatcaccggtatcacaggccagaaggacagaataacgggctcccagattcacaagccccacc

SEQ ID NO: 353314 - DNA, 98 bp, Homo sapiens
ccaggactccaaaatggcgtcagttgatattaacctggctgcagagccaaaagtgaaccgaggaaaagcaggtgtgaaacgatctgcagcggagatgt

SEQ ID NO: 353315 - DNA, 100 bp, Homo sapiens
ggctgaggggcgagaactgatcctggacctggagaagaatgagtcggtggccacacaatgctgcccattcgctggatgcctccagagagcatcatgtaca

SEQ ID NO: 353316 - DNA, 101 bp, Homo sapiens
tggaaggcgacccggcggctgtggaggccacgctcagctcgccaggcggcgcaggggtttgggatgctctgacagacaattacatcccttcactctcagaa

SEQ ID NO: 353317 - DNA, 75 bp, Homo sapiens
gcaagaaaaagaggatcatctatgattcagatgcctgaggaagtgcaccatggagaggaggaggtggagactttt

SEQ ID NO: 353318 - DNA, 75 bp, Homo sapiens
ctaagaccaaggtcaattgaagtagaaaatgactttctgccggtagaaaaggtctgtgggaggcatccgggcctc

SEQ ID NO: 353319 - DNA, 82 bp, Homo sapiens
ctcaggagctgtggggtcccctgctagaagtgggggactcggcgggacaatgcagatcttcgtgaagactctgactggtaag

SEQ ID NO: 353320 - DNA, 75 bp, Homo sapiens
ctgggcaggaggactacgaccgtctccggccgctctcctatccacagacgcctggtccgacccccagtggcacta

SEQ ID NO: 353321 - DNA, 80 bp, Homo sapiens
aaagggagatactccagcttcagcaacaggaactgtggctgcaccatctgtcttcatcttcccgccatctgatgagcagt

SEQ ID NO: 353322 - DNA, 73 bp, Homo sapiens
ccagcaccctccagctccctacccatccgccaggagccctcttccttcaggacctgctacaccctgaccaccc

SEQ ID NO: 353323 - DNA, 142 bp, Homo sapiens
acggatgccagaacagaaccctgggaggggaattccagcaccgcagcaaccactccagaaactttccctccttcagcttaagagttggacagtggaggaccttcagaagaggctcttggccctggaccccatgatggagcag

SEQ ID NO: 353324 - DNA, 100 bp, Homo sapiens
ccggtaaagaaaagttgccgaagatgagactgcccacgcgctcagacatgatatgcggctatgcctgcctcaaaggtcttgttgcagtaggagaaagagc

SEQ ID NO: 353325 - DNA, 100 bp, Homo sapiens
ctttgtctgggtcagtcaagaaccatttccaaacaaggacatggagggaaggcttcctaagaatgccagaggattcaacatgagcatacctatgcctggg

SEQ ID NO: 353326 - DNA, 100 bp, Homo sapiens
aaaaactgcagcagcaatgcttgcccagcagatgcaatttatgtttccaggaacaccacttcatccagtgatgagactgatcgtggggttgaccaacaag

SEQ ID NO: 353327 - DNA, 76 bp, Homo sapiens
aagatggcggagctcgaccagttgcctgacgagagatgaaatctttgacatggtaaaaccaaaggatcctttgaaa

SEQ ID NO: 353328 - DNA, 100 bp, Homo sapiens
cagcgttccaccgctcgggtttggctggctcctcaagagttactgatctatgaaatggcagagaatggaaaaaattgtgaccagagacgtgtagcaatga

SEQ ID NO: 353329 - DNA, 99 bp, Homo sapiens
gttttgctccagtcttcttacagttcttagactgtgtacaccagccaacaagtcccaaatttggaaaagctgactcatatgaaaagctggaaaaactag

SEQ ID NO: 353330 - DNA, 74 bp, Homo sapiens
attgacgccatgtcgggttattcgagtgaccgagaccgcggccgggaccgaggagcgaaaagctgttgctatat

SEQ ID NO: 353331 - DNA, 82 bp, Homo sapiens
gagctccggggtgtcgagggatttattcccaagaactacatccgcgtcaagccccatccgggacagagcacaggaaagggac

SEQ ID NO: 353332 - DNA, 51 bp, Homo sapiens
gcgggggctggcccggggttccaggaccaagtggaccacttgctaacccta

SEQ ID NO: 353333 - DNA, 100 bp, Homo sapiens
aggaagttttctactgtaaagtcaccaacgagatcttccgccactacgacacctgttcttcccggagcctatcagcaaagccattcccaaggctatggct

SEQ ID NO: 353334 - DNA, 87 bp, Homo sapiens
tgggtgtgggacaccgtgggctgcgtgtgggacgggtttagcggcagcctcttcgttaaagccttccatctgaagtatgatgaagtt

SEQ ID NO: 353335 - DNA, 100 bp, Homo sapiens
acccgaaagatggaacattggcaagcaaaatgggcaaagcacttatcaaaactcataactactcaatggtctgtgtacactgggctcagtaagttgttat

SEQ ID NO: 353336 - DNA, 75 bp, Homo sapiens
caaacccggggcaggcgggcagctgtgcccgggcggcacggccaggtgctggagaatctggtaaaagcaccattg

SEQ ID NO: 353337 - DNA, 101 bp, Homo sapiens
ccggagctgttcctattcggccatctttgctcctccctgcaactaactccattcttaattggtgcaatggatgagcttcatagtctggatccaagaaggca

SEQ ID NO: 353338 - DNA, 98 bp, Homo sapiens
ggagatcatttgggagatccaagagattcagtatcactcgctcccttgatgatcttgagaaaaggcaacagatggctccctgcaaagtgaggattgga

SEQ ID NO: 353339 - DNA, 95 bp, Homo sapiens
gtgtttaatacagaggctcaccctctgcctgtgttacatttagccaacaccacactttcaggtctccaattgagaaacatggcactgtttttcct

SEQ ID NO: 353340 - DNA, 99 bp, Homo sapiens
aggcgcccccgccggccgccgcgccgcccggcagcctcggcagactgtgccctgtccacggtgcctcctgcatgtcctgctgccctgagctgtcccgag

SEQ ID NO: 353341 - DNA, 82 bp, Homo sapiens
gtcaactatctgggggggacattcccaggttctgatggtcctttggctaccagcaaaccagtccctgcagaaaagtcaggtc

SEQ ID NO: 353342 - DNA, 97 bp, Homo sapiens
gtgcaaagtagcaattaactggtctggagggtggcatcatgcaaagaaagtcgacttcaatgttcctatgaagaacaaccagataacaaacaaccag

SEQ ID NO: 353343 - DNA, 83 bp, Homo sapiens
agatctgggtgcccgtggaccacaggccctcgttgcccagatttcacctctgggggacagaggaggttgctgcctggctggag

SEQ ID NO: 353344 - DNA, 100 bp, Homo sapiens
actggcaccaaccccggcagtatgagcagaaaggagaagatgagtatgccaacgttgatgccattgttgtatcagtgggtgttgatgaagaaattgttta

SEQ ID NO: 353345 - DNA, 83 bp, Homo sapiens
tcagggcccccaaactgtcacagaaagagctgttaacacttcctagataacggagaaattcactgcatgtaactatgaccacg

SEQ ID NO: 353346 - DNA, 95 bp, Homo sapiens
cgggttcagttcgtcatggggctgtttggaaagacccaggagaagccgcccaaagaactgcgattattggagccggaattggtggcacttcagca

SEQ ID NO: 353347 - DNA, 75 bp, Homo sapiens
cccatctaatcacagactcctatttgaagtatttgacgaaaatagactggaaaccaaccatcaggcctcccagag

SEQ ID NO: 353348 - DNA, 100 bp, Homo sapiens
tctgcgaaggccgggacccggttccccggcccacagtgggggtgtgcaaacccgagagaactggaaatgactgctgtccatgcaggcaacataaacttca

SEQ ID NO: 353349 - DNA, 48 bp, Homo sapiens
acagcttgtttacagtatttctgaagaaatgccagacgtgaaagctga

SEQ ID NO: 353350 - DNA, 100 bp, Homo sapiens
caactcgttgtttgcgtgcaatgttcaccagtcagtgtttgaaggagaagagagcaagtattgctgacagacagaacgccttggaggctgagtggaggac

SEQ ID NO: 353351 - DNA, 98 bp, Homo sapiens
gcgagtgggagcaccaggatctcgggctcggaacgagactgcacgggagtaactattcccagtcagaggcgctatgtgtattattatagctacctgtt

SEQ ID NO: 353352 - DNA, 100 bp, Homo sapiens
ttggagaactacaggaacctgctttctctcgatgaggataacatccctccagaagatggttggatggcaagcatgtggtgtttggcaaagtgaaagaagg

SEQ ID NO: 353353 - DNA, 75 bp, Homo sapiens
catggccctcctgcagcacgtggccctgcagtttgagccaggacccctgccatggattgcaaagatagaccagct

SEQ ID NO: 353354 - DNA, 90 bp, Homo sapiens
ggcctggcgtgcactccgcacctcggggacattattgcgcgtggaacggctgcttttggaaggtgaaatgtgaccattactggccattca

SEQ ID NO: 353355 - DNA, 98 bp, Homo sapiens
taacattcctagcaaacctccttggagcaagggtaaactggtccatgctaattttggtactaaaaaagattttgaggatttatacactcctgtgaatg

SEQ ID NO: 353356 - DNA, 73 bp, Homo sapiens
ttcaactagcctgcaaagagagagatgctgctaaaaaggaaacagagcaaatgcagcgttacaatcaaagact

SEQ ID NO: 353357 - DNA, 109 bp, Homo sapiens
acgacgttgccgggtacaagtgcaactgcctgctgccctacacaggcaaggatatcctgaaggatactatagttccaaaagtggatggagcagtcagagcgattactat

SEQ ID NO: 353358 - DNA, 75 bp, Homo sapiens
gtgccgtggagggcctcgccatgtcctgctgcccggattttttatcaagcagaaatgcatcgaacaacgagaatc

SEQ ID NO: 353359 - DNA, 100 bp, Homo sapiens
cggctgcgctgttcgtgctgctgggattcgcgctgctgggcacccacggagcctccggggctgcgtgagtgcatctccatccacgttggccaggctggtg

SEQ ID NO: 353360 - DNA, 74 bp, Homo sapiens
ctcctaatgttttccttcagcaaggacaaagatttcaggtatgctgctgaaagtgggaatcctctacattggtg

SEQ ID NO: 353361 - DNA, 96 bp, Homo sapiens
ctgaatccacatagagaaagtgatgggttgagacatttgggaaatgatgaagtgcacattgtttggtcagagcatactagagactacaggagagga

SEQ ID NO: 353362 - DNA, 75 bp, Homo sapiens
aaaagatccctggaatatgaagagacacagtatggtagccacacccccaggttgtgcaccatctccaggtgctta

SEQ ID NO: 353363 - DNA, 80 bp, Homo sapiens
cctccttgctgcccttgttgctggtgtcgtctactggctgtacatgaagaagtcaaagaaacatccatgtctgattagca

SEQ ID NO: 353364 - DNA, 106 bp, Homo sapiens
gcagcaggcccagctgaccacctcctgctgcagctctactctggacacctgcagcttgacagagccaattcgctattaaaccagactcaacagccttacaggtatc

SEQ ID NO: 353365 - DNA, 98 bp, Homo sapiens
gaagatgtggtggcttccgtttgttggtggaggaggtggcaggcctcggcgaaccaacatcccgggtaaccgggtggctgaaggacaggtgacgtgtc

SEQ ID NO: 353366 - DNA, 50 bp, Homo sapiens
ggaaatcattgtgaatgcaaagaatcaggaaacccaggcccaacggcagg

SEQ ID NO: 353367 - DNA, 83 bp, Homo sapiens
tgttgcttctttttcagggactatggcagttccaagaggaaatcaggccccacggaggagtcaccccccagtgcgcctctgcg

SEQ ID NO: 353368 - DNA, 100 bp, Homo sapiens
ttttatgaactcagcaaagaccatctgcttactgctatccagtctgactacctacaggtgaaggacttaactaagtacttggatcccagtgggctcggcg

SEQ ID NO: 353369 - DNA, 75 bp, Homo sapiens
gcaacaagggtctgcgaatttcatatatgacgatgcctttttgcaaatgtgtaacttgcctatcaaagtagtttg

SEQ ID NO: 353370 - DNA, 50 bp, Homo sapiens
ggagacgctcctggcactgcaggtactttacaaccttggaacagtgactc

SEQ ID NO: 353371 - DNA, 75 bp, Homo sapiens
aaacccaaacctgtaaaaccagtgacgttttccacaggcatcaaaatgaatctccgccacctccctactctcggc

SEQ ID NO: 353372 - DNA, 75 bp, Homo sapiens
ccgggtaatccgctgcctgggctggaactttgacttctccattttcaataaaatcctcactatggatgggctcat

SEQ ID NO: 353373 - DNA, 83 bp, Homo sapiens
ggggcgagaacaagtgactctgaccagcaggcttaccttgttcaaagaggtgtctggggaagccaatgaaactcagattgcag

SEQ ID NO: 353374 - DNA, 119 bp, Homo sapiens
gaaagtttcattgtgtatgtagaagaccagaagtggatggagatacttacagatcatcagtatttggagaggacaccactatgtgccattttgaaacaaaaagctcctcaacaataccg

SEQ ID NO: 353375 - DNA, 90 bp, Homo sapiens
gagagaaaagaaacactggaaaatagcttaattcaatggtttctgctttgggacaaccatacatctaattccttaaagtagttttatatg

SEQ ID NO: 353376 - DNA, 110 bp, Homo sapiens
tggacctaactttagagttggaaaaaaaattggatgtggcaattttggagaattacgattaggtgtggcaggtgtttccagtgccatggaccacaccttctcaacaacat

SEQ ID NO: 353377 - DNA, 105 bp, Homo sapiens
ccaccagtcccaagcctacctcccagaaacattaaacctccgtttgacctaaaatggaatctgcctgtgtttcaattcacgaagctctgaagtctgtcatcgatt

SEQ ID NO: 353378 - DNA, 75 bp, Homo sapiens
ggtggactgatttcaaagggacacccactaggcgctacagatcaaatgatgccgtttggaaaaatttcccagcag

SEQ ID NO: 353379 - DNA, 88 bp, Homo sapiens
taaccaaggcagttggtggaaatgaggattgttaaaatgagtcttcggaagcaaacccctagtgacttcttaaagcaaatcatcggac

SEQ ID NO: 353380 - DNA, 82 bp, Homo sapiens
gccgccgccgccgcgccgagcggaggaggaggaggaggcgaggaggagagacttgtgtcccggcatggatatccggaacaac

SEQ ID NO: 353381 - DNA, 153 bp, Homo sapiens
gggggaatggtattggagacaaatatgaatgagattgttacacaaattgatgcacaaaataagctggaaaaatctgagataacaacgaacttgatgcaagtgataggtttgccaaggtcagacctctcatcatccggatgaactgcaatttcc

SEQ ID NO: 353382 - DNA, 89 bp, Homo sapiens
ctccaccaggactgaccgctgccgcccagcacgtccaggttgaaaggattgttgacaaaaggaaaaataaaaaagggaagacagagtat

SEQ ID NO: 353383 - DNA, 83 bp, Homo sapiens
cgcttcttctggaagaccagccaacaggttgaaaggattgttgacaaaaggaaaaataaaaaagggaagacagagtatttggt

SEQ ID NO: 353384 - DNA, 100 bp, Homo sapiens
atgtgaaactgctttctaaaacaccagaactcaacctgttggaaagagtgccatcacctgatcaccgccggagaagctaccgagacttggacaagccccg

SEQ ID NO: 353385 - DNA, 100 bp, Homo sapiens
agccacggtgtggcagctgctctgaaccaggacctggacccggacccaaagtgccatgtctttaataggtaacctgacctctccactgaagggcgtgtgg

SEQ ID NO: 353386 - DNA, 75 bp, Homo sapiens
tttccaatttgctggaaaaaatgacatccagcgacaaggactttagccagagactgctgctactttgaaacgtac

SEQ ID NO: 353387 - DNA, 75 bp, Homo sapiens
caactgtagcagacttcagaacaaggtctctgggaaatttaagcggttgcttttgaaatcagaaagtcagtgcag

SEQ ID NO: 353388 - DNA, 90 bp, Homo sapiens
cgacagcacagacagaatccctgctaccatactatactggcaattgctggagaagattttgcaattgttgcttctgatactcgattgagt

SEQ ID NO: 353389 - DNA, 82 bp, Homo sapiens
acaaaggatggcagtttcttctcctcggtatcagaagctctgtaagcctcccgcgacgatgcccctcaacgttagcttcacc

SEQ ID NO: 353390 - DNA, 90 bp, Homo sapiens
ctgtggagacggattacaccttcccacttgctgaaaagtcatgagggtcctgtgtggcaagtggcctgggctcaccccatgtacggcaac

SEQ ID NO: 353391 - DNA, 90 bp, Homo sapiens
catcctcgaagtggagctgggcctgcctgactcacccattcatcagatggtgatggaatttcctgataatgtgttaaatctcgatggaca

SEQ ID NO: 353392 - DNA, 97 bp, Homo sapiens
ggcctcctccgcctcctcctctcccgcgggcaccgaggactccgctcctgcccagatgtgggaggaggccattgccttgggcaaggagctagccgag

SEQ ID NO: 353393 - DNA, 73 bp, Homo sapiens
cagtttcagttcgccgatgggaaacccggagaccaaatccttggtacctccagtgggcgctgtgatttcgaat

SEQ ID NO: 353394 - DNA, 75 bp, Homo sapiens
ccgccgccgccgagagagaggagaaggaggatgatgaacgacagttgtcaaaatcttcccaagatcaatcagcag

SEQ ID NO: 353395 - DNA, 71 bp, Homo sapiens
aggactggcttatcttcacacagaattaccacgaggaggccggatcacctcaacagtcacgtcagacaagt

SEQ ID NO: 353396 - DNA, 90 bp, Homo sapiens
ctcaatgagcacatgaccagcttagcttctgtcctaaaggtgggagtgtggattgatgttggcagccgttttgagactgagaagaataat

SEQ ID NO: 353397 - DNA, 75 bp, Homo sapiens
agccggtgcagcagccttcagcttttggcagcatgaaagttagcaatgcatgaagaagcagaggctgtgttggca

SEQ ID NO: 353398 - DNA, 87 bp, Homo sapiens
tcaacagggcttcaccactggaacaagcacaaggtggtcgtcggttttctgagggtacttcagctgacagagagattcagagaacgt

SEQ ID NO: 353399 - DNA, 83 bp, Homo sapiens
ggctccgggagtctggttcttccgggccttctccagggacagctgagcagtcattatggcgaaccttggctgctggatgctgg

SEQ ID NO: 353400 - DNA, 87 bp, Homo sapiens
acttatggtagaacttccttggaacaaaagtacaactggcaccacactgtaactcgaggcatcaccaaaggcgtgaaggaggacttt

SEQ ID NO: 353401 - DNA, 98 bp, Homo sapiens
gactagccactttgcattgactggaaacaatggcatttacagaaagagtcaacagcagtggcaacagcttcctgcctgacacagctcacttcaagaag

SEQ ID NO: 353402 - DNA, 127 bp, Homo sapiens
acaaaaccacatgttggaccttcggattagcaactccaagctcttctggcgggcgctggccatgctgcagtagcaggacccagtgctccataaaggataatagtttccagtacactatccctcatga

SEQ ID NO: 353403 - DNA, 98 bp, Homo sapiens
aggtgggctagaggccgacgccagccagagagcgtgccggtggtggtgtgcacattgagccccggtatagacagttcccccagctgaccagatcccag

SEQ ID NO: 353404 - DNA, 90 bp, Homo sapiens
attggtttcattcaccacaactgcaccccagagttccaggccaacgaggtgcggaaggtcaaggacttcgagtaagaaggtgatttacag

SEQ ID NO: 353405 - DNA, 50 bp, Homo sapiens
agacaaatcaaattagtggttttgccccccgaatccaagcccaacttcac

SEQ ID NO: 353406 - DNA, 76 bp, Homo sapiens
tggaagcgctcattgtacatatggatatcaccagcctagatattcagcagggggcagctggcattttatgctatgt

SEQ ID NO: 353407 - DNA, 50 bp, Homo sapiens
gggagaactcactgaggatgaggtggatactttaatactgataagccaca

SEQ ID NO: 353408 - DNA, 82 bp, Homo sapiens
ctcaagggcaagctggaggaggagcgagccaagctgcacgatgtggagcggctgaaaacacagttaaatcactttcaaagtt

SEQ ID NO: 353409 - DNA, 100 bp, Homo sapiens
ctcatcacctcctcactcgcctccgcgcagagaggaggtagatgacttctttgagcaagagaagaacttccttattaactattacaataggatcaaagat

SEQ ID NO: 353410 - DNA, 89 bp, Homo sapiens
ttcctcttcgacaaccttctcgtctactgcaagcggaaatccagagtccttggtataaatgaatggcagaatacggggttccagtatga

SEQ ID NO: 353411 - DNA, 51 bp, Homo sapiens
gccctcttcaatttctgacaaaagcataagctgtggccatgactactgaag

SEQ ID NO: 353412 - DNA, 76 bp, Homo sapiens
gggatattgtagaaactgtctttaacctgctgtgattgggttattatacccctgcattgacagacatctaggagaa

SEQ ID NO: 353413 - DNA, 76 bp, Homo sapiens
catgaagcgcaccccgactgccgaggaacgagagcgcgaagctaaggttgcactgctgtgatccatcctcatctcc

SEQ ID NO: 353414 - DNA, 50 bp, Homo sapiens
ccggctgccttccacctccagtgctggtacccctgggatggcgtgagcac

SEQ ID NO: 353415 - DNA, 100 bp, Homo sapiens
aaacaattgacagaagagctccagaatgtgaaacaagtggagccgccaccaaaatgcagattttcgtgaaaacccttacggggaagaccatcaccctcga

SEQ ID NO: 353416 - DNA, 101 bp, Homo sapiens
cgggaaaccctgtgaaggcgaagcgcgggagaccaaagcctgcaagaaagacgcctgccccaaaccagaaggaccctggtgtccttgaccgcatgatgaag

SEQ ID NO: 353417 - DNA, 97 bp, Homo sapiens
cacttctcagagctgcccctggacgaccaggtcatcctgctgcgggcagggaagacaccctctctggacccccatcagaccaaagagcagaagattc

SEQ ID NO: 353418 - DNA, 100 bp, Homo sapiens
aagcaggactgcgccgcgtcttcctcaaggtcatcatcagatttgaaatatttaaagtggatacaaaactatttcagcaatgcagacaattaagtgtgtt

SEQ ID NO: 353419 - DNA, 75 bp, Homo sapiens
tccagaagtccttcctgggtggaaaggaatgacacacagcaagaaggaggccatcagcaaactgggaagaggacc

SEQ ID NO: 353420 - DNA, 82 bp, Homo sapiens
tccacacccaagtccgctcatcaccctggagactcaggacccccgcagcaaacacaagtttaagatccacacgtactccagc

SEQ ID NO: 353421 - DNA, 96 bp, Homo sapiens
tagagacagccaacaaaatattcatggttcttgaggttatacattggctcttcaaagacgttcacctcatcagagaaatccctgactcctttgcag

SEQ ID NO: 353422 - DNA, 89 bp, Homo sapiens
tttgggcgtatgggaatacccaacagaaactggaccataacagatgccaacagaaactatgagggttgcttctagctattccacagaga

SEQ ID NO: 353423 - DNA, 80 bp, Homo sapiens
tttggtcagttgctgtgtttctgccggatcagatgagcagattggttagtgaaggtttgaatcttcagacaaacttctgg

SEQ ID NO: 353424 - DNA, 98 bp, Homo sapiens
aaaagagccaaactcagctcgcccggtttctcggcgaatgacagcacagaaagcgtggatacccatcaacgaagttttgatattggaattcagattgg

SEQ ID NO: 353425 - DNA, 82 bp, Homo sapiens
atcgctctcggcctcggcctcggcctccgacacgcacctgttccgcgagcctgagaagaggccccccaccgtggtgtccaat

SEQ ID NO: 353426 - DNA, 74 bp, Homo sapiens
cgtgagcaagcataagctgccaaaccaaggagaagggagcactggctttgctttcatcaggccaaagatgcctt

SEQ ID NO: 353427 - DNA, 76 bp, Homo sapiens
actctggtcagcaagtatccagacatcagctgtcgcctggttgggcccggaaatgggacgtcgcgctttctcaggg

SEQ ID NO: 353428 - DNA, 88 bp, Homo sapiens
agcagcagcagcagagatgataacatgtttcagttacagccaagttctacttctgaatctatggatcaactactaaacaaaaatagag

SEQ ID NO: 353429 - DNA, 82 bp, Homo sapiens
cttggtttcgggatctcggtgctgcagacggcgagacctcctgcacaggtgctggagaatctggtaaaagcaccattgtgaa

SEQ ID NO: 353430 - DNA, 100 bp, Homo sapiens
gccctcggggctgaaggcggtggtgggggaaaacaatgcagatcttcgtgaagactctgactggtaagaccatcaccctcgaggttgagcccagtgacac

SEQ ID NO: 353431 - DNA, 98 bp, Homo sapiens
gttgcctagtcgcggctacggcgtcatggaggagatccggcggcagggcaagctgtgcgacgtgaccctcaaggaatgaattcttccaaaacaaaact

SEQ ID NO: 353432 - DNA, 100 bp, Homo sapiens
ctgcccggctctcgcaggcccccccgcgccgaccgcgttcctatggacagacgcacagacacctgcaggcttaaatctcttcaagctcaggaggatgccc

SEQ ID NO: 353433 - DNA, 98 bp, Homo sapiens
catggatgaatctaacactacaaaatacgctgctggtgctcaagaccgaatcggctgggcttttggcctaggattagaaaggctagccatgatcctct

SEQ ID NO: 353434 - DNA, 128 bp, Homo sapiens
gacgcgcagcatggcggtggaggacgaggggctccgggtcttccagagcgtgaagatcaagatcgaaagtatgctgaggccttggattaccaccgtcaggcactggtgttgattcctcagaacgcatc

SEQ ID NO: 353435 - DNA, 101 bp, Homo sapiens
ccacctgcgccggcacacgggtgagaagcccttcgcctgcacctggccaggctgcggctggagccacttccggctcctgcgtcgctccggaagcctgcgag

SEQ ID NO: 353436 - DNA, 82 bp, Homo sapiens
gcggatctcaccgccgctcaggggttgtgagtcccggcccagcccctccacccccctgcccccccgatgcgaccatgggctc

SEQ ID NO: 353437 - DNA, 100 bp, Homo sapiens
ctttgttattggagaaacatgcagattatatcgcatcctatggctcaaagaaagatgattatagccccccaagatgaacccagtggtggagccactgtcc

SEQ ID NO: 353438 - DNA, 75 bp, Homo sapiens
ccagtggatctgcgcacacgccaggggctgaggaagctgccctcgaaaccctccagaagacatctgtcctgcaga

SEQ ID NO: 353439 - DNA, 100 bp, Homo sapiens
gcagatgtaccctcagtacgccacctactattacccccagtatctgcaagccaagtggtgaactatgacaatgtagtggacacaggttctgaaacagatg

SEQ ID NO: 353440 - DNA, 75 bp, Homo sapiens
cggaggcagagcggctgccatggctgaccggttccctgatgtgttacctgcttctgctactgatccaaactgcag

SEQ ID NO: 353441 - DNA, 100 bp, Homo sapiens
cacccggtgcttatgtctttggctctatgatcgcaacaccttggtggccatcgtggtgggtgtggggcgcctcatcactggcatggaccgaggcctcatg

SEQ ID NO: 353442 - DNA, 75 bp, Homo sapiens
cgacgttcagtgcccagggatgtggaggactgcatcgacgtaggctggtgggaaggagagctgaacggcagacga

SEQ ID NO: 353443 - DNA, 75 bp, Homo sapiens
taccgcctcagcagctacatcaagaggtctgctaaaaggtcagagtaatgcagaatgcgtgccttcatctcagat

SEQ ID NO: 353444 - DNA, 82 bp, Homo sapiens
acactatgtttacaaattgttacatctacaacaaggtaactaggatttctacctcaaccgcgagacctatgcaaggacggtg

SEQ ID NO: 353445 - DNA, 75 bp, Homo sapiens
acactaattgccaacaacaatgatcactacatgcaggtgcttgtttgtcagcatgaatgtgtgagggaacttgcc

SEQ ID NO: 353446 - DNA, 131 bp, Homo sapiens
ggctgcagaattcagcacggatggaaagatggagatgaacctctaacacagtggaaaggaaccgttctggatcagcatttgccatctatcaatcgctgccttattttgaatcatttggcacttattccacc

SEQ ID NO: 353447 - DNA, 100 bp, Homo sapiens
gatcatattcattggaggacactggaagatgggaagaaagaagcagctgccaggtttgtaaaagaatggacttggtctgccagagaatgttgaatcaggg

SEQ ID NO: 353448 - DNA, 90 bp, Homo sapiens
cgcctgctttggccccggcgggttcggcatccgagcctggcaggggccaatagatggctattcatatgaaaaggaagcaatggaaaattg

SEQ ID NO: 353449 - DNA, 100 bp, Homo sapiens
ttcaatgttccaggcttgtacattgctgtgcaggtagttagaaacaaacctgtggcaaggcaggctcctggcaaacggaagtgcaattgtcggcaagaga

SEQ ID NO: 353450 - DNA, 100 bp, Homo sapiens
catcttaagaatgtcaacgattagtcatgcaataaatgttctggttttaaaaaatacatatctggttttggagcggtggtgccccccccgggcacggggc

SEQ ID NO: 353451 - DNA, 84 bp, Homo sapiens
ctgccagggtccctgaagagggaagacacgcggaaacagacgctgaccggaaaggagattgagattgacattgaacctacagac

SEQ ID NO: 353452 - DNA, 80 bp, Homo sapiens
gcgaagccttgaaaaagctgccctgagacggtgtcccgccgaaaggccggggtttgaagtctcacgcctacattcacagt

SEQ ID NO: 353453 - DNA, 74 bp, Homo sapiens
ggaacacctgggcaacagaatattggtcaagttgctgaccttgaacactctgttttctacagtggacactgatg

SEQ ID NO: 353454 - DNA, 75 bp, Homo sapiens
catatcttcacttggcaaactcaacaaggtacaccaggggttggaaaaaccacactaggcaaagaacttgcgtca

SEQ ID NO: 353455 - DNA, 100 bp, Homo sapiens
gagcagctcgtgcagctaagcagccaactgcagaaacgtcagatcaatgagctgagcaatgttcctgttcctgtcatgctaatgccagatgacttcaaag

SEQ ID NO: 353456 - DNA, 78 bp, Homo sapiens
cctgtacagcctgcagaacttcccctcacctgatggtcccaacacttcatcatccaccacctcctggagggggtaccc

SEQ ID NO: 353457 - DNA, 82 bp, Homo sapiens
gcggggctgaggcggccgcggggcccgagcgcaggcccagctgagagccagcctggaggttacccagcagcaggccacccag

SEQ ID NO: 353458 - DNA, 100 bp, Homo sapiens
atccacaccatccttctcgctgcaggagaaacttgcccaggccaaagaagagaacgtgggcttacatcagacactggatcagacactaaacgaacttaac

SEQ ID NO: 353459 - DNA, 98 bp, Homo sapiens
ttggaggcgaatcattcacttcaacattccaaactcaatcaccaccatctttttacagggtggtgatcgtggcagaggtggccctggtggcatgcggg

SEQ ID NO: 353460 - DNA, 98 bp, Homo sapiens
ccaacgtgagaggaaacccgtgcgcggctgcgctttcctgtccccaagccgttctagacgcggagtggagcgtgttatatgttatcattgctaccttt

SEQ ID NO: 353461 - DNA, 75 bp, Homo sapiens
ggttgttccgttgcgagctgcagctgcgatctctgtggtaggcccagaataatgcatatactgccatgtcagatt

SEQ ID NO: 353462 - DNA, 116 bp, Homo sapiens
tggaaagcaagggattgctggctacagcttcagaagaccgaagcgttcgtatctggaagacctgcctagagctggaacgttacctccagagcgagccctgctatgtttcagcctca

SEQ ID NO: 353463 - DNA, 83 bp, Homo sapiens
gctggaggaccttttgtgggatgcctcacggctgctgaggggctgcagcggacaatgcagatcttcgtgaagactctgactgg

SEQ ID NO: 353464 - DNA, 100 bp, Homo sapiens
gcaaaaattgttgaaccatacaataagatagttgcccggactgcacaactagcaagacttcaggtatgctatacctccggagcatggaaaacgacttgaa

SEQ ID NO: 353465 - DNA, 97 bp, Homo sapiens
tgatacaacaactgtactgggagagctaggatggaaaacatatccattaaatgggaatatgtttcgacagcaacaaaagattcttcaacaatctaga

SEQ ID NO: 353466 - DNA, 72 bp, Homo sapiens
gtcgccatggttgagagatggaagcaggcagcaaagagtattatgattcactggcagccacctgctccagcc

SEQ ID NO: 353467 - DNA, 75 bp, Homo sapiens
ggtgggccggacctgggagtggcagacctgcctagagctggaacgttacctccagagcgagccctgctatgtttc

SEQ ID NO: 353468 - DNA, 100 bp, Homo sapiens
tggatgccctgcaccgggtccggcaggactcacaccacccggcaagaactgctcactacggctccctgccccagaagtcacacggccggacccaagatga

SEQ ID NO: 353469 - DNA, 51 bp, Homo sapiens
cccatgtggatttcttcctggaagtggggagactgtggccgctttctgtct

SEQ ID NO: 353470 - DNA, 90 bp, Homo sapiens
ctcccttgcatgatggaaacaccatggctgcggcggcccagctctctctgacacaggtaaagatgagcccagcagctacacatgtacaac

SEQ ID NO: 353471 - DNA, 100 bp, Homo sapiens
ggatgttccagtatttaaagctattcaaccagatgtctcgtgggctgcctaaactaaaagagtcacgttcccatgaatccttgctgagcccatgcagcac

SEQ ID NO: 353472 - DNA, 90 bp, Homo sapiens
cagccgggaggacacttactacagctgctcagaagcaccactggaaactcaggtgctggatccgggactccctggtcagctacatcacca

SEQ ID NO: 353473 - DNA, 98 bp, Homo sapiens
accacatataccacgaggatccatctcgtctgctccaggggcaggctgctcggacggcctgattctctagagctccagagacaacgggaggctaggaa

SEQ ID NO: 353474 - DNA, 75 bp, Homo sapiens
aagatagttgctgaatttcgaggcactctggccgtgctggccctgcagctggcaaggcagatccacttccaggca

SEQ ID NO: 353475 - DNA, 75 bp, Homo sapiens
ctggaagaactcgtcatgctctttgtagcgtggtgcttctgttgctcacagaaataagcgggttttgaaaacaaa

SEQ ID NO: 353476 - DNA, 100 bp, Homo sapiens
cccgggtctgccagcgcgacgtcctctcgcggccctcagggcacagcccaaggctgtcagcctcccggcccaggatgcctaaatcaaaggaacttgtttc

SEQ ID NO: 353477 - DNA, 82 bp, Homo sapiens
tccgtccgccgccaccacccactccggacacaggtgaaaggtgtagcagtcactcggcctacacccacagcatcgaccttgt

SEQ ID NO: 353478 - DNA, 100 bp, Homo sapiens
tttgacaaatgtacagcttgttcttccaaagctccaaccaggaatggagacgccattggatgttttgtccagggcagcatctctggtgcatgctgatgac

SEQ ID NO: 353479 - DNA, 75 bp, Homo sapiens
aacaccttaataaccagcggagctgacacagccaacgggacgaccctgggacagtctccactggggcagatccag

SEQ ID NO: 353480 - DNA, 82 bp, Homo sapiens
cctcgccagcagccgtccggagccagccaacgagcggacggggaggtttactgcatcgacgcgcggttctacgggaacgtca

SEQ ID NO: 353481 - DNA, 75 bp, Homo sapiens
aaaccattaaagttttagaagatcggagtgccagcttctctcagggcaccagagcctcttttctcatgaggagtg

SEQ ID NO: 353482 - DNA, 100 bp, Homo sapiens
gttccaccaggacttgatgaatataatccattctcggattctagaacaatacactgcctctaggactgggacagatagccactgagtacctgcttcaaat

SEQ ID NO: 353483 - DNA, 75 bp, Homo sapiens
tgcggccggagcgggcggctgagacaaaggcgacggatgggtcatcagttaaggaagttgaaacctaccaccgga

SEQ ID NO: 353484 - DNA, 82 bp, Homo sapiens
gaggagtagtcgctggagtccgcgcctccctgggtacaatgactcttcttgcttttcacctaagttgaataagcaccctgtg

SEQ ID NO: 353485 - DNA, 75 bp, Homo sapiens
ctcaggaatcatgggctatcaaagcctggcatcctcgctacaacctcattgttgtgggccgatacccagatccta

SEQ ID NO: 353486 - DNA, 116 bp, Homo sapiens
tgaactcctggcctgaagtaatcctcccaccttggcctcccaaagttctgggactacagagttctaaagttcctgttgcttcagacaatggatgagcaatcacaaggaatgcaagg

SEQ ID NO: 353487 - DNA, 75 bp, Homo sapiens
gttgcgaaggcagccatctttagttcgtctttcctagagaggatcaaagttctgatcgtaccagtctttcttcag

SEQ ID NO: 353488 - DNA, 100 bp, Homo sapiens
ccggcaaatgctgcaggaactggtgaacgcaggatgcgaccagatcaataacacagcagtggggcatgcgcttgtcctgcctgcagggagagacctcaca

SEQ ID NO: 353489 - DNA, 98 bp, Homo sapiens
aggatgtggtggtctactctgatgtcaatcttgagggctaggcatcctagaatacgtttccacacgggtcttgtggatgcccacctctactgtttgaa

SEQ ID NO: 353490 - DNA, 100 bp, Homo sapiens
ttgatttcaaaccttcagaaatagaagttggagtagtgacagttgaaaatcctaaattcagtatcacggccacatctgccagcatcggagctgctggcgt

SEQ ID NO: 353491 - DNA, 90 bp, Homo sapiens
gtcctgtccaccatgccctcagactcagaaagcagcagctccctcagcagtgtggattttaggtgatgggcaagtcagaaagtcagatgg

SEQ ID NO: 353492 - DNA, 98 bp, Homo sapiens
taagatggaagatgaggaggtcgctgagagctgggaagaggcggcagacagcgggagaccgtccaggctggacttgaactccttcctcggctgaagtg

SEQ ID NO: 353493 - DNA, 83 bp, Homo sapiens
cgcagggcctgcagcgggagctggacggcgagcgcgagcggcgcgagaaacacatggattaattgatgtatgttgagtttatg

SEQ ID NO: 353494 - DNA, 75 bp, Homo sapiens
taaaaacagaacaggaggtggtagagggcatggatatctctactcgctccaaagctgccactgcagagccccgcc

SEQ ID NO: 353495 - DNA, 100 bp, Homo sapiens
gaagtggagcaccgatgatgtgcagatcaatgacatttccctgcaggtatgcagagaaggagaagaaaaatcttagatacgtcagtggcatatgtgcggg

SEQ ID NO: 353496 - DNA, 100 bp, Homo sapiens
aaacaatacattttatgctaccaagcgtctcattggccggcgatatgatgatcctgaagtacagaaagacattgatgatgatgatgattttgatgatgag

SEQ ID NO: 353497 - DNA, 100 bp, Homo sapiens
gttaaagcatcaagaaaagttccatctgggttgtgtgatagctgagctttttacagaaggtgtaccattatttgatctctctcaacttttggcttataga

SEQ ID NO: 353498 - DNA, 82 bp, Homo sapiens
tcccgagtggctgggattacagaaagccatgtcctgccaccgcagccagctcctctggttccgccgcctctacattatcttc

SEQ ID NO: 353499 - DNA, 75 bp, Homo sapiens
atttgttaaggattccaagtaactcttatttgtttctaagctgactaaacaactaatgctcctggaggcaaaaac

SEQ ID NO: 353500 - DNA, 100 bp, Homo sapiens
ttcctggcccgaaaggagagcctttgctgatgattcctctgatcatgtcagtactttatgtctgggcccagctgaacagagacatgattgtatcattttg

SEQ ID NO: 353501 - DNA, 100 bp, Homo sapiens
agagaaacagccggcagccggcccgcagcgcgttctcccgggagaggacatcaaccaggaagtttataatttcctggcaactgcaggtgccaaatatggc

SEQ ID NO: 353502 - DNA, 98 bp, Homo sapiens
agcctgtgcagaaagctttgtacaaggatgtgatgttggagaactataggaacctggtcttcctaggaatggcggcgctagatagtaaggcatcaggg

SEQ ID NO: 353503 - DNA, 50 bp, Homo sapiens
atgtgcagatcaatgacatttccctgcagacaatgcagatcttcgtgaag

SEQ ID NO: 353504 - DNA, 77 bp, Homo sapiens
gaagaactcgtcatgctctttgtagcgtggtgcttctgttgctcacagagtaaagccaatcccagctgaaggaatca

SEQ ID NO: 353505 - DNA, 100 bp, Homo sapiens
gccgccagagaggcccgcccaccagttcgcccgtccccctgccccgttcacaatggcgtctctggccgagcctctttttgtggaaaacgacagcagcagc

SEQ ID NO: 353506 - DNA, 95 bp, Homo sapiens
agaagatccccactggaatttccaggaagagacgctgaaggccaaaattcctggaaaactcaagcaattcgtatttgacttacattctggaaaac

SEQ ID NO: 353507 - DNA, 100 bp, Homo sapiens
gtgggtctacaccgaccagccgcacgccgaccggcgccgggagatcctgggtttaaacggaacctgcagcgtttccagtgttcccacgtccacgtcggag

SEQ ID NO: 353508 - DNA, 97 bp, Homo sapiens
gaaacaacaatgaagaggtaattcacttgaacaactttcactgccatcggggacaaggtggagccgccaccaaaatgcagattttcgtgaaaaccct

SEQ ID NO: 353509 - DNA, 75 bp, Homo sapiens
gagctgctgcgcctcaaagccaaagtcgttcaccagacaggtgttatggaagctgctgaaggttgtgaaattcgg

SEQ ID NO: 353510 - DNA, 82 bp, Homo sapiens
ctggctcttgccctcatcctggttctggaatcctcagttcaagggaagagcatggaggaaatcaagaaggtgctgctgctgg

SEQ ID NO: 353511 - DNA, 100 bp, Homo sapiens
cccgctcgggcggccgcggacatgtgcaggatgtccttcaagatcagaaacctcttgaccttgcccagggtgctgaaatgaaacacattcttgttggtaa

SEQ ID NO: 353512 - DNA, 75 bp, Homo sapiens
ctttcagaaagtggctgacatggccaccaacacacgtgattggcggcagtaagcacacaatgaatgatcacctgc

SEQ ID NO: 353513 - DNA, 74 bp, Homo sapiens
gcctcctgtggatatctgtctaagtaagggtcactgtaatgatttattgatctttcaaacacagccttattcac

SEQ ID NO: 353514 - DNA, 100 bp, Homo sapiens
actggctctgctgaccttgtgccttggatacaagaccctcctgaaaggaatttccgggaagttcaatagtggtgagttggtggccattatgggtccttcc

SEQ ID NO: 353515 - DNA, 75 bp, Homo sapiens
cccaatccaatggtgcgagggctggcgttacggagcatgtgtagcctcaggttggatggcaagcatgtggtgttt

SEQ ID NO: 353516 - DNA, 75 bp, Homo sapiens
gtcgctgaggggcttgcctgaagcgagggggggggccctcagcctcttggccttgaacgggctgttcatcttgat

SEQ ID NO: 353517 - DNA, 75 bp, Homo sapiens
tctctgtcagctctttccccgtcagcatcccagccgtgctcacggccaccagcttgggctccccacggagggcag

SEQ ID NO: 353518 - DNA, 80 bp, Homo sapiens
tgagcctgcagccggccctgccggtgacgcggcgcacggcgcggatggtggccgagtggcagtgtgtgggcttctgccac

SEQ ID NO: 353519 - DNA, 100 bp, Homo sapiens
cctgtcaagaccttttggatcctgattcagccatccatcgttattagattggaagagtaggaagattaggtcaaaatggaacagcgattactttcatcaa

SEQ ID NO: 353520 - DNA, 75 bp, Homo sapiens
aggttaacaccttaagagttgtagttactgaccagctgctctgttaaaagcgaaaatgaaacaattgcctgcggc

SEQ ID NO: 353521 - DNA, 98 bp, Homo sapiens
cgagaatgcgagagaaagagcctccgtcaccacatagcgttcgtggcattcagggatgtggctgtgtacttcacccaggaggagtggaggttgttgag

SEQ ID NO: 353522 - DNA, 74 bp, Homo sapiens
ttcgctacacagcaatgcatcgagaaccttggccattctgatgtttaaccaagagttgagctgagtggctctga

SEQ ID NO: 353523 - DNA, 90 bp, Homo sapiens
gtgagaagtaaatttctgttttattgcctaagtgtaatcttgaacatgggcggtgctgtgagtgctggtgaagacaatgatgagctgata

SEQ ID NO: 353524 - DNA, 129 bp, Homo sapiens
gtatttgctctgatgatgaactaatgactgaaggtgaagaccagtttgatgaatgcatctccagcaagaacaccttcagctggagcatctccagcccaggcatctccagctgggacacctccaggccgg

SEQ ID NO: 353525 - DNA, 100 bp, Homo sapiens
ggcgggcgcctgtaaccccagctacttaggaggctgaagcaggagaatcgcttgaaccccggaggtggaggctacagtgttggagcgggccggagagaag

SEQ ID NO: 353526 - DNA, 83 bp, Homo sapiens
tgatgaagttcgagcactaatatttaagaaagaagatgttaactttcaggccgccatggcatcagatgaaggcaaactttttg

SEQ ID NO: 353527 - DNA, 100 bp, Homo sapiens
ggaggagctggtgagcctcatcacacaggatccgcccctggacatggaggagaaggtccgcttcaactctggattaatcgaattacagctgctagccagg

SEQ ID NO: 353528 - DNA, 136 bp, Homo sapiens
atgtctcggatcgaatccctcacgcgggcgcggatcgaccggagcagagagctggcgagcaaggtactccaaagattcaggtttactcacgtcatccagcagagaatggaaagtcaaatttcctgaattgctatgt

SEQ ID NO: 353529 - DNA, 75 bp, Homo sapiens
cggcgcccggatgggcagctgagaaagaaatctcgccattgccgggaatgggtaaatcactcaggccgcgtgggt

SEQ ID NO: 353530 - DNA, 95 bp, Homo sapiens
tgaaattacctccgagggaaacaagaaaacatcaaagaggtctagcaaaggagttcatgatcaagtgttgcccacaccaaatgcttcatccagag

SEQ ID NO: 353531 - DNA, 100 bp, Homo sapiens
tgtgtggtcgcgtctcggaaaccggtagcgcttgcagcatggccacggcatatgcctccaaggacggggtcctcactgaggccatgatggacgcctgtgt

SEQ ID NO: 353532 - DNA, 75 bp, Homo sapiens
aatatcttcccttacaagggttatatatggaattatggtaccctccctcagaatgtgaaggctgtgtctgagact

SEQ ID NO: 353533 - DNA, 75 bp, Homo sapiens
cgcgacgctatggcgcactggagtaccctgttcctggcaggaaatcctcattgacgattcaatttgttgaaggcc

SEQ ID NO: 353534 - DNA, 95 bp, Homo sapiens
caaaaccaacgcctggctcggagcagcagcctctgagacgtaaaattcatcctgatcagaaaaatattaatgcctatgttgtgtttaaggaggag

SEQ ID NO: 353535 - DNA, 73 bp, Homo sapiens
aatcccatcagccccatgcagtgggtgggcactgtgcttgtgttcctggatccttcccagcctgcaggccaac

SEQ ID NO: 353536 - DNA, 82 bp, Homo sapiens
cgctgggctttcgggtcccgcgcccagacaatgcagatcttcgtgaagactctgactggtaagaccatcaccctcgaggttg

SEQ ID NO: 353537 - DNA, 75 bp, Homo sapiens
gtgaggcccgccgctcgcatgagcacctcatacggctgcttctggagaagagcactctataccaaagcgtcaaga

SEQ ID NO: 353538 - DNA, 100 bp, Homo sapiens
gaacgtgcgggaagagaagatcatcgagcatttcaaacggttcgatacaagaggctgttttcctagcgtggcttgctgcctttggtaagaacatgtcgtc

SEQ ID NO: 353539 - DNA, 98 bp, Homo sapiens
cggcgctggagagggggcgctgagctgttggggctgaagccgacgtagcttctctgaacagacgcatccagctggttgaggaagagttggatcgtgcc

SEQ ID NO: 353540 - DNA, 75 bp, Homo sapiens
cattaaggaccagccagaaaatggctttccttaaagtttcccatgtctcaatggactcctgaatataacgagctc

SEQ ID NO: 353541 - DNA, 75 bp, Homo sapiens
ttcaggggaaatggcttcagcgcagtatattactgcagaaatgcactcggtgatggaaagagagccactattctg

SEQ ID NO: 353542 - DNA, 75 bp, Homo sapiens
ctgcaggtctctgtcgagcagcggacgccggtctctgttccgcaggatggctttgggggaccagatactatttgt

SEQ ID NO: 353543 - DNA, 95 bp, Homo sapiens
caagaatcctcagaagtactcggacaaggagctgcagataggcctcatagacctgctgagctgcatggggctgaggccagatggcatcgtcggcc

SEQ ID NO: 353544 - DNA, 98 bp, Homo sapiens
caaataccaggctaccatggtctacaagactctcttcgctctttgcatcttaactgcagtccgtagttcgtggtccttcgccggtgtccccggagccc

SEQ ID NO: 353545 - DNA, 50 bp, Homo sapiens
gagatccgaaggaatgaaatccggaacccagcgggtgccgcttctccacc

SEQ ID NO: 353546 - DNA, 100 bp, Homo sapiens
atcttgctcagtctctgtcagaggaagatcccttggtcctggcaaaactggcctgtggactaaacaagcccaaccgccaaaccctggtttcacatgggtc

SEQ ID NO: 353547 - DNA, 50 bp, Homo sapiens
atgcaaactggatgatgacatgaatcaggaaacccaggcccaacggcagg

SEQ ID NO: 353548 - DNA, 96 bp, Homo sapiens
tcaaatgttatctgggaaattaaagttctacgtaaagagagtatggagctcgtaaaattagacatggatttgattgacatactttggaggcaagat

SEQ ID NO: 353549 - DNA, 100 bp, Homo sapiens
gagccgtccttacggcctcggacgcaggattgaagacaatgatggtgaattcttgttaatagaagctgctgactttctccctaaatggctggatcctgaa

SEQ ID NO: 353550 - DNA, 75 bp, Homo sapiens
catcctagtggaggacgcccctgtggatttttagactctgaggagcagttggagctaatccacattatggaaatg

SEQ ID NO: 353551 - DNA, 83 bp, Homo sapiens
catgctggagatgctcctgcagcatcagatctgtttgacaagtatgcgcccaagctggacagcccctacttccgacattccag

SEQ ID NO: 353552 - DNA, 100 bp, Homo sapiens
cggcaggcggcagcagcaactacggcggcggcggcagtcaacgaaggcttgaaccaacctacggatgactcgtgctttgacccctacacagtttcccatt

SEQ ID NO: 353553 - DNA, 90 bp, Homo sapiens
accatccccaatgttggtgctgcctccgccccgtgggcctagggcacaaggagtcccagccacattcggagaaggtgttcgccagcctcc

SEQ ID NO: 353554 - DNA, 95 bp, Homo sapiens
catacctgcttggacatttgatatgaacacaggattaaagcaaggagagccaatcatgactggcaaaacacagaccagcaacgtcaccaataaga

SEQ ID NO: 353555 - DNA, 75 bp, Homo sapiens
ttgattacatactgttagagaccactggattagcagaccctgatgaagatctccttcaacgacaaaagcctgcag

SEQ ID NO: 353556 - DNA, 100 bp, Homo sapiens
agaagctggatgcagaatttgatcactttgtggttgatatgaagccctttgttctaaaattacctcataggacagcaatggctgccatccggaagaaact

SEQ ID NO: 353557 - DNA, 82 bp, Homo sapiens
atcgctgcaacctttagactaatgactgtccgaaacatcgcctccatctgtaatatgattatttactggcaagatgagcagg

SEQ ID NO: 353558 - DNA, 100 bp, Homo sapiens
cagccgatccagcctgcggagcctgtggggcaggggcatggtctagtggcccagtcaggacgcggaaacactccctggaggttctgacccactccctctc

SEQ ID NO: 353559 - DNA, 83 bp, Homo sapiens
ccgacgctaggggcccggaagggaaactgcgaggcgaaggtgaccggggaccgagaatgtggcagatcagattgcatttcaag

SEQ ID NO: 353560 - DNA, 100 bp, Homo sapiens
gaaagaatggctgtcagccacctgccaaccatggtccaggtacagtctttgcccgctgcctgatttttcctctcatcgtgacgggccagcgagaggcagc

SEQ ID NO: 353561 - DNA, 100 bp, Homo sapiens
attctgggccgaaatgatccgcctgcctcagcctccaaagtagctgagactacagtaattagtgaatgccaaaggcagcaactggaggctgtgagctact

SEQ ID NO: 353562 - DNA, 100 bp, Homo sapiens
ggggcaaagtgttcccaccggcagcaaatatggaatatatggtgaaggtaggcaatgaagttgctacaggaacaggacctaataaaaagatagccaaaaa

SEQ ID NO: 353563 - DNA, 100 bp, Homo sapiens
ttcttgaattagctagtagggagaagacagaagataaagataaaccccttatttataaagcttgcgcgatctctggcctcttcaactgcatcaccatcca

SEQ ID NO: 353564 - DNA, 100 bp, Homo sapiens
gcacatgaaacgttttgtcaaagacctggctgctgcacaggttctggaacctctggcggtctcagattgagcagaaaaaggaaagagagctgctcccctt

SEQ ID NO: 353565 - DNA, 75 bp, Homo sapiens
cccattttgtgggctccagaaagggggttatatcctgtgttgtgacctcatggtttaagtgggaataaagatgag

SEQ ID NO: 353566 - DNA, 75 bp, Homo sapiens
ccgcagggttcggatgagaccaggccgagtgatagctactttcacatgttcaggagaaaaggaagtaaatttggc

SEQ ID NO: 353567 - DNA, 96 bp, Homo sapiens
gccggtgatatgatctgtcctgaatgtggcttggttgtagaaaatgtcactgaaattcacaaatgcaaaacggattgaaggacttgatagtaatgt

SEQ ID NO: 353568 - DNA, 101 bp, Homo sapiens
cgggcggctgagacaaaggcgacggccaagctataacatcagaaatggtgaatgaatacaagaaaattcttttgctgaaaggatttgagctcatggatgat

SEQ ID NO: 353569 - DNA, 75 bp, Homo sapiens
cgagagtggccctgacggaggggaggaagtatctcattcagttgctaaacttatattagttaatttccactggca

SEQ ID NO: 353570 - DNA, 103 bp, Homo sapiens
cttaatttggaataacatggaacttgaaaatgattattgcttgaatgattacaagatctgccactgtgaaggagatgatgagagccccctgatcaccccctgc

SEQ ID NO: 353571 - DNA, 102 bp, Homo sapiens
ctgcggcagaagggctacgaagaagtgcttcagcgggccaggaagcgcatccaggagttgtatatgaacacagatcaagattagagaaatccttgcaaaaag

SEQ ID NO: 353572 - DNA, 50 bp, Homo sapiens
aagctgaacttttccaagaacagtgaggacctcgcgacctgtgtcagcag

SEQ ID NO: 353573 - DNA, 75 bp, Homo sapiens
ttctgataatcaaccaactgttacaatcaaggtctatgaagcaatggccaatgtacatggtggactatgccggcc

SEQ ID NO: 353574 - DNA, 101 bp, Homo sapiens
gagagggttcgatctccgtacgcaccaggtgctggagaatctggtaaaagcaccattgtgaagcagatgaggatcctgcatgttaatgggtttaatggaga

SEQ ID NO: 353575 - DNA, 100 bp, Homo sapiens
ctggatctgcgatctgtttgtgtggccactgcctccaccatggctgaggctttctctaagacaacctctgaggaagaccagagcatccaggagcccaaag

SEQ ID NO: 353576 - DNA, 87 bp, Homo sapiens
agcttctgacagtggagacactggcattggaacttcctgttctgatagcgtggaaggtctgacggtaactgctgtaaaagactcagg

SEQ ID NO: 353577 - DNA, 95 bp, Homo sapiens
gggattctcgacctgctaacagaactggaccttttcggttatacacaggaggagaagatagagattgcccataggcacttgatccccaagcagct

SEQ ID NO: 353578 - DNA, 85 bp, Homo sapiens
cggctttggaatccaccagctacatccagctccctgaggcagcactgttgcaagaattcaattccgtcttcctgatggttcttcc

SEQ ID NO: 353579 - DNA, 75 bp, Homo sapiens
tgatcgacttcctcacccgcgcctgcgacctcgagctgcctgagaactggacagacacgcgggagacgctgctgg

SEQ ID NO: 353580 - DNA, 88 bp, Homo sapiens
ggtgtcgtttttccttgagctgaacgtcttgcaacagtggccgcacgcataggtcattgctttagtgatggatatatttacagatgtg

SEQ ID NO: 353581 - DNA, 82 bp, Homo sapiens
aaagcagacattgacctcaccaagagggcgggagaactcactgaggatgaggtgggatgcagatcttcgtgaagaccctgac

SEQ ID NO: 353582 - DNA, 100 bp, Homo sapiens
gagatcaagagggccgtgtcagaaaggcaggcgctgcgagacggagacggcaatcgcacctggggccgcctaacagtgagcctcgtggtgcagtgggtgg

SEQ ID NO: 353583 - DNA, 74 bp, Homo sapiens
gtcctaccggaaacctaggaaaagccagctgtctgttaccaggcaatcacgaagaagttgaaaatatgtgaaga

SEQ ID NO: 353584 - DNA, 74 bp, Homo sapiens
tctccactgccgtctactcggccactccggtcccgacacctagcctgcgttacagtcttcttcataccttgatg

SEQ ID NO: 353585 - DNA, 95 bp, Homo sapiens
gcaaccaccccgtctgagaaagtcattcttatagaagagcatcagaggaagataaaaaagaatcctcaatgtcaggcccctgagcccaagctaag

SEQ ID NO: 353586 - DNA, 100 bp, Homo sapiens
tgaagatgcgcgccgtcttccccgaagtctgcgggccaggcatcgacatccgcaacgactatcagcagctgaagcgcctggagaactgcacggtgatcga

SEQ ID NO: 353587 - DNA, 97 bp, Homo sapiens
aggagccgccgccgccatatcagtgtactaatggtcacttgatgtgcgctggctgttttatccacctactagcagatgcccggctgaaggaggagca

SEQ ID NO: 353588 - DNA, 95 bp, Homo sapiens
ctacctgccccctcctggctaccagctcgtcccagacactcagtgggagcagctgcagacagagccgattcgaagacagtctcttacacctcctc

SEQ ID NO: 353589 - DNA, 75 bp, Homo sapiens
ccccaggcagcgtgtgtcggtcgcctagtctggagaactagtcctcgactcacgctgttgagtggaatgtcatgg

SEQ ID NO: 353590 - DNA, 82 bp, Homo sapiens
tgcgggacgcgaggtttccgggccaccagcttgggctccccacggagggcagcaagtgggacttggggaacccggctgtcaa

SEQ ID NO: 353591 - DNA, 74 bp, Homo sapiens
ggggctccggctggtctgtggtgaggagccagctctcaatgaagccaacttgagcaatctgaaggccccattgg

SEQ ID NO: 353592 - DNA, 96 bp, Homo sapiens
aaataggactcattttaatcttctgcctaccttttattcctcctcagagagacccccaacacagcaggcgcaggggccacaggcggcatcatcggg

SEQ ID NO: 353593 - DNA, 75 bp, Homo sapiens
tactcttatcaatttctatgagaggccagcgatctgtacatgagacccaggaattatttccaaagcaagattcat

SEQ ID NO: 353594 - DNA, 96 bp, Homo sapiens
aatattatgatgattatagagttcagttgtgtgcaaaaatgatgagaatgaggacccgggaagaaatggaaacttttgagaagaactttgaaagag

SEQ ID NO: 353595 - DNA, 97 bp, Homo sapiens
ttcaaaaatatgatcccattaactcgaggagatgttaaagtaacccatcttgcaggacgacattgaagattggtcttctgttgatctaagatgatta

SEQ ID NO: 353596 - DNA, 100 bp, Homo sapiens
ccattgtttgaccacaacaagggccggattctcacccaggccagaagcggactcctagaagaggggagcagcaaggatggaatgacagccgtgggccgga

SEQ ID NO: 353597 - DNA, 76 bp, Homo sapiens
ttttaatgccgagaggtctctgtgacgattttggtaccccaagaagctagtgcagacttattcagtgtttccctac

SEQ ID NO: 353598 - DNA, 88 bp, Homo sapiens
aggcttcacgggaacatactgccatgaaaaccatgctcgacagctgaccaaggccatgatgcgaaaggccacggccagccgcctggtc

SEQ ID NO: 353599 - DNA, 51 bp, Homo sapiens
ttcctgtacagcctgcagaactacctaatctgggagcctgcaagtgacaac

SEQ ID NO: 353600 - DNA, 50 bp, Homo sapiens
cttggattcagacgccgattcgcccagagtggagactgctgcacggactc

SEQ ID NO: 353601 - DNA, 83 bp, Homo sapiens
cggagctgtcgacccggcctggcgccggactagaaatgagccgtcagactgctacagcattacctaccggtacctcgaagtgt

SEQ ID NO: 353602 - DNA, 50 bp, Homo sapiens
gcctgaggagcttgaatgtgacagggttctctataaaggtgtcttaaaaa

SEQ ID NO: 353603 - DNA, 149 bp, Homo sapiens
cgagagagtaaaagccgaggaaaagtagaaattgatcagcaacaactaactcagcagcaacttaatggaaactagctgctctgttaaaagcgaaaatgaaacaattgcctgcggcaacagttcgactcctttcaagttctcagatcatc

SEQ ID NO: 353604 - DNA, 82 bp, Homo sapiens
ggacatatccattttgataatgtcagtgtggtatctctacagataaaccgagaaaactggtgtacaatagagccatgccctg

SEQ ID NO: 353605 - DNA, 83 bp, Homo sapiens
cgcggaggccgacaggattcgttggctgccgtccccgctgctgtgcattggcagcctcccgcgacgatgcccctcaacgttag

SEQ ID NO: 353606 - DNA, 82 bp, Homo sapiens
gcttgaagctgagcaatatttctcgattgatgtacagctatatattttgtcctttctttcacctcatgatctgtgtcagttg

SEQ ID NO: 353607 - DNA, 100 bp, Homo sapiens
tgttggtagaaaaagcaagagtttgttatatagcagttgaattctcttacccgcccctgattccaggagatggacatgacagccacactttacctgaaga

SEQ ID NO: 353608 - DNA, 122 bp, Homo sapiens
cagcactagaattttggagtagggtgacacccagcatccttcagctaatggcccataacaaagtggtagacaacaccaagtttacgatggactgcgtagcgcctacgatccacgtgtacgag

SEQ ID NO: 353609 - DNA, 101 bp, Homo sapiens
gaagctgccgccgaacgacaggacgttggggcggcctggctccctcaggtttgggccccatggtatccctgtgacagtatttcccaaaagggaatataagg

SEQ ID NO: 353610 - DNA, 51 bp, Homo sapiens
taacacagtacctgttaacaacccctgccaaggtaaccctgctggggtcag

SEQ ID NO: 353611 - DNA, 100 bp, Homo sapiens
gagccagccgctgttttgccggaggagcccctcaggcctttggaccccaatgaccagaagtctctagaggggatgcagaagatggagaaggaggagagtc

SEQ ID NO: 353612 - DNA, 100 bp, Homo sapiens
ctagattagaccatgaacgagccaagattcctattctcaccttgacctacaaccagacaatgcttctctccaagcaattcgtgcagtgggatgagctact

SEQ ID NO: 353613 - DNA, 100 bp, Homo sapiens
gctggaggagcgcgagcggcggtttccttgcccggggccgcgggaaggccgaccgactgccgcggctaagaaatggcatttcaaaaggcagtgaaaggga

SEQ ID NO: 353614 - DNA, 83 bp, Homo sapiens
gaagtttgtgaactcaactggctatttgacagaggaggatttgttggtattgaggaaaacggtgaaatcctttttggctgttt

SEQ ID NO: 353615 - DNA, 50 bp, Homo sapiens
ctgtctctgctcacagtgccaagcttgacagtgatgacctcctggataat

SEQ ID NO: 353616 - DNA, 80 bp, Homo sapiens
ggcgcgggaggtgttcgagaacgaccccgagacgacgctgcatccaggtagtacacaaactgctctgctaccagaagaag

SEQ ID NO: 353617 - DNA, 82 bp, Homo sapiens
gggcacagctgaatggaaagccagtaggacacgaaggtgtatctggcaccaattctgacccagtcatttgtgatccctggct

SEQ ID NO: 353618 - DNA, 75 bp, Homo sapiens
cctgccttcactcttctcccctgattcaagactcctctgctttggactgaagattaccagagactgatgactgtg

SEQ ID NO: 353619 - DNA, 50 bp, Homo sapiens
ggcagcagcatctcagcccaagagaaggtgcaagcggtcttctctgtctt

SEQ ID NO: 353620 - DNA, 100 bp, Homo sapiens
gtttaacctttattgtggtggagtccaccccgctgtgacgactaagctaccggagagccgcgggcaccctgccgagcccccagagcctcaggaagccccc

SEQ ID NO: 353621 - DNA, 98 bp, Homo sapiens
ttactcaaacagagggaactacaacagaggtggaatgcccaacagagggaactacaaccagaggttggaaagaaccatgactgtattcaggaaggcac

SEQ ID NO: 353622 - DNA, 83 bp, Homo sapiens
cacttgtcactcactgccatagagtacagccacagccacgacaggtacctaccaggtggatcagtacaagggaaagcgggatt

SEQ ID NO: 353623 - DNA, 100 bp, Homo sapiens
cgattagttgatgtggcctgcaagggattcccaagagctttgaatgaagacatttaagattacttctagtaaccttgcttgtcaaacccatggtggatgt

SEQ ID NO: 353624 - DNA, 100 bp, Homo sapiens
gaaggccctatcaggacatggagtatgaaagacggattatagctgagaaggtaaaggacgttctgtttatccgaccccggaagtatattcactgctccag

SEQ ID NO: 353625 - DNA, 82 bp, Homo sapiens
gccttgggcctcgcgccggctatggccgtgccctggggctgagccctcagtaagagttccctatttcattgatttgaaaaaa

SEQ ID NO: 353626 - DNA, 100 bp, Homo sapiens
gccagggtccctgaagagggaagacacgcggaaacaggcaaactaggcgtggcaactgctggctgcgtgaatgaagttacagagatggagtgcggtcgct

SEQ ID NO: 353627 - DNA, 89 bp, Homo sapiens
cggcagcgcgtcatggccgcccaggtggcgctccggaggcagcaggccaccgagtcaccttcaggccattcagaggaggaaagagaggg

SEQ ID NO: 353628 - DNA, 82 bp, Homo sapiens
gggccagtgcggcaaccagatcggcgccaaggtgaatgaaaactttgccattgatttgatagcagagcagcccgtgagcgag

SEQ ID NO: 353629 - DNA, 147 bp, Homo sapiens
caacgccgccccttccttccagtttattaaccccacaaccatcacatccaccatgaaagctaagctgctgaaggccactcgctctggtgggaccctcgtgcttgtggggctgggctctgagatgaccaccgtacccctactgcatgc

SEQ ID NO: 353630 - DNA, 100 bp, Homo sapiens
ggattgggagagaggtagctacccggatgcagtcctttgggatgaaggcagttcaattaacctccagaagatggctgaacctgcaggaataccagagcaa

SEQ ID NO: 353631 - DNA, 50 bp, Homo sapiens
ggcaaagttattgccagcttcctgtgtaaacaggaacatcgataagtagt

SEQ ID NO: 353632 - DNA, 89 bp, Homo sapiens
ttggaagcaatgtttgaacaaactcgaagaacagctgtggaaagaagttgcaaaacactggattttgaagccagcttcataaggctatt

SEQ ID NO: 353633 - DNA, 75 bp, Homo sapiens
cttcaatactacctttatttccaccataggccctgctgcaaaaaagaagtatgtcagttataataacctggttat

SEQ ID NO: 353634 - DNA, 83 bp, Homo sapiens
cgcaaattcactccccagtacaaagtgtcgatacaccctgcaatacacctacccatatgcatattacatggagtccggaccca

SEQ ID NO: 353635 - DNA, 74 bp, Homo sapiens
ttggtaaattgatcaggatttttggcctaccctccaaagaaaagaaaactttagaaactgttcctttggagagg

SEQ ID NO: 353636 - DNA, 50 bp, Homo sapiens
cctggcccaggaggatgggcccgttgtgctctctgatgtaaaggatggag

SEQ ID NO: 353637 - DNA, 99 bp, Homo sapiens
aaatgttgatgtggtacttgaagacacctgtactgttggtcaaaatgcagatcttcgtgaaaacccttaccggcaagaccatcacccttgaggtggagc

SEQ ID NO: 353638 - DNA, 50 bp, Homo sapiens
atcaacagtaaggatgtcaaagttcagattagcacatcgcagatcaaagt

SEQ ID NO: 353639 - DNA, 75 bp, Homo sapiens
aggaacaggcgccttcaaaagcccacttggcgatgggttacagtaagaggtgcccaacgctctgggagagcccca

SEQ ID NO: 353640 - DNA, 75 bp, Homo sapiens
gcagaacccaggttccgagatgagtgaattgcgaaagcccagctacgcagagatttgtcagagaacgagtaaaga

SEQ ID NO: 353641 - DNA, 51 bp, Homo sapiens
ggcttctccacagtcaccaaaccagggttaaagcacgaattgggagctctc

SEQ ID NO: 353642 - DNA, 100 bp, Homo sapiens
gttttaattcaagaatcagaaactttcagaaagaatcttgaagaatctttacatgataaggtactcatgtaatggaaggctctggaagaatggtagttac

SEQ ID NO: 353643 - DNA, 83 bp, Homo sapiens
catggctacttcatattttggaaagcagtttttaagacaacttcagcgccagtcagcaaagtaaataaatactgtgcttcttc

SEQ ID NO: 353644 - DNA, 83 bp, Homo sapiens
ttccacgtgaagctcaccgacagtgccctgagggccttcgagagctaccgcgccagacaggcataatcaccagcaacacccgg

SEQ ID NO: 353645 - DNA, 82 bp, Homo sapiens
ggacgacatcaagaaggtgatggcggccatcgagaaagtgcggaaatggagctcgaggccatgagcagatataccagcccag

SEQ ID NO: 353646 - DNA, 100 bp, Homo sapiens
gctgcagaactcctctatgatgaagaagaccttgaaatgcatccgctggtcgctgccggaaatggccagcctcgccgctcctgctatttgccaaccgccg

SEQ ID NO: 353647 - DNA, 74 bp, Homo sapiens
cgcagtggtcgcttcttctccttgttacagacacaactgaggccccctttcaaggggatcagaggtccctggag

SEQ ID NO: 353648 - DNA, 80 bp, Homo sapiens
aaggatgtcccagatcatgcggtcttagaaatgaaagatccaattctggtacagcagttgcgccggacatacaaatattt

SEQ ID NO: 353649 - DNA, 75 bp, Homo sapiens
tgaggagactccggcgctcgccatggccgacgaaaagcccaagtgctctggaactgaacccgcagtatcttccaa

SEQ ID NO: 353650 - DNA, 75 bp, Homo sapiens
cctgtccaaggacaaactcttcaagccttcctttgatgtgaaggtgatctgtgaaaatggttcgctattcacttg

SEQ ID NO: 353651 - DNA, 75 bp, Homo sapiens
aagcgcggaagaaggcctccgtggaggccagattgaaggaacttccatgtctggaatgagtgctggatggcccgg

SEQ ID NO: 353652 - DNA, 100 bp, Homo sapiens
actcctgccgcgtataccaggcatccagccccgatgagatggcccactgcgtgaccttggttcagctgtccatttcctgtgaccatctcattgacaagga

SEQ ID NO: 353653 - DNA, 82 bp, Homo sapiens
agggcccttgcggagttccgcgtccgaggtgtgaaggtccccgttctccgtgtcctgctgtccgctgacctgaaggggttcc

SEQ ID NO: 353654 - DNA, 83 bp, Homo sapiens
caccggcgcagtttcatctagcgactgggccaattcctgtccccccagcagcatggcatcgtgtgctgaaccctctgagccct

SEQ ID NO: 353655 - DNA, 100 bp, Homo sapiens
gtcttattccactcttcggcgaagctttacgttcatgtaaacagcatgacgtgaggccgtggatgcaggcattaagacagagtttcactcttgttgccca

SEQ ID NO: 353656 - DNA, 82 bp, Homo sapiens
tttggatgtggaggggaatagactccatctatccatatgaggtagaacgtcatgacatgaataccttaagcctgcccctgaa

SEQ ID NO: 353657 - DNA, 75 bp, Homo sapiens
tttgaatctcagagtgaagatgagttgacaccttttgacatgagcatccaggacttgattattcttagaaatgca

SEQ ID NO: 353658 - DNA, 100 bp, Homo sapiens
tttcgatcagagatcggcggagaccctcgaagtgcgcaaacttgacactcaccctgaccgatcactgtgtccactactatgatcttcgtaacactaaaca

SEQ ID NO: 353659 - DNA, 90 bp, Homo sapiens
cagggttcatctttactttttaccaaaactcaaggaagtagcacaagttgggacccaatgttgtcttccagttgtgaaagcaccccagag

SEQ ID NO: 353660 - DNA, 75 bp, Homo sapiens
gaaattgcactggaactgtctgattaagagcaacgatgcctcagggaacacttggaactggttgtacttcatccc

SEQ ID NO: 353661 - DNA, 75 bp, Homo sapiens
caaggtggcctaccaggaggccaggggtgtcgccatgaatcctcactatggatgggctcattgaggacattaagc

SEQ ID NO: 353662 - DNA, 82 bp, Homo sapiens
ctacgtcccgctgccgtcgccgccgccaccatgcccaagagaaaggtatcatgatattagctggtttgacatcaagtcattt

SEQ ID NO: 353663 - DNA, 100 bp, Homo sapiens
taacaggactgcatgcagtcgcagacatttactgtgaaaactgcaaaaccactctgggctggaaatactttggaaggcattcgggaataccaagtgaaaa

SEQ ID NO: 353664 - DNA, 100 bp, Homo sapiens
ctggatggttgtgagggaagagacaggaagatggtgcccaggtgctggagaatctggtaaaagcaccattgtgaagcagatgaggatcctgcatgttaat

SEQ ID NO: 353665 - DNA, 100 bp, Homo sapiens
gccggagtgtaggcggcagaggattcgctcccagagcagctgcggccaggtggaagcagggaaaggcctggagatgaggaagctggttctctcggggttc

SEQ ID NO: 353666 - DNA, 100 bp, Homo sapiens
tcggcgctgcgatccgcgcatataacgggtgaggaggtcctccggcagctgcagaccctggcaccaaagggcgtgaacgtccgcatcgctgtgagcaagc

SEQ ID NO: 353667 - DNA, 83 bp, Homo sapiens
atgcactcggatgccgccgctgtcaggactggtgattgcagctggaagtgcccatgaccgagctggcgtcctccgggggcggg

SEQ ID NO: 353668 - DNA, 50 bp, Homo sapiens
aactacaatcacctaatgcccacaaggaacaatggcgctgtcttcagtgg

SEQ ID NO: 353669 - DNA, 75 bp, Homo sapiens
aggaaatatttctttaaggactcatcaaactgtgtgcaaacaaggtgataaagtcatcccactcgctattcctca

SEQ ID NO: 353670 - DNA, 101 bp, Homo sapiens
agcttcagaaccagagctggcttccaggagaccttaatggacagaatcaagaaacagctacgtgaatgggatgaaaatctaaaagatgattctcttccttc

SEQ ID NO: 353671 - DNA, 75 bp, Homo sapiens
aaagagcccctcatcgagctcttcgtcaaggggaatgagtttcagaatattccaggggagcaggtgacagaggag

SEQ ID NO: 353672 - DNA, 101 bp, Homo sapiens
gtgccatatgatttatcggaaggtaaacactacacgtgaagagtggtgaaagggaacattgattactgaagtgccctggagagggaaagcactggtcaaca

SEQ ID NO: 353673 - DNA, 74 bp, Homo sapiens
tggagagaactgctggaaggagactggatgatagaattggcttcgtgggacacatatgcaacatgcctatgatt

SEQ ID NO: 353674 - DNA, 96 bp, Homo sapiens
ggggaagagagatctctcgagattttgccaagatgccaaacgtctgattggacgcagatttgatgatgctgttgtccagtctgatatgaaacattg

SEQ ID NO: 353675 - DNA, 109 bp, Homo sapiens
ctaaagttggtggttaagaaaggaaatcaaaccgaaaatgtgtatatagagagagggtctcctatgtttcctaggcctgtcttgaactcccgggctcaagcgattctcc

SEQ ID NO: 353676 - DNA, 83 bp, Homo sapiens
gatcccagaaggtcgcgaaggcagtaccgtttcctcagcggcggctagatgaggaagaggagcgaaggaaaaggcgccgggag

SEQ ID NO: 353677 - DNA, 100 bp, Homo sapiens
cggagcctggcgggcgtgggaacccaggccccgccgaggcggccaggaatcagagatcattgatttcttcctgggggcctctctcaaggatgaggttttg

SEQ ID NO: 353678 - DNA, 75 bp, Homo sapiens
gtaagccttagcagccttgatctgaaggtctccaattgagaaacatggcactgtttttcctgcactctacccacc

SEQ ID NO: 353679 - DNA, 73 bp, Homo sapiens
agaagatcctgaagctcacggctgacgccaagtttgttggagaccttccccagacgcctccaggggctgtccc

SEQ ID NO: 353680 - DNA, 83 bp, Homo sapiens
tggagaatggacagtttaagaaaagggaagcctttatgcctttctcaataggtatcatgaactgatcactaaatatgggaagt

SEQ ID NO: 353681 - DNA, 82 bp, Homo sapiens
agctgttagccaggctaggtgcctgcaggttgaagaactgagctctatctgttcctggaactgctgaggtcccaccagagcc

SEQ ID NO: 353682 - DNA, 138 bp, Homo sapiens
agagaagcagaattatacctagaagtctactaatggacagttagtcacccacctacatgttgagattctgatgctcacagtaccacctcaagtgcctccccagctcaatctccttgttacagtaaccagtcagatgac

SEQ ID NO: 353683 - DNA, 99 bp, Homo sapiens
ataaaagcgcggaagggctcctttccgtggtgtgtagccggcttggcgtgaccctcgcctgatccaggtgttccatgtacccctggaggagagaaaata

SEQ ID NO: 353684 - DNA, 100 bp, Homo sapiens
atcaacgtcctccgggaccggagtcagaaccctccgcagagtaaaggtgttggggatgtcctttgcactgaccctgaactgccagattgacaaaaccagc

SEQ ID NO: 353685 - DNA, 100 bp, Homo sapiens
agaaaacctgccaatcaagatgagtatggaaacagcacttcttctcagtctcagacaagtactgcctccagaaaagccaattcaagcgttgggaagtggc

SEQ ID NO: 353686 - DNA, 100 bp, Homo sapiens
cgctgaaccaggaatccgcccgcaagagcgagccgcctgccccggtgcgcagacagagctattccagcaccagcagagaaatggcttcagacatacctgg

SEQ ID NO: 353687 - DNA, 100 bp, Homo sapiens
ctcgcacacgggccgcggcatcctcagcatggccaactccgggcccaacagcaacaggtctcaattccctccagaatacccatcatatagcccctgaggt

SEQ ID NO: 353688 - DNA, 95 bp, Homo sapiens
tctccaaaatgtggccagattgcagggagtatcaaatatgagaaagctaggccatctgaataactttactaaggataacaaagccattgaccttt

SEQ ID NO: 353689 - DNA, 51 bp, Homo sapiens
tcccaagtagctgggactccagtttcttcagatggaggtactgagccctct

SEQ ID NO: 353690 - DNA, 100 bp, Homo sapiens
agaagatggagccagcacagcactcattgcagttgatcatggccttgccaggttggtgacagtatattgtgagcatggtcataaagctgccaaaatcaac

SEQ ID NO: 353691 - DNA, 98 bp, Homo sapiens
gacctgcgggcccctgacggatgaggacgtggtcaggctgcggccctgtgagaagaagcgggtcatcaacttctatgcaggagcaaaccagagcatga

SEQ ID NO: 353692 - DNA, 90 bp, Homo sapiens
aaacacggctgtgctcagggctcgcgggtgaccgaaaggatcatgaactagtgacctggaaagatcaccttctacgaggaccgagacttt

SEQ ID NO: 353693 - DNA, 100 bp, Homo sapiens
aagacaaagcagagttggaaagtgatccaccttacatggaaatgaagagagaagaagaaggaggttcctgctgtgccagaaacccttaagaaaaagcgaa

SEQ ID NO: 353694 - DNA, 102 bp, Homo sapiens
acaagacccatctttatgcaaagccagcgttacagtaatgttccagacttctgagaagttccagaaaataaatcagatggtatgtaacagcgaccgtgtgct

SEQ ID NO: 353695 - DNA, 75 bp, Homo sapiens
ctctgtggagaacacccccccatggaggcgaggattcaagccaaaactcgagaatttagggaacgacaagctcga

SEQ ID NO: 353696 - DNA, 82 bp, Homo sapiens
gtcgcggtgggtcctcgcttgcagttcagcgaccacgccttatgccagcctggaccatcttggaggcagtgtaggatcatgg

SEQ ID NO: 353697 - DNA, 100 bp, Homo sapiens
cagcctcagcaccgacagccgacgcgcagatagcagagccatccttggggctactgcagcactggggtgtcagttgttggtccgacccagaacgcttcag

SEQ ID NO: 353698 - DNA, 75 bp, Homo sapiens
ttcgtaatgcgactcaaagctgcacggcagtctgtttatgagatcctgtttgaccaaactcagagatcaattaag

SEQ ID NO: 353699 - DNA, 85 bp, Homo sapiens
ggaacgcttattcaacggcaaaaggctctgtggatagcaactggatcgtgggtgccacgctggagaagaagctcccacccctgcc

SEQ ID NO: 353700 - DNA, 100 bp, Homo sapiens
cacggcctgcatcgggcccacgctcagaattagactttcttgtacctaaggctggattcttctgtccaatttgttccctcttctactcaggtgaaaaagc

SEQ ID NO: 353701 - DNA, 87 bp, Homo sapiens
tggctgaaggaaaacctccttatgctgatatacatccaatgagggggaacttcaacatggagttacttttgatccctcagttttaat

SEQ ID NO: 353702 - DNA, 75 bp, Homo sapiens
gaggaaatgaggtctctaccacacctctgttagcaaattgccgagacgcatccagagctttcgtgaccggggact

SEQ ID NO: 353703 - DNA, 90 bp, Homo sapiens
ctaacttattcatctcctatggaagaggatcacctagcccgggtagaagaggcaatcacccgtatgcttgtgtgtgccctgaaaactgca

SEQ ID NO: 353704 - DNA, 75 bp, Homo sapiens
ttgagtcagtgcgccgctctccagcccgcttgaacggtttggtgcacctcgatttggaggaagtagggcagggcc

SEQ ID NO: 353705 - DNA, 48 bp, Homo sapiens
cctgagatccacccaagttgtgtatcctagaaggaaaacatcaccatg

SEQ ID NO: 353706 - DNA, 100 bp, Homo sapiens
acaatgactttgagccctaccttactggacagtcaaatcaggtgagccctattcccagaggcaggtggtgctgaccctgtaacccaaaggaggaaacagc

SEQ ID NO: 353707 - DNA, 83 bp, Homo sapiens
ccttggttcatccctaagggtcctaaccggggacctgcaggctgggacaatgaaaagaaaatagctattttacatgaaaattt

SEQ ID NO: 353708 - DNA, 100 bp, Homo sapiens
aaagagagactttttgtacttacaaagtccatgctaacctactatgagggtcgagcagaggatctgaagaagctgaagaaaaacaggacagtgagaaacc

SEQ ID NO: 353709 - DNA, 100 bp, Homo sapiens
gagtcagcaaagacagccgcccagaacctgtacgagaagacatacctgcccgctgtagatgagaaactcaggtaactgctggttccttgcagctgccgcc

SEQ ID NO: 353710 - DNA, 74 bp, Homo sapiens
tgggtttcttactaaggacgagctgatcaagtatatgactgaagaagcgttacagtgtttctgccacctctgta

SEQ ID NO: 353711 - DNA, 83 bp, Homo sapiens
ctggcggagcaggaggatgggcgatttaggcctattaaaggaaggcaggaagaactaaaggaagtaattgaacgttttaagaa

SEQ ID NO: 353712 - DNA, 90 bp, Homo sapiens
tctgctactaccactaccaataaagaggctgatccaagcaattttgccaacttcagtgctatggctgagagctagcaaggaaaactcagg

SEQ ID NO: 353713 - DNA, 100 bp, Homo sapiens
ctgggatgagattcaatgaagtggccgcacagtatagtgaagataaagccaggcaaggggagtttgggctttgcaaaactgagaacaaagccaagtcggg

SEQ ID NO: 353714 - DNA, 83 bp, Homo sapiens
aaggagctcaactccaaccacgacggggccgacgagacctcaggatgacgacctcaggcgcgctctttccaagcctggtgcca

SEQ ID NO: 353715 - DNA, 100 bp, Homo sapiens
cagcaaagatatgccaggctgacattgtggaggctgtggacattgcaagtgcagccaagtcccatcagggccctggatcccaagactcagcatccaaggt

SEQ ID NO: 353716 - DNA, 88 bp, Homo sapiens
tttgacaaaatccctgagtcctgtgcactcaaaagttggagacatccaggtctgcaccatgctgtgtgtgccactgaggtttttaaaa

SEQ ID NO: 353717 - DNA, 95 bp, Homo sapiens
aaaaactgacaggtgaccgatgtacaggactttcctctaaaatgcaagatacaatggaggagaacagtgagagagagtagcagatcgactctatg

SEQ ID NO: 353718 - DNA, 82 bp, Homo sapiens
gcgggcgagctgcggctcggacgccagcggacacgcgggcgagatgtttccttccaatgggcttttggtgtaggatgtcgga

SEQ ID NO: 353719 - DNA, 100 bp, Homo sapiens
gtttgagacgcgggagaatgcaggctgcgtgctggtacgtgcttttcctcctgcagcccaccgtctacttgtgcctgaagacctctcattagaagagaga

SEQ ID NO: 353720 - DNA, 100 bp, Homo sapiens
ccgagagggaagccccttggatattccagtcgatgtatttgtacaccaaattttctaccctagcaaggatggtacgaagattccaatgttcattgtgcat

SEQ ID NO: 353721 - DNA, 75 bp, Homo sapiens
gctggtttgagcaactgaactggaaacaagatgcagaagctccaccatgaggcgaggtggatggaggaagcgagc

SEQ ID NO: 353722 - DNA, 85 bp, Homo sapiens
ggccccggacgaaggtactcgcagcacttggagcgcagaaccggccgcgcccgcaaacggggattcagcgtccgatcctttggaa

SEQ ID NO: 353723 - DNA, 100 bp, Homo sapiens
cactactcttggaatcaaagataaatccaaatactgcatatcagaaacaacagatccagacatttaatgtggatgcaccatgccagaccgtggaagattt

SEQ ID NO: 353724 - DNA, 49 bp, Homo sapiens
cctgggcctcccggtccgcaagcaggttttggagattttaggtaagaag

SEQ ID NO: 353725 - DNA, 101 bp, Homo sapiens
gggccgcgtcgtagggactcactggcggtgcgcgacctgggctggctccgggggtggcgggcgcagctgctgtgacaggaggaaatgagtctcaaccagac

SEQ ID NO: 353726 - DNA, 49 bp, Homo sapiens
taggaggaaaattcatcatctggctcttcgtcagattgggcagaggacg

SEQ ID NO: 353727 - DNA, 90 bp, Homo sapiens
agacagaagaaaaccaaggctgaaggggatcgtctaaaagagggccgtttgagcaaggaagacattgaacgtatggtccaggaagctgag

SEQ ID NO: 353728 - DNA, 100 bp, Homo sapiens
ctcggcccgcgggggagccccgggagccgcacggaatttatgcaaatattctcatgaggttctctcagaagagaacttcaaagtcctgaaaaatcacgaa

SEQ ID NO: 353729 - DNA, 101 bp, Homo sapiens
cgctcctggaggaggaggtgggagctccgacagttagttaatatgtgcatcaacccagatccagagaagcgaccagacgtcacctatgtttatgacgtagc

SEQ ID NO: 353730 - DNA, 100 bp, Homo sapiens
ggattgaaagtcaaaaccgaagaaatgcagtgccagtgtttgaaagatgtatggtgatcttgaaacctccagacacaagaaaacttctagcaaattcagg

SEQ ID NO: 353731 - DNA, 100 bp, Homo sapiens
taagaagtgcctttcgcctcccaccatgattctgagacctccccagcaatgtggaactgacaggaagatgtcacccaagcgcatagctaaaagaaggtcc

SEQ ID NO: 353732 - DNA, 51 bp, Homo sapiens
cagatatgcgcgtcagcatactttggcggataacaacgaacttgatgcaag

SEQ ID NO: 353733 - DNA, 100 bp, Homo sapiens
agagctcctggaactttctcatcttttcagcatctcaaccctgtggaatcttttaactcccaagtctggccgggaccttcaacagtatcagagtcaggct

SEQ ID NO: 353734 - DNA, 90 bp, Homo sapiens
ctgatcccaaaattattgaaaacactcgaagggaagacagagatgtcaatgaccccatgcccaaccgaggcggcaatggactagctcctg

SEQ ID NO: 353735 - DNA, 100 bp, Homo sapiens
tgcgaaataccttgatgaggatacaatctaccacctacagccaagtggcagatttgttattggtgggcctcagagtcacctaaggtcctgcgagtacaag

SEQ ID NO: 353736 - DNA, 76 bp, Homo sapiens
aaagtggagagcacatgggtgtgtgttcagaggatggcaagctctaagcgaaagacatgaggcctcagcctgaaat

SEQ ID NO: 353737 - DNA, 75 bp, Homo sapiens
cgtgtcccaggcccggcctttctgacaagagcttttattccgcctgcgtggtgctgggcctacagtttcttcacg

SEQ ID NO: 353738 - DNA, 51 bp, Homo sapiens
ctggtcgagccggaggaagccaccagatcctgtctacctttcatgaccaac

SEQ ID NO: 353739 - DNA, 83 bp, Homo sapiens
aagagccggggccgtggctgacatggagcaggttaatttggagtggcccctggagtcagtttcctacaccatccgaggcccca

SEQ ID NO: 353740 - DNA, 98 bp, Homo sapiens
gccactgggacggcggcgcggagaaggcaggagtcagagtcagaagcaaaggtagatggagagactgcatcggacagtgagagccgggcagaatccgc

SEQ ID NO: 353741 - DNA, 100 bp, Homo sapiens
ccgggctctttggcagttgcgactccgaacgaaggcggctccgtgcgggccatcccctatctccccgggcggaaaaggtcacggatcgcctacagtgacg

SEQ ID NO: 353742 - DNA, 50 bp, Homo sapiens
gggcatacatctttcttcgacaaaggcaaagagagcaggatgaatggaca

SEQ ID NO: 353743 - DNA, 100 bp, Homo sapiens
atcaacaagaagctgaacacccacaaccggaatgagcctgaatacagacctaagtgtgaaacaggctacctcatcatggaccccaataggtcagactttg

SEQ ID NO: 353744 - DNA, 90 bp, Homo sapiens
aaataaccgccttcgcatggagctggaaaccatcaagaaggtagaagatagcaccatgccgattcgtcgaactgtgaattctacccggga

SEQ ID NO: 353745 - DNA, 83 bp, Homo sapiens
gttaatcctcaatttaagcctgatctaacccctagaaacagatcgccaaactgaggcagcaactacaacgcagtaaacagagt

SEQ ID NO: 353746 - DNA, 89 bp, Homo sapiens
gcggggccaccatgggggcccagctcagcacggtctacgacgttcctccatcggtgagcaaggatgtgcccgatggcccactgctgcgt

SEQ ID NO: 353747 - DNA, 100 bp, Homo sapiens
agcggctctcccagtcagatgaggatgtcattaggctaataggacagcacttgaatggcttagggctcaagtgaggcggaaccaaccctcctggccatgg

SEQ ID NO: 353748 - DNA, 100 bp, Homo sapiens
ccggagcttctcagaagacagagggttttcttttgaggatatggctttagttgcccctgaagctccttcagaacaagccagaagagtttttcaaacctac

SEQ ID NO: 353749 - DNA, 135 bp, Homo sapiens
ttagccccgcccccgtcccactctgccctgttgctgtcgcgccgctgctggttgctgtccctgacccgtccaagaagcagggaccatggctggaggaagaagaagaagcctatggatggatggacttcggccgcc

SEQ ID NO: 353750 - DNA, 83 bp, Homo sapiens
caggagactagacctcgtaattacattctctcggccagcgcctccgcgctctggattaatcgaattacagctgctagccagga

SEQ ID NO: 353751 - DNA, 99 bp, Homo sapiens
gaggagcagcaactgccagccgtggggctcaccaaccaccagctcttcttcgtgggatttgcccagggccccaggccagcccaagatcgaccacctgcg

SEQ ID NO: 353752 - DNA, 90 bp, Homo sapiens
ctccaaggacacacaggatcaattacatctttacagggatgcagtgcaactctcaatatttgaactaagacacaagattacggaactgga

SEQ ID NO: 353753 - DNA, 75 bp, Homo sapiens
aattatttctcttctggatgaagatgaaccacagcttaaggattaaactgcaaatatctcatgaagctgctgcct

SEQ ID NO: 353754 - DNA, 75 bp, Homo sapiens
gacaaatttaagacttcaaaacatgaaaagtgatacttttcaagagatactgcttctaaactaggacccatagaa

SEQ ID NO: 353755 - DNA, 100 bp, Homo sapiens
tcaagtacacggagtacaacgagccgcatgagagccggacaaactcagacatcgtggaggttgtaagttctacaaatggagagttaaacacagatgaccc

SEQ ID NO: 353756 - DNA, 83 bp, Homo sapiens
tgaagcttcatccccatgaactaaataatctcctgtctaaaacctgcctagagctggaacgttacctccagagcgagccctgc

SEQ ID NO: 353757 - DNA, 98 bp, Homo sapiens
cgtggaagccgtatatatagacattgcagatcgaagccaagtgctcagcaagtactacgacatttctgccaaaagtaactacaactttgaaaagccct

SEQ ID NO: 353758 - DNA, 88 bp, Homo sapiens
gcgcacaagatttggagatgatggctgatgacaatatagaagattctacagcaaggaagtgtttggattgtgagctatttcagaactg

SEQ ID NO: 353759 - DNA, 100 bp, Homo sapiens
tttgctccagggcatttgtggactccccaggtgtgtcctggtagacaactgctcccaggagctggcatagaagcaaacctgcaggaaaagccaacccact

SEQ ID NO: 353760 - DNA, 98 bp, Homo sapiens
acctgggtgaactttcacggacaacctcagaggacaacgaagtgttcggagtctccccaggacagtgctatcacccgggatattaaccgaacattccc

SEQ ID NO: 353761 - DNA, 88 bp, Homo sapiens
ggctgagttctatgatcctttaaaagagaaatggattcctattgcaaacatgattaaagctgtgtcagcgtgttatgatgccgtcccg

SEQ ID NO: 353762 - DNA, 98 bp, Homo sapiens
gcaaagcactgtgtggctgaataagcgttcctctgctggtctgggttctaattcggcgcctcccatccctgactcaaggctcggagaagagaacaaag

SEQ ID NO: 353763 - DNA, 59 bp, Homo sapiens
cgacccggagcacccgacccctgagtacctgcacatgttgttctttgtcagtgctgtca

SEQ ID NO: 353764 - DNA, 83 bp, Homo sapiens
cgaggacgaggagtcggaggagccgcgggcggcgcggcccagctcgttccagggtttccaggcctgaggtgcccgccctggcc

SEQ ID NO: 353765 - DNA, 100 bp, Homo sapiens
cggaagtccagcagctgctacacaacaagttcgtggtcatcttgggggactccaactccctgggtgggggccctgagggcccgtgcttctgccccacccc

SEQ ID NO: 353766 - DNA, 80 bp, Homo sapiens
cgtctgcggaagtgcagctgcctcagttcttagcgcaggtacgacaccgagcttctggtcaggtgatggctcttaagatg

SEQ ID NO: 353767 - DNA, 48 bp, Homo sapiens
cctcccaaagcgctgggattacagggcgttttccactgcgccgtggag

SEQ ID NO: 353768 - DNA, 100 bp, Homo sapiens
caaacgtaaatgcaaaggacatggccggccggaagtcttctcccctgcacttcgctgcagaattcaattcgtcataatctgtccctacacagcaagttca

SEQ ID NO: 353769 - DNA, 74 bp, Homo sapiens
cctggtgctgcccctgggcaaggacatgagtgcattggtggctgcccgcatgcggcacatccccttggccccag

SEQ ID NO: 353770 - DNA, 90 bp, Homo sapiens
cggcggctcagttgtccatgaccctgaaggtccaggagtacccgaccctcaagacagaagccctgggggatgcggaggaagatgaggacg

SEQ ID NO: 353771 - DNA, 82 bp, Homo sapiens
gagacttttctcagatgttggatatttgcttggaaaaacgtgtgggtacgaccttgcattttgaaagcgaagcagaagccgt

SEQ ID NO: 353772 - DNA, 96 bp, Homo sapiens
tgagtcgcatcttcaacccccatctagatccgtgctcagctcacagagcagatgaaatgcctggaccagcagtgtgagcttcgggtgcaactgttg

SEQ ID NO: 353773 - DNA, 98 bp, Homo sapiens
atcacactgctaatacgagaaaaggcatgagtacagtaccagaagttatcgttgcacggcactgtggacttcgagtctttggcttctcactcatcact

SEQ ID NO: 353774 - DNA, 82 bp, Homo sapiens
gagcctcagttggaagcagccgatccagcctgcggagcctgtggggcagaggtacttggaaggctccatcgcccctgaagac

SEQ ID NO: 353775 - DNA, 109 bp, Homo sapiens
acgcgagtgggagcaccaggatctcgggctcggaacgagactgcacgggctttgttcgcgggggtcacagctctcatggctgcagctagcgtgaccccccctggctccc

SEQ ID NO: 353776 - DNA, 74 bp, Homo sapiens
gtggctacagtatactcagaagaggcggtacaagcagatgcttgtggttggtggcatcgaccgggtttatgaaa

SEQ ID NO: 353777 - DNA, 76 bp, Homo sapiens
caaacttcagatgcagactacagctctggagtttaggcaacggattatcttacggattctcaaagaccaggtgccc

SEQ ID NO: 353778 - DNA, 100 bp, Homo sapiens
acccagtcctgcagcgccagcagctggactatggcatctatgttatcaaccagaatgtcgaggtcttggcgagcaggagcaacacttcagagcaagacca

SEQ ID NO: 353779 - DNA, 147 bp, Homo sapiens
gaatagccagatctcagaggagcctggctaagcaaaaccctgcagaacggctgcctaatttacagcaaccatgagctcctgcttcaggtgcagaaatacagcgatttccagtgccagctgttgagccagtgccagcaccaggggcag

SEQ ID NO: 353780 - DNA, 75 bp, Homo sapiens
agtggaggcattttggggcagaatacagagatatggaatcagaccaagatcactccatggatgaaatgacagctg

SEQ ID NO: 353781 - DNA, 78 bp, Homo sapiens
aagaagtagagtatttcaaccataaagacatcttaattgggcacgaaagagtgttatagttttgccgctggactcttc

SEQ ID NO: 353782 - DNA, 100 bp, Homo sapiens
gtgcgagagactcacgggacgcgacgcgccccgcctcccccgtccggtccctctctccacggtaagggccaaaattgaccaagaggcagaggaaaattca

SEQ ID NO: 353783 - DNA, 100 bp, Homo sapiens
cacctgacccctcggacatccacgtccataagcaggtatcctgagcatgattatcattcggaccctccggaaggacattgccaactacaacaaggaggat

SEQ ID NO: 353784 - DNA, 75 bp, Homo sapiens
aatgccggtggaggaatttgtggctggctggatctctgctctggatgagggggatattgccttgttgaaaactta

SEQ ID NO: 353785 - DNA, 100 bp, Homo sapiens
gtggtctaaggcgccagactcaaggtgattgaaagaaatagagtcatattggctagaagactttaccttaatgaaaaaggctggaataaatacactaagc

SEQ ID NO: 353786 - DNA, 100 bp, Homo sapiens
ggaaaaggacgcaaagttctccggcgaggtgatcagactctgagaatatgggatgtgaaggcagcaggagtaagaatcgtgattcctgcacatcaggcag

SEQ ID NO: 353787 - DNA, 108 bp, Homo sapiens
ctcctccaccctcttcccttcgcagctgtgaatcctgggaggggaagggtggccgccccgccagcagatctccattacaagctcataatgaatcagacatcacagaag

SEQ ID NO: 353788 - DNA, 75 bp, Homo sapiens
ctgaggctcattttgcagttgttgaaattgtccccgcagttttcaatcatggccctcgggaccaaggatcacgtc

SEQ ID NO: 353789 - DNA, 100 bp, Homo sapiens
gaaggattgtatatgaatactggaactatttgtcctcttccagaattggctctgaacaagaaggaacacagagggtgcgacagcccagaccctgatactt

SEQ ID NO: 353790 - DNA, 74 bp, Homo sapiens
gaacatggatgttagcagagaagagtttctggcccccaaagacaaaccaagtggagacacagcagctgtatttg

SEQ ID NO: 353791 - DNA, 83 bp, Homo sapiens
gtgaaagtggcggtgcggatacgacccatgaaccggcgagcagatcgaggcggagaagaagccgacgagtgccctggatgagc

SEQ ID NO: 353792 - DNA, 95 bp, Homo sapiens
ttcgtttaggttggagtaatagatttttccctctaccttaaggatgtgcaggatcttgatggtggcaaggagttacctgtcctgctgccgattcc

SEQ ID NO: 353793 - DNA, 74 bp, Homo sapiens
atttcatgcaagaagtaggctatggcttttgtgcaaggaaggtggaggatctgcagttccgcgtggaggaggag

SEQ ID NO: 353794 - DNA, 82 bp, Homo sapiens
acatcaatactataatcttaaggacttggtggacatcacaaagcaacctgtgggacattgacaaggtagatgaactgatgac

SEQ ID NO: 353795 - DNA, 100 bp, Homo sapiens
gttccacatcagtgtcatcaggtcggtggcgccgggtctgggggccgcgggacagtcaggttatcaccaatctagtgaaaatgttgaagtccagagacac

SEQ ID NO: 353796 - DNA, 101 bp, Homo sapiens
gttttgaaatcgacacacaaagaatagagttgagcctgtgggacacttcgggtcatcatcagatttgaaatatttaaagtggatacaaaactatttcagca

SEQ ID NO: 353797 - DNA, 100 bp, Homo sapiens
tcccagtctgaattctgtggattttcgtctaaaaataacaagaatgggaggagaaggttatctgatgatggccgctatgtcttgttatcaataagggaag

SEQ ID NO: 353798 - DNA, 136 bp, Homo sapiens
tctacgtcagtgataaaatctccttgaatcgctctctcccagatatccggcacccaaaggcggcgactggcggcgcgatggacctgaccgggctcctgctggacgaagaaggcaccttctccctcgccggcttcca

SEQ ID NO: 353799 - DNA, 98 bp, Homo sapiens
tgggagcctatttgttcatcatttctcgtgttcaaggagaatgcagttgaaactaattttgtggatagagaaactgttggaactgctttacaaagtat

SEQ ID NO: 353800 - DNA, 96 bp, Homo sapiens
atgctgaggccccaggcatcagagatcatgagagctgtcgcctggttgggcccggaaatgggacgtcgcgctttctcagggagcgtagaagcagcc

SEQ ID NO: 353801 - DNA, 82 bp, Homo sapiens
cgtcatcctgctgctgaagatctggaagacgcgctcctgcgccgcgtttgcctcagcatggagggcggggccgcggcagcca

SEQ ID NO: 353802 - DNA, 93 bp, Homo sapiens
gcaactccgccgcccaccatggcttccgaggagctgtacgagggggggccctcagcctcttggccttgaacgggctgttcatcttgattcaca

SEQ ID NO: 353803 - DNA, 74 bp, Homo sapiens
agcgagcgagcggcgcccagcccagcgcctcggccgaacccctccgcagcagacgcaaacatgcagatctttgt

SEQ ID NO: 353804 - DNA, 88 bp, Homo sapiens
gcaccgccgcgcgccacccgctaggatgccggtggccccagcgccctcagccgacggagactctgctaacaccagatagtggaaagaa

SEQ ID NO: 353805 - DNA, 97 bp, Homo sapiens
ctggagaggaaaacccactcaacaagctccgcgtgaagattgaaccaggtgtccaagacacacggagccacggaatctcacaggtgtctgagaattc

SEQ ID NO: 353806 - DNA, 74 bp, Homo sapiens
caaccgccagatcaacctggagctctacgcctcctacgtttacctgtccatgctcgagcagcacctaaaatagc

SEQ ID NO: 353807 - DNA, 75 bp, Homo sapiens
tgctgttgctcttctccgccgcggcactgatccccacagcagccattgtttgatgtcctgtgactgagaaaccag

SEQ ID NO: 353808 - DNA, 98 bp, Homo sapiens
ataaagaacttcttcccaaaatgggtggtgtgacaagaatgactgtctccctggtggttattgtttttgagcttactggaggcttggaatatattgtt

SEQ ID NO: 353809 - DNA, 97 bp, Homo sapiens
gctcaaagaactaatttttgaagagactgctagattccagccaggatacagatcttaaatttgtcaggaaaatgtttcaacgtgcgcaagagttgcg

SEQ ID NO: 353810 - DNA, 80 bp, Homo sapiens
aggcccagatgatatcctactaggcatgttttatgacacagatggtgatgcagctaattgccccagtttggaaaacatgg

SEQ ID NO: 353811 - DNA, 74 bp, Homo sapiens
agcctgcagagcgcgcagtacctccgcaaccatgtccaagggacctgcagttggtattgatcttggcaccacct

SEQ ID NO: 353812 - DNA, 82 bp, Homo sapiens
ccagcgcctcggccgaacccctccgcagcaggtgtgggcaagagcagtttactgttgcgttttgcagacaacactttctcag

SEQ ID NO: 353813 - DNA, 74 bp, Homo sapiens
agtggtgaatcccctgtttgagaaaaggcctaagaattttggcattgaactgccattggatgtccagaatcccc

SEQ ID NO: 353814 - DNA, 80 bp, Homo sapiens
ccgctggcagccgcggatctcaccgccgctcagggaactgtggctgcaccatctgtcttcatcttcccgccatctgatga

SEQ ID NO: 353815 - DNA, 150 bp, Homo sapiens
gcccccgcacccaggccttctcgcgctgcctggtcgctggtgaagcccgcggcgcgcgcctctcccggaccctgcaggatcgtcagtatttaaacagatcacatcatgcgtgagtacaagctagtggtccttggttcaggaggcgttggg

SEQ ID NO: 353816 - DNA, 98 bp, Homo sapiens
catgacaacagccaggaacctccctttccttatcaagaaggatgcacaagatgagctgaggaaactgaaacccagagaagttttgtaataacttgccc

SEQ ID NO: 353817 - DNA, 82 bp, Homo sapiens
gtgcatttcacagcactctgggcgaaaattggatgtgaaaatgaagccagaccgagatgatgattattctccaccgtctaag

SEQ ID NO: 353818 - DNA, 100 bp, Homo sapiens
ctgctatccccaacaagaggaaagacacacctaccaagaagccagtcaagcggccagtgggtcctggccttcgagatcttcatccccctggtgctgttct

SEQ ID NO: 353819 - DNA, 75 bp, Homo sapiens
aatacaagatctaacaggactagatgtttccacagcagaggaattacaggagctctgtctaaacatcattccaac

SEQ ID NO: 353820 - DNA, 75 bp, Homo sapiens
gtgctggccgccatcctgcagctgggcaacatctgcttctcctcctcagaggtattctggatggtgaaatggacc

SEQ ID NO: 353821 - DNA, 75 bp, Homo sapiens
agagcaaatgcagcatttttgataggtgcctatgcacctgatgttcaccaaggtgaagctggagcaggtgctgaa

SEQ ID NO: 353822 - DNA, 106 bp, Homo sapiens
tccagacaccaagggccattgtgaatcccatcctggaagggaaggaaaaatatattcagggggaagagatgtaatagatttcacattatggcagttactaaagaag

SEQ ID NO: 353823 - DNA, 75 bp, Homo sapiens
agggccctcaggccagaggccaaggggtggccgctgccaagcagacacctagctcccctgtttgacaaccctaag

SEQ ID NO: 353824 - DNA, 98 bp, Homo sapiens
ctggaccccaccgtgctgccactctactccctggggccctcagggcagttggcagccaatggagatcttcgtggatgatgagacgaagttgacgctgc

SEQ ID NO: 353825 - DNA, 90 bp, Homo sapiens
aaaatacttaggagaagaatatgtcaaggctgttggtaacctgagaaaatgctccacctcattatccgtaccgtcctgacgttttgaaac

SEQ ID NO: 353826 - DNA, 82 bp, Homo sapiens
aggagatcccgctggtgaccctgccgctggcgagcgccaccgcatggggctgaaatctctttaatgatggagggaagcaggc

SEQ ID NO: 353827 - DNA, 75 bp, Homo sapiens
ctacgtggagatgaaatgggagttcactagctgggccaaaacagagtggagtacgagaaaagggtccgagcacaa

SEQ ID NO: 353828 - DNA, 74 bp, Homo sapiens
ctcttccaagtggagtacgcgcaggaggccgtcaagaagggctcgaccgcgcctgggttactaggtgtctttca

SEQ ID NO: 353829 - DNA, 90 bp, Homo sapiens
ggaagactcgatccgcctgcctgcgcacctgcgtgacaaacagcatgtttggtgcttcaagaaagaagtttgtagagggggtcgacagtg

SEQ ID NO: 353830 - DNA, 60 bp, Homo sapiens
aaagatttggtttgaatgtctcttcaatctccagaaagttctgcaggctggaaatccaag

SEQ ID NO: 353831 - DNA, 87 bp, Homo sapiens
ttaccctaaatccctgttatccagactcattgggactgctctagatcttcactatccaatacgcaatggctgccatccggaagaaac

SEQ ID NO: 353832 - DNA, 75 bp, Homo sapiens
gaagtgagtcaggagctgtatgaccttaacgtggagctctccaaggaccttaaaggctttgatccaggagagaaa

SEQ ID NO: 353833 - DNA, 100 bp, Homo sapiens
ttaattctacccagcaaaatgaaactgagcctaatcagcacttttagtttggatgctgaacagcctgattatgatttggattctgaagatgaagtatttg

SEQ ID NO: 353834 - DNA, 74 bp, Homo sapiens
aattactgatgggagcaagttgactaccaccagtggagtccaggatgagacacctgaaagaccccgccgtggca

SEQ ID NO: 353835 - DNA, 90 bp, Homo sapiens
agctccaggagttcgtctcttacgtctgcggaagtgcagctgcctcagttcttagcgcaggaagaggagcaggacttggatggtgagaag

SEQ ID NO: 353836 - DNA, 74 bp, Homo sapiens
aagtcacaattacactgccacatatccctaccacctcctccaccctgaagggtgccatccagctgggcatcggc

SEQ ID NO: 353837 - DNA, 87 bp, Homo sapiens
ttcttaaaggcgcccgagtgtaggcgacaggccgctgacggccggaaggaaaatgatcaggagaacctcagtctgacgacattgaag

SEQ ID NO: 353838 - DNA, 82 bp, Homo sapiens
tgaaaatcaacgacaacttgagcacagtgcctacaccaactaatgttacaattgaatcctataacatgaaccctatcgtata

SEQ ID NO: 353839 - DNA, 98 bp, Homo sapiens
caggagcaacacgtgatgtgtctacttatcaggggcagccattctacaaaagtggaagctgtggtcagaactctgatgaaaatacagcttagagatcc

SEQ ID NO: 353840 - DNA, 83 bp, Homo sapiens
caaggcgaggccccgggggcgggccggggtcaccacgcctgccccagggaaccgcacagggcgccctgcgtccggcagaggag

SEQ ID NO: 353841 - DNA, 100 bp, Homo sapiens
cctttcatccctatgtggaaaacggcggcaaagaagtttgtttctggccagaagtcaatggcagcaagtggaaatttgggacatacaccttttgttgatg

SEQ ID NO: 353842 - DNA, 75 bp, Homo sapiens
acttgctgcatgccagcaccatgtggtttcctagaaacatgattgtttattggcattgatctcacagtctggtga

SEQ ID NO: 353843 - DNA, 80 bp, Homo sapiens
gtgttaagagaagaaatgaggacatatcagtatcgctcgtcgtcaaggtgcacatgaatgataacagcacaaagtcactg

SEQ ID NO: 353844 - DNA, 90 bp, Homo sapiens
cggagatgcagctcaaggggaagaaaggtggcaagtgcaggcagctgtcccggttatgccggaatcgttgcaggtgagtccatcagaaac

SEQ ID NO: 353845 - DNA, 100 bp, Homo sapiens
tggcagccctggtcctggcccaggctcctgcagctttagcagatgttctggaaggagacagctcaggatgatctgtctgctgtgcgtccggaccgcgtcc

SEQ ID NO: 353846 - DNA, 89 bp, Homo sapiens
caactcagaatgcattgccattttcacatagataacgaaggaggcccaacttcattcaataaggagcctgacggatttatcccagacgg

SEQ ID NO: 353847 - DNA, 50 bp, Homo sapiens
tgaagagggaagacacgcggaaacaggaggaattttgttgtcagagaata

SEQ ID NO: 353848 - DNA, 85 bp, Homo sapiens
agagagatgtactccaaagagaagaggactcttgctatggttcagcgccaaatcttaaaggcagaccacgcaaaaagaaaccatg

SEQ ID NO: 353849 - DNA, 51 bp, Homo sapiens
aaatgctcctttaatttttgaacgaggtcaggttgccaaaaaggaagatct

SEQ ID NO: 353850 - DNA, 83 bp, Homo sapiens
ccacgccgagctggccgcgccgaccaccatcccggtcaccacgagagcagccatcagcagggaccctttctacgaaatgctcg

SEQ ID NO: 353851 - DNA, 100 bp, Homo sapiens
atcgcctaacttctactgacgaagcttggaagttgcagaaggatcaagtcttccataccagggaccaggccaaaaccagactgccactgcccctacttgg

SEQ ID NO: 353852 - DNA, 83 bp, Homo sapiens
cggcctggtctacgtgctgaaccacgctgaggggctgggagccgcgcacaccaccatcacatatgttgtcacagaattgatgc

SEQ ID NO: 353853 - DNA, 101 bp, Homo sapiens
attcaattgaatccctaagattatttaaaaatgatcctttgttcttcaaacctgcctacgctcactccccaacccatcccaacattgacatgctatctgtg

SEQ ID NO: 353854 - DNA, 50 bp, Homo sapiens
gagagataaagccgagcactgaaataggaaggttgttgattactcacagt

SEQ ID NO: 353855 - DNA, 100 bp, Homo sapiens
tggtcacccttctcttaagacacatcattgaggacccctgtacccttcgtcataccatggaaaaggtgttacagaacatcctggacactgaaaaagaata

SEQ ID NO: 353856 - DNA, 100 bp, Homo sapiens
cctgctgatgctagggcttttgatagaggtatccgaagagctatagaggatatttctcaagtgtacatatgaagattgaagaaaagataacattaacctg

SEQ ID NO: 353857 - DNA, 90 bp, Homo sapiens
gtcttcccgcgtccgccgattcctcctccttggtcgccgcgtccttggctggcgtaaggggaaactgaggcccaaggaaattgagtatct

SEQ ID NO: 353858 - DNA, 75 bp, Homo sapiens
cttgtctccggaaggactctctcagaatgttcctcaaatgctttgatgaccatgacccagctgtgatccatgaga

SEQ ID NO: 353859 - DNA, 90 bp, Homo sapiens
gctgggcctgtgtgcctggaaaggaattgttttggcctaggatcatccagagtacaggggctcaggtccaggtggcaggggatatgctac

SEQ ID NO: 353860 - DNA, 98 bp, Homo sapiens
aagcagttcagaagagccaaggaataaacatgcaatgaacccaaaaggctgtttcagatagagagccttgcccgggaggcctccactggagtactaaa

SEQ ID NO: 353861 - DNA, 83 bp, Homo sapiens
gcagtttgtcgaacgatgttggactcatagtcactgccagaaaggctcctgctccagcccagcccccagagagcagaccccag

SEQ ID NO: 353862 - DNA, 50 bp, Homo sapiens
cggaccgtgagcatcagcgagccctggccaacgtcaacattgggagcctc

SEQ ID NO: 353863 - DNA, 75 bp, Homo sapiens
ccagcagcttgtgatgatgccaaacaagctctggaatcaacctcttctccaagggccctggtttcttttactgga

SEQ ID NO: 353864 - DNA, 75 bp, Homo sapiens
cttatttatccagaagattgatcatcatatgggttggctcaaaatctccttcgccaagaccaaacatgcctgttc

SEQ ID NO: 353865 - DNA, 74 bp, Homo sapiens
gctggtgccacagcccaaaccatcatttaccctatggagtcgtcattgaattttgagaagcattctgaaaactt

SEQ ID NO: 353866 - DNA, 54 bp, Homo sapiens
gatctgtttccctgatcgcgaagtaaaccttgtcctgccaagaagttactgatg

SEQ ID NO: 353867 - DNA, 75 bp, Homo sapiens
cggagactgcgggcccgtagctgggctctgcgagcatgtgatccgagggaaccgccccatcaaaactgagatggc

SEQ ID NO: 353868 - DNA, 50 bp, Homo sapiens
ctccaacagcaaatattttttcccaggtacaaacacaagtgcgccttgca

SEQ ID NO: 353869 - DNA, 97 bp, Homo sapiens
gccaccccacaaaactgctcaccacatggccaaacaggtatggctctgtgggggcagcatggaggtccttccttgctcacgggtggcccacattgag

SEQ ID NO: 353870 - DNA, 96 bp, Homo sapiens
cggcggcgggaacgattgggctgagcagaggacgacatgttgcttttcgtggagcacctgttccgcgagcctgagaagaggccccccaccgtggtg

SEQ ID NO: 353871 - DNA, 74 bp, Homo sapiens
agtgaccggaggcggcggcggcgagcggttccttgtgggctagaccaagatcactccatggatgaaatgacagc

SEQ ID NO: 353872 - DNA, 100 bp, Homo sapiens
ttctgccgcaccaggctcatcctgtccatcgtgtgcctgatgatcacgcagctggctggcttcagtggaccagccttcctggatgctctgcagaaccagg

SEQ ID NO: 353873 - DNA, 80 bp, Homo sapiens
tcggtgacctcaccgcctcggttcgccctcagccgccccgtaaagatgacggcgccttgaggtaagctacaggcaacacc

SEQ ID NO: 353874 - DNA, 101 bp, Homo sapiens
aagaagttgctcaagtacatgaagcacaccgtggtagtatactgcggcctcccagccaacatccagctggacattgatggggaccgtgagacggagcgtat

SEQ ID NO: 353875 - DNA, 95 bp, Homo sapiens
ttcaagaccgtatgctatgtgatatagctctttggtccacttacggtgcaatgattccaacacagctggtgaggacgcttgagcggaagttagaa

SEQ ID NO: 353876 - DNA, 50 bp, Homo sapiens
cttttggaatctgaacaagggggggcagctggcattttatgctatgtggg

SEQ ID NO: 353877 - DNA, 100 bp, Homo sapiens
gccggcgccgcgcccatagccggacggggatctgagctggcaggaggatagtgaatgatacctacagaacggatctttgcctactgtatcctcctttcat

SEQ ID NO: 353878 - DNA, 82 bp, Homo sapiens
cggtgacccgctaccggaaggccatcgccaagggcgtctctggccgagcctctttttgtggaaaacgacagcagcagcagtg

SEQ ID NO: 353879 - DNA, 50 bp, Homo sapiens
caccgccctggccatctaccatgtggcttcaacggaccacaccaaaatgc

SEQ ID NO: 353880 - DNA, 75 bp, Homo sapiens
tcatctactccttcgtcttctggatgatgtgatgccagccacttactgtgaaattgatttagataaagaaaagag

SEQ ID NO: 353881 - DNA, 100 bp, Homo sapiens
cacacccaccccacagtgcccggctcggctgcgacacgatgaggcgagtggtacgacagagcaagtttcggcatgtatttgggcaagcggtgaaaaatga

SEQ ID NO: 353882 - DNA, 82 bp, Homo sapiens
tccgccagagctgcggccgccaaggtggatccataaagaacccagccaacccgcagagggaggggaggggctgagctgtgag

SEQ ID NO: 353883 - DNA, 75 bp, Homo sapiens
ccgagatcgagctctttgtgaagggtttgaaagtattcttgaagggctgtttggacctgcattattaaaagatct

SEQ ID NO: 353884 - DNA, 100 bp, Homo sapiens
gggccgagatgtctcgctccgtggccttagctgtgctcgcgctactctctctttctggcctggaggctatccagcctgaactttgacctggaccggggcg

SEQ ID NO: 353885 - DNA, 112 bp, Homo sapiens
ttaatttggtacctcatgtggacaacattgagacagccaacagttttgctgtaacaaacgcctacaagttggatggcttgaggactggtactaaaaggaaacgtgactggga

SEQ ID NO: 353886 - DNA, 100 bp, Homo sapiens
ggaatgaagacaccacagctgggttccgagtctgaggaagacataaccttgtgcctgcctgcccacctctctctctggtcctgttcatctctcaggctct

SEQ ID NO: 353887 - DNA, 100 bp, Homo sapiens
gcgactgcagcaactgcagatggagaaggagaggctgcggctgaaacagcaagaactgcttcggcagcacacgacggttctgccctttatattaatcgag

SEQ ID NO: 353888 - DNA, 98 bp, Homo sapiens
agagatagatttaaagaatgaaccttggtataaattcttttcggaattggagtttgggaaaccgtttgagttcatgatcgagtccatcctgtatgccc

SEQ ID NO: 353889 - DNA, 103 bp, Homo sapiens
ttcggttcgggtgcgctgctcaaggacacggtctacaccgacttcgacgattttgcaagaacgaggctcaaggatgtgagggacacagtattgacagctgaag

SEQ ID NO: 353890 - DNA, 100 bp, Homo sapiens
cgacactcactgacaacatcaaaaagacactgcacaagttctgtggcccctcccctgtggtcttcagatatgggagtcctccacaaagagatccaaactg

SEQ ID NO: 353891 - DNA, 100 bp, Homo sapiens
ctgatggccatggagaagagcaaggccacgccggccgcgcgcgccagcaagaagatcctgctgcccgagcccagttgcatccttaatgtccagtcaagga

SEQ ID NO: 353892 - DNA, 82 bp, Homo sapiens
atttcaggaaaacagagaaagaagtgataggagggctctgtagggtttccaggcctgaggtgcccgccctggccccaggaga

SEQ ID NO: 353893 - DNA, 83 bp, Homo sapiens
gacaggattcgttggctgccgtccccgctgctgtgcattggaacatgaaaggctcccggagcagcgctgactcctccaggaaa

SEQ ID NO: 353894 - DNA, 100 bp, Homo sapiens
ttcacccatctgtacatcctatgtcaactgcttctcaggtagcaagtacatggggagtctgcagatctccaggggagcccaccagcctagtcaacatggc

SEQ ID NO: 353895 - DNA, 95 bp, Homo sapiens
gcatttaaccagcatggctacttcatattttggaaagcagtttttaagacaactctgtcttcccaggattctccccatttccaagagaagagcac

SEQ ID NO: 353896 - DNA, 51 bp, Homo sapiens
caaggatgaagaacggagacggcgacattgactacagcaccgtgctcctcg

SEQ ID NO: 353897 - DNA, 74 bp, Homo sapiens
caaggcaggcagtattgggtgcagacttccaccgctgtcagaaggcaatgaccgctaaaggaggcgatatctct

SEQ ID NO: 353898 - DNA, 83 bp, Homo sapiens
cctggctcttgccctcatcctggttctggaatcctcagttcaagtaatctatgccagcaattatgacaatgttagcagaccat

SEQ ID NO: 353899 - DNA, 83 bp, Homo sapiens
ctgccctcttggccgaagtgcccgctgccgggcgcgggcctcagcctaatcacacggatgctacagagagatcccaagagaag

SEQ ID NO: 353900 - DNA, 97 bp, Homo sapiens
aagccagaccggtcctcgtttgtaccgtccctcttcaggtccaccatggagcccttgtgtccactcctgctggtgggttttagcttgccgctcgcca

SEQ ID NO: 353901 - DNA, 76 bp, Homo sapiens
gcgagaaggctggcgttagtgaagcgcgcccggcgtcacgggtcatctttctgaaggattggttactaaatggtac

SEQ ID NO: 353902 - DNA, 75 bp, Homo sapiens
gtcacccggacccagccacacactcattgctatggacagtgctatcaccctgtggcagttccttcttcagctcct

SEQ ID NO: 353903 - DNA, 75 bp, Homo sapiens
agaacaccccgagcgaggccaaccttcaggaggaggagatcatggaagggaagtggttgctgtgtatgttactgg

SEQ ID NO: 353904 - DNA, 90 bp, Homo sapiens
gtggcctctagtgagatctggagtttccctgaaacctgggctcttgaagacgcatcactggagcagatggataatggagactggggctat

SEQ ID NO: 353905 - DNA, 50 bp, Homo sapiens
agcaggccctcatgcttcaacaggtattgttcaggaagatgattatgaaa

SEQ ID NO: 353906 - DNA, 82 bp, Homo sapiens
ggcgaagcccaagcccctgtcccctacgtcctacatgagcccaccttgggacaccttgactccaagcccagcagtaagtcca

SEQ ID NO: 353907 - DNA, 75 bp, Homo sapiens
ggcgagaaggcggcgcgcgaggtcaagctgctgctgctcggcagaaaatgtgctagattggaggtgaagaccctg

SEQ ID NO: 353908 - DNA, 83 bp, Homo sapiens
tgaaaagtcataaatacagaaatccgagcaaagagtggaacagaaaacctcggatcaattctcagctggtggcacaacaagtg

SEQ ID NO: 353909 - DNA, 52 bp, Homo sapiens
ccagaagatgcttgtggtcctgctccaggcgctgggccccctgccccgtgag

SEQ ID NO: 353910 - DNA, 100 bp, Homo sapiens
agttcttacaacatggcagacattgacaagctttgaagacaagattcccaaaaggagattctctgagatgcaaaatgaaagacgagaacaggcacagcgg

SEQ ID NO: 353911 - DNA, 51 bp, Homo sapiens
gagtgttacgctgacttgtgaagtgacagtcaccaggagactaaagtccat

SEQ ID NO: 353912 - DNA, 82 bp, Homo sapiens
ccgagacctggagcagccaccgccgcaatcatgatttccatggtgtcagtgattcatattcctgataggacttataaactat

SEQ ID NO: 353913 - DNA, 92 bp, Homo sapiens
caaatcaagcctagtgcttcgttttgtgaaaggccaatttcatgaatttcaagagagtaccattgggggatgccaaccctgtggtaattgag

SEQ ID NO: 353914 - DNA, 100 bp, Homo sapiens
cgagctgagtggttgtgtggtcgcgtctcggaaaccggtagcgcttgcagcatgcttcagtatcagacacagcacagcagccatctgaagagcaaagcaa

SEQ ID NO: 353915 - DNA, 83 bp, Homo sapiens
atcaaccctgcaggaagcttctcctgacccatgaccttcaggctggattttgagaagagggggaaaaaggaagtttgtcctgt

SEQ ID NO: 353916 - DNA, 100 bp, Homo sapiens
acgggccgcttctcgcgggccggggccacgctcagcgccgagggcgagatcgtgcaggtgaaaagccatacaagtgtacctgggaaggctgcgactggag

SEQ ID NO: 353917 - DNA, 75 bp, Homo sapiens
gccggaaccaggatcgaccccagctgaccaagaagttctgtgaggccagacacaactcaaggctcagaacagcag

SEQ ID NO: 353918 - DNA, 98 bp, Homo sapiens
ctgctgaaaacagcctcaagaaaccagtaacagattgtgttatttcagaaatttgtacatagattctaggcaaaatctccctccttcagtgatgccac

SEQ ID NO: 353919 - DNA, 100 bp, Homo sapiens
tatattttcaaaatctatgaatgaaagcatgaaaaatcaaaaggagttcatgcttatgaatgctcgacttcaggaggagattgtatttcgttactaccac

SEQ ID NO: 353920 - DNA, 111 bp, Homo sapiens
caactagcagcgaaaacattaaacaaattgggagtaccattctggctgagcagtggaacttgtctaggtgtcactctgcaaacctgaatggtgtatactacagcggcccct

SEQ ID NO: 353921 - DNA, 100 bp, Homo sapiens
cagtattgggaaatctgtgaaaggtccagcccagaatcaaatgcaggttccatctggatatggattgcatcatcaaaactatattgctccctcaggacat

SEQ ID NO: 353922 - DNA, 100 bp, Homo sapiens
catggagtccagatgacaactatcttgttgcttgtggcccagatgactgctctgagctttggctttggaatgtacaactatatatctgtgaagaaaatag

SEQ ID NO: 353923 - DNA, 75 bp, Homo sapiens
ctgggagaatatttaatggaaaatcgcttggttaaaacctgacacttttaacagacagctttattaaaccgcctg

SEQ ID NO: 353924 - DNA, 82 bp, Homo sapiens
ggcggcggcgcgcggacccaggcgcggatggcgaggccagcaggttttataggatcacattgacaaaagtaccatggagttt

SEQ ID NO: 353925 - DNA, 101 bp, Homo sapiens
attcgcagtggtcgcttcttctccttggattccccagctttccgttgcacaaacagtgaagtgacagtccagcccagcccctatttgagttaccggctacc

SEQ ID NO: 353926 - DNA, 90 bp, Homo sapiens
ctggggggagacgggacgctgctgtacgcttcctcgcttttccaggacatgatgagctacattgggcccaagaggacagcagtggtgcgg

SEQ ID NO: 353927 - DNA, 83 bp, Homo sapiens
ctgtgttcagattcacttccttctcatccttttccaccagctaaagcacaagcagcaggagacccagaatatctagagcagcc

SEQ ID NO: 353928 - DNA, 76 bp, Homo sapiens
accgcaccttcagtcttttccagcagctcattcagagattacaggaatgaagaactgttgcctaattggaaagtgc

SEQ ID NO: 353929 - DNA, 75 bp, Homo sapiens
ctgccagaatggaagcatacagatctgggaccgaaatttgactctaaaagaagtcttcaggaaacagctagagaa

SEQ ID NO: 353930 - DNA, 100 bp, Homo sapiens
tgaagccagaatgccagacagcgcagacactattccatctcgcattttagttttaatgaaaatctctgctttcagtgaaaggttacaatgacaagcagcc

SEQ ID NO: 353931 - DNA, 73 bp, Homo sapiens
cacaggtccagggcagaggaccaacatgggcattttgtttatgagcaagaagacagcgacagctgtggcgcac

SEQ ID NO: 353932 - DNA, 101 bp, Homo sapiens
tacagtgttctcgacttcgtcgctgggttctcatgtatcagccatcttctgtaagggtgcccagtgtgacttcggttgatcctgctgctattccgccttca

SEQ ID NO: 353933 - DNA, 99 bp, Homo sapiens
cacagaagacctgaagatatatgttcctgacactatctgcaacaggaggaaggatgctggtttcttatcatacaaagatcacctgccagtgagccaagt

SEQ ID NO: 353934 - DNA, 127 bp, Homo sapiens
cggaagacttatgaacgccttgttgcccagttccccagttctggcagattctggaaactgtacattgaagcagagatatgattctataacagactcttccagaaatgatatgaagaggaaatttgcc

SEQ ID NO: 353935 - DNA, 73 bp, Homo sapiens
acaaatgaagatgtttccagccctgcctcggcggaccaaagggcattgcttcaccggcagctacccggtcatt

SEQ ID NO: 353936 - DNA, 90 bp, Homo sapiens
cagcgtccgactcgactcggagggtttctgtgagagacaaattgcttgttaaagatgaacgacaatctccttgagagctggagcgacctc

SEQ ID NO: 353937 - DNA, 90 bp, Homo sapiens
acaaagttgttattggatttgttcccttagcagaaattatggtgccttggaatttgtgtcgctgagtcagcaagcctttcagatttgccc

SEQ ID NO: 353938 - DNA, 74 bp, Homo sapiens
tatatctcaaaccacttctcagacaagttccatcccacctttgagtcagattgtcctgggtcacataatgccag

SEQ ID NO: 353939 - DNA, 98 bp, Homo sapiens
cagaatcacagctggtgttaacgagagaacatcatgggaatgctatgcagccatctgtcaaggataacagtggtagccatggctctcctatcagtgga

SEQ ID NO: 353940 - DNA, 50 bp, Homo sapiens
aacatggatttcagagaacccacagaagaaaatgtggtgacctggaagaa

SEQ ID NO: 353941 - DNA, 87 bp, Homo sapiens
tggctcacaagatgaaagagcacgttgaattgaccaaagcaatggtgatggagaagcctagtcccctgctggtcgggcgggaatttg

SEQ ID NO: 353942 - DNA, 82 bp, Homo sapiens
ctttgatcccgcggtcccttcctgtaccttgtcctcagatggcccactgcgtgaccttggttcagctgtccatttcctgtga

SEQ ID NO: 353943 - DNA, 90 bp, Homo sapiens
agcatcaaaattcccagcaacagatacaatgagcacttggctgctgttgaggaaaggaagatcaaatctttggtggccctgctggtggag

SEQ ID NO: 353944 - DNA, 101 bp, Homo sapiens
cctccgcccccggccccggccccacggcgggatgcgggacaacaccagccccatcagcgtgattctgccccacagccaagctcttcaggatgttgaaaagg

SEQ ID NO: 353945 - DNA, 101 bp, Homo sapiens
caggcgctgcccagccccttgtcagccagggctgaacccccgcaggcagaggtggaggagacactgaagcgactgcagagccagaagggagtgcagggaat

SEQ ID NO: 353946 - DNA, 50 bp, Homo sapiens
ggatggtcttgaaacacaaatggtttttgctttactgtctttcacaagcg

SEQ ID NO: 353947 - DNA, 75 bp, Homo sapiens
ccgctgcttcctcctcatcttccgcctctggcagaatgcactgcttgaaaaggagtggtatgaggagcatgccag

SEQ ID NO: 353948 - DNA, 100 bp, Homo sapiens
aggcagcttcccacagcaggttggacagttcacagatctgactgcagccatgagcagcaatgagtgcttcaagtgtggacgatctggccactgggcccgg

SEQ ID NO: 353949 - DNA, 90 bp, Homo sapiens
gtctggtggctccgcggattataacaggtgtctgatgatttgtgagcctcaagtgactactctgtggaatcatctgtccttgcctttgaa

SEQ ID NO: 353950 - DNA, 98 bp, Homo sapiens
ttaccgagatgcggttttcctcgcagaacgcctttatgcagaaggactgatcctgtgcgtcccttcatcagtgggcatgtggcaaacagcatggctgc

SEQ ID NO: 353951 - DNA, 75 bp, Homo sapiens
ggcgggacggctgccggcctgtgtggtggactgtggcacggggaggaaaaggcttctcttttacatcgtactcag

SEQ ID NO: 353952 - DNA, 90 bp, Homo sapiens
cgcgaggctgtgaagctgcttcgccggtgcttggcggacagaagaggcctcatgcattgtgcgtcagcagcaatgtttatggtgaaaaat

SEQ ID NO: 353953 - DNA, 142 bp, Homo sapiens
ctgcctgggccatgccgaaaaaaggagattgtgacatatcactgcattcaatacctagatgatcatccgcacttccactaatagccaagtagacaagctgaccctgtcagggagtgacagcgtcatccttggtgatacaact

SEQ ID NO: 353954 - DNA, 50 bp, Homo sapiens
gaagcagcgggggggcaggcgatcgaagggcaagttaaagtcttcagagc

SEQ ID NO: 353955 - DNA, 101 bp, Homo sapiens
ggcggccagagcggggccgcggaggcgacgccggggacgcccgcgcgacgagcaggtggcggcggctgcagagccagccccagtgcctgctgagccgtttg

SEQ ID NO: 353956 - DNA, 75 bp, Homo sapiens
gacagaagcagatggattcgtccttttaggactctggactgtcttcacactaggtggtgtgggcagcaaagcggc

SEQ ID NO: 353957 - DNA, 100 bp, Homo sapiens
aaggcgaaactactttgataaatctaagtgttatgaatgtgggcggagtttaagagagctgtgaaagtagcaacaggacaagaactctcaaacaatattt

SEQ ID NO: 353958 - DNA, 91 bp, Homo sapiens
cttcggcagtccacccaccgccgccgcctcccaggccacagttgtaagggatcttgtggctgtcaggatggcagaggagcaggagttcacc

SEQ ID NO: 353959 - DNA, 90 bp, Homo sapiens
ctgggaccttctccctgcctggacccctactattgcaacaagggtgaggtggctttgaccccgggttgcccggccagcacgaccgaggag

SEQ ID NO: 353960 - DNA, 114 bp, Homo sapiens
gacctctggttctacttcacactgcagaactgggttctggactttgggcgtcccattgccatgggtgtgggccgaagatatgctcatgtggtgttgaggaaagcagacattgac

SEQ ID NO: 353961 - DNA, 83 bp, Homo sapiens
ggtggatcagcgcctacccgagtgtgcgaagctagccaagcctcccctggtgaagacacaaactgtcaccatctcagataatg

SEQ ID NO: 353962 - DNA, 83 bp, Homo sapiens
ccgatccagcctgcggagcctgtggggcagttggttaccacagagaagcgcttcctcaaagacagtttgtacaatgaaggaat

SEQ ID NO: 353963 - DNA, 100 bp, Homo sapiens
ggcggctcagaagataaacgaggggctggaacacctcgccaaagcagagaaatagtgtcgtgaaaactacccctaaaagccaaaatgggaaaggaaaaga

SEQ ID NO: 353964 - DNA, 98 bp, Homo sapiens
actgggcaggctttgaggtgcttgtcggtctggactgatgaaaatccatatgaacccagtgacttgattgtaaaaatttacagagcggaatcatatgc

SEQ ID NO: 353965 - DNA, 112 bp, Homo sapiens
gctggatctaccatgaaagacttgtgaatccaggaagagagactgactgggcaacatgttattcaggactggacctcactgtgggaacaacaagatcaacaagaggagcaag

SEQ ID NO: 353966 - DNA, 83 bp, Homo sapiens
tatgaatttatacaaggagaagcactggatccaaagcatgtctgcaacccagccattttcagcaattctgtggtgttcttggt

SEQ ID NO: 353967 - DNA, 74 bp, Homo sapiens
cggattccttatgcagagtggccgacttgacctgaaggaaaagattatgcccttcattggctagtgctggggac

SEQ ID NO: 353968 - DNA, 51 bp, Homo sapiens
cgaagttcaggaagagtgacactttgaaatactcgtgggatatgaagtgga

SEQ ID NO: 353969 - DNA, 83 bp, Homo sapiens
ccaggatagctgttgtttcagagaaaggttggatggcaagcatgtggtgtttggcaaagtgaaagaaggcatgaatattgtgg

SEQ ID NO: 353970 - DNA, 74 bp, Homo sapiens
attataggcgtgatgatagagggagaaaactggttgtcctggatgtttgaaaagttggtcgttgtcatggtgtg

SEQ ID NO: 353971 - DNA, 75 bp, Homo sapiens
ggcatatgtatgtgtttggagacttcaaagatgtattgttaaatggaagctgatcggcgttcacatggaatcctc

SEQ ID NO: 353972 - DNA, 60 bp, Homo sapiens
gggcgaaaattggatgtgaaaatgaagccagaccgagcaccagcagaaccaaaatcgtgt

SEQ ID NO: 353973 - DNA, 74 bp, Homo sapiens
acagtgtctcccaccagagcacggaacatgaaggactttgaaaatggtcatgtaggtacaacagcaaccaagaa

SEQ ID NO: 353974 - DNA, 100 bp, Homo sapiens
gctcacctgtgcgggatggaacaaaagcttcctgcctgacacagctcacttcaagaagtgcacaatgtcagaacgtggaattaagtgggcttgtgaatat

SEQ ID NO: 353975 - DNA, 98 bp, Homo sapiens
ctgcaaccaagcacctgaaacagcagatgaatgagaacagccacatcatcctgtgtggtcaaatttctcagtacaacaaagatgtgccttatcctccc

SEQ ID NO: 353976 - DNA, 90 bp, Homo sapiens
aggggccctgaaaggagtcacttccagtcctcctcagagatgaagactcttaagatgacagaaggtgatttttctggtgatcgaggactt

SEQ ID NO: 353977 - DNA, 100 bp, Homo sapiens
cacccgctgagcgtcagaaatgggatgtcgtgatctcaacagcttgtcacccaacagaaaacatcatcgcctctgctgcgctagaaaatgacaaaacaat

SEQ ID NO: 353978 - DNA, 90 bp, Homo sapiens
ctgttgttcccggagatgcggcgcgcaggctcttgcagccaatgccggaacaggatttgctgttgctgagcctcaaatcgcaatgttttg

SEQ ID NO: 353979 - DNA, 75 bp, Homo sapiens
gagttccccacctgcgattgcgtcggtgatggcttggacaacagtgtagcttcccccagcacaggtgacgatgat

SEQ ID NO: 353980 - DNA, 82 bp, Homo sapiens
ccctaatggaggtctccagtttcggtccattttagcttcctatctcctgaaggaaaagctcaacatcttgggcaagttgggg

SEQ ID NO: 353981 - DNA, 100 bp, Homo sapiens
ccgagccaggcggggacaggacggcggggcgagccaggatggggagggacgcgcggcactgccctcgagaactggcgctccggtgaagtaggcgccgccg

SEQ ID NO: 353982 - DNA, 90 bp, Homo sapiens
cggggcggtcggctgcggtggcggcgtttggatgattgtctctcggcggcggagtcggaatctttgtctgaagtggaagaaaaatacaag

SEQ ID NO: 353983 - DNA, 50 bp, Homo sapiens
gcgaagtctactcaacgtttccaagggcaagaatatcacggcatgggcat

SEQ ID NO: 353984 - DNA, 75 bp, Homo sapiens
tcatcacccggctgctggagggccaaccaagccctcgagcagttattcccatgtcctgtataaccaatggaagtg

SEQ ID NO: 353985 - DNA, 96 bp, Homo sapiens
ccgctgccgtgcacggcgggactggagcaagtcgctcacctgaaatgagaggtctcagcatgaaacagcagcagtggtgtgggatgactgccaaaa

SEQ ID NO: 353986 - DNA, 100 bp, Homo sapiens
aacttcctcttcagtcatcagtcaacgcacctcttgctttttcctccaaagtatgttatgttaagtttcgtgatccatcaagtgttggcgtggcccagca

SEQ ID NO: 353987 - DNA, 90 bp, Homo sapiens
ctggtggtgggccgcgctgcacggccaggagggctacgtgccgcggaactacttcggggccctgagaatcgtcctgcacagcctggacct

SEQ ID NO: 353988 - DNA, 83 bp, Homo sapiens
agccgccggcgtcgccgccatggacctagacaatgcagatcttcgtgaagactctgactggtaagaccatcaccctcgaggtt

SEQ ID NO: 353989 - DNA, 59 bp, Homo sapiens
gccagacctgacgaagagccttttgtgaagctggcaggtttcatctacgcctgttatgt

SEQ ID NO: 353990 - DNA, 75 bp, Homo sapiens
tgatgtggatgatgccaaagttttattagagcaaatttttcagaacataaaacaagaatatagtcgttatcagag

SEQ ID NO: 353991 - DNA, 75 bp, Homo sapiens
gtcttgatattctacgatcacagtggtctccagcactaactatttcaaaaggtgatttgatgaaggctgctgcag

SEQ ID NO: 353992 - DNA, 102 bp, Homo sapiens
cggaaggagaagatgtgccgccgctgccaacgtcgagcggcgacggctggatttttagactctgaggagcagttggagctaatccacattatggaaatggaa

SEQ ID NO: 353993 - DNA, 83 bp, Homo sapiens
ggagaatccgtccatgggaaaccttcggtggtgtacagatttttcacaagacttggacaggcatgtctgactcagggaatgac

SEQ ID NO: 353994 - DNA, 100 bp, Homo sapiens
gcaaggcatgacacaagaatcctttggtggtgttcccactgatgaagagcaggcgactgggttggagagggagatcatgctggctgcaaagaagggactg

SEQ ID NO: 353995 - DNA, 98 bp, Homo sapiens
ttggtgaaggcgttccagtatgtagaaacacatggagaagtctgcccagcgaactggacaccggattctcctacggccctgtctctgcccctggtggt

SEQ ID NO: 353996 - DNA, 83 bp, Homo sapiens
ggtcaacgtcaagcgggagtatgaccacatgaatggatccagcagcccctgtcaaagggaacaggaagcagtccacggagggt

SEQ ID NO: 353997 - DNA, 75 bp, Homo sapiens
cgggctgcgggcaggtggcggcgcggcgcgggctggcggtggctccacgatgtccaacatcacagtcacatacag

SEQ ID NO: 353998 - DNA, 83 bp, Homo sapiens
caggaagggaacgtggaaagcgcatacaggaccctaaacagctgtccctttccccccaacacatcgcttgacatctgaagaag

SEQ ID NO: 353999 - DNA, 90 bp, Homo sapiens
cgaggggaacggaggccagagctgcgttccaacaggatggattcctggtgctggaaggattcttgtctgcggaagagtgtgtggccatgc

SEQ ID NO: 354000 - DNA, 75 bp, Homo sapiens
gaggatcaaaatcttcgaaggaggccaaaactggacaagccaaggcatctgtagccaaagtaaacaaatctacag

SEQ ID NO: 354001 - DNA, 100 bp, Homo sapiens
gcactgactttcagctatggaatcgctgagttgatggcttccggagaactggcatagctgcagaatatgagtagtgtcccaagaagagtgctttgccttt

SEQ ID NO: 354002 - DNA, 75 bp, Homo sapiens
ggctgcgccgaggcgccctactcagggcaccctcatccagcatctgaaggagcacctgctgcacggcaacatgac

SEQ ID NO: 354003 - DNA, 50 bp, Homo sapiens
ctcgcacgggagccagctgggtggtgagaagccctaccactgcaactggg

SEQ ID NO: 354004 - DNA, 82 bp, Homo sapiens
gcgagggctacccgctctttgccgtgacaacaccgttcccccagccgggctgcaattctgtggtgttcttggtcacacattt

SEQ ID NO: 354005 - DNA, 100 bp, Homo sapiens
gttccggaggcccggccacctctgagaagggagacgacgctgctgggtccgctgagcggggcgacccgagacagcgtggaagatgaactggagatggcca

SEQ ID NO: 354006 - DNA, 75 bp, Homo sapiens
cagtgggaatacgtatcacctgctcatgtcccatgggagcaattatgtttgcctctccacattttagaagagaaa

SEQ ID NO: 354007 - DNA, 75 bp, Homo sapiens
ggtttcgggatctcggtgctgcagacggcgagacctcctgcacagaatttacatagtacatgacgaagttaagga

SEQ ID NO: 354008 - DNA, 50 bp, Homo sapiens
gtaatcaattgtgctgacaacacaggtgctggagaatctggtaaaagcac

SEQ ID NO: 354009 - DNA, 98 bp, Homo sapiens
tgggctcctgcctcgccctgctcgccgtcttcttcgcgctcgggctggtgattatgttgtcatgactatatattttgaattgagtagaagaatgggat

SEQ ID NO: 354010 - DNA, 80 bp, Homo sapiens
agtcgacttcccatcctgagttgttgttcagcacttctggtctcttcagttctgatatgattttaggattgcttcttttt

SEQ ID NO: 354011 - DNA, 75 bp, Homo sapiens
ttggcagccacatgttctcctgctggccttcccttcttcttggtggtgttcttgagtaagataatctggactggc

SEQ ID NO: 354012 - DNA, 100 bp, Homo sapiens
cgaggcacagcgtttcttgcaagaatgggagatctcggggtttccagaagaaaagatcaagggagaattatcaagaatagattatttttctgaatagtta

SEQ ID NO: 354013 - DNA, 82 bp, Homo sapiens
cgggcggcttcctggcctgggcgctccggtggcggcggagcttcggaaccaaaaagaagcttcccagagccggggccaggag

SEQ ID NO: 354014 - DNA, 101 bp, Homo sapiens
ttgattctgagcgtcaaacttgttatgcagcatataacagaatggatgatgaacttgttgttggacatagtgcaagatcagacatctccagcttcccttgt

SEQ ID NO: 354015 - DNA, 90 bp, Homo sapiens
cttttaacaccacagaggatccagatattagcacagcagaccttggtgatgtgctacagggaacagaaagaacagcttcaaaagatgaaa

SEQ ID NO: 354016 - DNA, 75 bp, Homo sapiens
gtccacacggtgctggtggagcgctccacgctcaaagaaaggcctaaagaatgtatttgacgaagcaatattggc

SEQ ID NO: 354017 - DNA, 82 bp, Homo sapiens
gccgccacaccgccgctgcctcagtcatgccgccgccgccatgatcctgctggaggtgaacaaccgcatcatcgaggagacg

SEQ ID NO: 354018 - DNA, 97 bp, Homo sapiens
ggaacgcgcctgctcccctcgtcgcagtttccagcccgacgagcttgttttgtcccggactcggtttctctggaaacccccctggtaagtgtggagg

SEQ ID NO: 354019 - DNA, 90 bp, Homo sapiens
attacggaggttgagctggtccggaatccctaagccagtgcgtccaatgacgtggaagctcctctcagtggatctccttacgtagcagcc

SEQ ID NO: 354020 - DNA, 58 bp, Homo sapiens
cctcactctctccgatactttctcccaaggagatgcctacatagaagagtgacagcag

SEQ ID NO: 354021 - DNA, 78 bp, Homo sapiens
gacgctgagcgcccagcacttggagcgtgaggaaggaaaaccggaccaccccagattgtgaacgagcattcccagagg

SEQ ID NO: 354022 - DNA, 82 bp, Homo sapiens
tttgtggatcgctgtgatcgtcacttggcagtagaagatggtgaaagaaacaacttactacgatgttttgggggtcaaaccc

SEQ ID NO: 354023 - DNA, 98 bp, Homo sapiens
ttcatctttcatgcagtgacatgttgataaaaaatgatgtcatatttgatcagaaattggatgaaccttcgggatgctgagacagggaagatactctg

SEQ ID NO: 354024 - DNA, 100 bp, Homo sapiens
cacaaaagatgtctctgaaaaggaagacaaggacaaaaacaaagaaaagatcccaaggaagatgctgtccagagttagttgaatccatggacatgaaacc

SEQ ID NO: 354025 - DNA, 100 bp, Homo sapiens
cgtcacttagctgaccatgggcaactttctgggatccagcgagcgacatggaaatcaatgaaaattctcttaaaaggttaagtgtctacctagaaaacct

SEQ ID NO: 354026 - DNA, 106 bp, Homo sapiens
gctgaggacacacccaggaaaagactcaggacggacaagcacagtcttcggaaggcaaaagctgtgcctcacttctgcgggttgaaccctttgtatgtgcccagtg

SEQ ID NO: 354027 - DNA, 75 bp, Homo sapiens
gccctggcagcatggctcagactgcatgacaggatgacgtagctttgccaaagacttagaagctaagcagaaaat

SEQ ID NO: 354028 - DNA, 100 bp, Homo sapiens
cctagctgccttccttaggcgtggtgaggctgccgggtctcctgttccaactccacctagtatgaacggtgccttagcgtttgtggacacttcggactgc

SEQ ID NO: 354029 - DNA, 74 bp, Homo sapiens
gccacccctacaccatgacaacgccttacccttcgctcccagcccagagcatgcaagcggcaagatgtcctaca

SEQ ID NO: 354030 - DNA, 95 bp, Homo sapiens
ctaggacgccgagcggtgactccccgccgctcccgggggccgtgacgttcagacttggttccttcaacctagagaaagttgaaaacccagctgaa

SEQ ID NO: 354031 - DNA, 98 bp, Homo sapiens
agcaggagcctggagcgcgagtacagctgcaccgtgcggctgctggacgacagcgagtacacctgcaccatccagccgattacacctcaacaagaagg

SEQ ID NO: 354032 - DNA, 100 bp, Homo sapiens
agaggcgaacgccactcagcttttgcggcacttggaggatatgaacgagactgccaaacaagaagatattttggaatccacaacagatgctgcagaatgg

SEQ ID NO: 354033 - DNA, 97 bp, Homo sapiens
gtttcctgatttgtccccatgttggagggtctgcctgaatccagggcctgaaaacccagaatgaacttgtgtccatcccagagatcactgcagatgt

SEQ ID NO: 354034 - DNA, 95 bp, Homo sapiens
gaggactttaggagaaagttgctgaaggcaggagggataacaacgaacttgatgcaagtgataggtttgccaaggtcagacctctcatcatccgg

SEQ ID NO: 354035 - DNA, 83 bp, Homo sapiens
tcccaagcagccgatgcccgcggccggagagctggaggagaggttcaaccgcgccctgagcaagaaagctttctgctcagcca

SEQ ID NO: 354036 - DNA, 83 bp, Homo sapiens
ggattctgaggaccagcagatggccagtcacgagaacccagagacaagaggagcagcagcggcaccgcccctcaccctggagg

SEQ ID NO: 354037 - DNA, 100 bp, Homo sapiens
accggagcgaacgccacgccgttggcaataccaagaaggagggtgacctgatagctgctcaggctcggctgaaggacctggaggctctgctgaactccaa

SEQ ID NO: 354038 - DNA, 75 bp, Homo sapiens
gcgcggccgagcggaggcggagtcggcgccgagaacatggattcaggagcagttccagaaaaatcccgacagtta

SEQ ID NO: 354039 - DNA, 82 bp, Homo sapiens
ccaggaccctcttcgcgggcgattcgcgtagcctcagatgccatggacaatattaccaggcagaaccaattctacgataccc

SEQ ID NO: 354040 - DNA, 100 bp, Homo sapiens
gatgggactgggcgattgtgtgatttgacatttgaacaaattaggaagctgaatcctgcagcaaaccacagactcagtcttgctggtggatgccctcctt

SEQ ID NO: 354041 - DNA, 82 bp, Homo sapiens
attaaaacatttttcagggacgtagccatccagagtgccctctggtggtcagaagatgctgtgctgtctcgttaggatgaat

SEQ ID NO: 354042 - DNA, 51 bp, Homo sapiens
aatacacccacctaccttgaaccagcatctcaaagacaaattttggaattt

SEQ ID NO: 354043 - DNA, 83 bp, Homo sapiens
ctcctcgccagcagccgtccggagccagccaacgagcgtgggaatgtaagacggacttagatattgcatacaaatttggaaaa

SEQ ID NO: 354044 - DNA, 100 bp, Homo sapiens
tccccagttctggcagattctggaaactgtacattgaagcagagacctccacaatctaaattgcttcgtgaagataagaaccataacatgtatgttgcag

SEQ ID NO: 354045 - DNA, 97 bp, Homo sapiens
ggaataagatggtacaagttggactgcttcccaagctcactgcactcctagaggagctctacggtgactttgaagacttggaaacaggggacgtgca

SEQ ID NO: 354046 - DNA, 95 bp, Homo sapiens
ggccgaggaggaggagggggaagcggcggcggcaaagggttcctatatgatagtggactcttcagatcacgaccctggagaaaaagccagacttc

SEQ ID NO: 354047 - DNA, 100 bp, Homo sapiens
gggcattatgaacgaattctcaacccctacaacttattcctgtccggagacagcctaagggctgacgttcctcagggagtgattcgagtgcaagctcccc

SEQ ID NO: 354048 - DNA, 83 bp, Homo sapiens
ctgatctctctcgctgtgagacatgtctgagactcctgctcagtgtagcattaagagtgatcagcagctggactgtgccttgg

SEQ ID NO: 354049 - DNA, 83 bp, Homo sapiens
tggtcctgctcggggctctgttcccaggctgcagtactttgcacggggcctgcaagtttatatcagacaacttcgcttagctc

SEQ ID NO: 354050 - DNA, 100 bp, Homo sapiens
gtctcatccgcatgtataaggccgaggtttgaaattccagagccagaacctactgacgcagacaaattggcaatagagaaaggcgagcagccaatcagtg

SEQ ID NO: 354051 - DNA, 88 bp, Homo sapiens
gggtgaagaactgccgtttgtggggttttcgtacagcaaggcactggggattcttggtagatctgagacagagccccagaataacccc

SEQ ID NO: 354052 - DNA, 90 bp, Homo sapiens
gccgggggaagctggccttgggtgttatccaagataaattctgtgggattataaacatttcagtagaaggcctgcatgatgtcatgacgg

SEQ ID NO: 354053 - DNA, 90 bp, Homo sapiens
aacctcaagtcaaccagcaacaactgcaacagattgtggtggaggaaggtggttatgaagctatctgcaaggaccgtcggtgggctcggg

SEQ ID NO: 354054 - DNA, 83 bp, Homo sapiens
gaagaagattaacctggagttaaggaacagatccccggaggagtgcaagaagaaacacacgctgctgtgccccgactttgccc

SEQ ID NO: 354055 - DNA, 100 bp, Homo sapiens
gaccgtttgtgtgcaatgccccgggctgtggacaggaaacccttttccaaagagaaatgaagaagaaaactgtatgtaccctaaatatgggagataagaa

SEQ ID NO: 354056 - DNA, 101 bp, Homo sapiens
acttcaattgatgaattcctaggacttccgggttttgttcctgagtcgatgtttgaccgccttctcactgggcctgtagtgcggggagagggagcgagcag

SEQ ID NO: 354057 - DNA, 97 bp, Homo sapiens
ggcacctaaaaattgtataccgcagattcaggaaaatatgcccaggttaccaacaatcctgaaaatgatggatgtataaatgcagtcttactggttt

SEQ ID NO: 354058 - DNA, 83 bp, Homo sapiens
ctgaagcctgccttcaagaaagatggttctaccacagctggtggtctacatagcctgctccttcaccacggtctggttgattt

SEQ ID NO: 354059 - DNA, 76 bp, Homo sapiens
ggagaagctggcagctctctgtaagaaatatgctgatcttacctgaaggaaaagattatgcccttcattggctagt

SEQ ID NO: 354060 - DNA, 83 bp, Homo sapiens
tctgcagtacaggatatgaagaaattgagggttcttgccatgcaaccatgtccaagggacctgcagttggtattgatcttggc

SEQ ID NO: 354061 - DNA, 100 bp, Homo sapiens
tgtgatatgtcacttgtgaattttgaaccagcagcaagaagagcatccaatatctggtttgtggtaaatatgccagctctagaacacatgaatcagattt

SEQ ID NO: 354062 - DNA, 85 bp, Homo sapiens
actgtgaatcttccattgtgattggactcagaaggtgtggacatcaagctgggcgtgtgtgctaatggacttctcatttacaaag

SEQ ID NO: 354063 - DNA, 100 bp, Homo sapiens
atgtccgtggccttcgcgtctgcccggccaagaggcaaaggggaggttacgcagcaaaccatccagaagcacttgcacctcctgcgccgccgccccccat

SEQ ID NO: 354064 - DNA, 75 bp, Homo sapiens
gggtgcactggctggacaccaggatggcatcaccttcattgacagcaagctaacaggcctcacctcttccattcc

SEQ ID NO: 354065 - DNA, 100 bp, Homo sapiens
gctgataaacttattaaaatttggggcgcgtatgatgggaaatttgagaaaaccatatctggtcacaagctggtatctagaagagcagaagacagagaat

SEQ ID NO: 354066 - DNA, 100 bp, Homo sapiens
gcctcagttggaagcagccgatccagcctgcggagcctgtggggcagagctacagagacttctgaagtggagagtctgcgacctcctcggttcttcaatg

SEQ ID NO: 354067 - DNA, 96 bp, Homo sapiens
ctacggctgttgccatgaggcgaggctagggaggacctcacttccccggggtgtaataatgttaactgaggtgacagtggatagtggaaacaggag

SEQ ID NO: 354068 - DNA, 98 bp, Homo sapiens
aactgtagccaggccaataccgatggttcccacatcagtagaacgactccgagaaggagggagcatccccaaggtcctccgaagcagcgtgagggtgg

SEQ ID NO: 354069 - DNA, 82 bp, Homo sapiens
ggccagggaaccctggtcaccgtctcctcagttcaaatctgaacatcaatgatgtactagggaactactcattgactcttgt

SEQ ID NO: 354070 - DNA, 100 bp, Homo sapiens
gtagctaatgaccgtggttcccactgaggttaatttggagtggcccctggagtcagtttcctacaccatccgaggccccacccagcacgagctacagcct

SEQ ID NO: 354071 - DNA, 74 bp, Homo sapiens
gagggggagttctcagagtcattacagcccttgatgagcctccctatttgacagtgggcactgatgtgagtgct

SEQ ID NO: 354072 - DNA, 100 bp, Homo sapiens
ggtgatctttggtctcttcggaaagactgttccaaaaacagtggataattttgtggccttagctacaggagagccagaagatcagctgccatgttacttg

SEQ ID NO: 354073 - DNA, 83 bp, Homo sapiens
gctaaagcagcgtgcgttcagccctgggcttatgttcctgaggaagaattgaaggcagcagaaatagatgaagagcacgtgga

SEQ ID NO: 354074 - DNA, 100 bp, Homo sapiens
agcagcctcaaggagcagccatggccccagacttgtcgcacggatgcagaaaacttaatggaggaggctgagatgcatttttgtagaagcattttgagga

SEQ ID NO: 354075 - DNA, 123 bp, Homo sapiens
agtatgatattttctctggccagttgcataataactgcaaaatacacacgatagtaaggagcatttagcaatgatggaaaggattcttggacctctaccaaaacatatgatacagaaaaccag

SEQ ID NO: 354076 - DNA, 82 bp, Homo sapiens
ctgacaatggctttggtccccagcgcagtgaagtggtgagcctttttgtcactgattggccatctgcaagcttcccttctcc

SEQ ID NO: 354077 - DNA, 51 bp, Homo sapiens
aaggggttgaaattgttgatagaggttctgtacagagtaatgagatgtgtg

SEQ ID NO: 354078 - DNA, 74 bp, Homo sapiens
cggagactgtggtgcgcctgcagctctgggatatcgcaggtattatgactctgtccccctttgatcaaatgaag

SEQ ID NO: 354079 - DNA, 50 bp, Homo sapiens
gaagtttctaggaaaggccggacaccaggctttatcctgtggataaacgc

SEQ ID NO: 354080 - DNA, 100 bp, Homo sapiens
tctgggccctggggctcctgggcgcgggcagccctctgccttcctggccgctcccaaatataggcttgttgattggtgctggctgtgccctctacccctt

SEQ ID NO: 354081 - DNA, 100 bp, Homo sapiens
gccgactacgccactgcgaaggcccctggctcacctgcagctccccggatctcggaggtgaagctgcagtctcctctggagccacactccaagaaggccc

SEQ ID NO: 354082 - DNA, 89 bp, Homo sapiens
aacgcagctgaaagcgtgaactgtatctatgcagttagatcagttgttcccaacaaaagcaataatgaaatagtcctggtgctccaaca

SEQ ID NO: 354083 - DNA, 100 bp, Homo sapiens
atgcaagtccaagaggaggaggaggcggaggtccaagcggaaagagaagcttgattctttgctctcagactacgatattctctctttatctaatatccag

SEQ ID NO: 354084 - DNA, 83 bp, Homo sapiens
agcagttcgtgaacagtgtccgacagctctcagctcaaggcccagctgagagccagcctggaggttacccagcagcaggccac

SEQ ID NO: 354085 - DNA, 142 bp, Homo sapiens
tgccaatttgcaaatggacatcttcctggaagaagatgggaacgtgaattccaaactcaccaaggattcagtgtggtgttccattgcctaaagaggagaacatttctgctcccttgatctccagctccccagtgaaggcagc

SEQ ID NO: 354086 - DNA, 100 bp, Homo sapiens
tttgcagagcctgaaccttgatatccaagccttagcctgcctgtcagcactgagcatgatcacagatcatatactcctatgaaaggaggaatctccaatg

SEQ ID NO: 354087 - DNA, 99 bp, Homo sapiens
tggacggccgaaccccgcgcccgcaggacgccccagccaggtgcgagaagatgtactaaattcattgaataacaactttcttcaaacgctaaatcaagc

SEQ ID NO: 354088 - DNA, 74 bp, Homo sapiens
aaacaatagctcaaggaaacctttccaacacagatgtccaagctgccaaaagatctcttaggctttctgctcag

SEQ ID NO: 354089 - DNA, 82 bp, Homo sapiens
ggggattgtgggagtctccgcgtcccgctcgctgggagagaggtgtggacactgccagcggctgcagccgacttggaatgac

SEQ ID NO: 354090 - DNA, 75 bp, Homo sapiens
ttggcatttggctttgcctttctggacacagaagtatttgtgacaggtggcacaagaatggctcaactctccaaa

SEQ ID NO: 354091 - DNA, 96 bp, Homo sapiens
agggggccctgagcctcctgcaacacctgcggcctcactgggacccccaggaggtgaccctgcaggattcctacaggaagcaagtagtaattgatg

SEQ ID NO: 354092 - DNA, 100 bp, Homo sapiens
tgagctgtcctttcaggaaggagccattatttatgtcatcaagaagaatgacgatggtggaaccgtcccaaaatgtcccttgctcagaagaaggatcggg

SEQ ID NO: 354093 - DNA, 100 bp, Homo sapiens
atggaacataaggaagtggttcttctacttctgttatttctgaaatcagttatcatttaacatggaagaagatgagttcattggagaaaaaacattccaa

SEQ ID NO: 354094 - DNA, 50 bp, Homo sapiens
catgaggaaggagcagcgcaagtttcactgttacatgccttgaagtgatg

SEQ ID NO: 354095 - DNA, 100 bp, Homo sapiens
caggtggttgcggagctggtaaggtatcatgatattagctggtttgacatcaagtcatttgtgagtcatcagatcttctcctgaaaatgggagacacagt

SEQ ID NO: 354096 - DNA, 101 bp, Homo sapiens
ccggcaagtaccaactgcagagccaggaaaactttgaagccttcatgaaggcaatcggaaatgggtcctgatgaatatgaagagatggaagaagaggagga

SEQ ID NO: 354097 - DNA, 50 bp, Homo sapiens
atgctacagcccctgcttgacaaccaggccatcgaagacggcaatttgga

SEQ ID NO: 354098 - DNA, 82 bp, Homo sapiens
gctttttatttttccccaattcagcagagaatattttcaaggggggctgaccccgcactacatctacccaccagccatcgtg

SEQ ID NO: 354099 - DNA, 74 bp, Homo sapiens
tatccgctatgatgtggaccgggccatctccgggggctccattcagggaaggccacgcttccatcgtgaaagag

SEQ ID NO: 354100 - DNA, 100 bp, Homo sapiens
ggatgttggcaagtctttacaatggcagtgtgtgtgtttggaatcatgaaacacagagtcgaggtggaaaaaagtttcttcctgtattgaaagaaatctt

SEQ ID NO: 354101 - DNA, 100 bp, Homo sapiens
actctaccatgtgctagagacagccaacaaaatattcatggttcttgaggttgctccttgagggcaggacagttcttatggctttatccgttgcgtaagc

SEQ ID NO: 354102 - DNA, 97 bp, Homo sapiens
gaggacatgaataaagaccagatcttgctggaaaaagaagctgagaatgccaattcctgtccagttgatcgaactctatttaagtgcatttgtattc

SEQ ID NO: 354103 - DNA, 75 bp, Homo sapiens
ggtgcactcataggctcgtctggtgctatcctgtcatacatcatgtgtgtgcttcagcgcctgctcctggtcatc

SEQ ID NO: 354104 - DNA, 82 bp, Homo sapiens
acggggctgctggtgggccgcgtcgaagacatggaccagggctacggaggtaagagcaaagaggcggaaattaagagaatca

SEQ ID NO: 354105 - DNA, 80 bp, Homo sapiens
gccctcacagcaagatctgcacaaagtcccagttcacccaatcgtgcagactccgagcccaagccggagcaggctccacg

SEQ ID NO: 354106 - DNA, 90 bp, Homo sapiens
cagcttattgttgcaaggagaataagcaagtgcaatgaggtgtaccttgaaagacttttaacatacgcagagatagatatctgtccggcc

SEQ ID NO: 354107 - DNA, 74 bp, Homo sapiens
tgaagatgtgtctgaggtggccaaagacgcagacaggtggatgaactgcaacaaccgctggagcttaagccaga

SEQ ID NO: 354108 - DNA, 149 bp, Homo sapiens
cttcagtctacaaaggactcttctaaaaggatatgtgttgctaatacccatctttactggcatcctaaaggtggagaaaccttgcagtggtggccaagatttacttctttatccagctaagagaaagcagcttttgagaagtgaactgg

SEQ ID NO: 354109 - DNA, 73 bp, Homo sapiens
acactctgaagcagcgacggcacagcgggaagaatgttggatatgtcaagtgaccagatagctgccaatctgc

SEQ ID NO: 354110 - DNA, 75 bp, Homo sapiens
cgaaactttcaccgcgagcggacttagaaggttttgactccgtggtatcatctactgagaaactcagtcatccga

SEQ ID NO: 354111 - DNA, 75 bp, Homo sapiens
catggtttatctaacaattaagccattaaacctgagtcaagttgaagggaaagaatatggcaaagctgatgcaag

SEQ ID NO: 354112 - DNA, 100 bp, Homo sapiens
cttgcacctgtattttagcgtactatgcaggttgccaacttggcctgttccatctcaaataatgaagaaggtgtaaagcttgttcgaatgtctgcaagcc

SEQ ID NO: 354113 - DNA, 99 bp, Homo sapiens
ggccgtgcaggaatcagaacgcctggcccgggacaagaatgcctccttacagctgctgcaaaaggagaagaaggaagttgtggaagaggcagaaaatgg

SEQ ID NO: 354114 - DNA, 126 bp, Homo sapiens
atctgcccgttgtgtttgtgaaacagagaaagataggcggccatggtccaaccttgaaggtggtggcccttagtaagagaagtcaggaggcggaggctgcttttctgagtgtttacaagcaattaa

SEQ ID NO: 354115 - DNA, 90 bp, Homo sapiens
cccgcatcagcggcctcggggaatggaagcggagaacgcgggcagggatgaactcaagcggcattacaacctgggggagtactggattga

SEQ ID NO: 354116 - DNA, 75 bp, Homo sapiens
atggaccggccggggttcgtggcagcgctggtgctcgatgcattctatttctcatcatttggctcataactggag

SEQ ID NO: 354117 - DNA, 74 bp, Homo sapiens
gaatcgcgaggcagagcgggagcgcgcagccagggagtgcatccgccccaacccttttccccctcgtctcctgt

SEQ ID NO: 354118 - DNA, 100 bp, Homo sapiens
gccgtggcgcctagagtagcgacccggggggagcgcggggcgacgctggctgcagggacccggtgacagcgtgagagtatttgactacagtcattcctta

SEQ ID NO: 354119 - DNA, 102 bp, Homo sapiens
tgggaatatctcagcctggttcagaagaccttgtaccaggaggtgatgatggagaactatgacaacttagtctcattggttactaccttatcctcagctgtg

SEQ ID NO: 354120 - DNA, 90 bp, Homo sapiens
gtctccaggcccagtacatggatgcttgttggatgaattaatgaaccttgacccacaccaagccggcccaggcctttgtggtgaagcggg

SEQ ID NO: 354121 - DNA, 100 bp, Homo sapiens
cgcaggctgaggacctctatctcgcttttcccctggccttctgtatcttcatggtgcggctcatcttcgagaggatcagtggtcaattggtcaggacagg

SEQ ID NO: 354122 - DNA, 71 bp, Homo sapiens
aagaaaatacaaatcacacgcataatggatgaaaggaaccgacaggcacgtctgagaatggtggatgtggt

SEQ ID NO: 354123 - DNA, 75 bp, Homo sapiens
tgggctgtgtttcgaaatgaagacaggcctgcacagctgaccacagttgggaaacgttgctgtctttggattcag

SEQ ID NO: 354124 - DNA, 100 bp, Homo sapiens
cagaaggagctggaggatgcctactggaaggacgacgacaaacacgtcatgaggaaggagcagcgcaagattgccaatgtgttatacctggagtccccag

SEQ ID NO: 354125 - DNA, 118 bp, Homo sapiens
cctcatcacgaaacattccgtgattaagctttgtgactttggatttgctcggcttttgaccacttctgccccaccaacgttgggccaaccaaaaggagtcagtgccagtcaagatcga

SEQ ID NO: 354126 - DNA, 78 bp, Homo sapiens
tatgaccctatggaagcagaagaagctgaggatgaagaagatgaagataccatcccacgaacacagatagaaagaagg

SEQ ID NO: 354127 - DNA, 109 bp, Homo sapiens
taagtcctgaattagaaaaggtattcattaaagaaaataatgggaaggaagaagtatccaagatccctaaagaagtggctgacatctttaacgcccccagtgatgatga

SEQ ID NO: 354128 - DNA, 75 bp, Homo sapiens
ctcatacgacttcagctcctcacttggactcctcttgaggtgggatctcatcgtgtccgtatgtcaaggggattt

SEQ ID NO: 354129 - DNA, 100 bp, Homo sapiens
atgctttgacaaagtacatgagagatcccacttttgtaagactgaattccagtgatccaagtctcataggatcaggagaaggtctggggaaaataatcca

SEQ ID NO: 354130 - DNA, 82 bp, Homo sapiens
aagaagtggagcgtgtcctgaaggagttccaccaggccgggaagcccatcggacaggccgacggtcgcaaggtcctacggtc

SEQ ID NO: 354131 - DNA, 75 bp, Homo sapiens
tctccagaagggcctgcagtatgtagaggccgagatcagtatcaacgaggtgggcaaacgcagaggcgggaacaa

SEQ ID NO: 354132 - DNA, 83 bp, Homo sapiens
ccccaaagccccaggatgcagcagaggtgcgtcagcaatttcctgctcctcttggttggtcaggcactgaagctcctacacag

SEQ ID NO: 354133 - DNA, 101 bp, Homo sapiens
ttaaagcaattatgaaagaagtcattccttttttgaaggtgcctgtcctgagacccatggacctgatggtggaggccaccccacgaagagtatttgccaac

SEQ ID NO: 354134 - DNA, 100 bp, Homo sapiens
gacggactctggccgcctcagcgtccgccctcaggcccgtggccgctgtccaggagctctgctctcccctccaggttccaattgtggacaagataaggac

SEQ ID NO: 354135 - DNA, 100 bp, Homo sapiens
agggcgaagacgagatccagttcctgcgaactatcttgtagaaaatttcagctgtagcccttggactagaagctgaaataacagaagctgtgtacgatgc

SEQ ID NO: 354136 - DNA, 80 bp, Homo sapiens
gcctccgaaccactgcctctgggctcaacagaacacagggatctacggaatccagaggcagcattgtctccaaccttccg

SEQ ID NO: 354137 - DNA, 75 bp, Homo sapiens
atttctcgtcggcggcgccctgcaccgcgcctcgcaaaatttgagttctgtgaacctgcatttgttgttggtaat

SEQ ID NO: 354138 - DNA, 75 bp, Homo sapiens
ctcaagaagggagggaggctggtggagaagtgggctcgggatgagtttgaaggcctcttcaagcagccagcagaa

SEQ ID NO: 354139 - DNA, 100 bp, Homo sapiens
cactctgtgcggagactgggcggccggccgacccttcctgtcgctgacggcgactgcgggaggccagaagctgacgggtcgcctcatgctggccgtggga

SEQ ID NO: 354140 - DNA, 82 bp, Homo sapiens
ggaacttggttccccctccctcagcttccgccccaaaagcatgactatatgaaggaagaggaaggttttcctgaagatgagg

SEQ ID NO: 354141 - DNA, 54 bp, Homo sapiens
cctttatccagtttcctggatggaccaagatttattctagtcgagaactcgaag

SEQ ID NO: 354142 - DNA, 82 bp, Homo sapiens
atttgcaccccgtggggtggtgcacacagaacaacaaggtgttgatgccgccggacggtcatcagaagattgagagaaagag

SEQ ID NO: 354143 - DNA, 75 bp, Homo sapiens
ggacgaggggctccgggtcttccagagcgtgaagatcaagatcggtgaaaggtgtagcagtcactcggcctacac

SEQ ID NO: 354144 - DNA, 106 bp, Homo sapiens
atcaacccagaacggatagctccctcctggaaaagatgctgggctcttgcactgtttggtggaaatggtgagacaggatttgagcaaaattctacttattcagtgt

SEQ ID NO: 354145 - DNA, 100 bp, Homo sapiens
gtgcagtatgagctacatgtttgagtacccggagtatcagacaggtgatttggcttctgcacagttaggaggagcaccaaaccgatgggaggttttgtca

SEQ ID NO: 354146 - DNA, 75 bp, Homo sapiens
tcggagagagaagccaatgatgccctcaatgcgtatgtgtcaacattgcatacttgaatactggcatcggaggac

SEQ ID NO: 354147 - DNA, 90 bp, Homo sapiens
agcgctccttgctcgcaaggcgggggaggcggcggcccagccacgatggcattctggagctgcaagagcaggtgtttacaacctcaccaa

SEQ ID NO: 354148 - DNA, 96 bp, Homo sapiens
tcaggactcatgctaggaacgctgtaacagggagcagtgatggagtccttgaggacacgttagcgtatgccacagctttgttgaatgaaaaagagc

SEQ ID NO: 354149 - DNA, 75 bp, Homo sapiens
cttcccacactgtgagcctcagcagctccagccagcggacccgacggctgagagttgcagagtgggcaggatctt

SEQ ID NO: 354150 - DNA, 103 bp, Homo sapiens
accatcttcctgcacacagccaaagtctgcaaagtgtatagtctttgctatgacttctggccagatgtggaaccatatccgtggacctccatatgctcataag

SEQ ID NO: 354151 - DNA, 100 bp, Homo sapiens
gcggaggacaaggccaagagggccaagggcaaaggccgaggactttgcctcccgggccaaactggcagttcaaaaactagtacagaaagttggatttttt

SEQ ID NO: 354152 - DNA, 82 bp, Homo sapiens
ctgactggtaagaccatcaccctcgaggtgaagcccaccatccaggacgtgctgcgcagcgacagccagctcaggaacgcag

SEQ ID NO: 354153 - DNA, 90 bp, Homo sapiens
ccagcgcagcgacggggcgctgcctggcccaggcgcacacggaagtggagctctgtctgaatggctggctgaccaccccgtcatgatcaa

SEQ ID NO: 354154 - DNA, 98 bp, Homo sapiens
ggacatgcgcgggagggcgccgcggggcagccgccgctcctccgggagagaactcgatgccaccgcaacggtattggcgaaccggcaggatgaaagtg

SEQ ID NO: 354155 - DNA, 90 bp, Homo sapiens
ctgagtcaaagaagatgcctcgaactaaacaaattcatcccagaaatctaagagggatgaattgtaaaagcaacatcagcttgaccagta

SEQ ID NO: 354156 - DNA, 82 bp, Homo sapiens
aaactggtcgccaaggacgggtcgtgcctgttccgggccgtggcggagcaggtacaatgactcttcttgcttttcacctaag

SEQ ID NO: 354157 - DNA, 75 bp, Homo sapiens
ctcaatacatgctgatctctgccagacaggggcaagtgtccgagtggtgaatcagctacttacagagatggatgg

SEQ ID NO: 354158 - DNA, 101 bp, Homo sapiens
tcacagcacagttcctgggaaggtggagccaccagcctctccctggaaggcgtggaagtgcgagtggccagaatcttcaacacctttgggccacgcatgca

SEQ ID NO: 354159 - DNA, 83 bp, Homo sapiens
ccgctacggggaagtaatggtatccggccaattgagattcggagttaaaacagtcaccttcaggccattcagaggaggaaaga

SEQ ID NO: 354160 - DNA, 124 bp, Homo sapiens
tctgcggagccgggctcgggtcgccggagccgcgccccaccccgccagctccagagccacgtactccaaagattcaggtttactcacgtcatccagcagagaatggaaagtcaaatttcctgaa

SEQ ID NO: 354161 - DNA, 82 bp, Homo sapiens
cagatatactattgtactatggacttcatcgctttatacaacgaaggttttgggaacagtaaaatggttcaatgtaaggaac

SEQ ID NO: 354162 - DNA, 101 bp, Homo sapiens
ccagaagcgactcaaccgcgcgcaggaaaagacaagttggatggcttgaggactggtactaaaaggaaacgtgactgggaggccattgccagcagaatgga

SEQ ID NO: 354163 - DNA, 75 bp, Homo sapiens
agaagaggatggcaaaggtggctaaggacctcaacccaggagttaaaaagcaaactgtgctcacaggagaaacta

SEQ ID NO: 354164 - DNA, 83 bp, Homo sapiens
caaggagctaaagcagcgtgcgttcagccctgggaacactctggacctggaggaaactggcgaggctgtccagggcaatatca

SEQ ID NO: 354165 - DNA, 100 bp, Homo sapiens
atctgagtcaacaacggatgaaaatgaagacgacattcagtttgtcagtgaattttggagagtaaaaggctgaaccttgttaaagagaaaaccattaatc

SEQ ID NO: 354166 - DNA, 74 bp, Homo sapiens
gaaaaatgaagatgatgtagacactggactattaggggatcatggaagctgataaagatgacacacaacaaatt

SEQ ID NO: 354167 - DNA, 100 bp, Homo sapiens
cttcattcagatgtggtggaatatgccaaggaaaaactggagagcttcatcaaaaatagtgatagctttgataagtagttttggatgttgggtgtggaac

SEQ ID NO: 354168 - DNA, 98 bp, Homo sapiens
ggacctgtcccacctggcggccatcgtcatcctgctgctgaagatctggaagacgcgctcctgcgccgatgatggtggtgctaccccagtacaggatg

SEQ ID NO: 354169 - DNA, 83 bp, Homo sapiens
cggaaccggagccggttgcgggcagtggacgcggttctgccgagagccgaaggatgccctgcagtggtctcgccatccagcta

SEQ ID NO: 354170 - DNA, 100 bp, Homo sapiens
tttgatccagaacttgcagcaacaataggtctccacctctgggcaggagagttgccgaccacctcgggggtgctttctctgcgcttgaacatctatagct

SEQ ID NO: 354171 - DNA, 75 bp, Homo sapiens
cagttggaagcagccgatccagcctgcggagcctgtggggcagttgaggagctcaagcttgggaaaatggtgtgc

SEQ ID NO: 354172 - DNA, 83 bp, Homo sapiens
acgacgggttggggatggcgtgcagcgcaaccacgagacggccttccaaggaatttgctgattcccttggaattccgtttttg

SEQ ID NO: 354173 - DNA, 51 bp, Homo sapiens
cgatgtatctaaacttggcaccaagtatggaccctgatgctcccataagac

SEQ ID NO: 354174 - DNA, 75 bp, Homo sapiens
gaaaatcatattatagatggagtaaaggtaaagtgttgagagaggagaaccagtgcattgctcctgtggtttcca

SEQ ID NO: 354175 - DNA, 100 bp, Homo sapiens
gcaagaggcctacgtgcgggtggtcaccgagaagtccccgaccgactggaccctgatgctcccataagacagaaaatgccccttgatgatctggatagag

SEQ ID NO: 354176 - DNA, 90 bp, Homo sapiens
gtgttacccacgactgcctgggacctggccaagggctccacacaccaagaccaagcattccacgcctacgggaaggcaggcaagatgctg

SEQ ID NO: 354177 - DNA, 100 bp, Homo sapiens
aagcagagaatggagaagaaggttgattccagatcttagcaaagcaatgtctcaagatggtgcttctcagttccaagaagtcattcggcaagagctagaa

SEQ ID NO: 354178 - DNA, 98 bp, Homo sapiens
tgtatgcaatatataccttttttggtcggaatgattcaagtattgggaaagggtcgttgtggtgcatagacccagagtatagacaaaatctaattcag

SEQ ID NO: 354179 - DNA, 98 bp, Homo sapiens
gggaccatgcttagctcaggatccgtgcccctggtgtccaagatctgccctagtgacacctacaaagtgtggaagagcggccagaacctgagggtaga

SEQ ID NO: 354180 - DNA, 82 bp, Homo sapiens
gtgatagcggcagcgaggggctcggagaggtgctcggattctcgtagctgtgccggcacctgaactcctggggggaccgtca

SEQ ID NO: 354181 - DNA, 89 bp, Homo sapiens
ggttcctacctggacgatgagaagaactgggggctgtctttctatggccctacatcattcgaggaatggcgcccccgacgacgccctgc

SEQ ID NO: 354182 - DNA, 75 bp, Homo sapiens
aatggggagaactggagggggacacctatgaccggacatgggagtcccaccgtattgtccaggctggtctcgaac

SEQ ID NO: 354183 - DNA, 51 bp, Homo sapiens
cccgggagaacctgcggcggccggagcgtgatgactcgtggcactgcctcc

SEQ ID NO: 354184 - DNA, 82 bp, Homo sapiens
catcatccttttgggcttgatcatcgcctaccacacacgtgaagtccagggacacactcaggacaccaacaccttctttctg

SEQ ID NO: 354185 - DNA, 100 bp, Homo sapiens
aggaaagcagacattgacctcaccaagagggcgggagaactcactgaggatgaggtggtggcggtggaggacagcagcgagctggtgactggaagtgtcc

SEQ ID NO: 354186 - DNA, 100 bp, Homo sapiens
ctcctgagtagctggaactgcaggatgctttcattggatttggaggaaatgtgatcaggcaacaagtcaaggataacgccaaatggtatatcactgattt

SEQ ID NO: 354187 - DNA, 49 bp, Homo sapiens
tggagcctctccagcctcccgcgaagactcacagatgaatgcttctcac

SEQ ID NO: 354188 - DNA, 95 bp, Homo sapiens
agatccgctgatctagtgcttctcgaaaaaaaccttcaggcggcccatgggttcgatacaagaggctgttttcctagcgtggcttgctgcctttg

SEQ ID NO: 354189 - DNA, 75 bp, Homo sapiens
aaagctcagactaaagcccctcccaaaccagcccaaggagctggatccctctgctgtgctccccttagactgtct

SEQ ID NO: 354190 - DNA, 100 bp, Homo sapiens
aaacagtgtgtaccattccgacgttacaatggtggagttggcaggtgtgcgcaggcctgacctctcgggacacacccagccctgtggacccagacaccgt

SEQ ID NO: 354191 - DNA, 90 bp, Homo sapiens
gttggaaggcttccaggatgacgccgggagtacaagcgcaagctagccagagtttccctggtgcgcaaagaactcaggtcccggatccag

SEQ ID NO: 354192 - DNA, 96 bp, Homo sapiens
tgctgctgctgctggtggcccctttgcagctgcctgccttgtgcttggctgtatgattttccctgatggctgggactcagatgaagtaaaacggat

SEQ ID NO: 354193 - DNA, 74 bp, Homo sapiens
tgggtctccaggcccgcgaccgtccgccagtcgtcccgagtactatactggcaattgctggagaagattttgca

SEQ ID NO: 354194 - DNA, 74 bp, Homo sapiens
ctgacctgtgaggggtgtaaagtgatcgaactgtgagaatttggaaggctcgcaatttgcaagatggtcagatc

SEQ ID NO: 354195 - DNA, 100 bp, Homo sapiens
agaggcccaaattgaggcgcaatgatgagaggatgtggtggtctactctgatgtcaatcttgagggctaggtactccaaagattcaggtttactcacgtc

SEQ ID NO: 354196 - DNA, 83 bp, Homo sapiens
cttgctgggggagaggccctgagaggcatgtgcacaggggcaagctctgtgtgattgattggaagacatcagagaaaccaaag

SEQ ID NO: 354197 - DNA, 88 bp, Homo sapiens
ccacaggtgcatttcacagcactctgggcgaaaattggatgtgaaaatgaagccagaccgagctccagtcagcccggtcaagcatgac

SEQ ID NO: 354198 - DNA, 100 bp, Homo sapiens
cagcctccttcccgacgtcctcaagaaagtcctgtgccggcagctgtggccaacagcaacagagagagtccaggaatgtaagaagcacttggcaggcttg

SEQ ID NO: 354199 - DNA, 75 bp, Homo sapiens
gtcggagacacagctctctcagagaccgtcggttcagcatctcggagaggaacagacaacgcaagctggggacga

SEQ ID NO: 354200 - DNA, 75 bp, Homo sapiens
gtgaacatcgaatcatggaatcccttgcatggctctcaacccaacatgagtgaagtttcctgcaagaaacgggac

SEQ ID NO: 354201 - DNA, 75 bp, Homo sapiens
cagacggctcacctgtgcgggatggaacaaaagatttgggtattcggattcccgttggacatgtggactacttcg

SEQ ID NO: 354202 - DNA, 75 bp, Homo sapiens
ggctgtgggcggtaaacgcggttagtgcaagcatctgggccatcttcaatacatagggcctgattacattccaac

SEQ ID NO: 354203 - DNA, 82 bp, Homo sapiens
tagctaagttcaaggagccagcccacgcattagcatttcagcagaaattccacagttgcagagtgggcaggatcttaagacc

SEQ ID NO: 354204 - DNA, 75 bp, Homo sapiens
ggaacacttcagtgcattcaaggtattgcactctcagtctcgccatgttgaagtcagaatggcctgtattcacta

SEQ ID NO: 354205 - DNA, 100 bp, Homo sapiens
caacaacctctcctcttcgtctccgccatcagctcggcagtcgcgaagcagcaaccatgatcgcagtggaggtgaccaagtccttcattgagtacatcaa

SEQ ID NO: 354206 - DNA, 83 bp, Homo sapiens
gaagaagttgcgaaggatccccaacggggaggccaacgtgaagaagtccggcctctttggcctacccccgttggctccgctgc

SEQ ID NO: 354207 - DNA, 88 bp, Homo sapiens
ttgttatgcagcaaacagtcctagaagaattcttcgaaacattggtacaatgaatacatttaagggccaagatgctgaattatcaggg

SEQ ID NO: 354208 - DNA, 82 bp, Homo sapiens
gccgccttgctgctgctcaaagctgctgccgccccttgggctaaaaggacccagatcaacttcactgtggccattgatttca

SEQ ID NO: 354209 - DNA, 82 bp, Homo sapiens
ctcattgccgcctttcaactcattgaactagactacagtggccgacttgagattggactggctaaggacgatcagctgaagg

SEQ ID NO: 354210 - DNA, 101 bp, Homo sapiens
ccccggagccgccggccgctagcgtcagcgccagccaggcttctggctgtgatgggtcggagattcctgatgaagtgaagctgattgggtttgctcagttg

SEQ ID NO: 354211 - DNA, 51 bp, Homo sapiens
agtacgtggacatcaacgtcacggatcagatggctgtgatagggcagcagg

SEQ ID NO: 354212 - DNA, 74 bp, Homo sapiens
tgctgacggcgggaagcgacggccgcggagatagagccacgaaccccctgaacaaggagctcgactgggccagc

SEQ ID NO: 354213 - DNA, 100 bp, Homo sapiens
ccccaacaaggcagttctttacttcatgtattgagatcttgggacaggtgtctttcaggttgcagaaaagatggaaaaaaggacatgtgcactctgcccc

SEQ ID NO: 354214 - DNA, 82 bp, Homo sapiens
cgacaagccgctggcagccgcggatctcaccgccgctcaggggcgtctctggccgagcctctttttgtggaaaacgacagca

SEQ ID NO: 354215 - DNA, 74 bp, Homo sapiens
cactacaacaggaaaatcatattatagatggagtaaagaaatactcagcagatcattacacacctttcccttct

SEQ ID NO: 354216 - DNA, 100 bp, Homo sapiens
cccgtgagtgcctcaacaactgagatgaacgtcgactcgcttgcagcttaattggcttagtgtcgacttcaataattggaaagactgggaagatgattca

SEQ ID NO: 354217 - DNA, 98 bp, Homo sapiens
tgtgagacgtttggaatgaggaaaagtgaacttttcgaggcatttgacttgtttgatgttcgtgactttggaaaggagtctcgctgtgtcacccaggc

SEQ ID NO: 354218 - DNA, 82 bp, Homo sapiens
ccaactgcttttgaaaaacaagaaacatgatgaaagtattgagggggcatcagaattgggtgtacagctgtgcattctctcc

SEQ ID NO: 354219 - DNA, 100 bp, Homo sapiens
tggggacgaagagctgcagctcctcctgtgcgggaccttgaccctgctgttcacagccagggggaccctcagagcagctggcactgcacccaggattctc

SEQ ID NO: 354220 - DNA, 100 bp, Homo sapiens
ggagggttgagctttgaaacaactgatgagagcctgaggagccattttgagcaatggggaacgctcacggactgtgtggcaacgccctgctgcggcggct

SEQ ID NO: 354221 - DNA, 90 bp, Homo sapiens
gttctttggaatgattctcttttttgacaaagcactactggctattggaaatggagagcttatggatggagaccaaacatccagatctgg

SEQ ID NO: 354222 - DNA, 96 bp, Homo sapiens
tcagtgcaaatgtgcaaaaaggtttcaggtggagcagatcggagagaataaataccggcatggacaccacgttgctgaaaacatgctttgggactg

SEQ ID NO: 354223 - DNA, 46 bp, Homo sapiens
ccttcgtacccgtcttgattgagaccttgccaccatggaagaaaga

SEQ ID NO: 354224 - DNA, 74 bp, Homo sapiens
gaagcggaaagctgctgatgagacgctgtgccaaacaaagtactcccctgccctcaacaagatgttttgccaac

SEQ ID NO: 354225 - DNA, 100 bp, Homo sapiens
ccccgcagaggaccccccgacaccagcatggactgctgcaccatgcgagccacccctctggctgctcctgcgggttccctgtccaggaagaagcggttgg

SEQ ID NO: 354226 - DNA, 75 bp, Homo sapiens
ttttgaaagctgcctgcggcaaaggctgcagagagactaagggcacttcctgaggttcattaccacctggggcag

SEQ ID NO: 354227 - DNA, 82 bp, Homo sapiens
ctggaaagtttgcagaagtggaaggagcagaacgtgagggtgtaacttacaaaaagagaggagtctgcaatgccgagtggag

SEQ ID NO: 354228 - DNA, 100 bp, Homo sapiens
tcaaactcccaggctcaagcagtcctaccatgtcagccttcccagtagctgggaccacaggtgccttggcatctcccaatggggtggctttgctctgggc

SEQ ID NO: 354229 - DNA, 90 bp, Homo sapiens
ctggttgcagaagtgccgaaagagcactggactccggaagggacttgcaacaaagcattgccagagaacctagtgctccttcaattccta

SEQ ID NO: 354230 - DNA, 100 bp, Homo sapiens
gctgaagtaagattgtcttggaaatactaagttggatttgctgaccatgaaagaatatcactgtttgctgcaattactgtgtcctgatttcccgctggag

SEQ ID NO: 354231 - DNA, 75 bp, Homo sapiens
gctgggcgttcatctaccacgctttcgtggatcgcttacacctgagacgaactacagaacagcacgtaccagagg

SEQ ID NO: 354232 - DNA, 100 bp, Homo sapiens
gcaacaaagttagagtctgcgggccgcactcgcctgcgccccgcacccctccgagcagcccggggatccagcacgcagacattcacggcatggtgtaact

SEQ ID NO: 354233 - DNA, 89 bp, Homo sapiens
ggctttggaatccaccagctacatccagctccctgaggaccaagacccctggacctggggcccagtcggccctcagagcccttgcccgc

SEQ ID NO: 354234 - DNA, 129 bp, Homo sapiens
gcggtgtaagtcggtggcggcgccggtacgcctggtccccgcgtggagtctttactcaaaacagggtatgcagaagttggctagtcaatacctgaagagagattggcctggagtaaaagctgatgatcg

SEQ ID NO: 354235 - DNA, 74 bp, Homo sapiens
tggacatggccaccctgaccggggctcagctcgggttcatgacgctctcgatattcctgtgcagaaacctggac

SEQ ID NO: 354236 - DNA, 100 bp, Homo sapiens
tacgcattcttcgagacctctgtcagcgagttccaacttggtctgattttccaagctgggttctggaggacacgtgccggcggcaggacttcaacccctg

SEQ ID NO: 354237 - DNA, 80 bp, Homo sapiens
ctgcagtttgaggctctgaacaaggactttgctgaagaattagcaacactgtctaatctgtttctagccgagccccacct

SEQ ID NO: 354238 - DNA, 100 bp, Homo sapiens
ggctgcttctgcacttccagagcccacgggtcccaaggggcggtggcttcaggatccactatcaggaacaggccgcccgcctgaagaaactacaagagca

SEQ ID NO: 354239 - DNA, 114 bp, Homo sapiens
gtggtctgctccggatggctccgcaagtcccccccggagaaaaagttgaagcgttatgtcatactaatagtgcctttctatgactgctatgagcccatggtgagaatggctgga

SEQ ID NO: 354240 - DNA, 82 bp, Homo sapiens
gttatcagatcacagaccatggtctcagacaatgagttacaaggcactaatagttctggatccttgggtggtcttgatgttc

SEQ ID NO: 354241 - DNA, 97 bp, Homo sapiens
cgctccagtcggcccaggcgccgcggcgaggagcgagcgctgcgaggtggcggcctgagattgcaagactggaggaagataaagaagaactacgtaa

SEQ ID NO: 354242 - DNA, 100 bp, Homo sapiens
aaagatccaaaacaagtggctgcggccgtcgcccaggagtcatcggacgccagaatctggtatgatctcgtgaaaccttgagagaaactgaatgacgaat

SEQ ID NO: 354243 - DNA, 83 bp, Homo sapiens
caccatcatccacctcaagtacccgctgaactgctccgatcccactagtgagagatagcctgggctggaagctcttctacgtc

SEQ ID NO: 354244 - DNA, 51 bp, Homo sapiens
ccgaatttgacttcatggaaaaagcgactccactgagatacacaaagacat

SEQ ID NO: 354245 - DNA, 100 bp, Homo sapiens
acgagaccctccctgctgagatgcgcaaattcactccccagtacaaaggaccccgagacagacaagcacacagaggaccagagtccttcgacacccttgc

SEQ ID NO: 354246 - DNA, 100 bp, Homo sapiens
tggaacgtgaacacagagaagacagccagacactcaggatttttttcccaggaagccatcccgtcagaggggttcaagtgatgaaagttggcaaactgca

SEQ ID NO: 354247 - DNA, 100 bp, Homo sapiens
ctattacccccagtatctgcaagccaagatggcccactgcgtgaccttggttcagctgtccatttcctgtgaccatctcattgacaaggacatcggctcc

SEQ ID NO: 354248 - DNA, 82 bp, Homo sapiens
aagggaccacggtcaccgtctcctcaggcttgaagtagaaaatgccatgatgagaaaaactattaaaaaacaggatgaccaa

SEQ ID NO: 354249 - DNA, 90 bp, Homo sapiens
gtagcgagtcggcaacccggagcaatggctgccatccggaagaaactggtgattgttggtgatggagcctgtggaaagacatgcttgctc

SEQ ID NO: 354250 - DNA, 51 bp, Homo sapiens
tgcgcttcctgagggagtgggtggagagagactaattgagcagcgtgatac

SEQ ID NO: 354251 - DNA, 75 bp, Homo sapiens
ctcccagtttgaacctctggacatgaagctcatgagaggtctgcggggtttccgagaggctcgccgggatttctg

SEQ ID NO: 354252 - DNA, 115 bp, Homo sapiens
gaaaaagcaagctgaagacatcaagaagatcttcgagttcaaagagaccctcggaacaacatccagtcatggataaaaatgagctggttcagaaggccaaactggccgagcaggc

SEQ ID NO: 354253 - DNA, 82 bp, Homo sapiens
tcgaattccagaatgatgaaattgtctgctggcagaggactggccatttggagctgagatgtgtaagctggtgcctttcata

SEQ ID NO: 354254 - DNA, 124 bp, Homo sapiens
tttgtacaggaaagtgatgttggagaactacaggagcttggtatcattggattctgtttctggcgtctgcatacgcaagtccccaactcgctgaggagagctgttcagctatggctgctgtcac

SEQ ID NO: 354255 - DNA, 100 bp, Homo sapiens
actacgaacccctggacgggagagtctgccggcggagaatataagggccgttgctccagggagaactgcaaatatcttcatccacccccacatttaaaaa

SEQ ID NO: 354256 - DNA, 74 bp, Homo sapiens
agctatatgggaacaacatacagtgacgcttcacagggccaagctgatcgtccccaacagcacggcgggcctga

SEQ ID NO: 354257 - DNA, 50 bp, Homo sapiens
ccggggcctgatgaatgacatcgcgtatagctggcattacagccatgtta

SEQ ID NO: 354258 - DNA, 75 bp, Homo sapiens
cgtcactgagccgcgccagctgagccaggattgccccctgtgggtcactttctcagtcattttgagctcagccta

SEQ ID NO: 354259 - DNA, 100 bp, Homo sapiens
tctccggtgtggtgaagagcgtccaccggcggctccgcaagaagtaccgagaaggttgtggtttctcgatcaggaccatcaacccctcatgtgaattttc

SEQ ID NO: 354260 - DNA, 50 bp, Homo sapiens
gtgccaggtgtccatccccgtgctgagttggaatgccaagatgccttgga

SEQ ID NO: 354261 - DNA, 83 bp, Homo sapiens
cctacatagagtcgcagggagcccaccgggcgggcctggccaagacaatgcagatcttcgtgaagactctgactggtaagacc

SEQ ID NO: 354262 - DNA, 50 bp, Homo sapiens
aatgtgcggaaaatgccttcaaatcagctcctctactagtgacctctcca

SEQ ID NO: 354263 - DNA, 100 bp, Homo sapiens
tgcatcctttatcatcacgaaagcaattcgagaattcctgctctccttgttggtgttcttttgataactggaaaacacaatggagatagcattgactcag

SEQ ID NO: 354264 - DNA, 100 bp, Homo sapiens
agaggcgctggagctgggtcagtccgccgctcaccccgcggccgcaccttcccgccttctcagttgactatattgtggagtatgactatgatgctgtaca

SEQ ID NO: 354265 - DNA, 100 bp, Homo sapiens
cagctgtacacactgcagcccaagcttcccatcacagctattcctgcaccaactgacctgaagttcactcaggtcacacccacaagcctgagcgcccagt

SEQ ID NO: 354266 - DNA, 75 bp, Homo sapiens
attttccaggatccaactccctcctgtccaaatatgacccccagaaggaggcagagctccgcacctggatcgagg

SEQ ID NO: 354267 - DNA, 88 bp, Homo sapiens
agccccttgcagaagacgccgtacgagtttcaccagtgatcattaaagaatgggcagcttacaaaggaaagtctcctcaaaccccgga

SEQ ID NO: 354268 - DNA, 75 bp, Homo sapiens
cctctttgaggaactcacaaagctgctgtccaagtggccacaagtaatcatcctgagactgactacaagaacaaa

SEQ ID NO: 354269 - DNA, 83 bp, Homo sapiens
ccagttcgtggcctgttaccacgagctagtgttggagtgcaccaagaaatgatcctgataacttaagtgactctctcttttcc

SEQ ID NO: 354270 - DNA, 100 bp, Homo sapiens
ccgccatcgctgcctcggaccccgccaccaaggtcaaaatgcagatcttcgtgaaaacccttaccggcaagaccatcacccttgaggtggagcccagtga

SEQ ID NO: 354271 - DNA, 133 bp, Homo sapiens
gaccggtttggttgaagttggagaagtatccaatagggatattgtagaaactgtctttaacctgcgtggggatgtacttgtgatgctgaagcagacggaaaataattacttggagtgccaaaagggagaagac

SEQ ID NO: 354272 - DNA, 51 bp, Homo sapiens
tgcgtcatcaaagacaccaaactgctgcctctgctgcgagaagttctggag

SEQ ID NO: 354273 - DNA, 90 bp, Homo sapiens
ctgggattacaggtgtgcaccaccacgcccagggtgaatcatttgatgtaaaagacttgactccataatctgcatctgtcctaatgctgt

SEQ ID NO: 354274 - DNA, 95 bp, Homo sapiens
gacagcccaaatatcctcggaagagcgctcccaggagaaacaatttatcatctggacttcaagctgcaggcagttctgtttttccaggccttttg

SEQ ID NO: 354275 - DNA, 75 bp, Homo sapiens
gaagaagctgtatgacattgatgtggccaaggtcaacaccctgattcgggctactacaaagttctgggaaaggga

SEQ ID NO: 354276 - DNA, 75 bp, Homo sapiens
ctcaaggagcgctgcctcaagcacgtctgaggcccttcatccctgagaaggacagccagcacttcgagaacttcc

SEQ ID NO: 354277 - DNA, 102 bp, Homo sapiens
ggactacgaactcgtccagagggtcggcagcggcacctacggggacgtctataaggggctttgttatgcacctaaagccatattggaagctccagaagaaag

SEQ ID NO: 354278 - DNA, 100 bp, Homo sapiens
cttctctgtcagtactatattggaaaaacctcaaaatatgatggtggttggacagtcagcatttgcagactttggtgccagtcacgaattgcccgaacat

SEQ ID NO: 354279 - DNA, 97 bp, Homo sapiens
aaggattatttactcgatgatggaactctggtggtttcaggaagggtttgtgtttagtgaatcagagggatctgcattagaacagtttgaaggtggc

SEQ ID NO: 354280 - DNA, 74 bp, Homo sapiens
gcagtggtcgcttcttctccttgatgtggcttaggaagctactatggaacaataggtggtccagtcccattttt

SEQ ID NO: 354281 - DNA, 100 bp, Homo sapiens
cgcgagcgctgagggtgagtgccgggagctctgagggccgccatggcatcagatgaaggcaaactttttgttggagggctgagttttgacaccaatgagc

SEQ ID NO: 354282 - DNA, 75 bp, Homo sapiens
cccgccactacctcctggctgccgtgaataggcagcctaaaggacccagccttgatgcccacttgggaggcagaa

SEQ ID NO: 354283 - DNA, 126 bp, Homo sapiens
tatttgtggcttaaactcttggcatttggctttgcctttctggacacagaagtatttgtgacaggtggtatggtcaggaaaaagactacaatgtactagtcatggatcttctgggacctagcctcg

SEQ ID NO: 354284 - DNA, 98 bp, Homo sapiens
tttggggcatctccgcggtccggcccggggccccgggatctcggctgtccttcctcccgataagctgtcattggaaggaatagtggtacaaagagctg

SEQ ID NO: 354285 - DNA, 100 bp, Homo sapiens
aatttgccaagcagacaggccagtggatcggaatggtggagaacttcaaccaggcactcaagaaagttcaggagccctggaaaggagaaggaataagacg

SEQ ID NO: 354286 - DNA, 74 bp, Homo sapiens
cagagataattgataacaccctgtaacagctgaatacagatcacttggattcagtcgagtttgctttgctccgt

SEQ ID NO: 354287 - DNA, 100 bp, Homo sapiens
ttgacacaggaggaggcttcattttagaagaggaagaagaagaagaacagaaaattggaaaagttgttcatcaaccaggacattcactgaacaatgccag

SEQ ID NO: 354288 - DNA, 100 bp, Homo sapiens
ccgcacatattgctgaaaggcatggtcacaaagaactcaagaaaatcttcgaagacttttcaattggaaaatgccttttatgaacatgcacagacttatt

SEQ ID NO: 354289 - DNA, 96 bp, Homo sapiens
cctatcagtatcggcagaacattcctgcttccgagttgccaggccgccatggcatcagatgaaggcaaactttttgttggagggctgagttttgac

SEQ ID NO: 354290 - DNA, 90 bp, Homo sapiens
ggagggcaaacctgtgaacccacccgagagcaacaaagcaggcgactacagccacgtgaaggcagaactggggctcccttgcatcttcca

SEQ ID NO: 354291 - DNA, 100 bp, Homo sapiens
taatggggagctgtaccatgagcagtgtttcgtgtgcgctcagtgcttccagcagttcccagaaggactcttctatgagcccaccttgggacaccttgac

SEQ ID NO: 354292 - DNA, 83 bp, Homo sapiens
ctcgtctcccgctccgccctcccttttccctggcggctatgagaggttttcctccgagtacccagaattctgttctaaaacca

SEQ ID NO: 354293 - DNA, 75 bp, Homo sapiens
gtcctttatatagaagggagagtaggaggcaagtgaggcctatctggttggcctttttgaagacaccaacctgtg

SEQ ID NO: 354294 - DNA, 101 bp, Homo sapiens
catggaccgagcccccacggagcagtgatgtttatccatgcatcgttgagacttcggaacctcaagaacaaactggagaataaaatggaaggaataggttt

SEQ ID NO: 354295 - DNA, 97 bp, Homo sapiens
ctctggccgacgagtggagaaagctgaagccgacgtagcttctctgaacagacgcatccagctggttgaggaagagttggatcgtgcccaggagcgt

SEQ ID NO: 354296 - DNA, 75 bp, Homo sapiens
tgccggatgacattgaggacgagtccacgggcctgaagaaggtgctccatctcgaaaagcgagaaaggcctccag

SEQ ID NO: 354297 - DNA, 100 bp, Homo sapiens
aataagtctgctcctgatcttttataagacaaaagaaatagcaagaactgaggagcaccaggagacgcaactcatcggtacgagctcaactggaggcagt

SEQ ID NO: 354298 - DNA, 75 bp, Homo sapiens
tgtattggagagagaagtccatttccaggaatatggatctactggaacagcccatgctgatagtgaatatgaaag

SEQ ID NO: 354299 - DNA, 75 bp, Homo sapiens
cttgggctctgttgcttctctgggtcccagcttcggaaccaaaaagaagcttcccagagccggggccaggagccc

SEQ ID NO: 354300 - DNA, 100 bp, Homo sapiens
gggagagcgaggcggggccgccggggccgccatggagcccgactcggtgattgaggacaagaccatcgagctcatgaacccctgaacagtgcccaagtgt

SEQ ID NO: 354301 - DNA, 83 bp, Homo sapiens
gaagtccttgttgtaagaacgcttggtttcatagagactgtttacagaacatacaacctcctcttcagtgtcaaaaaagccac

SEQ ID NO: 354302 - DNA, 90 bp, Homo sapiens
ttctcgtctctcatctacatcgccttcatcctgggcagggtgagaactctgtctcagtcgacgggaagtgcagtgactccacgctactga

SEQ ID NO: 354303 - DNA, 75 bp, Homo sapiens
agccgtggaataggtgtatcaagtaatggtgcaaagcctgaaaaaccagggtggttatgaccgctactcaggagg

SEQ ID NO: 354304 - DNA, 100 bp, Homo sapiens
actgcttcctgactcgctctactccgtggaagcacgctcacaaaggatctgaacaatgttttgaacagcttcagccagaatattcttcacaggaggagag

SEQ ID NO: 354305 - DNA, 51 bp, Homo sapiens
gtatgtgccggtcaagacgggctcggctcccacatcaggacgagaaggagc

SEQ ID NO: 354306 - DNA, 100 bp, Homo sapiens
cctggaccttgcagccgcaatggtgaccttggagaaggtgctgggaattacagtgtctggaggcagaggacttgcctgtgacccccgatcaggtttagtt

SEQ ID NO: 354307 - DNA, 90 bp, Homo sapiens
aaacctatcgttagagtcttcctgcccaacaaacagaggacagtgatatgtgtcacaaagatgtctacacggaactgccagggaatggac

SEQ ID NO: 354308 - DNA, 75 bp, Homo sapiens
aaagcaggatggactatcattactcctccaacaccaatcatcccagacgatttcccatcagatatcgctaacaag

SEQ ID NO: 354309 - DNA, 98 bp, Homo sapiens
cgtgatgttgggcggccacagagagattggtgtttttgtgaggcagtgagacctaagaattcaaagaagctttttcactatttgacaaagatggtgat

SEQ ID NO: 354310 - DNA, 89 bp, Homo sapiens
tgtggcgcttggctctggttaatggcaaaattcactctgtgacctgcctgctgcctccctcaacgaccagttgccccaacatacatttc

SEQ ID NO: 354311 - DNA, 82 bp, Homo sapiens
ccatcctgccgtccttctccactttcgccagcccgtgccgcgagcgcggcctgcaggagtgttctaagaacggaagcatctg

SEQ ID NO: 354312 - DNA, 103 bp, Homo sapiens
ggcagacggattcatttagagctgcggaacaggacgccctctgataacgtgctggccaaagcgctctatgacaatgtggccgagtccccggatgagctctcct

SEQ ID NO: 354313 - DNA, 50 bp, Homo sapiens
aaactgtggccagagagtgagacgggccgcctccttcggaaagtgtttcc

SEQ ID NO: 354314 - DNA, 48 bp, Homo sapiens
tcatgctgccagacaaccagagcttgttctgcaggctggaaatccaag

SEQ ID NO: 354315 - DNA, 75 bp, Homo sapiens
ttactctcctatgatggcagcgaaaacttatcacggttttgttgacgaaggatcagagattggtgtattcgggca

SEQ ID NO: 354316 - DNA, 96 bp, Homo sapiens
gaagagcaaccgaggtttcaatctgcggtcttgcaagagcaaaatccgtccctagccacacatactccaacgaagtggttaccttgtggtacagac

SEQ ID NO: 354317 - DNA, 75 bp, Homo sapiens
ggagaggccttatggtaatgtcggccattgagaaattgttgaggcagtgttatccaagataaattctgtgggatt

SEQ ID NO: 354318 - DNA, 80 bp, Homo sapiens
tgctcatcccactcttccttttactagatctcaaggcttttgagaggagacttactgaatatattcattgtttgcaacct

SEQ ID NO: 354319 - DNA, 100 bp, Homo sapiens
ggtgatcatcatggacacagttttgacagtaattcttttgggccggttgctacaagcctcaggaaaaatcagattacttgatgttggcagctgctttaac

SEQ ID NO: 354320 - DNA, 89 bp, Homo sapiens
gaagcagccgcgctgcgccttccacactgtgcgctttgaaatggatgcagtcagaactgaatgttgaagaagtggtaaatgacaggagc

SEQ ID NO: 354321 - DNA, 75 bp, Homo sapiens
agaaaatgcaaaaaaactaatggaattagcctgcaacatgaaggtgaccaagaatatggcccaggtgaccaaagc

SEQ ID NO: 354322 - DNA, 100 bp, Homo sapiens
catctttctagaccatatctcttctttggattattttacaaaaccagactaccagttgttcttcctaacataaaatcagaagatacaccatgccttctgt

SEQ ID NO: 354323 - DNA, 75 bp, Homo sapiens
gaggggagaatctggtctcaatgacagtagagggacctcctcccaaagatctgctggagccagttctgcttctcg

SEQ ID NO: 354324 - DNA, 100 bp, Homo sapiens
actacaagtcctcgcacctaaagtcgcacctgcggacgcacacagtgcgcgtcccgggacgactggcgctgtgcgcgctccatgcacgagttttccgcca

SEQ ID NO: 354325 - DNA, 75 bp, Homo sapiens
tcgctcccgccaccgccggacttcaatgcccagtccccagctcgccagcggaatttaccagctgaagaaagcctg

SEQ ID NO: 354326 - DNA, 100 bp, Homo sapiens
accccaggagagaggactggggtcccaggagtaggaggagacctgaactactgcacacaccataagccctgcaagaatggagccacctgcaccaacacgg

SEQ ID NO: 354327 - DNA, 114 bp, Homo sapiens
cgcgcgcagggcctgcagcgggagctggacggcgagcgcgagcggcgcgagaaagtgcgcgcggagccatggttatcatgtcggagttcagcgcggaccccgcgggccagggtc

SEQ ID NO: 354328 - DNA, 82 bp, Homo sapiens
caactgcagcccgaggacaagcggctgatggtgattgctcacaccaaagccttggacccctcccagcctgtgacctttgtga

SEQ ID NO: 354329 - DNA, 100 bp, Homo sapiens
tgttgttcccggagatgcggcgcgcagatgcacagtaatcaaaagggcttacttccagagccaaatccagtacaaattatgaaaagtttaaacaaccctg

SEQ ID NO: 354330 - DNA, 100 bp, Homo sapiens
gaaggaaaagctgatgcgatgctctcagtgccgcgtcgccaaatactgtagtgctaagtgtcagtctgctccatctggacacaagcatctgacggtagaa

SEQ ID NO: 354331 - DNA, 100 bp, Homo sapiens
gcgcctctcccgcccctgtctcccgctccgcagccccgggcacggcggaggcagcggagccctgggccatcgggccaattcctgtccccccagcagcatg

SEQ ID NO: 354332 - DNA, 98 bp, Homo sapiens
gtggagacatcccatgaggatctgcccgcttcccaggaaaggtccgaggattctcaaagttggattggtggaaacaatgaaccattgacaggctttac

SEQ ID NO: 354333 - DNA, 75 bp, Homo sapiens
actccatcgtgggactcagcagccttggtgctcaggtgccagatgcaaaggtagttagaaacaaacctgtggcaa

SEQ ID NO: 354334 - DNA, 75 bp, Homo sapiens
cttccacactgccacctgattaaaggaattggtgttacagggtcttgattatttacataccaagtgccgtatcat

SEQ ID NO: 354335 - DNA, 75 bp, Homo sapiens
ctggatggctactttcatctctggaaggctgaaaatacactatctaagaaatggaatctatttggaatttgcaga

SEQ ID NO: 354336 - DNA, 100 bp, Homo sapiens
atgggtttgctattgggaacatggcagcctttgatatgaatgaccctgaagcagtagtatccccaggtctggatattgagagcagcttgaagcagttggc

SEQ ID NO: 354337 - DNA, 83 bp, Homo sapiens
cttctctcgcttcggactgcgcaacgctgcgctctgggctgacagtgacaaccatgagtggaaaaaactaattatggttcagc

SEQ ID NO: 354338 - DNA, 84 bp, Homo sapiens
gaaccgcgcggccgaaccctccggatctcgaggacctggaagaagcagaggagccagacatggaggaagacgatgatcagaaag

SEQ ID NO: 354339 - DNA, 87 bp, Homo sapiens
ctatgatattcttctcctggttaatcaagaattctctatttctgctccgtcatccatgccacttgtcaagctgagctcccagactct

SEQ ID NO: 354340 - DNA, 51 bp, Homo sapiens
tccctcaggaagacaccatacaagaagattgttgatcgaatcgacaatgat

SEQ ID NO: 354341 - DNA, 98 bp, Homo sapiens
gaggaacgagagcgcgaagctaagccactcatctctgcccagctgctgccctccccaggaggcctccatggcttcacctacctccaccaacccagcgc

SEQ ID NO: 354342 - DNA, 50 bp, Homo sapiens
tttcaagtgtttactcatttgcctaaagtgactgagaccgaagatgatag

SEQ ID NO: 354343 - DNA, 51 bp, Homo sapiens
cccaccccacatggcccacgtacctcagccactcccatggttcaagctttg

SEQ ID NO: 354344 - DNA, 83 bp, Homo sapiens
gcacccgatgaggccgtgagggccccactggactgggcgctgccgctttctgaggaacaagatcactcaaggtgaaggataat

SEQ ID NO: 354345 - DNA, 101 bp, Homo sapiens
cgcgaatatcgtcatcgttagaaggggagagaccattctaacacaggtaccgtccagacagtgcctctgagaaagggaacctaaaggcgtgtttccgacgc

SEQ ID NO: 354346 - DNA, 75 bp, Homo sapiens
ttacacactggtgctgactgcatttgagcccataggcagcatgtcatccatggaagtgaacgtggacatgctgga

SEQ ID NO: 354347 - DNA, 89 bp, Homo sapiens
gctgggacatgaagcttcgggaacagtcgaaaaagtgggatcatcggtaaagcacctaaaaccagagcgttatccagactagcgagtgg

SEQ ID NO: 354348 - DNA, 100 bp, Homo sapiens
aagttgtcgacgaccgacagggtggtgaaagcaatggcaccagcatgatatcattgatcattcctcccaaagaccagatttcacgagtggcaaaaatgtt

SEQ ID NO: 354349 - DNA, 75 bp, Homo sapiens
gagttcgtctcttacgtctgcggaagtgcagctgcctcagttcttagcgcagatgcccagcctacagagtctgag

SEQ ID NO: 354350 - DNA, 83 bp, Homo sapiens
cggagcgccccttcgcgtcccctgcaccatgagctggggcaccgagctctgggagcatcagatccatgctgctgctgactcgg

SEQ ID NO: 354351 - DNA, 51 bp, Homo sapiens
cacttgaagactatcccttgatgattggagagcttatggatggagaccaaa

SEQ ID NO: 354352 - DNA, 101 bp, Homo sapiens
ctccgagaggctgcaccggccgccggtcatcgtcctgcagcgcggagcctgcggccaaggtgctggagaatctggtaaaagcaccattgtgaagcagatga

SEQ ID NO: 354353 - DNA, 98 bp, Homo sapiens
cggagctgcttcgccgctgcggtggtgctgtgggtcggcctgggcgtcctggtggtgagcactgtcaccacactgtctgtgagcgaggaggtccccga

SEQ ID NO: 354354 - DNA, 82 bp, Homo sapiens
agggagtcgccgctggagaggggctcggcgcccggcggggactgcaggtgagaagccctaccactgcaactgggacggctgc

SEQ ID NO: 354355 - DNA, 100 bp, Homo sapiens
gccgctctccgagctcgatccgctgctcgcacgggagccagctgggtgcagttggaattgatcacaccttttcagttgtacttcaatcctgaattaatct

SEQ ID NO: 354356 - DNA, 96 bp, Homo sapiens
aaggaaatcaataaacttgaattgaagatcagtgatttccttgatgaaaatgaggcacttagagagcgtgtgggtgcaggttttgcagcatttgga

SEQ ID NO: 354357 - DNA, 51 bp, Homo sapiens
ctgggatgcgcttgggctccctgattcctgggaacaccaccatggagggcc

SEQ ID NO: 354358 - DNA, 100 bp, Homo sapiens
ggtgacgcagagctttggcgagagctacggcaacagcaagaactgccggcggctcttgtgctgcaggtggagacctttggcgacttggcctttggcgaca

SEQ ID NO: 354359 - DNA, 82 bp, Homo sapiens
atttacaacaaaaagaaccctcaattgatgaaagtttggtgccctggttgtcagatgttggaaagcagtaggacggaacata

SEQ ID NO: 354360 - DNA, 95 bp, Homo sapiens
attgtgggcctcatcatcttcctcctgtgcaccctcttcatcaggtggtgaagcagtattttccaatttgaagattcatttgaaggtggctcctg

SEQ ID NO: 354361 - DNA, 98 bp, Homo sapiens
ccgtgggagccagcgagcctctctccctgatcttacgtgctcaaggaaacatgccctgaactgtcacagaatgaaaccagcgctcttcagcgtcctgt

SEQ ID NO: 354362 - DNA, 90 bp, Homo sapiens
cccgcctcgcccgccgtgagcgcccggagcggtccgcgagccaccgaggcccagttgaccacgttgttcctgagcctgggacaagcctgc

SEQ ID NO: 354363 - DNA, 100 bp, Homo sapiens
ctgaccccagcaaacatctgctgagaaagtacttcattgaagccagtcccttgcccagcagttatccgggaaaaacagtctattattagcagaagatttt

SEQ ID NO: 354364 - DNA, 75 bp, Homo sapiens
gaagtcaaagaaatgcaaatattctttcaaatgtgtaaatagtctcaaggaaccagcagcacaaacactgttggg

SEQ ID NO: 354365 - DNA, 75 bp, Homo sapiens
cttcgttgcttgcttgcctgtgcgcgcgtgcgcggacatggcctcaaacggttatggaaacaaaggacatgcttt

SEQ ID NO: 354366 - DNA, 83 bp, Homo sapiens
ctcacccaggcgggcgtcgacgtcatagtcttgatggccggttcctgccttaactgatgacattccaccacaaaagaagtgaa

SEQ ID NO: 354367 - DNA, 76 bp, Homo sapiens
aaaaatctgcatattttatatggagagaaagaagttttcccatttccagaagttagccaagatgaacttaatgaaa

SEQ ID NO: 354368 - DNA, 74 bp, Homo sapiens
gggggaccaaaaggaaaatgctacccagcagttcaagcatccaggatattgcagtcctcttcaacatcatcatc

SEQ ID NO: 354369 - DNA, 113 bp, Homo sapiens
ctcagctgtacactcccagtgtgtcactgggctggtgttctccccacacaggaaagatcgtcctacttggagtaccaaaaagtaatgagagaaatagaacatttgagtcgttt

SEQ ID NO: 354370 - DNA, 51 bp, Homo sapiens
attctggtgcttatggtgcctcagtgacgggtcagtcttacgagaatatgg

SEQ ID NO: 354371 - DNA, 100 bp, Homo sapiens
agttgctcatggaggtgcacggaaatgggaagaggcccagtccagagagatttgttcccgacaaggagttttctggttcagaccgtagacagagaggccg

SEQ ID NO: 354372 - DNA, 90 bp, Homo sapiens
cctaccatctaaaatacgaaggtttctggctgggctacattggcgtggtgaaccgcagccagaaggatattgagggcaagaaggacatcc

SEQ ID NO: 354373 - DNA, 98 bp, Homo sapiens
ctaccactacttgaatcagtctggatgtgtagaagacaagacaatcagtgaccaggaatcctttagggaagttattgatgagaacaagttgagcagtg

SEQ ID NO: 354374 - DNA, 100 bp, Homo sapiens
ggaagactccctgcctcctgagtcccagagtggaaacaaaatgtcagtcagtgtgcatgagaaccgcaagtccagggccagcagcggctccattaacatc

SEQ ID NO: 354375 - DNA, 98 bp, Homo sapiens
cggtggggagcctcagcgtgttcttctgtgcggagatcaccccgacggtgataagcttgagggagccttaccatcggtagtcaacgggtctgctttcc

SEQ ID NO: 354376 - DNA, 50 bp, Homo sapiens
caagtgcattgcctttggaaacgagtcttactactttgaccgcgatgatg

SEQ ID NO: 354377 - DNA, 95 bp, Homo sapiens
tcgcaagcatattgatgaagtagtctatccaccacctgtggatcccaagaagctgattgattctttagaaatcgccctgaagtctggctatggaa

SEQ ID NO: 354378 - DNA, 90 bp, Homo sapiens
aggaaacatggcggcggcgggtgttgtgagcgggaaggttgtctgcattcaaaagagcattctattaaagctaccttaatttggcgctta

SEQ ID NO: 354379 - DNA, 90 bp, Homo sapiens
ttctgaatcatcgggtgttctctactccagagctccgacttatttctgtgggcagacattaacattcagataagccatcaccaaactcag

SEQ ID NO: 354380 - DNA, 96 bp, Homo sapiens
gcttttcggttccgggtcttggccccgtccttacctcacagcatccacccgttttgtcaagtgtgaaaagtgtcatcatttttttgttgtgctatc

SEQ ID NO: 354381 - DNA, 83 bp, Homo sapiens
ggcgtgtgcgcgcccgccagctgctccggagatacgggtggatgtgaacactgaccggaagatcagtgccaaggagatgcagc

SEQ ID NO: 354382 - DNA, 101 bp, Homo sapiens
tgcaaaagtggaagcgaagccgaaaaaggcagcagcgaagggatcagtaatggggaagtggtggactggatggactcgactggggaagaagtgagcctgtg

SEQ ID NO: 354383 - DNA, 152 bp, Homo sapiens
gttgtgaggaggaactggactttagggctgtggtgatggatgaggtggtgctgacaatcgagcaaggaaacctgggccttccgcgtggccgaggagcacttgggcatcccagccttgctggatgccgaggacatggtggccttgaaggtgcc

SEQ ID NO: 354384 - DNA, 117 bp, Homo sapiens
cctggatccagatgatgtcttggcagatgttgttgaagataaagacaaggctttgatgcggcctggaagaattgatagaatcatctatgtgcctttaccggatgcagcaacaagaag

SEQ ID NO: 354385 - DNA, 82 bp, Homo sapiens
ctcattgggactgctctagatcttcactatccaatacgatggacggagaggggttgcttaacgaagaattgccaaattgctg

SEQ ID NO: 354386 - DNA, 100 bp, Homo sapiens
ccccgaacacctccaacatgaagcttcttcatgttttcctgttatttctgtgcttccacttaaggttttgcaagtcaagagaatccatcccattaaatga

SEQ ID NO: 354387 - DNA, 75 bp, Homo sapiens
atgaaatggaaatacagctgaaagataagattaagattgcggccctgcgcatgtatactagctgtgtggagaaaa

SEQ ID NO: 354388 - DNA, 100 bp, Homo sapiens
taagaatgagaatgaatctgaaaaaagagaactggtattcaaagaggatggtcaggctgctcgggagcaacagatcctggagaaacagaaaagagccagg

SEQ ID NO: 354389 - DNA, 75 bp, Homo sapiens
gtgatggcctacgggagcctgccacaagtatatggttatgatgacttgcagatgcttcagacaagatttccattg

SEQ ID NO: 354390 - DNA, 100 bp, Homo sapiens
ccacatccttactggttgcctaattttatggatgtcttcacgtggtctttaccgtttgttggagaaaaaggaatggtctgccgaaaaccgaccgacccgg

SEQ ID NO: 354391 - DNA, 75 bp, Homo sapiens
actacctgctgtacaccctcaacaaacaccagcgctttggcaaacatgtcttgacggaagacatagtacaccggg

SEQ ID NO: 354392 - DNA, 98 bp, Homo sapiens
gtgcgattgtggttcagttggcacaaccgtacatgattgggtcaatacggaatcctgaagtgggtaaaactgattgacaactttgaaggggaatatga

SEQ ID NO: 354393 - DNA, 100 bp, Homo sapiens
ccagagcctgccccccatcgcggtggccgagaacccgggcggccccccgagccgagggctgctggacgacggtttccagcacaggagaaaacgacgctcc

SEQ ID NO: 354394 - DNA, 82 bp, Homo sapiens
aggagtcggcggctcagttgtccatgaccctgaaggtccaggagtacccgaccctcaagatcgcaccccctccctccctggc

SEQ ID NO: 354395 - DNA, 82 bp, Homo sapiens
cgcgccgacggctgctcaaacatcagggaaagagagcttgaggcaaacaaaaaagaaaaaatgaaagaagcacaacttgaag

SEQ ID NO: 354396 - DNA, 83 bp, Homo sapiens
gtctggagtgcgtgggggaccggctgttggcggagccctgagaccagtgcaccgctgctgcctgaggcccaagggaatgctgg

SEQ ID NO: 354397 - DNA, 75 bp, Homo sapiens
tgattccccggaatcgtgtgctgggctggtcccccttgacaatgcatgcccactctcagttctgcatgagtgggg

SEQ ID NO: 354398 - DNA, 74 bp, Homo sapiens
agaaatcacattggaccctcctcccaactgtaggtgaagccatcagtgtctacagcttcagctattgcccgtgt

SEQ ID NO: 354399 - DNA, 100 bp, Homo sapiens
agtggctgtcgtgaagacatctgcgtgtgcggggtgcgtgggtgcctggagatgaagctggaaaggcccgatgagagaaagggaaagttaaggatgctgg

SEQ ID NO: 354400 - DNA, 99 bp, Homo sapiens
cggccaagagtccggcccctgctgaccttccttccgctgaccgagacatgggtgcccggcaccgcgcccgagcccactccattcagatcatgaaggtgg

SEQ ID NO: 354401 - DNA, 75 bp, Homo sapiens
gagcatgatcggcatgtccaccaaggcagtgtactaatggtcacttgatgtgcgctggctgttttatccacctac

SEQ ID NO: 354402 - DNA, 90 bp, Homo sapiens
ttgtatagagatgtgatgttggagaactacagaaacctggtctccctaggaaatcacattctgcctgatgaagatctggcttcctttcac

SEQ ID NO: 354403 - DNA, 75 bp, Homo sapiens
ggaaaatatataccatgatctacaggaacttggtagtagtcaatcagcaggtggaactgtcaccgctgttcccag

SEQ ID NO: 354404 - DNA, 100 bp, Homo sapiens
cttggtataccttgctacaatagcagattctaatcaaaatatgcagtctcttttaccagcagtgatgatgaacagtctacacagatggctgcaagttggg

SEQ ID NO: 354405 - DNA, 101 bp, Homo sapiens
cggccatggaggtctacatcccgtcctttcgctatgaagagagcgacctggagcggggatacacgaggcaaatttctggagatgtgcaatgatctcttagc

SEQ ID NO: 354406 - DNA, 101 bp, Homo sapiens
tgacggcgccggttcgctgcccggtccgcccgcggtgagaggaatcagtgacattcaaagatgtgtctgtggacttcacccaggaagaatggtaccatgtc

SEQ ID NO: 354407 - DNA, 74 bp, Homo sapiens
actgcagatattaaatctgggagcaaaattgtatttaaccaactccaaacaggcctctgagcccaagctaagcc

SEQ ID NO: 354408 - DNA, 100 bp, Homo sapiens
gcgaggacctcaaagtgggacaatatcctctgtggagaacacccccccatggaggcgaggtagagttggggtcgcagagccatgtccattggagcccgtt

SEQ ID NO: 354409 - DNA, 50 bp, Homo sapiens
tcacaagctgcaccagcttctaaccgagtccttggatgtggctgtgttgc

SEQ ID NO: 354410 - DNA, 50 bp, Homo sapiens
ctggacaccaaatacccgtacgggcaagttaaagtcttcagagccctgta

SEQ ID NO: 354411 - DNA, 74 bp, Homo sapiens
tctgctcttccaacaccagtggaagatgatcacatcccagctgccactggtgacatgccaacttaccagatccg

SEQ ID NO: 354412 - DNA, 75 bp, Homo sapiens
tgggtctgtgcaacaatggcttcatgcaccacgagccctatgagtttgtctctctggaatggctgcaaaagtggt

SEQ ID NO: 354413 - DNA, 82 bp, Homo sapiens
ccacgcaaccccagatccatttacactttacaatagggatgaggaagaaatgaccaaacgagatgacaaaagagatatcaac

SEQ ID NO: 354414 - DNA, 100 bp, Homo sapiens
aaggctctgaaagaatacatcaagattctgaatctggtgatgaacttagcagcagctccactgaacagataagggtctacctgcaagtcggatttcccag

SEQ ID NO: 354415 - DNA, 82 bp, Homo sapiens
ccctgcgtcgccgggaccctcgcgcgcgaccgccgaatcgctcctgcagcagagggaaatcctcattgacgattcaatttgt

SEQ ID NO: 354416 - DNA, 101 bp, Homo sapiens
gtggcatgtcctcagtgcaatgctgaatacctaatagtttttccaaaattgggtctatcagtccttgtaataatgatggccactgttgtgacaactatcac

SEQ ID NO: 354417 - DNA, 98 bp, Homo sapiens
ggatcctccagccccacttggagaaccaggaaaacctttcaatgaactgtgggattatgaaggttcctgggtggagctacccatgaacagcagcaatg

SEQ ID NO: 354418 - DNA, 100 bp, Homo sapiens
ccatcacgggaggaggcagctgcggcggggccggtgtctttccgatagccgttcctggtgagacatcctctttatataaaacctgggcattcagaatcag

SEQ ID NO: 354419 - DNA, 50 bp, Homo sapiens
ccagtggagcttagacaatctctgatctgcatctccaatggatactgagg

SEQ ID NO: 354420 - DNA, 80 bp, Homo sapiens
atacaaagtccttggaagcaagtggctgttcttgtagttttctgcatagataagtaataatagacgtggatggaatacaa

SEQ ID NO: 354421 - DNA, 100 bp, Homo sapiens
cttcaggctatggccagagcagctattcttcttatggccagagccagaacagtccgtgggctgctggacaccctggtgactgacctgatggtcctggctg

SEQ ID NO: 354422 - DNA, 100 bp, Homo sapiens
cagcaacttccaaaggagcagttgctagtggccatttacaggaatcagccacttcagttcaggaactgcaagcacatgttgaccagataactgaaatggc

SEQ ID NO: 354423 - DNA, 89 bp, Homo sapiens
aaacagtagccgtgttaacgaacagcctgaaaaatccccctccgtgctaactgttccagtgacaaaaatgctgagtttcttccgtagaa

SEQ ID NO: 354424 - DNA, 71 bp, Homo sapiens
ggctgaaatggaagcatatgttctagaagacattcttgagttggatgttgatggacagatagactctattc

SEQ ID NO: 354425 - DNA, 100 bp, Homo sapiens
ttaaatcctcgtcaggtttacagtctttctggaaatggaccaatgccagggtccacacgttccgaggcccacactggtgtgaatattgtgccaatttcat

SEQ ID NO: 354426 - DNA, 75 bp, Homo sapiens
cagctgtacgagatccagcacggggacctgaagctgcttcgggaggacctgaaggagaagaaggagaaggtggag

SEQ ID NO: 354427 - DNA, 100 bp, Homo sapiens
ctgattcctgccttgtcttctccactgttcctggaggaatccgagaagagcagagcggagggagccccagacacgaaaaggagaacaacttcccgccact

SEQ ID NO: 354428 - DNA, 98 bp, Homo sapiens
gaggagcagtgcttggctccctgcagtttggctacaacactggagtcatcaatgccccccagaagtgctttgacgatagttgccctctatatacttag

SEQ ID NO: 354429 - DNA, 100 bp, Homo sapiens
ctctgagcgggacacaattcacaattctttatagagtgaaggctgcacagactgagttaggacagcaaatcctggcagattttgaagaagcgtttccttc

SEQ ID NO: 354430 - DNA, 83 bp, Homo sapiens
agacgcagccgtagacaccagctccgaaatcaccaccaaggttgatgataattagaagcatgctttccactgaacttcccgac

SEQ ID NO: 354431 - DNA, 100 bp, Homo sapiens
tttttgaagcctttgcaaaagaataaagggattcattcctcattttaactgatgttacagtgaagatgggttcttgaactcttggaagcctggatgagcc

SEQ ID NO: 354432 - DNA, 100 bp, Homo sapiens
tagaattgatactcagcagctggaccggcaaattaaagcaattatgaaagaagtcattccttttttgaagactttcaagaaaatatgcacactcttctca

SEQ ID NO: 354433 - DNA, 98 bp, Homo sapiens
ccatctccgcatcaggaccaaggtgatgaccagtggctgggagacggtggacatgacgcttcggcggaacgggctcgggcagctgggcttccacgtga

SEQ ID NO: 354434 - DNA, 100 bp, Homo sapiens
gagaaagaagtgtccggccgggccatccccttcagttcctgggcttcccgatggactcgagtttttactatgtgagcatcccggtgcctgcacagcaagg

SEQ ID NO: 354435 - DNA, 51 bp, Homo sapiens
ccccttgcagaagacgccgtacgagggaagtcgagataacatgagtattgt

SEQ ID NO: 354436 - DNA, 100 bp, Homo sapiens
ttcccatggttgccggctcccctctcaggacaacccagatgtgcaacaaagtgcgatggtcagtgtgagaagaagattgtttctgagcttgagaagcttc

SEQ ID NO: 354437 - DNA, 50 bp, Homo sapiens
gttgtgtaaaggctacccttgcatgcccaagagaatcgtaaatgcaaaaa

SEQ ID NO: 354438 - DNA, 83 bp, Homo sapiens
ctcgttgcggccatcgccctgccggaccgcgcctcaggctcccccagggaaccttctgaccagcctcatgggctcctcagagc

SEQ ID NO: 354439 - DNA, 100 bp, Homo sapiens
cgaaggactgtcattgacaaatgctctccacccctagagttcttggatgactctgactctcatttagaaatccaaaagccaacaaatggaattttcttga

SEQ ID NO: 354440 - DNA, 100 bp, Homo sapiens
cgcgaagctggccaaagcctgcccagacggctcacctgtgcgggatggaacaaaagaatggctctcttctgtgtataaacagcagtggtttgctatgctg

SEQ ID NO: 354441 - DNA, 100 bp, Homo sapiens
cgattacggggctgcccgccgggaaaccgtgcaggattggtggtgattttcatagccaattacagaatgtctgaaggggacagtgtgggagaatccgtcc

SEQ ID NO: 354442 - DNA, 95 bp, Homo sapiens
gacccatcttgtacagcaactggctgtcaaaggtattgatgaagatgaccctactgctgatgataccagtgctgctgtaactgaagaaatgccac

SEQ ID NO: 354443 - DNA, 100 bp, Homo sapiens
ggagacattctgatggaatttgggtatcatcagagagtcttatatattgatatagatattcatcatggtgatggtgttgaagaagctttttatacaacag

SEQ ID NO: 354444 - DNA, 99 bp, Homo sapiens
aaaattagagtgaatgtagttgcaccagaattagaagtgcgtctcaccaaccagccaagatgaacatggtgaagaggatcatggggcggccgaggcagg

SEQ ID NO: 354445 - DNA, 101 bp, Homo sapiens
aagggttacaagttgctgccaccttatcttagagttattcaaggggatggagtagatattaataccttacaagagtgtgatttggaaggaatcatgccaaa

SEQ ID NO: 354446 - DNA, 99 bp, Homo sapiens
aaccgtttgaaaaaagttaaagatggagcaaaaccactttccctgaaatccgacactactgattctagtcaaggaagctgaatatggtgggcatgatca

SEQ ID NO: 354447 - DNA, 100 bp, Homo sapiens
cacagagatacccagacaacaggatcgtctcgtccaagaagagccttcttcggcttgaaggtagccctaatatttccagtacttgttttacttactgtat

SEQ ID NO: 354448 - DNA, 100 bp, Homo sapiens
ttgcattggtttggctttggctacacagcactggttgtttctggtgggatcgttggctatgtaaaaacaggagccaaaaacctgtatatcatctccgtga

SEQ ID NO: 354449 - DNA, 75 bp, Homo sapiens
agaaggactgggatgatacaccttttccacagggaattgagttgaaataagcgggttttgaaaacaaaaaaaaga

SEQ ID NO: 354450 - DNA, 74 bp, Homo sapiens
atcgaatatgatgttccttgtcaccttcaagctctaagcgaaagacatgaggcctcagcctgaaatgaggttgt

SEQ ID NO: 354451 - DNA, 83 bp, Homo sapiens
cgcggggtaatggggggtcagagtgccggaccccagcacacagaagccgagacgacaatgcagatcttcgtgaagactctgac

SEQ ID NO: 354452 - DNA, 94 bp, Homo sapiens
ggcgatgacagctgtaaagcacgaacaggaatacatggaagtccgggagagaatacacagagccaatcttggaaatgcttgaagaccacaaggc

SEQ ID NO: 354453 - DNA, 82 bp, Homo sapiens
gacctagtggaagtggttctttcagcaaaggaaggagtctgaaactcagtgtcaaactgaaaataaatatgattctgtaagt

SEQ ID NO: 354454 - DNA, 75 bp, Homo sapiens
caatattgtcttaacatgcttcaaataaatcagatcttcagtttagatcttggaggcatatcaactgtggttcta

SEQ ID NO: 354455 - DNA, 75 bp, Homo sapiens
caccctgctcagcttcaccatcgtcagcctcatgtacttcgcctttaccaggaaaatttctaccttgaaccgtat

SEQ ID NO: 354456 - DNA, 100 bp, Homo sapiens
aacggaccagggcctggtgcagtggctacaggaactgaatgtggattcaggcaccatccaaatgaccccgccagcaggctaagatggctgagtattgccg

SEQ ID NO: 354457 - DNA, 131 bp, Homo sapiens
ccaccatccacgccagccgcaccatgccgctcctaagcctgcacagccgcggcggcagcagcagtgagagaacccttaggagaaatcttgagagtggacagcaattgtgaagatcgccagagagttctgtg

SEQ ID NO: 354458 - DNA, 96 bp, Homo sapiens
ggaatttttcccattggatgagtcgggcaatgtggttcccagtgacaccaacattctggacacgtgggcggtcaagtctggcaccatctttgacaa

SEQ ID NO: 354459 - DNA, 99 bp, Homo sapiens
cggaactcctctgtggccagcgacctggaacgggctgttgaggaagaagacgctggtcccagggccgccaggttcgagccgcccggtcaagggccaggt

SEQ ID NO: 354460 - DNA, 110 bp, Homo sapiens
cacagaggaatgaccaccatggcagatggcaacagaggatgtcaacaattttttggagtatcgatcaggatgggatcctcatagaggggcagataatgtttctactaaat

SEQ ID NO: 354461 - DNA, 100 bp, Homo sapiens
ccgcggccaaacggtgcctgcggtgcctgagctgagtgaggccgaggccgggaggccgtgcccggagggccgttgctccagggagaactgcaaatatctt

SEQ ID NO: 354462 - DNA, 80 bp, Homo sapiens
ctacgacgaaattagccagctccgcctgggatcgaaaattgtacaatttgggattaaaaggctattacatcagagacagt

SEQ ID NO: 354463 - DNA, 100 bp, Homo sapiens
acttctcggcggcccacgcagcccgtggcaagggtcctggtgcccaaaaggaagatgaaaaatttctgacagatttgtttgcacaactaacagatgaagc

SEQ ID NO: 354464 - DNA, 82 bp, Homo sapiens
gtcaacctgcgcccccagatgtcccaggccataaaattttgagtagaaaaatccagaaatttgaaaatcagtatcgtggtag

SEQ ID NO: 354465 - DNA, 90 bp, Homo sapiens
gatcatacagcagatgtccagctgggtccgatacgccgagcgggtgctgggtcgccccatcactgcccacctctgcaccgccaagtcccc

SEQ ID NO: 354466 - DNA, 100 bp, Homo sapiens
cactactacagtcgaatggccaactatcggaacacgagcgagattcctctggttctggtgggaacccaggatatatttttgccatcatggatcagtttgg

SEQ ID NO: 354467 - DNA, 90 bp, Homo sapiens
tcctggcgctgctggccgcgctgctgctggccgcacgcggggctgctgcccaaggggactcattctcacagttccggtttgctgaggaga

SEQ ID NO: 354468 - DNA, 51 bp, Homo sapiens
aaaagtagctgatgaagatgatgcaatggtggatgtgatctttgctgatgt

SEQ ID NO: 354469 - DNA, 99 bp, Homo sapiens
gcaattatgagttatgtgttgacatacttcacagagaatgcagttgtcttgacttcaggtctgtctgttctgttggcaagtaaatgcagtactgttctg

SEQ ID NO: 354470 - DNA, 82 bp, Homo sapiens
gccttagctgtgctcgcgctactctctctttctggcctggaggctatccagcgaaggatcgagatcgagaccgggatcgtga

SEQ ID NO: 354471 - DNA, 100 bp, Homo sapiens
gtctgagtcggagctcggcaggaagtgggaccggtgtctggcggatgcggtcgtgaagatagtgacctacggcatgatgagctccaatgtgtactactac

SEQ ID NO: 354472 - DNA, 82 bp, Homo sapiens
gctgcagacactgaacgaggagccagtgagacgagttgtactgctgtcacaggaaatggacgctggattacaagcatggcag

SEQ ID NO: 354473 - DNA, 90 bp, Homo sapiens
gattaatgctacttgcaaaggcgtgtcctactgcacagatcctggccaatttggagcaaggcttagcagaagacggcggcatgagcagcg

SEQ ID NO: 354474 - DNA, 100 bp, Homo sapiens
tcaggaagaaagtgcctgccattcttatcatttctaagcaggttcatgccagcccagaacagagaatcagctaaaagatggcggcaaggcagcccaggca

SEQ ID NO: 354475 - DNA, 100 bp, Homo sapiens
agggaagacaggattcaactttggaaacctccatatacagatgaaaataaaaaagttggtttggcattaaaggactctgtctactagtgacgatgtcgaa

SEQ ID NO: 354476 - DNA, 98 bp, Homo sapiens
ggtcttgtatgcagtagtctggccggaccgacactgagaggcccaggtgtttggaaagcaggaaagaggaggccaggctgagtcagtgctgattctct

SEQ ID NO: 354477 - DNA, 101 bp, Homo sapiens
ctatgatgctgatggtgatggagattttgatgtggatgatgccaaagttttattagcactattcctgatcagagaactccagttgcttcaacacacagtat

SEQ ID NO: 354478 - DNA, 82 bp, Homo sapiens
tgtattccaccacctccgccagttaagaggaaaaaggactcggtgcggctgctggcggtggaggcgtgcgtgaacatcgccc

SEQ ID NO: 354479 - DNA, 75 bp, Homo sapiens
gctggtggcggcggcgctttcggcgcgggcccgggccccgagcgcccgaacaggaagaagaccagctacaaggaa

SEQ ID NO: 354480 - DNA, 100 bp, Homo sapiens
tgtttttctattcatgattggacatgtcctagacatcacttagagatcatggaagggaagtggttgctgtgtatgttactggtgcttggaactgctattg

SEQ ID NO: 354481 - DNA, 97 bp, Homo sapiens
ggtgacagagttcatgttgtgtgctgggctctggacaggtggtaaagacacttgtggggtgtcagcacagcgggctactcctagggataagcccccg

SEQ ID NO: 354482 - DNA, 90 bp, Homo sapiens
cagaaatctgaaaatgcccctggggagacacatgcacaagacagcaggtccacgagatccagtcttgcatgggacgcctggagacggcag

SEQ ID NO: 354483 - DNA, 100 bp, Homo sapiens
cagattccgatttgacgggcaaccaatcaatgaaacagacacacctgcacagggttccattaacttcaaatgatgatgaagatgaagataaagagaaaat

SEQ ID NO: 354484 - DNA, 75 bp, Homo sapiens
gtgtacagtgctgcgattctggagtacctcactgcagaggtgttgacttcaaaatcaaaactgtagagctaagag

SEQ ID NO: 354485 - DNA, 102 bp, Homo sapiens
tgggagatccacagctaagacgccaggacccactggaagcctagaaatgtgacctgaaaaaaatgtctggatttctagagggcttgagatgctcagaatgca

SEQ ID NO: 354486 - DNA, 100 bp, Homo sapiens
acagcctacatggtcctctttgacttcggcaacctacagcctggccacagcgtcttggtacacatggctgcaggttacaccggatgacatcaattgaaag

SEQ ID NO: 354487 - DNA, 75 bp, Homo sapiens
ctagggattacagtgggtttgactcaattcaaacagtgtttaagaatgaaagcctcaacgcagaatcaaaatctg

SEQ ID NO: 354488 - DNA, 82 bp, Homo sapiens
cagatgaacaacctgccttgcgccatgcaccagattggggatgtcaagtggagaccatcctgggcctcacaggagcgaccat

SEQ ID NO: 354489 - DNA, 98 bp, Homo sapiens
gcataccctgagccagattgaaacttctattgcaacagttcagggcaaaatggaatatgtttttgaattggatgttcccgggaaagtggaagatgttg

SEQ ID NO: 354490 - DNA, 83 bp, Homo sapiens
gttcggctggaaggaaccgctctcgcttcgtcctacacttgcgcaaatgtctccggtatacaaaactaggatatgctggaaat

SEQ ID NO: 354491 - DNA, 100 bp, Homo sapiens
gtcttggattcgtgaacagaccacagtggaccacttctggggtttttctttggactcagggaaaggtattgtttctaaagatgagatcacttttgtatct

SEQ ID NO: 354492 - DNA, 75 bp, Homo sapiens
aagatgacagacttggacaacatgtcccaacattacatcccaaaaatgatgcatcctgttgccagcagtaatcca

SEQ ID NO: 354493 - DNA, 75 bp, Homo sapiens
tgttctcagaggagaagctgactttctctctgcgtctgatggagggtcacacctgggtcctgagctggcgccatc

SEQ ID NO: 354494 - DNA, 75 bp, Homo sapiens
aggaagctttggatcagacttttgtgttgcagttcgggtgaccaagaatatggcccaggtgaccaaagccctgga

SEQ ID NO: 354495 - DNA, 100 bp, Homo sapiens
agaggtagccagaagaagcagaataactaaaaatgtgcctaaacaaagctctcagcttgatgagaattggggggttctatgctctttccccataccccgg

SEQ ID NO: 354496 - DNA, 97 bp, Homo sapiens
gggagcgcggagaggaggctggaagaggaagatgcctagcacagaccttctgatgttggcctctcactcaagaagaaattgctcagagacgtgagcg

SEQ ID NO: 354497 - DNA, 100 bp, Homo sapiens
gcaatatttaattcagcctttggaagttttttgcccacttcgatgtgttgttcttgtcgcacttagggacatcaatcaaggagaagagcttttttcaaac

SEQ ID NO: 354498 - DNA, 82 bp, Homo sapiens
catccacagaatagacctgaagacaaaaatccagaagtacaagcagtctggtatggggaggatgtcaggcaggaccagcagc

SEQ ID NO: 354499 - DNA, 146 bp, Homo sapiens
ctgatctcaacgactgcgtctccatcaaccgggccgtgccccagatgcccaccgggatggagaaggaggaggaatcgacaagcaaagtggatcagcaaaggctgcagtcaccagcatcttttccaaccttaatgaactgtatcctc

SEQ ID NO: 354500 - DNA, 76 bp, Homo sapiens
aagatcaagcactggaaccgcttccgagacggctcttccgtgggcggcggcttcgcgggcttggagttcgcgcggc

SEQ ID NO: 354501 - DNA, 76 bp, Homo sapiens
tgtgcttcaacaaaggacactacatcaaggactgcccccagatcaatgtaaccactgtgcgggaatatctgccaga

SEQ ID NO: 354502 - DNA, 75 bp, Homo sapiens
caccgggagtcagcagagtgaagtatggggctgagactgaaaagttgcagaagcagctggcttcggagaaggaaa

SEQ ID NO: 354503 - DNA, 76 bp, Homo sapiens
ccagctgcccggtgcccgaggaggcagccaagctcatggcctgccactgcgtgcatctctggaaacatggctacag

SEQ ID NO: 354504 - DNA, 90 bp, Homo sapiens
ggcctcggcctggatgggcagcgccagagagcgctcagggaatccgggaactactggatgttgctaaacaggacattccgttcgacttct

SEQ ID NO: 354505 - DNA, 100 bp, Homo sapiens
tgtgtgtgcgcgcgaaggagcggaagaatggcagtgctcaaactcaccgaccagggtggctcctatggacggaaaacagtcttaagaggcaactccgatg

SEQ ID NO: 354506 - DNA, 83 bp, Homo sapiens
caacttgcgagccatggggctggcggatgcgtcgggagttcaggatggtcaacggcagcagcagctgtgagggccgcgtggag

SEQ ID NO: 354507 - DNA, 75 bp, Homo sapiens
agcgactgcggcgccgagccgaccttcacggcatggtgcaactcccacctgcggaaggcaggcacacagatcgag

SEQ ID NO: 354508 - DNA, 75 bp, Homo sapiens
tcggcggctgatttagaaggaggttcaggctacggtgagccgaagatgcctgggaaccactcacctccttctgtg

SEQ ID NO: 354509 - DNA, 82 bp, Homo sapiens
ccttgaacagctatgcatgctgcttttgatgtctgacaacgtggatcgttgttttgaaacgaaactctgatgaggaagaaag

SEQ ID NO: 354510 - DNA, 100 bp, Homo sapiens
gtgcggaggtcaaactggcaatatttgggagagcaggcgtgggcaagtcagaaagcaggaattatgtttcaaatggacaatcatttaccaaaccttgtta

SEQ ID NO: 354511 - DNA, 88 bp, Homo sapiens
aaattgcaagtgtgagtgacgatcacacctgcagatttcgatggggtcctctatcatatttcaaatcctaatggagacaaaacaaaag

SEQ ID NO: 354512 - DNA, 74 bp, Homo sapiens
tcgaaatcctggatactgcagggacaaaaacaaccctttttgctgcacatgtaagtggagctgtgcttaccttt

SEQ ID NO: 354513 - DNA, 100 bp, Homo sapiens
gcgtgatgttgtcctggcaacgttttctacaccttataacagggcccgctacctggcttctgtcccagcctcccagtgtgtgccctttctgatcagcctg

SEQ ID NO: 354514 - DNA, 100 bp, Homo sapiens
cttcaaactccagcaaactggaaagtgaatctgaagttgacaagcagcagcatagaccctggtctgagtatcaagcagttgggtggtttgtatattaatt

SEQ ID NO: 354515 - DNA, 100 bp, Homo sapiens
cacaaacgccgcaccaggtcttgtagcagcgcctcctcggttggtggcagtggccctcctgtacctggaacaagaagatgctttctggtgtctcgttacc

SEQ ID NO: 354516 - DNA, 75 bp, Homo sapiens
gctgctttaaaggaagctgcccaaacccgagattgtgaagatggaaagggtccaacccctggaagagaatgtggg

SEQ ID NO: 354517 - DNA, 75 bp, Homo sapiens
gaggcagctgtactaggactgggaacgggtctctaattaacagaagatggcaaagcccagccacagcagctatgt

SEQ ID NO: 354518 - DNA, 83 bp, Homo sapiens
tccctcttagtgtacagaagttcatgaaaataatgttgagtttccatgaagaacaggaagtactgccagaaactttccttgct

SEQ ID NO: 354519 - DNA, 100 bp, Homo sapiens
gaatgtattcttggaatgcctcttctgtgatgtgaaacttcagtatgcagtccctatcatcagccagcagggggaggtggattgctcaggtaatgacctg

SEQ ID NO: 354520 - DNA, 82 bp, Homo sapiens
cagaagaagagcttgagtttggggccttctgcagctgaaatcaatcaagtctgatatcctgttgggcattctggacaacttg

SEQ ID NO: 354521 - DNA, 100 bp, Homo sapiens
attacaggaatgcagtaatcgtggccaagtctccagcctcggcgaagagggcccatgcagaatctccaccatgtgtagacaacctaaaaagtgacatcgg

SEQ ID NO: 354522 - DNA, 100 bp, Homo sapiens
ctcacccgcgcctgcgacctcgacgctatgtccagcaaaggctccgtggttctggcctacagtggcggcctggacacctcgtgcatcctcgtgtggctga

SEQ ID NO: 354523 - DNA, 83 bp, Homo sapiens
ctgttgtgcctcttcatattggcgatcctgttgtaacatggtccaagacaattcctgggaaagttcagttcttctcaagtgag

SEQ ID NO: 354524 - DNA, 100 bp, Homo sapiens
cgggcgccgcggccgccaggagcggctccgcgccgcagtccccaggtttttagaacttcagccataaaaatgggcagaattttccttgatcatatcggtg

SEQ ID NO: 354525 - DNA, 51 bp, Homo sapiens
cttgaacatcctttgactggttagccagaaaacctgttagaaatgtggtgg

SEQ ID NO: 354526 - DNA, 100 bp, Homo sapiens
gctctgctgtttctgatggggattctagaagcagttcggttatacctgggctatgtatgtcaaaaaggatgttcctttgtggcaaaaacatggacggaac

SEQ ID NO: 354527 - DNA, 120 bp, Homo sapiens
tgaaaacagactcctgtgatgtaaatgactgtgtccagcaagttgtggaacttctacaggaacgggttgctgcagcaactggtcacacagtagtgttggtagaccagacagaggacatcc

SEQ ID NO: 354528 - DNA, 98 bp, Homo sapiens
tgttcccggggcagatccaggttcaggctccaccgaggacaccgcgtccagcttgtgtggcgaggaggacacagaggacgaggagctggaagccgcgg

SEQ ID NO: 354529 - DNA, 90 bp, Homo sapiens
attcacttgtcgccttacttcctgcttaagccagcacagaagtgtctggagtggttgattcacagggcagctgcaatgactctccgcacg

SEQ ID NO: 354530 - DNA, 83 bp, Homo sapiens
tgcaggttacaagcagcagatcccaccttcagtcctggctctgacaagccctccaggaaaatgtttataggaggccttagctg

SEQ ID NO: 354531 - DNA, 98 bp, Homo sapiens
ggggagtgcacggtcagcacccaggaacacgaagccccgggcaccttccgggtggagttcagtgaaagggcagaacattcctgatgtagatgaagaag

SEQ ID NO: 354532 - DNA, 100 bp, Homo sapiens
gaatcaacacagatggggccgaatataacatagaggttccaagagagagaaggtcatcaacagcaaagccagaggtggagcaccctgagccagatcacag

SEQ ID NO: 354533 - DNA, 100 bp, Homo sapiens
caaacgtatgggcatcatcgtgcggaaactatgttccaacttcctgtcaacaatcttggcagtttaagaaaagcccggaaaactgtgaaaaaaatactta

SEQ ID NO: 354534 - DNA, 74 bp, Homo sapiens
gagattcagccagcacactcctcgcgagcaaggttgaaatcacaaagattagacacctttttagataggtgttc

SEQ ID NO: 354535 - DNA, 100 bp, Homo sapiens
aagagaatgtgtcagccgatgcaccgagtccagcccaggaaaatggagaggacacatgacggaagtgtgtatttttgggccactccacggcaggtcccta

SEQ ID NO: 354536 - DNA, 82 bp, Homo sapiens
gggggattctcgacctgctaacagaactggaccttttcggctgatgaattcatccgagcaaatgccaccaacaagctgacag

SEQ ID NO: 354537 - DNA, 75 bp, Homo sapiens
cagaggacgacatgttgcttttcgtggaggtgagaattatgaagatgatgacctagtaaattctgatgaggttat

SEQ ID NO: 354538 - DNA, 82 bp, Homo sapiens
tgaagttcgagcactaatatttaagaaagaagatgttaactttcagggacaagcagatcttttgaaatatgctaagaatgag

SEQ ID NO: 354539 - DNA, 101 bp, Homo sapiens
gctgttcgagacttcagtatcctcatcaacttgataaagttctgtcaggccaagcagaaggcagccttgctggagctgctgcatgaactctacaatttcct

SEQ ID NO: 354540 - DNA, 100 bp, Homo sapiens
ttgataccaactatcaaatttcgacactgttctctgttaagaaatcgacgctgcactgtagcatacctgtcctggctataagtcaccatggcacagcaag

SEQ ID NO: 354541 - DNA, 89 bp, Homo sapiens
gccctcttgatccccggcttgctgaagtcaaagaaggcccgaacaagacaggaacgtcctgtgccctggactgtggagctggcattggg

SEQ ID NO: 354542 - DNA, 83 bp, Homo sapiens
cctggatcttcgaacttttgacacggctttggaaacgacgtcatgtgttagcatttaaatcaaacggtattgagatggattgg

SEQ ID NO: 354543 - DNA, 90 bp, Homo sapiens
gaggtggtctgctcctgcttcgtgggctaccagctgctgtctgatggtgtctcctgtgaaggtgaatatgagaagggcgtagaccatctg

SEQ ID NO: 354544 - DNA, 75 bp, Homo sapiens
tttggaatttccaacacgagaagtatatgtccctcacactgtgtacagatatgctgtgatagcatttggatgtgc

SEQ ID NO: 354545 - DNA, 101 bp, Homo sapiens
cgttacgctattcgttgtggtccaaaacagtttacctcttatctaacaggtaagaattgtgacaaaggccagtcttttttcattgacgccccagattcccc

SEQ ID NO: 354546 - DNA, 100 bp, Homo sapiens
tagagaattagaagatgatgagcagtttgtttctctgtatggcacagaagaatatttggtgtttgtagaagtctataatctgactgcagacccagaccag

SEQ ID NO: 354547 - DNA, 100 bp, Homo sapiens
gtgaaacatggcggtaggctgggaccataacacaaggcagtttggtggttatgccaaggaagcagactacgtagcacaagccacccgtctgcgtgctgcc

SEQ ID NO: 354548 - DNA, 51 bp, Homo sapiens
tgccaatatggtatgcggttctaagagagtggtcaccatgggccttttccg

SEQ ID NO: 354549 - DNA, 75 bp, Homo sapiens
cccaccggtagagtcgctggaccagtattgatcctccagaaggtggagaatggagacctgagcaacaagattctg

SEQ ID NO: 354550 - DNA, 96 bp, Homo sapiens
ggagagagttcttctcttacagtttgttacgggcaggtatcatttatcactgtgatcttaccaaagaggagctggagccaagagttttccgagagg

SEQ ID NO: 354551 - DNA, 75 bp, Homo sapiens
tcctagagagaggcgatgggcctattgctgaacaatgccgcaaaatatctgccagtttacagtcccaaagtcccg

SEQ ID NO: 354552 - DNA, 100 bp, Homo sapiens
ccggggatcaaagagcagtgggggttgctgacccagaggagagttctccaaacatgatcgtttactgcaaactggccagctcagcgtccctggaagggaa

SEQ ID NO: 354553 - DNA, 71 bp, Homo sapiens
cagagagacgaacagctgtggccattgcagggtttggaatcacttgctaggagtcttgtctctctgccacc

SEQ ID NO: 354554 - DNA, 50 bp, Homo sapiens
tgtttgatgagacctttgaattggcctgtgaactcggagctgttcctgcg

SEQ ID NO: 354555 - DNA, 75 bp, Homo sapiens
ccatcaacagtttgactacataataaggatgatgaattgtactctacagagggctgctgaagtatcaaactaatt

SEQ ID NO: 354556 - DNA, 82 bp, Homo sapiens
ctacggccctgtgggcctgggagctgcctctgaggaacacgccgcagggactttgaacatgtcggggatcgccctcagcaga

SEQ ID NO: 354557 - DNA, 102 bp, Homo sapiens
ggtgatccagcaaggtcggcagagcaaggggcttacgcagaaggacctggccacgtaagactttgaccccgacgcaggcttcagtgattgccgcggatcaga

SEQ ID NO: 354558 - DNA, 136 bp, Homo sapiens
ccccgaatatgaaattgcatgtgaacacgaacactctaattgcctcctgatagcacacagaaagatatcattgaaatggattccaagcgtgtgcctcgagacaagctggcctgcatcaccaagtgcagcaagcaca

SEQ ID NO: 354559 - DNA, 96 bp, Homo sapiens
gggcgatcaaatggtcccggctgctgcagggcgggggcgtccccaggagccggacagctcaaactggaggattataaggatcgcctgaaaagtgga

SEQ ID NO: 354560 - DNA, 100 bp, Homo sapiens
ttcaagccgcaacaaccaggataccttgaaatgtggaagcaaacatcggcggcctacagtcagctcacagttcaaggtggttgaccagattgacaccctg

SEQ ID NO: 354561 - DNA, 99 bp, Homo sapiens
atgtatcataacaaccgactcataaaatcttttgagaaggtggggtgccaggtgaaggccaagatgggcttcagggaaggtgaaggattgggtaaatac

SEQ ID NO: 354562 - DNA, 75 bp, Homo sapiens
ggcctactcgcccgccaccctgcgctgccgccgctctgaggagttaaagatgaagactggcccatttgcagagca

SEQ ID NO: 354563 - DNA, 75 bp, Homo sapiens
gccagacgacaagcacacactatggcgctgaaacggattaataaggtaagaatgattgatgttggctgatattgg

SEQ ID NO: 354564 - DNA, 100 bp, Homo sapiens
gaaattgataaagaaggtgtgattgaaccagacactgatgctcctcaagaaatgggagatgaaaatgcggagctggatcagatctgcatttcttttgacg

SEQ ID NO: 354565 - DNA, 74 bp, Homo sapiens
gacaggaggcagtagccaaacacccagcaagggcaagtattttgtaaccttcccatatccatatatgaatggac

SEQ ID NO: 354566 - DNA, 75 bp, Homo sapiens
tccgccccgacccgggccccgcggccctcgatgaggaagcctgcaaccggccccacaaattctagcagtgccaag

SEQ ID NO: 354567 - DNA, 100 bp, Homo sapiens
ggaccgggaaggagcatcccaggacctaccagaatctgcagagagagatcatcattgcctgaatttagctttgtgactgcaagagcaagaccagttcctg

SEQ ID NO: 354568 - DNA, 100 bp, Homo sapiens
ctggagtactcttattttgaaaaggagtggaagctggacacactatgtgacttgtatgaaaccctgaccatcacccaggcagtcatcttcatcaacaccc

SEQ ID NO: 354569 - DNA, 75 bp, Homo sapiens
cttccttctgtcacatcacacccaatgaattatatccagatcgagagacagaagattctgaaagggttcaatgaa

SEQ ID NO: 354570 - DNA, 90 bp, Homo sapiens
gaaggccttgtgctgaccaagctgctcacctcgtgtaaggcaaacattggtgggcaccgatcttcctgttcattctgcaagaacccaaga

SEQ ID NO: 354571 - DNA, 115 bp, Homo sapiens
ccggccccccacctccccccggagccaggctggtttcggaaatgcccttacagcagcaggtactccaaagattcaggtttactcacgtcatccagcagagaatggaaagtcaaat

SEQ ID NO: 354572 - DNA, 100 bp, Homo sapiens
gcaagacaacttcttttacagcagcaaacaagtggattgaaatctcctaagagcagtgataaacagagaccactgcagcattttgaaagcgaagcagaag

SEQ ID NO: 354573 - DNA, 100 bp, Homo sapiens
tttattgaagctcacctttgtctaaataagggcaagattcttgccaagagaattaatgtgcgtattgagcacattaagcactctaagagccgagatagct

SEQ ID NO: 354574 - DNA, 100 bp, Homo sapiens
caccagaatacgtcttccactgtcagagtcctgtgaagataaatcagattagcttggatgaaagtggagagcacatgggtgtgtgttcagaggatggcaa

SEQ ID NO: 354575 - DNA, 75 bp, Homo sapiens
cgtgacgctggcaggacccttcagacctcctgccccccgaggtctgcagtctcctgaacccagcagccatctacg

SEQ ID NO: 354576 - DNA, 98 bp, Homo sapiens
ttgacaagacgcggctgccgtacgtggccctcgatgtgctctgcgtgttgctggggctgatcccttatccaacatggttctaaccttcagtactaaag

SEQ ID NO: 354577 - DNA, 83 bp, Homo sapiens
ctttctggcctggaggctatccagcccccagtggacaggaaagctaaggcctcagcgatgccggactccccagcggaggtgaa

SEQ ID NO: 354578 - DNA, 73 bp, Homo sapiens
cgaggggatcctcatgagttaagaaacatatttctacagatcttttagagaaatctcgggttgttaaacagcc

SEQ ID NO: 354579 - DNA, 95 bp, Homo sapiens
ccaagcggtttcaaacggcttagagcaggccgcttggttctgacccagctgagttgtcacaggtagtactgatggaattggaaaatcatatgcag

SEQ ID NO: 354580 - DNA, 75 bp, Homo sapiens
atgaaataacctttgacaagattttcaatcagaaaattgggcaataaaccttggatttccctgcccaggggaaag

SEQ ID NO: 354581 - DNA, 99 bp, Homo sapiens
attcaggaaagtgcaggttctgggaagtctcggtgggttccccgcaaaatcagacatatggaaagttgatcatgtgctggagcgcttgcagagtgaaag

SEQ ID NO: 354582 - DNA, 75 bp, Homo sapiens
gggacctgaagaagatgaacaagcgccagattcttgtagacactgtttgggctctgtcatacttgacagatggag

SEQ ID NO: 354583 - DNA, 75 bp, Homo sapiens
attattacagcttcatatgcaccagaaggagatgaaggtggttatcactaggctaaaactggacaaagaccgcaa

SEQ ID NO: 354584 - DNA, 100 bp, Homo sapiens
atgagaaggacgacaagcccatccgagcatgaatgtcagcatcatcattcaaagaacaagaaacattctaagaaatctaaaaaacatcataggaaacgtt

SEQ ID NO: 354585 - DNA, 98 bp, Homo sapiens
attccaagaaaaggcacagatggagttgcaggactatgttcagaaaacctactcagaagacacctaccgtcaccaggagactaaagtccatcaaaaac

SEQ ID NO: 354586 - DNA, 50 bp, Homo sapiens
gagaatgagatagccgtcctgagaaacgggtcacagaaagtcgagagagc

SEQ ID NO: 354587 - DNA, 83 bp, Homo sapiens
cggcgagcgcgagcggcgcgagaaaagcctggagacacaggccccatccttcccaatggggacacttcagggagcggctctca

SEQ ID NO: 354588 - DNA, 83 bp, Homo sapiens
ggcaagttggagggagagatgcaaataccaggttgtgaccgagattcccgacgagagagactgaggggaagagaggaaggagg

SEQ ID NO: 354589 - DNA, 101 bp, Homo sapiens
gactgattttatgggaaaattaagcagatgctccagtttgagaaacctggatctgcgatctgtttgtggggaagccatatgtttttgaccgtgtattcccc

SEQ ID NO: 354590 - DNA, 90 bp, Homo sapiens
gcttcctgagcaccgccagccaccggcaccaagaccggccacatcccagcactgcccacctctgataccggggagaccacgacgctgcct

SEQ ID NO: 354591 - DNA, 96 bp, Homo sapiens
gaaagaatgaactggttgtgcaggaaccaggatccgaacccgcctccccagccccacttggacgtcagccccacccttggatccttcagggtgggt

SEQ ID NO: 354592 - DNA, 150 bp, Homo sapiens
ggtgaagatcggacactacgtgctgggcgacacgctgggcgtcggcaccttcggcaaagtgaagagagagtaagacgggcagctacacccgcagcagttacctgccagctgagcaactggtcagagtggacagattgctttccgtgccag

SEQ ID NO: 354593 - DNA, 50 bp, Homo sapiens
acctgcagcactcaggccaggaggctggcgttgcagacggggcgtgaacc

SEQ ID NO: 354594 - DNA, 100 bp, Homo sapiens
tgggaaactgcagcctgacttgggctgccctgatcatcctgctgctccccggaaacaaattcctgtcccttgtgccgctatgagctgcccactgatgacg

SEQ ID NO: 354595 - DNA, 98 bp, Homo sapiens
ttaatctgggccaaaaggaatgaccctagccagactcagggatcaaagagcaaacagattcagtggcctgcattggcactatgtcgtccgaggcccag

SEQ ID NO: 354596 - DNA, 82 bp, Homo sapiens
ctccaggagttcgtctcttacgtctgcggaagtgcagctgcctcagttcttagcgcagaaactaatctggattcactccctc

SEQ ID NO: 354597 - DNA, 96 bp, Homo sapiens
atacactcatcattccagaggagggtaaaaggctgagaagcttaagattgcattcatggcttctctggcaacccacttcagcaatcagaacagtgg

SEQ ID NO: 354598 - DNA, 97 bp, Homo sapiens
acccctcctgtaacccagcctgtttcacttcttgttgcacactgacaagaaacagatcagtgttgggttcattggctatccaaatgttggcaagagc

SEQ ID NO: 354599 - DNA, 100 bp, Homo sapiens
gcagacaccatgaaggtgctgggagtgcagcggcctctcctacagaagaagctcattcacacagaagacccatttaatgatgaacatcaggagaggcaag

SEQ ID NO: 354600 - DNA, 74 bp, Homo sapiens
aagagatattgaaaccttacctccaaaggttatgatcatagctactacttcattgcaacctttattactgacca

SEQ ID NO: 354601 - DNA, 100 bp, Homo sapiens
gaatgaagaccacaataaaagagacctctacttagctcagcaattcttaccttaggaagaaattgttgagcttccagatttggattacctgcgaaccatg

SEQ ID NO: 354602 - DNA, 75 bp, Homo sapiens
ctgtgtgtccagaacgtgccatggagacgcttaacggccgaatacatcaagcaatggtaacatctttaaatgaag

SEQ ID NO: 354603 - DNA, 83 bp, Homo sapiens
cagaaaccccgttgacaaggcactgctttttcatgacggcaggccagaaagcagacccagggaggatagcacatgtcttcggc

SEQ ID NO: 354604 - DNA, 82 bp, Homo sapiens
tttcttcctgcccctcgttgatgagagcattcgaagtgacctcagcagggcatccaggtgctggagaatctggtaaaagcac

SEQ ID NO: 354605 - DNA, 75 bp, Homo sapiens
cttcgagctgcgcatcgtggatctgattaaagacaaatttacatgtattggagaccagaccagaagcccttctga

SEQ ID NO: 354606 - DNA, 82 bp, Homo sapiens
tccaacgctgctccctgtctgcaactgacttatggcctcatcctgcatgactcgcctgtcccggtctcgtacagcctctctg

SEQ ID NO: 354607 - DNA, 98 bp, Homo sapiens
acatccctcagggctccttggcctacctggagcaggcatctgccaacatccctgcacctctgaagccaacctggataacgcagatgaacaagcagccc

SEQ ID NO: 354608 - DNA, 98 bp, Homo sapiens
gaccaaccagcctccccctgaagattctgccgctgattgctatcacttctgcagaatccagtggtgttatccaagataaattctgtgggattataaac

SEQ ID NO: 354609 - DNA, 149 bp, Homo sapiens
cctgtggcagtgactttcttggatcgggtcgcctgtgtggcaagagtagaaggagcatcgatgcagacatgggagtcccaccgtattgtccaggctggtctcgaactcctgacctcaagcagtcctcctgctttggcatcccaaagtgc

SEQ ID NO: 354610 - DNA, 100 bp, Homo sapiens
ccgtcgggattactatgacagaggatatgatcggggctatgatgatcgggactactatagcagatcatacagactcagtggagaaggagttggaccagtc

SEQ ID NO: 354611 - DNA, 100 bp, Homo sapiens
ccacactgcaatgatataggaatgaggtgctgaacagcattttttttgagcttgaagcggatgagagagagcccacagagtctacccaacagcttaacaa

SEQ ID NO: 354612 - DNA, 100 bp, Homo sapiens
ccttgcttcgacacgcctgctgttaaatacaagtattcagctcttattgaggtcccaatattgaagcccatggatcttatggtagaagcgagtccacggc

SEQ ID NO: 354613 - DNA, 102 bp, Homo sapiens
catgaagctaccggccagggttttctttactctggggtcccggctgccctgtggcctcgctcctcggaggttgctgaacctgtttgcatgagttgctcctga

SEQ ID NO: 354614 - DNA, 74 bp, Homo sapiens
atccagcaaaaccgctgctaaattgtcaactagtgctaaaaggccaggtgtggtgtcttacacctgtaatccca

SEQ ID NO: 354615 - DNA, 51 bp, Homo sapiens
caccctgacctgcttacgcccagactgacttccttttggtagtactgcgtg

SEQ ID NO: 354616 - DNA, 110 bp, Homo sapiens
gggcgccccgagcccggctccgcgcgcctggcggctacatggagagtgtcagatgaagtggccattctgcctgcccctcagaacctctctgtactctcaaccaacatgaa

SEQ ID NO: 354617 - DNA, 98 bp, Homo sapiens
gaaaacaaaaactgatgaccaagagaatgtgtcagccgatgcaccgagtccagcccaggaaaatggagagcccgtggaacacagagcattcctaatga

SEQ ID NO: 354618 - DNA, 96 bp, Homo sapiens
tccttttaatttggtacctcatgtggacaacattgagacagccaacagttttgctgtaacaaacgcctattcagaatggacagtttagaagaacct

SEQ ID NO: 354619 - DNA, 75 bp, Homo sapiens
aacagactatgctgggcttattaagatgggtgtgaacctgacacgcagcaacaaggagacggtgaagcacagcga

SEQ ID NO: 354620 - DNA, 99 bp, Homo sapiens
ttcaatgggcagaagctaaagctatattttgcacaggattccttcctcaaggctcagcagtggctgaaggacctggaggaggagctgcacccaggagaa

SEQ ID NO: 354621 - DNA, 75 bp, Homo sapiens
atggagttgtacttaaatgcagacacaaggagaatggtgttgaacgcgtgtgtcctgagagcctgctgcagtcca

SEQ ID NO: 354622 - DNA, 135 bp, Homo sapiens
tggcgtgcactccgcacctcggggacattattgcgcgtggaacggctgcttttggaagtcaccttcaggccattcagaggaggaaagagaggggaatatgaagtcagccaagccccaagtgaaccacagtcagca

SEQ ID NO: 354623 - DNA, 75 bp, Homo sapiens
tttgacactccagaagagaggtatcagaagcttaaaaaggtagttgatgtcacttggcgatattcctgcaaacat

SEQ ID NO: 354624 - DNA, 100 bp, Homo sapiens
agagcaccaaaacacactggaaacaaacagtatttctactggaaaaaccattttcagttaaagcagcaatgtacaggaaagggaagcacagtttggaaca

SEQ ID NO: 354625 - DNA, 90 bp, Homo sapiens
tgggaaagttattgaacggctgggccagagcgtggttgctgaccagttgaaaggtacccagactcatggtatcgtgatatcacatccaac

SEQ ID NO: 354626 - DNA, 50 bp, Homo sapiens
tcatgctggggtttgctagggatggagagttatgtccccaccgtgtttga

SEQ ID NO: 354627 - DNA, 90 bp, Homo sapiens
cactccttcactccaaactgcatctacgatatcaagtctggaaaagtttgaaattccagtaaaaattcgtttgagtcctgaaccgtggac

SEQ ID NO: 354628 - DNA, 98 bp, Homo sapiens
catactcacagagttagagagagggatggtgatatttggagtctgggagtgatccttttcatgttggtgtgtgggcagccgccctttcaagaagccaa

SEQ ID NO: 354629 - DNA, 100 bp, Homo sapiens
cagcggcccgcgggacggcggaaggacgcgcgcaccgaggctcagggggtccggccgcgcgccgaggagtcgcttgtagcagcctagggcctaggcccgg

SEQ ID NO: 354630 - DNA, 50 bp, Homo sapiens
accgcacgcgtggcatacggaaggaaatggtgttcacactggccctgaat

SEQ ID NO: 354631 - DNA, 100 bp, Homo sapiens
caaaaatggttattgcaagttgtgactacaactgttctaatgaggtcctatctattactgctatgttgtcagtatgaatctgatgaacaagaaaagagtg

SEQ ID NO: 354632 - DNA, 96 bp, Homo sapiens
ccatgtcctacgtgaaggatgacatcttccgaatctacattaaaggcctgagggaagacatgctggagaccctggttcccaaggcagagggtgacc

SEQ ID NO: 354633 - DNA, 90 bp, Homo sapiens
ctggatcttaccttgcccaccaacttcagagatttgtccaaggtgagagttacgtgtgtgcatccaatgaaccatttcgtaaagtcgatt

SEQ ID NO: 354634 - DNA, 74 bp, Homo sapiens
acttggttccccctccctcagcttccgccccaaaaggttcatgtggatgttcacagccattacaattctgtcgc

SEQ ID NO: 354635 - DNA, 80 bp, Homo sapiens
gtggctggctggatctctggtgagacatttttcttccttctgtcacatcacacccaatgctgcattgtcttccttgaggt

SEQ ID NO: 354636 - DNA, 85 bp, Homo sapiens
cgggacaagcgcgacgcccggcgcgagctcaagctgctgctgctcggtgaatgaaaactttgccattgatttgatagcagagcag

SEQ ID NO: 354637 - DNA, 75 bp, Homo sapiens
aaacaattgagatggtaccctctgaagcggaaggaatcggatgcacaaggacatcaagtggctgccaggttctcc

SEQ ID NO: 354638 - DNA, 74 bp, Homo sapiens
gtttgctgaaggatctgaaacgcatcacagacagtgatgtaaaaggcctgacctctcgggacacacccagccct

SEQ ID NO: 354639 - DNA, 80 bp, Homo sapiens
cattgtagaagctgccagaggagccacagaaaacagtgtttacttgggaactgtggctgcaccatctgtcttcatcttcc

SEQ ID NO: 354640 - DNA, 76 bp, Homo sapiens
ttagtcattgacaagtttggatcagacatcataaaactgcctctcactcaagaagaaattgctcagagacgtgagc

SEQ ID NO: 354641 - DNA, 73 bp, Homo sapiens
gggaagatggcggctgggttcaagtaagtccatggcctacatgcgcggcatgtactttcgcatgaaggatgag

SEQ ID NO: 354642 - DNA, 73 bp, Homo sapiens
gcaaggaccctttggaaggccgggtgggccgagagctgaagaagcaggtggagagtgccgagctgaagaacca

SEQ ID NO: 354643 - DNA, 100 bp, Homo sapiens
gtcatgagtcgcttcaagtttatcgaatccattgtccggcacactgcaaagacgaaccttcctactgggctccggtgtttggaaccaacatctatgcaga

SEQ ID NO: 354644 - DNA, 75 bp, Homo sapiens
ccaccctgcgccagagaccagataaagcactactgcagtcttcagttaagcaacaagtagaagctattgaaaaac

SEQ ID NO: 354645 - DNA, 100 bp, Homo sapiens
gtgggccctgaaaaacggagacttggatgaggtgaaagactatgtggccaaggtggtggtgctcaccaacacccccctggaggaccagctgcgagtgggt

SEQ ID NO: 354646 - DNA, 124 bp, Homo sapiens
gttcgtctcttacgtctgcggaagtgcagctgcctcagttcttagcgcagggaacaacctatcttcagcactcgagctcatgtcttccaaattgacccaaacacaaagaagaactgggtaccca

SEQ ID NO: 354647 - DNA, 100 bp, Homo sapiens
ctgctttcatggagggacctgtgaggccacagcaggatcacccctgggtttcatctgccactgccccaaggtatacgacatccctccctcatcagcaaaa

SEQ ID NO: 354648 - DNA, 100 bp, Homo sapiens
atgaaggacatattcctaatgctgtggattcctgtctccaaaagttttagaaagagcgttttcgctacgtaaagcacattcgataaaggatatggaaaat

SEQ ID NO: 354649 - DNA, 100 bp, Homo sapiens
aattcttcaaaccggagtcgggtcggttattcagcttctcaaggctggaaaagcgaaggaagtttcctacaatgcactagcctcacacataatctcagag

SEQ ID NO: 354650 - DNA, 100 bp, Homo sapiens
aatatagatgataaagacttcaaatggaaattagatgcaatattgaaaaacgtgcccaatttgttacacatgggtggtatcacggaaaacttgacagaac

SEQ ID NO: 354651 - DNA, 74 bp, Homo sapiens
gagggaggaagctgggacacccgggagtcaggaaatggccaagatcaaggctcgagatcttcgcgggaagaaga

SEQ ID NO: 354652 - DNA, 93 bp, Homo sapiens
gtgccgtggagggcctcgccatgtcctgctgcccggcagcaaagcacctgctctgagtggccatggggaagcgatacttctgtgactactgcg

SEQ ID NO: 354653 - DNA, 100 bp, Homo sapiens
cagcatcccgcggcgctgacggtcctggggagagcatggcgccgagggtgactatgaccagagcaggaccaaagtgctgcacatgagcctgaaccccacc

SEQ ID NO: 354654 - DNA, 120 bp, Homo sapiens
taccacctgaagacctacaagtcagtgcttcccgggagcaagctggtggactggctgctggctcagaaactggcgatggaatatgagaggagccctctggaaagaaaaggacagaccctg

SEQ ID NO: 354655 - DNA, 59 bp, Homo sapiens
cgagccaatgatgccatgcacctcagcatgctggaagtcactgcttcaaccacctgtga

SEQ ID NO: 354656 - DNA, 82 bp, Homo sapiens
cccacctggctgtgggaagaccatgttggcaaaggcggtggcacatcacacaacagtatgccctggagcgcttaaaggtcat

SEQ ID NO: 354657 - DNA, 75 bp, Homo sapiens
ctgtgtttcacttaccagaatactacgttcagctaaattaagtactaaggctcgtacgtctgcatcgattatctt

SEQ ID NO: 354658 - DNA, 76 bp, Homo sapiens
gaatgtttaaataatattggtgactcctctcctctgattagagccactgttgggattaatgaaaatcaagttccat

SEQ ID NO: 354659 - DNA, 100 bp, Homo sapiens
tgggaggctccgttgcctgctcccggagggagacgcgctgccgaggagaacccagcggcttgcgcgatctctggcctcttcaactgcatcaccatccacc

SEQ ID NO: 354660 - DNA, 83 bp, Homo sapiens
cttggactgagtcctgcaggacacagctgcagatctgggacacggccggccaggagcggttccgcaccatcacccagagctac

SEQ ID NO: 354661 - DNA, 82 bp, Homo sapiens
ctgggtgcgtggggctgcctcgccgcgtctcgccacgcagataatcaccagaatgggagtgaatgacttgtggcaaattttg

SEQ ID NO: 354662 - DNA, 98 bp, Homo sapiens
tacaaaccatccccgctccaagtgaagctggagtgaccgtctccttatcaagggaggcagaatcgtcaatgatgatcagtccttttatgctgatattt

SEQ ID NO: 354663 - DNA, 100 bp, Homo sapiens
ccagagattttgcatatgactcaggtgtcatggagaaactccagctgggcccagagattctgcagcgggaaaatccaaggcttatttatgccaggctgag

SEQ ID NO: 354664 - DNA, 50 bp, Homo sapiens
ccgagaagtgctcctactctcagcctgtggagggtcgtcaaatccgagtt

SEQ ID NO: 354665 - DNA, 50 bp, Homo sapiens
tggagctccggcagccgccctggtgctggatagtttactagtccagtatg

SEQ ID NO: 354666 - DNA, 114 bp, Homo sapiens
cctggtggacagcaaaggctttgatgaatacatgaaggagctaggtcagtttgctgagaacgaaaccaatgaggtcaattttagagagataccttcacatgtgctatcgaaagt

SEQ ID NO: 354667 - DNA, 75 bp, Homo sapiens
gccgagtggtctaaggcgccagactcaagggcattttgtcagtgatgctgatctttgccttcttccaggaacttg

SEQ ID NO: 354668 - DNA, 76 bp, Homo sapiens
gctggaaagcgagctccggaaagagatacgtgacggactactgttcgaagatttttggaagaatactgagaacggc

SEQ ID NO: 354669 - DNA, 101 bp, Homo sapiens
ggatcaggagccgccgccgccatatcagtgacaccacagccaaagccctatgggaagctttactgaacactaagcacaaagaggcagtgatggaagttcgg

SEQ ID NO: 354670 - DNA, 75 bp, Homo sapiens
ggcgagtccggtctcaaaatggagtgcctccggagccagcgtggtggccatagacaacaagatcgaacaggccat

SEQ ID NO: 354671 - DNA, 51 bp, Homo sapiens
actgttgagtatgctccatgtagatcactttattaaccttgcaagaactct

SEQ ID NO: 354672 - DNA, 96 bp, Homo sapiens
gtcggcgagcccccgcggcgacagagagaagaagaaggaggttcctgctgtgccagaaacccttaagaaaaagcgaaggaatttcgcagagctgaa

SEQ ID NO: 354673 - DNA, 97 bp, Homo sapiens
cctcatccacaccgtgttgctgcaaaaggactatcagtgaagaaaaaatgactgctgcccgcattagaaaatgccacaagtgtgggactggcctcat

SEQ ID NO: 354674 - DNA, 75 bp, Homo sapiens
gcaattgttgtgacttcactaataaagatggctgagagctagcaaggaaaactcaggaccatgatggctcagttt

SEQ ID NO: 354675 - DNA, 74 bp, Homo sapiens
cagagttcaaggaggccttccagctgtttgaccgaacagagccggtgccatctgtgggggctttgggccagggg

SEQ ID NO: 354676 - DNA, 100 bp, Homo sapiens
gtcagtacgcgaaggatatcggtttcattaagatgtcagtattgaatatggtggtgaggcgtgaccctggcaacactgaacctgtgaaagccaaggaaga

SEQ ID NO: 354677 - DNA, 100 bp, Homo sapiens
cattcagcagctttccattgatttgcaaaagtatcagaggttctggtgatagcagtcattcacaatctcaaggggaaagatatcaacatttcactgaaaa

SEQ ID NO: 354678 - DNA, 100 bp, Homo sapiens
tgtagctgccctttccgtttccagggttccgaccaggacagaatgacttggaagataacggagcttcgaagcttctagcagaatatgaagtctttcgtct

SEQ ID NO: 354679 - DNA, 49 bp, Homo sapiens
ttcaagagctcagaccctaaaagcaaaatggagccatctaccttccaac

SEQ ID NO: 354680 - DNA, 83 bp, Homo sapiens
ggacgaggacgaggacgtcaagggaactctaatgatccaggacaaagaagttaccctggagtatgtatcaagcctggattttt

SEQ ID NO: 354681 - DNA, 100 bp, Homo sapiens
gtgactcccaccacccgaagccgaataagcccagctgcagctccagcaggtggcgctgcagcagcagcagcaacagcagcagttccagcagcagcagcag

SEQ ID NO: 354682 - DNA, 98 bp, Homo sapiens
ccgtggaaacggaggaactacaaccagggagtcgtgggtgccaccatggcaactgcaccatacaactactcttacatctttaaatatattattattgg

SEQ ID NO: 354683 - DNA, 100 bp, Homo sapiens
gcacgctggactgcgagacggcccggctgcagcgagcgctggacggagaggaaagcggaagatgagaatgtgcctactgctcctgatcctccaagtcaac

SEQ ID NO: 354684 - DNA, 98 bp, Homo sapiens
tgacaggtccacagatcgcctgccttcagctcacacatggccaagatcaagcaaaagctgcgggaaattgaagagaatcagaagcggattgagaaact

SEQ ID NO: 354685 - DNA, 98 bp, Homo sapiens
acatggagacgcacaacttcaagctgccccaggacgatctccagggcatccagaagatctatgcctgatctagttgaatctgaagatgtggacctgct

SEQ ID NO: 354686 - DNA, 100 bp, Homo sapiens
tgcggccggagggcgcgggaatggagctcggaggcggcgaggagcgcctgcctgaggagagcaggtggtcaagaagaatacgtcttatcttatgaaccag

SEQ ID NO: 354687 - DNA, 96 bp, Homo sapiens
tacaagattcggaggtaacagtgaagggattcaggatatacggtgcaccttgggtaagcttgatgattaccaggaacgaatgaacaaaggggaaag

SEQ ID NO: 354688 - DNA, 90 bp, Homo sapiens
agaaaatagactatgatgtaaaaaggggagtgctgctaaatgcgttgaagctactaaacataagatggagtttcactcttgttgcccagg

SEQ ID NO: 354689 - DNA, 100 bp, Homo sapiens
gggaagtcgcctctgtgctcgtgagtgcatggggtataaggagcttactccacgggaacagcctctagataatctgagttgttgaaaatacgaagcctgt

SEQ ID NO: 354690 - DNA, 100 bp, Homo sapiens
ttcacctctgacagcaaccaccgacgcaaaggatttaacgctcagttccaaggtatcattgcccagtgcctaagatcttttatgttcagctcactgtagg

SEQ ID NO: 354691 - DNA, 83 bp, Homo sapiens
gtaaaattggacaatggctctttagagagttatctgagtacttaattcagtgcacaaatgagatgaatgtgaacatcccacag

SEQ ID NO: 354692 - DNA, 100 bp, Homo sapiens
agcaggaaggtgaccatgtttctcagacacattcatttttacaccccagcaaattcaacacccaacagcttccttaatagcaaaggtagcaacagcccag

SEQ ID NO: 354693 - DNA, 95 bp, Homo sapiens
gtgccgaggagcgggaagagttgctgggggaggagtctgctactagtcttatcagctcttaaaaacagaaactcatctgtccaagttcgtggcag

SEQ ID NO: 354694 - DNA, 80 bp, Homo sapiens
gagtcctgccaacaataacgagtgaagctgtggtctaccaatctagacaactcagtggcaagcattgaggcaaaggctaa

SEQ ID NO: 354695 - DNA, 82 bp, Homo sapiens
cacattctgcggctaaagatgcgcattagcacagggcaaggcttcccagagcctgtctccccaggaccgtgcagcatataaa

SEQ ID NO: 354696 - DNA, 50 bp, Homo sapiens
gtgttttgggatggaaaagaggagtccagacttcacagagaatgcagttg

SEQ ID NO: 354697 - DNA, 75 bp, Homo sapiens
ccagcctaaccatgacccaaatactcatcattgtttatgtggagcagatggttccaagaccaaagattaaattaa

SEQ ID NO: 354698 - DNA, 100 bp, Homo sapiens
atgatgatgatgatgatgctaccccaccaccagtgattgctccacgcccagagcacacaaaatctgatcagtttgacaacttagaaaaacacacacagtg

SEQ ID NO: 354699 - DNA, 88 bp, Homo sapiens
ataacaagaaaaagaagccgaagaaagaagaggaacagaagtggaaatgctttactggggtgtaacaaacacacgataaactgcgcat

SEQ ID NO: 354700 - DNA, 75 bp, Homo sapiens
gcttggttccttacttctagagtctggaatatttaaaaagtttccaggagactgacaaggcgtggcatgggggat

SEQ ID NO: 354701 - DNA, 90 bp, Homo sapiens
gtagatctagaagtcactttggaagaagtatatgcaggaaattttgtggaaactaagaaaaatggctttgtcagcccaacagatacccag

SEQ ID NO: 354702 - DNA, 74 bp, Homo sapiens
gatgccgtgggccgcagccactcaggactgtcaaagggtgtccgcaatgttgccagtgtctgtctgcagattgg

SEQ ID NO: 354703 - DNA, 50 bp, Homo sapiens
aacatggaactcaggcagaaattcgaggcagacctgttatcctaaactag

SEQ ID NO: 354704 - DNA, 100 bp, Homo sapiens
gcctccgtgggacatggagtgttccttccgctagtgatcctttgcaccctgcttggagacggacttgcttccgcaattgcttctccattcttgaagttcc

SEQ ID NO: 354705 - DNA, 75 bp, Homo sapiens
tagaacgttttggtactggaattacaactattatcctcctgtagagatgagagtccggagtgttgtcatgtgaag

SEQ ID NO: 354706 - DNA, 82 bp, Homo sapiens
aatcagatcatcaaggacttggcctccatggtgtcagagcaaggagaagctgttggtttggtgcacctcgatttggaggaag

SEQ ID NO: 354707 - DNA, 98 bp, Homo sapiens
agagggaacaggagcagctgcgccgggaggcagagcggctcagccagcggcagacagaacgggacctgtgtcagagggtctccccagacacccgagca

SEQ ID NO: 354708 - DNA, 90 bp, Homo sapiens
ccagccgctcgcaggcgccgcacggagttgcgtcccggggacttggggccgcagggagaaatgcactcggtgatggaaagagagccacta

SEQ ID NO: 354709 - DNA, 100 bp, Homo sapiens
gttggtgccagttggaaagaaccttttccaataagcatggattcctggttcattcttgttctgctcggcagtggtctgatatgtgtcagtgccaacaatg

SEQ ID NO: 354710 - DNA, 75 bp, Homo sapiens
ctggcggagctccacgacgagctggaaaagttcacagcaacccaatggacatgcctggaagagagctcaatgagg

SEQ ID NO: 354711 - DNA, 100 bp, Homo sapiens
tcgtgggacgcttcatcatgggcatagatggagaacgcctgtaaaccttgcagtattgaaactcagtgaacaaggcatcttagacaagctgaaaaacaaa

SEQ ID NO: 354712 - DNA, 75 bp, Homo sapiens
tggctgggatcggtatctgaccaaccaaaaaatatccaagggactgagtgaaaagatatttgcaaaacctgaaga

SEQ ID NO: 354713 - DNA, 90 bp, Homo sapiens
ggctgctgctgctgcagtgggacaggtggcggcgaccggcggcgtccgaggaggacggctctacatttggcctgtgccaatggtcatcca

SEQ ID NO: 354714 - DNA, 83 bp, Homo sapiens
tgaagagcgacaagccgctggcagccgcggatctcaccgccgctcaggggagtctccggtggactgcagcgttagcaaatgca

SEQ ID NO: 354715 - DNA, 100 bp, Homo sapiens
agcagatcagctgtataaacagaaaattattcgtggtttctgtcacttgtgtgatggtcaggaagcagaacatcagagagccatgcagagacgtgctatc

SEQ ID NO: 354716 - DNA, 82 bp, Homo sapiens
ccgccgcctccgcctcccaggatgagctgaacttaattcagtgcacaaatgagatgaatgtgaacatcccacagttggcaga

SEQ ID NO: 354717 - DNA, 100 bp, Homo sapiens
cgttcgtgctacagaagaagggcatcgtgcgtgccaagcggcgagctggtagccggtctgggtctccaggaagagttctgaccacaacagccctgtccac

SEQ ID NO: 354718 - DNA, 100 bp, Homo sapiens
ccatattctacggggctttcagcaaatcaaagccaggcgcatattaaatttcctattgactacccctattcaccacctaccttcagattcttgaccaaaa

SEQ ID NO: 354719 - DNA, 101 bp, Homo sapiens
tacaggacggactcctctctgtaaagaggatgcctggtgtgcaggagtatatacaacagcctattctcaatggtctgcgggataaggcttcatatgtcagg

SEQ ID NO: 354720 - DNA, 75 bp, Homo sapiens
ttgttaggaccaaacctcaaagcatggctaagagtgttcagtagaaatgggaaatgcttccagactgcacacttt

SEQ ID NO: 354721 - DNA, 100 bp, Homo sapiens
cctccacacactaaaaactggagtgccagaactgaaagagcagattcaggcgtggatgagagagaaacagaacagcgatcactaaaccgttccgccgccc

SEQ ID NO: 354722 - DNA, 75 bp, Homo sapiens
tctaccaacttcgccaccctgcggtggattgactacggcaaagtggccactcagcggtggagacacagagcacca

SEQ ID NO: 354723 - DNA, 90 bp, Homo sapiens
tggccatgggggacgtgctgtccacgcacctggacgacgcccggcgccagcacatcgcagatggagttttaacattgaatgcggagaaca

SEQ ID NO: 354724 - DNA, 100 bp, Homo sapiens
ttgtgacagctgcagttgctccccgcccccgagcagccgagcccaaaatggagttaatcctgactgggagaagaaagtaattgagtattttaaggaaaag

SEQ ID NO: 354725 - DNA, 100 bp, Homo sapiens
ccctgagccagagtccgtcatcggttactccggagaagattgattacagtttaaagacaatttctgtgatcaagttgtcatttggaagattaaacccatt

SEQ ID NO: 354726 - DNA, 102 bp, Homo sapiens
gcagcgacaacatggaggccgtgaagaccttcaatagcgagcaattctgtggtgttcttggtcacacatttatggagtttctgaagggcagtggagattact

SEQ ID NO: 354727 - DNA, 100 bp, Homo sapiens
gttatccaggagccacaaagtgagcgctggagagcaagtgtaagtcaggcgagaagaaggtggacgccctcctgaaggagaagcggcgcctggaggcaga

SEQ ID NO: 354728 - DNA, 100 bp, Homo sapiens
attccactctccagtgtaatgattattgacaacaggaccgtataatagacgctggccccaaaggaaactactctcgatttatgaatcacagctgccagcc

SEQ ID NO: 354729 - DNA, 100 bp, Homo sapiens
caggaggggcgagagggagccgcagctgatgtcagtctatttttcaggagcattgaactgaccagttatatttatatctgggagaactacaggctgttca

SEQ ID NO: 354730 - DNA, 100 bp, Homo sapiens
cggggaggaggaggaggaggaagaggaggagaagcttctcagcagtggaagccgatacctcattcgatcagatgatatgatagaaacagtttacaacgac

SEQ ID NO: 354731 - DNA, 99 bp, Homo sapiens
ctttgacagggacatcagtggagccttctcagacccacaggccgtcgctttcgggttctctcatcgcttcgtcgttcgccaatgtttgaggagaaggcc

SEQ ID NO: 354732 - DNA, 50 bp, Homo sapiens
tctgacatcaacatccgagacaacgctactgcagcactggggtgtcagtt

SEQ ID NO: 354733 - DNA, 100 bp, Homo sapiens
tcgcgctatgcaggcagactgcctgcagaaactacagcgatatctgaaatccggggtggccatcaggagaacaggaaggtgatcgcccccatgctgtccc

SEQ ID NO: 354734 - DNA, 97 bp, Homo sapiens
aaaagaagccctattgtaatgccctctgaagagccaatccattcaggatgggaaaccacgcaggcaaacgagaattaaatgccgagaaggccagtac

SEQ ID NO: 354735 - DNA, 100 bp, Homo sapiens
ctgtcctgaatacagtatctccttaagatggtgtggacggaaagcaagctcgcagaaccaattctagcactcccttaggggagctttttgatcatggcct

SEQ ID NO: 354736 - DNA, 99 bp, Homo sapiens
ctgggagattactaccagggccggaggattaccatcaccggaagcttcagggatgacttcttagggggcaggggaggtagtcgcccaggcgaccggcga

SEQ ID NO: 354737 - DNA, 75 bp, Homo sapiens
tgctacagcccctgcttgacaaccagcttgccaattctgtaactccttgggatatcttgctgagcttaattgcag

SEQ ID NO: 354738 - DNA, 82 bp, Homo sapiens
caggacagtcgcgaggttcgagtgttgcagagcctgcggggcaagatctctcccctcgccacagtcctgagcaatcgtttcg

SEQ ID NO: 354739 - DNA, 90 bp, Homo sapiens
agctcccaggccagttctctgaatgtcgagatgagacgtgcaggtaccatcaggaagcagcgggataagctgataaaggaaggaaagtac

SEQ ID NO: 354740 - DNA, 100 bp, Homo sapiens
gagccgggctgtggtcactaatgtacaggcagaaaacgagaggctcaccgcagtcgtgcaggatctgaaggagatttaatccagagactgacttcactat

SEQ ID NO: 354741 - DNA, 100 bp, Homo sapiens
ctcccacactcctgagccaggaacagatcaagggaggagattggacaggctggactccccattgcttttctaaaaatcttggaaactttgtccttcattg

SEQ ID NO: 354742 - DNA, 75 bp, Homo sapiens
ctcagcagtgatggggagagccatagcgtgtaaggcaaacattggtgggcaccgatcttcctgttcattctgcaa

SEQ ID NO: 354743 - DNA, 50 bp, Homo sapiens
ggccactcagagtcgcccgagaagttgcacagagcattgaggatcaccat

SEQ ID NO: 354744 - DNA, 100 bp, Homo sapiens
aaccagatacttatggagaagtacctgaagctgcaggatacctgccgtactcaggaagaacgcctcaggcggggtgatgacctcagattacagatggccc

SEQ ID NO: 354745 - DNA, 75 bp, Homo sapiens
ggaatcatggttggctctttctacatccctgggggctatttcagctcagtttgaaaatctgaacacagttgctga

SEQ ID NO: 354746 - DNA, 100 bp, Homo sapiens
ctggcagataaaggagagattcgagtaggaaaccggtaccaggcagacatcaccgacttgttaaaagaaggtggtctttgggaagaagcttcctgccttt

SEQ ID NO: 354747 - DNA, 98 bp, Homo sapiens
ttcatctcttctggggcaggggccagggccagatggagttttaacattgaatgcggagaacactaattatgcctatcaagttccaaacttccataaat

SEQ ID NO: 354748 - DNA, 98 bp, Homo sapiens
tcaaggtgaacgggcggcccctggagatgattgagccgcgcacgctacagtacaagataagtgggcggaaaaaccagcctttgggactcccctagaag

SEQ ID NO: 354749 - DNA, 90 bp, Homo sapiens
cacccagtcaaggacaaatggatctatgtgtcacatctggcagccaacaaggtctttgtaagggaatcctgcaaaacctggcagctatgt

SEQ ID NO: 354750 - DNA, 100 bp, Homo sapiens
gcccaactcggccatgagtccttctactggcagctgccggagacataccagggagacaagctgccaaggggccaagggatgagctggggccctccttccc

SEQ ID NO: 354751 - DNA, 100 bp, Homo sapiens
cgttgacacgtcttatttaatccacatcatagttcctacaacagcagccagtacccctgatgccgttgacaagtatctcgagacacctggggatgagaat

SEQ ID NO: 354752 - DNA, 83 bp, Homo sapiens
ctccgcagctctggttcctgttgcggccggtggcagaaagagcactctattattggaataatgaatacatcatgagtttgata

SEQ ID NO: 354753 - DNA, 98 bp, Homo sapiens
tgacaaaagcacagcaaagcagggagagcctcctcggtagagagcaacgaccagataaatttgcgcctcattttggtaagcggaaaaacaaaagagtt

SEQ ID NO: 354754 - DNA, 73 bp, Homo sapiens
aagcaaaacatgggaactcagtttatatgagttacaacgaacacctcagggaaaagttaaccattggatgccg

SEQ ID NO: 354755 - DNA, 75 bp, Homo sapiens
gaggcgcggagcgaagtgaagggtggcccaggtggggccaggctgactgaactgcggttggatttctcacgatgt

SEQ ID NO: 354756 - DNA, 99 bp, Homo sapiens
gtccattctcctcgcgctgcaaggatgctcctgggatttcggagaggccgcaggagtcatttcgaagaggagcaggacttggatggtgagaaggggcca

SEQ ID NO: 354757 - DNA, 73 bp, Homo sapiens
gattgaggagggccatctggctgtgtactacagaacccctgaacagtgcccaagtgttgtctctttgttgtca

SEQ ID NO: 354758 - DNA, 96 bp, Homo sapiens
ctggcttctgtccctgctcagtcggccaagaagccctgcccagtttaatcccatggaatcaatcaaattaaatcatcatgactacattgattcccc

SEQ ID NO: 354759 - DNA, 74 bp, Homo sapiens
ttgccaaccctcccaagaagttcagaggtaacagtcctttggacagcccccggaatttctctccaaatgcacct

SEQ ID NO: 354760 - DNA, 100 bp, Homo sapiens
gttttagagtaccaaccattgtgtgctgtgaggtaaaggcaatgaatcgctccctggctaatgtgattcttggaggctatggcaccacttcaacagctgg

SEQ ID NO: 354761 - DNA, 101 bp, Homo sapiens
gcagagtggaaaaaagagaggatttgcttttgtaacttttgatgatcatgatacagttgataaaattgttggtgaatcaaaaactctggttttaagcaacc

SEQ ID NO: 354762 - DNA, 117 bp, Homo sapiens
gtttgacaatgcaggtgccatgatgagtgtggatgaaacactaatgtgttcttttcaggcagtcacccgcagggccaaggtggctcccgctgagaggatgagcaagttcttaaggca

SEQ ID NO: 354763 - DNA, 90 bp, Homo sapiens
tttgggaaaacacttcaaatgctgaggtttactcctggcttgggggcattaggaagcactggaggctcttcgggaactaatggatctaac

SEQ ID NO: 354764 - DNA, 100 bp, Homo sapiens
ctggggccagggaaccctggtcaccgtctcctcagagcaccagcctccctacatcattgcagtgttgcctcgatatgttgagatccgaacatttgaaccg

SEQ ID NO: 354765 - DNA, 98 bp, Homo sapiens
ttgtatgtaccttcccagcaggcctttggttctgcatcaaaaatatcaacgatgaaagagtatttggagaagagatcaactttgggaaacttatcaca

SEQ ID NO: 354766 - DNA, 98 bp, Homo sapiens
gactgcagtgctgcagtgccagatgacagagcacgtagatcgccacgaaaacttcctacttcattaaaaaaaggagaaaggaaatgggctcctccaaa

SEQ ID NO: 354767 - DNA, 90 bp, Homo sapiens
caacgatgaggcatacgctgaggagtttggcaacgagacgtggggcgtaacaaaggcagactgagcgccagagaggacgtttccaactca

SEQ ID NO: 354768 - DNA, 98 bp, Homo sapiens
ttcacacggcagctggccaatgaaggctgtgacatcaatgctatcatgtgtattgtacgagcattgaaagatccaaatgcatttctttttgaccacct

SEQ ID NO: 354769 - DNA, 82 bp, Homo sapiens
ttgccgccctgcactgccgcttcggtcactatgagttattctccccacctcagaagtaccagcttttggtgtatcatgcaga

SEQ ID NO: 354770 - DNA, 90 bp, Homo sapiens
aggctgtgggacctgcagcagctgagaaaggagctcggggactcccccaaagacaagttctttccaaatggcaatgcatttgccactggc

SEQ ID NO: 354771 - DNA, 82 bp, Homo sapiens
tgctaaaaggctccttcagtgagcaaggcatcaacgagtttctcagttaatggccagccaagaccccttgaatcaagtcagg

SEQ ID NO: 354772 - DNA, 49 bp, Homo sapiens
ctccggggaggtcacctgacgaggaggaaaaggctgaggaggtgtatcg

SEQ ID NO: 354773 - DNA, 100 bp, Homo sapiens
ggtcagcggatccctgccttttgatggacagaacctcaagctgccagccttgccctggctctgaatggcgtctttaccaacacaataaaactgatcgtag

SEQ ID NO: 354774 - DNA, 101 bp, Homo sapiens
aaagcctctgtcaccacaccaaaatacaaatggggatctgtgactcatcagagtgtgggggttgtgaaaggtatgatctcgtgaaatcttgagagaaactg

SEQ ID NO: 354775 - DNA, 101 bp, Homo sapiens
tgcgtggaggaggcctacagcctcctcaacgaatacggcgacgacatgtatgggccagaaaagtactactataattccttgacccagcagtacctttactg

SEQ ID NO: 354776 - DNA, 74 bp, Homo sapiens
ggtcatacaccagtactaccaaggacagcttttttcctgcaaggttcgatacaagaggctgttttcctagcgtg

SEQ ID NO: 354777 - DNA, 80 bp, Homo sapiens
ctgtcccatcgcaaacccaaagatccccgttcctggagattctgattgagtccctgaagaggaaggagaaggaatatgag

SEQ ID NO: 354778 - DNA, 100 bp, Homo sapiens
ctggcgtgggcgccggattcagaataaaagggctatgaggcgatacttggaacggggtgagctggttgtcttcttgcctgccctgtgtcgtaaaatgggg

SEQ ID NO: 354779 - DNA, 100 bp, Homo sapiens
cctctgcgacctggggccctgggtgaagtgctccgtcgcccttgcctccagggattgtgggactttaccaaatcggtttgtaataacacctagaagacgc

SEQ ID NO: 354780 - DNA, 102 bp, Homo sapiens
ttcgcagtggtcgcttcttctccttgattttagtccatggagaacagaatgaaatggccagattgaaagcagcactgattcgagaatatgaagataacgatg

SEQ ID NO: 354781 - DNA, 90 bp, Homo sapiens
cagcagtgatggggagagccatagcggaaaggccgagggggacggcaagatgcacatcaccctctgtgacttcatcgtgccctgggacac

SEQ ID NO: 354782 - DNA, 75 bp, Homo sapiens
caagagggtgttcgactgctagagccgagcgaagcgaagctcttcgtgggcggtcttgactggagcacgacccaa

SEQ ID NO: 354783 - DNA, 83 bp, Homo sapiens
tgccatggaccccaggaatggttacatggagccccactaccggggaaatttgcagtggtgagaaaatgtataaagaaagattc

SEQ ID NO: 354784 - DNA, 100 bp, Homo sapiens
cgggcgaggccgggtacctgggctgggatccggagcaagcgggcgagggcagcgccctaagcagcagtagaagactcagaaagtggtgtttacatgcgat

SEQ ID NO: 354785 - DNA, 76 bp, Homo sapiens
tttactgtcaagacatttcttcggcattctgcaacagcaacacagtcactcctggcggcaaaccaaacaaaaccag

SEQ ID NO: 354786 - DNA, 100 bp, Homo sapiens
gatttttttgtgcagtgggcaggaagaacccatcgggcagctacacatcttgaaagagaagctcttcctgtgagccaacttctctttgcctgaaaaatgc

SEQ ID NO: 354787 - DNA, 75 bp, Homo sapiens
gcaggcagcaactgaggcagcggcaggctcaggtgcagccgctgttgtcacaggtagtactgatggaattggaaa

SEQ ID NO: 354788 - DNA, 50 bp, Homo sapiens
gaggtcttttgcaagaactgtctcagtgatgtcttatggtgaaattgaag

SEQ ID NO: 354789 - DNA, 74 bp, Homo sapiens
tgatctacctaccaatcgtgaaaactatattcacaggtcgtggagggcccccaagacccaacagagggatgccg

SEQ ID NO: 354790 - DNA, 101 bp, Homo sapiens
ccaatgtgggatcgatgtttcaatattggaagcgctttgatttacagcagctgcaggtgcaatggatgagcttcatagtctggatccaagaaggcaagagt

SEQ ID NO: 354791 - DNA, 87 bp, Homo sapiens
tagatgccattgaacagcacaaggttgcacttcctgcagaagaggattatttaccacttaaaccacgagttggaaaagctgctaagg

SEQ ID NO: 354792 - DNA, 76 bp, Homo sapiens
cgcgagcgtctgggcgggtggtaggtcctgtccctgctatcagtggggcactgaagaaagcaggactgagtcttaa

SEQ ID NO: 354793 - DNA, 99 bp, Homo sapiens
ggccattgtcgactgtggctttgagcatccgtcagaaggtagacggagtgcaccacccttgaacctcactggcctccctggcacagagaagctgaatga

SEQ ID NO: 354794 - DNA, 51 bp, Homo sapiens
ttatcgatgagttcatctaccagagctattctcaagctggaataactgaga

SEQ ID NO: 354795 - DNA, 83 bp, Homo sapiens
gccttgtgtcgcgtgctgctcttcctctcgcagttctgcattctgtcgggcggtgggagtgcatccgccccaacccttttccc

SEQ ID NO: 354796 - DNA, 83 bp, Homo sapiens
tctgggtgtcgcgggccggccccgcggggagcgcccccggcgcgatgcccttcaggaaagttctggaggctgggaagtccaag

SEQ ID NO: 354797 - DNA, 100 bp, Homo sapiens
tggatgtgacccaaggagagtgctacccggtgtactggaaccgaaggagccatggctctggacgggataaggatgccagatggctgctacgcggacggga

SEQ ID NO: 354798 - DNA, 80 bp, Homo sapiens
tacagatagtgaagaagaaatccgtgaggcattccgagtctttgacaaggtatttaaagcatgtgatgaagatcacaaag

SEQ ID NO: 354799 - DNA, 98 bp, Homo sapiens
ggagctgccacgtccgagacctggagcagccaccgccgcaatcatgagaatggatcttggagaatgtctgaaagtccatgacctggctttaagagcgg

SEQ ID NO: 354800 - DNA, 100 bp, Homo sapiens
gtgatttaaaagctgaaaatttacttctggatgccaatctgaatatcaaaatagcagacaatgcagatcttcgtgaagactctgactggtaagaccatca

SEQ ID NO: 354801 - DNA, 75 bp, Homo sapiens
ccttacctgccctgcctcacagcaagagaccagtcttggaggaggaactttttttggtctctgctgtcttcttac

SEQ ID NO: 354802 - DNA, 100 bp, Homo sapiens
ggatttaatacacagcagcagcagcaaactacctgagcctccaacaacaaacaaatggcagctggacaactggctgaccaaagtcagccagccagctgcg

SEQ ID NO: 354803 - DNA, 100 bp, Homo sapiens
agaagatctccatcctgctcaagacctgcaaactcatctacgactccatggccctcggcaacccaggctttatcctgtggataaacgcagagtgaacgag

SEQ ID NO: 354804 - DNA, 50 bp, Homo sapiens
agtgtctactgatcatctacctgatggtctatgttaacaatgaatgggca

SEQ ID NO: 354805 - DNA, 82 bp, Homo sapiens
ctccgccgctgcctcaggagcggaacaacgtcggcgagcggggtgtccctggccagtgtccttccacctgtccacaagcatg

SEQ ID NO: 354806 - DNA, 98 bp, Homo sapiens
agcttatgatgccaatttgtcccatgaacccttaggagaaatcttgagagtggacagcaattgtgaagatcgccagagagttctgtgtttcatcaccg

SEQ ID NO: 354807 - DNA, 100 bp, Homo sapiens
gcaagtattttcagcgagggtactgtatttatggagaccgctgcaggtctggccagcatgacccagaacttagagccacttctgaagaagcagggctggg

SEQ ID NO: 354808 - DNA, 75 bp, Homo sapiens
ctggggtagctgaagctgttgtagctgtgccaaatctgattccagttttgatgttcaaattgggaagaccactgg

SEQ ID NO: 354809 - DNA, 75 bp, Homo sapiens
tgctcgcgctactctctctttctggcctggaggctatccagcttctggcataaagcatgcttccattgcgagacc

SEQ ID NO: 354810 - DNA, 101 bp, Homo sapiens
ccgctgccccagggctgcggggacggacaagctgaacaaccagagctttgggactgacctgccgctggtggaccaccaagtggaggagcataacatcttcc

SEQ ID NO: 354811 - DNA, 100 bp, Homo sapiens
agccaaatatattctcctacatgggaaccaaagataaaagggctataacagttcaagaaattgctgttctcaacatcctgaggttagcattacacttctc

SEQ ID NO: 354812 - DNA, 100 bp, Homo sapiens
tggaacttgtgattgagcagtttgaagacttgctagttaggattttattactggcagcatgtatatcttttgtgcgcatgcatcgatgtccgacatgcac

SEQ ID NO: 354813 - DNA, 74 bp, Homo sapiens
gaacatgtggaaggtgcgcgagctggtggacaaagcgccaatgagaacagcctgctgagtgcgcagctcaaggg

SEQ ID NO: 354814 - DNA, 100 bp, Homo sapiens
gcggccggggcctggggctgcctgccgggcggccgggcgcggcgagcccaggctctgtgtgctccgggatggagcaggtgtgcagagggtgagaacccag

SEQ ID NO: 354815 - DNA, 142 bp, Homo sapiens
aactcttcagtaaatatctagcggatcctagtaatctctttgtggtttcttctgatttctgccattgggggtcctgatgaagaagctgttgtggatcttggcaaaactagctcaactgtgaacaccaagtttgaaaaagaag

SEQ ID NO: 354816 - DNA, 75 bp, Homo sapiens
atcgtggattccaagacatccctgctgagagagccaagtgctcccaaatgtgtcagaagaaacagtgtctcccac

SEQ ID NO: 354817 - DNA, 51 bp, Homo sapiens
gtttgtggagtcgcgagtgctggtgtccgtttcatgatcaacatgggagac

SEQ ID NO: 354818 - DNA, 75 bp, Homo sapiens
cagatctgccggattatgataggagaccgttgggttttggctcctgagtcaagaaacttttcttttgagctattg

SEQ ID NO: 354819 - DNA, 74 bp, Homo sapiens
cgacagcaggtcacagtggacgaggtgttggcggaagatggactctgtgactacatgactaataaaatatggca

SEQ ID NO: 354820 - DNA, 74 bp, Homo sapiens
cgttcagacctgggttcccgtccagttccattccttgcacagggagcaggggagagaagacagaagaggttgga

SEQ ID NO: 354821 - DNA, 75 bp, Homo sapiens
tgaggaaacaggaaggaaggagggtgaaaggaacgtccacctgcacacaaagtagagacggggtttcgccatgtt

SEQ ID NO: 354822 - DNA, 97 bp, Homo sapiens
agtgcagcggcaggcctggggatggcctcgggaggacagagcgggatgccaccagcttgtccaaagggaagttccaggagctcctggtgggcatcgt

SEQ ID NO: 354823 - DNA, 82 bp, Homo sapiens
cagtgagttgcgtgtctgcaagagagcatcctatctggctcacgaggcccagggaatcctctggaccatcagattaccaatg

SEQ ID NO: 354824 - DNA, 50 bp, Homo sapiens
gtcccagggcccaggccgagcaggtgtggtggctcacgtctgtaatccca

SEQ ID NO: 354825 - DNA, 74 bp, Homo sapiens
ttggaccaagtggagattatcatggccatggaagacgaatttggtagtgggcagcagtcagtgacaggtgtaac

SEQ ID NO: 354826 - DNA, 75 bp, Homo sapiens
aagtatttgacgaaaatagactggttttggcacagagcaggcgccctatggaatgcagacacagaattaccccaa

SEQ ID NO: 354827 - DNA, 98 bp, Homo sapiens
tgaaccacctgggtgcgatgtgcagaggtagagcatccgccagcgaggctcgggagcccagcctacaacacagcagtcccctcaggatgagcaggaaa

SEQ ID NO: 354828 - DNA, 98 bp, Homo sapiens
cgcagtggtcgcttcttctccttgggcggcgacgacctggaccccaactacgtgctgagctcgcgggtgcgcacgggccgcagcatccgtggcttctg

SEQ ID NO: 354829 - DNA, 100 bp, Homo sapiens
cttcatggtggagaagggccccaccctgggcagtatagagacgtcggacttcacggtggacgacatccttggagaaggcagcgacgacagcgacagcgag

SEQ ID NO: 354830 - DNA, 100 bp, Homo sapiens
agaagagaatgcctgtgtcctgagataattctgtaagactttgaccccgacgcaggcttcagtgattgccgcggatcagaagcctgagcactttggctcg

SEQ ID NO: 354831 - DNA, 88 bp, Homo sapiens
gctgaaaaatcaatgctgtccaaacttaaacatggattattgggactttgcagaactctgcagagttttcagaagcctttcactgccg

SEQ ID NO: 354832 - DNA, 100 bp, Homo sapiens
gccctgccagcccttgtgcccgggctgccagggacagaggccagcgcgctgcaacacaagatcaagaactccatctgggtttggacagaggagccaaagg

SEQ ID NO: 354833 - DNA, 100 bp, Homo sapiens
tggcggagcctgcgtgctggtgatcgcgctgatgttcctggcctggggggaaggttgtgcattatgtgtgactcttccaatgagtttattaaactttttc

SEQ ID NO: 354834 - DNA, 133 bp, Homo sapiens
gaaaaagatgttttgatccctaaaataatgagagaaaaggccaaagagaggtgttctgaacaagttcaagaaagagaactgccgtcctgatggaagagaacttggtgaattcagaaccacaactgtcaacatc

SEQ ID NO: 354835 - DNA, 50 bp, Homo sapiens
tctcaagtagctgggattacaggaaggatcgagatcgagaccgggatcgt

SEQ ID NO: 354836 - DNA, 100 bp, Homo sapiens
actcaaccctatgctgtctaccctcaggcaacccaaacgtatggactacctccttttgagtccgtgcgtcctggtgcctcctacaaacggcagaatgaag

SEQ ID NO: 354837 - DNA, 88 bp, Homo sapiens
agtcccctaagtgggataccagtgaggactgctccagcagctgctgtctctccaatgcagcttgactgtagtagactctgatggagct

SEQ ID NO: 354838 - DNA, 100 bp, Homo sapiens
ccatctcacacctttccaaaggacgcgaccataactctaaaagtggaatgcagtagccctctgggcctgggatattgtggttgataactgtgccatctgc

SEQ ID NO: 354839 - DNA, 50 bp, Homo sapiens
atcttatcagacgaaggcaaaatgtatggaagcgttgttgacgaccatgg

SEQ ID NO: 354840 - DNA, 98 bp, Homo sapiens
ggaggaggctgagggcggagaggcgcatcgtgttcgaggcggagaccgagggggagccccgcgcgcggcgtcggctatttagcagacatgacccacaa

SEQ ID NO: 354841 - DNA, 75 bp, Homo sapiens
atggaccagtttgttcgttacgaggggccaactcaccctatgcagcacagcccaccagctacgactatgatgccc

SEQ ID NO: 354842 - DNA, 80 bp, Homo sapiens
ccaagaaggaagtcatcatgggccggcctggaacaggtcaaaatgcagatcttcgtgaaaacccttaccggcaagaccat

SEQ ID NO: 354843 - DNA, 100 bp, Homo sapiens
gaaatcggagattcagactttccacctgcagggttccaaaaggtcccaggtgtcctctccgtgcagtcggaaaaagccccgcatgggccagcaagtcctg

SEQ ID NO: 354844 - DNA, 83 bp, Homo sapiens
tgctattcaaactgccctgatgggcagtcaacagctaaaaccttcctcaccgtgtactgtcctcagaatggttggaatgaccc

SEQ ID NO: 354845 - DNA, 83 bp, Homo sapiens
atgccaacagtgtaccagcagggcgttggctatgtgcccatcacaggtgctccagaggctggtggacctgagcggaggctggg

SEQ ID NO: 354846 - DNA, 50 bp, Homo sapiens
ttctggatgtccttgagttcaaccaggtcccaggtgtgacaccttcagca

SEQ ID NO: 354847 - DNA, 75 bp, Homo sapiens
ggcattctcctccggctgccgcaggatttttagactctgaggagcagttggagctaatccacattatggaaatgg

SEQ ID NO: 354848 - DNA, 100 bp, Homo sapiens
cagcaagtcactctccttttcagccccaaactacaggtattgaagcccctgggtgataatttgatggaggaaaacataaggcagtctgtaacaaactcta

SEQ ID NO: 354849 - DNA, 100 bp, Homo sapiens
tacggatttctaccctgtccgaaggagctccaggaagagcaaagccgagctgcagccgctgtacaaccagccctccgacacccggcagtatcatgagaac

SEQ ID NO: 354850 - DNA, 100 bp, Homo sapiens
agttgatgccaatgatgtaattctggagagagtggcagcaacggacatgagtttgttttccttctaaaaggccatgaagatctgcgccaggatgagcgtg

SEQ ID NO: 354851 - DNA, 96 bp, Homo sapiens
gcgtgaccgagagcgcgaatatcgtcatcgttagaagggtgggtattctgctccctccttctctccttggcagggctccttccaggggatcccacg

SEQ ID NO: 354852 - DNA, 74 bp, Homo sapiens
cggaggctgacgaggaggcggatcccccggcgtcagatcatgagcgtcttgttgttcatcgagcactcagtaga

SEQ ID NO: 354853 - DNA, 87 bp, Homo sapiens
aaggcagacagtacgggctcccttcgccaaactcttcattttctctcagccgagaccgacccgcccgcccgcggccccgcagcagct

SEQ ID NO: 354854 - DNA, 82 bp, Homo sapiens
acttcatattttggaaagcagtttttaagacaagatgtgatggagctgcttgaagaagatctcacatgccctatttgttgta

SEQ ID NO: 354855 - DNA, 123 bp, Homo sapiens
tgatgaggtggatctgacagatgccagcgtagctgaatccagtaccaaaaacgtcaacaacagttttacggccaggagtggtggctcacacctgtaatcccagctctgggaggccaaggccag

SEQ ID NO: 354856 - DNA, 82 bp, Homo sapiens
cagcaatctcagggtaaccagaactagagctgctcaaagaaaaactgataacgaaggaggcccaacttcattcaataaggag

SEQ ID NO: 354857 - DNA, 75 bp, Homo sapiens
ggcgacggcgccttcggcaaggtttacaagctttctgaaaaggatatgagcatgctcgaggagaggattaagcgg

SEQ ID NO: 354858 - DNA, 82 bp, Homo sapiens
tcgtctcggtagcagccttcgccacgccggggtcttcagacggcgggcgctaacaccaccgacaaggagctagaggttctct

SEQ ID NO: 354859 - DNA, 100 bp, Homo sapiens
cgacatcagagatgaggacagcattgctgctccttgcagccctggctgtggctacagggccaggcaagtgtcgtggacttcgtactgctaggaagctccg

SEQ ID NO: 354860 - DNA, 98 bp, Homo sapiens
gttaaaccatgttaaggaggattttacagaggtctttgagagttcaggccctggtccgagaggattcaatcctgtgggtatgaactgcttggtaagaa

SEQ ID NO: 354861 - DNA, 82 bp, Homo sapiens
tgcagatggcccatttggagatcttgacaaagcctcttctgtttccaatgggttttggcaagcgttctgcaggaagttttag

SEQ ID NO: 354862 - DNA, 96 bp, Homo sapiens
tgaatgcagacaccttactgaatattttacctttaagcaggaatctctctgatgtaaaggatggagtaaatcaagcagcacctgcatttggatttg

SEQ ID NO: 354863 - DNA, 100 bp, Homo sapiens
tacatattccagtaatggtggatgaagttgttcattgtttgtcaccacaaaaaggacagggcagctttggaagaagtagaaggtgatgtggcagaattgg

SEQ ID NO: 354864 - DNA, 83 bp, Homo sapiens
tggctgtggttcacaagctcgtgaattagcaggttcttaagtggattctgaagagccagtctttgaggctgtcatcaactggg

SEQ ID NO: 354865 - DNA, 90 bp, Homo sapiens
gtagtcaacgggtctgctttcccctcgggatcaactcttccaggaccaccaaaaataactttggctggggtccccagacttccaagcaga

SEQ ID NO: 354866 - DNA, 88 bp, Homo sapiens
cttgaagtggaaaatcaagctaagcgcctactagagcagggtttggagactcaggtttccctaggacttctgcatgcccatgccacac

SEQ ID NO: 354867 - DNA, 97 bp, Homo sapiens
tgcaagccctcttgtagggccagagaggaaaaaatcttcaactattccaagtgggttatggttttgtgaaattcacagatgaactggaacagaagcg

SEQ ID NO: 354868 - DNA, 100 bp, Homo sapiens
atacctttgaggtttaaatcaggttggtggtgtggacccaaagcagttggctgtttacgaagagtttgcacgcaatgttcctggcttcttacctacaaat

SEQ ID NO: 354869 - DNA, 75 bp, Homo sapiens
cagttgtgtgcgagtgtgtacaggtctacttccccagcaggacagcatcattctcctatatcttctagacatcac

SEQ ID NO: 354870 - DNA, 75 bp, Homo sapiens
caaaagagcccatgaaagatgacttctcacctccagtgtgtgctcctgcgacgtgagcgtgttaatgatgcggat

SEQ ID NO: 354871 - DNA, 96 bp, Homo sapiens
ctgagacccggaggaggttcgaagctgagtatgtgacaggaacttataatcaaaactgtattaagctcggcaagagatgagccctctggtcctgca

SEQ ID NO: 354872 - DNA, 75 bp, Homo sapiens
ggaaggtgcggggagcggagccatggcctccgggtgtgctgatctgcaaaccctggacacaatgcagccaattga

SEQ ID NO: 354873 - DNA, 80 bp, Homo sapiens
tgtgtctgcttggtgtggagccatgaagggagtgcatccgccccaacccttttccccctcgtctcctgtgagaattcccc

SEQ ID NO: 354874 - DNA, 100 bp, Homo sapiens
cccagcctcaggcgtgcgcggacggtgtgcggcttctgatcaagaatctgaagaatgagatcaccaaaaaggtacaggtgcccaactgtgatgagatctt

SEQ ID NO: 354875 - DNA, 121 bp, Homo sapiens
atcctggaggatgtgcggggtgcgccggcagaggatccagtgttcaccatcctggccccggaaggccctgtttgtgctcttcgtcctggcctacatccacatcgtcttctcccgctcgccc

SEQ ID NO: 354876 - DNA, 90 bp, Homo sapiens
ccagtatccaggtcgaggttctgcagaaggttgtgactttagtatacaatctgcgatgagctgggagtgaagcggccatcttctgtgaaa

SEQ ID NO: 354877 - DNA, 90 bp, Homo sapiens
ctaaagcagtttctgaaatgagacagaagatctggaataatatgccgaaggatcatcctgatctcaaagatttcatgagacaagctgggg

SEQ ID NO: 354878 - DNA, 101 bp, Homo sapiens
cagcgtgcccgggagtacatctacatgcattttggggagcgtccaatgcgaatttttgtgaatgatgaccgccatgtgatggcaaagcattcttccgttta

SEQ ID NO: 354879 - DNA, 75 bp, Homo sapiens
tttattactttgaagtgaagattgtcagcaaaggaagagatgggtctgggatctgccgatatgggggatatgaag

SEQ ID NO: 354880 - DNA, 88 bp, Homo sapiens
ctaccagccatggctagacctgaaaatttcttccaaggttgatgcatctctctcagagaggactattttaacaaagggaaaaatgagc

SEQ ID NO: 354881 - DNA, 52 bp, Homo sapiens
accctccttccacctggccaggaatcaggttttggaaggaaggatgttgtag

SEQ ID NO: 354882 - DNA, 74 bp, Homo sapiens
agagaaggcaatgagccgacccatcttgtacagcaactggctgtcaaagtgcttttatgggaccaacgctgggt

SEQ ID NO: 354883 - DNA, 100 bp, Homo sapiens
tcggaccagctctgtaaaagccccgcctctgccttcggataggacaagacgatcagctccagtttggcagttgtggatttaattgatgccatccagccag

SEQ ID NO: 354884 - DNA, 75 bp, Homo sapiens
aagagatgtggggggattctcgacctgctaacagaactggaccttttcgatctcgacatggcaggagctgaggca

SEQ ID NO: 354885 - DNA, 100 bp, Homo sapiens
gagtcgcggaggcgcctccgctgcagtcgctgcgtctccaagcctgacatttaccccggtaactgctgggcatttaaaggctcccaggggtacctggtgg

SEQ ID NO: 354886 - DNA, 75 bp, Homo sapiens
ttaacatcaatgggcaaatccccacaggagaaggatacaaaattggacagctgtacatgatcagcaaacacagcc

SEQ ID NO: 354887 - DNA, 100 bp, Homo sapiens
cttgacaaccctggcgggggttcgctggctgcggccccggctccggcccccgcaggagcaggacatttcattaccatccagaagtgtctcccactgaagg

SEQ ID NO: 354888 - DNA, 98 bp, Homo sapiens
cacaggagctgtagagaggaccccggtacatctgaaagccgggaaatgacccctcctcctgtagagagtggtgctgccctctcgggatgtacctgcag

SEQ ID NO: 354889 - DNA, 74 bp, Homo sapiens
tcaaaccagtcagagatggagttctcttcacttcaggacatggatgaagatttgataaagtggaaggcactgtt

SEQ ID NO: 354890 - DNA, 74 bp, Homo sapiens
agcgcctttctccaggctcaaaagagtatcaggaatcccttggcaccatgtcctgtgtgcattataaattttcc

SEQ ID NO: 354891 - DNA, 100 bp, Homo sapiens
ctgcttccttgtggctatctggttggagagaacacgaccatctcagtgactgtgaaagctggacacctgttctgctgttgtgtcctgccattctcctgaa

SEQ ID NO: 354892 - DNA, 99 bp, Homo sapiens
ttcgttctgacttctccaagtttcaggaaatgatagaaacaactttagatatggatcaggcctctctctggaacgcctacccaactccatcgcctcccg

SEQ ID NO: 354893 - DNA, 83 bp, Homo sapiens
ctggtgtaccaggcgaagctggccgagcaggctgagcgatacgacgcatccgcagtgtcatgcagaagtacctggaggaccgg

SEQ ID NO: 354894 - DNA, 98 bp, Homo sapiens
caaaggaagacttgtaacctggagaagagctacaagcctatcgtggaattcatcgatgcacaattcgaggcctacctgcaggaagagctaaagatccg

SEQ ID NO: 354895 - DNA, 101 bp, Homo sapiens
gaggagtacttcgccacttactttaatgagaagatctccattcctgaggaggagattggccgcgtaatccaggttgctgctgggagcagcaacctcaagag

SEQ ID NO: 354896 - DNA, 83 bp, Homo sapiens
cccagagactgctgagcccgtccgtccgccgccaccacccactccggacacaggggaggtcatcaaggcttgggacattgcca

SEQ ID NO: 354897 - DNA, 96 bp, Homo sapiens
agtagcaggaaaaacgaaattacttgcaattatgccaggtaaaattgcggagttgctctctccgggctcagtggatccattgacaaggctggttct

SEQ ID NO: 354898 - DNA, 100 bp, Homo sapiens
tttcacttcctgaccgtgggctggaggaacagaagcggaacagccacagcagcctcccaaggagtctgcaagttgggaggtggggaagacagggctccag

SEQ ID NO: 354899 - DNA, 100 bp, Homo sapiens
tatagaagatcctgatcctgaggttatggcaaagctttagtgcagccgtcattatccatgacaccggaaactgtgaaagatgttggatttggtagccttg

SEQ ID NO: 354900 - DNA, 90 bp, Homo sapiens
gaggaactcagccctgattgcggattcactccttctccagttgcacagccacacccttcagctggccttaatgttgactttgaatctgtg

SEQ ID NO: 354901 - DNA, 74 bp, Homo sapiens
tgaaaggagcagtagatgatgatgtagcagaagaaaaatatgtcgtaactgcaagtgtggccaagaagagcatg

SEQ ID NO: 354902 - DNA, 100 bp, Homo sapiens
acccaaacagctgaggccaaaaagagaggaggaagaagatttcataagattggccaaaatgggaaggattggattccactctcttccacgaagagtcaat

SEQ ID NO: 354903 - DNA, 98 bp, Homo sapiens
agattccataattgaggatgaagatgatgaagccgaggtagaagaagatgaacccacagatttgggagagtcccgtattctcagagtaaaagttgttt

SEQ ID NO: 354904 - DNA, 100 bp, Homo sapiens
cgcggccgtagcagccgggctggtcctgctgcgagccggcggcccggagtggggcggcggagtccgaaattgaagttcagaggaagaattgccttccacc

SEQ ID NO: 354905 - DNA, 74 bp, Homo sapiens
tgctgctcagctgacggctgaatgtgccatcgtcaccctgacctgatggccaaaagaaaggaagaaaatttttc

SEQ ID NO: 354906 - DNA, 75 bp, Homo sapiens
gaacaggccctatggggcatacctatggctttattgacctcgactcccatgcgatgggcaaaacatgtagctgag

SEQ ID NO: 354907 - DNA, 97 bp, Homo sapiens
acctcatgaatctcatcgccaccatctttgtctttgcagtggtcatctatttccaggaacaccggacagaaatcgatgccagggctggcactttcca

SEQ ID NO: 354908 - DNA, 101 bp, Homo sapiens
ggcttgttgcagatcctgattgtaggtggtgtccagctccagactgtggttggttgaatctggcgatgtggaacccatggatatggagggctgactatata

SEQ ID NO: 354909 - DNA, 98 bp, Homo sapiens
gaagtggaccgagtacacgccagatcctaaccatggcttctatgtcagataaggagggttcctgcccccaggtgaacattaactttccccagctcggc

SEQ ID NO: 354910 - DNA, 83 bp, Homo sapiens
ggccttccgagaggaacctctatgccgacatcgacgccgcctggcaggccctgcgcaccagatgaaggtcaccgtgtccaaag

SEQ ID NO: 354911 - DNA, 106 bp, Homo sapiens
gcgtgctacggggacgacgcgtgcttcgtggcccggcaccgttccgcggacgtgctcgatgatatcatcaagttgaatcgaaaggaagggaagaagcagaattttc

SEQ ID NO: 354912 - DNA, 121 bp, Homo sapiens
agatgacaaaacttcaagccaaacatcaagcagaatgtgatttgcttgaagatatgagtggtgccaccgaacatcgcagaactgaagaatttggaggtgctcaacttttttaataaccaaa

SEQ ID NO: 354913 - DNA, 100 bp, Homo sapiens
cagagagaggaagccgaaaacaccctgcaatctttcagacagggctcctgcttttgaatctttccggccaccaagatgtcgtgagagatctgagcttcac

SEQ ID NO: 354914 - DNA, 90 bp, Homo sapiens
tgcgtgcttttcgcaagaacaagactctcggctatggagtccccatgttgggaaatcctcattgacgattcaatttgttgaaggccaatt

SEQ ID NO: 354915 - DNA, 100 bp, Homo sapiens
gtagcagttcatctgatgggcttcgtgataatgtaccttgtttaaagagtatgcatcaacaattgtgtcaggaacttcaaagggacaatgtggacctatt

SEQ ID NO: 354916 - DNA, 82 bp, Homo sapiens
gcagccccggcctctcggcctctgccggagaaacagatgatatcatcaagttgaatcgaaaggaagggaagaagcagaattt

SEQ ID NO: 354917 - DNA, 100 bp, Homo sapiens
aacagccttggtcctctctctatcctagacatgggagtatgagcctgatgtgggcagaatccagatgagctggccagtgctgtgaaggagctgagagcac

SEQ ID NO: 354918 - DNA, 90 bp, Homo sapiens
gtgttgctgaagaggaattgcctcacctgctcaccgaaaggaagttgcttgatagatttgactatgatgatgagccagaagctgtggaag

SEQ ID NO: 354919 - DNA, 75 bp, Homo sapiens
gtgttcctcgctgaccacttggccgaacagctgaccctgctagatgcgaacctggagatctgcttccacgctgag

SEQ ID NO: 354920 - DNA, 100 bp, Homo sapiens
tgtgtgtggccatggtgcattacaaccagccgcggcggcttaccacgaccctgtggttctcggaccagcagtgaccttcaaagtgagcgccaatgtccaa

SEQ ID NO: 354921 - DNA, 76 bp, Homo sapiens
ctacattctgggtgacacgctgggggtcggcaccttcggcaaagtgaagggttgaaatgttccttcttgcctatgc

SEQ ID NO: 354922 - DNA, 144 bp, Homo sapiens
ccaggaagagggactggaaccatctcagaagccatgcccctcaggctggaacttgccctgtctcctcgcagatgaggaacattttagtggacaaaccaaatgaccaatcttcaagatggtcttcagagagcaactatcctcccc

SEQ ID NO: 354923 - DNA, 51 bp, Homo sapiens
ccccgttccctggaggtcctgtggaatgaacattctagtatgccagtagaa

SEQ ID NO: 354924 - DNA, 100 bp, Homo sapiens
ggatttttggcctaccctccaaagaaaagcgttgacagaaggctacgttggggccctgcacgagaatagacacggcagcgcagtgcagatccgcaggcgc

SEQ ID NO: 354925 - DNA, 100 bp, Homo sapiens
gattccagagagcggcggaaaggataagcctcgacttagaagctaccgagttaccctaagaaagggtttgtggatgcacttagatgtttgcaatgagcac

SEQ ID NO: 354926 - DNA, 95 bp, Homo sapiens
accatcggcaagggcaacttcgcggtggtcaagcgggccacgcacctcgtcaccaaggccaaggggagagaccattctaacacaggtaccgtcca

SEQ ID NO: 354927 - DNA, 110 bp, Homo sapiens
cggggagcggcaggggcatgtggatactggctctctccttgttccagagcttcgcgaatgaaatgcactcggtgatggaaagagagccactattctgaagaacacttggc

SEQ ID NO: 354928 - DNA, 100 bp, Homo sapiens
ggccccccagtccagggggaacgcagtgcgccccgcttcggtgttacttccctcagctcactgaaaactgaagctaatttggaagttttgaagtcaattc

SEQ ID NO: 354929 - DNA, 98 bp, Homo sapiens
gcggacggcgtggaccacatagacatttacgcggatgtcggcgaagagttcaaccagttgcagagcttgaagtgaaaaccagagaaaaattagaagct

SEQ ID NO: 354930 - DNA, 75 bp, Homo sapiens
ctcttctgcctcttgatctccgccaccgtcttcaggccaggtcttttccaatggtcaccttggaagtgaagaata

SEQ ID NO: 354931 - DNA, 100 bp, Homo sapiens
taaacggagagcagcagccgcccgcttcaaccccaggggaccagaggaactcagccctgattgcgtgatcaccagcagcttgcaaaacttatccaggagt

SEQ ID NO: 354932 - DNA, 101 bp, Homo sapiens
caaggacagcagcgactttggggcccgtcaccctcagctgtccgcaggcttgtccaaaaggaaacatcggaatgaccacttaacatctacaacttccagcc

SEQ ID NO: 354933 - DNA, 74 bp, Homo sapiens
gaatcccacagaccagcagaatctctggcatctctatcccctatgaggcaccacgtaagacctcctgcccttag

SEQ ID NO: 354934 - DNA, 75 bp, Homo sapiens
ggcgacttcctccccgcgccccctccccctcgccatgaagcctcccgcgacgatgcccctcaacgttagcttcac

SEQ ID NO: 354935 - DNA, 100 bp, Homo sapiens
atatcaaacagattggcacctttgcctctacaacaatatgcacaggttttggcccaacagcagaaagcagcactgtcttcccagcagcagcagcagttgg

SEQ ID NO: 354936 - DNA, 98 bp, Homo sapiens
atttcaagatgttggtttgatgactggtgatgttactattaatcctacggcatcttgtcttgttatgaccacagagagaggaagaagctattcagttg

SEQ ID NO: 354937 - DNA, 83 bp, Homo sapiens
ctccggctcctcagagagcctcggctagggggatatgagactttctactcggaatatcctgagtgttgcgtggatgtaaaacc

SEQ ID NO: 354938 - DNA, 98 bp, Homo sapiens
gggaacccggagctgggaatcgggagccgggcgcggggagctgcgcgaagccggggcggagcacgcgagctatgacccaacatgagtgaagtttcctg

SEQ ID NO: 354939 - DNA, 74 bp, Homo sapiens
cacagtgccagcagctccagatgttcttcctcttgcttgccagaggcatccgtgtcattctggaccttactccc

SEQ ID NO: 354940 - DNA, 114 bp, Homo sapiens
ctttaaatgcagcatctgcgatgtgaggaaaggcacctccaccagggagtggagcaactgctgtagtccaagcagcttattgtgcccctaaaaaggagaaagtggcaatcaaac

SEQ ID NO: 354941 - DNA, 89 bp, Homo sapiens
ctcagagagggatgggttacatgcccaagaggggacttgatgttaacaaatgtgagattgccagactctaaaatagagctcaagcttga

SEQ ID NO: 354942 - DNA, 51 bp, Homo sapiens
tacgcacaagccaaaacctttgggatatcgtctgtatggccagtggaagaa

SEQ ID NO: 354943 - DNA, 82 bp, Homo sapiens
gcgaaggccgccgaacctgcctggctagccggcgacttgagtgacgatgtccccaactcctgcccagccagtccacgcggtg

SEQ ID NO: 354944 - DNA, 74 bp, Homo sapiens
gccaacacagaaaccttgccatcaggtgaggatgaggatgatgaccttcagtatgccgatcatgattatgaagt

SEQ ID NO: 354945 - DNA, 51 bp, Homo sapiens
cttgagagagatgggaaaacatgtagcgacgaagatgagtcgagtgagcag

SEQ ID NO: 354946 - DNA, 100 bp, Homo sapiens
ctcgctgatcgcctaacttctactgacgaagcttggaagttgcagaagaccacacatgcccacggaatttgattttgatgatgagccagtgacaccaaag

SEQ ID NO: 354947 - DNA, 101 bp, Homo sapiens
ggagagccgggagtcgctgggtgcgtggggctgcctcgccgcgtctcgccacggaatgaatctgaagtctgctgcagtaaaacacagaaggctttaaaatg

SEQ ID NO: 354948 - DNA, 88 bp, Homo sapiens
ggagaaggggtccgagggcagtctgtgtcaaacgcagatgtctttggtggacttgggaaagaggttgctagaagcagcaagaaaaggc

SEQ ID NO: 354949 - DNA, 74 bp, Homo sapiens
gctcgcccgggcagccacccccggccctgctgccacagcaggtggacgacatccttggagaaggcagcgacgac

SEQ ID NO: 354950 - DNA, 50 bp, Homo sapiens
ttagaacacacatactctgataaagagttctccggggtgctgcaccagtg

SEQ ID NO: 354951 - DNA, 97 bp, Homo sapiens
accgctccggcaacgccaaccgctccgctgcgcgcaggctgggctgcaggctctcggctgcagcgctggcattagtgccagcagtagttcccaaggg

SEQ ID NO: 354952 - DNA, 90 bp, Homo sapiens
ccaagatgcggatccgggcctttccgaaacatgatcaggggcaagtcttgttggatgtcgtcttcaagcatctagatttgactgagcagg

SEQ ID NO: 354953 - DNA, 100 bp, Homo sapiens
cagcaaatggttgacacctttacacagagcagttgcatcttgtagtgagcttcaaggttactgactttttatgatgtttggtggctatgagactatagaa

SEQ ID NO: 354954 - DNA, 50 bp, Homo sapiens
cagggcttggaggcttacatccaggttgtcttcaaccaccttactcctcc

SEQ ID NO: 354955 - DNA, 82 bp, Homo sapiens
aagactgtatccaccatgtactacctctggatgtattgctcgagactttaatcccaactggatgagtgctgtggaaatcttg

SEQ ID NO: 354956 - DNA, 100 bp, Homo sapiens
aaatctggaagcggatcgcgtggagtgacggtcacaccgcggcgagccaaaagccttgaaagtctcatctatatgagtacccggacagataaagatggca

SEQ ID NO: 354957 - DNA, 75 bp, Homo sapiens
cccgcggcgaccaagatcaggaacctgccctgatcgttctgaagtctccagcctgagttcagaggcccctgagac

SEQ ID NO: 354958 - DNA, 100 bp, Homo sapiens
tggcagagaagttccggcagaaggcctccatccacgaggcctggactgacggatcctggatgtccggaactttattgtacagtctcgtcctgaatttgcg

SEQ ID NO: 354959 - DNA, 83 bp, Homo sapiens
agtcgcagggagcccaccgggcgggcctggccaaggctgaaggtgatgtggccgccctcaaccgacgcatccagctcgttgag

SEQ ID NO: 354960 - DNA, 75 bp, Homo sapiens
tcgggccttcaggatcttctccagccagtggatgtctttcctgaggttgttccccttaacatcggaggggctcac

SEQ ID NO: 354961 - DNA, 100 bp, Homo sapiens
catgcgggtgcccttccttgagttcaaagccccagggattccctcaggaggtggctggcaggaccaagtaggtggcctaatgcctggcatcaaggtgggg

SEQ ID NO: 354962 - DNA, 74 bp, Homo sapiens
cagggaaccctggtcaccgtctcctcaggtgctcgcggtgaggatcgatgacctggaccacctcccggagacca

SEQ ID NO: 354963 - DNA, 82 bp, Homo sapiens
acgaggggctggaacacctcgccaaagcagagaaataatgaagatctccttcaacgacaaaagcctgcagaccacatttgag

SEQ ID NO: 354964 - DNA, 50 bp, Homo sapiens
cagctccaggcctgggaaagtgaaggtggcattgcagacagtgtagccaa

SEQ ID NO: 354965 - DNA, 100 bp, Homo sapiens
gtggcttttatcctggataacaccatcccaggcattcctgcatcgcatccggcagaacgtggccgactcagtggagaagggcctcacggaggagaatgtc

SEQ ID NO: 354966 - DNA, 83 bp, Homo sapiens
gctgcggggcgaggacggcggcggaccggggcagccccgcgccctggccagacttcccaagtaagaagcggaagaggagccgc

SEQ ID NO: 354967 - DNA, 98 bp, Homo sapiens
tccaatatggcaattgacctcacctcaagcacacccaatggacagcatgcctcaccaagtcacatgacaagcagttgtctgcattcaaaagagcattc

SEQ ID NO: 354968 - DNA, 50 bp, Homo sapiens
ccgagctttgcgggaaagcagcgctttaccactcctgaaggccctaaacc

SEQ ID NO: 354969 - DNA, 74 bp, Homo sapiens
gaccgaggcccccctgaaccccaaggccaacagagagaagatgactcaggtctgggtgggcagccgagggctgg

SEQ ID NO: 354970 - DNA, 89 bp, Homo sapiens
attggaggtatcaactgtaagaagaggaaagacttgtctcagccaaggccacctttgatgccatttctaagacctacagctacctgacc

SEQ ID NO: 354971 - DNA, 75 bp, Homo sapiens
ggacctcttcattgcctaaaacaggtgctctagttcacagctataggggaacaggtggaatatttgaagtttgct

SEQ ID NO: 354972 - DNA, 78 bp, Homo sapiens
caacagtggcaatgagaccagtggaagcagcaccatcggggagacaagcaagcagtaacagccctcatgggagcccca

SEQ ID NO: 354973 - DNA, 89 bp, Homo sapiens
acaaagaaacatgtcagcagggcctatggtggttccatgtgtgctaaatgtgttcgtgacagggtggcatgaaatggatgcagagaacc

SEQ ID NO: 354974 - DNA, 50 bp, Homo sapiens
cgcagaacctccacagtcaagaggacgaccaagatcactccatggatgaa

SEQ ID NO: 354975 - DNA, 75 bp, Homo sapiens
ttgtatagagatgtgatgttggagaactacagaaacctggtctccctagaaacctccacagctgttgagaaaaag

SEQ ID NO: 354976 - DNA, 73 bp, Homo sapiens
gatgtgatgttggagaactacagaaacctcgtctccctggatgggaaactcttgtctagtgatgtgactcatt

SEQ ID NO: 354977 - DNA, 82 bp, Homo sapiens
ggaagccggcatgctggagaagctggagttcgaggacgaagagtgatcatcaccatgctggtcgccaccgccgtctgctgtt

SEQ ID NO: 354978 - DNA, 76 bp, Homo sapiens
ccagctggaccccctttttgagcgagagacaagagagacacctccaacttcgacaaagagttcaccagacagcctg

SEQ ID NO: 354979 - DNA, 100 bp, Homo sapiens
acctcctggaagccaaaaatgagcctacctggacgtagacattactctgtcctcagaagctttccataattacatgaatgctgccatggtgcacatcaac

SEQ ID NO: 354980 - DNA, 96 bp, Homo sapiens
aagaagtcgcccatcgcagcagctcgaggtggggctggtgtccgagcacttctcgcaggccccgcagaggctgtccttctacagctggtacggcag

SEQ ID NO: 354981 - DNA, 74 bp, Homo sapiens
aagctaagaaggttcaaacaaatttgcaaatgatatacaacttctaagtcacattaactttgctctagaagaca

SEQ ID NO: 354982 - DNA, 100 bp, Homo sapiens
gaggaagatatttcctggcctctctccagtgagttggcatcctttggaagagttcgtgaaagctttctgcccagagctcctggaccaatgcatcttccca

SEQ ID NO: 354983 - DNA, 144 bp, Homo sapiens
tagacatcctctgcagccagaagaacaagaagtaggcattgaccccttgtccagttactctaacaagtctggagaccagcatctcagacatgtcgaaaaagatgttttgatccctaaaataatgagagaaaaggccaaagagag

SEQ ID NO: 354984 - DNA, 73 bp, Homo sapiens
cgggacacctggaagccgagaaatgttatcaggaactgttgccgttattacatcagatgggagaatgattgtg

SEQ ID NO: 354985 - DNA, 100 bp, Homo sapiens
gcaatgtttttgtggaacatgagatcgagatggtgatcatggagcgtagcaagctctcagagctggccgccagcacctccgtgcaggagcagaacaccac

SEQ ID NO: 354986 - DNA, 83 bp, Homo sapiens
agatgtctacttcgaagactggcaagcacggccacgccaagaagttcagttctgcaagcaagtatgctgctctctctgttgat

SEQ ID NO: 354987 - DNA, 80 bp, Homo sapiens
cggattcaccatctcaaaacctggtcgataaagacaggagtggagtgatatcagacaccgagcttcagcaagctctctcc

SEQ ID NO: 354988 - DNA, 75 bp, Homo sapiens
acccagggagaggaattacgggaacagaaagaaaagtccgaaagagctgagaatagtgacagtggtacaggaaag

SEQ ID NO: 354989 - DNA, 97 bp, Homo sapiens
gcagctggagcctcaggcggcagcgcttctagtgggcctttggagtgacgctgtgggaactcatgactctgggccagactccctacgtggacattga

SEQ ID NO: 354990 - DNA, 75 bp, Homo sapiens
tttgcgggactcagtcccatcactccaaggagagaagccaaggccacctttgatgccatttctaagacctacagc

SEQ ID NO: 354991 - DNA, 83 bp, Homo sapiens
cacttccttgaagaaacaagcttacagctcagggagccaatggtactctggagaacccagccctggacacaagtctgttggag

SEQ ID NO: 354992 - DNA, 98 bp, Homo sapiens
tggagacatggaccgcggcgagcaagatcgctgccgttttgcccttgggagtaggatgtggtgaaaggatggggcttctcccttacggggctcacaat

SEQ ID NO: 354993 - DNA, 98 bp, Homo sapiens
caagagacaatgtcatgtgattcagcctaatatctcaggtagaggaacatttccctgtgatatttctgtccttgatattcatcaggatttagactgga

SEQ ID NO: 354994 - DNA, 82 bp, Homo sapiens
gggctttctgctgccgcccgcaagcagagcttgaagtacatctggattccttatgtgtgcatgttagcagcatttggtgtat

SEQ ID NO: 354995 - DNA, 82 bp, Homo sapiens
gaaaacagaaggaaattgaaggaacttggagttaatggtctaatttatgataggttcgatacaagaggctgttttcctagcg

SEQ ID NO: 354996 - DNA, 87 bp, Homo sapiens
ctcccaagtagctgggattgcagagggctgaacatgtccgagtttgtctgtaacctgtcagcaaggccttatgtgtacgacctcatt

SEQ ID NO: 354997 - DNA, 90 bp, Homo sapiens
aaagcctccagagaagtagaatctgtagaccttccacactgccacctgattaaaggaattggcatagaatgtcaagctaaccaggcgtcc

SEQ ID NO: 354998 - DNA, 96 bp, Homo sapiens
gacacaacgaactttatattttaccacttccttgaatagcaaagcagctgctttgaaaagaagctcaaaggattaccttgaaatggttacccactc

SEQ ID NO: 354999 - DNA, 100 bp, Homo sapiens
ctcttcgtcaccttcgacctgctcttcatctccctgctctggatcatcgaactgaatggagtaccctgacttctaccggaagctctacggcctcttggac

SEQ ID NO: 355000 - DNA, 101 bp, Homo sapiens
ggcgtctcggcgacggttccctgggcgcccccggctcctgctccctgagcccggagctcgaggccatgagcagatataccagcccagtgaacccagctgtc

SEQ ID NO: 355001 - DNA, 98 bp, Homo sapiens
gtcgcaggagcacatcgagaccgcttaccgcatctggctggagccctgcattcgcggcgtgtgcagaccaaagagaaccctgtacagtaagaaatatg

SEQ ID NO: 355002 - DNA, 108 bp, Homo sapiens
tcattttcacctcgcgtcgcgcccgggaggaaggaacgaggcaaggagctaaagcagcgtgcgttcagccctggggttcattttccagacactgaaagagcagaatgg

SEQ ID NO: 355003 - DNA, 100 bp, Homo sapiens
gccgcaccaggctcatcctgtccatcgtgtgcctgatgatcacgcagctggctggcttcagtggaccatgtatttgtgtggcgatgtctgtaaaatgcca

SEQ ID NO: 355004 - DNA, 100 bp, Homo sapiens
gaggctacaggctcagggtatccaagtatttgatcctggggagtctgattcagatgacaactgtacagatgtcactggtttttcacgactgaaaacaaca

SEQ ID NO: 355005 - DNA, 50 bp, Homo sapiens
ctcctgagtagctgggactgcagagtttcgctcttgttgtccaggctgga

SEQ ID NO: 355006 - DNA, 75 bp, Homo sapiens
atctgtagagactgatttgcaacccttccgggaagccatagctctgcatgggtcagatgacttgtctgcaaagct

SEQ ID NO: 355007 - DNA, 82 bp, Homo sapiens
gttgaaagcgacaagtggaggcgccgctctagcggccgggactctgaactatggcggcgccatgtcagaaccggctggggat

SEQ ID NO: 355008 - DNA, 100 bp, Homo sapiens
agagcaacttgatgaaggtacacccaatagagaggtcacggtctagatcacattctcgatccagaggaaggcgatactctcgctcacgcagcaggagcag

SEQ ID NO: 355009 - DNA, 98 bp, Homo sapiens
ggggccttttaccccttctcaagaaaccacaacaccattgggaccagggtctatgttaacaatgaatgggcaaccagtgttggggaaggagggagctt

SEQ ID NO: 355010 - DNA, 89 bp, Homo sapiens
caacaactgtacaacttggaaaccttgttacagtccagttgtgattttggtgatggtgtttgtacatgctcgaaatgccactgtaagaa

SEQ ID NO: 355011 - DNA, 139 bp, Homo sapiens
ggcggacgggaaggcgggagacgagaagcctgaaaagtcgcagcgagctggagccgccggagatgcagattctgcccaagaagcccctgcattgcagagggactggagatctgtatgatctgtttatttcgcaattgac

SEQ ID NO: 355012 - DNA, 100 bp, Homo sapiens
cttaaatgagataagtttgttgaaagactaaaaggaacttgcttgctagaaaacaaagtgcaaggcttgacaaacacaatgacttgggatggaagttatt

SEQ ID NO: 355013 - DNA, 116 bp, Homo sapiens
ctgggacccgcggaagccggcatgctggagaagctggagttcgaggacgaagcttttacaaagttgatcacagtaaatggacaagaatatcatcttcaacttgtagacacagccgg

SEQ ID NO: 355014 - DNA, 82 bp, Homo sapiens
agctgtggttgctgctgtgatatggaggaagaagagctcagctgaggagaagaaagtggaagcaaagaaagaagaatccgag

SEQ ID NO: 355015 - DNA, 100 bp, Homo sapiens
ttcgccctggggcttccgcctggtgggcggccgggacttcagcgcgcccctcaccatctcacgggaggacaagtccttgaatgaccttggctgattcagc

SEQ ID NO: 355016 - DNA, 75 bp, Homo sapiens
ttccgccctaatggaggtctccagtttcgaaagccaaacttggccctgctggcaacaaagtcatcagtccctctg

SEQ ID NO: 355017 - DNA, 76 bp, Homo sapiens
aaaaagaacagacggcttgccttagagctgatgaagaaagcagcttccaagggaggtgtgaatacgagtgtcagac

SEQ ID NO: 355018 - DNA, 136 bp, Homo sapiens
cgttaaactcctgctctgtttactgtggattggatattctcaaggaaccacacatgtattaagatttgatcggacagctggcttttaaaggaatgaagagactcaatagaatccagtcaatagtgtttgagactgc

SEQ ID NO: 355019 - DNA, 85 bp, Homo sapiens
ctttcttcactcctcttcacttcttcaccctgaccctctattctgcaccctgtgagccaccgagactgaaccaaacccaggaagc

SEQ ID NO: 355020 - DNA, 49 bp, Homo sapiens
cagctctgcggctcgggccctgagcaagaaccagttgagtcatctctgg

SEQ ID NO: 355021 - DNA, 101 bp, Homo sapiens
cagtagtgctacttaaaatatgctggggaccatcaccatcacaggcattgaagttgatatcgatgtggagcacggagggaaaagaagccgcctgacccccg

SEQ ID NO: 355022 - DNA, 96 bp, Homo sapiens
cggagagggtgctggctgccgcgcggccgaggaaggatcgagatcgagaccgggatcgtgaagatcggtctaaagatcgagaccgagaacgtgata

SEQ ID NO: 355023 - DNA, 76 bp, Homo sapiens
ccagcaacggggtggccgatgaatcacccaacatgctggtgtacagaaaggactatcctattaagtgtaatctcac

SEQ ID NO: 355024 - DNA, 74 bp, Homo sapiens
cgcaaccaccgccctggccatctaccatgtgctctgcttatgataatgtcaacaaagttcgagtagctatcaag

SEQ ID NO: 355025 - DNA, 100 bp, Homo sapiens
ctggcacttggaagagtgagcgggtcatcacgtcccgtcaggggccgcacatccgcgtggacggcgtctccggagtatgaggttgatgagctacgccgaa

SEQ ID NO: 355026 - DNA, 83 bp, Homo sapiens
cagacagtgcttcagaagcaaactctcctgaggagctatccagcccaggaactgtggctgcaccatctgtcttcatcttcccg

SEQ ID NO: 355027 - DNA, 100 bp, Homo sapiens
agattaatgtctgcaagagcacgctatgagagatacagtggcaatcaggttctcttttgctgctgtgacttactcgaagcctcgattggccacattttgg

SEQ ID NO: 355028 - DNA, 100 bp, Homo sapiens
caggaggcggcaggacggccaagaccagcgcgagggccctgggcaaggcccgacaggcatttgttgctatcggggactacaatggccacgtcggtctggg

SEQ ID NO: 355029 - DNA, 100 bp, Homo sapiens
aaagtatgtgcttcagtaacattcaaaaactatattaaaaggaactggagaattttcattcaatgtgtcatgagtgtttaaatcaagaggaagctgcatg

SEQ ID NO: 355030 - DNA, 100 bp, Homo sapiens
accactgaagtgaccgaatgaggaatgtttacccttgcggaagttgcatcacttaatgacattcagccaacttaccgaatcctgaaaccatggtgggatg

SEQ ID NO: 355031 - DNA, 90 bp, Homo sapiens
accaaccaatgagtcgaaggtctcgtagagcttccttattagcaaagttggtcacatctggtgctgaaagtggaaatctaaatacctctc

SEQ ID NO: 355032 - DNA, 88 bp, Homo sapiens
agagctggatctcgtctttcttactggagaaaatgaaactgggattgacccatcaagatgcttggctcaataagaaaaccacgttagg

SEQ ID NO: 355033 - DNA, 50 bp, Homo sapiens
ctcagacgcctcacttaggacaagccataaaattttgagtagaaaaatcc

SEQ ID NO: 355034 - DNA, 99 bp, Homo sapiens
tccctgaagctctgctgccccgcaggcaccttcgggccctcctgccttcgctgcgagctcagtcaggagaggcggacttggaccttcagaccccagctg

SEQ ID NO: 355035 - DNA, 100 bp, Homo sapiens
gcagcatgcagtgctttctggggtgatattcatgaggatttttgcagcgtttgcagaaaaagtggccagttactgatgtgcgacacatgttcccgtgtat

SEQ ID NO: 355036 - DNA, 100 bp, Homo sapiens
gtgaaccaacattggatgtgaaaattgccttttgtcagaagccgagccccgctgcggagctcccggcggcccagccccgaggctctgcggccgcgccgcg

SEQ ID NO: 355037 - DNA, 83 bp, Homo sapiens
ggcgtgaagtggctggacacacagacaatgcagatcttcgtgaagactctgactggtaagaccatcaccctcgaggttgagcc

SEQ ID NO: 355038 - DNA, 75 bp, Homo sapiens
ggaaaagaccctcttcagacttgaacaaggctaagaaacattcaggccggcagcagcagcagagagcagagagca

SEQ ID NO: 355039 - DNA, 100 bp, Homo sapiens
cttttcatttccagcatctggctgtcaggcggaagctgcattcatggaagaagagtgtgtggacactccaaagttactatctgagatagaagaacacctg

SEQ ID NO: 355040 - DNA, 82 bp, Homo sapiens
gggtctgtcatcatgtcgcgttacgggcggtacggaggagttccagggtctccctccactgctgtagtaacccgggtccggg

SEQ ID NO: 355041 - DNA, 97 bp, Homo sapiens
ggaatccctacgcgtccctttgggtttagcacgatgagctcaatcggcactgggcagaagatggctgtgccacccacgtatgccgatcttggcaaat

SEQ ID NO: 355042 - DNA, 97 bp, Homo sapiens
cgcctgcgtcccagaagtgcctgcagttcagacccttctctcccctccactttctcccggacaatcacaaagagtgtgtaggccagccccggtcaca

SEQ ID NO: 355043 - DNA, 75 bp, Homo sapiens
gccccgggccccccagcatgaagaccccggcggacacaggtgctggagaatctggtaaaagcaccattgtgaaac

SEQ ID NO: 355044 - DNA, 75 bp, Homo sapiens
ctgggactttcttcgttgccatgaggaaagaattctccgagaagtctggaacgttttttcttagagttccagaat

SEQ ID NO: 355045 - DNA, 97 bp, Homo sapiens
gtcacctccaacaacatccgcgagatcgaggtcatcctgtacagttctacagcatgaataggcctgcctctcgccatactcccccaacaataggggg

SEQ ID NO: 355046 - DNA, 101 bp, Homo sapiens
gaaaaacttccgtaacatccaggttgatgaagctaatttattgacttggcaagggcttattgttcctgacagaactgtaccgctctctttttggccagctc

SEQ ID NO: 355047 - DNA, 75 bp, Homo sapiens
cgggccgcggcggcgcttggcagccaggagctctgcattgaaggcactggggtacttccattcaaccaacccttg

SEQ ID NO: 355048 - DNA, 90 bp, Homo sapiens
cgcatcctagccgccgactcacacaaggcaggtgggtgaggaaatccagggttctacgccagccagtggacaggatttactttgcaggca

SEQ ID NO: 355049 - DNA, 83 bp, Homo sapiens
gtctgactctgactctcggactgagaaacgcaagggttcccttctggagaagagtcaccgggtttggttctgtttcccctttc

SEQ ID NO: 355050 - DNA, 98 bp, Homo sapiens
tgctgtacaccctcaacaaacaccagcgctttgggtggctattatcatggaaaactaatttttcccagagaatttcctttcaaacctcccagtatcta

SEQ ID NO: 355051 - DNA, 100 bp, Homo sapiens
gtgaagtagatgataaagatgatgatatccttctcaaccttgtgggatgtgaaaactctgttactgaaggagtcagtggatcggtggggaaaatgctgct

SEQ ID NO: 355052 - DNA, 100 bp, Homo sapiens
ggtagcccgggccgggggcatcgagaccatcgccaatgagttcagcgaccggtgcaccccgtctcggcgcggaagatggccggcggcgtggacggcccca

SEQ ID NO: 355053 - DNA, 75 bp, Homo sapiens
aaaccgacgagaggacctcagctccaagtatttgtgtggaagtaatcgaaaagacaacatatttattgatcctgg

SEQ ID NO: 355054 - DNA, 101 bp, Homo sapiens
gggattctcgacctgctaacagaactggaccttttcgatagaagagtgatggatgtcatttctcgttcacagctttacttggatgatcttttttctgacta

SEQ ID NO: 355055 - DNA, 99 bp, Homo sapiens
cgtctcaaggtgtttgacggcatcccaccgccctacgacaaggatgaagatcttctcccaagtaaatattttgaggttgactttccaatgattgtcacg

SEQ ID NO: 355056 - DNA, 96 bp, Homo sapiens
gctcctggagatgagcacgccctttacctgcgtttcctggatgctcttaaaggtgtggcggggcaccctggcccgcatgcggtacaaaagaaccaa

SEQ ID NO: 355057 - DNA, 82 bp, Homo sapiens
ggaccctcttcgcgggcgattcgcgtagcctcaggctgaaggtgatgtggccgccctcaaccgacgcatccagctcgttgag

SEQ ID NO: 355058 - DNA, 107 bp, Homo sapiens
ggcccttgttcccccaaatgtctgactctgactctcggactgagaaacgcaaggtggacgacatccttggagaaggcagcgacgacagcgacagcgagaagaggagg

SEQ ID NO: 355059 - DNA, 75 bp, Homo sapiens
gagaacgcaaacagtttgaagctgaggattttgaatgcctgaactagatgaatacaccatggagagggtcctaga

SEQ ID NO: 355060 - DNA, 75 bp, Homo sapiens
taactctgagaagtcgtcctcttcagaaagtaagtacaaggtggactgtgcatgcctcaaagaaaacccagagtg

SEQ ID NO: 355061 - DNA, 100 bp, Homo sapiens
ggggctgcggcgcctgggactgcaccgcaccgagggcgagctccaggtcacgcaatatttaaactcacgtatctaagcaatcacgactataaacacctct

SEQ ID NO: 355062 - DNA, 100 bp, Homo sapiens
gccgccgccgccgcccaggcgcagccatcccagctcagtagcttttcctgggataactgtgatgaagggaaggaccctgcggtgatcagaagcctgactc

SEQ ID NO: 355063 - DNA, 50 bp, Homo sapiens
ggatttctacctttccatagcaggtgtatgagtttagagtcaaagaatct

SEQ ID NO: 355064 - DNA, 75 bp, Homo sapiens
tttattgatcaacatccttcatagccggaagtcggtgcagcccacctcagaggagcgcatccccaagaccatcga

SEQ ID NO: 355065 - DNA, 75 bp, Homo sapiens
gctggaatttcctcagattatttatatggacaggtagttgatgtcacttggcgatattcctgcaaacatgaagag

SEQ ID NO: 355066 - DNA, 90 bp, Homo sapiens
ggggaggcccctcctgttagcccagagggaaagaaagaactggggcgatccggtgacctcaaagcagaagctctgaattcacctctcatc

SEQ ID NO: 355067 - DNA, 97 bp, Homo sapiens
ctaggagtatgccagatggaagaaccattgttagtgaacgtggacaaagctgttgtctcagggagcacagaaagtaatcaagtcagaggattatatg

SEQ ID NO: 355068 - DNA, 75 bp, Homo sapiens
ccacagcctagcagtcgggaccgtactgagtactatactggcaattgctggagaagattttgcaattgttgcttc

SEQ ID NO: 355069 - DNA, 127 bp, Homo sapiens
agaaaatgaagattttgacagtcgtagatacaaatttttggatgatgatggatccatttctcctattgaggagtcaacgcgcagttgtgtagcagttgagtaatgctggttagctgttaaggtggcg

SEQ ID NO: 355070 - DNA, 75 bp, Homo sapiens
ggaatacaagtgtcatgtctgtggatatgtgtcacaaagatgtctacacggaactgccagggaatggactcagtg

SEQ ID NO: 355071 - DNA, 100 bp, Homo sapiens
agcgcgaatatcgtcatcgttagaaggatatttctttaatgggaaaaatgtacctcaaaacatcacctatgcaagcagaaacacctgagatacaagcaga

SEQ ID NO: 355072 - DNA, 100 bp, Homo sapiens
gattttttcagtacaacacctttacagcatcaaagaatactgatgaggagcgggaaggcctcctgcaccctggagaccgtgtgggaagacaagcacaagt

SEQ ID NO: 355073 - DNA, 100 bp, Homo sapiens
accagatgtacttgtgcttcctgctggccgtgctgctgcagaggcccagaaatctaaagatctttgttctataactgtaagtggagaagagatccctaat

SEQ ID NO: 355074 - DNA, 101 bp, Homo sapiens
ccgcgggagccgcacgcggcgatatggaagaggagggcaagaagggcaagaaggactcagtgacctttgaagatgtggctgtgaacttcacccaggaggaa

SEQ ID NO: 355075 - DNA, 100 bp, Homo sapiens
ttgtagataagcaactggattttttaactgaagatagtgcctttcagccctaccagttgagtcagcagatactggagttatttgaaacatgtcagcagca

SEQ ID NO: 355076 - DNA, 75 bp, Homo sapiens
gtttttcggatcatgtctggtggctccgcggattataacagaggctgggaggcggcagaatgcagccagaggagg

SEQ ID NO: 355077 - DNA, 73 bp, Homo sapiens
ctctgcatatagaacagtgcctggcacataataggtgctgagaagatattttcgattcagataaagaagttcc

SEQ ID NO: 355078 - DNA, 85 bp, Homo sapiens
tgtgttggctgttgacccagaaaaggcggcccagatgaaatcccagagaaagcttcttgctatctacctccaccatgatgaaagt

SEQ ID NO: 355079 - DNA, 101 bp, Homo sapiens
cgggagctagccaagatgaagcaggggccctcctcgccaaagacagcctagagaggacggcaatgaagaagataaagaaaatcaaggagatgagacccaag

SEQ ID NO: 355080 - DNA, 100 bp, Homo sapiens
tttcttccctgccagaaatgaaggttcagttatgaggcaaccctctaaacagtgctcggcatggcagggattccagggctcctcttccttctcttctttc

SEQ ID NO: 355081 - DNA, 124 bp, Homo sapiens
aaagcagcagagtttctacaaatgctagaagctatcaaagcccttgaagtcagggttacacatcattttggaatgactgtatatcatctggattacgtggctgtatgttaattgaattagcatt

SEQ ID NO: 355082 - DNA, 90 bp, Homo sapiens
tagaaattggtagttgctgcaaaaagaattattgcttgggttagaatatgccctactggtttggtggactcctaaagtagaacatcaagg

SEQ ID NO: 355083 - DNA, 101 bp, Homo sapiens
agtgaatataaaaggacttcatctcctcaacatggaaactaaggaacacaatgcacaacatccgtggcaacaagcaggcccagggaacaggccatgaacct

SEQ ID NO: 355084 - DNA, 75 bp, Homo sapiens
cagacaccaggttgcttcttgagagaagccggatggatgtgcatgcagggaggttgaaggtcgaggagctggaag

SEQ ID NO: 355085 - DNA, 98 bp, Homo sapiens
gcacagaaacacagcagcgggagcagcaacaccagcactgccaacagcctgcctagggtagttaaaagacgagtgaatgctctcaaaaacctgcaagt

SEQ ID NO: 355086 - DNA, 100 bp, Homo sapiens
gccagatcaacctggagctctacgcctcctacgtttacctgtccatgattccacctgctcctacgaagcccgactttgatggtcctcgagagaagatgca

SEQ ID NO: 355087 - DNA, 100 bp, Homo sapiens
ttcagatcaatagccgctactggtgtaatgatggcaaaaccccaggagcagttaatgcctgtcatttatcctgcagtgaacatacaacctcctcttcagt

SEQ ID NO: 355088 - DNA, 100 bp, Homo sapiens
gcagatggggaggacgcctatgccatgaagcgggacctcactcagatggccgacgagggagaagaaatgggtgaccgttggtgacacatccctacgaatc

SEQ ID NO: 355089 - DNA, 82 bp, Homo sapiens
cgtccgttggccttcgtacccgtcttgattgaggttcaagcactgtcttcctgttggccctgacaatcatagccagcacctg

SEQ ID NO: 355090 - DNA, 100 bp, Homo sapiens
gtcaacattgatggaaaacaaatcaaactgcaaatctgggatacgagatgtgaaagctggaaacattcttcttggagaagatggctcagtacagattgca

SEQ ID NO: 355091 - DNA, 82 bp, Homo sapiens
tcagaggccccggtgctggcagctgagcccgaggctgacaagttccagggtcacccccgagaggacaacaggcatctggaag

SEQ ID NO: 355092 - DNA, 83 bp, Homo sapiens
atagcgacgacgagatggtggaggaggcggtggaagggggatatgagactttctactcggaatatcctgagtgttgcgtggat

SEQ ID NO: 355093 - DNA, 86 bp, Homo sapiens
agaagatggtgcagaagaaaccagccgaacttcagggtttccaccgttcgttcaagatccagagacaatggccccgatgggatgga

SEQ ID NO: 355094 - DNA, 100 bp, Homo sapiens
cgcccggcccctcagcgcccccagcacgccgccgagtcccgctcgccatgggcacagggtggtggtttcctatcctcctcagagtgaggcagaacttgaa

SEQ ID NO: 355095 - DNA, 109 bp, Homo sapiens
ctgggctctgcctgctgacctggggaggccattggctctatggaaaacactgagatgagcatcaggattttatggatgagcaaaaacgactaaagaagcttcgtggaaa

SEQ ID NO: 355096 - DNA, 100 bp, Homo sapiens
gcaagaagacaaactgtatggtggagaaagaagtgggaaggatctgcgcgggcacgagatgtgcgtaccaatgaagtggtggccatcaagaaaatgtctt

SEQ ID NO: 355097 - DNA, 74 bp, Homo sapiens
ctttcgtggctcactccctttcctctgctgccgctcggtcacgcttgttcctaaggacggtctgaagagccaag

SEQ ID NO: 355098 - DNA, 100 bp, Homo sapiens
gtgattggtgacaaattttttataatgcatcattgtgcgtccctgtatgcatactaccttgtactgtatggaggggctcccggagggcctgcgtttcccg

SEQ ID NO: 355099 - DNA, 90 bp, Homo sapiens
agtacaggaggtgcgggcggctgctgaagaacagattaaggtgctggaggtgacggagggcgttgacccggacgacacctataatgagac

SEQ ID NO: 355100 - DNA, 90 bp, Homo sapiens
caaaaacggcccttggatgatggagccagcctgtctcgatcagcctttctgtctcagagatattatgaagacttggatgaagtcagctca

SEQ ID NO: 355101 - DNA, 80 bp, Homo sapiens
tgtctcctgatccagccggccctgccaggtcagccctgacaaaggtcagctagccccttgaggacatcagctttggcctc

SEQ ID NO: 355102 - DNA, 102 bp, Homo sapiens
atgtcattgggccaaagatagagattccggtacattatgcagggcttaaaagacaaccttcttgcttctgggacatccagcctgacagccaccaaacagttg

SEQ ID NO: 355103 - DNA, 90 bp, Homo sapiens
tcagcgaggagcagcagcagctccagcaggcgctggctcctgctcaggtatgcagtggaactgatgaagaccctgatgataaaaacgcac

SEQ ID NO: 355104 - DNA, 80 bp, Homo sapiens
cagcttctgaagggagatgtcatggtcacttcatcctggcccaggtactgcagctccaaatcgtggggattctgtaagag

SEQ ID NO: 355105 - DNA, 83 bp, Homo sapiens
ctcatcgggcagattagcgacatccgagtgcagaacctgcaaggagatcatgaatcagacagataaaaatcaacaagaaatcc

SEQ ID NO: 355106 - DNA, 97 bp, Homo sapiens
ggatccggatcgagggcaggaggctgagacccgcgggtgctggagaatctggtaaaagcaccattgtgaagcagatgaggatcctgcatgttaatgg

SEQ ID NO: 355107 - DNA, 106 bp, Homo sapiens
cagcagcaaagacaagcacacaccagagaccagaatgaaagtcggggaagtccttatgcgaatcgtcagggcattaggctgtcattatttgtatcaaaaacaaaga

SEQ ID NO: 355108 - DNA, 100 bp, Homo sapiens
gactcagtcagtctcttggtttggtctctaaaagtaaaggtatgagttttccccacagactttgtgctgctatgggaagcagctgtgtaccattcctcgc

SEQ ID NO: 355109 - DNA, 75 bp, Homo sapiens
caatgcctccaacctcatctaccccatctttgtcacgagccagcaccgctctttgaccttgccatgcttgcctta

SEQ ID NO: 355110 - DNA, 75 bp, Homo sapiens
gactaccctccgggcccagtctgtctgtccgtggtggatctaaggctggagtgcaatggtgcgatctcggctcac

SEQ ID NO: 355111 - DNA, 90 bp, Homo sapiens
gtccttgtggacgtggagaggggccgaaccgtgaagggctggaggccccggcggctagggttccaatgcagtttcctcagctcttggggc

SEQ ID NO: 355112 - DNA, 87 bp, Homo sapiens
ccgagaccgcggccgggaccgagggacgtgagcgacagaatagaaaaggaatccctggatggcccgatcgtgaagcagttagagaga

SEQ ID NO: 355113 - DNA, 78 bp, Homo sapiens
ttcccgctgcacactgccctccgaagtcggggacgcgggctcggacctggtgtcaaagatgcttcatgtagaccctca

SEQ ID NO: 355114 - DNA, 75 bp, Homo sapiens
ctggctgcagctctgcggggcgcaggaggcggtgcacagcgccaaggtcttgccccagaagctgcgggcacatcc

SEQ ID NO: 355115 - DNA, 76 bp, Homo sapiens
cgaggttctgcagaaggttgtgactttagtatacagttgggtatctacagccattggttgctgttcaggtcagctt

SEQ ID NO: 355116 - DNA, 75 bp, Homo sapiens
cgagaggaacgtgtccacgcgccaggctacgagttccagggagctctgtcctggtgaccgtgcccgggttatgac

SEQ ID NO: 355117 - DNA, 51 bp, Homo sapiens
ggagtggaaaggctctcagtgaaaaaggccgagacgcatccagagctttcg

SEQ ID NO: 355118 - DNA, 95 bp, Homo sapiens
ggaaaaggtggaagagcagtgccatccattgaatgggttgaacttttcacagttgattatggaagattcccacaagagtaccacgtcagagacag

SEQ ID NO: 355119 - DNA, 48 bp, Homo sapiens
caccgcacgccctgcaagggaggatagaggcactctccattcctgatt

SEQ ID NO: 355120 - DNA, 100 bp, Homo sapiens
gaaaaagttccagaaacaatttggggttaggcagaaatgggatcagaaatcacaggtaatgctggaggatggaagaagcaaagggtttggcttcgtctgc

SEQ ID NO: 355121 - DNA, 87 bp, Homo sapiens
cttcctccagaatgcgctcggacggaacgttaggaaggccctggttaaataggattgcgaatcaggtggccattcagcggaagaagc

SEQ ID NO: 355122 - DNA, 50 bp, Homo sapiens
ttatgtgggaagcgaatccactcagcgacatgtcctcacctacatggagg

SEQ ID NO: 355123 - DNA, 88 bp, Homo sapiens
tgccttctactccatcgtgggactcagcagccttggtgctcaggtgccagatgcaaaggttgacaaggtcacaggcaggtttaatggc

SEQ ID NO: 355124 - DNA, 127 bp, Homo sapiens
tattgcgatatatgccatttgtttgacaaagataagaagcagtatcactgtgaaaactgtggaatttgtaggtgatgcaactgtgacaatagctcacagatacacccccaaagagcaactgaagatt

SEQ ID NO: 355125 - DNA, 90 bp, Homo sapiens
ccacagttacctggcactctcttatcagggctgacgcgccactatgtagcgggtttcgggcgggccacgcgtgcgggacaggaacccaac

SEQ ID NO: 355126 - DNA, 51 bp, Homo sapiens
gaagtggtgaaggagtgtgtgcagcggtagctacagcaagctgggtagcag

SEQ ID NO: 355127 - DNA, 82 bp, Homo sapiens
caagaaggcaacgacgttccatctgtggaaggacctaccaaccaggagcatattaatgaaaagtgccataaactgaaaaacc

SEQ ID NO: 355128 - DNA, 75 bp, Homo sapiens
tcgactacaagaagagggcggagcggagacgggagtattatgaaaagatcgaatgacgggacagagtttggcggc

SEQ ID NO: 355129 - DNA, 98 bp, Homo sapiens
cagctaccggggggactcatgccagactttggcttcatgtttgaaagctcgccgggcggcaatctcggctgggaacccgacatcaagctgacggatga

SEQ ID NO: 355130 - DNA, 137 bp, Homo sapiens
gcaagtcatactagtgagccacacgccacagtcagcgtctgctgcttgtgaagaaatagcctaccagtgtgtgtcagttcctggagctgtgtcagagcccagaaggtggctttggaggaggacccggtcagtatcca

SEQ ID NO: 355131 - DNA, 75 bp, Homo sapiens
ctgaagaggagcgccagatggtggaggaatacacttatttatgaagtagcccctgaagaagatgaaaggaaaaag

SEQ ID NO: 355132 - DNA, 75 bp, Homo sapiens
tgaccgagagcgcgaatatcgtcatcgttagaagttgatcacagccgagttaaattgacattaaagactccttca

SEQ ID NO: 355133 - DNA, 89 bp, Homo sapiens
tgtaaatctgtctcccagcagtcacgcaaacaacttatcagtagtgacttacagtaaggcatcttcaaaattgaggactcagcccaggt

SEQ ID NO: 355134 - DNA, 98 bp, Homo sapiens
ggatattgtttcctttgttcacgagaacattgagacatttctttcgtgggtaattccagaattgattggccataccattgtcactgtattactgctca

SEQ ID NO: 355135 - DNA, 100 bp, Homo sapiens
ggccgccattgtcggctactgcgacgccaaatacgtctgggcagccacggccgggggcgtctttcagagcattacgctcaccatggatgatgatatcgcc

SEQ ID NO: 355136 - DNA, 101 bp, Homo sapiens
catgaagggcctctacacagacgccgagatgaagtctgataatgtgaaggttatcaatactctggctgaccatcatcatcgtgggactgactttggtggaa

SEQ ID NO: 355137 - DNA, 100 bp, Homo sapiens
ttttgattaacaccttaataaccagcggagctgacacagccaaggccaaggagatctgttgaagaatgccaagaatgaagctatagaaaacatgaagcag

SEQ ID NO: 355138 - DNA, 90 bp, Homo sapiens
ctgaggaggagccgaagcccaaaaagctgaaggtggaggcgccgcaagcgctgagccttgttgtcctcctggtgcgaagagctcggccgc

SEQ ID NO: 355139 - DNA, 83 bp, Homo sapiens
gcaaagcgaggctgaagaaggccaaggctgcagaagccaaagccacgggatccaggtccggcacgatcaagacccaggctaca

SEQ ID NO: 355140 - DNA, 130 bp, Homo sapiens
cgtgcgcacccaggagaaggagcagatcaagaccctcaacaacaagtttgcctccttcatagacaaggtgattctggacttgaaaggttctgattacagctggtcgtatcagacgccaccctcttccccc

SEQ ID NO: 355141 - DNA, 96 bp, Homo sapiens
gaggagaagctggcagctctctgtaagaaatatgctgatcttgaaaaggggaagatagtgatgtactcagtataaatgcagatgcttatgacagcg

SEQ ID NO: 355142 - DNA, 50 bp, Homo sapiens
tctcgttcccgttccaaatctgcagaaagaaaagcagtcctgaagaacga

SEQ ID NO: 355143 - DNA, 101 bp, Homo sapiens
ctgggaacggctcgtcagaggtggaagatctgtgacttcctccgcggagccacagtccatagaatcctcggccagcaggtcccctatgccaccaagggcaa

SEQ ID NO: 355144 - DNA, 75 bp, Homo sapiens
cagggagatcgggccccgcccccggcagcgacacccgggctgacagatgaagagattgatatggccttccagcag

SEQ ID NO: 355145 - DNA, 50 bp, Homo sapiens
ccggggtgtaataatgttaactgaggtaattattcgaggtggaggacata

SEQ ID NO: 355146 - DNA, 88 bp, Homo sapiens
gtcgcagcgagctggagccgccggagagctacttcctcagccgagcccagagcctgtgtggccccgagcacagtgctgttcctgactc

SEQ ID NO: 355147 - DNA, 75 bp, Homo sapiens
atagaaaacggcgagagtgggcgagaacgtccactgcgggccggcgaaagctggcctctggctgtacctggcagg

SEQ ID NO: 355148 - DNA, 100 bp, Homo sapiens
ggagctgtggcttattcaggcccctgcagactttgccccagaatggctgccccgggagacgctggccttcagggaggagctggatgtcctcaagttcttg

SEQ ID NO: 355149 - DNA, 75 bp, Homo sapiens
cgggaagaggcgaactccagacagttactgcaacaaggaggtatacaataaggagaatcttttcaacagcctgaa

SEQ ID NO: 355150 - DNA, 97 bp, Homo sapiens
ttggcaccactgaagtgaccgaatgaggttgtttttcaccattcagaacattgcctgaagcaggtccaccatgccgttagtaacgaggaacatcgag

SEQ ID NO: 355151 - DNA, 100 bp, Homo sapiens
ccttggtggaacatgtcaaggaggagtgtgaccgcctgggccctggcatggccgacatatccacgatggcccggtccctggtgtgccttggtgtcatcat

SEQ ID NO: 355152 - DNA, 75 bp, Homo sapiens
gggcggtaaggatttcaacatgcctctgacaatctctagtgtctctaattaacagaagatggcaaagcccagcca

SEQ ID NO: 355153 - DNA, 90 bp, Homo sapiens
gaattgaccaagaaaaataaagaaatctgttaacaggccataaagatagaccttcctccgagggccgtctctcccagccgaacacagccc

SEQ ID NO: 355154 - DNA, 82 bp, Homo sapiens
gcactaatatttaagaaagaagatgttaactttcaggcggctatgagaggttttcctccgagtacccagaattctgttctaa

SEQ ID NO: 355155 - DNA, 75 bp, Homo sapiens
acctgaggaccattattttttaatggaagaaaggcgaaggttgaaaaatgcaataattatccagtcatttattcg

SEQ ID NO: 355156 - DNA, 100 bp, Homo sapiens
tgacccagaggagagttctccaaacatgatcgtttactgcaaaatggactagaggcttttaccagatttcttaaaactgaattcagtgaagaaaatattg

SEQ ID NO: 355157 - DNA, 49 bp, Homo sapiens
gctgcggcgcgggccgagaaggaaggcaggtaaaaatcaaggtgacccc

SEQ ID NO: 355158 - DNA, 100 bp, Homo sapiens
tggccctgcagcgcaccatgaacgagatctaccgcaacggctccagcgccaacatcccgcccctcaagccgagaccgacccgcccgcccgcggccccgca

SEQ ID NO: 355159 - DNA, 75 bp, Homo sapiens
cgtggatccaagatggcgacggcgatggaccgtagcatcctgagacattttgaattgacacttctcaagatttga

SEQ ID NO: 355160 - DNA, 82 bp, Homo sapiens
tcctggaaactgccattaacctccagctttttaagcaggcagaaataaaacgtcttcaagaagccaataaggcagctcggaa

SEQ ID NO: 355161 - DNA, 100 bp, Homo sapiens
tcagggaagcgagcaaggggcttggaagtgcctgaagccagtgggctggggactcacggccgggacactcagggcagggagaagaaatgggtgaccgttg

SEQ ID NO: 355162 - DNA, 74 bp, Homo sapiens
agatggggggaccccggtacggacctgtgcaggtgtcttcagtgccctgggtttgcctgtgacccaatgcccac

SEQ ID NO: 355163 - DNA, 90 bp, Homo sapiens
aggagttgagaaaaaccaaggaagaaaagatgtggagtgggctgctacctcctggcctaaatgaaagtgacgctgagtcaaactcggaag

SEQ ID NO: 355164 - DNA, 50 bp, Homo sapiens
acaagatggtttacatctcgaacgattgtcactgctgttccaagggcaca

SEQ ID NO: 355165 - DNA, 90 bp, Homo sapiens
cgctggccgacaacagcctggcgtccgccacgaatatatacagccctgctctgggacacacctccattggatttaaaagacagtcctcgt

SEQ ID NO: 355166 - DNA, 100 bp, Homo sapiens
ccgcatgagagccggacaaactcagacatcgtggagggaagtcgagacaacatgagtgtgattttgatctgttttccaaatgcacccaaagtatcgccag

SEQ ID NO: 355167 - DNA, 82 bp, Homo sapiens
tcaaaactgccttcagaagcaaaagatcctgataacttaagtgactctctcttttccggtgatgaagaaaatgctgggactg

SEQ ID NO: 355168 - DNA, 48 bp, Homo sapiens
ctgggctaaggctttttagaaggagccagcaccgctctttgaccttgc

SEQ ID NO: 355169 - DNA, 75 bp, Homo sapiens
gcaacatgctcagcaggagcttcatcaacgatatatgtcagatctaaagagtgctgcagcagctcccagtccagt

SEQ ID NO: 355170 - DNA, 90 bp, Homo sapiens
gcagcggcgacatcctcgagtccaggatcactgcttttaccacggcacggtgagggagacagaactgtccagcgtcacgctcagcacttg

SEQ ID NO: 355171 - DNA, 100 bp, Homo sapiens
ctttcagcttcagcctgctcaagaactgcagcattgcagccgccaagacggtgtccggctttgctggcccagcaagcctgataagcatgaagctcttatc

SEQ ID NO: 355172 - DNA, 101 bp, Homo sapiens
acctgaaagtggtcacagccgcatctttgaaggttcttctgagctatgaaggggcccagatttaagggctatttttgacaccctaaatgtgctgagacaag

SEQ ID NO: 355173 - DNA, 100 bp, Homo sapiens
ttggaaagagatccccatgaagaaatactcaaggcatttaaactatttgatgatgatgattcagtgtactaatggtcacttgatgtgcgctggctgtttt

SEQ ID NO: 355174 - DNA, 100 bp, Homo sapiens
gggcctctggcggtggcggcctggggcggcgcgacggctggtgcgcaggtctcagcattagagaggcagatctttgacttccttggtttccagtgggcgc

SEQ ID NO: 355175 - DNA, 50 bp, Homo sapiens
cgcgggcgcccgaggggccgagcgaggctttcggacagtcctttctccag

SEQ ID NO: 355176 - DNA, 90 bp, Homo sapiens
cgggcccggcccacctcccctgagctcggtatcagacttggtgataattctgaattatgaccgtgctgtagaagcttttgcaaaaggcgg

SEQ ID NO: 355177 - DNA, 74 bp, Homo sapiens
caaataatcctggaaaagtacttggcaggtgaaaaggattcaatgatttttgattgtactgaatgctatgatcc

SEQ ID NO: 355178 - DNA, 50 bp, Homo sapiens
tccatctgcaccacggtgctgggcagcccaatggatccaatggtgatgaa

SEQ ID NO: 355179 - DNA, 101 bp, Homo sapiens
ggccaagctgcaaagctgggagagactggaccagaccatgggcctgagcatcaggttgatgccggcccaggatggatcagacctgtgaactacccagaaga

SEQ ID NO: 355180 - DNA, 100 bp, Homo sapiens
atcactaaaatatggcatcctaatattagttccgtcacaggggctatttgtttggatatcctgaaagatcaatgtcatggctccgatcttcatcttgaag

SEQ ID NO: 355181 - DNA, 82 bp, Homo sapiens
cgagagcgcgaaggaaatctggccgccgccgccgcgagcgctcccggtgctgactgggttacttttttaaacactaggaatg

SEQ ID NO: 355182 - DNA, 83 bp, Homo sapiens
agcagccaatgctgatatagtcaccttaggaggaggtggaggaggaggaggatggagagctgcccaagacagggatcagattt

SEQ ID NO: 355183 - DNA, 90 bp, Homo sapiens
gcgctgttcgtgctgctgggattcgcgctgctgggcacccacggagcctccggggctgacctcctgccccccgaggtctgcagtctcctg

SEQ ID NO: 355184 - DNA, 83 bp, Homo sapiens
gcctgctggagaatgatagccgggagatggcccgcgtgcttgggttgtgaatgggagagttcacatccgcgactggcgagagg

SEQ ID NO: 355185 - DNA, 87 bp, Homo sapiens
ctcattttctttgtgcttttccagtttgcaagttttccacatatggtgctttctcttcatcagaagaattatatccagatcgagaga

SEQ ID NO: 355186 - DNA, 100 bp, Homo sapiens
gttccaagtattccctatctaggctctgggaatgtgctgaaggtgcagcagctgctccacatttgtagcgaacactttgactccaaagagaaggaggaag

SEQ ID NO: 355187 - DNA, 82 bp, Homo sapiens
ctcgcgacccccggcaacccggagaaggtctacagagcggcctgcgccagcgagatgatcggctgaatgtaacagaggaact

SEQ ID NO: 355188 - DNA, 83 bp, Homo sapiens
cttcggccctagactctacaaatgtagaagctgcttttcagacaattttaacaggactgcccacagtggtgaaactggtagac

SEQ ID NO: 355189 - DNA, 100 bp, Homo sapiens
gaatgttcttaacccagaagtagctgaatgtgttactccattgctgaggagtgattgcagagggaatggcatacatcgagcggaagaactacattcaccg

SEQ ID NO: 355190 - DNA, 51 bp, Homo sapiens
cactgtctctgctcacagtgccaaggtcttgggcgtctttggtactggctt

SEQ ID NO: 355191 - DNA, 100 bp, Homo sapiens
taaacctggcagctgaagataaaaggctgtggatctttccattgatgagtccagcttgacaggtgagacaacgccttgttctaaggtgacagctcctcag

SEQ ID NO: 355192 - DNA, 75 bp, Homo sapiens
ggccaaaatgctgagttctaaggaggctggaacatggtgatgagttttcgagtctccgaccttcagatgctcctg

SEQ ID NO: 355193 - DNA, 100 bp, Homo sapiens
cagaggacttctggcctttggcacgtcctgctccgtggtgctctatgaccccctggttggtgttcgaggaagagacattgttgttcttggtgtggagaag

SEQ ID NO: 355194 - DNA, 99 bp, Homo sapiens
gagctgcatcgcctgctcagccttcagggagagcaggccaggaggcgcctggatgcacagcgggtatctgcgggatggtggccatctcctggtacgcct

SEQ ID NO: 355195 - DNA, 100 bp, Homo sapiens
cacagaagcagcatcactcacaccagtctgaaacaccacagagtatggtgtttgcgaaaacttgcggaagctggagatcacaggcgtgtcttgtcgggac

SEQ ID NO: 355196 - DNA, 100 bp, Homo sapiens
cgggcgactgccatgaactccggagccatgaggatccacagtaaaggacatttccaggagcaaattggtcaggagatgttggaaaaccttagtcatgaca

SEQ ID NO: 355197 - DNA, 96 bp, Homo sapiens
caacgcagtcgccgttcgcctgtggctggacaacacggagaacgacctcaaccaggggtttgaggaaccactggccaacctgttaaatgaacaaca

SEQ ID NO: 355198 - DNA, 100 bp, Homo sapiens
caaagagtcatattgcccagtggtcacctcacactcctccaaggtgttccttgcctgtatctccccttggttcaatagctaccagatttttggaagagga

SEQ ID NO: 355199 - DNA, 51 bp, Homo sapiens
cccgggcagcgcttccattccgcggagctgttacagatgtagagctaaaac

SEQ ID NO: 355200 - DNA, 100 bp, Homo sapiens
gatgcttcgcacacagaccgtcttccagaggcaggggcagggaaactgctgtcagggcgtctctggccgagcctctttttgtggaaaacgacagcagcag

SEQ ID NO: 355201 - DNA, 78 bp, Homo sapiens
ttcattgctgcaaggaacttccatgcctctaacactcatcttcaaaagactgacaaatgtagtaggacattctttagg

SEQ ID NO: 355202 - DNA, 82 bp, Homo sapiens
tggatgcagcaaggaaataggatttaaccgctctctgcctcccagtgaaagctggtggaatgcgaattgtgcagaaacaccc

SEQ ID NO: 355203 - DNA, 100 bp, Homo sapiens
ccgcaaacggtgggggtcggccggggccgcttcaccacttacgaaatcagggtcaagcttacagttgaacatgagtcttcttatgattagtgagaatgta

SEQ ID NO: 355204 - DNA, 100 bp, Homo sapiens
taacacaaacagcaactgttttttgttgtttacttttgcatctttacttgtggagctgtggcaagtcctcatataagaccatcatcatgtggaaactgac

SEQ ID NO: 355205 - DNA, 75 bp, Homo sapiens
aaggagagcatgtcggaggctgatcgcgcccagaaggaaacagtgacattcaaggatgtggccatggactttaca

SEQ ID NO: 355206 - DNA, 96 bp, Homo sapiens
ctcgctcgacgtgttgcagcacatcctcatccgagcctttgatttgagtggctggcaaactgatacaactcagaaactgctcaatgtcaggaaaac

SEQ ID NO: 355207 - DNA, 100 bp, Homo sapiens
ccctggactccctggagaagcagatggaaaagctcctgacccctgaggattaccagcgatttctagacctgggcatctccattgctgaaaaccgcagtgc

SEQ ID NO: 355208 - DNA, 50 bp, Homo sapiens
gtgaggagctaatccctgaatatctgagttatgatgtgattgctcaagcc

SEQ ID NO: 355209 - DNA, 74 bp, Homo sapiens
ttaaacgaaaattgaacattctgactcgaccgagtggcctgattccaccaagagaaggcccaggaggaagaaga

SEQ ID NO: 355210 - DNA, 90 bp, Homo sapiens
tcttcaaccacctcgagcggctgctggacgaagatccccagctcaagggtatagtgaccaggttatattgcaggcaaggctactacttgc

SEQ ID NO: 355211 - DNA, 75 bp, Homo sapiens
ttaaggattccaagtaactcttatttgccgcttacaaacacgcagatggcaagaagattgatggcaggagggtcc

SEQ ID NO: 355212 - DNA, 83 bp, Homo sapiens
ctgggtcagtccgccgctcaccccgcggccgcaccttcccgccttctcagaaggggaaactgaggcccaaggaaattgagtat

SEQ ID NO: 355213 - DNA, 105 bp, Homo sapiens
acccttcaggaccacacacagcctcctgtcctcaggaacacggtgacggccacccacggactctgtcacttgctgggattcacacacggcacggaggcagagtgg

SEQ ID NO: 355214 - DNA, 98 bp, Homo sapiens
tggcggatctagcttctcctcgccttcaggatgaaagctcagggggaaaccgaggttaattggccttggtcctcacagctccaaaaagaaacaggatc

SEQ ID NO: 355215 - DNA, 100 bp, Homo sapiens
catctggaacaatggtgtatgggttgtttatgttacaaaagttgaaaccaagactgaagactgaacctgaagaagtttccatagaagacagtgcccagag

SEQ ID NO: 355216 - DNA, 75 bp, Homo sapiens
tccaagagggcgctctccctccctgagaccctgacctccaaaattcgcacagatagatcattatctaggacttgc

SEQ ID NO: 355217 - DNA, 75 bp, Homo sapiens
ctactgccctggaatgggtgttgctcttaggatgtatcccctcaaccgattcgaagacagtctcttacacctcct

SEQ ID NO: 355218 - DNA, 100 bp, Homo sapiens
ggaagatggccgagagatttttgatgatgaccttgaagatgatgcccttgatgctgatgagaaaggggaactgtgtcaatctgacagaagcactgtcgct

SEQ ID NO: 355219 - DNA, 100 bp, Homo sapiens
ggatcgtgaccgagaccgtgaccgagagcgtgaccgagagcgcgaatatcgtcatcgttagaagagaatgggacattttagagactgaagagcattataa

SEQ ID NO: 355220 - DNA, 131 bp, Homo sapiens
tactgtttacagtacgatgatgaaaaaattatcagtggcctacgagataattctattaaggtcagtttaggggctggtgcaaaggatgagttgcacattgttgaagcagaggcaatgaattacgaaggcag

SEQ ID NO: 355221 - DNA, 88 bp, Homo sapiens
ttcatctaccacgctttcgtgttcacagcagatgaggctcgggacctgattcaacgttacctgacagagcaccctgaccccaataatg

SEQ ID NO: 355222 - DNA, 100 bp, Homo sapiens
gagagagaccagacctgcaagctctttgacacacagcagttcttgtcaggtaagtcaaatctcatggatgccatcagctttgtgctaggtgaaaaaacca

SEQ ID NO: 355223 - DNA, 100 bp, Homo sapiens
tctaagaaatttgctgttaaagtggccctggtacagtggacggaaagtgtgggcttaaccctggtgggccgagaccagtcttccatgcagctgaggaccc

SEQ ID NO: 355224 - DNA, 75 bp, Homo sapiens
cgccgccctcgcaacctggcagccgccgccgtggaagacctatgccagatttactggtgctccactgaaggtaca

SEQ ID NO: 355225 - DNA, 100 bp, Homo sapiens
cgcggattcgccgaggcaccgaggcactcagaggaggagacagatcagttggaggaagaaaaagcagagctggagtcggagatcgccgagctccaaaagg

SEQ ID NO: 355226 - DNA, 75 bp, Homo sapiens
aatcgtgatatcccaccccttacagggccttcatcccagaataatcactgaaggatttgaagctgtgaaggaaaa

SEQ ID NO: 355227 - DNA, 100 bp, Homo sapiens
ttgtattgcaatcatggtgcagaaataccagtccccagtgagggtgtacaaatacccctttgaattaattatggctgatgctgcctcccttggttcccag

SEQ ID NO: 355228 - DNA, 100 bp, Homo sapiens
cattgacaacaaaaacatcaaaacggcgatccaaaaattcagtggaaggcaaagtgtttcatggatttcaaagctggaggcgccttatgtcacattcttg

SEQ ID NO: 355229 - DNA, 51 bp, Homo sapiens
ctcttccacagcacctgaaagaggttcactaagaatctttccccagacaaa

SEQ ID NO: 355230 - DNA, 100 bp, Homo sapiens
aacgattacatgcagccagaagaggactgggaccgggacctgctcctggacccggcctgggagaagcagcagagaaaggccaaagaggtgctgaaaaaat

SEQ ID NO: 355231 - DNA, 100 bp, Homo sapiens
gacagcaccttcacaataactgttgatcagaaaaccttccatttccagggtggatgaagacctgatcattgaagttcaccagttatttttctcaagaatg

SEQ ID NO: 355232 - DNA, 98 bp, Homo sapiens
ttccgcagattgaaattaataaaatgcacatatcccagtccattgagaagggagagaaggtacccaaagggaaaaagggaaaagctgatgctggcaag

SEQ ID NO: 355233 - DNA, 75 bp, Homo sapiens
gccttagagggcctccccaggccgcctccgcccgtgaaggaggatttgacagctaaggatattgaagaaattatt

SEQ ID NO: 355234 - DNA, 100 bp, Homo sapiens
cgaagttcctgatggagctgtaaagccacccacaaacaaactacccattttcttttttggaactcatgagacgtcagagatcagatctcgctgtcatggt

SEQ ID NO: 355235 - DNA, 90 bp, Homo sapiens
gtggcctcggcgattatggacccggccgaggcggtgctgcaagagaaggcactcaagtttatgatgtgtctgagggctcagtccccaatg

SEQ ID NO: 355236 - DNA, 101 bp, Homo sapiens
agttgtgtatgatgtgacagatcagattcaaccctatgaaaagataaaggccaggggcttgcctgataatatatcttccgtgttgaacaaactagtggtgg

SEQ ID NO: 355237 - DNA, 50 bp, Homo sapiens
tgccgagggctctcacccaaataaatctcctgcaaagaagctgagccatg

SEQ ID NO: 355238 - DNA, 97 bp, Homo sapiens
acgcagtcagctgcgtgattcccgtgattgcgttacaagctttgtctccttcgacttggagtctttgtccaggacgtttgctaatccagactttaca

SEQ ID NO: 355239 - DNA, 75 bp, Homo sapiens
gttccccggcccacagtgggggtgtgcaaacccgagagaactgggagaccctcctgttcttaactgtgggcgatg

SEQ ID NO: 355240 - DNA, 96 bp, Homo sapiens
tggcccccggtgcaagaggcgcaaacaagccaatcccaggaggaaaaacgcaaaaccatattcctgctgctgtcagttttgatgcactgagaaaac

SEQ ID NO: 355241 - DNA, 76 bp, Homo sapiens
cggagctgcggtggcgtctccacacggtttatggctacaaatgatttgatgacggaactgcagaaagattccatca

SEQ ID NO: 355242 - DNA, 88 bp, Homo sapiens
cgaggctcggagaaacaggcgccgcgggctccgcgcccggccggacccgggcccgagcattgtcccagatatagccgttggtacaaag

SEQ ID NO: 355243 - DNA, 82 bp, Homo sapiens
aggaatttgagttctttgagaacaccattgtgtcccgcattgcccgcatctgcaaggtgggaatggagggaggccaggaagc

SEQ ID NO: 355244 - DNA, 100 bp, Homo sapiens
taccatcggacaggatttctccgcctcagcccaacggggagatgtgacaagccgaggcggtgagccgggcaggaggaaggagcctccctcagggtttcgg

SEQ ID NO: 355245 - DNA, 83 bp, Homo sapiens
tggctgactatttttatcctttttcccctgaagctcgtagagaaatgtgtttccccctttctagggtgaggatggttctacac

SEQ ID NO: 355246 - DNA, 75 bp, Homo sapiens
gatgttttgaggggtaatgatgagactattggatttgaggatattcttaatgagtgaaccagaggaaatgcctcc

SEQ ID NO: 355247 - DNA, 75 bp, Homo sapiens
tgaggcccctgggctggtggacgtacctggtgggcaccctgagcctcagatgtctttggtggacttgggaaagag

SEQ ID NO: 355248 - DNA, 75 bp, Homo sapiens
ccgtggaccacaggccctcgttgcccagatgtcttattagtaggtaagaaacagctgctcctccacctccacccc

SEQ ID NO: 355249 - DNA, 90 bp, Homo sapiens
cacattaaccctttcattttgtttggaagatggaccaaagcgatacagcgaaccctcctggtgtactggcccttttggatgaagaatgct

SEQ ID NO: 355250 - DNA, 124 bp, Homo sapiens
ccgaagcactcgttccgggggtgaagcctcctgcgccggccttgcctcgggtactccaaagattcaggtttactcacgtcatccagcagagaatggaaagtcaaatttcctgaattgctatgtg

SEQ ID NO: 355251 - DNA, 82 bp, Homo sapiens
cggagctggcgactagaccccaaaacatcgagacgctgcagaacgcgggtaaaataccatgaagattttgaaaaaacaaagg

SEQ ID NO: 355252 - DNA, 100 bp, Homo sapiens
tccacttccgccagccccacctccccccggccttcctggagtccctgaaagaggaagaagtaggttttaaggttttatgacttacctagtggagccttta

SEQ ID NO: 355253 - DNA, 97 bp, Homo sapiens
gctagcagggcaaagcatcctgaatgtggatctgaaagattttgtctgtggtaaagatgatgattcttttgatcggaaatcagtgtaccgaggctcg

SEQ ID NO: 355254 - DNA, 100 bp, Homo sapiens
agttggaacctctgacaagaccaagtactaccttcaagatgatgaggagtctgatgaggaagctgtgaagaaaaccaacaaatgtgtactagtctgggag

SEQ ID NO: 355255 - DNA, 100 bp, Homo sapiens
ggaagacctggctggccatcaagtgctcgcccagcctgcacgtcgacgacagggccatgaagcccccaggaggagaatcgagcaatctttttggaagtcc

SEQ ID NO: 355256 - DNA, 75 bp, Homo sapiens
gacaacgaacagctcttcaccatgaaatggatagatgaggaagttttaaccgtgattggagataccacaaagaag

SEQ ID NO: 355257 - DNA, 98 bp, Homo sapiens
ctggaggaggcagaggccaactgctccgtggcgttcgctgaggctcagagatgggtggagcccgtggccacccaggagcccgatgtgcaaggcaggtg

SEQ ID NO: 355258 - DNA, 125 bp, Homo sapiens
tggtggtgttcagttgtggcggttgctggtcagtaacagccaagatgctgcggaatctgctgggtggagagattcaaccagttagcgtgaaagttggagataaagttcttctcccagaatatgga

SEQ ID NO: 355259 - DNA, 90 bp, Homo sapiens
gctaaggccgcgttggggtgagaccctcacttcatccggactttccttatcccagttgattgtgcagaatacactgcctgtcgcttgtct

SEQ ID NO: 355260 - DNA, 98 bp, Homo sapiens
gtacgagcgacaggagttcatctacccggagaagcaggagccctactcggcaggtgaaaggtgtagcagtcactcggcctacacccacagcatcgacc

SEQ ID NO: 355261 - DNA, 100 bp, Homo sapiens
ctgcagcgggaaagagaacagagagtcctggggacagatactgtggatggtagggaagaaaagtctgcttctgattcttctggaaaacagtctactcagg

SEQ ID NO: 355262 - DNA, 100 bp, Homo sapiens
tggtggaaatctttcaaaaacacaaaacatggaacgatttggagagatcatacatctgtcggtggcctgggagacagtttttatgaatacttactgaaag

SEQ ID NO: 355263 - DNA, 100 bp, Homo sapiens
gtgaacctgaagcttcaccgagtgcagatacaactatactgtttgtaaaaggagaagaatactagttgatcagcaagtttggaaaatagaagatgtcttc

SEQ ID NO: 355264 - DNA, 84 bp, Homo sapiens
cgagaaagccgaagatggcggtccccgcggcgctgatcctacgggagagccccagtttggtgccctggttgtcagatgttggaa

SEQ ID NO: 355265 - DNA, 83 bp, Homo sapiens
ccctgcggtgaagagggagtacaagctcaattacgtcaaggaagaggatgaagatttgataaagtggaaggcactgtttgagg

SEQ ID NO: 355266 - DNA, 116 bp, Homo sapiens
ctctccacgtccacctacgtcctccaggaggcatctcacaacgtccccaaccagagttccgagtcacttgctggccgcaggcatggttttggtcaactgatgtttgcagatggtgg

SEQ ID NO: 355267 - DNA, 75 bp, Homo sapiens
gtatccgccagtcaataggaagtacgagtgtcatcatcagatttgaaatatttaaagtggatacaaaactatttc

SEQ ID NO: 355268 - DNA, 75 bp, Homo sapiens
ctgggcaccagcaggacccgaggccaggagccaggggcccagaagaaaaatggctacaaacttcctagcacatga

SEQ ID NO: 355269 - DNA, 101 bp, Homo sapiens
ggaaatccggcggcgccagccactcggagctaatccacaatctccgcaaaagggctattgcaagacacgaagtccgagaaattgagcagcgacatacaatg

SEQ ID NO: 355270 - DNA, 90 bp, Homo sapiens
ctctccttttcgtttccggaaacatgatgaaggatttgggggcagagcacttggcaggtcatgaaggggtccaacttctcgggttgttga

SEQ ID NO: 355271 - DNA, 74 bp, Homo sapiens
cctaccagctgcggcggccggaggaccggcctgccggcccccagaacaaggctatcttagcggcacagagacga

SEQ ID NO: 355272 - DNA, 75 bp, Homo sapiens
gtgcccccgccggccctggccctcactgtgttggaagggtgtccgcaatgttgccagtgtctgtctgcagattgg

SEQ ID NO: 355273 - DNA, 76 bp, Homo sapiens
gacgcgggctctgaggatgagctggaggagggggtaaaatctgtaaaaactgggtcagttttttggacaatgtgct

SEQ ID NO: 355274 - DNA, 90 bp, Homo sapiens
ggcggcggctgccgcaggacctgcagcatcccagaggaatccagatcttacataagatggaagtctctcacactagatactgaacattaa

SEQ ID NO: 355275 - DNA, 101 bp, Homo sapiens
tgctggggcctcccggggccggtaaagggacccagtgtggtcccggaacagcaagcccgtgcacaccaccatcctgaatccccacatccacctgatgggcg

SEQ ID NO: 355276 - DNA, 98 bp, Homo sapiens
cgcaaggcgtggagtcgacggctggagagaagccgggagcgagcccaggcggcagttccagaaagctgagtctgatctggattacattcaatacaggc

SEQ ID NO: 355277 - DNA, 80 bp, Homo sapiens
acaagtggtcagtttggttgtggaaagtaacagtgtatcatgtatgccactgattccaggggacactcccctgctttcct

SEQ ID NO: 355278 - DNA, 90 bp, Homo sapiens
gagcaagtgtataatgactgtgcaaagaagattgttaaagcacctgttcttcccggagcctatcagcaaagccattcccaaggctatggc

SEQ ID NO: 355279 - DNA, 82 bp, Homo sapiens
tccggtcccggcgcccggcgagggcgcgcggctggtgtccgccccgcccgaaagcggagctggagtttgttcagatcatcat

SEQ ID NO: 355280 - DNA, 83 bp, Homo sapiens
ccgacttcgactcttggggccagctggtggaggcgatagacgagtatcagatgaatcagtgtctgtccctgaagggtcattaa

SEQ ID NO: 355281 - DNA, 100 bp, Homo sapiens
acctacagctgcctggtgcgcaaccccgtgctgcagcaggatgcgcacggctctgtcaccatcacaggtctccctgacttggtcccagaccccaactatg

SEQ ID NO: 355282 - DNA, 75 bp, Homo sapiens
agctgtgatgttttggggattccactctccagtgtaatgattattgacaacagtgaataccagggcctggtgaag

SEQ ID NO: 355283 - DNA, 50 bp, Homo sapiens
tcatcgaggcccaaaccgccaagattcttggtgccaccattgagaactcc

SEQ ID NO: 355284 - DNA, 100 bp, Homo sapiens
cctccgaacccgggaaaagaggaactaaggcggaggaactgagacgtttcgaattccagtttctcacccacggataataaatttgctacatgctctgatg

SEQ ID NO: 355285 - DNA, 89 bp, Homo sapiens
gcctcggaggcgttcagctgcttcaagatgaagttaattggccttggtcctcacagctccaaaaagaaacaggatctcgataagctcta

SEQ ID NO: 355286 - DNA, 74 bp, Homo sapiens
tgtaggagggaaagaacttgtattccaaacagggtgtggatgaatggaacatagctcgcctcaatacagtcttg

SEQ ID NO: 355287 - DNA, 82 bp, Homo sapiens
ctgtagtggccttgatctactgcaggaaaaagcggatttcagtttttggtgttgagccagacttgaccagggaaggcggcag

SEQ ID NO: 355288 - DNA, 100 bp, Homo sapiens
agagaccttggagtgtcgggaaatgtggaaaggcttcatcttaacggtggtggaggccctgtctctgcccctggtggtcatcgtccatggcaaccaagac

SEQ ID NO: 355289 - DNA, 110 bp, Homo sapiens
tggcatggccccgcaggtcttcacccaggccctggagtgcatgcgcaggaaggaaaatcacctcggcagtgtttgaaggaaggatactgcaactctttgaagtacgcatt

SEQ ID NO: 355290 - DNA, 90 bp, Homo sapiens
tgaagctggaacagccagaattggacccgaaaccatgcctcactgtcctaggcaaggatcttaagattgaaagtgatgttcaagaaccaa

SEQ ID NO: 355291 - DNA, 75 bp, Homo sapiens
aggaatcgtgctggaaaaagtaatttgccattttcagtggaaaacaagtggtcgttactagctaagatgtgtttg

SEQ ID NO: 355292 - DNA, 100 bp, Homo sapiens
gtgaatcacaacacgcattggaaaagtgcattgcttattctccaccttttggtgattatgcacagaacggtggcagccgaagttaggaagcagatctccg

SEQ ID NO: 355293 - DNA, 50 bp, Homo sapiens
cataaaactgtcaagaagactgatttggtgcttccagatgtgagttatca

SEQ ID NO: 355294 - DNA, 50 bp, Homo sapiens
catcagctacttaagcgccacgagaagggaatctggaaacccaggaaaat

SEQ ID NO: 355295 - DNA, 100 bp, Homo sapiens
atctttcaggattctcaagatacagaggtcactgcttctgttcggaacagagatccccctgagatagaatacagaagtaatatgacttctccaacactcc

SEQ ID NO: 355296 - DNA, 100 bp, Homo sapiens
actgttgtgagaggctcagagaaagcagagggtgagatggatgagtccagcattctaagacgaagagggctccagactatctgttatagtccctgggtca

SEQ ID NO: 355297 - DNA, 82 bp, Homo sapiens
tgagacacaatttatcattgaataagtgttttaagaaagtggacaaagagaggagtcagggaagagcatggaggaaatcaag

SEQ ID NO: 355298 - DNA, 74 bp, Homo sapiens
ccaacctgaggaagagatagaagatggtggactcttcattccaatgggttctaagctggtctatgtccatcacc

SEQ ID NO: 355299 - DNA, 75 bp, Homo sapiens
cgcctcgtcgacatgagtgatgtggaggaaaacaacttcgagggcagagaaaagtcttgcacgaggagcatgttg

SEQ ID NO: 355300 - DNA, 82 bp, Homo sapiens
tgatgcctgcagagctgtggcttaccaggtacaccaggggttggaaaaaccacactaggcaaagaacttgcgtcaaaatcag

SEQ ID NO: 355301 - DNA, 82 bp, Homo sapiens
ccgcaaggaccccaaagagtgctgcaagttcatgtgtctggacccagaagtccattggaatattaagcccaggagttgcttt

SEQ ID NO: 355302 - DNA, 100 bp, Homo sapiens
gcgaaaaaaggtgaaaggtattcttgtggatattgggcttgacagctgcaaggagttactgaaggagggctctgagagatttcatttctgtcctgctgat

SEQ ID NO: 355303 - DNA, 100 bp, Homo sapiens
ctcgggggccaactctgaggagtccactgcagcaggctcagatcaccatgaaagtaatccaaggcttgtacagtggggtcaccacagtggaactagatac

SEQ ID NO: 355304 - DNA, 98 bp, Homo sapiens
ttgtgtatagcttgcctttcaaggacatggacaaattttcaggccatttgtgtaggaccagaaaacatgcagataatgtatccagctatatttgacca

SEQ ID NO: 355305 - DNA, 98 bp, Homo sapiens
ggtggttctgtgggatgtggcatcagggcaggtcgtgcgcaaattccggggccacgcaggggaaaacctcgaggaacccatggccctgcaggaactgg

SEQ ID NO: 355306 - DNA, 100 bp, Homo sapiens
tttcactcttcagtgttcctgttatttatgaacggcatcaggctgactgtgctgtcctgattgttgctgctggtgttggtgaatttgaagctggtatctc

SEQ ID NO: 355307 - DNA, 75 bp, Homo sapiens
gcccgggctccgcgtacttcctgttcaggtgctcatggaaacaacctcattgctgttctagccaaatacatctac

SEQ ID NO: 355308 - DNA, 75 bp, Homo sapiens
gagatcatggtggccaaacccacagaaaatcccgttttgtcaacctaatgaagcattcaaagaagacatatgact

SEQ ID NO: 355309 - DNA, 80 bp, Homo sapiens
cttcgatgtgcgagactttggaaaggaggatacgaagcgttttcggcttcctgcccggagctgtgcagcaaacagtcgac

SEQ ID NO: 355310 - DNA, 82 bp, Homo sapiens
tcgtatgtccgctatccagaacctccactctttcggtatcaacttgaactgaaggatgactacatcattagaactaatcgac

SEQ ID NO: 355311 - DNA, 74 bp, Homo sapiens
cctagatctgatgggggaagccaccaggattacatcatctgctggtatatgtctcgagtccacggtatgcaccc

SEQ ID NO: 355312 - DNA, 145 bp, Homo sapiens
agaaaacacagcagttgcaccctgttttgcaaaaaccatcagtgtttgggaatgattctgatgatgatgatgagatgatggaccatttggattgtgcaacaaatgaagaaaaccctgtgatatctggtgaacagattgtccagca

SEQ ID NO: 355313 - DNA, 50 bp, Homo sapiens
cccagacaagatggacaccgcggaggaagctgatgttctaatcatgtcag

SEQ ID NO: 355314 - DNA, 89 bp, Homo sapiens
gtcccgctgcagccgagatgccgggggagcggggccttccacaccccctccgtgggtgtgtgagttgcatgctgagaatttgaaaaatg

SEQ ID NO: 355315 - DNA, 83 bp, Homo sapiens
tacataccccgtaccaagccgagggcaactttggaggccccctggaaggctttaggatccagctttggcagcatgtaagcagc

SEQ ID NO: 355316 - DNA, 90 bp, Homo sapiens
ccgcgccccgccgctgagccgtcgcggagccgcgcagccctcggagcacgatcaggatcctcatgaccagccaaagagaagaagaattag

SEQ ID NO: 355317 - DNA, 90 bp, Homo sapiens
ggatttgttaaggattccaagtaactcttatttggtacagcagggaagaactggaaactcagagaaagaaactgcccttccatctacaaa

SEQ ID NO: 355318 - DNA, 100 bp, Homo sapiens
gcgagagaaacaataggacggaaacgccgaggaacccggctgaggcggcaggtacaatgactcttcttgcttttcacctaagttgaataagcaccctgtg

SEQ ID NO: 355319 - DNA, 128 bp, Homo sapiens
ggatgttggtggtcaagatagaattaggcctctctggaagcattacttccagaatacccagctccagaaacatgacaaggaggactttcctgcctcttggagatcagaggaggaaatggcagcagaag

SEQ ID NO: 355320 - DNA, 83 bp, Homo sapiens
cagcgagactccgtgggcgtaggaccctccgagccagtaagcaatggcctcagttttgcttctgttttggatgaacaccacca

SEQ ID NO: 355321 - DNA, 96 bp, Homo sapiens
gcctgacagctctgcggctcgggccctgagcgtgtccggagcggtgactggaaggggtacacaggcaagaccatcacggacgtcatcaacattggc

SEQ ID NO: 355322 - DNA, 75 bp, Homo sapiens
caagtcggacgaggagctgctgccgcctgacggggctcccgagcacgaaataagcgggttttgaaaacaaaaaaa

SEQ ID NO: 355323 - DNA, 75 bp, Homo sapiens
tgagaggctgctgttctaactcgctcccaggtctcccgcctgccatgcagaaagtcatgtataagggactcgtcc

SEQ ID NO: 355324 - DNA, 98 bp, Homo sapiens
gacggcccaggtggcaggatgtcctggtctggccttctccatggcctcaacacgtccctaacttgtgagagctggcggtcaccatggcaatgcgggag

SEQ ID NO: 355325 - DNA, 82 bp, Homo sapiens
atgcagcaaggaaataggatttaaccgctctctgcctcccaggggcactatggcagacaaagttaggaggcagaggccgagg

SEQ ID NO: 355326 - DNA, 89 bp, Homo sapiens
gctgctgacgctgctgctgcccggcctcggggtacgttggaggtcatcgaacaagtaagattatgaggtttgttgataaaattaccaag

SEQ ID NO: 355327 - DNA, 101 bp, Homo sapiens
ccggcgccgcctgactgtggggtgttcgttccgcacccgctcccggcgcctgccggagaggccagccactgaggcggctcccagctgcgttggcgacatgg

SEQ ID NO: 355328 - DNA, 75 bp, Homo sapiens
cgccacgggaaggagctgggcggcgagtccaactttgaaacaccacaaccccagacccagacccagcaactggaa

SEQ ID NO: 355329 - DNA, 83 bp, Homo sapiens
aggtgggcctgctgtaccggctgctgcaggcctccatcctggcgtacctggtcgtaaaaccgtgaggacatactgaatgccgg

SEQ ID NO: 355330 - DNA, 51 bp, Homo sapiens
ttgcaccacagatatatgggttcatcaagcattgcacagttctctccaata

SEQ ID NO: 355331 - DNA, 100 bp, Homo sapiens
ctgccatctcctatgaagaatggaatgaccctcctgctgtggccagagatcctcagcaggagcctatggaagagatagaaaatttgaagaaacaacatga

SEQ ID NO: 355332 - DNA, 75 bp, Homo sapiens
ctgatatgcaatgtcacttacaacattaatcagatactgcatttaagggcggcgaagtgcacaggggcgtgctgg

SEQ ID NO: 355333 - DNA, 100 bp, Homo sapiens
aattctcagtccaagtttaaagttaaggtaatactgcattgcatgattgtgcagaatctggaagtttggacatcatgaagatgcttcttatgtattgtgc

SEQ ID NO: 355334 - DNA, 75 bp, Homo sapiens
gagacagaaatgttgatgtggtacttgaagacacctgtactgttgaacgtttattgaagatgaccttagaagaga

SEQ ID NO: 355335 - DNA, 50 bp, Homo sapiens
aaagccgttcgagtgtcctgtggaaggaactaagcgtcttgtagaaggaa

SEQ ID NO: 355336 - DNA, 74 bp, Homo sapiens
atggtagcttcctggggatggtatgctggatatacaggcgagcgacggaggcgccggtgccaggtggcattcag

SEQ ID NO: 355337 - DNA, 72 bp, Homo sapiens
cagtgttatctcgaccagaggctagtaggactggagagtcatgatcagccgcacactggggcccgaggtcgg

SEQ ID NO: 355338 - DNA, 82 bp, Homo sapiens
gcgcgtgcgcggacatggcctcaaacgatctattaatgagatgaagcggttggaagaaatgtcaaatatgtttcagagctct

SEQ ID NO: 355339 - DNA, 75 bp, Homo sapiens
cctggacaattcacctgcctcctatgtcttccatccagacaatgctggaggcacctcccgaactaacaacttgga

SEQ ID NO: 355340 - DNA, 100 bp, Homo sapiens
ctgggctggggacctgccctcctcctccagccgcccgcttcctccttgccaggaggaccaaactcttacccaggatctactggagcagctgttggagccc

SEQ ID NO: 355341 - DNA, 116 bp, Homo sapiens
aggctcgcctcgactccaaatggttgaaaacagatatacaggttttgcactgattgcaaaaataaagtcctccgagcatacaatatccttattggtgaacttgactgcagcaaaga

SEQ ID NO: 355342 - DNA, 51 bp, Homo sapiens
aatcagagtggaggaagtacagccagcagctgttcggctcttgaatcccag

SEQ ID NO: 355343 - DNA, 100 bp, Homo sapiens
tccggaggccagtagcaccaggatatgtcttcctccctctgcgcttctgggtgaacgtgattaagaacccccagttcgtgtttgacatccacaagggcag

SEQ ID NO: 355344 - DNA, 97 bp, Homo sapiens
cctccccctcaagttcaaggtctaggtccaggtaaaatatgcaatatacgttgtcttgagaaggttgatgcttttgaagaacgacataaaagttggg

SEQ ID NO: 355345 - DNA, 100 bp, Homo sapiens
gctccgtgtggaggagctggagatggatgatgccaataatgacccacagtggtctgaggaacagctgattgctgcaaaattttgctttgctggacttctt

SEQ ID NO: 355346 - DNA, 50 bp, Homo sapiens
ggtttgaaaagcagctggcctgcaaggcatgttatttgaaagcaattgag

SEQ ID NO: 355347 - DNA, 74 bp, Homo sapiens
cctggcctcactcaaacagtaaacgagtactatactggcaattgctggagaagattttgcaattgttgcttctg

SEQ ID NO: 355348 - DNA, 100 bp, Homo sapiens
tgggaaaatcatggaagttgattactcagtctctaaaaagctaagcatcgagagtaaacatgaggttacgatcctgggaggacttaatgaatttgtagtg

SEQ ID NO: 355349 - DNA, 75 bp, Homo sapiens
cagaccagctctcaggatgacttttgtgcaggatcaagacaaaaaacttcaagacttgtggagaacatgtcagaa

SEQ ID NO: 355350 - DNA, 96 bp, Homo sapiens
cgccagcagttccagtccgttgctttactttttgcttcaccgacatagtcattatgccgaagagaaaggcctatggcatgtctgcgttacctttaa

SEQ ID NO: 355351 - DNA, 82 bp, Homo sapiens
ccgaagcccagcggctccccgactccttcaagggcaggggaaatggaaggtgatgcagtcgaagccattgtggaggagtccg

SEQ ID NO: 355352 - DNA, 82 bp, Homo sapiens
gatggcactttccaaagtggatgcctccggggagcagcccctgtcaaagggaacaggaagcagtccacggagggtgacgccc

SEQ ID NO: 355353 - DNA, 90 bp, Homo sapiens
ataatacaacacttctgcaaatggctgaagaggtccaggtcaagacctcgtctccgttctcatagtcgtagcagtgaaaggtccagtcac

SEQ ID NO: 355354 - DNA, 101 bp, Homo sapiens
ccggtgccggcctagcgtcctggaattacttcaatcaatttgcctgagaatacagatcaacccacagaacaaagcggatttccaaggcatctccccagagc

SEQ ID NO: 355355 - DNA, 95 bp, Homo sapiens
ctgagaatgacccgttctggaatcagcttctctcattttctttccctgcaccaactagcaggctaccggctctctgaccagttccacgacatcct

SEQ ID NO: 355356 - DNA, 100 bp, Homo sapiens
gaccaagcgggagctggagaacttcagacactacgagcaggccgtggagcagaaatgggtacaagttcctgtactgctcggcgcgggccattggcatggc

SEQ ID NO: 355357 - DNA, 75 bp, Homo sapiens
gagcagcggaaaatgatccagtcacagccaaaactggacaagccaaggcatctgtagccaaagtaaacaaatcta

SEQ ID NO: 355358 - DNA, 50 bp, Homo sapiens
caggaatcatgggctatcaaaggtaaattcgaaccaccattatttcaccc

SEQ ID NO: 355359 - DNA, 82 bp, Homo sapiens
agaggtgtaccggcatttcggcaaggccccaggaaccccgcacagccacaccaatgctgtccctgaagcagcttctgtttcc

SEQ ID NO: 355360 - DNA, 76 bp, Homo sapiens
ccatgccgctcctaagcctgcacagccgcggcggcagcagcagtgagagctacccgtacagtgaggacgcccgcca

SEQ ID NO: 355361 - DNA, 51 bp, Homo sapiens
gccatggccgccgccgatgccgaggacaagatcgcagaggaaggtgggcgg

SEQ ID NO: 355362 - DNA, 89 bp, Homo sapiens
tggcaatggcacaaagttctctcgatcagggcatacatctttcttcgacaaaggaaatgcacagcggtattgatgagtagatccttgga

SEQ ID NO: 355363 - DNA, 76 bp, Homo sapiens
tgccactcggctgccggaggccgaagtggccacagatgtctttaattccaaaaacctggccgttcaggcacaaaag

SEQ ID NO: 355364 - DNA, 101 bp, Homo sapiens
gtcaagctgttactttcctatggagcctccagaaatgctgtgagtcttttagtcctgctatacagctgcaccttgtacatcaagctccatgtaatgttcct

SEQ ID NO: 355365 - DNA, 98 bp, Homo sapiens
gggagtcccggcgttcttccgctggctcagccgcaagtacccgtccatcatagtcaactgcgtggaagagaaggggttccaatttcatctgctgttgc

SEQ ID NO: 355366 - DNA, 50 bp, Homo sapiens
gcggcgcacgccttgcccgcccagctctagccggcccggtccttggactg

SEQ ID NO: 355367 - DNA, 76 bp, Homo sapiens
agcggcccttagcgaccccgcccgggccccctcagacactacaacaacaggagtgcaaacttctctacagccgaaa

SEQ ID NO: 355368 - DNA, 85 bp, Homo sapiens
ggaaacaaagccctgtgggaccgtggcttgctcaatggggcctcccagaaggaaaggaaacagattcattgtctgtctgaggatg

SEQ ID NO: 355369 - DNA, 49 bp, Homo sapiens
ccgcctcaaccgcgacgccgagctcatgatggagcagtccaagaagtcc

SEQ ID NO: 355370 - DNA, 75 bp, Homo sapiens
agaaatccaaaaagccgagtagagaagttatcaggcggtgcgtctttctacgtgaataggattttgtggctggcc

SEQ ID NO: 355371 - DNA, 90 bp, Homo sapiens
gagcaccctgctgaagaggctgctccaggagcacagcggcatctttggcttcagcgtgtcccccatgaggacggcaccgtgaggttctgg

SEQ ID NO: 355372 - DNA, 98 bp, Homo sapiens
aaagccctccgatccgtcttttagttgcttctcttccttttttctctccggtttctcatcactccaaccaggctgaccccgcactacatctacccacc

SEQ ID NO: 355373 - DNA, 100 bp, Homo sapiens
tcactcaccgccgccgccgccaccactgccaccacggtcgcctgccacagtttgtagatgcggacaacctgatcctcaaccctgacacactgagcctgct

SEQ ID NO: 355374 - DNA, 83 bp, Homo sapiens
cttcagccaccctcgaccctgaactggaataattagcaaattgtggctactaatttgccccctgaagatcaagatggctctgg

SEQ ID NO: 355375 - DNA, 75 bp, Homo sapiens
ggacatcctggaagctgggaaatgggaatgctggcagactttgtgtcccagacttctccaatgatcccctccatt

SEQ ID NO: 355376 - DNA, 75 bp, Homo sapiens
agcgtcggggaggcaagatgatccaccagcggttccatcctacacttggaaatgcactcggtgatggaaagagag

SEQ ID NO: 355377 - DNA, 74 bp, Homo sapiens
tgagcaacatccgcgagttcctgcgcggctgcggggcttccctgcggctggagtcaagtccatcatctccagaa

SEQ ID NO: 355378 - DNA, 75 bp, Homo sapiens
actgaatccacatagagaaagtgatgggtgtgaagcagtattctggaaagtttttctaagactagtgaagaactg

SEQ ID NO: 355379 - DNA, 100 bp, Homo sapiens
tgtgatccagcaccgacccagccggcagtatgccacgcttgacgtctacaacccttttgagacccgggaggtggcacaactctttacagacaactttgac

SEQ ID NO: 355380 - DNA, 98 bp, Homo sapiens
tcgccaggatcttataaaacaaatgctgctgctatgaatatgggtcgaccattccaaaaaaatcggctttatcctgtggataaacgcagagtgaacga

SEQ ID NO: 355381 - DNA, 100 bp, Homo sapiens
tgaggttcagattaagaaatctgccccaaagtcttagaactgctggttctagtgagccctacatcagagcagtatgacagcctacttcggcagatgtggg

SEQ ID NO: 355382 - DNA, 75 bp, Homo sapiens
aggcactttccatgaatactgagaatgccaaagtaaccagatctaacatgagatattgctatatggagatttgcc

SEQ ID NO: 355383 - DNA, 76 bp, Homo sapiens
gccttttctgactcctcatactcacctcccatccagcctggtttgcctgagaatacagatcaacccacagaacaaa

SEQ ID NO: 355384 - DNA, 87 bp, Homo sapiens
cgaacatcgtgaacagcatcgtaggggtcagtgtcctcaccatgcccttctgcttcaaacagaaaagcacttggttctgcttcgaga

SEQ ID NO: 355385 - DNA, 101 bp, Homo sapiens
caaatgctctctggaggatctgaaacttgcgaaatccctggtgccaaaggctttagaaggttatatcacaggagagaattcctctaatattattccacaac

SEQ ID NO: 355386 - DNA, 90 bp, Homo sapiens
ctcattttatctgccacgacccagaaggaggccacttcatctgtaaaacctttgacctgttcacaccgtttagtgtggggcttgtctacc

SEQ ID NO: 355387 - DNA, 101 bp, Homo sapiens
aagtaaacctggtgactcacagaaccttggtgctgtgattgtctccacgccccaggacatcgcattgatggatgcacacaagggtgctgagatgtttcgca

SEQ ID NO: 355388 - DNA, 83 bp, Homo sapiens
gttggaagcagccgatccagcctgcggagcctgtggggcaggctgcgggaacaccatcgggccaccattaaggtcattcgacg

SEQ ID NO: 355389 - DNA, 60 bp, Homo sapiens
cattgccgacggtgaacgagcgggacacggaaaatcaaagtgtgggatgctgtctcagga

SEQ ID NO: 355390 - DNA, 75 bp, Homo sapiens
acgttcgagaatatgctgtaggctgcctgcgacagatgagccctccttacagcctagaaaaaatgacagatctcg

SEQ ID NO: 355391 - DNA, 100 bp, Homo sapiens
ctagatcctgtgctttactctgaagactcattggaactagatggaaagatgttgtctccaaatgcattcgatgccactttcagccactacttttgtttta

SEQ ID NO: 355392 - DNA, 73 bp, Homo sapiens
gccgatattcaccaagcgcttcgctacaaggtcaagtttacccatgggggaactggttccagccaaaccgcac

SEQ ID NO: 355393 - DNA, 82 bp, Homo sapiens
gcagaaagccgcctcttggtttgcgtcctgcactgaaaggaaatgacggattttgtatcatgaactgatcactaaatatggg

SEQ ID NO: 355394 - DNA, 83 bp, Homo sapiens
aagaccttcaagtttgtcgtcgtcggggtcctgctgcagaccctggaagctgtcctgaatttcaaatactctggaggcccggg

SEQ ID NO: 355395 - DNA, 80 bp, Homo sapiens
attgtaagtgcagatggaacacaacaggaatctgtcttgaactatcgtttcgatcctctcggcattgttgatggttttac

SEQ ID NO: 355396 - DNA, 90 bp, Homo sapiens
tgagtcactgcctgcgcagctccggccgcctggctccccatactagtcgccgctgggagtgtccactcgccttccaccagcatggcaacg

SEQ ID NO: 355397 - DNA, 100 bp, Homo sapiens
cggggcatcatcaagagcatggtcgcagcagttgtggtagaaatttctgggttagtggactctcttctacaaccagagctacagatttgaagaatctttt

SEQ ID NO: 355398 - DNA, 74 bp, Homo sapiens
tggccgagcaggctgagcgatacgacggatgaccgagtgggagacagcagcaccagcggtggcagagaccccag

SEQ ID NO: 355399 - DNA, 75 bp, Homo sapiens
gtggttgcggtcatcttctccctgctgctcgtggtggtccggacacagatatgctgtgtgacatggctagaatat

SEQ ID NO: 355400 - DNA, 100 bp, Homo sapiens
ctgctgaccgaggcccccctgaaccccaaggccaacagagagaagatgactcaggaacgaagagctctagaaagaagaatatctgaaatggaagaagagc

SEQ ID NO: 355401 - DNA, 83 bp, Homo sapiens
tttctcatctgactcgtgatctgcccatcttgttactccctagcagtgtggtaagatttggtgcttccagatgtgagttatca

SEQ ID NO: 355402 - DNA, 100 bp, Homo sapiens
gttcaaactccgcaactcctccagcccagccaccggggaggaccctgagggctcagacatcctgaaggcctttgagccctacttagagattttggaagta

SEQ ID NO: 355403 - DNA, 50 bp, Homo sapiens
ttcacgaagaaattctttgttacaagatcgaatcatcaatttagttgttg

SEQ ID NO: 355404 - DNA, 101 bp, Homo sapiens
ctctgttttcacttatacgaggtgaagttgagcagttggattcaagagcacttcccctttgccttcatcagggaactgggaacagccaggtgccccaaagc

SEQ ID NO: 355405 - DNA, 90 bp, Homo sapiens
ccggaccccggcgcgctgaatgcaggacgctaacaagtgctggtaaagacctacaagataattttctgacggccctggcaatgagagaag

SEQ ID NO: 355406 - DNA, 50 bp, Homo sapiens
ctctgctcagtggagaccttggatgccccttacctagacctggcccccta

SEQ ID NO: 355407 - DNA, 73 bp, Homo sapiens
tccagcatatcttttctgttgtgacagacacttcacatactgctggtgagtgatgaaatggtagtggagctca

SEQ ID NO: 355408 - DNA, 100 bp, Homo sapiens
tgtaaaaacatggcggatccagaattctgttggtgacaaagttcctgctgatataaggttaacttccatcaaatctaccacactaagagttgaccagtca

SEQ ID NO: 355409 - DNA, 51 bp, Homo sapiens
tttcaaatcaaatgactcacagcagaacactgatatttgcatttaatgggg

SEQ ID NO: 355410 - DNA, 100 bp, Homo sapiens
cccccagagcatcagtccttgaagagcagctttgaggcgcttctccaacgctgctccctgtctgcaactgacttactatgaggtgtcaggtcgcattgag

SEQ ID NO: 355411 - DNA, 99 bp, Homo sapiens
ctgcaagcggcctcacagtcatggatctggaagctgagggcacgtgtttgcggttcagccctttgatgaccgcagcagatccaggtccagagagcatcg

SEQ ID NO: 355412 - DNA, 108 bp, Homo sapiens
gcagcccctcagcaacgccgtgcagctgcccatcgaccagacctgtcatttactccatcctttatagtgatgctacaggacgaagaggaatggataaaaacattggcg

SEQ ID NO: 355413 - DNA, 82 bp, Homo sapiens
gccaaacgtcagcaagaagaagaagcagctgctcagatgaagtatgttgagtctaaaaaggacagagtcacagtagtcttca

SEQ ID NO: 355414 - DNA, 43 bp, Homo sapiens
gaaccgggggagcgaggcacgctcaacgggtcggccaccatca

SEQ ID NO: 355415 - DNA, 74 bp, Homo sapiens
agagaaagataggcggccatggtccaaccttgaaggatgactttgacaacgatgtggatgctctgctggaagaa

SEQ ID NO: 355416 - DNA, 75 bp, Homo sapiens
ctgacgatggcctggagtgtgtgcccactgggcagcaccaagtccggatgcagggacttcaaggatgttgaagcc

SEQ ID NO: 355417 - DNA, 100 bp, Homo sapiens
aggaggggtgttctttcttgacattaccttttcaccagactatccgtttaaaccccctaagaattcagaaggagctggcggacatcactttagaccctcc

SEQ ID NO: 355418 - DNA, 83 bp, Homo sapiens
ggacaatggggacccgggacgacgagtacgactacctattcaaagaaatcttcccaaggctgcagacaccgacggatttgctt

SEQ ID NO: 355419 - DNA, 83 bp, Homo sapiens
cacaaggcaggcctcttccgaccaagacaatgcagatcttcgtgaagactctgactggtaagaccatcaccctcgaggttgag

SEQ ID NO: 355420 - DNA, 74 bp, Homo sapiens
tgaagggagctgtggatggaggcttgtctatccctcacagtaccgccagctctctgctctccacagggctcccc

SEQ ID NO: 355421 - DNA, 82 bp, Homo sapiens
tggagtgtacaagtccgcggagcagggggaggtgtgggtcaacaacctggaggttgatagcagatataattcgtggccttct

SEQ ID NO: 355422 - DNA, 83 bp, Homo sapiens
cccagctgtgcggagctaggacgcggaacatcccagaggccagcatcaacatgtttttgtcatccattggagggacactgtat

SEQ ID NO: 355423 - DNA, 75 bp, Homo sapiens
ggtttgatcttgttgactatgaggaagttctaggtgaagctttgttctaagaatatttgtttcatctagtttatg

SEQ ID NO: 355424 - DNA, 100 bp, Homo sapiens
cagattcgcagtggtcgcttcttctccttgatacattccaccgttgatctgggggaaaagtggacacatccagacagccttgtatgggaagatgggaagg

SEQ ID NO: 355425 - DNA, 83 bp, Homo sapiens
gcccagaggggcccactcgctgtccccacttgcacctcctgcgccgccgccccccatccaaggatatgccttcaagcctccac

SEQ ID NO: 355426 - DNA, 90 bp, Homo sapiens
gatgtccaggaaggaggaggaataatatttatggagcatatattatggaacacagtgagtgctccagttgtaacatctaccactcaggaa

SEQ ID NO: 355427 - DNA, 73 bp, Homo sapiens
cttcacatcgtcgttcacatgggatgagctttgatccaaaccttctccacaacaatggacataatgggtaccc

SEQ ID NO: 355428 - DNA, 90 bp, Homo sapiens
aaaacacttcccatttacctgttgttgctgctgtctgttttcgtgattcagcaagtttcatctcaaggaaactcttatcactactattga

SEQ ID NO: 355429 - DNA, 100 bp, Homo sapiens
agtaacatacaggagctgcaggctcagatttctcggcatgaggatctagtgaaaagccatttgatgtatgcggtcagagaagaagtggaggtcctcaaag

SEQ ID NO: 355430 - DNA, 74 bp, Homo sapiens
tttatagctaagactccaggacacccctgaagccgagaaatgaatcagcatgattcttcagaggctcttcaggt

SEQ ID NO: 355431 - DNA, 90 bp, Homo sapiens
gaggcaggcgcccaccgccggcggtgatgcggctgtgaagccctagtcgtgatccgggccaaggtggtggggaagaagctggtaaaggag

SEQ ID NO: 355432 - DNA, 90 bp, Homo sapiens
agtgcccggagagaagcctgagctgccggcattgccgggcaccctgctgcggagcagacgtgaaggcctgtgatacttgggctgtgatcc

SEQ ID NO: 355433 - DNA, 75 bp, Homo sapiens
ctggccccgatggctctgtgcaacggagactccaagttcctggtccagaactttacacagaaaaggtgctcaaag

SEQ ID NO: 355434 - DNA, 101 bp, Homo sapiens
gccactacacctggcgatctgtgtcttatacgaaggccaatgatgaggccaatcagagtgatacaagtgtctccttgtcagaacccaagagcaaaagcagc

SEQ ID NO: 355435 - DNA, 100 bp, Homo sapiens
cggcgccgccgtggggcctcctggacgcgtcggcggaggtggcttcgtcccgcggagtccaggcttcagaaagttgaagttgatggtagtttaagtgata

SEQ ID NO: 355436 - DNA, 100 bp, Homo sapiens
atggacgacgaggaggagacgtaccggctctggaaaatccgcaagaccatcatgcaggagacgcaggtgcccgcgctgctggaggccggcttccggaggg

SEQ ID NO: 355437 - DNA, 82 bp, Homo sapiens
gcgaggctttcagttctttggaattccattcttttccttattcttctgatgtggatccaggcattatattgtacttctagca

SEQ ID NO: 355438 - DNA, 75 bp, Homo sapiens
atgtcctcgaagatcagaccgagagccgctccgggaattctgaagttctgggcctttctcagaagactgtaatgt

SEQ ID NO: 355439 - DNA, 80 bp, Homo sapiens
agactctcttcgctctttgcatcttaactgcagttgcctgtgtccctggagtgttacacagtgcctcctgaagacaacct

SEQ ID NO: 355440 - DNA, 51 bp, Homo sapiens
gcagttcaaagatgccttttgggtttgtcagacaccagtccggacctcagc

SEQ ID NO: 355441 - DNA, 98 bp, Homo sapiens
cgaaggcgcccaagcagcagctgccggagcccgagtggatcggggacggagagaacacgagcccatcagctttctgaaaaggatatgagcatgctcga

SEQ ID NO: 355442 - DNA, 82 bp, Homo sapiens
taccacaacagggacacctggttccagctgcagcacgtggacgctgactcggaagtgcagaattggctgtgaaaggactgag

SEQ ID NO: 355443 - DNA, 90 bp, Homo sapiens
gaaaagctgcaggccatgcacctggagcgatggttcgagactataagaggcttacccccatttctgtgctggaccatgcactagaatctt

SEQ ID NO: 355444 - DNA, 113 bp, Homo sapiens
aaaaatacatctcatgagactgcagcaaaccacaaagttgctaagcggaaagtgaccagaagaggtgtgcagtttccaggcctggcccatacagacctccaacaggtgctccc

SEQ ID NO: 355445 - DNA, 75 bp, Homo sapiens
caagaggagcaacctcgtcagcagcgaggaaggaaacagcgcaaaccagtccagctacgggggcccagccagcca

SEQ ID NO: 355446 - DNA, 75 bp, Homo sapiens
cagcagtacgacctgcagggccagccctacgatgccatggacaatattaccaggcagaaccaattctacgatacc

SEQ ID NO: 355447 - DNA, 100 bp, Homo sapiens
acacgttccagggggtcatctttcagggctccatccgctacgaggcgctcaagaaggtgtatgacaaccggctggagccagacctgagctgtgacacagc

SEQ ID NO: 355448 - DNA, 75 bp, Homo sapiens
gggagtatttgtagacacctaccccaatgaggagaagcagcaagaggtgtcagctgacaggggctctggccacag

SEQ ID NO: 355449 - DNA, 100 bp, Homo sapiens
gtccggggcttgccctggtcttgctcggccgatgaagtgcagaggtttttttctggttcgagaacatcatcgaaaattaagaaaggaggctaaaaagcgg

SEQ ID NO: 355450 - DNA, 75 bp, Homo sapiens
acgccttcaacaccaccttcatctccaccatcggaggatttgacagctaaggatattgaagaaattattgatgag

SEQ ID NO: 355451 - DNA, 50 bp, Homo sapiens
ctgtgcagtcctgttggaatttgggaagatggtgaaaggaatgggaggtg

SEQ ID NO: 355452 - DNA, 100 bp, Homo sapiens
ttatgtagaggaagaaaacattcctgctctgaaagctcttcttgaaaaatgcaaagatgtagatgagagaaatgagttggaaaatggatataccttattt

SEQ ID NO: 355453 - DNA, 98 bp, Homo sapiens
gtatctgtatggatgggcgggctgacctcatcctgccttgtgctcacagcttttgtcagaagtgtattgataaatggacagtgataccaccaagaaga

SEQ ID NO: 355454 - DNA, 100 bp, Homo sapiens
caggactgtcaacgaaacctggcacggctcttgcttccgccaatagcaatccttgtgagcatgcaggaaaatgtgtgaacacggatggcgccttccactg

SEQ ID NO: 355455 - DNA, 75 bp, Homo sapiens
actactacatccgcagcggccatttcgagaaggccatggtggcgtgttacccaggcaacgggctcgggtacgtaa

SEQ ID NO: 355456 - DNA, 100 bp, Homo sapiens
gtaccgggagaggtcgcgggctgggagccacatctcctccaatcgagcgtatgattttctgtacgcatgtgcagtctttgccaacaaaaaaaattaccaa

SEQ ID NO: 355457 - DNA, 49 bp, Homo sapiens
gatgctttacgcaagagttttgaggacagtcattttgtttactcattca

SEQ ID NO: 355458 - DNA, 90 bp, Homo sapiens
ccggctgtggaagagagcggcggccgctcacaacatgcacagcctggcgacggctgcggtgtgagcggggcctggaccacgccatccccc

SEQ ID NO: 355459 - DNA, 78 bp, Homo sapiens
aagcagctacacaaagagggtcatctcttctattgtacctgcagagccaatgaagagattgctcaggttcgaacaaaa

SEQ ID NO: 355460 - DNA, 75 bp, Homo sapiens
ccgctgccgggcaccgaggaccagctcaatgacagggcagctgcaatgactctccgcacggtattattgtcattg

SEQ ID NO: 355461 - DNA, 100 bp, Homo sapiens
ctgctgctgtgctcaggcctggccggacagatgcggtgacctgccagcacctgccgcagccttcgtccgggagtcgccccatctctccacgcatcggggc

SEQ ID NO: 355462 - DNA, 75 bp, Homo sapiens
ggagctgcggtctccccgccgcggctgtgaagtttagcaactgcaatggaaaaagaaaagtacaatatgagagca

SEQ ID NO: 355463 - DNA, 74 bp, Homo sapiens
ccgggagatcgcggacgggttgtgcctggaggtggaggggaagatggaagagttgagtcaggccctggctagta

SEQ ID NO: 355464 - DNA, 75 bp, Homo sapiens
ctggagtccgcgcctccctggactgccttttcaaggtgtgccctatgaacagatattctgcccagaagcaatatt

SEQ ID NO: 355465 - DNA, 98 bp, Homo sapiens
accgaaacctagccccggacgagaagcgcagcaacgtgcggtgggaccacgagagccttcagtatcagacacagcacagcagccatctgaagagcaaa

SEQ ID NO: 355466 - DNA, 75 bp, Homo sapiens
tgatggaaccagaacaccccgagatgagaggagaagagcccagcacaacgaagtgtggacgaatgtggaacctcg

SEQ ID NO: 355467 - DNA, 100 bp, Homo sapiens
tagagagtgaagatgaagatgaggagggagctacagcgttgaacaaccacagctctattcccatggacccagaccattcctcaagaattttgtatccaag

SEQ ID NO: 355468 - DNA, 90 bp, Homo sapiens
tgaagtctgcgtgctttagaatggatgaacaagagttaaccgctctgtaagaagcatcattttggtattaacaaaccagagaagatcata

SEQ ID NO: 355469 - DNA, 82 bp, Homo sapiens
tgtgaacttccagcagccggcggacggtactccaaagattcaggtttactcacgtcatccagcagagaatggaaagtcaaat

SEQ ID NO: 355470 - DNA, 74 bp, Homo sapiens
atgactaaaaagaagcgggagaatctgggcgtcgctctagagggaaatcctcattgacgattcaatttgttgaa

SEQ ID NO: 355471 - DNA, 100 bp, Homo sapiens
tcacgtgtgcccaggccctgaggtgggccggacctgggagtggcagacccaacatgagtgaagtttcctgcaagaaacgggacgactatttggaatggcc

SEQ ID NO: 355472 - DNA, 50 bp, Homo sapiens
agcaccttttggcccaatgaatatcagtgtggcaaaggagcagagaactt

SEQ ID NO: 355473 - DNA, 74 bp, Homo sapiens
aggagattctgaagataaggagcaagagacagagcgacatgagagattggaccgcgggctgcactggagaattt

SEQ ID NO: 355474 - DNA, 50 bp, Homo sapiens
ggtccagcttcttccccatgccagcaaggaatcctatgaggatggttgtg

SEQ ID NO: 355475 - DNA, 75 bp, Homo sapiens
ctaggacgcggaacatcccagaggccagcatcaacatgactcgggacctggttcgggccggggtgctgaaggaga

SEQ ID NO: 355476 - DNA, 74 bp, Homo sapiens
acatccaaggtggtcttgaaggacactgggatcctgtaacacaggatagaactggaggaacctccacttgtttt

SEQ ID NO: 355477 - DNA, 100 bp, Homo sapiens
aagaggaggacatggagatgaagaagaagattaacctggagttaaggaacagatccccggaggagctgcatcttcctcccgtgaggctggccgagctcca

SEQ ID NO: 355478 - DNA, 90 bp, Homo sapiens
caaaggatgaagaggaagagcctcccagcatgactcagctacttcgagatgtgtttcacatggtagttgaagtaccacgctggtctaatg

SEQ ID NO: 355479 - DNA, 75 bp, Homo sapiens
gccaagtcaattctggagacctgggtgtgggtcaagcaaccagatgtggccagtgggatcaccgtcgactgggcc

SEQ ID NO: 355480 - DNA, 82 bp, Homo sapiens
ggaccagctcatgggcacggctcgggacgacttcccaagtaagaagcggaagaggagccgctggaaccaagacacaatggaa

SEQ ID NO: 355481 - DNA, 98 bp, Homo sapiens
tggaacgacatggaacgcatttggcaatatgtctattctaaggaccagctgcagactttctcagaggagcgttatgtttggtggaagaaaagtttgga

SEQ ID NO: 355482 - DNA, 88 bp, Homo sapiens
ggcggcgcgtggtctacgccgagtgacagagacgctcaggctgtgttctcagcatacatctgtggatggatatactgaaccacacatc

SEQ ID NO: 355483 - DNA, 116 bp, Homo sapiens
ctcattgccagctactactgcgactgtcttcccggctggatgggtcagaattgtgacataaccattacaacacaagctagcatggagtttcgacggaaagggtcacaaatgtccac

SEQ ID NO: 355484 - DNA, 83 bp, Homo sapiens
tttacccagaagtagtccatatggtggacccccaaaagtacaagggcatatttaacggattctcagttacacttaaagaggat

SEQ ID NO: 355485 - DNA, 75 bp, Homo sapiens
gaaagtgctcctgcggctgtatggagcgattttgcagatgagctcccagctcctccagcagccgacaggaggccc

SEQ ID NO: 355486 - DNA, 90 bp, Homo sapiens
ggctcaactatgcagaaaacctcctgcggcacaaagagaatgacagagttgccctttacattgcaaacagagtctcactctgtcatccag

SEQ ID NO: 355487 - DNA, 87 bp, Homo sapiens
gagccggccgagcggcgacggaccgcgagttcccagtgacctgacagcagaggagcgtcaagaactggagaacatccgacggagaaa

SEQ ID NO: 355488 - DNA, 75 bp, Homo sapiens
gtttggagggaagaactacgaggcctccatgtcccacgtggacaagttcgtcaaacaatgcagatcttcgtgaag

SEQ ID NO: 355489 - DNA, 100 bp, Homo sapiens
gccggcaccttccagctggaccagtggctgcgcgcgtccaccgcgggcatgatcctgcctaagatgcccgacttcaactcagggagagcaacaagccccg

SEQ ID NO: 355490 - DNA, 93 bp, Homo sapiens
cgttgctgcgggggattgtgggagtctccgcgtcccgctcgctgggagagaggtatcatgatattagctggtttgacatcaagtcatttgtga

SEQ ID NO: 355491 - DNA, 73 bp, Homo sapiens
gccctgcatcgagcagctggagaaggcaccccccgagcccagctccacacaccgttcctggatctcctctccc

SEQ ID NO: 355492 - DNA, 100 bp, Homo sapiens
acatcttcccagctttggttggaagacctattatcagatcaaccaccaaagtgggaaacattgaaatcaagtccttcctctacctagcctggtatatgac

SEQ ID NO: 355493 - DNA, 144 bp, Homo sapiens
gtctctccggcccggtttccctcggcgtgctactgtgcgctcgatccagcaccatggggaagcgggacaatcgggtgggtgataaaagaaaatgtggctgaagttacccgaagttcagcttgcagtgtaattcagaagagttaa

SEQ ID NO: 355494 - DNA, 73 bp, Homo sapiens
aaccttcgatctcctgacgaatcactaaggaggaagagcgagagaagaagttttctagaaggctaaatcacag

SEQ ID NO: 355495 - DNA, 83 bp, Homo sapiens
ggctgccgatgggaaatcccaggctgccgcggctcctgtgtgctttgaaggtggagtgtgttactcttggggctggaatgagc

SEQ ID NO: 355496 - DNA, 90 bp, Homo sapiens
gaattaccaaaaacttctgcatccatattctggtgtaactgtggacatcaccattcaggaaggtgttgacttcaaaatcaaaactgtaga

SEQ ID NO: 355497 - DNA, 75 bp, Homo sapiens
ccggctctgggctacggactatgggcgaatagctctgaccacccggcgaaggtaagaatgattgatgttggctga

SEQ ID NO: 355498 - DNA, 48 bp, Homo sapiens
cgaggtcagccccaaactaccgatgctggtttttcagcagcagacaga

SEQ ID NO: 355499 - DNA, 75 bp, Homo sapiens
ggatcgctgtgatcgtcacttgctggtcagtgagaaggtcggaggggccgaggggaccaagctggatgatgactt

SEQ ID NO: 355500 - DNA, 99 bp, Homo sapiens
ccaagatcgagcccagcgtcaacttcctcaagtcgcccaaagatgaggacggggacttggttgccttttccagtgacgaggaattgacaatggccatgt

SEQ ID NO: 355501 - DNA, 74 bp, Homo sapiens
gccaagactaggagggtaacccagaggaaaccgtcttcagggcctgcggggccttttccgaagtggttttagct

SEQ ID NO: 355502 - DNA, 82 bp, Homo sapiens
ctttcacaataagagcagaggatggaacacttcagtgcattcaaggtgctatggtctttagaattgggtcactggatttctg

SEQ ID NO: 355503 - DNA, 50 bp, Homo sapiens
ggcgaaatgtgcaaatgtttatggacatattttggaatggatgtctctgc

SEQ ID NO: 355504 - DNA, 90 bp, Homo sapiens
cgagaccgggcccttcctcgaggcggtgtcccacctgccgcccttcttcgcatccgcacttccactaatagccaagtagacaagctgacc

SEQ ID NO: 355505 - DNA, 97 bp, Homo sapiens
cagagaggagcagctggaagccgtggctgcgctctcttccctctgctgggcgtcctgttcttccagggtcttgttcagcgttgcgtaatcatccaga

SEQ ID NO: 355506 - DNA, 75 bp, Homo sapiens
ccacccaccgccgccgcctcccagccccctcggaaaaccacactgagagttgcattaaaaaccagcatgtaggta

SEQ ID NO: 355507 - DNA, 101 bp, Homo sapiens
ctccgagtcactcatgtgcaaaattgcagattttggccttgctagagtaattgaagataatgagtacacagcaagggaagactttgagaatcactacaaga

SEQ ID NO: 355508 - DNA, 75 bp, Homo sapiens
atttcatccattatgctggctgttatgtacgcaggagttactccacaggatccgctgaacataggatgttgccac

SEQ ID NO: 355509 - DNA, 100 bp, Homo sapiens
tggagagggattcgtggtgaaggtccggggcttgccctggtcttgctcggccgatgaagtgcagaggtttttttctggactgatcctttgaaatactcca

SEQ ID NO: 355510 - DNA, 74 bp, Homo sapiens
ccaagaccatttgaacctagcaaaacagacatgaagaccctgttaccagtaagcaagccagaaattcggagtta

SEQ ID NO: 355511 - DNA, 87 bp, Homo sapiens
ctgtgggaacagagcaaagagttcctgaggggctttgttatgcacctaaagccatattggaagctccagaagaaagagcaccccccg

SEQ ID NO: 355512 - DNA, 82 bp, Homo sapiens
tcgcccgcctcgagccagcccgccagcatgccccagtccaaaggtgagcatgggtttatgcgtcttaggcattattgtgatg

SEQ ID NO: 355513 - DNA, 101 bp, Homo sapiens
cctggctcccttctgccccagctccgtctcggcggcggcgggatattccccgagtccctccggtggctaatggccacccagcagtttgagtctgcaaagag

SEQ ID NO: 355514 - DNA, 89 bp, Homo sapiens
atggcgagccaacagtcacttttcttggcggatctgatggataactcagagctcatcagaaatgtgaccctttgtggacatctccacca

SEQ ID NO: 355515 - DNA, 87 bp, Homo sapiens
atgtctttcctaccatctaaaatacgaaggtttctggctgggttttgctgttactgctcagtgtagtcacaccttgaataagaaatg

SEQ ID NO: 355516 - DNA, 100 bp, Homo sapiens
gctttcacgaaggcaccgacgtcatcatgctgaccaccaatcagatccgtaaggttacgggcaggacttgagtggcttcggacagggcttctcagacccc

SEQ ID NO: 355517 - DNA, 75 bp, Homo sapiens
gcggcgcttcccattcgccatgcgccgggggtgggtgcccgaagcctttccgctgtgcccattgccattactcct

SEQ ID NO: 355518 - DNA, 101 bp, Homo sapiens
tgcattgctgggcgtctggacatctgtagctgtcgtttggtttgatcttgttgactatgaggaagttctagtcactcaagactgcttgcaactgattgcag

SEQ ID NO: 355519 - DNA, 82 bp, Homo sapiens
gttcatctcctccgtcaccagccacatctaccaggcataatcaccagcaacacccgggacaataatacgggggccacctacc

SEQ ID NO: 355520 - DNA, 74 bp, Homo sapiens
ggagctgtgcgcgcagccgggccaggtggtcgccccaggctgcatggctacttggagaatgagccgctgatgct

SEQ ID NO: 355521 - DNA, 74 bp, Homo sapiens
tcgccgtgttatccttgagtaaaggagcttgaagaaatccgcaaatgtgggatgaaaaacttccgtaacatcca

SEQ ID NO: 355522 - DNA, 98 bp, Homo sapiens
caggcaacaggaacaagatgtgaactgtttctcttctgcagaaaaagaggctcttcctcctcctcccgcgacgggcaccatgccggtggaaaggatgc

SEQ ID NO: 355523 - DNA, 85 bp, Homo sapiens
gattgaagcttcagggagagccagagcagcccatgacccatcgagaaactgcacctgtttcccagcctgaaaacaaaccagaaag

SEQ ID NO: 355524 - DNA, 82 bp, Homo sapiens
acttcaaagctactgcagacgacgagctgagcttcaaaaggggggacatcctcaaggcagtatttggcagtcgtattcagag

SEQ ID NO: 355525 - DNA, 100 bp, Homo sapiens
atgaactcccagttggaacaaagggaaggcgcatggatgctggagggcgaagacctgcgaagtccctctccagtgtccccaactcctgcccagccagtcc

SEQ ID NO: 355526 - DNA, 83 bp, Homo sapiens
tgaggatatttctcgtatccagaaaatcagccgttggacataccagatggtcgaagagctccacttcctgctcattaccggag

SEQ ID NO: 355527 - DNA, 100 bp, Homo sapiens
gaagtattgagtgatcctaaaaagagagaaatatatgatcagtttggggaggaagcaaaatgtattgcattagaatgtgggagaattcaactgagttgct

SEQ ID NO: 355528 - DNA, 100 bp, Homo sapiens
gacgcctcacagctcatctttcctaaaggacttggatgttgtgggtgatggtatgcagtgtcctccttcacctttgctttttgatccttcactaaccctt

SEQ ID NO: 355529 - DNA, 74 bp, Homo sapiens
cagcaccacttcgaccagcttcatcctcagacaggaccctctttgcaagttcagtgcttaacctgaccgaactg

SEQ ID NO: 355530 - DNA, 101 bp, Homo sapiens
ccacctttccctttatttccggagggagtgcatccgccccaacccttttccccctcgtctcctgtgagaattccccgtcggatacgagcagcgtggccgtt

SEQ ID NO: 355531 - DNA, 75 bp, Homo sapiens
atcacacgccgccatccgggaggcccagggaagttttacatgtggcacccataaaagatgaggctgagaacacgg

SEQ ID NO: 355532 - DNA, 97 bp, Homo sapiens
aaggttggtacattagtgggggaagacaaatatggaaacaaatactatgaagacaacaagcaattttttggtaaaaagatggcctatcagaaggtcc

SEQ ID NO: 355533 - DNA, 75 bp, Homo sapiens
cggacccccgcaaggtcaacctgggagtgggagggattaatgaaaatcaagttccatcctcagacaagaggtaaa

SEQ ID NO: 355534 - DNA, 100 bp, Homo sapiens
agctgtgatagctttgcttgctgtggggttgacccagaacaaagcattgccagaaaacgttaaggaatgctgaaatacttttaaagctgataaacctagg

SEQ ID NO: 355535 - DNA, 98 bp, Homo sapiens
ggggcgccagctctgcaggagaggcctctgagaaggaacccttgaaatttgacaagtatgcgcccaagctggacagcccctacttccgacattccagc

SEQ ID NO: 355536 - DNA, 100 bp, Homo sapiens
cggaggaggttcgaagctgagtatgtgacagatgctaatactggagaccgtggacagaccaataatgctgcttctgcatcagcttccaactccacctgaa

SEQ ID NO: 355537 - DNA, 98 bp, Homo sapiens
tgccggggcaggggcggaggcggaggcagaggtggaggcgctttgaaaggaccacctttcactcacctgaggactccacagaagatggtatattatgg

SEQ ID NO: 355538 - DNA, 89 bp, Homo sapiens
tgagttcagaagtacaaaaattggcaagtgctttattaaaccaaaagccaactcagacagtaatgccaggacaagtcatgcgggttaca

SEQ ID NO: 355539 - DNA, 82 bp, Homo sapiens
agggctccaggcatccggtcctggtccctgctggttggctctacagattctcccctgcccctggagaaggaggagcaggtcc

SEQ ID NO: 355540 - DNA, 100 bp, Homo sapiens
gctgcgcgacccccgcgcatgggccaaggagattaagatcaagttgggaattctcctccagaagccagactcagttggtgaccttgtcattccgtacaat

SEQ ID NO: 355541 - DNA, 100 bp, Homo sapiens
cgcgcactgaggaggcggcggccgacggtggcggcgggatgcagaaacatgccaaaggccaggatttgtttgatcagattgtgtaccacttggaccttgt

SEQ ID NO: 355542 - DNA, 100 bp, Homo sapiens
tcaaagatgacgtcagcacatttccatgtgcagtctttgcaagccacatttggaacttttgagtccatcttgagaagctcccaacataaacaagacctca

SEQ ID NO: 355543 - DNA, 82 bp, Homo sapiens
gcgtggaccacatagacatttacgcggatgtcggcgaagagttcaaccagatccagagacaatggccccgatgggatggagc

SEQ ID NO: 355544 - DNA, 101 bp, Homo sapiens
tttttgactctgaggctctttccaacgctgtaaaaaaggacagaggctgttccctatggcagaacctcatgcagttccatactgtgggcaccaagaccaag

SEQ ID NO: 355545 - DNA, 75 bp, Homo sapiens
gttctactcaagccttattgaagagataggaactcttggttgggataaccagcagtatctgttggaaatgttggc

SEQ ID NO: 355546 - DNA, 100 bp, Homo sapiens
aaccagaccatgcaggaactctgatcgtggacatttcaacctccagaactgtgatccaaactccatccggcacaacctgtcactgcatagtcgattcatg

SEQ ID NO: 355547 - DNA, 83 bp, Homo sapiens
catcctctggcatttcctgcagaagtcagatgccctggatgcagctagaggatgattctctgtacatatcccaggctaatttc

SEQ ID NO: 355548 - DNA, 82 bp, Homo sapiens
gacaacctcagaggacaacgaagtgttcggatgcctttgtggaactgtacggccccagcatgcggcctctgtttgatttctc

SEQ ID NO: 355549 - DNA, 99 bp, Homo sapiens
ccttgatagcatggatttctgtgagctcactgcatcaaacagaaaggccttttgctaagtagcagcctgatgcactccgagtcagagctggacagcgat

SEQ ID NO: 355550 - DNA, 109 bp, Homo sapiens
ctgccttgctgatctgagctcagacctgccaatttaccagagataattgataacaccctgtaacagctgatagaacttcatggaggaacacggagtgacccaaaccgaa

SEQ ID NO: 355551 - DNA, 100 bp, Homo sapiens
catggcggccgccctgggagcgagcggaggagcaggcgccggaggtctcctaaaaacccagaacagaagatcattaagagagtgattgctcttgaaggag

SEQ ID NO: 355552 - DNA, 100 bp, Homo sapiens
aaccctaaacagtggactcaacttcaaagacgttctcaaggagaaggcagacctggataatggcatcagctgctaaggaatttaaaatggacaacttttc

SEQ ID NO: 355553 - DNA, 87 bp, Homo sapiens
atgtttggcagctgagtattggagccaggagcctgccatgagaggaaggaacagagccacagagaaaaatgacttgctcacaacaga

SEQ ID NO: 355554 - DNA, 50 bp, Homo sapiens
ggattttgtcagcttgtcgtcaaggtctcggcgcggaagatggccggcgg

SEQ ID NO: 355555 - DNA, 50 bp, Homo sapiens
tcgcgaggcaacctctgggccaccgcggagctggagtttgttcagatcat

SEQ ID NO: 355556 - DNA, 82 bp, Homo sapiens
atgctcagaccttcattgctctgtgtgccaccggtaagaatgattgatgttggctgatattggagtgctcattcacatgaag

SEQ ID NO: 355557 - DNA, 89 bp, Homo sapiens
attggctctgaagtggggtctctgggtcagaatggcggcagtggagcatcgtcattcttcaggattgccctactggccctacctcacag

SEQ ID NO: 355558 - DNA, 114 bp, Homo sapiens
gaaattgaaattacctccgagggaaacaagaaaacatcaaagaggtctagcaaaggtgctggagaatctggtaaaagcaccattgtgaagcagatgaggatcctgcatgttaat

SEQ ID NO: 355559 - DNA, 75 bp, Homo sapiens
aattttgccgatttcatgactaaccagtgatcactactcttggaatcaaagataaatccaaatactgcatatcag

SEQ ID NO: 355560 - DNA, 100 bp, Homo sapiens
gcggcacgcagccgggaggccgaggactcggagttcacctgcagcctacttctgcttcctcctggccgctctgggtgtgacagctggtgcccatcgcttg

SEQ ID NO: 355561 - DNA, 75 bp, Homo sapiens
cacgagcttttcctccaggcctttgagaggctccttcacctaccaaacgcaaagaccgctcagatgagaagtcca

SEQ ID NO: 355562 - DNA, 75 bp, Homo sapiens
cgctggtcgggcttcagtactcgggcaagaccaccttcgtcaacgtgatcgcgctgcgggggcacatccaggaga

SEQ ID NO: 355563 - DNA, 83 bp, Homo sapiens
gaagaaacctggaagaggaagaggaaagcaaaggagtcagggatggctcttcctcaggtccagcagtttaagcaggatccacg

SEQ ID NO: 355564 - DNA, 74 bp, Homo sapiens
caagccttcccagttatcataaccttgaatggcgactagatgtacaggctggtgcagtggtgtcatcttggctc

SEQ ID NO: 355565 - DNA, 100 bp, Homo sapiens
tctgccctcagtatcaacaatgattgctcaagacttctttgtggctttgctaaaggacaggacattaaattgtatgattggacagatgaagcatattttg

SEQ ID NO: 355566 - DNA, 51 bp, Homo sapiens
cgttgatcctgcagcccaaggtgacggagtgagtgacctgcaggaagaagg

SEQ ID NO: 355567 - DNA, 99 bp, Homo sapiens
cccctaccctaacggcaagccaagctcaaatgtatctccgagctcaaatggagtctcgctctcagtcaaaatctccaacgggaactcctgctcgtgtaa

SEQ ID NO: 355568 - DNA, 100 bp, Homo sapiens
cacgattgtaatgtctgtgaggagagagcaaggcagttcttcaggggaggctgaaccgttcacaggagaactccctgcccagcagacactgcccatcctc

SEQ ID NO: 355569 - DNA, 101 bp, Homo sapiens
tgggaaaccagagtatttggggtctacctcctgtggtttttgattcaagtcctgttctacctactgccaattggaaagatggatagctcccagttgatcca

SEQ ID NO: 355570 - DNA, 100 bp, Homo sapiens
acggctgaaggaccttcttcgtgctcagggcctgggagatattattgatatcgtccccagcactgcgacagttgtgatcgtggtgtgcgtcagcttcctg

SEQ ID NO: 355571 - DNA, 113 bp, Homo sapiens
tgcacttcagtatctcaggcggcaccctgtccccgaggaggggaccatgacacagtacatgtcccagagcaagcacacggaggcccgggagctcatgtactcgggagccctgc

SEQ ID NO: 355572 - DNA, 83 bp, Homo sapiens
aacccactttctcggcgccgcggctcttttctaaaagtatcatccaattatgatgggttttgaaccccttgtgaaccagaggc

SEQ ID NO: 355573 - DNA, 50 bp, Homo sapiens
gtctgcttggtgtggagccatgaaggaggctgaaccgtctgagcccagaa

SEQ ID NO: 355574 - DNA, 75 bp, Homo sapiens
cgcatccccgcggacgccacagcgctggtatttgaagtataccatacaactgttttgaaaatccagcgtggacaa

SEQ ID NO: 355575 - DNA, 100 bp, Homo sapiens
ctccgtattgaatgaaagacccagtgcaaagacatcaccatgaacactagcaatatgtgctgattagaaggctcacttgtgcagtgtggaggataaccag

SEQ ID NO: 355576 - DNA, 90 bp, Homo sapiens
gtattggaatggaaaatgcagtgggattggagataacccaggcatgccggtggtggtgtgcacattgagccccggtatagacagttcccc

SEQ ID NO: 355577 - DNA, 96 bp, Homo sapiens
acaggtggagttggagcagtagctctgctaattgggccaaatgctcctttaatttttgaacgagcttgtaaatcagcttctgaaacaaaagtgata

SEQ ID NO: 355578 - DNA, 75 bp, Homo sapiens
gaccgccatgcacaagctctttgactgggccaataccagccggcgcggtggaatcccccaaagaaggtaaaggga

SEQ ID NO: 355579 - DNA, 82 bp, Homo sapiens
tttcctcatccctgcagctgtgtttgaacagcaaaagactgttgaagtagagagcattttgcccagctcactcggattcttt

SEQ ID NO: 355580 - DNA, 100 bp, Homo sapiens
gggtgacagctccgggaccggccgaaaggcgaggaaccgggccgttgctccagggagaactgcaaatatcttcatccacccccacatttaaaaacgcagt

SEQ ID NO: 355581 - DNA, 98 bp, Homo sapiens
cgcccaggtggccggcgcttcagatttggtgcttccagatgtgagttatcaggtggaatccagtgaggaggatcagtctcagactatggatcctcaag

SEQ ID NO: 355582 - DNA, 82 bp, Homo sapiens
cagcctcccgccggccgtctccttaacaccgaacaccgcgccatgtcagaaccggctggggatgtccgtcagaacccatgcg

SEQ ID NO: 355583 - DNA, 100 bp, Homo sapiens
cggggaccgagcctgggaggccggccggtgccagcacctttcggcttctgagacggcggcagcagcggcattcagactacagtggtagtggaggccgaag

SEQ ID NO: 355584 - DNA, 97 bp, Homo sapiens
ccggcggcctcacggacgaggccgccctcagttgctgctccgacgcggaccccagtaccaagaaactaattctgaagcaagcccttatagttgtgct

SEQ ID NO: 355585 - DNA, 83 bp, Homo sapiens
gaaatgttttgtttgactccagtgttaagagaagaaatgaggacatatcagtatcgtcttacctccagtattagtgcctcgtc

SEQ ID NO: 355586 - DNA, 101 bp, Homo sapiens
tgcgcccaagcggggctctggcaagccacagcctggcagctctgatcaggaaagtgaggaacagcaacaattccggaacattttcaagcagatagcaggag

SEQ ID NO: 355587 - DNA, 100 bp, Homo sapiens
tggacttctggctttggccactttacttcctgccaggattaacctccatttcagctaatcatgggagagattaaagtctctcctgattataactggttta

SEQ ID NO: 355588 - DNA, 98 bp, Homo sapiens
ggaggtttgtgcaatttgagaccggtcggcactgtgcagagatcagagtactaagagacagtacaacacctcaggtattgagccccactattacatct

SEQ ID NO: 355589 - DNA, 74 bp, Homo sapiens
gctgggtgtcttctccctcgccagctgggtggtgtcgggtttgacatcaactgtggtgtccgcttgctaagaac

SEQ ID NO: 355590 - DNA, 50 bp, Homo sapiens
ccgccctggccatctaccatgtggtgaacctgttctctgacccaccccag

SEQ ID NO: 355591 - DNA, 101 bp, Homo sapiens
tgaatatattcattgtttgcaacctgctactggacgctggagaatataaatcaaagccattctgtgaaaaactgctttcctgggtgaaaagcagtggctgt

SEQ ID NO: 355592 - DNA, 50 bp, Homo sapiens
caccaatcccttcgatcaggatgttggcttgcagccaatttactggagca

SEQ ID NO: 355593 - DNA, 100 bp, Homo sapiens
caggaggacaggtgccggagcagctcgtgcagctaagcagccaactgcagaaacgtcaggaagcaatgaggctccccaagaacacacctgaggaaaagga

SEQ ID NO: 355594 - DNA, 82 bp, Homo sapiens
cgagagctggagaagctgggattggagattccacccaaacttgctggtcactgggagggccaattcctgtccccccagcagc

SEQ ID NO: 355595 - DNA, 82 bp, Homo sapiens
tccgggcctttcgtggaaggctctatcgtccgcatctcgatggagaacttcctgtcctcgaggccacacgggttaatcgaag

SEQ ID NO: 355596 - DNA, 98 bp, Homo sapiens
gagcttttaggcatacaagtaccctggctgctgacaagctctctactgatgatctgaactccctcattgctcatgcacatcgtcgtattgatcagctg

SEQ ID NO: 355597 - DNA, 75 bp, Homo sapiens
cgctgctacctgcagcgccgtgtggcacgacacaaaaatcaggcctgccttgctctgccaggaaccatgagtgag

SEQ ID NO: 355598 - DNA, 75 bp, Homo sapiens
gcggagaggtgtttggtgcagaagctccagtcagtctcagtcatcctacatcatcaggaatccacagcagaggcg

SEQ ID NO: 355599 - DNA, 100 bp, Homo sapiens
cctgccttcgctcccgcaccgaataatccagaatggctactctgatctatgttgataaggaaaatggagaaccaggcacccgtgtggttgctaaggatgg

SEQ ID NO: 355600 - DNA, 100 bp, Homo sapiens
cttggaaactttggctttggatgtcaatatttctgcttcctgcttccacttccgtgaccgttagggacaagacaggtgctggagaatctggtaaaagcac

SEQ ID NO: 355601 - DNA, 100 bp, Homo sapiens
gcagcgtcaggccgaggagacggcggccttcgaggaggtgatgatggacatcggctccacccggtgtctttggtgcaacactaacaaggcttgtctggac

SEQ ID NO: 355602 - DNA, 95 bp, Homo sapiens
gatattgaagcaatgcttgaggctccttacaagaaggagtgatttgggccccgatgttggctatgaagctattggtcttgtggacagtagtttgc

SEQ ID NO: 355603 - DNA, 100 bp, Homo sapiens
ctctacccggcagcgggggcagtcagagcggagccaagatgcgaatgggaaccaatttagaacttgaattgattcatcgaggaggcaatttgtgttcagg

SEQ ID NO: 355604 - DNA, 74 bp, Homo sapiens
gaaaatctcaggaatctggtctcattgggccaggagtggtggctcacacctgtaatcccagctctgggaggcca

SEQ ID NO: 355605 - DNA, 51 bp, Homo sapiens
agcttcagcggaattcgaaatggctactgcagcactggggtgtcagttgtt

SEQ ID NO: 355606 - DNA, 100 bp, Homo sapiens
tcgtcttccacttgcacgaaagctttcctaggccaaaaagaggctgaccggttccctgatgtgttacctgcttctgctactgatccaaactgcagaactt

SEQ ID NO: 355607 - DNA, 75 bp, Homo sapiens
ctccagcaccctcttcttcgtgttcactgccaaacccaagtctgaaatccacgtgtctatggccactccggtcac

SEQ ID NO: 355608 - DNA, 101 bp, Homo sapiens
cgcgccccgcgcggcccgcccggatcgtggcctctcgagagcaagatctttaatctcatgaagtacgacagctacagccgcttcttaaagtctgacttgtt

SEQ ID NO: 355609 - DNA, 76 bp, Homo sapiens
gctgccgggttgcgctccgtgcacctcttgcggttgtcacaggtagtactgatggaattggaaaatcatatgcaga

SEQ ID NO: 355610 - DNA, 76 bp, Homo sapiens
gaggcgtcacggtggggaacataggacgacagttagctatggaacaggagtacagctgtgtagtaaagatgccttc

SEQ ID NO: 355611 - DNA, 100 bp, Homo sapiens
ttgaaaagtttgggccaggtcctgctccgattcctagattaatagaagtgtgctggaattgatgttcgtctgtgtgatgttggtgaggccatccaagaag

SEQ ID NO: 355612 - DNA, 75 bp, Homo sapiens
gcagattatatcgcatcctatggctcaaagaaagatgattatggagttcccattagacttgaagttgggccacgt

SEQ ID NO: 355613 - DNA, 98 bp, Homo sapiens
cccggctcgaagcctggatgaaatagatctctcggctctgagggtgtcgtgaaaactacccctaaaagccaaaatgggaaaggaaaagactcatatca

SEQ ID NO: 355614 - DNA, 75 bp, Homo sapiens
cacaagacgactcaataggaggaaggaaacctgtccagtttaagtcgtcttggtctgagatataacagactgtca

SEQ ID NO: 355615 - DNA, 98 bp, Homo sapiens
ttcagtgtgcaaagatgtaatgcaacgttgtgatctggaggcacatctcaaaaacaggaacctctagtgcctcaacagacgaagacatggagacagag

SEQ ID NO: 355616 - DNA, 147 bp, Homo sapiens
ggtgccagctcgggcaggccttccgagaggaacctctatgccgacatcgacgccgcctggcaggccctgcgcaccaggtaactaggatttctacctcaaccgcgagacctatgcaaggacggtgtggaccaactcgcgcccgcggca

SEQ ID NO: 355617 - DNA, 50 bp, Homo sapiens
agatggcagtttgtgaaattaaaggcagtggagctactgctgtggttcag

SEQ ID NO: 355618 - DNA, 100 bp, Homo sapiens
ctcctgaccctgaagaactgtgaaaccagcctggacaccaagtctgtgtcagaaggccacctcaagaggaacatcgtggtgaagaccgtggagatgcggg

SEQ ID NO: 355619 - DNA, 74 bp, Homo sapiens
gggttcgggcgatgctgcaggatcggtcgcttggttatcggacagaatggaatcctctccacccctgctgtatc

SEQ ID NO: 355620 - DNA, 75 bp, Homo sapiens
ttgtggggccatgacacacaaaaagaaagactgctttgagagattacctaagcaaattgaagaacgtaatgaaag

SEQ ID NO: 355621 - DNA, 107 bp, Homo sapiens
cctggagcctcagttggaagcagccgatccagcctgcggagcctgtggggcagggatgggcgtgttttgggcgtgctagaggtgtcacgctccattggggacgggca

SEQ ID NO: 355622 - DNA, 75 bp, Homo sapiens
gaaaagcatgcccatacgattaaacctgcgaaagaccacagcaagattctttcattcgtctcctcctagcctggg

SEQ ID NO: 355623 - DNA, 125 bp, Homo sapiens
ttagaaaggagacccgactgcaactgctggattgctgcaaggctgagggacgagaacgagatgtatttccactacacaaaattttccacctctgggataccttactacttgggaattcctctttc

SEQ ID NO: 355624 - DNA, 100 bp, Homo sapiens
gccgccgtgcaggcggccgtcagcaacctcgtccggtcacccacaaaagctgtatataatgccagacattggaatcatccagattcagaagaactgcctg

SEQ ID NO: 355625 - DNA, 83 bp, Homo sapiens
ctcagttggaagcagccgatccagcctgcggagcctgtggggcagagtcctatcattgatcggcctgagtctaatagctttgg

SEQ ID NO: 355626 - DNA, 75 bp, Homo sapiens
gtgcctggctgtgagccccatgtgtgcctggtgctctgatgagaatgtacatggcaagtcaaagcaaacgatcgc

SEQ ID NO: 355627 - DNA, 100 bp, Homo sapiens
tccccaacgtggatgacaagaagacgtccaatctgagcgtgctgcggacggcgctgcggtacatccaggccgtctggcactgaaaaccctaagcaagaag

SEQ ID NO: 355628 - DNA, 104 bp, Homo sapiens
gtgtccgccagcaggctgtgcagcttaacatatttactgctgttcttagtgcactaaagtggaagcattgacatttcctccttcttctggaaagtcattcatca

SEQ ID NO: 355629 - DNA, 50 bp, Homo sapiens
cacgaagcaaatgaagttttatactacatatcagtgctttcatgccttaa

SEQ ID NO: 355630 - DNA, 80 bp, Homo sapiens
cggattcgccgaggcaccgaggcactcagaggaggtggtcaagtaccccctgcacgccatcatggagatcaaggagtacc

SEQ ID NO: 355631 - DNA, 110 bp, Homo sapiens
actggccatcagagtcaccaaccccaatgccaggctgcgcagtgaagaaaatgattctcagcacagatattctacacctcacgccttcacctttaacacctccagtccct

SEQ ID NO: 355632 - DNA, 71 bp, Homo sapiens
ggagcctggcgggcgtgggaacccaggccccgccgaggcggccaggttctttgcagatgtagttccagcag

SEQ ID NO: 355633 - DNA, 102 bp, Homo sapiens
tgggggccacaaatgctccttctcctggagacgcaactcaagtcgcaattgaagtaccacctcccgagggtgattgcttccccatgcggggtagaacctttg

SEQ ID NO: 355634 - DNA, 100 bp, Homo sapiens
cactttcgccagcccgtgccgcgagcgcggcctgcaggagttacagaatgtctgaaggggacagtgtgggagaatccgtccatgggaaaccttcggtggt

SEQ ID NO: 355635 - DNA, 100 bp, Homo sapiens
ggcggtcggagatccgagagctctgcttctctgaaaagcgtgtggctttctggacttgtcagttgcagggctgggacctattatgatggagcacgagaac

SEQ ID NO: 355636 - DNA, 75 bp, Homo sapiens
atacgagtcctagatgtcaataaccagtccttcagagaacaagaggagcagtgaggagaatgaataccttccaag

SEQ ID NO: 355637 - DNA, 100 bp, Homo sapiens
ccgctgctgctcttctccaggctctgtggtctcaccaacggctttgggggtgcgaggagcgagcaggagccgggcggcggcctggggaggaaggccacac

SEQ ID NO: 355638 - DNA, 90 bp, Homo sapiens
cctcggtctgggcttctctgaggcggcgagagatggtcaggtctggagctcgaccgggccaggagccgggtgtgggctgagccctgcctg

SEQ ID NO: 355639 - DNA, 82 bp, Homo sapiens
ctaaatatatccgtaggaatggagagggaccggatctcagaataccctctaccatctgctttggtcagggtgccgctcgagg

SEQ ID NO: 355640 - DNA, 100 bp, Homo sapiens
gccgcctgctcgttcctgacagaatgttggtcaaagaaaaagtgatgtatgaaaaagaggcaaaacaacaagaagaaaagattgaaaaaatgagagctga

SEQ ID NO: 355641 - DNA, 75 bp, Homo sapiens
gattcatttagagctgcggaacaggacgccctctgatgccagggctcgacccacagagcaccctcagccatcgcg

SEQ ID NO: 355642 - DNA, 99 bp, Homo sapiens
ctgggttctggtgccgcgcagctttccccgcatccgcacttccactaatagccaagtagacaagctgaccctgtcagggagtgacagcgtcatccttgg

SEQ ID NO: 355643 - DNA, 60 bp, Homo sapiens
ggaagcaatacatccagtatgagacccaacatgagtgaagtttcctgcaagaaacgggac

SEQ ID NO: 355644 - DNA, 100 bp, Homo sapiens
ttaccggacactgatcgaccagcaggtggtctatatccatccttccagtgccctcttcaacagacagccagaatggactagtgacacaatagtcctttcc

SEQ ID NO: 355645 - DNA, 100 bp, Homo sapiens
ggccaacatcacgcccttcggcgccgaccagagtgtagcttccattggcaatactttaaacagcgtccatcttgctgtggaagcactacagaaaactgtg

SEQ ID NO: 355646 - DNA, 114 bp, Homo sapiens
gcaatctggctgggaaaaactacatcattctgaacatgacagagaacatagactgtgtcctctcagggtgcgccatcattgtccgaggtcagcctcgtggtgggcctcctcctg

SEQ ID NO: 355647 - DNA, 82 bp, Homo sapiens
gagaaacaggcgccgcgggctccgcgcccggccggacccgggcccgagaacatccagtcatggataaaaatgagctggttca

SEQ ID NO: 355648 - DNA, 75 bp, Homo sapiens
acttctctgtcgtcacagttagaatttttgacagcagctgtatatcttctaagattccgctcctcaccaccatca

SEQ ID NO: 355649 - DNA, 100 bp, Homo sapiens
agaagaggtgtagagtttgcatatatcaactgtggccttaatgagcatgttgacagcatcgatgctagacagacatacgacaaagagattattgtcatca

SEQ ID NO: 355650 - DNA, 96 bp, Homo sapiens
atcatgaaagagatcctggacctatgaatatccagtttgagccatcggatctaagatccaaaagggaaaactcgatgccttgtgggtcctactgag

SEQ ID NO: 355651 - DNA, 85 bp, Homo sapiens
ggggaaaagcacgtggagaaatctgagttgtaggacagtcccatctggacagcaacattgagaatcaagagattgtcaccaatcc

SEQ ID NO: 355652 - DNA, 90 bp, Homo sapiens
atgggcatgtacaacaccgacgagctttggacatcagacagtgcaggagaagaatgtgatgcggcagaaggggctgaaaactaaatccat

SEQ ID NO: 355653 - DNA, 101 bp, Homo sapiens
ggcaggctgaggagaaagcggcgcgcggaggcttgcttccggcgtcatggctcaaagggccttcccgaatccttatgctgattataacaaatccctggccg

SEQ ID NO: 355654 - DNA, 100 bp, Homo sapiens
acaaactgctctgctaccagaagaagtgtcgggtacgcctgcattacacctggcgggagctctggtcagaatccagcaactatcacaagaatactcctta

SEQ ID NO: 355655 - DNA, 75 bp, Homo sapiens
gagggccacggcgagtgtgaggtccacggaaactgttgacagtggatacaggtactccaaagattcaggtttact

SEQ ID NO: 355656 - DNA, 100 bp, Homo sapiens
gcatttcagaaccaggttctccttcgaggaacagagaaaatgaaaccagcagacagaatttgtcaggagtacttgattcttcagaaaacctccaaagtag

SEQ ID NO: 355657 - DNA, 82 bp, Homo sapiens
ctcttcgctctttgcatcttaactgcagcagcccctgtcaaagggaacaggaagcagtccacggagggtgacgccctagacc

SEQ ID NO: 355658 - DNA, 90 bp, Homo sapiens
ggaaaaagaggaaagtggactgtccggggccgggctcaggagcagaggcactgaacttcccagccctgccgtggaagctgcctgccaggt

SEQ ID NO: 355659 - DNA, 100 bp, Homo sapiens
ttggatgactgcagttggtctttcagagatggcagcagaagctgcatatcaaactggtcttatatccagatggccaggctcagatgattcaccccaagcc

SEQ ID NO: 355660 - DNA, 75 bp, Homo sapiens
gcctcggcggccgctctgcctgcgcgctgctcctgctctgctacctgaaacctccacagctgttgagaaaaagga

SEQ ID NO: 355661 - DNA, 100 bp, Homo sapiens
aagcacctgagtcctggcatcacaaacacggaggatgacgacaccctcagtatgaacgctgccgtccgtgccgtggtgcgcatgggtatctacgtggggg

SEQ ID NO: 355662 - DNA, 75 bp, Homo sapiens
ggcgcggggaggctgaagggacgctcgggtaggcaagtaatctatgccagcaattatgacaatgttagcagacca

SEQ ID NO: 355663 - DNA, 75 bp, Homo sapiens
aaagcggaagaatttagacgcacactggagtttacagatgcttcctcagcaacggaaagccatagctaagttcaa

SEQ ID NO: 355664 - DNA, 50 bp, Homo sapiens
cgaaactttcaccgcgagcgggtgtctcactttgtcgcccaggctggagt

SEQ ID NO: 355665 - DNA, 100 bp, Homo sapiens
ctgctgggacatgcctgaacacactcaccgggcacacggaatgggtcaccaaggtccttgaatgggcaagagggcacatgaagtacggcgtcctccacat

SEQ ID NO: 355666 - DNA, 100 bp, Homo sapiens
tctacaaagaacagctggctagactggaggagaggggagaagatgtcaaccggacactagaaggtggaaggaaacctcttcattatgcagcagattgtgg

SEQ ID NO: 355667 - DNA, 74 bp, Homo sapiens
ttagggtcctttatatagaagggagagtaggtcagcagatccggaagctcatcaaagatgggctgatcatccgc

SEQ ID NO: 355668 - DNA, 75 bp, Homo sapiens
aatcatctggaggtggtgaagctaatcaaatgtgaaagacccctgacaaaagacaatcatcttctgggtacattt

SEQ ID NO: 355669 - DNA, 87 bp, Homo sapiens
acagacaaagaaagttcgaaaagttcctccaggtttgccatcttcaatggagttttaacattgaatgcggagaacactaattatgcc

SEQ ID NO: 355670 - DNA, 75 bp, Homo sapiens
cgtcagcactgactttcagctatggaatcgaaacgatggaaagaactttctaaggaagacttatctcctgccttt

SEQ ID NO: 355671 - DNA, 96 bp, Homo sapiens
actcaacagtcaaagtgaagcaggaggaatcttcgagtatgcggacggccccaacgcccaggtcatgaatgccgaggagcatgcctttcgattttc

SEQ ID NO: 355672 - DNA, 75 bp, Homo sapiens
gcacctggacgacgcccggcgccagcacatcgcagatttatcagtcctggctagacaagtccacaccctacacgg

SEQ ID NO: 355673 - DNA, 100 bp, Homo sapiens
aaacatcactgtaattcttgctgtagaaagcttaaacttccagaagctcctgaagaatcatcagaggatgtgacaaaatatcaggaaggagtatctgcag

SEQ ID NO: 355674 - DNA, 100 bp, Homo sapiens
cgagcctcgtggtgtggtgtatggccgtgggcatctcctacattagcgtctacgaccaccaaggcattgtgtccagatctggcaccctgacttatgaagc

SEQ ID NO: 355675 - DNA, 75 bp, Homo sapiens
aaagaatttcaggatcaccggtttctcctgcttcatgtgtgagtacttgataagaattaaaggacaggagttcat

SEQ ID NO: 355676 - DNA, 100 bp, Homo sapiens
cgggcagccatggccctccacagcccgcagcaggatcaaggtgaaaaggagaaccccatgcgggaacttcgcatccgcaaactctgtctcaacatctgtg

SEQ ID NO: 355677 - DNA, 100 bp, Homo sapiens
ctgccacacgctgatggtgcagcaccgcatgatggtacccaaagtcaggaattacatgaatgacagtcttcgaaccaatgtgtttgttcgatttcaacca

SEQ ID NO: 355678 - DNA, 51 bp, Homo sapiens
aacatccaggtggtggtgagatgcaggaaacccagaagttctgtgaacaag

SEQ ID NO: 355679 - DNA, 82 bp, Homo sapiens
tgggatcccggccaccagcaattgtccgggcaaatccagacagaacctttgacttggtgttgaaagtgaaatgtcatgcctc

SEQ ID NO: 355680 - DNA, 90 bp, Homo sapiens
tgccaacaatatagtttggtgtttcggaagccaaggtgaccaagatatcaacgtggtttctacatatatctccaaaatgaaagtaattta

SEQ ID NO: 355681 - DNA, 89 bp, Homo sapiens
ggcattccagttaagagcacaacattttcaagaaaattcaagggtgtcgtagtcattcttcagcacaattcttaattggagaccaagaa

SEQ ID NO: 355682 - DNA, 100 bp, Homo sapiens
ggtcactttggacctatcaacagtgttgccttccatcctgatggcaagaggtggtgtgtaagaagtaccggggattcaccatccccgaggccttccgggg

SEQ ID NO: 355683 - DNA, 107 bp, Homo sapiens
taccagagcatggtgctcttcttcttcgagaattacaccggggtccaggaatcttctgcggcttgtccatagtgtgaataaaaactaaatcacatctataattctac

SEQ ID NO: 355684 - DNA, 90 bp, Homo sapiens
ctgagatcttccggtggcgggaactgcagtcatggatcatattacggtacccaagccaccctgaagggtcccttcccaagcccttaggga

SEQ ID NO: 355685 - DNA, 75 bp, Homo sapiens
gaaggggaaggcgcctgaagaggacgaaggtccaactggcccaccttcaacactccctctaagcacccagacctc

SEQ ID NO: 355686 - DNA, 75 bp, Homo sapiens
gcgagatccgcatgaaggagctggagcggcagcagaaggaggtggtgaaaactattggcttgagggaagtttggt

SEQ ID NO: 355687 - DNA, 98 bp, Homo sapiens
ttggtgtcgtttttccttgagctgaacgtcttgcaacagtggccgcacgcataggaaaaatatattcagggggaagagatgtaatagatttcacatta

SEQ ID NO: 355688 - DNA, 100 bp, Homo sapiens
agattccggcctggagctcccagggccgaggtctcagccttagatccaaggacagtccaaggaagtcctaagaccatggagttggtgatctgggatctgg

SEQ ID NO: 355689 - DNA, 100 bp, Homo sapiens
gaagaaatacgccacatttattctaccggggaagacagtggagatatagatcagctatcaggaagggacttctgccattcaaagaaaatgacaggaagta

SEQ ID NO: 355690 - DNA, 117 bp, Homo sapiens
gatcagagatcggcggagaccctcgaagtgcgcaaacttgacactcaccctgaccggtggaaatggatattgttgaaaaactggtgaaaatgataccttgtgagcatgaagacctgc

SEQ ID NO: 355691 - DNA, 51 bp, Homo sapiens
ggacgcggcgctgctgaccgacatcgaagaccaagatcactccatggatga

SEQ ID NO: 355692 - DNA, 90 bp, Homo sapiens
caagtttgaaaaagattttcgcacagtttgggccccatggtatccctgtgacagtatttcccaaaagggaatataaggataaaccagaag

SEQ ID NO: 355693 - DNA, 90 bp, Homo sapiens
ctacgacaccggcgaggaacttggcaggaacacaatgcacaacatccgtggcaacaagcaggcccagggaacaggccatgaacctccagg

SEQ ID NO: 355694 - DNA, 76 bp, Homo sapiens
caacctcgtcagcagcgaggaaggaaacagcggatcagtttgacaacttagaaaaacacacacagtggggaattga

SEQ ID NO: 355695 - DNA, 101 bp, Homo sapiens
aacagcttctccgggtctcagcatgcccagctcctagtggagacagacaccttcggtagtcaagtccggatcaagggcaaggagacggaattctacctgtg

SEQ ID NO: 355696 - DNA, 100 bp, Homo sapiens
atccaaagtgtgtggagtttgcaaacaaattattgacggtcaaggtatttcatgccgagaaaccaatagagccatggcgactccctctgctgccttcgag

SEQ ID NO: 355697 - DNA, 100 bp, Homo sapiens
ttgtcaaggtggcctaccaggaggccaggggtgtcgccatggctcagtagatgaaggcgtttctgagggcttgcctacacttcaaagcacgtctagcact

SEQ ID NO: 355698 - DNA, 50 bp, Homo sapiens
gtgcttaatcatttctgcatgtgcaagctggatctaccatgaaagacttg

SEQ ID NO: 355699 - DNA, 75 bp, Homo sapiens
atttcttcttttggatttgcgaagaacatgcggttttcagggtttccaggcctgaggtgcccgccctggccccag

SEQ ID NO: 355700 - DNA, 100 bp, Homo sapiens
gagctctcgcgccttggcccattgtcgggcttggaaaattcttgttaaaagttgatagcaagatggaagaactggagcaaggcctgttgatgcagccatg

SEQ ID NO: 355701 - DNA, 98 bp, Homo sapiens
tgcctgctgctcatagcagccaccttcattccccaagggctcgctcagccaggcaagctacgacctatatctatgccagtggaatataattgggtggg

SEQ ID NO: 355702 - DNA, 50 bp, Homo sapiens
aacagcagcctcttcgaaatcaggctgaagccgacgtagcttctctgaac

SEQ ID NO: 355703 - DNA, 100 bp, Homo sapiens
cttacttctccgccaacgcggtcatctcgcagaacgccatcaaccagctttctttctaccacactcccgaggaagctcccatggacaaagccggataatc

SEQ ID NO: 355704 - DNA, 100 bp, Homo sapiens
gccgccagtgtttccgtcagtacgcgaaggatatcggtttcattaaggctggcctgccactcctcctgctatgatgcctgggcagatcccggacccttcg

SEQ ID NO: 355705 - DNA, 100 bp, Homo sapiens
tgcgactgcagcaactgcagatggagaaggagaggctgcggctgaaacagcaagaactgcttcggcagaaaaatctggtccttcatcagaactaggaaag

SEQ ID NO: 355706 - DNA, 100 bp, Homo sapiens
ctaaagtctgagagagggaagtcgcctctgtgctcctcaccttgcagagcgccaagtcccgagtggccttctttgaagagctctagcaggtgacccagcc

SEQ ID NO: 355707 - DNA, 100 bp, Homo sapiens
ggtggaggggtggtgaccatcgaaaggagcaagagcaagatcaccgtgacatccgaggtgcctttctccaaaagagcttagaagcaaagttaagagactc

SEQ ID NO: 355708 - DNA, 97 bp, Homo sapiens
acaccagctctgaagtaagcacagtagaactgctgcatctgcaacaacagcagaaataagcgggttttgaaaacaaaaaaaagaaggagtggaagag

SEQ ID NO: 355709 - DNA, 100 bp, Homo sapiens
cccctgggaggccgaatgtgcaggatcaccgaggggaaagtgagcttgacagggtataactccaccagggaatgctccgactgtcacttcaatgagcagc

SEQ ID NO: 355710 - DNA, 149 bp, Homo sapiens
tggagggcttcaacagttattagaaatttttaattctggaattctagagcctaaagagcaggaatcatggactgtgactttgccaaccccaatgcattgcacctctcattgcatgtgaatgatggctcctgttctattctctcaccttc

SEQ ID NO: 355711 - DNA, 75 bp, Homo sapiens
acgcaagagaaaaatccactgccttccaaagaaattgttcccatgactttgccgactaaagttctaagtgcccac

SEQ ID NO: 355712 - DNA, 51 bp, Homo sapiens
cagagacagctcaacacggcacttccacagatggagtctcgctctgttgcc

SEQ ID NO: 355713 - DNA, 100 bp, Homo sapiens
gggtgaggggcgcccgcctcaagctagagcaggagcattggtttgaaaaggccctacgagacaagaagggcttcatcatcaagcagatgaaggaggatgg

SEQ ID NO: 355714 - DNA, 90 bp, Homo sapiens
acatggacatcctgaagccaatcctgcagcaacaactccaggcccagcatttatcacatggacatggtctccccgtacctctgactccac

SEQ ID NO: 355715 - DNA, 75 bp, Homo sapiens
ctccttgctgcagccatggacccagctcaacattggcaatgtgctccctgtgggcaccatgcctgagggtacaat

SEQ ID NO: 355716 - DNA, 100 bp, Homo sapiens
gaagggggagctgtatggatcagtaccacaacatcagagtatacaagaatactggaagtgtgtgaagaaagaaagcattaaaggagtaaaagaagtctgg

SEQ ID NO: 355717 - DNA, 73 bp, Homo sapiens
ccaatatcagtctatcttttattcaacgaccacgttgatgagcgaacaatatgcaatggaattgccccagaaa

SEQ ID NO: 355718 - DNA, 100 bp, Homo sapiens
gaaccgcacagagccgcgggccctttgcagctgcgattttcgccctacgttttcaacggagggacagtcattttgtttactcattcagccctgttgcagg

SEQ ID NO: 355719 - DNA, 51 bp, Homo sapiens
gggtatggaggaggacctggagggaagaaggagaaagggccaacccctgaa

SEQ ID NO: 355720 - DNA, 75 bp, Homo sapiens
tggctgatgacaatatagaagattctacagcaagaggttggaaagaaccatgactgtattcaggaaggcacatga

SEQ ID NO: 355721 - DNA, 83 bp, Homo sapiens
tcagcttcgacagcagccccaccagctccacggacggccactccagctacgagtctcgctctgtcacccaggctggagtgcag

SEQ ID NO: 355722 - DNA, 83 bp, Homo sapiens
ggccaagttcggggccaggacgtcgggaggacctggcccgatgagagaaagggaaagttaaggatgctggagcagaacaatgg

SEQ ID NO: 355723 - DNA, 90 bp, Homo sapiens
ggagactccggcgctcgccatggccgacgaaaagcccaaggtttaactatagatcaacacatcatcttgcatctcatgggttctatgaat

SEQ ID NO: 355724 - DNA, 82 bp, Homo sapiens
ctgtactctgggtgactcagagagggaagagattcagccagcacactcctcgcgagcaagggcgtctctggccgagcctctt

SEQ ID NO: 355725 - DNA, 100 bp, Homo sapiens
aagcaatgtgttaataacttctcagattccgttgggtttcctatcctgggagcaggagagtgtgcctatttgaatgacaaaggtgccagtagtgccaggc

SEQ ID NO: 355726 - DNA, 82 bp, Homo sapiens
tggaagaagaagaagagcatgatcggcatgtccaccaaggcaggatgatcggctgaatgtaacagaggaactaacgtccaac

SEQ ID NO: 355727 - DNA, 113 bp, Homo sapiens
ctccggatggaaaacgtggacgtgaaggaggaatggcaggacgaagatcttcccaggtctcggcgcggaagatggccggcggcgtggacggccccatcgggatcccgttcccc

SEQ ID NO: 355728 - DNA, 98 bp, Homo sapiens
tatggacccatgaaagggggcagttttggtggaagaagctcgggcagtccctatggtggtggtgataaagtgctcctgcatttcgtccagaagtcccc

SEQ ID NO: 355729 - DNA, 100 bp, Homo sapiens
gccatttttcttaaatggcccacatcaggacagctgttccttggccatcccaaagctattctgggggcaacagagttaagtgggcagaccaacatccacc

SEQ ID NO: 355730 - DNA, 83 bp, Homo sapiens
aatacaaaactaccatccttttgcagattctgctcagcaatcctcagatgtggtggttaaatgattccaatcctgaaaccgac

SEQ ID NO: 355731 - DNA, 98 bp, Homo sapiens
acaaagaactggagttccagaaaggccccacccctgccattctagaatctctcatcaggtgtgaccatgaagctcatggatgaggtcgccgggatcgt

SEQ ID NO: 355732 - DNA, 88 bp, Homo sapiens
cacagctaagacaccgggacctcctggaagccaaaaatggtgtgcccccgagagcctgaagacacgcaccttctcccatgccagcgac

SEQ ID NO: 355733 - DNA, 100 bp, Homo sapiens
gcagaactacaggatctgctgtgtcaggccaagcacgaaaggtaatacaggtagatgaaatgatagtggaagaggaagaagaagaagaaaatgaacgtaa

SEQ ID NO: 355734 - DNA, 98 bp, Homo sapiens
agccccccaatctggcgagagctgtcacaaaggagccacttttccaaaccctcctctcaatggatcgccaaatgggcaccttctctctgattattgaa

SEQ ID NO: 355735 - DNA, 85 bp, Homo sapiens
cgcttcaagagaagaatgttacttgggcgtcataacttagagcaggaccttgtcagggagccctgcctgatgtggctctgggaat

SEQ ID NO: 355736 - DNA, 100 bp, Homo sapiens
gcgccacaagaacatgtctgtacacctgtccccctgcttcagtgtggacgaatgtggaacctcgctctgtggctgtgttcccttggcactccttagtccc

SEQ ID NO: 355737 - DNA, 98 bp, Homo sapiens
tccccaccaccaccatctccatcacccaccaacaacaccacaataatccacagccaaggtgtaacgtggagaaggtgcccagtaattctcagttggaa

SEQ ID NO: 355738 - DNA, 82 bp, Homo sapiens
catctatcagcaggctccgggctgaagattgcttctcttctctcctccaagcagaaaaatatggctcaggagactaaccaga

SEQ ID NO: 355739 - DNA, 100 bp, Homo sapiens
ggattcacacaggatggcttgcagaagacgctatttaggagctgatcacgcagtacctggctgagcttcggaaccccgaggagatgactcgctgtggctt

SEQ ID NO: 355740 - DNA, 98 bp, Homo sapiens
cttctgggtcctccctttgcagcccgtgcggggccgtctcggagaccccgcgccgacggctgctcaaacatcagggggacgaggaggaggaggaggac

SEQ ID NO: 355741 - DNA, 90 bp, Homo sapiens
gcctggtcgctggtgaagcccgcggcgcgcgcctctcccggaccctgcaggaatcatgtcaaccctgccatggacttcacgcagactcca

SEQ ID NO: 355742 - DNA, 75 bp, Homo sapiens
gccgagaagctttacctcgctgaccctatgaagggccgttgctccagggagaactgcaaatatcttcatccaccc

SEQ ID NO: 355743 - DNA, 74 bp, Homo sapiens
gacaaccaggcaatgctggatagataccgaattcttatcacaaaggagtccaatgtgctgattgctgctaacag

SEQ ID NO: 355744 - DNA, 100 bp, Homo sapiens
gaaggaaccgctctcgcttcgtcctacacttgcgcaaatgtctccgatgagttttgatcatcctgagaaaaatgggccttggcctgcagacccaataaac

SEQ ID NO: 355745 - DNA, 48 bp, Homo sapiens
cggctaatagcccggagacaagcgaaaaggctccaagtagctcctcta

SEQ ID NO: 355746 - DNA, 90 bp, Homo sapiens
gaggaagagttgtggcgaggcagatcctgccccgtggccgcggccgtctcgtgctggagaatctggtaaaagcaccattgtgaagcagat

SEQ ID NO: 355747 - DNA, 88 bp, Homo sapiens
aaaactccaaactcctctccaccagcgccaagagtctttcccagggaactccgatgaagtgttccaacaaaatgagcgagtgaaccaa

SEQ ID NO: 355748 - DNA, 100 bp, Homo sapiens
caggaaatggacagcagtataaaacccagaagcagaacttgaaggttaaaccactagcccatttcacagggtgaggacgcttgagcggaagttagaagca

SEQ ID NO: 355749 - DNA, 109 bp, Homo sapiens
actccagtgacccagacctggctgtggtcaaacccacccggcccaactcactgatggaatgggaaacctgaggatcacagaaaaaggtctaaagctagaaggagactct

SEQ ID NO: 355750 - DNA, 82 bp, Homo sapiens
gagagcaagctctataagattcttcaaggtggggttggcatcccccacatacgctggtactcctggttaatcaacagcttcg

SEQ ID NO: 355751 - DNA, 101 bp, Homo sapiens
ggccgttctcgcgatgctgtcttacgggtcgagctgtgcagttttagcgggtacaagatctaccccggacacgggaggcgctacgccaggaccgacgggaa

SEQ ID NO: 355752 - DNA, 74 bp, Homo sapiens
cccacagtgggggtgtgcaaacccgagagaactgggaattgactttaaaattaggaccatagagctcgatggca

SEQ ID NO: 355753 - DNA, 96 bp, Homo sapiens
tggagccggccctggaggacagcaggttcatgcttttatcaagagatctgatgctgaggaagtggattttgcaggttggctctgctccaccatcgg

SEQ ID NO: 355754 - DNA, 100 bp, Homo sapiens
cagaaattgagcaagcagcaagtcggctttcagatcagaccccatgccacagctggatgtgactgaggccaacaaggagttcatggaacagagtgaggag

SEQ ID NO: 355755 - DNA, 129 bp, Homo sapiens
gataaatcagacagaacagttaatcctcaatttaagcctgatctaacccctagaaacaggtgctggagaatctggtaaaagcaccattgtgaagcagatgaggatcctgcatgttaatgggtttaatgg

SEQ ID NO: 355756 - DNA, 100 bp, Homo sapiens
cccgagacccatgtcagccccactggatgccgttggtgttcgaggaagagacattgttgttcttggtgtggagaagaagtcagtggccaaactgcaggat

SEQ ID NO: 355757 - DNA, 102 bp, Homo sapiens
taaggacaaaagccaagaggaggacagttcgctacacagcaatgcatcgaggagttaaagttcctcgtaattttcgcttgttggaagaacttgaagaaggac

SEQ ID NO: 355758 - DNA, 95 bp, Homo sapiens
ctactttcaaaaagagatttcactggagctattaccctgttggagatacagtttatgtaacttgatggaagaaaatggaattactccaaaaagac

SEQ ID NO: 355759 - DNA, 101 bp, Homo sapiens
caaaggcaagaaggcaacgacgttccatctgtggaaggacctaccaaccaggatgccaaagaagagtgaatggcccacaaagagcctggtagcacatacgc

SEQ ID NO: 355760 - DNA, 75 bp, Homo sapiens
cagcacagatcaaagctgtgggcaagctgacgccggaaaaatatattcagggggaagagatgtaatagatttcac

SEQ ID NO: 355761 - DNA, 49 bp, Homo sapiens
ggatcaacaccggggagtctgcgggcaagaaggctgcttgatcttgcca

SEQ ID NO: 355762 - DNA, 100 bp, Homo sapiens
ccctcacacctgcggcccggatatcagccctcaacattgtgggagacctactgcggaaagtcgggtattgtacctggaaggctcggctcttgtgtttgag

SEQ ID NO: 355763 - DNA, 95 bp, Homo sapiens
gaacgtgctcttcgctcacctggatgacaacgagaggagggcgaagctgtgctcaggcccgggctggacgcagagccagagctgtccccagagga

SEQ ID NO: 355764 - DNA, 82 bp, Homo sapiens
ccgtaatcctggtgaccgagaagatgtgccggtgacttcagcgccagtcaccgcgttctaccgcggctgcatgacactggag

SEQ ID NO: 355765 - DNA, 100 bp, Homo sapiens
gcgggacctaccagctgcggcggccggaggaccggcctgccggcccccagaacaagggtaattttatggagtgtcagcccgagagcagcatctctcaccg

SEQ ID NO: 355766 - DNA, 99 bp, Homo sapiens
ggcagccggggagctgcaggaaccagactgggggcgagctgagcacctgtagtcaatcacacgcagatattaataaggcagcggaaagaagaaatatga

SEQ ID NO: 355767 - DNA, 99 bp, Homo sapiens
atcgggggcaagcggaaggtgatgcccaagatggaccaggagagcgacttgcagttgtggaggtacagtgtgaacggctgaggatgctctaccgggact

SEQ ID NO: 355768 - DNA, 100 bp, Homo sapiens
caagaattcccagaagaggcagcatgcggaaggcattgctgggagcctgaaaactgtgaatgttgaccagatataccatctggcatctccagcctcccct

SEQ ID NO: 355769 - DNA, 97 bp, Homo sapiens
ttggtctaaagtctttccaaaaggtcaaggttcacaaggtatgcaggcccatgtagtcaaaaagcagacactgtcttcagactgaactgggccactt

SEQ ID NO: 355770 - DNA, 90 bp, Homo sapiens
agaaggtggactctattgatgacagactggtcaaacaaatggattttacagaggcttacgcggacacgtgctctacagttggacttgctg

SEQ ID NO: 355771 - DNA, 82 bp, Homo sapiens
ggacgctctcagctctcggcgcacggcccaggtgaaatgacaatggatgctctgttggctcgattgaaacttctgaatccag

SEQ ID NO: 355772 - DNA, 75 bp, Homo sapiens
gtgcgctgctcaaggacacggtctacaccgacttcgacggagggagccatggatttgctgcgggagctgaaggcc

SEQ ID NO: 355773 - DNA, 100 bp, Homo sapiens
gtgatctgcgatcgagcctcggtcaaggagaaattccaacagaatgggtttcctgaaacggatttgcaggaattcctgaaggaatgcagtagcaaagaag

SEQ ID NO: 355774 - DNA, 82 bp, Homo sapiens
ggagaatggtactgatactgtccaggtttccaaggtgctattgggagctcatgcactcttggccaacgggtctgtgatgtca

SEQ ID NO: 355775 - DNA, 100 bp, Homo sapiens
gatttttgcatgagacgcttctggacagtactgtaagattgatgttaaaggcatggtgttcaccccacttcatcagcgtacataagttatctcttctttt

SEQ ID NO: 355776 - DNA, 50 bp, Homo sapiens
ggacatgtatctgctttccttgatgaggcttgtgcagacataagagccag

SEQ ID NO: 355777 - DNA, 74 bp, Homo sapiens
agaattgaattttacaaagaatccaagcaacaggctctgtccaatatggaacggaaaacagttcttccttcaaa

SEQ ID NO: 355778 - DNA, 75 bp, Homo sapiens
gtacctaaaaatacatctcagacggcagctattactacaaaggatgaaaactttcggaagagaaagttgcctgtg

SEQ ID NO: 355779 - DNA, 100 bp, Homo sapiens
gggaacgggctcaaagtaggattcaagaactggaggaaaaggtcgcctctttgctgcaccaggtgtcctggagacaggatagtggctacccagagacgct

SEQ ID NO: 355780 - DNA, 74 bp, Homo sapiens
cctcacagaaagcccacgggatcctagcacggcgcccatcttacaggggacatcacccagaagggctatgaaaa

SEQ ID NO: 355781 - DNA, 74 bp, Homo sapiens
ctcacttctaatgagaagcttatgctggcctccatgttccactcgaactgtcgacaaacactcagtggaggtca

SEQ ID NO: 355782 - DNA, 76 bp, Homo sapiens
aaacctttatcaggatgatgcagtaacagggtatggaagagtaagagaagatgatgaagacagcgatgacgatgga

SEQ ID NO: 355783 - DNA, 82 bp, Homo sapiens
gacagcgcggaatctgggtgcagttcctgcagtaccccactctacgatcagcttgcattgaaaggctctagttacagtggac

SEQ ID NO: 355784 - DNA, 100 bp, Homo sapiens
tttgacgggcaaccaatcaatgaaacagacacacctgcacagatcagtcgcatcgaatacattcattcaaagaacttcatccaccgggatgtgaagccag

SEQ ID NO: 355785 - DNA, 100 bp, Homo sapiens
tgaagattgtgaagcaatagcctaaggccctaaaggacagcaaggtggtggagatcgttgatgagaaagttcgtaggagggaggaaccagaaaagtggcc

SEQ ID NO: 355786 - DNA, 83 bp, Homo sapiens
tgtgtgcggtgctgctgagcttggcctcggcgtcctcgggcttctcacggcattcagcagcagcgttgctgtaaccgacaaag

SEQ ID NO: 355787 - DNA, 75 bp, Homo sapiens
tacagacttcacatcaagttcaaggagtctcttgttaatgtagacgaagttcctgatggagctgtaaagccaccc

SEQ ID NO: 355788 - DNA, 90 bp, Homo sapiens
cctggggagtctgattcagatgacaactgtacagatgtcactggaaacagagcaaatgcagcgttacaatcaaagacttattgaggaatt

SEQ ID NO: 355789 - DNA, 74 bp, Homo sapiens
aagcaactcattcctttcaggacattccctctgatgtcctattttcaaactgatgcattcagtctactagcata

SEQ ID NO: 355790 - DNA, 100 bp, Homo sapiens
tttcaatattggaagcgctttgatttacagcagctgcaggtacacggtcctcttctcgcacggcaatgccgtggacctgggccagatgagcagcttctac

SEQ ID NO: 355791 - DNA, 96 bp, Homo sapiens
cggcgacaagggtgttcccgaactagagtggcctccttttagaggactcagaagaagaagaaggtgacttatgtagaatttgtcaaatggcagctg

SEQ ID NO: 355792 - DNA, 75 bp, Homo sapiens
tatcaagtaatggtgcaaagcctgaatggtatcctgaggtgcggcaccactgtcccaacactcccatcatcctag

SEQ ID NO: 355793 - DNA, 142 bp, Homo sapiens
agcgcatcgccacagcgcccatgtggcccaacacattctggagtgctgctgaggatgggcttatccgggagctgaatacacggctgcgggatgacagggacgcctgcgaggccaggcgggcgggcagcagctgcaggaaggc

SEQ ID NO: 355794 - DNA, 97 bp, Homo sapiens
atcatggcctataaaatgcttcaagtagtcctgtgctcaacattgcttatcggagaagatggtataaactggtccatcagtgacaaagacattgagg

SEQ ID NO: 355795 - DNA, 73 bp, Homo sapiens
caggaaaatcatattatagatggagtaaagtgccggtggtggtgtgcacattgagccccggtatagacagttc

SEQ ID NO: 355796 - DNA, 100 bp, Homo sapiens
aattgaggagcagcccaaaaactatcaagtttgcgaccgtggcagccatgtattacagctactacatgctaccggacggcacttactgcctggcgccgcc

SEQ ID NO: 355797 - DNA, 75 bp, Homo sapiens
ctgagcttcctggagaagaggaaggcctccggtgtggctgtctctgatggtgtcatcaaggtgttcaacgacatg

SEQ ID NO: 355798 - DNA, 48 bp, Homo sapiens
tggagggcgccccggaaaccatgggtctctaattaacagaagatggca

SEQ ID NO: 355799 - DNA, 74 bp, Homo sapiens
aggcatcctactatgcttcctgagtgcttctttcttggagctgaccatgtcggatatgttgcggtcactatcta

SEQ ID NO: 355800 - DNA, 98 bp, Homo sapiens
aggctcttcatgattctttggctcaaaggagttgtatttagtgtgacgactgttgacctgaaaagggagcttctgataattggaggtgttgcagcccg

SEQ ID NO: 355801 - DNA, 100 bp, Homo sapiens
ttctggccaagcaaaagtccaccgtgctaaccatccctgagatcatcatcaagggtcacagtaaatcgatccagtgtctgacggtgcataaaaacggcgg

SEQ ID NO: 355802 - DNA, 74 bp, Homo sapiens
gtgggagcctggagggcaaagcgtggtgcgagcagaccacagtccatgccatcactgccacccagaagactgtg

SEQ ID NO: 355803 - DNA, 100 bp, Homo sapiens
gtctgccacgagtgcacattctgaaaacaggccaacagagattttgagaaacacattgaaggatctgttaacacttgatatacccaataaaagcagtggt

SEQ ID NO: 355804 - DNA, 100 bp, Homo sapiens
gttggagcacaggcttgtccggggagcagtatgccggaagctggttttcaggccacaaatgctttcacagtgggttggcagctggagaagataatggaca

SEQ ID NO: 355805 - DNA, 100 bp, Homo sapiens
ccagcccagcccgccgctgcgcccgacgctccctgtctgggaccttctccctgcctggacccctactattgcaacaagggcagctgcaatgactctccgc

SEQ ID NO: 355806 - DNA, 100 bp, Homo sapiens
agaatatcagtcagtggaagaagagttcttgggatatgagtaagttcttgaacattcagtgtcaactcagcaggctcaaataccctccttttgcgaaaaa

SEQ ID NO: 355807 - DNA, 51 bp, Homo sapiens
gtgaaactacatgttcagaaaatattctctaagccgctttcatcatgggag

SEQ ID NO: 355808 - DNA, 75 bp, Homo sapiens
ttacacaacacatccacagatgcaacaaggactcagcccaaaaccatgtttgcccaagttgaatctgatgatgag

SEQ ID NO: 355809 - DNA, 82 bp, Homo sapiens
tggaaagctcgggacaggatgagtgatggtgatgattttaattacatcattgcatttttccttggaacagcagcctgccttt

SEQ ID NO: 355810 - DNA, 50 bp, Homo sapiens
gaatcgcttgaccctgggaggcggaggttcaagcgattctcgtgcctcag

SEQ ID NO: 355811 - DNA, 100 bp, Homo sapiens
cggggccgaggccgcctccgagcgccagatgctattaactgagtacttggatatgaaaaatactcgtacggcctctgaaccatcagctcaactaagctat

SEQ ID NO: 355812 - DNA, 100 bp, Homo sapiens
cagaatttcacaaaaaaatcaaagaggcatttgaagtctttgaccatgagtcgaataatacagtggatgtgagtgccggtggtggtgtgcacattgagcc

SEQ ID NO: 355813 - DNA, 75 bp, Homo sapiens
gtcttgtattgatggttttgcactatttacaaaaagagtcaagtaccattggccaggatcaaacgcttatggaac

SEQ ID NO: 355814 - DNA, 75 bp, Homo sapiens
ggaattgcgcgtggctgctgggttctctcttatgattggaaaaagcttgtggtgaaggggggcaaaaaaaagaag

SEQ ID NO: 355815 - DNA, 89 bp, Homo sapiens
gagagcattacaagccagcctctgggaccgaggtatggcatttcaaatatagatacaaccattgaaggaacgtcagatgacctgactgt

SEQ ID NO: 355816 - DNA, 75 bp, Homo sapiens
gacctgggcgatcgtggtgtgtgcggttggtgagcagctcctgcccacagtcgagcacctccagctggagctgga

SEQ ID NO: 355817 - DNA, 88 bp, Homo sapiens
gtatctgctcctcatggcgcaggagcatctggagttccgcctgccggatttttcaagccacattcaattgataggatgaaaaaattta

SEQ ID NO: 355818 - DNA, 50 bp, Homo sapiens
cggacagattgaccttcagagcgagtgtactaatggtcacttgatgtgcg

SEQ ID NO: 355819 - DNA, 74 bp, Homo sapiens
gaggatgtgctggagcggtacaaagactctcaaagatgaagacttttgtaaacgtgtatctttggctactgtgg

SEQ ID NO: 355820 - DNA, 75 bp, Homo sapiens
cactggacctgaaagttatgtggctcaaatgattgtgagtctcactgtgttgcccaggctgaagcagcctcaaac

SEQ ID NO: 355821 - DNA, 100 bp, Homo sapiens
tagtggtgtataaccttggactcacactgctgtctctgtatatgttctgtgagacatagggtacctccaactttccggggtttcagaagagaatttttta

SEQ ID NO: 355822 - DNA, 75 bp, Homo sapiens
aagcgcctgctccagaagcagaaagatcttcagtttagatcttggaggcatatcaactgtggttctaaatggcta

SEQ ID NO: 355823 - DNA, 98 bp, Homo sapiens
ctgaacagttgcatgctgggcctgccacggaggagccaggtccctgtctgagccactttctgtatgagcccaatagccaagggtacaagtactaccga

SEQ ID NO: 355824 - DNA, 50 bp, Homo sapiens
ggaagcctgtcggagctgcctggagcagaatcagtctcagtgtttcctgt

SEQ ID NO: 355825 - DNA, 82 bp, Homo sapiens
gagtggggcgctccatcgtgtacggttttggctacgggcctccacctccaccgccagatcagtttgcccctccgggggttcc

SEQ ID NO: 355826 - DNA, 101 bp, Homo sapiens
gagtacctgttgttgcagagttattttctgagtcagtttcagatggactagaggcttttaccagatttcttaaaactgaattcagtgaagaaaatattgaa

SEQ ID NO: 355827 - DNA, 95 bp, Homo sapiens
ggacagccgcgcgctgagggtctcggggcgggcgccgcgggacctctccgggccatggacaaatttacatgtattggagaccagaccagaagccc

SEQ ID NO: 355828 - DNA, 74 bp, Homo sapiens
ttttgaagaagcaggatgctgatctaaacgtggaaaaaagagaagaagaaggaggttcctgctgtgccagaaac

SEQ ID NO: 355829 - DNA, 99 bp, Homo sapiens
ccagcagaatttgtatagagatgtgatgttggagaactacagaaacctggtctccctagttggacatgatataggtcgtggatgtatggggaatctaag

SEQ ID NO: 355830 - DNA, 101 bp, Homo sapiens
aacattgacctcacaaccgagcaaattgaagagacgttaaaatacttccattgattttgatgatgtggctgcaataaacccagaactcttacagcttcttc

SEQ ID NO: 355831 - DNA, 89 bp, Homo sapiens
tggatttttgcatgagacgcttctggacagaccatgcatggaattttggagagaagcaaattttgcaaagatatgacggtaaagtatga

SEQ ID NO: 355832 - DNA, 98 bp, Homo sapiens
atttgattaactcattcaaggttacccagttgcatccttttatcaagaatgccaaacctgtatcaatattaagagacctgatcacagaagctatggag

SEQ ID NO: 355833 - DNA, 75 bp, Homo sapiens
agactacattttcctcacaactgttctttccaagcatgtaacttctaatgccagcgatagtgaaagtagttaccg

SEQ ID NO: 355834 - DNA, 100 bp, Homo sapiens
acgtgggcaacgtacgtcagacggcagtggtggaaaagatccatgccaaggttcggacgacactcccatgatgaaatctccatcctctcgcctctctccc

SEQ ID NO: 355835 - DNA, 48 bp, Homo sapiens
aagcaagagtttgttatatagcaataaacaggggtcacatgacgacag

SEQ ID NO: 355836 - DNA, 83 bp, Homo sapiens
gccagggtaactcaggaaggaaaggccctgggaggagcggggacactgaggacctctctccaaattggcctctcaactcacag

SEQ ID NO: 355837 - DNA, 74 bp, Homo sapiens
cctcaacaaacaccagcgctttggactgattcttgctattccaaatcctcttccacgttgacagcccttcagat

SEQ ID NO: 355838 - DNA, 100 bp, Homo sapiens
taacagagtaaagattgtacagctgttactgcaacatggagctgatgtccatgctaaagataaaggccttatgtttgatcatcggccaaggtcctggcga

SEQ ID NO: 355839 - DNA, 93 bp, Homo sapiens
actaaacaaattcatcccagaaatctaagagtattctaccttgtaaatactgttatttgtatatactgtaaatgatgacatcggtgggcacta

SEQ ID NO: 355840 - DNA, 75 bp, Homo sapiens
gtacctgcagaaggtctctggagacatcttcagcagaaacaagggcagctgcgttccctgcacctgacatgtgac

SEQ ID NO: 355841 - DNA, 75 bp, Homo sapiens
cgttcgggagaggctgctgccaaattgaaaagggattacggggcgctgaaagacatcgtgatcaacgcaaacccg

SEQ ID NO: 355842 - DNA, 85 bp, Homo sapiens
aagccagaatcctgaccttgctgcacaggtgctgatagtctgcagcacaggtttagctgggattatgctgctcaactaccagcag

SEQ ID NO: 355843 - DNA, 100 bp, Homo sapiens
cacctgctgcacccacgaatctgcccacccctcctgtaacccagcctgtttcacttcttgaagcgtaaaagatgtgttgttttcaatcaaggtgaattgg

SEQ ID NO: 355844 - DNA, 100 bp, Homo sapiens
gatcctcccgcttcagcctctagagtagccgagaccacagcaagagtgagccatggagctacgtgtggggaacaagtaccgcctgggacggaagatcggg

SEQ ID NO: 355845 - DNA, 100 bp, Homo sapiens
ccctcatggggaaaatctccccggtgactttcaggagctcgaggccatgagcagatataccagcccagtgaacccagctgtcttcccccatctgaccgtg

SEQ ID NO: 355846 - DNA, 89 bp, Homo sapiens
attaaatgcaatagcccttcagtactgttgtacgggttctccaaaaaatgtggaatcctttgcatctatgctgagacattctcctctta

SEQ ID NO: 355847 - DNA, 100 bp, Homo sapiens
tggctctgggatttcaccgtaacaaccctcgcattgaccttcctcttccaagctagagaggtcagaggaggtggagccgccaccaaaatgcagattttcg

SEQ ID NO: 355848 - DNA, 75 bp, Homo sapiens
ccggagcttctgaagaaggccggctacgtcagcaagattgtcggcaagtgagcactacaaacaccactggtttcc

SEQ ID NO: 355849 - DNA, 100 bp, Homo sapiens
acttcgagcagtcgcacctggaggttcagctgcacacagcaagaaggaggccatcagcaaactgggaagaggaccctcaccaggaaccacatctgccagc

SEQ ID NO: 355850 - DNA, 100 bp, Homo sapiens
ctgcagtcccgggacaggatgttctccaagttcacctccatcctgcagcacgccgtggaggcggcaggtgacaaacattaccaccccagctgtgcacgat

SEQ ID NO: 355851 - DNA, 85 bp, Homo sapiens
atcactgatggaactggatgacgcttctatttccaggaatattccctgggcttttgaggcaataaagcaagcaagtgaatgggta

SEQ ID NO: 355852 - DNA, 100 bp, Homo sapiens
acagctcgagagagcattacaagccagcctctgggaccgagctagtatgttcaacacaccaggaatgcagagcttgttgcaacaaataactgaaaaccca

SEQ ID NO: 355853 - DNA, 75 bp, Homo sapiens
aaaactccaaccagataaagattctgggaaatcagggctccttcttaactaaagccgggtgatttgttgtacttt

SEQ ID NO: 355854 - DNA, 98 bp, Homo sapiens
ttcgggtaactctcacagtggagggacatgttcccgatttgaggtgaaaccatgaagagaaaatagaatacttaataatgcttttccgcaaccgcttc

SEQ ID NO: 355855 - DNA, 98 bp, Homo sapiens
ctacatccaagagatcaccacggcagatggccagaccgtacagcacctggtgacctccgacaaccaggaattgctagagtacatgagaaagctagagg

SEQ ID NO: 355856 - DNA, 75 bp, Homo sapiens
ccgacccttcctgtcgctgacggcgactgcgggaggccaggttctcccatgggcaggtggtctctctggatgagc

SEQ ID NO: 355857 - DNA, 101 bp, Homo sapiens
gttcgcggctctaacggggctttctacaaggatttttagactctgaggagcagttggagctaatccacattatggaaatggaaaccaccgaacctgagcca

SEQ ID NO: 355858 - DNA, 90 bp, Homo sapiens
gagacctacctgcggcgtcggcagctgctgctccgaggccgccatggcatcagatgaaggcaaactttttgttggagggctgagttttga

SEQ ID NO: 355859 - DNA, 114 bp, Homo sapiens
gaaagaggataaggaggcggtggggctggagaacccgaagcacctcccggcgccgggacgcttcttcttacaagttgtgcaaagtgaggaagattactgtgggagtgaagggaa

SEQ ID NO: 355860 - DNA, 98 bp, Homo sapiens
ttcatccaggcctacgaggaggtgcgcgagaagtacaaagaaacgcttcgttaagggactcaggcagtacgggaagaacttcttcagaattagaaagg

SEQ ID NO: 355861 - DNA, 98 bp, Homo sapiens
gtggtggatctgtgcaaagaacccggcgagagtgattgccatttggctgaagtgtggtgtggctctgcaatgtctcaggctgtgcagacaaacggaac

SEQ ID NO: 355862 - DNA, 90 bp, Homo sapiens
aagatgttttaatgattcttccatatgtggcaattgtccaagaaaagggaatgctggcagactttgtgtcccagacttctccaatgatcc

SEQ ID NO: 355863 - DNA, 50 bp, Homo sapiens
ccgagcctttgatgtccccaagaggacccctatggtgtagccgtgggtgg

SEQ ID NO: 355864 - DNA, 123 bp, Homo sapiens
ggagtcaacatatcaatggagcaagtcacagtcgtcgatgccagcttcttcttgaaatgttacagaaattatctcagagattcgggcgcccattgttactgttggtgttaataacgatccagc

SEQ ID NO: 355865 - DNA, 83 bp, Homo sapiens
aacttttgacacggctttggaaacgacgtcatgtgttagcatttgacattgtgcagcaaagaaatggttatggagaagcccag

SEQ ID NO: 355866 - DNA, 90 bp, Homo sapiens
ggattatcgagcaaaactttgggcttgcaacttttgttaccaaaggaatcaggccagaagcctgtcttagatgttcatgcagaactagac

SEQ ID NO: 355867 - DNA, 100 bp, Homo sapiens
ttcagtgctaccttgagcaaagagatccgtccagtctgccgcaagttcatgcaagatggtaacccaggacaagacagccaggagagaggacccaaaggag

SEQ ID NO: 355868 - DNA, 83 bp, Homo sapiens
gtgttactggcttacaaattggattgagctattgtacagggggatacgctggaagacatttacaaccaagtgaaacagatcat

SEQ ID NO: 355869 - DNA, 101 bp, Homo sapiens
cggcagcaagggcggcggtggcggcggcggcagctgcagtgacatgtccagcatgaatcccgaatagtgtggatccggagttgtatgagttaacaacttct

SEQ ID NO: 355870 - DNA, 75 bp, Homo sapiens
gccttatgttcctccagccaattgcaaagggtctgtgtatgatgaccaaccaaatgcgcacaagaagtttatgga

SEQ ID NO: 355871 - DNA, 100 bp, Homo sapiens
tggaaaaggtattctttcaagaagccgtccaagcttcacaatttcagatcctaaactggttgctaaatggaaaggtttgggaggaagctgagcattatca

SEQ ID NO: 355872 - DNA, 101 bp, Homo sapiens
agtaaaaagcccccaaatcgccctggaatcacttttgagattggtgctcgtttggaggcactggactacttacaaaaatgaatccagcaagctaaagtgca

SEQ ID NO: 355873 - DNA, 75 bp, Homo sapiens
gccaaacaagcaaatctggctatcttctccatccagcttcgagagctgtgcccaggagtgaacaaccagccctac

SEQ ID NO: 355874 - DNA, 50 bp, Homo sapiens
tgttacccaaggaattccctaaagctgttccatttcctccaagtcaccgg

SEQ ID NO: 355875 - DNA, 75 bp, Homo sapiens
tggaagtcggggccctacaagcagtctacgagcttgagagaattctgaacagggcctgtgatacttgggctgtga

SEQ ID NO: 355876 - DNA, 75 bp, Homo sapiens
cgaacgggggtcttcctcctccgccgttgacaggcgccatgtcagaaccggctggggatgtccgtcagaacccat

SEQ ID NO: 355877 - DNA, 75 bp, Homo sapiens
agcagcttccaggatcctgagatccggagcagccggggtcggagcggtgcatgcaagagatgggaaatggaaagg

SEQ ID NO: 355878 - DNA, 100 bp, Homo sapiens
tttaatgactttggtgccctcaacatctctcagagacgaaagaggatggcattccctgtggatatgctggaaaattgcagccatgaggaattggaaaatt

SEQ ID NO: 355879 - DNA, 82 bp, Homo sapiens
tttccacctcctgacacaacaccactcaacagagagtgcatgggctgaagaatactctgaaaagaagaaagggtctcacaag

SEQ ID NO: 355880 - DNA, 100 bp, Homo sapiens
ttagatgccgattacccacttcgagtcctttattgtggaggcatcattcacgctagaggactggttcgggagtgcttggcagaaacggaacggaatgcca

SEQ ID NO: 355881 - DNA, 50 bp, Homo sapiens
cctgtgggcatgagtggaacacagaagaagctcattcacacagaagaccc

SEQ ID NO: 355882 - DNA, 100 bp, Homo sapiens
ccagactcagggcgtgggcgcagtgagaagaaggctatcaagagggaaaacccctgatcctaaaatgaatgctaggacttacatggatgtaatgcgagaa

SEQ ID NO: 355883 - DNA, 50 bp, Homo sapiens
ttcccaatgtgctattggcaaagagagagaaatgtagacaaccaatttcc

SEQ ID NO: 355884 - DNA, 74 bp, Homo sapiens
cggagctgacggtggaggttcgcggctctaacggggctttctacaagaggagaaggcagagcccccccaggcta

SEQ ID NO: 355885 - DNA, 51 bp, Homo sapiens
gggacactgtgttcctgaaaactgctcactagaagctcagcccaaatatgt

SEQ ID NO: 355886 - DNA, 100 bp, Homo sapiens
cgagcgcgccttcggcattggccgccgcgatgtcagctcagtgctgtgcgggccaggaggactcagagagagtaatgataattaccggaccaaacatggg

SEQ ID NO: 355887 - DNA, 50 bp, Homo sapiens
ctcaccgcaacctccgcctcccagcaatctgcacatcgtgctgccacacg

SEQ ID NO: 355888 - DNA, 152 bp, Homo sapiens
gaggcatacaccatacatggtacagccagagtaccgaatctatgagatgaacaagagactgcagtctcgcacagagatggtagtgaaaacctttatggatatggatcaggactcagaagatgaaaaacagcagtatctcccactagccttgc

SEQ ID NO: 355889 - DNA, 50 bp, Homo sapiens
ctttacaaaccctgaatttataactgaccaagagcagccaattagagcat

SEQ ID NO: 355890 - DNA, 100 bp, Homo sapiens
ctttaccctcttcttcttctgcaacacggccactgtgtacaagatatgtgcctggatgcagctcacctccgggggattcccgaagtcttccgttttctga

SEQ ID NO: 355891 - DNA, 77 bp, Homo sapiens
gcgagcagagccgcccagccctgccagctgcgccgggacgtaatctatgccagcaattatgacaatgttagcagacc

SEQ ID NO: 355892 - DNA, 100 bp, Homo sapiens
ccgcaccctgcacacccgcccctctcctgtgccaggaactgcattgggcagcagtttgccatgagtgagatgaaggtggtcacagccatgtgcttgctcc

SEQ ID NO: 355893 - DNA, 75 bp, Homo sapiens
ggaggagccaggtgaggaggagccaggaaattttatgctttggatccttcattcccaaggatgaatttgttaact

SEQ ID NO: 355894 - DNA, 124 bp, Homo sapiens
agcagttctaccactacaaggatctctgggtcctgcatttggccaccaagacctgggaacaagtcaagtattgttgcagcatctggcagtgagactgaggatgaggacagcatggacattccct

SEQ ID NO: 355895 - DNA, 99 bp, Homo sapiens
gtgcttcttgtgcaagtaatcagtctttgacaagtgatgagaagctgtcggagcttcccaaggacttcttaattactcaaatgactggaaaagagctct

SEQ ID NO: 355896 - DNA, 75 bp, Homo sapiens
atgaaaaaagttggaagaaagggtgtcatcacagtaaaggcaagcacgaggagcggcaggacgagcatggctaca

SEQ ID NO: 355897 - DNA, 75 bp, Homo sapiens
aaggaagatggcggatctggaggagcagttgtctgatgaagagaaggaaattaattctgatcaggctacccaggg

SEQ ID NO: 355898 - DNA, 97 bp, Homo sapiens
cccagttcccatctttggatatagaggtcgatggtggagtaggtcctgacactgtccataaatgtgcagaggctcctgtgacgtttgatgacatcac

SEQ ID NO: 355899 - DNA, 77 bp, Homo sapiens
gtggccatcaaagtgattccccggaatcgtgtgctgggctggtcccccttggtcatcgggaccctggaggaggtcca

SEQ ID NO: 355900 - DNA, 126 bp, Homo sapiens
gtgagacgtgcctttgaccttctgccatgattgtgaggcctccccagccacgtgaaacttgaagtttagcaactgcaatggaaaaagaaaagtacaatatgagagcagtgagcctgcagattttaa

SEQ ID NO: 355901 - DNA, 74 bp, Homo sapiens
gaaaatctttcctctaaagtcaaactggcagacatctggtccctgggcataacagctattgaacttgcaagagg

SEQ ID NO: 355902 - DNA, 100 bp, Homo sapiens
gccgacatccctcagggctccttggcctacctggagcaggcatctgccaacatccctgcacctctgaagccaacggatgcgctggatgccctgggcctga

SEQ ID NO: 355903 - DNA, 100 bp, Homo sapiens
tcaaggtggaccccgagctggtggtgaccgtgctgggagacctggagcagctgctcttcagccagatgctgggtgtcatggagaaactccagctgggccc

SEQ ID NO: 355904 - DNA, 100 bp, Homo sapiens
gcataggttatgaagctaatcctggcgttccaccagcaaccatgagtggttccatgatgggaagtgacatggacgcacaagaccagccactgctaccgca

SEQ ID NO: 355905 - DNA, 82 bp, Homo sapiens
tgtcctggctcttgccctcatcctggttctggaatcctcagttcaaggtgcgtcctggctgagagttggagctctccagcaa

SEQ ID NO: 355906 - DNA, 75 bp, Homo sapiens
caacgacgttccatctgtggaaggacctaccaaccagattccagaggggtgactaccatattgatgtctgtatca

SEQ ID NO: 355907 - DNA, 88 bp, Homo sapiens
gaggtcgttgcacccagctgccctcccgggaggctgcctgcctgcgagtgcacatcacaggggctaccctggccctgctggcaggggc

SEQ ID NO: 355908 - DNA, 87 bp, Homo sapiens
tagtaaccctcaccaaaccagtaatctacatttccattggtgaaatcatcaacacccacactaaaagaggtgatgattttgaaaccg

SEQ ID NO: 355909 - DNA, 103 bp, Homo sapiens
caatatctgtcttcggtggactccttcggcagtccacccaccgccgccgcctcccaggaaacttcctcctggccaaccctgtgtctggcagccccatcgtgac

SEQ ID NO: 355910 - DNA, 90 bp, Homo sapiens
tggcggatggccccaggtgtaagcgcagaaagcaggcgaacccgcggcgcaataacgatctttaatctcatgaagtacgacagctacagc

SEQ ID NO: 355911 - DNA, 75 bp, Homo sapiens
ccagttgcacatttcctgcaaggactccaaagtggtgagattacatcgtcagcccaaacatctccttgcattttt

SEQ ID NO: 355912 - DNA, 110 bp, Homo sapiens
ctcgactcggagggtttctgtgagagacaaattgcttgttaaaggtttggaaagaaatcccggcctgcaatgtatgatgtgagccccatcgcctatgaagattacagtcc

SEQ ID NO: 355913 - DNA, 75 bp, Homo sapiens
gaggcgggttccggagatcccggcctcacttcgtcccactgtggttagggcaagtgcagccgcggagccctgtac

SEQ ID NO: 355914 - DNA, 100 bp, Homo sapiens
ttctaaaaggatatgtgttgctaatacccatctttactggcatcctaaagacttaattcagtgcacaaatgagatgaatgtgaacatcccacagttggca

SEQ ID NO: 355915 - DNA, 82 bp, Homo sapiens
cggaacccgagctggagctgaagcgcaggctgcggggcgcggagtcgggagacgttatgacagtgttataaatcgactgtac

SEQ ID NO: 355916 - DNA, 104 bp, Homo sapiens
ctggcgggtcgtgcggggaagcagcacccccgcgccgtgccagggccggccagcgtccgcagcctgcctgctccgcttcagcggactctcgctggtctacctgc

SEQ ID NO: 355917 - DNA, 98 bp, Homo sapiens
aagtcctggaggtgttccacccgacgcatgagtggcaggcccttcagccaggttgccaacttggcctgttccatctcaaataatgaagaaggtgtaaa

SEQ ID NO: 355918 - DNA, 74 bp, Homo sapiens
ccacatgcccgctcacctgcgctgtgatgcctgcagagctgtggcttaccagagcaccaagctatggatcatca

SEQ ID NO: 355919 - DNA, 100 bp, Homo sapiens
tttctctgccatgttgctattgcaggacggaattgactggggcgactttggggtagaggcagtgtctgaggggactgactctggcatctctgccgaggct

SEQ ID NO: 355920 - DNA, 100 bp, Homo sapiens
agagcccgtgaagatcgcggcgccggagttgcataagggagatacaggcaaatgtacactggggaccaccatgttcacgtgacatcaagaggaagcggaa

SEQ ID NO: 355921 - DNA, 75 bp, Homo sapiens
gacgagtaggcgaagcaaggactgcatatctcacagatttcctctgccagtttgctcagcagccctgctacataa

SEQ ID NO: 355922 - DNA, 90 bp, Homo sapiens
gtttgatcttattgttctcacaatgccagttcctgagattctgcagcttcaaggtgacatcaccacctcatgttggcagataaattgaac

SEQ ID NO: 355923 - DNA, 83 bp, Homo sapiens
gcagccctcactcttcatggtcactgaaatcatgttgttgatgtcagtgttgcggtcagtactcctgcaggactcatcacacc

SEQ ID NO: 355924 - DNA, 100 bp, Homo sapiens
agaggcaccgggatcgtgaccgagaccgtgaccgagagcgtgaccgagagcgcgaatatcgtcatcgttagaaggtcttctgaaggacctagcaggagac

SEQ ID NO: 355925 - DNA, 75 bp, Homo sapiens
gccccatgaggagggacgtgaacggagtgaccaagagcaggtttgagatagggccagatttgagtgtgtgaattt

SEQ ID NO: 355926 - DNA, 75 bp, Homo sapiens
ggacaccattttctgccgctggacgcaagttcccagaaatgaatgctatgatcatgcgacggttcagtttgcctg

SEQ ID NO: 355927 - DNA, 50 bp, Homo sapiens
ttaatagtggcatggaagatccatttgatattttatgacctggtcagaca

SEQ ID NO: 355928 - DNA, 114 bp, Homo sapiens
gaagaccgcgcgcagggcctgcagcgggagctggacggcgagcgcgagcggcgcgagaaactgctgatgcaaggaatcccctgggctcccgtccactccactgctgaccagccc

SEQ ID NO: 355929 - DNA, 100 bp, Homo sapiens
ttatgtgaaagaaatgaatgatgccgccatgttttatacaaaccgagtcctcaaagagtacaaagatgtgtcaagagcaatctgaatccaaatgcaaagg

SEQ ID NO: 355930 - DNA, 74 bp, Homo sapiens
cggaacttcccgccttcaaggaccgcgtgcctgagtaccctgcgatggatgacatggctgtggatagtgatgag

SEQ ID NO: 355931 - DNA, 82 bp, Homo sapiens
cgccagcggccgagcgggcggcttcctggcctgggcgctccggtggcggcggagacatttatgcagtgtgtgattctttcta

SEQ ID NO: 355932 - DNA, 75 bp, Homo sapiens
ttgctgggccggtgcaactattcgcagtccgagcgtgacaccacagccaaagccctatgggaagctttactgaac

SEQ ID NO: 355933 - DNA, 50 bp, Homo sapiens
gcagctgctgagttctcggtgaagaaaggaagctgttgaagttattgaag

SEQ ID NO: 355934 - DNA, 100 bp, Homo sapiens
cgagcgggagggacccttctccggcctgatgcgacccgactttgtgtggacagtaatgacctcacgtttccgattgcctgctggcagaacctacaatgta

SEQ ID NO: 355935 - DNA, 100 bp, Homo sapiens
atttgagaagactttaacaccaatcatacaggaatattttgagcatggagatactaatgaagttgcgggccagccgggggaccaggctgctctctttgct

SEQ ID NO: 355936 - DNA, 75 bp, Homo sapiens
tccccgcgggacgaggaggacagcatggccaaggcgaacctagacaagaataagcagacgctggagaaagagaac

SEQ ID NO: 355937 - DNA, 50 bp, Homo sapiens
agcatataagtggtcaaacaaggagtctccccaggacagtgctatcaccc

SEQ ID NO: 355938 - DNA, 97 bp, Homo sapiens
caggcagcagcctctcctttggggcatcctcagcacccgcccaaggctttgttggtgttgcacctttcgagcctgtcccactgtgaactcatcacag

SEQ ID NO: 355939 - DNA, 51 bp, Homo sapiens
gtgactgtcaggtcgatcatatgtacatgtcccagagcaagcacacggagg

SEQ ID NO: 355940 - DNA, 73 bp, Homo sapiens
aaaagcaccacttgctactggagaggatgatgatgatgaagttccagaccttttgatcctcagtattatgaag

SEQ ID NO: 355941 - DNA, 75 bp, Homo sapiens
ccgacttcgatgatcgtgtgtcggatgaggagaagattgcttccaagtatgatcatcaggcagaagaagatcttc

SEQ ID NO: 355942 - DNA, 141 bp, Homo sapiens
aagaaaaccttatcagcactatttgaaacttttatctcatctggcttggcgcctgaggttctcccattagtggaatgcagtagccctctgggcctgggatattgtggttgataactgtgccatctgcaggaaccacattat

SEQ ID NO: 355943 - DNA, 100 bp, Homo sapiens
cccttctgcaagaaagcctctttgcaaccggcaggatacagacgtccctcaccagtgccagcttggggtctgcagatgagaactccgtggcccaggctga

SEQ ID NO: 355944 - DNA, 90 bp, Homo sapiens
caccttctcatctctgcaaaccaaacaaaggcgaccctcgaaaggtggacaagagcaaggaccaagtgtggaaggtcttaatgtaccaac

SEQ ID NO: 355945 - DNA, 100 bp, Homo sapiens
cttggagttccaggtgttgggggccttggaggtattgacctgatggacatggcttcggacatcctgcagcccaaaggagatgatgtggcccggatcagct

SEQ ID NO: 355946 - DNA, 101 bp, Homo sapiens
ctggaggctgcggaggcgacgccggagagaacgaagcctcggctgggagcggatgtgatcttcgtggtggaaagctaaattttaaaaccaccccaatggat

SEQ ID NO: 355947 - DNA, 74 bp, Homo sapiens
ttcagcatccccaagcagggggaggttgaggaaacgtcccatgcagtcaactgttgctacttaaatgcagctgt

SEQ ID NO: 355948 - DNA, 100 bp, Homo sapiens
ggcgactagtggacaacagaacaatattggaatggtgcttttggaaagaacaaacagtggatttgaagaatcagattctggtgctactaagagtccactc

SEQ ID NO: 355949 - DNA, 75 bp, Homo sapiens
taagccatcccctggcggaaccgcccccagataaacaggggtcacatgacgacagaagccaagagggctgcaaag

SEQ ID NO: 355950 - DNA, 100 bp, Homo sapiens
aaaggagggatcctgggcggtggatccggacccctgcccctgtctaatctgctaaggttccctctcccagcctgtgctgactcagccatcttcccattct

SEQ ID NO: 355951 - DNA, 100 bp, Homo sapiens
cgcacgacgagtactggcatgcgcacgtggacaagtctaacttctccctggccatcctgaatgtgggggccccggcggctggcatgaatgcggccgtgcg

SEQ ID NO: 355952 - DNA, 117 bp, Homo sapiens
atcagtgccatttttccagccagcgtgtgcttacttcatgtctctgggtcacattttgaatgatggtcgactgaggttgagccgtcagggcatcatcttcaagaatagcaagacagg

SEQ ID NO: 355953 - DNA, 100 bp, Homo sapiens
tttacacagatgttaatacacacagacctcgagaatactgggattacgagtcacatgtggtggaatgggggtgtcagttgtacccgaggcgttctcagca

SEQ ID NO: 355954 - DNA, 50 bp, Homo sapiens
gagaaacccggagggcgccggggtacactaagatgaagacggccaccaac

SEQ ID NO: 355955 - DNA, 130 bp, Homo sapiens
gaacggctggcccagccaatcctggagctgctgttgcagcacttgttccccaaacaagtgctcctacattctgatgcctgtgaggagccaccaacatttgaagctatggagctcattggtaaaccaaaac

SEQ ID NO: 355956 - DNA, 98 bp, Homo sapiens
agaacttccgtctgtcccaggatgacatcaagggcattcaggagctctatgtgtttgaagaacctgaagatcccagtaacaggtcatttttttccgaa

SEQ ID NO: 355957 - DNA, 83 bp, Homo sapiens
ctggcagccccgctctctgcactgtcatcatgactccaactcgagaactggctttacagattactaaagagtgtaagaagttt

SEQ ID NO: 355958 - DNA, 100 bp, Homo sapiens
tgacatcgcgacgctgctcaaaacctcgctccggaaaggggacacctgtctctaggtaacaggagaattcgagtggacgttgctgatcaagcacaggata

SEQ ID NO: 355959 - DNA, 75 bp, Homo sapiens
ctcatgctcttctgggcacaccccacccacctgtggccaggtgcggattgatgagtacgattactccaagcccat

SEQ ID NO: 355960 - DNA, 75 bp, Homo sapiens
ggtgctgcgagggcagaacctgggagatgtaatcagtgtagagaaaaccgtgaagagatgccttttggacacttt

SEQ ID NO: 355961 - DNA, 75 bp, Homo sapiens
cagagttcaaggaggccttccagctgtttgaccgaacaggtgttggagagcacaatggctgaacaagtccttcct

SEQ ID NO: 355962 - DNA, 83 bp, Homo sapiens
gaaacattaccgtcatattccacccattactaaggcattgaatgccccagaggagcccgaaacctcccaggcttggtgcagga

SEQ ID NO: 355963 - DNA, 100 bp, Homo sapiens
ccgaggcgagcgccgcgcgcaccactgaacccttaggagaaatcttgagagtggacagcaattgtgaagatcgccagagagttctgtgtttcatcaccgc

SEQ ID NO: 355964 - DNA, 75 bp, Homo sapiens
taaggacaaaagccaagaggaggacagttcgctacacagcaatgcatcgagaccggaacatgaacattttgcagt

SEQ ID NO: 355965 - DNA, 100 bp, Homo sapiens
agaaaacggcgagagtgggcgagaacgtccactgcgggccggcgaaagctggttgcctgcaggagggaaggcggtgaacacagcccccgtgccaggccag

SEQ ID NO: 355966 - DNA, 82 bp, Homo sapiens
ggagctgggtgctggcacggggctggtgggcatagtggctgccctgctggaataccaagctgctattttacacttgaagagg

SEQ ID NO: 355967 - DNA, 74 bp, Homo sapiens
tgtatcctctgcagcatccttgatgataaaccagtaaatgaacgggattttccaacagaaaccattaaatttgg

SEQ ID NO: 355968 - DNA, 98 bp, Homo sapiens
ccgcctcatccgctacatacaccagtgggaggaggcgttcccgttgcccgctctctcccggaagcagaggacggtgctggtcgtgtgtggcccggagc

SEQ ID NO: 355969 - DNA, 101 bp, Homo sapiens
cgagtattttagaattactgcctccaacaggatgtattcactctgccggaggctggatctccagaactgttctctggaggaccctggtccaaactttcatc

SEQ ID NO: 355970 - DNA, 76 bp, Homo sapiens
caggagtgaagctgcataccttcgcggaagcagacagtatgagcatgaccagtggagaaggtactagtcaacctcc

SEQ ID NO: 355971 - DNA, 75 bp, Homo sapiens
tgaggcagcggcaggctcaggtgcagccgctggatgacgctgtcagtatagaaagtggtacaaacactgaacgcc

SEQ ID NO: 355972 - DNA, 50 bp, Homo sapiens
aggatgtgagcaacacgggaccggcctgatcttttggccagaaggagatt

SEQ ID NO: 355973 - DNA, 74 bp, Homo sapiens
ctcgctcaactggagggagttcagcttcgttcagtttgtagaagactatgaacctaccaaagctgacagttata

SEQ ID NO: 355974 - DNA, 74 bp, Homo sapiens
ccaaaatgcaatatagtagtacatcagacacaacctctttataacataaggacagtcattttgtttactcattc

SEQ ID NO: 355975 - DNA, 75 bp, Homo sapiens
ctgtagctaaactttgggaaatatcaacgggacgaacactggtcagatacacggagatccggaaaatgaggccca

SEQ ID NO: 355976 - DNA, 50 bp, Homo sapiens
gttggcagtagcagcttatgaggatgatggtggagttaccttaggaatgg

SEQ ID NO: 355977 - DNA, 50 bp, Homo sapiens
gatgaatcatttccagaagcagaagatgcaaccttaaaatcagtgacaag

SEQ ID NO: 355978 - DNA, 100 bp, Homo sapiens
aagccaagaggaggacagttcgctacacagcaatgcatcgagtaccataacagcttgggggaaagaccatgaaaaagatgcttttgaacatattgtaaca

SEQ ID NO: 355979 - DNA, 100 bp, Homo sapiens
agataaagtgattttttgcctttgttgattaactggacaaattcagatggagtttcactcttgttgcccaggctggagtgcaatggcgtgacctcggctg

SEQ ID NO: 355980 - DNA, 75 bp, Homo sapiens
ccccaacttgtgaagcttctaggagcttctgaattgccaattgtgttgtcagcagaagtatataggatactttca

SEQ ID NO: 355981 - DNA, 75 bp, Homo sapiens
cagtagtgcaaaaaccattcttaagcttatgtgccttcagaggaagagaaaaatggtgaaattctggcaccacca

SEQ ID NO: 355982 - DNA, 100 bp, Homo sapiens
ctcgggggtcatgatgggcagcaagatggcgtctgctagtagggtcgttcaggttccttttttgccaggagattcagaccttgatcagctaacaagaata

SEQ ID NO: 355983 - DNA, 90 bp, Homo sapiens
gggacccagtgcgcccgcatcgtcgaggcagggaccattgaggagaagatcttccagcgtcagagccacaagaaggcactgagcagctgt

SEQ ID NO: 355984 - DNA, 82 bp, Homo sapiens
ctgcccccaagaaggaagtcatcatgggccggcctggaacaggtactccaaagattcaggtttactcacgtcatccagcaga

SEQ ID NO: 355985 - DNA, 74 bp, Homo sapiens
ccacagcagcctcccaaggagtctgcaagttgttggtcgcattatgtttcagctcttctcagacatatgtccaa

SEQ ID NO: 355986 - DNA, 83 bp, Homo sapiens
atgacctgagaaccttgtgctccaggctgccccataataatgatgtcttggcattgcccattttcaagcaggaagattccagc

SEQ ID NO: 355987 - DNA, 75 bp, Homo sapiens
gagagcagccctctgataaaatatttagggaatctaagggaggaaattatcaactgtgcacaaggaaaaaaatag

SEQ ID NO: 355988 - DNA, 83 bp, Homo sapiens
agggcgccagggcgggatcgcgaccggtgcaacttctagatcctggctgcagctctgaccgaatgtcaccggaaatccagtgc

SEQ ID NO: 355989 - DNA, 100 bp, Homo sapiens
tccagttaaggttggaaagatggatgctacttcctattctagacacaactcagatgggaagttcatcgcccgggcacagcggatagagtacgactgtgaa

SEQ ID NO: 355990 - DNA, 75 bp, Homo sapiens
agcaggagctttttgcttagcactgaaaattctggataatggtgaatggttccgggtgctcttcgccaacctggc

SEQ ID NO: 355991 - DNA, 98 bp, Homo sapiens
gtcatccgcatcaacaagatgttgtcctgtgctggggctgacagttttaatccaggtgctggtttgccaactgacaaaaagaaaggtgggccatctcc

SEQ ID NO: 355992 - DNA, 90 bp, Homo sapiens
ctcccgggtagctgggactacagctaatcacatatggctctgatagaactgaggcactgaagagaatggcagatgcactggataactatg

SEQ ID NO: 355993 - DNA, 101 bp, Homo sapiens
atggcagctgctcaagcagttcaggctacagctcaggccataggaaaaggatacagagtagagtttcatgaacctgaaacttggtggaaatttgatcctga

SEQ ID NO: 355994 - DNA, 75 bp, Homo sapiens
tgcagatgcagtgtggctctggatagcaccttatggacagggtgcaacaccggaggatttcagcaacctcccacc

SEQ ID NO: 355995 - DNA, 116 bp, Homo sapiens
ctcagttgtccatgaccctgaaggtccaggagtacccgaccctcaaggacactcatgaggaccatgatacttccactgagaatacagacgagtccaaccatgaccctcagtttgag

SEQ ID NO: 355996 - DNA, 100 bp, Homo sapiens
cccagatgatagaggcatgttggatatgtgcggctttgatactggagctctggatgacatggatttgattgacatactttggaggcaagatatagatctt

SEQ ID NO: 355997 - DNA, 75 bp, Homo sapiens
gatggtgctgtaaccacctcacagattccagcttcggaacaagagaccctggcgacactaacaggtgaagatctc

SEQ ID NO: 355998 - DNA, 89 bp, Homo sapiens
acccccaggtgagccccatgcactgcctggacgaggaaggcgatgactcagatggggagacccccagcctgctgcagctccgtgatgcc

SEQ ID NO: 355999 - DNA, 100 bp, Homo sapiens
aagaaatgcagtaaccagcatgtcaataaggggtcataggtggaaaagacatgtcctggtacctgggctagcttggttcctttccaagtgtcaaatagga

SEQ ID NO: 356000 - DNA, 100 bp, Homo sapiens
ttttggaaaagaaatgtatcaggaaatagctcgtctgctggccctggaggaggctaccctgagtaccgatctgcagcagggttatgcccttaaaagtctc

SEQ ID NO: 356001 - DNA, 74 bp, Homo sapiens
ctcacatatggatactttcacagttcagcgtttgctgccaattgatggggcaaatgatctcttttttcagccac

SEQ ID NO: 356002 - DNA, 98 bp, Homo sapiens
tcttatttaatcctgttacagacattgaggaaattatccgtttctggaaacattctacagtcgttccaggggtagaggaggcatgaaggatgaccgtc

SEQ ID NO: 356003 - DNA, 94 bp, Homo sapiens
aggacatggagatgaagaagaagattaacctggagttaaggaacagatccccggaggagttttcggctttgtgagaaaccttaccatcaaacac

SEQ ID NO: 356004 - DNA, 100 bp, Homo sapiens
ccaagcacaaagagcttgctccctacgatgagaactggttctacacgcgagctggcctctgagcccaagtctgcacgtattcatccagatggcctgaagt

SEQ ID NO: 356005 - DNA, 51 bp, Homo sapiens
tgacaccactgatgacgatgatgcactcgttcttcctgtccaagatccggt

SEQ ID NO: 356006 - DNA, 83 bp, Homo sapiens
atgggaagttaatgtttacggcgaagtctactcaacgtttccaagactgcaaaattcaaaatggggctcaaggtattcgtttc

SEQ ID NO: 356007 - DNA, 95 bp, Homo sapiens
gaagagcagaaaaaagaggagctggccaggctacggagagaactggtattagaaaactactcggatgctccaatgacaccaaaacagattctgca

SEQ ID NO: 356008 - DNA, 99 bp, Homo sapiens
atgcagccaacaccatcctgaggcaactggacatggagttgatctctctaaaacgtcaggatctttccaattaaagatgtacccctggagactgatgac

SEQ ID NO: 356009 - DNA, 87 bp, Homo sapiens
ggaatatgagtgatgacaaaccctttctatgtactgcgcctggatgtggccagttttcggctttgtgagaaaccttaccatcaaaca

SEQ ID NO: 356010 - DNA, 100 bp, Homo sapiens
ccacgagcacatcatcaagtacaagggctgctgcgaggaccaagggctcccggagcgtgtggagctggcacccctgcctccttggcagccggtgggccag

SEQ ID NO: 356011 - DNA, 100 bp, Homo sapiens
gccgaggggatgaggggagcatgggtgccaaggagtcacggatcggattcctcagctacgaggaggcgctgaggagaggaattactccttctacgtcctc

SEQ ID NO: 356012 - DNA, 98 bp, Homo sapiens
acgaaatctttcgctccctacacaccctggttggacagcttggtgctaacagtggtttgcacatcatcatctttgatgaaattgatgccatctgcaag

SEQ ID NO: 356013 - DNA, 74 bp, Homo sapiens
catgatgcgtcggaagaaaattgcttctcgcatgattgaatgcctaagatgtgtggtttttaacaacagaggag

SEQ ID NO: 356014 - DNA, 75 bp, Homo sapiens
atcggaccccgaggatcaggaaaaactatgattctggatgaaattgaagaacataacatcaaaatctatcactta

SEQ ID NO: 356015 - DNA, 95 bp, Homo sapiens
tgttcagtcagattggaccctgtaaaagctgtaaaatgataacagagaacgatggcaacttggggagggtctacccagtgtgcactagatgaaga

SEQ ID NO: 356016 - DNA, 100 bp, Homo sapiens
acgccgtggcccttgggagagaggaaatggccagtgatgaactgagggagttgaggaatgccatgacccaggaggccatccgtgagcaccagatggccaa

SEQ ID NO: 356017 - DNA, 75 bp, Homo sapiens
ctgcaaacagtggtatcgacttatcaaagggaagtgttcgccagttactacatgaaaagataagagatgcttata

SEQ ID NO: 356018 - DNA, 96 bp, Homo sapiens
gtcagcttcgctttaactcagataaaccccgagactcttcagttgaagttcgtagtgattgggaagtgaaagaggaaatggattttcctcagttga

SEQ ID NO: 356019 - DNA, 100 bp, Homo sapiens
tcatgaagagcccaaaacctattacgaactcaaaagtcaaccgctgaagagcagatccaaaaagttggcagctcttgcagaagccttaaaggaagtctcc

SEQ ID NO: 356020 - DNA, 80 bp, Homo sapiens
cagcaaggtgggcccggacggcacaccctacgttaccgtgctcaagcaattctgtggtgttcttggtcacacatttatgg

SEQ ID NO: 356021 - DNA, 100 bp, Homo sapiens
gcagtgtggggagatgtagtccagacaaagactgaatcagttgacatgaagacaatggagactgcagagaaactggctagatttgttgctcaggtgggac

SEQ ID NO: 356022 - DNA, 90 bp, Homo sapiens
ccacccattcctttaaatccggagggggaaaaaatcccaaggtctgcaaaggtgctggctgccagctgctgcgccccccatgtagaaggt

SEQ ID NO: 356023 - DNA, 98 bp, Homo sapiens
ccgtggggcgcggaaggcctcccggcgctcttcctcccggagtatgattgagaggatccagaatccagatctctggaatagctaccaggcaaagaaaa

SEQ ID NO: 356024 - DNA, 82 bp, Homo sapiens
cagaccctggagcctcagttggaagcagccgatccagcctgcggagcctgtggggcaggatccacacccaagtccgctcatc

SEQ ID NO: 356025 - DNA, 101 bp, Homo sapiens
agcatttctatgttacaaactgaagatatttggggtctcgtcggcttgggattatcaatgcttgggagacatgaagccattattatatcaggaaccgaaat

SEQ ID NO: 356026 - DNA, 82 bp, Homo sapiens
tttcgccagcccgtgccgcgagcgcggcctgcaggagaacatccagtcatggataaaaatgagctggttcagaaggccaaac

SEQ ID NO: 356027 - DNA, 99 bp, Homo sapiens
agaagaccaaaatgaggaagtcaaagaggaaacacttgttgaagcatcagtccacggatgataccatcggggaccttaagaagctgattgcagcccaaa

SEQ ID NO: 356028 - DNA, 100 bp, Homo sapiens
aggaggcagcggcagagaaggaggaccgcggctgcagagagactaagggcacttcctgaggttcattaccacctggggcagaaggacagggagacagcaa

SEQ ID NO: 356029 - DNA, 97 bp, Homo sapiens
ttcagtatctcagtcctccagtgtttggatattcaggccagatcagaaaagggagctcaggtaccttccagagagtgagacccagcgcccttgtctc

SEQ ID NO: 356030 - DNA, 97 bp, Homo sapiens
ggggccggaggcgccactgctgcagcagcgccgaggccgagactcagacctgctacaccagcgtgaaggtgatgtgttccacctcactgtccccagt

SEQ ID NO: 356031 - DNA, 80 bp, Homo sapiens
cgagcacataacggggttcgggtgtctcgtgtgtgaacatcacaggtgtctgtgacctttgaggatgtggctgtgacatt

SEQ ID NO: 356032 - DNA, 51 bp, Homo sapiens
atccgcagggttcggatgagaccagccgaggtatcaggaagtttaaggaag

SEQ ID NO: 356033 - DNA, 83 bp, Homo sapiens
ctgtggaataatatggaagaagatggaaaaaacttgtttaatggaacaagaacctggactggttcccccggatgcgggccatg

SEQ ID NO: 356034 - DNA, 100 bp, Homo sapiens
gaggaatcctatccatatgaggcaacacatggagatatggaccaaaaggaacgagacgtgattatgagggagtttcgttctggctctagcagagttttga

SEQ ID NO: 356035 - DNA, 75 bp, Homo sapiens
ccgcagcactggggaaacgatccgctcccaaaacggattgtcaccagacctgcaatctatggagcagattcggag

SEQ ID NO: 356036 - DNA, 75 bp, Homo sapiens
tgtggctgccaacaagctaggcacaaccaatgcgagcctgcctcttaaccatggagtctcactctgtcacccagg

SEQ ID NO: 356037 - DNA, 98 bp, Homo sapiens
tctttgacaatttaaaaaagaacaatataaaggaagcctctgaacttttgaagaatatggatgacaggtattttctaagtgggtctttggatggaaag

SEQ ID NO: 356038 - DNA, 80 bp, Homo sapiens
cgctgttctcgctccggagccgctgcacatttcgcaaaatgatgcttcaacacccaggccaggtctctgcctcggaagtg

SEQ ID NO: 356039 - DNA, 80 bp, Homo sapiens
agcctcccaaggagtctgcaagttgcccccaaatacatcaagatgtttgtactggatgaagctgacgaaatgttaagccg

SEQ ID NO: 356040 - DNA, 82 bp, Homo sapiens
cttaaaaagccaccgcggctccaggagtcctgtgactcaggtgcgcgcggagccatggttatcatgtcggagttcagcgcgg

SEQ ID NO: 356041 - DNA, 100 bp, Homo sapiens
aaacaaagggacccaaaaatgtcttgtattagagtcacaattgatccaatgagtccctggaacgccagatgcgtgaaatggaagagaactttgccgttga

SEQ ID NO: 356042 - DNA, 100 bp, Homo sapiens
ggagcaccccagcgacagcggccccgacatggaggatgacgacagcgtcctcagcacccccaagccgaagctgcgcgctcctggttgcagccagaatgca

SEQ ID NO: 356043 - DNA, 98 bp, Homo sapiens
gcagcggaaaatgatccagtcacaggtgtcatggagaaactccagctgggcccagagattctgcagcgggaaaatccaaggcttatttatgccaggct

SEQ ID NO: 356044 - DNA, 75 bp, Homo sapiens
gaggttcaccgccatcattggacccaatggctctgcagtgtaacacacgtccatttgataatgaggagaaggaca

SEQ ID NO: 356045 - DNA, 74 bp, Homo sapiens
gcggtgccggatcctgacggcggccttcccccggcaccgaacaagatttgtgatgaaatggagcctggaacaaa

SEQ ID NO: 356046 - DNA, 83 bp, Homo sapiens
cggtacatcgcctcggtgcagggctccaccccgtcgcctcgacagggactggtgattgcagctggaagtgcccatgaccgagc

SEQ ID NO: 356047 - DNA, 75 bp, Homo sapiens
tctttctggcctggaggctatccagcgttggatcgtcaaacgcaggctactaccttggtccatcaaatttttgga

SEQ ID NO: 356048 - DNA, 75 bp, Homo sapiens
accgtgaccgagagcgtgaccgagagcgcgaatatcgtcatcgttagaagcctttgtcatcctcttcaatcaagt

SEQ ID NO: 356049 - DNA, 51 bp, Homo sapiens
ctgactttcagctatggaatcgggttctcatgtatcagccatcttctgtaa

SEQ ID NO: 356050 - DNA, 74 bp, Homo sapiens
gctgtccagatgctgaaaagagaaggtcaaacagctgaagggtctttttggagttcctgagctgagtgccccag

SEQ ID NO: 356051 - DNA, 100 bp, Homo sapiens
ctaaaccatatttgggaagacgaggttccagcaacagatagaaatgctttaagttcactctggggaaagctggcctctgaaatcttaatgcagaattggg

SEQ ID NO: 356052 - DNA, 80 bp, Homo sapiens
gcccagatgctcataaggattgtcctctttctacaaaagaatctacctgttactcgtattttggacaatcttatggagat

SEQ ID NO: 356053 - DNA, 90 bp, Homo sapiens
atcgaccccaccgtggcctcccagcccatcagcttcgagatctccattgaccggccagaatttagcttcacttgagagagatctggaatg

SEQ ID NO: 356054 - DNA, 75 bp, Homo sapiens
gtcggttgagcggcggcgaacatgcgcttttgacacattggagatgccaaggggctgagcgatccagggaagatc

SEQ ID NO: 356055 - DNA, 75 bp, Homo sapiens
gaaaatggcggtgtctacagtgttctcgacttcgtcgctgcaggggaaatgctgtctgtagctgagcacttcctg

SEQ ID NO: 356056 - DNA, 106 bp, Homo sapiens
cggatgctgggaagcctgctggtccacaggtccatacatgaagtcaccataaggtctcggtccagctcgacttccagctcaggctccagcaccagcactggctcaa

SEQ ID NO: 356057 - DNA, 90 bp, Homo sapiens
ttgtcccaatatccaagaagcagtagagggtgccatgcacattcaggtcaaaatgcagatcttcgtgaaaacccttaccggcaagaccat

SEQ ID NO: 356058 - DNA, 100 bp, Homo sapiens
tgtgtgggcactgaagggggactacaggttcgagatatgtgacactaaaagagatgccagctgtgcttgttttcaaagatgaaacttactttgtttatga

SEQ ID NO: 356059 - DNA, 82 bp, Homo sapiens
ccacgctcatgatcgacttcctcacccgcgcctgcgacctcggctctccgtgtgaaatggtcccatctcagactgccctggg

SEQ ID NO: 356060 - DNA, 90 bp, Homo sapiens
atggtccatccagcacccggggggccagcgggtcatcgggcactacgctggagaagatgcaacgtgccggatggagtgctgtgatgtgcc

SEQ ID NO: 356061 - DNA, 75 bp, Homo sapiens
ctggatgtttgcgacatcccagagagcttccagaggcttaaaagacaaccttcttgcttctgggacatccagcct

SEQ ID NO: 356062 - DNA, 105 bp, Homo sapiens
ggaagaagttagctgtagctattaaaaaaccatctggtgatgatagatacaatcagtttcacataagcgacttcaggaagaaatcaccaaacagtctccaacgtt

SEQ ID NO: 356063 - DNA, 98 bp, Homo sapiens
gagagtacttcccaggaactggggacctacggaaaccagcctggacaccaagtctgtgtcagaaggccacctcaagaggaacatcgtggtgaagaccg

SEQ ID NO: 356064 - DNA, 90 bp, Homo sapiens
ccggacggcacaccctacgttaccgtgctcaaggattttttatcaagcagaaatgcatcgaacaacgagaatcaagatcactgagctaaa

SEQ ID NO: 356065 - DNA, 75 bp, Homo sapiens
cgccaacgagtgggaggagtggcggcgcaggaaggagaagctgctcaagggtgtccgcaatgttgccagtgtctg

SEQ ID NO: 356066 - DNA, 75 bp, Homo sapiens
ggcgcttgagttggtcgggggcagcggcagtcacgcattgccaagcgggggcgcaagctggtggactacgacagt

SEQ ID NO: 356067 - DNA, 82 bp, Homo sapiens
tgctattgaaagagagtatgcacagagaccccgcagatgtgtcttcagagagtgacagtgccatgacctccagcactgtgag

SEQ ID NO: 356068 - DNA, 80 bp, Homo sapiens
gctccagcatgtatcagccgaggtggagctgcggggccctggcatgaaagggatccatatggctttggagacagtcgaga

SEQ ID NO: 356069 - DNA, 75 bp, Homo sapiens
accagtgaagccgtgacatcctgggatattctttgttgagagagttgatctctctaatgtattagatcttcatgc

SEQ ID NO: 356070 - DNA, 98 bp, Homo sapiens
aaaggatttatttatctggatgtaccaatatctgatgacagttgtatagcaggaatggagcagaagtcatattcttctgagccaggcctcaagatgcc

SEQ ID NO: 356071 - DNA, 75 bp, Homo sapiens
gctggctgctctgtgtctcttccaaggccaagaaagcagagaactcatcaaatgaggaggaaacgtcaagtgaag

SEQ ID NO: 356072 - DNA, 98 bp, Homo sapiens
cggagctgggcgcggagcccctcacagtgcaggagaagccctggagttgagcctggcgggtgcccatggccatggagtgcacaagaaaaaacacaaga

SEQ ID NO: 356073 - DNA, 82 bp, Homo sapiens
ggcttccatgggcaactacatcaccaggaccttgcagatgcttcgggagaacctggaggaggaggccatcatcatgaaggac

SEQ ID NO: 356074 - DNA, 90 bp, Homo sapiens
gattgtcgacatgcctactgataatcctgaagaatcgcattctgattttccatatggatcatttccctatgttgctagaccagtacactg

SEQ ID NO: 356075 - DNA, 100 bp, Homo sapiens
ccttcgtacacatggagcgggcagaggatgcagtggaggccatcaggggccttgataacacagagtttcaaggtccacgctgcttttatgagctgtaaca

SEQ ID NO: 356076 - DNA, 98 bp, Homo sapiens
ccaactgcatcgtgctggccctggagcagcacctccctgatggggacaaaacgcccatgtccgagcggctgctacagcagcacaaggatgaggacctc

SEQ ID NO: 356077 - DNA, 100 bp, Homo sapiens
agccgccagttgggatcaaatgtgagcctatggatcaagggattttccggggcaaggtgccagagcagctgtggacaagtgaaatgtaggaagggggagc

SEQ ID NO: 356078 - DNA, 99 bp, Homo sapiens
ctgaggatgagctggaggaggggaataacctgggtatcttgtggtctgaaagagaagaaattgaaactgcacaggcttacctagagtcatcagaagcac

SEQ ID NO: 356079 - DNA, 75 bp, Homo sapiens
cggccctgggaccaaagtggatatcaaacgtgccgtgagcgatgtggagatgcaggaacactatgatgagttttt

SEQ ID NO: 356080 - DNA, 83 bp, Homo sapiens
ccttggaacaagcaactggctattgaaaaggtagttgatgtcacttggcgatattcctgcaaacatgaagaggtgattgccag

SEQ ID NO: 356081 - DNA, 98 bp, Homo sapiens
cgggagacgagaagcctgaaaagtcgcagcgagctggagccgccggagctcaaagcattcagcaaaccagggttccaaggtgaatgtatagattttac

SEQ ID NO: 356082 - DNA, 82 bp, Homo sapiens
aaccctaagaagaggcgccagaggagccgccttctgcctcagaacggcgtgactcggagggggatatgagactttctactcg

SEQ ID NO: 356083 - DNA, 101 bp, Homo sapiens
ctaagactcccgaatacttcagaagtggggaaatggtgctggagaatctggtaaaagcaccattgtgaagcagatgaggatcctgcatgttaatgggttta

SEQ ID NO: 356084 - DNA, 82 bp, Homo sapiens
gggtctcgggggccgctctgggatcccggccaccagcaattgtccggagcaggccgggctctcgccatgggtcactgtcgcc

SEQ ID NO: 356085 - DNA, 82 bp, Homo sapiens
cgcgagcgaacgaccaagagggtgttcgactgctagagccgagcgaagctcaggatggctaaaggtgaccccaagaaaccaa

SEQ ID NO: 356086 - DNA, 98 bp, Homo sapiens
tgggccgccgctgctacctgcagcgccgtgtggcacgacacaaaaatcagaccacagcaccgggaagtccagtcagcggcagatggtgttcggggtgg

SEQ ID NO: 356087 - DNA, 88 bp, Homo sapiens
ctccaggggaacaatgaggcctacgcagagctcatcgtccttgtcaccaggagactaaagtccatcaaaaacatccagaaaattacca

SEQ ID NO: 356088 - DNA, 75 bp, Homo sapiens
cccacctcagcctcccaaagtattgagattacaggatatacgccatttctcacagagagatgctctgtctctgca

SEQ ID NO: 356089 - DNA, 98 bp, Homo sapiens
gagtcctgcgggtcaacaggacgctgttcattggggacagggacatcgtggaggcccattaccgggcctgcttgtatgctggagtcaagattgcgggg

SEQ ID NO: 356090 - DNA, 75 bp, Homo sapiens
tttttgagataactgttcccaatgcaatctgcgatttccttctggttggctgtcctgcgtgggtgccaagttcca

SEQ ID NO: 356091 - DNA, 75 bp, Homo sapiens
cgcacactggatgaatggaagcgcggtttttcaagtccccccattttgatggctggtaccggcagcggcacaagg

SEQ ID NO: 356092 - DNA, 83 bp, Homo sapiens
agaacagggcagtgtctatcgaggtcagttggtggtgtgtactttatgctcctgtgtcatgaaaacaaagcagatttggctgt

SEQ ID NO: 356093 - DNA, 100 bp, Homo sapiens
gagtcccgcaaccacgtccacgtgtcggtcaaagctgactgtgccctgtccacggtgcctcctgcatgtcctgctgccctgagctgtcccgagctaggtg

SEQ ID NO: 356094 - DNA, 75 bp, Homo sapiens
gacgcggcagcccgtggagtcggctgagggaaaagcgaggcaaggcaggcggagacaggggctccctgtgtttcc

SEQ ID NO: 356095 - DNA, 82 bp, Homo sapiens
tagcggactcttcttcgccttcgaggggcagtacccaaaggaaacgctacgaaagaatacatggagagcttgcagctgaagc

SEQ ID NO: 356096 - DNA, 82 bp, Homo sapiens
gagagcaagaccatcatgctgcgcggccttcccatcaccatcacagagagcgatttttccttccagcagggtggatggggag

SEQ ID NO: 356097 - DNA, 100 bp, Homo sapiens
ggttgagcagcggatccgcagcttccccgacttccccaccccaggcgtggtattcaggtggtcctgaagagcaaggatgaccaggtgaccgttatcgggg

SEQ ID NO: 356098 - DNA, 100 bp, Homo sapiens
cccgaaggacttcggcgcgggactcaagtacaactcccggcacgagagagcatcagtgatgtcacgtttggagcaggggtcagttacatcgggacaccac

SEQ ID NO: 356099 - DNA, 78 bp, Homo sapiens
ccagcacctacgtcccgctgccgtcgccgccgccaccatgcccaagagaaagcgtgagtgcatctccatccacgttgg

SEQ ID NO: 356100 - DNA, 82 bp, Homo sapiens
cgcctggctcggagcagcagcctctgagcttccccgggcgctgcctggacaggcctgcctgcgtgctgggacatgtctggcc

SEQ ID NO: 356101 - DNA, 82 bp, Homo sapiens
catgctgtagctttcatgagcacaggcatcagtcaggcagatgtttgtcgactggaatggctgtctgcttttctgtggagac

SEQ ID NO: 356102 - DNA, 100 bp, Homo sapiens
aagagaggagccacctgcagtgcctgccccaataatgacaagtgtttggacaatctctgtgggaagtgttcgccagttactacatgaaaagataagagat

SEQ ID NO: 356103 - DNA, 148 bp, Homo sapiens
gatggccagcgcctcagatgatggcactgttagaatatggggaccagcaccttttatagaccaccagaatattgaaggcattgcactgatgatgtggaatacgttcttagttaaaagattttctgctgctacatacttaatggataag

SEQ ID NO: 356104 - DNA, 146 bp, Homo sapiens
caagaagtggaaagaaatcctgaagttccctcacattagccagtgtgaagacctccgaaggaccatagatctttaatctcatgaagtacgacagctacagccgcttcttaaagtctgacttgtttttaaaacacaagcgaaccgag

SEQ ID NO: 356105 - DNA, 76 bp, Homo sapiens
caagaagattcagccctgtcatcttgtgcaaaaggcggggtttcaccatgttgcccagactggtcttgaactcctg

SEQ ID NO: 356106 - DNA, 100 bp, Homo sapiens
gcagtacggccagatgtacatcaaggcctccggcagctatgcagggtttcatcaccttaaatggttttgaaccaatgaaggtgtattcccttaaaaagac

SEQ ID NO: 356107 - DNA, 98 bp, Homo sapiens
gtaaaagccccaatcttagcaagtgcggggaagagctgggtcgactcaagatctcgacatggcaggagctgaggcagctgcaggagcagatccggagc

SEQ ID NO: 356108 - DNA, 89 bp, Homo sapiens
ccaagatccttaagttcgtcgtcttcatcgtcgcggttctgctgccggttctgcagctgattcatgagagagataacatctgtaaacag

SEQ ID NO: 356109 - DNA, 76 bp, Homo sapiens
agcccgcggggcagctaccgctcggaatcattaaccaatggcaacaggaatccaaggataaagtgatttccctcct

SEQ ID NO: 356110 - DNA, 89 bp, Homo sapiens
aagggtcctgaagtcagttgttgcatcaaatacttcatatttggcttcaatgtcatattttggtgccctgcaggagtcattaaatcaaa

SEQ ID NO: 356111 - DNA, 50 bp, Homo sapiens
cttttaactactggaagtttgcgtgggatttgctgcagacgctgacggag

SEQ ID NO: 356112 - DNA, 100 bp, Homo sapiens
gaactattagaatttgcaacaaggtcattagatataaaggaacctgaagaattttcaaagctccataaaattctaggagataaggtgaacaatactgctg

SEQ ID NO: 356113 - DNA, 100 bp, Homo sapiens
tagaggaaaagagtaagaattggctgagttcacatatgggctccatcaataactagcggccaggtgagattaggctttgagcataagatcacagtccagg

SEQ ID NO: 356114 - DNA, 83 bp, Homo sapiens
actacaacgtggctatcccctctgacgtctcccacttccgcttccatgaaatggcccgccagctgctggcagtgtttggcggc

SEQ ID NO: 356115 - DNA, 75 bp, Homo sapiens
accaggcgaagctggccgagcaggctgagcgatacgacgcaattaccagctctggctgggtcgccacaacttgtt

SEQ ID NO: 356116 - DNA, 97 bp, Homo sapiens
gcctcctcagtgcgaagaagctgcagccgcacctggccaaggctcccatcccagatctcaaagtgtttgagcgtgagggagtacagctgaatctgtc

SEQ ID NO: 356117 - DNA, 75 bp, Homo sapiens
aacccgggagtaggagactcagaatcgaatctcttctccctccccttcttgctgtgccacgaccgtggctatctg

SEQ ID NO: 356118 - DNA, 50 bp, Homo sapiens
atggcccaggcagaccttgcagtcaaaggtcttgctctgtctcccaggct

SEQ ID NO: 356119 - DNA, 126 bp, Homo sapiens
tggagcaggtgttattatggactttcaaacatctgaagatgacaatttattagatggtgacactgcagttgggttatgtattaagctctattgaaggccgagtggcagttgagtatttggacccaa

SEQ ID NO: 356120 - DNA, 74 bp, Homo sapiens
cttctgccaagcatagccaccacggcttgaagaaaatttgcctacacgttgtggattttgtcatataccatatg

SEQ ID NO: 356121 - DNA, 50 bp, Homo sapiens
aaagcatggagaccctccctccaggtactccaaagattcaggtttactca

SEQ ID NO: 356122 - DNA, 100 bp, Homo sapiens
cccggggaaccaaagctctcatggatgaggtggtgaaagccacttctaggggctgcatcaccatcataggtgccacatctgccccattcctcatcttcat

SEQ ID NO: 356123 - DNA, 50 bp, Homo sapiens
agcctcatcttgcatctcttgcaagcatcacccaagagaaaatcaacgag

SEQ ID NO: 356124 - DNA, 99 bp, Homo sapiens
cgagacctacttctgcatcaccacagttcgatatctcaatgcctatactggaatagtgctacttcgatgcagaaaagaattctatcagcttgtgtggtc

SEQ ID NO: 356125 - DNA, 75 bp, Homo sapiens
cgggtggcggctcgggacggaggacgcgctagtatcatggaagggaagtggttgctgtgtatgttactggtgctt

SEQ ID NO: 356126 - DNA, 100 bp, Homo sapiens
ggtggataccgtcaagctggccaagcacaaagagcttgctccctacgatgagaactggttctacacgcgagctgctccacggagaagaactgctgcgtgc

SEQ ID NO: 356127 - DNA, 90 bp, Homo sapiens
gcatcggccggatttccctgcaggtgctatacttggtagatcagaaactcaggagtgtcttttctttaatgctaattgggaaaaagacag

SEQ ID NO: 356128 - DNA, 138 bp, Homo sapiens
actcctggatttcagcagaaagtgttccatatcaatcagccagctgaattcattgaggaccagtcaattctaaactattggccttaagagaaggacggagccacatactgctgacggcccagaactggcagagagaag

SEQ ID NO: 356129 - DNA, 100 bp, Homo sapiens
gggagtgtcctggacccagctgagcgggcggtcattcgcatcgcagatgaggacggggacttggttgccttttccagtgacgaggaattgacaatggcca

SEQ ID NO: 356130 - DNA, 100 bp, Homo sapiens
gtgggctgtgtactagtagggtaggagtttttgttcagggaccagcggaacgaggctttctgtcgttaataggtgtctttctcgagaagcaggtggaaac

SEQ ID NO: 356131 - DNA, 83 bp, Homo sapiens
caatgacagtcaagtggaaacaactgtctgtctccaaacgtccacaactatcccgatatggaagccgttcccctgttgctaaa

SEQ ID NO: 356132 - DNA, 100 bp, Homo sapiens
gtcgtcttggtgtatagagaacaaaaaacaccacagtactatcgtctatcattggatgaagtggctccggagatggctccgctgatcctctaaatagtgc

SEQ ID NO: 356133 - DNA, 98 bp, Homo sapiens
tgaattccgggaagtgggagcttcaggctcgctccgtgcgggagccaaaaacctgtatatcatctccgtgaaggggatcaagggacggctgaacagac

SEQ ID NO: 356134 - DNA, 75 bp, Homo sapiens
ccgccctgttccccgcgctgcggcctggcggcttccaggcgcactaccgcgagagcgcctgctcgctgtgccccc

SEQ ID NO: 356135 - DNA, 100 bp, Homo sapiens
ttccccagctctgcagccacatactatccgtttgttcaggaaccaccagtgacagagtggagagctctccacagccaggcctaccagcaggggagcaact

SEQ ID NO: 356136 - DNA, 80 bp, Homo sapiens
aagactgtttgtgttgcgggggccggacttcaaggactaccgaccagactcccggaaatcatgttggtaggatcccagtc

SEQ ID NO: 356137 - DNA, 90 bp, Homo sapiens
gtgaaaatgataaacttcagaaagaactcaatgtacttaaatcagaacagatatgtgtcacaaagatgtctacacggaactgccagggaa

SEQ ID NO: 356138 - DNA, 82 bp, Homo sapiens
gccttagctgtgctcgcgctactctctctttctggcctggaggctatccagcgtgagccagccatgagagggtatcttgtgg

SEQ ID NO: 356139 - DNA, 100 bp, Homo sapiens
ggtggcgcttggtggccactggcggccgaggtagaggcagtggcgcttgagttggtcgggggcagcggcaggtttggtgcacctcgatttggaggaagta

SEQ ID NO: 356140 - DNA, 75 bp, Homo sapiens
cctcctctcccaagctgagagcagccacacaggttcaacagaagaggtggaaggtggagaccaactccaggctgg

SEQ ID NO: 356141 - DNA, 116 bp, Homo sapiens
ccctcatccacctcttcaggacctactccttcctgaacctcctgttcctctgctatccggcctgtcctcccaaagccaactctaaggagaggagaggaagagcagttcttggggca

SEQ ID NO: 356142 - DNA, 100 bp, Homo sapiens
cttgggagaagcctttaatcggttagacttctcaagtgcaattcaagatatccgaaggttcaattatgtggtcaaactgatccatatgaattcctcttat

SEQ ID NO: 356143 - DNA, 100 bp, Homo sapiens
cgggctgatacagccgcttcaccgtgcccctgcccgcgaccatggcctcctccgaggtggcgcggcacctgttctcaaaagtctatggtcctgtgttcac

SEQ ID NO: 356144 - DNA, 51 bp, Homo sapiens
ccaaccggccagaggacgagtgtgtgaagttattgccagtggactgtgaga

SEQ ID NO: 356145 - DNA, 83 bp, Homo sapiens
acagggacacctggttccagctgcagcacgtggacgctgactcggaagtgcaggaacgcggcaggcaaagatggcaaagagcg

SEQ ID NO: 356146 - DNA, 97 bp, Homo sapiens
acaagttcatcaagcaaagggactaccaccagcagggcgacataccttctgttgaataccttttacaaaatggaagtgatccaaatgttaaagacca

SEQ ID NO: 356147 - DNA, 99 bp, Homo sapiens
atgacaaggaagtcggacagtggaacaaattccgagacatggagcagctatcagatgaagaaattgatcatggtgctgaagaagacagtgacaaggaag

SEQ ID NO: 356148 - DNA, 75 bp, Homo sapiens
gagaacctgggccaaggcgacaagtattgcctaagtgtaatcttgaacatgggcggtgctgtgagtgctggtgaa

SEQ ID NO: 356149 - DNA, 73 bp, Homo sapiens
atttttcaacctgaacttgcagtagctagtggagaggcaggtaagtgggtggaatgaatcatctacgagagaa

SEQ ID NO: 356150 - DNA, 75 bp, Homo sapiens
ctgggggccacagctgcttcagtgctgtctggatgcggagtctacgatgggaccgagatccacgaggcctcggcg

SEQ ID NO: 356151 - DNA, 75 bp, Homo sapiens
ttgctcttcgagggcgagaagttttgggatttgagattgacgcggtgaactctgtccagttttcaaaccacacag

SEQ ID NO: 356152 - DNA, 75 bp, Homo sapiens
ctcactctgttaaagctggtctgttctaactgagcttcatattctccaattcagcctcattctctaataaaacat

SEQ ID NO: 356153 - DNA, 74 bp, Homo sapiens
agagcctcagtttgtgcaggacaccgacatggaacagggactcactggggtgttccttgcctgtatctcccctt

SEQ ID NO: 356154 - DNA, 100 bp, Homo sapiens
cgactacccaggcccgcacagtttcgacgtgtccttccagcagtcgagcaccgccaagtcggccacctggacggtgattttcttccacccccacctccac

SEQ ID NO: 356155 - DNA, 101 bp, Homo sapiens
gtggaggtagaaggctatggcagcaagaagatcgatgctgagcggcaggctgcagctgcagcctgccagctgttcaaggccgggcacggtggctcacgcct

SEQ ID NO: 356156 - DNA, 90 bp, Homo sapiens
acctcaagcacacccaatggacagcatgcctcaccaagtcacatgacaagcaaaaatgtttcgatgaaagatcctccggacttattggac

SEQ ID NO: 356157 - DNA, 75 bp, Homo sapiens
cactttcctccagatctaccagcggttaatcatctcattttagtggagccttggggtttccctgaacgaccagac

SEQ ID NO: 356158 - DNA, 100 bp, Homo sapiens
ctggctgtgctgcgcgacccccgcgcatgaatccagcaactatcacaagaatactccttagccacttcaattgggataaagagaagctaatggaaaggta

SEQ ID NO: 356159 - DNA, 75 bp, Homo sapiens
cgctcgcgcccggatccctcaggttattcagcttctcaaggctggaaaagcgaaggaagtttcctacaatgcact

SEQ ID NO: 356160 - DNA, 97 bp, Homo sapiens
ctgtgcttcaacaaaggacactacatcaaggactgcccccagcctcaagtactacagccttccagcagccttcccagacccacagatcacacccagg

SEQ ID NO: 356161 - DNA, 101 bp, Homo sapiens
ttctttcccaggaaccattggataaggataaagcggaagaagtccctatagaaccatacaacatcccactgtcccaggccgaagtcatacaggaagggagt

SEQ ID NO: 356162 - DNA, 100 bp, Homo sapiens
agtgtttacctttggtagaaaaacttttcaggaatggaaactgaaagtggaaatcaggaaaaggtaatggaagaagaaagcactgaaaagaaaaaagaag

SEQ ID NO: 356163 - DNA, 75 bp, Homo sapiens
cagcaatatgcattagcagcagctcagcagccacatatagaacattaaccaggtggtatttgttggaaatttctt

SEQ ID NO: 356164 - DNA, 74 bp, Homo sapiens
agactacctcctcctttaccccagaacctcctttacacagtatcagaacgagctgctgttttgaggattcctat

SEQ ID NO: 356165 - DNA, 98 bp, Homo sapiens
tttgatgatagcaacgtgtccctggcctctgaggatcagatagtggtcaagaaagatcttaagactggtcattcaaaggggtttggctttgttcgttt

SEQ ID NO: 356166 - DNA, 90 bp, Homo sapiens
atgatgtagccacctcctaaccttcccttcttgaacccccaggaattctcacactcaagaaagcaaatgaacttcttctgagcacaggca

SEQ ID NO: 356167 - DNA, 90 bp, Homo sapiens
gcagcaccagcaacagtggcaatgagaccagtggaagcagcaccatcggggagacaagcaacaacacagtcactcctggcggcaaaccaa

SEQ ID NO: 356168 - DNA, 91 bp, Homo sapiens
tgagcccgtccgtccgccgccaccacccactccggacacagcaaattgtggctactaatttgccccctgaagatcaagatggctctgggga

SEQ ID NO: 356169 - DNA, 100 bp, Homo sapiens
ctgacattgcatcttcaagactgtctgggctcaaaatgcagagaactcaaagatattcatttcggccagtgttacaagatctcagatgaaggcatgatcg

SEQ ID NO: 356170 - DNA, 100 bp, Homo sapiens
gctgaccttggcaaagctgccagagatattttcaacaaaggatttggcagcggaggaggaaatggcaggtcctaatcaactctgcattcgccgctggact

SEQ ID NO: 356171 - DNA, 51 bp, Homo sapiens
ggacctgcttccgccagtggagacaacagggttattttggagctgttggag

SEQ ID NO: 356172 - DNA, 99 bp, Homo sapiens
agagccgagtgcagaagatctgggtgcccgtggaccacaggccctcgttgcccagatatgcctgaggaaacccagacccaagaccaaccgatggaggag

SEQ ID NO: 356173 - DNA, 82 bp, Homo sapiens
aagaagattgaggaggcgatggacgggggtttatgccctggacagcatcatgcagacctggtttacactctttactcccacc

SEQ ID NO: 356174 - DNA, 75 bp, Homo sapiens
gacggaggcgttgcgattattgaccagtggatctgcgcacacgccaggcttgggcactgtttaaaggaaagttcc

SEQ ID NO: 356175 - DNA, 97 bp, Homo sapiens
ccaggcgaagctggccgagcaggctgagcgatacgacgttggaatcgaagcctcttaaaatggcagatgacttggacttcgagacaggagatgcagg

SEQ ID NO: 356176 - DNA, 75 bp, Homo sapiens
agctgtcacagcctggagaggggactgcccatctgcaaaggtgggtgacatcaccatcctggtgaacaatgccgc

SEQ ID NO: 356177 - DNA, 51 bp, Homo sapiens
gcgtcctggaattacttcaatcaagaagggaaaaggccgaggcatcagcgt

SEQ ID NO: 356178 - DNA, 74 bp, Homo sapiens
cgagaacgtgcgggaagagaagatcatcgagcatttcaaacggaatttatgcaaatattctcatgaggttctct

SEQ ID NO: 356179 - DNA, 83 bp, Homo sapiens
agaaggagaagtttccgcaggactacttccccgagatgagattgtggggaacctgggtgaaggcacctttggcaaggtggtgg

SEQ ID NO: 356180 - DNA, 100 bp, Homo sapiens
gtagctttctccagctcagtgagcgatccatgagttttaatccaggtgctggtttgccaactgacaaaaagaaaggtgggccatctccaggggatgtaga

SEQ ID NO: 356181 - DNA, 74 bp, Homo sapiens
ttctggatctgtgcttgtgaaaggctccatggtcttgcctccttgcagctgccatgtccacgcagagacttcgg

SEQ ID NO: 356182 - DNA, 98 bp, Homo sapiens
tgtcgcttcaccggggactgctgcttcgactacgacagggcgtgcccaggcttcagggatgacttcttagggggcaggggaggtagtcgcccaggcga

SEQ ID NO: 356183 - DNA, 83 bp, Homo sapiens
ctgtgcgagagcctcctcacttgggccctgggctgcatcttgtacctgctgtgcttccggcagcacccttttgaggatggagc

SEQ ID NO: 356184 - DNA, 100 bp, Homo sapiens
aagagaaataccatttcagacatgccaagttcgagaccgagttcggacaaaaatggaacgtgatatcttggtagaggttaatcatccttttattgtcaag

SEQ ID NO: 356185 - DNA, 90 bp, Homo sapiens
tgcatctcttgtcgcaggttagacttggaatggatcttactaaggccaagcatggggatcagcacgagggtcagcactacaacatctccc

SEQ ID NO: 356186 - DNA, 98 bp, Homo sapiens
ctgctcctgctcatggacgacgacttcatagacctcacgttgtcgaagactcaacgaaagactccaaccgttattcataaacattaccaaatacatcg

SEQ ID NO: 356187 - DNA, 80 bp, Homo sapiens
gtctgcaatcttaccagggaggccaagcgaccacccaaagaaggcttgaggatcttggcttaaagcagtttactgtggct

SEQ ID NO: 356188 - DNA, 100 bp, Homo sapiens
gctggtgggtgtacacactgctgtttaccttggcgaggcctttcaccaagtccatgggtcatggaggacgctggcggcggcgaggagaccccggccccgg

SEQ ID NO: 356189 - DNA, 101 bp, Homo sapiens
aacgcctggctcggagcagcagcctctgaggtgatgtgtccaatctagatcccaacttctcatttgaaggcaccaaactggatgtggggaacattgtgctg

SEQ ID NO: 356190 - DNA, 75 bp, Homo sapiens
agccttgaaaaagctgccctgagacggtgtcccgccgaaaggtaatctgtaagtcagatgctccaacaggggatg

SEQ ID NO: 356191 - DNA, 50 bp, Homo sapiens
aatcgttaaacatctgaaagggtcaggtaagaaggtgttttaccctgtgg

SEQ ID NO: 356192 - DNA, 83 bp, Homo sapiens
ctggctcggagcagcagcctctgaggcctggtactgtggcgctccgtgaaattagacgttatcagaagtccactgaacttctg

SEQ ID NO: 356193 - DNA, 75 bp, Homo sapiens
gctcgggaaggacctcatagacttggccacttttaggcctcagccaactgccacaaactgaaaccgtgtcagttc

SEQ ID NO: 356194 - DNA, 82 bp, Homo sapiens
gacgacaacccgggcctccgaggtcagcccaaggccaaccccactgtcactctgttcccgccctcctctgaggagctccaag

SEQ ID NO: 356195 - DNA, 75 bp, Homo sapiens
cagaacttggaatactctactggacaaacatttcctccaagcattgtcttcagtgttaagaaatgtggactcctg

SEQ ID NO: 356196 - DNA, 148 bp, Homo sapiens
atctggaccactttctggcaaaaatctttcagaagttgtcaacagtatagtttgggttcgccagttggaattgaaggtctatgcctctcagcgaatgagagctggcaaaggcaaaatgagaaaccgtcgccgtatccagcgcaggggc

SEQ ID NO: 356197 - DNA, 88 bp, Homo sapiens
tggagtgcgtgggggaccggctgttggcgggttcctcatgccatgcacctgctgtcacccagcatgcaccctattttaagggtacagc

SEQ ID NO: 356198 - DNA, 101 bp, Homo sapiens
ttacctgggaaccctggaggggccttcctcatccgggagagccagaccaggagaggccgagacgcatccagagctttcgtgaccggggactgttctgaagc

SEQ ID NO: 356199 - DNA, 75 bp, Homo sapiens
ctgggagtccagttgttaaacttcaggatgccttggccagtaatcaggttcaggagaagtggcacctggtggagg

SEQ ID NO: 356200 - DNA, 100 bp, Homo sapiens
gtgacatccgaggtgcctttctccaaaagtgggaagtggtggttcaagtggaggatgatggggatggcgattacatgtctgagcctgaggctgtgctgac

SEQ ID NO: 356201 - DNA, 100 bp, Homo sapiens
cagagccacaccgagaaccgccgcggagccctcatccctaacggtgaaagagaaacagcacccaggactatcttccaaagagttctggatatcctaaaga

SEQ ID NO: 356202 - DNA, 111 bp, Homo sapiens
tctggatgtggaattctccgtccctttccagggagggaacaaagcccacaagcaccgctgaggctttacagttctctatactctcccaagagccacagaaaatgaacacat

SEQ ID NO: 356203 - DNA, 75 bp, Homo sapiens
aagacacgtcggatgttgcagcagagccagcagctagcgcagaagaatgttccttacagaagaaggaatatttcc

SEQ ID NO: 356204 - DNA, 75 bp, Homo sapiens
aacccttgagggaagagaattatctctaagtggctatgattttggctatatggtaaagttgcttacagattctcg

SEQ ID NO: 356205 - DNA, 50 bp, Homo sapiens
tcaatcagagcgtcctgtgcgggatgtttcagcagcccctgagaaggaag

SEQ ID NO: 356206 - DNA, 75 bp, Homo sapiens
tcaagggaaccttccctgatgcgatcaaagagccagccgagaagcaaaaattcttccaggagctgagcaagagcc

SEQ ID NO: 356207 - DNA, 100 bp, Homo sapiens
tccaacatggtcattatgcttattggaaataaaagattgtagaaggcatgaaacaaaaaatgtggagtattgaaaatattgccttcggttctggtggagg

SEQ ID NO: 356208 - DNA, 75 bp, Homo sapiens
tgaaaggcaaagaacaagagaagacctcagatgtgaagtccattaaaggactcagaattcatgattgaagaaatg

SEQ ID NO: 356209 - DNA, 97 bp, Homo sapiens
ttaaagatgacaccttgcattccctatttaggtgtttgaagtggtggaacgtgtagaagagttaagaaggaagtggccagtagcgtgggggaagtta

SEQ ID NO: 356210 - DNA, 75 bp, Homo sapiens
caaggtggggttcggggggccaccgaatcgctgtcacgccggcagatcatccccccgaaggagtggaagccgcgg

SEQ ID NO: 356211 - DNA, 100 bp, Homo sapiens
ggggaacgctcacggactgtgtgccgtgttgccgcccgctgtgctatgagcagtcagagcgccgtctccacaagagtttacaaatgaaaatggaggaaat

SEQ ID NO: 356212 - DNA, 98 bp, Homo sapiens
gaatcaatctctcgtaattaatgaaaaccattctcagttgccaatttgcaaattaccattgaaattgccaaagtctgagggaaaaggccataccaatg

SEQ ID NO: 356213 - DNA, 75 bp, Homo sapiens
tgaagagggaagacacgcggaaacaggaggaggacttcatccaacccagcagccgagaagaggcccagcagctgt

SEQ ID NO: 356214 - DNA, 80 bp, Homo sapiens
gtttgatggctgatcttgaaggtttacacttgtcaacttcctcttcagtcatcagtggccgcgatgggcctcttggaaca

SEQ ID NO: 356215 - DNA, 80 bp, Homo sapiens
gcctggtggcctccgttctcttggcccaggtcgccccacggctgaattctcggtgataaaggcgcccactggaccctccc

SEQ ID NO: 356216 - DNA, 48 bp, Homo sapiens
attcagcggtactggtgtataatagatccctgggtatcagtatgtgtc

SEQ ID NO: 356217 - DNA, 132 bp, Homo sapiens
gatcgtgaccgagaccgtgaccgagagcgtgaccgagagcgcgaatatcgtcatcgttagaagagcagcccgacggccatggaggctgaagagacgatggaatgccttcaggagttccctgaacatcataaa

SEQ ID NO: 356218 - DNA, 103 bp, Homo sapiens
caagttccttccatcacagaggatcaatgaaggggaacaaagatttgggagcatctactttgtgccaggtgagctacatggaaatttactgtgaaagagtacg

SEQ ID NO: 356219 - DNA, 100 bp, Homo sapiens
catgaccgctcgcggcctggcccttggcctcctcctgctgctactgtgtccagcgcagctcctttagcggcagagttttccgagtgaccttcttgatgct

SEQ ID NO: 356220 - DNA, 90 bp, Homo sapiens
catcgacgccgcctggcaggccctgcgcaccagatggaagaagctcatttgattggctgaccgggagcagcactgacccgctggtcgacc

SEQ ID NO: 356221 - DNA, 80 bp, Homo sapiens
agattgtcaacggggaccagtactgtggggcgggcagggctgggcagcggcctgagtctcagcggacttgtccacccgga

SEQ ID NO: 356222 - DNA, 75 bp, Homo sapiens
gagttaaatacctgtgcatcccagcagcggattcaccatctcaaaacctgcgagacttgaaatctgtgctttgag

SEQ ID NO: 356223 - DNA, 100 bp, Homo sapiens
tcaccaaagactacattatgaacccaccactgggcaaagaaagtatccctttttatcccagatcactgaagctgagatggctgatgaagtaatttgcagt

SEQ ID NO: 356224 - DNA, 100 bp, Homo sapiens
actcctcgctggctggtgccgcgttcctgctgctctgcctgctccacaagcggcgccgcgccctcggcctgcacgggttcgtcacaaggcatcgcagaag

SEQ ID NO: 356225 - DNA, 83 bp, Homo sapiens
ttgacacggctttggaaacgacgtcatgtgttaggcctgaagctgcccagcaggcattccaaggcctgggtcctggtttctcc

SEQ ID NO: 356226 - DNA, 108 bp, Homo sapiens
gcagaatttgtatagagatgtgatgttggagaactacagaaacctggtctccctagatcctgataacttaagtgactctctcttttccggtgatgaagaaaatgctgg

SEQ ID NO: 356227 - DNA, 50 bp, Homo sapiens
tgagacgttatttccatcaaaaattggtcactctgtgagactgctgggtc

SEQ ID NO: 356228 - DNA, 75 bp, Homo sapiens
cctgtgtataacgaaatactgcgggtttactcatggggtagcaatacctttggtcaacttgggcattccgatttt

SEQ ID NO: 356229 - DNA, 82 bp, Homo sapiens
gtctgactctgactctcggactgagaaacgcaaggtgtaattacttcaagcctccaggatggcaatccagttccgttcgctc

SEQ ID NO: 356230 - DNA, 88 bp, Homo sapiens
aagatggcggaagcggaggagtctccaggagacccggggacagcatcgcccaggcccctgccagagactgctgctactttgaaacgta

SEQ ID NO: 356231 - DNA, 98 bp, Homo sapiens
tttggggctctcactctggaggatggggtggatgggagcgcccgctatgggcactggcataagaacaaggccccaggcgagtaccgcagtggcccccg

SEQ ID NO: 356232 - DNA, 100 bp, Homo sapiens
ctgtgcttcttgtgcaagtaatcagtctttgacaagtgatgagaagctgtcggagcttcccaagatttgagagggaagatctgatctcctagaattagag

SEQ ID NO: 356233 - DNA, 100 bp, Homo sapiens
tttgactactggggccagggaaccctggtcaccgtctcctcagggcgaccattgacgaggtggagacggacgtggtggagattgaggccaaactggacaa

SEQ ID NO: 356234 - DNA, 100 bp, Homo sapiens
atctggaagacgcgctcctgcgccggttattcagcttctcaaggctggaaaagcgaaggaagtttcctacaatgcactagcctcacacataatctcagag

SEQ ID NO: 356235 - DNA, 74 bp, Homo sapiens
ttgccatgctacgaagacagcagatcaagttgagtcagcagatactggagttatttgaaacatgtcagcagcaa

SEQ ID NO: 356236 - DNA, 100 bp, Homo sapiens
atggtcagaatcctgttgtaactccatgcaataaacagttcctgagtcaatttgaaatgcagtccaggaaaagagcccccacgccccgtgcacccagcac

SEQ ID NO: 356237 - DNA, 90 bp, Homo sapiens
ctgctcctctgggttgaaacccgggcgccgccaagatgccgtgttctggacttggtgcctctttctgttatatgctttcctatttagttg

SEQ ID NO: 356238 - DNA, 100 bp, Homo sapiens
caaaatgggagacaggcgcctgagtaacccggggcaaggagatatctgaagagattataggatcacccatcccagaacctaggcaacgctcaagacttct

SEQ ID NO: 356239 - DNA, 50 bp, Homo sapiens
gacacatcaagggcagccaattactgagtgtgggactacaatactggcag

SEQ ID NO: 356240 - DNA, 80 bp, Homo sapiens
gccaacgccccggtggagaagctgaggtgggtcctacgtgtatgaactcagcgcagtcctcatacacagaggagtgagtg

SEQ ID NO: 356241 - DNA, 75 bp, Homo sapiens
agaaaccccgacagagcaatctcccaggcaatgtccttgaatgggcaagagggcacatgaagtacggcgtcctcc

SEQ ID NO: 356242 - DNA, 87 bp, Homo sapiens
ggcccaacccaagagcgctacaaggatggggtggtgaccatcggctgtgtggttaccagatgtatgctactcatggtgggtcctggc

SEQ ID NO: 356243 - DNA, 90 bp, Homo sapiens
ggaagagagaccttagaaaggatcaggactggcggtcatcttcttgtgagccctgggcttaggagtcaccatggcaactgaagagttcat

SEQ ID NO: 356244 - DNA, 75 bp, Homo sapiens
gtccgacagccaggcccgggagaagctggatggaaagaaaaccatgcaacgtttatgaatgaattgaaaaacctt

SEQ ID NO: 356245 - DNA, 50 bp, Homo sapiens
atataccagacactgcaactggtgcaaagtccttcgtggatgcaacctca

SEQ ID NO: 356246 - DNA, 90 bp, Homo sapiens
acgtcagaacgtggcttatgagtacctttgtcatttggaagaagcgaagagtcccatcagggccctggatcccaagactcagcatccaag

SEQ ID NO: 356247 - DNA, 80 bp, Homo sapiens
ggaaaaggcaaaaatcccatctaccgcaactctcagttcgagagtaaagcaaaatgatgcttcaacacccaggccaggtc

SEQ ID NO: 356248 - DNA, 82 bp, Homo sapiens
ccaggatctcgggctcggaacgagactgcacgagtgttctgccagttctggataatccactgtccaagaaggttcgaggcct

SEQ ID NO: 356249 - DNA, 100 bp, Homo sapiens
tgggaacgcgggcggcgagacggcggcaggacggcggcaggtgaattcatcattggccgagttatcaaagccatgaataacagctggcatccggagtgct

SEQ ID NO: 356250 - DNA, 100 bp, Homo sapiens
aagccttgaagtacttgtttagattcatcatccaatcccgagtgctctacttgaggaaagcagatggtggagctgaatatgccacttaccagactaaatc

SEQ ID NO: 356251 - DNA, 75 bp, Homo sapiens
agggacattggggttgatgaaacttacctctttgaatctgaaggtttaggtaactataactacccaatattgcag

SEQ ID NO: 356252 - DNA, 98 bp, Homo sapiens
gctgcagtgaccccgctttcctcacgcccagtcttgccacttgcctagtgaggcttttccgaacctggaaggagacgtctagaaatcccaactttgct

SEQ ID NO: 356253 - DNA, 50 bp, Homo sapiens
acagagtgttgagaagtttattcagaaaacaacgactgaaagacctttca

SEQ ID NO: 356254 - DNA, 51 bp, Homo sapiens
gagcatcccaggacctaccagaatctgtgtctcctcagaaacaacgagctg

SEQ ID NO: 356255 - DNA, 74 bp, Homo sapiens
cctccctagtagctgagattacaggaggttgttcataaggagcttactaactgtggtttgcaccctaacactct

SEQ ID NO: 356256 - DNA, 90 bp, Homo sapiens
ccaattttgctcaacttattgtgagagacgatgccgccgtggagacagctgaggaagcaaaggagcctgctgaagctgacatcactgagc

SEQ ID NO: 356257 - DNA, 100 bp, Homo sapiens
atccagcaatattcactattggcaagcctgttcttggaatttgctatggtatgcaggtgaaaagaaagggattatctcagacagtaagccaggaggaaag

SEQ ID NO: 356258 - DNA, 100 bp, Homo sapiens
gaagggaagatttattactaccatgtgatcacaaggggttggccggagacctacgacatgaatacctcggagcccaagacggagcaggaaagcatcactc

SEQ ID NO: 356259 - DNA, 98 bp, Homo sapiens
aagcggaggaagctgggtaggccctgaggggcctcggtaagatcaccggcgtaatcaacccagcgttggacaaatactttccgtcagactctggagtg

SEQ ID NO: 356260 - DNA, 90 bp, Homo sapiens
tcttcttcgagtatttgtagaagggtactgaacgacacctgggtctccttcccttcctggtctgaggactccacgttcgtcagctccaag

SEQ ID NO: 356261 - DNA, 90 bp, Homo sapiens
ctgaaatacatccaggaaagacatggagattctcttaaaaagggactatgcagccatcgtcttctttgctaacaaccgctttgagacagg

SEQ ID NO: 356262 - DNA, 82 bp, Homo sapiens
cctggaaattgccttattggaaaaacatttcttacgttttaaaatcaaagatgggaaaatcggagaaaattgcccttcccca

SEQ ID NO: 356263 - DNA, 74 bp, Homo sapiens
cagcttttcggaacagcagagacacagagggcagtcatgagattgacttgatgcaaaacatcacaaaggctcca

SEQ ID NO: 356264 - DNA, 73 bp, Homo sapiens
ccatggccgacgaaaagcccaagtgaaggagaacgacctgctcagaatgagaagaggaaggagaaaaacataa

SEQ ID NO: 356265 - DNA, 80 bp, Homo sapiens
gtgcccatctatcagcaggctccgggctgaagattgcttctcttctctcctccaaggtatcacctgattttgatacagca

SEQ ID NO: 356266 - DNA, 100 bp, Homo sapiens
tgtttctccaaggtttgaaaagcagctggcctgcaagggctatgagggcctcgtggagggaggtgagaacatcaagcaggccaactggctgagcgtctcc

SEQ ID NO: 356267 - DNA, 100 bp, Homo sapiens
ccttagggcggctggcgtccgcgtgcagccacagcatcctgagaccttcggggcccggagcagctcctcagtgtctgtcctgcagctggacggggcgcct

SEQ ID NO: 356268 - DNA, 90 bp, Homo sapiens
cgagtatgagcagttcatcgcaggcatccgtgtacaagatttgcagagaaatgtatgacgatggagtgggtttaccctttcaaagtcagc

SEQ ID NO: 356269 - DNA, 101 bp, Homo sapiens
gccataaatgtctggctaatggcatttacaggaggagacccggtgagcctccattgataaaaggttggcttccttatcttggagtggtcctgaacttacga

SEQ ID NO: 356270 - DNA, 75 bp, Homo sapiens
ttttattcagcggcagtggtgctttcccgaatctcagaatgccgcgaggtagccctctgttgattggtgtacgga

SEQ ID NO: 356271 - DNA, 83 bp, Homo sapiens
ctggctcttgccctcatcctggttctggaatcctcagttcaaggagaaatggcatgattcacgacgctggcagctctctgtgg

SEQ ID NO: 356272 - DNA, 83 bp, Homo sapiens
ccggccggggcctggtccgggcggtgcagagcagtcattatggcgaaccttggctgctggatgctggttctctttgtggccac

SEQ ID NO: 356273 - DNA, 100 bp, Homo sapiens
tggtgtggggttggtgtgattagcttcgcagtctggaaagctttaggagttcacagtctgactcctgagttctcacaacgcttgaccaataagattcggg

SEQ ID NO: 356274 - DNA, 76 bp, Homo sapiens
ggaaagtttgatatcagcaatgtccagacaaggggcctttatcatctgctggactcctggattggttttgttactt

SEQ ID NO: 356275 - DNA, 43 bp, Homo sapiens
acggccagatctgccctccagtgacttaagagattaaaattaa

SEQ ID NO: 356276 - DNA, 82 bp, Homo sapiens
ccgcggaggagaagccggaggaggacaacgactaccaccgcagcgacgagcagatacagatcacttggattcagtcgagttt

SEQ ID NO: 356277 - DNA, 75 bp, Homo sapiens
agcccagcgtcaacttcctcaagtcgcccaaagggccgagaactactggtggcgtggccagaacacacggacgct

SEQ ID NO: 356278 - DNA, 90 bp, Homo sapiens
catagacgtggagttccacatccggcacaactacccctggaacaagttgccggccaacgtgagacaggagaagaaactgaggcctggaat

SEQ ID NO: 356279 - DNA, 100 bp, Homo sapiens
tatgaagagacacagtatggtagccacacccccagatcacatattctacaaattccagccttctgtggtcgctgcggcctgtgttggggcctccaggatt

SEQ ID NO: 356280 - DNA, 75 bp, Homo sapiens
cctggcggatgatgtggtcgggtctgtgctggactgcttcagaatgcaggctcaacagtaccagcagcagcgtcg

SEQ ID NO: 356281 - DNA, 100 bp, Homo sapiens
aatgtcatttccatcactgacggacagttgctcgataatgtggaaaataagatgaaaggcacctgtgtagagggcaccatacccaaattattccgcggca

SEQ ID NO: 356282 - DNA, 80 bp, Homo sapiens
ccccgcactctctcgatgagtcggagaagtcccgaaacctcgacctgtctcccagttggttgcacagcaggttactcagc

SEQ ID NO: 356283 - DNA, 100 bp, Homo sapiens
tcttgatggaattagaagttttgaagtcagctgaagcagttggagtgaagattggcaatccagtgccctataatgaagatctgggctgcaggagctgggg

SEQ ID NO: 356284 - DNA, 98 bp, Homo sapiens
atgacttagtccgaacaattggaggagacctggtggaaaaggttgatctcatagacaagtttgtacatccaaagtctgctggagtttgctggaggtcc

SEQ ID NO: 356285 - DNA, 80 bp, Homo sapiens
ttgacgggctcctcaccgttgtcctgctgggttcgggggtgattaaagctggctttgcaggagaccagattcccaaatac

SEQ ID NO: 356286 - DNA, 118 bp, Homo sapiens
ctgtgcagccgcgaggaggcgcgggaggtgttcgagaacgaccccgagacggagtgtggccatctggggccgtgtggtatttgccactcaggagacatgtccctatgacatagcagtg

SEQ ID NO: 356287 - DNA, 50 bp, Homo sapiens
caacaataccttagttgacccttgtaatgccacccagaggatgtttgaaa

SEQ ID NO: 356288 - DNA, 75 bp, Homo sapiens
aagctttcaaagtcatgaacgaattaagaaggtagctacagcaagctgggtagcaggcagatccaaaggatatca

SEQ ID NO: 356289 - DNA, 75 bp, Homo sapiens
ctcacagcatcaaaaaaaggagcctgagatctcagatacgtgtacagacaccttgtctcagtgcatccatgctgc

SEQ ID NO: 356290 - DNA, 52 bp, Homo sapiens
ggggtggcaggcggcacagttggaggcaccgtctgcgtcctgctgtccttcc

SEQ ID NO: 356291 - DNA, 83 bp, Homo sapiens
gagaatattcaagagtggcaacagagagatcactgcagtttgggagttgagtgatattgaccatgatggaatgcttgacagag

SEQ ID NO: 356292 - DNA, 82 bp, Homo sapiens
cgtggatccaagatggcgacggcgatgattttaacattatggcagggaggcatcagaatcgtagttttcctcttccaggagt

SEQ ID NO: 356293 - DNA, 76 bp, Homo sapiens
ccgcgggcccgggtgcgggcccggcgccgcaccagcagaacggatctaagcctttcccacgttatggttataaacc

SEQ ID NO: 356294 - DNA, 83 bp, Homo sapiens
aggaggactctggagctgacagcgcgcacttcacccgcagttgtgtcaacagcatctccaccctggagcctgtgagccggtgc

SEQ ID NO: 356295 - DNA, 90 bp, Homo sapiens
tggcgagcgcctcgtaccacatttccaatttgctggaaaaaatgacatccagcgacaaggactttagccaacaaatggaattttcttgag

SEQ ID NO: 356296 - DNA, 90 bp, Homo sapiens
ggacgctctatgacgtcatcttgtacggttacccagcatgccacaatctgattgctgacctggatggaacagagtgaaataaatgattta

SEQ ID NO: 356297 - DNA, 90 bp, Homo sapiens
actacttcaaccaggaggttttccgagacaacaacggcaccgcgcatcctgaggttagcattacacttctcccagtggagcccatgactt

SEQ ID NO: 356298 - DNA, 75 bp, Homo sapiens
ccagcacctacgtcccgctgccgtcgccgccgccaccatgcccaagagaaagattcctggtcgggtggcttccag

SEQ ID NO: 356299 - DNA, 100 bp, Homo sapiens
ccgggacatgcatcgtcccctggactctctcaagaaacagagcaaatgcagcgttacaatcaaagacttattgaggaattgaaaaacagacagactcaag

SEQ ID NO: 356300 - DNA, 51 bp, Homo sapiens
gccgaggactacccccgcttctagtactttgccagacgtttatcaaaatgg

SEQ ID NO: 356301 - DNA, 83 bp, Homo sapiens
ggagcagatattccacctgcagatgaaacttattgaacaggatctgtgtcgagcttcctttggagttcgcagactgataggag

SEQ ID NO: 356302 - DNA, 74 bp, Homo sapiens
agagatgtattcagtggaggaagctgtggatatcaaagtattgcagagtgccttagcagccatccgacatgccc

SEQ ID NO: 356303 - DNA, 90 bp, Homo sapiens
aataatagacagctcaactatgtgcagttggttcaaaccttgtactactcagctgatcacaagctgcttgatgggaacctactagatgga

SEQ ID NO: 356304 - DNA, 82 bp, Homo sapiens
cgtggagctccgccgccccgaaactttcaccgcgagcgggtgagcatgggtttatgcgtcttaggcattattgtgatggcga

SEQ ID NO: 356305 - DNA, 83 bp, Homo sapiens
cgagacggcgatccgggcgctcgagacttaccagagccacaaggttgatgataattagaagcatgctttccactgaacttccc

SEQ ID NO: 356306 - DNA, 100 bp, Homo sapiens
gaccatgcagacctatcgctctgtcagcgagatggcctcgcacaaggtgaccagcgccatgtccagccaggtggtgggcattgagcctctctacatcaag

SEQ ID NO: 356307 - DNA, 55 bp, Homo sapiens
gaatactcctaaccaagaagttgcccaggattctgaacacgaccctctttgagag

SEQ ID NO: 356308 - DNA, 74 bp, Homo sapiens
tggtcgtggaggccgagggcgaggagcgctggaggagctgacctttgacccgagctctgcgcacccgagcctgg

SEQ ID NO: 356309 - DNA, 100 bp, Homo sapiens
agaaaatcctcactctgagtacggtctcacagacaacgttgagcttcagcgcctgctcctggtcatcactaaccagatttacttggagtacatgtgaaag

SEQ ID NO: 356310 - DNA, 82 bp, Homo sapiens
acagaagattctcaatattctcacaaataaacatggtgcttggggagcagtttctcatagtactgtaagattgatgttaaag

SEQ ID NO: 356311 - DNA, 100 bp, Homo sapiens
gagaaaatgaatgccaaatgggacacgggtatcactgggatacatcagattggatgccaagcgttcctctgccggacatacaagagttccccaactatga

SEQ ID NO: 356312 - DNA, 50 bp, Homo sapiens
cagcagtcaagtatgtcccaaacgtcttataactttgaaaatgcatctca

SEQ ID NO: 356313 - DNA, 83 bp, Homo sapiens
aaggacttcgagcagcctctcgccatttcccgggatgctcgtcagaagttccgctctgttctggttgaagcaacggtgaaact

SEQ ID NO: 356314 - DNA, 75 bp, Homo sapiens
tccgaagccaggttgctgaaggatgtgtctcacaaagtaggtcccattagtccaccacagccaccttcagtcagt

SEQ ID NO: 356315 - DNA, 96 bp, Homo sapiens
ggcaagcactaagtgaagcaagaaagcatttaaaagaagagacacaattacgattgaggacatagatgaaaatctcttgttttgaacgaagatttt

SEQ ID NO: 356316 - DNA, 100 bp, Homo sapiens
tgggattctcaatggatgctggattctaaaatttgaatgaacatcatttacagcgagcaatttcagcacagcaagtgtttagagaaaaaaaagagagtat

SEQ ID NO: 356317 - DNA, 90 bp, Homo sapiens
ggcgtggtgtctcacacctgtaatcccagcacttcgggaggccgaggcgcatggatcatgaggtggggagaagaattttcattgtccaag

SEQ ID NO: 356318 - DNA, 74 bp, Homo sapiens
ttgacctcgagggcaacgtctgcctcaacatcctcagagaaagctgatggtttgtgttttaacttaactgtgat

SEQ ID NO: 356319 - DNA, 100 bp, Homo sapiens
agacttgaacctagaaaatttcactgcaaagcactgctcagcacgcaggcatgtgaggaagctgggcttaaaggagactccagcaaatggagagacagac

SEQ ID NO: 356320 - DNA, 74 bp, Homo sapiens
tgacgatgacgtctaccgcagcctggaggagctggccgagacgtgtttgagatgaggtttgccaagatgccaga

SEQ ID NO: 356321 - DNA, 98 bp, Homo sapiens
aagaggactggtgatctacgtgtgctttttcaagggagctgataaagaacttcttcccaaaatggaaatgcactcggtgatggaaagagagccactat

SEQ ID NO: 356322 - DNA, 50 bp, Homo sapiens
atattttggaaagcagtttttaagacaaatggagtcttgctctgccgccc

SEQ ID NO: 356323 - DNA, 75 bp, Homo sapiens
tgggaaatgctatgagaagctcttctagaaagtcagaaacatggccctggatgatgtcgtgatcctgaatgtgga

SEQ ID NO: 356324 - DNA, 89 bp, Homo sapiens
tcaatccaacagcccagtgcttctgtctcgactgcactttgagaagggatatctctaagtttgctatgcattatataatagaagaaata

SEQ ID NO: 356325 - DNA, 75 bp, Homo sapiens
ttttttctccagccgagaggacgcggctgtgatatacgaagaggactactgagcccagccaggctgtatgccatt

SEQ ID NO: 356326 - DNA, 50 bp, Homo sapiens
caggaaccaccagtgacagagttgtttacattcagagctctatcaataag

SEQ ID NO: 356327 - DNA, 99 bp, Homo sapiens
ggatattgaaatggacagtggagatgaagcctaagaatatgatcaggaagagtttaaagaacgctgtactcagtgtgctgctgtctcatggggtcttac

SEQ ID NO: 356328 - DNA, 100 bp, Homo sapiens
tgaacgcacaggccgtcgctatgagcgggaccaccctgggcacagcaggcatcggaggacacagcattgttggttttgccatgtactattttacctatga

SEQ ID NO: 356329 - DNA, 83 bp, Homo sapiens
cgacgacgagatggtggaggaggcggtggaagatcttgatgtggaagaaatggaggactcagaaccaaggatttccaagtgat

SEQ ID NO: 356330 - DNA, 75 bp, Homo sapiens
cccagcgggaaaggctacagattccggggctgaccttggagagatacaactcgtcaacgaatcaaattcagtgat

SEQ ID NO: 356331 - DNA, 83 bp, Homo sapiens
gccttagctgtgctcgcgctactctctctttctggcctggaggctatccagcgtaatctgtaagtcagatgctccaacagggg

SEQ ID NO: 356332 - DNA, 100 bp, Homo sapiens
tccggggacagcgcgccggtcgagctgattctgagcgatgctgcccaggaggcccgcaacaagttcgaggaggccgagcggtcgctgaaggacatggagg

SEQ ID NO: 356333 - DNA, 98 bp, Homo sapiens
gcggcagtggtggaggtggaggttggaggtggtgctgctggggaacgggagctggatgagctccagaacctgggtatcaacccagcaaacattggctt

SEQ ID NO: 356334 - DNA, 98 bp, Homo sapiens
ttatgagaatgttgagttcggcagcatacaggctgcaagaaagcgtaagattgccattcgaaaagcccaggggaaaaatgtggaggccattcgggagc

SEQ ID NO: 356335 - DNA, 108 bp, Homo sapiens
tggacaagtttgcagatcgggagcgcaaggtcgccctcaaggccatgatcaaaacgcgtccgagctgggccacagcctgaacgagaacgtcctcaagcctgcgcagga

SEQ ID NO: 356336 - DNA, 100 bp, Homo sapiens
ccggtttgagtcttgaagaatttattgcttttgagcatcctgaagaagttgattatatgacgctgctgggcatgctgtgtgcttgcatcgtgttgtgcag

SEQ ID NO: 356337 - DNA, 94 bp, Homo sapiens
atcttgggacccaccgctgccctcagctccgagtccagggcgaggcgccatgtcagaaccggctggggatgtccgtcagaacccatgcggcagc

SEQ ID NO: 356338 - DNA, 126 bp, Homo sapiens
ctgcgctgctgaggccgggccggccgcccagacgctgcccgcgggcccggccacggcggagccaagacaatgcagatcttcgtgaagactctgactggtaagaccatcaccctcgaggttgagccc

SEQ ID NO: 356339 - DNA, 100 bp, Homo sapiens
cattgtccaggtggatgtcagcaacctgcagtcattcttccgggcctccaaggaacttaagcaaaggctgcgtgagctctgcgtcaagcttatgttcctg

SEQ ID NO: 356340 - DNA, 48 bp, Homo sapiens
aagccttcgtctcccagattgcagccatgaagatggacctacagctaa

SEQ ID NO: 356341 - DNA, 100 bp, Homo sapiens
cggcggcggcggcggcagtgacgtcgccgggtgagggctccagtgcgggggaaactgactctactctgtgatgccaagacagatgggagtttccttgtac

SEQ ID NO: 356342 - DNA, 83 bp, Homo sapiens
aactgcttgggcacacgtgtaaggaatgtgaaattgtgcttgaggaatccaaagccctcgtgcgctgcaacatgaagatggag

SEQ ID NO: 356343 - DNA, 74 bp, Homo sapiens
ttggagtgaagaagtagaaattgaaagagaagtgctcttagaaaaggtatgttcatattggaggatgaccggtt

SEQ ID NO: 356344 - DNA, 75 bp, Homo sapiens
acaggagctgtagagaggaccccggtacatctgaaagccgggaaatggatcgacaagaccatgctggcaagtctg

SEQ ID NO: 356345 - DNA, 50 bp, Homo sapiens
atgcagcgcgtctatggagcccagggacaccacgatcatcaaccactcac

SEQ ID NO: 356346 - DNA, 88 bp, Homo sapiens
cagatatgaccattaaactatgggattttcagggctttgaatgcatcagaaccatgcacgattaaaaggagcccaagccccatctcat

SEQ ID NO: 356347 - DNA, 75 bp, Homo sapiens
gcaaactgtgttcattgagaccctgattgaagagagaggtaaacttgatatctcccaggacgatagtgaaattac

SEQ ID NO: 356348 - DNA, 100 bp, Homo sapiens
aggacatcactttagatgatgactgaagaagttaagcttggatgaaaacaggattatcaggatcccatacctacagcaagttcagctctatgacgagtca

SEQ ID NO: 356349 - DNA, 83 bp, Homo sapiens
ctattaatggacacttctataaccatgaagcagaagtcaattcatctggaaagactatctctgagtcagacttaaaccactct

SEQ ID NO: 356350 - DNA, 75 bp, Homo sapiens
gtggcgttccgcgggatcttgcagaggagaggattgctgtggaaactgcagcgacagcgaggaagagctccccac

SEQ ID NO: 356351 - DNA, 75 bp, Homo sapiens
ctcggcctggccaggtccgaaaacttaatctacacctacgataagctgataggaagatgtcttcaggaaatgcta

SEQ ID NO: 356352 - DNA, 75 bp, Homo sapiens
gttgctggtgttctatactggaagaggcatgccagaggtagagcagggattatcttgaacacataacctccattg

SEQ ID NO: 356353 - DNA, 100 bp, Homo sapiens
agaagccagtgtccaggccggccaccgctgccgctgccgctgccggctccagggagccccgtgtcaagcaagttaccttatcccatatcacacaactggt

SEQ ID NO: 356354 - DNA, 90 bp, Homo sapiens
tgttattgagttgtttgaatttataagagtgttggatgtactggaatatatacatgaaaatgaatatgttcatggtgatataaaagcagc

SEQ ID NO: 356355 - DNA, 100 bp, Homo sapiens
cgccatcttggatccgcgggacaagaaaattcatgcgttcttggccaggctgactgagagatttgtgctgggagtggatatgttcgtggagacactgtgg

SEQ ID NO: 356356 - DNA, 75 bp, Homo sapiens
atttgaggtctgtcggagctgcccttcagtgtgttgccttttcgggccttggcttcacgacgttctacttggcgg

SEQ ID NO: 356357 - DNA, 88 bp, Homo sapiens
ccagtacttcaaggagaatggctatgtgaccatgtcggtgggaaaagtctttcaccctggagcttctggaagaggtgaagaaggaatt

SEQ ID NO: 356358 - DNA, 74 bp, Homo sapiens
gcgacttcatctggggcgtcgtgcgcaaaggcctgcagtgcgcgcgcacgtgtggttctcaaatataggcattc

SEQ ID NO: 356359 - DNA, 100 bp, Homo sapiens
caacattcccaacagccaccaccaccaccagatggtcagccgtcagatccaggagcatgagcaggactctgcgctgcgggagcagctgagcggctataag

SEQ ID NO: 356360 - DNA, 83 bp, Homo sapiens
ccaactcttgtggtgccacatcgtactgatggatttgctgaagcaattcagtcggttgatgcgctgtgtccgctgtcctgtgg

SEQ ID NO: 356361 - DNA, 75 bp, Homo sapiens
accactgggccacaggaaaggcagacagaaagaatttactttcaggttttcttacctaaagggagcaaagagaag

SEQ ID NO: 356362 - DNA, 101 bp, Homo sapiens
gttactgccgcgccaccgagtccggaccggagactttggggcctaactaggtctgtaaacagatttggctaggattatttgatgatagatcttcagcaatt

SEQ ID NO: 356363 - DNA, 75 bp, Homo sapiens
cgactccggagacagcccaaatatcctcggaagagcgctcccaggagaaacaactgtcaaagctcgaaaaacagc

SEQ ID NO: 356364 - DNA, 100 bp, Homo sapiens
tcctgcagcatggacctgcaactttcctgaagcatctccagggctggatgccatgaggtcctcttcccctcgcagatgcggtgacctgccagcacctgcc

SEQ ID NO: 356365 - DNA, 75 bp, Homo sapiens
gacggaatgcctccatacattgaaaaggaaaccgaatttgcatgctctttccaagccgaagaaaaacatatcatc

SEQ ID NO: 356366 - DNA, 89 bp, Homo sapiens
ggtctctactcctgggctcaagcagtcctcctgcctcagtctcccaaagtgctggaattacaggggtggtgaaattgcctctacctttg

SEQ ID NO: 356367 - DNA, 74 bp, Homo sapiens
ggaagatggcgaaggtctcagagctttacgatgtcacttgggaaggccacttcccctcaccagtcacagcagtc

SEQ ID NO: 356368 - DNA, 51 bp, Homo sapiens
atgatggacatcggctccacccgggccatggtggcgtgttacccaggcaac

SEQ ID NO: 356369 - DNA, 83 bp, Homo sapiens
ggacagtcctgatgacacagccctcagcgagagtgccaaccaggccttcctgggcgaccattgacgaggtggagacggacgtg

SEQ ID NO: 356370 - DNA, 99 bp, Homo sapiens
acgctggcaacaccacttgacagagaattaagtgtatggcacaacataacaatcattgctactgaaattaaggacgtcggtgatgaaggagaagaagaa

SEQ ID NO: 356371 - DNA, 88 bp, Homo sapiens
ctctatagtcggagtggagaactgcaagggaaatcctcattgacgattcaatttgttgaaggccaatttgtggactcctacgatccaa

SEQ ID NO: 356372 - DNA, 75 bp, Homo sapiens
gcgccacaatctctcctcccagggcataacctgggtcctggtttacaggacagacaagtacaagagactgaaggc

SEQ ID NO: 356373 - DNA, 90 bp, Homo sapiens
gctgatattgatattattacagcttcatatgcaccagaaggagatgaaggttgcaaaagcttctcatttcagagagatgccaggatccta

SEQ ID NO: 356374 - DNA, 82 bp, Homo sapiens
taccaggagcatgtggccttacacgcccccatcagtgtggacactgccagcggctgcagccgacttggaatgacctgggaga

SEQ ID NO: 356375 - DNA, 100 bp, Homo sapiens
cagagcagcctccgtcgctgtcgctgagagcctcacgagtcgaggtcctgcaggtggagctccggcagccgccctgacggtctggaaaatcccgaagcag

SEQ ID NO: 356376 - DNA, 75 bp, Homo sapiens
tacaacagactgagaagagaagtggagcaccaggagactgcctatggtttggtgcacctcgatttggaggaagta

SEQ ID NO: 356377 - DNA, 100 bp, Homo sapiens
gaacaacatgctgcagctgtatgccagtatgctgcatgaaaggcgcatcgtgattatctcgagcaaattaagcactttctcaacgggaatgctttcaact

SEQ ID NO: 356378 - DNA, 75 bp, Homo sapiens
atatcgtatcagatggcagacatacatcatttaaaggatctaatgaggcgtcaagaagaactcagacgcttggaa

SEQ ID NO: 356379 - DNA, 83 bp, Homo sapiens
ggaaacagcagatgtaccctcagtacgccacctactattacccccagtatctgcaagccaagtctgctccatctggacacaag

SEQ ID NO: 356380 - DNA, 75 bp, Homo sapiens
tgtttgaacaaactcgaagaacagctgtggaaagaagttgcaaaacactgggaaactggagcacccatcctaact

SEQ ID NO: 356381 - DNA, 100 bp, Homo sapiens
ttgaagctgactactaaggagaataaggacggcaatggatacatagatgaaaatgaactggatgctttactgaaggatctgtgcgagaagaataaacagg

SEQ ID NO: 356382 - DNA, 100 bp, Homo sapiens
cctgtggtattgtggaaattcccagaggactttggagaccaggtatcacagatgtcgtaagaatctgaatcctccaaaagacagatgatgcggaggttcc

SEQ ID NO: 356383 - DNA, 75 bp, Homo sapiens
ttcagaacaaatattcagactttaccgtgccattggaaatataaaaagaatggtttgtcattcattgaaacttcg

SEQ ID NO: 356384 - DNA, 90 bp, Homo sapiens
caaagatgggcaaggctctgacaatccgggccaggaattgaatgatctggcacgggaccctccagcacagtgttcagcaggtcctgttgg

SEQ ID NO: 356385 - DNA, 98 bp, Homo sapiens
cattgacttgcacagtccttctgagattgttaagcagattacttccatcagtattgagccaggagttgaggtggaaggtccatccgagtatatcatgg

SEQ ID NO: 356386 - DNA, 96 bp, Homo sapiens
tgcggccatggcggcgactactgccaaccccgttttgagtatccgaggagcccaggaggaggaacccacagacccccagctgatgcggctggacaa

SEQ ID NO: 356387 - DNA, 148 bp, Homo sapiens
atcaccaaattgatgtgtctgacgtcatcaggcttgttcaagacacaccggaggcgacggccatggccacaggctactgcagcactggggtgtcagttgttggtccgacccagaacgcttcagttctgctctgcaaggatatataata

SEQ ID NO: 356388 - DNA, 50 bp, Homo sapiens
gagcagtctcaggcctttagtgatgatgtaacaaatgtggcaattatttt

SEQ ID NO: 356389 - DNA, 75 bp, Homo sapiens
ctggcctacagacgacaagagtatcagcttagcagtgtctgcaaaaacgaatcttttcctacaacctgttaactg

SEQ ID NO: 356390 - DNA, 100 bp, Homo sapiens
ctgagttacataaagaagacctaaaactgatggctactaaaaagcagagcatttctggtctcgaagtgctgcagctaaaactcatacaactgccttggct

SEQ ID NO: 356391 - DNA, 100 bp, Homo sapiens
catgctggcaagtctgaaggtcaatgactgtcatgtggcatgggtctctgcccaagctcgtaatgagactatagcaaggcggctgtgggacgtcagttgt

SEQ ID NO: 356392 - DNA, 100 bp, Homo sapiens
cccatcttgtacagcaactggctgtcaaagcactatcctgaggagcgacatgtggttgaacgccatggacgggacacaagcggaccaaggaaagagtggc

SEQ ID NO: 356393 - DNA, 98 bp, Homo sapiens
caacaacagcagccggcccttgttaactacaacagaccatctgaaaatgatgcatcctgttgccagcagtaatccagctttctgtgggcctggcaagc

SEQ ID NO: 356394 - DNA, 74 bp, Homo sapiens
ctagaagctccttccattcagatccagcagcacaacggcatgaaactgtccatgaagggctctcacggccacac

SEQ ID NO: 356395 - DNA, 98 bp, Homo sapiens
acctactttgggcctgtgctgaactacctgagacacggcaagctggtgattaacaaagacctcgcggaggaaggcttctgggaacttggcagacgcag

SEQ ID NO: 356396 - DNA, 100 bp, Homo sapiens
gcctcctgccgagataaagccaccacgtctggttgctccttgagggcaggacagttcttatggctttatccgttgcgtaagcacagagaggtctgcgagg

SEQ ID NO: 356397 - DNA, 101 bp, Homo sapiens
cagggtgatcagggaagagaaggccccgttggtgtccctggagacccgggcgagagaggtttccctggcgagcgtggtgtgcaaggtccccctggtcctgc

SEQ ID NO: 356398 - DNA, 100 bp, Homo sapiens
tagccaaattgctcaactaagaccaagtcctcgctggactgctcagggtgccagacctcatcgttatatatgccgcaattttacagggtcttctgctttg

SEQ ID NO: 356399 - DNA, 90 bp, Homo sapiens
tagaaggcatggagagtggtgaagatcacccggaagttcaggctgaattctgaaggcaaacttgagcagacggtctccatggcaaccacg

SEQ ID NO: 356400 - DNA, 89 bp, Homo sapiens
ggaaggaggagattctgaagataaggagcttcggggagttttgcctggctcacctgttactgaagaggaaccctgtcatgttcttccaa

SEQ ID NO: 356401 - DNA, 50 bp, Homo sapiens
ccgcggagcgccagctcaatgaatgaactttgaggcgctgatcatcacca

SEQ ID NO: 356402 - DNA, 80 bp, Homo sapiens
taacgggaggtgaatttccatgtcaacatagtcctgttggttgaatctggcgatgtggaacccatggatatggagggctg

SEQ ID NO: 356403 - DNA, 100 bp, Homo sapiens
atgtccgctatccagaacctccactctttcgccctggtacctgacagtgtaaagaaggagctcctacaaagaataagaacattccttgctcagcatgcca

SEQ ID NO: 356404 - DNA, 83 bp, Homo sapiens
cggagagaaggcggcgcgggaggtgaagttgctgctgttggatggagaaggaggagacaacccgggagctgctgctgcccaac

SEQ ID NO: 356405 - DNA, 98 bp, Homo sapiens
gccgcgctgccgagaagctttacctcgctgaccctatgaaggaagcacaagcctatgcagacgacaacagtttgctgttcatggagacatcagcaaag

SEQ ID NO: 356406 - DNA, 76 bp, Homo sapiens
ctgcaccgcaccgagggcgagctccaggaattgaatgatctggcacgggaccctccagcacagtgttcagcaggtc

SEQ ID NO: 356407 - DNA, 50 bp, Homo sapiens
gatccgggagtctttccactgggacaactacacctttgcccaacctggga

SEQ ID NO: 356408 - DNA, 100 bp, Homo sapiens
ctggatcctgaaaatagcaccaataggctggatacacagtatcgtcgctcatgtgcagttgagtatcctcatcaggcccgacctggcaggggatctgcag

SEQ ID NO: 356409 - DNA, 75 bp, Homo sapiens
gaagaaggtggtggctgtccacctccaccagacggtccagattcgggaactggagcctctcctctgtcacagtga

SEQ ID NO: 356410 - DNA, 75 bp, Homo sapiens
ggcgagcgaggaggatggcggagtcggggctcctgacgatgtgttcagagcaacattgttttgttgacacaagca

SEQ ID NO: 356411 - DNA, 100 bp, Homo sapiens
ggtggtctggggcaacgcggaagcaattctgtggtgttcttggtcacacatttatggagtttctgaagggcagtggagattactgccaggcacagcacga

SEQ ID NO: 356412 - DNA, 100 bp, Homo sapiens
cgcagcgacggcggcgacagcaggtacactgaggaggggacggctccgtcttcacattgtgcacagatctgaggatgggattagcgaagctgtggagact

SEQ ID NO: 356413 - DNA, 74 bp, Homo sapiens
ggaggaggttttcaggaccaaaattgtggaaaagtcactctgggaagatcagttttcctgccatccaggctgct

SEQ ID NO: 356414 - DNA, 100 bp, Homo sapiens
cggacctttcccgctggcgcgcagcctcagctagaaaaacgtttcttcatttcaactcaaacttgctgctaaagcgcctaaatctgaaaaggaaatggac

SEQ ID NO: 356415 - DNA, 88 bp, Homo sapiens
ttttactaaccacttctgaaaaaccacagtttaagtgggaagccgtgtccgccttttaagattgtgattctggatgaagcagattcta

SEQ ID NO: 356416 - DNA, 83 bp, Homo sapiens
cagagaggggaagtgatttgcctcagcttgtactgcagaagtcaattcatctggaaagactatctctgagtcagacttaaacc

SEQ ID NO: 356417 - DNA, 89 bp, Homo sapiens
attgctactgcctgtaaaacctttgttcctcatcgcagcagttgttttggaatccgagcggctggaactcatgaacgcagagctgaaga

SEQ ID NO: 356418 - DNA, 101 bp, Homo sapiens
cgtagacactgttgacatcctaggatgcacagctttacacagaggggctgcaggccaacttcaccatccgggaagatgccaaccccagctcccgacagcga

SEQ ID NO: 356419 - DNA, 100 bp, Homo sapiens
gataagacagtcccacagtccaggtggcttcccacacttctgactcggacgttccttccggtgtcactgaggtggtcgtgaagctctttgactctgatcc

SEQ ID NO: 356420 - DNA, 98 bp, Homo sapiens
tggaagaagcttcgtgtccaacctgttcagtcaatgaagcctgtgagtggacacccttttctcaaaaagggctacaccaagtccattgatatttggtc

SEQ ID NO: 356421 - DNA, 51 bp, Homo sapiens
gtcccccatggcggggccgcgggtggaggttgcagtgagccaagttcgtgc

SEQ ID NO: 356422 - DNA, 90 bp, Homo sapiens
tcccatcataaggatccctaacaggtttttgagagaagacccttttgaggacttctttgggaatcgaaggggtccccgaggaagcagaag

SEQ ID NO: 356423 - DNA, 101 bp, Homo sapiens
cgactgacggccacccaccatggccgcagaccagcgcccgaaggccgacacgctggccctgaggcaacggctcatcaggctggtctccaggaggtaaggcc

SEQ ID NO: 356424 - DNA, 100 bp, Homo sapiens
ctgaatcatgtgctctgtaatatgataagagcacttttgaagaaacgtgtccatactgtttccagctgttggttctggataactctcgagtgcgtctcaa

SEQ ID NO: 356425 - DNA, 100 bp, Homo sapiens
ggcaggatgaagttcgccgagcacctctccgcgcacatcactcccgagtggaggaagcaatacatccagtatgagggtagggctctacttcactgggcct

SEQ ID NO: 356426 - DNA, 80 bp, Homo sapiens
acagccttgcagaagaacgtggcagggtagaagagcagaggatggctctgtcattgattatgaactgattgaccaagatg

SEQ ID NO: 356427 - DNA, 71 bp, Homo sapiens
gaaaagccaatgttgaacatagggcaaaggatgccgaggaatgtgacagggctgggagtgtggccacctgc

SEQ ID NO: 356428 - DNA, 90 bp, Homo sapiens
ccagaagcagtatttgtcctgggatctgaaacttgcccacccttcgggatattgcaggacgctgcatcatgagcgacagtaaatgtgaca

SEQ ID NO: 356429 - DNA, 90 bp, Homo sapiens
cctctcctcacactcccaccactcctcccaaaaagctaccccggctgaagaagtggaagactccaatgtgccaccatggcaactgcacca

SEQ ID NO: 356430 - DNA, 82 bp, Homo sapiens
accagaagccctccctctaccctaaggccctgggctgcatcttgtacctgctgtgcttccggcagcacccttttgaggatgg

SEQ ID NO: 356431 - DNA, 75 bp, Homo sapiens
cgccactacagttcatcaacatcaactacgtccctctgaagtactacgagatgtcctacggcttgaacatcgaga

SEQ ID NO: 356432 - DNA, 90 bp, Homo sapiens
cggtttgtaggtcgtcagaaagagaaagaatcttcaagagggagacatagggaaaaggaagacataaaaatcactaaggaaagaactcca

SEQ ID NO: 356433 - DNA, 100 bp, Homo sapiens
cagaactgttctcaggactcattattttaacatttgggagaaacacagccagaagcctcgtcacgtgttcaatatgctaaagaagtatgtccgcgcagaa

SEQ ID NO: 356434 - DNA, 99 bp, Homo sapiens
gctgcatcattccttggggcaaaatgtggacaaggtctccaaacgtccacaactatcccgatatggaagccgttcccctgttgctaaataatgtgaaag

SEQ ID NO: 356435 - DNA, 101 bp, Homo sapiens
tctttacctgcttcatcgtgaccaccggcctggtattgggatggtgacagagctgaatgaacctctctccaatgaagatcgaaatctcctctctgtggcct

SEQ ID NO: 356436 - DNA, 83 bp, Homo sapiens
aaagacgaaagaagaagaagagcaaagggccttctgcagcaaccatgtccaagggacctgcagttggtattgatcttggcacc

SEQ ID NO: 356437 - DNA, 90 bp, Homo sapiens
cggagcttgagatacgccgctctgaatcttgccgccctgcactgccgcttcggtcactaagctggagataagatgggtagactgctactt

SEQ ID NO: 356438 - DNA, 74 bp, Homo sapiens
tcacccaccaacaacaccacaataatccacagccaagaaatcctctgcggacaaaatgcaacagttaaacgccg

SEQ ID NO: 356439 - DNA, 100 bp, Homo sapiens
gcgagaatcaagcacgcacacgagaacgacatcacccacttctacatgctcactatagacaaggtgctggaaacatgcatgaagagctgcggcaagcggt

SEQ ID NO: 356440 - DNA, 82 bp, Homo sapiens
taatagaggacttgaagcagaaagcaagtgaatacgagtcagaagttactccacaggatccgctgaacataggatgttgcca

SEQ ID NO: 356441 - DNA, 82 bp, Homo sapiens
cctatccccagtggagccggagtgcgggcgcgccccaccaccgccctcaccatgtatacgctcaacggcaagaaagtggaag

SEQ ID NO: 356442 - DNA, 82 bp, Homo sapiens
agtaactgaacattggtctaaagtctttccaaaaggtcaaggttcacaagttgctgaacctgtttgcatgagttgctcctga

SEQ ID NO: 356443 - DNA, 75 bp, Homo sapiens
tggtggacaaaattttgtggcgctctgcgtcccctgaaggcctaagatctggcaaacttggtgaacagtgtgaag

SEQ ID NO: 356444 - DNA, 76 bp, Homo sapiens
tcctactccgatgacaagttttatgcaactaatgacactgaggtcgatgagcagatgcttaacgtgcagaacaaga

SEQ ID NO: 356445 - DNA, 75 bp, Homo sapiens
gtgttaacaatgcatccacagagttatttgctggtataaaggatggagaaagcctgcagctctttgaacaaagtt

SEQ ID NO: 356446 - DNA, 75 bp, Homo sapiens
ctcctccgaggtggcgcggcacctgttttcagataactattatcgtgcagaaatgattgatgccctggccaactc

SEQ ID NO: 356447 - DNA, 100 bp, Homo sapiens
ggaaattgttggattgccagaagaagaagaaatcccagcaaataggaaaattaagtttagtagtgctcctattaagggtgccaaagcatgctttctgcgg

SEQ ID NO: 356448 - DNA, 75 bp, Homo sapiens
atcttgcgggaaaaggagagctcggctgttccagccagggtgacctctgagaaggatgtgcaaacagctctggct

SEQ ID NO: 356449 - DNA, 75 bp, Homo sapiens
gcgtccgccgattcctcctccttggtcgccgcgtccttggctggcgttggtatgtgtgcaacagagagaaattat

SEQ ID NO: 356450 - DNA, 83 bp, Homo sapiens
ttcttgtttgtggatcgctgtgatcgtcacttggtatcatgaactgatcactaaatatgggaagttggagcctttggcagaag

SEQ ID NO: 356451 - DNA, 100 bp, Homo sapiens
gacggattcatttagagctgcggaacaggacgccctctgatgtggctttctagaagatgaccatagaggaccttccagattttccattagaaggaaatcc

SEQ ID NO: 356452 - DNA, 74 bp, Homo sapiens
ggttttctttactctggggtcccggctgccctgtggcctcgctcctcggaggtaacaaatgtggcaattatttt

SEQ ID NO: 356453 - DNA, 51 bp, Homo sapiens
agaggatgatgctgactttgatgaagatgatgtgatgccagccacttactg

SEQ ID NO: 356454 - DNA, 75 bp, Homo sapiens
caggacactatcctggccgagggccttcacttcaggtataatattgagcccagcctatattgcccgtttttctct

SEQ ID NO: 356455 - DNA, 82 bp, Homo sapiens
tttcggctcagggacgacccccgtggccatgctgaagcggaggcggccgctgctcgaggttgacctgacagttcaagaaaag

SEQ ID NO: 356456 - DNA, 74 bp, Homo sapiens
cagcctccaaaagtgctggcattacaggctgcaggccaacttcaccatccgggaagatgccaaccccagctccc

SEQ ID NO: 356457 - DNA, 75 bp, Homo sapiens
cgattaaccagttcacccaggccctggaccgccaaacagggtttttaatgaccacaacaagcaagcatgcagctt

SEQ ID NO: 356458 - DNA, 100 bp, Homo sapiens
ggatgtgataattgtcacaagcaggcgatatgagtctcatccagtctgtgctgatctgcaggccaaaattcttcagtgttaccgtgagaacacccaccag

SEQ ID NO: 356459 - DNA, 75 bp, Homo sapiens
gttggcgggtttcatgggcgtcatgaataacatgcggaaacaggcagccctgaagcagcttcctaggaacaaggt

SEQ ID NO: 356460 - DNA, 75 bp, Homo sapiens
aaaatgtccactggacctctgtccaggaattacatgaacgacagccttcgcaccgacgtcttcgtgcggttccag

SEQ ID NO: 356461 - DNA, 74 bp, Homo sapiens
caggagaggccgggggcagccgccatcggcagcgccagctcaccatggatgatgatatcgccgcgctcgtcgtc

SEQ ID NO: 356462 - DNA, 99 bp, Homo sapiens
gtggcggcggcgccatggcagggcttgcagagttgctggagaatgtaaccctaatccataaaccagtgtcgttgcaaccccgtgggctgatcaataaag

SEQ ID NO: 356463 - DNA, 99 bp, Homo sapiens
gacagattcgcagtggtcgcttcttctccttggtactttgtttgcaagaagttcaagaagatcattatggagcagagatcaggccaagtttggaatcac

SEQ ID NO: 356464 - DNA, 98 bp, Homo sapiens
tagacttaggtctgttagaggaagacgacgagtttgaagagttccctgccgaagcggagctggagttcgcccaaatcatcatcatcgtcgtggtggtc

SEQ ID NO: 356465 - DNA, 100 bp, Homo sapiens
cccgtgctgcagcaggatgcgcacggctctgtcaccatcacagatgccatggacaatattaccaggcagaaccaattctacgatacccaagtcatcaaac

SEQ ID NO: 356466 - DNA, 100 bp, Homo sapiens
ctgattaaggactatcgggagaaagtggagtccgagctgagatccatctgcaccacggtgctggataaagtagccaatatttggtgcagcttcaatgtct

SEQ ID NO: 356467 - DNA, 82 bp, Homo sapiens
taaaagaaatgaattctgccaaagagaaatataaagaagctttagctaaagatctcttttcgagcacatataccgccattgg

SEQ ID NO: 356468 - DNA, 100 bp, Homo sapiens
gtgatggataggagcaaccctgtaaaaccagccttagactatttttcaaacattggtagctggcagtgttgtgatggcttttgaagaagtatgcccggac

SEQ ID NO: 356469 - DNA, 100 bp, Homo sapiens
gagacgatcattctgcaagcaggcaacctgaatacagctctggattaatcgaattacagctgctagccaggaacatggactgaagtatccagcgctcatt

SEQ ID NO: 356470 - DNA, 100 bp, Homo sapiens
ttgtcttctcctgataatgtaaattgccgcgatacccaaggcagacattcaacacctttacatttagcaggagctcgtgtaaatgccaaggacaacatgt

SEQ ID NO: 356471 - DNA, 75 bp, Homo sapiens
cttcttgtctaggttttccgtgtgtatcagggccaacagccagggacctgtatgctctccccaggctccgaggag

SEQ ID NO: 356472 - DNA, 80 bp, Homo sapiens
ttttactcctacctgtgtaccgagccagcaacgaaggttttgggaacagtaaaatggttcaatgtaaggaacggatatgg

SEQ ID NO: 356473 - DNA, 74 bp, Homo sapiens
acagagagagaggtggacagatctgagagatactgaggctcatcagattcaagagatgtttccccaggttccat

SEQ ID NO: 356474 - DNA, 101 bp, Homo sapiens
ccacctcggcagaagaggacatcattgatggatttgccatgaccagctttgtcacttttgaagcgctggaggaatgtatcctgtcaggtataatgtcagtg

SEQ ID NO: 356475 - DNA, 99 bp, Homo sapiens
ccggacacggaagatgttcgacaagggcccagagcagacaatattgactcacgcctactccagagtggtcctgagagtcctggaagcagccgtggcggc

SEQ ID NO: 356476 - DNA, 50 bp, Homo sapiens
aatgaagccgcggaccctcgcgaaaccaagagccacgactagctgaggac

SEQ ID NO: 356477 - DNA, 100 bp, Homo sapiens
cgacctgggcaccagcaggacccgaggccaggagccaggggcccagaagcaccacaccccactctggccggagcacgccaagcagctccccatcgctccg

SEQ ID NO: 356478 - DNA, 100 bp, Homo sapiens
ctggccgatactctttgaatgtcacatacaatattcagtgcttcacagtgaagcccaaactcgatctgcctcctaagtttcacaggccagtgtcagagca

SEQ ID NO: 356479 - DNA, 100 bp, Homo sapiens
agcaagaatattcccctggcaaacctgcagatacccaattgtgatgatgtgatgccagccacttactgtgaaattgatttagataaagaaaagagagatg

SEQ ID NO: 356480 - DNA, 74 bp, Homo sapiens
gtggaggaaaaggtcttggcctccaaccccatcatggaggtttgcagtaagcattggctactggcatgaccctt

SEQ ID NO: 356481 - DNA, 77 bp, Homo sapiens
ggacactgtccggatcttccctccctgctccaaaaggaattcttcatttgtctcctgatgtttatcaagagatggaa

SEQ ID NO: 356482 - DNA, 89 bp, Homo sapiens
gaaactgaggtctcatggagaagccccggagtattgaggccgcggcgtacggcaggtgcgtgcaggcctccacggccccgggcggccgc

SEQ ID NO: 356483 - DNA, 75 bp, Homo sapiens
gcctatttacccagaagtagtccatatggctgctgacttgagtaaaccaatagataaaaggatatacaaaggaac

SEQ ID NO: 356484 - DNA, 100 bp, Homo sapiens
atcaaattgaagagagcagttgaagaagtgaagaaattattggtacctgcaggttggggtctgctaggtccccggaatgagttgtttgacgcagccaaat

SEQ ID NO: 356485 - DNA, 100 bp, Homo sapiens
tgtaacccagcctgtttcacttcttggtacttttaggttgaaatacgcccctccagcagaaagtctggactccacagattgatatttttctctggcaaca

SEQ ID NO: 356486 - DNA, 75 bp, Homo sapiens
acagccaagaagtatgggaccaagaataagagagagtcaagggtccagagaaggaggagaagttgagacaggcgg

SEQ ID NO: 356487 - DNA, 83 bp, Homo sapiens
cttggactgagtcctgcaggacacagggaaaggcgtaggaggaggagcaggagttcttccagatcgccaagaacatcaaaaac

SEQ ID NO: 356488 - DNA, 99 bp, Homo sapiens
ataataccaagaaagccccacttggtgctgaagaaaaaatcctaacagaattccgtgaagcttgccatattatacctcatgactttcacctgcaggcca

SEQ ID NO: 356489 - DNA, 83 bp, Homo sapiens
gaacaccccgagatgagaggagaagagcccagcacaacgaaggttcctcatcaagggaagtgtggctgggggcgccgtctacc

SEQ ID NO: 356490 - DNA, 90 bp, Homo sapiens
gcctcccgagtagctgagattacagagccaaagccttggctggacagtcagtacgaatctgtaaaggccccagggctgtgttttcccgca

SEQ ID NO: 356491 - DNA, 100 bp, Homo sapiens
cttgcacaggcctggtttaacactcatagggagcttttggagagcaactttactttagtggaggatctctgggaaagtttagaaaatgctagtggtaaac

SEQ ID NO: 356492 - DNA, 95 bp, Homo sapiens
tggatttggctacacacttatagatcttctgcactgtttacaggcacagccaaatttgtatcctactgtggggcttcaaacaccaggagaagtgg

SEQ ID NO: 356493 - DNA, 82 bp, Homo sapiens
tccgtcccccgcgggtctgctctgtgtgccatggacgggttaatttggagtggcccctggagtcagtttcctacaccatccg

SEQ ID NO: 356494 - DNA, 75 bp, Homo sapiens
aggaactctacaacccaatccagccacagcaattgtctgctattttaaaagcactgtgatgcttaaatattccag

SEQ ID NO: 356495 - DNA, 75 bp, Homo sapiens
cttgaacagactagaaattgcaccacagatatatgggtttgctggacccaaaggagacaacatttatgaatggag

SEQ ID NO: 356496 - DNA, 101 bp, Homo sapiens
cggagacatgggagacccggggtcggagttgatggagtttgcactgtagcaaattgcgttggaaaagaactagctccacatgtcaagaagcatggaagcaa

SEQ ID NO: 356497 - DNA, 97 bp, Homo sapiens
ctaacaagatggaagcaggtttaaaattttacataagaagttacctttttcagggagtctgaagatacagtattgctcgtcctcaaagagatctacc

SEQ ID NO: 356498 - DNA, 82 bp, Homo sapiens
gcgaccggagcgaacgccacgccgttgggttgtggcagcactgcctgaaggtatgagaccagattctaatctttatggtttt

SEQ ID NO: 356499 - DNA, 101 bp, Homo sapiens
gccccatactgtactccagagcagtacaaggagtgtgcagatcctgctctggagacaggctcttgccatgttgcccgggctggtcctgaactgctgaattc

SEQ ID NO: 356500 - DNA, 100 bp, Homo sapiens
gaagattgagctgctgatgtcagttaactctgagaagtcgtcctcttcagaaaggttactcactataaacaatatccacccaacacaagcaaagtttatt

SEQ ID NO: 356501 - DNA, 100 bp, Homo sapiens
atgggggagtagctacaggaagcgaccccgcgatggcaagaagtcaacgaaaggttccgttgtccttgaccacgtattccatcacgtaaaccttgtggag

SEQ ID NO: 356502 - DNA, 90 bp, Homo sapiens
taaattacctggaataccaataaaaattgtgatggaggctattcaacaagcttcagttttttgctccactcaagcctgttagaatcacca

SEQ ID NO: 356503 - DNA, 144 bp, Homo sapiens
gaggcgtcgccgcatcccggacggtacttctgccactgctgctccgtggagatcgtcccgcgcctgccgggctggccctggccttccacgacggcagcgtccacatcgtgcaccggctctcactgcagaccatggccgtcttct

SEQ ID NO: 356504 - DNA, 102 bp, Homo sapiens
caagtgaagactttgaacgcactcctcagagtccgactctcccacctgctaaggacatccataaaaattcatcagagagcattttactactgagctgcaaag

SEQ ID NO: 356505 - DNA, 100 bp, Homo sapiens
tcagttttaaaggatgttcatacacatggtatagcttgcttggcgtttgacttagatggacaggttcaaaccttgtactactcagctgatcacaagctgc

SEQ ID NO: 356506 - DNA, 107 bp, Homo sapiens
acaggatgagcaagacagcggtggtttaagcaaggtcttcgctgtgctccggagagatccatcactggtgcaagctatatttaacggagatcctgatgaagttcgag

SEQ ID NO: 356507 - DNA, 100 bp, Homo sapiens
gcatttcacagcactctgggcgaaaattggatgtgaaaatgaagccagaccgaggtgagcgagtgctgtgctttcatgggcctcttctttatgaagcaaa

SEQ ID NO: 356508 - DNA, 90 bp, Homo sapiens
gttggacgacaaagatggcggcagggaccagcagttactgggaagctttgatgaccatgacccagctgtgatccatgagaacgcatctca

SEQ ID NO: 356509 - DNA, 99 bp, Homo sapiens
gctgaagctgctgaagaaatagtggattgcattactgagtcgttgtccatcttaaagacaccccttcctaaaaagtaacaaatgtggcaattattttgg

SEQ ID NO: 356510 - DNA, 76 bp, Homo sapiens
gcggagctgtgatgctgggcaactacagaaacttggtcttggatatggcaaatgcatttgcacagaagcatctccg

SEQ ID NO: 356511 - DNA, 75 bp, Homo sapiens
taatctcccaaaatattctagaaggggaaaagctacttcaaggcagcctgcttctgcaaagtggtacgatcgaag

SEQ ID NO: 356512 - DNA, 82 bp, Homo sapiens
ggagcaggaggaggtcccccgacatgcctgaggcaaaaccaggtctcgaagtgctgcagctaaaactcatacaactgccttg

SEQ ID NO: 356513 - DNA, 100 bp, Homo sapiens
ccgtgcccggccaatcctgctatttctctacaggacaaagggatatataatctggtgtgatgaatgcagactctgctaccattttggctgtttggatcct

SEQ ID NO: 356514 - DNA, 82 bp, Homo sapiens
tgcagggtgtgagcagggctgagatgggcaccgcggatctggggccgtcctcaggcaagtgaaccggagcaaacgacttccg

SEQ ID NO: 356515 - DNA, 100 bp, Homo sapiens
aaggtctatcacagcctcacctacctggggcagaaactaggcatcaagcatgatggaaccatgtgtgatacctgccgccagcaaccaatcattggcattc

SEQ ID NO: 356516 - DNA, 51 bp, Homo sapiens
cggggagcggagccatggcctccgatacgtcggtaacctttccagagatgt

SEQ ID NO: 356517 - DNA, 50 bp, Homo sapiens
tagcaccatgactaagcataagtctctggcatctctatcccctatgaggc

SEQ ID NO: 356518 - DNA, 75 bp, Homo sapiens
cttccggctccgtcgtggaagcaggactgcgccgcgtcttcctcaagggtgaatcaccaggattttcaactgaga

SEQ ID NO: 356519 - DNA, 87 bp, Homo sapiens
cggcgcccccggccgctaccgctcaggtgctgcaggcacagcccgagaaaccgcagcactacactctcagaccagtatccttcaggg

SEQ ID NO: 356520 - DNA, 97 bp, Homo sapiens
gcggacgacagaggatgccgaaccactccacgaagctgccgcccatgctgtcgccaccctggctgaggccaccttacaaggtgggggacagatcgtc

SEQ ID NO: 356521 - DNA, 82 bp, Homo sapiens
ggtagcttcttgcagcagtttctgaagttgcagaaggcacagaccagcacaggaccgcagctgaatgcacagctagaaggtt

SEQ ID NO: 356522 - DNA, 111 bp, Homo sapiens
tggaaatcctaatgacagtctccaaattcgcctccatctgtaccatgatggtcagtaggacagaaggtaacattgatgactcgctcattggtggaaatgcctccgctgaag

SEQ ID NO: 356523 - DNA, 88 bp, Homo sapiens
cgcgagcaaaaccaccatacctgggaccagggcgccaataacaggtattatgccggctgggctgataagtaccacgggaaaaccatcc

SEQ ID NO: 356524 - DNA, 75 bp, Homo sapiens
gggaaacaggaggagcaagttcgactccagcgagggaaaacggagaatcctgcaatgataaggcgaagttgagag

SEQ ID NO: 356525 - DNA, 100 bp, Homo sapiens
gactatgtccaattttcatgctcaggtgtatgtgactgctgagagccgcttcagcaccttggcagagcttgtacaccatcactccacagtggctgatggg

SEQ ID NO: 356526 - DNA, 90 bp, Homo sapiens
cccagctccttggggtttccggctgcagggcggtaaggatttcaacatgcctctgacaatctctagtagagacaagagagacacctccaa

SEQ ID NO: 356527 - DNA, 82 bp, Homo sapiens
gcgagcctggaggattgtcactccaacctcttttcgctgatgcttcaggactgccccaaggcccgcagggaggtggagctgc

SEQ ID NO: 356528 - DNA, 101 bp, Homo sapiens
cgctgccgctatggatgatcgagaggatctggtgtaccaggcgaagctggccgagcaggctgagcgatacgacgtcgagtaatcctgcctgtgtctgtaga

SEQ ID NO: 356529 - DNA, 75 bp, Homo sapiens
ctttgatgtactactataatgggaaagcggtcagcctgccagtatactggggggcagccatagtgaaggactgtt

SEQ ID NO: 356530 - DNA, 83 bp, Homo sapiens
gcaggacatcgtgtaccgcaccatggagatcttccagctcctgaggaacatgcagatatgatgcttcctggtgtgtttagtgg

SEQ ID NO: 356531 - DNA, 83 bp, Homo sapiens
aagaaagccttcacgtgctggataaactcacagttggccaggggtctcagcttcttggaagtgaaagaccagctgctgctcat

SEQ ID NO: 356532 - DNA, 83 bp, Homo sapiens
ctacgtttttacaggcgtctttacctttgagatggtgatcaagcttcacttaaagagaggaaacttcttggtgctcaaagcaa

SEQ ID NO: 356533 - DNA, 51 bp, Homo sapiens
agcgaagtgtcccaagaacatggaagccaatggagatcttcgtggatgatg

SEQ ID NO: 356534 - DNA, 100 bp, Homo sapiens
ctgaacatgagcctcctcctctccttctacctgctggggttgcttgtcagtagcgggcaaggcaatgatatgggaaatgatgatgccattggagggaatg

SEQ ID NO: 356535 - DNA, 90 bp, Homo sapiens
ggcccagacaacctgccttatgtccagatcttgaagctctttcgacgtgtagcagcagctttgccgggaatggaaagcacacaggacaga

SEQ ID NO: 356536 - DNA, 74 bp, Homo sapiens
tcttcatgatgttctgcatgattgtgagagaagatgactgaggaggaggtggagaccgttctggcaggacacga

SEQ ID NO: 356537 - DNA, 95 bp, Homo sapiens
ctccagcgcaacttcagcattaattctgttgccagcacctattctgagtttgcgtatctccagatgaaatggccactgcttgatgtccaggcagg

SEQ ID NO: 356538 - DNA, 98 bp, Homo sapiens
gagctctgaaaaagtgcccagaccaaggaaaaatccaagtgatggagcagcattttcaggcatgtgaaactattgaaccttcctgctagcctccggcc

SEQ ID NO: 356539 - DNA, 100 bp, Homo sapiens
gccgccgcagcaccgagtccgaggtctacgacgacggcaccaacaccttcttctggtactccaaagattcaggtttactcacgtcatccagcagagaatg

SEQ ID NO: 356540 - DNA, 100 bp, Homo sapiens
gcaagtgttcctgcaatgctggctatgaagaaagaggttttatgtgccaagcctgtcctttcatcagagcacatggcagcctttggggtctttggtctct

SEQ ID NO: 356541 - DNA, 100 bp, Homo sapiens
gccggcgcggccatggaggtctacatcccgtcctttcgctatgaagagagcgacctggagcggggatacacgctattgacctgaaaagtggttctggaaa

SEQ ID NO: 356542 - DNA, 98 bp, Homo sapiens
catccggatataaaacttcaaaaattaccattttatgatttactggatgaactgataaaacccaccagtctagtcccacagtgttttgttcgccccac

SEQ ID NO: 356543 - DNA, 80 bp, Homo sapiens
atatctgtttttttcttatgaagcttcttctggttggaaacttgtcaaatttcatcagctcctggtacagtttgttcaga

SEQ ID NO: 356544 - DNA, 50 bp, Homo sapiens
agaaagagtcaacagcagtggcaacagtggacattcttacgtatgttacc

SEQ ID NO: 356545 - DNA, 96 bp, Homo sapiens
ggaaggaacgaggcaaggagctaaagcagcgtgcgttcagccctgggatccctaaagaagtggctgacatctttaacgcccccagtgatgatgaag

SEQ ID NO: 356546 - DNA, 50 bp, Homo sapiens
ttttcagctacaacatcatcttctgggagacgttgatccagcagcacgtg

SEQ ID NO: 356547 - DNA, 100 bp, Homo sapiens
gctgcacttccatcccacggtcagtgtgccacctgggcttgaaggcatgaaggaacaggacctgtgcaacaagataatggctaaaattctagaaaattac

SEQ ID NO: 356548 - DNA, 75 bp, Homo sapiens
aggggcccctggctatgctgcagcactttgatactatctacagcattttgcaatacgtaggtaacctttccagag

SEQ ID NO: 356549 - DNA, 98 bp, Homo sapiens
tggcagagaaatactgtttatcgacattatacaagaaacagcaagcaaatcatttggttttggcaggtgaatatgtttacaaaccaaggaacagtgat

SEQ ID NO: 356550 - DNA, 100 bp, Homo sapiens
agcaagcctggcacggcggctgagctccggcagagcgtgtctgaggccgtgcggggctccgtggtgctgaacacctgaaggataaattggaagaatacat

SEQ ID NO: 356551 - DNA, 82 bp, Homo sapiens
gaccgtcctggcgcgatgcgtcaagtacactgaaattcatcctgagatgagagtaaagctaaaacattttgagaaatttcag

SEQ ID NO: 356552 - DNA, 90 bp, Homo sapiens
cggcggggtgggtgcaagatgccgctgccggttcaggtgtttaacttgcagagcacctggtgaatggccggatggactttgccttcccgg

SEQ ID NO: 356553 - DNA, 100 bp, Homo sapiens
ggcggctgctggacaccacgataacatttagcctggaacagagcggcactcggcctgagcggaacgaagtcttcccggagcccatgttcacgtggacgcg

SEQ ID NO: 356554 - DNA, 95 bp, Homo sapiens
cgtgattctgaggcctccccaaccatgtgcaattaccatcatggagcagttcaaccctagcctccggaacttcatcgccatggggaagaattacg

SEQ ID NO: 356555 - DNA, 75 bp, Homo sapiens
caccatcattgcatttacctcggatcatgtgtttgatgatggtgatgagcgaacattgagacgtacctcactttg

SEQ ID NO: 356556 - DNA, 100 bp, Homo sapiens
tcattgctgtggtggccggcgtagtccagaccatcctatactgtgacttcttctacttgtacattacaaaagttccacttacttacatgatcatttcgag

SEQ ID NO: 356557 - DNA, 100 bp, Homo sapiens
cccagcagaggccttatggatatgaccaggttgggtttcagtaacacctaattttaaggacagactgcatctccgaggctatacacctgaaggaacagtt

SEQ ID NO: 356558 - DNA, 75 bp, Homo sapiens
taatgaaccttgacccacaccaagaaaatgctgaaccagatctggacgacaatgaggatgaggaggagcctgccg

SEQ ID NO: 356559 - DNA, 75 bp, Homo sapiens
cggagacaacaaatgcttccgacaccccatcagcaaagtcaggaccgtagctttatgggatctgcgtaacttaaa

SEQ ID NO: 356560 - DNA, 72 bp, Homo sapiens
tggctcccttctgccccagctccgtctcggcggcggcgggataagttctgaacgtcgaaaagaaaagtctcg

SEQ ID NO: 356561 - DNA, 82 bp, Homo sapiens
tttggaaagacccaggagaagccgcccaaagaactgcaattctgtggtgttcttggtcacacatttatggagtttctgaagg

SEQ ID NO: 356562 - DNA, 87 bp, Homo sapiens
ccggccgtgtcccgaggaagtgcaagacccggtgtggaagatttccttacaagggccgtgttacatgacactgttaatgattgcatt

SEQ ID NO: 356563 - DNA, 75 bp, Homo sapiens
atgtattccaccacctccgccagttaagaggaaaaaggactactgttcgaagatttttggaagaatactgagaac

SEQ ID NO: 356564 - DNA, 100 bp, Homo sapiens
agccagccgaaccctgggattgtgagaaataatcagtcttacaggccccagaatcagaatgcctgctcctcggaaatgttcactttgatatgcaaaatac

SEQ ID NO: 356565 - DNA, 75 bp, Homo sapiens
ttctctctgcctgatttctcctgaatttggaaactatttgccaagtacaaggcccgagaggcggcgctcaaggct

SEQ ID NO: 356566 - DNA, 90 bp, Homo sapiens
acctcagacagatcgccggggaggcagcgcgggatcccagcctcaggcgtgcgcggacggtgtgcggggcaatgtgtatgtgaagtgccc

SEQ ID NO: 356567 - DNA, 51 bp, Homo sapiens
tctacagggacgccatcgaatccggctgcgagcttggagtggaagaataag

SEQ ID NO: 356568 - DNA, 75 bp, Homo sapiens
cccgtagggagccgtgggcgctcggtgcccgggccgggcagcctaattcagtggtttgagacagcaccaagtcgg

SEQ ID NO: 356569 - DNA, 95 bp, Homo sapiens
gagcttcgggggaaccagctggaaagcaccctgggaatcaatcttcctaagctgaagaacctctacctggaatggaagttggatacactttgtga

SEQ ID NO: 356570 - DNA, 105 bp, Homo sapiens
attcctgcggccgcggtctacgaagaccaagtgggcaagtttgattgatggagaaggatgaaactgtgagtgactgctccccacacatagccaacatcgggcgcc

SEQ ID NO: 356571 - DNA, 100 bp, Homo sapiens
tcattttttgcttggtttggaaaaatttcattagagacaagttggatggcttgaggactggtactaaaaggaaacgtgactgggaggccattgccagcag

SEQ ID NO: 356572 - DNA, 83 bp, Homo sapiens
gacatatttttggacctgaaacagaaattctggaacacctatatgggtggcccagttgaaatccttcccttcctctaccttgg

SEQ ID NO: 356573 - DNA, 100 bp, Homo sapiens
aatcagaaggctggtgtgtttaagacccagaaaatatcaagctgatttagatggtgctctactctcggggccagatggtgataggaatgtgaatgcaaat

SEQ ID NO: 356574 - DNA, 96 bp, Homo sapiens
gttttacccacctaaagtggagttgtttttcaagttataccgtttggaacgctatgatgaatgcttagcagtgtatagagatctcgtccgaaactc

SEQ ID NO: 356575 - DNA, 89 bp, Homo sapiens
atttacttgaaatgaaaggagattccaacctacttcaggaccaggaagaaacaggctcctgccagcaccgacagcaacgaaaatgttcc

SEQ ID NO: 356576 - DNA, 90 bp, Homo sapiens
tggacactttgtttcccccatggctcactatgtgcctgatatcatgccaattgaatctgttattgcaagtgctctgtgaagaactgccgc

SEQ ID NO: 356577 - DNA, 75 bp, Homo sapiens
ggaccacggttggtgtcgacggatctctttacaagacgcacccacagggttgtagaaggtgatttagctgccata

SEQ ID NO: 356578 - DNA, 100 bp, Homo sapiens
gtgacggcgcggcggctgctggggggcccggggcctcgcgctggggacgttgcgtctgcagctgcggcgcggtcttgggcgtctttggtactggcttttt

SEQ ID NO: 356579 - DNA, 100 bp, Homo sapiens
cacggcctgcatcgggcccacgctcagggattaaagcctgtggtttccacagaagcaccacctatcatatttgccacaccaactaaactgacctccgatt

SEQ ID NO: 356580 - DNA, 100 bp, Homo sapiens
actgaagatcagtacaaaaatcctaggagaaatctaagagctgtcgtcgagaaatatctgcttgaaaagtctcgcctggtgtctcaggagaaggatgaga

SEQ ID NO: 356581 - DNA, 83 bp, Homo sapiens
gggcgggccagaggtggtagcatgccagtttgttcatatcaacaacttaaaactcatctgcagagcacatcaactagtgcacg

SEQ ID NO: 356582 - DNA, 82 bp, Homo sapiens
cgcccgggaggaaggaacgaggcaaggagctaaagcagcgtgcgttcagccctgggcaaattcaacacccaacagcttcctt

SEQ ID NO: 356583 - DNA, 95 bp, Homo sapiens
cgcctttgcttcatctacagtcaggatgctggatgttcatggagtgagggccagcgggtgaggtaccccaggtaccagacaaggaaaccaaagcc

SEQ ID NO: 356584 - DNA, 75 bp, Homo sapiens
tacagacattagcaacggaagccccgggcctcatcccaggtgatggctcatgaagcaatggaatatgatgttcag

SEQ ID NO: 356585 - DNA, 75 bp, Homo sapiens
agcaagatcaccgtgacatccgaggtgcctttctccaaaagtctgccacacctaccatggggaacacagacttct

SEQ ID NO: 356586 - DNA, 75 bp, Homo sapiens
ccaggcctggcgcggcggcgcccgccagatccgggtcttcctccagcagctcaagggccgcgtagcccgggaggc

SEQ ID NO: 356587 - DNA, 82 bp, Homo sapiens
agcgcagtgaagtggtgagcctttttgtcactgctgtggaggaagatgcagagtcagaagatgaagaggaggaggatgtgaa

SEQ ID NO: 356588 - DNA, 87 bp, Homo sapiens
aagtttcaggaaatgatagaaacaactttagatatggatcagcctcttttggactccagctcttgttctctcgctgaatcccaccgc

SEQ ID NO: 356589 - DNA, 80 bp, Homo sapiens
ggagaagaacaggaccatgctcttccagggtcaaagtcagagtggtggtcatggtcctggaggtggcaagaaggatgaca

SEQ ID NO: 356590 - DNA, 75 bp, Homo sapiens
tgggcttcagcactggcagcccccaggcgtgcaatggaattgagttttgccctggtaaatgggaataatatccga

SEQ ID NO: 356591 - DNA, 100 bp, Homo sapiens
aagaattaaaagatgatgagaaataaggacaaaagccaagaggaggacagttcgctacacagcaatgcatcgaggatattccccgagtccctccggtggc

SEQ ID NO: 356592 - DNA, 90 bp, Homo sapiens
cctggcctccgctcgggcctccacacgggcctccgaagagctgccgcgacgcccggcccgcagggcagagaatctcgatgctggcctgga

SEQ ID NO: 356593 - DNA, 82 bp, Homo sapiens
ctgggggctgcaggcgcgctagcaaaatgatgcttcaacacccaggccaggtctctgcctcggaagtgagtgcttctgccat

SEQ ID NO: 356594 - DNA, 100 bp, Homo sapiens
cgccaggctggggtgtcccagaagagccaggaatcgaaatgcttcatggaacaaccaccctggccttcaaggcacaatccctcgggggccaatgtgtgcc

SEQ ID NO: 356595 - DNA, 100 bp, Homo sapiens
ctgatgcaaaacagtcggtgtgtgctgagcaaatggaagaacaaatatgtctgtcagaccagcatgttttggaaatttgatcttcactcatcatcccaca

SEQ ID NO: 356596 - DNA, 88 bp, Homo sapiens
gcactggcaccggcagcggcggcgcgggcggaggcagcagcaggcggacaggctgcgggaggagctgcaggactgaggtacagaggcc

SEQ ID NO: 356597 - DNA, 75 bp, Homo sapiens
aaagggtgtggccgttttacattggctgttttcctcacattcctcaagcaggatttgtgtgccaagatcctgccc

SEQ ID NO: 356598 - DNA, 98 bp, Homo sapiens
ctggttgtagcattgccagtgactctggaagcagcagtttatctgatatctatcaggtttggacatatttgactcttttccccccaggttgaattgac

SEQ ID NO: 356599 - DNA, 122 bp, Homo sapiens
caactccctccggaggcagcacctcaggaaaggtactggcgcgtgcggctgatcacctcaggaaaggaaatcaaagagcaggaggttgtggacaaagtcatggaaacactggacaatgatgg

SEQ ID NO: 356600 - DNA, 90 bp, Homo sapiens
ctcaacggcagaagcttcaccacaaaagcgaaatgggcacaccacagatttctggttcagtaagggtgagagccaggctccagactatag

SEQ ID NO: 356601 - DNA, 83 bp, Homo sapiens
ctgaagatgatgagacccagagttaccacaatggcaattcagaccctcgaggattcggaagaaccgggactatggtttgtgcc

SEQ ID NO: 356602 - DNA, 72 bp, Homo sapiens
atacagcaagaaagaccatcaagtttaccactttggggccatttggatcacacgatgttttttcaagatttt

SEQ ID NO: 356603 - DNA, 90 bp, Homo sapiens
atttggggaatctatagttaatcttggcgacattgacaatgatggctttgaagggatcatagacggtatttctatgtaaacgaacagtcg

SEQ ID NO: 356604 - DNA, 83 bp, Homo sapiens
ggtgcccgtggaccacaggccctcgttgcccagatgcgtccgacctccgatcatgaacgggcccctgcacccgcggcccctgg

SEQ ID NO: 356605 - DNA, 76 bp, Homo sapiens
gacacgacaccatgcatctcctcggcccctggctcctgctcctggcatgtccctgcatttaggcaatgaagtgttt

SEQ ID NO: 356606 - DNA, 87 bp, Homo sapiens
gtgtcaggatctgaagagctatggtgaaacaccactgaagcattgccaaggttatgaagacagtatggagtttccagaccatagtag

SEQ ID NO: 356607 - DNA, 83 bp, Homo sapiens
agggtctgaggtcatcggggatgtggacgaaggggccgacctcctaggagcggtggtgccccccccgggcacggggccatgta

SEQ ID NO: 356608 - DNA, 83 bp, Homo sapiens
cgcgcgcagggcctgcagcgggagctggacggcgagcgcgagcggcgcgagaaagtgctgtccttattcccagcccagtcaag

SEQ ID NO: 356609 - DNA, 82 bp, Homo sapiens
gtcgggtgatgcccgtgtggcgctgattggatttccctctgtgggtaaggtcaaaatgcagatcttcgtgaaaacccttacc

SEQ ID NO: 356610 - DNA, 50 bp, Homo sapiens
cgtctgcaaagtgtccccggcaagaagcgtcgagggcgaggcccccagca

SEQ ID NO: 356611 - DNA, 100 bp, Homo sapiens
aatattttgctgatatggaaaggcatcgcatcttgtttagatatgctggtcctgaagatgatgctgccattaccttggtggctgtggtgaagtcggaaga

SEQ ID NO: 356612 - DNA, 100 bp, Homo sapiens
ctgcaccggcaggtgagaggcggatctacagacataggaagggaaaaggccgaggcatcagcgtgtgaagaccgcaaagacgatcccgagtacagttgtg

SEQ ID NO: 356613 - DNA, 82 bp, Homo sapiens
ttatgaagttttaaaggatgatgaacgaaggcagagttttaggaatgctgaagtcattacaccaacttcaagttgaaaaccg

SEQ ID NO: 356614 - DNA, 100 bp, Homo sapiens
tttgaattcacttcagagcaatccactactgccagaccagaagagtactattaatcccgtagatgcaatatatcaacctagtcctttggaacctgtgatc

SEQ ID NO: 356615 - DNA, 87 bp, Homo sapiens
ctgccacacattgttcccaatgtgctattggcaaagagagaggtatcatatgtttcttacaaagtggaggtttgtggcagccctgca

SEQ ID NO: 356616 - DNA, 87 bp, Homo sapiens
aggaagccagaagatgggagagacatttttgaagcccagcagcaaagaaacctggataacatcgtcttgcaacaacccagaataggt

SEQ ID NO: 356617 - DNA, 73 bp, Homo sapiens
taccaggcagacatcaccgacttgttaaaagaagggtgtccgcaatgttgccagtgtctgtctgcagattggc

SEQ ID NO: 356618 - DNA, 75 bp, Homo sapiens
agccatcgtggatgagaagatattctgctgtcatggaggtggttgtgtcaaaccgattggtgacatctccatgct

SEQ ID NO: 356619 - DNA, 100 bp, Homo sapiens
cgcgcgcagcccgcccgcccggcgaccagcaagggggatatgagactttctactcggaatatcctgagtgttgcgtggatgtaaaacccatttcacaaga

SEQ ID NO: 356620 - DNA, 100 bp, Homo sapiens
cctgaccacaccgcagttggggatcatgaagagttcaggagctggaaggagccctgccaggttcagagctgccatctgtgtggtgtcagtttggtttcta

SEQ ID NO: 356621 - DNA, 75 bp, Homo sapiens
gaaatcctaatgacagtctccaaattcgcctccatctgtaccatgcgtgagtgcatctccatccacgttggccag

SEQ ID NO: 356622 - DNA, 75 bp, Homo sapiens
gcaaccccgggggcagcagcaactgccggacgccctatcgcaagcaggtctagatgttgatggaatatatcgagt

SEQ ID NO: 356623 - DNA, 88 bp, Homo sapiens
gagagcggctgatcgcagtccggaggtgaggcggaactctgagattagatttcggtaaacgagttcagatgtttgtgacgtgacgaaa

SEQ ID NO: 356624 - DNA, 98 bp, Homo sapiens
ggcttcctatgctatctctcttccgaggttctcacagagttcaggccctctttggattccagtacgatgcatcagaccataccatggcgtggctagga

SEQ ID NO: 356625 - DNA, 98 bp, Homo sapiens
tggagaaagtattctcaacgatgcagtctccattgttctgaccaaattggccatctgcaagcttcccttctccgtggagagcaggaagacagtcatgg

SEQ ID NO: 356626 - DNA, 83 bp, Homo sapiens
ctgccgtctgctcttctgcctcttgatctccgccaccgtcttcaggccagacgagatcatcagatgttcattcatctggatct

SEQ ID NO: 356627 - DNA, 100 bp, Homo sapiens
actaaggcgtctgcgagatgagctgagggctgtggtgcggcaccggcgagccagcgagaacctcatgctttccatcctgcccaagcacgtggctgacgag

SEQ ID NO: 356628 - DNA, 83 bp, Homo sapiens
agtcctgcatcttccaattatcaacaaaccactatctcacatagcccctccagatatgtgtcacaaagatgtctacacggaac

SEQ ID NO: 356629 - DNA, 101 bp, Homo sapiens
tggcacagcaacgaggggacagtgaggacggaagcccaagtggcacaaatgcagaaactccctctggtgatgatttcagcagcgtcaccctttacaccaga

SEQ ID NO: 356630 - DNA, 96 bp, Homo sapiens
ccggcgtgccccaccatgtcagacgcagccgtagacaccagctccgaaatcaccaccaagatgtgaagttcatttccaatccgccctccatggtgg

SEQ ID NO: 356631 - DNA, 100 bp, Homo sapiens
cacgggactcaccatccttcaagtgaacaattgattcaagatggaaaaggtgatgtaaccattacaaatgatggtgctaccattctgaaacaaatgcaag

SEQ ID NO: 356632 - DNA, 116 bp, Homo sapiens
gaggcaggcagccccgggcaggacctcgaacccgcctgcgatggggcgagaaaggtcccactgcagccctccaagcagtgtaggaagaatgatgatggagacacagttgttgtggt

SEQ ID NO: 356633 - DNA, 98 bp, Homo sapiens
gggatgtggaggagacggcgcccggggaggaggagataagtatgctgtgcgcttcatccctcgggagaatggcgtttacctgattgacgtcaagttca

SEQ ID NO: 356634 - DNA, 96 bp, Homo sapiens
gactttgagtggtaccgggatgacactagggaatgaaagctactggttgattttaaagtgcctgggcctcacaggtttggagatgtcccagaataa

SEQ ID NO: 356635 - DNA, 97 bp, Homo sapiens
ggccagccctcctgcgccacccctgaaacaggttctagaaatgcaggcaccgtctgcgtcctgctgtccttccccttcatcttcagcccctgcctgg

SEQ ID NO: 356636 - DNA, 100 bp, Homo sapiens
ggagtgtggactttttgaatttcaagaacagtaaagttggaacacagcagagggtgtgtaataaaatacaggtgtgtgtctggggaagagacttacagaa

SEQ ID NO: 356637 - DNA, 75 bp, Homo sapiens
tattggagaacttaatccacttacgttcagggttatcattcataggtttctgagtcccttcaacatgatcctggg

SEQ ID NO: 356638 - DNA, 100 bp, Homo sapiens
tgtttgggatcccgctgtggtacttctcgcagtccccgcgcgtggtcatccagatctattcggcttagcgactgaagattgacgctgcccgatcgcctcg

SEQ ID NO: 356639 - DNA, 90 bp, Homo sapiens
gcatcttggaggacttgcagtcatacagaggagctggccacgaaatacgagaggagtggaaacaaaatgtcagtcagtgtgcatgagaac

SEQ ID NO: 356640 - DNA, 100 bp, Homo sapiens
ccgagaaccgtcagtttgagccagatggtggatcatccatgccatggagtatgaacttcagatccgtggcggagacaagccagccttggacttgtatcag

SEQ ID NO: 356641 - DNA, 100 bp, Homo sapiens
ggccagcactggctccttgatggaataagacgagttggaagaagacctgatcaacaacttcagggtgaagggaaaataattgatagaagaccagaaaggc

SEQ ID NO: 356642 - DNA, 75 bp, Homo sapiens
gagtgatgtctgtggggccgccggcggcccggcttcaggtctattctggataagcaggttttgtgaagacattta

SEQ ID NO: 356643 - DNA, 101 bp, Homo sapiens
tctacatcgcggtggtctttacctgcttcatcgtgaccaccggcctggtattgggatggtaaacactacacgtgaagagtggtgaaagggaacattgatta

SEQ ID NO: 356644 - DNA, 90 bp, Homo sapiens
ccggagcgggcggctgagacaaaggcgacggaatttgtaagtgtctgggttcgagatcctaggattcagaaggaggacttctggcattct

SEQ ID NO: 356645 - DNA, 100 bp, Homo sapiens
tggaaatcattcaaagtatctgtaaattctctatgcagcggagacccagaccgccggctaaagttctaaaggtcatctttgctgttgccttttgcctgat

SEQ ID NO: 356646 - DNA, 75 bp, Homo sapiens
gctgcataaagtttgtgatacaggtgttcagtggaatcacacttacaaaatttggagggattgtggtgttggctt

SEQ ID NO: 356647 - DNA, 96 bp, Homo sapiens
gcagaaggtttgaggagcattgcttctcatacagtaagaagagcttaaagcagcgcctgggtaagagtaacatccaggcacggttaggccgaccca

SEQ ID NO: 356648 - DNA, 100 bp, Homo sapiens
gaatgatttatagctaagactccaggacacccctgaagccgagaaatgctccaaagacaacaggccctccctctgccctcccgtctgtgagctccctgcc

SEQ ID NO: 356649 - DNA, 90 bp, Homo sapiens
gggccttgggggtgaacctggtggtggaggaaatggaaaccaaagtcaagcatgtgataaagcagcacgagtacacgagacaggattgag

SEQ ID NO: 356650 - DNA, 50 bp, Homo sapiens
gcctacccgggatacggaggagggcggagcgggcactggacacaatgaac

SEQ ID NO: 356651 - DNA, 100 bp, Homo sapiens
gcatctcaacccttgtaccagccttctcatgctacagagcaacgaccacagaaggaaccaattgatcagattcagagcagcccgacggccatggaggctg

SEQ ID NO: 356652 - DNA, 100 bp, Homo sapiens
accatgaactggaccctcgaaggtggaagtagagcttttgtcccggcagagcgggctctctggccgccaggtagagcgttggttccgtcgccgccgcaac

SEQ ID NO: 356653 - DNA, 100 bp, Homo sapiens
tgtgctgtgtgtgaagccagacgtcagcgtctaccggattccgccccgggcctccaaccgcggttacaggacttgccggagcagccttacttgcagcctc

SEQ ID NO: 356654 - DNA, 83 bp, Homo sapiens
cagcaatgctggactgcagtgactatgttctagaaaggatcttgttcgagtagaagccacagtcattgaaaagacagaatcat

SEQ ID NO: 356655 - DNA, 82 bp, Homo sapiens
cccgccgcagcggctgggacgtacggagcccgcaagtcccggcccgagcaaacggggattcagcgtccgatcctttggaaca

SEQ ID NO: 356656 - DNA, 75 bp, Homo sapiens
gatattccagcagctgtcaatgcattccaggaagcagctagtcttttgatctgtgccagttcagaagcaggcgag

SEQ ID NO: 356657 - DNA, 109 bp, Homo sapiens
ctgggaccccggatcttcaccttcatgaacgacagttccaatgtggccatgctgcagaggagaaggcagagcccccccaggctatgaatgccctgatgcggttgaacca

SEQ ID NO: 356658 - DNA, 99 bp, Homo sapiens
agaaagcaggatggactatcattactcctccaacaccaatcatcccagacggaaaatggcaaatgcacgacagcggcctcctgaacatcaccaaggtat

SEQ ID NO: 356659 - DNA, 100 bp, Homo sapiens
agtggcacctgcgcgaagctggccaaagcctgcccagacggctcacctgtgcgggatggaacaaaaggcctcgaaaaagcccaagacagcagaagcagac

SEQ ID NO: 356660 - DNA, 50 bp, Homo sapiens
caaaaatgcacatccggggcattgtcaagtctgttcccagtattctagag

SEQ ID NO: 356661 - DNA, 100 bp, Homo sapiens
gcctggggaccatgggctccaggatcaaaaagacccaaatgggaccagtagtttgccaactggaagttctcttcttcaagaagttgaagtacagaatgag

SEQ ID NO: 356662 - DNA, 82 bp, Homo sapiens
tttcgtggttcacccgctgccgggcaccgaggaccagctcaatgacagatatggctcgtggacagcagaaaattcagtctca

SEQ ID NO: 356663 - DNA, 100 bp, Homo sapiens
cccagtgaccccaggctttttatggctgtgagacacgttaaaatttcaggtactatactggcaattgctggagaagattttgcaattgttgcttctgata

SEQ ID NO: 356664 - DNA, 51 bp, Homo sapiens
gcggcgcacgccttgcccgcccaggtctcggcgcggaagatggccggcggc

SEQ ID NO: 356665 - DNA, 100 bp, Homo sapiens
cgttcagcaaggtatgtgatggcttttaaggagcacgggaagatcacatcctgctgtattccgggttagtttgagagcatccccccggtccttcagaatc

SEQ ID NO: 356666 - DNA, 75 bp, Homo sapiens
gataatggatagcttatttgacaagctgttatctaaggtgcgaaattcatccacacttctctttagtgccttgat

SEQ ID NO: 356667 - DNA, 100 bp, Homo sapiens
ctggaaggtgcgtgtggggctgggtctcggagtgggagacgtggagtgcagatggatttgcagccgctgcaagtgtgtggaagggccgtgttcgtgttgg

SEQ ID NO: 356668 - DNA, 83 bp, Homo sapiens
gaagcatcacaaccagtcttgaaacaaaggcgaaagattacctccaaagatatcgatgtggaagatgtgaaatttgtcatcaa

SEQ ID NO: 356669 - DNA, 101 bp, Homo sapiens
cggccgccggagatgcctgacgcatctgtctgaggagcggtcagtgacgcgatggagcgggcaagggcgtctctggccgagcctctttttgtggaaaacga

SEQ ID NO: 356670 - DNA, 83 bp, Homo sapiens
caggaatctcactctgttaaagctggtctgttctaactgaggtaccgaggagaaggcattgtatatgggacactagaggaggt

SEQ ID NO: 356671 - DNA, 100 bp, Homo sapiens
cgaagattcgaaaagccacttgaagaaaagggtgaaggaggcgaattttcagttgatagggaaattgcaaagaagattctttggcaagttatgaattgat

SEQ ID NO: 356672 - DNA, 75 bp, Homo sapiens
agaaagacaaagacccagtgaacaaatccgggggcaaggccaaaaagaaggttccgaggattctgaagacgacgg

SEQ ID NO: 356673 - DNA, 110 bp, Homo sapiens
ccggacccagagaagaggaaaactctaccggtgcagggtgataaaagaaaatgtggctgaagttacccgaagttcagcttgcagtgtaattcagaagagttaagaccaga

SEQ ID NO: 356674 - DNA, 88 bp, Homo sapiens
ccgcctccctggccggggcgcagttcggaggttcaggaagtgcccaccgcgtgccccgattggagaggggaccttctgcaggttgtgc

SEQ ID NO: 356675 - DNA, 53 bp, Homo sapiens
atcctggaggatcaggtggagcctgatggctggagtgcaatggcgcaatctcg

SEQ ID NO: 356676 - DNA, 114 bp, Homo sapiens
cagaccctggagcctcagttggaagcagccgatccagcctgcggagcctgtggggcaggtgctgcgacaagagactttggacaaaaattgacttgagtaggtgtaaggccattg

SEQ ID NO: 356677 - DNA, 83 bp, Homo sapiens
cgacaagccgctggcagccgcggatctcaccgccgctcagggccccttcccagctgcctgcctgccctagccagctcccaggt

SEQ ID NO: 356678 - DNA, 100 bp, Homo sapiens
cacaatggcggctctgaagagttggctgtcgcgcagcgtaacttcattcttcaggtccgcccgtctgcgcccctcacaggaagccggagggtcgctctga

SEQ ID NO: 356679 - DNA, 96 bp, Homo sapiens
cctcgagaatactgggattacgagtcacatgtggtggaatgggggcaagaaactatattcagtctttgactcagatgccgaagatgaactttgcga

SEQ ID NO: 356680 - DNA, 75 bp, Homo sapiens
tcgtctcctgtgtggcgatggtcttcctgctggggctcatgtttgaggtgagaagccctaccactgcaactggga

SEQ ID NO: 356681 - DNA, 100 bp, Homo sapiens
ctggtgcctctcttttaatcaacatcttggcaagagtcttctggtccctgttgacgccgaagaacagttgagaattgttgaagaacaaagaaagattcat

SEQ ID NO: 356682 - DNA, 80 bp, Homo sapiens
cccgcccggaacatggactctgactcttgcgccgccgccttccacccggaggccagcatccttcagaaaaagcatccccg

SEQ ID NO: 356683 - DNA, 82 bp, Homo sapiens
tgcacctcagagtaaagctgctggacaacaccatggaaatatttgacattgaggtcttccccagggaggtcctgaactacac

SEQ ID NO: 356684 - DNA, 101 bp, Homo sapiens
ggacgtgctggtgtctgagtggatggggacctgcctgctgggccggtgcataaacttctcccgagttccatctcagtaaaagggaagcaggaagaccaaga

SEQ ID NO: 356685 - DNA, 75 bp, Homo sapiens
tgactatttctgaacaacaagcagagttgattcttcaaagaacggtggcagccgaagttaggaagcagatctccg

SEQ ID NO: 356686 - DNA, 73 bp, Homo sapiens
ccaaagcagtttgtgcctgctgtagaaaaggttggctgatcaagatgacactgagtaacccttcagaactaga

SEQ ID NO: 356687 - DNA, 100 bp, Homo sapiens
ggcggtcctggagctgctgcagcggccggggaacgcgcgctgcgcggactgcggcgccccgggagcaggccgggctctcgccatgggtcactgtcgcctc

SEQ ID NO: 356688 - DNA, 100 bp, Homo sapiens
ccctctgggggtcctctctgagtcaaatccagtgcatcatggcagaacaggatgtggaaaacgatcttttggattacgatgaagaggaagagccccaggc

SEQ ID NO: 356689 - DNA, 75 bp, Homo sapiens
atgaagtcgagatctcaaatactggttgtaaagaagaaagttctaccctttctgtcaaaatgaagtgtgatttta

SEQ ID NO: 356690 - DNA, 100 bp, Homo sapiens
gcgtggcgaggagccctgggttcccagtggaacggacacaaccctgtccaggaccacctacaggaggcgcaaccctggggacaacaagcccatctggatg

SEQ ID NO: 356691 - DNA, 98 bp, Homo sapiens
atgtcttgggtcctgctgcctgtactttggctcattgttcaaactcaagactgaggaagcacagcctagcactagcacaagtacacaggccccagccg

SEQ ID NO: 356692 - DNA, 100 bp, Homo sapiens
gcaggtcaccctgaagaccctccagcagcagaccttcaagatagacattgaccccgaggagacgtacttggggtgcattgaagttctgcgctcaatgagg

SEQ ID NO: 356693 - DNA, 100 bp, Homo sapiens
cagtgctttggtctgttgtgctggcttggtgacgctcacagtgctgggaaggaatctatccaaggtcctcagaatggttggaatgaccctccagctttga

SEQ ID NO: 356694 - DNA, 87 bp, Homo sapiens
ttcacactggacactctcgtgcaggatattggtgctggaaaaggcaaatactatgctgtcaattttccaatgagagatggtatagat

SEQ ID NO: 356695 - DNA, 100 bp, Homo sapiens
agccgggcaggtggaagtggtccgatgcctcctgagaaatggtgcccttgttgatgccagagccagggagtcaactgagagttcaaatacaacaattgag

SEQ ID NO: 356696 - DNA, 100 bp, Homo sapiens
tcatgtggccatcttgagtctactctgtcgctcttgtgccctagcaccccgagaaccgtcagtttgagccagatggttatgagtgccagtgagccgcctt

SEQ ID NO: 356697 - DNA, 50 bp, Homo sapiens
gaaggtgctaccatcgtgagagtaagagttatgcccagccaagtcttcag

SEQ ID NO: 356698 - DNA, 100 bp, Homo sapiens
aaagcgtcaagaagaggaggaagccatgcgtaggttgtattccctgaatgactataaaccacccatttcgaaagcgaaaatgacccaaattactaaggca

SEQ ID NO: 356699 - DNA, 50 bp, Homo sapiens
tctcggtggagacgctggatggtacctactgtcaacaacgggaagtggag

SEQ ID NO: 356700 - DNA, 75 bp, Homo sapiens
acatcaagggcggcacgctccggggcatcatcaagagcatgttatcccagatcactgaagctgagatggctgatg

SEQ ID NO: 356701 - DNA, 98 bp, Homo sapiens
cggctggagagcgaggaggagcgggtggccccgcgctgcgcccgccctcgcctcacctggcgcagttgggacccctgattttagcaggatggcccaat

SEQ ID NO: 356702 - DNA, 75 bp, Homo sapiens
cttggactagtttatatgaaatttgtgggtcagataccaggcccaggttccatgatgcccgggcagcacatgcca

SEQ ID NO: 356703 - DNA, 75 bp, Homo sapiens
tacacacagctttatcatcgggagaactgtgtttatgaaactgtagttttgcctttggatgaaagggcatttgag

SEQ ID NO: 356704 - DNA, 98 bp, Homo sapiens
aggaagcctggaacgggggttctggaattacatgaacgacagccttcgcaccgacgtcttcgtgcggttccagccagagagcatcgcctgtgcctgca

SEQ ID NO: 356705 - DNA, 101 bp, Homo sapiens
ccgggcggcacgcacgcggtgcagggtaacatggcggatgcggaagcacaagctccgggtggataaggcagctgctgcagcagcggcactacaagccaaat

SEQ ID NO: 356706 - DNA, 75 bp, Homo sapiens
gcggcgcaggaggcggtggagcgcagagcgggcgagcgcgagtactgatgaaatctccatctccagcattacacc

SEQ ID NO: 356707 - DNA, 75 bp, Homo sapiens
ctttctgctgccgcccgcaagcagaggaaataatgcaaaaggtgtcccaaggctcctgaccagtgaacaaagatt

SEQ ID NO: 356708 - DNA, 102 bp, Homo sapiens
tggagaaagtcgtcttccacttgcacgaaagctttcctaggccaaaaagagtgatatatctggccaagagatgaaccttcttctgatgaagtcgttggatgc

SEQ ID NO: 356709 - DNA, 90 bp, Homo sapiens
cagctggtgttcgtgattgggatcaaccagacggaaaacccgagtggcagcaattacgcttatttggagcagcttgagagcttgtctgcg

SEQ ID NO: 356710 - DNA, 100 bp, Homo sapiens
gcaaggctgacgataaggagacctgctttgccgaggagggcgctgatggacgagaccatgaaggagttgaaggcctacaaatcggaactggaggaacaac

SEQ ID NO: 356711 - DNA, 100 bp, Homo sapiens
tctcgctcggctgcgggaaatcgggctgaagcgactgagtccgcgatggaggtgtcccgacccaggctaagcttgagcatggctgagcaggagcccacag

SEQ ID NO: 356712 - DNA, 50 bp, Homo sapiens
ctgaaattactatcagtgatatacttagggcatactatggaaatattaat

SEQ ID NO: 356713 - DNA, 110 bp, Homo sapiens
aaggctgcgggagcacggcatctccctggctgcctatggcacaattgtgtcggctgagctcacagcagtacttcatcctcctcatcatcacggacggggtcatcagtgac

SEQ ID NO: 356714 - DNA, 82 bp, Homo sapiens
gattcctcctccttggtcgccgcgtccttggctggcgtgccgcatctacaagtgcttgtttactggctccgtgagctcacta

SEQ ID NO: 356715 - DNA, 74 bp, Homo sapiens
gggaactggatgtcagcaagaatgatgccccttggtgtggccactgcaaggctctggcccctgagtatgccaaa

SEQ ID NO: 356716 - DNA, 96 bp, Homo sapiens
aattctagaaggggaagtttttgattctgtgaagccaggactttctgcttttgtagatcaacctaagcagattcacaatttagaagaccgtttgaa

SEQ ID NO: 356717 - DNA, 100 bp, Homo sapiens
aaaaattatttatccaacagctcctcccagagagacaagagagacacctccaacttcgacaaagagttcaccagacagcctgtggaactgacccccactg

SEQ ID NO: 356718 - DNA, 73 bp, Homo sapiens
acagacagccctatgctgtcagtgaattagcagggtgagtcagatgattccattctccgattggccaaggccg

SEQ ID NO: 356719 - DNA, 75 bp, Homo sapiens
actaggcagcggaggagcccgaccgacccgttacagaatgtctgaaggggacagtgtgggagaatccgtccatgg

SEQ ID NO: 356720 - DNA, 80 bp, Homo sapiens
tcgatgatctggcagacctcagctgcctggtccatcactggtgcaagctatatttaacggagatcctgatgaagttcgag

SEQ ID NO: 356721 - DNA, 74 bp, Homo sapiens
cccgaccccgtcccgaccctggccgccccgagcggagcctggagtcttccgtgtgtgctaagatcgtgcagctc

SEQ ID NO: 356722 - DNA, 100 bp, Homo sapiens
tggggtcatgatggctcggtgggcagcgaggggccgggccggctggaggagcacagtgcggattctatataaagatgaagcgcagctgtataaagaagag

SEQ ID NO: 356723 - DNA, 126 bp, Homo sapiens
tttgtctcagagctcggagctggacccccccatcgagtcgctgatccctgaagaccaaataggtgctggagaatctggtaaaagcaccattgtgaagcagatgaggatcctgcatgttaatgggtt

SEQ ID NO: 356724 - DNA, 75 bp, Homo sapiens
caggtgaggaagtggagatagctgagctcactacaggtcatctaatacatgggagaaacatggattttggagtat

SEQ ID NO: 356725 - DNA, 87 bp, Homo sapiens
ccgttgtaacatcagtcacagcataatccagggcctgaaaacccagaatgaacttgtgtccatcccagagatcactgcagatgtcat

SEQ ID NO: 356726 - DNA, 50 bp, Homo sapiens
ggaaaaagcagtaaagccagaggaaggtcgatccagtgtttacaagggaa

SEQ ID NO: 356727 - DNA, 75 bp, Homo sapiens
cagggagaccaggacagaccaagagaataaggaccctgaccgccggggtcctgcttgtcctggggcagccacgag

SEQ ID NO: 356728 - DNA, 90 bp, Homo sapiens
gagagagcgaacgccagggaccctgtgcaggcctgctcctccgtttgcaagtaacagatcaactcctagcaatcatgatcggatacagcg

SEQ ID NO: 356729 - DNA, 110 bp, Homo sapiens
attgtgtcaggcaggaatgctgcccgcctttgcttcatctacagtcaggatgctggatgttcatggagtgagtggaagatagatgataagcctgtaaaaattgacaagtg

SEQ ID NO: 356730 - DNA, 100 bp, Homo sapiens
tgtgatttacctgggtgagacagcttgagccccatcgtggattccaagacatccctgctgagagagccaagatccgtgattctaactgcaactatgaggc

SEQ ID NO: 356731 - DNA, 88 bp, Homo sapiens
ttctccaacacagacaaatttgtcctaatgcaggatgccggctccaggagcagcagtggaggtcgggaacgcctcattgtggagcccc

SEQ ID NO: 356732 - DNA, 82 bp, Homo sapiens
aggaacagggacagcacctcatcccctggatgggggaccacaagatcctcatcgacaggtcatagagctgcccaacatccag

SEQ ID NO: 356733 - DNA, 75 bp, Homo sapiens
cagagacactgccaagcagccttagccctagtgtagagaattcctcagagagagaagactgtaataatggcgaac

SEQ ID NO: 356734 - DNA, 82 bp, Homo sapiens
gcagcccgtatcggggcctttatttctcgtcggcggcgccctgcaccgcgcctcgcaaagtgtttcccattaaacactacca

SEQ ID NO: 356735 - DNA, 83 bp, Homo sapiens
tcctcgcaaagcgtcgagatcccgggcgggggcaccgagggctaccacgttctgcggttaccggtattgtaagaacaagccgt

SEQ ID NO: 356736 - DNA, 82 bp, Homo sapiens
agatgagctcagaggtggtggattcgaatccctacagattggggaccacaaattcagtgcccaccggattgtcttagcagcc

SEQ ID NO: 356737 - DNA, 115 bp, Homo sapiens
atgagatgcaagcacacatattccatctggagactctgtccacctccacagaagccaggagggagcagattaagcgagtaaaagactcggatgatgtacctatggtgctagtggg

SEQ ID NO: 356738 - DNA, 82 bp, Homo sapiens
gtcaaggtggcctaccaggaggccaggggtgtcgccatgtccttttcagtggagagggaactacaggataacagcagttacc

SEQ ID NO: 356739 - DNA, 100 bp, Homo sapiens
cacagcattcctgaaatacatccaggaaagacatggagattctcttaaaaagatgatggatgccaaccagcgctgggatgtgcctgaggcggtggagtgg

SEQ ID NO: 356740 - DNA, 80 bp, Homo sapiens
gccgcagctgcgaggagctcactgcggtcctaaccccgccgcagctcctcggacgcagttcctgcggatggtggatgcct

SEQ ID NO: 356741 - DNA, 90 bp, Homo sapiens
tattattgcacttcttgccacaatgttacagagttcttctcaccactaaatccaatacgagttcatattgatattggagctgatggcaga

SEQ ID NO: 356742 - DNA, 73 bp, Homo sapiens
aaacgccgcaccaggtcttgtagcagcgcctcctcgcacttctaccctagccgggcccagcccccgagcagtg

SEQ ID NO: 356743 - DNA, 73 bp, Homo sapiens
ttgcagctgcttagacgctggatttttttcgggtagtggaaaaccagtctctggatggtcgtcagatccgtgt

SEQ ID NO: 356744 - DNA, 98 bp, Homo sapiens
gtcactcaccttgggcaaagtcacaggaacttttcacacctgagtgcaaattcaaagaatcagtgtttgaaaattattatgtgacatattcatcaatg

SEQ ID NO: 356745 - DNA, 74 bp, Homo sapiens
atgtcgggttattcgagtgaccgagaccgcggccgggaccgagggctatggtgaactaaacggtaatgctggag

SEQ ID NO: 356746 - DNA, 90 bp, Homo sapiens
gaacaccacctccccacccctcaaccagtctcaggcccagatgtatctacgggaagagagaagggcacagttacctaagtatcaacgtaa

SEQ ID NO: 356747 - DNA, 101 bp, Homo sapiens
ccagagtcctggtcattccagtgcagggcaagagggtgaggatacactgaggaggcgactgctggccccaggtaaatgagctggatggtatcccgttgatc

SEQ ID NO: 356748 - DNA, 100 bp, Homo sapiens
gtgtcagaaggccacctcaagaggaacatcgtggtgaagaccgtggagatgcgggatggagaggtgcgggccagtgctattgcccaggacgcggaccaga

SEQ ID NO: 356749 - DNA, 90 bp, Homo sapiens
tcctaactatgctgaatttctttgtcaccgaatattttggatttagtaaaggggacacattaccaggtagcctgtcaaaaatactttgag

SEQ ID NO: 356750 - DNA, 100 bp, Homo sapiens
gagagaatcatgaaagcacaagcgtaccaaacgggcaaggacatctctacaaaatacttatatgaaattgccagaagacatccttacttttatgccccgg

SEQ ID NO: 356751 - DNA, 97 bp, Homo sapiens
gaaagtgttagaaacagtagtggagaatcaagctccagaacctgggtatcaacccagcaaacattggcttcagtaccctgactatggagtctgacaa

SEQ ID NO: 356752 - DNA, 82 bp, Homo sapiens
ccttctggaagctactactacgtggtgcttggaaaggtcagcccaaggccaaccccactgtcactctgttcccgccctcctc

SEQ ID NO: 356753 - DNA, 75 bp, Homo sapiens
ttcacagctgattcctgggagcacatccatttcattggcaaggtcactcctggaagcaaggcggctctagctaat

SEQ ID NO: 356754 - DNA, 90 bp, Homo sapiens
gagaaggccagagattgcctgattcctatggggaaagtaatggaccagtgaaggtgtggggaagcattaaaggactgactgaaggcctgc

SEQ ID NO: 356755 - DNA, 100 bp, Homo sapiens
ctatgcgccaaagaaggagctaataaatattaagggaattagtgaagccaaagctgataaaattctggtcgctgaaaattttgttccccctctgttggat

SEQ ID NO: 356756 - DNA, 74 bp, Homo sapiens
aggctagccacgcaggcggggccctgggctcacggaatttgaagacacccccaccagtcagttgaccattgatg

SEQ ID NO: 356757 - DNA, 100 bp, Homo sapiens
gtaagaacagaaaatcgtcttatagttgagaatttatcctcaagagtcagctggcaggttattcacagtcctatggtggttatgagaatcaaaagcagag

SEQ ID NO: 356758 - DNA, 98 bp, Homo sapiens
ctatggtgcttcagccaagtgaaaggcactatcgagattggaaccacagaaggtaaaattgcggagttgctctctccgggctcagtggatccattgac

SEQ ID NO: 356759 - DNA, 83 bp, Homo sapiens
ccggagtggggcgagccgcggaacccggccgggagccgcgcgaggcggaatggttttagggaagactgttgccggatgacaag

SEQ ID NO: 356760 - DNA, 100 bp, Homo sapiens
gtgaaatttgctagccattgtctcatgaaccatcctgatttagcaaaagacttaacagttctgcttgagatttcaagaattttgaatactggcttagata

SEQ ID NO: 356761 - DNA, 82 bp, Homo sapiens
ctcctacatcgacgaccacgtgcggaggaaggactcctcgctctatatagataacgaaggaggcccaacttcattcaataag

SEQ ID NO: 356762 - DNA, 100 bp, Homo sapiens
tgggacgtggggtccaccggtacagagcgcatcagcgaggaggtggggctgctgcagctccttggggaccccccgccccagcaggtcacccagacggatg

SEQ ID NO: 356763 - DNA, 51 bp, Homo sapiens
gcttatgatggacctaggactgctgatggcaggatggtggctggcaaagtg

SEQ ID NO: 356764 - DNA, 100 bp, Homo sapiens
gaagcctttttggtggcatggtcctcaagaagttcctaaaaggctgcagttcatggagctcgtttcaaagggcaagatctaaaactggcatggaataaac

SEQ ID NO: 356765 - DNA, 83 bp, Homo sapiens
aggctttctttctgagatttcacttccctgtcaactcttcagctcgaggctgaggctgcagtggccacccaggagacatccac

SEQ ID NO: 356766 - DNA, 83 bp, Homo sapiens
ataatgcaattactgagagacaacttgacagtgaacagggatattgtgtcaggcctgaaatacgttcagcacacctacaggac

SEQ ID NO: 356767 - DNA, 100 bp, Homo sapiens
ggaggaggtggcaggcctcggcggcagcataattcgttgtatgaggcgcctggaagaattgcttcgacaaatgtgtcaagcagcaaaagccattggaaac

SEQ ID NO: 356768 - DNA, 82 bp, Homo sapiens
aggacgaggagagacagaagaagctggaggccggcaaagccaagttttcggctttgtgagaaaccttaccatcaaacacgat

SEQ ID NO: 356769 - DNA, 98 bp, Homo sapiens
tggaatgcagcaggagacaaagttggagccagtgcatcagatggttcaaccaaagagagtctacagtatgcattagaaaccttgactatgaatggctg

SEQ ID NO: 356770 - DNA, 98 bp, Homo sapiens
gcggagccctgggctggggcaggagccgtcttcccacacaggttgagagaggaggggatccaattgcctgtgaggaggacacggctcctgggtggacc

SEQ ID NO: 356771 - DNA, 75 bp, Homo sapiens
ccgatttaaagctgagctgcgaggaaaatggcggcgggagaaattatccagcaagctttcattaacgtggccaaa

SEQ ID NO: 356772 - DNA, 83 bp, Homo sapiens
cctcagttggaagcagccgatccagcctgcggagcctgtggggcaggttgtttgatgtgtgcacagtgtcacgaacagacaga

SEQ ID NO: 356773 - DNA, 50 bp, Homo sapiens
ccgtcatattccacccattactaaggaaggatgccaattctgcgcttctc

SEQ ID NO: 356774 - DNA, 95 bp, Homo sapiens
ccattcaggctccattcagtcctttaaacagcaaaaaggaaggatttgatgccctggatccctttattcccatcctggtttccaactataaccca

SEQ ID NO: 356775 - DNA, 100 bp, Homo sapiens
ggaggctgtgcgggccccgctccgcttcgaatggttgccgaggtactgtctgaatgccgcctgctcgcctacatatcccaggtgcccacgcagatgtcct

SEQ ID NO: 356776 - DNA, 74 bp, Homo sapiens
ttagttcagtgcagtgtctgacttgtgacaggcctcacagaatgaggttcctgcggcacccctggaagaactgg

SEQ ID NO: 356777 - DNA, 100 bp, Homo sapiens
gtcttaacatgcttcaaataaatcaggcatggctttgggaagaagacaagaatttgagatctggcgtgaggaaatatggagagggaaactggtctaaaat

SEQ ID NO: 356778 - DNA, 74 bp, Homo sapiens
ggaaggaaaaccgcgcagagagaccatggtgaatccgggcagcagctcgcagccgcccccggtgacggccggct

SEQ ID NO: 356779 - DNA, 85 bp, Homo sapiens
cccagctgggggagcagtgctggaccgcgcgcatccatatttctccctcgagtggctgggaaacttggcaagagaccagaggacc

SEQ ID NO: 356780 - DNA, 101 bp, Homo sapiens
tcaagcgattctcccgcctcagcctcccgagtagccgggattatagggtaatacctgcctggagaatggatctttcttactgaactttacaggctgtgcag

SEQ ID NO: 356781 - DNA, 50 bp, Homo sapiens
tgttccctgtctcacgccatcactctgattggagctggagtgagccttcc

SEQ ID NO: 356782 - DNA, 82 bp, Homo sapiens
tgtactgatgggcagcttcatgtcaggcaaatcctgcatcctgaggcttccaagaagtacaagccagctgccatgttgtgag

SEQ ID NO: 356783 - DNA, 75 bp, Homo sapiens
caacatccagaacttccagctgcccccaggtggcagaactggtgaagccattgtagatgctgcgctgagtgctct

SEQ ID NO: 356784 - DNA, 74 bp, Homo sapiens
acagattcgcagtggtcgcttcttctccttgtgcctggaagcagcgagccctttatgacgcaaggacagatgcc

SEQ ID NO: 356785 - DNA, 100 bp, Homo sapiens
cactgctcactttgctaatgtgacacagattgaagatgctgtctcctggccagccaagtctcgggatggtgaacgtactgtctattgcaacgtacacaag

SEQ ID NO: 356786 - DNA, 100 bp, Homo sapiens
tcaacttctgccgacaacttttctcctgatttgagggtcttgctcagtgtgcagaactctgctggcagctgagaggggaagccggaaagaggcaagttcc

SEQ ID NO: 356787 - DNA, 90 bp, Homo sapiens
gagcccatggaatcggtcctggaggacaggcttctgactttggccaggtaggacttgacttagaggcagaatttgaaaaagatctcaaag

SEQ ID NO: 356788 - DNA, 91 bp, Homo sapiens
gcccgcgaggagccgccgcgcgcccgcgccctccgcgcgacgccagctggagatggagctgaagatgctgaagtctcagtccagctctgcc

SEQ ID NO: 356789 - DNA, 100 bp, Homo sapiens
cttcccagcagccttcagtgcaggcagccattccccagacccagcttatgctagctggaggacagataactggggcattgaatgccccagaggagcccga

SEQ ID NO: 356790 - DNA, 100 bp, Homo sapiens
ccaggatggccgggacgaggccaattgccatgtgatgtttactgggacagcagatggccgggtcgtaaaacttgaaaatggtgaaatagagaccattgcc

SEQ ID NO: 356791 - DNA, 96 bp, Homo sapiens
gaattcgccgtgcccgagaatagctccgtccagcaggtttggtgcacctcgatttggaggaagtagggcagggcccttatctggaaagaagtttgg

SEQ ID NO: 356792 - DNA, 96 bp, Homo sapiens
atgatcttgatctcaacagtctcaggtgatttgtggagctatgatttcttcagtggtgaatttgtggtgtcacctgaaccagacacaagtgtccac

SEQ ID NO: 356793 - DNA, 75 bp, Homo sapiens
aagttgatggaattacactgtgatacgactgactgctaatagctcgtcagcttgctaaaatccatgctattcatg

SEQ ID NO: 356794 - DNA, 129 bp, Homo sapiens
gatgatcgaagccccttcccaggtcctcaactttgaagagatcgactacaaggagatcgaggtggaagagactaatgagaacatggagatcaccagcgcactgcagtcggagcagcacgtcaagaggga

SEQ ID NO: 356795 - DNA, 135 bp, Homo sapiens
gctgggggtgctgggcgacctgcaggcagcaccggaggcccaggtctccgtgcagcccaacttccagcaggacaagggccaattcctgtccccccagcagcatggcatcgtgtgctgaaccctctgagccctctg

SEQ ID NO: 356796 - DNA, 100 bp, Homo sapiens
agcagggtggagatcgtggctgccatgcgccggatacgggacttacaccagaggatcgataagttccgtttcaccccacctttggaggacagctgcttcc

SEQ ID NO: 356797 - DNA, 74 bp, Homo sapiens
gtgtttggagaactgctggacatgcccaatgttagagagactgaggctgatgtgaatccaaaggcctatcccct

SEQ ID NO: 356798 - DNA, 100 bp, Homo sapiens
gccgccgatattcaccaagcgcttcgctacaaggaagacagagatgtcaatgaccccatgcccaaccgaggcggcaatggactagctcctggggaggaca

SEQ ID NO: 356799 - DNA, 100 bp, Homo sapiens
cctttttcgtttttcggatgatgccttcaatactacctttatttccaccatagaacaagttgaaatcatcgcagaaggataaagttcgtcagtttatgat

SEQ ID NO: 356800 - DNA, 90 bp, Homo sapiens
tcaggctgaggccgagaagcagtacgaagactcctgccgcgtataccaggcatccagccccgatgagcatttacagccgaacaataccag

SEQ ID NO: 356801 - DNA, 75 bp, Homo sapiens
gctttccgtgccaggacaaaaagaccaaactgcagctggaatacccagtacagttctgcttactacacttcaaga

SEQ ID NO: 356802 - DNA, 83 bp, Homo sapiens
cgcaagatggtctccttccacggggacgtgaccgtctacctcttcgaccaggacacacacctcctctacgtactggcagctgc

SEQ ID NO: 356803 - DNA, 74 bp, Homo sapiens
cgccccgttccccgagctgtgcaggaagcatgagtgggaaaagcatgggacctgcgccgcccaggtggatgcgc

SEQ ID NO: 356804 - DNA, 123 bp, Homo sapiens
tgggttcttggtctcactgacttcaagaatgaagccacggacccttgcggaccccagagcactttagcccacagtggtgaagcttgctgaatatcaagttcttactgcagagattggtgattc

SEQ ID NO: 356805 - DNA, 82 bp, Homo sapiens
gccccctaaagcggaaccggatcaccgagggcatttacggcagaggctgaggctgcagtggccacccaggagacatccaccg

SEQ ID NO: 356806 - DNA, 75 bp, Homo sapiens
cttgctgtggcgcttcaagcaactgaggcaggacagcaccacggtgtgacgaaatgcaacatcacgtgcagcaag

SEQ ID NO: 356807 - DNA, 89 bp, Homo sapiens
caaccttgtgggatgtgaaaactctgttactgaagttggaaaatggatataccttatttgattatgatgttggactgaatgatataatt

SEQ ID NO: 356808 - DNA, 82 bp, Homo sapiens
gaaaattgagacggagctaagagatatctgcaatgatgtactgagagctagcaatctagagaatagtacctatgacctgtac

SEQ ID NO: 356809 - DNA, 83 bp, Homo sapiens
catggaatcaacaaggatttggagtagagtggatttcattgactgggtagacaacatgtggccaaggcacttgaaggaaagcc

SEQ ID NO: 356810 - DNA, 100 bp, Homo sapiens
tccccggtgcagtcgggcctgcccggcatgcagatgaatatttcccccgcttccctcgccagtctttatgaggaagacttcaagcaggacatggcagccc

SEQ ID NO: 356811 - DNA, 74 bp, Homo sapiens
gcacagaaactgttattcgggcattctacggagggagatattcttgagctcctgtgtcctaccgacctctccac

SEQ ID NO: 356812 - DNA, 87 bp, Homo sapiens
aaattgcgctggaccgtcgccttgctcctcgccgcggcggggactgcaggtactctcgcctccgccagtggaacaccctctatctgt

SEQ ID NO: 356813 - DNA, 75 bp, Homo sapiens
gcaagaactggctcaagaaatttgcctcgaaaaccaagtcacaaggcacttaaagcattgttgaggtcattggta

SEQ ID NO: 356814 - DNA, 100 bp, Homo sapiens
cttgctgtggcatttggacatgctttagagagaggacaggcgacactaacaggtgaagatctcgggagaccatgactaagaaaagaattgctgtgattgg

SEQ ID NO: 356815 - DNA, 120 bp, Homo sapiens
gggaacaatggccacagtgtcccaccatcaaagagatcagagaccagggctcctgtggctcctgctggcaagacactaagggcgactaccagaaagcgctgctgtacctgtgtggtggag

SEQ ID NO: 356816 - DNA, 100 bp, Homo sapiens
ccgccgccgcggacaatgagagatgcgtctgttactagagtggagagtctaccttcgtctcacatgtgccacaaaggatggcatggcccgggagtgcccc

SEQ ID NO: 356817 - DNA, 101 bp, Homo sapiens
caacctggagctctacgcctcctacgtttacctgtccatggtatcctccatgaaatgtgggatccttccaatttctcaagagtctcttcttctgggagatg

SEQ ID NO: 356818 - DNA, 101 bp, Homo sapiens
gggtaggcaagacctgcctcctgttccgcttctcagaggacgccttcaacaccaccttcatctccaccatcggtgttccagtcaaaagacgtacctgaaaa

SEQ ID NO: 356819 - DNA, 101 bp, Homo sapiens
attcttcctgctcatcgtggtgcttaccaccctggctgctctgctgggggtcataatattggaagctctagaggacaaaatcccagtccttggcacaaact

SEQ ID NO: 356820 - DNA, 95 bp, Homo sapiens
ctctggcggacgctcaagtacctgtggaccgtgtgctgccactgcgggggcaagacgaagttttcagatgcttcaagtgttgtgaacagagactt

SEQ ID NO: 356821 - DNA, 90 bp, Homo sapiens
cccagccccacagaccagcccagcattcaggtgctgccatgcttactgagtcccttctctctccttctctatcatcttccatcagtgagt

SEQ ID NO: 356822 - DNA, 82 bp, Homo sapiens
gctggcagccgcggatctcaccgccgctcaggggagcatttcctgaagacgtagtcatgcagcacgtcagcagctcccagag

SEQ ID NO: 356823 - DNA, 80 bp, Homo sapiens
ggatcacaaccggaaccgcaggggtctgtcaccgctggaagaggctggtggacgaccggtggctgtggcgacatgtcgac

SEQ ID NO: 356824 - DNA, 90 bp, Homo sapiens
gtcaagttcttcgtggagcctcatctcatcttacaggagcagactagtcatgatgctatggactcctactacgactacatatgggatgtt

SEQ ID NO: 356825 - DNA, 100 bp, Homo sapiens
gtgacagcaagtccattcagaaacaggaattccaggcttggactggagtgaagccctcaagatccacaaagacaaaaccagcccgagtcatcacaaccca

SEQ ID NO: 356826 - DNA, 75 bp, Homo sapiens
aagcctccgctcctccttcctgcaccctggggctcctgaaactcacatgggaaaggtggcccagacagcgtgtat

SEQ ID NO: 356827 - DNA, 100 bp, Homo sapiens
gtcagagggcgcagtccgcattcaaaggacaggaagatgtcacccaagcgcatagctaaaagaaggtcccccccagcagatgccatccccaaaagcaaga

SEQ ID NO: 356828 - DNA, 145 bp, Homo sapiens
gaacacattaggcagtcgccatttttggtaacattacattatgctttccagacagaaaccaaacttcatctcattttagcactggttgccaccaacattctcttggttgatgagatcatgcgagctggaatcttctctgaaaggt

SEQ ID NO: 356829 - DNA, 75 bp, Homo sapiens
tttcagcagttggcacacatggttaaggaacaggaggaaaccattcagagatttctaccactccaaacgccggct

SEQ ID NO: 356830 - DNA, 97 bp, Homo sapiens
gggctgctccccaggacctgagcaggaacctggagttttcaggacttgatagacgacctgaagtcagaactgagtggcaacttcgagcaggtgattg

SEQ ID NO: 356831 - DNA, 100 bp, Homo sapiens
ttactggagttgcaagtgggagcactggaagtacgggcagttgcagtgttggagctaaaaccaaccctggaatggtccccagccatggattcagtcccag

SEQ ID NO: 356832 - DNA, 80 bp, Homo sapiens
attggcaggcctgaggtccttgttggctgcttgctggagaggaagctgaagagggaactacccttttcattccgatcaat

SEQ ID NO: 356833 - DNA, 82 bp, Homo sapiens
agaggctaagaatattaatggccagatctaggctgagatatttggcaaagttcttcaaagtgatgaatatgaagaagttgaa

SEQ ID NO: 356834 - DNA, 75 bp, Homo sapiens
ctgtgccgggcggagagaactcagcgaggattctgagggggattcccgaagtcttccgttttctgagaatgtgag

SEQ ID NO: 356835 - DNA, 100 bp, Homo sapiens
aggagcaggtgcagagcactgcgctgtcagcgatagcccagtggatggccattccagcaatggctgccatccggaagaaactggtgattgttggtgatgg

SEQ ID NO: 356836 - DNA, 75 bp, Homo sapiens
ggctgctcccatcattgatgtggtgcgatcggttcggctttccagtttggcagcagcactacaaatttcaacttc

SEQ ID NO: 356837 - DNA, 102 bp, Homo sapiens
tggctctatgtggaccctgcggaatccaccggcgcagtttcatctagcgactgacaatgcagatcttcgtgaagactctgactggtaagaccatcaccctcg

SEQ ID NO: 356838 - DNA, 80 bp, Homo sapiens
gatctccatgtcctgttgtggggcttttacagcctttgggtccaggtgcaggtacagcagtctccgcaacaggtctcggc

SEQ ID NO: 356839 - DNA, 100 bp, Homo sapiens
gcggaggctgcactgagcgggacctgcgagcagcgcgggcggcagcccgggggaagcgattctgtttctggcgtctgcatacgcaagtccccaactcgct

SEQ ID NO: 356840 - DNA, 83 bp, Homo sapiens
caaagatccccgttcctggagattctgattgaggtaaggggcctggataccaagaagtgactgctcatctaatccataaagct

SEQ ID NO: 356841 - DNA, 82 bp, Homo sapiens
gaacgctggactctccctttgcagaggcttcgtgacggagttatcagagacattgagaggcaaattcggaaaaaagaaaaca

SEQ ID NO: 356842 - DNA, 100 bp, Homo sapiens
aataaaagtatccctctccatgaaggttgtcaatcaagggactgggaaagaccttgatcccaacaatgttatcattgagattcacaagacagtgatgatg

SEQ ID NO: 356843 - DNA, 100 bp, Homo sapiens
tttgggacgaggagaggatccaggaggaggagttgcagagtcggatgtcatggatcagaatttgttaaatttcctcccagaacaagaacattcagaagtt

SEQ ID NO: 356844 - DNA, 100 bp, Homo sapiens
taatagcccttgaacagctatgcatgctgcttttgatgtctgacaacgtggatcgttgttttgaaacaaatgcactcggtgatggaaagagagccactat

SEQ ID NO: 356845 - DNA, 74 bp, Homo sapiens
caaaaataaggaaaccagtgttgccattgaggatgatcgctgcaagatccctttattcatgctaatgtccttta

SEQ ID NO: 356846 - DNA, 101 bp, Homo sapiens
cggaaacaaagttattttgctcggaaggaaaatcacctcggcagtgtttgaaggaaggatactgcaactctttgaagtacgcattttttgagtgtaaaaga

SEQ ID NO: 356847 - DNA, 89 bp, Homo sapiens
agagagaatgagccagagggacacgctggtgcatctgtttgccggaggttgaccacgttgttcctgagcctgggacaagcctgctcgct

SEQ ID NO: 356848 - DNA, 100 bp, Homo sapiens
gcgagacttcctgaagaaagtccacgagaccgtggagcgtggtgggaagcagctggaccccgagaacacaggcttcatcggtgcggacaccttcactggc

SEQ ID NO: 356849 - DNA, 103 bp, Homo sapiens
acagcactgccaaatagcagaagaataccatgaggtcaaaaaggaaatcaccctgcttgagcaaaggaaagacatattgatgtctttgactgttggaaacctt

SEQ ID NO: 356850 - DNA, 100 bp, Homo sapiens
tgtgattgttctatgacctcttattctggaaaccagtgcaatgatcgtgatggcttggacaacagtgtagcttcccccagcacaggtgacgatgatgacc

SEQ ID NO: 356851 - DNA, 100 bp, Homo sapiens
aatgctgtttgtattccagagactaggatggagctgtagttacaccctccagacctttaggggacaccctaacagtcagtgaggcagaaacagatcctgg

SEQ ID NO: 356852 - DNA, 50 bp, Homo sapiens
gataccatgtcctgtttctcggaacagatgttgatgttagtgaagattca

SEQ ID NO: 356853 - DNA, 75 bp, Homo sapiens
aaaagggaagctgaaaccaactcagaatgcttctgagaagccaatggagatcttcgtggatgatgagacgaagtt

SEQ ID NO: 356854 - DNA, 75 bp, Homo sapiens
agagatacagcaaaagagtctacatagaccagcatctcagacatgtcgaaaaagatgttttgatccctaaaataa

SEQ ID NO: 356855 - DNA, 100 bp, Homo sapiens
cgctatgccaagaagcgaaatgtgctcattggccattcctacggtactactataattccttgacccagcagtacctttactgggatggggaaaaagagac

SEQ ID NO: 356856 - DNA, 115 bp, Homo sapiens
ccgcgcgcagggcctgcagcgggagctggacggcgagcgcgagcggcgcgagaaaaggttgacggatatattcagacgttacgacacggatcaggacggctggattcaggtgtcg

SEQ ID NO: 356857 - DNA, 83 bp, Homo sapiens
tccgggcgctcgagacttaccagagccacaagattgttgccagcaaaggaggttttgaaatggtcaccaaagagaagaaatgg

SEQ ID NO: 356858 - DNA, 89 bp, Homo sapiens
tcaggttctaaatggcttctaagaagttgggtgcagattttcatggatgctgacagacagcaccaagaagtaattgcaatttatcggac

SEQ ID NO: 356859 - DNA, 90 bp, Homo sapiens
agaagcaatcactcagtttcttcctaactgtgatccagatgatcctcacagccctcaaggacgttttgttctgaagactctcatattcag

SEQ ID NO: 356860 - DNA, 100 bp, Homo sapiens
gacactgtgagggaacaagaccagagtttcacgaaggccggggtcagaaagaaaaaagagggtcccggggccgaggcaggaggacatcagaggaagacac

SEQ ID NO: 356861 - DNA, 100 bp, Homo sapiens
caggcagaaagctttgtcctcacaagttctgatgcttagcagtgtctgcaaaaacgaatcttttcctacaacctgttaactgactggactgttggtaaca

SEQ ID NO: 356862 - DNA, 75 bp, Homo sapiens
cgttggtccgcgcgttgctgcgttgtgaggggtgtcagctcagacacgtcaagttcttgaggagctgactgagtt

SEQ ID NO: 356863 - DNA, 83 bp, Homo sapiens
gttgccacatcttctggttgctggatttgacccactgattctactgtgcaattcttgcggttgtggaacaggaaatgaaaaag

SEQ ID NO: 356864 - DNA, 104 bp, Homo sapiens
tctactacagggacaagtttcagagctgccactcagatccataatgagatggcatcaacatcagataaaggtgcccaaggaagaaatgacaagaaagattctca

SEQ ID NO: 356865 - DNA, 100 bp, Homo sapiens
cgctcggatcccttggcgtacacggtgtgcaaggggagtcgtggcgtcgtctgcgaccgctgccttctcgggtggagccccctgagctgcccgctgatct

SEQ ID NO: 356866 - DNA, 98 bp, Homo sapiens
aggaatctcactctgttaaagctggtctgttctaactgaggttaatgttgaagaaggaaaatgcggaagtcgtcatttgacaagttttataaatgagt

SEQ ID NO: 356867 - DNA, 82 bp, Homo sapiens
cctggcctgggcgctccggtggcggcggagattcctggtcgggtggcttccagtggtcttcagtctgtcgtgcaccgatgag

SEQ ID NO: 356868 - DNA, 100 bp, Homo sapiens
ccattcgccatctatcacgcacacagaaccctggccaggatcatgaagggcgattgaaaagtattgctgacagacagaacgccttggaggctgagtggag

SEQ ID NO: 356869 - DNA, 97 bp, Homo sapiens
cagccaagctcttcagtcccccgccctccacctgccagggaggctccgggcgttgtacctgccaccacgggggcctctacccgctgcccttgctcaa

SEQ ID NO: 356870 - DNA, 50 bp, Homo sapiens
cttgaagctttacagttaatttagaaaagagtagttgaacagctacggaa

SEQ ID NO: 356871 - DNA, 50 bp, Homo sapiens
ggactgcagtgctgcagtgccagttcgtgccctcgtgaggctggcatgca

SEQ ID NO: 356872 - DNA, 124 bp, Homo sapiens
acaccttttatagaagtacgtccaggaatagaagtgacctgctttttcgcaaattctggaaaccaaaatggaggaaatgatgataagactaagaatgctgagaggaactatttaaatgttttac

SEQ ID NO: 356873 - DNA, 75 bp, Homo sapiens
acgtgtctgcactcgctttcctcggattcccggatgtgggacagtggtgattatcctcttaccatgcctggacct

SEQ ID NO: 356874 - DNA, 100 bp, Homo sapiens
tggggccagggaagaccacagctgagccccagcaccagtcacctccagtgccctataaggactgccaggcaataatgaaggttcttttactgaaggatgc

SEQ ID NO: 356875 - DNA, 96 bp, Homo sapiens
ccccagacggaaagagctacttgctgagacagtcattttgtttactcattcagccctgttgcaggtcccaataaactcttcataaggttgacagaa

SEQ ID NO: 356876 - DNA, 100 bp, Homo sapiens
caagtccgtgctgtttgtgtgtctgggaatagccaggccagaagaaggaaggcctgtggtgagtgggacaggaaatgacatcaccaccccaccgaacaag

SEQ ID NO: 356877 - DNA, 99 bp, Homo sapiens
tagtgctggttcagtggagacagaggcatggccgatcctacaatgatgccctaaatgagaccagggaatcagagacaaagctgaaggagctcccaggag

SEQ ID NO: 356878 - DNA, 100 bp, Homo sapiens
caggatacagggcacctcctcctccagcccatgaagcttatgaagaatatgtttacgcaaatggcatccggaacattgaccttcactatattgttcgtaa

SEQ ID NO: 356879 - DNA, 100 bp, Homo sapiens
cggaggaggacgaggactacgtgccgtcgggactccctggaggaaaagcggaagcggcagcggtctgaacgcctggaacggattttccaacttagtgagg

SEQ ID NO: 356880 - DNA, 101 bp, Homo sapiens
aagaaacttttgggaaacagtacaaacaaactataggactggatttctttttgagaaggataacattgccaggccctcgggaccaaggatcacgtcatgac

SEQ ID NO: 356881 - DNA, 76 bp, Homo sapiens
gtacaatgacatcaaggatgtggggcagatgctgatgggcaaactagcagcagctgtcgattcggcagaccgaagt

SEQ ID NO: 356882 - DNA, 74 bp, Homo sapiens
cagaaagatggatttttgcatgagacgcttctggacaggcaaaccacagggaagctggaaaagaagcggccctg

SEQ ID NO: 356883 - DNA, 74 bp, Homo sapiens
gtttttagatccaaacaactattccgcaaactatactggtttctacgataaagacagttcagggtggagttcta

SEQ ID NO: 356884 - DNA, 100 bp, Homo sapiens
ctcccaagtagctggaactacagggcagctgcaatgactctccgcacggtattattgtcattgcaagcactattggcagctgcagagccagatgatccac

SEQ ID NO: 356885 - DNA, 101 bp, Homo sapiens
tggatgaaatagatctctcggctctgaggtgtaaacaggaacatcgataagtagtgtaaaaacttgcacaatgaaatccgaagccaaggatggagaggagg

SEQ ID NO: 356886 - DNA, 75 bp, Homo sapiens
tttaaaacttcgccagaatttgcagaaataaaacgtcttcaagaagccaataaggcagctcggaaggaaagacag

SEQ ID NO: 356887 - DNA, 100 bp, Homo sapiens
ctggccgctcagaagcgcgaacagagactgcgcaaattccgggagctgcacctgatgcgggactcacttggatagctcactcaaggtaacaaaaactcac

SEQ ID NO: 356888 - DNA, 75 bp, Homo sapiens
gatgaacatgggtggcatccaacacatcaaggtttttggaatccttaggcttccacgtgtggaaagcctgagcta

SEQ ID NO: 356889 - DNA, 134 bp, Homo sapiens
cgctactgtgtccaacaatgtgccgggttccgatttcagcatcggggcagacaccgccctgaacactatcaccgacgggttatggttttgtgaaattcacagatgaactggaacagaagcgagccctgacggag

SEQ ID NO: 356890 - DNA, 82 bp, Homo sapiens
cttcactccagtgcctccgacgcctcctgatgggagaagtggtgccacatgacccaggaggagcgcgacgacagcctccggt

SEQ ID NO: 356891 - DNA, 82 bp, Homo sapiens
cagtttagcagaacagcctccgcggctccggggagaaggaactgtggctgcaccatctgtcttcatcttcccgccatctgat

SEQ ID NO: 356892 - DNA, 82 bp, Homo sapiens
ccgccggccccaaagacgctaaacgtgccctactctgccccgggggagaggagaacggcccttccagtgcaatcagtgcggg

SEQ ID NO: 356893 - DNA, 50 bp, Homo sapiens
ccgggacgtcagtcctggaggaggcgaggcatatgtaagtggaactcaga

SEQ ID NO: 356894 - DNA, 114 bp, Homo sapiens
gagcaacagctccccacactgcaccatgagctcagttggctgcaggagcagctagcacagggagtgcatccgccccaacccttttccccctcgtctcctgtgagaattccccgt

SEQ ID NO: 356895 - DNA, 87 bp, Homo sapiens
cggccaagccatgctcggccccaggtattgttgcagcatctggcagtgagactgaggatgaggacagcatggacattcccttggacc

SEQ ID NO: 356896 - DNA, 98 bp, Homo sapiens
gctgcccacacctcttcccggcccctgaagttggcactgcagcagacagctccctgggcaccaggcagctaacagcatcccagccatcactcttccac

SEQ ID NO: 356897 - DNA, 100 bp, Homo sapiens
gaactggctaccgttcggactatttgtagtcatgtacagaacatgatcaagggtgttacactgttgtgggatatgaccccagtcgtgtcttgatgactct

SEQ ID NO: 356898 - DNA, 100 bp, Homo sapiens
aagaatctcagcagatggtcttagatatagaggatctagataatattcaaactcctgagaggctcacttgtgcatttttggcctgcaaagtagatgaatt

SEQ ID NO: 356899 - DNA, 74 bp, Homo sapiens
tgacccgcttcaagaagcctgctgagttcaccacaggatgctggtggactgtgtgcccctggtggaggtggacg

SEQ ID NO: 356900 - DNA, 109 bp, Homo sapiens
tgcggctctcggtgccctctccttttcgtttccggaaacatggtgagaagccctaccactgcaactgggacggctgcggctggaagtttgcgcgctcagacgagctcac

SEQ ID NO: 356901 - DNA, 83 bp, Homo sapiens
cgccgattcctcctccttggtcgccgcgtccttggctggcgtgtggacgacatccttggagaaggcagcgacgacagcgacag

SEQ ID NO: 356902 - DNA, 83 bp, Homo sapiens
ctctaacatgtcagcgttattgtaatgcaaggatttatcaaagatgttcatgaagactcccttacagttgtttttgaaaataa

SEQ ID NO: 356903 - DNA, 50 bp, Homo sapiens
ccgctcccgggcggccgcgggcggtgaacagagtatctgccaagcccggg

SEQ ID NO: 356904 - DNA, 78 bp, Homo sapiens
aatggggcacactcacagattgtgtggtaatgagagatccaaacaccaagcgctccaggggctttgggtttgtcacat

SEQ ID NO: 356905 - DNA, 76 bp, Homo sapiens
cattggtctaaagtctttccaaaaggtcaaggttcacaagaaaactttagaaactgttcctttggagaggaaaaag

SEQ ID NO: 356906 - DNA, 101 bp, Homo sapiens
gttggatcggatccttctggagtccgtgtgccagcaacagagctgggtccgggtgtacgccccatctgctttgatatgattgaagaagcatacatgacaaa

SEQ ID NO: 356907 - DNA, 98 bp, Homo sapiens
aaaggaggcagtttccctggtgaaaggatcctacaagaccctcaggctggtagtgcgcaggttcttgctggtgtgaaatgactgagtacaaactggtg

SEQ ID NO: 356908 - DNA, 97 bp, Homo sapiens
gactgactctgacaacgaaaacaaatcagatgatgagaacgtgccctctggtggtcagaagatgctgtgctgtctcgttaggatgaatggattaaaa

SEQ ID NO: 356909 - DNA, 83 bp, Homo sapiens
gagcagaggacccggcgggcggcctcgcgggtcagggaaagcaggcaggatgggagagtcgccgatagaaccacctcttccct

SEQ ID NO: 356910 - DNA, 90 bp, Homo sapiens
ggccccccgacggcggaggcgcccgcgggtcccctacagccaaggaggccactgtctgcagctcccgtgaagatgtccactccagaccca

SEQ ID NO: 356911 - DNA, 75 bp, Homo sapiens
taatgcaaaagaccttctacaggacctgaaggagaagatacccattatcagaaaaaaaaattatgcactatatgt

SEQ ID NO: 356912 - DNA, 73 bp, Homo sapiens
tagtggagcgcaggggaggcagaagtcatgacaggcgaggtgggttctgagatggagtctcccaggcgggaat

SEQ ID NO: 356913 - DNA, 83 bp, Homo sapiens
gtgacttcatcgacaacctggacagctttaatgcgcccaaatgtgggcggggcaaaccggctcttgtgcgacggcacacgctg

SEQ ID NO: 356914 - DNA, 101 bp, Homo sapiens
agccggggcccccgccgccgccggagcggtgaatctggattgggaaagtcgacattaatcaactcattattcctcacagatttgtattctccagagtatcc

SEQ ID NO: 356915 - DNA, 51 bp, Homo sapiens
cggtttgacgcacacggcaccaaactagttatgcccagccaagtcttcagt

SEQ ID NO: 356916 - DNA, 100 bp, Homo sapiens
attcggatgactcggagcccgggggcccccctgctcctcggcgtcggaccccccgagaaaatgaacagtccacaggaagaggttgaactaaagaagttga

SEQ ID NO: 356917 - DNA, 75 bp, Homo sapiens
ggctgcaggctctcggctgcagcgctgggtacaccaggggttggaaaaaccacactaggcaaagaacttgcgtca

SEQ ID NO: 356918 - DNA, 97 bp, Homo sapiens
tgggacgctccgtggatgaggctctgcggctggtccaggccttccagtacacagacgagcatggggaagcctctccccaccggtcactgttagcctc

SEQ ID NO: 356919 - DNA, 82 bp, Homo sapiens
gacatgagggtccccgctcagctcctggggctcctgctactctggctccgagtccaaaagaaactcttccttcaaaacctgt

SEQ ID NO: 356920 - DNA, 75 bp, Homo sapiens
ccaggacggaggctgcatgcccgaggaccaggccggcgcagccatggttggctttgatatgagtaaagaagctgc

SEQ ID NO: 356921 - DNA, 83 bp, Homo sapiens
gagtgtggaaggaccgctccaagaaaagattggcccccgccgcatccacacagtccgtgtgcggggaggtaacaagaaatacc

SEQ ID NO: 356922 - DNA, 76 bp, Homo sapiens
ggatctcttgttggaagagaaaatgagctctctgatgtaaaggatggagtaaatcaagcagcacctgcatttggat

SEQ ID NO: 356923 - DNA, 74 bp, Homo sapiens
gggaaggtaccaaggattggagcacagaggctcagaagcaagtccagtgaatggtagtgtctagaaagggtatg

SEQ ID NO: 356924 - DNA, 100 bp, Homo sapiens
cagagattcaggccagagttgtgggccgccgtcggcagcaagaacagagagagaggtggacagatctgagagatactgagattcatgatgttgctatcaa

SEQ ID NO: 356925 - DNA, 75 bp, Homo sapiens
gcgaggaggcgcgggaggtgttcgagaacgaccccgagacggccgacgcctccccccagggtcagctgcgggctc

SEQ ID NO: 356926 - DNA, 89 bp, Homo sapiens
tttatcactgccttcttgggaattgcttcgtttgccattttcttatggagaactgtccttgttgtgtagatttggaaaatggtacttgc

SEQ ID NO: 356927 - DNA, 114 bp, Homo sapiens
tggagcaaggaaaagatccctggaatatgaagagacacagtatggtagccacacccccaggctcagcagggagctgctggatgagaaagggcctgaagtcttgcaggactcact

SEQ ID NO: 356928 - DNA, 97 bp, Homo sapiens
tcacagtttgcgggactcagtcccatcactccaaggagagaagtaggataagttctgaacgtcgaaaagaaaagtctcgagatgcagccagatctcg

SEQ ID NO: 356929 - DNA, 82 bp, Homo sapiens
caaaggagagtttaaacagccaaaacagttcattcatattcagcgtttactcctggcttgggggcattaggaagcactggag

SEQ ID NO: 356930 - DNA, 100 bp, Homo sapiens
ctttggacaaaattgagaagaactcataaacttggcttcctcgcttctgctcctcagaacagtgctcggcatggcagggattccagggctcctcttcctt

SEQ ID NO: 356931 - DNA, 100 bp, Homo sapiens
ccgccccccaggaggggcgagagggagccgcagctgatgtcaggtactccacatcagcattctcaagactggagaagttaggcctcagacatcccaagcc

SEQ ID NO: 356932 - DNA, 76 bp, Homo sapiens
cagctacattgctgattgtgccttccgggggctttccagtttaaagactttcttctactgaaactaaaattgatgt

SEQ ID NO: 356933 - DNA, 100 bp, Homo sapiens
cgcgggtgggcaacgggaccctgtgccccaactctacttccctctgctccttcccaggaagaaggtagataatgactataatgcccttcgagaaagactc

SEQ ID NO: 356934 - DNA, 96 bp, Homo sapiens
tctgctcttctgcctcttgatctccgccaccgtcttcaggccaggtgccgtgcccctcatccagtctcggattgtgggaggctgggagtgtgagaa

SEQ ID NO: 356935 - DNA, 75 bp, Homo sapiens
cggagttgctgggtccaccgacccttaccctcagcgagagaagtaaccaccgatttgggatgttgcccctggatg

SEQ ID NO: 356936 - DNA, 100 bp, Homo sapiens
acaatacctcttgggactgggctcgatttgagcaatgcagagtccctggacaggctcctgccacctgtgggcactgggcgctctccccggaagcggacca

SEQ ID NO: 356937 - DNA, 82 bp, Homo sapiens
tgctggagaacttcgtgggccgctgagctgactgctgcccactttggaggaggcggtgggctccttcacaagaagactcaac

SEQ ID NO: 356938 - DNA, 100 bp, Homo sapiens
gcgcctgggggcggcccccgtgacccagcccacgcggtgatcaaggctgtggaggatggcttccggctgccaccccccaggaactgtcctaaccttctgc

SEQ ID NO: 356939 - DNA, 96 bp, Homo sapiens
caccacgggcaggactcactgaaggagtttgtgcagtttgtgtgctcggatggctcgggccaggccaccggacagatgccatggacaatattacca

SEQ ID NO: 356940 - DNA, 82 bp, Homo sapiens
gaaaagactgggcttgtccttgctggtgcatgcgtcgtcggcctctgggcagcagttcaaatctgaacatcaatgatgtact

SEQ ID NO: 356941 - DNA, 100 bp, Homo sapiens
aagcgctgcgctcgcgcccggatccctcaggaccatggccaacctggagcgcaccttcatcgccatcaagccggacggcgtgcagcgcggcctggtgggc

SEQ ID NO: 356942 - DNA, 100 bp, Homo sapiens
tactctcaccagagtgtcagcaatgggaccttctcttcggatgaggagaccctggaagacaatctaagttttgtttggctatgccaccacagtcatcccc

SEQ ID NO: 356943 - DNA, 75 bp, Homo sapiens
gcctgatctaacccctagaaacaggtgaattttaagaaggacaccacttccaaggcaattcatagtatatttaag

SEQ ID NO: 356944 - DNA, 98 bp, Homo sapiens
atggagtccaagactgagaaatggatggaacgaatacacctcaatgtctctggtgcctgtggacatacgagatccagttctctcaggacggtaaggcg

SEQ ID NO: 356945 - DNA, 82 bp, Homo sapiens
gtctcttacgtctgcggaagtgcagctgcctcagttcttagcgcaggtggctagaggtgcaggtagctaatttaacaagtcc

SEQ ID NO: 356946 - DNA, 50 bp, Homo sapiens
agctcacccactgccagcagaggtgctgcgataagcggttgtggacccgc

SEQ ID NO: 356947 - DNA, 83 bp, Homo sapiens
tccagcccggcccggcagcgacatggaagtgcacttacatttcaatcgaccaagttccaaggacctatgccataatgataagc

SEQ ID NO: 356948 - DNA, 88 bp, Homo sapiens
ttcaaggagggaaaagaaagaatgtatgaggagaattctcagcctagaatacagattctgttcatcttgctctgaaattaaataattc

SEQ ID NO: 356949 - DNA, 98 bp, Homo sapiens
ctgaaggagtacccggctgtgcggtatcggggttacagaatgtctgaaggggacagtgtgggagaatccgtccatgggaaaccttcggtggtgtacag

SEQ ID NO: 356950 - DNA, 82 bp, Homo sapiens
agagatccaagtgcgcgccctggcgggtccggaccaagctctaatggtaccaagtgacaggttggctttactgtgactcggg

SEQ ID NO: 356951 - DNA, 100 bp, Homo sapiens
tataaagctttggaagatgcagatgagaaggttcagttggcaaaccagatatatgacttgtgccggtggtggtgtgcacattgagccccggtatagacag

SEQ ID NO: 356952 - DNA, 90 bp, Homo sapiens
ctctgcggcttctggttctcacttgtcggttaatttggagtggcccctggagtcagtttcctacaccatccgaggccccacccagcacga

SEQ ID NO: 356953 - DNA, 100 bp, Homo sapiens
tcagtgaagcatttcgcctgaccattacacgcaaagatattcaaactctaaaccatctgaattggctcaatgatgagtgggggaagaaggtagcctgtgg

SEQ ID NO: 356954 - DNA, 100 bp, Homo sapiens
tgaatctgccgcagctagaaatgctcaagaaccagctggaccaggcagccacctggacagccaccggaggatggcgcccactcccatccccacgcggagc

SEQ ID NO: 356955 - DNA, 51 bp, Homo sapiens
cacatggaaagactgtcctggctgaccaaagtgaaggagtttggaattgac

SEQ ID NO: 356956 - DNA, 82 bp, Homo sapiens
ctgggctgcagctgcctaatgagcagtgcctgatttgagatggggtcccaggtctcggtggaatcgggagctctgcacgtgg

SEQ ID NO: 356957 - DNA, 97 bp, Homo sapiens
acttttatctttgcaatggcaagaggaaaaaaagccagtctcaacgttttacttatacaccagcttcctttgctccaataagctttgcaatcaaggc

SEQ ID NO: 356958 - DNA, 100 bp, Homo sapiens
ggccaggcgattcggtgaagcgattcctgcaggcgttggttcccctctttgacctggtgttctttgacctaatgagagaaatcagaacaaagaagatgtc

SEQ ID NO: 356959 - DNA, 100 bp, Homo sapiens
ctcagaactcagccggttctatttcagctaatgccaccctgactgtcctaggccgctacctgtctgaggaacccgagccctacctggcagtctacctgca

SEQ ID NO: 356960 - DNA, 76 bp, Homo sapiens
cagcggcctcagggttcaggcaatgcaaataagtttgctggcctagacctgaactcttcagataatcagagtggag

SEQ ID NO: 356961 - DNA, 90 bp, Homo sapiens
caatatactgttacgatccagttgaagattactggatgcacgtacagaatacattcagccgtcagagttcagcagtgcctaagacctggg

SEQ ID NO: 356962 - DNA, 50 bp, Homo sapiens
actccatatttgagtcagaggacaggctgtttggcagacctgatgcccag

SEQ ID NO: 356963 - DNA, 96 bp, Homo sapiens
cgacgtcgtgatccagaagtccagagctgaggactgcctgtttgcaggattaaagcaaggagagccaatcatgactggcaaaacacagaccagcaa

SEQ ID NO: 356964 - DNA, 58 bp, Homo sapiens
ctgaatcagaagggcaccatcttggggtgtgatccctcacatccacaaatctctgatt

SEQ ID NO: 356965 - DNA, 88 bp, Homo sapiens
tttgtcagatatccagattgtacaggttgcttgtggttactatcattcacttgcactttctaaaggatattatcaactcactggtaac

SEQ ID NO: 356966 - DNA, 87 bp, Homo sapiens
atccagccaggaaaccccaattacacgttctggcataaagcatgcttccattgcgagacctgcaagatgacactgaacatgaagaac

SEQ ID NO: 356967 - DNA, 90 bp, Homo sapiens
cctcctcttcctcctcctcctccacctccggcttttgggggatcactgtcctctctcggcagcaggagctgtaaaccggatcaaagaaat

SEQ ID NO: 356968 - DNA, 100 bp, Homo sapiens
aatgtcacttacaacattaatcagatactgcatttaagggtaagaaggtggatggctctgtaaatgcctatgccataaatgtctctcagaagaggaagta

SEQ ID NO: 356969 - DNA, 73 bp, Homo sapiens
cctttttgacagcttccgccgggactgcctggccgacgtggacaccaagggggaaatttgcagtggtgagaaa

SEQ ID NO: 356970 - DNA, 90 bp, Homo sapiens
gatcaggcccaagcctgactattttgctgttggctactacggacaagggttccccacattcctgcggggttcatagtggcgtcatgcacg

SEQ ID NO: 356971 - DNA, 100 bp, Homo sapiens
caggcggcaccctgtccccgaggaggggaccatgacacagcccagcgctggcgcagtgagaacttcgagagacccgtggacctggagggctctggggatg

SEQ ID NO: 356972 - DNA, 75 bp, Homo sapiens
gtgggcttttctagatcacatgaaatggactcagaactcaaggaagaaattcctgtgcatgaggaattcattttg

SEQ ID NO: 356973 - DNA, 75 bp, Homo sapiens
tggagagcttcatcaaaaatagtgatagctttgataagacatcatggcagctcacctggtaaagcgatgcacgtg

SEQ ID NO: 356974 - DNA, 50 bp, Homo sapiens
cacggtggaagcgagagaggagggtcaaaatgcagatcttcgtgaaaacc

SEQ ID NO: 356975 - DNA, 100 bp, Homo sapiens
tatcaaccctttgagaacacgacacaacgaactttatattttaccacttccttgaataggatttgaatttgttgaaatgagcagtcgtaaatcaaagagt

SEQ ID NO: 356976 - DNA, 100 bp, Homo sapiens
gaacagcaaaaacttggttctggaaaaagactagttgaacggaaaacagttcttccttcaaagcatgcagtacctgaagtaatagaagactttctctgca

SEQ ID NO: 356977 - DNA, 100 bp, Homo sapiens
ccttcaaaattaaaagaggagcagcatggcatttcagtcactggtttgcagagtccagaatacagattctgttcatcttgctctgaaattaaataattct

SEQ ID NO: 356978 - DNA, 100 bp, Homo sapiens
ggaccgtgttcaagaggaagcccgctgccttgtggaggagttgagaaaaaccaatgagtttactcgaactagaagtagatttggataatttggaattaga

SEQ ID NO: 356979 - DNA, 100 bp, Homo sapiens
ttgtactatcctcggtgctgtggtgcagagctagttcctctccagctcagccgcgtaggtgcatggctgcctcctaatcccatagtccagaggaggcatc

SEQ ID NO: 356980 - DNA, 101 bp, Homo sapiens
gttctagggttctaagtgatgtccaggaaggaggaggaataatatttatggagcatatattatggaacacatttctcacccacggataataaatttgctac

SEQ ID NO: 356981 - DNA, 98 bp, Homo sapiens
gcctatccagctccttacttggatgaatatggagaaacagaccctggcctgaattgagaaagattgggggtgggggctttggagaaatttacgatgcc

SEQ ID NO: 356982 - DNA, 82 bp, Homo sapiens
ggcccaggcctcggactccgcggccggcccggcgcggcccagcgccctcagggttgtgagtcccggcccagcccctccaccc

SEQ ID NO: 356983 - DNA, 90 bp, Homo sapiens
cagcccagaaaggagggtggaccaggatcctcaacaggcactgcagcatttcagttcaggcccctcctgttgttgctgcaactccctcac

SEQ ID NO: 356984 - DNA, 98 bp, Homo sapiens
ggagatccacagctaagacgccgggactccctggaaacctagaaatggcatgacagcaagcgctgtggcggctttgatcctcatgacgtcctccatca

SEQ ID NO: 356985 - DNA, 122 bp, Homo sapiens
aggggccaactgtgcccaccagctccccatcgcagaggccatgctgacctacaagcagaagagaagttccacctggtgccaagcatcaacaccatgagtggcagtcaggagctgcagtggat

SEQ ID NO: 356986 - DNA, 87 bp, Homo sapiens
atcatcttgggagtgatttgcgccatcatcctcatcatcatcataggtgatgcgactgtgaaaaagaaacctgcccccaagacacct

SEQ ID NO: 356987 - DNA, 50 bp, Homo sapiens
ccgggggtcgtcgccccgcagggtgctgtaaatgcattgatggaaaaaaa

SEQ ID NO: 356988 - DNA, 100 bp, Homo sapiens
gcggacaagcggcgggacgccaggacgcggcgagcaagaaacgctccagaggacaagtgctgtttgataaagtgtgtgaacacttgaacttgctagagaa

SEQ ID NO: 356989 - DNA, 97 bp, Homo sapiens
tgactaccatgacgaaaacatgtactacagccagtcttctatgtttccacatcggtcagaaaaagatgatatgtcagctcaaggatcatcttcgcag

SEQ ID NO: 356990 - DNA, 82 bp, Homo sapiens
aataaggcaacaggagaggaagagggaatggatatacaagcggcaacacccttctcagactcgtggtactacccgtcctatc

SEQ ID NO: 356991 - DNA, 75 bp, Homo sapiens
tttcatactaattttctcaaggaaattgagcaacgacttgccctgtgagatcctgaaggagctagacgagtgcta

SEQ ID NO: 356992 - DNA, 123 bp, Homo sapiens
caagagagaagattattttggaatcacaaatcttgttgaacatccagcccagctcaatcctccagaatcctcactatggatgggctcattgaggacattaagcatcggcggtattatgagaag

SEQ ID NO: 356993 - DNA, 100 bp, Homo sapiens
gaaaaaacttccagaacatctgggagaatatttaatggaaaatcgcttggttaaaacctgacacttttaacaggaaatcatcgagttccccatcctaaag

SEQ ID NO: 356994 - DNA, 100 bp, Homo sapiens
cccggatgctgcggcgcccgctggccgggctggctgcggccgccctgggccgggccccaccggacgactgccaggaactcctgccaccgccaccggctcc

SEQ ID NO: 356995 - DNA, 75 bp, Homo sapiens
tagatacatggagcccatcagaatggcagatggcttatgaaccacaggtgaaagacccctgacaaaagacaatca

SEQ ID NO: 356996 - DNA, 100 bp, Homo sapiens
ggctttcgtgacttcctgctcaagccagagttgctccgggccattgtcgactgtggctttgagcatccgtcagaagatgacctgtgtagaaaaagcagga

SEQ ID NO: 356997 - DNA, 51 bp, Homo sapiens
aaatcgccaatgccaactcccacctgtcttcctcgctggaagttttgcgtg

SEQ ID NO: 356998 - DNA, 100 bp, Homo sapiens
ttggccatgtcaccaaaacaaggagaaggtgcaagactgtccgtgtggaccctgactcacaggggcaccaccacgaggcgatttgtgggccataccaagg

SEQ ID NO: 356999 - DNA, 100 bp, Homo sapiens
ttggaccatctcttgattcatcttcttcatcttcactaacttcatcatcatcaggtagtgtcagtggctgagtatcaccgcaggatcgatgctctaaata

SEQ ID NO: 357000 - DNA, 75 bp, Homo sapiens
gtttttggcaccatatactactttttccagaattcatacaaagagtgaactgtggctgcaccatctgtcttcatc

SEQ ID NO: 357001 - DNA, 80 bp, Homo sapiens
gctcacctggcggtgcccgaggagtagtcgctggagtccgcgcctccctggaatctggcaatgggggcaggagctgttgg

SEQ ID NO: 357002 - DNA, 100 bp, Homo sapiens
tgtgcaagtattttcagcgagggtactgtatttatggagaccgctgcagtatggtggtgatattacccgaaaaatgaagcttttgaagagacaagcagaa

SEQ ID NO: 357003 - DNA, 100 bp, Homo sapiens
ctgggcccagaggacttctggcctttggcacgtcctgctccgtggtgctctatgaccccctgtgagtgatagttgcttcaggaatcttgcagaagaccgc

SEQ ID NO: 357004 - DNA, 100 bp, Homo sapiens
ggtccagccgcctggccctgcgtgggaccctccacctggcagcaggatgacgcggcatggcaagaactgcaccgcaggggccgtctacacctaccacgag

SEQ ID NO: 357005 - DNA, 83 bp, Homo sapiens
cctggtcctgctcggggctctgttcccagttatctccagaagaagaagagaaaaggagaatccgaagggaaaggaataagatg

SEQ ID NO: 357006 - DNA, 95 bp, Homo sapiens
tttcggcttctgagacggcggcagcagcggcattcaggctaacaaggaaagcccctggagctcctgtaataagaatgtggttggaagatgcaaac

SEQ ID NO: 357007 - DNA, 98 bp, Homo sapiens
gcatgttggctagactagaaatcaaacaacttggaaatcgatcacaaccaggcattaagttcacaaaaatgatgcatcctgttgccagcagtaatcca

SEQ ID NO: 357008 - DNA, 98 bp, Homo sapiens
ccggagccgcaacaagcaggagaagccagcctcctccttggacttcacagagaatgcagttgtcttgacttcaggtctgtctgttctgttggcaagta

SEQ ID NO: 357009 - DNA, 82 bp, Homo sapiens
caggcactggcacagctacagcgagggcctcggccatccaagggtctcccagattataagcgccatggctatggctagtgtt

SEQ ID NO: 357010 - DNA, 100 bp, Homo sapiens
aggagtaaagaatggctgttgaacatccacaaggcacctgcaagggaccattgcaatttagagatgtggccatagaattctctctggaggagtggcattg

SEQ ID NO: 357011 - DNA, 97 bp, Homo sapiens
ataatcctgtcttaatactgcaaacaaatcatagtggaactaaggggaacttaatttactggcatggacagctgggccatgggaccctggaggcaga

SEQ ID NO: 357012 - DNA, 75 bp, Homo sapiens
cgtgagcccagccgaggtaccgctgaagaggaatcaattttggatacagttgatatattagttggatggcatata

SEQ ID NO: 357013 - DNA, 100 bp, Homo sapiens
aaaagctgaaaatttacttctggatgccaatctgaatatcaaaatagcagatgaccctaattttcagtgcaaattcaaaggtctctggagtaaggaaaaa

SEQ ID NO: 357014 - DNA, 75 bp, Homo sapiens
cctctacaaggccaagttcatctcctccgtcaccagccacatctaccagggaaatcgtggaacacatggtccagc

SEQ ID NO: 357015 - DNA, 83 bp, Homo sapiens
ctgcggaccatttataaccgcgacttcaagatcaggtgcgcgcggagccatggttatcatgtcggagttcagcgcggaccccg

SEQ ID NO: 357016 - DNA, 88 bp, Homo sapiens
acacttttcaccaaggaactggtgctgcagcgagaggttagagcagccagcgggtacagaatggattttggaagagggagtcaccact

SEQ ID NO: 357017 - DNA, 87 bp, Homo sapiens
gtctatatatcctggggaatttaagatgccaaagcagctcattcacatacagcgacataggatgcaacacttgagcgaaggaaccaa

SEQ ID NO: 357018 - DNA, 100 bp, Homo sapiens
ggggatcgacaagctgcccatcgaggagacgctggaggacagcccgcaggtgctgggtcttcagctctaaagaggccatttgaagatggattaggggatg

SEQ ID NO: 357019 - DNA, 51 bp, Homo sapiens
ctacgagacgctggtctccctgggagcagcagcctcctgccccaaggccga

SEQ ID NO: 357020 - DNA, 100 bp, Homo sapiens
tgctgggtagcgttgctgcctttggctcctgggcttctcggatcccccctctctccagaatttcttggtgatgccttggacagcagcaactccatgcaaa

SEQ ID NO: 357021 - DNA, 89 bp, Homo sapiens
ctgtagcattcgtgctatccctgggggttgcagctttgtataagggaataccttggcaagcagctccagtccgagcagccccagaccgc

SEQ ID NO: 357022 - DNA, 75 bp, Homo sapiens
tttccacctcgcggcagttcgttatgcagaaggggttaaaagataactttgctgatgtccaggtctctgtagttg

SEQ ID NO: 357023 - DNA, 100 bp, Homo sapiens
caaggagctaaagcagcgtgcgttcagccctgggatgatccagatcctgatgatggatttaactataaacagatgatggttagagatgagcggaggttta

SEQ ID NO: 357024 - DNA, 98 bp, Homo sapiens
tcccagcaccacagtccttctgcagtccctcgtccagccacccccaggaaatgttctgtgaaggtcaagtgtgcaaacagacattccagagagcctga

SEQ ID NO: 357025 - DNA, 98 bp, Homo sapiens
caggtgaccaaccccaaggaggacgagggccggttgccgggcgcgggcgagaaaggatctcattttgcccaacggtggtactccagcaggtacttcaa

SEQ ID NO: 357026 - DNA, 75 bp, Homo sapiens
aagaatattaaggctctccgtacagacgttcaaaccttgtactactcagctgatcacaagctgcttgatgggaac

SEQ ID NO: 357027 - DNA, 82 bp, Homo sapiens
gagctcaacggcggcctgcctccgggcacacccggctccccggacgcctcggctgggagtcctccgtcagcatcagctccgg

SEQ ID NO: 357028 - DNA, 98 bp, Homo sapiens
tggaatcccaacaagccctttgaccaaggcactggagatattattgctgtcatgataacagaattgaggggtaaggatattttgagttatctggagaa

SEQ ID NO: 357029 - DNA, 98 bp, Homo sapiens
cagcttcgagggccgggagctcctggtcatcgagctgtccgacaaccctggcgtccatgagcctgccacagatgaagatatccttgctaaaggaaaac

SEQ ID NO: 357030 - DNA, 100 bp, Homo sapiens
ttccctgttgcccttggtctcggggtcgctgtaggcgctgaggctgcagagtaacctgatccactacctgggactgagccatcacctgctggcactgaat

SEQ ID NO: 357031 - DNA, 100 bp, Homo sapiens
catcaagtcggcttccatgcatccctaccagcgctgtttgacctgctcaacaagaaggccaagctgcgcgtgctggaggacggcaagcaacaggtgcaag

SEQ ID NO: 357032 - DNA, 75 bp, Homo sapiens
cagacagatcgctgtcaaaaccctagatccattacaagattttggcttttctgttgaaaagtgttccaagcaatt

SEQ ID NO: 357033 - DNA, 75 bp, Homo sapiens
aacgggagcactcgctgtcgaagccctaccagggtgaggcgcccaggcctcttcagaagaaacttgactccttcc

SEQ ID NO: 357034 - DNA, 90 bp, Homo sapiens
tggaaggtgtgcccgatgtgcagcgagcagttccctcctgactatgaccagcaggtgtttgaaagacacccatcatactgactccaagcc

SEQ ID NO: 357035 - DNA, 75 bp, Homo sapiens
tgaagatcaaagatgccaagaaaccctactatctgttatagtccctgggtcaagacaacaatttttataccttcg

SEQ ID NO: 357036 - DNA, 75 bp, Homo sapiens
cttagcgaagctgccggtgaagatggggaagatggtgaaaggaatgggaggtgctatggatttagtgtccagtgc

SEQ ID NO: 357037 - DNA, 74 bp, Homo sapiens
tcttttcaagccatgtccgcaaggtaactaggatttctacctcaaccgcgagacctatgcaaggacggtgtgga

SEQ ID NO: 357038 - DNA, 98 bp, Homo sapiens
agatctaaagagaacgtctctgaaatcaagtccggatgaagattcaaaaacatgccacaggaaagaagtctccagcaaagagtcctaatcccagcaca

SEQ ID NO: 357039 - DNA, 111 bp, Homo sapiens
aataaagccaagagagaccttggagtaattcgtcgacaggttacaggaaatacaggaggcagaggaacaaataaaagacaccacgagaaacagacacatccagaacgtgga

SEQ ID NO: 357040 - DNA, 51 bp, Homo sapiens
ggagggctccgggcccaagtttgaggaggttgctccggttgctaagaagac

SEQ ID NO: 357041 - DNA, 90 bp, Homo sapiens
aatttaaagaagcattaatactcatcttgtccagaactctgtcaaatgaagaacactttcaagaaccagatgtaaaaaaagattggtctg

SEQ ID NO: 357042 - DNA, 82 bp, Homo sapiens
cagggagtggagcttggtttcgggatctcggtgctgcagacggcgagacctcctgcacaggaacaagatcactcaaggtgaa

SEQ ID NO: 357043 - DNA, 74 bp, Homo sapiens
ctctgagggccccggcccctggatgcacagccccggcgctgagtggaaggccgtctctgagactactttcagag

SEQ ID NO: 357044 - DNA, 83 bp, Homo sapiens
ctcaacgacacggtagagttctaccgctggacctggtccatcgcaggagtctccccaggacagtgctatcacccgggatatta

SEQ ID NO: 357045 - DNA, 75 bp, Homo sapiens
attttgggtcttcttcttaatcccatatctggacatctggaacatccatggtattacaggaataacggaagccgt

SEQ ID NO: 357046 - DNA, 100 bp, Homo sapiens
gtttcctcctagaccgacttctgcagtacgagaacgtggatgaagactcttcggtctattatcctcccagtccacaacgctgaaccgtggctggacgaat

SEQ ID NO: 357047 - DNA, 75 bp, Homo sapiens
cacagacatgactgagtcctccatgaagagcctatatgaacccaatagcaatggcgagatcaaggggtccaatcc

SEQ ID NO: 357048 - DNA, 50 bp, Homo sapiens
ccgcaccccaggatggatcccccagaggaaaaacaagaatggtggtggct

SEQ ID NO: 357049 - DNA, 98 bp, Homo sapiens
gtgctggtcagcatccggaacaacagatattgatgatgctcaaatacttccccgctcaactagagtcagacatttttcacaaagtgaagaaactggaa

SEQ ID NO: 357050 - DNA, 100 bp, Homo sapiens
gccgcagcaccatggcgaccaccgtcagcactcagcgcgggccgttcatagccctgatgaagcaagttactctgctctcctaataaatgcaagaaaatga

SEQ ID NO: 357051 - DNA, 90 bp, Homo sapiens
tccttatccctattgcggaacaccccggacaaccgcagcacgctcttgcagccaatgccggaacaggatttgctgttgctgagcctcaaa

SEQ ID NO: 357052 - DNA, 75 bp, Homo sapiens
tggtcaggtactattcggggaaagaattgaaccttcaccatataagatttggaggttgatatgtggaagaataat

SEQ ID NO: 357053 - DNA, 95 bp, Homo sapiens
gacgagcgctgcactaacgcaggatccggctgccgaaggtcctcgccagacaccattcgcttttcacccaagatgatttgatgtcttataaaact

SEQ ID NO: 357054 - DNA, 75 bp, Homo sapiens
cgagtcggcgcgcgggacgaaggtttgatgaacttgtgaaaaaattcaaagtcgaatatcatgctggtggctcta

SEQ ID NO: 357055 - DNA, 75 bp, Homo sapiens
tctccaccaagtgaagaaggatgaaaaaagcattgaggttgaggtggtgatggcacttctcaaatactggccaaa

SEQ ID NO: 357056 - DNA, 98 bp, Homo sapiens
tttcatattgcagccagcatcaacccagccacagtttttgatgacggagatgagaagacactgagacgatcttcactgtgcctgaaaggagagaggca

SEQ ID NO: 357057 - DNA, 83 bp, Homo sapiens
gtgtcaatattgcagctactgcttctgaggaaaattgcctaagaattatgacccaaaagttaccccagatccagaaagatggc

SEQ ID NO: 357058 - DNA, 82 bp, Homo sapiens
tgtgggcgcgtcaggccgcgacgagggcgctgaggttttaaaatcaaagatgggaaaatcggagaaaattgcccttccccat

SEQ ID NO: 357059 - DNA, 73 bp, Homo sapiens
gtggtgcgagtcttcggagcgaccccggcagattgacgttctcaaggcagatctggaaagtgcagaatggaaa

SEQ ID NO: 357060 - DNA, 82 bp, Homo sapiens
tcgtcatgctctttgtagcgtggtgcttctgttgctcacaggttcatgcatgggagatctcagaccagttgttacagatccg

SEQ ID NO: 357061 - DNA, 82 bp, Homo sapiens
cagctcctcaagtgcaacaagtcccacttccgaaaccacaagtttgccgatgcctgagacctgggaggaagctggagaaaag

SEQ ID NO: 357062 - DNA, 100 bp, Homo sapiens
ccagtttgccatcccaaggccgaaggttcctctacctggcatgaaatgggtagataatcacaaaggtgtttttaatgttgaagttgttgctgtttcgtct

SEQ ID NO: 357063 - DNA, 100 bp, Homo sapiens
ccagctcaccattgtactcttacacaacagggtcatgtaggtacaacagcaaccaagaagatcgatgtctacctccctctgcactcgagccaggacagac

SEQ ID NO: 357064 - DNA, 75 bp, Homo sapiens
cactgcggggagatgctcttcggcctagtgcgccagggcctcaagtgcgatggattatttttacccaagatactt

SEQ ID NO: 357065 - DNA, 49 bp, Homo sapiens
ctattacacgatacttgatatatttagcgttatacgcagagcaatgggc

SEQ ID NO: 357066 - DNA, 90 bp, Homo sapiens
aggtggcctttgtcagcgcccagaacacagatggtggatgcttccaaaagcatcgaagctgtccatgaggacatccgcgtgctctctgag

SEQ ID NO: 357067 - DNA, 100 bp, Homo sapiens
caaaacagagagcacagcaaaagctgcttgaaaacattccaggtgtggcagctctcagaaaagaagcaaataaacgtgtgctcccagttggattggaaac

SEQ ID NO: 357068 - DNA, 83 bp, Homo sapiens
tgggtctcagaagagaggggctggcttaccagctcagcctgggcggcacagccagatgcgagatgcgtctctgctgatctgag

SEQ ID NO: 357069 - DNA, 88 bp, Homo sapiens
tggctttcgtattcgttgttctcggcgggctgtggggcctccgcgccgcggccgttagtcatgtcggcatgatccgctgggcccccag

SEQ ID NO: 357070 - DNA, 100 bp, Homo sapiens
gggttcgttttattcagcggcagtggtgctttcccgaatctcagaatgccccaatggagatcttcgtggatgatgagacgaagttgacgctgcatgggtt

SEQ ID NO: 357071 - DNA, 89 bp, Homo sapiens
aaggatgttggcggtccctgtgacctgtggagacacggccagatctgccctccagccgactgcagcagtggcccagggcaaagagtgtg

SEQ ID NO: 357072 - DNA, 80 bp, Homo sapiens
cacgctggagctccatggagatcatgtgccctggtgggcggaacccctggaccggggtatcccagttcctgcagacatct

SEQ ID NO: 357073 - DNA, 80 bp, Homo sapiens
gcgggactccagggtccaccagattctagaagtattaaaggtggaagaaggtccatatctttttctgtgggtgcttcaag

SEQ ID NO: 357074 - DNA, 50 bp, Homo sapiens
gcacgcggatttggctggcgtcccgccgtcagcctcgagtttgaccagca

SEQ ID NO: 357075 - DNA, 83 bp, Homo sapiens
cttcttcctcctccgctaccaccaccacaccagaaactagcaccagccccaaatttcggtcttactggacagagctcattcag

SEQ ID NO: 357076 - DNA, 50 bp, Homo sapiens
gtccgggatctacctggtctgaaatatggtttggagtgcctttttcgata

SEQ ID NO: 357077 - DNA, 83 bp, Homo sapiens
gcggcgtgtgcgcgcccgccagctgctccggagatacgcagaaaaatatggctcaggagactaaccagaccccggggcccatg

SEQ ID NO: 357078 - DNA, 125 bp, Homo sapiens
aagaccccgactcttcctggtgaagcatctgatgcacgttccatccggcgctcagctgggcttgagtgaagaaaatatttggaagctctgtgaatacatcaaaaaccatgaccagtatcctttag

SEQ ID NO: 357079 - DNA, 98 bp, Homo sapiens
gaaacgagagtacctgcttcagtacaacgatcccaaccgccgagggctcatcgcatttgatgaagcaattgctgaattggatacgctgaatgaagagt

SEQ ID NO: 357080 - DNA, 50 bp, Homo sapiens
cacattggaccctcctcccaactgtagaaatacaggtatcaggatgaaga

SEQ ID NO: 357081 - DNA, 100 bp, Homo sapiens
aaaaggggagctggctacttctcgctctgcttcatcccactattattttggcacaacaggaaggtagttgatgtcacttggcgatattcctgcaaacatg

SEQ ID NO: 357082 - DNA, 98 bp, Homo sapiens
tcgcccgccatggctttacttactgcggccgcccggctcttgggaaccaagagcccaaatggcgcagtgggaaatgctgcagaatcttgacagcccct

SEQ ID NO: 357083 - DNA, 89 bp, Homo sapiens
tggaataaatggcgtccaaagtcacagatgctatagtctggtatcaaaagaagatccagctccaggtcccacaggggctcttcttcccc

SEQ ID NO: 357084 - DNA, 75 bp, Homo sapiens
aggaatcaaacagttttatattaatgttgagagagaggctaaagaacgtgccaatggaatggagcttgatgggcg

SEQ ID NO: 357085 - DNA, 100 bp, Homo sapiens
gacctggatctcgcgccacaaggagatgggtaccgtgagggttttctctggaagcgtggccgggacaacgggcagtttttgagccggaagtttgtgctga

SEQ ID NO: 357086 - DNA, 82 bp, Homo sapiens
ttccccacgcaaccccagatccatttacactttacaatgtcttgtggcttcaagcactcagcagtggtcacttcagatggca

SEQ ID NO: 357087 - DNA, 88 bp, Homo sapiens
ccgctgcagccgagatgccgggggagcggggccttccacaccccctccgtgggtgtgtggttgctccgactgtgtgttccaggagtgg

SEQ ID NO: 357088 - DNA, 50 bp, Homo sapiens
ttcgatgtgcgagactttggaaaggtgacagagttagtccttgataattg

SEQ ID NO: 357089 - DNA, 83 bp, Homo sapiens
gggaaggaggccgagccgggatctcaggtcctcgggggcggcggccacgccaaggacgggtcactcctggaagcaaggcggct

SEQ ID NO: 357090 - DNA, 100 bp, Homo sapiens
agggaagaaggaatcatcgaggcatgggggtccacactgcaatgtttttgtggaacatggtgctgaccttaaggaaagagccaaaatgagttccagtgaa

SEQ ID NO: 357091 - DNA, 82 bp, Homo sapiens
gctgctggaggaaacacctcaggacacggcctacaacaccaagagctgctgatgcaaggaatcccctgggctcccgtccact

SEQ ID NO: 357092 - DNA, 100 bp, Homo sapiens
agacgacgagctgagcttcaaaaggggggacatcctcaagggaagcaataagtcgcctgtgtgaagctgtccccggggcaaatggagccattaaaaagcg

SEQ ID NO: 357093 - DNA, 100 bp, Homo sapiens
tcagggcaggctcagccccataactctggcaaaagctctcacaagcaaaagccttggagaggaggagaatgtatcaagaccaagatcactccatggatga

SEQ ID NO: 357094 - DNA, 51 bp, Homo sapiens
gctcattgggaatttagttaaggcctactgaacttgacgcactggtatttg

SEQ ID NO: 357095 - DNA, 75 bp, Homo sapiens
aagccctactgggaggcacggagggtggcgaggcagggttgagttccagaataaattctacagcgggaccggttt

SEQ ID NO: 357096 - DNA, 90 bp, Homo sapiens
caatgtcagaatgtacatagaagaacaagatgatcaagatggctcttcatggaaatgcattgtcagtgcttcaggcaccgtgtacacagc

SEQ ID NO: 357097 - DNA, 74 bp, Homo sapiens
tggcatgaccgctacatccacgtccgattcgaactaagtggatcccactggtgaatggggggaccacgcagggg

SEQ ID NO: 357098 - DNA, 90 bp, Homo sapiens
caaaggataataaactagttgagaagcagaacccagctgaaggactgatctggatctataatgaagagcatgaattggttttaaatagtc

SEQ ID NO: 357099 - DNA, 90 bp, Homo sapiens
gcgaggctagggaggacctcacttccccggggtgtaataatgttaactgagttactccacaggatccgctgaacataggatgttgccaca

SEQ ID NO: 357100 - DNA, 94 bp, Homo sapiens
cgggggattgtgggagtctccgcgtcccgctcgctgggagagagcaattctgtggtgttcttggtcacacatttatggagtttctgaagggcag

SEQ ID NO: 357101 - DNA, 98 bp, Homo sapiens
aggccttacctcgtgcacatacctagctgggtccatggctggcagtggaaatccctgatctgattcagaagggcgtcatccaacacaaagagaaatgc

SEQ ID NO: 357102 - DNA, 83 bp, Homo sapiens
caacaccacaataatccacagccaaggtctaacttcaaacttgtggctgttaattcaaaactctatgccatcggagggcaggc

SEQ ID NO: 357103 - DNA, 100 bp, Homo sapiens
cttacatcaggatatgcctgaggagagctctgaggaggattcactcaggaggtatggcctcacaagtcttggtctacccaccatatgtttatcaaactca

SEQ ID NO: 357104 - DNA, 97 bp, Homo sapiens
agcagctcgggcaaggatggtggaggcgagaacactgaggagaacgacaccgtaactatccgcactagaaagttcatgaccaaccgactacttcaga

SEQ ID NO: 357105 - DNA, 74 bp, Homo sapiens
gttttgatgtattttaatagaaccagcctgccatggcaagggctaaaggctgctggcaaaggggacgtcccaac

SEQ ID NO: 357106 - DNA, 86 bp, Homo sapiens
tcggacagatgaagctccccaaggagctgcaggtgtcatggagaaactccagctgggcccagagattctgcagcgggaaaatccaa

SEQ ID NO: 357107 - DNA, 75 bp, Homo sapiens
caggctcctgctgacccgggcagagaagtacgagctcaactggaggcagtcctgtgcggaaatctgaagaaaaaa

SEQ ID NO: 357108 - DNA, 82 bp, Homo sapiens
agaccctggagcctcagttggaagcagccgatccagcctgcggagcctgtggggcagaccagcatctcagacatgtcgaaaa

SEQ ID NO: 357109 - DNA, 141 bp, Homo sapiens
gtatgtctttgctctgatgttcttgtatgcaccatcccataaaaactatggagaagaccagtccaatggtccgctatcgacgagagcacctttctgctaggcagtcaccctacttcccgttgttggaggatttgatgagag

SEQ ID NO: 357110 - DNA, 100 bp, Homo sapiens
ctattttgaataaatcagaaactgtccggttccagttgttggcaaaggagaggaagaggaagaggaagatggcatgcggctttgtctgccagccaacccg

SEQ ID NO: 357111 - DNA, 90 bp, Homo sapiens
gcgctggacgcttcctccttggaagcgcctctccctcaggggaagcagaagtatacacttccgctgtaccacgcaatgatgggtggcagt

SEQ ID NO: 357112 - DNA, 76 bp, Homo sapiens
cctcacctcatatctcagccatacaatcactttgccagctgtgtggaggatggatttgagggagacaagactggag

SEQ ID NO: 357113 - DNA, 101 bp, Homo sapiens
agcgaggaatctgattccaagcaaaaaccagttgatcacagccgagttaaattgacattaaagactccttcacaagattcagactatatcaatgcaaattt

SEQ ID NO: 357114 - DNA, 100 bp, Homo sapiens
ctatgggtgccctatggggcctcgtgcacgacttcgtcgtgggtcagcaagagggccccgctgaccaggtggctgcaggagtgaaacacaaatcttttct

SEQ ID NO: 357115 - DNA, 83 bp, Homo sapiens
cgggaggtgaatttccatgtcaacatagtcctggagttgtatcccgcattttgtattcacaacggaggctccgaccttgagcg

SEQ ID NO: 357116 - DNA, 75 bp, Homo sapiens
ttacgtgagcatcttcgtctgcagtgattggcagctcctgcgggttgcgagatgacatgactgtctgtgttgcgg

SEQ ID NO: 357117 - DNA, 100 bp, Homo sapiens
cactgctggctgtccaccctcatgcagggaccggcctagttccccgagagcgttcagacagtgggggctcaagctcagagccatttgaccgtcatgcacc

SEQ ID NO: 357118 - DNA, 75 bp, Homo sapiens
tggcaactgctctgacactgagcagggatggtgagagaaggtcagctaaatggctcatctgcagcacacagtgaa

SEQ ID NO: 357119 - DNA, 50 bp, Homo sapiens
atcacgtggggcaggacggtcaggtcagaagttgagtagcaggggcctag

SEQ ID NO: 357120 - DNA, 99 bp, Homo sapiens
caggatcttacgatggagttttgctgtcccccagcgagcagatcacagggtagtgggcaccatcgaccagcttgtgaaacgtgtcatcgaaggcagcct

SEQ ID NO: 357121 - DNA, 98 bp, Homo sapiens
gtagcaccagcttatggtgtatatctgctgcgatcctactgtttcactgcaaataaaccagatgggtgcatacaagtacatccaggagctatggagaa

SEQ ID NO: 357122 - DNA, 80 bp, Homo sapiens
tcatcagcttctgaggaatctgtgctttctgtcccagaactccagtgcatttgattatgacacagaaaatatgaactctg

SEQ ID NO: 357123 - DNA, 82 bp, Homo sapiens
gatatttgcttggaaaaacgtgtgggtacgaccttggtgccacacctccctggatgatccaagatgaagaatacattgctgg

SEQ ID NO: 357124 - DNA, 75 bp, Homo sapiens
ggcctgcaaattcatgacaggattattgaggtggtctggacttggctattgagggcccctcaaaagcagaaatca

SEQ ID NO: 357125 - DNA, 82 bp, Homo sapiens
cttgatcttacagaatcagaggtgcagccgcaagaaaggactacaaatccctccaggatatcattgccatcctgggtatgga

SEQ ID NO: 357126 - DNA, 75 bp, Homo sapiens
tggaagatctcatgatgttcaaccattcacttacactccagacccaggtgatgctactaggaggtggagcctttg

SEQ ID NO: 357127 - DNA, 100 bp, Homo sapiens
caggctgtcctggccaacctgctgctggaggaggataacaagttttgtgcagattgccagtctaaagatttgcttgtaaatgcatcacgaagaggcagcc

SEQ ID NO: 357128 - DNA, 87 bp, Homo sapiens
gcaactcccagctcaatgcaatggaggaacagcacagcatgctgggctctggatttaaagctgagcgcttaagagtgaatttgagat

SEQ ID NO: 357129 - DNA, 50 bp, Homo sapiens
cctggatattcctgcaaacccaacaggcaaatggcatcttggacaccacg

SEQ ID NO: 357130 - DNA, 90 bp, Homo sapiens
gctaagacgccaggacccactggaagcctagaaatgcttccttcaaaatgtctactgttcacgaaatcctgtgcaagctcagcttggagg

SEQ ID NO: 357131 - DNA, 75 bp, Homo sapiens
cccgcaggaactcggcagaggagaaattcagacggctcccgagggttcaagcactgtcttcctgttggccctgac

SEQ ID NO: 357132 - DNA, 75 bp, Homo sapiens
tggacaaattgacccagagcctgtgatgcctgctctaagtatgcagtcatctccaaatggccagtttgtagcgcc

SEQ ID NO: 357133 - DNA, 100 bp, Homo sapiens
ctggtctctggctccctcctcccagggccaggcgccgctcagaacggtgtcatggagaaactccagctgggcccagagattctgcagcgggaaaatccaa

SEQ ID NO: 357134 - DNA, 100 bp, Homo sapiens
catgttgggcgccccggacgagagctccgtgcgggtggctgtcagattttaggtgatgggcaagtcagaaagtcagatggatataactgatatcaacact

SEQ ID NO: 357135 - DNA, 138 bp, Homo sapiens
aaccttatcagcactatttgaaacttttatctcatctggcttggcgcctgaggttctcccattaggtactccaaagattcaggtttactcacgtcatccagcagagaatggaaagtcaaatttcctgaattgctatgt

SEQ ID NO: 357136 - DNA, 98 bp, Homo sapiens
atagaggaagaacttgtccagaatggaacactgggttgctccttgagggcaggacagttcttatggctttatccgttgcgtaagcacagagaggtctg

SEQ ID NO: 357137 - DNA, 98 bp, Homo sapiens
acagcagggactactagacaaaataaaagatgaacctgacaatgctcaaatgcctggagttactgtaaaagacgtgaaccagcaggagttcgtcagag

SEQ ID NO: 357138 - DNA, 75 bp, Homo sapiens
ctccgggctgaagattgcttctcttctctcctccaaggtatatgaagacctgaggtataagctctcgctagagtt

SEQ ID NO: 357139 - DNA, 100 bp, Homo sapiens
tctgactaatatgaatgacaccatggttagccacatgtcctctggagtgcccactcccaccaagagtgcacttggaggctcctcagctcttcatatccca

SEQ ID NO: 357140 - DNA, 75 bp, Homo sapiens
aggagaggagggaactgcggagcgggatgagaacaagttgagcagtgccaacggccatgaagaacgtagcaaaaa

SEQ ID NO: 357141 - DNA, 107 bp, Homo sapiens
aatggactccctggctgctggagagttgaatgccagccaccagccatggttgatattcactgatggactccaaagaatcattaactcctggtagagaagaaaacccc

SEQ ID NO: 357142 - DNA, 101 bp, Homo sapiens
atgtcatgttcagtgaactggtgtggagaatttacagtctctctcagtgatgttttattgacatggaaatacttgctccatgagaaattgaacttaccagt

SEQ ID NO: 357143 - DNA, 90 bp, Homo sapiens
ttcgcagtggtcgcttcttctccttgctgaaaaaaggaagggtgggcagactgtggactctggcctcccgcttctaagcgtgtctgatcc

SEQ ID NO: 357144 - DNA, 50 bp, Homo sapiens
ttgtgtcatctctaccctcttcccaaggaagatgagaatgtgcctactgc

SEQ ID NO: 357145 - DNA, 76 bp, Homo sapiens
taatatttgtcacctgaactacttcacattttccccaatatatggtactccaaagattcaggtttactcacgtcat

SEQ ID NO: 357146 - DNA, 80 bp, Homo sapiens
gccagctgcggagcagtgcgtcagagtttcaggaaatccaggatgagtcagctgtgttatggttggatgaaattcaaggt

SEQ ID NO: 357147 - DNA, 100 bp, Homo sapiens
ggacaccaaggtacccaatgcctgtttattcaccatcaacaaagaagaccacacactgggaaacatcattaaatcctggtaggtgagtgctgtcctcggc

SEQ ID NO: 357148 - DNA, 100 bp, Homo sapiens
gatgagattgatcagtacctcagcaaacaggacgggaagatttacagaagccgagacccacagctgaggaggacttcatccaacccagcagccgagaaga

SEQ ID NO: 357149 - DNA, 83 bp, Homo sapiens
gtcaaatacatctgtgacctgatggtggagaacaagaaggtgaagtttggcatgaattgctgctgacacgccgaccgcctgct

SEQ ID NO: 357150 - DNA, 100 bp, Homo sapiens
actcgtgtggaatacatcacaccctgccacgcaggctgctcaagctgggtggtccaggatgctctggacaacagccaggccaaatttgagtttcatcatg

SEQ ID NO: 357151 - DNA, 106 bp, Homo sapiens
ctcgagtgagcggactgcccaggacttcggaactagacgagattctgtttctggcgtctgcatacgcaagtccccaactcgctgaggagagctgttcagctatggc

SEQ ID NO: 357152 - DNA, 76 bp, Homo sapiens
gaacccattgtcacccctccggtctcctctgagcctccggcctccataagacccaaaacagatgacacctcttccc

SEQ ID NO: 357153 - DNA, 95 bp, Homo sapiens
cagactctggatgagctgaaatgcacacgcttcagcatcagtctgaacaagttgaaatcatcgcagaaggataaagttcgtcagtttatgatctt

SEQ ID NO: 357154 - DNA, 100 bp, Homo sapiens
tctgaaagaatacatcaagattctgaatctggtgatgaacttagcagcagctccactgaacagataagggtgaatgaaaactttgccattgatttgatag

SEQ ID NO: 357155 - DNA, 90 bp, Homo sapiens
ctcatgaatagcaatcacagagactcggagagcatcactggttcatggggactgaagcctatgcagagagtattgacaggaccgtgatgt

SEQ ID NO: 357156 - DNA, 83 bp, Homo sapiens
caatagagtcactgtatttgaccttaaaaagagccttcacgtaaatgggtccagtcatgcctcccagtaagaagccagaaagc

SEQ ID NO: 357157 - DNA, 73 bp, Homo sapiens
ttggagaccccaatccgcatgagcgtcctttcggttcaggaagatttgactgaagagaaaaaaagggaactgg

SEQ ID NO: 357158 - DNA, 83 bp, Homo sapiens
cgagcaccagctcccttctcctcgccactccaaggttgcagacgaagcagaaaaatggctacaaacttcctagcacatgagaa

SEQ ID NO: 357159 - DNA, 90 bp, Homo sapiens
cgtccccggcgcgaagaggctggactcggattcgttgcctgagtgccggtggtggtgtgcacattgagccccggtatagacagttccccc

SEQ ID NO: 357160 - DNA, 100 bp, Homo sapiens
ctcgggctcgggctgatgtcggcacgcctggcgatcctgggcggcgtggaggggcagcctgcttctccaaacaggctggtgtacagggagcaacaccgga

SEQ ID NO: 357161 - DNA, 100 bp, Homo sapiens
gttgtgaccagtggtgagacacgaagagaggaaggggacccatcacctcattcaggagagaacattgaaagtattctctaagctatttgaagagagtgac

SEQ ID NO: 357162 - DNA, 50 bp, Homo sapiens
gtctggaggagccttctcaagaacagaggctatcaagaattttaatggag

SEQ ID NO: 357163 - DNA, 111 bp, Homo sapiens
gcaataaactattcaaaaagtttagacatggagaaaggagttgagaatgacctaagctatcagaatatagggttgaagctttgagagaagcagcaactgctgttgagcaag

SEQ ID NO: 357164 - DNA, 98 bp, Homo sapiens
aatcacagtgctgagtcagtgtgacagtccatatgtaaccaaatattatggatcctatctgaagcctggctgggaagaaagaattcacttggatggcc

SEQ ID NO: 357165 - DNA, 100 bp, Homo sapiens
attgtaaaaagagaacatgcattaacatcaggcacgataaaagccatgttgagtggcccagggatggttgcagaagagtacaatgcctttttctactcac

SEQ ID NO: 357166 - DNA, 89 bp, Homo sapiens
gaatacacacatcacaaagatcctggaatatataaatgtgttgtttgtggaactccattgtttaactggcaatcctttggtccagcaag

SEQ ID NO: 357167 - DNA, 82 bp, Homo sapiens
ctcaattacacttcgactctcaaagcaataccaggatagctgttgtttcagagaaagagtcatcctttttgaacttccatga

SEQ ID NO: 357168 - DNA, 98 bp, Homo sapiens
ctgcggatccagacagtgaaatagctacaaccagcctaagggtttctctactatgtccaataggaaccaaggctttagccttctcaactcattgactg

SEQ ID NO: 357169 - DNA, 100 bp, Homo sapiens
aagaccttcgagaaatgcatcattgaagccgtgagctcagcctgccaggttaacagaaccttctggatatttaacagatggcccaattaactataaatat

SEQ ID NO: 357170 - DNA, 100 bp, Homo sapiens
ggtcatcaaagatgatatttggccaaacccattacagtactacttggtggataaattagatgcttcagaatcactgagaaaagaagaagaacaagctaca

SEQ ID NO: 357171 - DNA, 75 bp, Homo sapiens
cagacccactccaaccgcatctatcgcatgatcaagctaggtctaggtatgtgcaagaggtgaaataattggcgt

SEQ ID NO: 357172 - DNA, 82 bp, Homo sapiens
ctataaataccacaccttcctgcgctgccgggaccagtatctgaagaagctgcacacgcaggagcgggcggtggaggaggtg

SEQ ID NO: 357173 - DNA, 103 bp, Homo sapiens
cttgtggagccggagctgggcgcggattcgccgaggcaccgaggcactcagaggaggtaatcattaccaaatgaggaggaaaggacgatgtcatcgaggctct

SEQ ID NO: 357174 - DNA, 82 bp, Homo sapiens
ttcaaggttgaagaccctggacaccaagccaggatgaccagtgtcccagtgaaggaacgagtgaaggtgtctcagaactgga

SEQ ID NO: 357175 - DNA, 82 bp, Homo sapiens
agagggaagagattcagccagcacactcctcgcgagcaagcctgacatttaccccggtaactgctgggcatttaaaggctcc

SEQ ID NO: 357176 - DNA, 75 bp, Homo sapiens
ccggtcccgacacctagcctgcgaatgtagcaaacctcgagaagcctttggatttgaacaagctgtacgagagta

SEQ ID NO: 357177 - DNA, 99 bp, Homo sapiens
gggccattgagaaagacatgatgaaaaaggaaataacgaaagaaagggagtacatgggatcaaaggatatcatttacaaggtaaaaactgttttcaata

SEQ ID NO: 357178 - DNA, 100 bp, Homo sapiens
gcggcgctgactcccggacgccgcccgctcacacccgccgcctttgcacccaaggcctcgcgcgaccagcagtgcaagattcttcttcagtaccactgcc

SEQ ID NO: 357179 - DNA, 75 bp, Homo sapiens
atcctggacatggccaccctgaccggggctcagatgtgttctgagctggatgccgggttccagaatcgctgcaca

SEQ ID NO: 357180 - DNA, 75 bp, Homo sapiens
tccacatccttccacccacccaggattcagatagtccactgtgtgcagaggcatgggagttgtcatgttgggaac

SEQ ID NO: 357181 - DNA, 50 bp, Homo sapiens
gaggcactgaggcaaaaacgagccgcctggaagcaagatggtgtcctctg

SEQ ID NO: 357182 - DNA, 100 bp, Homo sapiens
acagccccacagaagaaaaagctccaagacacaccttcagaacccatggaaaaggacccagcagagccagaaacaggcactatgtcgtccgaggcccaga

SEQ ID NO: 357183 - DNA, 51 bp, Homo sapiens
ggatctggtaacatggcaaaagatggtatttgaagtataccatacaactgt

SEQ ID NO: 357184 - DNA, 75 bp, Homo sapiens
acctgattgcctgcctgcttcagggctgctatcaacgaagagatatcacagcatctgttaagaacatcttcagcc

SEQ ID NO: 357185 - DNA, 100 bp, Homo sapiens
cagccgtcccctctgcagcctctctgacaagtgcatgcatgagtgaagagaccagtaaccaaaagcagcagcagcagcagcagcagcagcagcagcagca

SEQ ID NO: 357186 - DNA, 100 bp, Homo sapiens
tcctctctttactgctgaagctttacttcgagctcatgattgcaaaggtcgactgcaaggaagtactagacatcatttgtaatctggaatctgaggggca

SEQ ID NO: 357187 - DNA, 74 bp, Homo sapiens
tgaaattacctctcagactttctgtaaaggaaaacaagtgggagtctcgggtgactcaatatgaaagggacttc

SEQ ID NO: 357188 - DNA, 100 bp, Homo sapiens
ctcagccccatggggtatatccaccctcaagtgtgcacatgcagatgacaatccaggctctccaggatgaattgcggatccagagggacctgaatcagct

SEQ ID NO: 357189 - DNA, 82 bp, Homo sapiens
gagcggcctgcgggcgatcgggccgagggtctccctccactgctgtagtaacccgggtccggggcctcggtggtgctcctga

SEQ ID NO: 357190 - DNA, 80 bp, Homo sapiens
ggggatagtgtcatcggttcggtaaagtttctgttctctgaagaagaaaggagggcgcgggctaatgaccgagaatacaa

SEQ ID NO: 357191 - DNA, 100 bp, Homo sapiens
aagcatgtggctcctggtcagtgtaattctaatctcacggatatcctctgttgggggagaaggtaggagcattgcttttcgtggtgaaagaggcaatgat

SEQ ID NO: 357192 - DNA, 82 bp, Homo sapiens
tcgcgggtgaccgaaaggatcatgaactagtgacctggaaaggaattcatgatttgttcctgtagctgaaacatacattgaa

SEQ ID NO: 357193 - DNA, 75 bp, Homo sapiens
aggattccaagtaactcttatttggagtggagtcggttcttatacaactatgggctgaaaccatgaggcgtgctg

SEQ ID NO: 357194 - DNA, 80 bp, Homo sapiens
agcccacatgcccgctcacctgcgctgtgatgcctgcagagctgtggcttaccaggtgcctgagatcatcagctccatcc

SEQ ID NO: 357195 - DNA, 83 bp, Homo sapiens
gaagccagcagccaagccggggcagtttcagtctccaccccaaatgcagaatgaactctggaagcccagccagggacaatgca

SEQ ID NO: 357196 - DNA, 75 bp, Homo sapiens
gtgggctttcgcccgcggctcctgagggatcggtctcagccgcgcggccctgggcgctgcctatggcacagccaa

SEQ ID NO: 357197 - DNA, 121 bp, Homo sapiens
gcgttctgcacaccgaggaaatgcgcttcctgagggagtgggtggagagaagtgacagctttgagaaccccgtgctgcagcagcacttcaggaacctggaggccttggccttggatttgat

SEQ ID NO: 357198 - DNA, 101 bp, Homo sapiens
gggtgagcgtcgaggaggcgcaggagactgaccgcaacggcaggccacaatggtgcgcatgaatgtcctggcagatgctctcaagagtatcaacaatgccg

SEQ ID NO: 357199 - DNA, 100 bp, Homo sapiens
ccaggcaggctgctaccgcccctccgcttccagacattctcagctgtcaggttctagagccttctttccgccaggcctttcccaataccaaccgctggtt

SEQ ID NO: 357200 - DNA, 100 bp, Homo sapiens
cagatttggaattttcatcagattttaccctgaaaatcacaaggacatccatgtgcacggtcttcaaagcttcacctttctccaaaggcagatgtgaaga

SEQ ID NO: 357201 - DNA, 82 bp, Homo sapiens
ctccttcagtgagcaaggcatcaacgagtttctcagcattactctactgactggcagagacaggagaggtagatgtccacgc

SEQ ID NO: 357202 - DNA, 98 bp, Homo sapiens
cattgctggagtgatctatcaggcaccagacttgggatcagttataaactctagagtggatttaataagaaggcagtaactgacacacatgaaaatgg

SEQ ID NO: 357203 - DNA, 75 bp, Homo sapiens
tggaggagctggtggtggaagtgcggggctccaatggcgctttctacaagtgattcgcctttgccagtctcatct

SEQ ID NO: 357204 - DNA, 100 bp, Homo sapiens
gaaggaaccatttgtggagttaaatagaatattagaggcattaaaggtcagagttctgagacctgctctggagtgtcagctgtgatgcatgtttaaaagg

SEQ ID NO: 357205 - DNA, 100 bp, Homo sapiens
cagagccaaggccaagctctccaagttcagcatccccaagcagggggagagagctattgcttaccttttcccaagtggtttgtttgagaaacgagccagg

SEQ ID NO: 357206 - DNA, 100 bp, Homo sapiens
ttgaagatgaaggattaattacacaaggtggaagcggtactgaccccaccggcaagaacatttacctgcatgatatttggcctagtcgagaagaagttca

SEQ ID NO: 357207 - DNA, 90 bp, Homo sapiens
ctaagactgcttccaatgtagaagaggaagtcggcttggccctgaggacattattggccactgtggatgagaccattcccctcctaccag

SEQ ID NO: 357208 - DNA, 48 bp, Homo sapiens
caggagccgacttcagtacatggtgccaggcccacccccaggtgttcc

SEQ ID NO: 357209 - DNA, 83 bp, Homo sapiens
atgataaagatgatgatatccttctcaaccttgtgggatgtgaaaactctgttactgaagatgctattccaagttcagatcaa

SEQ ID NO: 357210 - DNA, 80 bp, Homo sapiens
ctctaattgcctcctgatagcacacagaaagcttggatttacactgggcaacgtggttggaatgtatctggctcagaact

SEQ ID NO: 357211 - DNA, 75 bp, Homo sapiens
cataagcataatcaagaaatcattttgcaaatgacctctcacttgactatgcctctcagccagcaaatcttcagt

SEQ ID NO: 357212 - DNA, 75 bp, Homo sapiens
gccgggagtcgctgggtgcgtggggctgcctcgccgcgtctcgccacggtgaccaggcattgatgcacccccagg

SEQ ID NO: 357213 - DNA, 74 bp, Homo sapiens
agaatctagaagagccatccagatatgagggcttatcgagacaaattgaagttttggacccattgtgtactagc

SEQ ID NO: 357214 - DNA, 51 bp, Homo sapiens
caagaatgaagccacggaccctcgcggtgtgatgaatgcagactctgctac

SEQ ID NO: 357215 - DNA, 99 bp, Homo sapiens
gcagttcaattctgtgcccgcaaagtctctgctgtttcaggagatgttcgcaaagcactggatgtttgcagggcttcttccgccgcagcatccagaaga

SEQ ID NO: 357216 - DNA, 74 bp, Homo sapiens
agaattataggaacctggtctccctggatatgcacccaatgtccagggagcgtgcaaaatttgtcaaaagtggc

SEQ ID NO: 357217 - DNA, 96 bp, Homo sapiens
ccatcgccagcatcgccaacccggactggatcaacaccggggagtctgcggctgatgttctaatcatgtcagataaagatgatattgagactccac

SEQ ID NO: 357218 - DNA, 100 bp, Homo sapiens
aagagcacgccatgcccattgggagaatagcagggcatccgcttcgatcctgaaattccgcaaacactacgactagagtttgctaaggcaaacacgaaga

SEQ ID NO: 357219 - DNA, 106 bp, Homo sapiens
ccgggccctcggcagggaggatgacggagctgcagtcggcactgctactgcgaagacagctggcagtgttctaagaacggaagcatctgggctggatggaatttag

SEQ ID NO: 357220 - DNA, 85 bp, Homo sapiens
ccctactgtcaactgtcaaccactgggaatgctgcaagctttcttcctggtggcagatgacatcatggattcatcccttacccgc

SEQ ID NO: 357221 - DNA, 90 bp, Homo sapiens
gctgcgtcgcccgaggcgaggaggagcgctggcggacgaatgccttagtttccactttccagcctggatcccctcacactgaacccttct

SEQ ID NO: 357222 - DNA, 82 bp, Homo sapiens
cgcgtctctctgctgcggcgcggggaccgctgtgctctcgggcgagctggagcggcagctgctgcaggccaaccccatcctg

SEQ ID NO: 357223 - DNA, 82 bp, Homo sapiens
ccggccccgcccgcgccggaagagccacgccggaatactcccccagttgcaagaggcgcaggaccgtggaagacttcaacaa

SEQ ID NO: 357224 - DNA, 80 bp, Homo sapiens
ccaaccaaaaccgtgaatggtgtctggaggagtgagagccggcaggttgaagaagcctcagcggaggcgatacggcctcc

SEQ ID NO: 357225 - DNA, 83 bp, Homo sapiens
tgaaaacatcagcaaatggcttagaaacatagatgagatctcagtggttcaatagcatccccagatgtcaaattaaatcttgg

SEQ ID NO: 357226 - DNA, 49 bp, Homo sapiens
gcaaaatatacctccttctcttcggtgctggagaatctggtaaaagcac

SEQ ID NO: 357227 - DNA, 83 bp, Homo sapiens
gcagaacgtcaacaccaagtgcatcaccatccccaggagcatattaatgaaaagtgccataaactgaaaaaccaaacatgagg

SEQ ID NO: 357228 - DNA, 75 bp, Homo sapiens
tgagcttgtggaggtggtcggcaatggaacctacggacaggtgtacaagattacctaaaacctcgggcagaagag

SEQ ID NO: 357229 - DNA, 75 bp, Homo sapiens
gtggggtcactggtgtatgtcatggaagaggtctctttggaagcaataatgatgactataacaagaacttatctt

SEQ ID NO: 357230 - DNA, 51 bp, Homo sapiens
ggaggtggaggaggcgccggaccggggggcaaatccagtttgctgatgaca

SEQ ID NO: 357231 - DNA, 100 bp, Homo sapiens
gggatgagctctgggcaggacggcgggccgaggagcccggggagggacccggagctccaggactgttgggaaagatcctgatggctatccgagatgcagg

SEQ ID NO: 357232 - DNA, 96 bp, Homo sapiens
gctgcaaggaactgatagcttatggttctccattgtgatgaaagcacatggtacagctgtcggaaaaggtaacagaagatggaactcgaaatccca

SEQ ID NO: 357233 - DNA, 75 bp, Homo sapiens
ggagaatatttaatggaaaatcgcttggttaaaacctgacacttttaacagatattatgaactagatccttataa

SEQ ID NO: 357234 - DNA, 98 bp, Homo sapiens
cgacacatcaaattctggtatctcgatgacagcaagacctcaaagtgctcaagtaaagctctttgtgacagggcttttcagcttaaatcaagatattc

SEQ ID NO: 357235 - DNA, 96 bp, Homo sapiens
actttcctggcccttttgaagaggaaatgaagggtattgccgctgttactgatatacctttaggccctcgggaccaaggatcacgtcatgactccg

SEQ ID NO: 357236 - DNA, 83 bp, Homo sapiens
atttacgcggatgtcggcgaagagttcaaccagaggctgaggggatctggcggtggagcgctaggatcagacgcccccgcgat

SEQ ID NO: 357237 - DNA, 78 bp, Homo sapiens
tcagtttgctgaaattaatcaacgattcttgaagttgaagaaaagacagtgatgtgtgttctgaaattgtgaaccatg

SEQ ID NO: 357238 - DNA, 82 bp, Homo sapiens
cagctagtccttgactgcagtgctgaatggcttgattttctagaattactgacagccctgtcctaggagcacaacgtccgag

SEQ ID NO: 357239 - DNA, 75 bp, Homo sapiens
tgaccttcacctcattaacagagaccctcctgttcttaactgtgggcgatgagaaaggtggtggactcttcttac

SEQ ID NO: 357240 - DNA, 82 bp, Homo sapiens
ggagatcccgctggtgaccctgccgctggcgagcgccaccgcatgggcaggtgacagcagggacatgtctcgggagatgcag

SEQ ID NO: 357241 - DNA, 90 bp, Homo sapiens
cccgataagaagaaaatacttttcttcaatgataagagctgtcagttttctgtggatgaagacgttcttgcatcctcagcctgtgtcagc

SEQ ID NO: 357242 - DNA, 87 bp, Homo sapiens
aaaccaccctctcctgaccctgaagaactgtggaatactcccccagttgcaagaggcgcaggaccgtggaagacttcaacaaattct

SEQ ID NO: 357243 - DNA, 51 bp, Homo sapiens
gcaagactggcacccagcacagcagggggagtggccacagcaggtcctatc

SEQ ID NO: 357244 - DNA, 82 bp, Homo sapiens
gactgagaagccgacccactacagaaaccaaggtgtatgttggtaacctgggaactggcgctggcaaaggagagttagaaag

SEQ ID NO: 357245 - DNA, 75 bp, Homo sapiens
atgattattgtatttcgccgtcaacaggtcctgggaactccaacaagggagcaaatcagagaaatgaacccaaac

SEQ ID NO: 357246 - DNA, 98 bp, Homo sapiens
gctcagcctggtgaaccacacagctcgcaaaggatctccttcatccctctccagaagaggagaagaggaaacacaagaagaaacgcctggtgcagagc

SEQ ID NO: 357247 - DNA, 74 bp, Homo sapiens
tcaccacgtactggctagacttatacttctcaaatcttaatttcctaaagccaacaaatggaattttcttgagc

SEQ ID NO: 357248 - DNA, 100 bp, Homo sapiens
cagaccccagacctccccacctcccacctgcaccagcaccaacgggaacagcctgcaagaactctactacgatcgcgggaaccaccatgagtttgtgtcc

SEQ ID NO: 357249 - DNA, 100 bp, Homo sapiens
aaaaaggatgatattggacgaaggaatgggcaaggatcgaacctgcaagcacttatagacagtactcgggaaccaaatagctctgcacaaattgatattg

SEQ ID NO: 357250 - DNA, 132 bp, Homo sapiens
tggttggcccagctccttggggtttccggctgcagggcggtaaggatttcaacatgcctctgacaatctctagttcaagctacaacttcaagcagaagagagaggagttgtgtctatcaaaggagtgtgtgc

SEQ ID NO: 357251 - DNA, 74 bp, Homo sapiens
agttgattgaaattatctctggtgctgcagctctgaaaagagcactggttgccattggtacccatgatttggac

SEQ ID NO: 357252 - DNA, 74 bp, Homo sapiens
gacatggaacagggactcactgggggtctgttgcagcttgctagaggtccactccagaccctgttcacctggga

SEQ ID NO: 357253 - DNA, 80 bp, Homo sapiens
tcccgtccgccccagccgcgtctgggccaggagaaaaggaagttctactacatcaccctgctacgagaccccgtgtcccg

SEQ ID NO: 357254 - DNA, 50 bp, Homo sapiens
ggcacggagtcgccgcggagcgcagattcccaacttcttctggagcctgg

SEQ ID NO: 357255 - DNA, 75 bp, Homo sapiens
caaattatgctgcagcatattgtactggcctgctgctggcccgcagggtgtcaaaactggaacaagaacttcaaa

SEQ ID NO: 357256 - DNA, 74 bp, Homo sapiens
tgaagagctgctgaagtacatgcttcatagtccttgcgtctctctgtgaaaggtgtagcagtcactcggcctac

SEQ ID NO: 357257 - DNA, 80 bp, Homo sapiens
acccgggcgggcgaatccgtcagctcccgcgggaggcccggcgagagaaggacccgcttcggaaccaaaaagaagcttcc

SEQ ID NO: 357258 - DNA, 75 bp, Homo sapiens
gcatctttctcatgaagcacggggaacgggtcggatgacaaagatcattccactcagcctgggacgatggggagg

SEQ ID NO: 357259 - DNA, 100 bp, Homo sapiens
agcagagactggtcttgaagagcagcttagcgaaagaaaccctctctgagttcttgggcacgttcatcttgattattcagtaagctgtgaggtccgtaat

SEQ ID NO: 357260 - DNA, 100 bp, Homo sapiens
cacattttgcagcctgcaccggccaacggaataggaggccttcaagattttgtgctgaaatctgcaacactgtgtagcctgccatcctgcccaccattta

SEQ ID NO: 357261 - DNA, 146 bp, Homo sapiens
tttgtgatccattcacttctgctactaccactaccaataaagaggctgatccaagcaattttgccaacttcagtgctggagagtcccgtattctcagagtaaaagttgtttctggaattgatctcgccaaaaaggacatctttgga

SEQ ID NO: 357262 - DNA, 75 bp, Homo sapiens
ccgcctctgtattacttaccaggctgagccagcaacctccttggcacctggggacagtcgcttcctcagtttctg

SEQ ID NO: 357263 - DNA, 75 bp, Homo sapiens
cacagcaaccagcaccagatgaaggagcattcctcttggatatggctcgtggacagcagaaaattcagtctcagc

SEQ ID NO: 357264 - DNA, 82 bp, Homo sapiens
ggcccgcgggtctacttcctcaaaggagccttcacgtaaatgggtccagtcatgcctcccagtaagaagccagaaagctcag

SEQ ID NO: 357265 - DNA, 74 bp, Homo sapiens
caaaattctgaactcaggacttggcaaaggagaaggcagagcccccccaggctatgaatgccctgatgcggttg

SEQ ID NO: 357266 - DNA, 82 bp, Homo sapiens
atgactgagtacctgaaccggcacctgcacacctggatccaggataacggaggctgggcatccagtaccctgctgactctga

SEQ ID NO: 357267 - DNA, 83 bp, Homo sapiens
ccggaggatcagaatcaagtcctatagcaggcatgctgcttgcagggtttctcatcagaaatatcccagtcatcaacgataat

SEQ ID NO: 357268 - DNA, 82 bp, Homo sapiens
aaggggacccagtgcgcccgcatcgtcgaggacggttcactgggaaacatcgatgacctggcgcagcagtatgcagattatt

SEQ ID NO: 357269 - DNA, 82 bp, Homo sapiens
caccagcaccgcagatgttgtcaaggtggcctaccaggaggccaggggtgtcgccatgacaggggcaagtgtccgagtggtg

SEQ ID NO: 357270 - DNA, 87 bp, Homo sapiens
ctgggcagcttcgtggaggagtacaacaacaaggaacagcttgagaactatgacttcaccaaattccactcgctgaagcccaagctg

SEQ ID NO: 357271 - DNA, 83 bp, Homo sapiens
ctgcgactcagctgcgaggccacgccttgaaatggatgcagtcagaactgaatgttgaagaagtggtaaatgacaggagctgg

SEQ ID NO: 357272 - DNA, 75 bp, Homo sapiens
acatcaagtccagggttaagtacagaaggtggagccgccaccaaaatgcagattttcgtgaaaacccttacgggg

SEQ ID NO: 357273 - DNA, 74 bp, Homo sapiens
cctattccactggattgggaaagaccatggcaggttgcctggcagagcagtggtccggcaagaagggagacaca

SEQ ID NO: 357274 - DNA, 50 bp, Homo sapiens
cacacagtgtccagatacgaggttttcggctttgtgagaaaccttaccat

SEQ ID NO: 357275 - DNA, 75 bp, Homo sapiens
agagcagctcctcactgtcaagcacgagctgcggactggttttaaaatcaaagatgggaaaatcggagaaaattg

SEQ ID NO: 357276 - DNA, 100 bp, Homo sapiens
atggaagtagcataactgtcaaccagactaacaagagattcaataagtgtaattggcagaaacaacagcaacaactttgacctgaaccgaaatttcccag

SEQ ID NO: 357277 - DNA, 75 bp, Homo sapiens
ggagaaggaagaggtgtttgaaaagactcccaagacagctgggctgcgaccaatggaaacaaaggacattccagt

SEQ ID NO: 357278 - DNA, 99 bp, Homo sapiens
tgtctggacaagaagtcgtagggggtgagggtggaagctgggaaacccacaggaggcaaccacactagtttagatttggaacattgctaccaataaact

SEQ ID NO: 357279 - DNA, 50 bp, Homo sapiens
cttcactggacccagctgtgaaacggcttaaaggagctgctcctttgaag

SEQ ID NO: 357280 - DNA, 50 bp, Homo sapiens
cggcaggggcggcggccttacggttcaaggagcagggacaagttacagga

SEQ ID NO: 357281 - DNA, 90 bp, Homo sapiens
gagcttctcagaagacagagggttttcttttgagatccatccctaccagggactcagcagggcctaagcagggggagtgggagaacagac

SEQ ID NO: 357282 - DNA, 57 bp, Homo sapiens
agctgcgctcggagaacgactatctcaaggaagttggaaatctgtatgacatgttcc

SEQ ID NO: 357283 - DNA, 100 bp, Homo sapiens
gaagaaggatctttgagtctagcaagtgttattatttctgccctttgtacccttacaaggttttccctgatgaatttcacctccagactttgaatccttt

SEQ ID NO: 357284 - DNA, 90 bp, Homo sapiens
atgcaaatacttgtgcactgggagagcacacaagtgtggagagtgaggcgaatctccattcttcctccagcactttttccaccacatcca

SEQ ID NO: 357285 - DNA, 100 bp, Homo sapiens
aggcatcctactatgcttcctgagtgcttctttcttggagctgaccatgatgatgttgaatttgaagtatcatcggaccgacggactgggaaacccattg

SEQ ID NO: 357286 - DNA, 83 bp, Homo sapiens
ccgggatttgggtcgcagttcttgtttgtggatcgctgtgatcgtcacttgacacacaaactcgggccacttctaagagtctc

SEQ ID NO: 357287 - DNA, 82 bp, Homo sapiens
gcagcaaatactcagaaacatccttccagaaggagcgaactgaagaggttctacacaattgaatcttatggcaagggcctta

SEQ ID NO: 357288 - DNA, 101 bp, Homo sapiens
aacatggtggacagaaagtcagcctcttgtgatgacaagagcacctcaaaggcagcagcctcaaggagcagccatggccccagacttgtcgcacggatgca

SEQ ID NO: 357289 - DNA, 100 bp, Homo sapiens
aagcgacacgagttatttccaaggcctcagcatacacaggaatgttgtcttctagatatgccactgatacatgtgattcgcctttgccagtctcatctcg

SEQ ID NO: 357290 - DNA, 75 bp, Homo sapiens
gaatctgtacccattattggtggtttttgggagactatctttggcaacagatgatggagtttcttcagttaatga

SEQ ID NO: 357291 - DNA, 100 bp, Homo sapiens
tggaagctgggccagggattgggaaaatctcttcaggctctttcgacgtgtagcagcagctttgccgggaatggaaagcacacaggacagaagcagagaa

SEQ ID NO: 357292 - DNA, 75 bp, Homo sapiens
cgggtcccgcgggccaggccgtggagtttggatgctcttccaagagtcacatgtccaaaccatccagatgcgatt

SEQ ID NO: 357293 - DNA, 83 bp, Homo sapiens
gctgggcacccacggagcctccggggctgggggatatgagactttctactcggaatatcctgagtgttgcgtggatgtaaaac

SEQ ID NO: 357294 - DNA, 100 bp, Homo sapiens
ttgacttggggatccaaaggcacagtgtgaagaagatggtagaaatcaactttctttgtgttcataagaagttgagatcgaaacgggtagccccagtgct

SEQ ID NO: 357295 - DNA, 90 bp, Homo sapiens
ctgggggttgcagctttgtataaggttaacacagaaatctgcctcctgggccatgccgcttctaaggcctgtttcttctcatgagcccca

SEQ ID NO: 357296 - DNA, 83 bp, Homo sapiens
cgggagctgtcggccccggcccgactctatcacaagaagtctctgctttctatccgtcaagatgataaagtcgtgtgcccgag

SEQ ID NO: 357297 - DNA, 90 bp, Homo sapiens
caagtatccagcctatattgttacaattttttttcaagaactgccgtcttctttgcctgcactaatgaaatctagttcatatgattgaac

SEQ ID NO: 357298 - DNA, 100 bp, Homo sapiens
agtcaagagcctgcggatccaggagcaggtgcagcagaccctcgcccggaagggccgcagctccgtgggcaacgattcagaatggacagtttagaagaac

SEQ ID NO: 357299 - DNA, 75 bp, Homo sapiens
ccgctttggagaactacatcaaccatcgtgttcgacgagtgtcacaaagccaagaatgccggctccaccaagatg

SEQ ID NO: 357300 - DNA, 100 bp, Homo sapiens
gaagaagatcaaaacccaccatgccccagcctgctccacccagagaagcacactttgtgagaaccaatgggaaggagcctgagctgctggaacctattcc

SEQ ID NO: 357301 - DNA, 90 bp, Homo sapiens
ctccctcctttaaacagcttctccgggtctcagcatgataaaactgtgaagctgtggaaagtcagcgagcgtgataagaggccagaaggc

SEQ ID NO: 357302 - DNA, 74 bp, Homo sapiens
ggagcggcgagcatggcccgcgcggcgccgggcgctgactgagaatgtccctcttccagtggaaagcccaacca

SEQ ID NO: 357303 - DNA, 75 bp, Homo sapiens
gaaaaataccacgacaaaaccaccctatgatgatttactggaggattcagacagtgaagagcattccagatcaga

SEQ ID NO: 357304 - DNA, 100 bp, Homo sapiens
ccgacttcgagaacaagcccatgatcctgctggtgggccagtacagcaccggcaagaccaccttcatcaggtttatgtgagattaagaccatttttcagg

SEQ ID NO: 357305 - DNA, 90 bp, Homo sapiens
aaagaagctgccagacttggtattcacaccattaagccacctgtctttaccagtttccaagactatgttactgggcttcagactttaatt

SEQ ID NO: 357306 - DNA, 50 bp, Homo sapiens
ggcctctgggtccaccaccttcaccaaggaggaggaaggtgaggacggcg

SEQ ID NO: 357307 - DNA, 80 bp, Homo sapiens
tacagcacagctgcccctgcctatgacaatgcagatcttcgtgaagactctgactggtaagaccatcaccctcgaggttg

SEQ ID NO: 357308 - DNA, 101 bp, Homo sapiens
cgcggcgctgcggagggcttgaggctcgcgagcctccttcgccgcgccccacttgctcgtgcactttacacacatgaggatttaggtcctgaatatgaagg

SEQ ID NO: 357309 - DNA, 73 bp, Homo sapiens
ccagctgcgcagggcctgccaggtggcgctcgcctgggttactaggtgtctttcagaagctgattgcatccaa

SEQ ID NO: 357310 - DNA, 100 bp, Homo sapiens
gcagcagcatggctatgcaaccggcctcatagaagtaaaatgcccattcccatcaagaccagacaatggatttgtgaactatcctgcaaaaccaacactt

SEQ ID NO: 357311 - DNA, 88 bp, Homo sapiens
agaaattcttggctgaggcagctattcggtttgagcctcaggcccaggcccaaggccaagtgagagagcccaggccacaggacatgct

SEQ ID NO: 357312 - DNA, 90 bp, Homo sapiens
ggtctgcccacctatcagagaagcagaaggcacagtgcctctgaccagcatcgtctgtaaaggtccagccgccgcagggaatgacgccgg

SEQ ID NO: 357313 - DNA, 100 bp, Homo sapiens
tggaggaatacacttatttatgaagtacttagtgttggatgaagctgataggatgctggatatgggatttgaacctcagatacgtcgtatagttgaacaa

SEQ ID NO: 357314 - DNA, 100 bp, Homo sapiens
cgagaagttgagggagaaaggcgggcccgggaacaggtcctggagtacaatgccattggaggcaagtataaccggggtttgacggtggtagtagcattcc

SEQ ID NO: 357315 - DNA, 75 bp, Homo sapiens
caaaatttcaggtcttaaatctggaattactctgcttaatgtaagcaagctgaacattttgaagcttgctcctgg

SEQ ID NO: 357316 - DNA, 82 bp, Homo sapiens
ggattccacagtgtcctctggaaaatgtcttattgttacaggtatcgctgtgctgctcggagccagaacacacctgatagct

SEQ ID NO: 357317 - DNA, 74 bp, Homo sapiens
gaacagattcagaaggagcaggattaccaaagggaatcagagatcattgatttcttcctgggggcctctctcaa

SEQ ID NO: 357318 - DNA, 75 bp, Homo sapiens
attttagcaacgcagaagcccggcgccgggaagcctcagctcgcctgaaggaaacttttgagaagaactttgaaa

SEQ ID NO: 357319 - DNA, 75 bp, Homo sapiens
gccgcgtctgatcgccgagcgcgccgcgtagacctccgctcccccagtgatcagggccaaagcggtcagtgagaa

SEQ ID NO: 357320 - DNA, 51 bp, Homo sapiens
cccggggaaggcgccagcgaagaagtttgttggagactgaaccgttgcaag

SEQ ID NO: 357321 - DNA, 55 bp, Homo sapiens
tgggcggcagagagcggggcggcggcagcgtctgctgcagagaccatgtctgccg

SEQ ID NO: 357322 - DNA, 82 bp, Homo sapiens
gaagtggtatcatgagagatatagcccacttagaaatcacagaattacatgaatgacagtcttcgaaccaatgtgtttgttc

SEQ ID NO: 357323 - DNA, 46 bp, Homo sapiens
caaagagtggtactggaaccagggtggttctcttcccaaagtggaa

SEQ ID NO: 357324 - DNA, 100 bp, Homo sapiens
ccctgatggaattatgcagtttattaagtgttttctaaagatcaaacccgtgtctctcacattttctcaagcaagcgatacctgtcactcctatggtggc

SEQ ID NO: 357325 - DNA, 87 bp, Homo sapiens
ggagcgcgtggaggagccggtgctgcagaaccagatccgggagcacgtcatcgccatcgaaggtcctcagccagcagagccacgttc

SEQ ID NO: 357326 - DNA, 100 bp, Homo sapiens
cgcacaatgacctgtgaatatgcactttgctcattctttgtacctggtgatagacaggtagtcataggaacaaagatcgatgctatagaagacaaacaag

SEQ ID NO: 357327 - DNA, 83 bp, Homo sapiens
cggggagcacacggagcactgcaggcgccggctgaaactagaggaccgttctgtggtgccccgagatgtggtccggcacatgc

SEQ ID NO: 357328 - DNA, 84 bp, Homo sapiens
ccttccgagtagctgggactacaggttgctgctgactcagccattctagaagttcttcagtccaacattcagcatgtgctggtc

SEQ ID NO: 357329 - DNA, 75 bp, Homo sapiens
gtccgcgtgcagccacagcatcctgagaccttcggggcccggagcagaggagaaggcagagcccccccaggctat

SEQ ID NO: 357330 - DNA, 100 bp, Homo sapiens
gaggcccaacagtggaattattgacccagggtcaactgtgactgtttcagagttggattacagaaactcctatgaaattgaatatatggagaaaattggc

SEQ ID NO: 357331 - DNA, 83 bp, Homo sapiens
aggaggcagaggcacttatgcttgtcagaatgttggctaccagggtatttagcctagttggcaagcgagcaatttccacctct

SEQ ID NO: 357332 - DNA, 100 bp, Homo sapiens
agagcaggccatgattggaccatcccccaatcctctcatcttgtcctacctgaagtatgccattagttcccagattatgatgatggcttttcaatgaagc

SEQ ID NO: 357333 - DNA, 90 bp, Homo sapiens
gtcttatcgaaggatgtgcatgaaggacagcctcttctcaatgatacctcaaatcagctatgcatccacagccccagagctaagtgataa

SEQ ID NO: 357334 - DNA, 130 bp, Homo sapiens
aggccagcatccttcagaaaaagcatccccgaggaggaagacgaatcgttaaacatctgaaagggtcagacaagttggatggcttgaggactggtactaaaaggaaacgtgactgggaggccattgccag

SEQ ID NO: 357335 - DNA, 73 bp, Homo sapiens
gcgaacattccttttaacctatgtcttacaaaggcccaagtactggtatcttgggcctctaaaaatcaaagca

SEQ ID NO: 357336 - DNA, 100 bp, Homo sapiens
aacaggtgtaattaccccagaagagtgctggacccaaaggagacaacatttatgaatggaggtcaactatattgggacccccaggatctgtctatgaagg

SEQ ID NO: 357337 - DNA, 98 bp, Homo sapiens
atcaatttccttgcaattaaccaaaaaggaagacaccctctctggacccccatcagaccaaagagcagaagattctgcaggaaactctcaatgaactg

SEQ ID NO: 357338 - DNA, 90 bp, Homo sapiens
ctcggcggagcagaggaaccacacgctgatcatgccccagcatgagaccagatgtaagctctcctccatccagctcctcaacagcaacaa

SEQ ID NO: 357339 - DNA, 95 bp, Homo sapiens
gtacagagatgtgatgttggagaactatagcaatctggttttcttgggaccgtataatagacgctggccccaaaggaaactactctcgatttatg

SEQ ID NO: 357340 - DNA, 100 bp, Homo sapiens
ttcggtgaagcgattcctgcaggcgttggttcccctctttgacctgatgggccatcaactgagaaagaccttgacgaaaagaagaaagaacctgcaatta

SEQ ID NO: 357341 - DNA, 83 bp, Homo sapiens
gatgcacgtgaataattttccctttagaaggcattcctggatatggccaagaagcttgagagaagaaaaatttcagaaaaatt

SEQ ID NO: 357342 - DNA, 100 bp, Homo sapiens
ctgctacaggactctactatggagactttaagaaagaaaggccttaatggttgtgagagccctgatgctgacgattactttgagcacagtccactctcgg

SEQ ID NO: 357343 - DNA, 100 bp, Homo sapiens
ttataccaacgttgagcaagatgcagaaaccaacagacaatgccaatttacgtgtcattatggaactacttatgagtgacagctggagtatcagccttgg

SEQ ID NO: 357344 - DNA, 82 bp, Homo sapiens
aacgggaggtgaatttccatgtcaacatagtcctggcgcatattaaatttcctattgactacccctattcaccacctacctt

SEQ ID NO: 357345 - DNA, 98 bp, Homo sapiens
gtgcgctgtgtcactctgtccctggaccgatttgaaaaccaggtggatatgaaagcctcacagaatgaggttcctgcggcacccctggaagaactggc

SEQ ID NO: 357346 - DNA, 100 bp, Homo sapiens
tcttgcgggaaaaggagagctcggctgttccagccagggagaccctcctgttcttaactgtgggcgatgagaaaggtggtggactcttcttactggcagg

SEQ ID NO: 357347 - DNA, 83 bp, Homo sapiens
ccaaactgtcacagaaagagctgttaacacttcctagataacggctgctcagatggaagataaaaagccctttatcctgtctt

SEQ ID NO: 357348 - DNA, 98 bp, Homo sapiens
gaggttcttcagtgtatgcctgggcccaatgtaaaggctgttgctactgctgtggaacagatttacccatttgtgtttgaaagcaggaaagaaatttt

SEQ ID NO: 357349 - DNA, 82 bp, Homo sapiens
ccagcggcaggaccagcgggcgggggcccacgagtccggcctctttggcctacccccgttggctccgctgccccaggtcgat

SEQ ID NO: 357350 - DNA, 82 bp, Homo sapiens
gcctgcagagcccggccaacaatcacaacttgagttggtggaaccaagtggctggattcatgttcccttaactgacaatcat

SEQ ID NO: 357351 - DNA, 100 bp, Homo sapiens
tttagtattgagtggaaaagaatgtttttacggtgaagtggatcctaaagagaggatagcacgccaacgaaaattattacagaagaaacttggccttaat

SEQ ID NO: 357352 - DNA, 75 bp, Homo sapiens
tggaatcacaataatttcaggctgagcaggagcagtgacttcacctgagaacatcccagcgggaggacaagagaa

SEQ ID NO: 357353 - DNA, 75 bp, Homo sapiens
atgagatggtagccaacccctcagaggtcatgacgccagtcagatcacactagccttgggcacagctgcctccta

SEQ ID NO: 357354 - DNA, 97 bp, Homo sapiens
catcttcgtggggcgtgaggagtgtgagctcatgctacaggtgaaaggtgtagcagtcactcggcctacacccacagcatcgaccttgtgaacccag

SEQ ID NO: 357355 - DNA, 100 bp, Homo sapiens
aaaccataagaacaagaccacctcttggctagacccaaggcttgaccctcgttttggtgctggagaatctggtaaaagcaccattgtgaagcagatgagg

SEQ ID NO: 357356 - DNA, 75 bp, Homo sapiens
gatgttcttcttcgagtatttgtagaaggaatacagtcgctttgaatcgaagatacatgacttacgagaacaaat

SEQ ID NO: 357357 - DNA, 75 bp, Homo sapiens
ccatatgctggagagacattaaagtaatcatggtgtcatggaaagggatttactttatactgactctgttttggg

SEQ ID NO: 357358 - DNA, 75 bp, Homo sapiens
gattgaaggaaggtgatacaatgatggggcagcaagtggccaagtggagggagcaaagtcctgcacactggagtg

SEQ ID NO: 357359 - DNA, 83 bp, Homo sapiens
taagacttggcgaagcgctgcgctcgcgcccggatccctcagcttgaaaactatttttctagtctgaaaaacccaaaactcag

SEQ ID NO: 357360 - DNA, 90 bp, Homo sapiens
ccgaggccatgggcccaggagttctgctgctcctgctggtggccacagcttggcatggcccctgtaaagatagctgtcattttcaagcag

SEQ ID NO: 357361 - DNA, 75 bp, Homo sapiens
ctgggggagatggaggcgaagacaagagagctcattggcagaatatgaagttactccagatgaaaaactgggaga

SEQ ID NO: 357362 - DNA, 82 bp, Homo sapiens
gactagccacaagtatgttacccagatgtagaattttcatcactaaacatgctgaacttcagactctcttgatgaatcagtt

SEQ ID NO: 357363 - DNA, 101 bp, Homo sapiens
gttgtgcttcagacgggattctgcaattcgaaagcagcttgttaaaaatgagaagaattggagcgttattcagtatattaatgtcttattgataatggcag

SEQ ID NO: 357364 - DNA, 99 bp, Homo sapiens
tttagaaaaagaaatggaggaagcaaagaaaatgatatcaggactacagctgcaggtggagctggagcaagaataccaagacaaattcaaaagactgcc

SEQ ID NO: 357365 - DNA, 100 bp, Homo sapiens
gttagagcctctgcgtgcgctccggggcccggcgagaggatgcgcaaggtggagagccgcggggaagggggcagagagcttcctgcctgacacagctcac

SEQ ID NO: 357366 - DNA, 106 bp, Homo sapiens
cagcttccgccaggcggtgatgaagaatccccccgaaaggaccccccagattctgaaggaagatttccattaggtaatttgtttaatcagtgcaagcgaaattaag

SEQ ID NO: 357367 - DNA, 89 bp, Homo sapiens
tgggaaagaagttatgcttgttggaattggtgacaaaatcagaggcatactttataggtgaatgaaaactttgccattgatttgatagc

SEQ ID NO: 357368 - DNA, 51 bp, Homo sapiens
tgcccacggccggcagcgcttccatttccctacgtcactcctgccccccac

SEQ ID NO: 357369 - DNA, 75 bp, Homo sapiens
gaaacatccacagcagcgactggcccaagttctttgaaaagggctccataatcgtgggaattgattacgactgcc

SEQ ID NO: 357370 - DNA, 83 bp, Homo sapiens
ccactcacccgcagactccttctccagcatgggctcgcctgtcaacgcgcagtgggcgacagatgcgaaagaaacgagttcca

SEQ ID NO: 357371 - DNA, 100 bp, Homo sapiens
tagcaaggaccttctggaacataatcttacattcacaaactctgtcatcacacctgtgagacactctagccacatggagaagcaagtccttgagatatcc

SEQ ID NO: 357372 - DNA, 75 bp, Homo sapiens
ctctacacctggacccgacctcctcgccttggaggaagaatataagattttctgccgtctcttggcaaaaatggc

SEQ ID NO: 357373 - DNA, 100 bp, Homo sapiens
tgaagttgagcagttggattcaagagcacttcccctttgccttcatcaggtaaatattgcagattttcaagagaatcagtgggtgacttgtttccaggag

SEQ ID NO: 357374 - DNA, 98 bp, Homo sapiens
atgaagattatttacaatgctaccctgctttttctggtgtcctgaacctggaagttgtgctttttaaggtgcaacccagtttatgcctgaccccaagc

SEQ ID NO: 357375 - DNA, 50 bp, Homo sapiens
agaatttatcctcaagagtcagctggcagctggcatcagtcatcttgaaa

SEQ ID NO: 357376 - DNA, 100 bp, Homo sapiens
ccagagccgacctgcagcaaataattgtcagtctaacagaatcctgtcggagttgtagccatgccctaggtggactatcatctccgaacactcctaagaa

SEQ ID NO: 357377 - DNA, 76 bp, Homo sapiens
cagaaagagtcaacagcagtggcaacagccaaatttgtatcctactgtggggcttcaaacaccaggagaagtggtc

SEQ ID NO: 357378 - DNA, 83 bp, Homo sapiens
caatgaggcctacgcagagctcatcgtccttgatcaatgtccgagttaccaccatggatgcagagctggagtttgcaatccag

SEQ ID NO: 357379 - DNA, 100 bp, Homo sapiens
cccaactcagccatctgcggaggtcaagatttttgatcaccatactgaagaggatatagataaaagtgctaacagtgtattgataaaaaacctgagcagg

SEQ ID NO: 357380 - DNA, 74 bp, Homo sapiens
tttgacgcacacggcaccaaactgtatgcagtgccattcagaatcaggatttcactgtgatcgaagactactgc

SEQ ID NO: 357381 - DNA, 82 bp, Homo sapiens
aacggcaagatgtccagtaatgtcccggcggatatggatggttcctacctggctgagttcctgctggagaaaggctatgagg

SEQ ID NO: 357382 - DNA, 82 bp, Homo sapiens
cgggtgccgaggagcgggaagagttgctggggcattgaagttgatatcgatgtggagcacggagggaaaagaagccgcctga

SEQ ID NO: 357383 - DNA, 74 bp, Homo sapiens
caagcagaaagttgaacagaacgcggctcccagccacaccaagttcagggcaattgaaggaacagactaaaaat

SEQ ID NO: 357384 - DNA, 98 bp, Homo sapiens
taaagttgcagcgaggagaagcgcagcgacggcgtcgggagagcgcgcctagccggctcgcgagagtccaacctataccttctcagggaggcaaacta

SEQ ID NO: 357385 - DNA, 75 bp, Homo sapiens
gcgctggggatccctgctcttcgctctcttcctggctgcgtccctagctcaaactggaggattataaggatcgcc

SEQ ID NO: 357386 - DNA, 101 bp, Homo sapiens
aaagacaaaagacacagaagaaaaagtgggactgaagtacactgaagcaggggaaagcctcctgaagctgatggtgtggatagatcatttggcgagaaacg

SEQ ID NO: 357387 - DNA, 100 bp, Homo sapiens
cccggagcaccgagctcgcggcacggacgagcctgtggagtgggagacacctgacctttctcaagctgagattgagcagaagatcaaggagtacaatgcc

SEQ ID NO: 357388 - DNA, 98 bp, Homo sapiens
aaagataaatccaaatactgcatatcagaaacaacagttttttgtagcatcagatccaacagttaaaacagatcgactgtggcacgacaagtatactt

SEQ ID NO: 357389 - DNA, 96 bp, Homo sapiens
gagaaggaacccattgtgggcagcactgactatggcaaggacgaagactctgctgaggccatcatctgtgcgatctctgcggtggacgaggtggac

SEQ ID NO: 357390 - DNA, 75 bp, Homo sapiens
ggacgaggagctgagcaagctgggcctgctggacaaccactcctcggagttcaaagaagtgaattctggcgtttt

SEQ ID NO: 357391 - DNA, 74 bp, Homo sapiens
gggacctgaagaagatgaacaagcgccagacacgagacgacttcctgggccaggtggacgtgccccttagtcac

SEQ ID NO: 357392 - DNA, 98 bp, Homo sapiens
gctcaggtgtttgtccacggagaaagcctgcagggactttgaacatgtcggggatcgccctcagcagactcgcccaggagaggaaagcatggaggaaa

SEQ ID NO: 357393 - DNA, 53 bp, Homo sapiens
ccgagaccgcggccgggaccgagggttttgagcaaaattttggactgtgaagc

SEQ ID NO: 357394 - DNA, 100 bp, Homo sapiens
gccaggtggacacgcccatccttggacttcctgaaaatgacccagggcagctgtgcggagggtagtggcagccatgaaccggatggaccagaagaagcac

SEQ ID NO: 357395 - DNA, 98 bp, Homo sapiens
gccggccacggagcgcctgcagatgccttcaattaagttgcagagttctgatggagagatatttgaagttgatgtggaaattgccaaacaatctgtga

SEQ ID NO: 357396 - DNA, 98 bp, Homo sapiens
gaaatcatgtgaaatgtgtaaagatgctcttaggatgatggcttggaaaaaagtccaatgaaaaaaaaacagaagaagaaagagaacaaggagaacaa

SEQ ID NO: 357397 - DNA, 75 bp, Homo sapiens
ctgctatgaaccttcacatagatgaacaagtcattacgttttcatttctcacaactgggctgagcacaactgaac

SEQ ID NO: 357398 - DNA, 118 bp, Homo sapiens
catcctgccgtccttctccactttcgccagcccgtgccgcgagcgcggcctgcaggagttgcagagtgggcaggatcttaagacccgataggtgcagaacccatctggacacggagac

SEQ ID NO: 357399 - DNA, 100 bp, Homo sapiens
gctggttctctgggatataaataagctgccctgtgagctacaggacatggttcggaaacatttgcacagtggtcaagaggccgccagcccaggtcctgct

SEQ ID NO: 357400 - DNA, 50 bp, Homo sapiens
cgaccgcgaggacgacttctccgcaggttaatttggagtggcccctggag

SEQ ID NO: 357401 - DNA, 75 bp, Homo sapiens
gcagacccagctacgtggactagagttcctaatgtggatctaccacccctgtgttcatcgagattccggtctgga

SEQ ID NO: 357402 - DNA, 82 bp, Homo sapiens
ctgtgctgcgcgacccccgcgcatgggactttgaacatgtcggggatcgccctcagcagactcgcccaggagaggaaagcat

SEQ ID NO: 357403 - DNA, 74 bp, Homo sapiens
ccgctctcgcttcgtcctacacttgcgcaaatgtctccggtgacagaccatgccaccactgccctgctccacta

SEQ ID NO: 357404 - DNA, 96 bp, Homo sapiens
cccaggctcaagtgatctgctcagcttcccgagtaactggggctacagggaacctcgagtggttggataagagcaagtccagcttcctgatcatgt

SEQ ID NO: 357405 - DNA, 100 bp, Homo sapiens
aaaaaatgtgagcgctattggcctttgtatggagaagaccccataacgtttgcaccatttaaaatttcttgtgtgctcagctttaagggctactgggaaa

SEQ ID NO: 357406 - DNA, 100 bp, Homo sapiens
ggcgaagtccccggagaactctaccctggaggagattctggggcagtatcaacggagtctccgggattactgatctctcattacccaactatctgatggc

SEQ ID NO: 357407 - DNA, 99 bp, Homo sapiens
caccgtgacaggccaagtgcaggggccagaagacaaagtcaattccatgtagaattgggctatttgctgaagcttcttggtggcccttgctagcccagg

SEQ ID NO: 357408 - DNA, 83 bp, Homo sapiens
ggcggtgcccgaggagtagtcgctggagtccgcgcctccctggatgaaggatttgggggcagagcacttggcaggtcatgaag

SEQ ID NO: 357409 - DNA, 100 bp, Homo sapiens
gcagctcatgaccgacctcaccctgtcgcgggtgagacaggggaaaaggtggaaacagacatggagaatgagaaagtgagtgaaggggctgaaaccaaag

SEQ ID NO: 357410 - DNA, 100 bp, Homo sapiens
aacagctggagcaaggcgacgaaccttggagagaggagaacgaacatcttctggacctttgtccaggccattgccattgtactggggttcatgattattg

SEQ ID NO: 357411 - DNA, 80 bp, Homo sapiens
aaggctgcagaagccaaagccacggcccgatgagagaaagggaaagttaaggatgctggagcagaacaatggatttctct

SEQ ID NO: 357412 - DNA, 96 bp, Homo sapiens
ctagcattaccgtgggcaacaccaccatgcatgttatgaaagatctccttccagaaaccacctaccgtgccgcagaatggaattcggcattgttcc

SEQ ID NO: 357413 - DNA, 100 bp, Homo sapiens
cctgagcggccaggacgacgaggagcagggcctgactgcgcagacaatgcagatcttcgtgaagactctgactggtaagaccatcaccctcgaggttgag

SEQ ID NO: 357414 - DNA, 82 bp, Homo sapiens
ctccggaacaaccacgtgctagactcggaaagaagcttccggttctgaggtcctggaggtgccatttccctctctgttgaag

SEQ ID NO: 357415 - DNA, 101 bp, Homo sapiens
gaggatgtggcgcgcggaggggaaatggctgccgaaaacaagccggaaggatttttttcccaggaagccatcccgtcagaggggttcaagtgatgaaagtt

SEQ ID NO: 357416 - DNA, 100 bp, Homo sapiens
aaggccactacacagagggcgccgagctggttgattctgtcctggatgtggtacggaaggaggcattccatgaagaatactccaggctctatcagcttgc

SEQ ID NO: 357417 - DNA, 84 bp, Homo sapiens
agggaaccctggtcaccgtctcctcaggtgacttaagagattaaaattaatttggttgctgttggttctgaacaaataatgagt

SEQ ID NO: 357418 - DNA, 100 bp, Homo sapiens
ctccttaccagctcacctctcaccgcgcatgtttggaggtgacagtggatagtggaaacaggagatcgtggatcctccttcaaaaatggaggatggaaag

SEQ ID NO: 357419 - DNA, 75 bp, Homo sapiens
cggatcctttcccagaagaatgagaatgaggctggttttaacctacgcaaagttaacaaacacataaagtttccg

SEQ ID NO: 357420 - DNA, 100 bp, Homo sapiens
gcgctgggaggtggagtcgttgctgttgctgtttgtgagcctgtggcgcggcttctgtgggccggaaccttaaaggcatttataagacgctgtttggcat

SEQ ID NO: 357421 - DNA, 82 bp, Homo sapiens
gtccagcatgaatcccgaatactgtccagaccaaaacgaagaagacgttagccaaacccaatataaggaatgttgtggtggt

SEQ ID NO: 357422 - DNA, 51 bp, Homo sapiens
ctttgagtaacattgccagagagataagtactcctctcagtttggtggtgg

SEQ ID NO: 357423 - DNA, 87 bp, Homo sapiens
agggaacgggaggagcgtctgagcaggagggactttgaacatgtcggggatcgccctcagcagactcgcccaggagaggaaagcatg

SEQ ID NO: 357424 - DNA, 74 bp, Homo sapiens
actacgacgtccctcaaaccttgcttctaggagataaaaaggagtgtggccatctggggccgtgtggtatttgc

SEQ ID NO: 357425 - DNA, 101 bp, Homo sapiens
ctagtattgcccaagctgactatggccttgaacacttgataagaaggctgactgcacaatcacaatggctgactcagacttcctggctttaatgactggta

SEQ ID NO: 357426 - DNA, 90 bp, Homo sapiens
cttgggcctcgcgccggctatggccgtgccctggggctgagccctcaggtctcctctgagcctccggcctccataagacccaaaacagat

SEQ ID NO: 357427 - DNA, 74 bp, Homo sapiens
cgggagaggcgagctcgcgatgagtggtctcggcaggctcttcgggaagggcaaagtgtttcatggatttcaaa

SEQ ID NO: 357428 - DNA, 82 bp, Homo sapiens
ggagccacccgcgaaaattcggccagggttctcgctcttggtgggtttggaggatttgggacaacatctacaactgcaggtt

SEQ ID NO: 357429 - DNA, 100 bp, Homo sapiens
gatgtattcaaatggatcttcaaaggatgataatgaagataattcaaatgatgggacccagccatccaaaaggaggcgaatgggctcaggagatagttct

SEQ ID NO: 357430 - DNA, 75 bp, Homo sapiens
tgtatataaagtttgtgatcgttggcggacattttgttttgcagaatcctgctataggaaaaatggagctgttcg

SEQ ID NO: 357431 - DNA, 100 bp, Homo sapiens
ggctcggacttccaatatgagaatgccaacatgtggttcaagaaccttgacaagctcatccggctggtaaatgcgcagcagcagcagcagcagcagcagc

SEQ ID NO: 357432 - DNA, 100 bp, Homo sapiens
gttctggttcctctacatccgagccagcagttggccttgtcagtttttaaaattcgagccatcccagacttacagccagctggcccaccccatccagcag

SEQ ID NO: 357433 - DNA, 85 bp, Homo sapiens
gtcttcctgaaacccgcagaggaaaattcaggcaacgcctcgcgttggtttaccaaagatgcaggtcattaggaactattctgga

SEQ ID NO: 357434 - DNA, 75 bp, Homo sapiens
tgaggatcctcttcctcctggggaggaaataatgctggccatacagttgttgtggattctgtggaatatgatttt

SEQ ID NO: 357435 - DNA, 75 bp, Homo sapiens
ctccgcttctccggcctccctgctcttaccgggaggatgctcacaactgtattcctgagctggacagtgagacag

SEQ ID NO: 357436 - DNA, 80 bp, Homo sapiens
ggaaacgtgcccaacgagaagatcgcgatatggctcaaggactgccgccatgaagatggacctacagctaaaaaattaaa

SEQ ID NO: 357437 - DNA, 74 bp, Homo sapiens
gctgtgtgtacatcacccccatggaggccctggcagagcaggaggaaatttccaagtatgataagatctgtgag

SEQ ID NO: 357438 - DNA, 83 bp, Homo sapiens
ggctagccttggagggaaagtagccaccagtccaactcgggtcgcccccaccattatttcgactaatagggatgccaaaggaa

SEQ ID NO: 357439 - DNA, 75 bp, Homo sapiens
tgaagatgtggatctggcccagcgagtgatagacagccaagcagagaaactgaaggagcttgacaaggagatccg

SEQ ID NO: 357440 - DNA, 75 bp, Homo sapiens
gccgtttaacctttattgtggtggagtccaccccgctgtggtcagcccaaggccaaccccactgtcactctgttc

SEQ ID NO: 357441 - DNA, 75 bp, Homo sapiens
gaagcatcgttaaagtctctcttcaccctgccgtcatgtctaagtcagagtactatgacgacacctaccccagtg

SEQ ID NO: 357442 - DNA, 90 bp, Homo sapiens
ggaagacatggccactccagtcggtgttgagcacggcgagcagtctcaggcctttagtgatgatggtgagcatgggtttatgcgtcttag

SEQ ID NO: 357443 - DNA, 136 bp, Homo sapiens
taccgctgcgctcaatgacagggaccaggggggcggcagcgctggacacccagcctccaggttatacattggctcttcaaagacgttcacctcatcagagaaatccctgactcctttgcagtggtgtagacatgtc

SEQ ID NO: 357444 - DNA, 82 bp, Homo sapiens
aggatctggtgtaccaggcgaagctggccgagcaggctgagcgatacgacgtgggctccgtggcttaagacttgaaccaagt

SEQ ID NO: 357445 - DNA, 89 bp, Homo sapiens
accaggagaagtttttatcaacaaaggcaaaggattcggatttattaagcttgctgatgaggaagagatgcttgataatctaccagagg

SEQ ID NO: 357446 - DNA, 83 bp, Homo sapiens
tgtctccccgatctacggggctgacatcagcggctctttgtatgatgacgagccttcacgtaaatgggtccagtcatgcctcc

SEQ ID NO: 357447 - DNA, 100 bp, Homo sapiens
gcctcggcctggatgggcagcgccagagggcccaggaaaccttcatgcaatgggatcagtgccggcggttctacaacttcctcatggctgacaacatgaa

SEQ ID NO: 357448 - DNA, 83 bp, Homo sapiens
ctgggccagaggcagaaaacggacggaagaaaaggtctggccggcaccacactgtaactcgaggcatcaccaaaggcgtgaag

SEQ ID NO: 357449 - DNA, 101 bp, Homo sapiens
ctggggcctcattttggatatctgtgataaagttggtcagtctcgcactggttccagaaagctgagtctgatctggattacattcaatacaggctggaata

SEQ ID NO: 357450 - DNA, 98 bp, Homo sapiens
cgccaatgtccaaaacgtgaccactgaggatgtggagaaggccacaggtgacagtggatagtggaaacaggagatcgtggatcctccttcaaaaatgg

SEQ ID NO: 357451 - DNA, 98 bp, Homo sapiens
gcggaagctgcccttcaccgcgggcgccaatggggagcagaaggactcggacacagacatgcttcagcttatcaacaaccaagacagtgacttccctg

SEQ ID NO: 357452 - DNA, 100 bp, Homo sapiens
agagcaaagaagaggcctgcaaagctgtacaagagatcatgcaggtcaaaggccctttcagaagcaactccatttcattggataacttaaaaccctccag

SEQ ID NO: 357453 - DNA, 109 bp, Homo sapiens
ggtactcggaaggcgcgggcaggagcctggcgaggatgcaccttcccctgccttggaaagtatgttgtggtaagcagcaaaaaaattttgttctataatgacgaacaag

SEQ ID NO: 357454 - DNA, 87 bp, Homo sapiens
agacaagttccatcccacctttgagtcagggaagctgcccgggagtgtcgcaggaagaagaaagaatatgtcaaatgtcttgaaaat

SEQ ID NO: 357455 - DNA, 100 bp, Homo sapiens
cgccctgccggaccgcgcctcaggctcccccagggccaattcctgtccccccagcagcatggcatcgtgtgctgaaccctctgagccctctgccccactg

SEQ ID NO: 357456 - DNA, 98 bp, Homo sapiens
gaaatccaaaggcagacagtacgggctcccttcgccaaactcttcattttctctcattactctactgactggcagagacaggagaggtagatgtccac

SEQ ID NO: 357457 - DNA, 80 bp, Homo sapiens
cgtggaagcaggactgcgccgcgtcttcctcaaggacagagcgggatgccaccagcttgtccaaagggaagttccaggag

SEQ ID NO: 357458 - DNA, 100 bp, Homo sapiens
ctgctttcatggagttcacagaagagtcgaggagtcttgtgaaaatgccattgtgtgctggaaacctggcaagatggaagatgatatagataaaattaaa

SEQ ID NO: 357459 - DNA, 75 bp, Homo sapiens
gacggctaccgggcctacctgccgtccaggctgtgtatcaaaaggtccctttgtggtacgtgctttccttcgtag

SEQ ID NO: 357460 - DNA, 98 bp, Homo sapiens
tgcttcacagcttcgacaggaatgggagaacaatcgtgagtctttgatcacattgattgaaaagtcacccacaaaagctgtatataatgccagacatt

SEQ ID NO: 357461 - DNA, 101 bp, Homo sapiens
tccaaagcctcctggaccgtccaagaacaaaagcgaaagcttcggatctacatttccaatacgttcagtcccagcaaggcggaaggcgatagtgcaggaac

SEQ ID NO: 357462 - DNA, 98 bp, Homo sapiens
aggagagggaacatgctgagaaactgatgaagctgcagaaccaacgaggtggccgaatcttccttcaggatatcaagctactcagctgcttaagctgg

SEQ ID NO: 357463 - DNA, 82 bp, Homo sapiens
ggcccgcgggggagccccgggagccgcacgatgcaatgaacctcattttacttttagtcactgaaaaattggaagatgtagc

SEQ ID NO: 357464 - DNA, 73 bp, Homo sapiens
tcaagctcatattttgaagtgtttacggccattggaaaagaagtttgttcgagtttcaggagaagcaactatt

SEQ ID NO: 357465 - DNA, 71 bp, Homo sapiens
ccttggtcctagcacccactcgagaattggctcagcagattttgcgccagaaccggggccgcaaggcctgt

SEQ ID NO: 357466 - DNA, 100 bp, Homo sapiens
ctatcccaggaatacagctttgcattaggtgctggagaatctggtaaaagcaccattgtgaagcagatgaggatcctgcatgttaatgggtttaatggag

SEQ ID NO: 357467 - DNA, 75 bp, Homo sapiens
ctgcagacagaggtgtgctgacgacctgctacaacagaaaaacctgtgaaggtcgaaacagctgcgtttcctgtt

SEQ ID NO: 357468 - DNA, 75 bp, Homo sapiens
cttgctcgcccgcagccccgagaccgcagtataaccccgttttcacacgaatggccccttcacatatttgaagac

SEQ ID NO: 357469 - DNA, 100 bp, Homo sapiens
tgagtgtgcaactgaagcctgaggtctccccaacgcaggacatcaggttcgttccaccagtcataaaccagatgaaatctatggcatgattgaaagacta

SEQ ID NO: 357470 - DNA, 90 bp, Homo sapiens
gccgaggcctgggttacaagcagcaagtgcgcggttggggccactgcgaggccgttttagtgtttgaagatactgtggaggagcgtgtca

SEQ ID NO: 357471 - DNA, 76 bp, Homo sapiens
ccagctccatcaacctcacgctgcacctggccatgacagttgaaaaagcaagtccagtgggtgatggaaatttccg

SEQ ID NO: 357472 - DNA, 98 bp, Homo sapiens
tggacatggagaaagcagaaagcctgcaagtgacgagaggagacttccttgcttctttggagaatgatatcaaaccaatctcttcagaggtatatctt

SEQ ID NO: 357473 - DNA, 82 bp, Homo sapiens
tggaattaggcaaatatggacaggtttacccagggttgatgataaccgctggccttattcattggattttaaatacattgaa

SEQ ID NO: 357474 - DNA, 100 bp, Homo sapiens
gtgaccatcgaaaggagcaagagcaagatcaccgtgacatccgaggtgcctttctccaaaagctggcccgagataacttcttccgctgtggtgtgctgta

SEQ ID NO: 357475 - DNA, 100 bp, Homo sapiens
ctcacgttgaccaactctttgatgatgcatccaggctacggaaaaacctgcgagccctggtggttgtccatgctacatggtatgtgaaagcatttctggc

SEQ ID NO: 357476 - DNA, 141 bp, Homo sapiens
tgactcggacgtttggcctcgaattacttgagtcagtcctcaatgattttccgcaggtctttttacaattaaacagtgattctgccactgatgaaacaataccagaccatcctgacttacttctccagtctgaagattcca

SEQ ID NO: 357477 - DNA, 100 bp, Homo sapiens
gaaacaactggaaactgttttggatgatcttgaccccgaggagatgcaagcaaagctcgcagcgcaaaaattagctgaaagactgaatattaaaatgcgg

SEQ ID NO: 357478 - DNA, 75 bp, Homo sapiens
gctgtctgttcagacttcagcttggtatgtccagctcgccgctgtccaagaaacgtcgcgtgtccgggcctgatc

SEQ ID NO: 357479 - DNA, 75 bp, Homo sapiens
ggcatagacttcaaccagcctttggtcatcaccaggacaggggttgatttgactaaagacaacatggcacttcag

SEQ ID NO: 357480 - DNA, 98 bp, Homo sapiens
ggagacatcagcggctgcaattttgctactcgctgctcggcatggaacggtcagtttgagttcatgatcgagtccatcctgtatgcccgggatgcctg

SEQ ID NO: 357481 - DNA, 100 bp, Homo sapiens
cttgcgagccgtcttccccaggcctgcgtccgagtctccgccgctgcgggcccgctccgacgcggaagccatgaagctcatgactgctctggtgaatgtt

SEQ ID NO: 357482 - DNA, 75 bp, Homo sapiens
gcggagccggccgtacgcggtgctgcgagggcagaacctggatacaaactggactctcaggacaaaacgacacca

SEQ ID NO: 357483 - DNA, 100 bp, Homo sapiens
cttctccggctgcaccctgaccgatgggaccctgtattctaccttgtaaatactgttatttgtatatactgtaaatgatgacatcggtgggcactaaccg

SEQ ID NO: 357484 - DNA, 83 bp, Homo sapiens
ggccacccggccgtcagcagcatgcagggtcaaaatgcagatcttcgtgaaaacccttaccggcaagaccatcacccttgagg

SEQ ID NO: 357485 - DNA, 100 bp, Homo sapiens
gctggccatttaggagctctgctcaaagccagacggcatacttttttgatgcaccagagatggaccatctcccaacaactacagctactccaaaccaaac

SEQ ID NO: 357486 - DNA, 82 bp, Homo sapiens
ccgcggccgcaccttcccgccttctcaggactgagcagggggaggaacatttaagctgatggaagtggaagtggaagttgct

SEQ ID NO: 357487 - DNA, 50 bp, Homo sapiens
ttttcctccaggcctttgagacatgtttggatgtaaccaagcagaaagat

SEQ ID NO: 357488 - DNA, 100 bp, Homo sapiens
gttcctgaagatgggtctccggatgcacctgctgccactcgacagcagttctacactgacatgtactgtcccatctgcctgcaccaagcctccttcccgg

SEQ ID NO: 357489 - DNA, 83 bp, Homo sapiens
gtgcagatcaagaccctggagggcgagttctcggtcaccatgtggtcctcagggcagcgaggtcacaggccccacctttgctg

SEQ ID NO: 357490 - DNA, 50 bp, Homo sapiens
cgttaagccggctctggagacagtttccaacatggctagatccatcagaa

SEQ ID NO: 357491 - DNA, 100 bp, Homo sapiens
ctggaggagggaatgatattcagtggtgtttttctcaggtgaaaggagcagtagatgatgatgtagcagaagatggtgtcaggaatgggatctaaagtgg

SEQ ID NO: 357492 - DNA, 51 bp, Homo sapiens
gaggctgcctcctgcagcccccatagcaggggcaccaccacgaggcgattt

SEQ ID NO: 357493 - DNA, 100 bp, Homo sapiens
cagatgaagaacatgacctcaaggagcttcctgtcaatgagaagaccaagctgacgcctggcaaaggtgtttggagaagagggattgaccctgaatcttg

SEQ ID NO: 357494 - DNA, 100 bp, Homo sapiens
ggacaacaacatccgcagcggggagatgtacaggttccagtaattcgccaaaatgacgaacacaaagggaaagaggagaggcacccgatatatgttctct

SEQ ID NO: 357495 - DNA, 95 bp, Homo sapiens
gtcatgatgacatcacagatcccaaaagaataaaaaaatgtggctgcaaacggcgtgtcctggggaagtgtcgctacgtttactatgggaaaaac

SEQ ID NO: 357496 - DNA, 71 bp, Homo sapiens
ggagaagcaggctccagagctgagcttatctagtcaggatttggaggtaccattgttggatactggtgaca

SEQ ID NO: 357497 - DNA, 123 bp, Homo sapiens
tttggattccgatgcaactgatagcagctctgatgacgatttggatgaatatacccttagaaaaaatgtggcagtacgccctcctgcaaaacggcccaactacgttaagcttggcactctggc

SEQ ID NO: 357498 - DNA, 108 bp, Homo sapiens
cactttgtggagaaagtcgtcttccacttgcacgaaagctttcctaggccaaaaagagttccaaagaactactggttcagattttagctcttcccaagttgtgaaaat

SEQ ID NO: 357499 - DNA, 136 bp, Homo sapiens
acccagcgccaccatccacgccagccgcaccatgccgctcctaagcctgcacagccgcggcggcagcagcagtgagaggttggcatggattacagaagctgcatcctgagacccggcggttccgaggatgccagcg

SEQ ID NO: 357500 - DNA, 75 bp, Homo sapiens
ctgtacttctatatctacaagggggtccgcaaggaatcccagtcagaagttccagcctgccactgttctctgatg

SEQ ID NO: 357501 - DNA, 85 bp, Homo sapiens
tgaagccgtgcccgttcttcctggagggaaagtgccgctttaaggagaactgcagctatcatggtgaacttacttcagattgtgc

SEQ ID NO: 357502 - DNA, 95 bp, Homo sapiens
aaggcggcggctctctggtccgcagcggcaacagtaacgaaaaacagggctgttacactcctggcacaccttacaaagtgtcctgttcccccacc

SEQ ID NO: 357503 - DNA, 74 bp, Homo sapiens
tgaaagtttattgcattccaacagctcattttatgttggtttcatttccagggaccctgtggaacgactcttcc

SEQ ID NO: 357504 - DNA, 96 bp, Homo sapiens
acaacaagcacaagaatcgatacataaatatcgttgcctgtacactcacgtggaagctgagtgtcctttcctgacttttgacgacctcctgaaccg

SEQ ID NO: 357505 - DNA, 82 bp, Homo sapiens
agcagatgcaggaaaatttcgatattgaagtgtcaaaatccatagatggaaaagatggtttactcctggcttgggggcatta

SEQ ID NO: 357506 - DNA, 100 bp, Homo sapiens
agatggttttggagagcaccccttttaccactgcctggttgcagaagtgccgaaagagcactggactccggaagggctgaccccacattggacaccgctg

SEQ ID NO: 357507 - DNA, 99 bp, Homo sapiens
caatggaaccaattgttttacagtctgttccgcatgatcgttataataagagttgtctcccagagctccgtggaatttcctttctctgctttaacgtac

SEQ ID NO: 357508 - DNA, 89 bp, Homo sapiens
gaggccagaaggctagaagaatcagacgtgctccaggaggccagaaggaaatacgtcttgccccagaagctgcgggcacatccacgcct

SEQ ID NO: 357509 - DNA, 75 bp, Homo sapiens
gcgattcttctgcctcagcctcctgaagcttgggaaagtcgaggtgacggtgtttgaccctgactccctggaccc

SEQ ID NO: 357510 - DNA, 90 bp, Homo sapiens
actttaagtttgagtttatcggtgatgctgtgacagatgatgaacgatgcataggggaagacaggaagacccccagcgaatcaaatagcc

SEQ ID NO: 357511 - DNA, 90 bp, Homo sapiens
gcggccgtcgcccaggagtcatcggacgccagaatctggccaggtcagagcagcccaccatgggatggggagggggtggaggctgcaccc

SEQ ID NO: 357512 - DNA, 100 bp, Homo sapiens
gcttcaggctggagggcattttcccagcggcgctgctgcccctgttgctgaccatgggatacctcagacaatggcagcttttggattgaaatatttgctg

SEQ ID NO: 357513 - DNA, 100 bp, Homo sapiens
cttcctctccatcctctacagcatcggcagcaagcctctgcaaatctgggacaaaaaggcaaaggcagctcgagcatctcatctgacgtgagttcaagta

SEQ ID NO: 357514 - DNA, 100 bp, Homo sapiens
cctctgggtcctcggtcggtacagtctctgcacctcgcgccccagcaggaaccctaaggactctgcaatatgaataattccctagagaacaccatctcct

SEQ ID NO: 357515 - DNA, 82 bp, Homo sapiens
aatgtgtggaatattggggggctcggctgcagacttggccaaatggacgggactattaagcggagctggagtttgttcagat

SEQ ID NO: 357516 - DNA, 100 bp, Homo sapiens
aatgtgaagagcaaaaagtctcagatgagctcatgagtgaaagcttcgttccagagcccagcatgaatggatacgcggaatttccgcccagccccagtaa

SEQ ID NO: 357517 - DNA, 100 bp, Homo sapiens
tttccaggggactgtggctttcaagaaactctgtccccatggccgaggattcatgaccaatggagcaggcaacttgttccagcgatggcatgttcctcta

SEQ ID NO: 357518 - DNA, 82 bp, Homo sapiens
tacctgcagaaggtctctggagacatcttcagcaggcatgacagcaagcgctgtggcggctttgatcctcatgacgtcctcc

SEQ ID NO: 357519 - DNA, 51 bp, Homo sapiens
ctccaggaccttctacgtacagtcagagcaccataacatggtgtgggaagt

SEQ ID NO: 357520 - DNA, 100 bp, Homo sapiens
gaaatccaagatctgccatcccaggtccgcaacccggagaagcaagtgatcctgccatgaagcagtttctgctgtacttggatgagtccaatgccctggg

SEQ ID NO: 357521 - DNA, 75 bp, Homo sapiens
ccggagctgcccgcgccatgtccgcgcacaatcggggcaccgagctcgtaccttctccaggcaaattccgttccc

SEQ ID NO: 357522 - DNA, 100 bp, Homo sapiens
ggagcgatggccgggatcctggagcactcggtcatgtacccggtggactcggtgaaggtggtatcacggaaaacttgacagaacgatagcagaagaacgc

SEQ ID NO: 357523 - DNA, 100 bp, Homo sapiens
atcctaagactcgaaggcagcacaggacctggaaaaattacattttttcagaagaagtgaagtcaagatgaagaaccatttgcttttctggggagtcctg

SEQ ID NO: 357524 - DNA, 112 bp, Homo sapiens
ggctctcctagggacagggaaactgagtcatatcaaggtggaaggcagctgaagattcttcaaacttcatgagagaaagtgtgaacctattattatgactgttcccaggaag

SEQ ID NO: 357525 - DNA, 75 bp, Homo sapiens
tgagacggtgtcccgccgaaagctcaatctgaaattgaagtgtctgtctctgcaaggaatatcagaaggctacta

SEQ ID NO: 357526 - DNA, 82 bp, Homo sapiens
attggaggatcccgagtctgccatgctagatacgctggatagaacagcccaggcagaaggggatgaggaggaagaaggggag

SEQ ID NO: 357527 - DNA, 92 bp, Homo sapiens
gacgggtctggagtgcgtgggggaccggctgttggcgggtactccaaagattcaggtttactcacgtcatccagcagagaatggaaagtcaa

SEQ ID NO: 357528 - DNA, 135 bp, Homo sapiens
acctgaagcaggagctggccagcatggaggagaaggtggcctaccagtcctatgagagggcacgggacatccaggtcaaaatgcagatcttcgtgaaaacccttaccggcaagaccatcacccttgaggtggagc

SEQ ID NO: 357529 - DNA, 100 bp, Homo sapiens
cgtttacctctaggaggatttgctgagctcatgggagaaaatgtccaccttggttctggtgatgggcagtcaaaagattctgggccccttcctcaagtgg

SEQ ID NO: 357530 - DNA, 71 bp, Homo sapiens
atccatattgcactgcttgggcagagtgctgagtctgttcgaggatgaggaagagtccttgaatgaagtag

SEQ ID NO: 357531 - DNA, 101 bp, Homo sapiens
tgtcccatgtttttgagtatatccgttctgagacatacaaatagacttccaatagtagtcagacattatcatcctgtcatactatggagccatgtacatca

SEQ ID NO: 357532 - DNA, 100 bp, Homo sapiens
atttgatgctgcctggactggtgatgccccctgctggtctgcctcaggtaatgagagatccaaacaccaagcgctccaggggctttgggtttgtcacata

SEQ ID NO: 357533 - DNA, 100 bp, Homo sapiens
ctcctgttccgcttctcagaggacgccttcaacaccaccttcatctccaccatcggaatgaatctgaagtctgctgcagtaaaacacagaaggctttaaa

SEQ ID NO: 357534 - DNA, 51 bp, Homo sapiens
gcctggcctcactcaaacagtaaacgagagcttcatagcaagtgaagtact

SEQ ID NO: 357535 - DNA, 98 bp, Homo sapiens
gacatttctcacatgaagatcaaagatgccttgccatctgcgaggacgacgggcagacgttcttcagcctagatgacgggaacaccaaattctctgac

SEQ ID NO: 357536 - DNA, 83 bp, Homo sapiens
atcgcctcgcgccggctgctctttccggttacagaatgtctgaaggggacagtgtgggagaatccgtccatgggaaaccttcg

SEQ ID NO: 357537 - DNA, 51 bp, Homo sapiens
tgggactgaagggggatcatctagaagcttcaagcacaaatgccagcctga

SEQ ID NO: 357538 - DNA, 100 bp, Homo sapiens
ggagatgattgagccgcgcacgctacagtacaagatcctgaaggacacagccctgcagaaagtgaagcgtggccagagctgcctggagccctgcctgcgc

SEQ ID NO: 357539 - DNA, 97 bp, Homo sapiens
acggaaatccttgggtttgaagatgatgttgtgattgagtttatattcaaccagctggaagtgaagggtgtttgccagcttcccagtaaaaatgatg

SEQ ID NO: 357540 - DNA, 98 bp, Homo sapiens
acagctacagccaattttgctaactttgcacatttcaacagtcatgcagttcagacttggttccttcaacctagagaaagttgaaaacccagctgaag

SEQ ID NO: 357541 - DNA, 83 bp, Homo sapiens
gaggctctgctgtagtcctgttcttctggctctaagatctgaatgttgtgaccactaatttgtacgagctcaactggaggcag

SEQ ID NO: 357542 - DNA, 80 bp, Homo sapiens
atttcctgctcggaaccttgtttactaattgtgagccagccatgagagggtatcttgtggccatattcctgagtgctgtc

SEQ ID NO: 357543 - DNA, 51 bp, Homo sapiens
atgtcacaaaagcggatgttgaaaagaatggtcagtctgtagacgttgaag

SEQ ID NO: 357544 - DNA, 98 bp, Homo sapiens
cagacgccgagactcccgcagcatgacccgccacgccgatcggctgctccagccatggccccagctccagcctcggccccagctccagcctcggcccc

SEQ ID NO: 357545 - DNA, 73 bp, Homo sapiens
cggcgcgaagaggctggactcggattcgttgcctgagcatcaacaacagcaacttgtgattggcggtgaccgg

SEQ ID NO: 357546 - DNA, 80 bp, Homo sapiens
accagaggagcctggaccgctcattcggactcgtcgggcagtttcttgcagaacataaattattaggaaacattaaaaat

SEQ ID NO: 357547 - DNA, 99 bp, Homo sapiens
atcaagtaagacagaccctaagctggagccaagtggctgcttctggactgcgctctgtcttccgaaactactaaagttcctggggaagcaaagtagaat

SEQ ID NO: 357548 - DNA, 90 bp, Homo sapiens
cactcaggaagctcggggacagagtgcagctcctaaacctgctggtgacacgactcagacagaagagtcttgctgtgttgcccaggctgg

SEQ ID NO: 357549 - DNA, 100 bp, Homo sapiens
caatcacagagactcggagagcatcactgggggaaatttgcagtggtgagaaaatgtataaagaaagattctgggaaagaatttgctgcaaagttcatga

SEQ ID NO: 357550 - DNA, 75 bp, Homo sapiens
gaacatcctttgactggttagccagccccatggctgggggttatggagtgatgggtgacgatggttctattgatt

SEQ ID NO: 357551 - DNA, 88 bp, Homo sapiens
gcctattgtgggacttcaccttgtgatcatgcttctagtgaggacgttgccagctccccggagcgccactacacgcccttgccttctg

SEQ ID NO: 357552 - DNA, 100 bp, Homo sapiens
ttccaggagctgcagatcgatgacaatgagtatgcctacctcaaagccatcatcttctttgacccaggtggccggactgtgccatgctgctccagaccca

SEQ ID NO: 357553 - DNA, 100 bp, Homo sapiens
ccctacggctgcaaggacgctctgcgccagcagctccgctcggcgcgagaggtacagaggggccaggtgtaagcatctctgaagagagacaaagtctggc

SEQ ID NO: 357554 - DNA, 50 bp, Homo sapiens
agggacaccgcagtatgaggcagagaatatgacagatacctagcatctag

SEQ ID NO: 357555 - DNA, 75 bp, Homo sapiens
gattgtagaacttctctctctgttccagaagctacacctggcctgtggctcagagcgcttaaccctacgctcccc

SEQ ID NO: 357556 - DNA, 51 bp, Homo sapiens
atgctcgagatttcactgtatccgccatggggcaacaccctccactaaaga

SEQ ID NO: 357557 - DNA, 90 bp, Homo sapiens
ggcgaagtccccggagaactctaccctggaggagattctggggcagtatcaacggagtctccgggattcttcagctcctcgtggttggtt

SEQ ID NO: 357558 - DNA, 98 bp, Homo sapiens
ggtggatgccttgcagggccatcttcaacaaatggagcaggaagccctggtgaagggaagcaggctgctttagatccattcatactgttgaaccttct

SEQ ID NO: 357559 - DNA, 83 bp, Homo sapiens
ggcgcggattcgccgaggcaccgaggcactcagaggaggctctgacgcccgctctgcggcttcggtgtttgaacaggccacag

SEQ ID NO: 357560 - DNA, 75 bp, Homo sapiens
cctcctcctctccttctacctgctggggttgcttgtcagtagcgggcaagacttgtgcaccatggacaattttgc

SEQ ID NO: 357561 - DNA, 95 bp, Homo sapiens
cgaggcggcgggctggagacatggaccgcggcgagcaagagccctaatttgtttagaactgtaatatgcacagttaaaacaacttgtcctctcag

SEQ ID NO: 357562 - DNA, 129 bp, Homo sapiens
cgcgccgcgcccggcgccccactccgcgcagcgggttgcctccgctccccatacggcggccccagagcttttcatcctactataaaggaggatttgaacagaaaatgagtaggcgagaagctggtctta

SEQ ID NO: 357563 - DNA, 83 bp, Homo sapiens
caattcaagctggcgaagagctcttctttgattacagggggatatgagactttctactcggaatatcctgagtgttgcgtgga

SEQ ID NO: 357564 - DNA, 87 bp, Homo sapiens
gctttcagcaacacagaaattcaggaagctgctttcaaaaggctttcctggggtttgatgtatgctggcttcatccttatcatggcc

SEQ ID NO: 357565 - DNA, 74 bp, Homo sapiens
atggagacccgctacaacctgaagagtccggaggaaggaacagagccacagagaaaaatgacttgctcacaaca

SEQ ID NO: 357566 - DNA, 75 bp, Homo sapiens
tcaggaacttttgggaaaaggagcaagtgtgcttgcagtagatgaaaatggtgcccctgggcgctgggattgctc

SEQ ID NO: 357567 - DNA, 83 bp, Homo sapiens
ctcccgaaagcgacgttcggccaccggaggagcgggagccaagcagacaatgcagatcttcgtgaagactctgactggtaaga

SEQ ID NO: 357568 - DNA, 75 bp, Homo sapiens
cctacaagcaagctgaatggaggccagatagtaccatgatagctgtatcagtttgttggcatccaaagctgttgg

SEQ ID NO: 357569 - DNA, 100 bp, Homo sapiens
tcaccaaaaacaggagtattaaatgaaaacacagtttctgcaggaaaagatctctctacttctcctaaggccgcaaaagataagtaccgtgaattggctg

SEQ ID NO: 357570 - DNA, 130 bp, Homo sapiens
tggaaaaaacctgagaacttcctgatctctctcgctgtgagacatgtctgagactcctgctcagtgtagcattaaggcaagaaggggttaaaagtggaatgtatgttgtaatagaagttaaagttgcaac

SEQ ID NO: 357571 - DNA, 97 bp, Homo sapiens
tacattaggaaacatgctagaattacctggaacttcatcatcatctacttcacaggaattgccatttcatgacgacagagatgatggtgtggattat

SEQ ID NO: 357572 - DNA, 83 bp, Homo sapiens
ccggcctggtgcgcaaggccccgaacaacagggagccagcgccggcagccaccatggcgtcacgcatagggttgcgcatgcag

SEQ ID NO: 357573 - DNA, 101 bp, Homo sapiens
agacgatgcgccccgcgcagccgcctgcgcctgcgggagccgttgaactttttccgtgatactccagacttccgtgttttggcctgtggtggagatgggac

SEQ ID NO: 357574 - DNA, 75 bp, Homo sapiens
ctaaaggtccttctaggagagaggtgaaaggatttaagtgccctgtatgctcaaaatttgtatcctcagatgaaa

SEQ ID NO: 357575 - DNA, 51 bp, Homo sapiens
gattccaagtaactcttatttgccctgattgagtccctcaaccagaaacca

SEQ ID NO: 357576 - DNA, 95 bp, Homo sapiens
gctaggtgttctaatgacattagtctttgtcttgctgttggtgaaaagattcattccgaagctggttatattctgggcactaaatgaaggcgttt

SEQ ID NO: 357577 - DNA, 98 bp, Homo sapiens
gcggcgcggcagcggagggacggcagtctcgcgcggtttggtgcacctcgatttggaggaagtagggcagggcccttatctggaaagaagtttggaaa

SEQ ID NO: 357578 - DNA, 74 bp, Homo sapiens
cccagatgtcctcatcatcccgtcagagctgaggtacttcgtgaaggacaattttaaccctgtgtctgaggagc

SEQ ID NO: 357579 - DNA, 82 bp, Homo sapiens
cgcggggaccgctgtgctctcggatactgaggaagatgaggaggaagatgagaaggacaaaggaaaactgaagcccaaccta

SEQ ID NO: 357580 - DNA, 75 bp, Homo sapiens
aaaagctggatacaatgtaaagcaggatgatgataaaagctttaggagagcaccttcatggagaaaaaagtttag

SEQ ID NO: 357581 - DNA, 111 bp, Homo sapiens
cttcgagtcgttatcccggaagtctcaattcttcctgaagacctagaggagctctacgacttattcaaggactgtaactcttgaccaggcaacagataatgcaaaaataat

SEQ ID NO: 357582 - DNA, 50 bp, Homo sapiens
ctgcacccgggaggactatgagtggtgggaacatccagttgcaggaaaac

SEQ ID NO: 357583 - DNA, 83 bp, Homo sapiens
cctgcgctctccgcaccgcggcttaaatgatgtattttgtgatcgcagcgatgaaagttggaatcgaagcctcttaaaatggc

SEQ ID NO: 357584 - DNA, 99 bp, Homo sapiens
gtggcagatcattcaggccaagtaaagaccaagtgctttgaaatgacgattccacagtttcagctccgccgcatgcaagagatgattgcaaggatgcag

SEQ ID NO: 357585 - DNA, 76 bp, Homo sapiens
tccacatcgccttttgccacctttccctttatttccggaggtaagaatgattgatgttggctgatattggagtgct

SEQ ID NO: 357586 - DNA, 107 bp, Homo sapiens
tcttctccactgttcctggaggaatccgagaagagcagagcggagggagccccagacacgagcccccctccatgcgcctgaaggcccgacccagcagccctggcttt

SEQ ID NO: 357587 - DNA, 75 bp, Homo sapiens
caggaggtttttgatgataaagcaaaggttctaaggcccagcagctactacaaggattgcaagccagtgatgaaa

SEQ ID NO: 357588 - DNA, 75 bp, Homo sapiens
tgctcttctgcctcttgatctccgccaccgtcttcaggccaggagcatcagatccatgctgctgctgactcggag

SEQ ID NO: 357589 - DNA, 82 bp, Homo sapiens
ccactatccccactgccaagtccacccccacactcattaagttctttattggtgaaaacatgaatccagatggcatggttgc

SEQ ID NO: 357590 - DNA, 98 bp, Homo sapiens
gtgaacagagggatgtcaaaggactctacaaaaaagcccgggcaggagaaattaaagaaggtgggtgcggctgctatttggacgagagttccccctgc

SEQ ID NO: 357591 - DNA, 83 bp, Homo sapiens
cggctttcctggtcagcagcgacttgattactgaagatttcattgctacatatcaggccaattatggcttctctaacgatggc

SEQ ID NO: 357592 - DNA, 83 bp, Homo sapiens
acgggaatatatccgaagcctgaagatggttccaagtattccctatctaggtaagaatgattgatgttggctgatattggagt

SEQ ID NO: 357593 - DNA, 82 bp, Homo sapiens
gacggcccaggagcgcgtctcggcgggagcctcagtacctggagtagaacagaaaaattattatgtctgtgttcccttggga

SEQ ID NO: 357594 - DNA, 100 bp, Homo sapiens
cgccagcggagcgaacccgagagcgtggagcgggctgggccagggatgggcgtgttttgggcgtgctagaggtgtcacgctccattggggacgggcagta

SEQ ID NO: 357595 - DNA, 100 bp, Homo sapiens
tcctccagctggatccttccttaggactgatggagaagatcaaagagttgctgcctgactggtgccttcaggacaacaactgggactacaccagatctgc

SEQ ID NO: 357596 - DNA, 100 bp, Homo sapiens
atggtgctgaaggacaaattccaggaatatgaagccatctacctagcaaaattaacaatacagatgatgtcaccactccagatagaaaggtcattatctg

SEQ ID NO: 357597 - DNA, 100 bp, Homo sapiens
agaagcatccttaggagctctgcagaacctcacggccggaagtggaccaatgaagcccggggcaagaactgtggtgtcttggtacattgcttggctggca

SEQ ID NO: 357598 - DNA, 100 bp, Homo sapiens
cgcggcccgggcgggctgctcggcgcggctatcttaatgacttggaccgcgtagctgaccctgcctacctgcctacgcaacaagatgtgcttagagttcg

SEQ ID NO: 357599 - DNA, 51 bp, Homo sapiens
tcgatgtgcggcgtccgctgtataaggacctgatcccaaccttgaagaaag

SEQ ID NO: 357600 - DNA, 83 bp, Homo sapiens
gtcccctaaaaagtattgtcgcctactcaatttgaagacattgaggatgaagacctttatgatgatccacttccacttaatga

SEQ ID NO: 357601 - DNA, 75 bp, Homo sapiens
cggaggcgtcgcgggagcctttggggcaccacagagatgcggaaaaattgtatggcgacttcttgagctggaagc

SEQ ID NO: 357602 - DNA, 83 bp, Homo sapiens
tcgcccccgcagcaccgctactcggagggcgagcggacctccctggagaaggtaagaatgattgatgttggctgatattggag

SEQ ID NO: 357603 - DNA, 75 bp, Homo sapiens
cgctgattctcacgggcccggctgccggcccccgctctgccctgaacatggtccaagacaattcctgggaaagtt

SEQ ID NO: 357604 - DNA, 80 bp, Homo sapiens
agatccccctgtactttgtggacttgcaggatgacttagacgactgaacaagcctggcttgaggatgctcaggtcttcat

SEQ ID NO: 357605 - DNA, 83 bp, Homo sapiens
atcaaaactgttcggacttccccgttagaactcgcgtttccacttcagagatctggtggtgaaggtgggtctggttgaagact

SEQ ID NO: 357606 - DNA, 100 bp, Homo sapiens
aagaagttaaaatcagagccccaccaagtagacgtgtcccgcatccatttggcttgtgatattctggaggaggaggtgaccaagaatatggcccaggtga

SEQ ID NO: 357607 - DNA, 82 bp, Homo sapiens
ggtcagctgggccgcaggggcgcgcagcgcggggagctgccagaataccctctaccatctgctttggtcagggtgccgctcg

SEQ ID NO: 357608 - DNA, 98 bp, Homo sapiens
cggccgaggtgcgcgctgggggggagggggggccggagaggagcatgaatggagcaaaatggcggatcatgtgcagccacacccactcgcccgggtct

SEQ ID NO: 357609 - DNA, 82 bp, Homo sapiens
ttgccatccaggagctcccagtcccaatgaggaaccagcagaggagcaggagcggcttcgcttggagcaggagcgagagcag

SEQ ID NO: 357610 - DNA, 98 bp, Homo sapiens
cgtggcaagccggactaaggaccggggacttcttgattgaggatacctgggatgaactcctaattggtagtgtagaagtgaaaaaggtaatggcatgc

SEQ ID NO: 357611 - DNA, 100 bp, Homo sapiens
gaaagaggtacatggagaacaagtttgtcaatccgtctgaacttcagttgccttacctgtaagcggccctccaggcactgaagcgtaagaagaggtatga

SEQ ID NO: 357612 - DNA, 75 bp, Homo sapiens
ccaagatcttggcaaagcttctccctcagtatttagaccaggaagcaatgaggctccccaagaacacacctgagg

SEQ ID NO: 357613 - DNA, 90 bp, Homo sapiens
gaacttctggctcgaaaggtggagcccccctttaaacctctgttggcttcaacggaccacaccaaaatgccatctcaaatggaacacgcc

SEQ ID NO: 357614 - DNA, 101 bp, Homo sapiens
ggccaaatcaaccatgatctgcatgaacggctatgtgtgtcgatgagcaaactcattggtaaccatcctgatgtcctcccaaccattggaaagttggagcc

SEQ ID NO: 357615 - DNA, 95 bp, Homo sapiens
atattcaaaggacttcaagaaagcttgcagtttgacccagcacctcgtagaggcgagccacatgttactcgtcgtaccccagactacttcctgta

SEQ ID NO: 357616 - DNA, 100 bp, Homo sapiens
cagctccgaagctggcaagaagtgcttagcgaatgccacagacggcgtgcggctagcagcccgcatcgtggacacaccctgcaatgagatgaacaccgac

SEQ ID NO: 357617 - DNA, 74 bp, Homo sapiens
gccgcggccgttagtcatgtcgggccaatggccatgtgtctcaggatcaagaggaacccgtctacctggagagc

SEQ ID NO: 357618 - DNA, 100 bp, Homo sapiens
tttgtgccccatgggtacctgtctgaggacgaaggtgtgacagaggtggacagccacatcatgaaggtggtgcagcagatcgtgcaccaggctagcgccg

SEQ ID NO: 357619 - DNA, 86 bp, Homo sapiens
ggagcttcaggctcgctccgtgcggaagtttccaagggtcacttgtgtctcgtccgtgggaagaccgggggagcccagaaggcctt

SEQ ID NO: 357620 - DNA, 99 bp, Homo sapiens
gcgctgccacttgtacccgcagacattatgaaaggtacagtctttgcccgctgcctgatttttcctctcatcgtgacgggccagcgagaggcagccagg

SEQ ID NO: 357621 - DNA, 83 bp, Homo sapiens
gctggacggcgagcgcgagcggcgcgagaaagtggtctttgggaagaagcttcctgcctttgccaccatccccatccaccagc

SEQ ID NO: 357622 - DNA, 90 bp, Homo sapiens
gattgaacgatctgtggtggaagcagcagtccaggaatgcagtcagtctgttgatgaaactatatttagcatgtagactgctggggcaat

SEQ ID NO: 357623 - DNA, 75 bp, Homo sapiens
cccgcggaacagcggaggacgaagagcgggacccgagccctgatggcctgatatgaaggagtcacgcctcccgcc

SEQ ID NO: 357624 - DNA, 100 bp, Homo sapiens
atcctgcgaatgctgctgcagagctcggaggggcgctgtgtgtacatcacccccatggaggccctggcagagcaggtcctaggcctacttacaagcctcc

SEQ ID NO: 357625 - DNA, 82 bp, Homo sapiens
cgcggatctcaccgccgctcagggctcttttccacaatggcccccctgaccagcgcgtcgaccgcggccgcgctcctgagac

SEQ ID NO: 357626 - DNA, 100 bp, Homo sapiens
cgaggcccggtactacccaaacgtcagtcgaatcacaggcaggagggtggctttgtccactatggtgaagtgaccaatgactttgtcatgctgaaaggct

SEQ ID NO: 357627 - DNA, 83 bp, Homo sapiens
tcgagtatctggtgaagtggaaaggatggcccccaaagggtattgtccagtcagaagaaaaacttgtcatcagtgcatcctgg

SEQ ID NO: 357628 - DNA, 75 bp, Homo sapiens
gcctccggggacaagaaactagagcaaataaccgttttgaaattggatatcatgataacacattttgaaccttcc

SEQ ID NO: 357629 - DNA, 75 bp, Homo sapiens
tggagccagagaccaccaccaggatggcacatttcctagaggcagaatcctacaacttccactccaagtgagaag

SEQ ID NO: 357630 - DNA, 76 bp, Homo sapiens
cccggtgtctgggaccccaactgggacagtccagtcaacctgcaaccaaaacgagactttttagcacgcttgatcc

SEQ ID NO: 357631 - DNA, 87 bp, Homo sapiens
agaattggagcaaaaagaggttgattacagcggcctcagggttcaggcaatgcaaataagaattctgcttggtcagaatcgtgatgg

SEQ ID NO: 357632 - DNA, 75 bp, Homo sapiens
tggtacttcaaacatgcaagttggaatgaaaccgaagaagacatcttttgatcaggattcagatgtggacatctt

SEQ ID NO: 357633 - DNA, 96 bp, Homo sapiens
tcaagatgctgcttactggtgggaaatcaagtcgtaaaaacaggtcaagtggatacttttgtggaactctatgggaacaatgcagcagccgagagc

SEQ ID NO: 357634 - DNA, 50 bp, Homo sapiens
ctggagcggccgccttccagcgtcatcatcagatttgaaatatttaaagt

SEQ ID NO: 357635 - DNA, 100 bp, Homo sapiens
cgcagtggtcgcttcttctccttgtggccataaaatgcagtaaaaacaaatccagttcccaagaagctgtacaaatgctttcttctgttcgactcaattt

SEQ ID NO: 357636 - DNA, 76 bp, Homo sapiens
ccggcgcaggtgaccggcgcgcgggagcgctacggccccaacggagctgacatggacccaaatcctcgggccgccc

SEQ ID NO: 357637 - DNA, 75 bp, Homo sapiens
ggcgaagccgcggaggacggggtgaagatggcggccttctccgtggccataaaatgcagtaaaaacaaatccagt

SEQ ID NO: 357638 - DNA, 75 bp, Homo sapiens
cagtctggatgctggtgccactaatgttgatttgccaacattacaacaaaggagatggaccccacggctcttgtg

SEQ ID NO: 357639 - DNA, 90 bp, Homo sapiens
cgtacatcggcgagggcgcctacggcatggtgtggtttgggtacccagaccccacctacctgacccgggtgcaagaggagctgagagcga

SEQ ID NO: 357640 - DNA, 80 bp, Homo sapiens
ggaggacggcgtgatcacggccagcgaggacaggtgcgagaagatgtactaaattcattgaataacaactttcttcaaac

SEQ ID NO: 357641 - DNA, 100 bp, Homo sapiens
aggaacccctggaagcctagaaatggacaaatccttcagaaagatcaggaaatcaaggacctaaaacagaagatagccgaagtcatggccgtcatgccca

SEQ ID NO: 357642 - DNA, 112 bp, Homo sapiens
gacgccatgtcgggttattcgagtgaccgagaccgcggccgggaccgagggagggtgaggacaaaatcttcttaatcaacaagcttcactccatctacgagaggaaggagag

SEQ ID NO: 357643 - DNA, 101 bp, Homo sapiens
ggggccaccggctggagcggatcccacacctccggaccgagggacgcggccaacaagtcccaaatttggaaaagctgactcatatgaaaagctggaaaaac

SEQ ID NO: 357644 - DNA, 100 bp, Homo sapiens
agacatctacaaccttcgatctcctgacgaaaatttaagatccgcattgaagacccaccccgcagaaagcacatggtattcctgggtggtgcagttctag

SEQ ID NO: 357645 - DNA, 100 bp, Homo sapiens
ccgcaccacctcctgctgccttcccgtcgccgctcccgaagcttttccagatcttgtagaaaatttcagctgtagcccttggactagaagctgaaataac

SEQ ID NO: 357646 - DNA, 75 bp, Homo sapiens
ttcgtcgggggtttggtgggcggcccaccgggactcgccgttgagctaaaacgtcatcctctcttcagtgatgtg

SEQ ID NO: 357647 - DNA, 96 bp, Homo sapiens
aagaaaggcaaggaaacatcttttgacaagatgtcacctgaaagtggtcacagccgcatctttgaagatattgatgatgttaagaagttcaaaccg

SEQ ID NO: 357648 - DNA, 100 bp, Homo sapiens
ctactcgcatcgcgcactttttggatcggcatctagtctttccgcttcttgaatttctctctgtaaaggaggttgtggcagcactgcctgaaggtatgag

SEQ ID NO: 357649 - DNA, 100 bp, Homo sapiens
cggcagggcggagaggagcggccggagtcagcgatggtgcccggcgaggagaaccaactggtcccgaaagagggatatcagtatgaacaacattactcag

SEQ ID NO: 357650 - DNA, 75 bp, Homo sapiens
agcggaacagccacagcagcctcccaaggagtctgcaagttggtctcactggtatctcgcagtcatttgttttcc

SEQ ID NO: 357651 - DNA, 75 bp, Homo sapiens
tggtgatggcaaatgtcgtggacatgtgtttgatgatggtgatgagcgaacattgagacgtacctcactttgtct

SEQ ID NO: 357652 - DNA, 84 bp, Homo sapiens
gacgtgtaccctgtctaccagcctgtgccatcagtggcctatgtacataccacgccgggtctgccttcaggctgggaagaaaga

SEQ ID NO: 357653 - DNA, 75 bp, Homo sapiens
aggagaagctgagcctttctggacagaccaacctgtcagtgctgcaacacgagtacacgagacaggattgagaaa

SEQ ID NO: 357654 - DNA, 76 bp, Homo sapiens
gagatcactaatccatcttcagcttcaattacaagctccactttgaggctctgatgaacattccagtgctggtgtt

SEQ ID NO: 357655 - DNA, 73 bp, Homo sapiens
tggcagccgcggatctcaccgccgctcaggaatggtgctgtgcccagcgaggccaccaagagggaccagaacc

SEQ ID NO: 357656 - DNA, 100 bp, Homo sapiens
tgatttgactcccttcctggttttgaaagcaagaaagaaacaaaagttcacctctgcgaaggatttttacctcctataactccaccagaaaagttttttc

SEQ ID NO: 357657 - DNA, 74 bp, Homo sapiens
gcggagcggcggcggaccacctccaggttttaaaatcaaagatgggaaaatcggagaaaattgcccttccccat

SEQ ID NO: 357658 - DNA, 88 bp, Homo sapiens
gccctggctgcctcagccctaccagcactggtcatgtctaaaggtaatttgtgaaagaagcaaaaataaatctgtggaactgaaggag

SEQ ID NO: 357659 - DNA, 100 bp, Homo sapiens
tcagtcaatgcccgtgcccgcattgtggctgaagagttccttaagaatataacgaaggaggcccaacttcattcaataaggagcctgacggatttatccc

SEQ ID NO: 357660 - DNA, 75 bp, Homo sapiens
gatgaagcttcaacttgtgcacaaaagtgttgtgcatttaatgatacggaaacgaggtgaaaagggagaagtggt

SEQ ID NO: 357661 - DNA, 100 bp, Homo sapiens
gacgcgtttggcaacagcgagggcaaagagctggtggcctcaggtgaaaaggttctgtacattggcctggcctgcaatacggctcgctatatttatattt

SEQ ID NO: 357662 - DNA, 100 bp, Homo sapiens
gcagaagaaatcttggagaagggtctaaaggattactacagcatcccatttcccacacccactactccgctgactgggagggatggtagcctggccagca

SEQ ID NO: 357663 - DNA, 100 bp, Homo sapiens
ctgcgggactatgtccgaggatacatccttcagagccaagaaaatgatgagctaagagatgcccatgaaaaacgcaaggaacggctacagatgttacaga

SEQ ID NO: 357664 - DNA, 100 bp, Homo sapiens
agttgaagtagatgcacaacagtgtatgcttgaaatcttggatactgcaggaacggtgtttgacctggtgatgcttttcatcatctatagcaccaatact

SEQ ID NO: 357665 - DNA, 83 bp, Homo sapiens
ccaccctcgtgtctgccaccatcttcgacttgagcgaagttttatgcaagacagtgggagtagctcaccgttacccaagtatg

SEQ ID NO: 357666 - DNA, 102 bp, Homo sapiens
aaaacatctgaccctttgaagattctggccaacgcagacaccatgaaggtgctgggagtgcagcggcctctcctacagtcaacgaaacggaatattccaatg

SEQ ID NO: 357667 - DNA, 89 bp, Homo sapiens
gcgccctggcgggtccggaccaagacctcccagctaactggaacctgtgtccacagaatgctgtccagtttcaacgagtggttttggca

SEQ ID NO: 357668 - DNA, 74 bp, Homo sapiens
ctgccgccatacgcgctctccctgtttaggtcgtagttcccccgctccctgggaaagcgtttttgcgtcagctt

SEQ ID NO: 357669 - DNA, 88 bp, Homo sapiens
gactttcttggatcgggtcgcctgtgtggcaagagtagaaggagcatcgatgcaggatttggagttccatggagtgatgagattttat

SEQ ID NO: 357670 - DNA, 135 bp, Homo sapiens
ggcggcggcttatctggcatgggccacacacctgaagtagaggaagctgtgcggtcctggcggggggctgctgagttacagacgttccacgttccgtctccctgtgccagccctcaggacctgagcagcggcctt

SEQ ID NO: 357671 - DNA, 100 bp, Homo sapiens
gggccctttgggacgagtgctgtgactgtgttggttcgccaagcagcttttcagtctctgggacctttcatatctacttttgctaatccatctagctcag

SEQ ID NO: 357672 - DNA, 74 bp, Homo sapiens
aagttgcggattgcagccgagaacgagctcaaccagtgttcctttctgccgaaattctccattcatatagaaac

SEQ ID NO: 357673 - DNA, 100 bp, Homo sapiens
tatggatttggatgtagtaatgcggagtagtgattgcccatacattgttcagttttatggtgcactcttcagagaggtcgctctggtgcagtggacagag

SEQ ID NO: 357674 - DNA, 100 bp, Homo sapiens
cagctggcgactttctccagtgactgggaaatccaggaagacagtaggaatcggtcgaggtggacggtttggccgtaaaggtgtggctattaacatggtg

SEQ ID NO: 357675 - DNA, 75 bp, Homo sapiens
atgaagaattggtatttcaaatgaccaccatgttgcaaaagtactatactggcaattgctggagaagattttgca

SEQ ID NO: 357676 - DNA, 100 bp, Homo sapiens
tctaacatcacctgcttcatccttgtttaatgactttggtgccctcaacatctctcagagacgaaaggtgactctgacatcattagaagcatgccagaac

SEQ ID NO: 357677 - DNA, 97 bp, Homo sapiens
tgccctcagtggttaacttttttgctgcaatcacaaagacagtcattttgtttactcattcagccctgttgcaggtcccaataaactcttcataagg

SEQ ID NO: 357678 - DNA, 50 bp, Homo sapiens
ggctctgaggatgagctggaggaggggttgattcgatgtcatcagtcccg

SEQ ID NO: 357679 - DNA, 82 bp, Homo sapiens
cgaggccgccgccgcctctccttgctgcagccatggagagaactacgatgacccgcacaaaacccctgcctccccagttgtc

SEQ ID NO: 357680 - DNA, 96 bp, Homo sapiens
ctggttgttccgttgcgagctgcagctgcgatctctgtggtaggcccagcccaccttgggacaccttgactccaagcccagcagtaagtccaacat

SEQ ID NO: 357681 - DNA, 74 bp, Homo sapiens
agaaaagagcaacttggagctgtaaaggtgaagctgtacttcacaaaaacagtagaggagccgtcaaatccaga

SEQ ID NO: 357682 - DNA, 50 bp, Homo sapiens
tagccctggacggcattcagtgttttggtttgagtacaagctcagcttca

SEQ ID NO: 357683 - DNA, 110 bp, Homo sapiens
gtgcttggaggtccagacacaagaagaggattggaaccagttccgatacagcacaatggacacattcagctaacgtattttagcaggtggagtgaggttgaagattcctg

SEQ ID NO: 357684 - DNA, 87 bp, Homo sapiens
gctcttcttcttttctctctcgtcctcgctgctgtacttcgtctatgtggcgcccggcataggtcgaagaattccatccactgacgc

SEQ ID NO: 357685 - DNA, 82 bp, Homo sapiens
cacctgccttgcatcgttccgagtcctgtactggactgcatcaggccgcgtctcctcaggctctgaacagcaacatggggtg

SEQ ID NO: 357686 - DNA, 80 bp, Homo sapiens
ccctaacgcacaataatatggctccgatgggctcaaagttgcatttgctggtctggcctttgcgtccttctacctggcag

SEQ ID NO: 357687 - DNA, 75 bp, Homo sapiens
cgtgagtgtggtctacgagctgtttctcatctttatactcttccagggcgccatgttttggaagtttgacctgca

SEQ ID NO: 357688 - DNA, 100 bp, Homo sapiens
ggtcacacaatgtcggggatggacctccagatttccttactgggcctctgaaaaatggaaccaaattctctgaggactaaagtcccagctttcttatctg

SEQ ID NO: 357689 - DNA, 100 bp, Homo sapiens
ttactatgaagttctaggcgtgcagagacatgcctcacccgaggatattaaaaaggcaacagaaactgttcatacttggtgcgctgtggactcttgtgat

SEQ ID NO: 357690 - DNA, 98 bp, Homo sapiens
cttgcagaaaaccagtgaaggggcttccgttttctaaacgagaggtgccggtggctagtgggtctgggtttattgtgtcggaagatggactgatcgtg

SEQ ID NO: 357691 - DNA, 101 bp, Homo sapiens
cgggggccctgctggggctactggcaggtttttcgttggaatatacgttgcacatttatggcgattctgagtgtgagggcagacttctgccaggctcagca

SEQ ID NO: 357692 - DNA, 96 bp, Homo sapiens
gaatagccaggataaggtgccagctcaaagatgtatttccactacacaaaattttccacctctgggataccttactacttgggaattcctctttcc

SEQ ID NO: 357693 - DNA, 100 bp, Homo sapiens
tcaaagcctccggtgaaatctgaactcattgaacaggtgatgaaggaggagcacaagactccaagaatgaaaaggctctgggccgcaaaataaactcctg

SEQ ID NO: 357694 - DNA, 80 bp, Homo sapiens
cgggatccactgtccggcagaggtatccaaaccttgaaacctttgctctagatgtcaggcttgtttttgacaactgtgaa

SEQ ID NO: 357695 - DNA, 80 bp, Homo sapiens
ctcttctgaaggaaaagacagtgtagtcctgcaaaacattttgagtatatggaggatcgcagaaaacagaagtggcaaag

SEQ ID NO: 357696 - DNA, 98 bp, Homo sapiens
gcgccactcctcccggaggcgacatggggcacccggtgtaccgcggcgagaagccccagctgcactacgcgtaccttctccaggcaaattccgttccc

SEQ ID NO: 357697 - DNA, 100 bp, Homo sapiens
tcacaatccaaatttcacagtcagagacaaccgagctatgctgggactcatgtatgtctactggactcagctcaacatgttccagaccttgaagtacctg

SEQ ID NO: 357698 - DNA, 100 bp, Homo sapiens
ctgggcggtgccggcgccggagacgatgccgttacgacaggatctgctcgccacccttcatggagctcacgagcctgtgcggggatgacaccatgcggct

SEQ ID NO: 357699 - DNA, 100 bp, Homo sapiens
gaaaactgtgaaacagaatgaaatttggctgtcaagagagtccctattcaggacaaagtggccttggagagtatgcctctgctaggcttcaccattgctc

SEQ ID NO: 357700 - DNA, 101 bp, Homo sapiens
aactacgtggagcggaagaacagcctgaagaagggctccctcgtgaagaacctgaaggacacactaggctgctggaaagtacagacaacaaggcagaaatt

SEQ ID NO: 357701 - DNA, 73 bp, Homo sapiens
attgatgtcaccattaacgaaaggtgacacttggacagaaacactggcctatgtgctcttctggggagttgca

SEQ ID NO: 357702 - DNA, 73 bp, Homo sapiens
cgggcacctccggtaccgctgcagccaccgcggcccccgcggcttcgcaaacctgggtatacttcatgtgaca

SEQ ID NO: 357703 - DNA, 90 bp, Homo sapiens
ccccgaaaacgaaggcgaagagactgcgcagtcagtgcacaggaagagtctcgctgccagcgctgcatctccgagctcaaagacatccgg

SEQ ID NO: 357704 - DNA, 100 bp, Homo sapiens
aggacgccaaggagatcatgcagcatcgcttctttgccggtatcgtgtggcagcacgtgtacgagaagaaggaggagatgttaaagtaacccatcttgca

SEQ ID NO: 357705 - DNA, 124 bp, Homo sapiens
aatctcgtcctccttttgatgttgtcattgatggtctcaatgttgccaaaatgtttcctaaagttcgtgaatctcaacttaagggaaagactactgatgagagatgcttccaaattaaaagtgg

SEQ ID NO: 357706 - DNA, 98 bp, Homo sapiens
tgcaagaaactccacgaccacattgagttggaggactcccaaattcgtcagagcacagcttatagcttacatcagcctcagggaaacaaggaacatgg

SEQ ID NO: 357707 - DNA, 75 bp, Homo sapiens
gtcgcgtctcggaaaccggtagcgcttgcagcatgctgtcaaagctcgaaaaacagcagcagaggaaagaaaaga

SEQ ID NO: 357708 - DNA, 82 bp, Homo sapiens
aaacttgggaataaaaagtattgtaacagctgaagtgtcttcaatgcctgcttgttgactatagtcaatggggccaatggag

SEQ ID NO: 357709 - DNA, 74 bp, Homo sapiens
aacagtgaaatatcagattcagaggatgacagttgcaaaccccaagactgcttctgagacagaaacagatatct

SEQ ID NO: 357710 - DNA, 83 bp, Homo sapiens
tggatgggagcacctggtgcctcgggactgctccgatgcccggttgttcctcaaagtcattcaagctgtactcgccgaaggag

SEQ ID NO: 357711 - DNA, 88 bp, Homo sapiens
ggcgaagggctaaatggaatgcacagaacctgctgtggaaggaagagagacatcatgcagaatattgtacagattttggaatcggtac

SEQ ID NO: 357712 - DNA, 82 bp, Homo sapiens
gctcaagggatcatcccgcctcagcctcctaagcagcagctggtactacagacccaacatgagtgaagtttcctgcaagaaa

SEQ ID NO: 357713 - DNA, 100 bp, Homo sapiens
aaggggctactcctgcgctgctacacgcaggcctgtagtggtggagacacgcccagtggatgatcctactgctcccagcaacctctacatccaggaatga

SEQ ID NO: 357714 - DNA, 90 bp, Homo sapiens
ccgggacgagctgttccgccggagcccccggcccaagggcgacttctccagccgggcccgcgaagtgcacgaaagtcaaagaagttggga

SEQ ID NO: 357715 - DNA, 74 bp, Homo sapiens
gtttgctttttccttagtcaatcagagacggtaaagaacaggtccaagaaaagctcaaagaaagcaaataccag

SEQ ID NO: 357716 - DNA, 96 bp, Homo sapiens
cctcaatctccttttccttggctacccggacatgagagatggctttagaagaaaaagtttctactcttcccattatgcgagagagcggtctcctta

SEQ ID NO: 357717 - DNA, 92 bp, Homo sapiens
cacccatctgaagggaggaaatagtggcaggtgacagtctgcatgtgcagttttcagattagaagcccaggacccaggaaggagacacagga

SEQ ID NO: 357718 - DNA, 94 bp, Homo sapiens
gggtccgtcgcggagccggagggcgggaggaacatgacatcgcggagacaatgcagatcttcgtgaagactctgactggtaagaccatcaccct

SEQ ID NO: 357719 - DNA, 100 bp, Homo sapiens
taaggcagcaacttcccatttcaatatcagggtgatggagtgtcggctggctgcgaagaatcctggtgaaatattcataattttgagagatgaagtaatt

SEQ ID NO: 357720 - DNA, 100 bp, Homo sapiens
ccgagatgtctcgctccgtggccttagctgtgctcgcgctactctctctttctggcctggaggctatccagcaattcagcttagagaactatcaacacag

SEQ ID NO: 357721 - DNA, 111 bp, Homo sapiens
gcggttattgtttgcctgggtggaattttaccttttggttcaatctttattgaaatcctgtggacatctctacagcaatgagtgaacgggcacttgctcagaaaagactca

SEQ ID NO: 357722 - DNA, 113 bp, Homo sapiens
tcttctgcaacacggccactgtgtacaagatatgtgcctggatgcagctcacctccgtgacaatttcaacaagcaccttttttgacggcttgctggtgacaggactatacaca

SEQ ID NO: 357723 - DNA, 87 bp, Homo sapiens
acccacaaacaaactacccattttcttttttggaactcatgagacccaaaatgaagtttaatccctttgtgacttccgaccgaagca

SEQ ID NO: 357724 - DNA, 75 bp, Homo sapiens
gctccctctaccggcggggtgaagaagcctcatcgctacaggccttggacaagattcgctatgagagcctgacag

SEQ ID NO: 357725 - DNA, 126 bp, Homo sapiens
atcctgctgcatcacagaagctggaagttctgatgttccactgaaatcacaatggaaagtcttgacttgactgacgaaatctcacaaaactgtcccttatcttcagtcacatgctggcagaaatca

SEQ ID NO: 357726 - DNA, 75 bp, Homo sapiens
aagtcgagtatctggtgaagtggaaaggatggcccccaaacaaatatgccagaggattatcctgatcagttcgat

SEQ ID NO: 357727 - DNA, 98 bp, Homo sapiens
gaattacataacatcaaacgtgggtctaaactaaatcataatgcagcgtttatgcagatacccatgggtttggagggtaattttaaaggtattgtaga

SEQ ID NO: 357728 - DNA, 75 bp, Homo sapiens
cgcccaggacgactccccgggctcagcttggctgcctgcctccttctggggtggcggatacagtggagcatcgtg

SEQ ID NO: 357729 - DNA, 100 bp, Homo sapiens
aattctcttcactagaatatggagactgttcaatcaccaggagacggtctcgccacattgcccagactggtctgaaagtcttgggctcaagagatcctcc

SEQ ID NO: 357730 - DNA, 75 bp, Homo sapiens
ccagccatggcagattcctccgggcagcaggtcaccaggagactaaagtccatcaaaaacatccagaaaattacc

SEQ ID NO: 357731 - DNA, 87 bp, Homo sapiens
gggttcgggtgtctcgtgtgtgaacatcacagcaataagagctaactgccatcaagagccatcagtatgtcttcaagctgcatgccc

SEQ ID NO: 357732 - DNA, 75 bp, Homo sapiens
ccaagatgcaggaatcaggagagcaaactataagaaaggtcccccttctgggaaagaccgagtgaagaaaggtgg

SEQ ID NO: 357733 - DNA, 83 bp, Homo sapiens
agaacatcctggaccccaggctgctgatcgccttccagaacaggagggtgtgaagacagagaatgaccacatcaacctgaagg

SEQ ID NO: 357734 - DNA, 75 bp, Homo sapiens
actggggcttcagtacgctgtcgagaaccagttacagaatgtctgaaggggacagtgtgggagaatccgtccatg

SEQ ID NO: 357735 - DNA, 82 bp, Homo sapiens
aagagaatgcctgaagacttggatgaaaatatggattacaggttgatgtgggaggaatatgtgtgtcttctgatcaaaatca

SEQ ID NO: 357736 - DNA, 75 bp, Homo sapiens
tgtaacccaaaggaggaaacagctggctaagctcatcattgttactgaggactaccccaatggcacctggctggg

SEQ ID NO: 357737 - DNA, 100 bp, Homo sapiens
tgatcaggagtgaattcacagtctaccatgaattggaagctcaatctgaaattgaagtgtctgtctctgcaaggaatatcagaaggctactaagtttcca

SEQ ID NO: 357738 - DNA, 120 bp, Homo sapiens
catggctaatgaagcagacttggatgaagagctggtcattaagggatccatcctacagaaatctataacaaggtgaggactggagaaaaagtgaaagttgaacatgtggtcagtgtcctg

SEQ ID NO: 357739 - DNA, 98 bp, Homo sapiens
tttagttgaggataccacattagagccagaagagaatagtgacagtggtacaggaaagaaagaaaaagaaaagaaaaacagaaagggcaaagacaagg

SEQ ID NO: 357740 - DNA, 50 bp, Homo sapiens
cctcaacctctccagagccattgggttcttgatggtgctagacattcccc

SEQ ID NO: 357741 - DNA, 75 bp, Homo sapiens
aggagcagcccgcggcgaccaagatcaggaacctgccctgcggtttttgaaatttccagatgaccccaaagtgag

SEQ ID NO: 357742 - DNA, 99 bp, Homo sapiens
aggaaaatgtcttccttgccccacagttggcacgggctgtgaaacctcatcagagcacgaacttccaggagccggtgcagccgctgacacagcagcagg

SEQ ID NO: 357743 - DNA, 83 bp, Homo sapiens
gtccggggccggctggtgcgcgagacgccgccgagagacaatgcagatcttcgtgaagactctgactggtaagaccatcaccc

SEQ ID NO: 357744 - DNA, 82 bp, Homo sapiens
ggctgagctggtggatgctcttcagttcgtgtgtggagacaggggcttttatttcatttcctgatgaagatgaggaaacaag

SEQ ID NO: 357745 - DNA, 100 bp, Homo sapiens
aaaatgtgcatatttcaggagtgtcaactgggccgcttgaagatgccattgaagatgaggaagaagaatgtccatcagaggaaacagacatcatctccaa

SEQ ID NO: 357746 - DNA, 98 bp, Homo sapiens
ggccgagcgggcggcttcctggcctgggcgctccggtggcggcggagtttggtgccctggttgtcagatgttggaaagcagtaggacggaacatactc

SEQ ID NO: 357747 - DNA, 82 bp, Homo sapiens
ccctgtctctgccctcctggcgggcccggcggctctcactatccagggaaagcaggcaggatgggagagtcgccgatagaac

SEQ ID NO: 357748 - DNA, 100 bp, Homo sapiens
acaagtggtggactggactagaggagtcagaaataccatcagaggaggggtactgtgactttaatagtaggccaaatgagaactcttattgctatcaact

SEQ ID NO: 357749 - DNA, 74 bp, Homo sapiens
gaatgagaataggacctgagagtatattgggctaaggaggagaggtgacagagttagtccttgataattgcctg

SEQ ID NO: 357750 - DNA, 97 bp, Homo sapiens
ctattgtctcacctgatgctggtggagctaagagggctgaactgtatcgggcctcagggaagtttgagctgcttgatcgtattctgccaaaattgag

SEQ ID NO: 357751 - DNA, 142 bp, Homo sapiens
ctcacaggtcccaccctggcccaggaggtcagccagggaatcattaacaagaggcagtgacatggcgcagaaggagggataagaaagctccagtctacaaacaaaacatgccagaagatttttaggcgatgatgccacctgc

SEQ ID NO: 357752 - DNA, 90 bp, Homo sapiens
aggcaacgtgttggaccttccggagcttctcagaagacagagggttttcttttgagtgatgcagccaacacgaacggttgtcatgtgtaa

SEQ ID NO: 357753 - DNA, 75 bp, Homo sapiens
gttcccatgcaaaccaatgagggagaagtatcggaagaaagcagttccaaggtatatttgaaggctcccatgatt

SEQ ID NO: 357754 - DNA, 83 bp, Homo sapiens
aggagcagggcctgactgcgcaggaatgggtaccacagaccatgtcatcgtcctggcgtccacgaaccgagctgacattttgg

SEQ ID NO: 357755 - DNA, 100 bp, Homo sapiens
gcccgggagcaggaggagctgctggcgcccgcagatgtgttctaagaacggaagcatctgggctggatggaatttagcatcaagcagagtcccctttctg

SEQ ID NO: 357756 - DNA, 75 bp, Homo sapiens
tcaacatctctcagagacgaaagagctttttgacaactacatgcaacaagatgcccatgaattcttaaattacct

SEQ ID NO: 357757 - DNA, 100 bp, Homo sapiens
cttttcacttctgctgcactgctttcagcatgcaaggtcaaagaaggctcttccaagaaacatgtagaagagaagagtgaagaaatttctcttcagcagc

SEQ ID NO: 357758 - DNA, 100 bp, Homo sapiens
gcctgcggaacgaaagtgaacaggagccgctcttaggcgacacacctggaagcagggtctactgagcgccatcccttgtgctggactctggctacttaaa

SEQ ID NO: 357759 - DNA, 101 bp, Homo sapiens
acgggtttggaggaccctcttcgccttcggagagcagagtcaacacggaggcatttaaacttccctcttagaactgcttttgtggcatcccataagttttg

SEQ ID NO: 357760 - DNA, 98 bp, Homo sapiens
cagaacaggtgaagaatatgtctgccagtgaggggacaattcatctctttcgaaaaccacaaagatccttttttggcaagttgttacgggaatttaga

SEQ ID NO: 357761 - DNA, 82 bp, Homo sapiens
ggttcgtggtctcgctggctcaggagtgaagctgcagaccttcatggacgactgggtttggattcagaagaggattattata

SEQ ID NO: 357762 - DNA, 101 bp, Homo sapiens
acaccgggaggcaaggagcacctggtctggcagaaaagaatggtttgtcattcattgaaacttcggccctagactctacaaatgtagaagctgcttttcag

SEQ ID NO: 357763 - DNA, 75 bp, Homo sapiens
ttgaaatgcatttgccttatacagctaaagccatggaaagatacgtttgaaatggtttctgaagatgaagatggg

SEQ ID NO: 357764 - DNA, 90 bp, Homo sapiens
atcaaaaatagtgatagctttgataacttgctgagcgagagcgagaagcggcccttcgtggaggaggcagagcgccttcgcgtgcagcac

SEQ ID NO: 357765 - DNA, 82 bp, Homo sapiens
tcacggaggtagtcatgatctatgacgccgagaagcagaggccccgagctccttccgcttccagccgttcgagtcctatgac

SEQ ID NO: 357766 - DNA, 82 bp, Homo sapiens
gcccgggtcccggatccccgcgcacccggccagatgccctcagggatggcagggagatccagtggcccagtgccatgtatcc

SEQ ID NO: 357767 - DNA, 90 bp, Homo sapiens
gaaagtctgaaagtggatgagcatctggccaaacaagatgcccagaatgccatagcaaatgcttcaactctggctgaagtggagaggctg

SEQ ID NO: 357768 - DNA, 100 bp, Homo sapiens
gctgttaaatgtgcctgaaaagcaatttgcaatctttgcattagagctggactggccattatggaggaggagctgcagcattcccattgtgtgaattgtg

SEQ ID NO: 357769 - DNA, 100 bp, Homo sapiens
ctggagacctgtgggcttctggtcgcactggatggcagaaacggtggacacaagcgaaatggtcaacggcgctacagaacaaaggacgagctctaaagag

SEQ ID NO: 357770 - DNA, 75 bp, Homo sapiens
gggagattgagtccaagttcaaccaagccatttcaaccacagaagcccctgtgaagcgagcatctctgctgggtg

SEQ ID NO: 357771 - DNA, 100 bp, Homo sapiens
atccgggagctcctggagcaggtggatgagcagaccttcctgcagtgtgagacagcttccttgtgtgggactgagaagcaagatatcaatgtagcagaat

SEQ ID NO: 357772 - DNA, 100 bp, Homo sapiens
caaaaccaatacactccgtttatcacagcttgtttatggaaatcctaaagtactgtacagactgtgatgaaatacaatttaaggaggatggcacttgggc

SEQ ID NO: 357773 - DNA, 98 bp, Homo sapiens
cttcattaagcagatcctggatggggtgaactaccttcacacaaagaaaattgctcactttgatctcaagggcgtctctggccgagcctctttttgtg

SEQ ID NO: 357774 - DNA, 75 bp, Homo sapiens
ggaatctctaggaaaggaaagagcaaaggaggggaaagatggggggctgcagttccctgtattgaacactgatat

SEQ ID NO: 357775 - DNA, 75 bp, Homo sapiens
cttccagctcgatctgctcttcgtctgcttcttcctcttcagtcaagttggagtcattcgttgcccagtttgcag

SEQ ID NO: 357776 - DNA, 82 bp, Homo sapiens
ctgcacgtctcgcggatcatgctgaaggatctgagtctctccctgcggagacagccctgaagaactcctgtaacgtcaagct

SEQ ID NO: 357777 - DNA, 98 bp, Homo sapiens
tgatctcaagagcaaagcaggaaagggggagagtgctggctacatggagccctatgaggcacagaggatcatgacagcttctggtagatgaattgaga

SEQ ID NO: 357778 - DNA, 100 bp, Homo sapiens
aagattttgtggtttatacttacaacaaggaagggactttaatcactgaccatcccaatatacagatctcttccgttccctgctggcagttcatcagctg

SEQ ID NO: 357779 - DNA, 100 bp, Homo sapiens
ttgccataggtagtcagacgacaaagaaagcatcagccatatccatcaaacttggatcaagtatttacagccagttacttactcagaacctgcattttgg

SEQ ID NO: 357780 - DNA, 98 bp, Homo sapiens
cgcgggctccgcgcccggccggacccgggcccgagatgccatggacaatattaccaggcagaaccaattctacgatacccaagtcatcaaacaagaaa

SEQ ID NO: 357781 - DNA, 100 bp, Homo sapiens
atcccctctgacgtctcccacttccgcttccatgactccctggaggaaaagcggaagcggcagcggtctgaacgcctggaacggattttccaacttagtg

SEQ ID NO: 357782 - DNA, 107 bp, Homo sapiens
aggcggcccgcttcctggaatggcaagcgcagcaacaacagagagcacgtgacaatgcagatcttcgtgaagactctgactggtaagaccatcaccctcgaggttga

SEQ ID NO: 357783 - DNA, 74 bp, Homo sapiens
ccacactctcacccaggacaaacccatttccgtccacacccgctcgtccagtatgaatgacccatattaaatcg

SEQ ID NO: 357784 - DNA, 100 bp, Homo sapiens
agacctcgctggcccccatcattgtttacatcaagatcacctctcccaagacatatctgaagagatggattaagaatgctttggattaaggattgtggag

SEQ ID NO: 357785 - DNA, 83 bp, Homo sapiens
ccggcctcggcggctgaggaaagcaggaggaggtggcggcggcgggaagatcccgtggaccgggagcccgtggaccgggagcc

SEQ ID NO: 357786 - DNA, 90 bp, Homo sapiens
ctgccacttccggggggaggtctgcagcgctgaagacttcaaggtgttgattatggaagattcccacaagagtaccacgtcagagacagc

SEQ ID NO: 357787 - DNA, 87 bp, Homo sapiens
ctgttcacaccccgcagcatggagaggagtgacgcctcccgggaggagctggcagagctggcacagcaggtcaaccccgaggagatc

SEQ ID NO: 357788 - DNA, 100 bp, Homo sapiens
attgttagatggaacacggctccatcatcacccaggcgcggagggaagacgccctggtgctcaccaagcaaggaactggcccaaataaggaaggaggaaa

SEQ ID NO: 357789 - DNA, 100 bp, Homo sapiens
aaaagagtagcagcagtgaggaagagctgccgagacgcctactttggggataaaggattatttggtcttctggatttggaggcaatcagcggacagcatg

SEQ ID NO: 357790 - DNA, 100 bp, Homo sapiens
gtcgtgaagaagcaggaggctaagaaagtggtgaatcccctgtttgagaaaaggcctaagaattttggcattggtcatcatcagatttgaaatatttaaa

SEQ ID NO: 357791 - DNA, 80 bp, Homo sapiens
cctgttcctcagttccaaccacaggccctccctatcctgaagacattagctgagagtctggcaccttttaaaggtctgat

SEQ ID NO: 357792 - DNA, 75 bp, Homo sapiens
cgcgctcacctgcgccggtagcgaagaaatcgccccgggacatgaatgacatctctgaaaaggagcaacgatggg

SEQ ID NO: 357793 - DNA, 75 bp, Homo sapiens
gagcgtccggagctagctggatcctctaggcagttcccagtgacctgacagcagaggagcgtcaagaactggaga

SEQ ID NO: 357794 - DNA, 101 bp, Homo sapiens
aaaatggcagctctcagaatgggaagaatgagagaagtcatatgcccggcacatgtggcaaagcgctccctggcctttcaaagcaagaggactgctgtgga

SEQ ID NO: 357795 - DNA, 75 bp, Homo sapiens
tgtaggggcagggcaaccagctgcgtccagcaatctccagcctcagtggagacctttggcgacttggcctttggc

SEQ ID NO: 357796 - DNA, 90 bp, Homo sapiens
gacgtctccagccaaattcaaaaaggataaggagatcatagcagagtacgatactcaggtcaaaggtgtgtgtgaccatggaacgggaga

SEQ ID NO: 357797 - DNA, 100 bp, Homo sapiens
ccgcgcagtgctgccaacgccccggtggagaagctgaggtcaccatggagtaacaagtatgaccctcccttggaggatggggccatgccgtcagctcggc

SEQ ID NO: 357798 - DNA, 90 bp, Homo sapiens
agcggaaacctcagctggagctggccatggtgccccactatggtggcatcaaccgagttcgggagcgcctggaccatgctgctgagcgcc

SEQ ID NO: 357799 - DNA, 74 bp, Homo sapiens
ggaatgcagcatatatctcattggaggtaggagcattgcttttcgtggtgaaagaggcaatgatgaatctgcca

SEQ ID NO: 357800 - DNA, 83 bp, Homo sapiens
ctggaaactggatgcagcaaggaaataggatttaaccgctctctgcctcccagacaatcgatcaagccagaggcattccccac

SEQ ID NO: 357801 - DNA, 73 bp, Homo sapiens
gaagaggttcagctgtcctaatcctcactgccgaaaggtggtcattgggactcccacacttaaacaaagaaag

SEQ ID NO: 357802 - DNA, 100 bp, Homo sapiens
agcagctgcattgcaggcacagggcccgatgagccagagaagcttgattggccttaagagaaggacggagccacatactgctgacggcccagaactggca

SEQ ID NO: 357803 - DNA, 83 bp, Homo sapiens
cagagaaggaaggatcttctcatgcacagaggcaacaaatggcaactttctgacacgccaaccatactaacaggtggtgaaac

SEQ ID NO: 357804 - DNA, 95 bp, Homo sapiens
aaatttcactggcctagtgggaggtcctgactttgcccactgtctgctggtacttcttcctgccctctctcccaccatgaccatgggcacagttc

SEQ ID NO: 357805 - DNA, 75 bp, Homo sapiens
tcgaggttgtatcagtaagaagggagcacggaacagattcaagctcagataatcctgatttgctgagccatgtca

SEQ ID NO: 357806 - DNA, 100 bp, Homo sapiens
cggcctggagcgcgccgccaaggcggcgcgcgagctggagcactcgctaacaaatgtggcaattattttggatctatcacctgtcatcataactggcttc

SEQ ID NO: 357807 - DNA, 90 bp, Homo sapiens
tccaaaccagtcacctccccacccccaccgccaagcagccacgagaaagatggaggcagaagaagctgctgctaaagcatcatcagaagt

SEQ ID NO: 357808 - DNA, 100 bp, Homo sapiens
cagcactgtggataacacctctgtttttggcagggtgatgcagatagggtttcgaaaaaacgatgaaatgaaagctatggatgttttaccaattttgaag

SEQ ID NO: 357809 - DNA, 100 bp, Homo sapiens
cttgtccaggcgggcctcccgtttctggctccgggctgagcttcctggagaagaggaagcccgtggaccgggagcccgtggaccgggagccggtggtgtg

SEQ ID NO: 357810 - DNA, 101 bp, Homo sapiens
ggctgccctcaaactcctggactgaaacgatcctctcatctcagcctccaaaagtgctggcattacaggctcccccgaagatgggcctcgagtggtcttca

SEQ ID NO: 357811 - DNA, 74 bp, Homo sapiens
gacgagtgttcgtgaaagtgaaccccaaggcggaggacatgtctcaggaaggctatggaactagatctcaacct

SEQ ID NO: 357812 - DNA, 80 bp, Homo sapiens
actaaaccccgcccaggtcttcgacctcatgaacggaggcccacacctcggtctaaagaatcctcgtctgtcttgagttg

SEQ ID NO: 357813 - DNA, 50 bp, Homo sapiens
agcacctggccccgctacagcaaaccagatctcttaagggcagtcccaag

SEQ ID NO: 357814 - DNA, 100 bp, Homo sapiens
agcacgtgtacatccccgtgctgccgccgcatctgctggactactgctggagtctccccaggacagtgctatcacccgggatattaaccgaacattccca

SEQ ID NO: 357815 - DNA, 75 bp, Homo sapiens
ccagagacttcggactcgctctcggggagaacggtgaccgaggtctctgtggcacattttgtttcccgtgccttg

SEQ ID NO: 357816 - DNA, 100 bp, Homo sapiens
gtctgcaaagaagtcctttcaagtctctaggactggactcttcctaagcaagtccggtgcttgaggaatccaaagccctcgtgcgctgcaacatgaagat

SEQ ID NO: 357817 - DNA, 90 bp, Homo sapiens
gcagcccttgccttgagtcagtgcgccgctctccagcccgcttgaacgatcgggagcggtgccgagaaaaatttccttactagatgacat

SEQ ID NO: 357818 - DNA, 99 bp, Homo sapiens
acaggagagccaggattcatgctctacatccccatagaggtgcagcggaactgctgcctgacgctctgcaacttcagcatccccgaggagctggaattc

SEQ ID NO: 357819 - DNA, 75 bp, Homo sapiens
tggcaaagtgctgcttccaaagctcattgacttttctgctcagggggcagctggcattttatgctatgtgggagc

SEQ ID NO: 357820 - DNA, 82 bp, Homo sapiens
actaacagctggagagaacagttcattgaagctatcactgtcagtgctgcttcctgcctgacacagctcacttcaagaagtg

SEQ ID NO: 357821 - DNA, 83 bp, Homo sapiens
catgccgctcctaagcctgcacagccgcggcggcagcagcagtgagagagtccactgccagctggttcgactctttgcacgag

SEQ ID NO: 357822 - DNA, 75 bp, Homo sapiens
aatggtatttcatccccgaagccactttttgtatgcttatggcaatcaggtttgccatgcagaacttgaattggg

SEQ ID NO: 357823 - DNA, 100 bp, Homo sapiens
ggcggcgcgatggagcagcgaaaacgtggttgtagagttccgtgactcccagggtgaggtggctttgaccccgggttgcccggccagcacgaccgaggag

SEQ ID NO: 357824 - DNA, 87 bp, Homo sapiens
ccggcagccttcgacgcgatgttccgccggagcttgaatcgttttgcatttgtaaaggatgttcatgaagattcaataacagttgca

SEQ ID NO: 357825 - DNA, 75 bp, Homo sapiens
ccggggtgtcagtgtggaggagactgaggtgctggagaatctggtaaaagcaccattgtgaagcagatgaggatc

SEQ ID NO: 357826 - DNA, 130 bp, Homo sapiens
atgagcagcatggacgacctgatacgccactgtaacgggaagctgggcagctacaaaatcaatggccggacgaaaatacgatgaatggattaaagcagataaaatagtaagacctgctgataaaaatgtg

SEQ ID NO: 357827 - DNA, 83 bp, Homo sapiens
agcaagctgaagacatcaagaagatcttcgagttcaaagagaccctcggaacttcaaatctgaacatcaatgatgtactaggg

SEQ ID NO: 357828 - DNA, 83 bp, Homo sapiens
aaccaacgcctggctcggagcagcagcctctgagcttcctgcctgacacagctcacttcaagaagtgcacaatgtcagaacgt

SEQ ID NO: 357829 - DNA, 101 bp, Homo sapiens
gctgcaggctctggggagtcgccatggtttggaattcacccagttgcaggccgaatgcctggtcagcttaatgtgctgctggctgaggctggtgtgccata

SEQ ID NO: 357830 - DNA, 100 bp, Homo sapiens
cccaccaccaccactgacccgatgctagagaaggatgcggctggaggtgacttcccagccaacttggtgccctacatcattcgaggaatggcgcccccga

SEQ ID NO: 357831 - DNA, 75 bp, Homo sapiens
agcaagcgatggcatagtaaatgaaaacttgtctgaacagcagaagaagcaacaggaggctgagaaactgcatcg

SEQ ID NO: 357832 - DNA, 89 bp, Homo sapiens
ctttgcggctgccaaaggaataattgagacgtctgagttgagcaggagctttattgcagaaatgaccatttatatcaagcagctgggca

SEQ ID NO: 357833 - DNA, 100 bp, Homo sapiens
cgcctgtccccgccggcttcggcttcagcgccgcggggtatcagctctgtgataacagcgtgggggtgctcttcaatgactcaacacgcctcatcctcta

SEQ ID NO: 357834 - DNA, 90 bp, Homo sapiens
actgaaacagattcctacacatgactatcagaagggttctgctccagacgagcccttaccacgttgactcactcctgcagctcagcgatg

SEQ ID NO: 357835 - DNA, 101 bp, Homo sapiens
ttccttgtagataagcaactggattttttaactgaagatagtgcctttcagccctaccaggtactagcaaaggccagacgtcttactcaacaacttccctg

SEQ ID NO: 357836 - DNA, 108 bp, Homo sapiens
gctcgatcttgggacccaccgctgccctcagctccgagtccagggcgaggagcaggccgggctctcgccatgggtcactgtcgcctctgccacgggaagttttcctcg

SEQ ID NO: 357837 - DNA, 100 bp, Homo sapiens
gttccaatactctgaatgagaagcccgccctgcccgtcatccgagacaagtacaaagacctgacgggagaggtggaggagcagcagcttctggcggccgg

SEQ ID NO: 357838 - DNA, 111 bp, Homo sapiens
ggagatgggcagacggattcatttagagctgcggaacaggacgccctctgatgcataatcaccagcaacacccgggacaataatacgggggccacctacccccacctgaac

SEQ ID NO: 357839 - DNA, 76 bp, Homo sapiens
gggagaagcacaagatcatgcacagaggaataaagggattcattcctcattttaactgatgttacagtgaagatgg

SEQ ID NO: 357840 - DNA, 98 bp, Homo sapiens
gacactcggcgagccatcagtgaagccaatgaagacccagagccagagcaagactatggtgtggccgacgacgatgccctcgctgaggagcgcatgcg

SEQ ID NO: 357841 - DNA, 100 bp, Homo sapiens
gatcgtcaggctctaaacaaaattctgggacagagcagaatgggctgatatagatccggtgccgcagaatgatggccccaatcccgtggtccagatcatt

SEQ ID NO: 357842 - DNA, 95 bp, Homo sapiens
ctgtggaggcggactccccagaccagaagaaaatcattagcctatggaggttgctcaaagaagtacagtctttaaaacaaccatacctgaagaag

SEQ ID NO: 357843 - DNA, 75 bp, Homo sapiens
aaaggatggagaaaaatctgggacaggccacgtgctgtacgccgacatcaagatggagaatgggaagtccaaggg

SEQ ID NO: 357844 - DNA, 100 bp, Homo sapiens
cagccactaacaacatagcccaggcccggaagctggtggaacagctacgcatagaagccgggattgagcgcatcaaggcataatcaccagcaacacccgg

SEQ ID NO: 357845 - DNA, 100 bp, Homo sapiens
gccgcgggcagtgccgaaaatgcccccagcaaggaggtgctcgattcgttcctggatcttgcgagctggagttggccacggccaagaacgacatgaaccg

SEQ ID NO: 357846 - DNA, 100 bp, Homo sapiens
tggtggaaaagactttatggctaaaaggcttaacccaggcatttggagggtttctcatttggcctggcacatgaggatttcatgtatgacatcatacgag

SEQ ID NO: 357847 - DNA, 100 bp, Homo sapiens
ccgcctcatcactggagccaccagcccaaccgtgttgtatgtgagtggaggaaatacgcagccacaagtatatggttatgatgacttgcagatgcttcag

SEQ ID NO: 357848 - DNA, 75 bp, Homo sapiens
acagtgaagaaattcttcagtgcatcttccagggtcggatcaaagaagggtcaagtttacccatgggggaactgg

SEQ ID NO: 357849 - DNA, 100 bp, Homo sapiens
attatttatgtcatcaagaagaatgacgatgaactcggcctgcatcttggcctcctgggtctccggcaagttcagcagcctgctacaggccctggaaata

SEQ ID NO: 357850 - DNA, 82 bp, Homo sapiens
ccacacgcccctccacatggctgccctcctcctgcttccctggctcatgttgctcacagctccccaggtgtgtcctggtaga

SEQ ID NO: 357851 - DNA, 75 bp, Homo sapiens
atcacagacaccgcctacaggagtatgatgcaagatggactcaccctgtcacccaggttggactgcactggcctc

SEQ ID NO: 357852 - DNA, 75 bp, Homo sapiens
gtgatatcagacaccgagcttcagcaagctctctccaacgatccggtgtttaaagccgtcccagtgcccaacatg

SEQ ID NO: 357853 - DNA, 80 bp, Homo sapiens
gcgtggtagttaaaggcccagatgataggaatcccatctcatttaggttctctccataaatgaagaagggctaaggcgat

SEQ ID NO: 357854 - DNA, 73 bp, Homo sapiens
cacctcagctggctgacattgttgcaacaggttctaatacccgatttacaattacattgaactacaaggatcc

SEQ ID NO: 357855 - DNA, 100 bp, Homo sapiens
cattgaaaaccctgctgatgtcagtgttatatcctccaggaatactggccaggatgaaaactttcggaagagaaagttgcctgtggtaagttcagttgtt

SEQ ID NO: 357856 - DNA, 83 bp, Homo sapiens
tttccacctcgcggcagttcggtgcaatgattctggactgagacgcgcttgggcagaggctatgtaatcgtgtctgtgttgag

SEQ ID NO: 357857 - DNA, 76 bp, Homo sapiens
gctgcccgcctgccctgaggagtccccgctgcttggttcacctttccttgccagtgaagatggcgtgcttggcgga

SEQ ID NO: 357858 - DNA, 100 bp, Homo sapiens
gaacgggcggaagcagagtctgggggagctcatcggcactctgaacgcggccaaggtgccggccgacaccggtgagaagccctaccactgcaactgggac

SEQ ID NO: 357859 - DNA, 96 bp, Homo sapiens
gccgggtaccggccgtggaagcggccaccgactactgtcagcagctgtgccagaacccttaggagaaatcttgagagtggacagcaattgtgaaga

SEQ ID NO: 357860 - DNA, 100 bp, Homo sapiens
cccccggcaccgcgcctgctgccgggttgcgctccgtgcacctcttgcggggctgaaaacacagttaaatcactttcaaagttaaaagactattaagaac

SEQ ID NO: 357861 - DNA, 96 bp, Homo sapiens
accagacatccaaaagactgctgagatagtttatgcagccaccaccagtttgcggcaagcaaatcagggttggatggcaagcatgtggtgtttggc

SEQ ID NO: 357862 - DNA, 76 bp, Homo sapiens
cttgtgcagaccgggcgagcagagtaagaagcagacatggagattaagtagcttgcccaagatcacccagccagta

SEQ ID NO: 357863 - DNA, 75 bp, Homo sapiens
catcatcctaaggacgcagctgtctgtgagggtccatgcctgcatcgcaatgacaatgcagtttattagtcatca

SEQ ID NO: 357864 - DNA, 50 bp, Homo sapiens
tccaactgtgaagccagatgataaggattccagacagcattggaaaagac

SEQ ID NO: 357865 - DNA, 100 bp, Homo sapiens
ccgcctcagccgccgccgccgccgttttcgcctgcagctgctcaccggagccaaccccctgcagaggaatgaaatgggacacacacccttggattatgcc

SEQ ID NO: 357866 - DNA, 150 bp, Homo sapiens
ccccggagcggcctcgctgcctactttttcatgggccggctcccattgctccggcgcgttctcaagggcttgcagctggtcctgctccagaagcaataactgataaaattttccaaatcagcaagacaattgaagaatatgcagtttgcc

SEQ ID NO: 357867 - DNA, 75 bp, Homo sapiens
gggcacccggaggaaagtctgttactactacgacggttcagtggtcacctcacaatgagactattttagcttcca

SEQ ID NO: 357868 - DNA, 83 bp, Homo sapiens
atactctatattcaaaaattctaggaccaaaacctcaggatcaggtctcctgggcatggctaacattgacctggaaaagagca

SEQ ID NO: 357869 - DNA, 83 bp, Homo sapiens
catcgcaaacccaaagatccccgttcctggagattctgattgaggcgtcacaatgtagcagggaccccaggcgtcgtgctcag

SEQ ID NO: 357870 - DNA, 100 bp, Homo sapiens
cagcactctgttggcctctcccatgctgaagcgcttcacctggactgacagcaaacccaaggcctcgctcaagattgagctggagtgcagtggcgcaatc

SEQ ID NO: 357871 - DNA, 50 bp, Homo sapiens
cgggggtgaagctttgcaggtggacaaagcaaatcgcagtcttctccagg

SEQ ID NO: 357872 - DNA, 74 bp, Homo sapiens
gaagcgctgcgctcgcgcccggatccctcaggaactctgcgaccttcaagtcgtttgaggaccgagttgggacc

SEQ ID NO: 357873 - DNA, 100 bp, Homo sapiens
ggactaaattttatatctgtcaagggccccgaattactaaacatggaaccacgtgaatgttgagggggcgacacacaagcaggtggtggacctgattcga

SEQ ID NO: 357874 - DNA, 75 bp, Homo sapiens
aaaaacaagactggggctgctcccatcattgatgtggtgcgatcgggtgaaggaggtgtacagactggaagagat

SEQ ID NO: 357875 - DNA, 96 bp, Homo sapiens
gtttggagccccggagtggggtgtcggcgcctcattcgggtggagctgagccggagacagaaaaagctccctgtgttgttgctgggtcactcggcc

SEQ ID NO: 357876 - DNA, 98 bp, Homo sapiens
atcggaaaccacgcgtcctactacaaagatgctctgcggtttttgggctgtgttgacatcaaggatctaccaggaagaagaaaggtggggcgaagcca

SEQ ID NO: 357877 - DNA, 126 bp, Homo sapiens
ggaggataaagtcagccatgtgagcactgggggtggtgccagtttggagctcctggaaggtgatttgaagatattaaagctagaaattggaactagaaaatcaaaagaattcaaggcatcttaacg

SEQ ID NO: 357878 - DNA, 100 bp, Homo sapiens
gccgcactggatgtttgccttagacagtatcattcggaaggcggtacagacagccattaccatcctggttccaggctttggcagctcaagtacatctggg

SEQ ID NO: 357879 - DNA, 83 bp, Homo sapiens
tgacggagaatccgtttcaggaaagcatctgggctgatgggccgtaccctgcaccgtgagccacccgcaggagaccaggaggg

SEQ ID NO: 357880 - DNA, 100 bp, Homo sapiens
tcgagtaattttggaggtttccccacagcaagtcactctccttttcagccccaaactacaggttttgcagccactcttgatgatgacaaaccttggtact

SEQ ID NO: 357881 - DNA, 82 bp, Homo sapiens
agacaaaaatccagaagtacaagcagtctgggtgatcagcccatgacctaaacctccagacaaaataaaacggaaaatttgc

SEQ ID NO: 357882 - DNA, 90 bp, Homo sapiens
tttggattgaagatactacaaaatcagtttatcaagcagcagaagaggatgaaacacaaaaccagcatgatgatagttcctccgattcag

SEQ ID NO: 357883 - DNA, 50 bp, Homo sapiens
atctctttctccacccatcccgagaacagctggcttagcaggagctccag

SEQ ID NO: 357884 - DNA, 100 bp, Homo sapiens
taaaaatgaaacaatgctttctcctcgagaaaagattttctattacttcagcaacagtccttcaaaggtcccaggtgtgacaccttcagcaggtctcagg

SEQ ID NO: 357885 - DNA, 87 bp, Homo sapiens
ccgaccgcgtgctggagctcttcgacccacccaaggttaagaatagacccaccagcatttcgtgggatggtcttgattcagggaagc

SEQ ID NO: 357886 - DNA, 100 bp, Homo sapiens
gacccaggaagggagagtcttcttccaaggttgaaatcacaaagattagacacctttttagataggtgttcttcagcaccactgacaacacggttctgac

SEQ ID NO: 357887 - DNA, 98 bp, Homo sapiens
cagaaacacattaaaagaacacatgccaaacatcatacttcggaagcaattgaaagttattaccagaggggatggtttagacaacagtgtagcttcac

SEQ ID NO: 357888 - DNA, 75 bp, Homo sapiens
gaaaagattgcccacgaattgggtcgatctgtgacagatttgggagctgaaagtgccgacagcattggtgccgtg

SEQ ID NO: 357889 - DNA, 99 bp, Homo sapiens
cccgagccgtcccagaaaccaaagggcaggcacggcagcaaacgcctgaggtcccgttcaagaagttcttccagttcgcagtcaagatctcgttccagt

SEQ ID NO: 357890 - DNA, 100 bp, Homo sapiens
caggatgaaaaagactgattggctcttcctcaatgcttgtgtggattcagaccaggatgtagcactcaaacttgcccaggagcgagctgaaatagttgct

SEQ ID NO: 357891 - DNA, 114 bp, Homo sapiens
atgcaacagtacgttttgctggtgttgtccctcccgtggcaggtagaagactttttgaatctctccacacagctgtctggatttcatatttgtattgacaaagggacttttgat

SEQ ID NO: 357892 - DNA, 74 bp, Homo sapiens
cttaaatcgtctggacattgaagggactgctgagatgtcctctattcttgaagagcgtattcttggagctgata

SEQ ID NO: 357893 - DNA, 83 bp, Homo sapiens
ggatacagggtcaaaggagagcacaaccatcgcagttggaagcccatggggcaggcagcctgcttctgcaaagtggtacgatc

SEQ ID NO: 357894 - DNA, 75 bp, Homo sapiens
tgaagagggaagacacgcggaaacaggtcagtactcctgcatttgtaccaacgaaaactcacgtgctgcttcatc

SEQ ID NO: 357895 - DNA, 50 bp, Homo sapiens
ccgtgccctggggctgagccctcagtgctcaggagctgtcccaggaaatc

SEQ ID NO: 357896 - DNA, 100 bp, Homo sapiens
aagggacggacgcagcccgggccgccatcgccttctcctttttctccatcttcacctgggatgttcacgtcccagtatgcccactctgtaatacccccat

SEQ ID NO: 357897 - DNA, 75 bp, Homo sapiens
ctgaccttcaagagcattctgcatacagccaggaggagccgaaacaccaccaggcccgctctgctgaggctgtcg

SEQ ID NO: 357898 - DNA, 98 bp, Homo sapiens
tgcaaatgccagaaagaggatttggccagagcgttttgtatagggccagatttgagtgtgtgaatttttgagtgaaacctggaacccaaatgagaaga

SEQ ID NO: 357899 - DNA, 83 bp, Homo sapiens
gcaactatgtgttcgtgttcctgggcctcatcctgtactgtgttgtactaatggtcacttgatgtgcgctggctgttttatcc

SEQ ID NO: 357900 - DNA, 100 bp, Homo sapiens
caccaggggtcagcagggggccagctcaggacacacagacccagctggaactcgtttgctgctttgtggtgcacaagcggtgccatgaatttgtcacatt

SEQ ID NO: 357901 - DNA, 100 bp, Homo sapiens
gcactggggctgtggatcccttcaaagctgagattgcctgtctgtggtctccagcgttaagcacagtcattagctcaggcaacatttcatacaccattta

SEQ ID NO: 357902 - DNA, 90 bp, Homo sapiens
gatgctttaaagttagattctatggaaagttctgagacatcttgtagagtgaacagcagagaatttcaaaggaccttgctaatatctgta

SEQ ID NO: 357903 - DNA, 75 bp, Homo sapiens
caattatgaaagaagtcattccttttttgaaggccatcgaagacggcaatttggaggaaatggaagaggaagtac

SEQ ID NO: 357904 - DNA, 82 bp, Homo sapiens
tttaaatgcagcatctgcgatgtgaggaaaggcacctccaccagatgacttcaaacctgcttctattgacacttcttctgaa

SEQ ID NO: 357905 - DNA, 82 bp, Homo sapiens
tttactgtcaagacatttcttcggcattctgcaacaggtttccgccagctgtggatgcctttgacattatgaccgcagagga

SEQ ID NO: 357906 - DNA, 75 bp, Homo sapiens
gaagagatctacattaaccagctggaagccctgttgctgtcaccaccaagtaagcgaagaaaattagagaaaccg

SEQ ID NO: 357907 - DNA, 75 bp, Homo sapiens
cagaggccggggaccttgccaaccctcccaagaagttcagaggtgccacttgaagaatggatgatgatgattttg

SEQ ID NO: 357908 - DNA, 51 bp, Homo sapiens
cccttacggccacgaccaagccctcaccgagacttggagccagaatctgag

SEQ ID NO: 357909 - DNA, 90 bp, Homo sapiens
tgagggtggaagctgggaaacccacaggaggcaaccacactagtttagcatgaagaatcacgagaagtcaaagaagcatcgggaaatggt

SEQ ID NO: 357910 - DNA, 50 bp, Homo sapiens
catactgcgagccctgctacattaaatctcctcagactgaaagttgcact

SEQ ID NO: 357911 - DNA, 95 bp, Homo sapiens
caataaccatcttattcagtgtataatggactctcagaataaaggaaagacctcagagtgttctcaacaccttggaagagcttaaggaaatagat

SEQ ID NO: 357912 - DNA, 75 bp, Homo sapiens
ctcccactgattctacattatgggctcatcctggaagaaaccccagagagcagcttcctcatcgagggggacatc

SEQ ID NO: 357913 - DNA, 91 bp, Homo sapiens
cagaacgcttcctggccaagacatgcagcaccaaggaccagcaattcaagtgccagatgtgacatccagatgacccagtctccatcctccc

SEQ ID NO: 357914 - DNA, 100 bp, Homo sapiens
gatttggtccatgatgatgcttctatctttcctgtcccctcagcttctccaaagagaagatgaagcgttctgtcagccaccctggttcttgcagttcaga

SEQ ID NO: 357915 - DNA, 100 bp, Homo sapiens
tccccagtgagggtgtacaaatacccctttgaattaattatggctgcatcccgggcccaaatcctagacaaagccacagaatatatccagtatatgcgaa

SEQ ID NO: 357916 - DNA, 99 bp, Homo sapiens
gcagctgatggagacagagactgtgtcctgcagaagtccagggacctcaaattcctcacaggctttgaaaccaaggccgccatggcatcagatgaaggc

SEQ ID NO: 357917 - DNA, 108 bp, Homo sapiens
atggcatagcttggagcccagagactagacttgattcattgcctccagtaatcaaggaataccttggcaagcagctccagtccgagcagccccagaccgctgccgccc

SEQ ID NO: 357918 - DNA, 89 bp, Homo sapiens
ctactcaagaaagagtgcccaattccaaatgtacagactatgtatagccaggacaggcatgttgatgtcctcaatctctgctttgccca

SEQ ID NO: 357919 - DNA, 100 bp, Homo sapiens
gatgttacgtggccggaatcattcccttggctgttaatttctcagagttgagacatttgggaaatgatgaagtgcacattgtttggtcagagcatactag

SEQ ID NO: 357920 - DNA, 75 bp, Homo sapiens
ttcaccatcaacaaagaagaccacacactgggaaacatcattaaatcctggaggagaaagctcgcctagaagcag

SEQ ID NO: 357921 - DNA, 90 bp, Homo sapiens
cgatcaggaaccctaagaagaggcgccagaggagccgccttctgcctcagaacggcgtgactcggagtgaccgaagctggctttggtgct

SEQ ID NO: 357922 - DNA, 90 bp, Homo sapiens
tcgggacccggtcccaggggaggcccccacctccccttctattgttctgtggcccaggttttgcacactagggaccaagaagccctcggg

SEQ ID NO: 357923 - DNA, 82 bp, Homo sapiens
aacagcccgcccgaccccgtcccgaccctggccgccccgagcggagcctggaggattctgtttcactgaggccatctatccg

SEQ ID NO: 357924 - DNA, 75 bp, Homo sapiens
ctgagcaaattgtcctgataggatcaaagacaaatggaaagttcctcaccagtaactccagatagtggttattca

SEQ ID NO: 357925 - DNA, 82 bp, Homo sapiens
cactttcgccagcccgtgccgcgagcgcggcctgcaggaggtgacagagttagtccttgataattgcctgtgtgtcaatggg

SEQ ID NO: 357926 - DNA, 95 bp, Homo sapiens
gtatcatcctggtggagaagatgaactaatgagagcagcaggatcagatggtactgaactttttgatcagaaatacaaacctggtcgatgtgatg

SEQ ID NO: 357927 - DNA, 90 bp, Homo sapiens
gggctgaagacgctgagcaggctgccggtcgcaagacacagagcagtgggcctgggctgcagaagaataagctcatgtcccagacgggcc

SEQ ID NO: 357928 - DNA, 82 bp, Homo sapiens
cgcgccgcctccccgcgccgctcgcgcagccatgtccgaggagaagcccaagctggtcagtgagaaggtcggaggggccgag

SEQ ID NO: 357929 - DNA, 98 bp, Homo sapiens
agaccttcccaggaagccagagccacacacaccatcatggtcctggtcgggaaagaggttaaagaagacacgcaagtatgatatcatcaccactccag

SEQ ID NO: 357930 - DNA, 100 bp, Homo sapiens
aacaagtcccgggacaacagcagggacagctcccagtcctgcggaaacatggctcgcgaaggactgcggaccctcgtggttgcaaagaaggcgttgacag

SEQ ID NO: 357931 - DNA, 115 bp, Homo sapiens
atcgtctccaacttgctaaaaatgggtcacacagtgactgtctggaaccgcactgcagagaaaagtcaacaaacactcgggtcctatacttcagcatcttttcaatgttctgtct

SEQ ID NO: 357932 - DNA, 97 bp, Homo sapiens
gagcagggccccttagcctctgggtttgcgctagcagcgtaagggttggcaatcttgagtttctacttgatcagcagtatattttcagcaagatgaa

SEQ ID NO: 357933 - DNA, 50 bp, Homo sapiens
ccatacaggcccaaaagagttcagatttgcagaaaaaacttcagcatgtg

SEQ ID NO: 357934 - DNA, 100 bp, Homo sapiens
tagcaccccgagaaccgtcagtttgagccagatggtggcggcgggaaggccaaggtctctggcagacccagcagccgaaaagccaagtccccggccccgg

SEQ ID NO: 357935 - DNA, 85 bp, Homo sapiens
cgacacacaaagaatagagttgagcctgtgggacacttcggctacgagttccagggagctctgtcctggtgaccgtgcccgggtt

SEQ ID NO: 357936 - DNA, 75 bp, Homo sapiens
agtctgtcagtacaggtgccgatatgggccaggatcctcttcctgctccagttgctggccgaccacgtccctggc

SEQ ID NO: 357937 - DNA, 90 bp, Homo sapiens
ttagagaaaacgtgcctgcatgggagattgatgaactcccagagggcgctgtgaagcctccagcaaacaagtatcctatcttcttttttg

SEQ ID NO: 357938 - DNA, 100 bp, Homo sapiens
gggaaggaaatcatgtcaagcgaagccttgaaaaagctgccctgagacggtgtcccgccgaaaggcccagatagctaataaccgaacacctggaagatgg

SEQ ID NO: 357939 - DNA, 100 bp, Homo sapiens
gttaaagctggtctgttctaactgaggtgctgatattcgtggcttcagtgctcctaggacatttggccttacactgggacatgtagtagatgaaatacag

SEQ ID NO: 357940 - DNA, 83 bp, Homo sapiens
ggatcatgtctgcgagccaggattcccggtgaaaggtgtagcagtcactcggcctacacccacagcatcgaccttgtgaaccc

SEQ ID NO: 357941 - DNA, 75 bp, Homo sapiens
cttgcaggatgacttagacgactgtgtcgttcaaggaatgataacaggaattcgaggattatgcaatggtctggg

SEQ ID NO: 357942 - DNA, 100 bp, Homo sapiens
cctagccgcggtggtgagctgcctgcgcccgcagcccggcgaggagccgcagacccatgaggtgatggcttggacaacagtgtagcttcccccagcacag

SEQ ID NO: 357943 - DNA, 98 bp, Homo sapiens
gccccgcgcagcgtctggtcactcgctctcctctggggactgcagagaagcaggacctcgggccatgggagtctaccatggctcaagaatctcccaaa

SEQ ID NO: 357944 - DNA, 80 bp, Homo sapiens
cctgcctcccctgcgtcccgccaccggccgcttctgtcctcgggctgatggagttatgagaacaatgaacacagaaaaac

SEQ ID NO: 357945 - DNA, 75 bp, Homo sapiens
ctgaaatcaagtccggatgaagtggcatttattttcaactggcttggattttgtttatccttctgtatcaccaat

SEQ ID NO: 357946 - DNA, 100 bp, Homo sapiens
tgaccgagcccagcggagcctgagcaaggagcgggtccgtcgcggagccggagggcgggaggaacatgacatcgcggagaactctctttgctcacaagtt

SEQ ID NO: 357947 - DNA, 100 bp, Homo sapiens
ctcctccttggtcgccgcgtccttggctggcgtctgggagtgtccactcgccttccaccagcatggcaacgtcttcacagtaccgccagctgctcagtga

SEQ ID NO: 357948 - DNA, 83 bp, Homo sapiens
cccaggtccccaggacagtgcagaggctgggaggcggcagaatgcagccagaggagggcacaggctggctgctggagctgctg

SEQ ID NO: 357949 - DNA, 95 bp, Homo sapiens
ggcttttgagcaggagtccgggccctcgtgtcaccgctctgaagtcaaggagagcactgcagtttcctcctgaaggctggctccggctctccctc

SEQ ID NO: 357950 - DNA, 75 bp, Homo sapiens
atgaatacattgcaattgcaaaggaaaagcatggctacaatgtggaacaggtgaccttgaggaaccctgggagct

SEQ ID NO: 357951 - DNA, 82 bp, Homo sapiens
cgccgaagaagcatcgttaaagtctctcttcaccctgccgtcatgtctaagtcagagttacagaaacttcgtggcaaattga

SEQ ID NO: 357952 - DNA, 97 bp, Homo sapiens
gaacttgcgtcaaaatcaggactgaaatacattaatgtgggtgatttagctcgagaaggtgaccaagaatatggcccaggtgaccaaagccctggac

SEQ ID NO: 357953 - DNA, 100 bp, Homo sapiens
tttctcattctcatatttcaccaataaaggtgattttcttccacccccacctccacctctagatgattccagtgcccttccatctatctctggaaacttt

SEQ ID NO: 357954 - DNA, 100 bp, Homo sapiens
gcgcgatgcccaaatccaagcgcgacaagaaaggactcgggacctggttcgggccggggtgctgaaggagaagcccctgtggtttgacgtatatgacgcc

SEQ ID NO: 357955 - DNA, 75 bp, Homo sapiens
atttccaacaagagcactggccaagtcaggtgtgatgaatgcagactctgctaccattttggctgtttggatcct

SEQ ID NO: 357956 - DNA, 75 bp, Homo sapiens
gggagaccttctccccagatgcctgcaccacctgccgctgtctgggtttgaacatcctcatccctgtgttagacc

SEQ ID NO: 357957 - DNA, 83 bp, Homo sapiens
ccttcaacaaccccaccacggagttccggtacaagctcctgcgggccggcgggctggtcagtgagaaggtcggaggggccgag

SEQ ID NO: 357958 - DNA, 76 bp, Homo sapiens
cattttgcaactcttttctagcacattggtgagaaggatatgagaatttctttgataagctccaacaacatagcat

SEQ ID NO: 357959 - DNA, 100 bp, Homo sapiens
ccctcaccacccctatccagacggctgcccttcaagtaccagttacagattatgccattgccaggcgcatagtagatttgcattcaagaattgaggaatc

SEQ ID NO: 357960 - DNA, 96 bp, Homo sapiens
ggagacggttcgccgtcggtgccgagaccccatcaacgtggagggcctgctggggcaagctctgtgtgattgattggaagacatcagagaaaccaa

SEQ ID NO: 357961 - DNA, 100 bp, Homo sapiens
cagggctgcgtctgcactacggagcctctagattgctgaaaacagtcttatggaaggcacgcactcctggctttaaagtttatacttgcatttgccatac

SEQ ID NO: 357962 - DNA, 101 bp, Homo sapiens
cgccgccgccgccgccgccgcccggaccccggcgcgctgaatgcagagcattggggagtcagcaatgtccgttgtgttaaatcagctgctgcccatgatta

SEQ ID NO: 357963 - DNA, 96 bp, Homo sapiens
cagtggcctgtcgttggaagagtacaagctgatcctgtccacaggataaaaactttgaatctggtcctaggattaaaaagagcactggaattccca

SEQ ID NO: 357964 - DNA, 100 bp, Homo sapiens
gtcagccgaacagccagtcaggctgatattaaaaaggcttataagaagctcgcccgggaatgataattctgaaataatcagcagaaacggaatggaatgc

SEQ ID NO: 357965 - DNA, 74 bp, Homo sapiens
gaacgaaagcagtgacggaggagcttgtaccaccgacatgctggtgtctacacagcagaagaagtggccctgat

SEQ ID NO: 357966 - DNA, 100 bp, Homo sapiens
cctgtccttactccctctttaagattgcgtacccactgcagagtgctgaagacggggtagccacgaggtgaaatgacaatggatgctctgttggctcgat

SEQ ID NO: 357967 - DNA, 100 bp, Homo sapiens
agttccttgaaagaaatagaaccaaatctgtttgctgatgaagattcacctgtgcatgacatcaaggagcacgtgaaacagctagagaaagcggtttcag

SEQ ID NO: 357968 - DNA, 100 bp, Homo sapiens
gcgagtaagatggaagatgaggaggtcgctgagagctgggaagaggcggcagacagcgggtcaggatggctaaaggtgaccccaagaaaccaaagggcaa

SEQ ID NO: 357969 - DNA, 100 bp, Homo sapiens
cacgaaacactgaaattttggcaggtggttgccgaagaagcctgggaaaaccatttaaaacgaaatgattctatcatagtagatatatttcatggccttt

SEQ ID NO: 357970 - DNA, 92 bp, Homo sapiens
atcccgcgtccagcacctacgtcccgctgccgtcgccgccgccaccatgcccaagagaaagacttcccaagtaagaagcggaagaggagccg

SEQ ID NO: 357971 - DNA, 75 bp, Homo sapiens
gctggggctactgctggcaacattcctgataaacgtcttgtacccggaggtggagcaacagaaattgaattagcc

SEQ ID NO: 357972 - DNA, 76 bp, Homo sapiens
cgacctcagatgctcccttctgctcctggaactagccagctgtggatggagtaagaaggagaaacacagtcttgcc

SEQ ID NO: 357973 - DNA, 74 bp, Homo sapiens
ccagaagagcggcggctggaccacttctctgtcgacggctatgacagttctggattccttttaagattgggcag

SEQ ID NO: 357974 - DNA, 83 bp, Homo sapiens
gcgctgagtgccaggatggctctgatgagtcccaggagacgtgctacccatggggaaatgagaaagaaccaccggctggtaag

SEQ ID NO: 357975 - DNA, 90 bp, Homo sapiens
ggggctccagtggagagttcttacgagatttacaaacgaggaccacctggcagttcataaacacaagcatgagatgacattgaaatttgg

SEQ ID NO: 357976 - DNA, 100 bp, Homo sapiens
aaaaaaaaacgagcagaattttaaacttgcaggccctagatggtcagaatatttataatgcctgctgtaccctaaggattgatttttccaaacttgtgaa

SEQ ID NO: 357977 - DNA, 80 bp, Homo sapiens
aacagaggatgtcaacaattttttggagtgtggattctttaaacgctctaggtacgatgacagtgttccccgataccatg

SEQ ID NO: 357978 - DNA, 100 bp, Homo sapiens
ggagaggtaaacagaacaccaggacatcccagagtctgggaaatgtgaaactggaacgccaagctgaagaagaacgaatacggaagcacaaagcagctgc

SEQ ID NO: 357979 - DNA, 83 bp, Homo sapiens
atcttgggcaccgagagggactacgtgggcaccttgcgcttcttgcagtcggtggagtttgaggacgggtcccagctgacggt

SEQ ID NO: 357980 - DNA, 100 bp, Homo sapiens
cgccggagctctgatcgccgggaacccttgccgctgctgtcctgcgaccccaagcaggacagctggcctgaagctcagagccggggcgtgcgccatggcc

SEQ ID NO: 357981 - DNA, 101 bp, Homo sapiens
gtgagagctccccaggggagttctctgtgtctgtgaagtcaaaatgcagatcttcgtgaaaacccttaccggcaagaccatcacccttgaggtggagccca

SEQ ID NO: 357982 - DNA, 98 bp, Homo sapiens
ctgggcgtgctcaagaacgtgctggctgccagcgccgggggcatgctcacctacggcgtctacctggaaggagcttcctgactggaaccagagaatgc

SEQ ID NO: 357983 - DNA, 76 bp, Homo sapiens
ctgctgctgccctgcgcgctgctggctgatggactcaccctgtcacccaggttggactgcactggcctcaacctcc

SEQ ID NO: 357984 - DNA, 100 bp, Homo sapiens
caaggcaagaccgaattcagaaggatatcgacgtcgtgatccagaagtccagagctgaggactgcctgtttgcaggaggaagagttcatcgattggtgga

SEQ ID NO: 357985 - DNA, 100 bp, Homo sapiens
gattaactaaactccaaatattagagcttagagaaaaccagttaaaaatgttgcctaaattgtagggaatggaagtgaacagcagctgcaaaaagagcta

SEQ ID NO: 357986 - DNA, 100 bp, Homo sapiens
tctgcaggtgaagatgcagttgttttcaccattgacctgagacaagaccgcccagcgtcacacctggatttcattagcatcatgacctacgattttcatg

SEQ ID NO: 357987 - DNA, 74 bp, Homo sapiens
agtgctgatgtgaaaaataccacgacaaaaccaccctaattgctcatttagaaagtggatgtgtgggataacat

SEQ ID NO: 357988 - DNA, 100 bp, Homo sapiens
caagcgagactcaaagtcctcagagcaagagatgaccttatcacaacagatgcttgctctggcctgcagggcttcctgattttccacagttttggtgggg

SEQ ID NO: 357989 - DNA, 50 bp, Homo sapiens
acggcagcaaggacatcggaaatttctacctggacaaggactggtactat

SEQ ID NO: 357990 - DNA, 82 bp, Homo sapiens
cttccgctgagacctgccgtgctgggtgatagcctgggctggaagctcttctacgtcacaggctgcctgtttgtggctgtgc

SEQ ID NO: 357991 - DNA, 83 bp, Homo sapiens
cgacgggccgagcctgccactacctcctgccccccgaggtctgcagtctcctgaacccagcagccatctacgccaacaacgag

SEQ ID NO: 357992 - DNA, 100 bp, Homo sapiens
aaccagccgcagcttccgtactgccagtgtcagcatcaaccagacagaaaacatgtctcaacttagcgaggaagaacagaataaagattatcaagactgt

SEQ ID NO: 357993 - DNA, 82 bp, Homo sapiens
caaccattgacgccatgtcgggttattcgagtgaccgagaccgcggccgggaccgaggggaggagattggacaggctggact

SEQ ID NO: 357994 - DNA, 118 bp, Homo sapiens
ggggacgctgcggaggcgcagcacgttcctctgcccagagctgatgggcaccgtccgtgtctttcgctgcagccatgacagtgcagatcctgctgaagctggaccgcctggacctcgc

SEQ ID NO: 357995 - DNA, 82 bp, Homo sapiens
agctgtcggcttcaaacagacggctgcccccaagtgtaactccagcactgtgaggtttcagggattggcagaggggaccaag

SEQ ID NO: 357996 - DNA, 100 bp, Homo sapiens
cttgccctcatcctggttctggaatcctcagttcaagggccaaggcctaatgagtcagattctgatgatctggatgatgaagactttgaatgtttagata

SEQ ID NO: 357997 - DNA, 100 bp, Homo sapiens
ctgttcgagatcagccagccgaccgagagacttgcagccaatacaggaagcaaacagcgtagtcgcctctctgttatggctcagtacctctgcaatgttc

SEQ ID NO: 357998 - DNA, 100 bp, Homo sapiens
gctacgggcaagcgggcagctgaagatgatgaggttccagcaacagatagaaatgctttaagttcactctggggaaagctggcctctgaaatcttaatgc

SEQ ID NO: 357999 - DNA, 100 bp, Homo sapiens
ggcactgtggttcctgcatgaagacagtggctggcggtgcctggacgtacaatgctgttccctcgtcacaccaatgccagtgctcgagacaacaccatca

SEQ ID NO: 358000 - DNA, 100 bp, Homo sapiens
ccagaaccctggctgaccactttgaaggaggatgctccagcagatggtgatggaatttcctgataatgtgttaaatctcgatggacatcagaataatggt

SEQ ID NO: 358001 - DNA, 74 bp, Homo sapiens
tgtcactgcactcagttgctggcttccacttcgggcttcctttccacagatgggccatcaactgagaaagacct

SEQ ID NO: 358002 - DNA, 51 bp, Homo sapiens
cgaagctgccaaagccttagacaaatggacgtgcacattactccggggacc

SEQ ID NO: 358003 - DNA, 88 bp, Homo sapiens
ctcccccggtcgccgcggctgccgcgccgccgctgcagagcagtatggtatgaccccatctactatccaacctcatggcagttggatc

SEQ ID NO: 358004 - DNA, 98 bp, Homo sapiens
aaaatccttaccataacgcagtccacgctgcggatgttactcaggccatgcactgttacttaaaggaacctaagagtctcaccctgttgcttaggcag

SEQ ID NO: 358005 - DNA, 50 bp, Homo sapiens
aagaatcagacccaattttaaaggtcgagcctcttaggcagagtttaaca

SEQ ID NO: 358006 - DNA, 75 bp, Homo sapiens
cctgaaggaccctgtggctgtgcagactgctaaaacaaaccacagtacatgtgtgaggccatgctgatcctgggc

SEQ ID NO: 358007 - DNA, 100 bp, Homo sapiens
gtgttttgtacattgggagagatcgttggttcacagggaagtcgcctggaaaaaccaatagtctacacagatactcttagctactacccaaattctccag

SEQ ID NO: 358008 - DNA, 100 bp, Homo sapiens
caaactactctcaagccaggaaggaatgatcagctttgactgctttatgaccatattaatgcagatgaggcgttctttgcaagcggatgagaccctggac

SEQ ID NO: 358009 - DNA, 100 bp, Homo sapiens
taagctgcactgcatggttgctgctggatgtgttgtgttcctggcttccctctggatgctgacagaaacaagggagaataaaggcagccccgttgatgac

SEQ ID NO: 358010 - DNA, 83 bp, Homo sapiens
ccgtaatgagcgtcaaaattatccgaaaccgcctcactgggtctcggcgcggaagatggccggcggcgtggacggccccatcg

SEQ ID NO: 358011 - DNA, 75 bp, Homo sapiens
caccgacatcatgctccagttcctgatgctattaactgagtacttggatatgaaaaatactcgtacggcctctga

SEQ ID NO: 358012 - DNA, 100 bp, Homo sapiens
ttcctggatccccttcatgcaggagaagtataccaagccaaatggtgacaaggaactctctgaggctgagggccctgaaaaaaactctcttcctgtgtct

SEQ ID NO: 358013 - DNA, 74 bp, Homo sapiens
tgcaaaccacactaacatattactggcatcttcaatctgatgatgaagaacgagagcttcaaatggatcctgca

SEQ ID NO: 358014 - DNA, 100 bp, Homo sapiens
cctgcttctccttttcatgagtgttcctgtggtctctgcacctcctttcttgaatctgaatggtgcctaccctaagctggtgcctttcagacctgcagga

SEQ ID NO: 358015 - DNA, 141 bp, Homo sapiens
cccagagccagcctgtgggaagtctttcaactttaagaaacacctgaaggagcacatgaagctgcacagtgctccccagagacgctcatcctacagcctcagctcgggcccagccttctctctccagctgccaccacagcc

SEQ ID NO: 358016 - DNA, 75 bp, Homo sapiens
catcttactggtccatgctactgagactgacaggaaaggggactcattggcgccccctgaggtggactttgacag

SEQ ID NO: 358017 - DNA, 90 bp, Homo sapiens
cgcggaggagggcgagccgcacgtcctcctgaggaagcgggagtggaccatcgggcggagacgaggtactgggcctaatcgctacgtgcc

SEQ ID NO: 358018 - DNA, 100 bp, Homo sapiens
cggagatgccaccttccccaaagctatggacaacgtgacggtccggcagggggagagcgccaccctcagggccaattcctgtccccccagcagcatggca

SEQ ID NO: 358019 - DNA, 97 bp, Homo sapiens
atcttgtgaaaccactgcccaaccagagcaatgattgttcaaagagtggtattgaattctcgacctggttgaatgatcctaaaatgtctgaaacgga

SEQ ID NO: 358020 - DNA, 114 bp, Homo sapiens
ttgcacccagacacgacaccatgcatctcctcggcccctggctcctgctcctggaattatatccagatcgagagacagaagattctgaaagggttcaatgaaatgagagtcatc

SEQ ID NO: 358021 - DNA, 95 bp, Homo sapiens
agcccaggctccagttgtccgcggttcctcctcctgtcgctgcccgtgtgattactgagactcagagtggagactgctgcacggactctggaacc

SEQ ID NO: 358022 - DNA, 75 bp, Homo sapiens
ctgggaaagaggaagcaaatataataatggcagcacagagctacattcgagggtgataaaagaaaatgtggctga

SEQ ID NO: 358023 - DNA, 82 bp, Homo sapiens
gagcgccctctactcagcatggatatccaggtgctgagccaggagcagcagcctttctgtggacccccaaaagtacaagggc

SEQ ID NO: 358024 - DNA, 76 bp, Homo sapiens
gagatgggcagacggattcatttagagctgcggaacaggacgccctctgattgtggacgaatgtggaacctcgctc

SEQ ID NO: 358025 - DNA, 90 bp, Homo sapiens
caattatgaaagaagtcattccttttttgaaggatgctccaggatgaaacgccataggcctgtcagcagcagtgacagttcagacgaaag

SEQ ID NO: 358026 - DNA, 75 bp, Homo sapiens
gccgtcctgggggccttcagagccgcaatcaagcaggattatatctgtccaagatgcgagtctggttttatcgag

SEQ ID NO: 358027 - DNA, 75 bp, Homo sapiens
ctgagctgaacacattacgatggatgatggaaacataaggggccaaaccagtgctcctgccacctctctggctgc

SEQ ID NO: 358028 - DNA, 100 bp, Homo sapiens
gaagcattgcattgattgtcttatatttcaagttaaggtccaaaaaaactccagctgtgaaagcaacataaatggggagaaaacccaggaggaatgagaa

SEQ ID NO: 358029 - DNA, 100 bp, Homo sapiens
tggcaactttcctggcccttttgaagaggaaatgaagggtattgccgctgttactgatatacctttagtgtcgacttcttccactacaaaatctccagcg

SEQ ID NO: 358030 - DNA, 100 bp, Homo sapiens
cagacctaccggtctgtcagtgagatggcttctaacaaggatcagagcggcaccgaacctattagtagtgaggaagatggcagcgtcgaagttggtatta

SEQ ID NO: 358031 - DNA, 90 bp, Homo sapiens
ccgaactctgcaaagcctccagaggacataccacctccaggatcaggatgcagaggctttgatgcggcctggaagaattgatagaatcat

SEQ ID NO: 358032 - DNA, 90 bp, Homo sapiens
cccgaaactttcaccgcgagcgggagcgggacggtatgcgggccatcctggggtcctacgacagcgagctgaccccggccgagtactcac

SEQ ID NO: 358033 - DNA, 101 bp, Homo sapiens
tggaaagtgaggaattttgaagtacaccgtggtgacattgtatcattggtgaggcaagtgaggcctatctggttggcctttttgaagacaccaacctgtgt

SEQ ID NO: 358034 - DNA, 100 bp, Homo sapiens
aaaatccagaagtacaagcagtctggatccactagttcctggactatgggaactgatgactcgcccaatgtcacagatgatgcagctgatgagatcatgg

SEQ ID NO: 358035 - DNA, 83 bp, Homo sapiens
cccaatcccccactctttccgccctaatggaggtctccagtttcgagcccatggatttcagaaaattatctacattcagagaa

SEQ ID NO: 358036 - DNA, 101 bp, Homo sapiens
gtgtgttaaagtaacagatgatttagttgtcgtgataaactgtgccattcctaaagggttgaagtacaatcaagctacacagaccttccaccagtggcgag

SEQ ID NO: 358037 - DNA, 75 bp, Homo sapiens
ttcaaacattcgtctcggaaaccccgcctcttacagtcacgagtgagctccagtgctgtgaatctctgcttaaag

SEQ ID NO: 358038 - DNA, 50 bp, Homo sapiens
cggcaccacccatcttgagtatctgagtgtgaacatggctacgcctcttc

SEQ ID NO: 358039 - DNA, 88 bp, Homo sapiens
cgcgtccgccgattcctcctccttggtcgccgcgtccttggctggcgtaacactctgctccagccaaggtggtgagggcagctgttcc

SEQ ID NO: 358040 - DNA, 90 bp, Homo sapiens
ggccgcctaagtcccacagagacgggagtcgggtgggatcccaggctgggccccgcggcgggaagaaggagagacgaccatcttgcaact

SEQ ID NO: 358041 - DNA, 100 bp, Homo sapiens
tcggggtcggtcacagtctgcgcctgcgcgggccccggctcgctagccgtcctgcgggacgccggcgctgatgggactcagcccaggagagtgttattac

SEQ ID NO: 358042 - DNA, 101 bp, Homo sapiens
tctccgaggagccgcacgccggcggcaccatggtccacctcattacaggcccaaaaactgcgactggcatacacaaggagctctcattatggtgggtctct

SEQ ID NO: 358043 - DNA, 75 bp, Homo sapiens
cgatgatctggcagacctcagctgcctggttgaaatccggcccaactccaccgtgcagtgggaagaagtgtgccg

SEQ ID NO: 358044 - DNA, 80 bp, Homo sapiens
ttacagagaccggggaactctactcttcctacgtgaaaggaaagcaagccaggatggatatttacgacactcaaaccttg

SEQ ID NO: 358045 - DNA, 100 bp, Homo sapiens
ggaggagtactcggtgaaatcctgtcctgaagactgtaaggttcatcctaagttccactataaacaggctcatgactcgggcacagacacttcttgcgtg

SEQ ID NO: 358046 - DNA, 74 bp, Homo sapiens
agcctgcggagcctgtggggcaggtagagagctgtgagccccagccccacctgactccagcacacctggcgagt

SEQ ID NO: 358047 - DNA, 118 bp, Homo sapiens
tgtgtctgttgtgtcttgttgcgggcaccgcagtcgccgtgaagatggcgtctaccagccgacaatgcagatcttcgtgaagactctgactggtaagaccatcaccctcgaggttgag

SEQ ID NO: 358048 - DNA, 100 bp, Homo sapiens
gcacatgcattgcggagcagccttttggggacgactgccctgctcctgtctgtcagtcacctggtgctggtgacaaggaatgcctgccatctgacgggag

SEQ ID NO: 358049 - DNA, 100 bp, Homo sapiens
caaaatcatgaaagtcaccgtgaagaccccgaaggaaaaggaggaattcgccgtgcccgagaatagctccgtccagcagtccaagccttatgcatttgat

SEQ ID NO: 358050 - DNA, 82 bp, Homo sapiens
taccatcctgaaccccatttattcgatcaccacgtgggcatttggcgtgaccatgtgggaaatagctacgcggggaatgact

SEQ ID NO: 358051 - DNA, 104 bp, Homo sapiens
gccgccgacatgaagaaagacgtgcggatcctgctggtgggagaacgtggtggctaatgccgtagcggcattatctgaaatcagtgagtctcacccaaacagca

SEQ ID NO: 358052 - DNA, 100 bp, Homo sapiens
tgcgcactgcgggcgcatccctgccccggcgccgtccgtgcccgcgggacctgacagccgggtcagagcggaggcctcagcaacctgctcttccgctgct

SEQ ID NO: 358053 - DNA, 100 bp, Homo sapiens
gaaatctcttcatcgggccagagcattgcagaaacgtcatgaagattttgaagaagtggcacagccgatcaaagtccagatctccatctccaaaaagaag

SEQ ID NO: 358054 - DNA, 100 bp, Homo sapiens
gcggccctcacagcaaccagcaccagatgaaggagcattcctcttggacggtctggaaaatcccgaagcagaagcccgtattcatctaggcattcaagat

SEQ ID NO: 358055 - DNA, 83 bp, Homo sapiens
gtcccgacgcagcaaaggcaaacttggaaagagcaagatcggcagccctaaaatgacagtcatgtccctttccagggacctca

SEQ ID NO: 358056 - DNA, 97 bp, Homo sapiens
gatcgttttgatggatatatcttccttgacagcaaagaggtctctcagtttagcccctccctgatatcagagaagatcctgctgcggctactcaagt

SEQ ID NO: 358057 - DNA, 90 bp, Homo sapiens
ctttcgatggtactgcagtggcaactaacaaagtacgtcgctgccccgccctcgggactccatccgcagctgtgccctcagcatggacca

SEQ ID NO: 358058 - DNA, 103 bp, Homo sapiens
gctcggagaggtgctcggattctcgtagctgtgccggtctcaaaccatgaattatgtgggacagctggctgggcaggtgattgtcactgtgaaggaactctac

SEQ ID NO: 358059 - DNA, 150 bp, Homo sapiens
gcccagctggcctccgaccagaccatcaaagagctcatacggagcgtccttggccagaactacgacattacaatggaagctagaaaatattaaccctgaagaaaatgacatggtaagccattctctgaggagatttcttgatgtcagtct

SEQ ID NO: 358060 - DNA, 100 bp, Homo sapiens
cagggaccctgtgcaggcctgctcctccgtttgcaaggatggtgccatgacaatggtgtgaactacaagattggagagaagtgggaccgtcagggagaaa

SEQ ID NO: 358061 - DNA, 100 bp, Homo sapiens
acggcgtcctgctgggggagcagctgatcaccatgtcctgcacggacaagatcgccaggttcgagaacttgtcttggacaattgcaaatcaaatgatgga

SEQ ID NO: 358062 - DNA, 100 bp, Homo sapiens
cctgctcgcagaattaccgcctcttctttagtgttgacagctcttctaccacaagcagtgcttctccaatgcccaacagttatgatgccctggaaggagg

SEQ ID NO: 358063 - DNA, 90 bp, Homo sapiens
cggggagtgtcgcagccctgaagttgcctcttctggtgtcaaagcttttggacattcctgggatttgggccaggcttagtcatctattgg

SEQ ID NO: 358064 - DNA, 100 bp, Homo sapiens
cctcctccactgccactacagggaagtgcatcacatgtcaggattgtgaccagatccacgttgatgacgtctcatcagatgacaatggccaagatttaag

SEQ ID NO: 358065 - DNA, 83 bp, Homo sapiens
cacagaacttacctgcctcttcatgcagttctccatcgtgccactagacttcgggctccttgaggatattcagttttgtatgt

SEQ ID NO: 358066 - DNA, 95 bp, Homo sapiens
agacctgcctcctgttccgcttctcagaggacgccttcaacaccaccttcatctccaccatcgagaaagcgtcgtggtggagcaataaattctag

SEQ ID NO: 358067 - DNA, 71 bp, Homo sapiens
aaaattgagacggagctaagagatatctgcaatgatgtactgatgaagactggcccatttgcagagcactc

SEQ ID NO: 358068 - DNA, 100 bp, Homo sapiens
caagtggtaccaatgctctcactacatccagcagtcccctcagcgtgctcactagttcaggtcgttccaggggtagaggaggcatgaaggatgaccgtcg

SEQ ID NO: 358069 - DNA, 100 bp, Homo sapiens
tggggcgcctggagtgagggttctggttcccgccggcgagtgtgccatgcggagctgaatgccatcatgaacaaaaattcgaccgatgtgaaaggctgta

SEQ ID NO: 358070 - DNA, 51 bp, Homo sapiens
ggcagggcaaggaaactggccacaagatatcaatgcttacaattgtgaaga

SEQ ID NO: 358071 - DNA, 99 bp, Homo sapiens
ggaagcactacaagggtcctgaagtcagttgttgcatcaaatacttcatatttggcttcaatgtcatattttgggaagatgaagtcctcagtacattct

SEQ ID NO: 358072 - DNA, 83 bp, Homo sapiens
cccgtccgacgaggatatcgtgtctggagcagtggagcccaaagacccctggagacatggtgcgcgcggagccatggttatca

SEQ ID NO: 358073 - DNA, 121 bp, Homo sapiens
gaccatctcgcactaccctgactacagctggagcgcccagaggcgagccctggtggaggaagaggcgcgggcggtgatgaactttgtggttcgctaccggccagacgagcagccgtctctg

SEQ ID NO: 358074 - DNA, 74 bp, Homo sapiens
gctgctatacagtgaggccaagagcactgcagtttcctcctgaaggctggctccggctctccctcaataatggc

SEQ ID NO: 358075 - DNA, 83 bp, Homo sapiens
cgcctgcgacctgcccgcctgggtcagcccaaggccaaccccactgtcactctgttcccgccctcctctgaggagctccaagc

SEQ ID NO: 358076 - DNA, 82 bp, Homo sapiens
ctgtgtcagggaatgctcctggctggtgcggacacaacccaatagtgcctgagattgtgagggagacccaggacctaattga

SEQ ID NO: 358077 - DNA, 98 bp, Homo sapiens
gacaacatgtgcatggggaggaccagtcgtgctctctccttcctgcttcctccttgctgtggtggctgggatgcttcttccatgattttttgaatcta

SEQ ID NO: 358078 - DNA, 100 bp, Homo sapiens
gaagtacatgaactcagggccggttgtggccatgggttattggggctgtgccatcggcaaagccaggcaagctgcaaagacggaaatagagaagcttcag

SEQ ID NO: 358079 - DNA, 98 bp, Homo sapiens
ccgagttcacgcagctgtcccatgccgtgctgctggagctggtcatcgacagcctcgatgacttacgagccctcaaggggaagcattttctcctggac

SEQ ID NO: 358080 - DNA, 49 bp, Homo sapiens
gaggtcccggataaaggccttggcagcactattcctgatcagagaactc

SEQ ID NO: 358081 - DNA, 100 bp, Homo sapiens
cgaccacctcgtgaacgaagattcgaaaagccacttgaagaaaagggtgaaggaggcgaattttcagttgatagtttgctgatggccgccaaagttggag

SEQ ID NO: 358082 - DNA, 83 bp, Homo sapiens
caggaggaagcaggagcagcccaagcgccttccctcacacctgcctagagctggaacgttacctccagagcgagccctgctat

SEQ ID NO: 358083 - DNA, 100 bp, Homo sapiens
tcaggaccctacccagggttctagaaatccaggcaggcatctatcttgaaggtggaatacatgttggtatcttttgatcatgaaaataaaaaagtccggt

SEQ ID NO: 358084 - DNA, 75 bp, Homo sapiens
ccccagacccctcagcgtctggcatctgatgaaagtcaaacttctgcatcctcttgtgatgagactgagatacag

SEQ ID NO: 358085 - DNA, 85 bp, Homo sapiens
cagacagctcaccaaccgtgacagcaccatactggaacttcaaaaagttctgaaaacatgttggaatgtaaccaatttacctaca

SEQ ID NO: 358086 - DNA, 83 bp, Homo sapiens
cgccaaggaggtcacccgcgtgctaatggtggaaacccacaacggtgctggagaatctggtaaaagcaccattgtgaagcaga

SEQ ID NO: 358087 - DNA, 117 bp, Homo sapiens
agcgggccctgcgcgcctgatgggtcgaggcggacgcgcggctgcgtcaggattttgaatgtggaaatgacgtggaactgtcttttaccaagaatggaaagtggatgggcattgctt

SEQ ID NO: 358088 - DNA, 83 bp, Homo sapiens
atcgtcagggtcgccagcgcctcagctctgtggaggagcagcagtagtcggagggtgcagcaagagtgagccatggagctacg

SEQ ID NO: 358089 - DNA, 100 bp, Homo sapiens
aattctcgtcctattgaagatttattcagggtaaatatgtctgagaagaaacggtgcaagagaatacttgaacaggttaattggactcctgagattaaca

SEQ ID NO: 358090 - DNA, 76 bp, Homo sapiens
taacgacatacttctggccccaccaactgttcaagactgaacctccattgaatactccagaaaacagggaatatac

SEQ ID NO: 358091 - DNA, 101 bp, Homo sapiens
cctcagccgtggtcatcttcaacgtgggctccaacaccaacgagaccatcaccatgccccacgcgggaacaagcacatcatgattgacttggggactggca

SEQ ID NO: 358092 - DNA, 75 bp, Homo sapiens
tggagcgcccagaggcgagccctggtggaggaagaggtggcagcctcggtttcttcccctcctccctggcctaca

SEQ ID NO: 358093 - DNA, 51 bp, Homo sapiens
acgcagatctccgggccacctgccttgaagtggtggacttgctttgtgaag

SEQ ID NO: 358094 - DNA, 75 bp, Homo sapiens
agagtcggagggagtccatctggagcggccaagaagctcttactcctcagaaatgtattcctcacatcatcgtcc

SEQ ID NO: 358095 - DNA, 100 bp, Homo sapiens
tcatcggaaacatggcactgttgcctatcagaagtcaattcaaaggacctgcccccagagagagctctacacagagaacagagggagctggttgctgtgc

SEQ ID NO: 358096 - DNA, 82 bp, Homo sapiens
gcgtctcggaaaccggtagcgcttgcagcatggtgctgccttcacctgcctggagactgccttccgcctggacgccctgcac

SEQ ID NO: 358097 - DNA, 74 bp, Homo sapiens
agtgcgaccttaatgggaggccccgggaggccgaggttcggcaacatttaggaccagtacatcgtgaaaaagcc

SEQ ID NO: 358098 - DNA, 100 bp, Homo sapiens
agcgcacctacacccagctggtgcggctcatcattctgggatttggacatttggtgccatcttcagaagatccaggagtcctgggaatcgtgtatgactc

SEQ ID NO: 358099 - DNA, 84 bp, Homo sapiens
gtttgatgaaggtggaggcagcgcggctctcaggtttggtgcacctcgatttggaggaagtagggcagggcccttatctggaaa

SEQ ID NO: 358100 - DNA, 51 bp, Homo sapiens
agagtatatgcgatgagtttgctattgacctgaaaagtggttctggaaaag

SEQ ID NO: 358101 - DNA, 50 bp, Homo sapiens
ccgccgcttgtgctgcagccatggacccatggatgaaggaccagatcttg

SEQ ID NO: 358102 - DNA, 98 bp, Homo sapiens
aagggattcaggtgtggtgccggtgggaactgaggaagcgcccaagagactctccaacatgtgccttctgaccatacaaatgaaacttccaacagtac

SEQ ID NO: 358103 - DNA, 90 bp, Homo sapiens
aagaaactgactaaagctatatgtggactgaatctgaattatccagaacagaaagttgtgactgttggacagttcaaaattggtctgatc

SEQ ID NO: 358104 - DNA, 100 bp, Homo sapiens
tgctttttcaatgagaagaatgaacagacctagtgggcgttgcctttagacccaggccttcctgatgcgcttgcctgctccctggtctctctgcatgggg

SEQ ID NO: 358105 - DNA, 100 bp, Homo sapiens
agtagccatgtgccatatgatttatcggaagagatgcccgagtggtaaaagacatggcaacaggaaagtctaagggatatggctttgtctcctttttcaa

SEQ ID NO: 358106 - DNA, 117 bp, Homo sapiens
gtcgctgccgccaccaccgttgcttcgcgggctgggaggcccggggtccccgggcgaacagaggctgcgggtggtggtgaagtttattaagaaggagaaggtcttggaggattgttg

SEQ ID NO: 358107 - DNA, 100 bp, Homo sapiens
aatgtgaaatgcagacgtgagatgtttgacaaggatgtagtaatgcttcaggaagcggctcagccccagggcagcacatcagagacaccatggaacacag

SEQ ID NO: 358108 - DNA, 100 bp, Homo sapiens
ttggggtggcggtgacgacaggcagcaaaagaccagcacgtcagctaactgttcagatgatgcaaaatcctcagattcttgcagcccttcaagaaagact

SEQ ID NO: 358109 - DNA, 51 bp, Homo sapiens
ttcagtggataataccaaaatgtggatcaatcttcctgtcctacaactgac

SEQ ID NO: 358110 - DNA, 75 bp, Homo sapiens
ctatggtcaatattcctaggaatgggaacattactctggggccagctctgggagacaaagaaagtatgtaagaac

SEQ ID NO: 358111 - DNA, 100 bp, Homo sapiens
ctccttgcccgagaacatccagtttgatgtttactacaagggaaatcctcattgacgattcaatttgttgaaggccaatttgtggactcctacgatccaa

SEQ ID NO: 358112 - DNA, 98 bp, Homo sapiens
cggctccggcccccgcaggagcagtgaaggagaacgacctgctcagaatgagaagaggaaggagaaaaacataaaaagaggaggcaatcgctttgagc

SEQ ID NO: 358113 - DNA, 75 bp, Homo sapiens
atatgatgaaaaccccatgaagtctgatctgaaatgtgtccaggatgccaagggaggttctttctacagagatca

SEQ ID NO: 358114 - DNA, 98 bp, Homo sapiens
acctttgagaacattgacgacgctaaggatgccatgatggccatgaatgggaagatcctgcatgccaatgtggtggtttatagctaccactacctcct

SEQ ID NO: 358115 - DNA, 100 bp, Homo sapiens
tcaacaaccgcgtcacccagctcatgagccaggaggccaacctgctgctagccaaggccggtgtgatccctcacatccacaaatctctgattggaaagaa

SEQ ID NO: 358116 - DNA, 97 bp, Homo sapiens
aagtacctttatgaaccagtgtatcccaatcatccgtccttggctcaggatttggagagcttgcaccaccaaaaatggcaaacatcaccagctccca

SEQ ID NO: 358117 - DNA, 74 bp, Homo sapiens
tcctttcctccctcccagatcttctcacgttctccgggagatgttgcataaccactccttcgtgggctgtgtga

SEQ ID NO: 358118 - DNA, 95 bp, Homo sapiens
ctggagacagattgtaggaccgagcgcgggcaggcgggaggcaacggagctaccagccgcacctgtggaatcctctcaagaggaacagtcattgt

SEQ ID NO: 358119 - DNA, 96 bp, Homo sapiens
cgttcctcaaactccgtgaccaggtgaggcaggcgactaatcagattgtgatgaattgtgctgatattgatattattacagcttcatatgcaccag

SEQ ID NO: 358120 - DNA, 75 bp, Homo sapiens
gacgaccgacagggtggtgaaaggaaacccagcgtttgctggcagaaccagttcctggcatcaaagccgaaccag

SEQ ID NO: 358121 - DNA, 90 bp, Homo sapiens
gagactcctgaccctcagaatgttaattggccttggtcctcacagctccaaaaagaaacaggatctcgataagctctatgagctgaagtc

SEQ ID NO: 358122 - DNA, 100 bp, Homo sapiens
aagagataggcgcatctctggagttgatcgttactatgtgtcaaagggtttgcaagactttcttcagaatcacatcacggaggatctcctatacactggg

SEQ ID NO: 358123 - DNA, 90 bp, Homo sapiens
ctggcggccatggtgttgctgctgtactccttctccggagtcagtggatcggtggggaaaatgctgcttaccctgggccctgggctgtag

SEQ ID NO: 358124 - DNA, 83 bp, Homo sapiens
gcgactcttctgacctccgcgcgacgtacccgccgccgccgttggctggaggtgcgcgcggagccatggttatcatgtcggag

SEQ ID NO: 358125 - DNA, 98 bp, Homo sapiens
tttcgggctgccgagggtgttcttgacgattaatcaacagtcattgaaattatgagactatcattcaaatggaagcattatagttcttcggaaccatt

SEQ ID NO: 358126 - DNA, 82 bp, Homo sapiens
ccgggacctgggctgggaacccgcggtggagcgggacacgaacgtggttgtggcagcactgcctgaaggtatgagaccagat

SEQ ID NO: 358127 - DNA, 82 bp, Homo sapiens
ggcgcgcggccgagcggaggcggagtcggcgccgagaacatgggtctgcgcttcgcagccgggatgaagctggtttccgtcg

SEQ ID NO: 358128 - DNA, 100 bp, Homo sapiens
gccagatgagtggaaataccctggttagttggcctgagtcacatggcactattgatgggacagtggttttatgaagaaacagaaagcagtgatgatgttg

SEQ ID NO: 358129 - DNA, 100 bp, Homo sapiens
cggctccgtgtttctggaaagtgacagcagtaataaaagactagtggccttagtgcccatgcccagtgaccctccattcaatacccgaagagcctacacc

SEQ ID NO: 358130 - DNA, 100 bp, Homo sapiens
aagctcctgctagaggaggcgttgcaggacagcccccaggtctaggcgttttacactgagattctccactgccaccctttctactcaagcaaaatcttcg

SEQ ID NO: 358131 - DNA, 100 bp, Homo sapiens
aacaagtgtctttggttataaattatgatctacctaccaatcgtgaaaactatattcacagacccgaccgcatgtctgtcatggacctcgccaatacttg

SEQ ID NO: 358132 - DNA, 75 bp, Homo sapiens
cgaacttttgacacggctttggaaacgacgtcatgtgttaggactttttttatgaagacatggagtccttgacgc

SEQ ID NO: 358133 - DNA, 88 bp, Homo sapiens
ccagtaagaagaaaaaagcgtccgcttccagctttgcgcagtttctgtagaaaatgtttcctgactgcaatgagggaaagcggagcac

SEQ ID NO: 358134 - DNA, 100 bp, Homo sapiens
caaaagcccagcagatgcacactgggcctgtgcttgatgtctgctggagtgacgctgaccccgcactacatctacccaccagccatcgtgcagcccagcg

SEQ ID NO: 358135 - DNA, 100 bp, Homo sapiens
tcaccttctttgacgtccagaagaccaagtacctgcagatcctgacctctctgatgagatggatcgggcgtctctggccgagcctctttttgtggaaaac

SEQ ID NO: 358136 - DNA, 83 bp, Homo sapiens
gtcaactgcagccgtgtattcagccttagtgatcagggccaaagcggtcagtgagaaggaagtggactctggaaacgacattt

SEQ ID NO: 358137 - DNA, 100 bp, Homo sapiens
caaaatgatccgagacctccagaatgagggcagcagcacggagcctccggacaacctactgaccacccacgtgctggacaccgcctcagggctcccagcc

SEQ ID NO: 358138 - DNA, 90 bp, Homo sapiens
gccctggtgtgggagcggccagctaggagcgctctgtggtgcctggggctgaacgcggctttctgaatgttgtaccatctttgggtaggc

SEQ ID NO: 358139 - DNA, 119 bp, Homo sapiens
agagctctgccaggcagaaggcctctctcctgatacagcaggcgctcaccatgttccctggagaaaatgtggtgacctggaagaagaactcaagaatgttactaacaatctgaaatctc

SEQ ID NO: 358140 - DNA, 96 bp, Homo sapiens
gagagtttgaaagtgcgattgtggaagctgctcggaacatctgctcaaattaatgaccatgggggatatgaagaccccagactttgatgacctcct

SEQ ID NO: 358141 - DNA, 50 bp, Homo sapiens
catctacgccaggacctggagagggcaccatggctgaggaaacagctcca

SEQ ID NO: 358142 - DNA, 75 bp, Homo sapiens
aagtgaagtgattaagaattccttggtgtatctacatcagcaatcaaaatggcatcaaccagacttccttccccc

SEQ ID NO: 358143 - DNA, 89 bp, Homo sapiens
cggcgacagcggccggggcgcaggcgcccgtgcggaatggcagggtatttgaagtataccatacaactgttttgaaaatccagcgtgga

SEQ ID NO: 358144 - DNA, 96 bp, Homo sapiens
gtctgtcgcccgaggcggccgccgctgcaccttcaccgcgtacccgggacccgcccgcccgcgggaggaattgaatgatctggcacgggaccctcc

SEQ ID NO: 358145 - DNA, 100 bp, Homo sapiens
accggatcctccgtgccaacctcaacggcagcaacgtggaggaggttgtgtctactgggctggagagcccaggtgggcaaacgcagaggcgggaacaaac

SEQ ID NO: 358146 - DNA, 100 bp, Homo sapiens
ctcctttgcgccccgacgctgccaacagggacttcctgagccagcaggggaagatagagcacctgaagcaaaagcgaaagcttcggatctacatttccaa

SEQ ID NO: 358147 - DNA, 113 bp, Homo sapiens
tgaagacatcaagaagatcttcgagttcaaagagaccctcggaacgaactcgaatcatttatgacagaaagtttctgttggatcgtcgcaattctcccatggctcagacccca

SEQ ID NO: 358148 - DNA, 104 bp, Homo sapiens
ttttgctgctgtttggtgactggaagaggcaccagagactctcactctggggagagcattggggagtcagcaatgtccgttgtgttaaatcagctgctgcccat

SEQ ID NO: 358149 - DNA, 98 bp, Homo sapiens
cagaaaccccgttgacaaggcactgctttttcatgacgacctgcctagagctggaacgttacctccagagcgagccctgctatgtttcagcctcagaa

SEQ ID NO: 358150 - DNA, 96 bp, Homo sapiens
tgtttgctggcttggtccatgtgaagcaatgcatcgtggctcatcctatcatcaatgctgtggtactgttgattttattgagtgccctggctgatc

SEQ ID NO: 358151 - DNA, 90 bp, Homo sapiens
gcccaccttagaaccatgctccaaggcagctaagaatagactgcatatatattgggattttaaaccgattgatgttctgccagaaattgt

SEQ ID NO: 358152 - DNA, 75 bp, Homo sapiens
ctgaatctggtgatgaacttagcagcagctccactgaacagataaggagtggcagaatttagtgacatttggaag

SEQ ID NO: 358153 - DNA, 101 bp, Homo sapiens
tgctgtaaaaaatttcaggattggtactacaaggctttgatgacagtagggaaagaaccatttcctaccatttacgtagattcacaaaaagaaaatgagag

SEQ ID NO: 358154 - DNA, 100 bp, Homo sapiens
tcccaaggagttgagactaagttgagactacagctcttgaggatcttgcttgtccaaacccagaagacagtgcatgaagccaggggacatccgccatgct

SEQ ID NO: 358155 - DNA, 75 bp, Homo sapiens
gatgctatgttcccagaaggatataagcgtgttgtgctcctacagactgcaaccctgctaggggtccttctcctg

SEQ ID NO: 358156 - DNA, 90 bp, Homo sapiens
attcagaaggagctagctgaaataacccttgatcctcctcctaattgcagtgagaagtgtaaggctagaggatttaccgtgattgtggat

SEQ ID NO: 358157 - DNA, 50 bp, Homo sapiens
ccgcgcccaacaccttctatgtagggccaattcctgtccccccagcagca

SEQ ID NO: 358158 - DNA, 96 bp, Homo sapiens
cttttttataaactggctgaagcccatccagactgtttgatgctgaacttcaccgttaaggagaagatggagttccggacggcatctatccgcctc

SEQ ID NO: 358159 - DNA, 95 bp, Homo sapiens
gtccgcggcgctgggtcggtggcggaggctgaggagaaggaggagcgggccgtggaggcttcgccgcctaggctctgtgtgctccgggatggagc

SEQ ID NO: 358160 - DNA, 75 bp, Homo sapiens
attttgacctccttccatgaatcacaaatgttcttaatggcatctagaatggtcacagggattatggacccagaa

SEQ ID NO: 358161 - DNA, 74 bp, Homo sapiens
gggggacggggaccagcagctgtcgccgccgctctcagaataacctgggtatcttgtggtctgaaagagaagaa

SEQ ID NO: 358162 - DNA, 82 bp, Homo sapiens
ggcgctcgccccaaatgatcctggcggaaaggacgtgctttttctgggtttcaacaggtctggccgtgggcctgggcttcgg

SEQ ID NO: 358163 - DNA, 95 bp, Homo sapiens
atttcacccattgtcatctcgaacagtatcttcttcttcgctccctagcttagaagagtgtgagccactgccccatgttgtgttgatgccaatct

SEQ ID NO: 358164 - DNA, 118 bp, Homo sapiens
actgtcttcatctttacagaggaatagtctacaaaggaagacttgtaacctggagaagagacaatgcagatcttcgtgaagactctgactggtaagaccatcaccctcgaggttgagc

SEQ ID NO: 358165 - DNA, 100 bp, Homo sapiens
cctgtgtggaccaggtggacggctttgagtgcatctgccccgagcagtgggtgggggccacctgccagctgggaggaagagcaagcaggccctgagggac

SEQ ID NO: 358166 - DNA, 75 bp, Homo sapiens
gccgatccagcctgcggagcctgtggggcagggaggttatattcaaaagaaaaaggaactgtggggaatctgtat

SEQ ID NO: 358167 - DNA, 75 bp, Homo sapiens
atttaacattccaacacataaaaattatttatccaacagctcctcccaggagcctgtgaagcaagctgactttgt

SEQ ID NO: 358168 - DNA, 101 bp, Homo sapiens
gcaaaggtggctaaggacctcaacccaggagttaaaaaggtcccgctcccggtcccctcggaggagagcccactcccctgagagacggagggaagagagga

SEQ ID NO: 358169 - DNA, 75 bp, Homo sapiens
gacggcccggcagacatgcagaaagtacgaatctgctctgagggcggatgggagaagatccccgaactacggcga

SEQ ID NO: 358170 - DNA, 97 bp, Homo sapiens
agccacggccgggggcgtctttcagagcattacgagtgtgaacatggctacgcctcttcattcccgtccatgccgagcccccgactgcagcattcaa

SEQ ID NO: 358171 - DNA, 100 bp, Homo sapiens
ccgagatgtctcgctccgtggccttagctgtgctcgcgctactctctctttctggcctggaggctatccagcagataattgacgaccttgccaacctagt

SEQ ID NO: 358172 - DNA, 90 bp, Homo sapiens
ggagtgaagctgcataccttcgcggtgctgaaaccaagaacctacagttactggttccaaaaactgagatatgtgaggaagctgaaaaac

SEQ ID NO: 358173 - DNA, 100 bp, Homo sapiens
gttccgctgcagggcgcggaggaggatggcgccctttggaaaggagcacgaggctttaatggggtgagggggagcagctgtccccgccctactccggacc

SEQ ID NO: 358174 - DNA, 97 bp, Homo sapiens
tcatggcgttggaataccggctctcagcggctagaactggaccccatcctgactgaggtcaccctgatgaatgcccgcagtgagctatacttacgct

SEQ ID NO: 358175 - DNA, 100 bp, Homo sapiens
gtgagtgagaaggagcaaagatggggtgccaagacggtgcagggctccgggcaccaggagcatatcaaaaatgttccgaataacgttacttcaagtccta

SEQ ID NO: 358176 - DNA, 100 bp, Homo sapiens
ggaagctgaaaccacagacatgactgagtcctccatgaagaatgcagaggccaggatgtgggcccagccctgtgccaggaggctggctggaataaaggta

SEQ ID NO: 358177 - DNA, 82 bp, Homo sapiens
tcagcagcggaggctggacgcttgcatggcgcttgaggtactccaaagattcaggtttactcacgtcatccagcagagaatg

SEQ ID NO: 358178 - DNA, 75 bp, Homo sapiens
tgctgctgatgaagatgatgacgatgatgatgaagaggatgatgatgaagaagaacatcaccaccctgaagccag

SEQ ID NO: 358179 - DNA, 90 bp, Homo sapiens
gtagtattggcattcccattgctgtgcctacaccttcgccacccactattggaccagggtgtccgcaatgttgccagtgtctgtctgcag

SEQ ID NO: 358180 - DNA, 100 bp, Homo sapiens
taaatcaagatttaacattccaacacataaaaattatttatccaacagctcctcccagttggcctttaccagagtttgatccaagccagattcgactgat

SEQ ID NO: 358181 - DNA, 100 bp, Homo sapiens
caggagagtccggccgcgacaggacgatttatcagcaagactgttgaacgcataactgcccaagatgcctgtccctccccctccagcacccccgccgccc

SEQ ID NO: 358182 - DNA, 100 bp, Homo sapiens
ctggagagcctgcaggacggcgcggcagagtccccgtacgcctacagtaacgttcttggccaggctgactgagagatttgtgctgggagtggatatgttc

SEQ ID NO: 358183 - DNA, 75 bp, Homo sapiens
gagctggggcgacgaggcgattgcgggggcctgggctagacttgaaacccacatgacaccagagatgttccgaac

SEQ ID NO: 358184 - DNA, 82 bp, Homo sapiens
acttggatgacctcacagacatggatcctgaagtggcggccctgtattttcccaaaaaattcaccagaccagagcacttggg

SEQ ID NO: 358185 - DNA, 98 bp, Homo sapiens
gataaagatgatgatatccttctcaaccttgtgggatgtgaaaactctgttactgaagagggcagtgatgactgttcggaaatgtgtgatggagaaga

SEQ ID NO: 358186 - DNA, 98 bp, Homo sapiens
tgttcaagagacatgcactgaacttctgaagataatcgagaaataccagctaagactcaatgtttgggaaaactgatttaatggctgttacacttgcc

SEQ ID NO: 358187 - DNA, 83 bp, Homo sapiens
gggcatctccgcggtccggcccggggccccgggatctcggctgtccttcctcccggtgaaatgacaatggatgctctgttggc

SEQ ID NO: 358188 - DNA, 118 bp, Homo sapiens
tgggactctacctggggatatacatgcatgcaccaaaacgaggacaggtaactcgggaccaaatgaagatgtttatacagcaggaatttaagaaagttcagaaagtgattgctgatga

SEQ ID NO: 358189 - DNA, 100 bp, Homo sapiens
gtggttgatctgactcacaatgactctgttgtggtggtacaacatcttggccctgcaactgatttttataagaaacttgcattagattgctcgggacagc

SEQ ID NO: 358190 - DNA, 82 bp, Homo sapiens
ccagcactaactatttcaaaaggtgcaaatgtcaattgtcaagccttggacaaagctacacccttgttcattgctgctcaag

SEQ ID NO: 358191 - DNA, 124 bp, Homo sapiens
ggcaagagtaacagcagcgccgtcccgtccgacagccaggcccgggagaaaacatccagtcatggataaaaatgagctggttcagaaggccaaactggccgagcaggctgagcgatatgatgac

SEQ ID NO: 358192 - DNA, 98 bp, Homo sapiens
cgagttgcaggccccaatggcagctggaagtgcactgtctgtgacaaaatcgcatctgatcgaccgagccttcagcagattccgtcacagagaagtgg

SEQ ID NO: 358193 - DNA, 82 bp, Homo sapiens
cgaactccgatgtgcgcccattgtaaccaggtcatcaggagtgaaagggaagcaatgcagaaatcagagggctctggaggta

SEQ ID NO: 358194 - DNA, 75 bp, Homo sapiens
ttgtacaaaggagagtttaaacagccaaaacagttcattcatattcagctgacctgctatcgtgttggaggcttt

SEQ ID NO: 358195 - DNA, 100 bp, Homo sapiens
cttcgcgagaacagaatttcttttggcacctcctctccgcgcgttcttggggtctgctcaccaggtggccagataccgcccacgtgcccccatcattgct

SEQ ID NO: 358196 - DNA, 51 bp, Homo sapiens
gctctgcgaaacatcatccagaaggaaaccacccctactcctaatcccccg

SEQ ID NO: 358197 - DNA, 82 bp, Homo sapiens
acctttaacaaccagctgaccactgtccacaaccaggctctccaggacatgtttgcactacttgggggagtttggagaagac

SEQ ID NO: 358198 - DNA, 111 bp, Homo sapiens
gcaccactggtcgccggtactcatcagcctggccgccctgttttccaaagacaatgcagatcttcgtgaagactctgactggtaagaccatcaccctcgaggttgagccca

SEQ ID NO: 358199 - DNA, 98 bp, Homo sapiens
accatgttcctcattaacatctgtctgtccgcttagtcatcacatcatttcactgtgaatgagctgaaagccagtggtggcgaaatcaaaattcataa

SEQ ID NO: 358200 - DNA, 100 bp, Homo sapiens
tggacgagttctcccggggaaatgtaccgtccagcgagttgcagatctacacttggctccatctactctttgaagcttctgcccagcttgcattgtttct

SEQ ID NO: 358201 - DNA, 75 bp, Homo sapiens
agtgccatccattgaatgggttgaacttttcacagaatgtgacagtgatgataacatgggtgccaaaaatacttc

SEQ ID NO: 358202 - DNA, 50 bp, Homo sapiens
ggcgaatggggctcacgtcgagagaatgccgtgaatggagaacacctgtg

SEQ ID NO: 358203 - DNA, 100 bp, Homo sapiens
gtggcgacctatggccgtggctaccccggatttgctccaagctatggctatcagttcccagagtcatcctttttgaacttccatgactcagactgcgaac

SEQ ID NO: 358204 - DNA, 110 bp, Homo sapiens
agatgggcaccgcggatctggggccgtcctcagctgcaagagaaatagtgtggttagaaagagaagagcgagccaggcagcactacgagaagcacctggaagagcggaag

SEQ ID NO: 358205 - DNA, 75 bp, Homo sapiens
cccagattctgccaattcgttttcaggagcatctccaggacttcttgatggagaccttcatcatgttcaaggacc

SEQ ID NO: 358206 - DNA, 98 bp, Homo sapiens
ttcggtgcaccaagagcagcctcacatggtgtgggccgacatcaagagctgcgagatccaacagtattctaccttgtaaatactgttatttgtatata

SEQ ID NO: 358207 - DNA, 98 bp, Homo sapiens
acagatgtccaagctgccaagttatttctgacagacaaacgccaaaaaaagatgaaagtcttgtatccaaagcaatggagtacatgtttggctggtag

SEQ ID NO: 358208 - DNA, 98 bp, Homo sapiens
atttcccatcaacattgtggctgtcaagaatgatcatgattttcttgaaaaggaccttgtagaacctctttgcagggtggctgtgctggctctggctg

SEQ ID NO: 358209 - DNA, 87 bp, Homo sapiens
gtcgtggaggtggccgtggaggcagaggtggcatggggccacggaagccctgggtcaccctttcagcctggttctctccggtggtgc

SEQ ID NO: 358210 - DNA, 97 bp, Homo sapiens
agaacattaactaccttctcatcttctacctcagtttctcactgcttatctacataaaaaccttagaccagaacactgcggaagaggaaatccatca

SEQ ID NO: 358211 - DNA, 100 bp, Homo sapiens
ccggcggagggtgcatgtttgcgaggaagccgccgggcgccgcgcctttggttggcaaacatgaattgactgggcataaagtagctgtgaagatactcaa

SEQ ID NO: 358212 - DNA, 97 bp, Homo sapiens
tgggactcagcagccttggtgctcaggtgccagatgcaaaggtttacccaaggtccagcctagcccctaggcaccatgtcggacagtgatctaggtg

SEQ ID NO: 358213 - DNA, 75 bp, Homo sapiens
agatacaaacttggattttttccagtctgatccttttgttggcaagaatggcatcatttcctggtggtcaacatg

SEQ ID NO: 358214 - DNA, 49 bp, Homo sapiens
cgggcagttgcagtgttggagctaaaaacctgcacttgttgccaagtct

SEQ ID NO: 358215 - DNA, 82 bp, Homo sapiens
acgttccatctgtggaaggacctaccaaccaggtacaccaggggttggaaaaaccacactaggcaaagaacttgcgtcaaaa

SEQ ID NO: 358216 - DNA, 100 bp, Homo sapiens
attgggacaacattcagacccatttccagtcatgagttctcagaggcactgtgactgacttccctggatttgatgagcgggctgatgcagaaactcttcg

SEQ ID NO: 358217 - DNA, 83 bp, Homo sapiens
gacctgctgaatcatagcccacatgtccaggctgacgtgatggcagacagggttccccgctgcccggtctgcaccggcgttgt

SEQ ID NO: 358218 - DNA, 100 bp, Homo sapiens
cggagatgtggcccctggtagcggcgctgttgctgggctcggcgtgctgcgacagcaaatcacccaccttgaggtcataaaggagctggaagctgctggg

SEQ ID NO: 358219 - DNA, 100 bp, Homo sapiens
tggtggatgcggccaactccaatgggcctttccagcccgtggtccttctccatattcgagagatatgaatcaggttcttgatgcctatgaaaataagaag

SEQ ID NO: 358220 - DNA, 51 bp, Homo sapiens
tgctgcacacctaaagtcaagggtgactgaaaactcctgaggcatttcctg

SEQ ID NO: 358221 - DNA, 97 bp, Homo sapiens
cctggaaggtgcgtgtggggctgggtctcggagtgggagacgtggagtgcaggtgaccattgtgaggtagatattttgttctaattttccagatgag

SEQ ID NO: 358222 - DNA, 75 bp, Homo sapiens
gactttttcagctactatcgtcattgaaactgtatggcccatctcctgtacgcttggagcgacctttggctacgt

SEQ ID NO: 358223 - DNA, 90 bp, Homo sapiens
catctcttctattgtacctgcagatccacatctcaaagaagtggggcttcaccaagttcaatgctgatgaatttgaagacatggtggctg

SEQ ID NO: 358224 - DNA, 99 bp, Homo sapiens
cccccaaatgtctgactctgactctcggactgagaaacgcaagatgcctgctctgtgcctgtatctgagatcatcgccgttgaggaaacagacgttcac

SEQ ID NO: 358225 - DNA, 74 bp, Homo sapiens
gacacagctaaattactgagtgcaggaaaaaggcctgtgtcatatcaacacttatctaacagcatggcacaaaa

SEQ ID NO: 358226 - DNA, 95 bp, Homo sapiens
ccattgactgatgccaagtgggtgcctggcagcagccttccttcccatccctgcttctggacgcctcagccattttgtggaagtataatactttg

SEQ ID NO: 358227 - DNA, 100 bp, Homo sapiens
cgtgaaagattttgtcgtcagagtccacatagtaacctatttggagtgcaagtacaatacaagcaaaagctgtgcctcacttctgcgggttgaacccttt

SEQ ID NO: 358228 - DNA, 97 bp, Homo sapiens
acgttttcgaagatgccttggaaaccatctcaatgttaaatgggccagggaaaactatcaccataacattggctcaccatattgcttacggttagct

SEQ ID NO: 358229 - DNA, 75 bp, Homo sapiens
gtcgagaggaaactgttgtgcctcttcatattggcgatcctgttgtttacatgggaataggactctcggctcaag

SEQ ID NO: 358230 - DNA, 106 bp, Homo sapiens
gacctggtgcgctctcgtgaggtctcggtggatggaccgtcctccttctaatatttggaagaaaatagatcaatccagggactataaaaatggcaatcaactcagg

SEQ ID NO: 358231 - DNA, 100 bp, Homo sapiens
ggaagagcggctcggtggaaaacgggttcgatacccaggcccggtggttctgggaagcgtacttccagtcaattaaagccattgccctggccaccctgca

SEQ ID NO: 358232 - DNA, 75 bp, Homo sapiens
ggcctactcgcccgccaccctgcgctgccgccgctctgaggagttaaagcagaaagatgaaggtcttagaatcat

SEQ ID NO: 358233 - DNA, 98 bp, Homo sapiens
ggcaccccccgccgacaaggaggatctttaatctcatgaagtacgacagctacagccgcttcttaaagtctgacttgtttttaaaacacaagcgaacc

SEQ ID NO: 358234 - DNA, 96 bp, Homo sapiens
tattgaatgcattagcctcattggtctggctgttgggaaggaaaaaaaaaccatgagctgttttccaagagcttcatctccatggaagtgcctgtc

SEQ ID NO: 358235 - DNA, 75 bp, Homo sapiens
cagtgctgttaccactctgggtgatccagccaaagattctcagaggattaaacagcaagcaacattgtttgttgg

SEQ ID NO: 358236 - DNA, 74 bp, Homo sapiens
gcagagttttcatcatggataactgtgaggagctaatccctgaatatctgattatggctgcagcttcgattgcc

SEQ ID NO: 358237 - DNA, 51 bp, Homo sapiens
gcaaccttgtctcagtgggtaagtttatgtaataagaacgggcaaacagct

SEQ ID NO: 358238 - DNA, 50 bp, Homo sapiens
aggatgtcagtcttttgaggaaacaggtagctacagcaagctgggtagca

SEQ ID NO: 358239 - DNA, 75 bp, Homo sapiens
ctggagtacacagcttctctgctggaagccgtctacatagatgagacacgggaagacgcttccctcctggggcca

SEQ ID NO: 358240 - DNA, 90 bp, Homo sapiens
caagcgcgggacccgctatgagatcatgtttgagaccttcaacaccccagccatgtacgttgctatccaggctgtgctatccctgtacgc

SEQ ID NO: 358241 - DNA, 132 bp, Homo sapiens
tacatgaatgccacagttcagtgtattcgttctgtgcctgaactcaaagatgcccttaaaagatgccgctcctacgaggactgctgtggctccaggtgctgtgtgcgggccctctccatacagaggctgtgg

SEQ ID NO: 358242 - DNA, 74 bp, Homo sapiens
ctgccattatctgtgacttctatctgtggctcattggaaggaaacccaggccctgaaaaggagcctttaaaagt

SEQ ID NO: 358243 - DNA, 100 bp, Homo sapiens
ctacgcgaggctttgaagattttagctgagagggttttaatcttggaaacaatgattgggctctatggcatatgggcaacaaagctatggaacctatgga

SEQ ID NO: 358244 - DNA, 74 bp, Homo sapiens
cgctgcagccaccgcggcccccgcggggttgaaaggaggagcaggaggtactgatggacaaggaggtaccttcc

SEQ ID NO: 358245 - DNA, 75 bp, Homo sapiens
taatccagtatttgcggatagctccaaactgggatatacttaattcagtgcacaaatgagatgaatgtgaacatc

SEQ ID NO: 358246 - DNA, 83 bp, Homo sapiens
tccttgcagctgcttagacgctggatttttttcgggtagtggaaaaccagcttgagagactgaaaggatttgaaggcccttcg

SEQ ID NO: 358247 - DNA, 141 bp, Homo sapiens
ccccgatccgatcacctttcaaggagtcctgtgatccatcactcggattggcaggacctggggccaaaagccaagcttgcctacatgtagcctgtgttgtacagcagaaagatgccaggcaatggtttgctgagctttctg

SEQ ID NO: 358248 - DNA, 50 bp, Homo sapiens
ttgtgttgctgcagattgccaaaatgctgggctcttgcactgtttggtgg

SEQ ID NO: 358249 - DNA, 98 bp, Homo sapiens
ttccaccggcagggcttctcctatgactacgtctttgactggaacatgctgaaattcacccagcgcgtgtcctcaacatgccccctgtgatttacgtg

SEQ ID NO: 358250 - DNA, 90 bp, Homo sapiens
cttattaatctcagggaactggatgtcagcaagaatgacaaaattgcttacccagtacatattaaatctcggcaagtatgatcaaaacta

SEQ ID NO: 358251 - DNA, 101 bp, Homo sapiens
gtccgccccgcgtctccgcagcgcgcccaactgcatcctcctggccatgttcctcgtccactacgggcatcgcttgataactatggacagcaagaacttgc

SEQ ID NO: 358252 - DNA, 97 bp, Homo sapiens
gtggaccaagttgctctgcgtcatcaaagacaccaaactgctgaagatggcagtgaacgtatactcaacgtcagtgaccagtgataacctaagtcga

SEQ ID NO: 358253 - DNA, 100 bp, Homo sapiens
gatcatttgcatttcgttagctttctggattatatcaatgactgcaagcacctattatggtggacgcggatctgtcaacatgggtaaaggagaccccaac

SEQ ID NO: 358254 - DNA, 100 bp, Homo sapiens
cagaccggccttgccttgttccacggttttgaacgaagaatgtgatcagaactggtacaaggcagagcttaatggaaaagacggcttcattcccaagaac

SEQ ID NO: 358255 - DNA, 74 bp, Homo sapiens
gaagtctgataccgcttgcagaagggaattgaatagatgtctccctattgggaaacaaaggacccatcgcaaat

SEQ ID NO: 358256 - DNA, 100 bp, Homo sapiens
tatcttcgccatcgccagcatcgccaacccggactggatcaacaccggggagtctgcgggtcagaacaaaatctgcttcatcccaggcatggtaggacct

SEQ ID NO: 358257 - DNA, 100 bp, Homo sapiens
cctctccagtcccctgcccctcacaggtagtgggcagcagtcagtgacaggtgtaacctctgtggatgacagcaacagttactggaggatacgggggaag

SEQ ID NO: 358258 - DNA, 80 bp, Homo sapiens
cttctggtgtcacctcccagggtgactcaactccaggatgaatctggttatagatggacaagagacgatcattctgcaag

SEQ ID NO: 358259 - DNA, 75 bp, Homo sapiens
gacgtcttgcctgtgtcccacttgttcgcggcctatagcaagagtgagccatggagctacgtgtggggaacaagt

SEQ ID NO: 358260 - DNA, 82 bp, Homo sapiens
actacaagctacaagctcctctaagtgaacccacgctgagccagcatactcatggttttgagatagaaactgtgaagaacaa

SEQ ID NO: 358261 - DNA, 82 bp, Homo sapiens
caacaaccacagctttacctccctgaaggacagacaaggaacccataaagatgctggtgagcggagaattagagtacataca

SEQ ID NO: 358262 - DNA, 100 bp, Homo sapiens
catagtggaggccgcagcagtcagggacatttctgaagcgagcgtcttcgatgagttatagatagtagtatgaaaaacttcaaagcattttttcggtggc

SEQ ID NO: 358263 - DNA, 100 bp, Homo sapiens
ggcccgcggccgggaggtctgggccgcagcgggaccccagttcctccgccaagcgcggccgccgcccccgcctcagggactttgaacatgtcggggatcg

SEQ ID NO: 358264 - DNA, 105 bp, Homo sapiens
ctcgtcgacatgagtgatgtggaggaaaacaacttcgagggcagagagaatggggtactaagagaaaagcacgaagctgtggatcatagttcccagcatgaggaa

SEQ ID NO: 358265 - DNA, 75 bp, Homo sapiens
agaaaatcttgtggacaaatccaggggaaggtccttggaagttccagtaaaacatacacatgtttggcttcttgt

SEQ ID NO: 358266 - DNA, 98 bp, Homo sapiens
tgaacatcagaagggacagactccagacgcgccacccatgcccagcctcttgcataggaagaagtggtaagctaaggagagaaatgcagggttcctag

SEQ ID NO: 358267 - DNA, 100 bp, Homo sapiens
actttgctgctgatggcttcctgcccgattccttgttggacatcatcaccaactgtggctcaggttttgcagtggtatgtgtgcaacagagagaaattat

SEQ ID NO: 358268 - DNA, 102 bp, Homo sapiens
tggaattctaatttgaaccatgtttggattgaagccgcctctgtattacttaccagcaattctgtggtgttcttggtcacacatttatggagtttctgaagg

SEQ ID NO: 358269 - DNA, 82 bp, Homo sapiens
agaaacgtccacatgtgggtactgcattcctaccggtgtgacaggatccttcatctgtacctaatgcagacaatgccttcac

SEQ ID NO: 358270 - DNA, 100 bp, Homo sapiens
tgacccccgatgccaaacacctgtggctgaacgtatgaaggtcaactccctgtgctggccatcacagatcccgacgtgatcagaacagtgctagtgaaag

SEQ ID NO: 358271 - DNA, 98 bp, Homo sapiens
gcggcggaagatcaccacgtatgtgtccttccccctggagctggacatgacccctttcatggcctccagatttcatgagcactggaggtttgtgttgc

SEQ ID NO: 358272 - DNA, 97 bp, Homo sapiens
tcagttaaaacacgtatgcaaaaacttgcagagcaacggcgccgttgggataatgatgatatgacagcttggatcctagcatgactatacattgtga

SEQ ID NO: 358273 - DNA, 98 bp, Homo sapiens
ctagcattcgatcacatagatattgagaaagatcagtctaaagaaaaggagaagaaagtgaaaaaaacaattccttcctgggctaccctttctgccag

SEQ ID NO: 358274 - DNA, 100 bp, Homo sapiens
ccagactcacataagaggaaaggatcgccatgtgacacactggcatcaagaaatgtgattgataacagtaaagccacactcctcaagtgcctgaaatacc

SEQ ID NO: 358275 - DNA, 90 bp, Homo sapiens
cgcgtctctctgctgcggcgcggggaccgctgtgctctcgtgaagttcccttgtgggaggccctggaagcggatggagaagaagcgcagt

SEQ ID NO: 358276 - DNA, 110 bp, Homo sapiens
cagcaccatgttcccatccaggacaccttccccttcctgaacatcaatgattccaggaatatacaattcacccttcagaaaagagcctgatccatgggagctgcaattac

SEQ ID NO: 358277 - DNA, 82 bp, Homo sapiens
ctggggcagaatgaggaatctcccaaacaggccctctgcccgaggagatgctcagctacgcccgggatgacacccattacct

SEQ ID NO: 358278 - DNA, 98 bp, Homo sapiens
cgcgctgtaagaagcaacaacctctcctcttcgtctccgccatcagctcggcagtcgcgaagcagcaaccatgataaactcatcctgaaagtcgctgt

SEQ ID NO: 358279 - DNA, 50 bp, Homo sapiens
gttggccccgatatccgctcagggtggctttgtacaagtcagtgccaacg

SEQ ID NO: 358280 - DNA, 99 bp, Homo sapiens
gttctgcagaaggttgtgactttagtatacaaaggtgggtgcggctgctatttggacgagagttccccctgcaggaccttctggtggtctgggatgcct

SEQ ID NO: 358281 - DNA, 82 bp, Homo sapiens
cgactccacgcagctcgcccttggggacggcaaaacagaacagaaaggcggagataaaaagaggggtgttaaaagaccacga

SEQ ID NO: 358282 - DNA, 89 bp, Homo sapiens
tgctggttggggttgctctgatatagcagccctggtgtagtttcttcatttcaggaagactggagggcatcctggctgtttcacccgtg

SEQ ID NO: 358283 - DNA, 83 bp, Homo sapiens
gccggaccagctggtgctgcgcggcgcagttacagaatgtctgaaggggacagtgtgggagaatccgtccatgggaaaccttc

SEQ ID NO: 358284 - DNA, 142 bp, Homo sapiens
gagatgtttggatggagctttgtctttgaggactttgtctctgatgagctgagaaacaaagccacccagccaatgaagctctctgatgtaaaggatggagtaaatcaagcagcacctgcatttggatttggcagcagtcaag

SEQ ID NO: 358285 - DNA, 90 bp, Homo sapiens
gccgcggccctctttagggataaggctgaattgcatcatcagcagatggcggatccagacttgttggaagagtcctcatccctcttggag

SEQ ID NO: 358286 - DNA, 100 bp, Homo sapiens
gctctgctgtgggcgctgctggcgctctggctgtgctgcgcggcccccgcgcatggttcgagaacttgtcttggacaattgcaaatcaaatgatggaaaa

SEQ ID NO: 358287 - DNA, 100 bp, Homo sapiens
ttggggatacaaacacaccttgaaccagattgatgaagtaaaggtgtggcctcaggatgacatggaagcttaccggacccagaactgcttcctcaactcc

SEQ ID NO: 358288 - DNA, 82 bp, Homo sapiens
attgtacccagagtgcagagccgcctttccagcatgcaggggctgctcagggacccagacatggagctgcgggaagaagcct

SEQ ID NO: 358289 - DNA, 75 bp, Homo sapiens
tccaatcagagcattcaagggatggtgaaatggatgatagtcgagatggaattgtcagccacttgaagaagcagg

SEQ ID NO: 358290 - DNA, 98 bp, Homo sapiens
tttgacgccgagagctacacgttcacggtgccccggcgccacctggagagaggccgcgtcctgggcagagctagttcttctggagctcaacttcttgc

SEQ ID NO: 358291 - DNA, 100 bp, Homo sapiens
gttagcagacttcagatatgtacacagcatcatactgaagctattggaaagggtttagatgtagattctctggtcattgagcatatccaagtgaacaaag

SEQ ID NO: 358292 - DNA, 50 bp, Homo sapiens
cctgaagcaacagcccatctgtggtgaagcagcgcttgcagatgtacaac

SEQ ID NO: 358293 - DNA, 83 bp, Homo sapiens
gcggcatgagcagcgtgactcaggagggcagacaaggtcctgaacgaggctgtgggggccctgatgtaccacaccatcactct

SEQ ID NO: 358294 - DNA, 83 bp, Homo sapiens
gctcggcgctgcgatccgcgcatataacgagcagtcattatggcgaaccttggctgctggatgctggttctctttgtggccac

SEQ ID NO: 358295 - DNA, 100 bp, Homo sapiens
aatcaatgaaatgcagaaaaaagatcacaagcaactctggatgggattgcaaaatggatcaggagaaggtctggggaaaataatccagagatttccacag

SEQ ID NO: 358296 - DNA, 90 bp, Homo sapiens
cgccggcctcgcctcctcgcagcagcgccatggttggtgttcgaggaagagacattgttgttcttggtgtggagaagaagtcagtggcca

SEQ ID NO: 358297 - DNA, 75 bp, Homo sapiens
tgctcggccgatgaagtgcagaggtttttttctggtacaactccaaaaggagacattggagaagaaccaagctgg

SEQ ID NO: 358298 - DNA, 82 bp, Homo sapiens
ggcgcggtgagacagaggtcctgggctggagagtctctgctttctatccgtcaagatgataaagtcgtgtgcccgagaacca

SEQ ID NO: 358299 - DNA, 127 bp, Homo sapiens
cggcgcgtcaggtccgcggaggcgcgggctcggggcgcctgcgggacggtgaggccctgctgaggactccggctcgaaaggacacagaagcgggagaaacgttttcatctgtccaagccaatttaag

SEQ ID NO: 358300 - DNA, 100 bp, Homo sapiens
actggaaaaggataggctgcagtttttgaagtttgaatctgagaagctgcagattgaaaaggaacgcttacagattgtaagtgttggaaagcatgttaaa

SEQ ID NO: 358301 - DNA, 75 bp, Homo sapiens
cacacacgtggtctgtagcgacagcggcttggaagtgctctaccagagttgcgcatttgacattgtgcagcaaag

SEQ ID NO: 358302 - DNA, 51 bp, Homo sapiens
tggcagccggccacggagcgcctgcaggcagctggctaagagtcttgggca

SEQ ID NO: 358303 - DNA, 87 bp, Homo sapiens
actacaggactgcggacaagggctggcagtacatggactggacctgcctggagcccagcccagagcatctcctcagtgctcatctct

SEQ ID NO: 358304 - DNA, 100 bp, Homo sapiens
ttgggcttgcaacttttgttaccaaaggaatcagatcgttaactgaagacaatatgcaaaattctcacatggatgaatacagaaattctagtaatggcag

SEQ ID NO: 358305 - DNA, 75 bp, Homo sapiens
gagaagttcgcaaagagaaaatgctcaggcaaatgggtttttaatgaccacaacaagcaagcatgcagcttactg

SEQ ID NO: 358306 - DNA, 82 bp, Homo sapiens
cccgcaccaaattgcatcgtttcccagaatcagtatttcaagcatccaaaatgtgtaggagaatatggacccaagaacggag

SEQ ID NO: 358307 - DNA, 98 bp, Homo sapiens
caccagtaaagtttttatcagaaaaggatcggaaaagaattttgaagtcaatgaaaggattctattttgcaaagctgtattatgaagctaaagaatat

SEQ ID NO: 358308 - DNA, 75 bp, Homo sapiens
ttgagatcagctagtgttccatctatcttctgtcatgtggtgaagagggaacagaaatctttgccccctgacttt

SEQ ID NO: 358309 - DNA, 80 bp, Homo sapiens
ggcatggaaagttccagccggttcgagagctaggtggaaatgagttctcaacagtttcctcggttaggagccccttctac

SEQ ID NO: 358310 - DNA, 100 bp, Homo sapiens
tttatcaaaacatttcattccctataatgcaaagctccagggtttgagccacaatgtgatcttcaccttggattctttgttaaaaggagacctaaaggga

SEQ ID NO: 358311 - DNA, 95 bp, Homo sapiens
gatcgacttcctcacccgcgcctgcgacctcggtactccaaagattcaggtttactcacgtcatccagcagagaatggaaagtcaaatttcctga

SEQ ID NO: 358312 - DNA, 75 bp, Homo sapiens
tctggcctcctcacctggtacctgatcagcatcgatggcaccgaaagcgaaggaagctcctgctcctcctaaagc

SEQ ID NO: 358313 - DNA, 49 bp, Homo sapiens
ctcatggaggctgagcatttattcagatctcattcgtcggttcggatcc

SEQ ID NO: 358314 - DNA, 82 bp, Homo sapiens
tcctggatgagaagagcggcagtttcgtgagcgacctcagcagcagcctcccgcgacgatgcccctcaacgttagcttcacc

SEQ ID NO: 358315 - DNA, 100 bp, Homo sapiens
agatgactatgccgatcttccagaatatttcaagcgactgacatgtgagatctccacaaggggtacatcagatggagtttcactcttgtctcccaggctg

SEQ ID NO: 358316 - DNA, 104 bp, Homo sapiens
ctccactccgtcccccgcgggtctgctctgtgtgccatggacgggtgtcgtgaaaactacccctaaaagccaaaatgggaaaggaaaagactcatatcaacatt

SEQ ID NO: 358317 - DNA, 100 bp, Homo sapiens
cgtttctcagtccccgttcagcatttctgtggtgggaaccccagcacacccatccaggtgcccatggcccgagccagcatcctgtggctcatcggagagt

SEQ ID NO: 358318 - DNA, 85 bp, Homo sapiens
gatttggggatggctataatgggtatggaggaggacctggaggtggccaagcaagaggagttcttcaacctgtcccactgccaac

SEQ ID NO: 358319 - DNA, 83 bp, Homo sapiens
gagtagcagtgtcctctctcatgaagaggtggcgacatgtctaagaatgtgagccagtcacagatggcaaaattgaaccaaca

SEQ ID NO: 358320 - DNA, 75 bp, Homo sapiens
gaagagaagtttacaggccctctattgccaactgttaaaatccacattcatctcaatggaaggatcctgccttaa

SEQ ID NO: 358321 - DNA, 109 bp, Homo sapiens
ggctcacgctgagagggacacgcagtgacgagcggccgaagcagctttgcggtgtggacactgccagcggctgcagccgacttggaatgacctgggagacaaatacaac

SEQ ID NO: 358322 - DNA, 75 bp, Homo sapiens
tgaagatgatgtggtctacagaccaggagctaagtttggtgcgaacgccattctgggggtgtcccttgccgtctg

SEQ ID NO: 358323 - DNA, 97 bp, Homo sapiens
aacaccacatgttgtctcttagaagtgggagctgaacggagccagtgtcctgggctaaacacaagagtgctgattcccactgtaagttacagtgaag

SEQ ID NO: 358324 - DNA, 82 bp, Homo sapiens
agctctgcatcaatgcgccggccataggtactaactagggagctctggcagtgaaccttattgacgtggaaagttgtggtcc

SEQ ID NO: 358325 - DNA, 96 bp, Homo sapiens
cactcaatgaatataaactgcacttactggcatgctcaaggaatgggctattaaggtggacccccaaaagtacaagggcatatttaacggattctc

SEQ ID NO: 358326 - DNA, 96 bp, Homo sapiens
ctcagatgctgccagggtccctgaagagggaagacacgcggaaacagacgcaaacatgcagatctttgtgaagaccctcactggcaaaaccatcac

SEQ ID NO: 358327 - DNA, 100 bp, Homo sapiens
aaaatggcggtgtctacagtgttctcgacttcgtcgctgatcgtcagtatttaaacagatcacatcatgcgtgagtacaagctagtggtccttggttcag

SEQ ID NO: 358328 - DNA, 90 bp, Homo sapiens
cgcggagggagccgcgggatggaccgcaggctgcaggggacagcgctggaccgtacagacctgcctaacatgccagcgcagccaacgctt

SEQ ID NO: 358329 - DNA, 98 bp, Homo sapiens
taccgagatgcggttttcctcgcagaacgcctttatgcagaagagtcattcttatagaagagcatcagaggaagataaaaaagaatcctcaatgtcag

SEQ ID NO: 358330 - DNA, 151 bp, Homo sapiens
atgtaaatttgcacatccttcgaaaagctgccaagttgaaaatggacgagtaatcgcctgctttgattcattgaaagtactaggttttgacaagcttgcatcatgcgtgagtataagctagtcgttcttggctcaggaggcgttggaaagt

SEQ ID NO: 358331 - DNA, 82 bp, Homo sapiens
ggacaccaaacatttcctgccgctcgcttcctgggtctgcaggtccagccggctggcaccctccatgtacccaggggagatt

SEQ ID NO: 358332 - DNA, 75 bp, Homo sapiens
ggatattcctcatgacattgctgtctggttttgtagtgcatccctgagcatgagcacagaatgaagcggcgtttg

SEQ ID NO: 358333 - DNA, 98 bp, Homo sapiens
gacgccgagcggtgactccccgccgctcccgggggccgtgacggataatagccaaggttctggaggacaacaagctgcctggtgcaatttgttccttg

SEQ ID NO: 358334 - DNA, 75 bp, Homo sapiens
atttgatggtatacaaccaaatgagaaagatcagtctaaagaaaaggagaagaaagtgaaaaaaacaattccttc

SEQ ID NO: 358335 - DNA, 100 bp, Homo sapiens
ctttgaggggtttcttgcaaaacgcttctccggctgcaccctgaccgatgggaccctgacattatgatctcaaccagctgctggagcctcgaagcataac

SEQ ID NO: 358336 - DNA, 90 bp, Homo sapiens
atcgtcactgaggttgcagttggcgtgaaggaggagacagaggaggacagtgacctgtcagattatggtgatgatgtggatgggaggaaa

SEQ ID NO: 358337 - DNA, 83 bp, Homo sapiens
cctccgaagatgggggatttctacgacccggagcacccgacccctgaacaatgcagatcttcgtgaagactctgactggtaag

SEQ ID NO: 358338 - DNA, 100 bp, Homo sapiens
gatggagagaaaattgtggtccagggagagcctggggacgacttttacatcatcacggaggtaaaaatgtctccatcgtatcatcagtccaaaggggatc

SEQ ID NO: 358339 - DNA, 100 bp, Homo sapiens
gcttgaacacctggcctattatcagggaccttgtggatgatatcttcactgtcacagaggatgaaattaagagtctggtgctggcagaaagtagtcctgg

SEQ ID NO: 358340 - DNA, 75 bp, Homo sapiens
agccatagtacctacagcagcactccaggatctgaacgtctatgacactctttcgagctgacacagtgaagaaca

SEQ ID NO: 358341 - DNA, 82 bp, Homo sapiens
gcgttaagggaacgctgaggtcccgcgctccccgaccgagaatagcctaacatggcagaccagagacagcgctcactgtcta

SEQ ID NO: 358342 - DNA, 100 bp, Homo sapiens
gggcggcccgggctgtagtgccggcgccgccgcgtcttcccggtctcctttcccggccgcacaggacctagaggatcaagacataatgggagcattttta

SEQ ID NO: 358343 - DNA, 60 bp, Homo sapiens
gcctctgtgaacccggagtacttcagcgctgctgatggcagtaagctcctacaggacatt

SEQ ID NO: 358344 - DNA, 90 bp, Homo sapiens
gaagttcactgctgtagtcagtggggacatgatttcagacctggatgccgaagtaatagtggactggagaccattggatgatgcattaga

SEQ ID NO: 358345 - DNA, 100 bp, Homo sapiens
aggagacatggttcttagtgttgcaaagcttgtaccagcaggacttcacatttaccagtcacttggcgcttggatttacactgggcaacgtggttggaat

SEQ ID NO: 358346 - DNA, 100 bp, Homo sapiens
gcttggagcacttcctattccactggattgggaaagaccatggcagagctgggatgtttgtgtctaagttctttgggggctatgtgcctgagatggtgct

SEQ ID NO: 358347 - DNA, 74 bp, Homo sapiens
cctgactgctgcggaggcctcggcaatattgattttagacagtgtcttgggacaaggtgcgcattcctggtgtg

SEQ ID NO: 358348 - DNA, 95 bp, Homo sapiens
gcagctatcgtggacgtcactggccctggtggggattgacagccacgggaagacaatgcagatcttcgtgaagactctgactggtaagaccatca

SEQ ID NO: 358349 - DNA, 100 bp, Homo sapiens
ggagccaggggcccgagggcggggaccggcggcgctggaggagcgaggcagctgtactaggactgggaacgggaaaaacgtggtcttcgagaaatgcgag

SEQ ID NO: 358350 - DNA, 75 bp, Homo sapiens
aaacagtgggatggcttttatgattaaacactcccagaaactttttaaggagtataacatgtatggctggtgggt

SEQ ID NO: 358351 - DNA, 109 bp, Homo sapiens
ttcacagtttgcgggactcagtcccatcactccaaggagagaaggaactttatattgctgttggaatatctggagccatccaacatttagctgggatgaaagacagcaa

SEQ ID NO: 358352 - DNA, 75 bp, Homo sapiens
gtttgagaaaaggcctaagaattttggcattggaatgggtaccacagaccatgtcatcgtcctggcgtccacgaa

SEQ ID NO: 358353 - DNA, 100 bp, Homo sapiens
gtgaaaagcgggaagagcttcttattcatgttatcactgagcaggtgaagtattacagacacttagcacctgatcacttgctgcaaatatgtcatcgact

SEQ ID NO: 358354 - DNA, 100 bp, Homo sapiens
cgacaaggagggcatgatcaacctcgtcatgtcctacgcgctcaccatggatgatgatatcgccgcgctcgtcgtcgacaacggctccggcatgtgcaag

SEQ ID NO: 358355 - DNA, 97 bp, Homo sapiens
gagtatctccgtttcctggatgtgaactgataaaaagttgattgcagaaggacctggggaaacagtattggttgcagaagaagaggctgctcgagtg

SEQ ID NO: 358356 - DNA, 74 bp, Homo sapiens
tcgggccaatcagagggacggccccagaatggcatgatggccgccaagaacgagtcatgtttgacaaaattaca

SEQ ID NO: 358357 - DNA, 75 bp, Homo sapiens
atgctggtggctctacccagaattcaattaaagtggctcaggtccccagtctatgtgaggatctcctgtcttctg

SEQ ID NO: 358358 - DNA, 82 bp, Homo sapiens
atatttgcctttagtgcactcttctccttcacagtaaagtggctgagatatagatcagctatcaggaagggacttctgccat

SEQ ID NO: 358359 - DNA, 95 bp, Homo sapiens
ctgagttccttttggaggatccgtcttcaggcagtgatggtcattgtcctccagagcagtgatggaggaaataccagcccaggaagcagcagggt

SEQ ID NO: 358360 - DNA, 82 bp, Homo sapiens
gaagatgtgaagaggcttctgaaactacacaaggaccgatgaagagcatgagtgtgggggacccccgaaccttccccttcat

SEQ ID NO: 358361 - DNA, 83 bp, Homo sapiens
gggaaccctggtcaccgtctcctcaggaaaaccaattctgtgtcctcggaggaccacagcccagttgggccccaggcgaaacc

SEQ ID NO: 358362 - DNA, 76 bp, Homo sapiens
tggccacttgcttgggatcctttatcctggtcatcttctatttccaaagactgcctccaagtggaagttggcagga

SEQ ID NO: 358363 - DNA, 75 bp, Homo sapiens
gccatggcaagacttcccgcaacatccactccttggaccacctcaagtaaaatgtcggttccaggaccttaccag

SEQ ID NO: 358364 - DNA, 100 bp, Homo sapiens
agtcaccggtactggtgcccatcctgccttcaagtacctggcccagaacggacattctttgaagtctaatcatgatcactacagatgaacccaatgtgcc

SEQ ID NO: 358365 - DNA, 82 bp, Homo sapiens
aaccacaaggcagacatcagctcctggttcaacgaggccattgacttcataggattttacagtttttggaggcagtctgtca

SEQ ID NO: 358366 - DNA, 100 bp, Homo sapiens
cgtggatacctctgtctccgccacctcccggccacgcatgaggaagaaactgaagatgctcaacattgccaagaaggaccacgggatcattcgaactctg

SEQ ID NO: 358367 - DNA, 51 bp, Homo sapiens
caaacaactggcagaatttgctaggccaaagcctcactgtttcaattgtgg

SEQ ID NO: 358368 - DNA, 83 bp, Homo sapiens
ttatgcccaccctccaactttgcgacggaaatgtgtcatcgaaagccaggaaattcgaaatgagtcccatgactatcctcata

SEQ ID NO: 358369 - DNA, 118 bp, Homo sapiens
actggttgtggatgcagcaaaggagaaaagagaaatggagcaaaaacattccaccattcaacaaaagacaactgatcaatactgggttccatgtttacatgatgaaactgagaaactg

SEQ ID NO: 358370 - DNA, 50 bp, Homo sapiens
agccaaaattgatcatgggaacagaaacacatttactccccaataattgt

SEQ ID NO: 358371 - DNA, 100 bp, Homo sapiens
ttaagaaaaaagcaaccaacctgaagaggacctggcagcaataagtttttggtgaaataacaaagagtcaccttcaggccattcagaggaggaaagagag

SEQ ID NO: 358372 - DNA, 74 bp, Homo sapiens
gggaccacggtcaccgtctcctcaggtggatccataaagaacccagccaacccgcagagggaggggaggggctg

SEQ ID NO: 358373 - DNA, 82 bp, Homo sapiens
ttctccactttcgccagcccgtgccgcgagcgcggcctgcaggaggagccgaggaggtgctgctgctggcccggcggacgga

SEQ ID NO: 358374 - DNA, 83 bp, Homo sapiens
cgctggggatccctgctcttcgctctcttcctggctgcgtccctagatgcatcactgtaagcgataccgctcccctgaaccag

SEQ ID NO: 358375 - DNA, 100 bp, Homo sapiens
gtgcctgtgaatgacagcttttgtgagaaaattttgccgtggttggacaaatcagtagatttcattgggcttgaactgcatagacctaatctattgttgg

SEQ ID NO: 358376 - DNA, 75 bp, Homo sapiens
ccggaatgtcatccagcgagtgattagccctggtacctgacagtgtaaagaaggagctcctacaaagaataagaa

SEQ ID NO: 358377 - DNA, 90 bp, Homo sapiens
ctaatggaggtctccagtttcgtcttgtgaaaatgccattgtgtgctggaaacctggcaagatggaagatgatatagataaaattaaacc

SEQ ID NO: 358378 - DNA, 101 bp, Homo sapiens
ctgagctcgaggcccggctggcgcacctgggcgtgcagctgtctgaaaacgtggtgaaccgcatgaaggagcccagctctccaccccctgctcccacatct

SEQ ID NO: 358379 - DNA, 51 bp, Homo sapiens
agtcttctcccctgcacttcgctgcagccaaacatcatgtcaatggcaaca

SEQ ID NO: 358380 - DNA, 90 bp, Homo sapiens
gcggccgggagcccgccgcgctggtagcgagcaacctgcaagcaatcaaggccagtctaccctgcagcccttgccgccttcccataagca

SEQ ID NO: 358381 - DNA, 82 bp, Homo sapiens
gcgggatgccttgaaccaggccacgagccaggtggagagcaaggaacggcaggagcagctgatgggatatcggaagagaggg

SEQ ID NO: 358382 - DNA, 75 bp, Homo sapiens
ggaagaagttggcagacaagttcatccacgcagaaatctcctttacagacaataggtgaagaacaaacccagaat

SEQ ID NO: 358383 - DNA, 73 bp, Homo sapiens
acagaactgccaaaggccctgcaaggacaaggagaaccaggtgcatcagcgcattgcggagctgaggaaagca

SEQ ID NO: 358384 - DNA, 100 bp, Homo sapiens
cgaaaagtcagatcttcctttggccggggcttttttaaaatcaaaagtaacaagagaacagcaagtgcaccaaacttagagcactctataccaaagcgtc

SEQ ID NO: 358385 - DNA, 83 bp, Homo sapiens
gagagaaactaagtagtggacaggacacttggcattcagggacgtggccatagaattccctcaggaggagtggaaatgtctgg

SEQ ID NO: 358386 - DNA, 50 bp, Homo sapiens
ggaaggtgaatccatgttgagctgagctaagacggagtttcaccgtgtta

SEQ ID NO: 358387 - DNA, 90 bp, Homo sapiens
gtccagtcccgggcgggccgtcgcgggagagattataagcgccatggctatggctagtgttaaattgcttgccggtgttttaagaaagcc

SEQ ID NO: 358388 - DNA, 100 bp, Homo sapiens
agctctactacatgggggacctgatccaacaccgcaggacacaggaccacaagctgctagcaagtcctgtgccattatgtccacacacattgtggcttgc

SEQ ID NO: 358389 - DNA, 51 bp, Homo sapiens
gtctgccagacaatagagcatatgggaccgtgtttcttcgcctcgcctccc

SEQ ID NO: 358390 - DNA, 90 bp, Homo sapiens
cggacggctgcgtcgcccgaggcgaggaggagcgctggcgtaacaaaggcatggagcatctgtacagcatgaagtgcaagaacgtggtgc

SEQ ID NO: 358391 - DNA, 100 bp, Homo sapiens
cttccccatggggctggcctgcggcgcctgggcgctctgagcaaaacccttgaagatcgtttgaaaattgaagcaaaaaatgggacattgagtgtatccg

SEQ ID NO: 358392 - DNA, 51 bp, Homo sapiens
aatgaggcgggcagcactgcggtaagaatgattgatgttggctgatattgg

SEQ ID NO: 358393 - DNA, 75 bp, Homo sapiens
ggcgggagaacggaaaactcccaacttcctggatttttttcccaggaagccatcccgtcagaggggttcaagtga

SEQ ID NO: 358394 - DNA, 83 bp, Homo sapiens
cgaggagccagccttcaatgtgtcctacaccaggcagcccccaaatcccggcccagctgtcaataccagcaaatatgcagaaa

SEQ ID NO: 358395 - DNA, 75 bp, Homo sapiens
tctgaagcgagcgtcttcgatggagaattctcaccaaatgttcccaaatccttatcctcagctgtgaaggtaaaa

SEQ ID NO: 358396 - DNA, 75 bp, Homo sapiens
ggactgcttggatactggaatgattgataacctctatatttgtcaggatacgaatcaggttctcttcaagtgctg

SEQ ID NO: 358397 - DNA, 74 bp, Homo sapiens
caagatggtgcagaagaagaacgcgtgtcaaatcaacagtgccttgacatctttccacactgctttggaacttg

SEQ ID NO: 358398 - DNA, 90 bp, Homo sapiens
cttggacaacatgtcccaacattacatcccaacccgggaagaaggtaaggccttactccggcaaatcctacagcttcggaaccaaggcga

SEQ ID NO: 358399 - DNA, 73 bp, Homo sapiens
ccctttgaattaattatggctcctctctacatatgacatcgtgatcactacctatagcctcgtggccaaggag

SEQ ID NO: 358400 - DNA, 75 bp, Homo sapiens
gaacagcagaaagtccttcatgaaaccattaaagttttagaagatcgttgcaggaagaggcagaggaagaggaag

SEQ ID NO: 358401 - DNA, 100 bp, Homo sapiens
aaccttatgcatgtaaggaatgtgggaaggcttttggagtatgtagagaacttgctcgtcatcagagaattcatactgaaatgcactcggtgatggaaag

SEQ ID NO: 358402 - DNA, 75 bp, Homo sapiens
cctgaacactgaccagctctcagttgcacttctcaaaggcaacttcagagtggacgttggattacccccctttct

SEQ ID NO: 358403 - DNA, 100 bp, Homo sapiens
cttcaccagagacctggccagcatcgccagactccgcatcgcaaaggggggcgtcaatgacaatttccaggggatgccattgattatttagttaaaaata

SEQ ID NO: 358404 - DNA, 75 bp, Homo sapiens
gagaagagcgaccagctcactaagaacatgggcagaggagagagaccagtgaaggttgggaggaggcggccaaaa

SEQ ID NO: 358405 - DNA, 100 bp, Homo sapiens
cggtccgtgcgagaggaccaacggagcgctgaggcgggcgttttcttggatgaattgcttgctttggagggacattagtcatgagtgccgagtgtgcggg

SEQ ID NO: 358406 - DNA, 98 bp, Homo sapiens
aacctaatagaagaataaggagggagtctacgtgggccggatgtatcccccgcgttctcccaagtctgctgcccctgccccaatctcagcttcctgtc

SEQ ID NO: 358407 - DNA, 75 bp, Homo sapiens
ccaacatggaccgggagatgatcctggcggattttcaggtgacaggcaccagctctgaagtctttccagcccagc

SEQ ID NO: 358408 - DNA, 83 bp, Homo sapiens
cacaaataaccctatcgcagccgggagttagtagggctgtttgggaagaaatggtgaatgcctgctggtgtggtcttcttgct

SEQ ID NO: 358409 - DNA, 82 bp, Homo sapiens
tccaagctgcgtgattatgcagaactgggctaggattgagtcagaagtaatgacagtggaattcagcagagctctgatgatg

SEQ ID NO: 358410 - DNA, 90 bp, Homo sapiens
cgagtcaacagggaagcagaggagaaccgggagccattcagaaaagaacatctgctcaaattaatgaccatgggggatatgaagacccca

SEQ ID NO: 358411 - DNA, 100 bp, Homo sapiens
ggacagcgacgtgggtgaggaacctgactctgagaacaccccccagaaggctgacaaggatgccggcctggcccaggccaagtcctgtatctgccatgtc

SEQ ID NO: 358412 - DNA, 80 bp, Homo sapiens
catgtgagtgaccatgcagcaaaagaaggagggtcctctcagtgattaagatgattccaatgtacagccaatgatgagca

SEQ ID NO: 358413 - DNA, 100 bp, Homo sapiens
tttgcagatgaccggcatacttgcatctggccggatcgtggcacccagaggctgccaggactttggctgggacccctgctttcagcctgatggatatgag

SEQ ID NO: 358414 - DNA, 82 bp, Homo sapiens
cctgaaacagaaattctggaacacctatatgggacccagacatggagctgcgggaagaagcctggtctccggggccgctgga

SEQ ID NO: 358415 - DNA, 82 bp, Homo sapiens
tttttaatgtgcaactagcctgtgagattcagtatcctaagaaatccggtaaccaataagaagcattacagattgtatgtga

SEQ ID NO: 358416 - DNA, 100 bp, Homo sapiens
tggagatgaccgtgggcagccccccgcagacgggttccccactgaaggacttggtccagctgtctggcagggaggagagacagaagctctggcccgcctg

SEQ ID NO: 358417 - DNA, 100 bp, Homo sapiens
ggagccggggctgggagttctcctgagggaagaggagtggagtaggggggacgcggcggcggcgttgacaatgggatgtgagctcatttcaactcctgat

SEQ ID NO: 358418 - DNA, 100 bp, Homo sapiens
ggctggactcggattcgttgcctgagatgaggacggggacttggttgccttttccagtgacgaggaattgacaatggccatgtcctacgtgaaggatgac

SEQ ID NO: 358419 - DNA, 88 bp, Homo sapiens
ccgtgtgcgaggagtgcctcaaagtctacctgagcgcccaggttttgactggatcatctcgtcaaagttattcacctggctatcagga

SEQ ID NO: 358420 - DNA, 100 bp, Homo sapiens
tgtcctacaccaggcagcccccaaatcccggcccagatgggcttaggtcacgagcaaggatttggagccccttgtttaaaatgcaaagaaaaatgtgaag

SEQ ID NO: 358421 - DNA, 83 bp, Homo sapiens
attcgcgctgctgggcacccacggagcctccggggctggagatacaactcgtcaacgaatcaaattcagtgatgacagagtat

SEQ ID NO: 358422 - DNA, 83 bp, Homo sapiens
cccacatctggaatctggaatgaaatcttccaagtccaaggatgtgtttcccaaaccactccttatgatccagtgaatattca

SEQ ID NO: 358423 - DNA, 75 bp, Homo sapiens
cgcgctactctctctttctggcctggaggctatccagccgtttgcctcagcatggagggcggggccgcggcagcc

SEQ ID NO: 358424 - DNA, 75 bp, Homo sapiens
ccggttccttggtgtcatccagccttagcaaaccagaggggaaaaataaagtgaggcgagtgaagaccatttatg

SEQ ID NO: 358425 - DNA, 50 bp, Homo sapiens
cgctcagcacttgccgaggaattaggctgatcagctgaccgaagaacaga

SEQ ID NO: 358426 - DNA, 75 bp, Homo sapiens
gaacaaagaggtgaaggagtatttcttcccatgcacaagatgattaatacagatcttagcagaatcttgaaaagc

SEQ ID NO: 358427 - DNA, 98 bp, Homo sapiens
accatgagtggttccatgatgggaagtgacatgctgaatagcattggcaattactacaagccgtggttctttaagcatgtggagaactatctgaagac

SEQ ID NO: 358428 - DNA, 82 bp, Homo sapiens
agaggggccactgctgggccctgaggctgcaccaagtggcgaaggagccggctccaagaacaagattgtggaccagtgtgag

SEQ ID NO: 358429 - DNA, 51 bp, Homo sapiens
cattcattctcgatgtcgtgctaaatcatttgtgtgtgttggtggaagccc

SEQ ID NO: 358430 - DNA, 113 bp, Homo sapiens
gttttgaaatcgacacacaaagaatagagttgagcctgtgggacacttcggggggatatgagactttctactcggaatatcctgagtgttgcgtggatgtaaaacccatttca

SEQ ID NO: 358431 - DNA, 100 bp, Homo sapiens
ttctctctacagaagtctgttgcagagttcacagaggagaattccagacctggagtggaagatcatttatgttggctcggctgagagtgaggaatttgat

SEQ ID NO: 358432 - DNA, 100 bp, Homo sapiens
gaggccaacaacccattccaggctgtgcaggaaggcatcaagcatgatggaaccatgtgtgatacctgccgccagcaaccaatcattggcattcgatgga

SEQ ID NO: 358433 - DNA, 100 bp, Homo sapiens
acaccaacttgcgcaaaaacaacagacagccctatgctgtcagtgaattagcaggatcaaagttctgatcgtaccagtctttcttcagtgggagcccagg

SEQ ID NO: 358434 - DNA, 100 bp, Homo sapiens
cccatccagatctatgagaagatcgtctctgggaagcttagcagtgtctgcaaaaacgaatcttttcctacaacctgttaactgactggactgttggtaa

SEQ ID NO: 358435 - DNA, 50 bp, Homo sapiens
gccgggactccctggaaacctagaaatgacatccaacacgctgacatggg

SEQ ID NO: 358436 - DNA, 137 bp, Homo sapiens
cggtgcaacatcatgggccccaacggctaccccatccactcggccatgaagttctctcagaagggctggtgaacatcggctcctcctacaactacggcagcgaggaccaggcagagttcctgtgtgtggtgtccaag

SEQ ID NO: 358437 - DNA, 100 bp, Homo sapiens
cagaacggctacgatgagtcctgtgacctgtggagcttgggcgtcattttgatatgggataaaaccagcctggaatgtttgaaagtgttaacaggacaca

SEQ ID NO: 358438 - DNA, 100 bp, Homo sapiens
tgcagagtccctccaaggctggaatctggtgcaggtggacatggaagcgttcctcacactgactgacggtgacttgaaggagctgggaattaagacagat

SEQ ID NO: 358439 - DNA, 75 bp, Homo sapiens
ccactattccaaccaagaagagccagacccctgtaaaagagcccaacagtgaaaatgtagatatcagcagtggag

SEQ ID NO: 358440 - DNA, 100 bp, Homo sapiens
tgaagatcggccactacattctgggtgacacgctgggggtcggcaccttcggcaaagtgaagggtgcaaagttccccatcaagtggacggcccccgaggc

SEQ ID NO: 358441 - DNA, 95 bp, Homo sapiens
gacctcagcactcaagcagcaggagcagcccgcggcgaccaagatcaggaacctgccctgggagctgagcacataacgacttacacgttcaatac

SEQ ID NO: 358442 - DNA, 75 bp, Homo sapiens
tgtcacctttgctgcaaaaaattacgggtaaatcaacagactgggaagatgatggttggggagcatgggaagaaa

SEQ ID NO: 358443 - DNA, 100 bp, Homo sapiens
ccgggttccggacactacgctggtgaagcggcctgtggagccccaggctggggccgagcctagcacacctttagaagaagccacactctctgaattaaaa

SEQ ID NO: 358444 - DNA, 75 bp, Homo sapiens
attttgtatcccaccagcaatgaatgagcgttccagcttctccctgcctgggaggggtggctgtatccctgtccc

SEQ ID NO: 358445 - DNA, 98 bp, Homo sapiens
ttttctccatttggtacaatcactagtgcaaagcttttggaaaagaagaagagagtccaactcaaagatatgggagaggatttggagtgcctctgtca

SEQ ID NO: 358446 - DNA, 82 bp, Homo sapiens
tccttcaaaaatgccagaaatcaacgccaagggatggagctagccaagggctgggctcctgtcattgggacttccggaaccg

SEQ ID NO: 358447 - DNA, 75 bp, Homo sapiens
ctgaagatagtgcctttcagccctaccagagcaggttgttgccctggatgcccaaaatattgtagctgtttcatg

SEQ ID NO: 358448 - DNA, 113 bp, Homo sapiens
cctgaagccatctctagcaagtggtcaggacgctgattgttctgcgcaggttggaggaatctcaccagtgacacgcgtttgtgaaaagctgtgaatattcagtgccacagggt

SEQ ID NO: 358449 - DNA, 75 bp, Homo sapiens
atttgttgatcccggaaaccacaatagcgggattgatctccttaggacctggtgaaaatcctatttataagagtg

SEQ ID NO: 358450 - DNA, 76 bp, Homo sapiens
ccacaaaccgctgccagaaaacatctgtgggtcttgcagatatgatgtctcctggtgaatccaaactgcccctgcc

SEQ ID NO: 358451 - DNA, 82 bp, Homo sapiens
atcgcgggcatcagcgggaacaaggtgttttctgttgctggatttgtgcgactcggtgaaggatgatgcccggagggtgatc

SEQ ID NO: 358452 - DNA, 74 bp, Homo sapiens
ctgcactgtctctccgacgcaagactgtcccggcccggatccagaatataagaagtttttagaaacctactgtg

SEQ ID NO: 358453 - DNA, 50 bp, Homo sapiens
tctcaagcactgtgatcttcaaatcttaagagttggacagtggaggacct

SEQ ID NO: 358454 - DNA, 83 bp, Homo sapiens
ctgctgccggaaggggtcccgaagccccctgcaggaactctacaacccaatccagccacgccgcaatgaagagcttcttacag

SEQ ID NO: 358455 - DNA, 74 bp, Homo sapiens
tctttacgtattgaaactctatgacaagattgacccagagaaggtgtttaatgaacgctgccgaattcacttca

SEQ ID NO: 358456 - DNA, 74 bp, Homo sapiens
tcgttattggagccaggcctacaccccagaaggcagacggtaacaagtactccttgctggattgaacttcatct

SEQ ID NO: 358457 - DNA, 90 bp, Homo sapiens
gacaaaatggcgaagatcgccaagactcacgaaggtgtctgatgatttgtgagcctcaagtgactactctgtggaatcatctgtccttgc

SEQ ID NO: 358458 - DNA, 75 bp, Homo sapiens
cgggacctgggctgggaacccgcggtggagcgggacacgaacgtggtgttggctacgtttgtggttttaagaaag

SEQ ID NO: 358459 - DNA, 100 bp, Homo sapiens
ttccgatcgacccggtaccaagaaggggagtgcccgcggcagcaacattccaacgcatcccagtccctgtgtgacatcatccgcctgagccgggagcaga

SEQ ID NO: 358460 - DNA, 100 bp, Homo sapiens
ctttgccagttatgatattctcaggtgggcaatgggcactccaatgaggcagccttgatcctccacagaaaagggtttgattgtcggttctctagcaaag

SEQ ID NO: 358461 - DNA, 100 bp, Homo sapiens
acgcgcggcggcaccgggaggccgggccgagcgaggcggggtttcaccatgttgcccagactggtcttgaactcctgagcttaagcaatccacctgcctc

SEQ ID NO: 358462 - DNA, 97 bp, Homo sapiens
aaaagagaaacctgggtgaactttcacggacaacctcagaggacaacgaagtgttcggactctggactgtcttcacactaggtggtgtgggcagcaa

SEQ ID NO: 358463 - DNA, 75 bp, Homo sapiens
tggattttttccagtctgatccttttgttggcagttgtttacattcagagctctatcaataagaggaatacatat

SEQ ID NO: 358464 - DNA, 98 bp, Homo sapiens
agtgttcagcaggtcctgttggagatgatagatctctatgaagcaccagaattatcagtgaagaatatattaaatggctcacgggctactgtaaagca

SEQ ID NO: 358465 - DNA, 99 bp, Homo sapiens
caggagaaaagacagcaatggaccgagtgttccttgcctgtatctccccttggttcaatagctaccagatttttggaagaggaggaactgaggtctcat

SEQ ID NO: 358466 - DNA, 75 bp, Homo sapiens
caaaaaaggaatggatttcttccatggagtctcgctctcagtcaaaatctccaacgggaactcctgctcgtgtaa

SEQ ID NO: 358467 - DNA, 100 bp, Homo sapiens
gcaagactatgaatctctgttccaaatgctttgctgaaccaggagaggaagcacaggacgtatgtctatgtgctcattgtcactgaagtgctggaagact

SEQ ID NO: 358468 - DNA, 90 bp, Homo sapiens
gtactgcaactgcattctatagattgacaagaaagggagcatttcctgaagacgtagtcatgcagcacgtcagcagctcccagagcagcc

SEQ ID NO: 358469 - DNA, 100 bp, Homo sapiens
ttgggggtcgcccttctgaggaggctgcggctaacagggcccagcccacccggagagagctgccctgctgttcgtgtccagtgtctgcatcggcctggcc

SEQ ID NO: 358470 - DNA, 100 bp, Homo sapiens
gtccagcctgcatctgcccctcggccttccgacgtgggcggtgggccccagccccacagaccagcccagcattcagctcttgcaatctcaggatgtgaag

SEQ ID NO: 358471 - DNA, 90 bp, Homo sapiens
cccaagttattcgtcagtgaggcggaaattgtggtgtacttgtttgtacaatggtagatggagtgatgattcttcctgtgcttatcatga

SEQ ID NO: 358472 - DNA, 75 bp, Homo sapiens
agaaaggagattgcctcggattccgacagcaggttgggggccgtcccgctcctaaggcaggaagatggtggccgc

SEQ ID NO: 358473 - DNA, 100 bp, Homo sapiens
aacaaactacccattttcttttttggaactcatgagacccatgtgaagatgtgcttgcttcccctttgccttctgccatgattctaagtttcctgaggcc

SEQ ID NO: 358474 - DNA, 82 bp, Homo sapiens
atcgaccctccaagatacaagagaacgcattacccatgatgcttgctgaaccgcctcagctgttgaagaacgctctgcagag

SEQ ID NO: 358475 - DNA, 90 bp, Homo sapiens
ctcagaagcttaccagtggctaaatagatcccagttttacttcctaacaaaatcacagcgttgtccattaggaagcacgatcttgaaagt

SEQ ID NO: 358476 - DNA, 100 bp, Homo sapiens
agtgatcagggtcccaagctggaccacctcctcagaacccttgatgacacggctgttcctccttttggaacctcaggcccagagtccccaggagggagca

SEQ ID NO: 358477 - DNA, 90 bp, Homo sapiens
ttctcccaagaggttctcgcttttatttgaaggaggtgattcatgatgttgctatcaaaagttgagaaattgtcagaagaaatcatggag

SEQ ID NO: 358478 - DNA, 100 bp, Homo sapiens
cggggcgtgaagacacaggctccggagagcatccctacccaacagaggatgagaaaaaacagattgctgctcagacaaatttgacactactccaagtcaa

SEQ ID NO: 358479 - DNA, 100 bp, Homo sapiens
caaaacaaataagttatgctatgaggatgacaaactctggagtaattggagccaagaaatgagtatagaacacacgaggagatgccacagagcatcgtgg

SEQ ID NO: 358480 - DNA, 100 bp, Homo sapiens
ccggaaggcttcaaaggctgtcgcaaggaggaaggagaaaagttttttgacattgatagtggaagaaatgctcctttgcatgctcctccttcagaacatt

SEQ ID NO: 358481 - DNA, 50 bp, Homo sapiens
ctccactccccagctgtgaaaggcttcaacattgctttatggcatgtgtg

SEQ ID NO: 358482 - DNA, 90 bp, Homo sapiens
gcaaacgaattgttccaaagagaattttctgttcttaactccagactgcaagtccctttggaatggtctgctggagccagttctgcttct

SEQ ID NO: 358483 - DNA, 75 bp, Homo sapiens
ctacaggccaaggagacccccctgacaacatgaagaaaagttgccagacggccagcattgccactgccagtgcat

SEQ ID NO: 358484 - DNA, 101 bp, Homo sapiens
gtgaagagacaggaggcagcagacggacatccaggttggtcaaagaaaaagtgatgtatgaaaaagaggcaaaacaacaagaagaaaagattgaaaaaatg

SEQ ID NO: 358485 - DNA, 76 bp, Homo sapiens
actggattatactgtactgcccatgaaaaaggatgttgaccggacaggtgatctgtgaaaatggttcgctattcac

SEQ ID NO: 358486 - DNA, 83 bp, Homo sapiens
ctgagatgggcaccgcggatctggggccgtcctcagaattaaacaaccaccatgtcgagcaaaaaggcaaagaccaagaccac

SEQ ID NO: 358487 - DNA, 104 bp, Homo sapiens
aatgatgttggaaatgcacaagctggagcccaactgataatccttgaacatgtgcatattgggtacttccagaagtatgaattcagtgatgcaaaggacaggcg

SEQ ID NO: 358488 - DNA, 74 bp, Homo sapiens
tgagggcgaaggtcgtattgaatggtgttgtaggaatttggataaagagagggcagtgctactacaacgccgga

SEQ ID NO: 358489 - DNA, 90 bp, Homo sapiens
tggagtgagtttgaagaagttcaggtgtgaagatgccttaagaaaaaataagagcttaattgggccggatcaaaaggagtatcaaaggga

SEQ ID NO: 358490 - DNA, 100 bp, Homo sapiens
atactgtggaggcttatgatccccagacaaatgagtggacccaggctcgaaaggacacagaagcgggagaaacgttttcatctgtccaagccaatttaag

SEQ ID NO: 358491 - DNA, 74 bp, Homo sapiens
actcggtgaagtcgtttgaagagcttcggctcacctacgccccagtgaagtccttccttcgagtggataaagaa

SEQ ID NO: 358492 - DNA, 83 bp, Homo sapiens
ggacccagccctgcgtgaggccgcggagcgccagctcaatgaaatggtcagtaggacagaaggtaacattgatgactcgctca

SEQ ID NO: 358493 - DNA, 90 bp, Homo sapiens
acctgctttgagaagagcaatgacattgggggcctgtggaaattttcattgggatgaatgggttccggagagcagagtactcaaatacgt

SEQ ID NO: 358494 - DNA, 83 bp, Homo sapiens
gagagagaggtggacagatctgagagatactgagttctttatagctccaagctctacagattcttcaaatatattgagaatag

SEQ ID NO: 358495 - DNA, 75 bp, Homo sapiens
agggctacgcgggcaaccactgtgagacgatttgccctggggccccagcctggcccgggtcaccctggcatgagg

SEQ ID NO: 358496 - DNA, 50 bp, Homo sapiens
gcgacaagaccgtgtacttcgggatcttgcctcggagctggtcccactac

SEQ ID NO: 358497 - DNA, 100 bp, Homo sapiens
aaaggatcaacgtaacgtgagcatgaggttttccaatcaggtgccactgattaatgaacttgaatcagcaatacatcagctgtacaaacagcgagcttcc

SEQ ID NO: 358498 - DNA, 90 bp, Homo sapiens
atgggaaggtggatcccgccgggaggtactttgctggagtctcgctctgtcgccagactggagtgcagtggcacaatctcggctcactgc

SEQ ID NO: 358499 - DNA, 75 bp, Homo sapiens
cgtcacagagatgctggcaggaggggtggacacggaggatctccttatatagcagccaaaatcaatgaagctaaa

SEQ ID NO: 358500 - DNA, 101 bp, Homo sapiens
aagttcctcaagatggagactttgactttcaagccagggctgagcaggaagaagaattcattagtaacactttattcaagaaaattcaggctttgcagaag

SEQ ID NO: 358501 - DNA, 100 bp, Homo sapiens
cacagcaagcaccacgcggcctacgtgaacaacctgaacgtcaccgaggagaagtaccaggaggcgttggccaaggatcctgggtgtttggctgacctac

SEQ ID NO: 358502 - DNA, 83 bp, Homo sapiens
gttcggggcccatctatcctggacacggcatgatgttcgtccgcaacgattgcaaggccctgggaggagcggggacactgagg

SEQ ID NO: 358503 - DNA, 75 bp, Homo sapiens
attggaacaagcgttcagaaagagctgttacaatttgtaaaagcaaatgatgatgtagctcaagagattgctgaa

SEQ ID NO: 358504 - DNA, 82 bp, Homo sapiens
ctccccctactcgttctaattccacgcgctccaaaatatccgccatggagaaatcttggttctcctgaaaagaaagctgaac

SEQ ID NO: 358505 - DNA, 50 bp, Homo sapiens
cctggtgtcacctatcagtaaaagacctgaaagatgtctgaaaattccag

SEQ ID NO: 358506 - DNA, 100 bp, Homo sapiens
cacctatgtgcagtctttgaaacggaagatcaagcagtttgagaagcaagttgaggtggttgtgtcaaaccgattggtgacatctccatgctgtattgtc

SEQ ID NO: 358507 - DNA, 96 bp, Homo sapiens
aggacaccgaggagaatatcttgctgggagtggacttttccagtaaggaaaggacggtgcagcctggtgagaccatccaatcccaaataaaatgca

SEQ ID NO: 358508 - DNA, 74 bp, Homo sapiens
cggcgagacgcgcgtgtgtgagcgcgccggaccaagcgggcccagaagcgggaccaagaatcgccttcagccct

SEQ ID NO: 358509 - DNA, 98 bp, Homo sapiens
caaaatacaggagcatttgaaaaggatcatccaattatgatgggttttgaaccccttgtgaaccagaggctacttccacctaccttccctcgatatgc

SEQ ID NO: 358510 - DNA, 100 bp, Homo sapiens
ggtattggagctgaaggcggcggcagagaacttgccggtgccagctgagagaatagtgacagtggtacaggaaagaaagaaaaagaaaagaaaaacagaa

SEQ ID NO: 358511 - DNA, 90 bp, Homo sapiens
gcacaataaaccgacgtttagccagagccagccccagtgcctgctgagccgtttgacaacactacctacaagaacctgcagcatcatgac

SEQ ID NO: 358512 - DNA, 82 bp, Homo sapiens
aatggatggtcgtggaagcccagttcacattcatccttcctcagcaaaagcttatagcttcattgcaccatgtgtggcattt

SEQ ID NO: 358513 - DNA, 96 bp, Homo sapiens
cccaggcagaccttgcagtcaaaatttggagtccaggaatgagactaagcatttatctgtaggaaaagatattattcaaaacactggttctcagtg

SEQ ID NO: 358514 - DNA, 98 bp, Homo sapiens
tttgtataacaaaggatttatttatctggatgtaccaatatctgatgacagttgtatagcagatggaaagaactccagtggatccaagcgttataatc

SEQ ID NO: 358515 - DNA, 100 bp, Homo sapiens
gacattcctgaagtcgactggattgttcagtatgaccctccggatgaccctaagccagtgaaactgaaattgcattcttctgtgaagaagattataagaa

SEQ ID NO: 358516 - DNA, 83 bp, Homo sapiens
ggggacggcgaggccctcatgtaccacacgatcatggaagggaagtggttgctgtgtatgttactggtgcttggaactgctat

SEQ ID NO: 358517 - DNA, 82 bp, Homo sapiens
tgaggatcgaggaacgttgtctggagctctttgttcaatgcctagccacctattcctacagacacggcagtggaaaggaaaa

SEQ ID NO: 358518 - DNA, 50 bp, Homo sapiens
gtctgccacgttttcgctctgccaggtgaaagaaaatggcccgaaccaag

SEQ ID NO: 358519 - DNA, 100 bp, Homo sapiens
aatcttggagaagggtctaaagaattcagatcaggaaggaggtggaaagaaaaagaagaaaaagaaggacaagaaacacaaaaaggataagaagcacaag

SEQ ID NO: 358520 - DNA, 76 bp, Homo sapiens
gtgccaagttagatgccgattacccacttcgagtcctttattgtggagcctacatctgctccaaccagataatggg

SEQ ID NO: 358521 - DNA, 101 bp, Homo sapiens
ggcggccaccatgaagaaggcgatttatcagcgatgctggttagtattcaagaaagcttcaagcaaaggtccaaaaagactggagaaattttctgatgaac

SEQ ID NO: 358522 - DNA, 96 bp, Homo sapiens
gcgcttgagttggtataaactcctgaagccctgtatgatgagattcgtcagtttcgcaaggcctgtggggaggctcatcttaaaactatattagcg

SEQ ID NO: 358523 - DNA, 75 bp, Homo sapiens
ccaactgtgtgataaacttttgtggttaccctaacagctaatgataagacaagtgtttccttctcctccctcccg

SEQ ID NO: 358524 - DNA, 85 bp, Homo sapiens
ctctcgcctcgggtctcgggggccgctctgggatcccggccaccagcaattgtccggacatggatttgattgacatactttggag

SEQ ID NO: 358525 - DNA, 116 bp, Homo sapiens
gttcaaacagcactgccaaatagcagaagaataccatgaggtcaaaaaggaaatcaccctgcttgagcaaaggaagtatgttgagtctaaaaaggacagagtcacagtagtcttca

SEQ ID NO: 358526 - DNA, 96 bp, Homo sapiens
aaggaagatagttcgagagaagaaaattttagaagttcatattgacaaagcacaacattctgaaattttttggttattgtaatgatgttgatcggg

SEQ ID NO: 358527 - DNA, 90 bp, Homo sapiens
gtgacagagacaacaccgagtatgagaagcacggatgggcagaagcctttgcaggtatcagaagttcacatatcaaatatatctgcccgc

SEQ ID NO: 358528 - DNA, 83 bp, Homo sapiens
gagaggagatgcacacggcactcgagtgtgagaacccagtgacttgattgtaaaaatttacagagcggaatcatatgctggtc

SEQ ID NO: 358529 - DNA, 89 bp, Homo sapiens
cgggagtgtcctggacccagctgagcgggcggtcattcgcatcgcaggtactccaaagattcaggtttactcacgtcatccagcagaga

SEQ ID NO: 358530 - DNA, 100 bp, Homo sapiens
tccaccgcgcatgcgcacacgccccagacccaggctcagtgtgtttcctgtaacaaatcgttcaagaaactctggtcccttcatgaacatatcaagatcg

SEQ ID NO: 358531 - DNA, 75 bp, Homo sapiens
accatatagtagtattactgtggaagtacctacaacttcaggtgcagctgacgagatcatgttgccttgtgaatt

SEQ ID NO: 358532 - DNA, 101 bp, Homo sapiens
accagacaaccttcttttggacagcaagatcaatgagctgagcaatgttcctgttcctgtcatgctaatgccagatgacttcaaagcctacagcaagatca

SEQ ID NO: 358533 - DNA, 90 bp, Homo sapiens
ggcacggcctcgtgcccttcgccttcgtgcgcttcgaggacccccggttaatttggagtggcccctggagtcagtttcctacaccatccg

SEQ ID NO: 358534 - DNA, 82 bp, Homo sapiens
ggttcgcgtctctctgctgcggcgcggggaccgctgtgctctcgacgtcaagccttctaatgtactcatcaatgctctcggt

SEQ ID NO: 358535 - DNA, 75 bp, Homo sapiens
gctactgcgattccaaggagggcaaagcgtcctgcggctgcatagagcctggacctgggcactggggtgagctga

SEQ ID NO: 358536 - DNA, 100 bp, Homo sapiens
gctggagtaccgccacctccccgctgggtggggagaggcccttcagggacagagcagaatgggctgatatagatccggtgccgcagaatgatggccccaa

SEQ ID NO: 358537 - DNA, 100 bp, Homo sapiens
cgccgctgggcctgcaggtctctgtcgagcagcggacgccggtctctgttccgcaggatgggcaactccaacaacattgccaccgtggacatctccgcag

SEQ ID NO: 358538 - DNA, 98 bp, Homo sapiens
gctgcgtgggggtgaggggatcagggcactccacagaaggatgttattatcaagtcagatgcaccggacactttgttattggagaaacatgcagatta

SEQ ID NO: 358539 - DNA, 74 bp, Homo sapiens
ttccatgtgtcctcagtcagacaccattactaaagaatttacatagtacatgacgaagttaaggataaagcttt

SEQ ID NO: 358540 - DNA, 88 bp, Homo sapiens
aaagcaagaaagaaacaaaagttcacctctgcgaagtgtggcaaaggagcagagaactttgacaagttcttcacacgaggacagcccg

SEQ ID NO: 358541 - DNA, 99 bp, Homo sapiens
tttccaggtgatgtcaagagtttttctaatatgggcagtaacacatagcgtcaaagagcttggattccttagcaccaccacagctcagccagaacagaa

SEQ ID NO: 358542 - DNA, 100 bp, Homo sapiens
gagaaaccgcagcactacacgaggggcaacccccttcatttatctcgtgagcggtatcggaagctccatttggtctggcaacaacactgcattatagaag

SEQ ID NO: 358543 - DNA, 50 bp, Homo sapiens
ggaacgtgtccacgcgccaggggcgtgatggtgggcatgggtcagaagga

SEQ ID NO: 358544 - DNA, 100 bp, Homo sapiens
ctcgggaagtctttgacttacctgttgtaaagagtttacagatgcttcctcagcaacggaaagccatagctaagttcaaggagccagcccacgcattagc

SEQ ID NO: 358545 - DNA, 100 bp, Homo sapiens
cctcgggcccgcaggtcgcagggcggcctgcagctgggccgcggccgaggaggcagcgcgacctccgcacgatcgctactgaagcaatagaaaacttccg

SEQ ID NO: 358546 - DNA, 74 bp, Homo sapiens
ccttactaaccacgaccatcaaatccgtgtcggagtccttacagctgtccccaatctcttcatgctggaaacag

SEQ ID NO: 358547 - DNA, 83 bp, Homo sapiens
cacataacggggttcgggtgtctcgtgtgtgaacatcacaggtgcagcagtaccgcgtcgccatgactgccaaggactgctcc

SEQ ID NO: 358548 - DNA, 90 bp, Homo sapiens
aaagagtcttgttatttcttctttgagaaaaacctgaaagatgtctcaggttttggccaaattgggcgagggcacaaaataaccacttac

SEQ ID NO: 358549 - DNA, 74 bp, Homo sapiens
ctcagacagtgctggggaagaggactcggctgacctcaagagagctcagaaagtctctgctggatgaaccgaat

SEQ ID NO: 358550 - DNA, 50 bp, Homo sapiens
gtcgtgttctgatcactactgacttgttgacatgagcaccagcctccagg

SEQ ID NO: 358551 - DNA, 83 bp, Homo sapiens
aatccgacactactgattctagtcaagatgtgtatatctcatgattgatatggagaaactagtcatgggccaaaggtcaagat

SEQ ID NO: 358552 - DNA, 100 bp, Homo sapiens
gaatccctaaggcggggaaccgcagcgcagtgacagtgcagaaccccggcgcggcccttggtccaccttctccaatccctgcctgctgggagaggacgat

SEQ ID NO: 358553 - DNA, 75 bp, Homo sapiens
catcctgccagaaaccgattgctgggaaggttaaacactttaagatgagaaaaattgatctctgtctgagctctg

SEQ ID NO: 358554 - DNA, 51 bp, Homo sapiens
caaagtttttgaacacaacatgtgcccagttgtgcatttccagtttgccat

SEQ ID NO: 358555 - DNA, 115 bp, Homo sapiens
gcagtgttcgtgggatggggcagcgggctgcagctggcggccggaatccgcgcgcagcccggatatgccacacttctgcctgctgttggcaaccctcctggactaggctgctctt

SEQ ID NO: 358556 - DNA, 101 bp, Homo sapiens
ataaggccattgctcagggcatccaggagctgctgtggtacttctggcggcgccacgtgttcatctggatctcgttcatagacagctactttgaaatcctc

SEQ ID NO: 358557 - DNA, 85 bp, Homo sapiens
gagctgatagagaccctagtaacatgaagtaaaatgcccattcccatcaagaccagacaatggatttgtgaactatcctgcaaaa

SEQ ID NO: 358558 - DNA, 101 bp, Homo sapiens
caatgggcacccgcgacgacgagtacgactacctctttaaagcttccttcaaaatgtctactgttcacgaaatcctgtgcaagctcagcttggagggtgat

SEQ ID NO: 358559 - DNA, 75 bp, Homo sapiens
ctggggcggggaccttgccttgcccgggggatcaaaggaagcagttccaggtactggtagagaacaagttttatg

SEQ ID NO: 358560 - DNA, 97 bp, Homo sapiens
gtcagactccagcagccaagatggtgaagcagatcgagagcaaggtactccaaagattcaggtttactcacgtcatccagcagagaatggaaagtca

SEQ ID NO: 358561 - DNA, 108 bp, Homo sapiens
gcagatgttgtcaaggtggcctaccaggaggccaggggtgtcgccatggtatttaaaccatgtcagagctgcctcaccacaggaccttgctggaggctatacttcttc

SEQ ID NO: 358562 - DNA, 97 bp, Homo sapiens
tggagcagtggaagaggcagttctccatctgccgtgatgagaatgaccggctccgcaacaaggactgatcctttgaaatactccagccatgactaaa

SEQ ID NO: 358563 - DNA, 74 bp, Homo sapiens
ttaatacagcaagaaagaccatcaagtttaccaataagccaatggacacgtcagtgttatctgaagaaggagga

SEQ ID NO: 358564 - DNA, 74 bp, Homo sapiens
gttgaatgctgtcttccaagaacagaagaaaatgatccaggcccaggttggatggcaagcatgtggtgtttggc

SEQ ID NO: 358565 - DNA, 107 bp, Homo sapiens
ccccggaccgtgggctccatgccagtgggcaaagcacaggtaactgtgacatttgatgatgtggccttatatttttcggaacaagagtgggagatcctggagaagtg

SEQ ID NO: 358566 - DNA, 82 bp, Homo sapiens
ggcgatgtgccaccgaggctgaggatgatggtagattgccagatgaggacggggacttggttgccttttccagtgacgagga

SEQ ID NO: 358567 - DNA, 82 bp, Homo sapiens
tcaaaccttgcttctaggagataaaaagggcagtcagggcgacagcaagaatgccaagaagaagaacaacaagaaaaccaac

SEQ ID NO: 358568 - DNA, 87 bp, Homo sapiens
gaaggtgaagagttgtcccagctcggcccgcgggggagccccgggagccgcacgactacgcgtttgttcacatggagaaggaagcag

SEQ ID NO: 358569 - DNA, 74 bp, Homo sapiens
tgaagagggaagacacgcggaaacagtggctgcaggtttcgtcctccgccagtgtggcagtgatggccaatggg

SEQ ID NO: 358570 - DNA, 74 bp, Homo sapiens
ttttgctatgtatggtgtatattgtatggattatcaatatcctgttgtccagtactgtaagattgatgttaaag

SEQ ID NO: 358571 - DNA, 105 bp, Homo sapiens
gccagcggccgagcgggcggcttcctggcctgggcgctccggtggcggcggagagtgaagacatttccacctggacacctgaccatgtgcctgccctgagcagcg

SEQ ID NO: 358572 - DNA, 100 bp, Homo sapiens
ggaagcagcgtgagcagccggaggatcgcggagtcccaatgaaacgggcagccatggccctccacagcccgcagggaactgtacctggggaatgaattgt

SEQ ID NO: 358573 - DNA, 110 bp, Homo sapiens
ccgggccagggtgacgatcctcaagttcccaagtagaggagaggaagcggcagagggagacaatgcagatcttcgtgaagactctgactggtaagaccatcaccctcgag

SEQ ID NO: 358574 - DNA, 75 bp, Homo sapiens
gcaaagggcagtcggcggagcttcgccaaggctggcgcagtcggctgacaaacgggctcatcataatgcactgga

SEQ ID NO: 358575 - DNA, 100 bp, Homo sapiens
gtttgaatcgctgagcgatatcacagaacacaagattaatcaatgtcaactgacaggcatcaagcatgatggaaccatgtgtgatacctgccgccagcaa

SEQ ID NO: 358576 - DNA, 98 bp, Homo sapiens
tggcagcagcccccggggcaagagcaggagcccggcaccccccgccgacaaggagggtttccgagacactaaagcgttttgcagggaaggtgacaaca

SEQ ID NO: 358577 - DNA, 100 bp, Homo sapiens
cacagccggtcaggaacggtttcggacgatcacaacggcctactacaggggtgcaatggagttaacagagcagtttcataaagttgaatctcaactgaat

SEQ ID NO: 358578 - DNA, 75 bp, Homo sapiens
ggagcggtacatcgcctcggtgcagggctccaccccgtcgcctcgacaggcagatccagttcctaatggtttgcg

SEQ ID NO: 358579 - DNA, 75 bp, Homo sapiens
agacacgtacgtctactacccttgttagaaggaagctttggatcttcggtggaaaaagcttgtggtgaagggggg

SEQ ID NO: 358580 - DNA, 100 bp, Homo sapiens
atgaaaagcgtcaagaagaggaggaagccatgcgtaggggtttcccaaactctcgattgcctcttgcaagcagatgacctgggagcaaatgttatggcag

SEQ ID NO: 358581 - DNA, 100 bp, Homo sapiens
aggttcgaggcctacagaacctagcctatcagctggggctggatgagttagccatccctgccattggggctcagtattccatgtttccagcagctccagc

SEQ ID NO: 358582 - DNA, 99 bp, Homo sapiens
agcctatttacccagaagtagtccatatggtatattactcgaggggtttttaaatattgtcaggaaaaagaaggaagctcaacgatatcggaacgaagt

SEQ ID NO: 358583 - DNA, 97 bp, Homo sapiens
gccgtgccctccgacagccaggcccgcgagaaggcagctggtggaatttttgaagaaaatggaatctcgaggccccctttcgtgcgacacggttctg

SEQ ID NO: 358584 - DNA, 80 bp, Homo sapiens
ttcagtatgcgcttcacattttgaacagagtatctgtcaggcaagagctgctgtgatggtttatgatgatgccaataaga

SEQ ID NO: 358585 - DNA, 90 bp, Homo sapiens
gaagtaaaagtggtggctaatgttcaggttcttcggaatgctggagaagaagtgactctaacagtgtcatttttaaaaagagcacctgct

SEQ ID NO: 358586 - DNA, 107 bp, Homo sapiens
tgctatacatgttatgttccagttgaaaatgtacctattgaacagattccacttgtgaagttcttccctgtggaacagtagagacctagtctgccttctttcacaag

SEQ ID NO: 358587 - DNA, 82 bp, Homo sapiens
ctcatggccctcctgcagcacgtggccctgcagtttgagccaggacccctgacttgcctcctcatgcggcagcagcacgagg

SEQ ID NO: 358588 - DNA, 82 bp, Homo sapiens
gaagagatggcgtttgtgaagagtggctggttgctgcgacagagttgacatcatggacatatgtgagtccatcctggagagg

SEQ ID NO: 358589 - DNA, 74 bp, Homo sapiens
cctgtgacctgtggagacacggccagatctgccctccaatgaaaacacaccatgtcatatcaagcagatcttca

SEQ ID NO: 358590 - DNA, 100 bp, Homo sapiens
gtggagcaggtcctgagcctcgagccgcagcacgagctcaaattccgagaatagcctaacatggcagaccagagacagcgctcactgtctacctctgggg

SEQ ID NO: 358591 - DNA, 51 bp, Homo sapiens
ttgagcctgtgaaggacactgacattcagtgctcaacaggaaccttggatt

SEQ ID NO: 358592 - DNA, 90 bp, Homo sapiens
tgcatatggccagtttggccaaggagatgtacagaatgggccaagctccactgttcagatgcaaagcttagaccatgctcagcctccaag

SEQ ID NO: 358593 - DNA, 98 bp, Homo sapiens
caattacacttcgactctcaaagcaataccaggatagctgttgtttcagagaaaggaagaccaacactgtcatctgaagttggaatcatcatctgtga

SEQ ID NO: 358594 - DNA, 51 bp, Homo sapiens
cggggcggcggactggctcgcggtgcagattgacttgatgcacaacatcac

SEQ ID NO: 358595 - DNA, 90 bp, Homo sapiens
tcaaaacgcccgtgcggaccacggcctgtcagcacgtgtacagaggtgcagttccatggtacaccataaatcttgacttaccaccctaca

SEQ ID NO: 358596 - DNA, 97 bp, Homo sapiens
gtctctgcagttgaatctgacaaagatcgaacagttgtgctcagtgaacagagtatctgtcaggcaagagctgctgtgatggtttatgatgatgcca

SEQ ID NO: 358597 - DNA, 82 bp, Homo sapiens
gccccgccgctgagccgtcgcggagccgcgcagccctcggagcacgacttcccaagtaagaagcggaagaggagccgctgga

SEQ ID NO: 358598 - DNA, 74 bp, Homo sapiens
aattccagccataaagcaagctgtatttctgggaaaagccagcttctgtttgcactggtcttcacaactcgtta

SEQ ID NO: 358599 - DNA, 82 bp, Homo sapiens
ccgaccctggccgccccgagcggagcctggagcgatcattcttcggaacatagctccgcacactgtggtggattccatcatg

SEQ ID NO: 358600 - DNA, 116 bp, Homo sapiens
taaggatggcccagaaggagaactcctacccctggccctacggccgacagacggctcctggcgacctccctgctgcagggggccctcccagcggggccatgcccttctacaaccct

SEQ ID NO: 358601 - DNA, 75 bp, Homo sapiens
cagctgtgggagaaggcccagcgaatgagcgggatcgtgtgcagaagaaaaccttcaccaagtgggtcaacaagc

SEQ ID NO: 358602 - DNA, 90 bp, Homo sapiens
atggcgttccctcacctgcagcagcccagctttctactggttcatctgcgttgctctaaatgggactgtttcattattttgatggctgaa

SEQ ID NO: 358603 - DNA, 100 bp, Homo sapiens
ggcggacggttttcgtacgggcggccgtgcgcgaggcgaggtccttttggtgtgaaccatggggtggaacttcactcagatgtgatagagtatgcaaagc

SEQ ID NO: 358604 - DNA, 88 bp, Homo sapiens
tgcctccaggccgctccccacggtggtgttagcacctcagcccatcccagataagaccatcatcatgtggaaactgaccagggatgag

SEQ ID NO: 358605 - DNA, 75 bp, Homo sapiens
ggacctgcggcgggagaaggatgctgccgagatgctgggcgccaagatcaaggattggttgccgtggtctttact

SEQ ID NO: 358606 - DNA, 98 bp, Homo sapiens
gtggccctgtcagtggctctcttggccctcctgaaatgttatctggaagtattttggatgtgtatagcggtgaacaaggaatttcaccaattaacatg

SEQ ID NO: 358607 - DNA, 75 bp, Homo sapiens
atccttaccaaggaatctgcttttcaagtatgccaccaacagtgaagaggttcacaactacatgatgccacccct

SEQ ID NO: 358608 - DNA, 90 bp, Homo sapiens
actgaacacattgtatctcaggaattaagaatttttcctaaaagaagaacactcctatgccaccttcaccagctgtacaagtgcagggcc

SEQ ID NO: 358609 - DNA, 74 bp, Homo sapiens
cgagagatggtcaggtctggagctcgaccgggccaggttctaagctggtctatgtccatcaccttcttggagaa

SEQ ID NO: 358610 - DNA, 101 bp, Homo sapiens
cttggactttgtggaacagaaatgtgaaggtaatcattaccaaatgaggaggaaaggacgatgtcatcgaggctctgcagcgaggcatccttcttccccat

SEQ ID NO: 358611 - DNA, 90 bp, Homo sapiens
tgcttcgacattagccgaccagaaacactggacagtgttctcaagaagggtgtgggccgaagatatgctcatgtggtgttgaggaaagca

SEQ ID NO: 358612 - DNA, 75 bp, Homo sapiens
caacaagatgatgagggcgcggcagtatccttggggcactgtgcaggatagtgtgtgtaccatatcagtggcgtg

SEQ ID NO: 358613 - DNA, 97 bp, Homo sapiens
tgaccttccctcgggaattccacctctgcgtttttccctccaggtggcagtgctccttttggacttttctctaggtttggcgctaaactcttcttgt

SEQ ID NO: 358614 - DNA, 100 bp, Homo sapiens
atgaagtattaattcttccactgatatctcaaaaggtgatctggacaaaggaacaggtatctcaggtgcaggtggtaccattataacgaattttgagagg

SEQ ID NO: 358615 - DNA, 100 bp, Homo sapiens
gcccagacaaccagaccagaatcgacacaaatccagcctcagcctgcggttgatcgacaagaccaaggtgacatatctgaagtggctgcctgagtcggag

SEQ ID NO: 358616 - DNA, 106 bp, Homo sapiens
cgtcagaaagttacagtcgcccatctgagcgtttgtaagagatggaggcaggagtggtgagaattcctagaggacctgtgcaacaacctcttgaggatcgaatctt

SEQ ID NO: 358617 - DNA, 78 bp, Homo sapiens
gcctcccaagtatctgggattacagcatgcatgagtgaagagaccagtaaccaaaagcagcagcagcagcagcagcag

SEQ ID NO: 358618 - DNA, 100 bp, Homo sapiens
cttgtccaatcctcaatcctggatggatgtggagaaaggcaagattgaagacacaggaggcagtggcggctcctattccatcaaaacccagtttaactct

SEQ ID NO: 358619 - DNA, 75 bp, Homo sapiens
atcgatggcctactggggataacattcatgcagaacatcaggacccagatgatgtggtaccagttggccaaagaa

SEQ ID NO: 358620 - DNA, 98 bp, Homo sapiens
tgaagatgattctaattcaacaaatcataacttggttacgactatggctatgtctgcgtggagttttcactcttggaagatgccatcggatgcatgga

SEQ ID NO: 358621 - DNA, 75 bp, Homo sapiens
ctacccaatggagagccggtgccctgcctgctcttggccaacaagagtgctgtgcccccctcccaggaggaaagg

SEQ ID NO: 358622 - DNA, 99 bp, Homo sapiens
gcggttcagccctttgatgaccgcagcagctgtgcggccccactctgccccagaatacgaggatgaaaccatgacagtttaccagatccccatacacag

SEQ ID NO: 358623 - DNA, 75 bp, Homo sapiens
cgcggagccctcatccctaacggtgaaaggtggtgctgtgggtcggcctgggcgtcctggtggtgagcactgtca

SEQ ID NO: 358624 - DNA, 100 bp, Homo sapiens
gttcaaactctttagaagatggccagaccttggggaccaagaaaagcagcaagttcaaggaggccttctccctctttgacaaggatggagatggcactat

SEQ ID NO: 358625 - DNA, 75 bp, Homo sapiens
cacctgtgcgggatggaacaaaaggtgaaggacttaactaagtacttggatcccagtgggctcggcgtgatcagc

SEQ ID NO: 358626 - DNA, 100 bp, Homo sapiens
cgagcggctgctgagccgggtggccgccctgttccccgcgctgcggcctggcggcttccaggcgcactaccgcggggatcctgctaaagcggagcggcaa

SEQ ID NO: 358627 - DNA, 74 bp, Homo sapiens
cggcagacgcctgaggatgatgccccagctgcagttcaaagatgccttttggagttgttgcctgcaatctctat

SEQ ID NO: 358628 - DNA, 97 bp, Homo sapiens
gagtgtttgcttcggcagaaaacggattactacagcatcccatttcccacacccactactccgctgactgggagggatggtagcctggccagcaacc

SEQ ID NO: 358629 - DNA, 90 bp, Homo sapiens
gtcccttgcccagcagttatccgggaaaaacaacccaacatgagtgaagtttcctgcaagaaacgggacgactatttggaatggccagag

SEQ ID NO: 358630 - DNA, 75 bp, Homo sapiens
tttgtatagagatgtgatgttggagaactacagaaacctggtctccctagttaaacacagtgggaatatcacttt

SEQ ID NO: 358631 - DNA, 82 bp, Homo sapiens
accagcttccagttagtggatatagcacaccatccccagccaaaaatgtcactgaaattcacaaatgcaaaacggattgaag

SEQ ID NO: 358632 - DNA, 98 bp, Homo sapiens
ccaccatttattcagcactcagaatgctccaggcagtgtaatctcattccatcttcattcatgactccagacagatatcgcaaacggcaccagttcag

SEQ ID NO: 358633 - DNA, 100 bp, Homo sapiens
gtcttccacctggagggcatgactacatctgtcatgtaagactttgaccccgacgcaggcttcagtgattgccgcggatcagaagcctgagcactttggc

SEQ ID NO: 358634 - DNA, 75 bp, Homo sapiens
gtctttatatcctgacactatgaatgctacttggatgcctcttaaggagaactgcgacacatcaccaagctgaag

SEQ ID NO: 358635 - DNA, 80 bp, Homo sapiens
cgagcacataacggggttcgggtgtctcgtgtgtgaacatcacagaatcccctactttgaaactagtgctgccaatggga

SEQ ID NO: 358636 - DNA, 101 bp, Homo sapiens
gaagtggatccttcccccgaaagcccggctttcaggatgttcttgagtcgaagaacagcaccatcaaggacctgcagtatgagctggcccaggtctgtaag

SEQ ID NO: 358637 - DNA, 90 bp, Homo sapiens
cgagcgtctgggcgggtggtagtccaatatcagatggaaatgatgcggagccttcgccatgtaaacattgatcatcttcacgtgggctgg

SEQ ID NO: 358638 - DNA, 74 bp, Homo sapiens
ggatatccaggtgctgagccaggagcagcagcctttctgtatcatgatattagctggtttgacatcaagtcatt

SEQ ID NO: 358639 - DNA, 129 bp, Homo sapiens
gaaagaagtcatggaacactatgctgatcaagatgatctggttgtcatgtttactgaatgggaagtttggttggcttagtggattatccagatgatgaagaggaagatgaagaagaagaatcgtccccc

SEQ ID NO: 358640 - DNA, 71 bp, Homo sapiens
tcccggacatgatcctctccgcctctcgaggtacggactaaggctaaaacactgtcttatgaaccattatc

SEQ ID NO: 358641 - DNA, 90 bp, Homo sapiens
cctgagctggcagtacctgaccactctctcccaggtcatcatcagatttgaaatatttaaagtggatacaaaactatttcagcaatgcag

SEQ ID NO: 358642 - DNA, 138 bp, Homo sapiens
cagccgcggccgccctggggacgcagacgccaaggcccctccggccagggccgggagccgggccggcctagccaggagccggtgaaacctgaagaaggcagagatatggcaaacaggattggcgcttttgggtacatg

SEQ ID NO: 358643 - DNA, 98 bp, Homo sapiens
agtactacgcttacctcaccgacacacagtgcaagcgcgtaggaacacaatgctgggtgtttggtggatccaaacttctacagcaaaaacttacttct

SEQ ID NO: 358644 - DNA, 75 bp, Homo sapiens
gtcagtcgaatcacaggcaggagcagaaaggacccaggagcgataacagtaaatcaaataagatatttgtcggtg

SEQ ID NO: 358645 - DNA, 98 bp, Homo sapiens
cagatgatgagatgcgcaggctcaacatacccgtactacaggatgatggctttctcttcctctgggtcacaggcagattggtgtctccgctgtgcctg

SEQ ID NO: 358646 - DNA, 100 bp, Homo sapiens
cttcggaggcctatagcccgcagggacattccagctacatcacacaccttgactggtccccagacaacaagtatataatgtctaactcgggagactatga

SEQ ID NO: 358647 - DNA, 78 bp, Homo sapiens
tcaactatctcgctgacacgcagggttgagtaaggagccaaataccttgcgggccccccgtgtccgcacagccttcac

SEQ ID NO: 358648 - DNA, 82 bp, Homo sapiens
gtagagctgagcgacccagcccgcgagcgagggaagaaactttttggtgagggctacagtggactagaatatgattatcgag

SEQ ID NO: 358649 - DNA, 98 bp, Homo sapiens
agacaaaaacttccagaagaattagattttctgctttaactgccgcctcacctgtggagctctgggtacaggtttttctatatgagtggagaagacag

SEQ ID NO: 358650 - DNA, 112 bp, Homo sapiens
cgcgtccagctcgcccagctcgcccagcgtccgccgcgcctcggccaagtattctaccttgtaaatactgttatttgtatatactgtaaatgatgacatcggtgggcactaa

SEQ ID NO: 358651 - DNA, 75 bp, Homo sapiens
ggccttcagcagccacctcgtacccaagctcgctgaggagctgcgtgtaggcatccccaatggattggacaattg

SEQ ID NO: 358652 - DNA, 100 bp, Homo sapiens
taccagcccacagagtatgaacatgcggccaactgtgccacccatgctgtcattcctgtcccaatcagctgctctactactgatgacattaaagatgcct

SEQ ID NO: 358653 - DNA, 100 bp, Homo sapiens
catggatctagaggcgaccccccaggaccccaactcagctgcacctgttgtgttcagaagcccaggtggtattttgaagctgtacagctgagctctcagc

SEQ ID NO: 358654 - DNA, 74 bp, Homo sapiens
gatatctctactcgctccaaaggcctcaggagtgcaagtagctgatgaagtatgtcgcattttttatgacatga

SEQ ID NO: 358655 - DNA, 74 bp, Homo sapiens
cttcgcaaatgccgtcaggctggcatgcgggaggagtatatccaggtgaaagaactggagaagcgtgcctcagg

SEQ ID NO: 358656 - DNA, 105 bp, Homo sapiens
cccaaatattgaccaactggcatcccacagcctcctcttccagaatgcctttgcgcagagtccctgtgaagcaggaagagtgagggcaggttcactgcagctcag

SEQ ID NO: 358657 - DNA, 142 bp, Homo sapiens
ttttgctaaatgttctctgtgttctcagaagacgttctgtatttcagcttcctgctatgtgccctctttgttcctaaagagaatggatcttggagaatgtctgaaagtccatgacctggctttaagagcggattatgaaatt

SEQ ID NO: 358658 - DNA, 88 bp, Homo sapiens
ccttggccacctccccaggtgatgcctgaagctcaagggactgtgtccaccctcagccgaacgaccctgtcaccaacatttgccaagc

SEQ ID NO: 358659 - DNA, 75 bp, Homo sapiens
tcgattgtataacacagaatcacaaagtttcagaaagaagtgcttcaaagagtggtgaaaccagaacaatatctc

SEQ ID NO: 358660 - DNA, 74 bp, Homo sapiens
caaatctttgggcatgtctggaggaagccctcctatgacactgaaacagatcctagtgagggattgatgaatgt

SEQ ID NO: 358661 - DNA, 95 bp, Homo sapiens
gccggcctcaagaagcagttccataaagccactcagcacaatgacagatttcctcaaggaccaccatctcagatgggttcacctatggggagtag

SEQ ID NO: 358662 - DNA, 100 bp, Homo sapiens
aagcaacaaaaagaaataatagaacaagggatagatttgaaattgacaatggcccttcagctatgctaggtctataatgggaagtgtcacagttcggtat

SEQ ID NO: 358663 - DNA, 75 bp, Homo sapiens
gctgatgaggatgtggatggagagccagagaggcagaggctttatcctgtggataaacgcagagtgaacgagttt

SEQ ID NO: 358664 - DNA, 90 bp, Homo sapiens
ctctgacctgaatcctgaattttccttgatggtcaaaagattaagggatcagtgtccttcagtgatgtggctgtgggcttcacccaggag

SEQ ID NO: 358665 - DNA, 100 bp, Homo sapiens
gaaaacttgactgtatacagaatcttgaatcagaaattgagaagctggaggagagacttcagcatgcaaaccttcatctgttcggcttgcaccgtcattt

SEQ ID NO: 358666 - DNA, 83 bp, Homo sapiens
cagatgctggctggggaaatctggtgtatgttgtcaactatccaaaagctgactatagcactagtgaaatgctggtcaacatg

SEQ ID NO: 358667 - DNA, 82 bp, Homo sapiens
aagaggaagaagggctccaccatggagcgctggtgagaagccctaccactgcaactgggacggctgcggctggaagtttgcg

SEQ ID NO: 358668 - DNA, 75 bp, Homo sapiens
gcggccacgcgcggcgccgctcggtttattttcttgaaaaggctccaggcttcggcttggaaaatcccaccgcca

SEQ ID NO: 358669 - DNA, 83 bp, Homo sapiens
cgagcgccgcgccttcgcgcacaagatcaacaggtgagaagccctaccactgcaactgggacggctgcggctggaagtttgcg

SEQ ID NO: 358670 - DNA, 102 bp, Homo sapiens
caccagcttcagaaaaacatggcagctggggaagtggtttggacatgcacaccaaaccctgggttagagcaagtgctcaatggtgcccaggctggagtgcag

SEQ ID NO: 358671 - DNA, 74 bp, Homo sapiens
agaaggttgggttcagaagagggagagtattatgagggaggccgaggacttcatgctccggacagagaaacggc

SEQ ID NO: 358672 - DNA, 101 bp, Homo sapiens
ccagcggctgaggaggggccccagcagcccccgaaggccctatcaggacatggagtatgaaagacggtactctgatggctaccgcagctcctccctcctcc

SEQ ID NO: 358673 - DNA, 75 bp, Homo sapiens
ttcagaagaccgaagcgttcgtatctggaagttggaatcgaagcctcttaaaatggcagatgacttggacttcga

SEQ ID NO: 358674 - DNA, 75 bp, Homo sapiens
gctggcaccccgaacgggttgcttcccccgctgcgaggtgagccaccagctgggcagcatcatggacctcttcac

SEQ ID NO: 358675 - DNA, 75 bp, Homo sapiens
ccccagcccctggagaggatgcaggaaaatcctgccttgcttcgttgggcctatgcaagaacaataaatgtctat

SEQ ID NO: 358676 - DNA, 100 bp, Homo sapiens
caggagaaggggaatgaagtagaggtgggacgtccaaggatgatgggcactgatgacgggtctaagccgacacccacgatggagacccagccggtgttcg

SEQ ID NO: 358677 - DNA, 100 bp, Homo sapiens
tcccgggtggcttacagacgctgccagcatcgccgccgccagccgccgccatgatcctgctggaggtgaacaaccgcatcatcgaggagacgctcgcgct

SEQ ID NO: 358678 - DNA, 83 bp, Homo sapiens
gtggaaccttaccctgaggtagacatctttagactcatcagaacttcctacgaggcagtcatggatcaggtaatgcagtttgt

SEQ ID NO: 358679 - DNA, 90 bp, Homo sapiens
ggccgttgaaaaatggcgactgtggcagagttgaaggctgcatcaacaacagcaacttgtgattggcggtgaccggatattcagttgcac

SEQ ID NO: 358680 - DNA, 50 bp, Homo sapiens
ccaagcacgtggtgaagggaaagcagatgaaaaagagaggtttgacccta

SEQ ID NO: 358681 - DNA, 75 bp, Homo sapiens
ggaaaaatacactactataaaggatctcacagctgaacttaggtacacctattaacaaacgacctgtacttggat

SEQ ID NO: 358682 - DNA, 98 bp, Homo sapiens
gctgatcgcagtccggaggtgaggcggaactctgaggccatttgtgtaggaccagaaaacatgcagataatgtatccagctatatttgaccagttgtt

SEQ ID NO: 358683 - DNA, 90 bp, Homo sapiens
gttacggaccggaagtgctccagaactcaagctgcattcatccgggtcgtgggctcggagtttgtacagaagtatctgggtgagggcccc

SEQ ID NO: 358684 - DNA, 49 bp, Homo sapiens
gaacatctcgctgtcggtgaagaagcgtttagtgggctacagatggcat

SEQ ID NO: 358685 - DNA, 75 bp, Homo sapiens
gggctgtttggaaagacccaggagaagccgcccaaagaactggacatggatttgattgacatactttggaggcaa

SEQ ID NO: 358686 - DNA, 96 bp, Homo sapiens
tatgtgccacgccgcccaggagacccctctgctgcaccacttcatgagtccggatggtgctcacctcacctgggagccaccctctgtgacctccgg

SEQ ID NO: 358687 - DNA, 88 bp, Homo sapiens
gcggtatctcagccctggatggtgaatttcagtcagcctcagaggttgacttctacattgataaggaatctcctgcaagaggaccctc

SEQ ID NO: 358688 - DNA, 108 bp, Homo sapiens
gcggaccccgccgagtcctagcgcctggcctgcgcgccgctgcccgcgccacagggagaactaatgccgacgtgatgaccgccctgtcccagggctacaggatgcccc

SEQ ID NO: 358689 - DNA, 98 bp, Homo sapiens
caacttcctctcgaatatcaagaaatgcagtaaccagcatgtcaataaggggtcataggtggaaaagacatgagcagcccgacggccatggaggctga

SEQ ID NO: 358690 - DNA, 101 bp, Homo sapiens
aggtgtatcaagtaatggtgcaaagcctgaaagtttgccttctgccaggtggatgcctccatcgctctggccctggccctggccgtcctgtgtgatctgct

SEQ ID NO: 358691 - DNA, 75 bp, Homo sapiens
gaagaccgcagtgggataaatctcaaagatctcgtacaagatccttctttgcgcattctacattctaaaggggag

SEQ ID NO: 358692 - DNA, 75 bp, Homo sapiens
gcaggatgccgcttctgctccagggcatgcaccatgcctctacttctgcaggccccatcccttcccagaaagaag

SEQ ID NO: 358693 - DNA, 97 bp, Homo sapiens
gaaaggcaggcgaagtcttcattcataaggataaaggatttggctttatccgcttggtatttctgggaaaagccagcttctgtttgcactggtcttc

SEQ ID NO: 358694 - DNA, 100 bp, Homo sapiens
ccgtccccagaacgcagatcagaggtagtcggacctttcccgctggcgcgcagcctcagctaggtccagtggtttacgtcttggatcttgcagatagact

SEQ ID NO: 358695 - DNA, 75 bp, Homo sapiens
cggactttcaagatgggaccaagactctgttccagcctcagacaggtgcctatcagaccctggccaaagagtgtg

SEQ ID NO: 358696 - DNA, 74 bp, Homo sapiens
tgggagttgcttttggaatgaatttggaatcttcccttgaagaggttggtcttggacaactgcacctgcacgga

SEQ ID NO: 358697 - DNA, 100 bp, Homo sapiens
cagagattgcctggaacaccagctcgggtcctcgcacaccatcctgaatggtaccaaaccaccactggatgcagatgtaaatttggaagcaattgctggt

SEQ ID NO: 358698 - DNA, 76 bp, Homo sapiens
cgaaggggacctcatgtccctgtgggacacaatgcccccaagtaggtaaccagttaggggccttggtacatcaaag

SEQ ID NO: 358699 - DNA, 83 bp, Homo sapiens
aagtcaggaatggcccttactcaggaatatgaagacaaggctggaagacctagcaagccaccctctccaaagcagaatgtgag

SEQ ID NO: 358700 - DNA, 95 bp, Homo sapiens
ttaaccttcaaccatctggggaaaaggcaaaaatcccatctaccgcaactctcagttcgagagtaaaggttatgaagacagtatggagtttccag

SEQ ID NO: 358701 - DNA, 100 bp, Homo sapiens
ggggacactgtgtgcacctgctcgagatgaggaagttaagaaactaaaggacattaaggaaatagtgccccttttcagtccctacagatgaagaagatga

SEQ ID NO: 358702 - DNA, 83 bp, Homo sapiens
cgtcaagcagcatgtgaaggagaccaagtacctggagtagaacagaaaaattattatgtctgtgttcccttgggactcattgg

SEQ ID NO: 358703 - DNA, 121 bp, Homo sapiens
gatccaggagtggttcaccctggtcaacaagaagaacgctctcatccggaggcaggaccagctgcagctgctacacctggatttcattagcatcatgacctacgattttcatggagcctgg

SEQ ID NO: 358704 - DNA, 82 bp, Homo sapiens
ggggcgctgggccgccagcctcggcaccgtcctttcctttctccctcgcgttagttattttaccaagaaaatggtttgcacg

SEQ ID NO: 358705 - DNA, 100 bp, Homo sapiens
caaatctctcattacaactcatcatttgatggtgtatggaaatgagcactatgttggccatggaaatgctatcaatgagctgaaattccatccaagagat

SEQ ID NO: 358706 - DNA, 100 bp, Homo sapiens
agaggaggaggaggaggggcggagggagacgcccgaggacagggaggtgcgtctgcagctggcgcggaagaggtgcctggaatacttattaagaaacgat

SEQ ID NO: 358707 - DNA, 98 bp, Homo sapiens
gtggatttcctgccaagggaagtagtgtcctactcaaaggagacccagactcctcttgccacgcatcagtctgaagatgacacaattggtactgcctg

SEQ ID NO: 358708 - DNA, 82 bp, Homo sapiens
ccgcgtccgccgattcctcctccttggtcgccgcgtccttggctggcgtagtgcctggtgaagaatgtgatgggatcactag

SEQ ID NO: 358709 - DNA, 75 bp, Homo sapiens
aggaggagcctgttccagaactgctggaagctgagaaccacatttgaatttgggagattccattaggagggatta

SEQ ID NO: 358710 - DNA, 83 bp, Homo sapiens
tctacgtggccctcctgcgagtcatgatcccagggcaccgccgtgtgaatataaagattggctgacaaaaatgtcaggaaaac

SEQ ID NO: 358711 - DNA, 100 bp, Homo sapiens
tgaaagcccagcgggaaaggctacagattccggggctgaccttggagtttccatggatctcaatagtgccagcactgttgttcttcaggtgttaacacag

SEQ ID NO: 358712 - DNA, 75 bp, Homo sapiens
gtggatcgttgttttgaaacggcaggctgtccctgcaggatcccacgtacggctgaatcttcagactggggaaag

SEQ ID NO: 358713 - DNA, 100 bp, Homo sapiens
acatgagagtacctaccattcctccaaacctggcaggaatccctggggggaaaccaggagaggggccactgaaaacttcccaggatttaattcatcaact

SEQ ID NO: 358714 - DNA, 96 bp, Homo sapiens
agtagaagattccataattgaggatgaagatgatgaagccgaggtagaagaagatgaacccacagatttggcccctagcagtcttcttgatgcttt

SEQ ID NO: 358715 - DNA, 98 bp, Homo sapiens
gaaattgaaaagtaccaagaagtggaagaagaccaagacccatcatgccccaggagctcgaagagaaacatcgggaggcccaagtctcagcccagcac

SEQ ID NO: 358716 - DNA, 83 bp, Homo sapiens
cttttctcttcctgcttcatctctaaaggtccttctaggagagaggtgaaaggctgcctctaagaatcaaacttcactcttgg

SEQ ID NO: 358717 - DNA, 75 bp, Homo sapiens
ccgcgtccgccgattcctcctccttggtcgccgcgtccttggctggcgtgttcctcatgggtgcctcctgtggcg

SEQ ID NO: 358718 - DNA, 107 bp, Homo sapiens
ggaatttcaacttgccaatgtgcaaagctgcagaaaccacagtggtagaggtgtcacccacacatcatccggtgggcacaggagagcagagacagcatgcgcacacg

SEQ ID NO: 358719 - DNA, 75 bp, Homo sapiens
gtctcaaactctatttgccaaaggaaacttgccttatcaccttcttgcttgcagcggacaaggcaaaatctcagc

SEQ ID NO: 358720 - DNA, 101 bp, Homo sapiens
gaggaccgccaagagcgacgccgccgtgtgcccaacggtcggtgtccccggctgaggcagcgcggccgcagcagccctatcactaaggaggaagagcgaga

SEQ ID NO: 358721 - DNA, 100 bp, Homo sapiens
gttgcggcgcccaccttcgggaggatcaggtgtcatggagaaactccagctgggcccagagattctgcagcgggaaaatccaaggcttatttatgccagg

SEQ ID NO: 358722 - DNA, 75 bp, Homo sapiens
cacacaagcaccccaataacctcaaggtcaaaatgcagatcttcgtgaaaacccttaccggcaagaccatcaccc

SEQ ID NO: 358723 - DNA, 100 bp, Homo sapiens
tgaggcaggagatgagcaaggatctggaggagggaaacagtgataagtaagctgaccacttgctgtaggagaagttccaacgtgtcctacaaatactcaa

SEQ ID NO: 358724 - DNA, 50 bp, Homo sapiens
acccctgatgaggcccgtgtggaaggggttgtggaaaccagaacttcgcc

SEQ ID NO: 358725 - DNA, 75 bp, Homo sapiens
tgttgctgttttcctggcgtgttagcggtggtcagcagatttgagttttgtcaccggctcccacgtcggagagct

SEQ ID NO: 358726 - DNA, 51 bp, Homo sapiens
attcgcagtggtcgcttcttctccttggttacggcctccgctgccacaggg

SEQ ID NO: 358727 - DNA, 98 bp, Homo sapiens
ggtaacgttgctggaccgggacgcacgctcagctgaggaggacccccaaagggtttggattcaggatttgttcctagtgtccaagattttgataagaa

SEQ ID NO: 358728 - DNA, 75 bp, Homo sapiens
gggtgcggcacctggaggaggagaaccgagccaggccatctgtgagctgcaagaagaggtgtcccggcttcgtct

SEQ ID NO: 358729 - DNA, 101 bp, Homo sapiens
gtggccggagcggcccgcgcctgggctgccggcacttcgcggcaggaaacttggatttaactggccagaagcaggtattcaaagcagagaacaatccctgg

SEQ ID NO: 358730 - DNA, 100 bp, Homo sapiens
ctggtactcccagacccttccgtatcgaggaccccaatcaacaacccacctggatgcctaaatcaaaggaacttgtttcttcaagctcttctggcagtga

SEQ ID NO: 358731 - DNA, 101 bp, Homo sapiens
gacttcttcctgctgctgcttttcaggggagcagatgtctcaagtattagatgccatgtttgaaaaattggtcaaagatggggagcatgtaattgatcaag

SEQ ID NO: 358732 - DNA, 95 bp, Homo sapiens
ctgaggagcgggatctaacccaggagcagacagagaagctgctgcagtttcaggatcctcagtcttccacaatgaaccctgtttacagccccgtg

SEQ ID NO: 358733 - DNA, 100 bp, Homo sapiens
acgacggcgttgatatcggtggtaacgacggcctcagcaggcggggaagatgaaaggttgctgcgaaaccagagatttcctgcatcctatcatcatgcag

SEQ ID NO: 358734 - DNA, 85 bp, Homo sapiens
agaccctcatgacggtcaacgagttcatcagcaaatacatcgtgaatgagctctctgatgtaaaggatggagtaaatcaagcagc

SEQ ID NO: 358735 - DNA, 75 bp, Homo sapiens
agaacaatcagtgatgaagatgaatcggaaccacgtgaatgttgagggggcgacacacaagcaggtggtggacct

SEQ ID NO: 358736 - DNA, 74 bp, Homo sapiens
cgctcggctgcgggaaatcgggctgaagcgactgagtccgcgatggagggttctctataaaggtgtcttaaaaa

SEQ ID NO: 358737 - DNA, 98 bp, Homo sapiens
ttcccggactgcgccaaagcctactacaagtcctcgcacctaaagtcgcacctgcggacgcacacaggtgtggaccactacaacgaggtgaagagcgt

SEQ ID NO: 358738 - DNA, 96 bp, Homo sapiens
gtagctaccatagcctttattattcaattgaaaagcctttgaaattctttcaaactggagccttattggagcttgtgagaagaatgagttgatgac

SEQ ID NO: 358739 - DNA, 98 bp, Homo sapiens
tgcggctcctcggctggtggcaagtattgctgtgggtgctgggacttcccgtccgcggcgtggaggaggtaaatgtgtttcgattggaaatggagggc

SEQ ID NO: 358740 - DNA, 139 bp, Homo sapiens
gggagcggatagcggagccccgagccgcccgcagagcaagcgcggggaaccaaggagacgctcctggcactgcagatcataaggcctatgggttttctgccccaaaagaccaacaagtagtcacagcagtagagtacca

SEQ ID NO: 358741 - DNA, 83 bp, Homo sapiens
cccccgcttctatgtcctgtacacaatcttcatgaaagagacgaagtttcatcatgttgtccaggctggtgtcaaactcctga

SEQ ID NO: 358742 - DNA, 100 bp, Homo sapiens
ctcacaccagacctacggagggagctggaaattcctgacgttcattgatctggcacagttggtggatctgaaatctgaactgacagaaacccaagcagag

SEQ ID NO: 358743 - DNA, 98 bp, Homo sapiens
tccccccacccatcttctcccggctggacgccccggtggactacttctaccgaccagagacccagcaccgagttgtcttcaggctttggagccacagg

SEQ ID NO: 358744 - DNA, 100 bp, Homo sapiens
cggagtgagaagcaagaaggccctggacacagcaatatctctgggctttcacaggttgatgtgatcgtgacactgggaggccttgctgggcgttttgacc

SEQ ID NO: 358745 - DNA, 76 bp, Homo sapiens
cccaaaccccgccaccatcatagtggacacgtcgatctgacaatgctaggagcgatgcaggtttccaaatatggtg

SEQ ID NO: 358746 - DNA, 100 bp, Homo sapiens
aagagtgttcaaaattcaattacacagtggctgacggcctggtcaaggtgcaggtggctttggggaacatttccagcaagagggagagggtgaagattct

SEQ ID NO: 358747 - DNA, 50 bp, Homo sapiens
gctggacacactggaggcgctggggaccaacttggaggccttgcagaaga

SEQ ID NO: 358748 - DNA, 82 bp, Homo sapiens
cacccaccgccgccgcctcccagaacttcatggaggaacacggagtgacccaaaccgaacatatggctaccatagaagcaca

SEQ ID NO: 358749 - DNA, 100 bp, Homo sapiens
tcttcacaaggatcagatgatgaacagataatcatggaagggaagtggttgctgtgtatgttactggtgcttggaactgctattgttgaggctcatgatg

SEQ ID NO: 358750 - DNA, 107 bp, Homo sapiens
ggcaaagccgggggcgccttcgacccctacaccctggtccggcagccgcacaccatcctgcgcgtcgtgtcttggagtttatgtggccgaggcagacaagtggaatt

SEQ ID NO: 358751 - DNA, 83 bp, Homo sapiens
agaagagcggcagtttcgtgagcgacctcagcagactccatcaagaatgctggaggaagggtgtttgtccactgccaggcagg

SEQ ID NO: 358752 - DNA, 82 bp, Homo sapiens
tggctctcaacttattcccttcaattcaagtaacagtggatcaatcttcctgtcctacaactgacaaaggatcccctaaaga

SEQ ID NO: 358753 - DNA, 100 bp, Homo sapiens
atttgtcttctgtccatggtgctgaagtttattcactttcaaaccactttcagtaacaggaccagctttatccagggactctaccattcccacccctttg

SEQ ID NO: 358754 - DNA, 76 bp, Homo sapiens
ggcggctctgaagagttggctgtcgcgcagcgtaacttcattcttcaggatggaactgcaggatccaaagatgaat

SEQ ID NO: 358755 - DNA, 100 bp, Homo sapiens
gctcttcccggcgctctcctggctcccttctgccccagctccgtctcggcggcggcggtatgttcatgcggatgctcctaccaataaaacactggctggg

SEQ ID NO: 358756 - DNA, 75 bp, Homo sapiens
tgcgctgcaccctctcggctaatgagggaaaacccctgatcctaaaatgaatgctaggacttacatggatgtaat

SEQ ID NO: 358757 - DNA, 96 bp, Homo sapiens
gccttctttgctctgtctgggatcgccgcacagctgctgaatgccttgggactagctggcatccgtgtcattctggaccttactcccaactaccgg

SEQ ID NO: 358758 - DNA, 100 bp, Homo sapiens
gaagtgagggggcccggattcccaccctggcctcacggaccttgggctgaccggtctgtctggcttcaggttatgcctccgcctcgttgccctgaaagcc

SEQ ID NO: 358759 - DNA, 100 bp, Homo sapiens
cgagggtcccacgactcccgcctggagttccgattctgaagaggcatttgagaccccggagtcaacgacccctgtcaaagctccgccagctccaccccca

SEQ ID NO: 358760 - DNA, 82 bp, Homo sapiens
gtcagcactgactttcagctatggaatcgagccaaatctcctcagccacctgttgaagaagaagatgaacacttcgatgaca

SEQ ID NO: 358761 - DNA, 71 bp, Homo sapiens
atgagtatgcggaggacagctctgatgaggagggtaacccagtgcaagtacaaacgcatcggctgcccatg

SEQ ID NO: 358762 - DNA, 83 bp, Homo sapiens
ctgaaccatccacacatcataaagctttaccagagagaaaaggaacagttccgtaagctctttattggtggcttaagctttga

SEQ ID NO: 358763 - DNA, 74 bp, Homo sapiens
cctaagctgggctgcagagctggtggaggaagagcaagcaggccctgagggactataagaaggttcagatccag

SEQ ID NO: 358764 - DNA, 82 bp, Homo sapiens
gggccagggaaccctggtcaccgtctcctcagggccatttgaagaaggtcacagaacagtatcccgatgatgttgaagcttg

SEQ ID NO: 358765 - DNA, 102 bp, Homo sapiens
ctccctacgagatcaccacagaccgaggagagcattcccattgctttatctggtagggatatcttagctagagcaaaaaatggaacaggcaagagcggtgcc

SEQ ID NO: 358766 - DNA, 75 bp, Homo sapiens
tgagcgactatattgagaaggaggtaaaggttggatggcaagcatgtggtgtttggcaaagtgaaagaaggcatg

SEQ ID NO: 358767 - DNA, 74 bp, Homo sapiens
gcagtggtcgcttcttctccttggttttgccagatcgaagtcatcctaaactgctgatgagtggaggtgggggt

SEQ ID NO: 358768 - DNA, 50 bp, Homo sapiens
tgcactgatgggctttgcatgcagagctttacaggaagtatggtgctggc

SEQ ID NO: 358769 - DNA, 100 bp, Homo sapiens
cgcgccccgagaccgccgtcgctcggacgctcctgctcggctgggtcttcgcccaggtggccggcgcttcagggttctctataaaggtgtcttaaaaagg

SEQ ID NO: 358770 - DNA, 75 bp, Homo sapiens
acatttacaagaagctgagcaaaccaaaaacagtggcactgagcactggaggagatgttaaagtaacccatcttg

SEQ ID NO: 358771 - DNA, 100 bp, Homo sapiens
atcaattgtctctctgggcggccacctatgagacttcatctgtgtgtttgcagttaacatgtttcgaacattaccaccttcctccaatcctacgggagcg

SEQ ID NO: 358772 - DNA, 88 bp, Homo sapiens
ttaagagtggcctaagaggctgctgcactgaaatatctgcaaagcccctgagcccaaaacagtctcctactgcagcccgtccgtgccc

SEQ ID NO: 358773 - DNA, 51 bp, Homo sapiens
tcattacggtccacctcaagcacagattgttgatattcactgatggactcc

SEQ ID NO: 358774 - DNA, 100 bp, Homo sapiens
acaaaggcatggggctgtccatgggcaccatgatctgtggctgggataagagaggccctggcacctgtatcaagtgcaacaaaggcatctatgggcagag

SEQ ID NO: 358775 - DNA, 50 bp, Homo sapiens
gcttgggccagtatgatgatggttttgggcggaaagacgtagttgaatat

SEQ ID NO: 358776 - DNA, 95 bp, Homo sapiens
gggatggcgacgtctacactgagtcggaggcgaagggtgaatttggaagtgaaaagaaaactgctttgcatgaaaaagaggagacacttcggctt

SEQ ID NO: 358777 - DNA, 89 bp, Homo sapiens
ttggaaattgtgtgtccatcttggttttgagctctgctctgcctgtgatgtcgagaacactgggaactcattatacaatgacaaatgga

SEQ ID NO: 358778 - DNA, 90 bp, Homo sapiens
atcagagatgaggacagcattgctgctccttgcagccctggctgtggctacagggccaggttcatcatgcctagtggcgtataagaagac

SEQ ID NO: 358779 - DNA, 58 bp, Homo sapiens
aaccagatgaggaagtacaactttgagatctcacattcttgaaggtggcattgaagag

SEQ ID NO: 358780 - DNA, 50 bp, Homo sapiens
ctgagcctgccacgccgaggacgtgggctgaccaactgactgaagagcag

SEQ ID NO: 358781 - DNA, 83 bp, Homo sapiens
gagctaaagcagcgtgcgttcagccctgggtgttctggacttggtgcctctttctgttatatgctttcctatttagttgggag

SEQ ID NO: 358782 - DNA, 80 bp, Homo sapiens
gaagttggtggaacagctcactgaatacagctgatgaatgcagtgaacacactggacagggatgtcctcaaccagctaca

SEQ ID NO: 358783 - DNA, 75 bp, Homo sapiens
ctgggccgcctggcggccatcgtggctaaacaggtactgctggattcatgttacatgtaaagctgtcctcatttg

SEQ ID NO: 358784 - DNA, 96 bp, Homo sapiens
tgcggtgaggctgcgcggggccgaggccgcctccgagcgccaggaggagacatcacagctttcccagatcgggaggaaaaatatggaatgtgtttt

SEQ ID NO: 358785 - DNA, 100 bp, Homo sapiens
agaaattggtcgtctgagagctttacgtcatcttcgattagctaataaccaactgcaattcctacctccagaatatgcttttaaggctattaaccagggt

SEQ ID NO: 358786 - DNA, 80 bp, Homo sapiens
ctcaacaccggtcgctttgagaccaaagacatctcagacattgaaggtgaatggagtgccatagaaaaagaaatgggtga

SEQ ID NO: 358787 - DNA, 100 bp, Homo sapiens
ttccaccccaaatttatcaaagaactgagagtgattgagagtggaccacactgcgccaacacagaaattatgcgcagttgtgtagcagttgagtaatgct

SEQ ID NO: 358788 - DNA, 51 bp, Homo sapiens
tggctggcggtgcctggacgtacaaggatttgtcttggctgttactatgac

SEQ ID NO: 358789 - DNA, 90 bp, Homo sapiens
ttttctttcagtctgcaactgtgtctgatggcgatgcacattgactctcatgaagcccttggagtgttaaatacattatttgagattttg

SEQ ID NO: 358790 - DNA, 100 bp, Homo sapiens
aaaatgctagtgtgaaggtctccattgacattgaaggatttcagctaccagttacttttacgtgtgatgaaccagacgtcctgggtcctctccagcatgg

SEQ ID NO: 358791 - DNA, 100 bp, Homo sapiens
agagctggcagaggttctaccaactgaccaagctgctggactccatgcatgacgttcctgtgagaacaacatctcgctcccctgttctgtcccgtcgaga

SEQ ID NO: 358792 - DNA, 83 bp, Homo sapiens
cggtccccaacgcatcatgccagggagccaagcgtcctgcccggccgtgtcgtgaaaactacccctaaaagccaaaatgggaa

SEQ ID NO: 358793 - DNA, 80 bp, Homo sapiens
ttccactcggctcctgtcgtccgttctctcaggctcccgttcagggaagagcatggaggaaatcaagaaggtgctgctgc

SEQ ID NO: 358794 - DNA, 101 bp, Homo sapiens
gggaaagtgccgctttaaggagaactgcagggtgaggacgcttgagcggaagttagaagcaaaaatgatcaaggaggaaagcgactaccacgacctggagt

SEQ ID NO: 358795 - DNA, 90 bp, Homo sapiens
tcgcgcccgccgacccgcgccctgctccctctcagcacctgggcggacggtctcggtccagctcgacttccagctcaggctccagcacca

SEQ ID NO: 358796 - DNA, 90 bp, Homo sapiens
ggatgccaatgaagttccaattcaaaagatgtttgaaaagctgggatgtctccccgttcaatgttgtggcctggcacgggaattatacac

SEQ ID NO: 358797 - DNA, 90 bp, Homo sapiens
gcgagcgggaacgcgagaaagagcgcgagcgcgagaaggagcgcgagcttgaacgcagcgtgggtgccgccagctgccgcaccagcccga

SEQ ID NO: 358798 - DNA, 88 bp, Homo sapiens
aggagttggaccttctggagtgttacactgtgggtcagtcttgcactcccatcaacataccagtagaggtttgctgcaatttgccccg

SEQ ID NO: 358799 - DNA, 75 bp, Homo sapiens
atttaacccccctccaaaaatgatgccatctgcagttttgtgatctgcaatgattcttcccttcgaggtcagccc

SEQ ID NO: 358800 - DNA, 98 bp, Homo sapiens
tcgatcctgctggctgctgtctctattctctcggcctgtcagcaaagttaaagatcgaggtccggaagccactaggagattttttaattggttttatt

SEQ ID NO: 358801 - DNA, 82 bp, Homo sapiens
gtaacagccaagatgctgcggaatctgctgggaaatatgaaatctgatgatgatcctcctgctattccaccgagacagcctc

SEQ ID NO: 358802 - DNA, 75 bp, Homo sapiens
gctaccttaaccctgcctgactcggaaggcctcaggcccaggcccaaggccaagtgagagagcccaggccacagg

SEQ ID NO: 358803 - DNA, 88 bp, Homo sapiens
tcggcttgaccgcattcttcctcccaggtggtgaccatcgctatgtgaacaactacacgaacagcttcgggggtgagtggagtgcacc

SEQ ID NO: 358804 - DNA, 87 bp, Homo sapiens
cgtctcgcgtcccggactgagaagcctcgatgacttacgagccctcaaggggaagcattttctcctggaccccttgatgccggagct

SEQ ID NO: 358805 - DNA, 100 bp, Homo sapiens
agtgaaccgcggcgacaagtacatcgccaagtttcagggagaagacacggtcgtgatcgcgctgtggaacaactactttcacctggctgttgctttcctt

SEQ ID NO: 358806 - DNA, 75 bp, Homo sapiens
tttgggcgtcccattgccatggccatctggctgctgtgcacaggcgctcgtgaggctgccttccggaacattaag

SEQ ID NO: 358807 - DNA, 74 bp, Homo sapiens
cccacctgcatcatctggggttccaatgcagtttgcaggcctttcagatatatccatctcacaagacatccccg

SEQ ID NO: 358808 - DNA, 75 bp, Homo sapiens
tgccaatcaaactgctacaagacaacaccctgatctggcatggacatacttaattcagtgcacaaatgagatgaa

SEQ ID NO: 358809 - DNA, 97 bp, Homo sapiens
ctgctgtttggcaccgactaccccttcttccatgacccaccatctgtcttctacgagaaaggtcctggaggctccaagtggggccctctccctcttg

SEQ ID NO: 358810 - DNA, 100 bp, Homo sapiens
gaagggaggagactcctgaccctcagaatggaatcacatgcagcccaactacagattcttatggaattcctcaaggttgcaagaagaaataagagagagg

SEQ ID NO: 358811 - DNA, 80 bp, Homo sapiens
gttctggagagcggggtgtggggtgtggacactgccagcggctgcagccgacttggaatgacctgggagacaaatacaac

SEQ ID NO: 358812 - DNA, 88 bp, Homo sapiens
agactgctgtgctagcaatcagcgagactccgtgggcataggaccctccgagccagaattgctgagtactcctatgggcatcaaaaga

SEQ ID NO: 358813 - DNA, 90 bp, Homo sapiens
accaatgtggatgcccgaattctttaagggcattaggagaccatggaaagacggcatcagaattaatgtaactacactgaaagatgatgg

SEQ ID NO: 358814 - DNA, 75 bp, Homo sapiens
caccaggagacgcaactcatcgggcaatgtgaagtattcatccggccaaccaatgtttcctgacgtacagtgttg

SEQ ID NO: 358815 - DNA, 100 bp, Homo sapiens
tgaaccctgaagtcggtgtctgctgcgttcacggcaggattcggttaggagtgtacctcacagccttctaggatctccagagtggacaggaatctcactt

SEQ ID NO: 358816 - DNA, 98 bp, Homo sapiens
ccagatccgctgatctagtgcttctcgaaaaaaaccttcaggcggcccatgggtactactgagcgagtgtgcttgatccagggaacggttgaagcact

SEQ ID NO: 358817 - DNA, 75 bp, Homo sapiens
ggctgctgcaggcccagctgcagcatttaaatcaaacggtattgagatggattgggttatgaaacataatggtcc

SEQ ID NO: 358818 - DNA, 99 bp, Homo sapiens
ccagggcaacctggactgagtggacaacctggattaccaggaccaccaggtatgtgactggtgtaagcacataagacacacaaaagaatacctggattt

SEQ ID NO: 358819 - DNA, 98 bp, Homo sapiens
gctgcgtcattagataatcctcatgcaaatagcgggaagaacaaaggaaggggagcccgggacccccgggggcgcagctgtcgcctggttgggcccgg

SEQ ID NO: 358820 - DNA, 82 bp, Homo sapiens
tgtataaccacccagtaccaaaggcaaatactcctgtaaatttgagtgtgaggtgttatgaacataaacagtatagaaatgg

SEQ ID NO: 358821 - DNA, 82 bp, Homo sapiens
aaacaaatacaggttcttcaaggtatggcctcacaagtcttggtctacccaccatatgtttatcaaactcagtcaagtgcct

SEQ ID NO: 358822 - DNA, 75 bp, Homo sapiens
ccgtccagataggatagacaagcatgctcgaagacgaccttcagctcagtgacagtgaggacagtgacagtgaac

SEQ ID NO: 358823 - DNA, 100 bp, Homo sapiens
tggaaatgttcccagaacattgcacgatgcctcctgggtcagtttgaaaaggaggatcgagctcactgtggagtatccatggagatgtggagccttgtca

SEQ ID NO: 358824 - DNA, 82 bp, Homo sapiens
ccccgccgcccgcctgcgcctccggggccggccctgcagtgcaaggatgatgctgaaaggaataacaaggcttatctctagg

SEQ ID NO: 358825 - DNA, 49 bp, Homo sapiens
ctctataggggaggcaggcttttgcaagttacggctagatgaggctcaa

SEQ ID NO: 358826 - DNA, 75 bp, Homo sapiens
ttgacaccttttgacatgagcatccagtcatccgtccttggctcaggatttggagagcttgcaccaccaaaaatg

SEQ ID NO: 358827 - DNA, 51 bp, Homo sapiens
gaacaacaagcagagttgattcttcaaagaaaaatcgatgggacaactgag

SEQ ID NO: 358828 - DNA, 97 bp, Homo sapiens
gcgctggagctgggtcagtccgccgctcaccccgcggccgcaccttcccgccttctcaggtattgttgcagcatctggcagtgagactgaggatgag

SEQ ID NO: 358829 - DNA, 83 bp, Homo sapiens
gagcttcatcaaaaatagtgatagctttgataaggaaagaccatgtttgtagatttattggctgtgggaggaatgatcgattc

SEQ ID NO: 358830 - DNA, 83 bp, Homo sapiens
ccgggatttgggtcgcagttcttgtttgtggatcgctgtgatcgtcacttgatcgggagcggtgccgagaaaaatttccttac

SEQ ID NO: 358831 - DNA, 75 bp, Homo sapiens
cctgctgctcgtgctgatctcagaacctgctgggactacagaacatccccaggccgttcttcctgcaggtgtacc

SEQ ID NO: 358832 - DNA, 80 bp, Homo sapiens
tggtgcctaaacctcagagtcctagatggatatgtgatttctcagaaggaaagcattagtgccagcagtagttcccaagg

SEQ ID NO: 358833 - DNA, 74 bp, Homo sapiens
cagtggtcgcttcttctccttgagctcccccatccaggaatccactgctcccgagctgccttcggagacccagg

SEQ ID NO: 358834 - DNA, 100 bp, Homo sapiens
tgtctcatgttcgagtctggggctgtcgctgtgctctatgagctgcttcagaaagagcaaaactattcagatgacgtcttggccaacatgattagtgaac

SEQ ID NO: 358835 - DNA, 50 bp, Homo sapiens
gaagtgctggaccgaggacgaagtgatcgatgggctagaggagaagctgt

SEQ ID NO: 358836 - DNA, 96 bp, Homo sapiens
cttccacttcctcagaatgtgaaggattatttactcgatgatggaactctggtggtttcaggaaggcattggaatggatacttgtgtcattccttt

SEQ ID NO: 358837 - DNA, 88 bp, Homo sapiens
aattgacctcacctcaagcacacccaatggacagcatgcctcaccaagtcacatgacaagcaactccagggattagagctcgatctgc

SEQ ID NO: 358838 - DNA, 100 bp, Homo sapiens
tgtgaataaaactgaccatagccagagaacagccctccatcttgcagcccagaagtgagaaagatcagtctaaagaaaaggagaagaaagtgaaaaaaac

SEQ ID NO: 358839 - DNA, 82 bp, Homo sapiens
ggagattatagctctgtatgagaaggacaacacctacttagagctagagccggtgcaggccacgcagaacaagacagggaag

SEQ ID NO: 358840 - DNA, 51 bp, Homo sapiens
cgggagttacaccgccaccgccagatttgatggtagagtggtggcaaagct

SEQ ID NO: 358841 - DNA, 82 bp, Homo sapiens
atgcaacgatggaagatgtgaatgactggctgactgaactctaagctcctcctggggtagagacagatcttattgatgttgg

SEQ ID NO: 358842 - DNA, 50 bp, Homo sapiens
tcaagcgggacctgttccagtttaacaagttccagagaattgttgaacaa

SEQ ID NO: 358843 - DNA, 75 bp, Homo sapiens
gtaaaactcaactctccactggaaaagataaactccttttcgccacagaaatggttccccctggaagtcctgggc

SEQ ID NO: 358844 - DNA, 60 bp, Homo sapiens
tacgaggaggtgcgcgagaagtacaaagacccaagcaccagccgccgcttcacacctccc

SEQ ID NO: 358845 - DNA, 100 bp, Homo sapiens
agacatgtttgcagactctaatgaaaatgagactgtctttgctcctgtcatccaggctggcatggaagcactaaagctccctggggacaaagagtttgta

SEQ ID NO: 358846 - DNA, 89 bp, Homo sapiens
ccagaacatctgggagaatatttaatggaaaatcgcttggttaaaacctgacacttttaacagatgtattagacacagaaatgattggg

SEQ ID NO: 358847 - DNA, 74 bp, Homo sapiens
cagcatggccgcgatctatgggggtgtagagggtcagcaggatggacctggagatgtcagggctgaagaccctg

SEQ ID NO: 358848 - DNA, 73 bp, Homo sapiens
aattcttctgtatatttacgatttccatgggacatggatgaaattggaaatcatcattctcagcaaactatcg

SEQ ID NO: 358849 - DNA, 75 bp, Homo sapiens
ctcccaaagtgccgggattgcagatgattaccacatgctgagggcacctgacacagagcccggtgcagagcactt

SEQ ID NO: 358850 - DNA, 75 bp, Homo sapiens
tcgtatcagatggcagacatacatcatttaaaggaggcaccagaaactgttcagccgggtgccacagcccagcct

SEQ ID NO: 358851 - DNA, 98 bp, Homo sapiens
acgtaatgaggatgaagattcaccaaataagctatatactttggttacctatgtacctgttaccactttcaaaaaatgtaattatatctagtgctgca

SEQ ID NO: 358852 - DNA, 100 bp, Homo sapiens
aggaactggtacttggagtctggacatctgaaacttggtttttcgttggaatatacgttgcacatttatggcgattctgagtgtgagggcagacttctgc

SEQ ID NO: 358853 - DNA, 121 bp, Homo sapiens
ccggggcaggggcggaggcggaggcagaggtggaggcgctttgaaaggttcgatacaagaggctgttttcctagcgtggcttgctgcctttggtaagaacatgtcgtccatcttgccattc

SEQ ID NO: 358854 - DNA, 51 bp, Homo sapiens
gtataggagcaagggcgtctttgtgcagaggctgaggggatctggcggtgg

SEQ ID NO: 358855 - DNA, 75 bp, Homo sapiens
ggatgtgatgcctgctagccaaaaggggtccacatatagcctcagttacattagctgcttatgaatgcaattcag

SEQ ID NO: 358856 - DNA, 88 bp, Homo sapiens
gccgctagcgtcagcgccagccagtttgattcatccagattcctcaaatactcctctttcaacaagacttgtatctgtgcaagaggat

SEQ ID NO: 358857 - DNA, 92 bp, Homo sapiens
ctgcgggaaatcgggctgaagcgactgagtccgcgatggagctacgagttccagggagctctgtcctggtgaccgtgcccgggttatgacga

SEQ ID NO: 358858 - DNA, 50 bp, Homo sapiens
aaaaaacttcccaaagaactcctgttacgtcagcagataagcagagagcc

SEQ ID NO: 358859 - DNA, 98 bp, Homo sapiens
gagcaccaggatctcgggctcggaacgagactgcacgagctcctccaagttccccctgatgacgctgcagctgctggacttctgcctgagcatcctga

SEQ ID NO: 358860 - DNA, 100 bp, Homo sapiens
cgctctgggtgaagaatggaagatatctgtgtgaggctggattttctttgcctactccaaccaaagcgacacatcacagcagactggatgcagaagcgtg

SEQ ID NO: 358861 - DNA, 100 bp, Homo sapiens
cccttccaaataagcggcataaagcaattgagaattcaggttgttttctgcatggaccgtgccctagaatttgcccctgcctgccatcgcttcaaaatcc

SEQ ID NO: 358862 - DNA, 100 bp, Homo sapiens
tgtgagccatcaggactccatcactcgtcttatggaggtgtctgtaactgaggtgtgcctaccgcatgttgccgctgctgtttctgctgggacgtctgac

SEQ ID NO: 358863 - DNA, 75 bp, Homo sapiens
aaatcacctatgtttacagcgacagattctctcgggcctagccgtccttggaacccgatattcgggctgggcggt

SEQ ID NO: 358864 - DNA, 98 bp, Homo sapiens
gccagcggttcaaaactcggaaaaggggaatggctttctaaaggacatggggaatacagagaaatccctagtgaaagagacttttttcaagaagtcaa

SEQ ID NO: 358865 - DNA, 90 bp, Homo sapiens
cgagtcccaggtcaagagcctctgcgagaaggaaacttcgagccacgttagatgaatatactactcgtgtgggacagcaagctattgtcc

SEQ ID NO: 358866 - DNA, 98 bp, Homo sapiens
agagcctggagtctgcgaaggccgggacccggttccccggcccacagtgggggtgtgcaaacccgagagaactgggaggcacgcggacctccagtggc

SEQ ID NO: 358867 - DNA, 82 bp, Homo sapiens
ctgccctgggctggaacgaccctggatcaaaatacttgctggatggtggactcagagaccaataaaaataaactgcttgaac

SEQ ID NO: 358868 - DNA, 50 bp, Homo sapiens
ctgcaatgtttttgtggaacatggctttcttagaaatggcttctgaggaa

SEQ ID NO: 358869 - DNA, 99 bp, Homo sapiens
cgcagatggcctgccacgttttccgcgccacagaccccagccaggaatcagagaagatcattgctgagttgaatgaaacttgggaagagaagcttcgta

SEQ ID NO: 358870 - DNA, 100 bp, Homo sapiens
ctgataggaagaagagagcgctacagaagaaagatgtaggtctggtgagctgtaccttctttctggcagtgaatggtctgtattcctctagtgatgatgt

SEQ ID NO: 358871 - DNA, 100 bp, Homo sapiens
aatcccagcaaataggaaaattaagtttagtagtgctcctattaaggtgaaaggtgtagcagtcactcggcctacacccacagcatcgaccttgtgaacc

SEQ ID NO: 358872 - DNA, 95 bp, Homo sapiens
atggcggcccccggcagcgcccggcgacccctgctgctgctactgctgttgctgctgctcggctgtggaaaatctctgttctcacaaagtctccc

SEQ ID NO: 358873 - DNA, 85 bp, Homo sapiens
actcatgtcattcctcctgaggtgtcatttgacagcagacctacaacaagaaaggggcctcccgaaggaaagaccacctgaagga

SEQ ID NO: 358874 - DNA, 101 bp, Homo sapiens
ctgcgctccccgccgcccgcctgcgcctccggggccggccctgcagacgtaaaattcatcctgatcagaaaaatattaatgcctatgttgtgtttaaggag

SEQ ID NO: 358875 - DNA, 100 bp, Homo sapiens
gcatcgacagtgctccaggacttggtgacttcctccagcttcacataataaatttgcgcctcattttggtaagcggaaaaacaaaagagttcctgttttc

SEQ ID NO: 358876 - DNA, 100 bp, Homo sapiens
ttttgagttaattctgaaatgaatccttcatggatttaaaaatcaagttggcgatgaaaattggaggcgtttctctgaccagtttcctcttcccttaaaa

SEQ ID NO: 358877 - DNA, 82 bp, Homo sapiens
acgtcttcaccttcggcagccggctgtacgcacacaccatcgcaggtatcatgatattagctggtttgacatcaagtcattt

SEQ ID NO: 358878 - DNA, 144 bp, Homo sapiens
tactgctccgtggtctcagcccaggacctccaggggaacaatgaggcctacgcagagctcatcgtccttgatgccatggacaatattaccaggcagaaccaattctacgatacccaagtcatcaaacaagaaaacgagtcaggc

SEQ ID NO: 358879 - DNA, 100 bp, Homo sapiens
ccaaaaaaatgcaccaggggaagaagaagaaacagaacaagaatcgcatctcttgggtcggagaagccgtcaagagaggatcattacagagacagactct

SEQ ID NO: 358880 - DNA, 83 bp, Homo sapiens
aaacaggacctccgaaaccaacacaccacagacagaagcattaaaatgcgtggctcaggctagcaagaacagatcactggcag

SEQ ID NO: 358881 - DNA, 100 bp, Homo sapiens
ccaacacccgctgctgcccgcccgctgcctgcctgcctggcatctctctctcccggtgaccggaatgagaagatgaaaaatcaaattaagcagatgatgg

SEQ ID NO: 358882 - DNA, 75 bp, Homo sapiens
tttggagtctgttaagcccaatcagaccaaacattgtctggcttgcactgtaaaactagttagctgaagacgact

SEQ ID NO: 358883 - DNA, 135 bp, Homo sapiens
atggcatcaaggtctttcccaacgaggaggacctcaccgacctccaggtcaccatcgagggccctgagtcaaggaaacttttcttttgagctactgacagcttaactcctgtgaacaaaatttggagcatatttg

SEQ ID NO: 358884 - DNA, 98 bp, Homo sapiens
ctgacggccggtatgtgaaggagaactgcaaacctctgaaggcatgagtacagtaccagaagttatcgttgcacggcactgtggacttcgagtctttg

SEQ ID NO: 358885 - DNA, 99 bp, Homo sapiens
aaaaaaacaaaggtatttatggaattccactgagtggtaatggatgatgcagttcaaataactaagtctattgaagacaatgaagtatatttgcctaat

SEQ ID NO: 358886 - DNA, 75 bp, Homo sapiens
agaacagttaatcctcaatttaagcctgatctaacccctagaaacagttctgctgatcgatgggcccctgagctg

SEQ ID NO: 358887 - DNA, 83 bp, Homo sapiens
ctcgtagcctgccactccgtgcatctgactgcagccatgagcagcaatgagtgcttcaagtgtggacgatctggccactgggc

SEQ ID NO: 358888 - DNA, 100 bp, Homo sapiens
gggctccgtcatctgtctggagggattaaagcctgtggtttccacagaagcaccacctatcatatttgccacaccaactaaactgacctccgattccaca

SEQ ID NO: 358889 - DNA, 80 bp, Homo sapiens
gacggaggaaggacgtgcagttgcagctctttctgcagatgccctgagagaggaggtatattttcctggagtacgcgtcc

SEQ ID NO: 358890 - DNA, 90 bp, Homo sapiens
gcccttgaaccagcaacaatggatgcagtcattccagcaccaacaggatccaagcctttccgttccgaacgtccacggcgccctggcccc

SEQ ID NO: 358891 - DNA, 50 bp, Homo sapiens
ctggactcggattcgttgcctgagggcgtgatggtgggcatgggtcagaa

SEQ ID NO: 358892 - DNA, 101 bp, Homo sapiens
atctgtctcagaatattcaagaagatgatcttcaacatttgcaaattcctatcacatatcctactactgccccagaaattgcagttcctgagctggatgga

SEQ ID NO: 358893 - DNA, 75 bp, Homo sapiens
cgcgacgcgcccggcccggagcccccagcgcagcggccgcgttcctacaacagcagccagtacccctgatgccgt

SEQ ID NO: 358894 - DNA, 100 bp, Homo sapiens
gtcttcatggacatttttgaacttgtggtcgtggattcacagataaagtagatcgactaaaactggcagaaattgtgaagcaggtgatagaagagcaaac

SEQ ID NO: 358895 - DNA, 100 bp, Homo sapiens
ggcgcgagccccgtcctccttcgccgccgcgcacaaccgcacgtgcaggttttagatggagcaggattagatattgatttccatcttgcctctccagaag

SEQ ID NO: 358896 - DNA, 99 bp, Homo sapiens
aaagacttcgaaaaagtgcctgaagtgacacaacacatgttttcttctggtatctggctaaagtgctggagaatctggtaaaagcaccattgtgaagca

SEQ ID NO: 358897 - DNA, 102 bp, Homo sapiens
caagtccgtgctgtttgtgtgtctgggttgtctgcattcaaaagagcattctattaaagctaccttaatttggcgcttatttttcttaatcatgtttctgac

SEQ ID NO: 358898 - DNA, 75 bp, Homo sapiens
gtggcctggtctccattatttgagatgagttacatcttggagcctttccgctgtgcccattgccattactcctgc

SEQ ID NO: 358899 - DNA, 90 bp, Homo sapiens
gaacaatgagaagcaggcagaagattgcatcacacggtatgagttaatacagaaaggagtgactgaacttagaactgttgggaatgttcc

SEQ ID NO: 358900 - DNA, 95 bp, Homo sapiens
acgcggcgaccgccaagaaaggcagcgaggtggagagcgagggcccaagacagggagtggaacagccagccccgtggaggggacctcagctgtgg

SEQ ID NO: 358901 - DNA, 99 bp, Homo sapiens
gttcgcagcgtggattttaaccgaggcacggacaacatcaccgtgaggcagggggacacagccatcctcaggtgctgtaaactgcaaaccataatcctg

SEQ ID NO: 358902 - DNA, 75 bp, Homo sapiens
gttcaggccagaccctctgggagcttctcagccattttccacagatcagcaccagaaatgtcagcagcccaggac

SEQ ID NO: 358903 - DNA, 82 bp, Homo sapiens
gcggaggcttcgagtgacccgggtgccgaggagcgggaagagttgctgggatcacgaggaatacaacaccaatgtatagaac

SEQ ID NO: 358904 - DNA, 100 bp, Homo sapiens
aaattactaagctgcttattatacataatccgagtactactagaaaacccttcacaaggaaatgaatgacagttgaaccaactggaaaacgtttcttact

SEQ ID NO: 358905 - DNA, 75 bp, Homo sapiens
gcctgaagtggcactgaaatgaggcatagatgagggaacactgactatgccaaatggagactacattgaaggtta

SEQ ID NO: 358906 - DNA, 87 bp, Homo sapiens
tcgcgtctgcccggccaagaggcaaaggggaggttacgcagcaaaccatccagaaggactgagcagggggaggaacatttaagctga

SEQ ID NO: 358907 - DNA, 50 bp, Homo sapiens
cgtacccacagtgcttcatgagaggccataggaaaaggatacagagtaga

SEQ ID NO: 358908 - DNA, 100 bp, Homo sapiens
cgggacctggccagcgctgctggcgggcgttagggtgcatctgcagacgcagcaggaggtgaagctgcgcatgacgggcatggcgctgcgggtggtgcgt

SEQ ID NO: 358909 - DNA, 50 bp, Homo sapiens
tcttcttttcttaactggtcaagagatcctgggcttttccacccctccag

SEQ ID NO: 358910 - DNA, 112 bp, Homo sapiens
ggccgacccgggccccgggctagcagagcggaggcgctgccacgaaactcgtacctgcggctaagagcaggttgaaatcacaaagattagacacctttttagataggtgttc

SEQ ID NO: 358911 - DNA, 100 bp, Homo sapiens
aaataccagtccccagtgagggtgtacaaatacccctttgaattaattatggctgttttgcacactagggaccaagaagccctcggggacactgctgaga

SEQ ID NO: 358912 - DNA, 83 bp, Homo sapiens
ctgcagaggaactggaacagaggaacattttgaaacgtaccgaggagaaggcattgtatatgggacactagaggaggtgtggg

SEQ ID NO: 358913 - DNA, 74 bp, Homo sapiens
gaagattgacgccagtaagaacgaggaggatgaaggggtcgagctgtgcagttttagcgggtacaagatctacc

SEQ ID NO: 358914 - DNA, 100 bp, Homo sapiens
caagaggattacctgctttacaagcaaatgaagcaactgaaaaaccccttggaaatagtcagcatacctggtgaacacacagtgttcatcccctcaggag

SEQ ID NO: 358915 - DNA, 106 bp, Homo sapiens
gaatcttgggatttagaggaaaaactgcttgatattagaaagaagagattgctcaaaccacacactccattaataaggtttcctgacagaagagacaatcctaaac

SEQ ID NO: 358916 - DNA, 101 bp, Homo sapiens
ctcaggaacgtgtcccggggccgacccggcccgtagtgtggaagcagcttcaggtgaacctgagcaaggtgggcgagtattggtggaacgccatcctggag

SEQ ID NO: 358917 - DNA, 95 bp, Homo sapiens
aaacatttagaacgatgtgaacatcgaatcatggaatcccttgcatggctctcagctattttggcattctgctggatatatgttcgtaaatacca

SEQ ID NO: 358918 - DNA, 100 bp, Homo sapiens
tgcggcaaccaaatcggcgccaagaggcttcgtgacggagttatcagagacattgagaggcaaattcggaaaaaagaaaacattcgtcttttgggagaac

SEQ ID NO: 358919 - DNA, 90 bp, Homo sapiens
cccaactcagccttcctgcataccctggaccagcagaaacctagagtggatgttaaagtctttagtgaagatgggacaagcaaagtggtg

SEQ ID NO: 358920 - DNA, 74 bp, Homo sapiens
caaggacccaggggatcacctaatgccagaagccgtgtcagctgtgatgcatgtttaaaaggaaattttcgagg

SEQ ID NO: 358921 - DNA, 100 bp, Homo sapiens
ctgtcttcggtggactccttcggcagtccacccaccgccgccgcctcccagccttgaaaagatcttttgaggtcgaggaggtcgagacacccaactccac

SEQ ID NO: 358922 - DNA, 75 bp, Homo sapiens
gctcaactctaagttacctgtggatatccttggaagaaatcctggtaattgatgtccacccgagaaatccctgca

SEQ ID NO: 358923 - DNA, 97 bp, Homo sapiens
gtcggctgctgggaggaggtggtgggctggttcggacgtgggtcgaggctgtagcaggactccaggatttgtgtatcttagaggaccagacgaacag

SEQ ID NO: 358924 - DNA, 99 bp, Homo sapiens
ctgggtcccaggaatgtgctgctgttcctgcaggacaaggaggtgatgtcagacctggaggagagcaaataccagaatgcagagctgcggctctccatt

SEQ ID NO: 358925 - DNA, 100 bp, Homo sapiens
ggggggttcctggaatgcatccttgtggacttcctagcatgggctgttgtgctggagagaacgagagctacgaagagactacagtgcctctgactttttc

SEQ ID NO: 358926 - DNA, 75 bp, Homo sapiens
gccgagtggtctaaggcgccagactcaaggggtcaggagagtgctggtattgtgactagtgatgggagttcggtg

SEQ ID NO: 358927 - DNA, 82 bp, Homo sapiens
acggccctgtgggcctgggagctgcctctgaggaacacgccgcaggaaatggcggtggaagagagggaagtcatcaagagcc

SEQ ID NO: 358928 - DNA, 125 bp, Homo sapiens
aggggcgggaactggccgggaggaccgcgcgggagagcacggatgggcaccctgggctcgatgaaagaccacagcaagattctttcattcgtctcctcctagcctgggggaccaggctcgaactg

SEQ ID NO: 358929 - DNA, 75 bp, Homo sapiens
aatcttgaatcatgaagctactaaccagagccggctctttctcgaaactggcgatggaatatgagaggagccctc

SEQ ID NO: 358930 - DNA, 75 bp, Homo sapiens
aggcccgcgaccgtccgccagtcgtcccgaggtgcttgaggaatccaaagccctcgtgcgctgcaacatgaagat

SEQ ID NO: 358931 - DNA, 156 bp, Homo sapiens
ggcagctacttaatcctactcagaagaacttgtacagagatgtgatgttggagaactatagcaatctggttttcttgggcatccaaagcctctgggatgtgttctgactgtaaaaactctgatgttgtgaaaaaagcttacgctttgcctccactc

SEQ ID NO: 358932 - DNA, 134 bp, Homo sapiens
ccaactcttcgttcgattattagctttagtgaaatgggctaataatgctggcaaagtggaaaaatgtgcgagatgcccgagtggtaaaagacatggcaacaggaaagtctaagggatatggctttgtctccttt

SEQ ID NO: 358933 - DNA, 75 bp, Homo sapiens
agtgactgccaccctggaggacagggcacaacaaccgtttctggggtggaccaagctttgccgcaagaacgccgg

SEQ ID NO: 358934 - DNA, 82 bp, Homo sapiens
gtgtgtgcatctggctgttagaagaattcatgctcatccgggcattttttactgtctacagaaacttattgtaattcatttt

SEQ ID NO: 358935 - DNA, 98 bp, Homo sapiens
aaaaacgttaaagtgtgagagattttatttcaacactgacaagctagttactagagggcctacaaagatgatcgccgggtgtcgatccttttccctcc

SEQ ID NO: 358936 - DNA, 87 bp, Homo sapiens
aagaagcagtaggacagcgttatcctgaagatagttcacggccttatctaaaatccaagaataattgccagaatcaaccaccttcta

SEQ ID NO: 358937 - DNA, 97 bp, Homo sapiens
ctggggagcgcctcgtcgacatgagtgatgtggaggaaaacaacttcgagggcagactccttcgagaactcatagaacggaagaccagctccttgga

SEQ ID NO: 358938 - DNA, 75 bp, Homo sapiens
tgcatgcgtcgtcggcctctgggcagcaggaggctgtgcagaaggtatcctgcagaccatgaactgagcactgtt

SEQ ID NO: 358939 - DNA, 97 bp, Homo sapiens
ggcccttttcgagcctggaagggagagacctggagttcgtcgcctgcagcttcgagaggagttggatcgatcttcttgtggaaacgtcctcttcaat

SEQ ID NO: 358940 - DNA, 111 bp, Homo sapiens
gcggccggctttgaccgcgctaagatggcgactcccatgcatcggctaatagcccggagacaagcgttcgttaccgtgaacgcatcaccattcttcgagggaatcatgaga

SEQ ID NO: 358941 - DNA, 82 bp, Homo sapiens
aaaccaaggatctggggatcttcgcactatcccaaggaatgatttccctgatgaaaagatccctaccctaagggaagctgtt

SEQ ID NO: 358942 - DNA, 137 bp, Homo sapiens
tttccgtggaaattttgagccatttcgaatcacttaaaggagtggacattgctagcaatgagctcccaaagccatccagtttagattttgaagaatgtgctcacaaattgctgaaaatggagtttcctgaaagccaa

SEQ ID NO: 358943 - DNA, 75 bp, Homo sapiens
aactcgatcctgctggctgctgtctctattctctcggcctgtcagcaaaggtggagccagccatcctgagacgtc

SEQ ID NO: 358944 - DNA, 100 bp, Homo sapiens
catggttcaagtgaggactacctacacatggtgcacaggctaagtagtgacggtgagaatccttttgaaattcaagaccattctcaggatcagcaaatag

SEQ ID NO: 358945 - DNA, 100 bp, Homo sapiens
taagcagatgctccagtttgagaaacctggatctgcgatctgtttgtggtattgcgcagcgatgcacggccatcaagtaccacttttctcagcccatccg

SEQ ID NO: 358946 - DNA, 90 bp, Homo sapiens
ctcgatctggccctaaccacagagtcaccttgagacccaacatgagtgaagtttcctgcaagaaacgggacgactatttggaatggccag

SEQ ID NO: 358947 - DNA, 100 bp, Homo sapiens
gggcgccgcgggacctctccgggccatggcttgctcacttccgacagagaaaaacaaaaggtgacagttcgcattcggagaaaaagacggcgaagaggaa

SEQ ID NO: 358948 - DNA, 101 bp, Homo sapiens
aattcgcctccatctgtaccatgggggaaatttgcagtggtgagaaaatgtataaagaaagattctgggaaagaatttgctgcaaagttcatgagaaaaag

SEQ ID NO: 358949 - DNA, 75 bp, Homo sapiens
cccgccccggcctctggggagccccaggaggagtgtgacaagtttaaccaatgtgggacatgcaatgaattcaaa

SEQ ID NO: 358950 - DNA, 82 bp, Homo sapiens
cagcagggcgttggctatgtgcccatcacaggatctcccagccatccagccccggctagtggcggtcagcaaaaccaaacct

SEQ ID NO: 358951 - DNA, 100 bp, Homo sapiens
gaaaacttcactttcttcattcacaatcccaagcgccaggaccttgaagttgaggtcgtaaatgaagagtgtgtccgaaaagactttgaatccagtatga

SEQ ID NO: 358952 - DNA, 100 bp, Homo sapiens
cccggagtcttcctgatccatggacccgatgaacatagacacagcatgttggaacaggattccaggagaatgaaccctagtgtgagccctgcaaatcaaa

SEQ ID NO: 358953 - DNA, 78 bp, Homo sapiens
cgccggagccgcgaggccaacgggctgacgcacgaggcacacaggaaggaggtggagcaggtgtatctgcgctgtgcg

SEQ ID NO: 358954 - DNA, 90 bp, Homo sapiens
aaaatttcagagctgcaaaattatcaggtcctgaggcacgtgaatggccaggatcagattgtgcccggcctgtacgcctgtggggaggcc

SEQ ID NO: 358955 - DNA, 98 bp, Homo sapiens
cccaagctgatatcagcaatgctgtgtgctgctttgtatccaaatgtagtgcaggttacaggaggttccagtggcatcgggaagtgcattgctatcga

SEQ ID NO: 358956 - DNA, 100 bp, Homo sapiens
cggcctggtcctggccccggagctgttgctggacccctggcaggcggccttcctcacccagtccgtttgtctagatgacacaacagtgaagtttgagatc

SEQ ID NO: 358957 - DNA, 103 bp, Homo sapiens
agccaggctggaaagcagtgctgaccatcctcttggcgcacaaacagtctagccagccagctgaaacggactccatgagacaaggtctcaccatgttgcccag

SEQ ID NO: 358958 - DNA, 83 bp, Homo sapiens
cgacgtcgtgatccagaagtccagagctgaggactgcctgtttgcagcatttgacattgtgcagcaaagaaatggttatggag

SEQ ID NO: 358959 - DNA, 98 bp, Homo sapiens
gctgaaaacagactcctgtgatgtaaatgactgtgtccagcaagttgtggaacttctacaggaacgggctaggaattatctgtgaatgtaggaccact

SEQ ID NO: 358960 - DNA, 75 bp, Homo sapiens
cgatatttctaggggtgtacttgttggggtcagggggacccgaagctgccagtactgtaccaagtggagcggaca

SEQ ID NO: 358961 - DNA, 76 bp, Homo sapiens
gacctgctttcggagtacatgggcaatctcatccaggtgctgttggaagatgaaaccactgaaagcgcagttaaac

SEQ ID NO: 358962 - DNA, 83 bp, Homo sapiens
tggcaaacttcagattggagataaacttttagcagagtcctttgcaagagcaaaaaattgggttaaagaacttcagaggcaag

SEQ ID NO: 358963 - DNA, 100 bp, Homo sapiens
tacgacctgttcaagcagagctattggaatcacagatcgccacatcacagaatcgtatctatctcacagctgacaaccttgtgctgaacctacaggatga

SEQ ID NO: 358964 - DNA, 116 bp, Homo sapiens
caaccattgacgccatgtcgggttattcgagtgaccgagaccgcggccgggaccgaggatgtgaagttcatttccaatccgccctccatggtggcagcggggagcgtggtggccgc

SEQ ID NO: 358965 - DNA, 100 bp, Homo sapiens
tagagattgctaatcacgttgacaaggtgctggagaatctggtaaaagcaccattgtgaagcagatgaggatcctgcatgttaatgggtttaatggagag

SEQ ID NO: 358966 - DNA, 50 bp, Homo sapiens
cttggaagctcatggacaaagtggaagaagctgtttgttttgattctgag

SEQ ID NO: 358967 - DNA, 90 bp, Homo sapiens
gggggtcggctgccaggtacagatcggacagctggcttttaaaggaatgaagagactcaatagaatccagtcaatagtgtttgagactgc

SEQ ID NO: 358968 - DNA, 88 bp, Homo sapiens
gacgcccaatcagccaattaccgtcaagattactgagatacggaaacgctggggccagaacactcagcttggattccttagcaccacc

SEQ ID NO: 358969 - DNA, 96 bp, Homo sapiens
cggcagagcaaggggcttacgcagaaggacctggccacgggagtgcatccgccccaacccttttccccctcgtctcctgtgagaattccccgtcgg

SEQ ID NO: 358970 - DNA, 82 bp, Homo sapiens
ccctgtgtgatgcttttgatatctggggccaagggacaatggtcaccgtctcttcaggatgaaacaggcgcctatttaatcg

SEQ ID NO: 358971 - DNA, 90 bp, Homo sapiens
ggcaaggaaagcagcatagagaatgagatagccgtcctgagaaaatatatgcacactttctgagaaggagagacaaatcaagaaacaaac

SEQ ID NO: 358972 - DNA, 88 bp, Homo sapiens
gttcacagaccgagttagcaattgtcaccgcagactttgttaaggtgggctgtaacaaggtgtacacgagcacgtctgacgtgatgac

SEQ ID NO: 358973 - DNA, 50 bp, Homo sapiens
gctggaagaggcatatagctctgctcccatggtgaatagatcaaccaagc

SEQ ID NO: 358974 - DNA, 75 bp, Homo sapiens
gttgtctatggctcctggtcatacagatagaggagtatgagcctgatgtgggcagaatccagatgagctggccag

SEQ ID NO: 358975 - DNA, 75 bp, Homo sapiens
gcattgatgaaattaaagatgcatgctgatggcgataagtcattaccacagctagagatgatcgctatggaaaat

SEQ ID NO: 358976 - DNA, 73 bp, Homo sapiens
gatcacaaatgtgatggaggcaaaccagcgggtacggttcctggagcagcagaacaagatgctggagaccaag

SEQ ID NO: 358977 - DNA, 80 bp, Homo sapiens
gccgtgtcccgaggaagtgcaagacccgccgctgccatggcccagacactgcagatggagatcccgaacttcggcaacag

SEQ ID NO: 358978 - DNA, 75 bp, Homo sapiens
tcccccctccactcacccggcagatatccgtgaaggctctagaaaaatccagttacactcttaaaggaattgtca

SEQ ID NO: 358979 - DNA, 88 bp, Homo sapiens
cgaccttaatgggaggccccgggaggccgaggttcggtgtctttggtgcaacactaacaaggcttgtctggactacccagttacaagc

SEQ ID NO: 358980 - DNA, 83 bp, Homo sapiens
ccgcccgtctgttcgcgctgctgctgttcttcgtaggcggagtcgccgagtcggtatcatgatattagctggtttgacatcaa

SEQ ID NO: 358981 - DNA, 100 bp, Homo sapiens
cttcgggagttgatctctaatgcttctgatgatgaaaactttcggaagagaaagttgcctgtggtaagttcagttgttaaagtaaaaaaattcaatcatg

SEQ ID NO: 358982 - DNA, 80 bp, Homo sapiens
cggctctgtaggaaggaacttggttccccctccctcagcttccgccccaaaaggtgaaaggtgtagcagtcactcggcct

SEQ ID NO: 358983 - DNA, 100 bp, Homo sapiens
cagctgttgaaaggatgctctctgctcgtgcctcaaacgcttggattctacagcaacatattgggagtacacctttaggatgctataaaaaactaataga

SEQ ID NO: 358984 - DNA, 50 bp, Homo sapiens
caggtgctggaggacttcccaacggacttggaaaaggagagtgacacacc

SEQ ID NO: 358985 - DNA, 101 bp, Homo sapiens
cctgtctgataactgactctgatctcaacattttggctgaaatacagtttatgtaacttgatggaagaaaatggaattactccaaaaagacaagtgctcaa

SEQ ID NO: 358986 - DNA, 88 bp, Homo sapiens
agtgctttccccaagtagtccgatggctgcggctgcgccgaggcgccctactcagacccaacatgagtgaagtttcctgcaagaaacg

SEQ ID NO: 358987 - DNA, 83 bp, Homo sapiens
caaagaaaaactttgaagtagtggatctggtggatgtcaatacccctgatttaatgatctccagcaccctgccggtggcacta

SEQ ID NO: 358988 - DNA, 98 bp, Homo sapiens
cggctggcagcgctgtgtgcgagagggtgctgtgctctacatcagatgtgtcatgaagctttgtcacatatctgggtaccaggtttgacctcaagaga

SEQ ID NO: 358989 - DNA, 100 bp, Homo sapiens
ttctagaaggaaaatcacagaggtaaagcatcatttcatcacatcctgtcaagggtggattttgcaaatcgttttgttggaggtggtgtaaccagtgcag

SEQ ID NO: 358990 - DNA, 100 bp, Homo sapiens
aatgacaaagataagaagatagctgagttggaaaggaaagaatacccacctcatgtccaaaaagttgaaattaatcctgtaaggttaagtcggctccaag

SEQ ID NO: 358991 - DNA, 85 bp, Homo sapiens
ccacagatagtgatgagatttcacatattgttaatcgtattgctcctcaggcagtacttaattttcctaaatattgtgaacccgt

SEQ ID NO: 358992 - DNA, 87 bp, Homo sapiens
aatgatgggtgcccttgtggccagtaggcaatcacctgaaggatctgacttccagaaggtgttggagcgggccggagagaagtagag

SEQ ID NO: 358993 - DNA, 83 bp, Homo sapiens
gtgggttttggtggggactttgatggtgttccaagatttcatgagcactggaggtttgtgttgcagcgcttggtcttcttggc

SEQ ID NO: 358994 - DNA, 76 bp, Homo sapiens
cggcatctgctacctttgagagtgccagagataattgacgaccttgccaacctagtggagaacacagatgaaaaac

SEQ ID NO: 358995 - DNA, 82 bp, Homo sapiens
cccttggctgggatcaccaggagaaattgcagctgcatgaatcccaaaaaggttcctcaacttaaaagggatgaggagacct

SEQ ID NO: 358996 - DNA, 100 bp, Homo sapiens
ttttggcagattatggctttgtccccacccagcactgatgatattataaagattcactccttctccagttgcacagccacacccttcagctggccttaat

SEQ ID NO: 358997 - DNA, 75 bp, Homo sapiens
ggctgcgagggactaagagcagagtggtgaggtttctgaagaattatccctgaaactgccaccaaatgtggtaga

SEQ ID NO: 358998 - DNA, 97 bp, Homo sapiens
tgtgaaccccagtgtaaccaccatcaaaaccattgaagaaaattcttttgggagccaaacccacgaatccttcaggttcctgttccgtagatgtgag

SEQ ID NO: 358999 - DNA, 96 bp, Homo sapiens
gcccgggcggcgggcggagacgtgggcgccctccccgccaaggcccgtgcgaggtatcatgatattagctggtttgacatcaagtcatttgtgagt

SEQ ID NO: 359000 - DNA, 74 bp, Homo sapiens
ttgtggcaggctctatggcctgcaggaagcgctggaaatagccagagagatgacagggtctcgctctgttgtcc

SEQ ID NO: 359001 - DNA, 75 bp, Homo sapiens
gaagcgactgagtccgcgatggaggctactgcagcactggggtgtcagttgttggtccgacccagaacgcttcag

SEQ ID NO: 359002 - DNA, 80 bp, Homo sapiens
gggtaacacccttccagatgatttttgagcacatttaactggacggtccccttcctttcatctctggcctgtttgattct

SEQ ID NO: 359003 - DNA, 100 bp, Homo sapiens
cttcgctgtggcatggcggacgaggggaagtcgtacagcggttgtgaccgagattcccgacgagagagactgaggggaagagaggaaggaggggcgggct

SEQ ID NO: 359004 - DNA, 101 bp, Homo sapiens
cgacgaggagccggctttgagcagtctctggaatctgttctgcgccacccggcagataatcgcacccagattcgagagcttggccagactctgattgatgg

SEQ ID NO: 359005 - DNA, 82 bp, Homo sapiens
gggaaacccaaattgtagctgacgaagcattttgcaacgcagttcggagttattatgaggtcaatgtgacggtggactacat

SEQ ID NO: 359006 - DNA, 78 bp, Homo sapiens
gcagaacgcaacgccagccatctggtatgttcgggtatattcaagagcaaatgaccaagagccatgtgggtggtggtt

SEQ ID NO: 359007 - DNA, 98 bp, Homo sapiens
actgcagcaactttgacaaaactggaagaatttcgcagtaagacagcaacagaatcgaagcaaacgcttggagaaggtccatgtggttattgggccta

SEQ ID NO: 359008 - DNA, 73 bp, Homo sapiens
cgaccttccttgctttcagaatttcacccaggttctgacaggttgcaaattcgtgaagaatcagcatcatgtt

SEQ ID NO: 359009 - DNA, 85 bp, Homo sapiens
aaatatgctacagatagatgttaaggacatctgcaaatctttcaccaattgtgcaacttgctttggtgtttgctgttttattgcc

SEQ ID NO: 359010 - DNA, 51 bp, Homo sapiens
actggtgcctgcgctgaaaaaggtctgtaaactgcagcaaaaagttcaaaa

SEQ ID NO: 359011 - DNA, 100 bp, Homo sapiens
gtaaagctcttcatgcaaggaaacataagttggaggttctggaatctcagatttaccggaacattccaggatttttacgtacacttatggatgccctgag

SEQ ID NO: 359012 - DNA, 101 bp, Homo sapiens
ccctttaagtttatgctaggcaagcaggaggtgatccgaggctgggaagaaggggttgcccagtttctctgcaggtggatattgttcccagccagggggag

SEQ ID NO: 359013 - DNA, 83 bp, Homo sapiens
ggggacaccaaaactcatttggcagcagaggtgaggtccagctgctgcttgcgtgtctttgcatggcacccccacaccaacaa

SEQ ID NO: 359014 - DNA, 101 bp, Homo sapiens
ccacacattcgttcctggccagaagtaaaagcacagctgccttgtctggagaagcagacacgaatgcagagtttgagtccagatcccaaagcccagtacac

SEQ ID NO: 359015 - DNA, 51 bp, Homo sapiens
taaggattccaagtaactcttatttggtatccctcgtacttggcccctgag

SEQ ID NO: 359016 - DNA, 82 bp, Homo sapiens
cgctggatttttttcgggtagtggaaaaccagaacaccttccaccatgaccacctcagcaagttcccacttaaataaaggca

SEQ ID NO: 359017 - DNA, 100 bp, Homo sapiens
cctacagatctgtgggactggtttgaatccttccttgatgatgaagaggtagttgtgtcaactaacatagcagagacgtctttgacaatagatggtgtgg

SEQ ID NO: 359018 - DNA, 100 bp, Homo sapiens
agaagctgagcctttctggacagaccaacctgtcagtgctgcaagtggcccgggagagtggcccaccccacatgaagaactttgtgaccaaggtttcggt

SEQ ID NO: 359019 - DNA, 87 bp, Homo sapiens
attacgcaggccagcaactcccagctcaatgcaatggataacttcaaactaatgtgtactaatgccatgatttacaataaaccagag

SEQ ID NO: 359020 - DNA, 90 bp, Homo sapiens
gcgccgtagagatcgctcccactcaggtcacagccgcatttcacagctgagtgtcgctttaaggagtgtgtctttgagaattactacgtc

SEQ ID NO: 359021 - DNA, 73 bp, Homo sapiens
tccgagtcagattggagcatttgtgttgatgaagatgaaagagactgcagatgacgaagatgatcctgcagaa

SEQ ID NO: 359022 - DNA, 100 bp, Homo sapiens
cccagccctgggtgggggctgtctcggcaccttcacctccctgctgctgctggcgtcgacaggacttgaactgccatgtcctctgaagaaggaaagctct

SEQ ID NO: 359023 - DNA, 100 bp, Homo sapiens
tttggatgctcatgaaatttgtctgcaagatatccagacttatctaaaaacagactggttgaagttccaatggaattgtgccattttgtatcactggaaa

SEQ ID NO: 359024 - DNA, 90 bp, Homo sapiens
gggcttcgtgccctgtgcacgtttgccacctagtgaccaaactgaatcccttcccactggaggcatgtgatgagaggaaatcaccgaaaa

SEQ ID NO: 359025 - DNA, 51 bp, Homo sapiens
gtcgggctctggaggaaaagaaaggagcttactccacgggaacagcctcta

SEQ ID NO: 359026 - DNA, 100 bp, Homo sapiens
cagcaaaagaaaaatattgctgtacctaaattcaagtgtctcaatgcttgtacctactgcaaaactaaacacgccagaggaaatttggccagttatccaa

SEQ ID NO: 359027 - DNA, 78 bp, Homo sapiens
agacgacgctgctgggtccgctgagcggggcgacccgagatcccaccacctgctgaggagaaaaattcttcaagactc

SEQ ID NO: 359028 - DNA, 100 bp, Homo sapiens
gctgaatgtggagagggtcttccaggacggccgagacgcatccagagctttcgtgaccggggactgttctgaagcaggcctcgtggatgacgtatccgac

SEQ ID NO: 359029 - DNA, 100 bp, Homo sapiens
acctgcacgaatacgcctcgataaacagggccgtgccgcagatgcccaccggaatggagaaggaagaggagtcgcctgggttactaggtgtctttcagaa

SEQ ID NO: 359030 - DNA, 100 bp, Homo sapiens
gatgcggactcccgcgcccccttcaccccgacctggccgcggagccgcgagcgtgaagccgccgccttccgggcatggctggaaagaactccaggtttag

SEQ ID NO: 359031 - DNA, 100 bp, Homo sapiens
ttagagctcagttggttgatatgaaacgactggagtgtacaccttaaacaatgagaagcagtggataaataaggctgttggagataaacttcctgaatgt

SEQ ID NO: 359032 - DNA, 97 bp, Homo sapiens
agcgtgagtgatcactctcaatcccggattgaccgactcatcagtcacggggccgacatcctgaagcctgtaatgctcaggcagggagaaaaggagg

SEQ ID NO: 359033 - DNA, 100 bp, Homo sapiens
cggggctgaggcggccgcggggcccgagcgcagccgctgccatggcccagacactgcagatggagatcccgaacttcggcaacagcatcctggagtgcct

SEQ ID NO: 359034 - DNA, 100 bp, Homo sapiens
ctcaaggcaggttgacgtgtaatgacaccagcgcagctctcttgatttcacacattgtgcaatgcctccatgaagaagtggactattctgagaaactgaa

SEQ ID NO: 359035 - DNA, 75 bp, Homo sapiens
gtgagagactgcctagagaaggacccaattgaccggacagatgatgacattgcatttgacattgtgcagcaaaga

SEQ ID NO: 359036 - DNA, 98 bp, Homo sapiens
caggcccgccgcctccctgccaaggctcttgtcaggatggtgaagctgttcatcggaaacctgccccgggaggctacagagcaggagattcgctcact

SEQ ID NO: 359037 - DNA, 75 bp, Homo sapiens
caggccacaaatgctttcacagatgaataatacggcagctagtccaatgtctactgcaacttcaagtagtggaag

SEQ ID NO: 359038 - DNA, 98 bp, Homo sapiens
gaaaagaagatgatacaaatgaatttgttagtgctgtgtgctggagggcactaccagatgggcaaatggttatgagccttagagtttctgaactccaa

SEQ ID NO: 359039 - DNA, 100 bp, Homo sapiens
tttctcgtcggcggcgccctgcaccgcgcctcgcaaatggtatgtgtgcaacagagagaaattatgcgaatcactccaggctgtctttgttcagagttac

SEQ ID NO: 359040 - DNA, 100 bp, Homo sapiens
ctcaagcgcagggactatgtcttaaggcgctttgcagagccaagctcatttctggcacataagaggttgtgggagacaagtagccaacagtatcataact

SEQ ID NO: 359041 - DNA, 76 bp, Homo sapiens
tgcatcaattacaagttctaatgtgcatgttccagctgcagtcccatgtctgtcttcaccaagaaggacgactttg

SEQ ID NO: 359042 - DNA, 117 bp, Homo sapiens
ctcagaactgttccttcagccaaagaaacaagccgtggaataggtgtatcaagtaatggtgcaaagcctgaagtggggaacgccaagcacaacgtgcatgtcatgaacatctccaca

SEQ ID NO: 359043 - DNA, 100 bp, Homo sapiens
cggaagaccgcgcgcagggcctgcagcgggagctggacggcgagcgcgagcggcgcgagaaagtaagtaaggaggtctctgtaccatggctcgtacaaag

SEQ ID NO: 359044 - DNA, 75 bp, Homo sapiens
ctctcatcgctctcggcctcggcctcggcctccgacacgacccaacatgagtgaagtttcctgcaagaaacggga

SEQ ID NO: 359045 - DNA, 100 bp, Homo sapiens
gagaagtcacaaaacagcagatttcccaagagcagcggaaaatgatccagtcacagtttttttcaccgctcaaccctgtgagagtacacattgaaattgg

SEQ ID NO: 359046 - DNA, 75 bp, Homo sapiens
aagctctgcgaggccatctgccccgcccaggttctgcggcatgaggaatttgaagaaggctgcaaagctgcctgt

SEQ ID NO: 359047 - DNA, 100 bp, Homo sapiens
gctcaccttcctgaaccgagccgaggattacacccttaccatgccctacgcccactgcaaagggtggctgttgcaccacgccctccctcctgcccctgag

SEQ ID NO: 359048 - DNA, 149 bp, Homo sapiens
gctgcagggctccggtgagaacctggctgcctggcaccccatcaagcctcatgggatccttatcttgggccaggagcagagcgccgccaagatgatcaaagagacaatggacaagaagttcggctcctcctggcacgtggtgatcggcg

SEQ ID NO: 359049 - DNA, 98 bp, Homo sapiens
cagagcctgggagacagcaagaccattcccggtctggagcccggcactgtggtcataacagagcaggcagtggatacctgcttcaaggcagagtttga

SEQ ID NO: 359050 - DNA, 76 bp, Homo sapiens
ccttgcactatgctgctgcctcagggatgaaagcctgtgtagagatggtagagaagaccgtggatcacctggggac

SEQ ID NO: 359051 - DNA, 96 bp, Homo sapiens
ggggcgttccccagaccatggcatctacggaagggctctatcaaagaaagcaagagatggaaaattgttgcctgaagaataccaaggaggatcttt

SEQ ID NO: 359052 - DNA, 83 bp, Homo sapiens
cccatcctgccgtccttctccactttcgccagcccgtgccgcgagcgcggcctgcaggagctgcatggctacttggagaatga

SEQ ID NO: 359053 - DNA, 75 bp, Homo sapiens
cggcgccatcttcgaacttagacttccggaaggactttggcgaggcccgacggccatggaggctgaagagacgat

SEQ ID NO: 359054 - DNA, 96 bp, Homo sapiens
ccggaagtcaccattggagctcatcagactgaccgtgtcttacatcagttcagagagacaaatttacatgtattggagaccagaccagaagccctt

SEQ ID NO: 359055 - DNA, 100 bp, Homo sapiens
ctggtcagatgaacccatcaaagagtgcggcatctccttggaaacaatgccatctttgaatgtgagagataaacctagtttcagcatgtctgcagcagag

SEQ ID NO: 359056 - DNA, 83 bp, Homo sapiens
agctctcctctgatggcaggacctgccaaggtgaggaagaggatggagatgaagatgaggaagctgagtcagctacgggcaag

SEQ ID NO: 359057 - DNA, 111 bp, Homo sapiens
ctcgggacgggagaggccgtgtagcgtcgccgttactccgaggagataccagtcggtagaggacagcccacctgaggatattgaccataaggactcatatctcattacaag

SEQ ID NO: 359058 - DNA, 74 bp, Homo sapiens
taagagcttggaggcggcccgcgggaattgaatgatctggcacgggaccctccagcacagtgttcagcaggtcc

SEQ ID NO: 359059 - DNA, 114 bp, Homo sapiens
ccagaagtgatcgctcagctggagaacgcggctaaagttctgatggaccaagaatcgccttcagccctgtctggtgcatccttggcagaaagtgaggaggaaaacacccccatt

SEQ ID NO: 359060 - DNA, 75 bp, Homo sapiens
acgaaataaagctcctgggcaaggggacgtctgcagctgaacccaacatgagtgaagtttcctgcaagaaacggg

SEQ ID NO: 359061 - DNA, 75 bp, Homo sapiens
ttcaagccaaacatcaagcagaatgtgatttgcttgaagatatgaggaatgaatctgaagtctgctgcagtaaaa

SEQ ID NO: 359062 - DNA, 86 bp, Homo sapiens
ggcgtaccgtggccagggtcagaaagtgcagaaggttatggtgcagcccatcatcagttttctgaggaaggtgatgaaaccaaaac

SEQ ID NO: 359063 - DNA, 100 bp, Homo sapiens
cactcctgcaacccagttttccagccaccagtgggatgatgggtcaaaaattgcatgttcaaacaaaaggaggcaaagtgatctgtctgggaacagttta

SEQ ID NO: 359064 - DNA, 85 bp, Homo sapiens
cagacccggatgctcccagcaggaaggatcccaaatacaggtcccccacggcccttcaggatgaaagctgcggtgctgaccttgg

SEQ ID NO: 359065 - DNA, 101 bp, Homo sapiens
cctaggccctattcaaaacaaggcttccgagtggacctgccaatcaagtcggcccgctaccgtggccagtacaacacctatcccatcaagctcttctatac

SEQ ID NO: 359066 - DNA, 100 bp, Homo sapiens
tgatcggagggtatggttggcatggaattgaatttcatctgtctgtgggaattgtaagcaaggaaatgtggctttagataatctacagataaaagaaaat

SEQ ID NO: 359067 - DNA, 88 bp, Homo sapiens
agcagattccagcctccacatgtacatatgtagtgggcagcagtcagtgacaggtgtaacctctgtggatgacagcaacagttactgg

SEQ ID NO: 359068 - DNA, 82 bp, Homo sapiens
aacaagtctgcgcaaaatttgtcgaggaggtttgccgcggcagctgctgaaatgggttgcggattgaacaagttagagaaac

SEQ ID NO: 359069 - DNA, 90 bp, Homo sapiens
cttgttcccccaaatgtctgactctgactctcggactgagaaacgcaagattcttcgctgctgctgccttaccgccgagaaccaccaccc

SEQ ID NO: 359070 - DNA, 82 bp, Homo sapiens
cagcatattgtactggcctgctgctggcccgcagggtgcggctctatgagtggacaacagagaaggagctgcgcactgagtg

SEQ ID NO: 359071 - DNA, 82 bp, Homo sapiens
ctggtagatgcttcacagcaaactgaatgaactctggaagcccagccagggacaatgcaccttcacagagattctgcactaa

SEQ ID NO: 359072 - DNA, 87 bp, Homo sapiens
agaagaaactgaggcctggaatttgattaactcattcaaggttacccagttgctccagggtttgagccacaatgtgatcttcacctt

SEQ ID NO: 359073 - DNA, 97 bp, Homo sapiens
ggcggcggcggcaccaacggcaccaactattcgcggagctggaatgactggcaacccaggattatcgagattgcagcctgtcactccacacacacgt

SEQ ID NO: 359074 - DNA, 75 bp, Homo sapiens
gcctgctctccaacttccctgacatcatccatctacaaaaagagcttactcacatagcatattggtatatcaaaa

SEQ ID NO: 359075 - DNA, 100 bp, Homo sapiens
caagcagtgcaagacccatccccactttgtgattccctaccgctgcttaggaatccaaatgagactcagaacaatagcacaagctggcctgtcttcaaaa

SEQ ID NO: 359076 - DNA, 83 bp, Homo sapiens
tggtggaggctgtggcaatggaacaggcttgagaaacagttacggctagatgaggctcaagaagcagaatgccaggccttgag

SEQ ID NO: 359077 - DNA, 75 bp, Homo sapiens
attttcatttgcatgtcctacggagaaaaggagaacatcgtatgaggtggagtctcgctctgtcgcccaggctgg

SEQ ID NO: 359078 - DNA, 83 bp, Homo sapiens
agggtcagtcacagccatgtgggctacacactctcctacaagaactgtggctgcaccatctgtcttcatcttcccgccatctg

SEQ ID NO: 359079 - DNA, 88 bp, Homo sapiens
atgcgacaggctaagctggattatcagaggctgcctaccacaaggactttagcttactttttaaagattgaagaaaaaaaagaagaca

SEQ ID NO: 359080 - DNA, 90 bp, Homo sapiens
gtccagagaaggtggaggaatcctgatactgagcgacatgtcatgctgcccaaggacatagccaagctggtccctaaaacccatctgatg

SEQ ID NO: 359081 - DNA, 48 bp, Homo sapiens
caccgcaccgagggcgagctccagggcagagcggcttgggtaaatcca

SEQ ID NO: 359082 - DNA, 82 bp, Homo sapiens
gccagagacgacaacccgggcctccgagatcagttggccttatttcctcagtggaaatctactcactatgatgtggtagttg

SEQ ID NO: 359083 - DNA, 82 bp, Homo sapiens
aacgggaccagctctgcggagactttgtgttttatgccccacgtctgagaatcaacaagcggatcctgcagctctgcatggg

SEQ ID NO: 359084 - DNA, 83 bp, Homo sapiens
tccaagtcatgcattttctaatctgcccaatatttccagaatgtttttcttcccccagtccctcagctgctgctgctgctcag

SEQ ID NO: 359085 - DNA, 100 bp, Homo sapiens
gaagcgaagccgaaaaaggcagcagcgaaggcctcgaaaaagcccaagacagcagaagcagacacctccagtgaactagcaaagaaaagcaaagaagtat

SEQ ID NO: 359086 - DNA, 76 bp, Homo sapiens
caaaggaactgtccacactgctgaaaaatctggctatttttatgattcccacaaatccaccaccaacattcagaaa

SEQ ID NO: 359087 - DNA, 74 bp, Homo sapiens
cggatcagagagggctaccttgtgaagaagtcatccctttcaagccctgatatcttcgactccccaagtcccga

SEQ ID NO: 359088 - DNA, 75 bp, Homo sapiens
tgaattagacccgtttcctatagatgagaaaccatacaagctgtggtagctacagcaagctgggtagcaggcaga

SEQ ID NO: 359089 - DNA, 75 bp, Homo sapiens
acaacccagatgtgcaacaaagtgcgatggtgtactattgactggaagaaaggaaagaatgttactgtcaaaacc

SEQ ID NO: 359090 - DNA, 100 bp, Homo sapiens
gggaggggagagcccgagcgctggagttggtgctgggaaacccggggctaatgttgacaacaggctcgagaacttgggaatcagtgaaacgtacaaccag

SEQ ID NO: 359091 - DNA, 98 bp, Homo sapiens
ggaggatcccttgatgccaagagttcgagaccagctggggcaacaaaaactggcaagggaactgaatttttcagtggatgaaatcaatcaaatacgtg

SEQ ID NO: 359092 - DNA, 97 bp, Homo sapiens
tccccagtcgctgctgcagacgacactgttcctgctgagtctgctcttcctggtccaagatttgtaagccttatggacaatcctattgataatgccc

SEQ ID NO: 359093 - DNA, 75 bp, Homo sapiens
ctggaaattgccttattggaaaaacatttcttacgttacgggcaggacttgagtggcttcggacagggcttctca

SEQ ID NO: 359094 - DNA, 75 bp, Homo sapiens
cgaggcagcttccagaacccagccagcagtccaagtagctggtacttcctcaccagcttctacactaagtacgac

SEQ ID NO: 359095 - DNA, 100 bp, Homo sapiens
gtacaggtttgcagattccgccagcagcacagcaagctctacagatgagtggctctttggcatttggtgctgtggcagcatatattttgtgaagagtgca

SEQ ID NO: 359096 - DNA, 83 bp, Homo sapiens
cggaggtgggagactgaaccatctccacatctagttgccccagggctatggttctgatggtctaaagttgttatcacatgaag

SEQ ID NO: 359097 - DNA, 75 bp, Homo sapiens
ggcatttacagaaagagtcaacagcagtggcaacagggatggcaccacagatgtgacgcggacaatgcattttgg

SEQ ID NO: 359098 - DNA, 100 bp, Homo sapiens
acccaggaggcatttgaagttccattcattatgctgacatatcttttcatgttggcctggctgggagtcacggctttcacctcactgccagtttacatgt

SEQ ID NO: 359099 - DNA, 74 bp, Homo sapiens
gatcctctcatctcagcctccaaaagtgctggcattacaggtccggcctctttggcctacccccgttggctccg

SEQ ID NO: 359100 - DNA, 76 bp, Homo sapiens
tccaagcaataacccaagcaaaacttcagatgcagtgacttaagagattaaaattaatttggttgctgttggttct

SEQ ID NO: 359101 - DNA, 50 bp, Homo sapiens
gtacaagctttcaaagtcaatgttctgactcagaagatcttttggaagaa

SEQ ID NO: 359102 - DNA, 75 bp, Homo sapiens
cgcgggtctgtcatcatgtcgcgttacgggcggtacggaggagatatatttttgccatcatggatcagtttggag

SEQ ID NO: 359103 - DNA, 112 bp, Homo sapiens
gttattttggaggaagtctgtatgctagacaaggaggtatataccctctcagtgtctggagaccggctgattgtgggaacagcaggccgcagagtgttggtgtgggacttac

SEQ ID NO: 359104 - DNA, 75 bp, Homo sapiens
gcttcatcttcccagttcatcatggcttcaacatccaggtctctaattaacagaagatggcaaagcccagccaca

SEQ ID NO: 359105 - DNA, 100 bp, Homo sapiens
cggaggccccaacaccaggaaggactatcacatcgaagagggtgaagaggttcgagaacttgtcttggacaattgcaaatcaaatgatggaaaaattgag

SEQ ID NO: 359106 - DNA, 75 bp, Homo sapiens
ggatctcaatgaatggattgctgtgaacatccagcctagggtgaatgtttccccctccaagaaggggcccttgca

SEQ ID NO: 359107 - DNA, 76 bp, Homo sapiens
acgagcagatcctggtcctcgatccgcccacagacctcaaattcaaaggtattgttgcagcatctggcagtgagac

SEQ ID NO: 359108 - DNA, 87 bp, Homo sapiens
tgggagaatatttaatggaaaatcgcttggttaaaacctgacacttttaacaggtcagtaacagatccaagagatggaaagagagta

SEQ ID NO: 359109 - DNA, 75 bp, Homo sapiens
gaagctgttaaacacattggatatgatgattcttccaaaggaactgtggctgcaccatctgtcttcatcttcccg

SEQ ID NO: 359110 - DNA, 88 bp, Homo sapiens
aaatttttgggaaggtgcaaggggtgtttttccgtaagcatactcagtggtagacggaggagaagtccatccccaccacccaccagaa

SEQ ID NO: 359111 - DNA, 75 bp, Homo sapiens
atatcgacgtcgtgatccagaagtccagagctgaggactgcctgtttgcaggaggagattgtatttcgttactac

SEQ ID NO: 359112 - DNA, 100 bp, Homo sapiens
ggagggggactccaggaaaagccgttgagaggaccatcacaacctgagcagcacagctccttgctcggattgaacgtatggaaaggcggatgcagctggt

SEQ ID NO: 359113 - DNA, 100 bp, Homo sapiens
gtggccctctcagcaaacggtcctgcacaacaggtttcagtgttgactggtgggctcttggagtgctcatgtttgagatgatggcaggaaggtctccatt

SEQ ID NO: 359114 - DNA, 100 bp, Homo sapiens
ctggaggacacacctaaacatgtggaatcccaatgccggttcttttgaagtaaccagtgatcttttttgcttaccctcatcaacagaatggatgaagata

SEQ ID NO: 359115 - DNA, 100 bp, Homo sapiens
gccatccacttagcaggcctccagcaagatctccgatgactcttgtgaagcagcaggcgccaagtgatgaagcattcctctgaatattgatttgctgaat

SEQ ID NO: 359116 - DNA, 96 bp, Homo sapiens
cccaggcaagaacgtgtagcaataaaacggatcaacttggaaaaatgccagaccagtatggatgaactattaccaaaacctattgatgtacaagtc

SEQ ID NO: 359117 - DNA, 85 bp, Homo sapiens
tgacggggacggccaacaaggcttccctgtgcatcagcaccaaaagaaagaccacagcaagattctttcattcgtctcctcctag

SEQ ID NO: 359118 - DNA, 78 bp, Homo sapiens
tttcaagctggtcatcatgatgaaacttagacacaacacttgaatccagacacagaactgaaaaggtattttggtgcc

SEQ ID NO: 359119 - DNA, 75 bp, Homo sapiens
gcacctgcacacctggatccaggataacggaggctggtccacagacaaacgaatttaaaggagcaaccgaggagg

SEQ ID NO: 359120 - DNA, 75 bp, Homo sapiens
ctgaaccaggccccagacatgctgcatagaaattgcaggtgctgcagtgtctgaaatttccgggcctttctcaac

SEQ ID NO: 359121 - DNA, 101 bp, Homo sapiens
aaaaagacgaaagaagaagaagagcaaagggccttctgcagatgtgtatatctcatgattgatatggagaaactagtcatgggccaaaggtcaagatactt

SEQ ID NO: 359122 - DNA, 80 bp, Homo sapiens
cccgagttatgcccaccctccaactttgcgacggaaatgtgtcatcgaaagccagcaattctgtggtgttcttggtcaca

SEQ ID NO: 359123 - DNA, 98 bp, Homo sapiens
cctgctccacgcagtctgcttcagtgcagtgaaggatgaactggacctcacagacaaacacagagaagccatgtttgcacttccagctgagaaaaaat

SEQ ID NO: 359124 - DNA, 100 bp, Homo sapiens
acaactggtgctgatggctcccttggcgaaggagtctgtttttcaacccaggaagtacaagttgtgcaaagtgaggaagattactgtgggagtgaaggga

SEQ ID NO: 359125 - DNA, 100 bp, Homo sapiens
aacccagaaaaaatacttcgcaaaatcccaaagcaaaattaccaggtaaaatgtttattggaggcttgagctgggatacaagcaaaaaagatctgacaga

SEQ ID NO: 359126 - DNA, 100 bp, Homo sapiens
ggagaaattcagacggctcccgagggacaaagcaggacctcataaggaaatctacccctatgtcatccaggaacttagaccaactttaaatgaactggga

SEQ ID NO: 359127 - DNA, 100 bp, Homo sapiens
tcaacaccagcaccgcagatgttgtcaaggtggcctaccaggaggccaggggtgtcgccatggtaactgctggttccttgcagctgccgcctcccttact

SEQ ID NO: 359128 - DNA, 50 bp, Homo sapiens
aggcctccccagccatgcagaactctatttgcatgcaaagaacatcatcc

SEQ ID NO: 359129 - DNA, 90 bp, Homo sapiens
gcggcggctctctggtccgcagcggcaacagtaacgaaaaacagggctccgaagggagccgatcggaaacagaagactgaccgggagaag

SEQ ID NO: 359130 - DNA, 76 bp, Homo sapiens
ggaagtgcagctgcctcagttcttagcgcagtgacaccacagccaaagccctatgggaagctttactgaacactaa

SEQ ID NO: 359131 - DNA, 75 bp, Homo sapiens
atcaaatacttacacttgaaaaggatcagaattggtgctcttggaatattgctgttaccatcatttttggggggc

SEQ ID NO: 359132 - DNA, 50 bp, Homo sapiens
gatgatgccaaagttttattaggtactccaaagattcaggtttactcacg

SEQ ID NO: 359133 - DNA, 87 bp, Homo sapiens
agagtatgcaagagtcaccttctcaactgttgtcctcatgatgtcctttctggaactagccataagtgtgatccttggtgacaggtg

SEQ ID NO: 359134 - DNA, 100 bp, Homo sapiens
agaagatgggcagagtctgcatgtggctgcaggacctctgtcagagaatgaaacactcatcgcatggtcatcatcagatttgaaatatttaaagtggata

SEQ ID NO: 359135 - DNA, 82 bp, Homo sapiens
tcaggtcttctgtgaggaatctggattgtcacctttgctgcaaaaaattacggcatccacccaacccaccagtatcaccagg

SEQ ID NO: 359136 - DNA, 75 bp, Homo sapiens
aggaagccacgtgcagacatctacaaccttcgatctcctgacgattttcttcagcctccaaagcctctgtcttca

SEQ ID NO: 359137 - DNA, 75 bp, Homo sapiens
ccccggctcgcggggcccggcgaagggcagcaaacggggattcagcgtccgatcctttggaacagggactcacgt

SEQ ID NO: 359138 - DNA, 90 bp, Homo sapiens
ttccagagagcggcggaaaggataagcctcgacttagaagctaccgagttaccctaagaaagtttgtcagaggaatggctgtgaatggat

SEQ ID NO: 359139 - DNA, 80 bp, Homo sapiens
cactgcgggccggcgaaagctggttgacatcatggacatatgtgagtccatcctggagaggaagcggcatgacagcgaaa

SEQ ID NO: 359140 - DNA, 113 bp, Homo sapiens
gaaaacaaatgtgaaagagttacaatactacgtcggacagagttttgccaatgggaaatcctcattgacgattcaatttgttgaaggccaatttgtggactcctacgatccaa

SEQ ID NO: 359141 - DNA, 75 bp, Homo sapiens
gccatcaggggccttgacaacacagagtttcaagatttggtgcttccagatgtgagttatcaggtggaatccagt

SEQ ID NO: 359142 - DNA, 80 bp, Homo sapiens
cagaaacccattatacttcaagtggtaaccctcaaaccaccacacggaaattggagtctaccctgatgggagagtctgca

SEQ ID NO: 359143 - DNA, 100 bp, Homo sapiens
cttccccaagtagtccgatggcagcggctgcgccgaggcgcccgactcagagtatcctgagctccagctggaccctaaattggatcctcttcctgctgag

SEQ ID NO: 359144 - DNA, 75 bp, Homo sapiens
tcttgcccccggggagctggtgtggacagaggagggaaggtgacctgctgagaaaagtggtacaaatactgggaa

SEQ ID NO: 359145 - DNA, 100 bp, Homo sapiens
tggggagaagctagatgaaagggaagctggcatcactgagaaggttgttttcgagcagacaaaggtcatcgcagaattgaagaggagctgggcagcaagg

SEQ ID NO: 359146 - DNA, 50 bp, Homo sapiens
gccccttcccaaagatgtggtttaacaggctgctctttggcgtaaattgc

SEQ ID NO: 359147 - DNA, 75 bp, Homo sapiens
attcccttcaattcaagtaacagaactcagcctcctcccaagctccctgtgggtcctagccacaagctctccaac

SEQ ID NO: 359148 - DNA, 80 bp, Homo sapiens
gcagtccacccaccgccgccgcctcccagctggctgtccaaaagtatgaggagctgttcccagctttctctgattcccgg

SEQ ID NO: 359149 - DNA, 98 bp, Homo sapiens
ccggttccccggcccacagtgggggtgtgcaaacccgagagaactggggagtctgaagatacagtattgctcgtcctcaaagagatctaccaaaccca

SEQ ID NO: 359150 - DNA, 100 bp, Homo sapiens
taaacttttggccaagagaatgaaggaggtgggccccctccacccccagcacttcccacctggtcggtcccgaacggcccctccccggaggaggtggagc

SEQ ID NO: 359151 - DNA, 100 bp, Homo sapiens
tgagagaagaaatacaggatgcctctcagctgccacctgcctttgacctttttgaagcctttgcaaaatggtgtcggcaaggccagtgcgtaaagtttgg

SEQ ID NO: 359152 - DNA, 100 bp, Homo sapiens
gggaggaggccatcctgcagatggaggccatttccaatccagcggaagaccttctagaagagatgatggtgggagagtgctgacatactatgtgaagcta

SEQ ID NO: 359153 - DNA, 76 bp, Homo sapiens
tcatgacagctttgcacactattttgcggcttcggacaaagtggccttggagagtatgcctctgctaggcttcacc

SEQ ID NO: 359154 - DNA, 83 bp, Homo sapiens
agataggcaatggtctggtcacttttcagctgcggggacttgaattcagagctcggtgctgattatcacaactgtttggtgac

SEQ ID NO: 359155 - DNA, 108 bp, Homo sapiens
gcggtagagccttggggcccagatctccaccgcccggaggagagggagccacagagaggcgcccgcacaggtcccgggcgaggcgcccgcgccgtccgccgacccggc

SEQ ID NO: 359156 - DNA, 75 bp, Homo sapiens
atcccccactctttccgccctaatggaggtctccagtttcggccctgggaggagcggggacactgaggacctctc

SEQ ID NO: 359157 - DNA, 73 bp, Homo sapiens
aactatagagtttgtggacagatttatattgagagcatcagtgatgtcacgtttggagcaggggtcagttaca

SEQ ID NO: 359158 - DNA, 51 bp, Homo sapiens
atgcctctgacaatctctagtagaaccatggagtctggcagtaccgccgcc

SEQ ID NO: 359159 - DNA, 98 bp, Homo sapiens
gttatgaagctaatcctggcgttccaccagcaaccatgagtggttccatgatgggaagtgacatgggcgtctctggccgagcctctttttgtggaaaa

SEQ ID NO: 359160 - DNA, 98 bp, Homo sapiens
ggcaggtgtgtgcagaagctctagcccagaggacatacagaaaacccatatagacagctgccttgtaactgtcatggaagcatgcctggaaagacagc

SEQ ID NO: 359161 - DNA, 100 bp, Homo sapiens
ctgtgtttgaagtcaacattcgatttattggaggcctacttgcagcatattacctatcaggagaggagtgaaaccagcagtgtgtgtagcagcagtgaca

SEQ ID NO: 359162 - DNA, 100 bp, Homo sapiens
ttcaccacactcacagaccgtgagctggaggagtaccgcagggaggtggagaggaagcagaagggctctgaagctgcatcttcctcccgtgaggctggcc

SEQ ID NO: 359163 - DNA, 82 bp, Homo sapiens
cgacaagccgctggcagccgcggatctcaccgccgctcagggtgaaaggtgtagcagtcactcggcctacacccacagcatc

SEQ ID NO: 359164 - DNA, 101 bp, Homo sapiens
cgacacggatcaaggacgagtgttcgtgaaagtgaaccccaaggcggagaacccacaatacattatatgcaccagaaatgctagccaaaatggcagagcct

SEQ ID NO: 359165 - DNA, 82 bp, Homo sapiens
ctccgagctgaagcagctcatccaccagcagctgagcaagattgttcagtttggcatgaatgaaaaggttgggcaaatctcc

SEQ ID NO: 359166 - DNA, 74 bp, Homo sapiens
aaaaggattcgtccgtgttcatcctgggacagagtttcactcctgttacccaggctggaggacaatgatgtgat

SEQ ID NO: 359167 - DNA, 96 bp, Homo sapiens
caagaaacacaacttcagacttgcagaaaaccagtgaagggctataatgatccagccttttatgaagaatgcaaaatggaatacctgaaggaaagg

SEQ ID NO: 359168 - DNA, 100 bp, Homo sapiens
agtcagcatgagcaaaaactccaaactcctctccaccagcgccaagagaaggtagaagatagcaccatgccgattcgtcgaactgtgaattctacccggg

SEQ ID NO: 359169 - DNA, 98 bp, Homo sapiens
gttgtatcgtacagcatggattgcgaagcaacagagaatcaatttggatcggcttatcataaccagaaatgcactcggtgatggaaagagagccacta

SEQ ID NO: 359170 - DNA, 98 bp, Homo sapiens
ctgctctgtaccaactgccggaaagtgctgcggaaggttggaagcgagatagagaaaaaagggatgatcaagatgacgtttccagtgtgagaagtgag

SEQ ID NO: 359171 - DNA, 50 bp, Homo sapiens
gaaatgcattttcgaacgcattcaggacacattcagctaacgtattttag

SEQ ID NO: 359172 - DNA, 75 bp, Homo sapiens
aatctcactctgttaaagctggtctgttctaactgaggtcatcatcagatttgaaatatttaaagtggatacaaa

SEQ ID NO: 359173 - DNA, 50 bp, Homo sapiens
ggggaggtcacctgacgaggagtttccttacgccgccccacctccccaag

SEQ ID NO: 359174 - DNA, 100 bp, Homo sapiens
cttctcgactcggtcctgtttcgacagcgaacatgtcgcggcctgtcaggtcaccggattgaaactgtctcaggaccttgatgatcttgccattctctac

SEQ ID NO: 359175 - DNA, 100 bp, Homo sapiens
ggaaaactgtttcagttgcagactttaggcctgaaaggcctactctgtgtatgatgaagacattgggtactgtcaagggcagtcttttcttgctgctgta

SEQ ID NO: 359176 - DNA, 74 bp, Homo sapiens
acagacttctcagcacagagtggggactgccttccattgtgaagtctctagaagataccctgagccttgtgaag

SEQ ID NO: 359177 - DNA, 101 bp, Homo sapiens
ggggaggagcatcgcttgtcctgagctggttgccggggcaggggcggaggcggaggcagaggtggaggcgctttgaaagatatttggagttcttacaacat

SEQ ID NO: 359178 - DNA, 82 bp, Homo sapiens
attcaactgaatgcactgatgcccagcagaaactaatctggattcactccctctggttgatacccactcaaaaaggacactt

SEQ ID NO: 359179 - DNA, 100 bp, Homo sapiens
gcgacgaggacgatgactgcttagaccacagcgacgaggacgactgccggtggactccgacgaccagtggggagagtactcctgcgtcttcctccccgag

SEQ ID NO: 359180 - DNA, 51 bp, Homo sapiens
tcggaaaccggtagcgcttgcagcatgacccaacatgagtgaagtttcctg

SEQ ID NO: 359181 - DNA, 75 bp, Homo sapiens
ctaatatgttgatggcattccagaatatctcagatgagcaggaccgcctggcccggtgcaccatgcattgcaacg

SEQ ID NO: 359182 - DNA, 100 bp, Homo sapiens
tgggcttcgctgctcagccagctcctgcgaccgccctgcgcttcgtgcaccggggcggtccgttgccaaagccagtcttctcattcacaggttaaggcta

SEQ ID NO: 359183 - DNA, 83 bp, Homo sapiens
agcccatgcccctgaaggcctcgctggagatcgagtaccaaacgatgttccacaggagcccgtgcccacgctgtggaacgagc

SEQ ID NO: 359184 - DNA, 75 bp, Homo sapiens
acaactcacagcctgaaaatgaaaaggaagcttcaggtggagacagcccgaagcctggtgcctgctgaagccagt

SEQ ID NO: 359185 - DNA, 90 bp, Homo sapiens
ggacgtgcctcgtggtctaaagcttcggcacaagggcccaactggaattccacttacggatggaaaaagtggaggcagatctaactagat

SEQ ID NO: 359186 - DNA, 75 bp, Homo sapiens
agaaaaggcctaagaattttggcattggtgtaatcctgagagattcacatggtgttgcacaagtacgttttgtga

SEQ ID NO: 359187 - DNA, 75 bp, Homo sapiens
gattttcagcctgtgtcgatacaataatcgacttgcagaacatgtacaggtttgcagattccgccagcagcacag

SEQ ID NO: 359188 - DNA, 83 bp, Homo sapiens
aagctggaatgcatccaagagaatccctcaacatgctgaactaaagatgactcagagccatctggagaagaaacagtagaaag

SEQ ID NO: 359189 - DNA, 83 bp, Homo sapiens
gggcatcagggagaaggactattggacctgctttgaggtcaacgagagggaggaggcagctgagctcctgtgacggccacgac

SEQ ID NO: 359190 - DNA, 90 bp, Homo sapiens
gtttagttcagcgcagcgactcggggacctggagctgacgcctaagcatcctggccagaacaagccaaggagccaagacgagagggacac

SEQ ID NO: 359191 - DNA, 50 bp, Homo sapiens
ccggcgggaaggaaaaccgcgcagagagtatacgctcaacggcaagaaag

SEQ ID NO: 359192 - DNA, 82 bp, Homo sapiens
atgaacggagaggaagaattctttgatgccgtcacagccgtgttgccgcccgctgtgctatgagcagtcagagcgccgtctc

SEQ ID NO: 359193 - DNA, 98 bp, Homo sapiens
acggtcaacgtggtatactcgcagacaacccaaccggtatacaatggtctgtttctgtcgactgtggaccacttatgtgcgatccgtggaccacttgc

SEQ ID NO: 359194 - DNA, 100 bp, Homo sapiens
cgagtaccctccggccggagccacgcagccgcggcttccggagccctcggggcggcggactggctcgcggtgcagtctcttgtccttctgcctgctgttg

SEQ ID NO: 359195 - DNA, 98 bp, Homo sapiens
caacacataaaaattatttatccaacagctcctcccagtgattccagcagtctcagcagcactgatgctggattgtttaccaatgatgagggaagaca

SEQ ID NO: 359196 - DNA, 100 bp, Homo sapiens
ctctcactaaccacaggcatcagttggtactcgccatgaaactcaaagatcgagagtccgatacatacttctgcatgtctatgcgaataccagtggatga

SEQ ID NO: 359197 - DNA, 80 bp, Homo sapiens
agggctgcggccgcccgaagaggagagagcgcgggcctctaggaagctacgagttccagggagctctgtcctggtgaccg

SEQ ID NO: 359198 - DNA, 82 bp, Homo sapiens
atcgctgtctactatgacaacccccacatgtcttcccaagggattgttgaagaaacttctgaagagggaaactctgtacctg

SEQ ID NO: 359199 - DNA, 51 bp, Homo sapiens
gtcctgatggcaaaactggcccccctttgtgtgacttcattgagacacatt

SEQ ID NO: 359200 - DNA, 96 bp, Homo sapiens
ggagattccagtcgctgctcctgcttctcgggctgctggtgctgtgcgcgaggctcctcactgcagcgaaggatctgccgacaccccaggccatcg

SEQ ID NO: 359201 - DNA, 75 bp, Homo sapiens
acaacatcaataccaatgaatttcccaatattggatcctggagctgttgcgcagccattggtacctgtattgggg

SEQ ID NO: 359202 - DNA, 96 bp, Homo sapiens
tccggacagccgcgcgctgagggtctcggggcgggcgccgcgggacctctccgggccatgggtacttcaaaggctcatcaagtcccgaggaaagtc

SEQ ID NO: 359203 - DNA, 100 bp, Homo sapiens
cggtggagccatggtcggccaactgagcgagggggccattgcggtctccaattgagaaacatggcactgtttttcctgcactctacccacctattgctgg

SEQ ID NO: 359204 - DNA, 99 bp, Homo sapiens
gccacgacctgatgatgtcagaggagcagcagcagcatctttacaagacaccagagaagcctatgatgacaagcaggtggtcacagagatcatggcaag

SEQ ID NO: 359205 - DNA, 82 bp, Homo sapiens
tcgggaagagggagagcaaacttggctcagcccagttcaaaagatgtcgtgataaaggcacaggttttagctggtggtagag

SEQ ID NO: 359206 - DNA, 90 bp, Homo sapiens
cagcaatcctcagacgcctcacttaggacaagctgtgtggttccgggtgctggtgctgtggaagtggcaatggcagaagccctgaataaa

SEQ ID NO: 359207 - DNA, 132 bp, Homo sapiens
tcctggacggcaacctcattatccgctatgatgtggaccgggccatctccgggggctccattcaggtggcggccaaagccctggagatgggcgtgtttggcgcatatttcaacgtgctcatcaacctgaggg

SEQ ID NO: 359208 - DNA, 83 bp, Homo sapiens
ggaagtgtagaaaataccagtgggaaaaggaagtgctgggtctccctctgttgtccaaggctggagtgtagtagtgctatcgc

SEQ ID NO: 359209 - DNA, 80 bp, Homo sapiens
tatgggatctgatgatgctgcctacacacaaggatatctatagagaaatggggtttggtcactatgaagaagaagaaagc

SEQ ID NO: 359210 - DNA, 75 bp, Homo sapiens
ttcagaaacttattcacagttaccaaagctggattactacagcatcccatttcccacacccactactccgctgac

SEQ ID NO: 359211 - DNA, 98 bp, Homo sapiens
ttttttctcatggatgttcttcttcgagtatttgtagaagggtcccagctagtccacagggaccagcagtgccatggaaggatttaacatgtctcaga

SEQ ID NO: 359212 - DNA, 83 bp, Homo sapiens
ccactccggagtcgccgctgccgcggggacatggtcctctgcgttcaggggctggtgaatgtgctgaagatggccgcctcctc

SEQ ID NO: 359213 - DNA, 82 bp, Homo sapiens
aggcctacgtgcgggtggtcaccgagaagtccccgaccgactggggatcctgctaaagcggagcggcaagtccctgaacaag

SEQ ID NO: 359214 - DNA, 50 bp, Homo sapiens
attactggcagcatgtatatcttttgactacttccagcaacccagtctcc

SEQ ID NO: 359215 - DNA, 101 bp, Homo sapiens
catgaatggagcaaaatggcggatcatgtgcagaacatccagtcatggataaaaatgagctggttcagaaggccaaactggccgagcaggctgagcgatat

SEQ ID NO: 359216 - DNA, 50 bp, Homo sapiens
ggatcctacatgtgccatagggtatctcagatgaagacatcatcaacatt

SEQ ID NO: 359217 - DNA, 90 bp, Homo sapiens
acggcacggaaggtggggcggcctgggaggaagcgcaagcaccccccgccaccttttgtggtgacattggatgaggtagagctgatccac

SEQ ID NO: 359218 - DNA, 100 bp, Homo sapiens
accatctgtgctcgtaaatcaggaaactgcaaaactgtgagaacactccgacgtcaattgaggtgtgaagatgccttaagaaaaaataagagcttaattg

SEQ ID NO: 359219 - DNA, 148 bp, Homo sapiens
gtgtggtcaacgcgctgctctgtcctctctgggtgggagccacctgtgtgatgatgcctgagttcagccctcagcagaagctggcagggcggagatgctggaccacgccgtcctgcttcaggtgatcaaagaacagcaggtgcagcaa

SEQ ID NO: 359220 - DNA, 75 bp, Homo sapiens
agccatctgggctcattcagcaggaaataatggaaaaagctgcaatatccaggcatggaagaggagatggttcgt

SEQ ID NO: 359221 - DNA, 100 bp, Homo sapiens
cagaaatacagatccaagacaaagacaggatgggcactgctggaaaagaggagatgttaaagtaacccatcttgcaggacgacattgaagattggtcttc

SEQ ID NO: 359222 - DNA, 100 bp, Homo sapiens
tgtccatccgtcacatccatcattgcagagtccctccaaggctggaatctggtgcagataacgaaggaggcccaacttcattcaataaggagcctgacgg

SEQ ID NO: 359223 - DNA, 90 bp, Homo sapiens
gctcccttgaggctggggttgcgtctgttgacgcggccgactacaatcccgaggagcaggacatcgagactttacatggctctgttcacg

SEQ ID NO: 359224 - DNA, 75 bp, Homo sapiens
tagctttctccttctggtgtggggcccgagctgaagctgaagaagatggggacctgcagtgcctgtgtgtgaaga

SEQ ID NO: 359225 - DNA, 75 bp, Homo sapiens
ccaaagtgaaacctccgggtggacattcccctcagccaggcgggcaccacggcaggggctgagctaccctcatgg

SEQ ID NO: 359226 - DNA, 74 bp, Homo sapiens
ggggctgagaggaatcttctggagtactcttattttgaaaagtggatgattcaacagccacacaaagcagcaac

SEQ ID NO: 359227 - DNA, 74 bp, Homo sapiens
gggggacgagctcggagcagcagccaggtttattgttggccaaaaccaggctttgattgaaccaggatgaatgc

SEQ ID NO: 359228 - DNA, 100 bp, Homo sapiens
cctgcaccatgagcgtcccggccttcatcgacatcagtgaagaagatcagttgatattcactgatggactccaaagaatcattaactcctggtagagaag

SEQ ID NO: 359229 - DNA, 50 bp, Homo sapiens
cagttatttgcctcagtaaaagatttccaacatggctagatccatcagaa

SEQ ID NO: 359230 - DNA, 75 bp, Homo sapiens
ttccccccgaagaagactcccccacatctggcttcctgcctgacacagctcacttcaagaagtgcacaatgtcag

SEQ ID NO: 359231 - DNA, 100 bp, Homo sapiens
tctgtcccccagcctggctgcacttgaggttcccgcccaggaaggccggtcagtacggcgtggcccagactaggaggcgggccatcatcctggccgcggc

SEQ ID NO: 359232 - DNA, 90 bp, Homo sapiens
ctcccgagcagttgggattacagtttgctgggatggagtcaggctatgcttgcttctgtggaaacaatcctgattactggaagtacgggg

SEQ ID NO: 359233 - DNA, 100 bp, Homo sapiens
cgtcattggggactacctgggtgaaagttggatcatcatcgctgccacagtggtttccattatcattgtctttgaccctcttggggggaaaatggctcca

SEQ ID NO: 359234 - DNA, 82 bp, Homo sapiens
tgattcacgaaaacgcaaattgccatgtgatactccaggacaaggctggtcgatcacaccgctcatgtacccagcctccttc

SEQ ID NO: 359235 - DNA, 80 bp, Homo sapiens
attctgccaattcgttttcaggagcatctccaggcagttgtgaaaaacttcaggacaaaaatgtttcatttaaggacttg

SEQ ID NO: 359236 - DNA, 75 bp, Homo sapiens
ttttgcttccctcttggataaaaacactttgggagaagtcacaagagaaactcagattgatggacaacttttctt

SEQ ID NO: 359237 - DNA, 82 bp, Homo sapiens
tgaaaaactacagaggagaggactactgtaattcccagccttgttcctttatagctttgtctcctcagcactctgctgtcac

SEQ ID NO: 359238 - DNA, 75 bp, Homo sapiens
gcgagggcgaggaagctagccaaaaccttcatctcctcgtcctccaggcagcacaagccattgtggaatctccac

SEQ ID NO: 359239 - DNA, 90 bp, Homo sapiens
ggcctttttgacagcttccgccgggactgcctggccgacgtggacaccaaggttgaaaggattgttgacaaaaggaaaaataaaaaaggg

SEQ ID NO: 359240 - DNA, 82 bp, Homo sapiens
ccgcgaccagacaggcggcgccatcttcgaacttagacttccggaaggactttggcgaggacggccgaagccctgcagccca

SEQ ID NO: 359241 - DNA, 75 bp, Homo sapiens
cggcgatcgagaaagtgcgcaaatgattggcatctttgcaaacgaggcattgttcaccttggaactgctagccac

SEQ ID NO: 359242 - DNA, 83 bp, Homo sapiens
tacacggccagttttgaaatcgacacacaaagaatagagttgagcctgtgggacacttcgggcagttccggcgaggggggagc

SEQ ID NO: 359243 - DNA, 74 bp, Homo sapiens
acaaatcacacgcataatggatgaaaggaaccgacaggaattatccatggagtctggaattgatcctggccagg

SEQ ID NO: 359244 - DNA, 100 bp, Homo sapiens
cagcctcagtactctttgccgtacccaccggagcctggcgcagcctccctctattaccagggtcggcactcttcaccctcccgagccctgcccgtctcgg

SEQ ID NO: 359245 - DNA, 98 bp, Homo sapiens
taccatcagcaagttttttgactcccaaggacagggtccacatatagcctcagttacattagctgcttatgaatgcaattcagttaattttcccgaac

SEQ ID NO: 359246 - DNA, 97 bp, Homo sapiens
tcttcccgcgtccgccgattcctcctccttggtcgccgcgtccttggctggcgttgacaaccatgagtggaaaaaactaattatggttcagcactgg

SEQ ID NO: 359247 - DNA, 82 bp, Homo sapiens
agttttctactgtaaagtcaccaacgagatcttccgccactacgattggactaaatgctcttccttcagaggattatccggg

SEQ ID NO: 359248 - DNA, 100 bp, Homo sapiens
tgatcacatccccaccccacaggatctgccccagagaaagtcctcgctcgtcaccagcaagcttgcggggtttggaaggtttgcagttgctgctcttcag

SEQ ID NO: 359249 - DNA, 100 bp, Homo sapiens
ccatgtgctagagacagccaacaaaatattcatggttcttgagccaggtgactttatacacactttgggagatgcacatatttacctgaatcacatcgag

SEQ ID NO: 359250 - DNA, 74 bp, Homo sapiens
cgcggtagctgggaccgccgttcagcttaagagttggacagtggaggaccttcagaagaggctcttggccctgg

SEQ ID NO: 359251 - DNA, 98 bp, Homo sapiens
gtcgtccccgctgcgggtggcggtggtgtgctcgagcaaccagaaccggagcatggaggcgcacaacatcctcagataatgtggatgcaaatgatctt

SEQ ID NO: 359252 - DNA, 100 bp, Homo sapiens
ggaaggaactttgggtcctgaatcttctgggagctgaggaaccagatatcttgaaaagctgccagaaagggtgtccgcaatgttgccagtgtctgtctgc

SEQ ID NO: 359253 - DNA, 87 bp, Homo sapiens
tccggagtcagtcattttactgtcaagacatttcttcggcattctgcaacagggaagctatgcgaaattatttaaaagagcgagggg

SEQ ID NO: 359254 - DNA, 99 bp, Homo sapiens
cttctgatgaggatgttacagatgctggtcttaccacttatcatctccagtcttgtcacaggacttggaagaacaaagtcggttgatagctgcttccag

SEQ ID NO: 359255 - DNA, 98 bp, Homo sapiens
aatatccagcaaaaccgctgctaaattgtcaactagtgctaaaaggtgtgttccagagaacaagccttcagacatttgctatattgacgctgagctgt

SEQ ID NO: 359256 - DNA, 75 bp, Homo sapiens
gccagatagtaccatgatagctgtatcagtgtgactgcacagaaaagttacaaaacaaatttgactttttgcgct

SEQ ID NO: 359257 - DNA, 50 bp, Homo sapiens
gcttcccttccgcgggagggagagttagatgtccggtctgtgctacgaca

SEQ ID NO: 359258 - DNA, 51 bp, Homo sapiens
tggagggcttatccccataacctgatgacgcctcccccagggaagaacttc

SEQ ID NO: 359259 - DNA, 101 bp, Homo sapiens
tgggaatttatggtcgatcgtcttcctactgtcttgttttttccctgcaacaggttatcaatactctggctgaccatcatcatcgtgggactgactttggt

SEQ ID NO: 359260 - DNA, 100 bp, Homo sapiens
ggaaacattcaggaaattcagactcgccaggacaacaaagttgttattggatttgttcccttagcagaaattatggaaactaaatatattttgccaactt

SEQ ID NO: 359261 - DNA, 90 bp, Homo sapiens
cctaatccgcgagacttgctaactgtcagttccccaaaacgtgtcactcctacctgggcaagtaattaaactgcatgaagtcctagagag

SEQ ID NO: 359262 - DNA, 75 bp, Homo sapiens
atgtgactccgccgccggggacccgtgaggtttgtgtggaccccgagggatatcagtatgaacaacattactcag

SEQ ID NO: 359263 - DNA, 100 bp, Homo sapiens
tacagacatggacaccattgagaagtcaaatctgaatcgacagtttcttttccggccctgggatgtcacgtgcctcagcaatgtgccacagctcaccgag

SEQ ID NO: 359264 - DNA, 100 bp, Homo sapiens
cacggattaatatttctccctgtcttactcagttacatagatagcagactccttgaaagcagggtccttgtttagtgcatctttgcccacatacaccaca

SEQ ID NO: 359265 - DNA, 51 bp, Homo sapiens
ggagaggcctggaggacaccaacatggtggcaaagaaacacagcatgatgt

SEQ ID NO: 359266 - DNA, 101 bp, Homo sapiens
cttccaagccctcaaagtttgaaaggcaaaattctagtgaaggttcaaaccttgtactactcagctgatcacaagctgcttgatgggaacctactagatgg

SEQ ID NO: 359267 - DNA, 100 bp, Homo sapiens
ttggcagcacagaagaactgaagataggcaacaagatgatgagggcgcggcagtatccttggggcactgtgcaggtgagcatttgtcctgtgctttcaca

SEQ ID NO: 359268 - DNA, 51 bp, Homo sapiens
tctgggggcaggtgggcccggtgacaggcctggggcatctctgtactgaac

SEQ ID NO: 359269 - DNA, 75 bp, Homo sapiens
cagcaacctagtcagtctgcatttggctctggaacaactcctaattctaagtctcactgtgtcgcccaggctgga

SEQ ID NO: 359270 - DNA, 98 bp, Homo sapiens
tcagtggtgtttttctcaggtgaaaggagcagtagatgatgatgtagcagaaggattctggactctacttataatatccctaactgctggattctcct

SEQ ID NO: 359271 - DNA, 100 bp, Homo sapiens
aataggcaatgggcagtcaccagcattgcctcgaccacactcacctctctctgctcatgcaggcgtactttattgtcggcttccaaagattactaacttt

SEQ ID NO: 359272 - DNA, 82 bp, Homo sapiens
cacccattgtgtcttctcaagaaggtaattttttctgcaggatgaattaagagaagagacacttgctcatcaggcatggaga

SEQ ID NO: 359273 - DNA, 82 bp, Homo sapiens
cccgcagcggcgccattttgcccaaaccggtgaaagactgagcagggggaggaacatttaagctgatggaagtggaagtgga

SEQ ID NO: 359274 - DNA, 75 bp, Homo sapiens
aaccggatcaccgagggcatttacggcaggtgtgaacccacatccctgcccccagggccacctgcaggacgccga

SEQ ID NO: 359275 - DNA, 83 bp, Homo sapiens
cccactgatgaggatcagcccatgggatgtccgtcgcttggtagtggccatgtctagagccagacttggactttatatcttcg

SEQ ID NO: 359276 - DNA, 100 bp, Homo sapiens
ttagctgtgctcgcgctactctctctttctggcctggaggctatccagcaatctccgccacctccctactctcggctgtctcctcgcgacgagtacaagc

SEQ ID NO: 359277 - DNA, 100 bp, Homo sapiens
gagcatggcaggctccctgcctccctgcgtggtggactgtggcaccgggtatttctgggaaaagccagcttctgtttgcactggtcttcacaactcgtta

SEQ ID NO: 359278 - DNA, 100 bp, Homo sapiens
ttacaacacccgcgagcacagccaaaaattcttcctgggacacaacgacgacattatcaggctgatgaattcatccgagcaaatgccaccaacaagctga

SEQ ID NO: 359279 - DNA, 75 bp, Homo sapiens
ggggagactgtgccgtggagggcctcgccatgtcctgctgcccggttaatttggagtggcccctggagtcagttt

SEQ ID NO: 359280 - DNA, 75 bp, Homo sapiens
gttcgtccggctcccttgcggtggtgttggggtatcgagaaccttccctgcgaacttcagaggaacttccagctg

SEQ ID NO: 359281 - DNA, 90 bp, Homo sapiens
cggcggcggtggcatctgcggccatggcggcgactactgccaaccccgcaaaagtactttgactcaggagactacaacatggccaaagcc

SEQ ID NO: 359282 - DNA, 97 bp, Homo sapiens
gaggctcatgggaaattgtattctccgagtcagattggagcatttgtgttgatgaagatgaaagagactgcaggtgtgatcctgctgcggctggacc

SEQ ID NO: 359283 - DNA, 100 bp, Homo sapiens
gcagcgaaagatcctactggacatgtcagtgtcctttcacacccatgtgaaagaggtgagcagtaggtcatccagtcccagtgtcagaatgattactacc

SEQ ID NO: 359284 - DNA, 98 bp, Homo sapiens
acagattcagttggcctcatgctatcttcattggatcttctttggaaagaccccagttattaaagcttttggcatcttgaagcgagcggccgctgaag

SEQ ID NO: 359285 - DNA, 100 bp, Homo sapiens
gctctggaggaggaggaagtggaggtatctcaggtccagagtccagccccttgaacgaggtggtgtctgaagcctttgtccgcttcttcgtggagattgt

SEQ ID NO: 359286 - DNA, 100 bp, Homo sapiens
acactgcagttcttcacccatttctcgtctctcatctacatcgccttcatcctgggcagaacacagaatgttcttggtgagaagggccggcggattcggg

SEQ ID NO: 359287 - DNA, 122 bp, Homo sapiens
agacggcaaatggcggacttcgacacctacgacgatcgggcctacagcagcttcggcggcggcagagggccgcagctatgatgagaaggtggatgtgttctcctttgggatcgtcctgtgcg

SEQ ID NO: 359288 - DNA, 83 bp, Homo sapiens
accatggtctacaagactctcttcgctctttgcatcttaactgcagttgattatggaagattcccacaagagtaccacgtcag

SEQ ID NO: 359289 - DNA, 98 bp, Homo sapiens
gcctagcgtcctggaattacttcaatcaaatctgagtgggacatacttttgaaggatgtgcaatgttcaatcataagtgtgacaaaaactgacaagca

SEQ ID NO: 359290 - DNA, 83 bp, Homo sapiens
gaccgtcttcattgtggagatctccctgacatgcaagaacagggtccaggttagcactctacgtatatgaatatctgctccat

SEQ ID NO: 359291 - DNA, 90 bp, Homo sapiens
tgagcttgaccagttacggcaggaggccgagcaacttaagaaccagattcgaagactaaggtgtcagtatgttcttcaagctgctctgct

SEQ ID NO: 359292 - DNA, 82 bp, Homo sapiens
taagatggcgactgtcgaaccggttttaaaatcaaagatgggaaaatcggagaaaattgcccttccccatggccagcttgtt

SEQ ID NO: 359293 - DNA, 90 bp, Homo sapiens
ggggttcagcgctcgggtgaggagctggtggcgtcggcaggttcgaggcgattcgaggaatgggtaccacagaccatgtcatcgtcctgg

SEQ ID NO: 359294 - DNA, 74 bp, Homo sapiens
tccctgcactctcatcgctctcggcctcggcctcggcctccgacacggcatcaccaactctgaatttcatactg

SEQ ID NO: 359295 - DNA, 100 bp, Homo sapiens
caagctataaagaggaagcatgctgtcctatgtcagcaaaaactggagcagaaattggaggctcagcatagttgaggagctcaagcttgggaaaatggtg

SEQ ID NO: 359296 - DNA, 98 bp, Homo sapiens
gacaagcacacactatggcgctgaaacggattaataaggatagaatcacttgaattcctggatgaaatggagctgctggagcagctcatgcggcatta

SEQ ID NO: 359297 - DNA, 99 bp, Homo sapiens
atcactgttggcactactttgagttactaaaggtttgtggagaaaaacagcgctttgagaagttgatggaacatttcaggaatgaagacaataacatag

SEQ ID NO: 359298 - DNA, 82 bp, Homo sapiens
gcttctgctttcggggatgcagctggccaagctgatccgacagagaaaggtacaagaaaattccccaggacacagagctggt

SEQ ID NO: 359299 - DNA, 51 bp, Homo sapiens
attccaagtaactcttatttgttgctttgaattacggaatttataagcagg

SEQ ID NO: 359300 - DNA, 98 bp, Homo sapiens
cctctcgccaagggccccaatgagtggcacacagtctactatcaccgacaggtttgaagtttgaggaaattcaaaaaagatttggtgaagagttcttt

SEQ ID NO: 359301 - DNA, 75 bp, Homo sapiens
tatttctctgcctcctgtggacaaaaaaagggttgttacaagttgagttgaaaacaagaaaaacttgcttttggc

SEQ ID NO: 359302 - DNA, 90 bp, Homo sapiens
attttaggcggtatcaaatggaaagtttttccaaatattcatctgtacaggtccagagggggcaaacctctttatttaccaccttccaca

SEQ ID NO: 359303 - DNA, 90 bp, Homo sapiens
gtgagatacaagccatccccagaaagataggagcatgctgctatgtggaatgttcagctttaacccagaagggattgaagactgtttttg

SEQ ID NO: 359304 - DNA, 97 bp, Homo sapiens
tggaaaggatctggagtcatggactacaagtgaaacaggatctggctttgctgcccacgctggagtgtggtggtgtgatcacagctcactgcaacct

SEQ ID NO: 359305 - DNA, 100 bp, Homo sapiens
tctgtcgctgctgctgcccaaggccttcctgtcccgcgggaagcggcaggagccgccgccgacacctgaaggtgacagccacagacgcggatagtggccc

SEQ ID NO: 359306 - DNA, 99 bp, Homo sapiens
tgccgcagtaggacagcaggcccaagtctgcacatcccagatctggcaccactccttctacaatgagctgcgtgtagcacctgaagagcaccccaccct

SEQ ID NO: 359307 - DNA, 100 bp, Homo sapiens
gctactactgccgctgccaccgtggctacactctggaccccaatggcaaaacctgcagcccactgaacctaccagatgtatttgggttggtcgtcctccc

SEQ ID NO: 359308 - DNA, 50 bp, Homo sapiens
ggaattgccgtggacccaactgttggattcatgatgttgctatcaaaagt

SEQ ID NO: 359309 - DNA, 100 bp, Homo sapiens
tccacgaagttgccagggcctgtccagggccccagtacgggaccgtggagaaggcctggatggccttcatgtccgaggcagagagggtgagcgagctgca

SEQ ID NO: 359310 - DNA, 74 bp, Homo sapiens
gctaactcctgccaggcagtgcccttcccggagcgtgccctcgccgctgttgggccatatggtgctcttcccag

SEQ ID NO: 359311 - DNA, 109 bp, Homo sapiens
aacatgaagcagatgagttgagtggagatgcttctgtggaagatgatgcttttatcaaggaactttatattgctgttggaatatctggagccatccaacatttagctgg

SEQ ID NO: 359312 - DNA, 80 bp, Homo sapiens
aagccacccacaaacaaactacccattttcttttttggaactcatgagacgcagcctgcttctgcaaagtggtacgatcg

SEQ ID NO: 359313 - DNA, 74 bp, Homo sapiens
gctgtgctcgcgctactctctctttctggcctggaggctatccagcgatcctgctgggatttttgagctggtgg

SEQ ID NO: 359314 - DNA, 73 bp, Homo sapiens
ccgcagagcgcatccatcaaagctttgcgcaacgccaacctcaggcgagatgaagttttcatgggctgagctg

SEQ ID NO: 359315 - DNA, 90 bp, Homo sapiens
tcagctcttccgcagtgattgaagctttgataaatgaaatcttcctaagtatagtccaatatcagatggaaatgatgcggagccttcgcc

SEQ ID NO: 359316 - DNA, 100 bp, Homo sapiens
ggagaagaggagctgctgagggaagagagaagggcacagttacctaagtatcaacgtaatcttcctcggccaggacaggcccccatcggtaatccaccag

SEQ ID NO: 359317 - DNA, 100 bp, Homo sapiens
cagttggaagcagccgatccagcctgcggagcctgtggggcaggactcagtgacctttgaagatgtggctgtgaacttcacccaggaggaatggactttg

SEQ ID NO: 359318 - DNA, 99 bp, Homo sapiens
ccaaaatggcgcgggtgctgaaggctgcagccgcgaatgccgtagaaacgggcctgaatttgaagctaggatccgacagaacgagatcaacaaccccaa

SEQ ID NO: 359319 - DNA, 100 bp, Homo sapiens
gccaaaaggaatgaccctagccagactcagggatcaaagagcaaacagattcagtggcctgcattggactttccaggacctgtccaaacaagtggaaatg

SEQ ID NO: 359320 - DNA, 51 bp, Homo sapiens
cagtcttccgcaggaaggagatgtgatgctgagatgaatcgtcacctgtgt

SEQ ID NO: 359321 - DNA, 82 bp, Homo sapiens
accccttcctggtcggattacactcctgcttccagacgacaagtcggtactccaaagattcaggtttactcacgtcatccag

SEQ ID NO: 359322 - DNA, 100 bp, Homo sapiens
ctctatccaacctattatatctgacatcatctctaccgttgagttcaaccacacgggagagctgctggccacaggtgacaagggcggccgggtcgtcatc

SEQ ID NO: 359323 - DNA, 100 bp, Homo sapiens
ggccggcctgcggaacgaaagtgaacaggagccgctcttaggcgacacacctggaagcaggctgtggaaaatctctgttctcacaaagtctccccaatgc

SEQ ID NO: 359324 - DNA, 51 bp, Homo sapiens
gattcgcagtggtcgcttcttctccttgaggctgtggccctgagaaagatc

SEQ ID NO: 359325 - DNA, 122 bp, Homo sapiens
tggaaggcgcttttcaccgcggccatcctgcaggcacagttgccgattacaggaaagaccggcagagaccaatgccaatgtggacaactcggcgtccccctcggtggcccagctggccgggc

SEQ ID NO: 359326 - DNA, 85 bp, Homo sapiens
gtgggagccccgagaacgcctccagcggggatgacacagaagacaatgcagatcttcgtgaagactctgactggtaagaccatca

SEQ ID NO: 359327 - DNA, 82 bp, Homo sapiens
tgggcggtgccggcgccggagacgatgccgtttcttcccaagggattgttgaagaaacttctgaagagggaaactctgtacc

SEQ ID NO: 359328 - DNA, 100 bp, Homo sapiens
ggctgaccctgcccaccaggaccgccatggggacacggcactgcatgctgctgcccgccagggcccagatgctgtatgacaaaattaacacaaagtcttc

SEQ ID NO: 359329 - DNA, 120 bp, Homo sapiens
tctttcctggcagatgccggctatggcgaacaggaactggatgccaactctgcccttatggaattggacaaagatgccacttcaaatgaacaacaagagcttttctgtcagaagttgcag

SEQ ID NO: 359330 - DNA, 98 bp, Homo sapiens
acagccaggactgccaccagtaccaggagcaccaggaatgcctccaggctttgaattgtattccatggtgccatctatttgtcctctagaaactcttc

SEQ ID NO: 359331 - DNA, 75 bp, Homo sapiens
tggcagcgagccgaaactgagcaagaattccctgttcttcaggacaatttagaagtttatttgggattacaacag

SEQ ID NO: 359332 - DNA, 82 bp, Homo sapiens
cgcaagggcggcggggagcacacggagcactgcaggcgccggggagtgcatccgccccaacccttttccccctcgtctcctg

SEQ ID NO: 359333 - DNA, 96 bp, Homo sapiens
gctgcgtgctggtacgtgcttttcctcctgcagcccaccgtctacttgctaggatgcatttctctcactgaaccccatccagcagaggacagaaga

SEQ ID NO: 359334 - DNA, 111 bp, Homo sapiens
tgaagttgttcattgtttgtcaccacaaaaaggacaggagctgactaaggctttggaacagaaaccagatgatgcacagtattattgtcaaagagcttattgtcacattct

SEQ ID NO: 359335 - DNA, 74 bp, Homo sapiens
gtccttctttgtggagagcaaggcatgtcagagcgggagcgacaggtgatgaagaagctgaaggaggtggtgga

SEQ ID NO: 359336 - DNA, 89 bp, Homo sapiens
agatatacacgaaccttggtccaagactacaagtcaatcaggtggtgaaggcatttgtgatcctggcctcgcagttcctatcccatgac

SEQ ID NO: 359337 - DNA, 106 bp, Homo sapiens
ggaggatgacggagctgcagtcggcactgctactgcgaagacagctggcagatcatggaagggaagtggttgctgtgtatgttactggtgcttggaactgctattg

SEQ ID NO: 359338 - DNA, 97 bp, Homo sapiens
ctgaaaccaactcagaatgcttctgagaaggagggccgtgtagccatcacccgagtggccaaccttctgctgtgtatgtatgccaaggagaccgtgg

SEQ ID NO: 359339 - DNA, 75 bp, Homo sapiens
ctggcatcagggaggctttcagccggagaagcgagtttcagctgccatgtcagtttgaacagtgcatcgtgtgtt

SEQ ID NO: 359340 - DNA, 97 bp, Homo sapiens
ggagactcgcaggagcaacacgtgatgtgtctacttatcaggtcaccaccaagtaagcgaagaaaattagagaaaccgagaaaacccataacattcg

SEQ ID NO: 359341 - DNA, 83 bp, Homo sapiens
gtcctgaagccggcggacggttttcgtacgggcggccgtgcgcgaggcgagactagacgcttgaagcaaagctgccatcccag

SEQ ID NO: 359342 - DNA, 75 bp, Homo sapiens
agccccctcaccatggctctgtgcggctccaaagaaactcccacgttaacccacgaaaccttcaaagcactgaag

SEQ ID NO: 359343 - DNA, 75 bp, Homo sapiens
tgatccagaacttgcagcaacaataggaatgtatcctgtcaggtataatgtcagtgaatggcaagaaagttcttc

SEQ ID NO: 359344 - DNA, 100 bp, Homo sapiens
tcgaacagagccgggagttcaagaagaacactccagagcgtgtgaaggcaaagaagaatgctgctccattcagaagtgaagtctgctttgggaaagaggg

SEQ ID NO: 359345 - DNA, 90 bp, Homo sapiens
ctgctgtgtggctgcactcactctacgtggagttgggccctgcaggaaggacggacttcaggggcaggtttccaccgtgcacattatgaa

SEQ ID NO: 359346 - DNA, 51 bp, Homo sapiens
gtgggggccaaggtgtacttcatctacgagagagacggccacagagttagc

SEQ ID NO: 359347 - DNA, 100 bp, Homo sapiens
gtcagtgtggaaaaactgcgctgctccatgtcttcgccaaggactgcttccccgagaattccttgatctatgaacttttctctgttatggttcattctgg

SEQ ID NO: 359348 - DNA, 75 bp, Homo sapiens
atgagcaaaaactccaaactcctctccaccagcgccaagagatgcatcatcccattcagatgaaacctgcagata

SEQ ID NO: 359349 - DNA, 75 bp, Homo sapiens
acagcgagggcaaagagctggtggcctcaggtgaaaagtgaaagaaaatggcccgaaccaagcagactgctcgta

SEQ ID NO: 359350 - DNA, 51 bp, Homo sapiens
caaattcattcttgacctcatactgaacaaacccaccgtgcggaggtcgtt

SEQ ID NO: 359351 - DNA, 100 bp, Homo sapiens
tacataataagacacaatctattctgctgattcacaattatggagactgtttggaatcgaagcctcttaaaatggcagatgacttggacttcgagacagg

SEQ ID NO: 359352 - DNA, 90 bp, Homo sapiens
gaaagaagcaactcaagttgcaaggatattcctcatgtatcatgcaaggatattcctcatatatcatattcagtcgggtccactaaaaat

SEQ ID NO: 359353 - DNA, 50 bp, Homo sapiens
caggacctccagacacaccatatgaaggtaaatactacatagccacgatg

SEQ ID NO: 359354 - DNA, 76 bp, Homo sapiens
atattaagcctgaaaaacggcctcgtagagtcaacagcaggaacgaatgcaggaatttgggaactgagctgtgcaa

SEQ ID NO: 359355 - DNA, 100 bp, Homo sapiens
tacacatcggtttcccttccagccattggaacagttgaagactgggatagtttccaagctattttggatcatacctacaaaatgcatgtcaaatcagaag

SEQ ID NO: 359356 - DNA, 83 bp, Homo sapiens
ttcctcacagtttaggtctcaaggcaagcctattgagttaacacctctgccgctgctaaaagattctgaaaaagagttccacg

SEQ ID NO: 359357 - DNA, 100 bp, Homo sapiens
gaacagtctcctccactcggagcgacatgtagactgccaaagtgtatgggatgctttcaagggtgcatttatttcaaaacatccttgcaacattactgaa

SEQ ID NO: 359358 - DNA, 100 bp, Homo sapiens
gcagcggcgcccgcagccgcagccccctgctccggaggctggtgcagtgtaaacaggaacatcgataagtagtgtaaaaacttgcacaatgaaatccgaa

SEQ ID NO: 359359 - DNA, 75 bp, Homo sapiens
ggccagagagggcctcgggaagagatgcgaggatgacaagcctcttagcaaatatccggctgtgatcaatgatat

SEQ ID NO: 359360 - DNA, 76 bp, Homo sapiens
gggtgagccccacccggagttcagcgcggactcccccagcccaggttcttgggtgtctctggggagtccctgggcc

SEQ ID NO: 359361 - DNA, 120 bp, Homo sapiens
gaggaagtagtttaaatgatacctatcactcaagagactcttcatttagattggattctgaatatcaggtttcccaacagtgatgtcacaagattgaccacattgatcacagtaagacca

SEQ ID NO: 359362 - DNA, 99 bp, Homo sapiens
tactggttgcagaatcagaggatgccctgccaaattggttttgtagaagacaagtctgaaaactgtgcttctgaaatgggtcctgatgaatatgaagag

SEQ ID NO: 359363 - DNA, 82 bp, Homo sapiens
cttggacgactcggagagccgaggctgggaggcggcagaatgcagccagaggagggcacaggctggctgctggagctgctgt

SEQ ID NO: 359364 - DNA, 74 bp, Homo sapiens
aaggtgtcaagaagctcagaatggatgaatgctatcaagtaagacaagtgtttgcccagaaacttcacaaaggc

SEQ ID NO: 359365 - DNA, 73 bp, Homo sapiens
aagagtataatgtctatggtgaagtcttttgtacagtggttagacactttttcaaaaatggcaatggtatcag

SEQ ID NO: 359366 - DNA, 75 bp, Homo sapiens
ggctttgccgcagttcatcttcctccctgtgtactttccatttgccttcctggtgatgctattgctgagattaga

SEQ ID NO: 359367 - DNA, 75 bp, Homo sapiens
cagacactgagagccgctttcatcaagactgaaaatattcctgtggttagaagacctgatcgaaaagatctactt

SEQ ID NO: 359368 - DNA, 100 bp, Homo sapiens
tccgggaacttctgcaggacgggagggcaatgagccaggggagaccactcagatcacataccatcagcttctggtccaagtgtgtcagttcagcaatgtt

SEQ ID NO: 359369 - DNA, 82 bp, Homo sapiens
aactgaagaagcttgggctcacttccacaaattgatgctgcttcaaaagtcatggtggaattgctcggaagttacacagagg

SEQ ID NO: 359370 - DNA, 89 bp, Homo sapiens
ggagaacgcagcaagcccaggcggcggtggaaaggaaaaccaattctgtgtcctcggaggaccacagcccagttgggccccaggcgaaa

SEQ ID NO: 359371 - DNA, 90 bp, Homo sapiens
aaccgccgcggagccctcatccctaacggtgaaaggtgggagacctacctgatgcagatattaaacctccagaaaatgtactgtttgtgt

SEQ ID NO: 359372 - DNA, 82 bp, Homo sapiens
tctgtcccacatataggtggattaactgtctggcaaaggcaggggtttagtggttactctcctgtttggaaaaacaaactca

SEQ ID NO: 359373 - DNA, 96 bp, Homo sapiens
ggcggggaaaatggcggacgggaaggcgggagacgagaagcctgaaaagtcgcagcgagctggagccgccggagaatacttcaaacattgtgcaga

SEQ ID NO: 359374 - DNA, 75 bp, Homo sapiens
ttcattggccacctacagaaacaaaatgtcaacaaattgatggggaaactgaacagccaagactcctataacaat

SEQ ID NO: 359375 - DNA, 106 bp, Homo sapiens
ggcaagtattgctgtgggtgctgggacttcccgtccgcggcgtggaggaccaaagagaaccctgtacagtaagaaatatggtgtggacctcatcagatacactcat

SEQ ID NO: 359376 - DNA, 100 bp, Homo sapiens
cgattgcactttactgggggatttgcctcagatggagttacaggtgatcttagacctgatcccgtatgaaagcatcgtggtgacccgagcactggacggg

SEQ ID NO: 359377 - DNA, 75 bp, Homo sapiens
gccaaacgtcagcaagaagaagaagcagctgctcagatgaaggatgatccaccaacacattctcagccagacagt

SEQ ID NO: 359378 - DNA, 83 bp, Homo sapiens
tttgattacagtatttgtagcagaatgttgctatggagattcatgccaggaaggcaacagcccccaggggagcaaccagggag

SEQ ID NO: 359379 - DNA, 100 bp, Homo sapiens
cagtgaacctatcgaaggacatgaagactaccacatgatggttgagataagtcgaagagtgactctggaaaaactccctcctgtcctcgtgctgcacctg

SEQ ID NO: 359380 - DNA, 82 bp, Homo sapiens
gggaaccctggtcaccgtctcctcaggccctggccaacgtcaacattgggagcctcatctgcaatgtaggggccggtggacc

SEQ ID NO: 359381 - DNA, 88 bp, Homo sapiens
gttgacctatgatctgcagggagacgcacagccaggacatcctggaacctgggaaagggttctggcctataggaacaagacattttca

SEQ ID NO: 359382 - DNA, 75 bp, Homo sapiens
gtaggagaatgactccgattcgtgaccctcagcgccggtgcatgtcgatattcagaatggacagtttagaagaac

SEQ ID NO: 359383 - DNA, 100 bp, Homo sapiens
tgattaagtctggaatgaatgtggctcgtctgaacttctctcatggaactcatgagatcaacaacccctccccgtcgtaaacgctgaggaatgatgtggc

SEQ ID NO: 359384 - DNA, 49 bp, Homo sapiens
gccggagctggacgccatgaccaggaggagagaagctccagggagcccg

SEQ ID NO: 359385 - DNA, 82 bp, Homo sapiens
tgtgaagagaggatgttctagaggcatggttgaaattgaatttcttacctgcagtggtgaaaaacggagacgggagcaggaa

SEQ ID NO: 359386 - DNA, 83 bp, Homo sapiens
ctttggcttgcagccaacaatgggataaccttctgttcggtgatgaaattatcactaatggttttcattcctgtgaaagtgat

SEQ ID NO: 359387 - DNA, 49 bp, Homo sapiens
gccagcttagactattcatacgctcggttttaaagacgctagagtgcca

SEQ ID NO: 359388 - DNA, 100 bp, Homo sapiens
gcttcgcagtctggaaagctttaggagttcacagtgtcagtctagagcacgaggagcagaaactggagctcaagcgccagctcacagagctacagctctc

SEQ ID NO: 359389 - DNA, 75 bp, Homo sapiens
ctccaaagtcaccaggctcaaatcggattttttatcaagcagaaatgcatcgaacaacgagaatcaagatcactg

SEQ ID NO: 359390 - DNA, 87 bp, Homo sapiens
gaccgtgaccgagagcgtgaccgagagcgcgaatatcgtcatcgttagaagatatgatggacgtggtcacctgcatgacctttctga

SEQ ID NO: 359391 - DNA, 100 bp, Homo sapiens
ttgttgcaggaagtactagttccccatctgtgtcctactacaggaaaataattgaaggcactgaagttgtccaggaaccgcggggaaaggcgaatgggtg

SEQ ID NO: 359392 - DNA, 101 bp, Homo sapiens
aggctttcagcatcgcacaggatgccctgcacatccccaggctcctggagccagaagcctttgaagtaaattttatggatgatgtaggtcagactctatta

SEQ ID NO: 359393 - DNA, 87 bp, Homo sapiens
gcgcctcgcggcatggcgtcggaggggccgcgggagcccgaaagcgagagttactggaggtgaactgtttgaagacatagtggcaag

SEQ ID NO: 359394 - DNA, 82 bp, Homo sapiens
tggcccagtactaccggcccctgcatatgacatggcagagcttctcctcggggagtcgaagctggagcagtacctgaaggaa

SEQ ID NO: 359395 - DNA, 95 bp, Homo sapiens
tgcagctgcctacaaattcaagagtgaccagggatggaaacttcttgtggaccacggacatggcagcctgcgtgaaggagcttgttttccatctc

SEQ ID NO: 359396 - DNA, 100 bp, Homo sapiens
aggactttccttacctgtttttccagctcacccactgccagcagagctcttagcttctgccagctatgatgacacagtgaagctgtaccgggaggaagag

SEQ ID NO: 359397 - DNA, 88 bp, Homo sapiens
ggagtttgacagctattaaaaccagggctccacagttaggagctttggacatcagacagtgcaggagaagaatgtgatgcggcagaag

SEQ ID NO: 359398 - DNA, 83 bp, Homo sapiens
catgaagcgggctggcggcgctgccgctcccgggcggccgcgggcgggtttggtgcacctcgatttggaggaagtagggcagg

SEQ ID NO: 359399 - DNA, 118 bp, Homo sapiens
gcgcgaacgagcgacggcggaacccgtgggcctgtggactgcagcctcggcggtcagcaggagtggttctgattaaagcccagatttcagagctggcatttcctattacagcatctca

SEQ ID NO: 359400 - DNA, 75 bp, Homo sapiens
cgggaagagaagatcatcgagcatttcaaacgcggagctggagtttgttcagatcatcatcatcgtggtggtgat

SEQ ID NO: 359401 - DNA, 100 bp, Homo sapiens
cagatgctccagtttgagaaacctggatctgcgatctgtttgtgcaggatcgtgctatctaaacaagcatcattcaggaatagccaaaacacaaaaagag

SEQ ID NO: 359402 - DNA, 98 bp, Homo sapiens
agcatcgtgaagggctggggccttcactcctctgtggctctggaagagcccgatttcctcaggaggacacagcattgttggttttgccatgtactatt

SEQ ID NO: 359403 - DNA, 90 bp, Homo sapiens
aaatggttgtggactacgtctgtgcggctgcgtggggctcggccgcgcggactgaaggagactgaagttcaacttcctcaattgctttgc

SEQ ID NO: 359404 - DNA, 82 bp, Homo sapiens
cagcctcatcacccggctgctggagggtgtggaaacaggaagagaactagaactggaagtaaagcattgaagatgtgactga

SEQ ID NO: 359405 - DNA, 83 bp, Homo sapiens
ttaactttcattgtcttttccgcccgcttcgatcgcctcgcgccggctgctctttccggggagcatttcctgaagacgtagtc

SEQ ID NO: 359406 - DNA, 98 bp, Homo sapiens
tgagatcaaatggcacttcattggccacctacagaaacaaaatgtcaacaaattgatgggttagcatggcctcattgaaagaactagatcaaagactc

SEQ ID NO: 359407 - DNA, 83 bp, Homo sapiens
cacaatgaggctccctgctcagctcctggggctgctaatgctctgggtctctgggctgggttacgacccctacaaccctgagc

SEQ ID NO: 359408 - DNA, 82 bp, Homo sapiens
aggaactggtgctgcagcgagagggaaatcctcattgacgattcaatttgttgaaggccaatttgtggactcctacgatcca

SEQ ID NO: 359409 - DNA, 98 bp, Homo sapiens
gggaaaattaagcagatgctccagtttgagaaacctggatctgcgatctgtttgtgttgcaagaatgtagtaactctgatcagctacaaggaaaggag

SEQ ID NO: 359410 - DNA, 100 bp, Homo sapiens
aggatccgcccctggacatggaggagaaggtccgcttcaatgatcattcaggatatgttcgtccagtaccagtgccacgcagtttaaatagtgatatttc

SEQ ID NO: 359411 - DNA, 50 bp, Homo sapiens
cgtttattaaaagagctgtggctgtgtcagcttcctctggtgcaaccagc

SEQ ID NO: 359412 - DNA, 82 bp, Homo sapiens
ggaacttcgttgcttgcttgcctgtgcgcgcgtgcgcggacatggcctcaaacgcggccctccaggcactgaagcgtaagaa

SEQ ID NO: 359413 - DNA, 93 bp, Homo sapiens
ggcggcaccgcggtgcgcaagcgcaaccgtcggtgggtcggggatcggtcgcctgagaggaagctcttcgtgggcggtcttgactggagcacg

SEQ ID NO: 359414 - DNA, 87 bp, Homo sapiens
tgggtagatctgaacatccctgataccccagaagctgaaccttattcacagtgaaatcagtaatttagccggctttgaggtggaggc

SEQ ID NO: 359415 - DNA, 100 bp, Homo sapiens
ccatcttggctcctccccacaaagtgtctatattgacaaaagtccaaagacttgttgagccagctaactgggctttttacaatggcttttcaagattgca

SEQ ID NO: 359416 - DNA, 100 bp, Homo sapiens
caggagtggttcaccctggtcaacaagaagaacgctctcatccggaggcaggaccagctgcagctgcttcaccgagacttggagccagaatctgagcctc

SEQ ID NO: 359417 - DNA, 100 bp, Homo sapiens
ttctggagagcttgacattctcaaagactggtgctatgaagctctgcacagatgtcccgatctctctgacttccagcaaaaaatctctagtgttctaagc

SEQ ID NO: 359418 - DNA, 100 bp, Homo sapiens
aagaggtcccaatcccccactctttccgccctaatggaggtctccagtttcgaaactgattattgatgagaagaagtattacttatttgggagaaaccct

SEQ ID NO: 359419 - DNA, 75 bp, Homo sapiens
tcgtgttctgatcactactgacttgttggctggaagtgatggagagagtattggaaactgtcccttttgccaacg

SEQ ID NO: 359420 - DNA, 99 bp, Homo sapiens
ggatgataaccacccaaggcccaaaagcgtcaaactcaccaaaaacaacatctttccagaaagaggtgtggccgacgacgatgccctcgctgaggagcg

SEQ ID NO: 359421 - DNA, 89 bp, Homo sapiens
tgaccgtgcagtaaccgctacccaggaggcggagcggacaaggctccggcctgcgaggaggctggcgcccatgcggctctacacgctct

SEQ ID NO: 359422 - DNA, 90 bp, Homo sapiens
gtcttctccacgccgctccgactccaggggagccgtggcctcctctccgccctagcgctgagaagttccacctggtgccaagcatcaaca

SEQ ID NO: 359423 - DNA, 102 bp, Homo sapiens
ccgggatttgggtcgcagttcttgtttgtggatcgctgtgatcgtcacttggtgcgcgcggagccatggttatcatgtcggagttcagcgcggaccccgcgg

SEQ ID NO: 359424 - DNA, 135 bp, Homo sapiens
cttttttaaatggtgccaaaggaggtaacccttttcttttccgacaagtactggagaactttaaactaaagggcaagtgtccagagaatggctgggatgaaagtacacttgaactctttttacatgaacttgcaa

SEQ ID NO: 359425 - DNA, 75 bp, Homo sapiens
gtcgctggagcgggcggagctgtgcgagagcctcctcacttggaaagcgtggatacccatcaacgaagttttgat

SEQ ID NO: 359426 - DNA, 51 bp, Homo sapiens
gtctctgcacctcgcgccccagcagaatgaagatgataaccgagccagtga

SEQ ID NO: 359427 - DNA, 100 bp, Homo sapiens
agggaaaagaggaggcagaagagacgaatgtgctgcccaaggtgaaagacttggtcgccaggatacatggaaaatggcaggaaataatccagaactgtcg

SEQ ID NO: 359428 - DNA, 97 bp, Homo sapiens
tgttgctcactttcctgggtattgtagccgctgtgcttgtcaagccacagggtcgactcatggatgatacctctattgctgctgcatgatgttcaag

SEQ ID NO: 359429 - DNA, 75 bp, Homo sapiens
ctcctctgatggcaggacctgccaaggtaccgtacagagtggatttgcagggcagtggcatggagcccctcttcc

SEQ ID NO: 359430 - DNA, 75 bp, Homo sapiens
tagaagaagaaaacttcgaaggcttaactgctcctgctaaggccaagccggctgaagctcctgctgctgcagccc

SEQ ID NO: 359431 - DNA, 50 bp, Homo sapiens
cggcgccctgcaccgcgcctcgcaaagcattgtttccaagtcgtacgagt

SEQ ID NO: 359432 - DNA, 71 bp, Homo sapiens
agtacaaaaacggcccttggatgatggagatgcctgggaaccactcacctccttctgtgccatgaggccac

SEQ ID NO: 359433 - DNA, 100 bp, Homo sapiens
agttgacacacctcatggtatatttgcagccagtactctatatgaacaatccgtctggatcacggatgtaggaagtgataaaatttgatgctgggactct

SEQ ID NO: 359434 - DNA, 75 bp, Homo sapiens
ccgggcccggccgccaggcgcctctactccaggacacattggcgtgagacctgggagtacgttgtgccaaatcat

SEQ ID NO: 359435 - DNA, 75 bp, Homo sapiens
aaagcaatgcaagagtcgctttgttacacctttcaagtgtctcgggaagtgtgaaatcggctgggcctactactg

SEQ ID NO: 359436 - DNA, 71 bp, Homo sapiens
ctttaatgaaaagggatggaactacattcttgagtgctacaactgtgaggaggaggccatgtaccactgct

SEQ ID NO: 359437 - DNA, 98 bp, Homo sapiens
ccggccccatgaggagggacgtgaacggagtgaccaagagcaggtttgagcgtttgctgccaattgatggggcaaatgatctcttttttcagccacct

SEQ ID NO: 359438 - DNA, 83 bp, Homo sapiens
gaagaataagcacaagagaaagaaggttaagctggctgtcctgaaatattataagagatatgacagaagtagttcacatcaaa

SEQ ID NO: 359439 - DNA, 100 bp, Homo sapiens
gggatcctctctgctttcctgggccgccgccacaatgggccgcgagtttgggaatctgacgcggatgcggcatgtgatcagctacagcttgtcaccgttc

SEQ ID NO: 359440 - DNA, 100 bp, Homo sapiens
agatgtcccccttacggagcagaccgtgtctcaggtctgccagcttacatttacccaaactgtccattactggaacctatgatctgaagagcgtcctggg

SEQ ID NO: 359441 - DNA, 100 bp, Homo sapiens
ggatcctcactctctccgatactttctcccaaggccagacggttttgctgtctcagcctactgtggtacaacttcaagcacctggagttctgccctctgc

SEQ ID NO: 359442 - DNA, 88 bp, Homo sapiens
aatatgtgctggagagggaagagaaagtctttatttacagcttcatggagacctggtcaggcagaagctcctcctggggtagagacag

SEQ ID NO: 359443 - DNA, 100 bp, Homo sapiens
ggaagaatggcagtgctcaaactcaccgaccagcctctgaagagccaatccattcaggatgggaaaccacgcaggcaaacgagaattaaatgccgagaag

SEQ ID NO: 359444 - DNA, 97 bp, Homo sapiens
aacaaataagttatgctatgaggatgacaaactctggagtaattggagccaagaaatgagtatagttaccgtgcagacggtctacgtgcagcacccc

SEQ ID NO: 359445 - DNA, 100 bp, Homo sapiens
ggaggaaccagaccgcggccagagcgttcaggtcacagccaggggctttgggccgctgttacagtttgcctacactgccaagctgttactcagcagagaa

SEQ ID NO: 359446 - DNA, 100 bp, Homo sapiens
cccaagtctcctgaagaggaaggagcggtgtcctcttaagaaaatggtcgttccaggggtagaggaggcatgaaggatgaccgtcgggacagatactctg

SEQ ID NO: 359447 - DNA, 98 bp, Homo sapiens
gcccaggtgcccagaggactttcttccagcttctgctgtccttctttgtggagagcaagatattgctgtgggagctccgtttgaaggcttgggcaaag

SEQ ID NO: 359448 - DNA, 75 bp, Homo sapiens
caggcattttggttttaggagcaattgctgaaggaataaaggttggggagactacacctgacaaacttttcactc

SEQ ID NO: 359449 - DNA, 99 bp, Homo sapiens
gttcactggagtttgcattgtcttggctgttgagtgaagaaaaagagcaggaagtcattacatgatctctgcactcgtcctaagagcccaggcctccga

SEQ ID NO: 359450 - DNA, 74 bp, Homo sapiens
tgaaactggttcttgggtgtttaaggaatgatgagaagacagcagctgattacaagattttaggtggttcagtc

SEQ ID NO: 359451 - DNA, 104 bp, Homo sapiens
acagagacagcagcccagtgcaatgatccctttgtggccttccacatcaacaagggccttgtgaagaagtatatgaactctctcctgattggagaactgtctcc

SEQ ID NO: 359452 - DNA, 100 bp, Homo sapiens
aacatccagaaagagtccaccttgcacctggtactccgtctcagaggtggagctgaagaagggagccactctcaaaatcacgctggataacgcctacatg

SEQ ID NO: 359453 - DNA, 98 bp, Homo sapiens
aggaccctgttccatccaaactcttgccctttgagggaccaggctctgacgcccgctctgcggcttcggtgtttgaacaggccacagtccaggagcgc

SEQ ID NO: 359454 - DNA, 100 bp, Homo sapiens
ccagtacatcagagaaacccaactccatggacactgcaaatacctcacccttcaaagtaccagctttcattaaagatagaaccagggacaagcaccccac

SEQ ID NO: 359455 - DNA, 74 bp, Homo sapiens
agaactggttcagcggagaataacatatcttcagggcttttgctgggctggagtgagggcgcgcagcttgggag

SEQ ID NO: 359456 - DNA, 99 bp, Homo sapiens
tgcggaccctgccattccggaggaggacggttcactgggaaacatcgatgacctggcgcagcagtatgcagattattacaacacctgtttctccgacgt

SEQ ID NO: 359457 - DNA, 82 bp, Homo sapiens
ttcctggcctgggcgctccggtggcggcggaggagctggagttcctacgcgtggccaagaaggagaagctgcgggaggccac

SEQ ID NO: 359458 - DNA, 74 bp, Homo sapiens
ttgttgctggagtaatcatcagcctcataacagatatttgtagagcaattgaattattggaaaaactacaaagg

SEQ ID NO: 359459 - DNA, 82 bp, Homo sapiens
tcgagcctgagggaggggaaaggcgcagggtgagtggcatcaaggcgctgtacgagtcggagctggccgatgcccggagagt

SEQ ID NO: 359460 - DNA, 95 bp, Homo sapiens
gtctggactgaaataccttcatgaacaagaaatcttgcacagagatctcaaactagggaagtgtttgtttatgtcagggctcagtgaggtccagc

SEQ ID NO: 359461 - DNA, 83 bp, Homo sapiens
ctcgcctgtgtgaaaaagaagccgacgtgcagaaagcagcagagatttaacagaggctttggatgaagatgcagaccccacaa

SEQ ID NO: 359462 - DNA, 97 bp, Homo sapiens
tggatggggtgaactaccttcacacaaagaaaattgctcactttgatctcaagatcaaaggtttggagtggctggtgtccctgtacaacaacaacct

SEQ ID NO: 359463 - DNA, 75 bp, Homo sapiens
tggagggggcttccccggaatggagggctccgggcccaagtttgaggaggtgtgggcagaagaaaaagctagtga

SEQ ID NO: 359464 - DNA, 95 bp, Homo sapiens
cataatggatgaaaggaaccgacagactgatgatgaagatgagtcttttattcttgaggatcctacattgttaaacattgatactattgattctc

SEQ ID NO: 359465 - DNA, 42 bp, Homo sapiens
ggcagagttcccgctctcttgacttaaccaccaccatgtcga

SEQ ID NO: 359466 - DNA, 82 bp, Homo sapiens
taccagtcttccctggcaagattcttctgaattgtgctgccttggccaaaagagaaagcataacccctactgtagaactaaa

SEQ ID NO: 359467 - DNA, 100 bp, Homo sapiens
accacttggccccctctgatctgcgccgggtcgccacatactgctcctttagcggcagagttttccgagtgaccttcttgatgctggctgtttctctcac

SEQ ID NO: 359468 - DNA, 100 bp, Homo sapiens
aactaagaccaagtcctcgctggactgctcagggtgccagacctcatcttcttcgcacactcatgggacacaaagccaacatctgcagcctggatttcca

SEQ ID NO: 359469 - DNA, 51 bp, Homo sapiens
caggttacttcatggcagctatcccacagatggagtttcactcttgtcgcc

SEQ ID NO: 359470 - DNA, 89 bp, Homo sapiens
aggatcatcctccagctgaaccgttactacccacagatccttaccaacaaggaggcggaaaaggaagacggaagaaagtgccgggaaga

SEQ ID NO: 359471 - DNA, 98 bp, Homo sapiens
ttgccaccttcagcccccccgcgaacgcccaagacgtaaaattcatcctgatcagaaaaatattaatgcctatgttgtgtttaaggaggagagtgctg

SEQ ID NO: 359472 - DNA, 83 bp, Homo sapiens
cgcgcctccgctacttccagggctacgcgcgctccgcgcagctcaggagggagccatggatttgctgcgggagctgaaggcca

SEQ ID NO: 359473 - DNA, 90 bp, Homo sapiens
gctgtacatcgtattacacctgaggaggccaaggtacaattcaacagtgttgtgatgccattgatcacctatgccgcatcattgaaaaga

SEQ ID NO: 359474 - DNA, 75 bp, Homo sapiens
gaatgaggatattttttgaatcaaacacagaccaccagtgcaaaacaagaaaaagcaccaagtaaaaagccagtg

SEQ ID NO: 359475 - DNA, 100 bp, Homo sapiens
aagccattaaacctgagtcaagttgaaggtttcctatcctgggagcaggagagtgtgcctatttgaatgacaaaggtgccagtagtgccaggcactacac

SEQ ID NO: 359476 - DNA, 75 bp, Homo sapiens
ctacattaagctggacaaactgggcgaggataccatgacaatcatattgtaattcggtggttctgggctgcagtg

SEQ ID NO: 359477 - DNA, 96 bp, Homo sapiens
ccaccgcacgttcagaagtcggggtgctgtgattacaccaaccatggaccatcccatgtcaatgcagccagccaacatgatgggcccactgacaca

SEQ ID NO: 359478 - DNA, 100 bp, Homo sapiens
ttaaactttggccctgcgcctcgtccagcctaggttccacccttttctgggaacgtgagtatcaaccaagccagagactgctgctactttgaaacgtacg

SEQ ID NO: 359479 - DNA, 100 bp, Homo sapiens
ggtggaaatttcggaccaggaccaggaagtaactttagaggaggatctgatttctaacgacccaagtccaggatacaacattgaacagatggcaaagcgg

SEQ ID NO: 359480 - DNA, 75 bp, Homo sapiens
tattgcacttcttgccacaatgttacagaggagctgatggtacacacatggatggtgatcaaattgttgtggaag

SEQ ID NO: 359481 - DNA, 88 bp, Homo sapiens
cggatactggtcttctcgtcggattgcccatgcacttgttgcagaaacagccaaggcccggattgcatttctacaaggcgaaagaaaa

SEQ ID NO: 359482 - DNA, 95 bp, Homo sapiens
ttgttgaaaatttcaagcaggaacataaactccatgttctggtgtctcaatgcttgtacctactgcaaaactaaacacgccagaggaaatttggc

SEQ ID NO: 359483 - DNA, 83 bp, Homo sapiens
aggagctggcggagagcggcctgcgggcgatcgggccgagtcaggactggtggagtcaacacagtcaatcaatagccaacctc

SEQ ID NO: 359484 - DNA, 75 bp, Homo sapiens
ctgtgccccagagatctgcccctcccacccgaggccaagactaaggggctgcagagcggggtggacattggcgtc

SEQ ID NO: 359485 - DNA, 98 bp, Homo sapiens
ttttcttctgggctccaattatgaaatgggttacagaagagaatggtgagcaattgccatgttactttgtcatggtaagcctacaagaagttggagga

SEQ ID NO: 359486 - DNA, 100 bp, Homo sapiens
ttccggctgcttatttgaatccttgctctgcgatggactattccctggctgcagccctcactcttcatggtcactgtaatgtgtgtggctggtattggac

SEQ ID NO: 359487 - DNA, 75 bp, Homo sapiens
ggcggctctctggtccgcagcggcaacagtaacgaaaaacagggctaaatctcctgcaaagaagctgagccatgc

SEQ ID NO: 359488 - DNA, 50 bp, Homo sapiens
ctctcccggcaaggaaacttcgcaggctgagtcaagaattgaaggttggc

SEQ ID NO: 359489 - DNA, 100 bp, Homo sapiens
atgaacaatccgtctggatcacggatgtaggaagtgggtaagaaggtggatggctctgtaaatgcctatgccataaatgtctctcagaagaggaagtaca

SEQ ID NO: 359490 - DNA, 49 bp, Homo sapiens
ccctgatgatccccccctgagccggtcatacttacctggttgcttgcgc

SEQ ID NO: 359491 - DNA, 83 bp, Homo sapiens
tgggcctacaccagcatccggtcagttatcatctggtgacaaagcttcaggtttgattactcaggagttggaagttcagatgg

SEQ ID NO: 359492 - DNA, 83 bp, Homo sapiens
ggagcctcagccccgccggcagccctaagggcaaggtttgttgataagccggggcccttcgtgggaccctgcggtcactggat

SEQ ID NO: 359493 - DNA, 100 bp, Homo sapiens
gaaggtctctggagacatcttcagcagcaaacggggattcagcgtccgatcctttggaacagggactcacgtgaagcttccaggaccagctcccgacaag

SEQ ID NO: 359494 - DNA, 100 bp, Homo sapiens
ctacgaacgagttgtatcacctggaattggtctgaagaactgttgcccaattcaacagtgccagcattccaactttgttaaacctaccaacatcttaaat

SEQ ID NO: 359495 - DNA, 83 bp, Homo sapiens
ctaaaatgaaagaaaccgctgaggcttatttgggaaagaagatgtgttcagagcaacattgttttgttgacacaagcatttag

SEQ ID NO: 359496 - DNA, 100 bp, Homo sapiens
agcattcaaattgctcacagctgatcctaagattgatgccaagaaggaacagctagcagatgcccggagagacctgaaaagtgctaaggctgatgccaag

SEQ ID NO: 359497 - DNA, 75 bp, Homo sapiens
cagctgggacttcaagacggccgagagccactgcgaaatccaggatgagtcagctgtgttatggttggatgaaat

SEQ ID NO: 359498 - DNA, 121 bp, Homo sapiens
gaaaaggaaggtggctgaacaggaggagcggcagggcatgaaggtccaggcgctggccaggcttcgccgtggcccagtgcataaaccagcacagctccccgtccctgtcctcacagtcgcc

SEQ ID NO: 359499 - DNA, 76 bp, Homo sapiens
cattcctgaaatacatccaggaaagacatggagattctcttaaaaaggatgaactgctggaggagctagaggagct

SEQ ID NO: 359500 - DNA, 60 bp, Homo sapiens
atcgtggtaggctatgaccacgagaagccagtaattttatgcgtcaggagtgtttggatt

SEQ ID NO: 359501 - DNA, 115 bp, Homo sapiens
actcaacaccaacatcgatgggcggcggaaaatagcctttgccatcactgccattaagccaatggagatcttcgtggatgatgagacgaagttgacgctgcatgggttgcagcag

SEQ ID NO: 359502 - DNA, 83 bp, Homo sapiens
cgaaggtgctaccatcgtgagagtaaggatgcttatagaattttatgagtcaccagatccagaaagaagaaaaagatttcctg

SEQ ID NO: 359503 - DNA, 87 bp, Homo sapiens
ccgggctcctaccagcgctttggtcaaagcaatagcacaacattgagaggatccagaatccagatctctggaatagctaccaggcaa

SEQ ID NO: 359504 - DNA, 101 bp, Homo sapiens
aaattaatccagcaggaactgagtagtctgaaagcgactgtttctgctcctactacaacactggtgacttaagagattaaaattaatttggttgctgttgg

SEQ ID NO: 359505 - DNA, 82 bp, Homo sapiens
tttcttcatgaccctgcccttgccagaatttcctgcgctgttccacctcattcaacttcagatatctcccggggccaattca

SEQ ID NO: 359506 - DNA, 74 bp, Homo sapiens
aaagtgtgtgggaggcgttgacctgccccttgtcctggccccggttggcatggattacagaagctgcatcctga

SEQ ID NO: 359507 - DNA, 78 bp, Homo sapiens
cggctcttgagtacttgcactcgcgggacgtggtataccgcgacatcaaggtccgtcggaagttagagctggaagctg

SEQ ID NO: 359508 - DNA, 74 bp, Homo sapiens
gtgaaacatgtgaacactcaagtgaagcaaaagccttccatgattacctattgtggacgatgaaaggctctctg

SEQ ID NO: 359509 - DNA, 50 bp, Homo sapiens
caccaagatgcctacatccggaatctacctgttactcgtattttggacaa

SEQ ID NO: 359510 - DNA, 101 bp, Homo sapiens
gcgggacggctctgtaggaaggaacttggttccccctccctcagcttccgccccaaaaggtgctgtgctggccattggtgacccaaagatgatgaaaaata

SEQ ID NO: 359511 - DNA, 97 bp, Homo sapiens
gtgttagacatcgagatcaatgaacctttagatgaatttacagtttcccaggcagctgcagacttgaaacagttctgtctgcagaatgctcaacatg

SEQ ID NO: 359512 - DNA, 100 bp, Homo sapiens
tgggaccagatgctgcaatcaaccttaccgaccccgatggcgccctggctaacttcttctgcacggtacctgagatcctggtgcacaacatagtgatctt

SEQ ID NO: 359513 - DNA, 100 bp, Homo sapiens
acaaggccaatgtggccaaggctggcttggtggatgactttgagaagaagattctacttcaaagaaatcctgccacccgatgattaaacagtgaataaaa

SEQ ID NO: 359514 - DNA, 120 bp, Homo sapiens
gctacctctttcctgctggctttggagcctgagctcgaggcccggctggcgcacctgggcgtgcagggccgttgccgtctgcacccagaccctgagccgccgccgccggccatggaggtg

SEQ ID NO: 359515 - DNA, 90 bp, Homo sapiens
agacttcgaaactttgttcaccgattgcaccaatgccagataagccaatggacacgtcagtgttatctgaagaaggaggagagccttttc

SEQ ID NO: 359516 - DNA, 100 bp, Homo sapiens
cactatgccatgatgaagaagatgcagttgccagaactgcccaaggacatcagggtgtcaaattgagaaccaggtagatccccaccacctacagtaaaaa

SEQ ID NO: 359517 - DNA, 100 bp, Homo sapiens
caaggagaagagccatggatcataaagagacacataccaaattggatctatccaggtctgcgcaggcatggcactaagtgtcccatggcacatttggccc

SEQ ID NO: 359518 - DNA, 75 bp, Homo sapiens
cggactttgtcatcgccttgatattcaaaaggggacagatgatttctgctgaagattgtgagtttattcagaggt

SEQ ID NO: 359519 - DNA, 90 bp, Homo sapiens
cagctcatccagcctcagtttgagacgccgctgccaacccttcagcctgcggtctcgatctagaagacggtcacgaagtaggagtcgcag

SEQ ID NO: 359520 - DNA, 51 bp, Homo sapiens
gacagtctgcatgtgcagttttcaggttgaaggggcccggccaggactcgg

SEQ ID NO: 359521 - DNA, 83 bp, Homo sapiens
gtgctcgcgctactctctctttctggcctggaggctatccagcgtgagtggcatcaaggcgctgtacgagtcggagctggccg

SEQ ID NO: 359522 - DNA, 74 bp, Homo sapiens
gacttgggatcagttataaactctagagtgctgcttttctaacccaaactgtatgtcttgatgacactacagta

SEQ ID NO: 359523 - DNA, 97 bp, Homo sapiens
acaccgaggaattctatgatgcccctgaagatgtgcacctagggggcggctaccccgtgggtgccccaaaatgcgccgtcatgcttttgaactcaag

SEQ ID NO: 359524 - DNA, 75 bp, Homo sapiens
cgaattggatttgatagcacacagtgggttgatgatgcaatgatggcaaatgcagcccagaaatttcccttcaat

SEQ ID NO: 359525 - DNA, 98 bp, Homo sapiens
gtttaaacagatccacaaactgaacagagatgcttttactgactctgctatcagtgctaaagtgaatggcgaacacaaagagaaggacctggagccct

SEQ ID NO: 359526 - DNA, 110 bp, Homo sapiens
ctaactttagagttggaaaaaaaattggatgtggcaattttggagaattacgattaggtgacagatcagtcagtgaaagcatttgctgaacactgtcctgagcttcaata

SEQ ID NO: 359527 - DNA, 100 bp, Homo sapiens
ttacctaaatgcactctttcgaaagaaagacaagttggatggcttgaggactggtactaaaaggaaacgtgactgggaggccattgccagcagaatggag

SEQ ID NO: 359528 - DNA, 100 bp, Homo sapiens
aacggctccatgtctctgaggagcggcgggcggcggcgcgcggacccaggcgcggatggcgaggccagcaggcgagaaccactgtctctgatcaacgtgc

SEQ ID NO: 359529 - DNA, 83 bp, Homo sapiens
ctgactggggttctgagactccctgtcccggaccgcagaggagaacgaggagcgcacgatgattgaccccacttccaaggaag

SEQ ID NO: 359530 - DNA, 100 bp, Homo sapiens
actgccaaaatatggtgtgaaggttggcctgacaaattatgctgcagcatattgtactggcctgctgctggcccgcaggtgttccttgcctgtatctccc

SEQ ID NO: 359531 - DNA, 75 bp, Homo sapiens
aagtgacatgagccatgggtacgtgacagtaaaggtcctgaggcacgtgaatggccaggatcagattgtgcccgg

SEQ ID NO: 359532 - DNA, 83 bp, Homo sapiens
atttctcatgaacagaaacacctaggaagggagaactgcattactctactgactggcagagacaggagaggtagatgtccacg

SEQ ID NO: 359533 - DNA, 100 bp, Homo sapiens
tgtcccaaaagaccatcctgctctcaactacaacatcgtttcagggtatggcctcacaagtcttggtctacccaccatatgtttatcaaactcagtcaag

SEQ ID NO: 359534 - DNA, 104 bp, Homo sapiens
ctgcacaagtgaaatcactgacacaaaaagttcaagctggtgcctatcctacagaaaagtgagaaagatcagtctaaagaaaaggagaagaaagtgaaaaaaac

SEQ ID NO: 359535 - DNA, 100 bp, Homo sapiens
cgtgcccggattgcccttgctcgtgctgtctaccaggacataagcagctctatgaccaatagcacagctgccagtagacccccggtcaccctgaggctgg

SEQ ID NO: 359536 - DNA, 80 bp, Homo sapiens
cttttactattagcccatcaagaaatgaagaacgagattcagacacaggggttgtagaaggtgatttagctgccatagaa

SEQ ID NO: 359537 - DNA, 82 bp, Homo sapiens
cacttcgtcatgttcttcgcgccctgggtggactccattatgctggtggaagagggcttcagtgtgacgagtgtggatgcca

SEQ ID NO: 359538 - DNA, 80 bp, Homo sapiens
gggtggcttacagacgctgccagcatcgccgccgccagggagtgcatccgccccaacccttttccccctcgtctcctgtg

SEQ ID NO: 359539 - DNA, 82 bp, Homo sapiens
cgggacgcctgcatcaaggaggccattctcttgtgtcttgggacaaggtgcgcattcctggtgtgctgcagcgattgggagt

SEQ ID NO: 359540 - DNA, 97 bp, Homo sapiens
gggctcggggagccggtctatggactttccgaagacgagcctggcatgggagggcaggattgtggtggtgggatttgctggaggaaacattgcttct

SEQ ID NO: 359541 - DNA, 100 bp, Homo sapiens
ctagcacgtggaattcgcgaagctgccaaagccttagacaagccggcgatgaatttgtggagaagaccctgagcaccatagcgaccagcacggatgcagc

SEQ ID NO: 359542 - DNA, 101 bp, Homo sapiens
aaaattcatctggaattactacccaatcaaggaatgctgatcaagatgtacagttacccagcacgtgtacctcctcctcctcctattgctcgggctgtagt

SEQ ID NO: 359543 - DNA, 75 bp, Homo sapiens
caggggccttgataacacagagtttcaagagtctaacgtgaagacattttgctccaagaatatcctagccatcct

SEQ ID NO: 359544 - DNA, 88 bp, Homo sapiens
tcctgtacacaatcttcatgaaagccacatccatcctgaagcggcagaagcagctgcggaggaagaatgtacgctttgaccaggtgac

SEQ ID NO: 359545 - DNA, 100 bp, Homo sapiens
ttctcttcatattttctcacatatacaacacgattcttctaatggatgggaacatgggcttggtgatccagctatttttcctgccgtaattgtggaacat

SEQ ID NO: 359546 - DNA, 130 bp, Homo sapiens
tgccgcctccttaccatgaagccagtaagtcgtcgcacgctggactggatttattcagtggtttttcgttggaatatacgttgcacatttatggcgattctgagtgtgagggcagacttctgccaggctc

SEQ ID NO: 359547 - DNA, 82 bp, Homo sapiens
agcaacagaaacaaaagcaggcaaatggagtcgttgggaatgcaaggagagcctcatcactgacagtggaaagctgtatgcc

SEQ ID NO: 359548 - DNA, 98 bp, Homo sapiens
aagatttggaacctcactgaaaattggtattgttggattgccaaatgttgggacatggatttgattgacatactttggaggcaagatatagatcttgg

SEQ ID NO: 359549 - DNA, 96 bp, Homo sapiens
gaaatacttcagaaagacagagattttactgctgaagattatgaaaaggtgaacggaagagtccttatgttgcagtatgctgtatagtaatggcct

SEQ ID NO: 359550 - DNA, 101 bp, Homo sapiens
ggggaagtcatgctcgcttcacggaggcaatagctagccgacatggaaggtctttaatgtaactttaaatggttcaccaaaggatgctctaatggatgaca

SEQ ID NO: 359551 - DNA, 101 bp, Homo sapiens
gtgctggcagcacttccctgagccactctccaggctgctccagtactcaagggaacggtgaacagcagagaatttcaaaggaccttgctaatatctgtaag

SEQ ID NO: 359552 - DNA, 99 bp, Homo sapiens
gaatttctctctttgggaggaggaagggacaccgagggaccaaagggcgtgggctcgggatgagtttgaaggcctcttcaagcagccagcagaaaatgt

SEQ ID NO: 359553 - DNA, 90 bp, Homo sapiens
cggaaggactcctggaatgccacaaatgcaaatacttgtgcactgggagagaaatgagccgtcagactgctacagcattacctaccggta

SEQ ID NO: 359554 - DNA, 50 bp, Homo sapiens
ctctcgaatgggcacacctgtgtagccccgtcgcagaatttagtctcaaa

SEQ ID NO: 359555 - DNA, 80 bp, Homo sapiens
cccccagacaagatggacaccgcggaggaaggatgcctttgtggaactgtacggccccagcatgcggcctctgtttgatt

SEQ ID NO: 359556 - DNA, 50 bp, Homo sapiens
cgcctcgaaaacggagaagcaggatctcattttgcccaacggtggtactc

SEQ ID NO: 359557 - DNA, 100 bp, Homo sapiens
gcagaaggcacagtgcctctgaccagcatcgtctgtaaaggaggcccagaagattaacaatggctcaagccaggcggatggcactctcaaaccagtggat

SEQ ID NO: 359558 - DNA, 71 bp, Homo sapiens
aaaggttcgggaggctgacctagtgatatttcagaggtccagttccggccgtaccgcacagacgacttcat

SEQ ID NO: 359559 - DNA, 99 bp, Homo sapiens
gcggtcatggagggagcaggagctggatccggcttccggaaggccaaaaaatcattttactgggcaagaaaaacatctcattcctttgtcgtgaatatc

SEQ ID NO: 359560 - DNA, 88 bp, Homo sapiens
gtctatggaattaaaaaatatggtccctttgttgcagactttgctgataaactcaatgagggtggtgacttcacacgccataatggca

SEQ ID NO: 359561 - DNA, 100 bp, Homo sapiens
atcgggtggagtgtaggtcatatcgccgcgctgagatctgtatctgtggacctgaatgttgatccctcgcttcagattgacatacctgatgcgctcagtg

SEQ ID NO: 359562 - DNA, 100 bp, Homo sapiens
cgggaactgctgacgcttgatgagaaggacccacggcgtctgttcgaagaccatgctcgacagctgaccaaggccatgatgcgaaaggccacggccagcc

SEQ ID NO: 359563 - DNA, 89 bp, Homo sapiens
tgcagccctcactcttcatggtcactggaggagacatcacagctttcccagatcgggaggaaaaatatggaatgtgttttaccgctgac

SEQ ID NO: 359564 - DNA, 75 bp, Homo sapiens
cctggctttctgcgccatcctgcaccgccaccggcccgacctcatgagcatcagatccatgctgctgctgactcg

SEQ ID NO: 359565 - DNA, 111 bp, Homo sapiens
ggccggggccgcttcaccacttacgaaatcagggtcaagagttcacatgagactctgaatatagtggaggagaagaagcgggcagaggttgggaaagacgaaagagtaatc

SEQ ID NO: 359566 - DNA, 82 bp, Homo sapiens
gatgatcctggaggagaggccggacggcgcgggcgccggcgaggagagcccgcggctgcagtgtggacgaatgtggaacctc

SEQ ID NO: 359567 - DNA, 82 bp, Homo sapiens
ttgcagcaactgggaacctgaatgcctacttgcaacagggttgcaaactgtcttccagttttgtccatcaactaaaggcaca

SEQ ID NO: 359568 - DNA, 100 bp, Homo sapiens
caatcacagaagccgacaaggcgttcaagcgaaaacatgaccgctgagcccatgaggatgatcacggacgtgcagctcgccatcttcgccaacatgctgg

SEQ ID NO: 359569 - DNA, 50 bp, Homo sapiens
gccttactccttcacagatcggtgccacacctccctggatgatccaagat

SEQ ID NO: 359570 - DNA, 100 bp, Homo sapiens
aaaggatttaagagatcatggtgtgcatgttctagggcagaaggagaagacagcctgaagaagatgcagctgatggagcttgcgattctgaatggcacct

SEQ ID NO: 359571 - DNA, 100 bp, Homo sapiens
ttgaaacatccaatgtcatctgggtgattcttctaaggagcctaaattcaccaagtgccgttcacctgagcgagagactttttcatgccactggacagat

SEQ ID NO: 359572 - DNA, 51 bp, Homo sapiens
gaactcgcaaaagctcagaggaactgataaatttcaaacggaagagagtgg

SEQ ID NO: 359573 - DNA, 51 bp, Homo sapiens
aatcttgagaagtatgtagtcaaagatgcaattttatatgatgacaaagga

SEQ ID NO: 359574 - DNA, 100 bp, Homo sapiens
agaaagacggttctggcgtctcctctctagggcgtctctggccgagcctctttttgtggaaaacgacagcagcagcagtggcctggaagacgccaccgct

SEQ ID NO: 359575 - DNA, 100 bp, Homo sapiens
ctggaatgaagatcgatagtaaaactcctgaatgtcgcaaatttttatcaaagttaatggatcagttagaagcttctatccagaagttaaaggagagatt

SEQ ID NO: 359576 - DNA, 99 bp, Homo sapiens
agcgcccaggaccctgttccatccaaactcttgccctttgagggaccaggctaccggctctctgaccagttccacgacatcctcattcgaaagtttgac

SEQ ID NO: 359577 - DNA, 96 bp, Homo sapiens
atggagatcattcaggttccagagccaaataccacaagttgaaatacgggacagaattgaatcagggagatatgaagcctccaagctatgattctg

SEQ ID NO: 359578 - DNA, 78 bp, Homo sapiens
cggaacaaagcttatcattacaggacaacaccatcgacttcctggagtacgtggcagctctgaatctcgtgctgaggg

SEQ ID NO: 359579 - DNA, 50 bp, Homo sapiens
gctgaagcgactgagtccgcgatggagttgacgccagagggaggcatcaa

SEQ ID NO: 359580 - DNA, 100 bp, Homo sapiens
ctcactgaatgagcctgaagacaaggatgtgactgtgaatgaactggtgcaggtagaaacgtacctccgcagtgaaggtgtgctggtgcgatactggtat

SEQ ID NO: 359581 - DNA, 75 bp, Homo sapiens
gctgctgccgtggcccttccggaacaaggtagttttgcagaagtgcaaagtcaagtctctcttgcacagtcctgg

SEQ ID NO: 359582 - DNA, 101 bp, Homo sapiens
gttccaccaggccgggaagcccatcggactaatagggatgccaaaggaaaaatatgatcctccagatcctcgcagaatttataccatcatgtcagcagagg

SEQ ID NO: 359583 - DNA, 71 bp, Homo sapiens
aagagtgctgcaagttcatgtgtctggacccagcggagctggagtttgttcagatcatcatcatcgtggtg

SEQ ID NO: 359584 - DNA, 100 bp, Homo sapiens
catgcatcctgccgtcttcctatccttacccgacctcagatgctcccttctgctcctgatagtgtttttagaagaagcatctcaacaggaaaaactggcc

SEQ ID NO: 359585 - DNA, 78 bp, Homo sapiens
tgggtgatgacatgggacttggaaaaacagtacagatctattaatgagatgaagcggttggaagaaatgtcaaatatg

SEQ ID NO: 359586 - DNA, 75 bp, Homo sapiens
ggcggatctggaggagcagttgtctgatgaagagaagtaccaaacgattccctggttatgattctgaaagcaagg

SEQ ID NO: 359587 - DNA, 80 bp, Homo sapiens
gccgaagcagcatgtgacaccgaccaggtcgagtctatgctgtcttgtcaaagagagaaggtcgggtacttcaagaagaa

SEQ ID NO: 359588 - DNA, 75 bp, Homo sapiens
gctccggggaggtcacctgacgaggaggatcctcagtcttccacaatgaaccctgtttacagccccgtgcagcct

SEQ ID NO: 359589 - DNA, 75 bp, Homo sapiens
tctcatgaacagaaacacctaggaagggagaactggagagattaaacagattctagaaaatgaacttcagatacc

SEQ ID NO: 359590 - DNA, 83 bp, Homo sapiens
agcggagagactcgccggccgagggtggccctaggggcagcgagcaagacagcaagcaggcgtttacgtgtgtgccaagtgtg

SEQ ID NO: 359591 - DNA, 50 bp, Homo sapiens
ggaggaggaggcgaggaggagagactggagagctggtgacggcctccaag

SEQ ID NO: 359592 - DNA, 106 bp, Homo sapiens
ccatagagagtctccgggtccctggaaaggtcgtcacgctgtggtacagagcacccgaagtcttgctccagtccagctacgccacccccgtggatctctggagtgt

SEQ ID NO: 359593 - DNA, 100 bp, Homo sapiens
cattcgagatgtcttacttccccaattccctataaggagcccctgctggtgcaccagaactaccgggggccatctgcccaactgccccagactctggcag

SEQ ID NO: 359594 - DNA, 76 bp, Homo sapiens
tggaaatacaagatcatcatctgtttctagagatgctttcaattcagctgaaagaacccagtgacttgattgtaaa

SEQ ID NO: 359595 - DNA, 110 bp, Homo sapiens
tttgaccaggcccagaggtccgtgcggcagcagctccagagctttgtcaaagagtgaaaggtgtagcagtcactcggcctacacccacagcatcgaccttgtgaacccag

SEQ ID NO: 359596 - DNA, 75 bp, Homo sapiens
cttgccgcacaaaaagctagagagatttacaaggacaaccggaacctgttcgaggtacaggagaatgagcctcag

SEQ ID NO: 359597 - DNA, 50 bp, Homo sapiens
tgggaggccgagcgcgccgagttacagagacaagaggagcagcagcggca

SEQ ID NO: 359598 - DNA, 50 bp, Homo sapiens
cccggggtgtaataatgttaactgagagggcagataaaacttgcagactt

SEQ ID NO: 359599 - DNA, 90 bp, Homo sapiens
ttcatccctcgtcgaaaggattggattggcatctttagagattacaaggcagaggaagacccagcaaaatttaaatctatcaaaacaggc

SEQ ID NO: 359600 - DNA, 100 bp, Homo sapiens
cccgaaccaccatgacccacttcaacaagggcccttcctatgggctctcggccgaagtcaagaacaaggctgcacgtgggaatttggagccatggtgaac

SEQ ID NO: 359601 - DNA, 100 bp, Homo sapiens
gggcaaagttgctgccaaattatctgagactggataagatgaccttcagtgtgctgctcaaaaacagccatggaattccatgaacacttgcacagcatag

SEQ ID NO: 359602 - DNA, 100 bp, Homo sapiens
cagctctgcctttgcacctaaatcctggatggaagatagcttgaacagggctgacaacatttttccttttccggaagatgcaatcacacccaatgataag

SEQ ID NO: 359603 - DNA, 83 bp, Homo sapiens
aggtttctaccaaccagcaacagtggaccatggttgctgacagaactaaagtctcctgcaatgggagagcccatcaactgtga

SEQ ID NO: 359604 - DNA, 83 bp, Homo sapiens
cagaccctggagcctcagttggaagcagccgatccagcctgcggagcctgtggggcaggtgtcgattgactgcccgtggtcca

SEQ ID NO: 359605 - DNA, 51 bp, Homo sapiens
gccaccacgcccagcccggccagagaacatcaccaccctgaagccagagac

SEQ ID NO: 359606 - DNA, 98 bp, Homo sapiens
cagctataggtcctggcagtgagacaaggccaagtccgacagctggaagaacaattaagaataatggatcagaccttgaaagcattaatggctgcaga

SEQ ID NO: 359607 - DNA, 100 bp, Homo sapiens
agccaatcccaggaggaaaaacggttctgccggagacttccatttggcctcaatgtgaaattaaagtagaaaatcacatctacatgcatgttgctatcag

SEQ ID NO: 359608 - DNA, 100 bp, Homo sapiens
ccagaatctgcctttttataagacccccaggtatgcagtgccattcagaatcaggatttcactgtgatcgaagactactgcactggcctcaaagccctgc

SEQ ID NO: 359609 - DNA, 95 bp, Homo sapiens
gttcttccagtcccctgaggtgatggcagggctgtgggacagatgatgtctaccatgttctacccactggtcacctttgtcctcctcctcatctg

SEQ ID NO: 359610 - DNA, 50 bp, Homo sapiens
agcgggagggcctggactgggacctcatctgcctggctcgagtaactggg

SEQ ID NO: 359611 - DNA, 100 bp, Homo sapiens
tggggtcggccaggccggtgcgggctccttgcggcaggtcccaagaatgctgtgggccctgagggaaaggatcacagaggcgctgagccgggatggctac

SEQ ID NO: 359612 - DNA, 82 bp, Homo sapiens
tctctctgtggatcattgctgcctggaccgtccgtgtctgtgaaaggtcacagtgtccatgtaactaactcctggttaagag

SEQ ID NO: 359613 - DNA, 100 bp, Homo sapiens
cgaccttgagctccaggagttcgtctcttacgtctgcggaagtgcagctgcctcagttcttagcgcaggtgagtgaagatggcagagaggacgtgaccag

SEQ ID NO: 359614 - DNA, 75 bp, Homo sapiens
tattccccctggtggagtagaggagaaagctaaaaataatgccgttttactgagtcctgtccaagaacagcaagc

SEQ ID NO: 359615 - DNA, 98 bp, Homo sapiens
tgtcggggatggacctccagatttccttactggttatacattggctcttcaaagacgttcacctcatcagagaaatccctgactcctttgcagtggtg

SEQ ID NO: 359616 - DNA, 100 bp, Homo sapiens
tctcccattcatacactgtgttacatgagagagccaatcttggacctaccacttgaaaccattagtgagctgggagagcccattgctaaaaaggcccgct

SEQ ID NO: 359617 - DNA, 82 bp, Homo sapiens
ccgggagtcgctgggtgcgtggggctgcctcgccgcgtctcgccacggtctcggcgcggaagatggccggcggcgtggacgg

SEQ ID NO: 359618 - DNA, 83 bp, Homo sapiens
ggtagccctggactccagctatgtaacaaacaaacaactcaatatcacgatagagaaattgaggcatttcatccttcatgaag

SEQ ID NO: 359619 - DNA, 100 bp, Homo sapiens
aactggatgcagcaaggaaataggatttaaccgctctctgcctcccagtcaagttcagcagctgtgtggggaccaaggggacacaatatgagaccaacag

SEQ ID NO: 359620 - DNA, 75 bp, Homo sapiens
gagagctccgtgcgggtggctgtcaggtctgcttagtggcctatcttggcttgtttatgctttgtgtctcatatc

SEQ ID NO: 359621 - DNA, 90 bp, Homo sapiens
gatgaaatctatgtaacttgcgaatcagatcagagtgtggtcgaatgtaagatgcctataagaaaatcttagaaaccacaatgactccaa

SEQ ID NO: 359622 - DNA, 101 bp, Homo sapiens
aggagcagctttacactgatgaagtgttagacatcgagatcaatgaacctttagatgaatttacagtactatggcagaaatggccagggaagggtttatct

SEQ ID NO: 359623 - DNA, 83 bp, Homo sapiens
ctggagtgcgtgggggaccggctgttggcgggtctgcctcagccacctccctgacgctgtcccactgtgtggatgtggtgaag

SEQ ID NO: 359624 - DNA, 75 bp, Homo sapiens
gtctgtgtctcaaatcaaccacaagctggaggaagctatgaagcagataacccagctcctaccagaggacctcag

SEQ ID NO: 359625 - DNA, 51 bp, Homo sapiens
agccacacagtgtccagatacgaggctcccatggctattgaagaacaagtg

SEQ ID NO: 359626 - DNA, 98 bp, Homo sapiens
gcagattggaggcgagcgttgggtgtggaacatcattctcaccaccagtctcttctctgttattagaggaagtaacacaaggggatatgagtgcagca

SEQ ID NO: 359627 - DNA, 98 bp, Homo sapiens
cagttgtaacttcatagactcccaaagggaaattcttggactgggcacctcgctgcccccgctgctgcccactctgcgactgtgcctgtacgtgccag

SEQ ID NO: 359628 - DNA, 100 bp, Homo sapiens
tacctgcccgagctgatggcggagaaggactccctggacccctccttcacgcacgccctgcgcctggtgaaccaagaccactaaggcttttcttcctacg

SEQ ID NO: 359629 - DNA, 100 bp, Homo sapiens
agaaactggaaaccctatcatcaagatgggaatatctgggtgtatgcaacagcgttattgcaacaggctaacgaaaacagacaaaattcaactggaaaag

SEQ ID NO: 359630 - DNA, 101 bp, Homo sapiens
tcaatacaaagatactctccccaaggttccggagctcccgctcaggccgcttaagcctgcatggagatatccgcctgcttttttcccgccggagcctggag

SEQ ID NO: 359631 - DNA, 100 bp, Homo sapiens
gagaatgactccgattcgtgaccctcagcgccggtgcatgtcgataagaaggctcaagcttggaggaaactggctttaactggggagaatatttggaaga

SEQ ID NO: 359632 - DNA, 75 bp, Homo sapiens
gcaaaatggcggatcatgtgcagtgggtgggaggacgctactcgctgtggtcggccatcggactctccattgccc

SEQ ID NO: 359633 - DNA, 100 bp, Homo sapiens
gctttgtaggagcatggcttggagcacttcctattccactggattgggaaagaccatggcagtatttcagacaacttttaagaggtgcagaatcaccaac

SEQ ID NO: 359634 - DNA, 78 bp, Homo sapiens
cgtccccagccctgcctctccctgggctctgtagtttatgccaacgtgacttcattcatacagatgaaccaaggatcg

SEQ ID NO: 359635 - DNA, 90 bp, Homo sapiens
accgggcccatcgcattgggcaggttttgggcggaaagacgtagttgaatatttgcttcagaatggtgcaaatgtccaagcacgtgatga

SEQ ID NO: 359636 - DNA, 75 bp, Homo sapiens
gaacctgcctggctagccggcgacttgagtgacgaaggctaagaatattgtacacaaagattcttgatgttcttg

SEQ ID NO: 359637 - DNA, 83 bp, Homo sapiens
cactgggtgagttcatgcaaagcgctgagaacaggaccccccgcccccatgcctgtgaggagccaccaacatttgaagctatg

SEQ ID NO: 359638 - DNA, 101 bp, Homo sapiens
atgtgtgctaaatgtgttcgtgacagggtgttcatttagaagaaagcaacactaatgattcaaacagcttcctgaattttaattttgtgttgtctcacaga

SEQ ID NO: 359639 - DNA, 75 bp, Homo sapiens
gagctgcgcaagcccgacggcaccctcgtctccttcaccgccgacttcaagaagaccaagatcactccatggatg

SEQ ID NO: 359640 - DNA, 97 bp, Homo sapiens
accctcagtacgccacctactattacccccagtatctgcaagccaaggagtagctcggagaggaggaaggagaagtcccgggatgctgcgcggtgcc

SEQ ID NO: 359641 - DNA, 82 bp, Homo sapiens
cctggagcagttgtatgtgtagaaagtgaaatcagaggagatgtaactatcggaccatcagcacgtgcccatcgacatccag

SEQ ID NO: 359642 - DNA, 75 bp, Homo sapiens
cagtgcctggataccttcgaatagggagaccagccactaactggggcgtacacagtgaccctggatggacgaggg

SEQ ID NO: 359643 - DNA, 120 bp, Homo sapiens
agcgacccgctgctcagcgtcctcatgtggggggtaaaccactcgcactattcctgatcagagaactccagttgcttcaacacacagtatcagtagtgcagccaccccagatcgaatccg

SEQ ID NO: 359644 - DNA, 80 bp, Homo sapiens
ctctgaggtggagcctttcttatcctggcccaagatccaggacaagcactttctcagaagcccgtggccctgctgacgag

SEQ ID NO: 359645 - DNA, 75 bp, Homo sapiens
acggggtggtggccgggcagagggtttgaagactgggatgtattatttaaggacaagaccagcggctaatccaat

SEQ ID NO: 359646 - DNA, 100 bp, Homo sapiens
ggaaaagcagagacgtggacctcgtccagtcagcttttgaagtacttcgggcaccgcatgcgtggggagaccaccctgtggaaccctggctgtgaccatg

SEQ ID NO: 359647 - DNA, 112 bp, Homo sapiens
gcgagcacagagcctcgcctttgccgatccgccgcccgtccacacccgccgccaggttctgcggggagtgtctccagccctgcctgcaggtgccatccccgctgtgcccact

SEQ ID NO: 359648 - DNA, 100 bp, Homo sapiens
gtccggggtcctggtcggggtggtctgtctgctcctggcatgccctgccacagccactggcatagaatgtcaagctaaccaggcgtccgctacttcagaa

SEQ ID NO: 359649 - DNA, 97 bp, Homo sapiens
gaagtttgtgcatgaagacagcagccacatcattgctttatgtgactagaagcagccaaagatgattatcgaatacgttgtgaagagttagaaaagg

SEQ ID NO: 359650 - DNA, 100 bp, Homo sapiens
cttctccatgctctgctgcttctggcctctgggcatcgcagccttctacttgtcccatgagagagcagggctgagggagggctccgaggagaaagtcaaa

SEQ ID NO: 359651 - DNA, 109 bp, Homo sapiens
atgccttgagacagctacaaggatttccattttatggtaaaccaatgaggtctcaaaaagctgtcaaaaagccctatacttaacggagaccagccacagacttccttcc

SEQ ID NO: 359652 - DNA, 132 bp, Homo sapiens
cgccagcttaaggacaacacctgtgtggtggaattccagttcatgctgcccacatctcatccaaacagaatatgacagatacctagcatctagcaaaataatggcagctgcttaccttgaccccaacttgaa

SEQ ID NO: 359653 - DNA, 83 bp, Homo sapiens
gagcagatccgatggagaggctgagctgctccaggacttgggtcactgtgtgcccagtattctgcagacaaacgagaagatga

SEQ ID NO: 359654 - DNA, 75 bp, Homo sapiens
atgatatcctactaggcatgttttatgacacagatgggtcgacaagtgcccccaatgatttatggtacaacttca

SEQ ID NO: 359655 - DNA, 98 bp, Homo sapiens
cacatggctgccctcctcctgcttccctggctcatgttgctcacagtgaacacctacctcttcatgatgcaagcccaaggcattctgatccgggacaa

SEQ ID NO: 359656 - DNA, 97 bp, Homo sapiens
gatgcaactttgcaatcctgcagtcagatcctaaaacaagggtaatgacttgagcatcagcacagcccaagatgaggtgtacctgcacccatctgaa

SEQ ID NO: 359657 - DNA, 95 bp, Homo sapiens
cttgatgaaggcgtggatagcctgaaggcagccattcaggaaaattcccagatgtttcaaggtagaccttgcaagaatatgtatcctaatgaata

SEQ ID NO: 359658 - DNA, 90 bp, Homo sapiens
aatatgggagacgacagaccgtttgtgtgcaatgccccgggctgtggacagccagagactgctgctactttgaaacgtacgatagaggcc

SEQ ID NO: 359659 - DNA, 98 bp, Homo sapiens
gaagcagtacgaagactcctgccgcgtataccaggcatccagccccgatgagatacggactcagaggaagacgaagaattcctgaaggacgagtggcc

SEQ ID NO: 359660 - DNA, 83 bp, Homo sapiens
ctacctcctggggcccgacaagaacttcacgcgggagcagggggtgatcgctgagctgaaggtgcgcagggacccccaggtga

SEQ ID NO: 359661 - DNA, 100 bp, Homo sapiens
cgttgctcttgcttttcctcgctggggtgtacggtcctctcaaactgtgagtaactaagtggtttgtgcatcattccagaagcaaagctaaaatttttag

SEQ ID NO: 359662 - DNA, 100 bp, Homo sapiens
gcctcccagtctgaattctgtggattttcgtctaaaaataacaagaatgggaggagaaggaaaaggaacggctgtagtagatctctctgggaatggcgac

SEQ ID NO: 359663 - DNA, 75 bp, Homo sapiens
cggatgaggaccggagcggaaaaccttctgaattacatcttccggcccagctgtactcgcctggggcagtgggcc

SEQ ID NO: 359664 - DNA, 75 bp, Homo sapiens
aacccggctttcgcatttgggaccctgcaggatggagtcatcagaacccactgtgaggaagtgacttctccttga

SEQ ID NO: 359665 - DNA, 95 bp, Homo sapiens
cagaggaggagatcctgggatcagatgatgaggagcaagaggaccctgcggactactgcaaagtccgtagttcgtggtccttcgccggtgtcccc

SEQ ID NO: 359666 - DNA, 75 bp, Homo sapiens
cgttgcaaactctggaaaaaaacttgggttttcccatcatatgattcccggtcctcctggtccccacacaactgg

SEQ ID NO: 359667 - DNA, 100 bp, Homo sapiens
cctagacagaaataacttctgtgcatttctccagctacatttaggtacgagatcaaagacctgctgagccacgccttcttcgcagaggacacaggcgtga

SEQ ID NO: 359668 - DNA, 98 bp, Homo sapiens
acgtggatgattactacgacaccggcgaggaacttggcagtgaacagagtatctgtcaggcaagagctgctgtgatggtttatgatgatgccaataag

SEQ ID NO: 359669 - DNA, 90 bp, Homo sapiens
gatccgcgaggttgtctgctgctgaagctatgtgcatagttgggatgagggctgtgttgtctcaacaccaccctgccctgtggtgggtgg

SEQ ID NO: 359670 - DNA, 83 bp, Homo sapiens
cacagagacgggagtcgggtgggatcccaggctgggccccgcggcggcattgcagtgtcgagatggctatgaaccctgtgtaa

SEQ ID NO: 359671 - DNA, 96 bp, Homo sapiens
cttgagtgacattgacctcatggcacctcagccaggggtgtagccaagtaggattgtcaccagacctgcaatctatggagcagattcggagaatta

SEQ ID NO: 359672 - DNA, 100 bp, Homo sapiens
tgaggaattttggattgattttaatcttgggagtcagactctctcattctacattgctggagataatgattagagacggggtttcatcgtgttagccagg

SEQ ID NO: 359673 - DNA, 145 bp, Homo sapiens
caatagggaaagtgaggcagctgcaaggagggcggcgggactgcactcgagtgtccagacctgctcgatggtggccagcatcgaaatgttcagccttttagtgatgaagatgcatcaattgaaacaatgagccattgcagtggtt

SEQ ID NO: 359674 - DNA, 100 bp, Homo sapiens
gattgagcagcagaaagaacagaggcgacggctagaagaggaaacccagcgtttgctggcagaaccagttcctggcatcaaagccgaaccagatgagagc

SEQ ID NO: 359675 - DNA, 100 bp, Homo sapiens
agaaggtggtggctgtccacctccaccagacggtccagattggtgctgaagacatggacggcttccaggcagacacggaggaggaggaagaggaggaggg

SEQ ID NO: 359676 - DNA, 126 bp, Homo sapiens
tatctctgccctcagtatcaacaatgattgctcaagacttctttgtggctttgctaaaggacaggataatgttgtctgtctgtctccaaaactggcacaaagcctgggaaatatgaaccagatttg

SEQ ID NO: 359677 - DNA, 100 bp, Homo sapiens
agctgctgccttgctagcaaaacaggcagaaatggaagtcaagagggaatcttatgcaagagaaagaagtgagaaagatcagtctaaagaaaaggagaag

SEQ ID NO: 359678 - DNA, 98 bp, Homo sapiens
attggtcaagttgctgaccttgaaaataactgaagtgaagtgatggactccgatttggagagtagtaagacgtgaaaggaatacacttgtgtttaagc

SEQ ID NO: 359679 - DNA, 98 bp, Homo sapiens
tttggtaatactacaccaagaaaccaggttatccctcgaactcctagctcatttcgacagccttgcattgatcaatatgacagagatagcatcataaa

SEQ ID NO: 359680 - DNA, 83 bp, Homo sapiens
gccaaggtcttcctcgatttcaaggaaaggttggctcaaaaacagaagttgctgagtgcaaggagaaattcgccgcctccaag

SEQ ID NO: 359681 - DNA, 98 bp, Homo sapiens
tccgcccaggcgcagatgcgggccctgctggaccagctcatgggcacggctcgggacgggtcctccaccagcagcctggccccaggccctgagccagg

SEQ ID NO: 359682 - DNA, 82 bp, Homo sapiens
ctccccggtgcacccgcaacaggcgttttgcaatgcagatgtaggagggtgtgaagacagagaatgaccacatcaacctgaa

SEQ ID NO: 359683 - DNA, 100 bp, Homo sapiens
tcgggcctgactctaaccagctcatggcctgtaaactttcctcccttccacattttcttgtctaggacagagtttcactcctgttacccaggctggagga

SEQ ID NO: 359684 - DNA, 80 bp, Homo sapiens
actatcttctccatggccacaggttgaagcagcccgaagactgcctggatgaacttgagaaagatcagtctaaagaaaag

SEQ ID NO: 359685 - DNA, 75 bp, Homo sapiens
catgccctacctcaacaagtacatcctggacaaggcagaagctcctcctggggtagagacagatcttattgatgt

SEQ ID NO: 359686 - DNA, 100 bp, Homo sapiens
atgtgagtggaagccatgaggccaaaggcagttgtattgggacctcatgtcttggatcaatggaatacgggggttggtgtcctcagatgagctagccaag

SEQ ID NO: 359687 - DNA, 82 bp, Homo sapiens
ctaaggacttcatgcccgccagcaaaggggtgagcccctccagactccgaataggagatcaagagtttgattcattgcctgc

SEQ ID NO: 359688 - DNA, 100 bp, Homo sapiens
agacaagtgacgatggcggagattctcccgagcacgacactgacattcctgaggggggacaggccccacctcggacacaggctggggctgcatgctgcgg

SEQ ID NO: 359689 - DNA, 100 bp, Homo sapiens
aaattatttatccaacagctcctcccagaacaccttccaccatgaccacctcagcaagttcccacttaaataaaggcatcaagcaggtgtacatgtccct

SEQ ID NO: 359690 - DNA, 75 bp, Homo sapiens
gctccccggtgcacccgcaacaggcgttttgcaatgcagatgtagttctcgaggctggacagtccaagatcaagg

SEQ ID NO: 359691 - DNA, 82 bp, Homo sapiens
cccagtgggaatacgtatcacctgctcatgtcccatgggcagacaggcagtacgacattcccccacagcaccgactgcccaa

SEQ ID NO: 359692 - DNA, 82 bp, Homo sapiens
gttgtgcctcttcatattggcgatcctgttgtgcgtgccgccgccagacggattactggcagttcgtgaaagacatccggtg

SEQ ID NO: 359693 - DNA, 100 bp, Homo sapiens
ctcagaattgggagacatcagtaagcttgccaagtttgacgaaaccagcctggacaccaagtctgtgtcagaaggccacctcaagaggaacatcgtggtg

SEQ ID NO: 359694 - DNA, 101 bp, Homo sapiens
ccgggcggggagggcatgttccgtggcctcgcccaggccgacggcagtggcatgtgtataatccagtgctgcagcttccttactatgaaatgacagctcca

SEQ ID NO: 359695 - DNA, 82 bp, Homo sapiens
gcgcagcaacgtgcggtgggaccacgagagctggaagaagaagatgatgatgatgatgatgatgacaacctcccccagctga

SEQ ID NO: 359696 - DNA, 75 bp, Homo sapiens
ttgaagatcagtacaaaaattcttcaagaaatctaaggtctaacttcaaacttgtggctgttaattcaaaactct

SEQ ID NO: 359697 - DNA, 82 bp, Homo sapiens
cagccgggacccagccagccctgcgcctcgcgccgtcgcgcatgcgtcctgggtgaaatgacaatggatgctctgttggctc

SEQ ID NO: 359698 - DNA, 100 bp, Homo sapiens
aagtcatgatgtattctcccatctgtctcactcagtgtgaaatcaaagttgcacaacccaaagaggtatataggcagcaacagcaacaacaaaaaggtgg

SEQ ID NO: 359699 - DNA, 82 bp, Homo sapiens
cctgcctctccaggatgtctacaaaattggtgacaacatctggggaagatgtacgagacttcacaaaggtacttaagaacaa

SEQ ID NO: 359700 - DNA, 50 bp, Homo sapiens
gcggcataccaccctgcactgtgagggtacattagctcaggctgtaaaga

SEQ ID NO: 359701 - DNA, 90 bp, Homo sapiens
tggagctttgcagctgacctacatctcgaaggactccatccccgtgtctacctccctccttggagacacttccgacacgacctctactgg

SEQ ID NO: 359702 - DNA, 90 bp, Homo sapiens
tgccaatggtgtggacaccgcagtgtgcttgaggagacttcagaaacgagaactggttgtttacattcagagctctatcaataagaggaa

SEQ ID NO: 359703 - DNA, 75 bp, Homo sapiens
cgggtcagcgactcgggttcatattcctcagcgagtagcgattatgaaaccacgaagctgccctgagacgctcac

SEQ ID NO: 359704 - DNA, 98 bp, Homo sapiens
gagagaggcagtccagccgcaggggccacccgaacagtctctcctcctcacagaagcctggtgctggagaatctggtaaaagcaccattgtgaagcag

SEQ ID NO: 359705 - DNA, 83 bp, Homo sapiens
cgacacgcgtggtatcctcgcggtgtccggcaagagactaccaagacagacgctatgagcactacaaacaccactggtttccc

SEQ ID NO: 359706 - DNA, 87 bp, Homo sapiens
ccgccaccaggtcaccctggaagagtcgctggccgaagttggatatgtcaagtgaccagatagctgccaatctgcaagcagttatta

SEQ ID NO: 359707 - DNA, 100 bp, Homo sapiens
ttgtgagagagattaagcattcatcatttggaagaaatgtatttgcaatttcatatataccaggaacagcaatgggcacttgcattgcaacatatctcaa

SEQ ID NO: 359708 - DNA, 123 bp, Homo sapiens
gatgtctcgctccgtggccttagctgtgctcgcgctactctctctttctggcctggaggctatccagccctcctctattggcccaggaagcccacccagccccgccacgcagagcccagaagg

SEQ ID NO: 359709 - DNA, 121 bp, Homo sapiens
aatatctgatcaagataatgatggtactctcaatgatgctgaactcaacttctttcaggaagagagaagggcacagttacctaagtatcaacgtaatcttcctcggccaggacaggccccc

SEQ ID NO: 359710 - DNA, 100 bp, Homo sapiens
acggcatgtacttctgcatgaacatctccagccagggggtcaccagtcgttggcacaccaagaagctgccccgcaagacccaccgaggcctgcgcaaggt

SEQ ID NO: 359711 - DNA, 98 bp, Homo sapiens
gaaagcccatcctttcaaaatcaacttagaatcagaaccacaggtctcatcacaactacgtcaaggaagctagaccgagaacagcaagatgaacacat

SEQ ID NO: 359712 - DNA, 75 bp, Homo sapiens
acgacgggccgagcctgccacttgttatagttttgccgctggactcttccctcccttcccccaccccatcaggat

SEQ ID NO: 359713 - DNA, 121 bp, Homo sapiens
ggaggaaggaacgaggcaaggagctaaagcagcgtgcgttcagccctgggccacgccgcaatgaagagcttcttacagtgaaagcaaagtaggtcgagtccactgaaaatgcctttaaggg

SEQ ID NO: 359714 - DNA, 100 bp, Homo sapiens
gctcccagagaaaaatcggcagatgttacagctgctcatgaaccacttggcaaatcaatcatatttgatgaggtggatctgacagatgccagcgtagctg

SEQ ID NO: 359715 - DNA, 100 bp, Homo sapiens
gaggatcatggcggatggccccaggtgtaagcgcagaaagcaggcgaacccgcggcgcaataacgatcctgtttgaccaaactcagagatcaattaaggc

SEQ ID NO: 359716 - DNA, 83 bp, Homo sapiens
gcagtgatttgctccccctcgtgcagcaacccccacacccagcaccaggttcgagaacttgtcttggacaattgcaaatcaaa

SEQ ID NO: 359717 - DNA, 100 bp, Homo sapiens
gccgcggtggcggcgctgccgcctgaagtgcgggcgcagctggcggagctggagctggagctctcggaggtgaccatgcagcaggtggccaggacagtgg

SEQ ID NO: 359718 - DNA, 75 bp, Homo sapiens
agaacatgcatatttgggtccaactgtgaagccagatgataagactcctgaggaagaagagattttaaacaaaaa

SEQ ID NO: 359719 - DNA, 98 bp, Homo sapiens
ggagaccgtggtgagcctggtccccccggccctgctggctttgctggcccccctggtgctgacaaccagggtgcaggagaacaaggtagaccagtgag

SEQ ID NO: 359720 - DNA, 90 bp, Homo sapiens
caccgccgcggctccggccctggccccgatggctctgtgcaacggagactccaagtaatctatgccagcaattatgacaatgttagcaga

SEQ ID NO: 359721 - DNA, 90 bp, Homo sapiens
ccttggcccttggggttgaaaggacccgaagtgagcttctgcctttccttacaggttaatttggagtggcccctggagtcagtttcctac

SEQ ID NO: 359722 - DNA, 98 bp, Homo sapiens
ggctcactgcagcctcaacttcttgtcctcaagtgatcctcccaccttagcctcctaagtagctgggaccacaggccagtcaacacatgcaatggaaa

SEQ ID NO: 359723 - DNA, 75 bp, Homo sapiens
agttgatggagattacctttggaggggtctggttgctgcttacagtggtgacagtgacaatgaggaggagctggt

SEQ ID NO: 359724 - DNA, 74 bp, Homo sapiens
gtcaacccagaggatccccagtatgcatctcaagatgtgatcttcaaagctgctgcgggcattctatgtcccct

SEQ ID NO: 359725 - DNA, 75 bp, Homo sapiens
aatggttatcaaagtgtttgttgctacatcttctgggtccatagcggtatgatctcgtgaaaccttgagagaaac

SEQ ID NO: 359726 - DNA, 82 bp, Homo sapiens
aaggaccagagagggagccctgcctacatcagtcccgacgtgctcagcgggaaagaatatggcaaagctgatgcaagatggg

SEQ ID NO: 359727 - DNA, 97 bp, Homo sapiens
gtccgtctgcgacccgaggcctccgctgcgcggattccagtcctctactaaatgaagtttcttcttcccttattggaactgattcccaagcctttcc

SEQ ID NO: 359728 - DNA, 90 bp, Homo sapiens
gggcgaagcacgctactacctggtgcagggcctgattgaggactgccagctggcgctgcaggttcattttccagacactgaaagagcaga

SEQ ID NO: 359729 - DNA, 75 bp, Homo sapiens
atactattgtactatggacttcatcgctttatagccaaacgtaccaagaaagtcgggatcgtcggtaaatacggg

SEQ ID NO: 359730 - DNA, 92 bp, Homo sapiens
gggcggctgcaatatggcggaggcggaaggggaaagcctggagtcctggctcagaaggagtcaagactgagaacaacgatcatattaatttg

SEQ ID NO: 359731 - DNA, 80 bp, Homo sapiens
gaagcaggactgcgccgcgtcttcctcaaggctggttggaaggaaaatcatgcaacattcatgagcgaactaaaaaatct

SEQ ID NO: 359732 - DNA, 130 bp, Homo sapiens
tggggagaagaggattggaggtgtcagtgttaaaggaacctctacaacgaaggtgaagccacggaagataaggctcttgtcaggatggtgaagctgttcatcggaaacctgccccgggaggctacagagc

SEQ ID NO: 359733 - DNA, 100 bp, Homo sapiens
ttcatctaagcaggcagaaacatatttaaccatgatgcagccaacacgaacggttgtcatgtgtaacacaactttcgatcaccgcgaaaacaccgtcctg

SEQ ID NO: 359734 - DNA, 82 bp, Homo sapiens
gtgacttctacgaaaaagccctggtggagctgaaggttgcaggtcctaggcctacttacaagcctccagtctcaaattatcc

SEQ ID NO: 359735 - DNA, 83 bp, Homo sapiens
agccgatgaacagcgccgggatccaggtcttgaggaccggcccagctcaggctcctggggcagcggcgaccagagcagctcct

SEQ ID NO: 359736 - DNA, 133 bp, Homo sapiens
agaataggaacctctacttccccaccaaaaagtggcacacactggagagatatcagttgcaaaagcttctcatttcagagagatgccaggatcctaagtgcctgccaaacttaccaattctaaggaataagtg

SEQ ID NO: 359737 - DNA, 100 bp, Homo sapiens
gatgggatagcgttgcaaatccttaaaagagtcttaacgtcctcccaaaccgaaggaccctgtatctgcagctgtgccagcaccagggagaaacaacagt

SEQ ID NO: 359738 - DNA, 100 bp, Homo sapiens
ggtggccgtgctcgtcgggcccccttcgggagtggaacgttacaatcctcaggaaaacagatggcacactatagcccctatggggacccggaggaaacac

SEQ ID NO: 359739 - DNA, 100 bp, Homo sapiens
cgcccacttctttgagtttctcaccaaggagctagccctgggccaggaccgtgagggggttgacctgatagacaaccctgtgatcaagaggattgcaaag

SEQ ID NO: 359740 - DNA, 73 bp, Homo sapiens
tgtactgcaaggaacaaaatgtttgtaaattctccttttaccaaggtccaagacaagctgctgctatctgcgt

SEQ ID NO: 359741 - DNA, 100 bp, Homo sapiens
ttggatgctggataaattgaccggtgtgtttttgcagagcttgaagtgaaaaccagagaaaaattagaagctgctaagaaaaaaacaagctttgagattg

SEQ ID NO: 359742 - DNA, 83 bp, Homo sapiens
cctcgaaaaaaagatggagccctgcatatgattggctctttagctgaaatacttctgaaggtcaaatgaagcgcaacagaggg

SEQ ID NO: 359743 - DNA, 95 bp, Homo sapiens
gaaaaatgcacaacagagggacaacaaaagcctcctacaagagtcctaccaaaaattccttggtgttactcagttttcgcctacacatgccagaa

SEQ ID NO: 359744 - DNA, 82 bp, Homo sapiens
gtgagcggcgcagcggcggcagcggagagcgagagaggggagcagagaatccgacaacagctgctccagctgacacgtatcc

SEQ ID NO: 359745 - DNA, 75 bp, Homo sapiens
catgaccttccagaattacgggcaagcgctgttcaaacccatgaagctaagtcctatcagccatggaaacaccat

SEQ ID NO: 359746 - DNA, 75 bp, Homo sapiens
ctgcaggccaagcgcctcacgccggacctggtgcaggttcacaaccagtatccaactgagtttgaattcaatctc

SEQ ID NO: 359747 - DNA, 75 bp, Homo sapiens
ttaaagaaaattttaaaaggaatcttggattataatcatgagacaccagagactctaccaggacataccaaagca

SEQ ID NO: 359748 - DNA, 100 bp, Homo sapiens
gatctggaggaccagagagtagtgaaagaggaggaagccatagcactcgcagagaaatatggtagtggccacagaagaagtagttactgcagaatctgtg

SEQ ID NO: 359749 - DNA, 100 bp, Homo sapiens
gcgacagcaagaagtggagacagagcttaaaatgtgatgacgcggcatggcaagaactgcaccgcaggggccgtctacacctaccacgagaagaagaagg

SEQ ID NO: 359750 - DNA, 100 bp, Homo sapiens
gttccccctccctcagcttccgccccaaaagacctacctggtggttctgtgccttcccctactctcttctcatcttcgtatatgacgaagtcagaaaact

SEQ ID NO: 359751 - DNA, 75 bp, Homo sapiens
cctggtgttggtgagaaggcagatgtagacaggagcccagcgaagtgccaacacctaagagacctcggggccgac

SEQ ID NO: 359752 - DNA, 98 bp, Homo sapiens
aaataaaagagccctgcaatttgaagatacatgagacagcagccaaacccccagacgcatctagatgtagtgaacaacccagtatttcagatatcaag

SEQ ID NO: 359753 - DNA, 82 bp, Homo sapiens
tttgacagactcacacttttggccctgtttgatagtgggaacctggataagcagacggccctgggaaacacagttctacact

SEQ ID NO: 359754 - DNA, 111 bp, Homo sapiens
gacacaattgtctgtgacagtaacagtacttgggatcccccagttccaaagtgtcttaaagttggaaatggaggatgaagatacaattgatgtgttccaacagcagacggg

SEQ ID NO: 359755 - DNA, 73 bp, Homo sapiens
agagttcaaggaggccttccagctgtttgaccgaacaggactgcaagatggaggaaggcgggaacctaggagg

SEQ ID NO: 359756 - DNA, 50 bp, Homo sapiens
ttttgcatgggttgatgagtggtatgtgccggtggtggtgtgcacattga

SEQ ID NO: 359757 - DNA, 90 bp, Homo sapiens
gtcctccagggtatacttcgtggcctgcaccatcgtggagacctttggcgacttggcctttggcgacatcttcctccacctgctcacggg

SEQ ID NO: 359758 - DNA, 90 bp, Homo sapiens
aatgaatatccacaatttagcatcaggcaaaggaagcaccgcacatttttcaggtcatctgtgggaagtgctccgagttcaaggccgaga

SEQ ID NO: 359759 - DNA, 75 bp, Homo sapiens
tgaggaaccagatatcttgaaaagctgccagaaaggcaatgccaccgtagataagttggaggacttcatcaacaa

SEQ ID NO: 359760 - DNA, 75 bp, Homo sapiens
tgcccacataacgatcaggtcattgccagcggttcagaggactgcacggtcatgttccatgccattgcagtgtca

SEQ ID NO: 359761 - DNA, 74 bp, Homo sapiens
aaaaggcctaagaattttggcattgggtggagagattcaaccagttagcgtgaaagttggagataaagttcttc

SEQ ID NO: 359762 - DNA, 100 bp, Homo sapiens
tcatggccaacctcaggctcaggtggacatcttcaataaggagctactgctaatccccatccacctggaggtgcattggtccctcatctctgttgatgtg

SEQ ID NO: 359763 - DNA, 83 bp, Homo sapiens
tcaagtcttacaggagcatcagcacagattttcagctgaactctcatctctcaacactggcaaatattcataagatctaccac

SEQ ID NO: 359764 - DNA, 50 bp, Homo sapiens
cacccatgaagagcctgcctctagggggccgcgatgggcctcttggaaca

SEQ ID NO: 359765 - DNA, 118 bp, Homo sapiens
ggcggcgctagcttcggagtctcccgcgcgcacctcagccgcctcctagcggcgcggcgctcgctcctacgcggttaagaagattgtctaccaaatatagaacagaaaagatatatcc

SEQ ID NO: 359766 - DNA, 100 bp, Homo sapiens
ctgtgggtgatatttgcctttagtgcactcttctccttcacagtaaagtggctggttagcactctacgtatatgaatatctgctccatgtaggagctcag

SEQ ID NO: 359767 - DNA, 100 bp, Homo sapiens
tgaagattcaccaaataagctatatactttggttacctatgtacctgttaccactttcaaaagttatgaagttcatggaatggaaaaaataccagaagat

SEQ ID NO: 359768 - DNA, 74 bp, Homo sapiens
gagtctacgatgtcacccgcttcctcaacgaggtggtcttcgagggatagcacgaggtggtctgacaggactaa

SEQ ID NO: 359769 - DNA, 73 bp, Homo sapiens
accgcggccgtcgcggcttttgtgctgtacaagtgtttgcagagccgctcccgaggccccggcgcggcgcgag

SEQ ID NO: 359770 - DNA, 75 bp, Homo sapiens
gccgctaccgctcaggtgctgcaggcacagcccgagaaaccgcagcactacacgactacatccccgtggagggtg

SEQ ID NO: 359771 - DNA, 82 bp, Homo sapiens
gaagccttgaaaaagctgccctgagacggtgtcccgccgaaaggtggccagcatcgaaatgttcagccttttagtgatgaag

SEQ ID NO: 359772 - DNA, 97 bp, Homo sapiens
agtcttcactcaccaaggaaaagtggctctgtatggcaagctggtgcagtcagctcaggttcatacgttttatgaagctgtggggtacatgattggt

SEQ ID NO: 359773 - DNA, 100 bp, Homo sapiens
caatcccccactctttccgccctaatggaggtctccagtttcgacagacagtctagcagtgcttccttggagaccctgttagcacttcttcaggcagaag

SEQ ID NO: 359774 - DNA, 100 bp, Homo sapiens
tgaaggagtttgtgcagtttgtgtgctcggatggctcgggccaggccaccggacaggttggacgtgataagtatgagcctgcagctgtttcagaacaagg

SEQ ID NO: 359775 - DNA, 95 bp, Homo sapiens
ctttagagcctgtggtggttgatctgactcacaatgactctgttgtggtccagggcatgtccttcatagcagcagtgttgatcttgaacttagat

SEQ ID NO: 359776 - DNA, 98 bp, Homo sapiens
cttgacacggatatcacctttgccactgacattgcagagctgtgggctgtgttccacaagttcaaaggttccttcaatggtgccttagctgctgttcc

SEQ ID NO: 359777 - DNA, 74 bp, Homo sapiens
gcacccagacacgacaccatgcatctcctcggcccctggctcctgctcctggggtcccagtcctatgaggatat

SEQ ID NO: 359778 - DNA, 97 bp, Homo sapiens
gctgtgctcctgcttaaagaaatcagtccttcctttccgacttagtcctcgggaagaagtttcagactacaagttcgatcctttggtacagaagaca

SEQ ID NO: 359779 - DNA, 83 bp, Homo sapiens
ccttgcctagtgggccttccttcccagctctattaccaggttttaaacttcgccatgatcgtgtcttctgcactcatgatatg

SEQ ID NO: 359780 - DNA, 75 bp, Homo sapiens
aaattcaacagagagctcaccagattactgatgaggtgtgatccctcacatccacaaatctctgattggaaagaa

SEQ ID NO: 359781 - DNA, 140 bp, Homo sapiens
gttcacgtgacatcaagaggaagcggaaaccagtggccacagcatctttgtctagccccagtgcagggctccagcaagagcttcccatgtggctcggagcacctgccctacccgctgggcagccgcgacgggctcagagg

SEQ ID NO: 359782 - DNA, 83 bp, Homo sapiens
gatgcaagtacccaccaacctgaccctcaggaatctacagccatcgaggagggcacgctggaggagatcgaagaggaggtccg

SEQ ID NO: 359783 - DNA, 83 bp, Homo sapiens
gcatggggcagccccagtggccaccggagctgtgtgagcaagtgacagccctgggcgctgcctatggcacagccaagagcggt

SEQ ID NO: 359784 - DNA, 100 bp, Homo sapiens
gtttttggttgggacgcagtctcttaaatatgataatcagggtccaggagggctggctcatgccaacccagctcatgaggccgacgaaggcagcagaccc

SEQ ID NO: 359785 - DNA, 80 bp, Homo sapiens
ttcacttagctctacaatcaacccatgtggtgttggggcgatgtttcctgactgtggtgcaagtccatttccagtttttg

SEQ ID NO: 359786 - DNA, 100 bp, Homo sapiens
cgcgaggcgagcgcgggagcctgggcggcgagccgggtgtgagctgcctgaaaatgcactcggatgccgccgctgtcaacacgaagatcgattgagaagt

SEQ ID NO: 359787 - DNA, 98 bp, Homo sapiens
ttacatttagagactgaaatcactgcaccttaaaaacaaaagattgagctgcactgtattcctgcagctcctttgggacccagatcatcgggggccgg

SEQ ID NO: 359788 - DNA, 141 bp, Homo sapiens
ccccgatgtgtttccgcacctgccgctcatcgccatcacccgcaacccggtgttcccgcgctttatcaagattatcgagtaacccgtgtccatgccgcccctgcagccccttctgccacagcattgcctgcctcccctgtc

SEQ ID NO: 359789 - DNA, 50 bp, Homo sapiens
gttgaaggcgtgatgagagtcattgggacctggacaaacaccagactcag

SEQ ID NO: 359790 - DNA, 75 bp, Homo sapiens
cagaaaatcaaaacgctgattaaaagaagcacgggtcccgacggcctacacatggggcgctgtgggcgccgtggg

SEQ ID NO: 359791 - DNA, 98 bp, Homo sapiens
acctgtttttccagctcacccactgccagcagagaagctccaccatgaggcgaggtggatggaggaagcgagctgaaaatgatggctgggaaacatgg

SEQ ID NO: 359792 - DNA, 100 bp, Homo sapiens
gaattcagcctcagtgatgtccatgaggttaacacagaaatctgcctcctgggccatgccgcttctaaggcctgtttcttctcatgagccccagcacaag

SEQ ID NO: 359793 - DNA, 100 bp, Homo sapiens
catctcgggaagtgaggagagcccccattggaccagtgtttgcttagttggaggagaggtcagtgctctttgcggtggcctcagcgctggtgaactgcac

SEQ ID NO: 359794 - DNA, 74 bp, Homo sapiens
tctgaaacgccacaaaaagaaatgcatcttcctgggcacggtccttggaggaactgtggctgcaccatctgtct

SEQ ID NO: 359795 - DNA, 73 bp, Homo sapiens
gctgctctctgacatgaagctgcaaggtcactggaaggactgagcgcattcaggagcctggaggaactcatct

SEQ ID NO: 359796 - DNA, 76 bp, Homo sapiens
gccaagcggattgagccaggacacaacaccgcggagccctgcaggcggtatggatcctggcgggagccagtcaacc

SEQ ID NO: 359797 - DNA, 100 bp, Homo sapiens
gaacgattctgagtgaattggcaccaagccttcccagttatcataaccttgaatggcgactagatgtacaggtcctgggaactccaacaagggagcaaat

SEQ ID NO: 359798 - DNA, 100 bp, Homo sapiens
cattaacagaaaagaagaggagaatgctaagcagatcaccaggagactaaagtccatcaaaaacatccagaaaattaccaagtctatgaaaatggtagcg

SEQ ID NO: 359799 - DNA, 98 bp, Homo sapiens
aacaaacagagactgcgaaacgatcctctcaatcaaaataagatatttcagcagttgaatcagttgaattcacttcatcaagaaactatcatgaaatg

SEQ ID NO: 359800 - DNA, 90 bp, Homo sapiens
gtggtggagtccaccccgctgtgcaatggctgccatccggaagaaactggtgattgttggtgatggagcctgtggaaagacatgcttgct

SEQ ID NO: 359801 - DNA, 98 bp, Homo sapiens
ttcttcatggagattgcagctgacaaactgctgagcctgccaatgcaacagccacggaagattaagcagctcgatgacttgtacttgatcgccatctg

SEQ ID NO: 359802 - DNA, 75 bp, Homo sapiens
tcgcgtctctctgctgcggcgcggggaccgctgtgctctcgaacccagcgggtgccgcttctccacccgaggctt

SEQ ID NO: 359803 - DNA, 101 bp, Homo sapiens
gcggcagagagggaatggtgcaggcaggcgctgagaaggacgcgcagtccatctctctcaggtacctttgacaggagcgtgaccctgctggaggtgtgcgg

SEQ ID NO: 359804 - DNA, 51 bp, Homo sapiens
tggagtgttctaaccaacaaggaagagctaagtgctatttatggaggtacc

SEQ ID NO: 359805 - DNA, 100 bp, Homo sapiens
cttcaccttcacgatgtttcccttggtcaaaagcgcactaaatcgtctccaagaattgccaagaagatgcttttagaagaaattaaagccaatctttcct

SEQ ID NO: 359806 - DNA, 75 bp, Homo sapiens
ttttatggattttgatgaaactgaccacatggtgacaatgcatgatgtgcttgatgctcagtggctgtatgataa

SEQ ID NO: 359807 - DNA, 101 bp, Homo sapiens
attaagaccacaagctctggagccaaactgcctggttcaaatcccagctccaatacaggacaatctctatgggaagcagaaggcaaggaccccggtcattt

SEQ ID NO: 359808 - DNA, 98 bp, Homo sapiens
gttctacccaagcaaatttgtccttatcaccgacatacttgatacatttgaagcccctgaatgtgacagtgatccgcaggggggaaaaacaccagctt

SEQ ID NO: 359809 - DNA, 100 bp, Homo sapiens
ctgtttcctaccaggtcacacactgttgcagcgcagcgttgatgccttacctggacatttcgaggctaaagcagttgttgaactccagagcattatcaag

SEQ ID NO: 359810 - DNA, 90 bp, Homo sapiens
gcgacgccccggggcgggggcgatggcggcggcggcggccggagcttctctcagccggtccaggggcaagttcatcctactctcgagtct

SEQ ID NO: 359811 - DNA, 75 bp, Homo sapiens
gacttcgcctttcccgagccctggaggtggggagaaaagatgagccccgctagggccgccccgcgctgagagccc

SEQ ID NO: 359812 - DNA, 75 bp, Homo sapiens
cagtgattttaaccaaggcagttggtggaaatgagcaaatgcagccctgaggatttggctactgcatataacaac

SEQ ID NO: 359813 - DNA, 80 bp, Homo sapiens
aaaactgattgactgggctggcgttaactgtgcggaggcaggtcagcccaaggccaaccccactgtcactctgttcccgc

SEQ ID NO: 359814 - DNA, 100 bp, Homo sapiens
ctgctgctgtccaagggctctgacatcaacatccgagacaaccagccagacccggtccgtttggaatgcctgggatggtgccgccgcatgttcctcctca

SEQ ID NO: 359815 - DNA, 75 bp, Homo sapiens
agaaaccatttaaaacaggtctaaaggagaacatttcaggataggaataggccaagtgctgagaagatgagtctt

SEQ ID NO: 359816 - DNA, 50 bp, Homo sapiens
ggagtattggaatgatgtgttcagtggaatgcagtagccctctgggcctg

SEQ ID NO: 359817 - DNA, 99 bp, Homo sapiens
cacacatctatagccagaaactgtctcgtccctcttcagcaaaggcaggtcttcagaactactagcagataatttggggggacttcatattcagaagtc

SEQ ID NO: 359818 - DNA, 50 bp, Homo sapiens
cgctggagtccgcgcctccctggaactgaaatctgccttcatactatcta

SEQ ID NO: 359819 - DNA, 100 bp, Homo sapiens
ccccaagctgagttccagtcatacagcaggacatgctacgacagtgaagattcagtgacagaaatgttggtaaatgttctgagtatttgctctgatgatg

SEQ ID NO: 359820 - DNA, 100 bp, Homo sapiens
gaaggatgtggactgcagtgctgcagtgccagggagagctggtgacggcctccaaggccatcattgaaaaggagtaccagccccacgtcattgtgagcac

SEQ ID NO: 359821 - DNA, 90 bp, Homo sapiens
tcgcctccttgatgaactggcaggcaagctacaaagcctagacctttcagccgctgccgaaatggatgaatattctatctttcctcagac

SEQ ID NO: 359822 - DNA, 75 bp, Homo sapiens
acggacatgcgcgggagggcgccgcggggcagccgccgctcctccgggattttaggtgatgggcaagtcagaaag

SEQ ID NO: 359823 - DNA, 75 bp, Homo sapiens
aatggttgataaagaacttaactatagaagatccagactaccaaaaggaagcgtggctacattaaaaataagctg

SEQ ID NO: 359824 - DNA, 75 bp, Homo sapiens
ctcccatcattgatgtggtgcgatcggtttccttaatgacaacaaaaaagggagtaatcctacccactgtaagag

SEQ ID NO: 359825 - DNA, 75 bp, Homo sapiens
gcgttcagctgcttcaagatgaagctatctgctctatgcaagcacttagacaacctatgggaagaacaccgtggc

SEQ ID NO: 359826 - DNA, 50 bp, Homo sapiens
ccgccgtcagagccgccctatcagttgtccagtgtacagaagcttactgg

SEQ ID NO: 359827 - DNA, 98 bp, Homo sapiens
cgagggacctgggtctacgataacgcgcttttgctcctcctgaagtgtctttggtccaacgttgttccagcatgggtggtaaagtaccacctgctact

SEQ ID NO: 359828 - DNA, 74 bp, Homo sapiens
cggggccgagcgcggccctgcaggcgatgtcgccgaaaccgggctgcaggcggaacattgacatcaccaatttc

SEQ ID NO: 359829 - DNA, 100 bp, Homo sapiens
agcatctatcctcatggatcaactgataagttgccttatgtcaccatgggtgctgttccagaattcaaagaagagaaactgcagctgcaaccaaaaccac

SEQ ID NO: 359830 - DNA, 100 bp, Homo sapiens
agtgcctcaaaagctggaacagtgcatggccagcaagcactatctcagtgccactgacatgttgatggcttgttcaatcagtatatcagtcaacaggaat

SEQ ID NO: 359831 - DNA, 100 bp, Homo sapiens
gcttctgcctaccaacgacaagaagaaatgggctcgaccccccatttccatgaactttgaggtgccacgctgatcaatgaacaatggctgctgaccacgg

SEQ ID NO: 359832 - DNA, 129 bp, Homo sapiens
aaggaccgcttctgccagctgctgtggcggccccggcctcccacactcctgagccaggaacagatcaaggccaccagcccctcgggttccaagatgcagctactggagacagagttctcacacaccgtg

SEQ ID NO: 359833 - DNA, 74 bp, Homo sapiens
gaaaaatcaaaaggagttcatgcttatgaatgctcgacttcagatggctgatcactgggaaactgcacctcgtc

SEQ ID NO: 359834 - DNA, 100 bp, Homo sapiens
ggccgggctgccccgcaggatcatcaagttggtgacaaagttcctgctgatataaggttaacttccatcaaatctaccacactaagagttgaccagtcaa

SEQ ID NO: 359835 - DNA, 100 bp, Homo sapiens
ttggcagcatgaaagttagcagagttttgagagcaaaatgacaacacccagaaattcagtaaatgggactttcccggcagagccaatgaaaggccctatt

SEQ ID NO: 359836 - DNA, 100 bp, Homo sapiens
ccaaaagtccattatgaaactggttactataacaacagtaccaaggtggctgtgaaaaccctgaagccaggaactatgtctgtgcaagccttcctggaag

SEQ ID NO: 359837 - DNA, 100 bp, Homo sapiens
cggcgccttcctgctgctcttcctgctcgtgctcactgtcaccgagccgctgcggccaggatgccatgcagcatgctgcagagtcgcgggatgctgagct

SEQ ID NO: 359838 - DNA, 82 bp, Homo sapiens
tgctgctgtgggtgatattactggtcctgggaaactggagcacccatcctaactgatgatgttagcctgcaggtgttcatgg

SEQ ID NO: 359839 - DNA, 103 bp, Homo sapiens
gaggcagaaggagcaggctctgcgggaggtggagcacctgaagagatgccagcaggtgagaagccctaccactgcaactgggacggctgcggctggaagtttg

SEQ ID NO: 359840 - DNA, 100 bp, Homo sapiens
gatgtcagaccagagaagagcacagaatgtaccagagagataaactcaagccatggagggattactgcattacatcaaccctgcacacgccatttctctc

SEQ ID NO: 359841 - DNA, 98 bp, Homo sapiens
tgctcggttcacccacaaggaatgagagctgcctgcctgctgctgcttggagagccccagacagtcgcttgaagagatcacaaaatttgtccaggata

SEQ ID NO: 359842 - DNA, 80 bp, Homo sapiens
agcagtttgtaccagactatcaggctgaaagttggaaagcacaggttgcatgtagacactggaatggagggtgattggtg

SEQ ID NO: 359843 - DNA, 100 bp, Homo sapiens
gcccggcctatgcctacgtgctcacggtcaacgagcggggcaaccactgcgagtactgcttcaccagaaggatgccctgcagtggtctcgccatccagct

SEQ ID NO: 359844 - DNA, 73 bp, Homo sapiens
tggtctccattatttgagatgagttacatcttggaggttctactgtttctaaggcttatggtgcttcaaagac

SEQ ID NO: 359845 - DNA, 98 bp, Homo sapiens
gaatatcgagagcgtcatgaacccgagctatagagaaaggagatgagctgggagtgtccactcgccttccaccagcatggcaacgtcttcacagtacc

SEQ ID NO: 359846 - DNA, 88 bp, Homo sapiens
atggctggtatatggaggatggatttaagggggacaggactgaaggctgtcgcagtgattcaggcgggtgccccggtgatgactggtg

SEQ ID NO: 359847 - DNA, 100 bp, Homo sapiens
acctgcatcaacctgatcaccagccaggagtacgccgtcaaggagacgcaggtgcccgcgctgctggaggccggcttccggagggagaacatccgtacgg

SEQ ID NO: 359848 - DNA, 75 bp, Homo sapiens
tctgtggaaaatgagccatgaaccaaccaatacaagttggatggcttgaggactggtactaaaaggaaacgtgac

SEQ ID NO: 359849 - DNA, 75 bp, Homo sapiens
tggatcggctgccggtgcctgccagtgggccgcggcgagtcctttgcacatgttggcaacacacgcatccgcatc

SEQ ID NO: 359850 - DNA, 114 bp, Homo sapiens
ttgctgggccgggtaccatggacgtgggcgaacttctgagctaccagatgtttctttctcagcaaaatagaggagaagcttacccctcttccagaagataatagtatgaatgtg

SEQ ID NO: 359851 - DNA, 82 bp, Homo sapiens
aaggaacagtgccaagttagatgccgattacccacttcgagtcctttattgtggagccacatgaaatgaagatcacctctgc

SEQ ID NO: 359852 - DNA, 85 bp, Homo sapiens
aaacagtgctagtgaaagaatgttattctgtcttcacaaaccggagggggttggggacatgggcagagcctattgggacataatg

SEQ ID NO: 359853 - DNA, 90 bp, Homo sapiens
cggaaaggccgcgtcgtgatcgactcggacacagaggacagcggcagcgacgagaacctggatcagctatatgtgagacagagcctgaac

SEQ ID NO: 359854 - DNA, 50 bp, Homo sapiens
gggcctagaacagttttctcatgtttgaggaggaagaaggtgggaaaggt

SEQ ID NO: 359855 - DNA, 100 bp, Homo sapiens
tgggattttgccttttggtaatgctgtttctgcttaagttggcaagacactccaagtttggcatgaaagatgatgttgaatttgaagtatcatcggaccg

SEQ ID NO: 359856 - DNA, 51 bp, Homo sapiens
gctgagcttggcctcggcgtcctcggtatttagcgtggactacaatgatga

SEQ ID NO: 359857 - DNA, 100 bp, Homo sapiens
ggacgacgtggaggcggagtggcgcccggcgaggtagcgccaggcgagggagactcatgcatctgtatgccgtgtgcgtggactgcctggaaggggttca

SEQ ID NO: 359858 - DNA, 100 bp, Homo sapiens
tggagaattgtgagcttggagccaggaaatcatactgtgaccttattctggaaggaagaccaggcttgtgcaacttgccttattcttgcttgctccactg

SEQ ID NO: 359859 - DNA, 100 bp, Homo sapiens
attctacagtgtttcagatgacaatgctccctctccttatatggtcacgagacatgtgtagaactgcttttagaacaggaagttttccagaaaacggaag

SEQ ID NO: 359860 - DNA, 75 bp, Homo sapiens
tcggacgccagcggacacgcgggcgagatggagcctcgctctgtcgccaagactggagttcagcggcacgatctc

SEQ ID NO: 359861 - DNA, 75 bp, Homo sapiens
gttgagggcacgagtcgggtcctgagaccaggtgcagtcagcctcagtttccaaagccggaaaaggatcctctag

SEQ ID NO: 359862 - DNA, 80 bp, Homo sapiens
taccgcctccttcccagccgcgcggcttcctccagacctctcggcgcggatgaaggatttgggggcagagcacttggcag

SEQ ID NO: 359863 - DNA, 75 bp, Homo sapiens
tggataacgggaggtgaatttccatgtcaacatagtcctggtgtagcccatcagtgttatcatggtttcatgaag

SEQ ID NO: 359864 - DNA, 50 bp, Homo sapiens
gactgggcaacatgttattcaggaggagatgttaaagtaacccatcttgc

SEQ ID NO: 359865 - DNA, 80 bp, Homo sapiens
ggccgggcgcggcgggaaggaggcgtggtgaccaagatgaagatgcagaggaccattgtcatccgccgagactatctgca

SEQ ID NO: 359866 - DNA, 100 bp, Homo sapiens
ggagatgaagacatgtgaggatcctcggccccccaatggacagtctcccattgcccttgcttcaggacagagatatgaaaccagttctacatcagctggt

SEQ ID NO: 359867 - DNA, 75 bp, Homo sapiens
gcgagataggaccctgcttcctagagcacgactttccttatcccagttgattgtgcagaatacactgcctgtcgc

SEQ ID NO: 359868 - DNA, 50 bp, Homo sapiens
atctcaccaatttcaaatccggagcttgctacaagtgccagaaatctgac

SEQ ID NO: 359869 - DNA, 75 bp, Homo sapiens
ggggacggcagtgctgaggcggaacaggccgggcaccaaggcgcagaaatcaatgtggactgaacataaatcacc

SEQ ID NO: 359870 - DNA, 100 bp, Homo sapiens
ctcctcgccagcagccgtccggagccagccaacgagcggttgggtatctacagccattggttgctgttcaggtcagctttgctcctaacaacactgggaa

SEQ ID NO: 359871 - DNA, 100 bp, Homo sapiens
aaaacactcttggcacgagccgttgctagccagctggactgcaatttcttaaagatggagtctcccaggcgggaatgcaatggtgcgatctcgacttcac

SEQ ID NO: 359872 - DNA, 97 bp, Homo sapiens
caggacagctgttccttggccatcccaaagctattctgggggcaacagagctttggacatcagacagtgcaggagaagaatgtgatgcggcagaagg

SEQ ID NO: 359873 - DNA, 50 bp, Homo sapiens
cgacgcccggcgccagcacatcgcaggtaaaccaagggaacatgccaggg

SEQ ID NO: 359874 - DNA, 74 bp, Homo sapiens
cacctccagtgagggacccgccaggccgatcagccaggaaatgtgaagaattcacctggaactaagtagaaaac

SEQ ID NO: 359875 - DNA, 80 bp, Homo sapiens
tgggtagatgtcgttctgaaacgcaggtattcctggagtggagagccactctttttgacctgccctacatcagaagtcac

SEQ ID NO: 359876 - DNA, 96 bp, Homo sapiens
gacgtaatcaaagacggcaacgcgcttatcagcgctatgagaaattgaatagggaaaacctgctttctgcaaacaactgaaaaagctgcatttaga

SEQ ID NO: 359877 - DNA, 80 bp, Homo sapiens
acaagaaattaatggtgaagtggtgacgaaaattctacattgcttagaaagcaatttgcagaaaaaacttcagcatgtgc

SEQ ID NO: 359878 - DNA, 100 bp, Homo sapiens
ctgaccccggggagcgtggactacgagttggcgcccaagtccagaatccgcgcgcaccgcgatatgatgcttcctggtgtgtttagtggttggtgccatt

SEQ ID NO: 359879 - DNA, 98 bp, Homo sapiens
ggccctggcgggtgccctggctaccatggaccatcctgctggtcagcactgcggctgggtgtcaaattgagaaccaggtagatccccaccacctacag

SEQ ID NO: 359880 - DNA, 75 bp, Homo sapiens
atcagttggatcccactgcttccatttctaaagtgaagtcactgcttttgctgtcttggatcaagaccagaaaga

SEQ ID NO: 359881 - DNA, 75 bp, Homo sapiens
agtccctgagctgctgaggaagctttacgcctaaggaggtggccaagactaagcagcagattgaggagcagcggg

SEQ ID NO: 359882 - DNA, 100 bp, Homo sapiens
tcacttagcagcaaaggggatcagatgatttctgttaacgtgtgtataaagaaatttaaaagcctgttgattcaagaactttctaaagtatttccggaag

SEQ ID NO: 359883 - DNA, 100 bp, Homo sapiens
ccagtctgaagcaccgagatgataaggatgacattcggctgctgccgtcagcattgggtgtgaagaagagaaaacgaggacccaagaagcagaaggagaa

SEQ ID NO: 359884 - DNA, 75 bp, Homo sapiens
caggagggccagcgctgcgtggtcattctgcccgactcagtgcggaactacatattgaggagagcaccacagtgg

SEQ ID NO: 359885 - DNA, 90 bp, Homo sapiens
gaagaacatagaaggagaactcacccagtctgccaggagaatttccaaccttacaaaacaagatgcgagccatcctgcgcatagaagtgg

SEQ ID NO: 359886 - DNA, 100 bp, Homo sapiens
gaaacgtgctgggaccaccgggtcagcccgaggcatggccctttatgaggaagagcagctccagagccctggccggggccgcgggatatcaatatcaggc

SEQ ID NO: 359887 - DNA, 83 bp, Homo sapiens
aagaagtgcttcagcgggccaggaagcgcatccaggagacaaatcttcctattttcaagctgaaagaatctactgttagaaga

SEQ ID NO: 359888 - DNA, 83 bp, Homo sapiens
cagacatctacaaccttcgatctcctgacgatgcatttgattatgacacagaaaatatgaactctgaagatatttatagctct

SEQ ID NO: 359889 - DNA, 74 bp, Homo sapiens
ccagttaagattattcttaaaactctgtatgtgccaagagttgtaacctctgcacaacagaaagcaggaagaac

SEQ ID NO: 359890 - DNA, 75 bp, Homo sapiens
ataaagagacagagatcacaccagaagatggagaggattgaccagagaggtttttcattagtcaatacagtgaag

SEQ ID NO: 359891 - DNA, 80 bp, Homo sapiens
tcgcattcagaatttgaccatcttggtgagaaacattaagacctactaccaggtgaaaggtgtagcagtcactcggccta

SEQ ID NO: 359892 - DNA, 76 bp, Homo sapiens
gaccaggactcggaggcaatgaaacgacttcaggctcttgttccggatgtgggtccctctctctgccgctcctggc

SEQ ID NO: 359893 - DNA, 75 bp, Homo sapiens
ggagggtacataatgccactttgattttgtcagaagatttcttcgcaagactatggaaaggaagtggacctctac

SEQ ID NO: 359894 - DNA, 50 bp, Homo sapiens
agctggttctctgggatataaataagtgcgacttcatgatagcatatcag

SEQ ID NO: 359895 - DNA, 87 bp, Homo sapiens
ggggcccgtactgcacatcgtggtggtcggatttcaccacaagaagggctgccaggaagccttatcagttgtgagtgaggaccagtc

SEQ ID NO: 359896 - DNA, 98 bp, Homo sapiens
gacgaggaagctggtggtgttgatcactcctcaggtgtccagcctgctcagcattatctgcatatcagagatattacagtttacaggctgactactgg

SEQ ID NO: 359897 - DNA, 74 bp, Homo sapiens
caacttcgcggtggtcaagcgggccacgcacctcgtcaccaaggccaagcattatgccagtacatacaggcttc

SEQ ID NO: 359898 - DNA, 100 bp, Homo sapiens
atagaccggacagcggaggaaatcaagcaaggcaatgacaatggttaatgttcgtgaagaaattgaagagttttttccaagaatgtggaagataaatcaa

SEQ ID NO: 359899 - DNA, 82 bp, Homo sapiens
gacaggcggcgccatcttcgaacttagacttccggaaggactttggcgagggcagaagctcctcctggggtagagacagatc

SEQ ID NO: 359900 - DNA, 75 bp, Homo sapiens
catctttggatcttcattcattaagcagtgcagaaacacagaacaaaaagagcctggtagcctttaagatcatgc

SEQ ID NO: 359901 - DNA, 90 bp, Homo sapiens
aagcaagcagcaggagctggaggccgtgcggaaggaagcctggagccagaggacttttggtggctgaggccttagctacctggcttacac

SEQ ID NO: 359902 - DNA, 80 bp, Homo sapiens
agagttgctggcacaccctgtggagtgatggaatggggagaagatattaaagcagtttcaaaagatgaagcagtgatgtt

SEQ ID NO: 359903 - DNA, 75 bp, Homo sapiens
ttcagaaggcaaagtctgcaagggaaggaagtatattgggaggtacaacggtctggaaaatcccgaagcagaagc

SEQ ID NO: 359904 - DNA, 50 bp, Homo sapiens
cagctgaggcctgagacacaggaccaggaaaatcatcagcgtgttagcat

SEQ ID NO: 359905 - DNA, 75 bp, Homo sapiens
aagaggagctgggcctggtgcacaggtctgagactgtggtggagaggatgctgtccaactggatgtccatctgcc

SEQ ID NO: 359906 - DNA, 51 bp, Homo sapiens
aaaatacgaaggtttctggctgggagtcagtggatcggtggggaaaatgct

SEQ ID NO: 359907 - DNA, 139 bp, Homo sapiens
tccaaacaacacgcgaacacccgagatctcaggggatttggctgacgcctcacaaacctccacattggtttctgacgtagaagagcttacccctccagagcatctttctgatcttccaccattttcaaggtgtttaata

SEQ ID NO: 359908 - DNA, 90 bp, Homo sapiens
ggcgggccgcgggagccgcacgcggcgatatggaagaggagggcaagaagggcaagaaggtaattttaaccaatcagatgacaacaaaga

SEQ ID NO: 359909 - DNA, 74 bp, Homo sapiens
ggtctgcctcagtccaccctgtaccctggcaaagccttctagacaagctcagtggaatctgaagggcccacccc

SEQ ID NO: 359910 - DNA, 83 bp, Homo sapiens
ggaattggagcagagagaagggatgagccggagccagccatccgaaagagctaccaggcggtagagcggcatggggagacaat

SEQ ID NO: 359911 - DNA, 75 bp, Homo sapiens
atcgcaaccaccgccctggccatctaccatgtggacactcatgaggaccatgatacttccactgagaatacagac

SEQ ID NO: 359912 - DNA, 75 bp, Homo sapiens
ccgacatcttgacgaggctgcggtgtctgctgctattctccgagcttcgcaatgagagaaaaggaacagttccgt

SEQ ID NO: 359913 - DNA, 88 bp, Homo sapiens
gctccgcgacgttgaggccgcgttgggcggttcagactcagggtggctcctgtgacgtttgatgacatcactgtgtacttactccagg

SEQ ID NO: 359914 - DNA, 74 bp, Homo sapiens
ctgcactctcagcctctacactggcctggcaggcggagcaactagaagccatttgtgtcaaggtaacgtctgga

SEQ ID NO: 359915 - DNA, 83 bp, Homo sapiens
agaccattcagatgggatctttccggatcaatccagatggcagccagtcagtggtggaggtattacatcaaataccaataacg

SEQ ID NO: 359916 - DNA, 74 bp, Homo sapiens
taaaagaagctgccagacttggtattcacaccattaagattatggtgacaagctgaacatggagctgagtgaga

SEQ ID NO: 359917 - DNA, 83 bp, Homo sapiens
agcagccgatccagcctgcggagcctgtggggcaggcaccgcatgcgtggggagaccaccctgtggaaccctggctgtgacca

SEQ ID NO: 359918 - DNA, 49 bp, Homo sapiens
cctgtacagcctgcagaactatggagtctcactttgtcacccaggctgg

SEQ ID NO: 359919 - DNA, 80 bp, Homo sapiens
ctggtgcacacaccctcgtattctcctgcccttccccagcaccgacagtaaatggttcacggccgacatcatgtccatag

SEQ ID NO: 359920 - DNA, 156 bp, Homo sapiens
ggggattcctgaaccctgctcagagagatttgtacacaactgtgatgctggagaattatcagaacctggtctggctggttttaacttctagtcatggcgaatgatcgcaggagagcacagactggaccctgctacgatctctcttggagtggatca

SEQ ID NO: 359921 - DNA, 100 bp, Homo sapiens
atcaacgccagcagctccctctgccctatgaacagcttaagcacttttaccgaaaaccttctccccagagtttgtgatcctacgagatgagaaatggggt

SEQ ID NO: 359922 - DNA, 50 bp, Homo sapiens
agcaaatcacggcagtcactacggggatcatggaagctgataaagatgac

SEQ ID NO: 359923 - DNA, 48 bp, Homo sapiens
cgtggccccgagggcggatccgagaatgagatgtgcctggccacacaa

SEQ ID NO: 359924 - DNA, 83 bp, Homo sapiens
gatggggctgatcttcgccaaactgtggagcctcttctgtaaccaagacaatgcagatcttcgtgaagactctgactggtaag

SEQ ID NO: 359925 - DNA, 115 bp, Homo sapiens
gagatgattaaaacggaatttacactgacagaagcagtggtcgaatccagtagaaaactggtcaaggaagctggttacacatcattttggaatgactgtatatcatctggattac

SEQ ID NO: 359926 - DNA, 100 bp, Homo sapiens
gacttagatggcttagacacaccgtcagagaatagtaatgagtttgagtgggaagataagagtgcccaggagtggaatctggaaatagagtctacatttg

SEQ ID NO: 359927 - DNA, 75 bp, Homo sapiens
ttcccacactgtgagcctcagcagctccagccagcggacccgacggctgagaggccccgccagcaggcgaagcag

SEQ ID NO: 359928 - DNA, 90 bp, Homo sapiens
gaagaaagaagttgaatcccagcttcccgaaaaaagccgagactgtctgaagctgggcccacctgctgagggagaagtcgtccaagtcaa

SEQ ID NO: 359929 - DNA, 83 bp, Homo sapiens
agcatcccggaggaggaagaagaagtgttatatgtcctaaagtaaggtttcagccatcgacgagtacaagccccaggatgcta

SEQ ID NO: 359930 - DNA, 75 bp, Homo sapiens
aggaggccgacttcaaggatcttgagactcaaccccatatggaggagataagcaaggacctcagagccacactga

SEQ ID NO: 359931 - DNA, 89 bp, Homo sapiens
aaaacagatattacctaccatttacaaaatcgctccttcgatatcctaaaaaaatccaagccgccctcgacattgcttgctgcaggccg

SEQ ID NO: 359932 - DNA, 100 bp, Homo sapiens
ggagcggttgacgttgcctctcggcggcgcggcggcggtggacgagtacctggagtaccggagtttttcaggaattgttcaaatggatgaagatacacat

SEQ ID NO: 359933 - DNA, 90 bp, Homo sapiens
gaactttgcaattatgaggaagccagagagatttttgtggatgaagataaaacgcgcaccttttgacaagacagccaacatcaccttctc

SEQ ID NO: 359934 - DNA, 101 bp, Homo sapiens
gtgctccaggacagcgtggactttgatattgatgtgaacgcctctgtgtttgaaacaaacattcgagattgaaagtatccagctgatgatggacagtgaaa

SEQ ID NO: 359935 - DNA, 100 bp, Homo sapiens
cactggtgtcttctctcttctttcatgtccctgctggattactggccctcttcaccctcagacatcacaaatatgtgactgccaggaactgctaaaccag

SEQ ID NO: 359936 - DNA, 90 bp, Homo sapiens
gaaaagtttgggccttatgtgggagagcagaggtcaaacctgaaagaccccagttatggatgggagaatctacctgttactcgtattttg

SEQ ID NO: 359937 - DNA, 75 bp, Homo sapiens
cgccagatcaacctggagctctacgcctcctacgtttacctgtccatgacctcctgccccccgaggtctgcagtc

SEQ ID NO: 359938 - DNA, 82 bp, Homo sapiens
ggaagcgctttgatttacagcagctgcagacaatgagttacaaggcactaatagttctggatccttgggtggtcttgatgtt

SEQ ID NO: 359939 - DNA, 51 bp, Homo sapiens
gccctcaacagcgccattttagagagctggcggtcaccatggcaatgcggg

SEQ ID NO: 359940 - DNA, 100 bp, Homo sapiens
gaccgccaagagcgacgccgccgtgtgcccaacggtcggtgtccccggctgaggcagcgcggccgcagcagccctgatcccactttgcgcaccaaacagc

SEQ ID NO: 359941 - DNA, 83 bp, Homo sapiens
accgcttcccccgagccagcagacaatgcagatcttcgtgaagactctgactggtaagaccatcaccctcgaggttgagccca

SEQ ID NO: 359942 - DNA, 83 bp, Homo sapiens
gcagggcgttggctatgtgcccatcacaggattgtcagtggcttcgccccgaggagagctgactgccctgggctgctgcctcc

SEQ ID NO: 359943 - DNA, 95 bp, Homo sapiens
agccttccaattttttaagaagcggagaccttttaatcaaagtgaagtttggggaaagcattgaggacttgcacacctgccgtctcttaattaaa

SEQ ID NO: 359944 - DNA, 98 bp, Homo sapiens
gttggaagacctattatcagatcaaccaccaaagtgggaaacattgaaatcaaggttggtgaccgttgttatgatgaaaaaatgtatgatgctgctaa

SEQ ID NO: 359945 - DNA, 100 bp, Homo sapiens
gtggaatttttccgacagtttatactggttatgaatgctttagataacagaggagccttggtcatcatttgatatatacacccggaaagggccgctggaa

SEQ ID NO: 359946 - DNA, 75 bp, Homo sapiens
cctgacgatcctgacctggtacgagcccggaacattcttcacaagaaagatggtatgcaattcctgttggttagc

SEQ ID NO: 359947 - DNA, 100 bp, Homo sapiens
aatttgagcctctgctgaattggatgaaagataaagcccttaaggacaagattggccatctgcaagcttcccttctccgtggagagcaggaagacagtca

SEQ ID NO: 359948 - DNA, 75 bp, Homo sapiens
tgcggagcggcggcggaccacctccagtgcaccgtccaggtgaggttagagctggggcatcgcgcccaactgcgc

SEQ ID NO: 359949 - DNA, 100 bp, Homo sapiens
gcggacatcggcttctgcctggtgctctgcgtcctcatcgggcttatgttcgagatgtccctgtacaaatttctgctcatcaccttcaccagctcttaca

SEQ ID NO: 359950 - DNA, 96 bp, Homo sapiens
catggctttggttgctgctatccttttgctagtgattatcatttctacgtggaatttggacactttggccttccaggaactgaagtccgagctaac

SEQ ID NO: 359951 - DNA, 75 bp, Homo sapiens
tcctcaggtccttcaggattactacgcgggaggctggcatcatcacgacaaaggcatagaatgtcaagctaacca

SEQ ID NO: 359952 - DNA, 100 bp, Homo sapiens
tggagatgggcagacggattcatttagagctgcggaacaggacgccctctgatggtggcagcacgcaaagggtgtccctgtccctcaaggggtcatggcc

SEQ ID NO: 359953 - DNA, 88 bp, Homo sapiens
cagttcactttaaaacatttgtcatgggattaattcttggggatggcattcctactgtatttgtggcagtggcaggcagaagtaatgg

SEQ ID NO: 359954 - DNA, 88 bp, Homo sapiens
catctcccggcccggccgcagcagccgccgccgccgcgcacgtcgagggcgaggcccccagcagtgagactggcacatccctggacag

SEQ ID NO: 359955 - DNA, 83 bp, Homo sapiens
gatcgctgtgatcgtcacttggaaaatcctgccttgcttcgttgggcctatgcaagaacaataaatgtctatcctaatttcag

SEQ ID NO: 359956 - DNA, 83 bp, Homo sapiens
gcctctgctctgcctccggggacaagaaactagagcaaataaccgttttgaaattgcctgttacatgaacagaatatggcaaa

SEQ ID NO: 359957 - DNA, 75 bp, Homo sapiens
cggattctctgcccacaaggatatgtggctcagtgtggtcaaggtaatttatcctcagcattccaaacttactga

SEQ ID NO: 359958 - DNA, 83 bp, Homo sapiens
tggacattcagacttcagaatgtcccttaagctcctaggatttttagatgttgaaaatactccctgcgcccggcattcaatat

SEQ ID NO: 359959 - DNA, 99 bp, Homo sapiens
gctttcccccgagggtcaacgagaaagagatcggacctcagcagccatgtcgaagccccatagtgaagccgggactgccttcattcagacccagcagct

SEQ ID NO: 359960 - DNA, 50 bp, Homo sapiens
ttcgccaacttcaaccaggacaacacgcatcatcctctcactggccctgg

SEQ ID NO: 359961 - DNA, 100 bp, Homo sapiens
ctgaagtcggtgtctgctgcgttcacggcaggattcggttagggctcaagggttcttgttgatgcacgagataagcttggcattccttggcagtattctg

SEQ ID NO: 359962 - DNA, 75 bp, Homo sapiens
cgtcagggacacggggtgctgcgctgcgccgacggctccacctacaagtctccaaaaaaagttggtgatgacatt

SEQ ID NO: 359963 - DNA, 98 bp, Homo sapiens
tataaaaacacagctcgacagtacgcctacttctataaagtcatccagccccgtcgcagaatttagtctcaaaggaaacttcaaccacagcactgcag

SEQ ID NO: 359964 - DNA, 101 bp, Homo sapiens
tgaggacatgcgagcaatcttcaagcgctatgccaagaagcgaaatgtgctcattggccattcctacggatccgaagccaacgacttagccttacgcctgg

SEQ ID NO: 359965 - DNA, 82 bp, Homo sapiens
agtacatcataatcggcgacacagctccctgtgctgtcaggaatctacaggacttggctcgtatttacattcgacgcacact

SEQ ID NO: 359966 - DNA, 83 bp, Homo sapiens
cgggtctgctctgtgtgccatggacggatgataccacgagtcaacccaaaagttgctggggagaagttgctctttaatgaatt

SEQ ID NO: 359967 - DNA, 100 bp, Homo sapiens
agcaccccgagaaccgtcagtttgagccagatgaagttaaagtctgacacggctgctgcagctgtgcgccaaatgaatccacatatccgggtgacaagcc

SEQ ID NO: 359968 - DNA, 75 bp, Homo sapiens
gccggagcggcgccatggaggagggggcgccgcggcagctgccaatttgtggtgtctgaagaccaagactacaca

SEQ ID NO: 359969 - DNA, 100 bp, Homo sapiens
ggctgcgagagtggcagaggagctggcggagagcggcctgcgggcgatcgggccgaggctgactgtgctgtcctgattgttgctgctggtgttggtgaat

SEQ ID NO: 359970 - DNA, 76 bp, Homo sapiens
acgaggtggacatcaagccggataagtgtccccgtagagtcaaccggatctgcttcccagtgcaggtgaaccggct

SEQ ID NO: 359971 - DNA, 75 bp, Homo sapiens
cctggtggtggctgccatgatgatttccattgtgggctgtgctccattgaagtgacttgtgaatcagccagtgtg

SEQ ID NO: 359972 - DNA, 100 bp, Homo sapiens
ggcatcatgaagcgggctggcggcgctgccgctcccgggcggccgcgggcgggacgtcccagtgatcgggaggagtgggaagagcttcagctacaaccag

SEQ ID NO: 359973 - DNA, 97 bp, Homo sapiens
gaaatgacatgactgagccacacaaacctttaactcagctgcttccaggaattagtcgagaaggaaggaagagggaatggtttaaaatagaagacgc

SEQ ID NO: 359974 - DNA, 96 bp, Homo sapiens
ctgctggtgggtgttccagctggaagtaaccccttccgggagcctagatcctgtgctttactctgaagactcaacaagttgaaatcatcgcagaag

SEQ ID NO: 359975 - DNA, 100 bp, Homo sapiens
caggaagctggtagagcagcttaagatggaagccaatatcgacaggataaagcagggaggagagagcgatggcttttttcacccagaaggccagccccag

SEQ ID NO: 359976 - DNA, 100 bp, Homo sapiens
attaatccagaagatagtactttccctggtaaagaacaagcacctttggagatgagtatgcatccagcggcaagcgctccactctcagtctttactaagg

SEQ ID NO: 359977 - DNA, 83 bp, Homo sapiens
gcttcaaagagaaaaggcaacatcctgtcacaggccatgctctggcaaaaacgtaatagcctgcagctggtgttttgagaagc

SEQ ID NO: 359978 - DNA, 83 bp, Homo sapiens
agcagattctacaacacatggtggaatgtatccgggaggtcaacgaggtcatccagcctcgatgacttacgagccctcaaggg

SEQ ID NO: 359979 - DNA, 100 bp, Homo sapiens
cacttagaagcatcacatgacaatgcatctgctgtaggcggtagcagtttgcacgatgaacttggaaggatctgagtctctccctgcggagacagccctg

SEQ ID NO: 359980 - DNA, 82 bp, Homo sapiens
gaccgagagcgtgaccgagagcgcgaatatcgtcatcgttagaaggaaggtgtcttgctgcaggtaactaatgaagaagtgg

SEQ ID NO: 359981 - DNA, 51 bp, Homo sapiens
cctcccaaagtgctgggactacaggcaagttaaccgatatccatgggaatg

SEQ ID NO: 359982 - DNA, 100 bp, Homo sapiens
aaacctgtgaacccacccgagagcaacaaagcaggcgactacagccacgtgaaggttatgggcacgctgcacctggcaccgatgcgggcaaggccttctg

SEQ ID NO: 359983 - DNA, 82 bp, Homo sapiens
cgagggccagctgacggagatggtgcagaagatggaggagaaagtttcctacactactgaggtttaggggcactgtgaagca

SEQ ID NO: 359984 - DNA, 83 bp, Homo sapiens
aaggctcactcaaggatcagttggctttagcaattgatgtggacgagtgctcactagcagaaaaaacctgtgtgaggaaaaac

SEQ ID NO: 359985 - DNA, 48 bp, Homo sapiens
caagctcagcctggacagcaacaggtctggtgagctgtaccttctttc

SEQ ID NO: 359986 - DNA, 75 bp, Homo sapiens
tggcataccattctcatcgttgatatctagatgatctcaatgaaggggtttatattcagcaaaccttagaaactg

SEQ ID NO: 359987 - DNA, 75 bp, Homo sapiens
tctacaaccttcgatctcctgacgaatgcttgctctgtcaaggcacagcctattgtctcctttgctcagtgtgac

SEQ ID NO: 359988 - DNA, 100 bp, Homo sapiens
aaatacctgtgatttgctttctcggagcaaaagtggctctctaaatacgtacagattctgcgataatgtgtggacttttgtactgaatgatgttgaattc

SEQ ID NO: 359989 - DNA, 100 bp, Homo sapiens
cttggttaccatgtatattttttgctggaggcataacaatgggaaacattggtcgacaactggcaatggtctgtgcagacttttgcagacaaatcaaaac

SEQ ID NO: 359990 - DNA, 90 bp, Homo sapiens
caccagcacagcaaacccgccgggatcaaagtgtaccagtcggcagcatgggtgctggagaatctggtaaaagcaccattgtgaagcaga

SEQ ID NO: 359991 - DNA, 100 bp, Homo sapiens
catgcagtggtacaaggaccagaagaaactgcaccggaaatgtgcctaccaggtgaagctgtgtgactttggctttgctcgcatcatcggcgagaagtcg

SEQ ID NO: 359992 - DNA, 74 bp, Homo sapiens
agaaacagatatacagatgtggagaaggattccagacagcattggaaaagacatagaaaaggcttgccaatcta

SEQ ID NO: 359993 - DNA, 83 bp, Homo sapiens
caaacagcccgcccgaccccgtcccgaccctggccgccccgagcggagcctggagctgtcccctttcctccaacccaacggct

SEQ ID NO: 359994 - DNA, 98 bp, Homo sapiens
caagtttacgacaaggaggttcagtggacccttggagccatcctctacaggacccgctttctaccattaagaatttctagaaggaggagttggccatg

SEQ ID NO: 359995 - DNA, 75 bp, Homo sapiens
acgccacctgggaggtggaccggagctcgtccagctgcgtgcctaggatgctgtatgattatgttgaaaggaaac

SEQ ID NO: 359996 - DNA, 75 bp, Homo sapiens
ctgagaagtattatgatctggcagccaggctgaggcctaatgcttgcattgatgacaatgttgatatggtgaagt

SEQ ID NO: 359997 - DNA, 50 bp, Homo sapiens
catttcagatgtgattcatctagtcttgtggatgagcagcagaaagttcg

SEQ ID NO: 359998 - DNA, 75 bp, Homo sapiens
gacgacgttgaccgcacactggatgaatggaagcgtgtgcggcgttcctacacctttggcctggctggaggcggc

SEQ ID NO: 359999 - DNA, 75 bp, Homo sapiens
ctgcccgtagatttcagcaatatccccacataccttctcaaggctgtggaaaatctctgttctcacaaagtctcc

SEQ ID NO: 360000 - DNA, 83 bp, Homo sapiens
gccgagtgggaggatggcggaagctgcctgctgtttcccggggagatcatgaaacgaggtcgccttcccagcagcagtgagga

SEQ ID NO: 360001 - DNA, 96 bp, Homo sapiens
aaccagatatcttgaaaagctgccagaaagaaaaatggctacaaacttcctagcacatgagaagatctggttcgacaagttcaaatatgacgacgc

SEQ ID NO: 360002 - DNA, 100 bp, Homo sapiens
gctggtcacatatccttatgacaagccagtacagacagatctcaggaaacaggctcgacagctggaaaatgaacttgacctgaaactagtttccttcagc

SEQ ID NO: 360003 - DNA, 141 bp, Homo sapiens
cgtgaggcgaagctggaatctgcctctgtcacgggggctggtgcctcacgggtttgtgtcctagacagagttctatatacccctggccacactgatgatcacatggctctactcttagaagaggaaaatgctatcttttct

SEQ ID NO: 360004 - DNA, 52 bp, Homo sapiens
aagtggaccaactatctgagcgaagaaccttgaaggctatgtgggatttgcc

SEQ ID NO: 360005 - DNA, 100 bp, Homo sapiens
ctgccataaacaaaagctattacaatgtgaattggagcgttattcagtatattaatgtcttattgataatggcagaacatccaccactactggatacaac

SEQ ID NO: 360006 - DNA, 75 bp, Homo sapiens
ggtgccttctgtgaggcaaagattaagactgtgaaaaggctggtgaaagttaagttttttgctccactcaagcct

SEQ ID NO: 360007 - DNA, 104 bp, Homo sapiens
cacccagaaggacgttcaacctccaaagcagcaaccaatgatatatatctgtggagatgtcaagccctccaacatcctagtcaactcccgtggggagatcaagc

SEQ ID NO: 360008 - DNA, 100 bp, Homo sapiens
gtggttggggaagtcgaagccaagcgccgtatgggactttgggcgctgtgagcggcggcgagcagaagggagttaagccccaagccaaggcagccaaagc

SEQ ID NO: 360009 - DNA, 71 bp, Homo sapiens
caccgggaagcgcgctcgttcgggatcgccgagggggctgagtgttttccaagcagtgaagcacttgccgt

SEQ ID NO: 360010 - DNA, 100 bp, Homo sapiens
gccagcgagcgcgccttcggcattggccgccgcgatgtcagctcagtgctgtgcgggccaggcggcttcaatgatccatcctaaagaggtgccccctgag

SEQ ID NO: 360011 - DNA, 82 bp, Homo sapiens
ggcggatggccccaggtgtaagcgcagaaagcaggcgaacccgcggcgcaataacgcaaacggggattcagcgtccgatcct

SEQ ID NO: 360012 - DNA, 100 bp, Homo sapiens
aagacattgtttctctccctctgcccccccttccccacgcaaccccagatccatttacactttacagaactgtggctgcaccatctgtcttcatcttccc

SEQ ID NO: 360013 - DNA, 100 bp, Homo sapiens
tcagtatgaagagcggatgaggatacagaaggctggaggaaacgtcagagaaaacctcttgtgttggaagggattgatttggggccatgtacaagcaaat

SEQ ID NO: 360014 - DNA, 50 bp, Homo sapiens
cgacaggcggcgcgggcggcgtttggaaattttagcattcaggtgccagg

SEQ ID NO: 360015 - DNA, 75 bp, Homo sapiens
tttgcgtgctggtcagcatccggaacaacagcagcgatggattttgggtggggaagtcctccttgcggagttggc

SEQ ID NO: 360016 - DNA, 99 bp, Homo sapiens
acttctgagttacataaagaagacctaaaactgatggctactaaaaagcagagcatttctggttgtctgcattcaaaagagcattctattaaagctacc

SEQ ID NO: 360017 - DNA, 101 bp, Homo sapiens
ccgaaagaggtttttgcacaccttattaagaccctgactgcacctgccccatttgctgatgaaaccaactgccagtgtcaagcaccccatgaaaaactgac

SEQ ID NO: 360018 - DNA, 82 bp, Homo sapiens
tggagcctgacgagctggcgggctggcgccttcctctgttgggccagcggtacctggacctcctgaccacgtggtactgcag

SEQ ID NO: 360019 - DNA, 100 bp, Homo sapiens
cggaaggctacatgcggttagatgacagtgggattgctttctgttcaaaatcaggagtttgagataaataaagatggaatccccaaagtggatcagtttc

SEQ ID NO: 360020 - DNA, 83 bp, Homo sapiens
ccttgtggagtctcccgtcactcaggacatcatctgcgacgtggggatgtgcagaggccaagaccgttttgcccaagaaggag

SEQ ID NO: 360021 - DNA, 100 bp, Homo sapiens
tttaacattccaacacataaaaattatttatccaacagctcctcccaggcatcataggcgagtattagtggaatggctaagagatccatctcaggagctt

SEQ ID NO: 360022 - DNA, 75 bp, Homo sapiens
agcacaatgatccttttgctcctggtggaacagttgttgcagcaagcgattcagatcctgataacttaagtgact

SEQ ID NO: 360023 - DNA, 100 bp, Homo sapiens
ttagctaaggcatgaccagcaatgaacagtagtaaggtaccctggctaaagccgggccggagccctctgccctctcatgcccgcagccagcctgggctgt

SEQ ID NO: 360024 - DNA, 74 bp, Homo sapiens
tccctccgggtacacgatgaattccagcaagactgaatgtgggcccagttggcgtcattctgctttgacctaaa

SEQ ID NO: 360025 - DNA, 95 bp, Homo sapiens
cctggatgtggtacggaaggaggcagttgttctgtgactttggtgaggacttcactgtgcaggaccccacagaggcagaacccctgacagctgcc

SEQ ID NO: 360026 - DNA, 100 bp, Homo sapiens
aatgagaagactgatcaatctggtaatcaaatgcaaagcagctgtgctatgggagttaaagaaacccttttccattgaggaggtagaggttgcacctcct

SEQ ID NO: 360027 - DNA, 75 bp, Homo sapiens
cggccgacagtggagtctcaccacgtctccatcacgggtatgcaggaggaaaactccctcttcgtcatgaccaac

SEQ ID NO: 360028 - DNA, 82 bp, Homo sapiens
gcccacgccagacacgacgtctggcaggaacctcggcctcagaggaatgtggcctgctgcggaaggggacagtgctactggc

SEQ ID NO: 360029 - DNA, 78 bp, Homo sapiens
ggactgtcaaggagttctgccagcaggagtctatgggtaaaacatcagggaagctgtttgatagcagtgatgatgacg

SEQ ID NO: 360030 - DNA, 101 bp, Homo sapiens
aatcgtttgtcagaggaagagatccgaaaaattcctatgttttcttcatataatccaggggaaccaaacaagttcctggtccagaactttacacagaaaag

SEQ ID NO: 360031 - DNA, 100 bp, Homo sapiens
gcggacagcatgctgagcctcctcgtctggatcctcactctctccgatactttctcccaaggttatggccacaccgtgcccttgtcagatggaggtaagg

SEQ ID NO: 360032 - DNA, 98 bp, Homo sapiens
agtgtcaatcgttcagttttaatgattttaccacttagcagtgtctgcaaaaacgaatcttttcctacaacctgttaactgactggactgttggtaac

SEQ ID NO: 360033 - DNA, 97 bp, Homo sapiens
ccggttgcgccacccgaggacaaggttaccatagagatgaatgaaccagttcaactaacttttgcactgaggtacctgaacttctttacaaaagcca

SEQ ID NO: 360034 - DNA, 75 bp, Homo sapiens
gattactatcactaatgacaagggaatccctggggttggcactgggccaagcccaggagcccttgcacagcttgt

SEQ ID NO: 360035 - DNA, 97 bp, Homo sapiens
ccagagtgttgccaaggccaaatatgaatttttatttggcagatctgaagggaaagctccagatactacacccctacggagaacgagctgaagttcc

SEQ ID NO: 360036 - DNA, 100 bp, Homo sapiens
tgcaagtggtcaagatcctggtggtcacggtgcagattgactggggcgactttggggtagaggcagtgtctgaggggactgactctggcatctctgccga

SEQ ID NO: 360037 - DNA, 75 bp, Homo sapiens
gacgagttctcaaagagttgggtttctgcgtccatgtgaagcatcctcataagaaattggagatattgctggtgt

SEQ ID NO: 360038 - DNA, 100 bp, Homo sapiens
ggcgccggggcctagcgctatgcctgcggcggagactgcatcaggctctcggattttttatcaagcagaaatgcatcgaacaacgagaatcaagatcact

SEQ ID NO: 360039 - DNA, 98 bp, Homo sapiens
ctgggacagtgcaaggaaagaaagaagcctgcggtgaaagtgacactgagcgccccagcgggatcccagagaaggatctgcacagtgttatggcaccc

SEQ ID NO: 360040 - DNA, 98 bp, Homo sapiens
gcggtgaccaagacgctgcgggagcccggcgccggagcccaagatgcttctgtcagacttctctcatcaccatattgaaatggcatgcaccctgctgg

SEQ ID NO: 360041 - DNA, 75 bp, Homo sapiens
cggaaaccccgcctcttacagtcacgaggtgccaagtctagtggtggcagggaagacttggagtcatctggactg

SEQ ID NO: 360042 - DNA, 50 bp, Homo sapiens
tgcaagtgtccttcgacgggagggtgtcgaagtgcagacagactacgtgc

SEQ ID NO: 360043 - DNA, 100 bp, Homo sapiens
agatgccaccacctcatccaccccagccaggaactcgaatcatttatgacagaaagtttctgttggatcgtcgcaattctcccatggctcagaccccacc

SEQ ID NO: 360044 - DNA, 75 bp, Homo sapiens
cggatacgatagaaaatgtaaaggccaagatccaggataaggaagggtctcctatggacagaagtgcgggcaagg

SEQ ID NO: 360045 - DNA, 74 bp, Homo sapiens
tgtttatgttccaaacactacttacagagtcctatcattgatcggcctgagtctaatagctttggggacaggag

SEQ ID NO: 360046 - DNA, 75 bp, Homo sapiens
ttttgtcaattccagaatacaaaatcctacatggctttccaccaacctgggcatcctgacctgcatcgagtgttc

SEQ ID NO: 360047 - DNA, 75 bp, Homo sapiens
aatgaccacaacaagcaagcatgcagcttactgcttgaaagttatatcttgaagcagcagatattgttgaatcac

SEQ ID NO: 360048 - DNA, 97 bp, Homo sapiens
agagggcctgggagcttgctgcagcttcagggtgattctgggggtccacttgtctgtaatggtgtgcttcaaggtatcacatcatggggccctgagc

SEQ ID NO: 360049 - DNA, 85 bp, Homo sapiens
ctacatgaaaagtctgttaaaaatctttgcgtgttctagaacagatcagacattttgtaatgatgcctgaaataaacactaacca

SEQ ID NO: 360050 - DNA, 75 bp, Homo sapiens
cacctgccaccgaggccccctcttcgcctcctccagtgatgttcctccatcttacgttcaaactaaattttctag

SEQ ID NO: 360051 - DNA, 83 bp, Homo sapiens
cgctgcgggcccgctccgacgcggaagctcttcctcctcccagaaagacacgtgctgagctcatgaaggcaatcgattttgag

SEQ ID NO: 360052 - DNA, 76 bp, Homo sapiens
ctgacctggaggtcagggtgccagtacccaagcacgtggtgaagggaaagcagaattaacactgaatcctccggaa

SEQ ID NO: 360053 - DNA, 90 bp, Homo sapiens
tcttatttgctttatatatcatgtgtgttcctcactcagcggtttccaacctagatgaggaaagccgatggacagtccactacactgccc

SEQ ID NO: 360054 - DNA, 83 bp, Homo sapiens
ggcagcccagacgtttattcagagagctcaggccccggggcctccagcggcaccagcggagaccacggtgagctcgtcgtccg

SEQ ID NO: 360055 - DNA, 74 bp, Homo sapiens
actgaacaaagggattaaattgtgagaatgctgcctttttatatggtcttggtttggtctacttccattataat

SEQ ID NO: 360056 - DNA, 82 bp, Homo sapiens
ccccacgcaaccccagatccatttacactttacaatctctggaaacatggctacagaacatgttaatggaaatggtactgaa

SEQ ID NO: 360057 - DNA, 80 bp, Homo sapiens
aaacacagagccaccctggaaaggtactccaaagattcaggtttactcacgtcatccagcagagaatggaaagtcaaatt

SEQ ID NO: 360058 - DNA, 100 bp, Homo sapiens
cggcgtcctctcccggccctctcgcgctgcactgtctctccgacgcaagactgtcccggcccggttcctgagggaagacctcaattaccatgacccaaca

SEQ ID NO: 360059 - DNA, 82 bp, Homo sapiens
ttctaatttgaaccatgtttggattgaagccgcctctgtattacttaccagagctccacgcaggagatcggtgaggagctga

SEQ ID NO: 360060 - DNA, 75 bp, Homo sapiens
cgagtggtcaacagtgagacaccagtggttgtggatttccacgcacagtatgggcactaggaaaagacttcttcc

SEQ ID NO: 360061 - DNA, 101 bp, Homo sapiens
ttgtggtgcacactgtacagttcctcaaccgcttttctacagtttgtgaggaggggactggatgaaggtgtttcttgtacgtcaatttatgaaaagcatag

SEQ ID NO: 360062 - DNA, 75 bp, Homo sapiens
gctgagtggtttttcggatcatgtctggtggctccgcggattataacaggaattggcagcaatgaaacagattct

SEQ ID NO: 360063 - DNA, 100 bp, Homo sapiens
cttaatcacaggcgctgaatgaaagaatgaactggttgtgcaggaaccaggatccgaacccgcctccccaggtgagaattatgaagatgatgacctagta

SEQ ID NO: 360064 - DNA, 100 bp, Homo sapiens
cgaggaggaagacgaatcgttaaacatctgaaagggtcagtattctaccttgtaaatactgttatttgtatatactgtaaatgatgacatcggtgggcac

SEQ ID NO: 360065 - DNA, 83 bp, Homo sapiens
cctttggggcaccacagagatgcgggtgtcgtgaaaactacccctaaaagccaaaatgggaaaggaaaagactcatatcaaca

SEQ ID NO: 360066 - DNA, 98 bp, Homo sapiens
ctctgcccaaccgcacggtcaccctgacttgaaaatactggaaatctgtccggatccaaattattttgcaagccagatgagtaaccagagggcatgaa

SEQ ID NO: 360067 - DNA, 82 bp, Homo sapiens
cccgcgcctgcacttagccccgcgcccgagatgaaggatttgggggcagagcacttggcaggtcatgaaggggtccaacttc

SEQ ID NO: 360068 - DNA, 107 bp, Homo sapiens
ccgccggcggccaagcagccaaccatgctcaacttcggtgcctctctccagcagactgcgatatggctcgtggacagcagaaaattcagtctcagcagaaaaatgcc

SEQ ID NO: 360069 - DNA, 100 bp, Homo sapiens
ggaagatctgatgaatggtgttaaaaaagaaatctccatttctattattgggaaggtgctggagaatctggtaaaagcaccattgtgaagcagatgagga

SEQ ID NO: 360070 - DNA, 97 bp, Homo sapiens
aaaggatgtgaaggtgtttaatgaactatccaagatcacgatgccagttatatttaatgagcctctgagcttcctacagcgcctaactgaatacatg

SEQ ID NO: 360071 - DNA, 99 bp, Homo sapiens
gggatggagcctcagaggtgcagaagagaaaccttgtctgcatcaggggcagaggcctggcctccaggggtttgtcttaaatatgtcgggggagaccaa

SEQ ID NO: 360072 - DNA, 76 bp, Homo sapiens
caaaaacaacatctttccagaaagagtcaaggtgattctggataaatactacttcctctgcgggcagcctctccac

SEQ ID NO: 360073 - DNA, 90 bp, Homo sapiens
gcaggatgaactgaaacggattgccagagaattggcagaagatattctctaagccgctttcatcatgggagaaatagagcagaggccgac

SEQ ID NO: 360074 - DNA, 75 bp, Homo sapiens
ctccgccgctgcctcaggagcggaacaacgtcggcgagcgggctctctattggaggcatcatcattctgaaggat

SEQ ID NO: 360075 - DNA, 95 bp, Homo sapiens
aaaaccacattcatgggacacttctccaggatctgttgacaatggagcaagtgaaagactttgctgctaatgtgtatgaagcttttagtacccct

SEQ ID NO: 360076 - DNA, 98 bp, Homo sapiens
ccaccgcttggacgagccgccgcacatctggagcctgcagacagggggatttgcctgggaaggagaagtagaaaacaacgtgtacagccaggctacag

SEQ ID NO: 360077 - DNA, 100 bp, Homo sapiens
gcaggctccggaggcggcgggacagagcgcctgcgaccccagtcggtgctccggggaggtcacctgacgaggagttcagaatgaccgaagaagcatgccg

SEQ ID NO: 360078 - DNA, 75 bp, Homo sapiens
tcgatctaggttctgcggcacgggatggcggaggcgcctcctgtctcaggttctggccactgcatttgacacgac

SEQ ID NO: 360079 - DNA, 82 bp, Homo sapiens
agcgccagcggccgagcgggcggcttcctggcctgggcgctccggtggcggcggaggccgctacctgtctgaggaacccgag

SEQ ID NO: 360080 - DNA, 100 bp, Homo sapiens
cgcagtggtcgcttcttctccttggtaaatatgcagaggacatttttggagagctctttactcaggcaaatacctttgcctctcgggtaagctcccttgc

SEQ ID NO: 360081 - DNA, 98 bp, Homo sapiens
tacagaaagagtcaacagcagtggcaacaggtcctccaagttacgtgccagcaacagcctttctgcagaatgctggtcaggcccacttgattagccag

SEQ ID NO: 360082 - DNA, 100 bp, Homo sapiens
gtcgtgctggtgatggcctacgggagcctggaaggatttgatgccctggatccctttattcccatcctggtttccaactataacccaaaggaatttgaaa

SEQ ID NO: 360083 - DNA, 99 bp, Homo sapiens
actggtgtctcctgcggaagggcagctgggcacgccttccagaccgaggtgatctgcaactctttcaccatctgtaatgcggagatgcaggaagttggt

SEQ ID NO: 360084 - DNA, 75 bp, Homo sapiens
agacggccaagatcaaggtgaaggagaacattgatgccctggagggcaattgaaggaacagactaaaaatcgtgt

SEQ ID NO: 360085 - DNA, 90 bp, Homo sapiens
ggcggccgtggaaggcgacccggcggctgtggaggccacgctcagctcgccaggcggcgcaggtctgcgggccaggcatcgacatccgca

SEQ ID NO: 360086 - DNA, 76 bp, Homo sapiens
caagaagtttctaggaaaggccggacaccaggctcttgtcaggatggtgaagctgttcatcggaaacctgccccgg

SEQ ID NO: 360087 - DNA, 75 bp, Homo sapiens
tgaggtccactactccctcctgaaaggcctactgaacttgacgcactggtatttggccatctatacaccattctt

SEQ ID NO: 360088 - DNA, 50 bp, Homo sapiens
catgtgcttttgcacatccaatgtgggacctaggaaaaggcctgaagatt

SEQ ID NO: 360089 - DNA, 75 bp, Homo sapiens
gctttggccactttacttcctgccagttagttgcagaagaaggtggatttgcagttgtttgcaaggatagaaaat

SEQ ID NO: 360090 - DNA, 100 bp, Homo sapiens
ctggctgctgtgtcccgcggcttgcgctccgtagtggactccgcgggccttcggcagctggtggatagcgaggtggtcatgctttctgcgcactgggaga

SEQ ID NO: 360091 - DNA, 108 bp, Homo sapiens
agaagacgctttacccgactctttgggccgttatctcacgttatcaatactctggctgaccatcatcatcgtgggactgactttggtggaagtccttggttacatgtc

SEQ ID NO: 360092 - DNA, 75 bp, Homo sapiens
cagaggtcgtggaggtggccgtggaggcagaggtggcatggggtcaaggtcagcatctcctcgacgatcaagatc

SEQ ID NO: 360093 - DNA, 106 bp, Homo sapiens
tgaaaggggtagatcctaacttaatcaacaacctggaaacattctttgaattggattatcccaaacggggatctgatgagcttctttcttctggcatcattaacgg

SEQ ID NO: 360094 - DNA, 74 bp, Homo sapiens
agtgcagctatcaaccagattcttggcagaaggggagatacttcaggggattaccggaagattctgctgaagat

SEQ ID NO: 360095 - DNA, 74 bp, Homo sapiens
tcaccgaccagagcctggacgaggcacaggccagattccaactccacagagtgaccagagagaggacgtggctg

SEQ ID NO: 360096 - DNA, 74 bp, Homo sapiens
ctcggacgacgagaacctcaacaccgagtccccagcagccagatccaggctcctggaagaaccatgtccggcag

SEQ ID NO: 360097 - DNA, 83 bp, Homo sapiens
ttgtcacattctcctgccctggcgctgacaagggtccagcctccgatggttcatcatttacaacccaacagcctcaggcttat

SEQ ID NO: 360098 - DNA, 83 bp, Homo sapiens
tatcatgtcagctcaggccagcagcggctccacctctgtcctccgatggggtgctgttggcccaaaggttgccctgaagcccc

SEQ ID NO: 360099 - DNA, 97 bp, Homo sapiens
gaagacgcggtgggccgcccctccgctgccactgcagagccccgccatggaagacacgccgttggtgatatcgaagcagaagacggaggtggtgtgc

SEQ ID NO: 360100 - DNA, 98 bp, Homo sapiens
caaagcctgaagaccccggagcccctttagccatgtggatacctacggagcacgagaaatacggcgtggacgagccaaactcaggctgtaccttgagc

SEQ ID NO: 360101 - DNA, 75 bp, Homo sapiens
gggaaccctggtcaccgtctcctcaggggcttagggaaggccgagccagcctgggtcaaagaagtcaaaggggct

SEQ ID NO: 360102 - DNA, 83 bp, Homo sapiens
cccagtgcagatcgcccggacgcacacggcgtcctgcctctgcggctctgccccctgcatcctgtgcagctgctgccccgcca

SEQ ID NO: 360103 - DNA, 90 bp, Homo sapiens
gcgcgagggaggacccgacgcgcggcgtttacccagcgcagcgttccaccgctcgggtttggctgggtactccaaagattcaggtttact

SEQ ID NO: 360104 - DNA, 100 bp, Homo sapiens
aggagcggaagaaacagcaggagaaggactccatgaaagatgacagaagaagttattgtgatagccaagtgggactacaccgcccagcaggaccaggagc

SEQ ID NO: 360105 - DNA, 87 bp, Homo sapiens
actgtcttcatctttacagaggaatagtctacaaaggaagacttgtaacctggagaagaggaatccagacgctctgcagtgtcccat

SEQ ID NO: 360106 - DNA, 49 bp, Homo sapiens
ccgccaaccccttcgagcaagacgtgggggttgtagaaggtgatttagc

SEQ ID NO: 360107 - DNA, 83 bp, Homo sapiens
cgctggtctgggagcctgaggacatggagcaggagccagcacagcaggtggagccatcgaagcccccacccacaggctgacag

SEQ ID NO: 360108 - DNA, 75 bp, Homo sapiens
tgcaagactgtcgacctaaagcctgactggggcaagttttttggaccatatacaaacaacactctttttgaaact

SEQ ID NO: 360109 - DNA, 100 bp, Homo sapiens
tgccatgtgagacgtgcctttgaccttctgccatgattgtgaggcctccccagccacgtgaaactttttaacttctagtcatggcgaatgatcgcaggag

SEQ ID NO: 360110 - DNA, 51 bp, Homo sapiens
gctgccagaagatagcgaacgagaactgtgtttatgaaactgtagttttgc

SEQ ID NO: 360111 - DNA, 50 bp, Homo sapiens
tgggggcaggcgggctagaggagcaggtatgtcacaacttgtgcttttgc

SEQ ID NO: 360112 - DNA, 100 bp, Homo sapiens
cagccgcctctttgggttcgtgagatttcatgaagatggcgccaggacgaaggccctactgggcaagggctgatgttgtagtcaccgatcttgaggaatt

SEQ ID NO: 360113 - DNA, 100 bp, Homo sapiens
caggaccatatcgagagcatcagcaaggtggctgaggtggctggcaaggagtacgccatcgagcagtctattatcctcccagtccacaacgctgaaccgt

SEQ ID NO: 360114 - DNA, 96 bp, Homo sapiens
tggagtctcctttggtatccgcaaactctacatgaaaagtctgttaaaaatctttgcgattgtctacatgggctggtgtgaagcccgggagcaaga

SEQ ID NO: 360115 - DNA, 82 bp, Homo sapiens
aggagttatacataagccattttccgaatatacagccctggtacctgacagtgtaaagaaggagctcctacaaagaataaga

SEQ ID NO: 360116 - DNA, 118 bp, Homo sapiens
acatccttgtctgtgaagctaaactcaatgctgctgtgtgggaagaagatttgtaaagaaaactcttagtttgcagtcctgatgtggctcctgacctacgttggcgctctcttcaatg

SEQ ID NO: 360117 - DNA, 100 bp, Homo sapiens
tgctggccgcggcccgcctcagcatctggtacagccgagaccgaggtgatgagttcacatacactggaagcggtggtaaaaatcttgctggtaacaaaag

SEQ ID NO: 360118 - DNA, 83 bp, Homo sapiens
tggggctgctaatgctctgggtctctggaatgggtaccacagaccatgtcatcgtcctggcgtccacgaaccgagctgacatt

SEQ ID NO: 360119 - DNA, 100 bp, Homo sapiens
agacaccgctatcacagctgctgcaatcgcttgggagagctcctgggccacccctcctttcaggtcaaggcccagctgagagccagcctggaggttaccc

SEQ ID NO: 360120 - DNA, 75 bp, Homo sapiens
actgcctccatggaaccttcagcaattgaactcccagattatttgatcttactgaaacaaatgcaggtatcaagt

SEQ ID NO: 360121 - DNA, 100 bp, Homo sapiens
tgaccatcgaaaggagcaagagcaagatcaccgtgacatccgaggtgcctttctccaaaagatgcaatgaacctcattttacttttagtcactgaaaaat

SEQ ID NO: 360122 - DNA, 100 bp, Homo sapiens
ccgagaaccgtcagtttgagccagatgggaaaggtggcccagacagcgtgtatgtcagcttgcaagcatttagccacatccttgatgcaacttttgttgg

SEQ ID NO: 360123 - DNA, 83 bp, Homo sapiens
gttgggactgagctggattttccttttggctattttaaaaggtgctggagaatctggtaaaagcaccattgtgaagcagatga

SEQ ID NO: 360124 - DNA, 100 bp, Homo sapiens
acggcttcaccaacatggcccatgttacccaggtgcaactggagaaggcactgaagccctacgagattcacaccgtcttcggtctcctggggtcggcgcc

SEQ ID NO: 360125 - DNA, 76 bp, Homo sapiens
gtgagtctctacttttatggaatcctgcaaagtgatgcctcagcccccaaatacatcaagatgtttgtactggatg

SEQ ID NO: 360126 - DNA, 98 bp, Homo sapiens
gacagatgtgcgtgaggaggtctctggtcggcctcaccttttgtacctgctacctggcttcttacctcacgaacaagtggagtacgacaaggagttct

SEQ ID NO: 360127 - DNA, 100 bp, Homo sapiens
gagcagttgtctgatgaagagaaggacttcctgatccatttgctaaggtggtggttgatggatctgggcaatgccattctatagatactgtgaagaatat

SEQ ID NO: 360128 - DNA, 100 bp, Homo sapiens
gtccactaagaaaagtccatgtgctggcagcacttccctgagccactctccaggctgctccagtactcaagggaacggattgacttgatgcaaaacatca

SEQ ID NO: 360129 - DNA, 100 bp, Homo sapiens
ctggccaaagcctgcccagacggctcacctgtgcgggatggaacaaaagagtccgatgggtggtccttttattcctgctgctcctgtcaaaactgccttg

SEQ ID NO: 360130 - DNA, 83 bp, Homo sapiens
ccctggatgggggaccacaagatcctcatcgacaggtggagccttttgccagcttgaccgaggccgtgcggagctcagttccc

SEQ ID NO: 360131 - DNA, 88 bp, Homo sapiens
gcgtttaagttggatttccttccagaaatgatggtggatcattgctctttgaattccagtcccgtgttgcagatatcaagaaagtcaa

SEQ ID NO: 360132 - DNA, 74 bp, Homo sapiens
gggcatggtggtctggggcaacgcggaaggcagtgctcggaatgtgaccaggcagggagcagtgacatggaagc

SEQ ID NO: 360133 - DNA, 100 bp, Homo sapiens
ctgaacattggtctaaagtctttccaaaaggtcaaggttcacaagattcagaatggacagtttagaagaacctcagaaaaaagtctttaaggctcgaaaa

SEQ ID NO: 360134 - DNA, 80 bp, Homo sapiens
cacacctggatccaggataacggaggctggaccatggtgaatccgggcagcagctcgcagccgcccccggtgacggccgg

SEQ ID NO: 360135 - DNA, 98 bp, Homo sapiens
gaatttacactgacagaagcagtggtcgaatccagtagaaaactggtcaaggaagcttgggtaattccagaattgattggccataccattgtcactgt

SEQ ID NO: 360136 - DNA, 98 bp, Homo sapiens
tgtgagagccacgtgtgccgcgctctgggcacagccttggaaagtcaggaccgcgacggcagcagagcagtggagtaactaatacggcacaatatcag

SEQ ID NO: 360137 - DNA, 82 bp, Homo sapiens
gtggatgattactacgacaccggcgaggaacttggcagcctttccgctgtgcccattgccattactcctgcaacatatctgg

SEQ ID NO: 360138 - DNA, 74 bp, Homo sapiens
cccagaggccggcgggagctccaggttcacctcctcctcctccaggacacagcttgggctatggctttgtgaac

SEQ ID NO: 360139 - DNA, 82 bp, Homo sapiens
tcatcattaaggacggaggcacggtggtacagaagttggtcctgccctttgggcgactgaactacctgcccctggaacagca

SEQ ID NO: 360140 - DNA, 100 bp, Homo sapiens
gaagcccctgaccattgaagaggtggcccccgccccgtcgggcctcacgagaggtaccagcagaaaggtcccctcgtagacggagtatctcagggaccag

SEQ ID NO: 360141 - DNA, 90 bp, Homo sapiens
gaacagctcataggagagtcatgattttgaatcacccagataaagatttgaacatggaattcaatccttcagatcatcctcgggccagca

SEQ ID NO: 360142 - DNA, 90 bp, Homo sapiens
gcgggacggagcggccggggcctggggctgcctgccgggcggccgggcgcggcgagcccagaatagcctaacatggcagaccagagacag

SEQ ID NO: 360143 - DNA, 75 bp, Homo sapiens
aaccttgtgtctcaatttggctacaaaagagtgctgcagcagctcccagtccagtgctaggaaacattcccccag

SEQ ID NO: 360144 - DNA, 89 bp, Homo sapiens
ggggaaccatggctgccccgagaggtgagacaggcattggcaaatccacgttaatggacactttgttcaacaccaaatttgaaagtgac

SEQ ID NO: 360145 - DNA, 100 bp, Homo sapiens
tccacggccagagccctggatgtcatttggaaaaacactagagacagacggctggcagattgtcctgggtcacataatgccagctgagcgtaaaaagcca

SEQ ID NO: 360146 - DNA, 98 bp, Homo sapiens
gaagaaaatgctttatttttgtggcaggcatctgtgggatctgtaatagaaatggctatagtgctgacatatcaagaacacctcggagtgacttattt

SEQ ID NO: 360147 - DNA, 100 bp, Homo sapiens
ggacatcctggaagctgggaaatggtctgggaggggctgaacgtggtgaagacaggccgagtgatgcttggggagaccaatccagcagattcaaagccag

SEQ ID NO: 360148 - DNA, 83 bp, Homo sapiens
cgaagaggctggactcggattcgttgcctgaggttgcaaattcgtgaagaatcagcatcatgtttggcagctgagtattggag

SEQ ID NO: 360149 - DNA, 60 bp, Homo sapiens
ctaaaaatgattcgggaatatcggcaaatgagcaacaagatatggatttggatatagaat

SEQ ID NO: 360150 - DNA, 95 bp, Homo sapiens
aggattccaagtaactcttatttgctggactgggcagcctttggggtcatgacccttccctccatcggcatccccctgctattgtggtactccag

SEQ ID NO: 360151 - DNA, 87 bp, Homo sapiens
tcctggagctccacagctctgccgctaaatgcttctacaactgtcccttcagaattgcccaggagtcgatagcagcagttggtgacg

SEQ ID NO: 360152 - DNA, 95 bp, Homo sapiens
ccagagaagaatgaggcctttctggccaaggcagaggcttcctcaggagaccatcccactgacacagagatgaaggaggagcagaagagcaacac

SEQ ID NO: 360153 - DNA, 74 bp, Homo sapiens
ctcggattcttcaaaaacttcacctgaaggcaatgaatcgctccctggctaatgtgattcttggaggctatggc

SEQ ID NO: 360154 - DNA, 90 bp, Homo sapiens
ctttttggtggcatggtcctcaagaagttcctaaaagggaaatcctcattgacgattcaatttgttgaaggccaatttgtggactcctac

SEQ ID NO: 360155 - DNA, 87 bp, Homo sapiens
agtggattaaaatctcccaagaggaatgacaaacaaccagctcttcaggtgatgatgaacagtctacacagatggctgcaagttggg

SEQ ID NO: 360156 - DNA, 100 bp, Homo sapiens
caaaaatggagttccacttctccccgcagacctagtcaggatggctaaaggtgaccccaagaaaccaaagggcaagatgtccgcttatgccttctttgtg

SEQ ID NO: 360157 - DNA, 75 bp, Homo sapiens
catgaacgcccctccagccttcgagtcgttcttgctcttcgagggcgagaagtacaggtttgcagattccgccag

SEQ ID NO: 360158 - DNA, 75 bp, Homo sapiens
ctcccagaactctctgtcttggcacaacagaactacaaatgcccttctggctgcaggatgaaagggttgattgat

SEQ ID NO: 360159 - DNA, 98 bp, Homo sapiens
cggggtgtaataatgttaactgagccaactgggtacatggaaaactcagtctcctacagcgcaattgaagacgttcagctgctgtcctgggagaatgc

SEQ ID NO: 360160 - DNA, 75 bp, Homo sapiens
ggaaagcttgcagaagattatgccagtgaggctgagaatagagtacctgcaggctgggacaatgaaaagaaaata

SEQ ID NO: 360161 - DNA, 82 bp, Homo sapiens
agccctttgtgactgcaatctcgagatcagtcgcatcgaatacattcattcaaagaacttcatccaccgggatgtgaagcca

SEQ ID NO: 360162 - DNA, 83 bp, Homo sapiens
aatccgagaagagcagagcggagggagccccagacacgggtttccaggcctgaggtgcccgccctggccccaggagaatgaac

SEQ ID NO: 360163 - DNA, 90 bp, Homo sapiens
aatatttttccagggatataacagtccactttggaaagaagatttctcaggtacaggtgaacaaaggcagagtaaactgtcaccccagat

SEQ ID NO: 360164 - DNA, 74 bp, Homo sapiens
ggaagaccatcatccccctgatctctcagtgcacccagagaaaagtctcagaaagctatccaggatgaaatccg

SEQ ID NO: 360165 - DNA, 82 bp, Homo sapiens
caggaagatactgcagagatattctactccatctcattcattgtacagcgggagatacagatgacccaccaagaattactca

SEQ ID NO: 360166 - DNA, 100 bp, Homo sapiens
agaagtcccaggataatgttatcaaagtccaggttcacactagaaggccaaaacttccgcaaacatctgatgatgaaaagaaagatttttgagactgcag

SEQ ID NO: 360167 - DNA, 82 bp, Homo sapiens
acggctgaacgcagcccgccctccccaagtcgacgccgcaacccggggaaagcagtccctgtgggccttgctcagagcggag

SEQ ID NO: 360168 - DNA, 96 bp, Homo sapiens
gccatttattgatgaaattttgaacaacattaacactattatttgtgatcttcagcctcaacaggtatgcccaagaggacagagaacgaatgcaca

SEQ ID NO: 360169 - DNA, 50 bp, Homo sapiens
ctttcaacgggactattatgatagagttgatctctctaatgtattagatc

SEQ ID NO: 360170 - DNA, 82 bp, Homo sapiens
attaaaccagagtagattaattatcagtatatgtgaaatcatgtccactgatcaaggtggagattctggacgcaaagacaag

SEQ ID NO: 360171 - DNA, 97 bp, Homo sapiens
cagatgcgggccctgctggaccagctcatgggcacggctcgggacggacacattcagctaacgtattttagcaggtggagtgaggttgaagattcct

SEQ ID NO: 360172 - DNA, 90 bp, Homo sapiens
aactgaaaaaccccttggaaatagtcagcatacctgggtgaaaatcctatttataagagtgccgtaacaactgtggtcaatccgaagtat

SEQ ID NO: 360173 - DNA, 75 bp, Homo sapiens
ccttcaccgccgacttcaagaagagcttggggcttccttggtcgcacccaccacctgcctgcccactggtcagcc

SEQ ID NO: 360174 - DNA, 100 bp, Homo sapiens
agttccttcccaatggcaactatgtttggatgttggatctacactttctcaagcactgtgatcttcaaatgacctgagagtcagtatactaagactgccc

SEQ ID NO: 360175 - DNA, 75 bp, Homo sapiens
tttttgagaaggataacattgccagatgacttcaaacctgcttctattgacacttcttctgaaggataccttgag

SEQ ID NO: 360176 - DNA, 50 bp, Homo sapiens
ctttgttccctgcagccctcccacgagggaagtctcaggttgccctgaag

SEQ ID NO: 360177 - DNA, 75 bp, Homo sapiens
aatgacatcaaggatgtggggcagatgctgatgggcaaactagaagggaacttgccgaaaacttaggtgtgactg

SEQ ID NO: 360178 - DNA, 78 bp, Homo sapiens
aagccctttttgtgccaggtgtcccgttaacgtctctgttagttcagagatgtttcagaaagaacaagtggatcctct

SEQ ID NO: 360179 - DNA, 82 bp, Homo sapiens
tacaagtccagacccaggagagcaaggcccagaaagagggccaatactcccatttggttttactggcggcatttgattgtat

SEQ ID NO: 360180 - DNA, 83 bp, Homo sapiens
ctgcgggagactgagcacttgctgcacgacctgcctagagctggaacgttacctccagagcgagccctgctatgtttcagcct

SEQ ID NO: 360181 - DNA, 75 bp, Homo sapiens
cgccctgcagagaccagcggagccacagttttcaatggttccagcaggtcaacacgggagaaggaacctgttcaa

SEQ ID NO: 360182 - DNA, 100 bp, Homo sapiens
gcaaatccagacagaacctttgacttggtgttgaaagtgaaatgtcatgcctctgaaaatgaaggaaaatgtttataggaggccttagctgggacactac

SEQ ID NO: 360183 - DNA, 75 bp, Homo sapiens
tccagaaagtagtcgcagtgaagccagccgaatactagctgaacccaaagtgcagcctggtgtagccatgcagga

SEQ ID NO: 360184 - DNA, 98 bp, Homo sapiens
aggaggcttcattttagaagaggaagaagaagaagaacagaaaattggaaaagttgttcatcaaccaggaaacagatgatttgaagagagctgagagt

SEQ ID NO: 360185 - DNA, 82 bp, Homo sapiens
tcacctcttggtgttccctccagatctggtggcagagcagtttacactgatggatgcggtcccgcagcccccggaagccaat

SEQ ID NO: 360186 - DNA, 75 bp, Homo sapiens
gagcaagcccaggcacagccgacgccgcgggatcactttggatgtattagttgagatggggcacaaggagctgaa

SEQ ID NO: 360187 - DNA, 74 bp, Homo sapiens
tcagtctcccaaagtgctggaattacagggcaaagccttctagacaagctcagtggaatctgaagggcccaccc

SEQ ID NO: 360188 - DNA, 83 bp, Homo sapiens
ccaatccgcatgagcgtcctttcggacttgacacagcaagcaaaagacatacagaacataacagtccaggaaaccaacaaaaa

SEQ ID NO: 360189 - DNA, 50 bp, Homo sapiens
gattgaactcagagaagccggggaactagaagatcttctgccatctagac

SEQ ID NO: 360190 - DNA, 101 bp, Homo sapiens
tgacagccagtgagaagaatgagtataaaggatgggttttaactacagacccagtctctgccaaacagtacaatgtagattataaactggagacttacttg

SEQ ID NO: 360191 - DNA, 129 bp, Homo sapiens
ccgcaatggacaagctgaagaaggtgctgagcgggcaggacacggaggaccggagcggcctgtccgagatggaggagatgtataagaaagctcatgctgctatacgagagaatccagtctatgaaaaga

SEQ ID NO: 360192 - DNA, 82 bp, Homo sapiens
cacaccgtcttcggtctcctggggtcggcgccgagtgggaggatggcggaaggccgcctgggcagaatgtcacgatggacga

SEQ ID NO: 360193 - DNA, 82 bp, Homo sapiens
gggtaaccgagagatggtatatgactgcactagctcttcctttgatggcagcagccgctcttctaaaacattcaaaccaaag

SEQ ID NO: 360194 - DNA, 82 bp, Homo sapiens
tagacgctggatttttttcgggtagtggaaaaccagcacaggaagtcctggagaacctgaaggaccgctggtaccaggcgga

SEQ ID NO: 360195 - DNA, 50 bp, Homo sapiens
acctgcagctggcgcctctgcagtgggggcaccgcgtccgtgctgcagcg

SEQ ID NO: 360196 - DNA, 74 bp, Homo sapiens
aaataccaagcccgagaagacggaggaggactcagaggagctgatggtgagaccattctaaaaggcctccagtc

SEQ ID NO: 360197 - DNA, 100 bp, Homo sapiens
agccagggagccggagagatcgcgcgcctgccgccgccggagcctgcgagccgagaccgttgattcttcaccacactgaaaccattaggaaaaatccttg

SEQ ID NO: 360198 - DNA, 75 bp, Homo sapiens
ggtttcagagagctccctggaccatctaatggctatgggagatgggtatttgaagtataccatacaactgttttg

SEQ ID NO: 360199 - DNA, 97 bp, Homo sapiens
attaagagttatgtgaattatgtgctaagtgaaaaatcatcaacctttctaatgaagtctcacaccattttgctggtacagcctaccaagaggccag

SEQ ID NO: 360200 - DNA, 97 bp, Homo sapiens
gaccggttcgtcgcctccttgcccgtgaccgtcgctagaactcagttgtgcgttgcggccagtcgccactgctcttagaccatgctcagcctccaag

SEQ ID NO: 360201 - DNA, 50 bp, Homo sapiens
cgagctgcaattgcccagaaaaagagtctcccgtcctcggagaggatgaa

SEQ ID NO: 360202 - DNA, 76 bp, Homo sapiens
cacaccccggacatccgcgccacacacccgtgaccaaggtgtagactaagaagtggagtcatgcttcacacggcca

SEQ ID NO: 360203 - DNA, 100 bp, Homo sapiens
gaagcaaccgcccattcagtctacggctggggccgtcccagttcgcaatgagaaaggaacagcatatgccatatatgagctggctgtggcttcatttccc

SEQ ID NO: 360204 - DNA, 74 bp, Homo sapiens
ctgtgacgaaggtgctaccatcgtgagagtaaggccagctgcgggccgtccagcggctgtgccacttctacagc

SEQ ID NO: 360205 - DNA, 75 bp, Homo sapiens
aaagaaatgtttcactctgctctgctactatgatcccaattcaggagccaaggcaaagagggaccactgtgctca

SEQ ID NO: 360206 - DNA, 100 bp, Homo sapiens
caggaaaagccgttgagaggaccatcacaacctgagcagcacagttttcggctttgtgagaaaccttaccatcaaacacgatggccagcaacgttaccaa

SEQ ID NO: 360207 - DNA, 100 bp, Homo sapiens
ttttgacaactatgcagtcacagttatgattggtggagaaccatatactcttggactttttgatactgcagggtgactctggaggacccctcaactgccc

SEQ ID NO: 360208 - DNA, 80 bp, Homo sapiens
gggagagactggaccagaccatgggcctgagcatcagatctgactgcagccatgagcagcaatgagtgcttcaagtgtgg

SEQ ID NO: 360209 - DNA, 97 bp, Homo sapiens
aagcctgcccagacggctcacctgtgcgggatggaacaaaagattcctgctccaaaacgaggagaaatagtaagacagattggcgatgccttgcggg

SEQ ID NO: 360210 - DNA, 83 bp, Homo sapiens
ccaactggacagcggagcacgatgattgatagggcagcgaggtcacaggccccacctttgctgatggcgagctcatccccagg

SEQ ID NO: 360211 - DNA, 50 bp, Homo sapiens
gatgaggaaagctgtgaaagttctcaagcaacatggccaatctttcctaa

SEQ ID NO: 360212 - DNA, 51 bp, Homo sapiens
cttgccctgtctcctcgcagatgaggatcaagtcttccataccagggacca

SEQ ID NO: 360213 - DNA, 97 bp, Homo sapiens
tcaagtccctgatggcctcagaggaggaggtgaacacccaccacctacactcctccagtgacgatgaggacgaccggctcaaggagttcaacttccc

SEQ ID NO: 360214 - DNA, 98 bp, Homo sapiens
atggaattccactgagtggtaatggatgatgcagttcaaataactaaggaatatttttcaagatgtcttacacagagacactctagtgaaagccttcc

SEQ ID NO: 360215 - DNA, 50 bp, Homo sapiens
gcgcaaccaagtgttgcctggtgagcatggaaataaccagcctgcaagaa

SEQ ID NO: 360216 - DNA, 75 bp, Homo sapiens
cctacgcggttgaagagcctagcgacgaggagccggctttgagcaggttcagcctggagaaggaaataaagctgc

SEQ ID NO: 360217 - DNA, 99 bp, Homo sapiens
ttctggccgccgatatcttcgccatcgccagcatcgccaacccggactggatcaacaccggggagtctgcggacattgttgaaataccccattaaccac

SEQ ID NO: 360218 - DNA, 103 bp, Homo sapiens
aggcccagaggtccgtgcggcagcagctccagagctttgtcaaagagacaatctctatgggaagcagaaggcaaggaccccggtcattttaggtagaaacaac

SEQ ID NO: 360219 - DNA, 100 bp, Homo sapiens
ttgccactgacattgcagagctgtgggctgtgttccacaagttcaaaggcacagcttcttcaaccaagcggagcacttctacaggtaataaagaatccag

SEQ ID NO: 360220 - DNA, 100 bp, Homo sapiens
ccctgcgctccaagtccatgacagctgagctcgaggaacttgttgttgagatcatgacctcttctggaatggtgttctcagaagtccttggacaatcagg

SEQ ID NO: 360221 - DNA, 75 bp, Homo sapiens
gcccggccaagaggcaaaggggaggttacgcagcaaaccatccagaagggcaccatgccggtggaaaggatgcgc

SEQ ID NO: 360222 - DNA, 100 bp, Homo sapiens
tttgtttcattgaagaaatagttaaggatgtgatcttcgtggtggaaagctaaattttaaaaccaccccaatggatgcagacagtgatgttgcattggac

SEQ ID NO: 360223 - DNA, 96 bp, Homo sapiens
gtttgggcctccacgaggagacaccagaaacttctcggcttccgaagatcttctcaaggaacactacgttgacctgaaggaccgtccattctttgc

SEQ ID NO: 360224 - DNA, 100 bp, Homo sapiens
gagggcatggatatctctactcgctccaaagagcagtgtcgggcactccagatccaaggggtgaaagagaatatggaccagaacaaggccacgctggccc

SEQ ID NO: 360225 - DNA, 83 bp, Homo sapiens
caaaaagatgaagccaccaaaaatccctttcatgcccttattgcttaaagcctactttggggataaaggattatttggtcttc

SEQ ID NO: 360226 - DNA, 98 bp, Homo sapiens
gacgactcgctgtaccccatcgcggtgctcatagacgaactccgcaatgaggacgttcaggtcattcagtggtgcacccaccacaaggatgaccctcc

SEQ ID NO: 360227 - DNA, 100 bp, Homo sapiens
acgcaaagatattcaaactctaaaccatctgaattggctcaatgatgagcttatttcaacaattccaactagccgtttaaaattcctcaaagaagctggt

SEQ ID NO: 360228 - DNA, 82 bp, Homo sapiens
aaaggaagacttgtaacctggagaagagaaatctgacccggtcgtctcgtaccgcgagacggtcagtgaagagtcgaacgtg

SEQ ID NO: 360229 - DNA, 100 bp, Homo sapiens
caaggatatcagctaccctctgcacttccccctgtcatgaaacagcaaccagttgctatttctagcgcaccagcatttgaatgcaaggccagaaactgtc

SEQ ID NO: 360230 - DNA, 98 bp, Homo sapiens
cgctatggcgcactggagtaccctgttcctggcaggttattttggagctgttggagcactccttgagctgttgaagatcccgtgatcattacctgggg

SEQ ID NO: 360231 - DNA, 75 bp, Homo sapiens
acgtccgttcgagctctgactgcagacctaccaaaacaggacagagcgggatgccaccagcttgtccaaagggaa

SEQ ID NO: 360232 - DNA, 98 bp, Homo sapiens
atggctactatttcaccaatctgaatcttccacaatctgtaattgaaaatgttggaggaaaaatttttacatttggatcttacagattaggagtgcat

SEQ ID NO: 360233 - DNA, 75 bp, Homo sapiens
cctgcctgggcagagactactaagcggaaaacatcttcagatgctgtcaccactgactaaagaagagaaaactgc

SEQ ID NO: 360234 - DNA, 90 bp, Homo sapiens
cgaaaacaggcactggaccacttcaatgcagatgggtctgaggcctctaagaaatatgtctccaaagaacttgccaaagagattcgtgtc

SEQ ID NO: 360235 - DNA, 97 bp, Homo sapiens
tggggtccagccgtccccagaacgcagatcagaggtagtcggacctttcccgctggcgcgcagcctcagctaggccaagtgcagtggctcactcctg

SEQ ID NO: 360236 - DNA, 133 bp, Homo sapiens
atgatgaaagactgtaaacacccaaatattgttgcttattttggaagctatctcagatgcttgctttaaatcgagtaacagcatcgcacccatttatgactgccgtagatctaatggaagcaagccaactgtg

SEQ ID NO: 360237 - DNA, 88 bp, Homo sapiens
ccaataactcagtcactggctgcaacaggaccacagtcaagacgatcatagtcactgatgaaggactcgctcatcaaccttcagaacg

SEQ ID NO: 360238 - DNA, 100 bp, Homo sapiens
aacaggaggatcaatttgatttgacagtcggtataactgatcctgagaagataggctacctcggacctgaacagctgcctgactgcctgaaaggttgtga

SEQ ID NO: 360239 - DNA, 75 bp, Homo sapiens
gaaaatgactgcagcatagcacgactgaacaagcgcagcttttctccatggaatccttctgtacatgatgaagcc

SEQ ID NO: 360240 - DNA, 98 bp, Homo sapiens
gggctcccgcctccccggccacgcgagcgggaacagtctcctccactcggagcgattctggaacttttcaaagcctgactctcttcttgaaacagtgg

SEQ ID NO: 360241 - DNA, 100 bp, Homo sapiens
gtcatagctcactgcagcctcgaactcctggcctccagtgatccttctgcctcagcctcccaaggagcgaggaccacagagcatatcatgtcccgagtgg

SEQ ID NO: 360242 - DNA, 83 bp, Homo sapiens
tggacatctcgttccctcccagaaagaatcttcaagagggagacatagggaaaaggaagacataaaaatcactaaggaaagaa

SEQ ID NO: 360243 - DNA, 109 bp, Homo sapiens
tttactggacacaactgagaaatacctctacagagatgtgatgctggagaactacatgaacctggcctctgtgggccgagtgtactacttcaaccacatcactaacgcc

SEQ ID NO: 360244 - DNA, 80 bp, Homo sapiens
attatgaatctcaggaacaccaccttctgtcaggcaatagccctctggaacaagacaattcatgtgagataagaaagaag

SEQ ID NO: 360245 - DNA, 100 bp, Homo sapiens
cctgtatgagagggatgaggacaacaaccttctgactgagaagcagaagctgcgggtggctgagctggaggctcaggcagcttcagaggtgacccccacc

SEQ ID NO: 360246 - DNA, 82 bp, Homo sapiens
cttcaccaaataatagctgtttgtattttggctgctgcaggagccattttagatcgaagcggatttccgattgaatggtgag

SEQ ID NO: 360247 - DNA, 75 bp, Homo sapiens
cggacatcaacgaggcctacgtggagacgctgaaggaatactcccccagttgcaagaggcgcaggaccgtggaag

SEQ ID NO: 360248 - DNA, 75 bp, Homo sapiens
aaagttagattctatggaaagttctgagacatcttgtagagtgctacagcctgctgtcgaggccttctttctggt

SEQ ID NO: 360249 - DNA, 101 bp, Homo sapiens
cggcgggcggcgggcggcaaaggagcagccatgagggccgggcccagtcaccgaccccgacatcggcctggctgcctggggacgcaaggccctggacattg

SEQ ID NO: 360250 - DNA, 75 bp, Homo sapiens
ctcgatcttgggacccaccgctgccctcagctccgagtccagggcgagattgacgagatgcctgaggctgccgtg

SEQ ID NO: 360251 - DNA, 101 bp, Homo sapiens
ggcagcagcactgagagcagccgcgacgcgggcgacatggagtccaatgggaaatacatcaccaaatctggaacccgtgtggaccaccagacaggccccat

SEQ ID NO: 360252 - DNA, 100 bp, Homo sapiens
aaagcgtcaaactcaccaaaaacaacatctttccagaaagaggttctgccattactgcaatagccacatctgtgtgtcacggcccaccctgtcgccagct

SEQ ID NO: 360253 - DNA, 100 bp, Homo sapiens
cctagagctattcagagcctgaaaaaaatagtcaatagtgctcagactggtagcttcaaacagctcacagttaagtgcacgtggtgattgctacccctgg

SEQ ID NO: 360254 - DNA, 99 bp, Homo sapiens
cttcggaaagactgttccaaaaacagtggataattttgtggccttagctacaggagaggaattgaatgatctggcacgggaccctccagcacagtgttc

SEQ ID NO: 360255 - DNA, 100 bp, Homo sapiens
gaaggaacaaagtctactgtgcatccagcaagtctccagcttgtacctcatatcagatgactccgcaagggcacagggcccctcccaagatcaacccaga

SEQ ID NO: 360256 - DNA, 100 bp, Homo sapiens
tggaggataagcaggaccagatgataccatgaagagaagtttacaggccctctattgccaactgttaaattggcagtatggagttactcaggccttccct

SEQ ID NO: 360257 - DNA, 75 bp, Homo sapiens
cgcagggggacggggaccagcagctgtcgccgccgctctcaggccagaagcggactcctagaagaggggagcagc

SEQ ID NO: 360258 - DNA, 90 bp, Homo sapiens
agcagattgccaacattgaccgtattacaaatgacctggacagaaataatatcaccaggatcaccaagatggacttcgctgggctcaaga

SEQ ID NO: 360259 - DNA, 75 bp, Homo sapiens
cgcaccctccgagacctcctgagggaacagcactgcaaagagtgatgaccagatcctggaatggtgtggggagga

SEQ ID NO: 360260 - DNA, 75 bp, Homo sapiens
tgaatgccagccaccagccatgggctctgtggatagcaactggatcgtgggtgccacgctggagaagaagctccc

SEQ ID NO: 360261 - DNA, 100 bp, Homo sapiens
gaaagtcctctcgggagaagcagcgcctgttcccggggcagatccaggttcaggaactttatattgctgttggaatatctggagccatccaacatttagc

SEQ ID NO: 360262 - DNA, 82 bp, Homo sapiens
ttgctttcttctctggcagctgcaaacgggcgctgacctcaaccagcaggctctttcaagtgagtcatttgagagacttcca

SEQ ID NO: 360263 - DNA, 100 bp, Homo sapiens
aatcaagttcatgacggatggtgtgctgcttaaagaaatccagaaggtcatcaagagagagggcacaggtacagagatgcccatgattggggaccgagtc

SEQ ID NO: 360264 - DNA, 100 bp, Homo sapiens
ggacgcagaacgccgacggcttctccacctacgtgtgcctggtgctgctggtggccaacattttgcggatactcttctgacagagtcttgctctgtcacc

SEQ ID NO: 360265 - DNA, 100 bp, Homo sapiens
ccacaggatgtccggcgggaggcaggaggtgaccaaaagccagccccactgtgagttgaactctttcgtgttgaccggccactctccgtgctctggatga

SEQ ID NO: 360266 - DNA, 100 bp, Homo sapiens
cgttccggaggcccggccacctctgagaagggagacgacgctgctgggtccgctgagcggggcgacccgagctcagagtcaagatctccactgaagttgg

SEQ ID NO: 360267 - DNA, 74 bp, Homo sapiens
ctttgcctcatcccaggttgccttggaaaatgccaacgccgtgtctgaagtctctggatggtcgtcagatccgt

SEQ ID NO: 360268 - DNA, 60 bp, Homo sapiens
ctggcgctctggctgtgctgcgcgacccccgcgcatggcataatcaccagcaacacccgg

SEQ ID NO: 360269 - DNA, 99 bp, Homo sapiens
caaaagccttgtgcagctttgtcaccgaggacgaggtcgagtggatgagacaaggtggagccgccaccaaaatgcagattttcgtgaaaacccttacgg

SEQ ID NO: 360270 - DNA, 75 bp, Homo sapiens
tgcagtcaactcctggaccactagtgaagagagaagggcacagttacctaagtatcaacgtaatcttcctcggcc

SEQ ID NO: 360271 - DNA, 90 bp, Homo sapiens
gcgccggcgccggcgccgcggcctcttcggctgcggaccctgccattccggaggagggtttgtggatgcacttagatgtttgcaatgagc

SEQ ID NO: 360272 - DNA, 75 bp, Homo sapiens
tgccccgcaggcaccttcgggccctcctgccttcagacgagttgtactgctgtcacaggaaatggacgctggatt

SEQ ID NO: 360273 - DNA, 85 bp, Homo sapiens
gcccgtgccgcgagcgcggcctgcaggagcttcggaaccaaaaagaagcttcccagagccggggccaggagccccaagcgccctc

SEQ ID NO: 360274 - DNA, 100 bp, Homo sapiens
cccgcactgcccagcaccttccgctcagtcctcggcgcccgcctgccgcctccggagcgcctgtgtgggtgttatgaagcggagattgaggagatagatg

SEQ ID NO: 360275 - DNA, 100 bp, Homo sapiens
gacctgctttgccctgggaaatagtaaccctgccaaatacatcagcttgtaggagacagagtgacatctggtccttgggttgcatcctgtatgaactctg

SEQ ID NO: 360276 - DNA, 89 bp, Homo sapiens
taaggattccaagtaactcttatttggacaccatgtaaaattgaacctagtataaaccacatcctaagcaccagaaagcctggaaagga

SEQ ID NO: 360277 - DNA, 100 bp, Homo sapiens
gtttggattccagatttgtattcgatagaccactgcctgtgtctcgtcttgtatctctaattggaagcactctgtgacctgcctgctgcctccctcaacg

SEQ ID NO: 360278 - DNA, 75 bp, Homo sapiens
ggcacagctacagcgagggcctcggccatccaagggtctcccaggatgaaacaggcgcctatttaatcgacagag

SEQ ID NO: 360279 - DNA, 97 bp, Homo sapiens
tgattaccggctggatgcagacgatgtcttcgatcttctaaaggaatacaggagtttccagaaaatataaaaaattgtaaagttttgacaattgtgg

SEQ ID NO: 360280 - DNA, 100 bp, Homo sapiens
tttcaggctcatcgagaggtaccagggcagggcgatgtagacctggaatttgttttcgtctgttcagtagactccgattccagaatatgttggaatttca

SEQ ID NO: 360281 - DNA, 75 bp, Homo sapiens
agatcttcgagttcaaagagaccctcggaacatcaggatcctcatgaccagccaaagagaagaagaattaggaag

SEQ ID NO: 360282 - DNA, 100 bp, Homo sapiens
aaaacttggatccactggccagtgattcacgaaaacgcaaattgccatgtgatactccaggacaagggtggtctgtttttctggggggccaccaacacct

SEQ ID NO: 360283 - DNA, 98 bp, Homo sapiens
attcaagaactggaggaaaaggtcgcctctttgctgcaccaggtgtcctggagacagactcagtcggctgtcaaatcactgaagcgacccctcgaggc

SEQ ID NO: 360284 - DNA, 130 bp, Homo sapiens
aatggttatgaatatgaagagagcactaaaaatcaagcaacaaaagagcaacaggaacttttaatgaaaatgcttgcggctgggcggggagcgtcggaccagaagagaatcacgccaggaaagcgacccg

SEQ ID NO: 360285 - DNA, 82 bp, Homo sapiens
tcgcctcacagtgggggtgtacgagtcggccaagttgatgaatgtatcgcaccccctccctccctggcggagcccctgaagg

SEQ ID NO: 360286 - DNA, 98 bp, Homo sapiens
cttgtgtcctaccatggtatttgctaacgtttagagagtgcttccccttgccgagcactggcacctggctgcagtggaagaaagaaagatcaagtccc

SEQ ID NO: 360287 - DNA, 90 bp, Homo sapiens
gaagttcttccttgaagaaatacagcttggtgaagagttactagctcaagtatagagcaaatgctggccgccaacccaggcaagaccccg

SEQ ID NO: 360288 - DNA, 75 bp, Homo sapiens
gtcacatcgccctgctgggctttgagaagcgcttcgtacccagccagcactatctgtggacatcggaaaaccagg

SEQ ID NO: 360289 - DNA, 87 bp, Homo sapiens
gggcggacgagcacgaacacacgagcctggcccaactagagaatctgtgcaaacagctgtatgaaaccacagacacaaccactcgac

SEQ ID NO: 360290 - DNA, 75 bp, Homo sapiens
agcatcctgacacggaagccgcgttgagagcggtctcagttgtcgagatgtccacagaaggaggatttggtggta

SEQ ID NO: 360291 - DNA, 83 bp, Homo sapiens
cggttagcccgtcagtccctgctctgtgcgcgcctccatctgggccatggatggatttttcgaaagaaagcagtggaacttgg

SEQ ID NO: 360292 - DNA, 101 bp, Homo sapiens
ggcccaggcctcggactccgcggccggcccggcgcggcccagcgccctcagggggggccctcagcctcttggccttgaacgggctgttcatcttgattcac

SEQ ID NO: 360293 - DNA, 75 bp, Homo sapiens
gcttttcgcaagaacaagactctcggctatggagtccccatgttgtctgaaccggacggcttttctcatttccac

SEQ ID NO: 360294 - DNA, 50 bp, Homo sapiens
tcagcttccacagcgtgtctggctgctctttggcgtaaattgcaatcgat

SEQ ID NO: 360295 - DNA, 98 bp, Homo sapiens
cacagttattaatggactgcttggaaatatagaaaatttgagaagcaatgggcatcctgaagctgcaagtatttctcattgtgctctctgttgcattg

SEQ ID NO: 360296 - DNA, 83 bp, Homo sapiens
catcaagtacctgctgcttggcttcaacctgctcttctggacgcccagcggcagcaggatgagtgcggaggcaagcgcccggc

SEQ ID NO: 360297 - DNA, 100 bp, Homo sapiens
caaagacaaggtcatttcactgcctgagctgaagggctgcctgggtgttagcaaagaagcctgcctgctccaggctgagctggtaaactatgaacgagtc

SEQ ID NO: 360298 - DNA, 136 bp, Homo sapiens
gcggtggcggcgctgccgcctgaagtgcgggcgcagctggcggagctggagctggagctctcggaggtgccggtggtggtgtgcacattgagccccggtatagacagttcccccagctgaccagatcccaggtgtt

SEQ ID NO: 360299 - DNA, 104 bp, Homo sapiens
caaggcctgagtagccggtaacaaacgagggttcccgggattggaccgacgcagccatgttcatcaatggtgctaaggaaatttgctatgctcttcgagctgag

SEQ ID NO: 360300 - DNA, 83 bp, Homo sapiens
cagcgaccttcgctttcgtggggaagccggactgcgccgtgtcttcctgaagaaggctgggttttcggctttgtgagaaacct

SEQ ID NO: 360301 - DNA, 50 bp, Homo sapiens
cgaaccttctagttgcttattgcagggcgaactttctgaccaagtataca

SEQ ID NO: 360302 - DNA, 82 bp, Homo sapiens
gtccaatctgagcgtgctgcggacggcgctgcggtacatccagcacaggaagtcctggagaacctgaaggaccgctggtacc

SEQ ID NO: 360303 - DNA, 100 bp, Homo sapiens
agaaactagagcaacaatgtcagaaagaagccaaggaatttgccaagaaggtacaagagctgcagaaaagcaatcaggggcaatgaaaactattctaggt

SEQ ID NO: 360304 - DNA, 97 bp, Homo sapiens
gacatcgacgccgcctggcaggccctgcgcaccagcctcctgacaaggtgatccgggcgggccccgcaggaattttatcccctcaccggcctcacac

SEQ ID NO: 360305 - DNA, 90 bp, Homo sapiens
gcgctctcggccgccgccgcctctgcgtgggccggccgggagggcctcgggggactgactgcttcctgcctgacacagctcacttcaaga

SEQ ID NO: 360306 - DNA, 73 bp, Homo sapiens
cttagttggagctttgtctatcttcttccttaggaaaccattttggaaaatatgtcccatggagcacattctg

SEQ ID NO: 360307 - DNA, 74 bp, Homo sapiens
atcatggaaatcacagcacctgattcccaaggcaagacagtgtggttttatgtaggcatggcaggtgccttttg

SEQ ID NO: 360308 - DNA, 83 bp, Homo sapiens
ctggatgtcaagcattgtgcatagttttcttcgattgttgcaacatcccttgcgagatttatgtgatcagtttggctgaaccc

SEQ ID NO: 360309 - DNA, 75 bp, Homo sapiens
cacgcagcccggcgggaggataaagaccaccacgggtgcttcaaggatgaccgcatcgtcttctggacttggatg

SEQ ID NO: 360310 - DNA, 100 bp, Homo sapiens
tttgaaaggtgtactgcaaggaacaaaatgtttgtaaattctccttttaccaagggaagcccgtcagcctgagctacagatgcccatgccgattcttcga

SEQ ID NO: 360311 - DNA, 74 bp, Homo sapiens
cctcgctgaaggccaagctcctccgcagcctgaactctttgcttccggaatccgggattgttgctgacatagaa

SEQ ID NO: 360312 - DNA, 75 bp, Homo sapiens
agactatgaccgcaagagggacagaggtatgatgtggaactcttccagcgcatagaacacttaattgggaagaaa

SEQ ID NO: 360313 - DNA, 100 bp, Homo sapiens
cagagctacttttcaacagccttctcaattttctttctcagaaagcagaggctcagagcttggagacagacgcggacaaggcaaaatctcagcaagttcg

SEQ ID NO: 360314 - DNA, 141 bp, Homo sapiens
ttcaacagggcttcaatcaaggttataagaaaggtgcagaagtcattttaaactatggacgactccgaggaacattgagaggagaggagacgccgtgagcgggacgaccagatgtaccgagagcggctgcgcaccttgctg

SEQ ID NO: 360315 - DNA, 100 bp, Homo sapiens
ccgggacaccgcacagccgggaaatgattactctagtttgatgtcataatttctcatggagttaaaactggactcttcaaaatgatagagttgtctgaat

SEQ ID NO: 360316 - DNA, 75 bp, Homo sapiens
atacagccaccaaaatgaaggatgtacaaacatccacaccagggaaaggaaaacctcttcagcgcaaggtgaaac

SEQ ID NO: 360317 - DNA, 100 bp, Homo sapiens
atttctccaccaaattctcagcctgataaggccttgttagatgacttggataaagaactaaacaactacattatgcgatgtagagaatggtatggctggc

SEQ ID NO: 360318 - DNA, 90 bp, Homo sapiens
cttgcttggaattctgcccactctgcggagttagcagtcacgacctccagcacaggctgtatcgcatccattgaatactgtgaccgagga

SEQ ID NO: 360319 - DNA, 51 bp, Homo sapiens
gagaatggcatgtgcaaagatacagaggacgactgggtttggattcagaag

SEQ ID NO: 360320 - DNA, 75 bp, Homo sapiens
cttacactgaaactgtcaaccatcactacttgctctttcaagacacagatttggacagagcgggatgccaccagc

SEQ ID NO: 360321 - DNA, 107 bp, Homo sapiens
tgatgcagatgcccctcctccaccagaggactgggaggagcatgtcaacagatctattaatgagatgaagcggttggaagaaatgtcaaatatgtttcagagctctg

SEQ ID NO: 360322 - DNA, 88 bp, Homo sapiens
tgcagtggcgcctaaagtctgagagagggaagtcgcctctgtgctcgtgagtgcatggggtataagtctgcgctcctcagaccaccgg

SEQ ID NO: 360323 - DNA, 83 bp, Homo sapiens
ggacagttcgctacacagcaatgcatcgagactctaaaatagagctcaagcttgagaagagagaaccactaaagggcagagca

SEQ ID NO: 360324 - DNA, 83 bp, Homo sapiens
gaaaatgtccacccccatcgaagtgttgtgtaaaggctacccttcgccgtgccgtccctgcagtgacaccgaggtgctcctag

SEQ ID NO: 360325 - DNA, 74 bp, Homo sapiens
gccagtgtttccgtcagtacgcgaaggatatcggtttcattaaggatcccggctactcaacagaaatgaaggag

SEQ ID NO: 360326 - DNA, 100 bp, Homo sapiens
cttaaaataattgggcagaagagaagcagtgaaggagtgcagaggcatcacctgaaaggtgctgcggctgttgaacctgatgtggctgcccaagcctccg

SEQ ID NO: 360327 - DNA, 97 bp, Homo sapiens
gctacacaaagagggtcatctcttctattgtacctgcagattcccagaaaatctaagctggcagttcataggaatatcagagacgacgaaggcttca

SEQ ID NO: 360328 - DNA, 50 bp, Homo sapiens
gccattgcgagcggcatctacctactggaagtgcccaccgcgtgccccga

SEQ ID NO: 360329 - DNA, 50 bp, Homo sapiens
agtacattctcaggtggagacctatgtcctgcggtttgacaacacctaca

SEQ ID NO: 360330 - DNA, 100 bp, Homo sapiens
cctgcctccagctgccaggggggacagccagccagcagcaggaggatatgttgatgatgtgatcagccgcattgacaggatgtttcctgaaatgtccatc

SEQ ID NO: 360331 - DNA, 102 bp, Homo sapiens
tttggttacctatgtacctgttaccactttcaaaagtgctggatattagaccttcgtcagacacatagaccagtggaacagaatagagaacccagaaattag

SEQ ID NO: 360332 - DNA, 100 bp, Homo sapiens
cagcaaggaaataggatttaaccgctctctgcctcccagtttcatgatcaacatgggagactcccacgtggacaccagctccaccgtgtccgaggcggtg

SEQ ID NO: 360333 - DNA, 82 bp, Homo sapiens
aaccctgtaaaaccagccttagactatttttcaaacagctttggcagctcaagtacatctgggtttaacttcagcaatcctg

SEQ ID NO: 360334 - DNA, 100 bp, Homo sapiens
aaagaaattccacccagtatttcaagagtcacttctttacttggtgcaggaaggcagtctttgctacgtacagcaaaagctcaactacagaacacctaca

SEQ ID NO: 360335 - DNA, 100 bp, Homo sapiens
tgcccggccaagaggcaaaggggaggttacgcagcaaaccatccagaaggaacttgctactaccagcaccatgccctaccaatatccagcactgaccccg

SEQ ID NO: 360336 - DNA, 51 bp, Homo sapiens
cagcaaatgcattccacgtgtatcagtcgagcaaaagatgtgataatacca

SEQ ID NO: 360337 - DNA, 83 bp, Homo sapiens
ccggtgctgcggctgttgccatgtccgcaccgggacgatcatcctggggacctggtacatggcttacattcagaaagtggagg

SEQ ID NO: 360338 - DNA, 75 bp, Homo sapiens
gcaatttatgtttccaggaacaccacttcatccagtgctgatgtagcccagcagttccagtatgctgtgcgggtg

SEQ ID NO: 360339 - DNA, 101 bp, Homo sapiens
tcacatattcaaacctgtatctgtgcaggcaatgtgcctgccccctgtcatggctcagaacctctccatacctctggcttttgcctgtctcctacatttag

SEQ ID NO: 360340 - DNA, 75 bp, Homo sapiens
aaactgactttgcagccacggagagtatatttgccttccctccatgatctccaacactatccgataaagtagaag

SEQ ID NO: 360341 - DNA, 75 bp, Homo sapiens
gagcgactgcccgctcaacgagaaccagacaggatgactgagggacgtggctgcctctgggggcaccagcacctt

SEQ ID NO: 360342 - DNA, 100 bp, Homo sapiens
caggattctacagatatatgcaaaaattccaacagaatgggtttcctgaaacggatttgcaggaattcctgaaggaatgcagtagcaaagaagagtatca

SEQ ID NO: 360343 - DNA, 83 bp, Homo sapiens
agaacggatgatttatctggtgacagaatatgctagtggaggggaaatatttgacttatctaaaaacagactggttgaagttc

SEQ ID NO: 360344 - DNA, 75 bp, Homo sapiens
gctccaaatatccgttgaagcaggaatgtatcctgtcaggtataatgtcagtgaatggcaagaaagttcttcata

SEQ ID NO: 360345 - DNA, 96 bp, Homo sapiens
gtagcattcaagacttcaaactggaccggagtaggccctatgatacttttaacttgcactcgttggagaactccttaatggatatgataaggactg

SEQ ID NO: 360346 - DNA, 101 bp, Homo sapiens
atggagagaatttcactatattcagcagagtgacaaagacctcgatgatgccttggataaactctctgacagtctaggacaaaggcagcctgacccagatg

SEQ ID NO: 360347 - DNA, 82 bp, Homo sapiens
ccagcttggagaaccaccgcatcaagagcttcaagaacaagggccgcgatgtggaagtcatcatcagatttgaaatatttaa

SEQ ID NO: 360348 - DNA, 100 bp, Homo sapiens
tggttatagatggacaagagacgatcattctgcaagcaggcaacctgaatacagtgaccatctttccaccgtagaaaaggacacaaatggagaagttctg

SEQ ID NO: 360349 - DNA, 98 bp, Homo sapiens
tgagatgtggagttacgcagcaaagctcttagccccccacgacgtaaagcctttaagaaatggacacctcctcggtcaccttttaatctcgttcaaga

SEQ ID NO: 360350 - DNA, 98 bp, Homo sapiens
gggaggcaaggcctgacaggctgaagtcacctggaaggggaccgagaccgagatctcactcagcagacagcagcagcccgggagcctgagctcaggag

SEQ ID NO: 360351 - DNA, 83 bp, Homo sapiens
cagaagaccaagtacctgcagatcctgacctctctgatgagatggatcggcggctatgagaggttttcctccgagtacccaga

SEQ ID NO: 360352 - DNA, 51 bp, Homo sapiens
gcaaagtgaacacaacgtgtgccaagagtgcctggaagagctgggatgtct

SEQ ID NO: 360353 - DNA, 51 bp, Homo sapiens
cgggctgaagcgactgagtccgcgatggagtacataccgagcatcaaatat

SEQ ID NO: 360354 - DNA, 100 bp, Homo sapiens
cctgcgtttcctggatgctcttaaagttggccacggacagagcgaaggggagaggatggtagtgtctgacttccacgttttcgtcagggatgtgttgcag

SEQ ID NO: 360355 - DNA, 75 bp, Homo sapiens
tgtcacaaaagcggatgttgaaaaggtgctggagaatctggtaaaagcaccattgtgaagcagatgaggatcctg

SEQ ID NO: 360356 - DNA, 98 bp, Homo sapiens
ggaggcagcggctggaggagcggacgggccccgcggggcccgagggcaaggagcaggtctccatcatcaccagttccagtagtgaaaaacagaaccca

SEQ ID NO: 360357 - DNA, 80 bp, Homo sapiens
gacccgaaagccgctgggaaaagtattgacctgatggacatggcttcggacatcctgcagcccaaaggagatgatgtggc

SEQ ID NO: 360358 - DNA, 98 bp, Homo sapiens
tccagcaccctcatcgccctggccgacaagcacgcaattaccagatgtatgctactcatggtgggtcctggcttccctaaagataattggaagacttc

SEQ ID NO: 360359 - DNA, 51 bp, Homo sapiens
tggtacacactcagttaattaatctgaccaaactagagtcagaacgaatac

SEQ ID NO: 360360 - DNA, 96 bp, Homo sapiens
cgggacaggaagtggccgtagcggcttgttggataaggggatgttcgtctaaccccagaagactttgctagagctcagaagtactgcaaatatgct

SEQ ID NO: 360361 - DNA, 94 bp, Homo sapiens
cgagcggggctctgtggctgctcctggctctgcgcaccggtcacaccgacaaatctgaagcgggtttgccaggggagtgtacccgtctccccag

SEQ ID NO: 360362 - DNA, 48 bp, Homo sapiens
ttcggatggtgaactcattagaacacaggagaaaacgacgctccacac

SEQ ID NO: 360363 - DNA, 99 bp, Homo sapiens
acggcgacgacgggggaatgtggcgctggatccggcagcagctggtcattaatagcatctgggctctatggctacaatgccaccctggtgggagtactc

SEQ ID NO: 360364 - DNA, 75 bp, Homo sapiens
agcactgactttcagctatggaatcggttaaacccatccagagtaatggctgcggccttacccaggaccctgggg

SEQ ID NO: 360365 - DNA, 50 bp, Homo sapiens
taaccgtccagataggatagacaagatccaagtattttagaacatgctca

SEQ ID NO: 360366 - DNA, 97 bp, Homo sapiens
gcaatcgagttgagtacttggatagacttatacctcagagctctgattatacaaaaccaggagacattgaccctacatcagtagcaagtcccaaaga

SEQ ID NO: 360367 - DNA, 100 bp, Homo sapiens
gatatgatccgcaagttggaacaaggagaagagctatggacacagagaatttttccaagttacagctacctagttgctgagagatggatgttaaaaatca

SEQ ID NO: 360368 - DNA, 90 bp, Homo sapiens
tccgcggccctgctgagagggaaaaggacgccgcggtcttcccaggcgtcgcggagagcagtaagactttgaccccgacgcaggcttcag

SEQ ID NO: 360369 - DNA, 73 bp, Homo sapiens
ccaaataagctatatactttggttacctatgtacctgttaccactttcaaaacaataagagctaactgccatc

SEQ ID NO: 360370 - DNA, 75 bp, Homo sapiens
ctttggcttgccaggaaaacagcacctcctccgagtagcctatcaggatcccagcagtggctgcacctccaagac

SEQ ID NO: 360371 - DNA, 74 bp, Homo sapiens
gcagtggtcgcttcttctccttgaggaagaaaagtatgcctttgtcaactggataaacaaagccctggaaaatg

SEQ ID NO: 360372 - DNA, 96 bp, Homo sapiens
cgcgggcagtggccggacgctgaagcccaggagagcgatggagacgtatgcggaggttggtgttcgaggaagagacattgttgttcttggtgtgga

SEQ ID NO: 360373 - DNA, 90 bp, Homo sapiens
atccaatcccgagtgctctacttgaggtgcatgaatacctcagaagtaaactctgttcactgtatgaaaatgactgcatatttgacaaat

SEQ ID NO: 360374 - DNA, 89 bp, Homo sapiens
atcgatgggcggcggaaaatagcctttgccatcactgccattaagggtgatgctggtttgactggacgcaaaatcattgtggacactta

SEQ ID NO: 360375 - DNA, 100 bp, Homo sapiens
tcaagacacgtctggagcaggagatcgccacctaccgcagcctgctcgagggccaggacgccaagagaggagagccagagaagtgacagggaagctacag

SEQ ID NO: 360376 - DNA, 97 bp, Homo sapiens
cctggacattaaacaccactgcgcagccatcacccctggccgcgggcgtcacctcctggcattggagcagagcaagactttctataagccagattgg

SEQ ID NO: 360377 - DNA, 100 bp, Homo sapiens
accaacaatgtctcagcctttcagccttaccaagcaacaagtgaaattgaggtcacaccttcagtccttcgagcaagttctgactaataagaagacgacc

SEQ ID NO: 360378 - DNA, 75 bp, Homo sapiens
cgaaccccaactttgtccgctgcatcatccccaaccacgagaagaaggcctggagctgctgaagactgctattgg

SEQ ID NO: 360379 - DNA, 100 bp, Homo sapiens
agagccgtgatatgttccagttgcacatttcctgcaaggactccaaagtggtgagggcaattgaaggaacagactaaaaatcgtgtcctggaaggaaact

SEQ ID NO: 360380 - DNA, 83 bp, Homo sapiens
gactacagtggtctcgaatatggcatgtgattggagatcacttcaataagtgcaaacttggatgaggaggcacaggctggtac

SEQ ID NO: 360381 - DNA, 84 bp, Homo sapiens
gcgacgacttactggcttcatgacaatgcagatcttcgtgaagactctgactggtaagaccatcaccctcgaggttgagcccag

SEQ ID NO: 360382 - DNA, 97 bp, Homo sapiens
gtgactgatgacgaagggaacaggctaagtcatgaagatattcgagaagaagttgacaccttcatgtttgaggaggctttcgagctacccttggatg

SEQ ID NO: 360383 - DNA, 98 bp, Homo sapiens
aaatggcgaagatcgccaagactcacgaagggttccaacctcacagacatctgcactcagctcctcctgcaagggactttgttaaagatctctgcggg

SEQ ID NO: 360384 - DNA, 100 bp, Homo sapiens
cttctcaggtctcccaaggaacaggttcccctgttcctaaaattcatggaagtagttttgtaacatctactgtcaaggttgctccttgagggcaggacag

SEQ ID NO: 360385 - DNA, 75 bp, Homo sapiens
aggatggttctgaggacaagttctacagccacaagaaaaaaggaacccagccagccggcggaatgcaagcagcag

SEQ ID NO: 360386 - DNA, 90 bp, Homo sapiens
ggctagtggtataccaggaaattctgttctactcgtcacaaatctcaatcctgatggaaaatggagctgatagtatcctggatcttggat

SEQ ID NO: 360387 - DNA, 82 bp, Homo sapiens
ggaccaaaggcctgtgtgctgcagaacccccagaccatcatggcgtgatggtgggcatgggtcagaaggattcctatgtggg

SEQ ID NO: 360388 - DNA, 50 bp, Homo sapiens
gtttccacgactttctgggagactcgttggattagcagcatgccaaattg

SEQ ID NO: 360389 - DNA, 50 bp, Homo sapiens
ctggaattggcaacatctctgagagtgcctccggagccagcgtggtggcc

SEQ ID NO: 360390 - DNA, 100 bp, Homo sapiens
gaagctggttttcaggccacaaatgctttcacaggtcaccctgctgattgccttcatctgtgtgcggagctccctgtggaccaactacagcgcctacagc

SEQ ID NO: 360391 - DNA, 75 bp, Homo sapiens
cggacgcctccctcagccagggcaagactaaggagctgggcctgtgattggaattgaaacagtacaactgcctcc

SEQ ID NO: 360392 - DNA, 104 bp, Homo sapiens
aaagttttgcagatcttcaacaagaggacccaggagaaattcgccctcaaatgtactaatggtcacttgatgtgcgctggctgttttatccacctactagcaga

SEQ ID NO: 360393 - DNA, 100 bp, Homo sapiens
aagtagaaaaatgggtgaagcaaatgataaaccgcaataaggtcgtcaaggtgacagcaccagaagcccaagcaaagatatgattgacaatctgctgtcc

SEQ ID NO: 360394 - DNA, 110 bp, Homo sapiens
gttgcgatggcgcagaaaccccgttgacaaggcactgctttttcatgacggattttttatcaagcagaaatgcatcgaacaacgagaatcaagatcactgagctaaatcc

SEQ ID NO: 360395 - DNA, 101 bp, Homo sapiens
gcggtggcggcctggggcggcgcgacggctggtgcgcagactggagttccatagactttctgaagaaaacactttgttgaaaaacgatctgggaagggttc

SEQ ID NO: 360396 - DNA, 75 bp, Homo sapiens
tttgtgcttgcctgcgtccccagactcagaggttgctgcagcaactggtcacacagtagtgttggtagaccagac

SEQ ID NO: 360397 - DNA, 80 bp, Homo sapiens
ttcctcaactggtagcacgccggctaaacccactgtggaaaaattgagggcttctgtatgtaatgtactgttgacttgct

SEQ ID NO: 360398 - DNA, 75 bp, Homo sapiens
gatgccacatctgaccttggataccatggtgatggatgtggacacactgtactaggccctgagagtggaaccctt

SEQ ID NO: 360399 - DNA, 82 bp, Homo sapiens
taagcggcgtggtagcgaaggtcgccgaacccgcctggctagccggcgagttgagtggcgacggacaaggcaaaatctcagc

SEQ ID NO: 360400 - DNA, 100 bp, Homo sapiens
gcttgcctgctccgctgaccagccgcgccgacccggaaaaggccgtgcaagcaactccgatccaatatccgagaaattgagaaactttgtttgaaagtcc

SEQ ID NO: 360401 - DNA, 104 bp, Homo sapiens
tggacattcaggaattctcctgccaccgcgtggtgcttgccgcagccagcaactatttcagaaaatgcttggacagaagagatgagtactatttccactaaggc

SEQ ID NO: 360402 - DNA, 83 bp, Homo sapiens
cttggactgagtcctgcaggacacagaacaccttccaccatgaccacctcagcaagttcccacttaaataaaggcatcaagca

SEQ ID NO: 360403 - DNA, 100 bp, Homo sapiens
aaaatcagtcagaaactctgaattggctatcaaatgccataaaagaatttggtttttctgggccttcctggatgctctgcagaaccaggctgaggccagc

SEQ ID NO: 360404 - DNA, 82 bp, Homo sapiens
tccaatcttccagccgcctggctccctgccttggtttttcagaagaagtgaagtcaagatgaagaaccatttgcttttctgg

SEQ ID NO: 360405 - DNA, 83 bp, Homo sapiens
ggtcacagtaaggccaaaaatgtgcatactcacagagttagagagagggatggtgggaggaaatcaaacagctacagtgattg

SEQ ID NO: 360406 - DNA, 96 bp, Homo sapiens
aagagacaaccataaagagaaagctagtgaatgggaaaatggtagcggagcctggctcaacccgtcagtgattcaagtaagactcaaggtcctgta

SEQ ID NO: 360407 - DNA, 75 bp, Homo sapiens
gaaaaacggagagcagctcttgaaaggtaccttgtggtctataatcctttagaacaagaccgaatctcgttggtc

SEQ ID NO: 360408 - DNA, 83 bp, Homo sapiens
cgcagggggacggggaccagcagctgtcgccgccgctctcaggcagtgaggtcactcaaggagacaatcgaagactgttggga

SEQ ID NO: 360409 - DNA, 75 bp, Homo sapiens
cttagcaaggctgtcatcacacaagaagatccatcgcagagtcctaaagaagaacccactgaaaaacttgagaat

SEQ ID NO: 360410 - DNA, 70 bp, Homo sapiens
aaatcgatatgtaaacatcttgccttgaagaggtgaaaaacttcatcacccgagagaacctggaggcacg

SEQ ID NO: 360411 - DNA, 100 bp, Homo sapiens
gctccaccgtgctgcttgcctcctgggaaagaggatcaccgtcatccacagcaaggactgtttcctcaaaggaagcagtcaattatagatttcttcaaac

SEQ ID NO: 360412 - DNA, 100 bp, Homo sapiens
tggaaggggtcctcagagttactgggtgggtaattccagaattgattggccataccattgtcactgtattactgctcatgtcattgcactggttcatctt

SEQ ID NO: 360413 - DNA, 88 bp, Homo sapiens
tcagcctcttcagatccaaccaggtctgcttgcccagattacataccggttacggcacctccttcgtgcaaggtgtgatgcatcccca

SEQ ID NO: 360414 - DNA, 100 bp, Homo sapiens
ggatccgcggggagaccttgggcatcatcggacttggttagtggttacttggatgattgtacctgtgatgttgaaaccattgatagatttaataactaca

SEQ ID NO: 360415 - DNA, 100 bp, Homo sapiens
attaactacccttgcagatctattccggccacccattgatttgatgcataaaggcagctttgaaacagtggtcaagaagaatacgtcttatcttatgaac

SEQ ID NO: 360416 - DNA, 83 bp, Homo sapiens
ttccggtattaccaagagctgtccaattgcatttgtgtcttttggacttctctgagcggcttgcagccctgagtgatcgagag

SEQ ID NO: 360417 - DNA, 50 bp, Homo sapiens
tccctgctgcataagaccttgtcagaggccaaagcctcactgtttcaatt

SEQ ID NO: 360418 - DNA, 98 bp, Homo sapiens
tgagctttacatgcacttgaacagactagaaattgcaccacagatatatgggttgaggattccagtgctggggaagacagtgttcatgacaggtttat

SEQ ID NO: 360419 - DNA, 83 bp, Homo sapiens
cccgattcaccaacgagccctagcttgtggaatatacccgtgctgatggcacagttggccgaagagtgaagccctacatcatt

SEQ ID NO: 360420 - DNA, 120 bp, Homo sapiens
gcagatgacaaaacttcaagccaaacatcaagcagaatgtgatttgcttgaagatatgaggaggatgagtctccactcggcgccccatatgttagaaacaccccgcagttcaccaagcct

SEQ ID NO: 360421 - DNA, 94 bp, Homo sapiens
ttttgtggctgacaaagacacagtgctgctggagttttatgctccatggttactgaagctaaaggagatgtttaactccaagtttggatctatt

SEQ ID NO: 360422 - DNA, 83 bp, Homo sapiens
aggaaagtctgtcctctgaagacaacagccagagtgtccaggaagagctgaagaaggctgtctgtccccagaccccagagcac

SEQ ID NO: 360423 - DNA, 82 bp, Homo sapiens
gttgcgggcaccgcagtcgccgtgaagatggcgtctaccagccggtgttggagagcacaatggctgaacaagtccttcctca

SEQ ID NO: 360424 - DNA, 82 bp, Homo sapiens
ctcagttggaagcagccgatccagcctgcggagcctgtggggcaggtgaacctgagcaaggtgggcgagtattggtggaacg

SEQ ID NO: 360425 - DNA, 50 bp, Homo sapiens
cctgttttctgggagcttcgaaggacaactacacctttgcccaacctggg

SEQ ID NO: 360426 - DNA, 100 bp, Homo sapiens
aaagtgatttctggttttgtgaagggcagaaattacgaagttaggccagaggaaactctgatgaggaagaaagtgcttcagaatctgaactttggaaggg

SEQ ID NO: 360427 - DNA, 100 bp, Homo sapiens
cctgggcccaactgtgaccgatttaaactgcacataccatatgctggagagacattaaagttgaaacaaagagtcctcttcgtggaaaagaaaaaaatac

SEQ ID NO: 360428 - DNA, 100 bp, Homo sapiens
ctgcaaccccgcagagcgcatccatcaaagctttgcgcaacgccaacctcaggcgagatgacttaattcagtgcacaaatgagatgaatgtgaacatccc

SEQ ID NO: 360429 - DNA, 50 bp, Homo sapiens
gctggtcagccagttccgctcctgtcaggctttaccgccagcacctgttc

SEQ ID NO: 360430 - DNA, 99 bp, Homo sapiens
caaggaaccagggcccctgcaatgtgaagccaaaccactagacgtgctatgggaagagggcaaggcagccttggagcagctgcttaagttcatggtgca

SEQ ID NO: 360431 - DNA, 100 bp, Homo sapiens
ctccaagcccccctcgcctatgccttcagacatcaccagccagattctgtttctggcgtctgcatacgcaagtccccaactcgctgaggagagctgttca

SEQ ID NO: 360432 - DNA, 51 bp, Homo sapiens
cttacctctttgaatctgaaggtttagtggcagaaatctgaagctatcatg

SEQ ID NO: 360433 - DNA, 90 bp, Homo sapiens
cttcaaccaggaggttttccgagacaacaacggcaccgcgatgaggacggggacttggttgccttttccagtgacgaggaattgacaatg

SEQ ID NO: 360434 - DNA, 49 bp, Homo sapiens
aaggaatagtcccattagcaaagagatgggattttgccatgttgcccag

SEQ ID NO: 360435 - DNA, 100 bp, Homo sapiens
gaataagtgttttaagaaagtggacaaagagaggagtcaggtacttggaaaaatggacaaggattgtgaaatgaaacgcaccacactggacagccctttg

SEQ ID NO: 360436 - DNA, 98 bp, Homo sapiens
gttctagagcagggatcagcaaacttgctgtaaagagccagtggacatttgggagcaataaaaataagaagaaaggaaaagccagaaaaatagagaag

SEQ ID NO: 360437 - DNA, 96 bp, Homo sapiens
gattttcccacaatcactgccaaaattactgctgtcaatcaagtggaataaacttgaggatgttgctcaggaatggaagttggatacactttgtga

SEQ ID NO: 360438 - DNA, 90 bp, Homo sapiens
attatccagggtgggctggacgcagatctccgggccacctgccttgaaggtggcccatcccctgcacccctgcaccccaaacgcagcccg

SEQ ID NO: 360439 - DNA, 74 bp, Homo sapiens
ctcagctgacatatgaaggactcattgatgaaatttatggcattcagaacactgcacagcctcacagagatttt

SEQ ID NO: 360440 - DNA, 90 bp, Homo sapiens
ggacaaaattgagaagaactcataaacttggcttcctcgcttctgctcctcagaaaaccagaactgatggctctatttgcagtctttcag

SEQ ID NO: 360441 - DNA, 75 bp, Homo sapiens
cctctcaagtcaaagcagcaggaagataccacaatcagaccctccggttggtcaaagtcactctgtacggatctc

SEQ ID NO: 360442 - DNA, 90 bp, Homo sapiens
tagaagatgacgaagacatgacacttacaagatggacagggatgataattgggcctccaagaagcgaaaagctgttgctatatgatacag

SEQ ID NO: 360443 - DNA, 100 bp, Homo sapiens
aactgattaccgaggagatgtaaattaaaatagctggctgtaattttccaggtgacaaaatatctgaacagaagaggacttaggagagatctgaactcca

SEQ ID NO: 360444 - DNA, 100 bp, Homo sapiens
cgccagcaacgtgcagaagaagctcacccgcgcgcaggagaaggtgaaagaacttgtcctggacaacagtcggtcgaatgaaggcaaactcgaaggcctc

SEQ ID NO: 360445 - DNA, 100 bp, Homo sapiens
cgggagggggccctgagcctcctgcaacacctgcggcctcactgggacccccaggaggtgaccctgcaggttatgaagacagtatggagtttccagacca

SEQ ID NO: 360446 - DNA, 97 bp, Homo sapiens
gtttactccatgcagttgtcaggagtatgcctgtggcatcaaagccgaggtggtggggaagccttctcctgagtttttcaagtctgccctgcaagcg

SEQ ID NO: 360447 - DNA, 137 bp, Homo sapiens
ccaagtcctacagtcgacagtcctcttcttctgacacagatttgagtttgacacccaaaactgggaatagcatttcaaggttcagtggaggagaaccccaagagcaccaaaatggaaagatgatttgtaaagctgag

SEQ ID NO: 360448 - DNA, 50 bp, Homo sapiens
gacccaatcatgagcactgctttaataggagctcagagttctacagagtc

SEQ ID NO: 360449 - DNA, 100 bp, Homo sapiens
acagggcaaagaaaatgggactggttgaccaactggtggaacccctgggaacgtcaaggtcgtgggaaataaaaggcagttctacacagactgcagcaac

SEQ ID NO: 360450 - DNA, 83 bp, Homo sapiens
gagtgggagcaccaggatctcgggctcggaacgagactgcacggagaatgcagttgaaactaattttgtggatagagaaactg

SEQ ID NO: 360451 - DNA, 120 bp, Homo sapiens
gaaatcactgacacaaaaagttcaagctggtgcctatcctacagaaaagttttcggctttgtgagaaaccttaccatcaaacacgatggccagcaacgttaccaacaagacagatcctcg

SEQ ID NO: 360452 - DNA, 96 bp, Homo sapiens
tgagcgccggcgcgaggacagcgcgtgcccgcgaggagccgccgcgcgcccgcgccctccgcgcgacgccagctggacggactcatccaccgcttc

SEQ ID NO: 360453 - DNA, 101 bp, Homo sapiens
cggcgggagcccaggagcctgccccgccctggggacgaagagctgcagctcctcctgtgcgggtatcgagaaccttccctgcgaacttcagaggaacttcc

SEQ ID NO: 360454 - DNA, 100 bp, Homo sapiens
caacatgagccaagtgctgttccaccaactagtcccgttgcaggtgaaatgcaaagactgtgaggagagacctagaggatcaagacataatgggagcatt

SEQ ID NO: 360455 - DNA, 82 bp, Homo sapiens
ctgccttttgtgggctactcctactcctgcatggccctcagatacagccttttcctccctctccatgaactctggaaacagt

SEQ ID NO: 360456 - DNA, 74 bp, Homo sapiens
tcttcctagagaagcgtttgcacaagatgcgctgcctgaccacgcctatgctgctgcgggccctggcccaggct

SEQ ID NO: 360457 - DNA, 83 bp, Homo sapiens
ctcctcccagtgacgggtctggagtgcgtgggggaccggctgttggcggtcaccttcaggccattcagaggaggaaagagagg

SEQ ID NO: 360458 - DNA, 74 bp, Homo sapiens
tgaatgtgttactccattgctgaggagtgtttaatagaaaatggtcagcttgaaattgtgacaggtggctgggt

SEQ ID NO: 360459 - DNA, 85 bp, Homo sapiens
tctgggatgtgaggagcgcctctgcccggccgcgaccctgtctgggaggaaacttcatggtgttatggtcaacttgccgcacaac

SEQ ID NO: 360460 - DNA, 99 bp, Homo sapiens
ttcgggacacacagaaatataaacctttcaagagtcaagtaaagatcgccacatcacagaatcgtatctatctcacagctgacaaccttgtgctgaacc

SEQ ID NO: 360461 - DNA, 98 bp, Homo sapiens
ccacttcgagtcctttattgtggagtgtaaagaaagaatgaggcctgttaaagcagctttgaaacaacttgataggcctgagaaaggcctttcagaaa

SEQ ID NO: 360462 - DNA, 48 bp, Homo sapiens
gtgcgaggctgcccttctcactcaggctgtgctcctgtgtctgctgga

SEQ ID NO: 360463 - DNA, 100 bp, Homo sapiens
gtataccagagctgcaaatatgttcaagatggctaaaaattggagtgctcgaatatgagactcaaattaagaagatgctatgctcaaaagatagcctggg

SEQ ID NO: 360464 - DNA, 82 bp, Homo sapiens
cgagttgaactgaagaaacgagtggatgactatgtcagaagacatttgatgacagtcatgtccctttccagggacctcaagg

SEQ ID NO: 360465 - DNA, 142 bp, Homo sapiens
ctggcattttcgttgacccggacgaggaggagtctgctctgcggagatcatggggacagcctcccaagctgaaggaaggatggaggagatgtataagaaagctcatgctgctatacgagagaatccagtctatgaaaagaag

SEQ ID NO: 360466 - DNA, 88 bp, Homo sapiens
caccatacaggaacagggcagacgttagcgtgagtgatcactctcaatcccggtctattgcgtctgcagacatggatttcaaccagct

SEQ ID NO: 360467 - DNA, 50 bp, Homo sapiens
ctggaccatctaatggctatgggagatgaccagcatctcagacatgtcga

SEQ ID NO: 360468 - DNA, 100 bp, Homo sapiens
ttaaggattccaagtaactcttatttgatgaagacactgaggctcagagaggttaagtgactcagccaaggtcaaacagctagtaagtggtggagccagg

SEQ ID NO: 360469 - DNA, 82 bp, Homo sapiens
tccaaggaagaatttcctctgaagcaccgagatcctgaaggagctagacgagtgctacgagcgcttcagtcgcgagacagac

SEQ ID NO: 360470 - DNA, 101 bp, Homo sapiens
gatcattccagaagctgctaagcagaattgcaagggacaagtggccacactccctcaggtggagagtatagtgaagatgatgtaaatgaattagtgaagga

SEQ ID NO: 360471 - DNA, 75 bp, Homo sapiens
tattccctggggatggcgcatcacacaccaaaggactggactcgggccatatccgtggtgccgtcaacatgcctt

SEQ ID NO: 360472 - DNA, 100 bp, Homo sapiens
ttgagaattggtgtaagacatcacaatcccattattcagagcgcgtatggagtggaaacgcttgtagggcttcaccagatggagtctcgctctgtctccc

SEQ ID NO: 360473 - DNA, 98 bp, Homo sapiens
cctacagaaacaaaatgtcaacaaattgatggagccctaatttgtttagaactgtaatatgcacagttaaaacaacttgtcctctcaggaccttttgc

SEQ ID NO: 360474 - DNA, 100 bp, Homo sapiens
aaaatggtggagtctgggaaggatttggagatttttcccccacagatgttcatagacaagttcttggtgagattcaggaaattgtgaaaacagggctttg

SEQ ID NO: 360475 - DNA, 83 bp, Homo sapiens
cgcagcatgaacccccgccggcgggcagcctcctgtacagcccgccgcccctgcaggattatatctgtccaagatgcgagtct

SEQ ID NO: 360476 - DNA, 74 bp, Homo sapiens
ggagcagttcatgcagcacctctacccacaggatccagttcactatcctagccttgcagacaagtatgaaagtg

SEQ ID NO: 360477 - DNA, 83 bp, Homo sapiens
cctccccagcaaatcgagaaaaacctcagcgacctgatcgacctgcatttttgaaacgttggggttgttggagtggttggatt

SEQ ID NO: 360478 - DNA, 83 bp, Homo sapiens
caaggaaatgctatacttgaaaagatgtcatgtggcctgtgttttggaccgtggttcgtacctatgctccttatgtcacattc

SEQ ID NO: 360479 - DNA, 100 bp, Homo sapiens
cggacggcgtggaccacatagacatttacgcggatgtcggcgaagagttcaaccaggttggtgttcgaggaagagacattgttgttcttggtgtggagaa

SEQ ID NO: 360480 - DNA, 100 bp, Homo sapiens
ccacgaaaatttcaagacacctcctgggggctgcaggggcggccaagtctccccagcgccaggtgcccccggccacacgttttcggctttgtgagaaacc

SEQ ID NO: 360481 - DNA, 98 bp, Homo sapiens
tcgggggacaggaatcagcacttcctctgcgggagatcatccgtcggctggagggcagaagagatgaaagtctgaaagtggatgagcatctggccaaa

SEQ ID NO: 360482 - DNA, 75 bp, Homo sapiens
ccaagttcctgtctttctactgcaagagcccagtacccctcagaccagagaatgcccggtggttctgggaagcgt

SEQ ID NO: 360483 - DNA, 100 bp, Homo sapiens
ttcagttcattggggttaaggagatctacagaccagtcacggaactcaaagttggcattcccgtcacggatgagaatgggaaccgcttgggggagtcggc

SEQ ID NO: 360484 - DNA, 136 bp, Homo sapiens
cgcgccgggcctcaggctccttcctactgtccgagggccaccaggccgccgggggcctgctgcgcccggtgacccaggaggctctcacgtggagtccccagaacagcatcaactcctcacgatgctcctgacggtg

SEQ ID NO: 360485 - DNA, 86 bp, Homo sapiens
gaagctttggatcagacttttgtgttgcagttcggttggaatcgaagcctcttaaaatggcagatgacttggacttcgagacagga

SEQ ID NO: 360486 - DNA, 100 bp, Homo sapiens
ttgtgaaacgtgtttcaagaccaaaaaacacaataccaggcatacatttggcagaataaatgaaccagtcactattccaggtcctcaggatatagccgtg

SEQ ID NO: 360487 - DNA, 100 bp, Homo sapiens
agcctcaagggcttcagcaccgcgcccatggcagagccagaccggaaatgtttcaacgtgcgcaagcgttgcggcggcgggcagaggactactacagatg

SEQ ID NO: 360488 - DNA, 100 bp, Homo sapiens
ggcaaagactactgcatcctctacaacccgcagtgggcccatcttccgcacgacctcagcaaggcaatcctgtggatgtcctgaaggccctgggtgtgca

SEQ ID NO: 360489 - DNA, 83 bp, Homo sapiens
cctgaaggagttccaccaggccgggaagcccatcgggtcttgaggaccggcccagctcaggctcctggggcagcggcgaccag

SEQ ID NO: 360490 - DNA, 100 bp, Homo sapiens
catccacgcacctgcagctctgctgagagagtgcaagccgtggggatatctatagagaaatggggtttggtcactatgaagaagaagaaagctgttggga

SEQ ID NO: 360491 - DNA, 75 bp, Homo sapiens
cttcaatgatgggaaggtggatcccgccgggaggtactttgctggtcacgagaagagaatgccttctagatgcaa

SEQ ID NO: 360492 - DNA, 100 bp, Homo sapiens
ctcatttgtctactgcctcattcctggaaattgcactggaactgtctgattaaggaagaagcactgcatgggtttcgagtgagtgattattttgaataca

SEQ ID NO: 360493 - DNA, 75 bp, Homo sapiens
cgcctacttctataaagtcatccaggtttggcagttctctaccagtggaccaatcttttcatccccgtgtacctc

SEQ ID NO: 360494 - DNA, 82 bp, Homo sapiens
gaagaaaatcgcatgctgccccagtcttattgttacaggtatcgctgtgctgctcggagccagaacacacctgatagctctg

SEQ ID NO: 360495 - DNA, 75 bp, Homo sapiens
ccgccgggaggctgctgtacgacatacagagtgttgctcagttacccaggctggagtgcaatggcatgatcttgg

SEQ ID NO: 360496 - DNA, 74 bp, Homo sapiens
tggacccgtaaaataaaatggggatttatcaaagatgttcatgaagactcccttacagttgtttttgaaaataa

SEQ ID NO: 360497 - DNA, 80 bp, Homo sapiens
ggatcgaccggagcagagagctggcgagcaagaaatgcactcggtgatggaaagagagccactattctgaagaacacttg

SEQ ID NO: 360498 - DNA, 98 bp, Homo sapiens
atacccggatgtgaggcgatccgctggcgctagtctgaccctccgccaggcaaaaggaagccaaaccaaacaggaagcttacttttctctacctagcc

SEQ ID NO: 360499 - DNA, 100 bp, Homo sapiens
ggccaagatccaggataaggaagggcctgcttccgcgaggccaacatcccaacccacttcgggagaagaaccgacaggtgaacgagctggtacgggcggc

SEQ ID NO: 360500 - DNA, 75 bp, Homo sapiens
aaacatcaaagaggtctagcaaaggtcaaaatgcagatcttcgtgaaaacccttaccggcaagaccatcaccctt

SEQ ID NO: 360501 - DNA, 90 bp, Homo sapiens
gaggtgttaccggaacggcggcgacaagggtgttcccgaactagagtggggagactcatgcatctgtatgccgtgtgcgtggactgcctg

SEQ ID NO: 360502 - DNA, 100 bp, Homo sapiens
gtttgatagaagatgggatcgttttcgattcgcactaaactccatggtagaaaaacacctgaattcacagatgtggaagctctctatgagaacatgctgg

SEQ ID NO: 360503 - DNA, 100 bp, Homo sapiens
actgaaaccaccgtggaagtcgcctggtgtgaactgcagatggagtgaaggtacctgagcgcaggaaccatggtcttcattgctgcctcagcattagcgg

SEQ ID NO: 360504 - DNA, 83 bp, Homo sapiens
ctgaaaccaatggtgaatttgactgaaatcgccaagagattgaatacgatttgtgcacaagtcatcccatttctgtctcagga

SEQ ID NO: 360505 - DNA, 50 bp, Homo sapiens
cttgcttctaggagataaaaagagtccggcagcgtcttctcttgagggag

SEQ ID NO: 360506 - DNA, 75 bp, Homo sapiens
aaatgacattgttcgatacagggtgtatgagatcctgaaattcctgttcaggtcactcaggatattgagcctcat

SEQ ID NO: 360507 - DNA, 100 bp, Homo sapiens
cggcgtgggaggaggaagatggcggccggcaagagcggcggtagcgcaggggagattacttttctggaaggtcctcgatgggcttcctggaatattggtg

SEQ ID NO: 360508 - DNA, 74 bp, Homo sapiens
atgtgtatgaccttcacctcattaacagctgtgggtgagcgtggaggatgctcagatgcacaccgtcaccatct

SEQ ID NO: 360509 - DNA, 75 bp, Homo sapiens
gaacaccagccacaagtcctaccggccgctctgcgtcctcaccttcaacaagatggattctggatatactctgag

SEQ ID NO: 360510 - DNA, 75 bp, Homo sapiens
cctgcatatggaatgtatggccaggcatggaaccagcaaggatttaactacacagtctcaccagtggtattcttg

SEQ ID NO: 360511 - DNA, 75 bp, Homo sapiens
attaatgcgcttttcctgaaggctcctgatgagaggaggcagtttttgaatcagagccgacaggcacttgaattg

SEQ ID NO: 360512 - DNA, 83 bp, Homo sapiens
ttcccgctgcttcctctacccctgtatttcgctgggctctctaaatggattcagctccagggttcgggggtgattaaagctgg

SEQ ID NO: 360513 - DNA, 100 bp, Homo sapiens
gaatggagagggaccggatctcagcctctcctgagtttgtaaagatgcctcagctcctgagaaatgtcctctgtgtaattgagacattccacaaatatgc

SEQ ID NO: 360514 - DNA, 74 bp, Homo sapiens
tgacatggaggatgatttcatgtgcgatgatgaggaggactacgacctgatgtgatgccagcatagctagactt

SEQ ID NO: 360515 - DNA, 50 bp, Homo sapiens
gatatcattctgccccgactacaggttggtgttagcatcaaaatgagcag

SEQ ID NO: 360516 - DNA, 82 bp, Homo sapiens
tctcgggatgattataggcgtgatgatagagccgagtcgtccggaaatccattgcccgtgttctcacagttattaaccagac

SEQ ID NO: 360517 - DNA, 100 bp, Homo sapiens
cagaccatgagctggaggacatgaagatgaagatctctgccctcaagagtgaaatccagaaggaggttctgcggcatgaggaatttgaagaaggctgcaa

SEQ ID NO: 360518 - DNA, 90 bp, Homo sapiens
cagccttgaggagagcccatttgaggcctaaactgaaaggaaatcaagaaggcattttcagccctggcaggtgcccggcccgccccccac

SEQ ID NO: 360519 - DNA, 83 bp, Homo sapiens
gctcggtcaacggcttcatcagcaccttggggctatcgccccattccagcggagacttatgtaggagggaccttccctctacc

SEQ ID NO: 360520 - DNA, 100 bp, Homo sapiens
actgtgccgtggagggcctcgccatgtcctgctgcccgtggcaaagcgcaagtccctctttgatgataaagcagtggaaattgaagagctaacatatatc

SEQ ID NO: 360521 - DNA, 97 bp, Homo sapiens
cgcttttgcctgcagttgaggctttatggcgtttattcgacgatgcttggcctaccgaaaggaggaccgcattgatgtccagcagctggcctgtgat

SEQ ID NO: 360522 - DNA, 101 bp, Homo sapiens
gaagtctataagctttgcaacagaattacagagtatgatatgctgtcttcgcagtgccatgcctacaatggcaagcgtgaagctgtctacacttcatccca

SEQ ID NO: 360523 - DNA, 100 bp, Homo sapiens
aaagtcattcacacggaggattaccggctgcgactcatctccctcaagtttgcctatctggggcgcctggctcacgaggttggctggaagtaccaggcag

SEQ ID NO: 360524 - DNA, 74 bp, Homo sapiens
actgcgagaccgacatcgacgactgccggcccaatggacggagaggggttgcttaacgaagaattgccaaattg

SEQ ID NO: 360525 - DNA, 89 bp, Homo sapiens
acaaaagttagaattcttgaaaaaaagcatgttattgaattatcaacatcactggtggcgacatgtctaagaatgtgagccagtcacag

SEQ ID NO: 360526 - DNA, 74 bp, Homo sapiens
ctccctctcagcacctgggcggacgactgtggatattcataaggagaaagtggcacgaagagagattggtattt

SEQ ID NO: 360527 - DNA, 99 bp, Homo sapiens
cacctctgtttgggggtcctcaggtttgagaagatggtcagtggcatgtacttgggagagctggttcgactgatcctagtcaagatggccaaggagggc

SEQ ID NO: 360528 - DNA, 99 bp, Homo sapiens
cagaggcgctggagctgggtcagtccgccgctcaccccgcggccgcaccttcccgccttctcaggtcatattgaacattccagatacctatcattactc

SEQ ID NO: 360529 - DNA, 74 bp, Homo sapiens
agtagcaaccgggcattatattatctcttggaaaaggacctcattgctgatttaaagtatgaattgacgggcaa

SEQ ID NO: 360530 - DNA, 98 bp, Homo sapiens
gcagtgctcaaactcaccgaccagataacaacgaacttgatgcaagtgataggtttgccaaggtcagacctctcatcatccggatgaactgcaatttc

SEQ ID NO: 360531 - DNA, 90 bp, Homo sapiens
gggtgtgtgaagtgtcctgccaacaatatggagtacctgcattgtcttcagtgttaagaaatgtggactcctgtgaggtgctggaggttt

SEQ ID NO: 360532 - DNA, 74 bp, Homo sapiens
agcccctcccttcgaatattctcgagtggtcagaagccaatgacctggccctgaggctggctcgccactacacg

SEQ ID NO: 360533 - DNA, 96 bp, Homo sapiens
cttaatgaccctaaaaatggcgattctgcaaccaagcacctgaaacagcaggttctttcagagcacggcttcggccccatcactaccgacatccgg

SEQ ID NO: 360534 - DNA, 101 bp, Homo sapiens
cacgtccaagcaaaccgggaaaggagaggatcccggagccgtgtcctgtgggccgccaccggagctgcccctggctcaagtgttcggccgcccacggctgc

SEQ ID NO: 360535 - DNA, 100 bp, Homo sapiens
gggagttacatagctaagatgccaggacaccccgaaagccggaaaacgtacgactttactccgtgacataaaagaaggactacagaaagctgtaatagac

SEQ ID NO: 360536 - DNA, 100 bp, Homo sapiens
agactagccactttgcattgactggaaacaatggcatttacagaaagagtcaacagcagtggcaacagaggtccagttccggccgtaccgcacagacgac

SEQ ID NO: 360537 - DNA, 80 bp, Homo sapiens
ggtctccttttgggatctctcctgctacagttgttaagggggtggcccgattctacaggtcacggaaaaagcacttgatc

SEQ ID NO: 360538 - DNA, 116 bp, Homo sapiens
ttcgctctcgccttacgacagcccggtcggatcatggggttgcccagggggccggagggccagggtctcccggaggccagaagcacttgtgtgtcaccagcctcctgatctgccag

SEQ ID NO: 360539 - DNA, 50 bp, Homo sapiens
cctggaaggggctcctgctcacaggactcagaattcatgattgaagaaat

SEQ ID NO: 360540 - DNA, 101 bp, Homo sapiens
tgagcttcattcagatgtggtggaatatgccaaggaaaaactggagagcttcatcaaaaatagtgatagctttgataagtctgagcgggaaagttccgaag

SEQ ID NO: 360541 - DNA, 131 bp, Homo sapiens
tccgctgtgaaaagctaactttcaacaaccccacagaggactttaggagaaagttgctgaaggcaggagggaaagtgagtgagaaggttggaggagctgaaggaaccaagctagatgatgacttcaaagag

SEQ ID NO: 360542 - DNA, 83 bp, Homo sapiens
cctggagcctcagttggaagcagccgatccagcctgcggagcctgtggggcagcaacatggccaacgccctggccagcgccac

SEQ ID NO: 360543 - DNA, 50 bp, Homo sapiens
aaactcctatttgtttatggcaaggtatgcatttatagagtttgcttcat

SEQ ID NO: 360544 - DNA, 82 bp, Homo sapiens
ggggagccgcccccgacacggcccacgacaatgcagatcttcgtgaagactctgactggtaagaccatcaccctcgaggttg

SEQ ID NO: 360545 - DNA, 49 bp, Homo sapiens
atcaaatctactactgttcatggcagaaaccgaaccctcaccaaacaga

SEQ ID NO: 360546 - DNA, 105 bp, Homo sapiens
gcggccgaacgatgtgcgagaactgcgcagacctggtggaggtgttaaatgaaagtgaaatgacaatggatgctctgttggctcgattgaaacttctgaatccag

SEQ ID NO: 360547 - DNA, 100 bp, Homo sapiens
tgccatctcctgcatcgtcatagggttttaattacaacaagaacggctgctgataattttagcacccagtatgttttagatggcagtggccacatacttt

SEQ ID NO: 360548 - DNA, 82 bp, Homo sapiens
cagcgtgcgttcagccctggggttcatgatcaagagggcccaaggacggaagcgctttgggatgaagaattttaagaagaga

SEQ ID NO: 360549 - DNA, 75 bp, Homo sapiens
agaagaactaccacctatatagatccccgcacaggaaaatctgccctgaaggtgtcttgctgcaggtaactaatg

SEQ ID NO: 360550 - DNA, 100 bp, Homo sapiens
gcccagacggctcacctgtgcgggatggaacaaaagttatcccagatcactgaagctgagatggctgatgaagtaatttgcagtgaaattttaagcgact

SEQ ID NO: 360551 - DNA, 100 bp, Homo sapiens
acaatagggtatcatttttacgggccttctggagatgcttccgaactgtgggcaaaaatggcggcctgtcccctcagttcccaggtgccatgaggaagcc

SEQ ID NO: 360552 - DNA, 100 bp, Homo sapiens
cgtaccagaggtggaagtccaagtcaaacgcagaaggactgcctcactgagcaaccaagactttcagtgccaatggaaaagatatcattgtcgactttcc

SEQ ID NO: 360553 - DNA, 100 bp, Homo sapiens
cgagcgcgctagtcagctccctgaagggagtgacggcggttgggtgcccgcggccacttttgccttcccggttatcaggaactgttgccgttattacatc

SEQ ID NO: 360554 - DNA, 83 bp, Homo sapiens
ccggagccgtgtggaccaggaggagcgctatgcttgtttgctactgatgggtgtgagcaagttagatattctataccggagac

SEQ ID NO: 360555 - DNA, 97 bp, Homo sapiens
gaaataaatcctgattcagctcagccttacaagtggcgggggaaagcacacagcattgatgttgatgggacaatgacagtggactggaatgaatgga

SEQ ID NO: 360556 - DNA, 105 bp, Homo sapiens
gcacctcgcagtctccccaggtccgcccagcagccgcgcttcagccagctctcaagaggcagaatttatataataatcctttcaactctatgagttacaccagtc

SEQ ID NO: 360557 - DNA, 73 bp, Homo sapiens
ctcttgtcctcctcagcctcgaccattaaaaatctcaagtgacgactttgggaaactctggttatccttcgca

SEQ ID NO: 360558 - DNA, 90 bp, Homo sapiens
gcggcccctagctttctccttctggtgtggggcccgaggtggtggtgaagtttattaagaaggagaaggtcttggaggattgttggattg

SEQ ID NO: 360559 - DNA, 83 bp, Homo sapiens
atatgctcagccatcgtgtctgctgcaaagcttaatttgcccattaatattatagaacagcgttgttttttgcatgttttgca

SEQ ID NO: 360560 - DNA, 50 bp, Homo sapiens
gaccgagaccgcggccgggaccgaggctgtttgcagacaaggtcccaaag

SEQ ID NO: 360561 - DNA, 100 bp, Homo sapiens
ggcggagcggaggggaggccgtgccaggcagggccggttcgtgcggaaccgccatggccgagccggcttcggtctcctctgagcctccggcctccataag

SEQ ID NO: 360562 - DNA, 83 bp, Homo sapiens
ttaatttgtagaaagagtcgggcaaataggtccaggatgcaaagcctaaccaagacaatgcagatcttcgtgaagactctgac

SEQ ID NO: 360563 - DNA, 98 bp, Homo sapiens
agcgatcgggcccaggaaaaagaggaaagtggactgtccggggccgggctcaggagcagaggctgaagccgacgtagcttctctgaacagacgcatcc

SEQ ID NO: 360564 - DNA, 100 bp, Homo sapiens
tcagagatccaagtgcgcgccctggcgggtccggaccaagtgcttcaccgatatagacacattttgggattgtggcagccagatatcgggccatacggag

SEQ ID NO: 360565 - DNA, 75 bp, Homo sapiens
gatggatttttgcatgagacgcttctggacagaatcagatgctgaggctacccaggaattggcagcaggacggag

SEQ ID NO: 360566 - DNA, 101 bp, Homo sapiens
gtggacagttttccttatttgcgaggattagacggaaatggaacagaagtcctggagggtatttgggagccaaaaagaaaaagaagaaacagaagagaaaa

SEQ ID NO: 360567 - DNA, 100 bp, Homo sapiens
ggcgaaaccaggtggagtccgaggttcggaggagtatcagagaacactgagctgaaggttgaagtggagagcttgaaacgagaactccaggacaagaaac

SEQ ID NO: 360568 - DNA, 100 bp, Homo sapiens
tctgtggagcagatccgatggagaggctgagctgctccaggacttgggatacccataatatctgccgaacatctgactagccacaagtatgttacccaga

SEQ ID NO: 360569 - DNA, 100 bp, Homo sapiens
cgccatcctcggcgcgactcgcttctttcggttctacctgggagaatccaccgccatccgccaccatgtgcaccgtccaggtgaggttagagctggggca

SEQ ID NO: 360570 - DNA, 100 bp, Homo sapiens
cgctatcccctccggaccatggccgacgacgacgtgctgttcgaggatgtgtacgagctgtgcgaggtgatcggaaaggaagaggaagaacgtctgagaa

SEQ ID NO: 360571 - DNA, 74 bp, Homo sapiens
gcggccatggtgttgctgctgtactccttctccggcatgtcgggccccaggcctgtggtgctgagcgggccttc

SEQ ID NO: 360572 - DNA, 98 bp, Homo sapiens
ggctctcctagaatacaactaataacactaaaaggatgatggacagcagcctgagagacacaatctgacgtgagaaagatcagtctaaagaaaaggag

SEQ ID NO: 360573 - DNA, 99 bp, Homo sapiens
agtgctcaagagcctcattatctaccacccgagatgccccaaggaccagtcctgcctctgttgtagaagacatgtggtgtatataaagtttgtgatcgt

SEQ ID NO: 360574 - DNA, 96 bp, Homo sapiens
gccctaagcacacctggagcaacaacctggcggtgctcgagtgcctgcaggatgtgagggagaatttcgctaaggagtttgtgatcagtgatcgga

SEQ ID NO: 360575 - DNA, 75 bp, Homo sapiens
ggagcagttgtctgatgaagagaagggccccgtgaagcacgtgtacagagtcctgcagtgtcaggaagaagagct

SEQ ID NO: 360576 - DNA, 101 bp, Homo sapiens
tgctctttttgctgcagtggtggaacagattcacaagtttgcccagaacaactctgctcatggtgattacatgcaaaataacgagagcagcttaatagagc

SEQ ID NO: 360577 - DNA, 95 bp, Homo sapiens
tggaccacaccacagagaacgaggatgagctcttccgtctttcgcagctgggtgatgtagtcaaggtgatcgtctccgtccaggtattgatcctc

SEQ ID NO: 360578 - DNA, 98 bp, Homo sapiens
cgcgcgcgggtctccgtggaagtccgtttcgtgagcagcgccaaggcggagacagcagccaatcgcatctgcaaggtgttggccgtcaaccaggagaa

SEQ ID NO: 360579 - DNA, 86 bp, Homo sapiens
ggaatccgagaagagcagagcggagggagccccagacacgaagcccacccgggcagtaaacaagatccacgcctttgggaagagag

SEQ ID NO: 360580 - DNA, 118 bp, Homo sapiens
ccagaccctggagcctcagttggaagcagccgatccagcctgcggagcctgtggggcagactacatgaggaaataattgacttttataacttcatgtccccttgtcctgaagaagcag

SEQ ID NO: 360581 - DNA, 100 bp, Homo sapiens
tgtttgtcagctacctgatattaacattgctccacgttcaaacagcagtgttagcaagacctgggggagagggggcagctggcattttatgctatgtggg

SEQ ID NO: 360582 - DNA, 88 bp, Homo sapiens
aagatggcacatggcccaggcagaccttgcagtcaaagattccagacagcattggaaaagacatagaaaaggcttgccaatctattta

SEQ ID NO: 360583 - DNA, 88 bp, Homo sapiens
gggggccacaaatgctccttctcctggagacgcaactcaagaagaacttctgcttgggtggctgaactctgatcttgacctagagtca

SEQ ID NO: 360584 - DNA, 100 bp, Homo sapiens
attcttttgaagagtgcatttcaagctgccaaggtggagagagggattacagaaaggagaacaccttatttcagagtgacaaaaagagtagtccccagaa

SEQ ID NO: 360585 - DNA, 90 bp, Homo sapiens
agcagagcaaactcctctcactgctctccacgtggcatctttaataaaagagcagaaaaatatggctcaggagactaaccagaccccggg

SEQ ID NO: 360586 - DNA, 75 bp, Homo sapiens
ctccagtcccttgccagtgggggaaatgatctctggtagctgaagaacatctcacagtggacgccagggtctatt

SEQ ID NO: 360587 - DNA, 100 bp, Homo sapiens
gctgcctggaaaggaagtaccaggacttgcacagttcacttagcagccatggaaggccaccttcactgtttcaaattcctagtcagtagaatgagcagtg

SEQ ID NO: 360588 - DNA, 131 bp, Homo sapiens
ctttgtgtcctgagatcaaatggcacttcattggccacctacagaaacaaaatgtcaacaaattgatggtctcagaccagtatccttcaggggttctcttactctgatttgcggaaatttggcatcgtctt

SEQ ID NO: 360589 - DNA, 75 bp, Homo sapiens
acagtgagcccaagtgtgtggaaggattttgaagcaagagcaccccgagttggcagtcctcgcagactcggttga

SEQ ID NO: 360590 - DNA, 100 bp, Homo sapiens
ttggctttaagaagaaggacaagggaggcattaatctcacagccactcatcagcgagagctttctaactgtcaaaggtgctgccctttttctaccacggg

SEQ ID NO: 360591 - DNA, 90 bp, Homo sapiens
ctcccggtcctggtggtggttctgtcgatcgtcttggaaggaggtgcttcccaaggaccgtagatgcctctctagagcatgagctcaggc

SEQ ID NO: 360592 - DNA, 96 bp, Homo sapiens
agcaaaaatgacccaccaatggaagcagctggcttcactgctcaggaacttgtaatagctggcatcgttgagaatgaatggaaaagaacgtgctcc

SEQ ID NO: 360593 - DNA, 100 bp, Homo sapiens
gacgtatgtgggccccatgaccgagagcctgtttcccggttaccacaccaaggtgtttgtggagctgaatgagttgctcctggacaaaaaccaggagccc

SEQ ID NO: 360594 - DNA, 83 bp, Homo sapiens
ctcgagagacctgcgtacattcggggtgccagaaggaaagcataggaatcccagtcagaagttccagcctgccactgttctct

SEQ ID NO: 360595 - DNA, 98 bp, Homo sapiens
ccgaatcagccttttcacgctcaagctttcactctactcagttcctgagggtcaatcgaagtatgtggaggaggcaaggagccagcttgaagaaagca

SEQ ID NO: 360596 - DNA, 75 bp, Homo sapiens
gagatgctgcagatgccgttaaacaaatcctggaggcagttgctgtgcattgacatacaacagagcaacgaggta

SEQ ID NO: 360597 - DNA, 100 bp, Homo sapiens
tcggtgacaatccaggctcccggggagcccctgctggacaatgagtccacacgaggggatgagcggaatgccagaggattcaacatgagcatacctatgc

SEQ ID NO: 360598 - DNA, 100 bp, Homo sapiens
aagatcgggagcgggtccttcggagatatctacctgggctcagggtttggagcggccaccaaggccatgtgcatcggcctgcggtactggaagcctgagc

SEQ ID NO: 360599 - DNA, 91 bp, Homo sapiens
tggggagatccaagaagaatcaatgctttggcccctggtgacatgtacatggtgtaatgacagcttcaccagcctccaccaagacgggaca

SEQ ID NO: 360600 - DNA, 74 bp, Homo sapiens
gactggaaacaatggcatttacagaaagagtcaacagcagtggcaacaggcacggagtgtgaatgtgaagacac

SEQ ID NO: 360601 - DNA, 87 bp, Homo sapiens
ctgggcttccacacaactccagtgctaactcaacagcagtccagagcgtgagtccattcacatcctgagtgttgatgagaagaacaa

SEQ ID NO: 360602 - DNA, 50 bp, Homo sapiens
tagacactctggctgctccctgacagacgaactggctgtctgccctaaag

SEQ ID NO: 360603 - DNA, 75 bp, Homo sapiens
atctcaagctcatattttgaagtgtttacgggacagagcgggatgccaccagcttgtccaaagggaagttccagg

SEQ ID NO: 360604 - DNA, 90 bp, Homo sapiens
ctgttatgccagatggtcagtttaaagatatcagcctgtctgactacaaagcaggtttggatgcatctgctcagactacttctcatgaac

SEQ ID NO: 360605 - DNA, 101 bp, Homo sapiens
agcagatgctgaatattatgctgcacacaaatatgccacctcaaacaaggttcaccagggcatcaagggaatggtgcttgatgagaattacaataatctcg

SEQ ID NO: 360606 - DNA, 100 bp, Homo sapiens
atcctcacattcaagctgataggctgcgctaccggaatgtcatccagcgagtgattagctctttcgacgtgtagcagcagctttgccgggaatggaaagc

SEQ ID NO: 360607 - DNA, 80 bp, Homo sapiens
gaaggctgctattgaaagagagtatgcacagtgggtcggaagcagttcatgaggtttgagtgggcaaactacgcagctga

SEQ ID NO: 360608 - DNA, 100 bp, Homo sapiens
gagccaccatggagagtaggtgctacggctgcgctgtcaagttcaccctcttcaagaaggaggaaggaggctgcagtgtgccagtagccgtgcatacagc

SEQ ID NO: 360609 - DNA, 75 bp, Homo sapiens
tgttggacattagctcccgagcgctggccttctggacatatcagccacctggtttccatcgggcctatagttccc

SEQ ID NO: 360610 - DNA, 95 bp, Homo sapiens
aagctggttctgtatgagactagagctgtgaactggcacaaaggttaatctcaagatgccgctagtgaaaagaaacatcgatcctaggcacttgt

SEQ ID NO: 360611 - DNA, 76 bp, Homo sapiens
gaactcagtactgatgcccagtggggcattcgtcttggtaaacttggtgattggccatttgatgatggagctccac

SEQ ID NO: 360612 - DNA, 75 bp, Homo sapiens
tgaaccggacagtcatcaccatgggccgggatcacattctgatttggccacagatgtctttaattccaaaaacct

SEQ ID NO: 360613 - DNA, 100 bp, Homo sapiens
agttaaagctggcagatttcgcttgcccagtttcgacaaagaaaagctcagtcggatgggcagagtccttccaagaagcagaaaaaaaagagaaaaacgt

SEQ ID NO: 360614 - DNA, 100 bp, Homo sapiens
acaaatcagcaacacagaatttctgcaagtaattgtggatgacagcactggagttataaactgcatctgctggaaaaagttgaatactgagtctgtatca

SEQ ID NO: 360615 - DNA, 98 bp, Homo sapiens
gtgagggactgtctgagtgacctgctgggtcatcccttcttttggacttgggagaggccctagactggagctggttacagacggaagaagaagagcac

SEQ ID NO: 360616 - DNA, 88 bp, Homo sapiens
ccatttgatgatattgtggatcccaatgattcagatgtggaggagaatatatcctctaaatctgataagctcattcacacagaagacc

SEQ ID NO: 360617 - DNA, 74 bp, Homo sapiens
tcccagagtttgcagatagtgatcctgccaacattgttcatgactttaacaagtggttttagtgaagaagtctt

SEQ ID NO: 360618 - DNA, 90 bp, Homo sapiens
tcgggctacagctgccatgccgggcactattactgctacgtgaaggcagaagatagtttacgaagagaaaagaacctggaagaagcaaag

SEQ ID NO: 360619 - DNA, 73 bp, Homo sapiens
tgggtcccgccgggtctgaagcctgaacagctgtgtgccaaccacgatgcaaacatggtgaatgtatcgggcc

SEQ ID NO: 360620 - DNA, 116 bp, Homo sapiens
cacagtccccgcctgccatggccggctcttcctggagtgttggaaagctatttttgatacaccagatgaggatccaaattacaatccactacctgaggaacggccaggaggcttcg

SEQ ID NO: 360621 - DNA, 50 bp, Homo sapiens
ctccacctcccacatttcatcaggtccaaactaaatgacatgatagatgc

SEQ ID NO: 360622 - DNA, 75 bp, Homo sapiens
cgagtcgcggaggcgcctccgctgcagtcgctgcgtctccaagggtcgataaagacaggagtggagtgatatcag

SEQ ID NO: 360623 - DNA, 87 bp, Homo sapiens
gatggctgaactcaatactcatgtgaatgtcaaggaaaagacctatgccagatttactggtgctccactgaaggtacacaagatcag

SEQ ID NO: 360624 - DNA, 90 bp, Homo sapiens
gaacagcggtcgcgccggcaagagcagcgggagcggcgcggggaagggggcggtgtccgcagagcagggtcagttaaatgaaagcatgga

SEQ ID NO: 360625 - DNA, 100 bp, Homo sapiens
tggcgatggaagatggaaggaaggagcgcagcgggacagagcagaatgggctgatatagatccggtgccgcagaatgatggccccaatcccgtggtccag

SEQ ID NO: 360626 - DNA, 75 bp, Homo sapiens
tggactcttttacactcaactaattggcatcatcacagtggtcctgccatcatggctgtcctctgcaaaggtctc

SEQ ID NO: 360627 - DNA, 100 bp, Homo sapiens
ctttcctcaggagtcatttctgttccgcacaggcctgctgaactgggtgctttatataggatgttccatttaagcagacctcttccatagctgtagctgg

SEQ ID NO: 360628 - DNA, 100 bp, Homo sapiens
gtgactgcagccatggccacaggcttagctgttaacgggaaaggaaatggaagttccagtattaccgaaaatctctctaccgatcaccagttcttcactg

SEQ ID NO: 360629 - DNA, 74 bp, Homo sapiens
accaatgccgagaacgcctgctgcaagtcggacaagtttgcaaagctggagataacgaaggaggcccaacttca

SEQ ID NO: 360630 - DNA, 100 bp, Homo sapiens
cggcggcagcgggtcttgggtcctccgagagcagcagcgttggagctcagctgcatggaaggcagctgcacgtgttcgttcccaaccagtgagctggaga

SEQ ID NO: 360631 - DNA, 82 bp, Homo sapiens
ggatccaggataacggaggctggatcgcttcttgacctgcacaactttctgatttgatgagttcaacagaaaccaactcaag

SEQ ID NO: 360632 - DNA, 88 bp, Homo sapiens
ggattccaagtaactcttatttggaaatctgaaatagagtactatgctatgttggctaaaactggtgtccatcactacagtggcaata

SEQ ID NO: 360633 - DNA, 75 bp, Homo sapiens
aggcgcatcactcccagctgcgcaaagcttgcgaggtggcgttagtgcaagaagaaacacacgctgctgtgcccc

SEQ ID NO: 360634 - DNA, 100 bp, Homo sapiens
aggatgaaagtgagcagtccagaaagcggcttatcgaacagagccgggagttcaagaagaacactccagagctgtttgcagacaaggtcccaaagacagc

SEQ ID NO: 360635 - DNA, 50 bp, Homo sapiens
ccgaggctcgcgggcggcgggcccgggacctgaaggagaagaaggagaag

SEQ ID NO: 360636 - DNA, 88 bp, Homo sapiens
gagcgtcaagaactggagaacatccgacggagaaaacaggagctgctggctgacattcaggtcaataatgccacggcccgagtgatga

SEQ ID NO: 360637 - DNA, 51 bp, Homo sapiens
gttccatcatggcgtcaatgcagggtccaattggttccaagacgcgtaggc

SEQ ID NO: 360638 - DNA, 50 bp, Homo sapiens
tacttggatagacttatacctcaggctgaactcacgggaatcaaatggcg

SEQ ID NO: 360639 - DNA, 100 bp, Homo sapiens
ttcccggggggcaccgggccccccatcaaggctgagcccaaggctccctatgccccaggtcctgacgtgaactacgaggagctggcccgctgcacagatg

SEQ ID NO: 360640 - DNA, 98 bp, Homo sapiens
tggccctgagtagggtgtgacctccgcagccgcagaggaggagcgcagcccggcctcggggcaagattcttgccaagagaattaatgtgcgtattgag

SEQ ID NO: 360641 - DNA, 98 bp, Homo sapiens
actccagtcagtggtcctggtcccactgtcccagtgtagaatttcttgaggttggcaaaaagcagcctgctctggatgttctttatgatgttatgaaa

SEQ ID NO: 360642 - DNA, 98 bp, Homo sapiens
gcgggcggcgctgtgtccgtcgccatgacaggtccgggcccaccagctggtcttgccaccttgcgacgtagtgatcaaagccgttgctgactatgtac

SEQ ID NO: 360643 - DNA, 75 bp, Homo sapiens
tcatcacaaaagagttgattgaaattatctctggtgctgcagctctggatcccgggtgcaaggggcacaagtttg

SEQ ID NO: 360644 - DNA, 96 bp, Homo sapiens
ttggcctcccaaggtgctggaattacagttagtgcgcaagaagcacatgttgtcctgcttccaagatgcccttgtgaggcatacctccctggtcac

SEQ ID NO: 360645 - DNA, 100 bp, Homo sapiens
gcccgggctgcgctgggcgctgccgctgctgctgctgctgctgcgcctgggccagtctctggctgatgaacttgctcttgtggatgttttggaagataag

SEQ ID NO: 360646 - DNA, 75 bp, Homo sapiens
cagctgtcctcttgcagggtctgccgtgctggagggaaggctgctgttggaggctttacaggaagtatggtgctg

SEQ ID NO: 360647 - DNA, 83 bp, Homo sapiens
gagctggcggcgacggccacaggggcggcgacggcgcagtgcgaagcgaaacagacatgggaaagcggaaccaccaaaaggag

SEQ ID NO: 360648 - DNA, 75 bp, Homo sapiens
gcgagcagaggcttaaggtcttcagcggggcgctccaggaggcactcacagaccagaccagctttctccatgcag

SEQ ID NO: 360649 - DNA, 101 bp, Homo sapiens
ctgcagaaggtctctggagacatcttcagcaggtctcctctgagcctccggcctccataagacccaaaacagatgacacctcttcccagtcccccgcgcct

SEQ ID NO: 360650 - DNA, 51 bp, Homo sapiens
acgtcatcacgccctttctcttgctcaagctgtttgatgaagacaatccag

SEQ ID NO: 360651 - DNA, 90 bp, Homo sapiens
cagggagtgagatcggttgctggaaaactctccgtctttgctaatggagtcgtgacttcaattcagctgctggagccagttctgcttctc

SEQ ID NO: 360652 - DNA, 75 bp, Homo sapiens
catgtcgggttattcgagtgaccgagaccgcggccgggaccgagggtgagcatgggtttatgcgtcttaggcatt

SEQ ID NO: 360653 - DNA, 100 bp, Homo sapiens
gtggatggggactggtccgtgctcagtaccccatgggagagcctgtacagcttggccgggaacccagacttggggacagagagcgtcagtggcaccctca

SEQ ID NO: 360654 - DNA, 100 bp, Homo sapiens
gccgcctgacggggctcccgagcacgaaaagcaaactcaagttcctgcctcctcaggcggagcaagaagactccaccaagttcatcgcgctcaccctggt

SEQ ID NO: 360655 - DNA, 100 bp, Homo sapiens
aaatttattaaaggaagcacacctaaggaggaacatatgcagcagaaaaaagaggaggaagaagttcttaaagaagtaactgcacatttccaaattactt

SEQ ID NO: 360656 - DNA, 90 bp, Homo sapiens
catcaggggccttgataacacagagtttcaagatgcgctggctccctccctccgaggctacttctcagggctggaagtcccgtcagttct

SEQ ID NO: 360657 - DNA, 75 bp, Homo sapiens
gatgaactgtccttccaacggggtgacctcatccgtattctgagcaagaggtgctcagcacagtggactttgtcg

SEQ ID NO: 360658 - DNA, 80 bp, Homo sapiens
aggctcaagcacttctcctgcctcagactccggataactgggattacagagtttatgtggccgaggcagacaagtggaat

SEQ ID NO: 360659 - DNA, 96 bp, Homo sapiens
taactgctggcagcaccgacgaacccccaatgctgaccaaggaggagcctgttccagaactgctggaagctgaggaaggagtcaagactgagaaca

SEQ ID NO: 360660 - DNA, 82 bp, Homo sapiens
gcagtatcatgctggccaagaagatcatcattaaggacggaggcacgctgaacatctccttcccagccactggctgccagaa

SEQ ID NO: 360661 - DNA, 82 bp, Homo sapiens
gtttttctgttttgcctgaatacatgatttaaacaagagatttccacagaaggagctctttgttcaatgcctagccacctat

SEQ ID NO: 360662 - DNA, 100 bp, Homo sapiens
gtgacgctgctggaggaaacacctcaggacacggcctacaacaccaagaggcgggaggcagcaccgggctcttgatggacttggcagccaatgaaaaggc

SEQ ID NO: 360663 - DNA, 98 bp, Homo sapiens
acccgatgccccatgaagtggagatcgcacacaccaagaagctgttccgcaggaggagaaatgatcgaagcttattgacatgtgtgtgcagaactgtg

SEQ ID NO: 360664 - DNA, 82 bp, Homo sapiens
agaaaaacagcctagactagacgcacatcaggaagacagaaagcgtggatacccatcaacgaagttttgatattggaattca

SEQ ID NO: 360665 - DNA, 98 bp, Homo sapiens
caggttcttctgcactggggctactatcctgacagatttgctcccattcatgctgaggctccagagttcatggaaatgagtgttgagcaggaaattct

SEQ ID NO: 360666 - DNA, 75 bp, Homo sapiens
cgacaagccgctggcagccgcggatctcaccgccgctcaggatcctgcccggcctgtacatcggcaacttcaaag

SEQ ID NO: 360667 - DNA, 100 bp, Homo sapiens
ccagcaccggctccagtgggctctgaaaaacagcactggaggcaatgtttctataaatcaaagaagagacagtgtgagaatgtcagccctcaactggaag

SEQ ID NO: 360668 - DNA, 74 bp, Homo sapiens
tgaccgagaccgcggccgggaccgaggcaggagcattggtttgaaaaggccctacgagacaagaagggcttcat

SEQ ID NO: 360669 - DNA, 100 bp, Homo sapiens
gcaccgtggaattcctcctttcaaaagaacatacaacctcctcttcagtgtcaaaaaagccacggttagaccagattcctgccgccaaccttgatgcaga

SEQ ID NO: 360670 - DNA, 75 bp, Homo sapiens
cagacagcgagtggcgacgattttcaccagtgatcattaaagaatgggcagcttacaaaggaaagtctcctcaaa

SEQ ID NO: 360671 - DNA, 82 bp, Homo sapiens
ccagatatagccgttggtacaaaggtggatccataaagaacccagccaacccgcagagggaggggaggggctgagctgtgag

SEQ ID NO: 360672 - DNA, 100 bp, Homo sapiens
ggaagactgccttggagcagcagaaggcagcccatgagaaagaggtgaaccagctccgggagaaatgggccctgtctcagcgggaccctcctcacaacaa

SEQ ID NO: 360673 - DNA, 101 bp, Homo sapiens
cccctgccgtgtggacccgtaaaataaaatgggttatgatgtgattgctcaagcccaatctgggactgggaaaacggccacatttgccatatcgattctgc

SEQ ID NO: 360674 - DNA, 132 bp, Homo sapiens
cgcgccgctccctgtacaaactggtgggctcgccgccttggaaagaggctttccggcaggccctccaggccctccaggtggtctgagaatagaagacattagagccacttctgtggcacttacttggagccg

SEQ ID NO: 360675 - DNA, 75 bp, Homo sapiens
tctgtgttgctgttggagcagatttcttctctgtgtagcaagcaccagtatgcatgagcgggtgaaccgaacaga

SEQ ID NO: 360676 - DNA, 82 bp, Homo sapiens
caaggagctaaagcagcgtgcgttcagccctgggaaacttgaagggtcaaagtgcaaagggcagcttttgatttttggggca

SEQ ID NO: 360677 - DNA, 98 bp, Homo sapiens
tcatggatgggcacactgtgggggtgtcctggtgcacccccagtgggtgctcacagctgcccattgcctaaagaagccaggaccaaaccgtcacgagc

SEQ ID NO: 360678 - DNA, 75 bp, Homo sapiens
tcgacaacagagtgggaactttctgtcttgtgatccattgcctgacctctgtgagtgaaagccttcagagggaag

SEQ ID NO: 360679 - DNA, 94 bp, Homo sapiens
gggtgccacctcccgggacgctgcccacggcgtccccggtcgcgaaggatatggccctgaagccacatgagcggaaggagaagtgggagcgtcg

SEQ ID NO: 360680 - DNA, 50 bp, Homo sapiens
aacaacttagaatggagtataaagagacgggatttcaccatgttggccag

SEQ ID NO: 360681 - DNA, 76 bp, Homo sapiens
atccgatgcaccctttttgtcagattatcaggatgagggaccccaggagcaagcacaagttcaaaatccacactta

SEQ ID NO: 360682 - DNA, 95 bp, Homo sapiens
tactgctcagcaaggtgttgtgaatttcccatatgatgatcacctgctgtccccagatgcccctgcagaagctgctcttctcagctactctgacc

SEQ ID NO: 360683 - DNA, 95 bp, Homo sapiens
tcactgctctccaactgcatagacagtgtgtcgtttgcaagttcttctgtgtggcagttcagaatgatggatcaagctagatcagcattctctaa

SEQ ID NO: 360684 - DNA, 97 bp, Homo sapiens
gacccatagcacgctgcctactgcacacacatggaatcattaaccaatggcaacaggaatccaaggataaagtgatttccctcctgttaactcatct

SEQ ID NO: 360685 - DNA, 100 bp, Homo sapiens
caaagcaaatccggccatgaagactgtctacaagttcgaagccagttgagggaagttctccatgaatgtacgtcacaatgatgatgaccgaccaaatccc

SEQ ID NO: 360686 - DNA, 95 bp, Homo sapiens
tggctgtgctgcgcgacccccgcgcatgttttctggatatgccgcagaaggatccgtgccagaagcaagcctgtgagatacagaaatgtttacaa

SEQ ID NO: 360687 - DNA, 100 bp, Homo sapiens
ctgagctcgtcaagcagctgtcggccaagctcatcgccaacggtgctggagaatctggtaaaagcaccattgtgaagcagatgaggatcctgcatgttaa

SEQ ID NO: 360688 - DNA, 73 bp, Homo sapiens
ggaacaagaagagtctaggacagtgcagagaggtgatttccaagcctcttagcaatgcataccacgagttagc

SEQ ID NO: 360689 - DNA, 80 bp, Homo sapiens
tggtgatgtgtctgcttacattccaacaaatgtcatttccatcactgacggacagaatatcatcacccttgcagaaactg

SEQ ID NO: 360690 - DNA, 83 bp, Homo sapiens
atctgaatgttgtgaccactaatttgtgaaacaaagagtcctcttcgtggaaaagaaaaaaatacgctccctttaaacggtgg

SEQ ID NO: 360691 - DNA, 82 bp, Homo sapiens
aggatcgaagtggtatcaccccaaaaggattaggcatggaagaggagatggttcgtgttacgcagtggccgtttaactggag

SEQ ID NO: 360692 - DNA, 82 bp, Homo sapiens
ctgtcagagcccggggacggcgaggccctcatgtaccacacgaagatcacccttagttcttcctcggaagagtatcagaagg

SEQ ID NO: 360693 - DNA, 100 bp, Homo sapiens
tttgcggagaggtcagtaactaaattggagaaaagcattgatgacttagaagatgaaaacatctgagactcagggctaagcaccttgcccaaggccacac

SEQ ID NO: 360694 - DNA, 87 bp, Homo sapiens
tctcctggagacgcaactcaaggtcgtggagtcagatttgagtgatgatggcaaagcatctttggtgagcgaggaagaggaagatga

SEQ ID NO: 360695 - DNA, 115 bp, Homo sapiens
ctcaaaaatgtgataactttgctgaaaaaagacccctccttggtgtttgtaagagcattggatcttctgggatttggatgaagtaatggatcactaatgaactacagtgctggtg

SEQ ID NO: 360696 - DNA, 51 bp, Homo sapiens
gaaaacctcaggaaattctacaagctacgagacaatgtgattacacctcga

SEQ ID NO: 360697 - DNA, 51 bp, Homo sapiens
cggctgggacaggaagccacagaaggcccgaacaagacaggaacgtcctgt

SEQ ID NO: 360698 - DNA, 74 bp, Homo sapiens
agcaggctccgggctgaagattgcttctcttctctcctccaagatgaggaaaatgaggcccaaagaagtgatgc

SEQ ID NO: 360699 - DNA, 74 bp, Homo sapiens
cggaacggcggcgacaagggtgttcccgaactagagtggtgttcctttctgccgaaattctccattcatataga

SEQ ID NO: 360700 - DNA, 83 bp, Homo sapiens
ctttgtctttgacgggtcctccctgcctgccgatgtgcatcggtacatgaagatgcaaggggatcaggcgagtgaagccgaag

SEQ ID NO: 360701 - DNA, 74 bp, Homo sapiens
ctacaacagtttggcgtgcaacatggggcttgagaaaggaggagaaggcagagcccccccaggctatgaatgcc

SEQ ID NO: 360702 - DNA, 100 bp, Homo sapiens
gattccacccaaacttgctggtcactgggaggtgtatggaatgattcggttctcaggcaccacaggccagatgtctgacctgaacaaaatgatggtccag

SEQ ID NO: 360703 - DNA, 75 bp, Homo sapiens
ccgtaaccacaaggaggacgagggatgatttggtcagacattaaaagactctggtatgaagggttggaagacttt

SEQ ID NO: 360704 - DNA, 90 bp, Homo sapiens
gggccttagaggagacgccgccggagctgctgctcttcctccagaacctgcccacagcccactgggatgatgaggacatcagcctgttgc

SEQ ID NO: 360705 - DNA, 100 bp, Homo sapiens
ggctgtagtggggctggtggtgcttccaactgcgggacaggaagtggccgtagcggcttgttggataagccatgaaccagagaatcagtcagagtgctcc

SEQ ID NO: 360706 - DNA, 100 bp, Homo sapiens
ctgggggcgctggcggcctgcgcagccacctcaaggtggtgaagaaggtgaagtccatgcagatgttccacatgcccatcacttcagccatgcaaggaga

SEQ ID NO: 360707 - DNA, 99 bp, Homo sapiens
gttgtgtggtcgcgtctcggaaaccggtagcgcttgcagcatggtaaaataccatgaagattttgaaaaaacaaaggggagaggctttactcccgtcgt

SEQ ID NO: 360708 - DNA, 80 bp, Homo sapiens
acgggtttgccgccagaacacaggagcatcagatccatgctgctgctgactcggagccccacagcttggcacaggctctc

SEQ ID NO: 360709 - DNA, 99 bp, Homo sapiens
acagctacagccaattttgctaactttgcacatttcaacagtcatgcagtgtttaaccagggggaagaaggtacctcctggtacattattctaaaagga

SEQ ID NO: 360710 - DNA, 50 bp, Homo sapiens
tatttgaaagaagccatattttcaggtgaagggcaaccatcggtttaaat

SEQ ID NO: 360711 - DNA, 74 bp, Homo sapiens
gacctatgcagttcgaaaactggataacactaagtttagatctcatgagctccagcggcgccatgagcaaatga

SEQ ID NO: 360712 - DNA, 100 bp, Homo sapiens
ccacccgccgacgcctcagccgcttggggcccgcacggaccctctacttcatcaccttcaggccattcagaggaggaaagagaggggaatatgaagtcag

SEQ ID NO: 360713 - DNA, 71 bp, Homo sapiens
gcattgaggagaaggcagcggacaaagaggttactaccggtactacaacaagtacatcaatgtgaagaagg

SEQ ID NO: 360714 - DNA, 82 bp, Homo sapiens
gctcaccatctacggcatccggtagcccagccctgaccctgctgctggtggacgaggcctgctggctgaggacgctgcccca

SEQ ID NO: 360715 - DNA, 100 bp, Homo sapiens
agatgaaggcgatgatacctctaagggtaaatgttgtccagactcagagtttaagaaacactttcctgttggaaatccagaaattcttccttcatctctt

SEQ ID NO: 360716 - DNA, 83 bp, Homo sapiens
cttaaattctcacccactcttggtattttgaaggtgatgcagaagatggggaagaatatgatgacccttttgctgggcctcca

SEQ ID NO: 360717 - DNA, 82 bp, Homo sapiens
catggtcatgagctttgtgaacctggagagcgcctgctcgctgtgcccccgggttatgacgacccccaataaaggaaacaag

SEQ ID NO: 360718 - DNA, 90 bp, Homo sapiens
tttgaagattctggccaacgcagacaccatgaaggtgctgggagtgcagcggcctctcctacaggctgaccggttccctgatgtgttacc

SEQ ID NO: 360719 - DNA, 75 bp, Homo sapiens
gcggaagtgcagctgcctcagttcttagcgcaggctgttcggctcttgaatcccagcgatgaaaccaggaactca

SEQ ID NO: 360720 - DNA, 90 bp, Homo sapiens
ccacagctaagacgccgggactccctggaaacctagaaatgctcatgatggagcagtccaagaagtcctccctcatggtggcccgcagta

SEQ ID NO: 360721 - DNA, 50 bp, Homo sapiens
gtcgccgccgccccgagtcccgggcatttgcacgccaaaggcaaagaaga

SEQ ID NO: 360722 - DNA, 75 bp, Homo sapiens
ggggctccaatggcgctttctacaagctgctctgttaaaagcgaaaatgaaacaattgcctgcggcaacagttcg

SEQ ID NO: 360723 - DNA, 90 bp, Homo sapiens
cacccacagcggggcggcggcggcggcggctgcggcccaatataggtgagcatatgacggaggaggagatgttggattgctttgcttcac

SEQ ID NO: 360724 - DNA, 100 bp, Homo sapiens
tgggtctgtgactacaacatattgctgcaatcaggaccattgcaataaaatagaacttccaactactgaccccaccaacaactgaacgctttggtcaggc

SEQ ID NO: 360725 - DNA, 115 bp, Homo sapiens
ctatggatctacaacatggagactggaagatgggtaacgccatcctctgaaaatcctaatggtgctacttctagtgtcagccaaggaaaaccctctttaagacgaattaaaggga

SEQ ID NO: 360726 - DNA, 100 bp, Homo sapiens
ccaaaaagcagctggacagcacaattggaatccaccctgtctgtgcagaggagaacatgatcgtgtatgtggaaaagaaagtgctagaagaccctgccat

SEQ ID NO: 360727 - DNA, 84 bp, Homo sapiens
cagagtcacacacggtcctaagagctgggcaccaggaagcgaaggctgggttcgggggtgattaaagctggctttgcaggagac

SEQ ID NO: 360728 - DNA, 75 bp, Homo sapiens
gtgattcacaggagcctctgtatcagcaccatgcagttgcaggaattgtgccttggatccatccatccagtcagc

SEQ ID NO: 360729 - DNA, 75 bp, Homo sapiens
ggtaggagatggagaaattccaagttcagattctccagctttgtctcctcagcactctgctgtcactcaaggaag

SEQ ID NO: 360730 - DNA, 82 bp, Homo sapiens
cgtctggatcacggatgtaggaagtgacaaatggaatcctgtgctgaacccgaatcttccaaaaaacagcctacaatctgtg

SEQ ID NO: 360731 - DNA, 75 bp, Homo sapiens
gttcgagaacgaccccgagacgggagcatttcctgaagacgtagtcatgcagcacgtcagcagctcccagagcag

SEQ ID NO: 360732 - DNA, 140 bp, Homo sapiens
cagcccgaagcggcggcggccgaggacggggacagcgacgacgcggaggcagagaagggaacgcccggcccagccccaacccctgaacagtgcccaagtgttgtctctttgttgtcagagagttacaaccctcatgtgcg

SEQ ID NO: 360733 - DNA, 50 bp, Homo sapiens
agaagaggaacgccccaaaccaaggatggagatgaagatgaggaagctga

SEQ ID NO: 360734 - DNA, 83 bp, Homo sapiens
tcggtggactccttcggcagtccacccaccgccgccgcctcccagcagtctctggtcccagcccaccccatggcccctcccag

SEQ ID NO: 360735 - DNA, 82 bp, Homo sapiens
ctttctaaccgacaaaaagccttatacgaggacgttatcctgcaacctgggtccctgtgcgttttattgcgacctgccggtg

SEQ ID NO: 360736 - DNA, 75 bp, Homo sapiens
gatcgagcgagagttctgtgacctcccccgctgcgttgttgacctcctgtactggagagacattaagaagactgg

SEQ ID NO: 360737 - DNA, 50 bp, Homo sapiens
ttgtccctcaggaagacaccatacaaggctggtgaattaccatatctccg

SEQ ID NO: 360738 - DNA, 97 bp, Homo sapiens
gtttctctgctgcaccgacctcgacgtcttgcctgtgtcccacttgttcgcggcctataggtgagaagccctaccactgcaactgggacggctgcgg

SEQ ID NO: 360739 - DNA, 82 bp, Homo sapiens
gtcgagcccggggcagcggctgccgggccgggactggtgcgcgagggtcttatagctggatcagctaccaagagaagttgta

SEQ ID NO: 360740 - DNA, 75 bp, Homo sapiens
cggatggccccaggtgtaagcgcagaaagcaggcgaacccgcggcgcaataacgcgggctgacgcacgaggcaca

SEQ ID NO: 360741 - DNA, 100 bp, Homo sapiens
agctggaggcaaaatctcaagacccaggagcagttgtacttggaaaaaggttacaagtgaacctgaaatgattggagctgaagttatttcagagttctta

SEQ ID NO: 360742 - DNA, 98 bp, Homo sapiens
attgaagggagagatgatggatctccaacatggcagccttttccttagaacaccaaagattgtctctggcaaaggtgaatttccaatcatcagcccag

SEQ ID NO: 360743 - DNA, 75 bp, Homo sapiens
ggaggatggagcagaggacattctagagaaagctcgggttcatgacgctctcgatattcctgtgcagaaacctgg

SEQ ID NO: 360744 - DNA, 51 bp, Homo sapiens
ccattcagagcaccagtctacaacacagtcactcctggcggcaaaccaaac

SEQ ID NO: 360745 - DNA, 75 bp, Homo sapiens
ctcatcctggttctggaatcctcagttcaagacctgatggccaaaagaaaggaagaaaatttttcctctcctaaa

SEQ ID NO: 360746 - DNA, 49 bp, Homo sapiens
ccagccctgccagctgcgccgggacggtgacttcccaagtatgcctggc

SEQ ID NO: 360747 - DNA, 50 bp, Homo sapiens
tgcttttgcaccatttggaagaatatcgtgggcagtgtcaaaccgggaaa

SEQ ID NO: 360748 - DNA, 101 bp, Homo sapiens
agtcttctcaacttgaaggtcatttaaccaacctcagctttacaaaccctgaatttataactgagtggctgcttctctattatgctctgtgcttctccctg

SEQ ID NO: 360749 - DNA, 98 bp, Homo sapiens
aaaagaggaattccagaagggccaccccgacctccaagggcagcctgggtgtaccagtgatggcaataagaaacaaaatgatatcagaaggactagac

SEQ ID NO: 360750 - DNA, 101 bp, Homo sapiens
accgcgcgcagggcctgcagcgggagctggacggcgagcgcgagcggcgcgagaaaccgcggcgagtcctttgcacatgttggcaacacacgcatccgcat

SEQ ID NO: 360751 - DNA, 83 bp, Homo sapiens
catgagggccctgtgggtgctgggcctctgctgcgtcctgctgaccttcgccaagacaatgcaaactccagtgaacattcccg

SEQ ID NO: 360752 - DNA, 100 bp, Homo sapiens
ctgacagcccagatcactgaaagctatcatggtgaacttacttcagattgtgcgggaccactgggttcatgttcttgtccctatgggatttgtcattgga

SEQ ID NO: 360753 - DNA, 82 bp, Homo sapiens
ccctctcagcctccgcctggtctctggtgacttaagagattaaaattaatttggttgctgttggttctgaacaaataatgag

SEQ ID NO: 360754 - DNA, 50 bp, Homo sapiens
cgccgagtgggaggatggcggaagttgtgcccacgtgcctcagggccttg

SEQ ID NO: 360755 - DNA, 101 bp, Homo sapiens
gatgagggtccagtgtccaaccagggctacatgccttatttaaacaggttcattttggaaaaggttgtaaagctctctgaaatagtgaccttagcgaagca

SEQ ID NO: 360756 - DNA, 75 bp, Homo sapiens
ctttaatccagctactctacctctaacacagtacctgttaacaacgtggcaattttggaggtagccccggttatg

SEQ ID NO: 360757 - DNA, 100 bp, Homo sapiens
gtccccaaagttggagaatcccatcaaggagagtagccctgtaaggaattcgaatttccagcatgtgtgatgaatgcagactctgctaccattttggctg

SEQ ID NO: 360758 - DNA, 74 bp, Homo sapiens
gggggccagcgggtcatcgggcactacgctggagaagatgcaacgagaaagaataatctccatttatctacaca

SEQ ID NO: 360759 - DNA, 100 bp, Homo sapiens
gggaacccaggccccgccgaggcggccaggaaagaccacagcaagattctttcattcgtctcctcctagcctgggggaccaggctcgaactgaccctgga

SEQ ID NO: 360760 - DNA, 82 bp, Homo sapiens
gtctgcgagccaggattcccggtcgccacccagttcaagatgagcctcctgcagctggtggagatcctgcagtctaaggagc

SEQ ID NO: 360761 - DNA, 87 bp, Homo sapiens
tgacttgcgttggggttggagacgtgtgtaataaaggaaaggcagacctcaacaccaacatcgaggatgaaggcagctccttctatg

SEQ ID NO: 360762 - DNA, 100 bp, Homo sapiens
ccggccgggagggcggccgcagcaggggatggagaagtttatgtttgggatgtgaactcaaggaagtgccttaacagatttgttgatgaaggcagtttat

SEQ ID NO: 360763 - DNA, 51 bp, Homo sapiens
gtcccaggacgtgcaccagaaaagagggtaactaaggaagtggatgctaca

SEQ ID NO: 360764 - DNA, 80 bp, Homo sapiens
agtgctaaaggatctctgatctgggtgtggcaggtgtttccagtgccatggaccacaccttctcaacaacatcaaaagat

SEQ ID NO: 360765 - DNA, 82 bp, Homo sapiens
ctgtcttcggtggactccttcggcagtccacccaccgccgccgcctcccagattcttctaacagagaaaatgccattgagga

SEQ ID NO: 360766 - DNA, 75 bp, Homo sapiens
gtggcactgaggctctggaacttctgcccagctctccttgccagagactgctgctactttgaaacgtacgataga

SEQ ID NO: 360767 - DNA, 75 bp, Homo sapiens
caaataagaatgcgagtattcttttaaaggaacttgatctggaaaagccccccgaatccaagcccaacttcaccc

SEQ ID NO: 360768 - DNA, 100 bp, Homo sapiens
cagtgaagcatttcgcctgaccattacacgcaaagatattcaaactctaaaccatctgaattggctcaatgatgagggaagatgtgccacctccaaagag

SEQ ID NO: 360769 - DNA, 100 bp, Homo sapiens
aagatgcagaaaggaaatgttctccttatgtttggtctactattgcatttagaagctgacagagtgggaagctttggagctgacggatcaccagtgggca

SEQ ID NO: 360770 - DNA, 50 bp, Homo sapiens
ggggaccacaagatcctcatcgacagaaagccattgatctggtgacgaaa

SEQ ID NO: 360771 - DNA, 75 bp, Homo sapiens
ccagcgccacactgatgcccaggcacaggcatctgcagatatgtaactggttcatcaatgcccggcggcggcttc

SEQ ID NO: 360772 - DNA, 82 bp, Homo sapiens
aagtagtccgatggcagcggctgcgccgaggcgcccgactcaggtgctcttacagcctgttccaagtgtggcttaatccgtc

SEQ ID NO: 360773 - DNA, 100 bp, Homo sapiens
ccgggcttagctggaaggaatttctacctgaaggccaggacattggtgcattcgtcgctgaacagatggacagagacccgggcccacggggagaggaagg

SEQ ID NO: 360774 - DNA, 83 bp, Homo sapiens
cgcgctactctctctttctggcctggaggctatccagcgtgtacaagggagaagaagccacattccaaatctcaggcctccag

SEQ ID NO: 360775 - DNA, 100 bp, Homo sapiens
cgatgagaggcgctcgcggcgcctgggattttctctgcgttctgctcctactgcttcgcgtccagacagtggacattcctctggttatgatagtcgttct

SEQ ID NO: 360776 - DNA, 128 bp, Homo sapiens
caaatgacactaatcgggagtataaatctgtaaaagaaagaggagtacacattgtttccgagcactggcttttagattgctcttagtgatggcagcagtaggtggctacttgatgtggcggaattggc

SEQ ID NO: 360777 - DNA, 100 bp, Homo sapiens
tgaccgcgcgactcggcgcccgcccgcggttgcagatattttattccaaactgcccaaaatgcaggcatcagttttgacaccgtgtgtggagtgccttat

SEQ ID NO: 360778 - DNA, 100 bp, Homo sapiens
cgaagaagcttcgaggatctgtttaaaaggatgcttaatcgggagctcacccatctctctgaaatgagtcggtctggaaatcaagtgtcagagtttatat

SEQ ID NO: 360779 - DNA, 83 bp, Homo sapiens
cagttgctggcttccacttcgggcttcctttccacagaaaggacctaagtgtgaaataccccgaagacgtccccatcaccctt

SEQ ID NO: 360780 - DNA, 100 bp, Homo sapiens
acagtggggaccctgtgctgctgcgcctcttctaccaagtggctgagtacaccttccgccaggtggctgagatctgcgttgaaatggagctgcgggacga

SEQ ID NO: 360781 - DNA, 100 bp, Homo sapiens
cggcaggctcaggtgcagccgctgcgtggggtagagcagcggctgccatgctcttctgtggcttcatcatcctggtgatctgtttcatcctctccttctt

SEQ ID NO: 360782 - DNA, 143 bp, Homo sapiens
aagtttcacatccttgtctgtgaagctaaactcaatgctgctgtgtgggaagaagatttgtaaagaaaactcttaggtccccagtctatgtgaggatctcctgtcttctgttgaccagccactgaaaattgccagagacaagg

SEQ ID NO: 360783 - DNA, 73 bp, Homo sapiens
ggccacgccccagccctctgaaggtgctgctccagctgaggagaagaaagtggaagcaaagaaagaagaatcc

SEQ ID NO: 360784 - DNA, 75 bp, Homo sapiens
aaagggagccgccaccgtctggtgtctaaaccgcctcgggtggaatgaatcttacttgttgaatatcttctggtt

SEQ ID NO: 360785 - DNA, 100 bp, Homo sapiens
tgtgaacccacccgagagcaacaaagcaggcgactacagccacgtgaaggacaaaaggagttattcttgtcctgtttgtgaaaagtctttttcagaggat

SEQ ID NO: 360786 - DNA, 82 bp, Homo sapiens
agtggcaatgagaccagtggaagcagcaccatcggggagacaagcaatttgcctgagaatacagatcaacccacagaacaaa

SEQ ID NO: 360787 - DNA, 99 bp, Homo sapiens
gaaaacttgatcacatcaatatctgcagttccaatttcccaaaaagagagaataaacttaacacccttaaagacggacactccaccaagttctgtacca

SEQ ID NO: 360788 - DNA, 128 bp, Homo sapiens
gccccgtgtcagaagagctgtccaactaatcttgatattaaatcattcatcacaagtattgcaaacaaggacctgagggcactcgctttgctcctgtcagtacacactcccaaacagttaaacccagc

SEQ ID NO: 360789 - DNA, 83 bp, Homo sapiens
ggcggcgcagtacaccaacgcggtgcgcgaccgggagctggacctccggggtttaagaattgtttaagctgcatcaatggagc

SEQ ID NO: 360790 - DNA, 50 bp, Homo sapiens
ctcgctgccaccagatcccagcaaggctgggttgcggcccatttgtgaat

SEQ ID NO: 360791 - DNA, 95 bp, Homo sapiens
atcttggaatcattttgctctcagtcatccttacccctaaagaaggagagtccagggatgtggtgacatttacaaagaggaaatttgggttgatg

SEQ ID NO: 360792 - DNA, 100 bp, Homo sapiens
tgctgctattgcagaatttttgactggagactatagtagctgtgaaagttgtgtagatttactgtttgtgagaggagctggaaactgccctgagtgtggt

SEQ ID NO: 360793 - DNA, 100 bp, Homo sapiens
gtggcctgtgttgtggacactctgtgcagacatggaaggtctttaatgtaactttaaatggttcaccaaaggatgctctaatggatgacagcgatactcc

SEQ ID NO: 360794 - DNA, 75 bp, Homo sapiens
cctggacctatgaatatccagtttgagccatcggatctaagatccaaaagatggcagtcttgggcacgtccatct

SEQ ID NO: 360795 - DNA, 100 bp, Homo sapiens
ggaacagccagacgagagcttcagccatcacgaggatgatttcggaacctggagaaaatacaggaacacagaggacgatcgccccccggacacaccctta

SEQ ID NO: 360796 - DNA, 100 bp, Homo sapiens
agcagctgctctcccagccgcgccagcctcctcactggcctgccccagggcattgacactgagaggcccattctgcaagtggacagctgtgtctttgctg

SEQ ID NO: 360797 - DNA, 99 bp, Homo sapiens
agcaaccctgaggggcggccgggcagcgccgccaccatgttcctgggcaccggggagccggccttggacacgatgtctctgcccacccacgcaacccag

SEQ ID NO: 360798 - DNA, 96 bp, Homo sapiens
tgaacaactcgggcgccgacgagatcggggccctcctccccagttcagaatgcagcccacagccaccatggccacagccgccaccaccaccaccac

SEQ ID NO: 360799 - DNA, 100 bp, Homo sapiens
cgaggagcgcacgatgattgaccccacttccaaggaagaccccaagttcaaggaactggtcaaggacggctgtcctcagcgaggggccgtgcacccgctc

SEQ ID NO: 360800 - DNA, 80 bp, Homo sapiens
ccggattccagactcgtgggggaaaggctggttgggaaaagtggaaacattccagcaggcacgactgtggacacgaaaat

SEQ ID NO: 360801 - DNA, 71 bp, Homo sapiens
gaggagtacgcgcgagagccttgcttatcttaatggccatgcagaaaccccagtatatcgattctcgttgg

SEQ ID NO: 360802 - DNA, 100 bp, Homo sapiens
atcaatgacttcctgaaaggatgtgcaaccctccaagtggaaaccacccgttagccgagcagctccccagcctgagaaactgcagaagaacaatatcacc

SEQ ID NO: 360803 - DNA, 100 bp, Homo sapiens
cgatagaccactgcctgtgtctcgtcttgtatctctaattggaagcagtgaggttactattgaatgtaaaacaaggtactggacatcaagcatggtgctg

SEQ ID NO: 360804 - DNA, 74 bp, Homo sapiens
accaggcgaagctggccgagcaggctgagcgatacgacggttcatcatgcctagtggcgtataagaagaccccg

SEQ ID NO: 360805 - DNA, 82 bp, Homo sapiens
ctcagcgcggcggccgcgctcttcgcgtccctggccggtcccatctgatgccgaggctgaaggagtctcgctcccacgagtc

SEQ ID NO: 360806 - DNA, 88 bp, Homo sapiens
tgtatgaactatctacaaacacacaagaaaagaaacattatgctaatattggatgggtcatcagttaaggaagttgaaacctaccacc

SEQ ID NO: 360807 - DNA, 101 bp, Homo sapiens
tgaagtggaaggcgcttttcaccgcggccatcctgcaggcacagttgccgattacaggttaaagcggcaactggggaagaagtatctgctgaggatcttgg

SEQ ID NO: 360808 - DNA, 100 bp, Homo sapiens
cttggttaaaacctgacacttttaacaggctcttctgaaaatggattgccaagagttagtcgcacgtctcatccaagaagctgctgttctgacttcagct

SEQ ID NO: 360809 - DNA, 89 bp, Homo sapiens
attaaatgcacatattgttgtatcagatccagaagatattacagaattccatacgacataatctgtcattgaacaaatgtttccttaaa

SEQ ID NO: 360810 - DNA, 100 bp, Homo sapiens
gcggggtcgagatggcggcgcctttgaggattcagagcgactgggcgcaagccctcaggtgctgtgcctgaggaacaataccatttttaagcaagccttt

SEQ ID NO: 360811 - DNA, 83 bp, Homo sapiens
cacttcgtcatgttcttcgcgccctgaaattccgggtagatatgcctggctcaggcagtgcattcatccccaccatcaacgcc

SEQ ID NO: 360812 - DNA, 101 bp, Homo sapiens
tggaggtgtcagtgttaaaggaacctctacaacgaaggtgaagccacggaagataagttactccacaggatccgctgaacataggatgttgccacaaaatc

SEQ ID NO: 360813 - DNA, 100 bp, Homo sapiens
cgggccgattttcccaggatgacagagctgaggcagagggtggcccatgagccggttgcgccacccgaggacaagcctgtcagtccctgggaacgggcat

SEQ ID NO: 360814 - DNA, 74 bp, Homo sapiens
cagtgggggtgtgcaaacccgagagaactggttggctggggaacagaccagggaattggtggatttggagaaga

SEQ ID NO: 360815 - DNA, 96 bp, Homo sapiens
gcagaagaagaaggtgtactcctttctattttaaagagccaagcctcagagaattggccctgtgtactcctctgtctcgtctgaagcaagaagtag

SEQ ID NO: 360816 - DNA, 82 bp, Homo sapiens
accatgataatttccccagagcgtcttgatccttttgcagatgagtatctgactgtcttctctcagatgattgcatttcatg

SEQ ID NO: 360817 - DNA, 99 bp, Homo sapiens
ccggaggctgctggccaaggcgcggagcagtgcccccaccgcccgggtggtgaagtgggctctggagaagctggagctgaccaagtacgcagacaagcc

SEQ ID NO: 360818 - DNA, 80 bp, Homo sapiens
aaagtggaatttcctactgtatcatgatcatcataggagtggagaacatgcacaatgctcatcatcactgtaggggacct

SEQ ID NO: 360819 - DNA, 75 bp, Homo sapiens
agatcttccagaagcttcagggggcagagtcacaaagctgtaagaactatcatggtgaacttacttcagattgtg

SEQ ID NO: 360820 - DNA, 80 bp, Homo sapiens
ccgggccgggctgcgcccgcttcttgcaggtgtcagctgtgatgcatgtttaaaaggaaattttcgaggtcgcagatata

SEQ ID NO: 360821 - DNA, 82 bp, Homo sapiens
cgccgagtcctagcgcctggcctgcgcgccgctgcccgcgccacaggttttaaagacgctagagtgccaaagaagactttga

SEQ ID NO: 360822 - DNA, 76 bp, Homo sapiens
gcacaaccaacatgctttcttctgatacttcccaactgtcagaaaataatgtgtaagagaagaagaaggaggttcc

SEQ ID NO: 360823 - DNA, 100 bp, Homo sapiens
agaccctgagcctgaaggggaggcggaggacagatcctccaggtcctattgacaatactaagattgcagtcactaaatgtggtaatgtgatgcttaggca

SEQ ID NO: 360824 - DNA, 50 bp, Homo sapiens
attgagccgcgcacgctacagtacaaggacatgggcaagttttgcctcac

SEQ ID NO: 360825 - DNA, 83 bp, Homo sapiens
cctcccaagtatctgggactacagaaggaccctctattgtcccaggcctgtgttggctgcctggaggccttgcttgactacct

SEQ ID NO: 360826 - DNA, 100 bp, Homo sapiens
gtgatcgcgctgatgttcctggcctggggggaagacttaattcagtgcacaaatgagatgaatgtgaacatcccacagttggcagacagtttatttgaaa

SEQ ID NO: 360827 - DNA, 75 bp, Homo sapiens
aggagatcgtttcatcattggggaatcccaagctggtgaacaggaacgactgaagctggtgactgttttgggtgc

SEQ ID NO: 360828 - DNA, 75 bp, Homo sapiens
tggcctggctcaggcacaggctgagggcaggtgccggctgcggccaggtgccctccaaagaatttagaacgagtc

SEQ ID NO: 360829 - DNA, 83 bp, Homo sapiens
cagacggcctgttgtgggacagtctctgtaatcgcggaggagaagagggactccagaatggctgaggagaagaagctgaagct

SEQ ID NO: 360830 - DNA, 88 bp, Homo sapiens
tggattcaagtcccaggagtcctgaccagagagcagtcttcccatgcacaagatgattaatacagatcttagcagaatcttgaaaagc

SEQ ID NO: 360831 - DNA, 118 bp, Homo sapiens
acatggacatgaagaggaggatccacctggagctgaggaaccggaccccggcagctacaatgcagatcttcgtgaagactctgactggtaagaccatcaccctcgaggttgagcccag

SEQ ID NO: 360832 - DNA, 60 bp, Homo sapiens
cgaaaggcatctgtcccaagcaggagaacattgcagatgaggaaaatgaggcccaaagaa

SEQ ID NO: 360833 - DNA, 98 bp, Homo sapiens
cctctggtgcgaaattccggatttccttgggtcttccggtaggagctgtaatcaattgtgctgacaacacagaagcatcagatggtgaaggagaagga

SEQ ID NO: 360834 - DNA, 71 bp, Homo sapiens
tggttggcatttgctctgagcatcagtcacgggggccgctacctggtggcgctgggccacgcgtaccaccc

SEQ ID NO: 360835 - DNA, 49 bp, Homo sapiens
gtctccttaacaccgaacaccactgtgccctgtccacggtgcctcctgc

SEQ ID NO: 360836 - DNA, 50 bp, Homo sapiens
ggaggaggcgggagagagtgtggaggctatggaggctatgatgattacaa

SEQ ID NO: 360837 - DNA, 90 bp, Homo sapiens
gctcgcgacccccggcaacccggagaaggtctacagagcggcctgcgccagcgagcaggatgacgcaaaacacggtgattgtgaatggag

SEQ ID NO: 360838 - DNA, 76 bp, Homo sapiens
ctgcggcccgggccgggccctgaggggatccagaagtctgggcaccttctctctcaggaccagagaccaagccccc

SEQ ID NO: 360839 - DNA, 100 bp, Homo sapiens
atcctcatccctgactttgttaaacagacctctgaagagaagcccaaagacagtgaagaactcgagttctctttcaacatgttcgaccaccctattccca

SEQ ID NO: 360840 - DNA, 80 bp, Homo sapiens
ctgaggaccagcccctcacccccaccgggtcggatccccagagtggttgcagatatcaagaaagtcaacaacttcatcag

SEQ ID NO: 360841 - DNA, 100 bp, Homo sapiens
gcctggcctgcgcgccgctgcccgcgccacagatggagaggagaaaacctatggtggctgtgaaggacctgatgccatgtatgtcaaattgatatcatct

SEQ ID NO: 360842 - DNA, 83 bp, Homo sapiens
cccagcgccccatctccccaccctctcttctccaccagccaacgtccgggaaaaacgagatggaatgctggacagacatgagt

SEQ ID NO: 360843 - DNA, 50 bp, Homo sapiens
gggctccggctggtctgtggtgaggtcaaaatgcagatcttcgtgaaaac

SEQ ID NO: 360844 - DNA, 50 bp, Homo sapiens
ggaggggctccggctggtctgtggtgaggccttgtccatcaaaacctcat

SEQ ID NO: 360845 - DNA, 100 bp, Homo sapiens
ggaactcgactcttggcgccaccgcctcatgcactgtgtagctgactcaggtgttgacaccttggcagtgtttatggccagcagcggaactacagacgtc

SEQ ID NO: 360846 - DNA, 85 bp, Homo sapiens
ggtatgagccacacatccccgaccacttgcggcctgagtatggtgagaagccctaccactgcaactgggacggctgcggctggaa

SEQ ID NO: 360847 - DNA, 73 bp, Homo sapiens
gcttgccagccgaaacgatcaaggctccgactacgactgctactccgtgaatggggatgcggacagcgagggc

SEQ ID NO: 360848 - DNA, 80 bp, Homo sapiens
tggggactgcagagaagcaggacctcgggccatgggttgctgcagcaactggtcacacagtagtgttggtagaccagaca

SEQ ID NO: 360849 - DNA, 100 bp, Homo sapiens
agacaaaattggagagactgccatgaagcaagaagttggtgaaccatctaaagaagagaaggctgtggccaagtatcttcgattcaactgtccaacaaag

SEQ ID NO: 360850 - DNA, 75 bp, Homo sapiens
aaacattatttctaaagatcaactttacttagacatgtgcattgccattgcgatttctcttctcatgatcctgat

SEQ ID NO: 360851 - DNA, 100 bp, Homo sapiens
gcaaagccagcgttacagtaatgttccaggttcgagaacttgtcttggacaattgcaaatcaaatgatggaaaaattgagggcttaacagctgaatttgt

SEQ ID NO: 360852 - DNA, 90 bp, Homo sapiens
ccagcacacagaagccgagacgagacagggtctccctctgtcacccgggctgagtgcactggtgcagtcgaagcttgctgcagccgcgac

SEQ ID NO: 360853 - DNA, 83 bp, Homo sapiens
ccagctccgaaatcaccaccaagagctcaggccccggggcctccagcggcaccagcggagaccacggtgagctcgtcgtccgg

SEQ ID NO: 360854 - DNA, 100 bp, Homo sapiens
ctttccttcaaactacgttaagatgacgacagactcagatccaagtcaacagtctctatagtatcaaccctccttgctcttatggatggattagataata

SEQ ID NO: 360855 - DNA, 82 bp, Homo sapiens
agactttgaaaaggatgtagacattgcctgtcgatcaggtgaaagaacttgtcctggacaacagtcggtcgaatgaaggcaa

SEQ ID NO: 360856 - DNA, 84 bp, Homo sapiens
ccacgcaaccccagatccatttacactttacagtgtgagatgcacaatgcgaaacctaggccccagcttttacaccatgatgcg

SEQ ID NO: 360857 - DNA, 100 bp, Homo sapiens
gttctgctggctcgagaacgaagtaggccgtctcgctctgggtctccaggcccgcgaccgtccgccagtcgtcccgagcacggggtcactctggtgccca

SEQ ID NO: 360858 - DNA, 74 bp, Homo sapiens
acaaggacagcagcgactttggggcccgtcaccctcagacctgcctagagctggaacgttacctccagagcgag

SEQ ID NO: 360859 - DNA, 100 bp, Homo sapiens
gcagcttcaagcttaggaccacccaccatgcctatccagagctccacgcaggagatcggtgaggagctgatcaacggagtcatctactccatctccctgc

SEQ ID NO: 360860 - DNA, 82 bp, Homo sapiens
ggagctggacggcgagcgcgagcggcgcgagaaaatcagtcgcatcgaatacattcattcaaagaacttcatccaccgggat

SEQ ID NO: 360861 - DNA, 97 bp, Homo sapiens
cttggagatgcatttgctgacctgagtttgaagtcactagaacttcatgtttgccaagatggtggataagaatatttacatcattcaaggggagatt

SEQ ID NO: 360862 - DNA, 100 bp, Homo sapiens
cctgccccgccgaggcttgacccgatgccctaaatgagaccagggaatcagagacaaagctgaaggagctcccaggagtgtgcaatgagaccatgatggc

SEQ ID NO: 360863 - DNA, 100 bp, Homo sapiens
gtgcttttatattcatctcaaaaacaaaattctgaactcaggacttggcaagttcttggagtgtcaatgttttaataccagtacacaattaaatctgtgg

SEQ ID NO: 360864 - DNA, 75 bp, Homo sapiens
aaaaaacaaagtaatggttattatcactgtgaatcttccattgtgattgtaaataacagatgcgggtgaaagatc

SEQ ID NO: 360865 - DNA, 74 bp, Homo sapiens
caagctcgaggccaaaaccggcgtgaacaggagcttcatcgctcttgagtgaagacatttccacctggacacct

SEQ ID NO: 360866 - DNA, 100 bp, Homo sapiens
gccaccagaacccaagaagattccgataagaaacacgatatccaagaattttatgaggtgacattgctaaattctcaaaaaagttgtgagcagaagatag

SEQ ID NO: 360867 - DNA, 100 bp, Homo sapiens
gggacacacctccattggatttaaaagacagtcctcgtcagcactgactttcagctatggaatcgctccatgatgcgttatctgggtctggaaacccaaa

SEQ ID NO: 360868 - DNA, 90 bp, Homo sapiens
cctctggctgttgttcttttcttttccatgatatcattatatggacagtttaggattgctcgctgtaagcagctcatctgtgaccccagc

SEQ ID NO: 360869 - DNA, 90 bp, Homo sapiens
aaaaatcaacagaacaaaggaagagtatggctcctgaacctacacaggggtggcacagaatcaacaagatatgcagttcaactaatcaat

SEQ ID NO: 360870 - DNA, 98 bp, Homo sapiens
tggtggctgttttgctatgcagtggatgcttatctggtgatccggagatcggcaggactgaggtacaccaaaccgctcacctttgctgactgcattag

SEQ ID NO: 360871 - DNA, 75 bp, Homo sapiens
tctgcttcttcctcttcagtcaagtgcacgatctgattttctggagagatgtgaagaagactgggtttgtctttg

SEQ ID NO: 360872 - DNA, 75 bp, Homo sapiens
gcaattggaccaagagaacaatgggaaccagtctttcaaaatgtggaatgcatccttgggacatctttgcatagc

SEQ ID NO: 360873 - DNA, 132 bp, Homo sapiens
cggcggtggcggcggcaccaaggcccccaagccctccttcgtgtcgtacgtacgccctgagattgggaaaatgaggtacgttagtgttcgcgattttaaaggcaaagtgctaattgatattagagaatattg

SEQ ID NO: 360874 - DNA, 74 bp, Homo sapiens
tgcccccaaatgccgaaggccacgtaaaacaggtagaaaaactggcacggacacttttcttgtggaagattgag

SEQ ID NO: 360875 - DNA, 75 bp, Homo sapiens
gtatggactacgcgacctccaaggatgcccgtgagcctgttgtcggggccagggtcgggtgtgctgacagccggc

SEQ ID NO: 360876 - DNA, 110 bp, Homo sapiens
cctcaatctgctgtggtcagcacccctgcagatcatcctggcgatctacttcctctggcaggtggtggtaaatggaaatcccttctatgagtacgggcaccggcttcccc

SEQ ID NO: 360877 - DNA, 82 bp, Homo sapiens
gtttctctccctctgcccccccttccccacgcaaccccagatccatttacactttacagatgatcggctgaatgtaacagag

SEQ ID NO: 360878 - DNA, 75 bp, Homo sapiens
cagattcgcagtggtcgcttcttctccttggatgaacgtgaagccagagaaaatgtgaagagagagcaagatgag

SEQ ID NO: 360879 - DNA, 75 bp, Homo sapiens
caatttttgctatactcctgttctggggacagtttggtattaaaaacttggagaaagtatagcagcaaacaatgc

SEQ ID NO: 360880 - DNA, 51 bp, Homo sapiens
ctggactgctcagggtgccagacctcatccacctgtggaatcctctcaaga

SEQ ID NO: 360881 - DNA, 74 bp, Homo sapiens
aggaggttcacatctcccacgtgggccagcccatgctgaacttctcgtcatacagcagatggaacaaaaaaaat

SEQ ID NO: 360882 - DNA, 74 bp, Homo sapiens
ggcagggtctgaggtcatcggggatgtggacgaaggggccgacctcctagggggggccctcagcctcttggcct

SEQ ID NO: 360883 - DNA, 100 bp, Homo sapiens
aacgttgcaaactctggaaaaaaacttggtactaaggctcgtacgtctgcatcgattatcttacgtggggcaaatgatttcatgtgtgatgagatggagc

SEQ ID NO: 360884 - DNA, 75 bp, Homo sapiens
cggccggccgacccttcctgtcgctgacggcgactgcgggaggccaggcgctgtccacgccccgaggcctgggct

SEQ ID NO: 360885 - DNA, 100 bp, Homo sapiens
tcatcaaacagctatggtgatgattagagacatactaatgtacatggtatggatggcagaacagaaaatatcatatgataagaagaaacaagaagaattg

SEQ ID NO: 360886 - DNA, 82 bp, Homo sapiens
cacaatcttcaatgagtaaacatattcctcattttgaaagcgaagcagaagccgtagaatcagcggcgagcctgttgaaaga

SEQ ID NO: 360887 - DNA, 90 bp, Homo sapiens
gtcctacctgtcagagccccaagcttcgttccagagcccagcatgaatggatacgcggaatttccgcccagccccagtaaccccaccaag

SEQ ID NO: 360888 - DNA, 83 bp, Homo sapiens
gagaccatctaccagtctgcaagcgtcttcaaaggagccccacatgaggcttgggcactgtttaaaggaaagttccgagaagg

SEQ ID NO: 360889 - DNA, 100 bp, Homo sapiens
ggggatgaattcagcggaatggccagatgcccatatgatgccaaacatgccaacgttgcactgtttgcagcacaaccagctccacagccagtagttgcga

SEQ ID NO: 360890 - DNA, 100 bp, Homo sapiens
cccaaatgcaacacaaaccatctaagcgaagagtgagattccaagaaatagacgatagcttggatcaagtatcggttttatggagaacctgtaataaaag

SEQ ID NO: 360891 - DNA, 97 bp, Homo sapiens
aagagaaactcagcgctggggaagaaggtcagccaaagaggagcaaagagtcatccacctcaatcatgttcaggaaatgatcaggtcaagatgtgga

SEQ ID NO: 360892 - DNA, 90 bp, Homo sapiens
attcttgtggaatttttatgtattgagcatattgattatgctttggaaacaggacttgctgaattggcagagggggtcgatttgggagga

SEQ ID NO: 360893 - DNA, 100 bp, Homo sapiens
aaggattccaagtaactcttatttggtctgtccatgcggctgctggaatcaaaaaaaggcctctccttctttgcgtttgagcacagtgaggagtaccagc

SEQ ID NO: 360894 - DNA, 76 bp, Homo sapiens
cgggagaggtttggaattgatgatcaagatttccaggcatgtactggcattgaaaacattgacgaagctattacat

SEQ ID NO: 360895 - DNA, 100 bp, Homo sapiens
ggtctggtgcaccactcctcaggagcatctcagctcctggtggacccatgtggaaatgggacctccagatcccattctgggagtcactgaagcctttaag

SEQ ID NO: 360896 - DNA, 100 bp, Homo sapiens
atctcatgaagaagttatgcagaaaatcggtgaactctttgctctaagtccaccaatcgattactttgatgtatttaaagaatcaaaagagcaaaatttc

SEQ ID NO: 360897 - DNA, 80 bp, Homo sapiens
cttttgccacagcagttcctgcagcttccttgaggtggctattatcatggaaaactaatttttcccagagaatttccttt

SEQ ID NO: 360898 - DNA, 90 bp, Homo sapiens
ggagaacatctcgctgtcggtgaagaagtgggcatccccaccatcagatggtgcggggcagagggggactacaacgtcatggtgatggag

SEQ ID NO: 360899 - DNA, 75 bp, Homo sapiens
gggttattcgagtgaccgagaccgcggccgggaccgagggcgtccgacctccgatcatgaacgggcccctgcacc

SEQ ID NO: 360900 - DNA, 90 bp, Homo sapiens
aacgtgacgagcaatgatgaaagtccctgtgaagcaggaagagtgagggcaggttcactgcagctcagcagcatgtctgcagggaattca

SEQ ID NO: 360901 - DNA, 97 bp, Homo sapiens
ctctggtcacagtcctggggctgggctacttcgcggactctgtctactagtgacgatgtcgaagacagggaaaatgaaaagggtcgccttgaagaag

SEQ ID NO: 360902 - DNA, 143 bp, Homo sapiens
ggaaatgctggggcaagtggtcaccctcatactcctcctgctcctcaaggtgtatcagggcaaagaccctgtacccaagcctgtcatcaaaattgagaagatagaagacatggatgacaactgttatctgaaactgtcatgtg

SEQ ID NO: 360903 - DNA, 100 bp, Homo sapiens
tgggtacaatctagcgacaaaacaaactccaaaagaaggtgtgaaagttaacaaggagctgggctgaggatgagaaacagaaggcagagacagtacaggc

SEQ ID NO: 360904 - DNA, 100 bp, Homo sapiens
gtgagccttctcgtggcggcggggaccgtccagcccagcgattctcagtcagtgtaaacaggaacatcgataagtagtgtaaaaacttgcacaatgaaat

SEQ ID NO: 360905 - DNA, 96 bp, Homo sapiens
gaaatcattatcagtggtcacagaagtctctaccaatggtgcttcagaagtttcatactttcaggtgagtgtggctgtgaagtgcctgaagcccga

SEQ ID NO: 360906 - DNA, 100 bp, Homo sapiens
cccgacacaagagacttatggagaatatgttgcaagaaagctcaagtagcctatggagaggatgcaaggcttccagctgatgccctcagccaggctcagt

SEQ ID NO: 360907 - DNA, 98 bp, Homo sapiens
tggatgcagctgtggaatgtcaccgtggagaatgtcaagctgaaggcgtcctcttcttccaaggcagtcgtggaagggagaaaggtgaattcaccaat

SEQ ID NO: 360908 - DNA, 75 bp, Homo sapiens
cggagcaccgccttccggcagaagctggtcagtcaaatgtccagctgcagctgctgacagccattgtgaaactct

SEQ ID NO: 360909 - DNA, 75 bp, Homo sapiens
ggcaaacgagaattaaatgccgagaaggccagtacgtgtttctgaaagatctatccagcactccgatggccagca

SEQ ID NO: 360910 - DNA, 75 bp, Homo sapiens
tccttcggcagtccacccaccgccgccgcctcccaggtgagtgtggctgtgaagtgcctgaagcccgatgtcctg

SEQ ID NO: 360911 - DNA, 111 bp, Homo sapiens
gcggcggtgcgtgttgctgcgagtgggacgcgcactggtcggtgccggctcaggagccgggggagacttgcagctcctctgctgaaacgtttaagcctctccacatccaaa

SEQ ID NO: 360912 - DNA, 100 bp, Homo sapiens
gataatttccccagagcgtcttgatccttttgcagatggtgaaaggtgtagcagtcactcggcctacacccacagcatcgaccttgtgaacccagcgacc

SEQ ID NO: 360913 - DNA, 142 bp, Homo sapiens
ccggtgggtacgatctgtatcttttagccatgatggactgcatgttgcaagccttgctgatgataagtctccatcatcaccagttccagtagtgaaaaacagaacccaacaaactcaaaatacattacatttaccactaaaa

SEQ ID NO: 360914 - DNA, 75 bp, Homo sapiens
cccagggagaaaaaactgcaggcattaatgtccgaaaggtaaagatgagcccagcagctacacatgtacaacttg

SEQ ID NO: 360915 - DNA, 100 bp, Homo sapiens
ccatcaaccaggccagacccaaccgcaacctgaccttgaccaggaaggagcctgttggggctgccaggcgcccagctgtgcccagatggatgggacagag

SEQ ID NO: 360916 - DNA, 100 bp, Homo sapiens
gcagccatcaaccgaaacaacagttgccaccttccagagaagaggtacgagatgacaagacaaccataaagtgtgaaacctccccgccttcctccccgag

SEQ ID NO: 360917 - DNA, 100 bp, Homo sapiens
gaaattatgcgtgcacttaaagctgccagcaaggatgactcaatcatcactgttttaacagaggaagaaattgttgagcttccagatttggattacctgc

SEQ ID NO: 360918 - DNA, 75 bp, Homo sapiens
ccgagaccgcggccgggaccgaggagccaagattttcttcttcactcctcgcttggtggctcccagccagaggcc

SEQ ID NO: 360919 - DNA, 83 bp, Homo sapiens
cagcagcccagacgcggcacagagagggcctgggagcttgctgcagcttcagcttccccgggcgctgcctggacaggcctgcc

SEQ ID NO: 360920 - DNA, 102 bp, Homo sapiens
cgacaagccgctggcagccgcggatctcaccgccgctcaggttttgtaccaatggctagaagcagatcgtcatggcaagagccaaggtgctgcaaatacgac

SEQ ID NO: 360921 - DNA, 75 bp, Homo sapiens
acaagatcaccacggacgagatgatcaaacgcctgaagcatcagcgagagctttctaactgtcaaaggtgctgcc

SEQ ID NO: 360922 - DNA, 90 bp, Homo sapiens
atttgccttatgttatgggctatttgtgtagcagaagatttaggtcgatctcgagaactacagtatgtatacgtggataacaacattcac

SEQ ID NO: 360923 - DNA, 75 bp, Homo sapiens
tgctgaggactcagaccggtctctgcaagaacattgtatgcaaacctgttccattctttcttcgtggacaaccca

SEQ ID NO: 360924 - DNA, 82 bp, Homo sapiens
catgtcagacgcagccgtagacaccagctccgaaatcaccaccaagggctgggttacgacccctacaaccctgagctgccca

SEQ ID NO: 360925 - DNA, 83 bp, Homo sapiens
tgacgtttttccctaatctgatgggtcattatgaccagagtattgccgcggtggaaatggagatggaggagatgtataagaaa

SEQ ID NO: 360926 - DNA, 90 bp, Homo sapiens
tacaacctgaacttctcaggaagcagtactattcaagaggtgattgatgagatttatcgtgtgttgagatatgtcaattctaccagagcc

SEQ ID NO: 360927 - DNA, 74 bp, Homo sapiens
tctgaccaaggaggtgatggtggatgacaggctagtcacaatgcaggtattaatctctggagaagacacatcca

SEQ ID NO: 360928 - DNA, 100 bp, Homo sapiens
cacagttaccaagaagacttatgagatctggcatcgacggcatgactactggctgctagccggcattataaatggcctggacaatgctggaaagacaacc

SEQ ID NO: 360929 - DNA, 75 bp, Homo sapiens
ggaagttaatgtttacggcgaagtctactcaacgtttccaaggtatgaggatacatgggctgcacttcacagaag

SEQ ID NO: 360930 - DNA, 100 bp, Homo sapiens
aactacagaaacctcgtctccctggcggacaaggcaaaatctcagcaagttcggacctctagtacaataaggcgaacctcctctttggatacaataacag

SEQ ID NO: 360931 - DNA, 100 bp, Homo sapiens
ttcatattttggaaagcagtttttaagacaaattgtagatgtctttatggaatacaatctaattcagcagtgtactgcattcttgcttgatgctctgaag

SEQ ID NO: 360932 - DNA, 100 bp, Homo sapiens
caatctttggtaaaactaagatccagaatgctgttcactgtactgatctgccagaggatggcctattagagatggagtcttactctgtcgcccaggctgg

SEQ ID NO: 360933 - DNA, 75 bp, Homo sapiens
caggaccgcaagtcccgtcttatgggacttgaggccctcaaggttctgtttggattctgcaaagcagactcgtca

SEQ ID NO: 360934 - DNA, 100 bp, Homo sapiens
gggcggccgggtccgcatcgagaagatgagctcagaggtggtggattcgaatccctacaggtgcttgtgagtgaggattctgacagtgatggcattgtgg

SEQ ID NO: 360935 - DNA, 100 bp, Homo sapiens
tctgacgaactactctcaggcagtgttctcagtagtccgaactctaatatgagcagcatggtagttacagggccgcgatgggcctcttggaacattggtg

SEQ ID NO: 360936 - DNA, 100 bp, Homo sapiens
tgaaaaaggaagacgagccacctgagcaagctgagccagagcccacagaagcatggaaggctccagcctatgccgtcctgaagagcattatccaggccgg

SEQ ID NO: 360937 - DNA, 74 bp, Homo sapiens
aaaaaagctgaaggcaactatggatgctgggaaactggactcagtggcctttgaggatgtggctgtgaacttca

SEQ ID NO: 360938 - DNA, 82 bp, Homo sapiens
aaggagttcacgttcatgggcgagggaacagatgagaaacccggcaatgaaatgcagtcattggagaaatcgatgaagaaac

SEQ ID NO: 360939 - DNA, 83 bp, Homo sapiens
agggcctgccaggtggcgctcgacacgaatgcagagtttgagtccagatcccaaagcccagtacacaagtatctacggagccc

SEQ ID NO: 360940 - DNA, 98 bp, Homo sapiens
gagccccgtcctccttcgccgccgcgcacaaccgcacgtgcagcaaacggggattcagcgtccgatcctttggaacagggactcacgtgaagcttcca

SEQ ID NO: 360941 - DNA, 87 bp, Homo sapiens
tgactgaggctagtgggaagcttcacctgctggataagctactagcattcctgtattctggcacgcttcctgggctgttacagtcaa

SEQ ID NO: 360942 - DNA, 51 bp, Homo sapiens
cctctaacctccttaatctgtcctttcagcaatggattggtgactgtgatg

SEQ ID NO: 360943 - DNA, 100 bp, Homo sapiens
ctactataaagctttggaagatgcagatgagaaggttcagttggcaaaccagatatatgacttgcctcttagcaaatatccggctgtgatcaatgatatt

SEQ ID NO: 360944 - DNA, 100 bp, Homo sapiens
ggagagttccagcacactcgaccaccccgcggcttcctggaggcggcggccgcgattgcgaggtagaacgtcatgacatgaataccttaagcctgcccct

SEQ ID NO: 360945 - DNA, 76 bp, Homo sapiens
agaagtatgagcttgctcacccaccagaggagtggaagtgctgctacccccgtatgatgatgccactgtgaatggt

SEQ ID NO: 360946 - DNA, 50 bp, Homo sapiens
tttgaagtatttgacgaaaatagactgattttaggtgatgggcaagtcag

SEQ ID NO: 360947 - DNA, 90 bp, Homo sapiens
aaacacataaagtttccggaaatcttagatttggctcctttttgcacccttaaatgtaagatctggcaccactccttctacaatgagctg

SEQ ID NO: 360948 - DNA, 95 bp, Homo sapiens
gcacctgcgccgccagttcgccagccaggccaatgttgtggggccctggatccagaccaagatggagtttgtgatggacgcctctgaccccaccc

SEQ ID NO: 360949 - DNA, 50 bp, Homo sapiens
caatgggggaccagattcgtgtggatgtggtttgtggatgcacttagatg

SEQ ID NO: 360950 - DNA, 101 bp, Homo sapiens
gagaagtttaagagaagaaatggacatgattgcctaaatcagccaaacacagggttgcaaaagcttctcatttcagagagatgccaggatcctaagtgcct

SEQ ID NO: 360951 - DNA, 101 bp, Homo sapiens
gaaatttataacttgtcagcaaactactttcaggagaaaaaatgagccgtcagactgctacagcattacctaccggtacctcgaagtgtccaccatcccag

SEQ ID NO: 360952 - DNA, 101 bp, Homo sapiens
cgccgctgccaacgtcgagcggcgacggctgatggactagaggcttttaccagatttcttaaaactgaattcagtgaagaaaatattgaattttggatagc

SEQ ID NO: 360953 - DNA, 90 bp, Homo sapiens
gcaaggagcacagcttccagcatcccttcctccagggccccggagctgcagttctacaccagcgccgctgcggtggccatgctcgtcccg

SEQ ID NO: 360954 - DNA, 100 bp, Homo sapiens
ggaagacatggccactccagtcggtgttgagcacggcgagcagtctcaggcctttagtgatgatggaactgtggctgcaccatctgtcttcatcttcccg

SEQ ID NO: 360955 - DNA, 75 bp, Homo sapiens
ccgctggcagccgcggatctcaccgccgctcaggcctaagttcgaggcccaggcgcctccatcagcgccgcctgc

SEQ ID NO: 360956 - DNA, 48 bp, Homo sapiens
gtgaatagagcttctaaactggcaacctaatgaggcctctcttgaatt

SEQ ID NO: 360957 - DNA, 75 bp, Homo sapiens
ccagcgggtcctggaggctgctaacctcttccagggacgccagaccttccagcgttttgataagttcaatgacaa

SEQ ID NO: 360958 - DNA, 100 bp, Homo sapiens
ttcgcgtcccctgcaccatgagctggggcaccgagctctgggtgtcagcttcctctggtgcaaccagcaagtcttccagtatgaatcccacagaaaccaa

SEQ ID NO: 360959 - DNA, 83 bp, Homo sapiens
ttttcctgtcgtacgtgggacaggccacgctgtccgtccgcagtaccgacgcctgcaggtactccaaagattcaggtttactc

SEQ ID NO: 360960 - DNA, 75 bp, Homo sapiens
agagcaagagctggatctcgtctttctgaacgtcaaggtcgtgggaaataaaaggcagttctacacagactgcag

SEQ ID NO: 360961 - DNA, 75 bp, Homo sapiens
caaaacaatagatgcttctgtcagtaagaaagcagctgatagcacatcacaggattcctacaggaagcaagtagt

SEQ ID NO: 360962 - DNA, 100 bp, Homo sapiens
gcagaaggttgaagaacaggaggacctgaactgccaggaggaggaggaccctatgaacaaactcaagggccagaagatcgtgtcctgccgcatctgcaag

SEQ ID NO: 360963 - DNA, 101 bp, Homo sapiens
gacggacggcagcggccaagcaagaagaaagacgtggcagcaagcgggagtcggggatagtgtcatcggttcggagttgtaagacgttcatcgccgtgtta

SEQ ID NO: 360964 - DNA, 95 bp, Homo sapiens
ctgcaagatcgaggctgtcctctggtgagaaggtggtgaggcttcccgtcatattccaggatgaggatgggacagaagaggataacagtcgtgtt

SEQ ID NO: 360965 - DNA, 100 bp, Homo sapiens
atgcgcccctaccgattgacatgcgacaccaggaaggaaggtaccattacgagcctcattctgtccacggtgtgcacggcctcacagaatgaggttcctg

SEQ ID NO: 360966 - DNA, 100 bp, Homo sapiens
ctgcagaacctcacggccggaagtggaccagaaaggttatttgtcaatgaagaaaatgttaatgagtttcttgaagaggtcctgagctctccattcaaac

SEQ ID NO: 360967 - DNA, 75 bp, Homo sapiens
ccaccaaagggggctgctgaccgagagagctcactcagccaggcactgacccttgacctccggtggctcccccat

SEQ ID NO: 360968 - DNA, 75 bp, Homo sapiens
tcgtgtgcctgatgatcacgcagctggctggcttcagtggaccaccctctgcccgaggagatgctcagctacgcc

SEQ ID NO: 360969 - DNA, 83 bp, Homo sapiens
cgtaaacaaccctgaagagaacagccaggcctggagtccaggcatgataaagaaaagatagaaaagaaagagaaacgggacag

SEQ ID NO: 360970 - DNA, 99 bp, Homo sapiens
cggcggggtccgggccggagtacgtcgttcccgctgcgctaggggaagcgggcagcgagtgatagacagccaagcagagaaactgaaggagcttgacaa

SEQ ID NO: 360971 - DNA, 149 bp, Homo sapiens
aagtggattctgcttcccctgggacagcactgagcgagtgtggagagaggtacagccctcggcctacaagctctttagcaagaagtctatgtgccccaggatcctggattacctgaggaagaagagatcaaggaaaaaaaacccaccag

SEQ ID NO: 360972 - DNA, 82 bp, Homo sapiens
atactatccgtttgttcaggaaccaccagtgacagattggagtcattcgttgcccagtttgcagccaagaatgtgcagagag

SEQ ID NO: 360973 - DNA, 85 bp, Homo sapiens
catgctgatggtcttcttaaggatttaatgagagcatcttatccttgcatgtctcttcatggagatggagtgtcgctctgtcgcc

SEQ ID NO: 360974 - DNA, 50 bp, Homo sapiens
tggcggctgacagtcgggaggagaaagggctggttgatatgtgaagagcc

SEQ ID NO: 360975 - DNA, 50 bp, Homo sapiens
gcgctacctcttcaccttcctcaaccattcgtctgacaaaagtgtaaaag

SEQ ID NO: 360976 - DNA, 100 bp, Homo sapiens
aggagggcacattccttttcacctcagagtcggtcggggaaggccacccaggtcttaaacgaatatttccacaatgtctgtgaactggacctggtgttca

SEQ ID NO: 360977 - DNA, 101 bp, Homo sapiens
atcatgtcgcgttacgggcggtacggaggagggccctgtggtaggaggctggtacaaggttttggatcggttcatccctggcaccaccaaagtggatgcac

SEQ ID NO: 360978 - DNA, 90 bp, Homo sapiens
gaaaaagaaactaaaaaatggcagctctcagaatgggaagaatgagagaagtcatatgcccggcacagaaaatggttctcctgaagaaca

SEQ ID NO: 360979 - DNA, 90 bp, Homo sapiens
ggtcaagcgggccacgcacctcgtcaccaaggccaagctggtcctatagtacccctcctcaggaatgtctccccagtgcaaggacaaaga

SEQ ID NO: 360980 - DNA, 97 bp, Homo sapiens
gtgccgacaagatggcggacggggagctgaacgtggacagcctcatcacccggctgctggaggggactggtgattgcagctggaagtgcccatgacc

SEQ ID NO: 360981 - DNA, 87 bp, Homo sapiens
cacatgaccagcttagcttctgtcctaaagaactctcttgatagagcccaagcagccaagaataaaggcaataaatattttaaagca

SEQ ID NO: 360982 - DNA, 100 bp, Homo sapiens
agctatccttagcagagcaccctggagtctgcaaagtgttaatccaggcctaaagacaaagcagcccgacggccatggaggctgaagagacgatggaatg

SEQ ID NO: 360983 - DNA, 100 bp, Homo sapiens
ctgcgtcccacctagaatctgctggctactacttgaaggccttgggaactccaagacagaatggcccgaggcctggacactctctgaggacatctctgca

SEQ ID NO: 360984 - DNA, 100 bp, Homo sapiens
cccaggctcagtctgtccatcatcaaagaccaggttcaagggtctctccagaaaatcttgtggacaaatccaggggaagaaaacatagctctgctggcag

SEQ ID NO: 360985 - DNA, 143 bp, Homo sapiens
gcctgggcgggcgcagcgcggccaccgccccgggacccgcgccgctgccctccggctccgcgggcggcccacggcgaggttgctgaaaagccaggagtcaaaatgactgagcgctttgactgccaccattgcaacgaatctct

SEQ ID NO: 360986 - DNA, 75 bp, Homo sapiens
gctttccaatccccagagtagcaaatgttgaaagaagttgcacagatatttggagttcttacaacatggcagaca

SEQ ID NO: 360987 - DNA, 76 bp, Homo sapiens
acactgaccaccaggccaacttaacatcagcagatatcctgtctcagatgaagagtctggctcttgctgattgaat

SEQ ID NO: 360988 - DNA, 100 bp, Homo sapiens
ggctggggtgccaagtggcgcctgctgcgtcagagctcaaggaatctgtgcccaccaccagctcctggtccgtaggagcccgtggaccgggagcccgtgg

SEQ ID NO: 360989 - DNA, 98 bp, Homo sapiens
gcgatgcgggggctgctgcaatgacgagggcctggagtgtgtgcccactgaggagtccaacatcaccatgcagatctgtgacttcctccgcggagcca

SEQ ID NO: 360990 - DNA, 83 bp, Homo sapiens
tacccgtccatcatagtcaactgcgtggaagagaagattaaaacacgtaaaggtctcatttcaatatttgagcaaggtaagac

SEQ ID NO: 360991 - DNA, 75 bp, Homo sapiens
actccatgaagaagaacaggaaaggaaacgcatgcaagctaaggcagctgagagagttggccatggagataagaa

SEQ ID NO: 360992 - DNA, 90 bp, Homo sapiens
gtggaagctcttcatctacaacccgaccaccggagaattcctggggcgcaccgccaagagctgggaatcaaatatggctgagaagcaagc

SEQ ID NO: 360993 - DNA, 96 bp, Homo sapiens
acatatttttggacctgaaacagaaattctggaacacctatatggtaagtcagtaatgttgtatgcagcagaaatgatacctaaactaaaaacaag

SEQ ID NO: 360994 - DNA, 98 bp, Homo sapiens
tttttactctccttttgcaagcaaaacactcccactgaggttcattgtcggatcctccaaatattgctggcttaagtcatttttgtgaacatatgctt

SEQ ID NO: 360995 - DNA, 82 bp, Homo sapiens
tgtctgcctctgatctcgatgttgctgacaggaccaaatttgataaggttgatggaagtagttccacattaagcatgagcac

SEQ ID NO: 360996 - DNA, 100 bp, Homo sapiens
aaaagcaagctcacaagaaagagcaccatatgtgggggtgctcaaaggatttaaaggagaactaattcatgtatttaacaaacatgatggtgccttgagg

SEQ ID NO: 360997 - DNA, 76 bp, Homo sapiens
gtccagtttcccttatgggagtccttaaaaactctttttgatcagaacaatgctgcaaaaaaagaagagtcagaaa

SEQ ID NO: 360998 - DNA, 102 bp, Homo sapiens
cccaatgtctcctgcacgtgcaactgcaaacgctctttgttccagagcatggagatcaggggatatgagactttctactcggaatatcctgagtgttgcgtg

SEQ ID NO: 360999 - DNA, 98 bp, Homo sapiens
ggagatgcctgctgatgtgaatttatcccagaagcctcaggtcctgggtccagagaagcaggatggatcttgcgagggaggagctgtgcagtgagaag

SEQ ID NO: 361000 - DNA, 100 bp, Homo sapiens
ttttctgcaggccccacgagtgggaggtgctgagccgctcagtataccaaatactacattcaccgaattccaagaagccgggaggttcagcagtcctggc

SEQ ID NO: 361001 - DNA, 75 bp, Homo sapiens
catgaacggatggatgtgatgcctgctagccaaaagggtacagagtgaagacagtgtcctcctgtttgttattgc

SEQ ID NO: 361002 - DNA, 97 bp, Homo sapiens
ttctggaatgtcttgggggttttgatcctgtcactgtgataaccctccttcctccacctcacaaaaactcacaagctgcaacccttctgatgtccac

SEQ ID NO: 361003 - DNA, 82 bp, Homo sapiens
gacggcggcagcagcggcattcagaataccaagctgctattttacacttgaagagggagcacaaagaagaaattgaaaacct

SEQ ID NO: 361004 - DNA, 100 bp, Homo sapiens
acttgctattatgggggaaagcaagctccgccgcatgcaagagatgattgcaaggatgcaggcgcagatgcagatgcagatgcagggcggggatggcgat

SEQ ID NO: 361005 - DNA, 97 bp, Homo sapiens
aggctcactggacatatacgctgggttggacagtgctgtttctgctgggcttcgctgacttgaacctggccgagtttgcgggctcgggctccacggt

SEQ ID NO: 361006 - DNA, 100 bp, Homo sapiens
cctcagtttgtgcaggacaccgacatggaacagggactcactggggggattattgtcattcaaggatatatctatggagttcacctgggatgaatggcag

SEQ ID NO: 361007 - DNA, 100 bp, Homo sapiens
tggagaactattaactgcctttcttctgtgggctgtgattttcagaggggaatgctaagaggtagatgacattaatgctgataagaatatctcttctgca

SEQ ID NO: 361008 - DNA, 100 bp, Homo sapiens
atgggctggcgggaaggctctggcttgggacgaaagtgtcaaggcattacggctcccattgaggtaagtgttcattggatgggtgtacctcgtttttaaa

SEQ ID NO: 361009 - DNA, 106 bp, Homo sapiens
gaaggcagtggacacacagcatggagaaatccttcgcaatgtcaccatcctacgagagtgtgaacatggctacgcctcttcattcccgtccatgccgagcccccga

SEQ ID NO: 361010 - DNA, 115 bp, Homo sapiens
caagatgtctgacatggaggatgatttcatgtgcgatgatgaggaggactacgacctggtactccaaagattcaggtttactcacgtcatccagcagagaatggaaagtcaaatt

SEQ ID NO: 361011 - DNA, 74 bp, Homo sapiens
tgcaccgtatcctgtcacttctggatgtgagatggtatagctgcatgctgggaaagaaatgcagcctggcgcct

SEQ ID NO: 361012 - DNA, 75 bp, Homo sapiens
cgcagtctggaaagctttaggagttcacagtgtgcccctgggcgctgggattgctctagcctgtaagtataatgg

SEQ ID NO: 361013 - DNA, 100 bp, Homo sapiens
cttgtcctatgatggcagcagttatactacgtatatgaaagaggaagtggataggcttagaagacaatacgtcaggaaatatgaaggagaagctgaggaa

SEQ ID NO: 361014 - DNA, 75 bp, Homo sapiens
gttttgaataatttctgcatgaatagaccagtaagagagtttattaaccacttaacctctcagaactgaacaaag

SEQ ID NO: 361015 - DNA, 75 bp, Homo sapiens
cgtcttccgctgcatccccatcttcggcatgtccttcgcctgccagtcgtacggacattgctgcaggagaagagg

SEQ ID NO: 361016 - DNA, 74 bp, Homo sapiens
gaggctgagaatccagagaaagatctctgaccactaaatctgtgtgcaggggacggcaaaacagaacagaaagg

SEQ ID NO: 361017 - DNA, 98 bp, Homo sapiens
ctggagttcatcttccacgtggtcctcagcatccactctagaagccaaagccaagtgagaaaaaacgcaagcctgcatggaccgatcgcatcctgtgg

SEQ ID NO: 361018 - DNA, 100 bp, Homo sapiens
gcgggcagagcactgcgccgtttgggaacgcaactttgaggagacagtgcggtggttaggaaaaatgaggctgacaatcccatgccgtgcagtgacttgt

SEQ ID NO: 361019 - DNA, 100 bp, Homo sapiens
aacacaagtacctaatcatagtttatctcacagacagcctgagacagttcttacggaaacaccccaggacacaattccggaaaactcaaatatatgtgag

SEQ ID NO: 361020 - DNA, 98 bp, Homo sapiens
ttctacacaacaaaacattcatggagggggaaagtcttctacattcatgctgtagaagctatgaaagtcgtgggaaactatagagtcaacactgcaaa

SEQ ID NO: 361021 - DNA, 100 bp, Homo sapiens
ggacttgcatcaggagtagcaaaaataagcgggttttgaaaacaaaaaaaagaaggagtggaagagggggccaggatccaggcctccatccccacagaag

SEQ ID NO: 361022 - DNA, 98 bp, Homo sapiens
cggcggccgggccctcgagacggggacggtagaacgtcatgacatgaataccttaagcctgcccctgaacatacgccgaggggggtcagacaccaacc

SEQ ID NO: 361023 - DNA, 98 bp, Homo sapiens
agcgacccaagcgccgcggttaaccacgtctcgtccacgacctccctagaattcaaagaagctttttcactatttgacaaagatggtgatggaactat

SEQ ID NO: 361024 - DNA, 130 bp, Homo sapiens
tggataagaaatcaaaaatctggtgaaattgccggcaagagggagttaaggacattccaggcagaggcaaggtaccacaggttgaagtgtatttttttgtggaactatatgaagctactgctggagcagc

SEQ ID NO: 361025 - DNA, 89 bp, Homo sapiens
tcgtttcagaagcaaccttgggcttagtcccaccctttttaggcactcttgagaaatcagtgcctccggagccagcgtggtggccatag

SEQ ID NO: 361026 - DNA, 75 bp, Homo sapiens
caaaccgagctcccgtctgccttgcaggccacagaaacactattcagaatgggtgtagcaagaggaaccatcaca

SEQ ID NO: 361027 - DNA, 90 bp, Homo sapiens
ctcatccgagtgcgtacttagaaatgagtccatacttcttgctcaggaaatatctaatgagggctggtggacgaagccattgataccaaa

SEQ ID NO: 361028 - DNA, 100 bp, Homo sapiens
ccgccgccgcccctgttgcgatggcgcagaaaccccgttgacaaggcactgctttttcatgacgctgaactagatgcagagcacgcccagaaggtcctgg

SEQ ID NO: 361029 - DNA, 100 bp, Homo sapiens
aacagatgtggaaaaatgtttacttcagagaaaggggttgtggaggaatggttgtcagagtttaaggaagaggcagaaatccaggcagaacttgaacgtt

SEQ ID NO: 361030 - DNA, 82 bp, Homo sapiens
atctacctgatcaatgacgtgctgcaccactgggcctggagtccctcggctgcatccggaagcgctggctgagaaagccaag

SEQ ID NO: 361031 - DNA, 100 bp, Homo sapiens
gtggaatccatgtttctggacgcggatttttggcctcatactctgttatagataaacaaggtcgatttggtcagacaacgccaccacttgttgattttct

SEQ ID NO: 361032 - DNA, 80 bp, Homo sapiens
gtgcccgagaatagctccgtccagcagcctacaacacagcagtcccctcaggatgagcaggaaaagctcttggatgaagc

SEQ ID NO: 361033 - DNA, 80 bp, Homo sapiens
aataccgtctggacctgctcacccaggcgggcgtcgacgtcatagtcttgacaatgcagatcttcgtgaagactctgact

SEQ ID NO: 361034 - DNA, 75 bp, Homo sapiens
cctgtacagcctgcagaactgtgagcgacctgtgagagtttatgccgatggaatatttgacttatttcactctgg

SEQ ID NO: 361035 - DNA, 100 bp, Homo sapiens
ccatgacccgcagaccaccaacctcctgtatctggagctgggagacaagcccgcgcccaacaccttctatgtagggctactacaaagttctgggaaaggg

SEQ ID NO: 361036 - DNA, 100 bp, Homo sapiens
agtgtaaaatcagagcagcttgagaactgcgacacatcaccaagctgaagccctggagcctctttgatgtacttgtggaaaagtatggctggccccatga

SEQ ID NO: 361037 - DNA, 83 bp, Homo sapiens
tgtattttgtgatcgcagcgatgaaaggtaagtaaggaggtctctgtaccatggctcgtacaaagcagactgcccgcaaatcg

SEQ ID NO: 361038 - DNA, 105 bp, Homo sapiens
agagcctggagtctgcgaaggccgggacccggttccccggcccacagtgggggtgtgcaaacccgagagaactgggagaagatggtataaactggtccatcagtg

SEQ ID NO: 361039 - DNA, 90 bp, Homo sapiens
atcatgaaaccatccgaaactatgctcaggtctcctctgagcctccggcctccataagacccaaaacagatgacacctcttcccagtccc

SEQ ID NO: 361040 - DNA, 100 bp, Homo sapiens
ctctgagggagggtccgagccagccgctgttttgccggaggagcccctcaggccgcaatgaatcgctccctggctaatgtgattcttggaggctatggca

SEQ ID NO: 361041 - DNA, 100 bp, Homo sapiens
cgacgacggcaccaacaccttcttctggagcaggccgggctctcgccatgggtcactgtcgcctctgccacgggaagttttcctcgagaagcctgcgcag

SEQ ID NO: 361042 - DNA, 50 bp, Homo sapiens
tagttttggactccattgccgcactgcagcaaaatgatgcttcaacaccc

SEQ ID NO: 361043 - DNA, 74 bp, Homo sapiens
ttatttcagaatggagaatttgcaactcatcatagtcctggaaggttatagagatggaatagatgctggcaaag

SEQ ID NO: 361044 - DNA, 100 bp, Homo sapiens
cctgctgcgcaggataaaaggcaaactcttcacctggttttaaaatcaaagatgggaaaatcggagaaaattgcccttccccatggccagcttgttcatg

SEQ ID NO: 361045 - DNA, 100 bp, Homo sapiens
gagtcctgaccacaatggggaggacaacttcgcccgggacttcatggaagaagaaatgccagaggtagaaattgacattgatgatcttcttgatgcagac

SEQ ID NO: 361046 - DNA, 98 bp, Homo sapiens
caaaatgaggccttccctggccccaagcgttggaaggtgcagaggataaggaggcactgctgattgaagacacactcagcaaccacacggatctgaca

SEQ ID NO: 361047 - DNA, 75 bp, Homo sapiens
atggcatcatcgtgtttggcacccggatcctggatgaggaggtgtttgagggactttgaacatgtcggggatcgc

SEQ ID NO: 361048 - DNA, 51 bp, Homo sapiens
ctgaactcaggacttggcaaccactgtagtctgcagatcaaagctctggcg

SEQ ID NO: 361049 - DNA, 75 bp, Homo sapiens
gcccgtagtgtggaagcagcttcagatggacactgacgtcgttgtcctcacaacaggcgtcttggtgttgataac

SEQ ID NO: 361050 - DNA, 51 bp, Homo sapiens
gcctgaagcaacaactacagcatttgaatggggcagctggcattttatgct

SEQ ID NO: 361051 - DNA, 100 bp, Homo sapiens
aaacagttactgtgatgaatgtctggagcaagccatcctctctcctggacagaactcggggaattactttgctcctataccattggaagaccatgctgaa

SEQ ID NO: 361052 - DNA, 75 bp, Homo sapiens
ttccatcaataaatcatgactgatcttgtagcgctctgaagggctccaagaagctggtgctgtctgtgtactcag

SEQ ID NO: 361053 - DNA, 96 bp, Homo sapiens
agcctcctgcagatcatggacgtgggagaaaatcctccacctccgggtttcataatgcatggaaatgttaatccaaatgctgctggtcagcttccc

SEQ ID NO: 361054 - DNA, 100 bp, Homo sapiens
ttacagagaaaaaaccaacaccttcctgtgcagtcctgttggaatttacctacagatttgacagtgaagtgcttctcaaagtgctttcaaaataaattac

SEQ ID NO: 361055 - DNA, 76 bp, Homo sapiens
tcgcgctgctgggcacccacggagcctccggggctgaaattccgggtagatatgcctggctcaggcagtgcattca

SEQ ID NO: 361056 - DNA, 90 bp, Homo sapiens
gcattatgaacgaattctcaacccctacaacttattcctgtccggagacagcctaagggtttatcttgcagattatggactttcctacag

SEQ ID NO: 361057 - DNA, 90 bp, Homo sapiens
gaagaagtacctgagcaagaccggccgggaagatattgttaatcctgccagtctttctcttcaagccagggtgcatcctcagaaacctac

SEQ ID NO: 361058 - DNA, 100 bp, Homo sapiens
ccaggattggaatattgtgaagttcaacgagatccttattcaaattatgaaatggtggagtcaatgaagaaagtagcagggatggatgtggagctgacag

SEQ ID NO: 361059 - DNA, 82 bp, Homo sapiens
gtggatttcgaggagtgtctgaaggactcgccccgcttcaggtcaaaatgcagatcttcgtgaaaacccttaccggcaagac

SEQ ID NO: 361060 - DNA, 100 bp, Homo sapiens
gcatgaccccagtgctgcctgcattcgcggggcatgttcccgaggctgtcaccaggtagagcaggtctctctgcagccatgtcggccaaggcaatttcag

SEQ ID NO: 361061 - DNA, 110 bp, Homo sapiens
atttaggcattggaggagctgtggttgtaacactctacaagatgggttttccggaagccgccaggataagttctgaacgtcgaaaagaaaagtctcgagatgcagccaga

SEQ ID NO: 361062 - DNA, 75 bp, Homo sapiens
gacgcgggcagccatggccgaagcggcgcctgcccgggctgttttggagtcagcggaagatcaccaaggccaggg

SEQ ID NO: 361063 - DNA, 80 bp, Homo sapiens
cttctatggagtggcgtttactaccagttcgatacaagaggctgttttcctagcgtggcttgctgcctttggtaagaaca

SEQ ID NO: 361064 - DNA, 101 bp, Homo sapiens
ctcaggccgtccgagcccttcctgaccccgtacctgctggggccggacaagaacctgaccgagagggaggcgcatcccggggaaatggtgggggctctggc

SEQ ID NO: 361065 - DNA, 82 bp, Homo sapiens
ccagcactcctttaaagtgggcactgcaaaagtgaggaaaggagcagtggcttccggttgaagccaccaacgctgatccacg

SEQ ID NO: 361066 - DNA, 87 bp, Homo sapiens
gggaactgatggcgttcctgttacctctcatcattgtgttaatggtgaagcacagcgattcccttgatcgtggaacagcaggatgag

SEQ ID NO: 361067 - DNA, 51 bp, Homo sapiens
taatacatcatgaactgcaggatgtgtatatctcatgattgatatggagaa

SEQ ID NO: 361068 - DNA, 75 bp, Homo sapiens
cacttaagaaagtttctcagaagtaaaatggacatacctaatactttccagagcagttcatacagtagattttac

SEQ ID NO: 361069 - DNA, 100 bp, Homo sapiens
tgccagcaaacgtctacactgtacatgctttttattacaagactacggagcataggaggaaaattcatcatctggtgagtgctccagttgtaacatctac

SEQ ID NO: 361070 - DNA, 75 bp, Homo sapiens
cagccgagtcactactgcctgcctgcctgcctgctacgctgccactgcagagccccgccatggaagacacgccgt

SEQ ID NO: 361071 - DNA, 50 bp, Homo sapiens
ctggcccggaaacaggaggacgcctccggaatgccccccgctgctgggca

SEQ ID NO: 361072 - DNA, 74 bp, Homo sapiens
ctcgtatgcaacctcaggcttcagccagtttaaccaccaaggactctgagagctggcaggtctgagtaaccctg

SEQ ID NO: 361073 - DNA, 100 bp, Homo sapiens
attgatcttacacaagtaaaagccggatgcgcagtgatggttttgatgaagaaagtcaaagatactattggaggccaaagaatgaaatttctgggacact

SEQ ID NO: 361074 - DNA, 98 bp, Homo sapiens
cccatgactgctctgcttatactggctggacagttcgtaatggacctgaaagtggcagcaagattatggttcagtttcctcgtaaccaatgtaaagac

SEQ ID NO: 361075 - DNA, 90 bp, Homo sapiens
caaatatgaagaaagaagctctgtcacaatcaaggaccaagaactatatttctttcatgaactcagccctggaagttgcttttttctgcc

SEQ ID NO: 361076 - DNA, 50 bp, Homo sapiens
ggctattcatttattctcaccaggcttccatgaggcaggctgaacctgca

SEQ ID NO: 361077 - DNA, 76 bp, Homo sapiens
tagattctatagctgttgatggctcaggaactaaaaccaccaaatcccattgaatttctagcatcttatcttttaa

SEQ ID NO: 361078 - DNA, 90 bp, Homo sapiens
ctcggacaagtacttcgacgaacactacgagtaccgtggacagtttgcggttgtgaagaaatgccgtgagaaaagcaccggcctccagta

SEQ ID NO: 361079 - DNA, 122 bp, Homo sapiens
tttctagtaatcaaaaatcttgtacctgatgccgatattcaacgctttcggacatatttgacagtgattggtacacttctcgaaatctaattgggggcgctgacatcattgtgatcaaatac

SEQ ID NO: 361080 - DNA, 75 bp, Homo sapiens
ctcatatgcagtccattattgacaaggcctgtttaaagaagaaaacccgtatgctagatttgaaaacaactaaag

SEQ ID NO: 361081 - DNA, 50 bp, Homo sapiens
gcccagagtatagagcggaagcaagagagaacagaaactgttcatacttg

SEQ ID NO: 361082 - DNA, 96 bp, Homo sapiens
gagatcctgagcgtgaaggacatcagtggccggaagcttttctacgtccattacattgactgtacgttcttcagatgtgtcatggtctgatactcg

SEQ ID NO: 361083 - DNA, 100 bp, Homo sapiens
aaaaacttgtgagggcgaaggtcgtattgaatggtgttgtagtactatactggcaattgctggagaagattttgcaattgttgcttctgatactcgattg

SEQ ID NO: 361084 - DNA, 75 bp, Homo sapiens
cattactaacaggatattcctcatgacattgctgtctgatgacttcctgaagccacagatcatcacccagccaga

SEQ ID NO: 361085 - DNA, 75 bp, Homo sapiens
ccgggctcggggagccggtctatggactttccgaagacgaggaccttaaaggctttgatccaggagagaaatact

SEQ ID NO: 361086 - DNA, 83 bp, Homo sapiens
catacggtgattgccagtaggagcctgccgcgagtgctgacggtgccaagtcctgccctgccaacttcttggcagctgccgac

SEQ ID NO: 361087 - DNA, 83 bp, Homo sapiens
caatctttgaccagttactggagtttgttactgaaggatcacattttgttgaagaaatcatgagtggaggatctcaagtccac

SEQ ID NO: 361088 - DNA, 96 bp, Homo sapiens
ccagttcgagatcaccttcgagtgcatcgaggacctgtctgaagcttcgagagctgtgcccaggagtgaacaaccagccctacctctgtgagagtg

SEQ ID NO: 361089 - DNA, 100 bp, Homo sapiens
ctacaccctgttaatgttgatattttgacctccttccatgaatcacaaatgttcttaatggcatctagaatgattccagaatgactatcttgacttaccc

SEQ ID NO: 361090 - DNA, 80 bp, Homo sapiens
cccagccatggcagattcctccgggcagcaggggtgaggtggctttgaccccgggttgcccggccagcacgaccgaggag

SEQ ID NO: 361091 - DNA, 100 bp, Homo sapiens
atcatagcagagtacgatactcaggtcaaaggtgaatgaaaactttgccattgatttgatagcagagcagcccgtgagcgaggtggagactcgggtgata

SEQ ID NO: 361092 - DNA, 90 bp, Homo sapiens
agagtgagagatggaacccgaagaagaaaggattcgttacagccagagattggtcaccatggctgttattggctcccttgctgtccccag

SEQ ID NO: 361093 - DNA, 50 bp, Homo sapiens
gcggcccacgcgcagcgacagggagaggccagcactccttgcccgaggac

SEQ ID NO: 361094 - DNA, 100 bp, Homo sapiens
tcttgaaacatttatttccagtccaaagtgtggatgaggtcaccattgtcaacattttgaccaaccgcagcaatgcacagagacaggatattgccttcgc

SEQ ID NO: 361095 - DNA, 98 bp, Homo sapiens
agatgttgtcaaggtggcctaccaggaggccaggggtgtcgccatggcctgtagtggtggagacacgcccagtggatgatcctactgctcccagcaac

SEQ ID NO: 361096 - DNA, 108 bp, Homo sapiens
ggcggctgctggtagttccatgctgtctgttcagacttcagcttggtgaagttggtgaaccatctaaagaagagaaggctgtggccaagtatcttcgattcaactgtc

SEQ ID NO: 361097 - DNA, 101 bp, Homo sapiens
ggttggcccagctccttggggtttccggctgcagggcggtaaggatttcaacatgcctctgacaatctctagttggagatctccgactcggctcccccagc

SEQ ID NO: 361098 - DNA, 82 bp, Homo sapiens
gcaaccattggtctgcaggacatcactttagatgatggtgtcagctgtgatgcatgtttaaaaggaaattttcgaggtcgca

SEQ ID NO: 361099 - DNA, 100 bp, Homo sapiens
cggcgctgctgctcgggctgctcttggagggctgtttaacgacccccaactccccatccatgcactcacgttctcttacgctgggtccatccctctcgct

SEQ ID NO: 361100 - DNA, 100 bp, Homo sapiens
gtggcccacctccctcttggggtcgtcgccctcgagatgattatcgtaggaggagtcctccacctcgtcgcaggtggccacaaagcgggcacaggcctgg

SEQ ID NO: 361101 - DNA, 75 bp, Homo sapiens
ccgtggcggagaaagcgctgcaggaataccgcaaaaagcaccgggaggaagagatagtcgctctggatcacccat

SEQ ID NO: 361102 - DNA, 83 bp, Homo sapiens
ctcaaagcaataccaggatagctgttgtttcagagaaagtagtttatgccaacgtgacttcattcatacagatgaaccaagga

SEQ ID NO: 361103 - DNA, 51 bp, Homo sapiens
ggcagtgctcaaactcaccgaccagatggaacagattaaaagggccaataa

SEQ ID NO: 361104 - DNA, 75 bp, Homo sapiens
gaccctccagcgctgcctggaggagaatcaagagctccgaggttggatggcaagcatgtggtgtttggcaaagtg

SEQ ID NO: 361105 - DNA, 83 bp, Homo sapiens
ctttgctcaaggatcccagttttctctggatgacgtgggcgtgatggtgggcatgggtcagaaggattcctatgtgggcgacg

SEQ ID NO: 361106 - DNA, 75 bp, Homo sapiens
aactcaggaagagtgatgtggttttggataaggtatatgagctccctgaaagcacaaagcagttatttccatctt

SEQ ID NO: 361107 - DNA, 50 bp, Homo sapiens
ataaatctcgcccaaacaggaaagctccagtgatccacaagctcagaaat

SEQ ID NO: 361108 - DNA, 98 bp, Homo sapiens
cggctctaacggggctttctacaaggtaataaatctcctaatggaataagtgactatccaaagatcagagtgacagttacccgagatcagccacgcag

SEQ ID NO: 361109 - DNA, 100 bp, Homo sapiens
aaccattactgatgatgtggaggttaacagctatctttcttgtttgggaaatgggaagtaatgacagctggcacctgaactaagtacttttataggcaac

SEQ ID NO: 361110 - DNA, 50 bp, Homo sapiens
tattgactactgccacaattccgagaatgtaactggtcactacatttccc

SEQ ID NO: 361111 - DNA, 100 bp, Homo sapiens
tctctggagctgtggttgctgctgtgatatggaggaagaagagctcagaacttcagtgaagatttcatacattggcctcatgacccagagctccttggag

SEQ ID NO: 361112 - DNA, 75 bp, Homo sapiens
tggcgcccgtcaacttctgcgacgaagaaaaaaagagcgacgagtgcaaggtaattggtacgcctcagagaccgg

SEQ ID NO: 361113 - DNA, 75 bp, Homo sapiens
gggctcctgcgagaagcaagcggaacttcctgaggaaattgagaggctgactgagcgactagaagaaaaagagag

SEQ ID NO: 361114 - DNA, 82 bp, Homo sapiens
gcttctgagaacaaacgcaaaaggacagtaaactgtggaccttgaagttagcagaggatgcagcaacaaggcaccatcttgg

SEQ ID NO: 361115 - DNA, 100 bp, Homo sapiens
ccacggctgaaccctccttctcaatcttggaacagcacccccttctttaagatgtctttggtggacttgggaaagaggttgctagaagcagcaagaaaag

SEQ ID NO: 361116 - DNA, 101 bp, Homo sapiens
aagctcagagaagtgaagcaacttgcccagctatgagagacagagccaggatttgaaaccagccctttggagtgaatcaacctggaccttatatcatgtat

SEQ ID NO: 361117 - DNA, 100 bp, Homo sapiens
caaagataaaatcttttgtgaaagtgtataactacaatcacctaatgcccacaagaataatccagaatggctactctgatctatgttgataaggaaaatg

SEQ ID NO: 361118 - DNA, 82 bp, Homo sapiens
gttcctacagagattcatatgagagttatggagatacaactcgtcaacgaatcaaattcagtgatgacagagtatgcaagag

SEQ ID NO: 361119 - DNA, 49 bp, Homo sapiens
agtgaataggcccagaaaggtgtaaatttgatgaagtctatgaagcact

SEQ ID NO: 361120 - DNA, 100 bp, Homo sapiens
catcgacagctgcaaggaggccgtcaccttcaaggccgtcagacaagggccgatgtccattggaatcactgtgatgctgatcatacacaactatttgttc

SEQ ID NO: 361121 - DNA, 100 bp, Homo sapiens
cagctccactgaacagataagggtataatttgggcgactacaatggagagatcatgtctgaggttatggcacagagacagccaatgaaacctacttatgc

SEQ ID NO: 361122 - DNA, 98 bp, Homo sapiens
ccgggcgcagccggagccggtgccgcagctgcgatggccgtggccgtggggagaccgtctgcgcagtgagcctgcaggccgacctcactcgtggcaca

SEQ ID NO: 361123 - DNA, 100 bp, Homo sapiens
cggctcgagagcgtgcccggctgcagatagagattgggaagctgagggcagagttggacgaggtcaacaagaggttctcaagactcagaagttagtgaag

SEQ ID NO: 361124 - DNA, 101 bp, Homo sapiens
cgcaaacgaaaaagaacgacatgatgcaatcttcaggaaagtaagaggctccgggttgacaaatggtggggtaacagaaaggaactggctaccgttcggac

SEQ ID NO: 361125 - DNA, 90 bp, Homo sapiens
cttgtcagtaccattcaacaagatgctgactgggacagcgttctgtcatctcagcaaagaatggatgagaacaagttgagcagtgccaac

SEQ ID NO: 361126 - DNA, 83 bp, Homo sapiens
gatccgcccacagacctcaaattcaaagaacatgaaaggctcccggagcagcgctgactcctccaggaaacactgaggcagac

SEQ ID NO: 361127 - DNA, 89 bp, Homo sapiens
gacgagggagaaatgttttgtttgactccagtgttaagagaagaaatgaggacatatcagtatcgcggagtttaagagagctgtgaaag

SEQ ID NO: 361128 - DNA, 99 bp, Homo sapiens
tgtgcccaagctcatcgagaagtgctggaccgaggacgaagtggttccagcaacagatagaaatgctttaagttcactctggggaaagctggcctctga

SEQ ID NO: 361129 - DNA, 126 bp, Homo sapiens
ccgagacatcttccctgtgggctggtgttccttgactggagacaacctgcagcctcctggcaccaaaggatgatgaggatgataatgcaggcacggagatgaagatactgcggggccactgcggac

SEQ ID NO: 361130 - DNA, 115 bp, Homo sapiens
gctgcagttgctggccgagcctggcctgggccgcgtccatcacctggcactcaaggtggcttctggcacagcagcttaattgaccggaacctcattgattattttgttcccttcc

SEQ ID NO: 361131 - DNA, 100 bp, Homo sapiens
aaggatatcactgtgtgtgaacctccgaaagctcagcacacactcccgcaggatcccgccattgttcagattgattacacagtacctaccgttatagcag

SEQ ID NO: 361132 - DNA, 75 bp, Homo sapiens
tgcccttcctcctctgtgcggtgctgctcagtgcagttcagggtaaagcccacagcttgaagccaagcataaagg

SEQ ID NO: 361133 - DNA, 100 bp, Homo sapiens
aaagaagtggagcgtgtcctgaaggagttccaccaggccgggaagcccatcggatataacacgtgggaaccggaggagaacatcctggaccccaggctgc

SEQ ID NO: 361134 - DNA, 96 bp, Homo sapiens
gcatctggctggagccctgcattcgcggcgtgtgcagacttcagctacgggacggacgagtacgacggagaggggaatgaggagcagaaggggccc

SEQ ID NO: 361135 - DNA, 98 bp, Homo sapiens
agcaccgctactcggagggcgagcggacctccctggagaagcccacaccagttatcctattgaaagaggggactgatagctcccaaggcatcccccag

SEQ ID NO: 361136 - DNA, 75 bp, Homo sapiens
caaggagctcagtgacctcctggacttcagcatggctcccccccaaccaagcggcagcggcggagtcggggccgg

SEQ ID NO: 361137 - DNA, 75 bp, Homo sapiens
tacgtggggacgttccccgacggccagaagttcgactccagggaaaaagacctcgatgaagttctgcagacccac

SEQ ID NO: 361138 - DNA, 102 bp, Homo sapiens
caaggacaaggccacagagtcggggtcttcacgaactgaagcgctgcggcatggcgcgcgcctgcctccaggccgtcaagtacctcatgttcgccttcaacc

SEQ ID NO: 361139 - DNA, 75 bp, Homo sapiens
cagagcctcagtttgtgcaggacaccgacatggaacagggactcactggggaatccttgttgcctgatgactatg

SEQ ID NO: 361140 - DNA, 74 bp, Homo sapiens
tgccgcgcatcgtccgcagacgccgccaccgccatgggctcctgaggctcttgtcaggatggtgaagctgttca

SEQ ID NO: 361141 - DNA, 100 bp, Homo sapiens
aaatgttgagcctttttggcctggcttgtttgcaaaggccctcttcgctcgcttattacttcaagatccaggcaaccacttaattaacatgacttcttct

SEQ ID NO: 361142 - DNA, 90 bp, Homo sapiens
gttccacgtgtcaaccctgcttccctacatgcccaacaacagacaacagctgctcaagaagccagaaaaaggagatgaaaaagaattgga

SEQ ID NO: 361143 - DNA, 83 bp, Homo sapiens
actgagccagcctctgcacatgctgttggaacgtctcggatctatgggcatgtccttgaatgggcaagagggcacatgaagta

SEQ ID NO: 361144 - DNA, 82 bp, Homo sapiens
cgggttattcgagtgaccgagaccgcggccgggaccgaggacctccgcgctctggcagctcctcttccgtgtgctctcgcca

SEQ ID NO: 361145 - DNA, 98 bp, Homo sapiens
ggaagacgaatcgttaaacatctgaaagggtcaggtcatattgaacattccagatacctatcattactcgatgctgttgataacagcaagatggcttt

SEQ ID NO: 361146 - DNA, 75 bp, Homo sapiens
attgatttatatattgggactgcagctgggatagatgggcagcagaagatcatgtgcttcgtgataccgatgaaa

SEQ ID NO: 361147 - DNA, 100 bp, Homo sapiens
attatattgatacaatatggaaaatactcaagccaggtggaatttggataaatctaggtaagaagaaagcagcggcattgttcgacagccaggccccaat

SEQ ID NO: 361148 - DNA, 100 bp, Homo sapiens
agctaagactccaggacacccctgaagccgagaaatgcatgggtcggagccctcgcgatgggtatgatcttcttctgttctcccattgtgagtatattca

SEQ ID NO: 361149 - DNA, 100 bp, Homo sapiens
gacgcccggcgcgagctcaagctgctgctgctcgtcaggatggctaaaggtgaccccaagaaaccaaagggcaagatgtccgcttatgccttctttgtgc

SEQ ID NO: 361150 - DNA, 100 bp, Homo sapiens
ggaagaccgcgcgcagggcctgcagcgggagctggacggcgagcgcgagcggcgcgagaaagacccttgaacatctgtgaagaaatgactattctgcatg

SEQ ID NO: 361151 - DNA, 100 bp, Homo sapiens
tgaaataacccttgatcctcctcctaattgcaggctgctggaaagtacagacaacaaggcagaaattatattgttgaagatggagatattatcttcttca

SEQ ID NO: 361152 - DNA, 73 bp, Homo sapiens
gcgagcctctcagccggccgggatggctaccacggccgagctcttcgaggaggagatgttaaagtaacccatc

SEQ ID NO: 361153 - DNA, 100 bp, Homo sapiens
aaacgaggaggagataacgcggccttgggctctggtggatgaagacctgatcattgaagttcaccagttatttttctcaagaatgtgaataacaatggga

SEQ ID NO: 361154 - DNA, 101 bp, Homo sapiens
caaaggctttagaaggttatatcacaggttgggtatctacagccattggttgctgttcaggtcagctttgctcctaacaacactgggaaagaagtaacagt

SEQ ID NO: 361155 - DNA, 75 bp, Homo sapiens
ttccagaagatttaactacgtggtccgggaaatggtgttcacactggccctgaatcaagggaacaccagttttca

SEQ ID NO: 361156 - DNA, 96 bp, Homo sapiens
ttagaaaccatcacaatgcataaaatcctggagaccaccaccttcttccaaagagcggtgtacttgattcaagatggaaaaggtgatgtaaccatt

SEQ ID NO: 361157 - DNA, 96 bp, Homo sapiens
ctcctcaaccgcgaagcacccagcggctggcgcctggagcgtcttttggagctacagggagctggccgactgcacctggcacatggcggagaagct

SEQ ID NO: 361158 - DNA, 83 bp, Homo sapiens
gacggccggcgggggcggcgtgcggcctagcgtctcagggatgggatccccccatacaggatccgtaagcagcaccgcaggga

SEQ ID NO: 361159 - DNA, 100 bp, Homo sapiens
catagacttcaaccagcctttggtcatcaccagggttaacgaagcccttgtcatttgctgattgtgttggggatgagctgccgtggggatgggaagcagg

SEQ ID NO: 361160 - DNA, 76 bp, Homo sapiens
attttgaagtcaccactgaggaggaattcaccctgttcgtctatgatgtggacgagtgctcactagcagaaaaaac

SEQ ID NO: 361161 - DNA, 74 bp, Homo sapiens
ggacttcagacatgcagggtgacgcctacagcctggctcccgcgacgccggaggtgaaggtggcttgctccgaa

SEQ ID NO: 361162 - DNA, 100 bp, Homo sapiens
gggaaggcgtgggcgacccggtgtgtggcgcgcccagagccccgcgtttcagccctagggaaggatgaatctggttatagatggacaagagacgatcatt

SEQ ID NO: 361163 - DNA, 75 bp, Homo sapiens
atcaaacattttgacccccgcaaagcagattctatttttactgaagaaggagagctcgggttcatgacgctctcg

SEQ ID NO: 361164 - DNA, 100 bp, Homo sapiens
caagcagtggcgaagggaatcgcaaggctcttccctgaccattttctactgtccctgcgcgaggtagtgggcagcagtcagtgacaggtgtaacctctgt

SEQ ID NO: 361165 - DNA, 90 bp, Homo sapiens
gccctggacgtggagatcgccacttaccgcaagctgctggagggcgaggaatgcaggatcagtggaaggagctttcccacgaggacctgg

SEQ ID NO: 361166 - DNA, 100 bp, Homo sapiens
aaaaagacagaggagtgacgaggccgtactctgacagctgtgcacgatgccatccttgaggacttggtcttcccaagcgaaattgtgggcaagagaatcc

SEQ ID NO: 361167 - DNA, 114 bp, Homo sapiens
cggagcaccatggcggagctaggagctggcggcgacggccacaggggcggcgacggcgcagtgcgaagcgaaacagtgatcctgccatgaagcagtttctgctgtacttggatg

SEQ ID NO: 361168 - DNA, 75 bp, Homo sapiens
gaaaaacgtgcccaatttgttacacatgggaaatccccttacccaggatatattgaacctttatcaggaaccaga

SEQ ID NO: 361169 - DNA, 83 bp, Homo sapiens
ccgtcccgaccctggccgccccgagcggagcctggaggccaaagagtgtggccagatgcaaaataagtggctgatgataaaca

SEQ ID NO: 361170 - DNA, 87 bp, Homo sapiens
cgcggggaccgctgtgctctcgatatccaaacacagcctgtgagcttctgacttgtgatgtgccgcagatcagcgaccgcctcggtg

SEQ ID NO: 361171 - DNA, 97 bp, Homo sapiens
ggcagcccgcagtgacagctggagtctggctaacttgtcttccactaaagagttggacctgtcagggctccacgtgttccccacgtttgtggcgtac

SEQ ID NO: 361172 - DNA, 75 bp, Homo sapiens
gcagaaaccccgttgacaaggcactgctttttcatgacggtcctggcaggagaacatctctctgaaagagctcca

SEQ ID NO: 361173 - DNA, 74 bp, Homo sapiens
acaaaggatatcgtcaatgggctgaggattttttatcaagcagaaatgcatcgaacaacgagaatcaagatcac

SEQ ID NO: 361174 - DNA, 50 bp, Homo sapiens
aggctgctgaagatcgctttcaagaggtccaacacacttgacaaaaccaa

SEQ ID NO: 361175 - DNA, 100 bp, Homo sapiens
gactcggctaagaaagatgagaacagaatgaagaacagatacgggaatatcattgcatagtaaagacaagattgcatcctacagcaaaactccaaaaatt

SEQ ID NO: 361176 - DNA, 100 bp, Homo sapiens
gcattttagcacaaccactaacaacatccagtcccggatcaccaagaccttcaccaaggccttcccttcttcttggtggtgttcttgagtaagataatct

SEQ ID NO: 361177 - DNA, 100 bp, Homo sapiens
aagcctgcccagacggctcacctgtgcgggatggaacaaaagtgaattttgaagattgcaccggtcgacaaaggacagcctatttttccctcgacacccg

SEQ ID NO: 361178 - DNA, 74 bp, Homo sapiens
gctcgccgtcctgcggaaccgctggctgtcagacagcttcaaggagacgatattgttaatcctgccagtctttc

SEQ ID NO: 361179 - DNA, 101 bp, Homo sapiens
aaatcccagcatccactaagctggtgttgtcctatcgacccagctggatcgtgtaaccagtctatgggaagtgagtatgactatgaatatgatgaaaatgg

SEQ ID NO: 361180 - DNA, 51 bp, Homo sapiens
gtgatttctgcatttccatctgagttggggttagacttggaggaactcgag

SEQ ID NO: 361181 - DNA, 101 bp, Homo sapiens
cctagcgtcctggaattacttcaatcaaactggatacacgtctgtttaactacgcaaaaggtaatgctggcatggcttactgggaccctaagtgtggcgaa

SEQ ID NO: 361182 - DNA, 98 bp, Homo sapiens
aaacatttccgtcaccttgacttgtctgaacttattggtaaaggttttcaaggtgtcatgaaaagatggggatttaaaggccagcctgctacgcatgg

SEQ ID NO: 361183 - DNA, 148 bp, Homo sapiens
cagcgccaccatccacgccagccgcaccatgccgctcctaagcctgcacagccgcggcggcagcagcagtgagaggggcaccaccacgaggcgatttgtgggccataccaaggatgtgctgagtgtggccttctcctctgacaaccgg

SEQ ID NO: 361184 - DNA, 75 bp, Homo sapiens
ggaaaatagcctttgccatcactgccattaagcttaccctcttctccacctgctccccggctgcccgcaccttcc

SEQ ID NO: 361185 - DNA, 100 bp, Homo sapiens
agctggcagcagcatctcagcccaagagaaggctgcctgctgtttcccggggagatcatgaaacgaggtcgccttcccagcagcagtgaggattctgacg

SEQ ID NO: 361186 - DNA, 75 bp, Homo sapiens
tgaagaaggtgaagaagcggatgagtttcccccccagactgctgcttccccggatgagcagaaggtgtttgccct

SEQ ID NO: 361187 - DNA, 110 bp, Homo sapiens
gcaagcagttcagaagagccaaggaataaacatgcaatgaacccaaaagggagccatgtgttcacatgtcatgtggaccagtatttaactgtggaaaccgcgggtggcat

SEQ ID NO: 361188 - DNA, 100 bp, Homo sapiens
tggatgccaatctgaatatcaaaatagcagggtatcagcatggaagccatgagtgagaataaaatggtgccctctgagtttagcacaggacctgtggaaa

SEQ ID NO: 361189 - DNA, 83 bp, Homo sapiens
attaccgtcatattccacccattactaagcataatgcagtgaagatgggtgaagagagatgtgtttcatctgaaatttgaagg

SEQ ID NO: 361190 - DNA, 116 bp, Homo sapiens
ggtaaaagcctttcagtgaatgaaatgactcttagcactttgaaagaaaaaggctacaaagctgctttcattggaatagtagtattattgattccacagaatacagccaacctcca

SEQ ID NO: 361191 - DNA, 100 bp, Homo sapiens
aattgaagactttcgacaaggaagtgaaacaccaatgcagtttttccactactcccaagggcaagtgtaccttgggaattatccaccatttaaagacaga

SEQ ID NO: 361192 - DNA, 100 bp, Homo sapiens
cctactacgcgtacgtggtggagctctgcgtgtccatgcaggatatacgtactgtgggtcttgtgctgcccatgcttataaacaagtggatccgtctatt

SEQ ID NO: 361193 - DNA, 96 bp, Homo sapiens
gagactcctgctcagtgtagcattaagacattgctacaagtggttggtgtggtctctgtggctgtggccgtgattccttggatcgcaatacccttg

SEQ ID NO: 361194 - DNA, 141 bp, Homo sapiens
aaactaaaggagagttattccagtttaggaggaagatgcaagcggtttgggaccttgaacaaggcaaatatggttttgcttcctgcctgacacagctcacttcaagaagtgcacaatgtcagaacgtggaattaagtgggc

SEQ ID NO: 361195 - DNA, 85 bp, Homo sapiens
cagaagatcatgtttggcaagaggcgaaaaatccgagaggttgcacactgggccacagaggatccagcaaggatgaagaaatgga

SEQ ID NO: 361196 - DNA, 100 bp, Homo sapiens
gctaacccaaaggctaacacatcaggtgcgagaagatgtactaaattcattgaataacaactttcttcaaacgctaaatcaagcttggaatgatcatcaa

SEQ ID NO: 361197 - DNA, 88 bp, Homo sapiens
tgttcaggccatggaagaaatgatgatggaaatgaagtataataccaagaaagccccacttgaggccaagtgaggttggtgcagggag

SEQ ID NO: 361198 - DNA, 82 bp, Homo sapiens
tgaagctcaagttgctactcgggacgctgcacctcccgcgccgcacggtggacgagctcaccatggatgatgatatcgccgc

SEQ ID NO: 361199 - DNA, 100 bp, Homo sapiens
gccatcaaagtgattccccggaatcgtgtgctgggctggtcccccttgttcaaggagcagggacaagttacaggaatgttctccaagcagcaatccaaaa

SEQ ID NO: 361200 - DNA, 90 bp, Homo sapiens
ggcgggggcgtccccaggagccggacaggtgaaaagccatacaagtgtacctgggaaggctgcgactggaggttcgcgcgatcggatgag

SEQ ID NO: 361201 - DNA, 90 bp, Homo sapiens
attcaacatggaggcggaggtcgataagctggaactgatggtgagaattatgaagatgatgacctagtaaattctgatgaggttatgaag

SEQ ID NO: 361202 - DNA, 50 bp, Homo sapiens
acatttctgaagcgagcgtcttcgatggtgtgatgaatgcagactctgct

SEQ ID NO: 361203 - DNA, 100 bp, Homo sapiens
aatcgacttcggtttcagttggagttggaatttgtgcaatgtttagccaacccaaattaccttaattccatgtgacatgcctgctcctactctgccttcc

SEQ ID NO: 361204 - DNA, 97 bp, Homo sapiens
gtgatcaccaacttaaaaaggagatactcgtttagattacacattgccctgctgttcgtggcatttgccctgtgtatgttttgcctgtacagcttca

SEQ ID NO: 361205 - DNA, 100 bp, Homo sapiens
taacaatcaagatgaatatgaccctatggaagcagaagaagctgaggatgaagaagatggtcagatgggcagacctggaagagaagaaggatgcagatag

SEQ ID NO: 361206 - DNA, 74 bp, Homo sapiens
cctggaggtggatctgaagaacggcactgtgacttctgccgtgttcaccgtgggagacaacgtggtttcaggca

SEQ ID NO: 361207 - DNA, 100 bp, Homo sapiens
gatgatcgagtacatcgtgcagcagtgcgcgctgccccccgagcaggagggggaagttgctgaagttatatttgtaggtgctaacccgaagaattcagta

SEQ ID NO: 361208 - DNA, 100 bp, Homo sapiens
gggaaaagctaaaaagaagagattaaccaaggcagatataggaacaccaagcaatttccagaattacatgaacgacagccttcgcaccgacgtcttcgtg

SEQ ID NO: 361209 - DNA, 96 bp, Homo sapiens
gagttgagaacatctctgttgacattcattgtggtagtgggcagcagtcagtgacaggtgtaacctctgtggatgacagcaacagttactggagga

SEQ ID NO: 361210 - DNA, 82 bp, Homo sapiens
cgcacattttgcagcctgcaccggccaacgaacacgatgatgaacgcgttaatttccctcaaagaaagaagaaaggccgggg

SEQ ID NO: 361211 - DNA, 75 bp, Homo sapiens
aatcctcagtgaacttgggaagtgtgttgctggaaaagattagaggatttcctacaatcaagatatttcagaaag

SEQ ID NO: 361212 - DNA, 74 bp, Homo sapiens
tgttgaacatgtggaaggtgcgcgagctggtggacaaagcatcagaccaaacattgtctggcttgcactgtaaa

SEQ ID NO: 361213 - DNA, 100 bp, Homo sapiens
cactgcctgcgcagctccggccgcctggctccccatactagtcgccgctcaaatctaatccaagtgaaaatgaagaaaaggaagcacagtctcaacttat

SEQ ID NO: 361214 - DNA, 76 bp, Homo sapiens
tgcggcgcggggtgagcgtcgaggaggcgcaggagactgaccgcaacggcaggcatcctggtggggaagaagtttt

SEQ ID NO: 361215 - DNA, 96 bp, Homo sapiens
aaaggaacggctgaaggccctacgggagaaaaccgggcgcaaggtttaagaattgtttaagctgcatcaatggagcacatacagggagcttggaag

SEQ ID NO: 361216 - DNA, 100 bp, Homo sapiens
gcctgaggtgtcggccggatccctccttctcccggcgcctcaagcggaaggtgtagaagacatcgtggccataatgattcctgagccaaaagggaaggag

SEQ ID NO: 361217 - DNA, 75 bp, Homo sapiens
gaggacctgtggaaggcatggaagtcatcagaaggaactcaacagaggcaattattatcccgactgcaaatcgac

SEQ ID NO: 361218 - DNA, 83 bp, Homo sapiens
tctaaccatcttgactctactgattacatacccttaggtcttgggcgtctttggtactggcttttttaggggtctgcctgggg

SEQ ID NO: 361219 - DNA, 100 bp, Homo sapiens
gctgggcgacttgcgaggatgagagcgacgaagccaactgtccaggtgacgcatccaaagaagacattgacactgctatgaaattaggagccggttaccc

SEQ ID NO: 361220 - DNA, 82 bp, Homo sapiens
gaagtgtcaacaagtgcaacagatgaacttctatcacagtttaagaatcatttgctgtttcaaatagagaactgtgcgatga

SEQ ID NO: 361221 - DNA, 52 bp, Homo sapiens
tgccaagcaaaacagtttccaccacgtacctgtggcatgttccattgacatt

SEQ ID NO: 361222 - DNA, 75 bp, Homo sapiens
ggaatgatcatcaaacagctatggtgatgattagagacatactaatgtacatgagagttggaaactcaactattg

SEQ ID NO: 361223 - DNA, 100 bp, Homo sapiens
gtgttaaaggaacctctacaacgaaggtgaagccacggaagataaggatgaatttgacaagctgaggcctctctgctacaccaacacagacatcttcctg

SEQ ID NO: 361224 - DNA, 74 bp, Homo sapiens
cgggagagaaatcacaagccgtcccgatccttctctaggtctcgtaggcaatccaccttccaaagaggtgcctg

SEQ ID NO: 361225 - DNA, 98 bp, Homo sapiens
cctggagcaggaatgcggggaagctggtgcccggttcccccagggacagcttcaagcggtagggacagacatctgaggacccagcctcagggatgctg

SEQ ID NO: 361226 - DNA, 50 bp, Homo sapiens
ctgcacagctctttacctctactcaacagtttcgctcttgttgcccaggc

SEQ ID NO: 361227 - DNA, 100 bp, Homo sapiens
acaatggaagatatagataagaatgctgatggtttcattgatctagaagagtatattggtgttcctgatccaagcagaaccctgttatttgaagagcctg

SEQ ID NO: 361228 - DNA, 90 bp, Homo sapiens
cacacggtgccccacaggccactgtgcaggatctccactcggccctgacacagctctgtcctgtccccgtatgagaggcagcttaacctg

SEQ ID NO: 361229 - DNA, 97 bp, Homo sapiens
atctcaggagagagcagccagagtggatgcatcatctgcagacatcagaaaagcatatcgtaagctttcactaactttacatccagacaagaataaa

SEQ ID NO: 361230 - DNA, 75 bp, Homo sapiens
cacgcacctgcagctctgctgagagagtgcaagccgtggggcatgttatttgaaagcaattgagacgcaaccgaa

SEQ ID NO: 361231 - DNA, 100 bp, Homo sapiens
ccagcggctcagacacaacatctgctgaggtgttcattgaaggatgaaactgtaacaattgaaacagtctttccatttgatgttgcggttaaatttgttt

SEQ ID NO: 361232 - DNA, 98 bp, Homo sapiens
cagcaacagcttcgaaggcgaccttccttgctttcagaatttcacccaggttctgacaggttcaaaccttgtactactcagctgatcacaagctgctt

SEQ ID NO: 361233 - DNA, 50 bp, Homo sapiens
caggtgtcatcacctgactgaggtgctaagagatgccgtttgcaggcctc

SEQ ID NO: 361234 - DNA, 98 bp, Homo sapiens
ggcggcggctgccgcaggacctgcagcatcccagaggtgtgggttgctgaccgaggaaataaaagaatccaagtatttgataaagacactggggagtg

SEQ ID NO: 361235 - DNA, 100 bp, Homo sapiens
tatattgtgccaccagctccagaaaagagtatagtaggagttcatgatcaagtgttgcccacaccaaatgcttcatccagagtcatagtacatgtggatc

SEQ ID NO: 361236 - DNA, 102 bp, Homo sapiens
attagagcttagagaaaaccagttaaaaatgttgcctaaaaccatatttatttagagtcagaatggagcgatttgtagtaacagcaccacctgctcgaaacc

SEQ ID NO: 361237 - DNA, 87 bp, Homo sapiens
actggcctggcgtgcactccgcacctcggggacattattgcgcgtggaacggctgcttttggaagaaaacttggaatataacgtgga

SEQ ID NO: 361238 - DNA, 82 bp, Homo sapiens
ccatgggccgccgccccgcccgttggatattagaaatggctactccccagtcaattttcatctttgcaatctgcattttaat

SEQ ID NO: 361239 - DNA, 100 bp, Homo sapiens
agaaacttattcacagttaccaaagctggcccgatgagagaaagggaaagttaaggatgctggagcagaacaatggatttctctttctctttcatgcaag

SEQ ID NO: 361240 - DNA, 80 bp, Homo sapiens
tactgctccaacatctccttgtccttccatatcttcccagtgtggcccagagttgctcagaattggagcagagcctgaga

SEQ ID NO: 361241 - DNA, 83 bp, Homo sapiens
ctgtagtcacaggagctgtagagaggaccccggtacatctgaaagccgggaaatgccgcggcgagtcctttgcacatgttggc

SEQ ID NO: 361242 - DNA, 83 bp, Homo sapiens
cggggtgtctggactggaacctctgggcccacactgtgccctgtccacggtgcctcctgcatgtcctgctgccctgagctgtc

SEQ ID NO: 361243 - DNA, 103 bp, Homo sapiens
ctgaggaggggccccagcagcccccgaaggccctatcaggacatggagtatgaaagacgctgagatctgtatctgtggacctgaatgttgatccctcgcttca

SEQ ID NO: 361244 - DNA, 98 bp, Homo sapiens
ctcagcatggtcagtgccgtttaacctttattgtggtggagtccaccccgctgtggttcttgaattagtgttggaaaactttgtttatccgtggtaca

SEQ ID NO: 361245 - DNA, 100 bp, Homo sapiens
atcgttttccccaggcaaggattccggagagaggatcaggtgttttcaggttaaccgtcaggttactatatcaacaactgataggagaaacaataaactc

SEQ ID NO: 361246 - DNA, 75 bp, Homo sapiens
gcggttccaccgctctgaaaccgatttctaacagagagctcttacaaacttaaggaaaggatacctgtttatgta

SEQ ID NO: 361247 - DNA, 96 bp, Homo sapiens
tgagctgaaagcgaaaaactatgctgaccagaggacacagcaggtcaggagagattcaacagcattacctcagcttattacagaagtgccaagggg

SEQ ID NO: 361248 - DNA, 105 bp, Homo sapiens
ccgcaaccattgacgccatgtcgggttattcgagtgaccgagaccgcggccgggaccgaggaaatgcttcggttacccacagtctttcgccagatgagaccggtg

SEQ ID NO: 361249 - DNA, 76 bp, Homo sapiens
gcctcccgagtggctgggattacagaaagttcccctaaagccctgaggaatcaccgaatgaaaggggctttttaca

SEQ ID NO: 361250 - DNA, 90 bp, Homo sapiens
ggaactgcagtcatggatcatattacggtacccaaggtgaggcaatggaacaaggtttacgagactgctgtcgatccatacgaattggaa

SEQ ID NO: 361251 - DNA, 75 bp, Homo sapiens
gagtgtgcgtgcgcgccgagcgattcctggtcgggtggcttccagtggtcttcagtctgtcgtgcaccgatgaga

SEQ ID NO: 361252 - DNA, 100 bp, Homo sapiens
caagaaaagcctctgggagcagaagggaggctccaagacctcatcaacaattaaggaagagttgggctgtggaaggacatcttcaccgtctccatgaatg

SEQ ID NO: 361253 - DNA, 75 bp, Homo sapiens
cttggtttgcctatgtcaagatcacagtctattatcctcccagtccacaacgctgaaccgtggctggacgaatgt

SEQ ID NO: 361254 - DNA, 99 bp, Homo sapiens
cgagaagaaaatgtccacccccatcgaagtgttgtgtaaaggctacccttggatgtcagaccaggcgatcatggagctgaacctgcccacggggatccc

SEQ ID NO: 361255 - DNA, 98 bp, Homo sapiens
aaagccttcttaattatgtctgagaaaagcccaattatacagaaatccgacagtactgcaatcactggcgaaattttgctgacattgatgattcctgg

SEQ ID NO: 361256 - DNA, 100 bp, Homo sapiens
tgcagcagtgaagatgctgcccacctttgtgaggtccactccagatgggacaggttgggagccacgtgtaccagtgtgtgttgatcttggcttgattcag

SEQ ID NO: 361257 - DNA, 90 bp, Homo sapiens
gcgtccctggagcggccgccttccagcgaacctggcggaccgaggctgtgttcagcgaggaagcactgatccaagttccgagtgacatcc

SEQ ID NO: 361258 - DNA, 82 bp, Homo sapiens
agccccgcaataggcttaaacaatctggacaaggcatatgtggaacggaaattatcagttcattgcctagcatagtaaatga

SEQ ID NO: 361259 - DNA, 83 bp, Homo sapiens
aagcaggtctaccgggccacgcaccgcctgctgctgctggttccagggtctccctccactgctgtagtaacccgggtccgggg

SEQ ID NO: 361260 - DNA, 100 bp, Homo sapiens
tcatgttgaagctaaacccatatgcaaagaccatgcgccggaacaccattcttcgccaggccaggaatgtgcaggtgatggtcctaccagtgtgtctgtt

SEQ ID NO: 361261 - DNA, 83 bp, Homo sapiens
ccccaacatgcctcaccctcatctatatcctttggcagctcacaggtcccccacggcccttcaggatgaaagctgcggtgctg

SEQ ID NO: 361262 - DNA, 83 bp, Homo sapiens
cccggagacagcggcacagaggtgcttctgccaggtattgggagagttgctgctacatctttaggaaatttgactaaccatgg

SEQ ID NO: 361263 - DNA, 100 bp, Homo sapiens
cctacatctcttgtcacagcttaagctgggcatggatttaacaagaatgatgaataaggtatttggaggtactgtgcacaaaaaaagtgtcagagaagat

SEQ ID NO: 361264 - DNA, 75 bp, Homo sapiens
cactgggcattggcccagagtgggatggtgcagctgcaggccccgtgtccctgtccaagtccaacagcaatgccg

SEQ ID NO: 361265 - DNA, 90 bp, Homo sapiens
cgaggagttccgcccctttctggcaaagatgagggggattcttaagggattaaagcctgtggtttccacagaagcaccacctatcatatt

SEQ ID NO: 361266 - DNA, 75 bp, Homo sapiens
ctagagctggccacactgcaggacattgggaagagccaagattttcttcttcactcctcgcttggtggctcccag

SEQ ID NO: 361267 - DNA, 146 bp, Homo sapiens
cagaatgctaagcaagtaaacagtgcacttaaacagaaaatggaaggtggaattgaagaattcaaacctcctgagaaagaaggactttgctgctttgggccaggatctgaacttaggtgtaaaccattgccctggcagagggaacc

SEQ ID NO: 361268 - DNA, 98 bp, Homo sapiens
gggcggccagcagaaggagaacacgctgcttcacctcttcgccggcggggcgccctgcgtccggcagaggaggcgagcatcccgctcaggtgatgagg

SEQ ID NO: 361269 - DNA, 50 bp, Homo sapiens
ggagtagcgagtcggcaacccggagccctgggcgctgcctatggcacagc

SEQ ID NO: 361270 - DNA, 75 bp, Homo sapiens
gccatcagtaagctatactccaccatccggccctacctagaggattctgcaggacagagagatgaaactggaaat

SEQ ID NO: 361271 - DNA, 98 bp, Homo sapiens
cagagctcctggaccaatgcatcttcccaccaccttaaaccactgcttccagtggtgtctgtagtgagagaaacagagtcccagttactgccagatgt

SEQ ID NO: 361272 - DNA, 75 bp, Homo sapiens
ctggccccgaccaccctgctggcctcctatgtgttcagattttgcaaatctaaatgtcataaaaactttaaaaag

SEQ ID NO: 361273 - DNA, 50 bp, Homo sapiens
attctgaccatctcacatgccacaggaggcaaatacatgcaggcggtgat

SEQ ID NO: 361274 - DNA, 100 bp, Homo sapiens
acgtgttgtgcctgctgaggatggccggaggctcgccgacgaccttgaatattgtgggtaatgctaggcctaaagaaacagatcacaaaagtctttcatc

SEQ ID NO: 361275 - DNA, 90 bp, Homo sapiens
gactacggggagcgcgccgagctggatgactcggacgttcatggcctcccacgggaacgacgccgcgagagccaggtttgagtccaaagt

SEQ ID NO: 361276 - DNA, 74 bp, Homo sapiens
gagtgggaacccccagtgattcagaaccctgagtacaaggctgagcggaaggaggagaaaaaggcggctgcccc

SEQ ID NO: 361277 - DNA, 100 bp, Homo sapiens
ataaatcctgcttcctgtgcatgactgtgaagtgctgaccacactcaccccagacactggccgtatcctgtccaagctacatactgtccaacccaagggc

SEQ ID NO: 361278 - DNA, 100 bp, Homo sapiens
gtagaagacgtctacgaattcatccgctctctgccaggaagatattttcgattcagataaagaagttcctatcgaatccacttttgttcgcatcaaagaa

SEQ ID NO: 361279 - DNA, 90 bp, Homo sapiens
gctgacactgctgcctccagctagttatttcgtcctcttccgttcttcacccctacaccttggacggagctccctgggtcctcagcagtg

SEQ ID NO: 361280 - DNA, 101 bp, Homo sapiens
ggaaacaatggcatttacagaaagagtcaacagcagtggcaacagcaatatccagattattatgcaataattaaggagcctatagatctcaagaccattgc

SEQ ID NO: 361281 - DNA, 75 bp, Homo sapiens
ggcttgggccgccgagctggacccggaccggttttgggtcatcgtattgaggaagttcctgaacttcctttggta

SEQ ID NO: 361282 - DNA, 83 bp, Homo sapiens
ccacctccgcacagggcgccacggagagtacctggagtagaacagaaaaattattatgtctgtgttcccttgggactcattgg

SEQ ID NO: 361283 - DNA, 100 bp, Homo sapiens
cgtggaatttgaagattctacagataaatcaggttatcaatactctggctgaccatcatcatcgtgggactgactttggtggaagtccttggttacatgt

SEQ ID NO: 361284 - DNA, 97 bp, Homo sapiens
gattctgttggactggcaaaacagatagctttgcatgctgaactgctgcgttcctttgcctgcaacaggggtcaagatgagttttgcctgacttctt

SEQ ID NO: 361285 - DNA, 100 bp, Homo sapiens
ctcatggtttcaagttacagagtgcctatgagagtggcctgatgccttacacgaattacacatttgatttcaaggtcgacaaagatgctgaattagtggc

SEQ ID NO: 361286 - DNA, 133 bp, Homo sapiens
ctccaggatgctggcgagcggtctcggctccaggagttccgcaggagggtcgctgcggcccagagccaggtgcaggatatacgtggcatttcaagtgatcagttgcatagagtactaaaaagtgtggaatcag

SEQ ID NO: 361287 - DNA, 100 bp, Homo sapiens
gggaggtcgggagatggacggaaactgctggggatgtgagaagcctggggcactaactggagttgttattgacttggtgtcatggagaaactccagctgg

SEQ ID NO: 361288 - DNA, 82 bp, Homo sapiens
ttgagaagcgcttcgtacccagccagcactattcgtgatgagaggagatggattgaaaagcagaacagagcaacaagagcac

SEQ ID NO: 361289 - DNA, 100 bp, Homo sapiens
gcggctggatccagggcctgcgctccctggcacagcaccccagcgccctgcgcttcctggccgaccatggagaggaagaagcggggagagaccaacaatg

SEQ ID NO: 361290 - DNA, 89 bp, Homo sapiens
ctggatccaaagcatgtctgcaacccagccattttcagtgaagaacagtccagactggcagcaagaaaatatgctagagttgtacagaa

SEQ ID NO: 361291 - DNA, 100 bp, Homo sapiens
gaagtgaacaagtccaagaggaccttctgattagtccacagtcttcctctatagagagcaatcacctcacagacttgtaccgaagagatgagaccatcca

SEQ ID NO: 361292 - DNA, 50 bp, Homo sapiens
cgccagggcctcaagtgcgatggacagtcattttgtttactcattcagcc

SEQ ID NO: 361293 - DNA, 82 bp, Homo sapiens
cggccgagctgaggcggtcgcggccatgaaggagagtcgcggttgctgatcgtggtgcttgagtagagccgtggttggtgac

SEQ ID NO: 361294 - DNA, 100 bp, Homo sapiens
caaaagcattagaacatcacagaagtgaaatacaggctgaacaggacagaaaggtggttgtgtcaaaccgattggtgacatctccatgctgtattgtcac

SEQ ID NO: 361295 - DNA, 100 bp, Homo sapiens
ttaaacttaggtatttaagtactgaaagatgcaaagtacagttcgagagcacagagatggaggtcatgcaggtggaatcttcaacagatacaatattctc

SEQ ID NO: 361296 - DNA, 90 bp, Homo sapiens
tcttagtctagggactgaggagtcgccgccgccccgagtcccggtgagccctattcccagaggcaggtggtgctgaccctgtaacccaaa

SEQ ID NO: 361297 - DNA, 50 bp, Homo sapiens
cccggtttgacgcacacggcaccaaactgaacttagtgatttggcccgtg

SEQ ID NO: 361298 - DNA, 82 bp, Homo sapiens
ccgccttccgccgtctcttcgagttcttcgtgctgctcaagggccaattcctgtccccccagcagcatggcatcgtgtgctg

SEQ ID NO: 361299 - DNA, 50 bp, Homo sapiens
gacgccgtcgcggtggactgcaaggaggtcttgctggagttgctagaaca

SEQ ID NO: 361300 - DNA, 74 bp, Homo sapiens
tggtattctttatgctttccaagaacagactacagaggttttcctttggaatatggataaatacaccatgatac

SEQ ID NO: 361301 - DNA, 82 bp, Homo sapiens
gaatgtggaagactttgatgtggagtccaaatttgaaaggtcagcccaaggccaaccccactgtcactctgttcccgccctc

SEQ ID NO: 361302 - DNA, 100 bp, Homo sapiens
cctctatggtggcgtcggccgaacagccccgcgggaatgtcgacgaggagctgaggtatgtcgagagtaccaacgtggcaattgcaaccgaggagaaaat

SEQ ID NO: 361303 - DNA, 83 bp, Homo sapiens
ccctgttgcgatggcgcagaaaccccgttgacaaggcactgctttttcatgacggtacaggaaaaacaatggtgatggacatg

SEQ ID NO: 361304 - DNA, 80 bp, Homo sapiens
tggagagcttcatcaaaaatagtgatagctttgataagcttcattccagcgctccaatagtcatgacaaagtaaggagaa

SEQ ID NO: 361305 - DNA, 75 bp, Homo sapiens
gccgcctggcaggccctgcgcaccaggtgccagcgagatttcagattcctgtaaacctctaaagaaaaggagtcg

SEQ ID NO: 361306 - DNA, 75 bp, Homo sapiens
aacccgtgggcctgtggactgcagcctcggcggtcagcagggtcggcactcttcaccctcccgagccctgcccgt

SEQ ID NO: 361307 - DNA, 82 bp, Homo sapiens
cagcatggcccaggctcctgctgacccgggcagagaaggaatcagagatcattgatttcttcctgggggcctctctcaagga

SEQ ID NO: 361308 - DNA, 98 bp, Homo sapiens
ttgagaaccttggatgccgccttttcaatatctctgatcagcatgcagaaccgtgggtggtttctggtattttcctgacagcagcccttggatttccc

SEQ ID NO: 361309 - DNA, 100 bp, Homo sapiens
gatttggacatggtcctcaaatgtctccggttcttttttcgatcggggaaacagacctagatccaaggccacaagtaaggctatggctctgattctagaa

SEQ ID NO: 361310 - DNA, 101 bp, Homo sapiens
accacaggagccttcattacaggaacaagctgactgacctggagatacttgcattgctgattgctgcactaagccacgatttggatcaccgtggtgtgaat

SEQ ID NO: 361311 - DNA, 75 bp, Homo sapiens
ggagtgttcaagatgctctctctggaccgatcccactaaaacgttgtgtgacgtgatcctcatggtccaggaaag

SEQ ID NO: 361312 - DNA, 75 bp, Homo sapiens
catgcagacctatcgctctgtcagcgagatggcctcgcacaagttcaaggagcagggacaagttacaggaatgtt

SEQ ID NO: 361313 - DNA, 75 bp, Homo sapiens
tacttcagggagtcaacggtgagctaatctgagaaggcccacttctggttccatggatgatggcggttgagcaga

SEQ ID NO: 361314 - DNA, 90 bp, Homo sapiens
ccgggagttacaccgccaccgccagggcagcccaatggatccaatggtgatgaagagacctcagttgtatggcatgggcagtaaccctca

SEQ ID NO: 361315 - DNA, 73 bp, Homo sapiens
ttttagaagtgggctggctatagtgagccaacatgatttagaccaggagccagcaccgctctttgaccttgcc

SEQ ID NO: 361316 - DNA, 83 bp, Homo sapiens
atagtctaaatgctgaaagggagaaagtccaggtctccagaaatgctttgggttcatctttcattgctgcaaggaacttccat

SEQ ID NO: 361317 - DNA, 101 bp, Homo sapiens
caaaaagaggttgattacagcggcctcagggttcaggcaatgcaaataaggccgaagaacagttgagaattgttgaagaacaaagaaagattcatgaggaa

SEQ ID NO: 361318 - DNA, 138 bp, Homo sapiens
tggagaccgagccactggctttcacttcaatgctatgacctgtgaaggctgcaaaggcttcttcaggtgctgagccgtccccggcccttctggtgccaagtgccaagcgccgcagccggaagaccagcaaagacactg

SEQ ID NO: 361319 - DNA, 74 bp, Homo sapiens
aggatgtggagtggacttcctagcagagaattaaggaagttcactggagtaaaatggaggcctcagtaatatta

SEQ ID NO: 361320 - DNA, 74 bp, Homo sapiens
agaagaagatgaacccacagatttggtatgaacgctgccgtccgtgccgtggtgcgcatgggtatctacgtggg

SEQ ID NO: 361321 - DNA, 87 bp, Homo sapiens
agtgctccgccgcccttgcctccagaaccgagattaagcgtagctcctgaaatggatatcatggactactgcaaaaaagaatggaga

SEQ ID NO: 361322 - DNA, 98 bp, Homo sapiens
gcaaacattgcgtatactcctgatattattatagcctcaatactgaggctgattgattgctgtgctaaggagacagcaacgtatgataaaaaatcgag

SEQ ID NO: 361323 - DNA, 100 bp, Homo sapiens
cagtcgtgcatgttcttggtgaagtcggccagcctgagcaagcggaggacctacgccggcctgggagacgttctcttccagatggctgaagtccacaggc

SEQ ID NO: 361324 - DNA, 80 bp, Homo sapiens
agagattgagaatgtccatggatttgtttctcattctcatatttcaccaataaagcaatcatcctcttccagtggtagcg

SEQ ID NO: 361325 - DNA, 111 bp, Homo sapiens
tactcgcccccacctgtggactctgaccgcaaacaaggagagcctactgagcagcctgagtggattggggaccacaaattcagtgcccaccggattgtcttagcagcctcg

SEQ ID NO: 361326 - DNA, 75 bp, Homo sapiens
agcatctgctgcacccaagcctgagccggttcctgttcaaaagctacaggaccgcactcagttcagtgaccgaga

SEQ ID NO: 361327 - DNA, 90 bp, Homo sapiens
gctggaccacattcctcaggtaccacagcagaccacagttcttggttgcaaatgatggattttatgtaatactgaaaggcctagctcgac

SEQ ID NO: 361328 - DNA, 75 bp, Homo sapiens
gtcaaaatcaagactatagaggtggaaagaatagcacttggagtgttaagctcaaatcttcgtcatgtgagagta

SEQ ID NO: 361329 - DNA, 80 bp, Homo sapiens
gagccctgtttttgccaccacactccagcctggctccagaaagcagtggggcctgagatcaccaagacagacctggtccc

SEQ ID NO: 361330 - DNA, 101 bp, Homo sapiens
gaactgaaaagatctcaaaatctggacttgaaaagaattctggaggtggaaatggagttgatctttcagtgctaaatgaggctcgcaatatggtgtcagat

SEQ ID NO: 361331 - DNA, 82 bp, Homo sapiens
ggaaaagaaagcaccactgcacaatttaacttacgagtgttgcggagataggaacatgggagagaaacaatctgggtaacat

SEQ ID NO: 361332 - DNA, 78 bp, Homo sapiens
tggactctgccgacaccggagagagatacctctactaagaagacagaagacttactttcatcatctgaatcaaatcca

SEQ ID NO: 361333 - DNA, 75 bp, Homo sapiens
caaacctgtaaaaccagtgacgttttccacaggcatcaaaatgatggatcctgagcttgaaaaaaaactgaaaga

SEQ ID NO: 361334 - DNA, 82 bp, Homo sapiens
ctggagcctcagttggaagcagccgatccagcctgcggagcctgtggggcagctctactgagatgaagaaagaaaaagaata

SEQ ID NO: 361335 - DNA, 90 bp, Homo sapiens
ccctggtcttgctcggccgatgaagtgcagaggtttttttctgagccaatggccaaaggccctgccaagaattcagaaccagaggaggtc

SEQ ID NO: 361336 - DNA, 100 bp, Homo sapiens
agcacctttcggcttctgagacggcggcagcagcggcattcagaatctaggtcaacctattaagatacgtttccaggaatctgaagaacgaccaaaatta

SEQ ID NO: 361337 - DNA, 74 bp, Homo sapiens
cggcataagctcaatcttcgggttagctgctgaatcaaagcttcaaacagaagttaaagaaggaaaagaaactt

SEQ ID NO: 361338 - DNA, 100 bp, Homo sapiens
ggccaacttctgctacagacgactcagaaaatcaggaaaatgtttccaacctggtgattgaggacacagagctgaaacaggtggcttacatatacaagtg

SEQ ID NO: 361339 - DNA, 113 bp, Homo sapiens
ggacgggaaggcgggagacgagaagcctgaaaagtcgcagcgagctggagccgccggagcttcaaaagcagtggactgtcttttggattcaaagtgggcaaaggccaagaaag

SEQ ID NO: 361340 - DNA, 100 bp, Homo sapiens
cacgacagtcatcagtgaagatgccgttcttgagcagtctgtcatcacggatactttggcagcaatctcagaagttctttatgttgatttgctagaaggg

SEQ ID NO: 361341 - DNA, 50 bp, Homo sapiens
gaggccaggagccaggggcccagaaggtttggtgcacctcgatttggagg

SEQ ID NO: 361342 - DNA, 98 bp, Homo sapiens
gtgacctgtggagacacggccagatctgccctccatgggtgaatttgtaagtgatgtcctgctagttccagaaaagtgccagtttttccacaaagagc

SEQ ID NO: 361343 - DNA, 100 bp, Homo sapiens
gcatatggagagctactgcatgcccagcaccattcctaggctgggagcaaaacgggaaaggtggcccagacagcgtgtatgtcagcttgcaagcatttag

SEQ ID NO: 361344 - DNA, 111 bp, Homo sapiens
cgggccctcacagaccccagagcggccatgagctggtgtgcagccgcccaggagggggcggcgactggcggcgcgatggacctgaccgggctcctgctggacgaagaaggc

SEQ ID NO: 361345 - DNA, 121 bp, Homo sapiens
tggggccacagggacaggtttggtcattttccccggagcctttgactggtttctggagacaagttggatggcttgaggactggtactaaaaggaaacgtgactgggaggccattgccagca

SEQ ID NO: 361346 - DNA, 100 bp, Homo sapiens
gacgatgtcttcgatcttctaaagaatctgaattatccagaacagaaagttgtgactgttggacagttcaaaattggtctgatccatggacatcaagtta

SEQ ID NO: 361347 - DNA, 100 bp, Homo sapiens
tgcagggcttggcacgatacgtgttccagtcaggaactcgaatcatttatgacagaaagtttctgttggatcgtcgcaattctcccatggctcagacccc

SEQ ID NO: 361348 - DNA, 74 bp, Homo sapiens
ctattatttgtgatcttcagcctcaacagggattcatccaaccatcatttctgagtcattccagaaggccctgg

SEQ ID NO: 361349 - DNA, 90 bp, Homo sapiens
gtggcaggagcttttcgtaaagggaagtcatttctactggacttcatgcttagatacatgtataacaagaagcccttcagcggccagtag

SEQ ID NO: 361350 - DNA, 51 bp, Homo sapiens
cgcgggagccctggaggggaagggctccttcacctaccaaacgcaaagacc

SEQ ID NO: 361351 - DNA, 75 bp, Homo sapiens
cggtcggagaagtggcctaaaacttcggcgttgggcttgggcactgtttaaaggaaagttccgagaaggcatcga

SEQ ID NO: 361352 - DNA, 116 bp, Homo sapiens
aaaaccaaacaccctcagctccacattgagagcaaaatctacaagatgatgcagggaggaggtttcagaggagcgtgctcgacctttctctccagtggagatttgccaacctgccc

SEQ ID NO: 361353 - DNA, 82 bp, Homo sapiens
ttcttcctggcgcacaaagatgaggagtgccagatctactgcatagagaatgcccacggacagctggtgcgggaccttgact

SEQ ID NO: 361354 - DNA, 99 bp, Homo sapiens
gtggctggaagacatggccactccagtcggtgttgagcacggcgagcagtctcaggcctttagtgatgatggcatagaatgtcaagctaaccaggcgtc

SEQ ID NO: 361355 - DNA, 101 bp, Homo sapiens
atctgaatgagccaattaaacgagatggcaaaaaggagtgtgatattgttttacgtaagaagaagaaaaaagtttcaggtactcttgacactcctgagaag

SEQ ID NO: 361356 - DNA, 143 bp, Homo sapiens
aaaggctgaagggcagtggaccttggaaatccaagatctgccatcccaggtccgcaacccggagaagcaaggtactccaaagattcaggtttactcacgtcatccagcagagaatggaaagtcaaatttcctgaattgctatg

SEQ ID NO: 361357 - DNA, 101 bp, Homo sapiens
gacggacctcagccaggagcgggaggtgaccttccaggaacaacaacctgaccttcctgcggccgtactaccagacggaggagggcgaggagaacccgttc

SEQ ID NO: 361358 - DNA, 105 bp, Homo sapiens
aaacacctctacctcctgcgaggcctcccgggctccgggaaaactacactggccagccaacatgcccatcactcggatgcgcatgagaccctggctagagatgca

SEQ ID NO: 361359 - DNA, 75 bp, Homo sapiens
accatcgtcatcgtggcccactacgacgcctttggagtggcccccgtggcctgtgagtacggcatggtgcacgtg

SEQ ID NO: 361360 - DNA, 75 bp, Homo sapiens
taccctcagtacgccacctactattacccccagtatctgcaagccaaggttctccttactatgacaatgtccgcc

SEQ ID NO: 361361 - DNA, 100 bp, Homo sapiens
tgcttccagaacgctctgccactctaatggtatatgaagatgtcgtccaaatagtatcaggattccaagatttattgccaaaccctgtgcactctgtatt

SEQ ID NO: 361362 - DNA, 101 bp, Homo sapiens
tgaagaagaatttcgatctccgccctggggtcattgtcagtgtgtttcctgtaacaaatcgttcaagaaactctggtcccttcatgaacatatcaagatcg

SEQ ID NO: 361363 - DNA, 110 bp, Homo sapiens
ttcaaaggctgtcgcaaggaggaaggaatgatgagaagacagcagctgattacaagattttaggtggttcagtccttcacctggtgttggctctgagaggaggaggtggt

SEQ ID NO: 361364 - DNA, 100 bp, Homo sapiens
ccaacatgaagcttcttcatgttttcctgttatttctgtgcttccacttaaggttttgcaaggtcgaagaagggggcaaagcagacaccctgagctccaa

SEQ ID NO: 361365 - DNA, 100 bp, Homo sapiens
cggattaaagctaaagacatagttcctggtgatattgtagaaattgctgaatgtggaggctgtggacccacgaggtcgaacattattgcatcttgctgtt

SEQ ID NO: 361366 - DNA, 106 bp, Homo sapiens
ccggaggatcgcggagtcccaatgaaacgggcagccatggccctccacagcccgcaggtatatgagggtgggagcaacgtggaccagtttgtgacccgcttcctcc

SEQ ID NO: 361367 - DNA, 95 bp, Homo sapiens
actgaggcacggagaggctaaataacctgccgagattgcacagtctttatcttcaagccaggatgaagggagactgggcaagactcttacgcccc

SEQ ID NO: 361368 - DNA, 48 bp, Homo sapiens
gcgaagctgccaaagccttagacaagacggcatcagaattaatgtaac

SEQ ID NO: 361369 - DNA, 75 bp, Homo sapiens
gggccttgtgctgtcgctgccgtggcaccccttctagaaggattatttgaggtgtagagggtgggaagcgaagcc

SEQ ID NO: 361370 - DNA, 96 bp, Homo sapiens
agtgtgcagctccctaatgatgatgctcagtttgatgcgtcacactacgacagtgagaaaggagagtgtgaacatggctacgcctcttcattcccg

SEQ ID NO: 361371 - DNA, 83 bp, Homo sapiens
cttcacagcacagttcctgggaaggtggagccaccagcctctccttggtaagtaaggaggtctctgtaccatggctcgtacaa

SEQ ID NO: 361372 - DNA, 98 bp, Homo sapiens
gcgcgcaggagctcatgtggcctgcggctcctgtcgcctgtagagtgtttttgggcctaggcctgagtggaatcattcctaccttgcactatgtcatc

SEQ ID NO: 361373 - DNA, 50 bp, Homo sapiens
ttcaccagtctcgactggattacaattggaaaatgactcaggcactttgg

SEQ ID NO: 361374 - DNA, 100 bp, Homo sapiens
aaatgacctgatccacgcagaggagggagaggaccggtttgcagatctctgtgctgttggatccaaggattctgtagctacaatgttgtcaagacttttt

SEQ ID NO: 361375 - DNA, 83 bp, Homo sapiens
gtcccatttcgcccctcgcgtccggagtccccgtggccaggatttccatttaaacagggttaatttggaagaatcttcaggag

SEQ ID NO: 361376 - DNA, 75 bp, Homo sapiens
tgctgaggacctcacaggagcccacttcctcggagcttcagctttagctgcagctgcctctgttcagccacttgc

SEQ ID NO: 361377 - DNA, 82 bp, Homo sapiens
gatgagattttgccagagaaaggacgagcagcaagtcagggagcttaaggtcctggcctggttcgaggagggcgaggagacc

SEQ ID NO: 361378 - DNA, 74 bp, Homo sapiens
cgagaattaaatgccgagaaggccagtacggtatgagctcaagctggccattccagaagggaagcaggttttcc

SEQ ID NO: 361379 - DNA, 98 bp, Homo sapiens
gggcatcgcctactacatgtactcggggggcggctctgcgctggccgggggcgcgggcggcggcgccggcaggaaggacagttttggcatgtgactga

SEQ ID NO: 361380 - DNA, 100 bp, Homo sapiens
caacatgaagctgctcgcagcaactgtgctactcctcaccatctgcagccttgaaggtgacctcacaaagttcggccgtggggatgcctcctccccagcc

SEQ ID NO: 361381 - DNA, 51 bp, Homo sapiens
ccaggccgggagccgaccggcacagcagaacactatggctatgcatcctcc

SEQ ID NO: 361382 - DNA, 95 bp, Homo sapiens
aggagctggtgtcttcatccagaagggacagtttgtgccagctctccagagagaaaaggaaggcgcaatggcgaggaagttatctgtaatcttga

SEQ ID NO: 361383 - DNA, 100 bp, Homo sapiens
tcagaatggatttgaagagctgatccagtggacaaaagaggggaaactatgggagttcccaattaacaatgaagcagatccatcacaaagcgaagtcatg

SEQ ID NO: 361384 - DNA, 100 bp, Homo sapiens
gccggtggccgcgctcggacccggtagcccagccatgacccataggaatctgacttcctccagtctgaatgacatttctgataaaccggagaaggaccag

SEQ ID NO: 361385 - DNA, 97 bp, Homo sapiens
cttggacttcagaggaaggcagctattctcaggatatgacaggggtaacacccttccagatgatttttgaggtggattcatacgacgtgactgtgga

SEQ ID NO: 361386 - DNA, 90 bp, Homo sapiens
aatgcactcattcaccgataccggtggatgggaagagagtcccaagggatgcagggcatcctctgtacccctttaatgacccgtactgag

SEQ ID NO: 361387 - DNA, 74 bp, Homo sapiens
cagtagcggcagccctgaggacgaacctaaaggcagacccagaagagctttttacaaaactagagaaaattggg

SEQ ID NO: 361388 - DNA, 83 bp, Homo sapiens
caacggccaacttcggcaagatccagatcgggatttacgtggagatcaagcgcagcgatgtggaatgagaccgtggagctttt

SEQ ID NO: 361389 - DNA, 50 bp, Homo sapiens
gggaagcatgtcgtctttatcgctcaggggaaggagttcgagacacgact

SEQ ID NO: 361390 - DNA, 100 bp, Homo sapiens
ggattcgcagggaggatgtcgggacaccccggaagctgggaaatggagtttgctgtgaacttgcggaaccgggtgtctgccatccatgaagtgcccccgc

SEQ ID NO: 361391 - DNA, 98 bp, Homo sapiens
tctaggacaagtcaggatcgagatccaagttctctctccacctcagaaacaacggcaccaccttccatggtcaataatgaacaacgccagcatgcaga

SEQ ID NO: 361392 - DNA, 75 bp, Homo sapiens
taccaagcgtctcattggccggcgatatgatgatcctgaagtacagaaagacataggcaaatttctggagatgtg

SEQ ID NO: 361393 - DNA, 75 bp, Homo sapiens
gacaggataaactgttacgcatatatgacttgaacaaacctgaagcagtcctggaatcaagatgtgagaccaaga

SEQ ID NO: 361394 - DNA, 75 bp, Homo sapiens
ctcagcgcccggcagccttcgacgcgatgttccgccggagcttgaatcgttttgcctacaagactatgaaagagg

SEQ ID NO: 361395 - DNA, 100 bp, Homo sapiens
gcagaggtggaggcgctttgaaaggtgtgagttcttgatacgaatgaaaggccaagagtttgttgatgagattcaaggtagatatcctcatcttcttgaa

SEQ ID NO: 361396 - DNA, 82 bp, Homo sapiens
cccggaagggcggacacctccacatcgccttttgccacctttccctttatttccggagggggatatgagactttctactcgg

SEQ ID NO: 361397 - DNA, 83 bp, Homo sapiens
ccctgaagatatttagagatggtgaagaagcaggtgcttatgatggacctaggactgctgactctgaagaagaagctatggag

SEQ ID NO: 361398 - DNA, 48 bp, Homo sapiens
ttccttctgggattggagctcaccacatatagcactttctacattgtg

SEQ ID NO: 361399 - DNA, 100 bp, Homo sapiens
cggtatccactgtcttctctcatgtatacagatcgctccttcgatatcctaaaaaaatccaagccgccctcgacattgcttgctgcaggccggctttcag

SEQ ID NO: 361400 - DNA, 78 bp, Homo sapiens
catgcctggggttacacctaaacagtttatcatctggacttcaagctgcaggcagttctgtttttccaggccttttgt

SEQ ID NO: 361401 - DNA, 115 bp, Homo sapiens
gaaaagagcaaggatcgcggcagcaacacgatcggcgcccgcctgaaccgagtagaagacaaggttactcactataaacaatatccacccaacacaagcaaagtttattcctact

SEQ ID NO: 361402 - DNA, 98 bp, Homo sapiens
ctttgctttaaaacagtattacttgcggcagcagtgaggatgccagagttcatgggtttctagaagacaagttttcaactgcagatacaaacatcagg

SEQ ID NO: 361403 - DNA, 100 bp, Homo sapiens
gccgcatcgcccgccgagccacagccacgatgatcgcgggctcccttctcctggtgtccatcagcggagaatggtctccgtggcaggccaaggtgcctca

SEQ ID NO: 361404 - DNA, 75 bp, Homo sapiens
tcagagagaaggaatccaccttcttacgctatggcaggccccacatcaagaccatcttccaaggcattgctgcaa

SEQ ID NO: 361405 - DNA, 87 bp, Homo sapiens
cctggagggaaagtgccgctttaaggagaactgcagatgatccctctgataagccaccttgccgaggctgctcctcctacctcatgg

SEQ ID NO: 361406 - DNA, 96 bp, Homo sapiens
agagactcggagatgggccagcagagcctcctcttccaggtctctgagcggcccctgatgttcctgttggacactcctggcgtgctggctcctcgg

SEQ ID NO: 361407 - DNA, 86 bp, Homo sapiens
gaccccgcctccctcccgcgcgtgctgcgggtctgctcgggggtctacttcgaggggtggacaagtccttcacttctcgccggagt

SEQ ID NO: 361408 - DNA, 101 bp, Homo sapiens
agcgcccccggcgcgatgcccttcaggaaagatctttaatctcatgaagtacgacagctacagccgcttcttaaagtctgacttgtttttaaaacacaagc

SEQ ID NO: 361409 - DNA, 101 bp, Homo sapiens
tgtcatctcggagcaaaacagatcttgactgcatttttgggaaaagacagagtaagaagactcccgagagtggagactgctgcacggactctggaaccatg

SEQ ID NO: 361410 - DNA, 100 bp, Homo sapiens
gacggcgcgtcctgctgaccccagccggcgccgagggcttggaatctcgagcgggaaaaggtgtcatggagaaactccagctgggcccagagattctgca

SEQ ID NO: 361411 - DNA, 100 bp, Homo sapiens
ggagcgcggttcggggccgcagagatgggaaagggctccttcaagtatgcctgggtcttggataaactgaaagctgagcgtgaacgtggtatcaccattg

SEQ ID NO: 361412 - DNA, 74 bp, Homo sapiens
ttcatcggcatgtaccagacgatgaccaagaaggcggccatcaccgtacagtgggatgaagctctcttgactat

SEQ ID NO: 361413 - DNA, 100 bp, Homo sapiens
caaaatctttccggtcataatgctattattaacacattgacggtaaattctgatggagtgcttgtatctggagaaatcctaagtaatgcactgaagagag

SEQ ID NO: 361414 - DNA, 98 bp, Homo sapiens
attatcacaggttcagaagatggcacagaccccacaggctcctcggacactgggtccatcacctcctgccccatcatccactccaacaccaacagccc

SEQ ID NO: 361415 - DNA, 97 bp, Homo sapiens
cgaagccaaactggaagtccgcgagtttgtggattatctgaaggaccaggtctccaaggacaaagcccttcagagcatggcgtccatgtcctctgcc

SEQ ID NO: 361416 - DNA, 75 bp, Homo sapiens
acaagaactgcttcctgcagcctgtctgcttcagttgaaaggattggcagccaccatttgcatgtgatgttgata

SEQ ID NO: 361417 - DNA, 100 bp, Homo sapiens
gaagaatggaacgaagcttaagtagctacaggggaaaatattctgaggtttacccagggttgatgataaccgctggccttattcattggattttaaatac

SEQ ID NO: 361418 - DNA, 90 bp, Homo sapiens
agaagactgggaagtatttgacccggtggttctcttcccaaagtggaagccaaattcatcaattatgtgaagaattgcttccggatgact

SEQ ID NO: 361419 - DNA, 100 bp, Homo sapiens
ggagatcatttgggagatccaagagattcagtatcactcgctcccttgatgatcttgaggagtcaactgagagttcaaatacaacaattgaggatgaaga

SEQ ID NO: 361420 - DNA, 75 bp, Homo sapiens
gatgacgaagacttctatgacgaggacatgggcgaattttggaagcagctggggaacctgggcgtattgggcatc

SEQ ID NO: 361421 - DNA, 100 bp, Homo sapiens
gacaaggactcacagtggctgcaaggcaagaagttatgaaatggaatggatggggatataatgattctaaattcatcttcaataagaagggccaaattga

SEQ ID NO: 361422 - DNA, 100 bp, Homo sapiens
gagcaagtgtgaatgaccttgatgaaagaggctgcacacccctgcactatgcagctacatcagacacagatggcaagtttgtcaacttcagagacaaccc

SEQ ID NO: 361423 - DNA, 96 bp, Homo sapiens
tcagcgtggtctgcctgctgcactgctttgtggctgcctccgggtgatgatggctgtgtgaacgactgccatggcccaccggaagcttgagagcgt

SEQ ID NO: 361424 - DNA, 88 bp, Homo sapiens
tatatccatggactcagtattatcaagctacatcatggagaaagcagatcttgtcatagttggtgctgaaggagttgttgaaaacgga

SEQ ID NO: 361425 - DNA, 112 bp, Homo sapiens
ccgccatcttgtgggagcaaaaccaacgcctggctcggagcagcagcctctgagaacatccagtcatggataaaaatgagctggttcagaaggccaaactggccgagcaggc

SEQ ID NO: 361426 - DNA, 100 bp, Homo sapiens
cagctcgccaggcggcgcagggtactagcaaaggccagacgtcttactcaacaacttccctgccaccacctccaccatcccatccggccagccaaccacc

SEQ ID NO: 361427 - DNA, 72 bp, Homo sapiens
ggagcctgaggatcccatgttcctgataaatgctccacctgtaagaacagaaaatcgtcttatagttgagaa

SEQ ID NO: 361428 - DNA, 98 bp, Homo sapiens
cacaaaagagttgattgaaattatctctggtgctgcagctctacccggatgcagagtctacagcctgacccagctgcccgctatcgcaatgtgttgga

SEQ ID NO: 361429 - DNA, 98 bp, Homo sapiens
ttggagtgttgactttaatttgatggatcctaaactcttggcttcaggttctgatgatgcaaaagaaccttcaacaactagtactgcttcaaattatc

SEQ ID NO: 361430 - DNA, 75 bp, Homo sapiens
tttctttgagcagtttgtggaagcgatcaggaaacagtgcttcttagtcctacgtcagcagcagtttaatgtcca

SEQ ID NO: 361431 - DNA, 97 bp, Homo sapiens
agaccctgctcctctgttctccgcagcctgatgctggattgccttttgcaattcttacttcaaggcatacccccttccaacgaggagtattctgtaa

SEQ ID NO: 361432 - DNA, 82 bp, Homo sapiens
cggcgcggcagcggagggacggcagtctcgcgcggagatggcagcagaaaaggccaaagcagcagccggggaggccaaagtg

SEQ ID NO: 361433 - DNA, 75 bp, Homo sapiens
ggctgggggaaccactatgatcaggcaactccaacaacattgccaccgtggacatctccgcaggcttcgtgggct

SEQ ID NO: 361434 - DNA, 83 bp, Homo sapiens
ggttgggctcgcggcgagcggacggggtcgagtcagtgcgttcgcgcgagctctttagtcaagagacggtgatgaagtttgtg

SEQ ID NO: 361435 - DNA, 83 bp, Homo sapiens
cacagttcctgggaaggtggagccaccagcctctccctgtttgccagggtttggatacctgatccagaggaagtctggaagtc

SEQ ID NO: 361436 - DNA, 89 bp, Homo sapiens
cagattcgcagtggtcgcttcttctccttggaatgaattcttccaaaacaaaactagaactgcaaaagcacctgacgacattaaccaat

SEQ ID NO: 361437 - DNA, 50 bp, Homo sapiens
gctcttcaccatcccgttttccagcaaggagcgagaacccgagcagcgcc

SEQ ID NO: 361438 - DNA, 83 bp, Homo sapiens
gagactttagctgtaaggaggagccagaaattgacagcccaggggacgagccaaactcaggctgtaccttgagcagctcaagc

SEQ ID NO: 361439 - DNA, 95 bp, Homo sapiens
caagactggggctgctcccatcattgatgtggtgcgatcggtacagcagggaagaactggaaactcagagaaagaaactgcccttccatctacaa

SEQ ID NO: 361440 - DNA, 75 bp, Homo sapiens
accaagccttcccagttatcataaccttgaatggcgactagatgtacagaaattgtatgctgctatgcatgaacc

SEQ ID NO: 361441 - DNA, 100 bp, Homo sapiens
gggctttgcatacctgtggtcaggagcccgtgccagctatggggtcagaaggggccgtgtatgcttcgagatgaaggtctcggcgcggaagatggccggc

SEQ ID NO: 361442 - DNA, 75 bp, Homo sapiens
atttgttaaggattccaagtaactcttatttggtatggtgtggagcctcctggtttgataaagctggaaaaagag

SEQ ID NO: 361443 - DNA, 131 bp, Homo sapiens
atttttcaggacatctttaaataccctcaagaggagcaacctcgtcagcagcgaggaaggaaacagcgttttaattgataaagaccagagtccaaaatggaaaccagctgatctaaaagaagttactgagg

SEQ ID NO: 361444 - DNA, 75 bp, Homo sapiens
attagaggcattaaaggtcagagttctgagacctgctctggagattcacagctggtaatagaagcttataaatca

SEQ ID NO: 361445 - DNA, 100 bp, Homo sapiens
aaaaaacagaatggagcaattggaagaaagcttagcagtgtctgcaaaaacgaatcttttcctacaacctgttaactgactggactgttggtaacaaagt

SEQ ID NO: 361446 - DNA, 100 bp, Homo sapiens
cctcctgcttcccatcgaagctctagaaatgaatgtttccatctcttcagagatgaaccagtgtctcaatttaaaatggtgaattactcctatgatgaag

SEQ ID NO: 361447 - DNA, 83 bp, Homo sapiens
aaacaagacagttctgtctgcagaagcccattatggctgtaactggagatgacacaggtgctggagaatctggtaaaagcacc

SEQ ID NO: 361448 - DNA, 100 bp, Homo sapiens
ttcacgaaatcctgtgcaagctcagcttggagggtgatgaaggttgtgcaggaccagcgttccctgtgcaggcgccactgcgtttcctgcagattccgac

SEQ ID NO: 361449 - DNA, 75 bp, Homo sapiens
taaccatgaagaaccttgacagcaagggtgtcagtgtggaggcagttgatccagtgttccaagctaaaatgttgg

SEQ ID NO: 361450 - DNA, 100 bp, Homo sapiens
gaaccaagttttaaccaccaacatttggctgcaaatgaacattcagaagattctcggccttgccccttcacgagccgccaccaagcaggcaggtggattt

SEQ ID NO: 361451 - DNA, 82 bp, Homo sapiens
gcgcggagcgccccttcgcgtcccctgcaccatgagctggggcaccgagctctgggaggatcccttttcccccagaaattac

SEQ ID NO: 361452 - DNA, 135 bp, Homo sapiens
agcctgggaggccggccggtgccagcacctttcggcttctgagacggcggcagcagcggcattcagacatccacgacagcgatggcagttccagcagcagccaccagagcctcaagagcacagccaaatgggcgg

SEQ ID NO: 361453 - DNA, 100 bp, Homo sapiens
tggctgtggccgcgtggtctctcacgcaggggcgccgggcgggggaacgcggccaccctgagtctgggtgtccgcaatgttgccagtgtctgtctgcaga

SEQ ID NO: 361454 - DNA, 98 bp, Homo sapiens
gggacacggctggccaggagcggtttcgggttcccttctggagaagagtcaccgggtttggttctgtttcccctttctgctcgacacttctgggaagc

SEQ ID NO: 361455 - DNA, 73 bp, Homo sapiens
aggagtcctccacttgccactgggtcccgcggcagtgctggtggccatggttcccgtagccagaaggagttgc

SEQ ID NO: 361456 - DNA, 90 bp, Homo sapiens
ttcactggatgttgctgaagaagaaatcatagacgatgatgatgatgacatcacccttacagatataccttagatgaatttggaacagcc

SEQ ID NO: 361457 - DNA, 90 bp, Homo sapiens
gttgtgttgtacagccagaaaccggggaccttaacaatccacctaagaaattcagaggagccatatattgaagaccatgtctgggagctt

SEQ ID NO: 361458 - DNA, 139 bp, Homo sapiens
agccttctcaagtgggaacaaaaatgagtgtgaggcgaacagccatcccgggcactatgtgaatttgggataaatcttgcttccagccactgtttcagttcgaggacatgcaggaaatcattcagaactttgtgcgggt

SEQ ID NO: 361459 - DNA, 82 bp, Homo sapiens
aagactatcagccactaatgaagttgggaactcagaccgtaccttgcaacaaggcaagaaaattggatgtatattttgaata

SEQ ID NO: 361460 - DNA, 75 bp, Homo sapiens
ctgaccagcgagctggcattgtacaagagggggtcatcgacatcctgagggggaaggccacccggcctgcttcca

SEQ ID NO: 361461 - DNA, 75 bp, Homo sapiens
ttaggggagagtttcgagaagcagccgcgctgcgccttccacactgtgcgctttcaaatctgaacatcaatgatg

SEQ ID NO: 361462 - DNA, 83 bp, Homo sapiens
cagcgttctgcgtcatgggggagtgctgatcaactaaaagagacacaaatgccagaccctaagaccttcaagcagcactttga

SEQ ID NO: 361463 - DNA, 80 bp, Homo sapiens
ggcgagtccggtctcaaaatggagaaaccaaggtgtatgttggtaacctgggaactggcgctggcaaaggagagttagaa

SEQ ID NO: 361464 - DNA, 83 bp, Homo sapiens
ttagggtattttccattccagaaggacaaaaactctttgagtttcggagaggagtaaagaggatttttagactctgaggagca

SEQ ID NO: 361465 - DNA, 80 bp, Homo sapiens
aagacccggaggaaactaacctcaacctctgccatcacaaggagatagaatctcactatgttgaccaggctggtcttgaa

SEQ ID NO: 361466 - DNA, 100 bp, Homo sapiens
gtcccaccactgaggctgttgggccaggccagtcatgctagaacgttcctgcgtgaagaccagctgggagcccactgcctgctgccacctccaactccgg

SEQ ID NO: 361467 - DNA, 82 bp, Homo sapiens
ggccagagccgaagctgtgcttctccatgagatgcaatctgcacatcgtgctgccacacgaggcttcattcgttatggctgg

SEQ ID NO: 361468 - DNA, 75 bp, Homo sapiens
ggccctggaggccaggctgtgggagaccgagggccctgttacataaaccagagatgataaaacagatacttccag

SEQ ID NO: 361469 - DNA, 90 bp, Homo sapiens
tatggaggcacagctgctgtcttcaatgctgttaactggattgagtccagctcttgggatgaaccccagctcaaagggattgtgacaagg

SEQ ID NO: 361470 - DNA, 100 bp, Homo sapiens
caagatcagtgttgtacaacttgtgtcgtccagtaaagaagataacctcaatcatggccataccgagcagagagaaagcggttggaagccaagcaacggg

SEQ ID NO: 361471 - DNA, 101 bp, Homo sapiens
ccccaagatcttcaagaagaagacctgcacgacgttcatagttgactccacagatccggggtaaaagtacacctgtaagccagcttggttccgcagacttt

SEQ ID NO: 361472 - DNA, 100 bp, Homo sapiens
cgaagccttgaaaaagctgccctgagacggtgtcccgccgaaaggaagttggtgaaccatctaaagaagagaaggctgtggccaagtatcttcgattcaa

SEQ ID NO: 361473 - DNA, 134 bp, Homo sapiens
ccaagtttactttttgcatacacagactggagttagcacgtggcacgaccccaggataccaagtgcacgctaggcggctttgaggagctgcagagcatgaaggctgagaagcgcagcatcctgggcctcccccc

SEQ ID NO: 361474 - DNA, 51 bp, Homo sapiens
ggcaccttgcgcttcttgcagtcgctgaacaaaaggttcatcctcagtttt

SEQ ID NO: 361475 - DNA, 98 bp, Homo sapiens
cggaagtgcagctgcctcagttcttagcgcagatcacttttctccagagaatgcaaatgacacggccaaggaaacatgcctaaattggtttttcaaga

SEQ ID NO: 361476 - DNA, 100 bp, Homo sapiens
ttggaaatcaactaatttcaagacaattttggagtgggaacccaaacccgtcaatcaagtctacactgttcaaataaggaaacatgccctgaactgtcac

SEQ ID NO: 361477 - DNA, 100 bp, Homo sapiens
ttttgaaccactggaaagtgaggaattttgaagtacaccgtggtgacattgtatcattggtgattaagttgtcatcattctgggaagaaaaaaaaaacat

SEQ ID NO: 361478 - DNA, 80 bp, Homo sapiens
gtcagcactcagcgcgggccggttgagaacttgttgcttagtaaccaagggaccattaagctgtgtgactttggcagtgc

SEQ ID NO: 361479 - DNA, 73 bp, Homo sapiens
agagcctttggggagctcagattggagtaaggcattgctgtcccttgcaggtcattgaaattatgagactatc

SEQ ID NO: 361480 - DNA, 98 bp, Homo sapiens
aaataccttaaaagtgttttacgggaactggtcacatacctcctttttctcatagtcttgtgcatctctataaacctgcttgacgtcttgcacatcag

SEQ ID NO: 361481 - DNA, 75 bp, Homo sapiens
gaaagagtcaacagcagtggcaacaggagccaaaaacctgtatatcatctccgtgaaggggatcaagggacggct

SEQ ID NO: 361482 - DNA, 96 bp, Homo sapiens
cccggtgtaccgcggcgagaagccccagctgcactacgcgccaggcccagacatgtccgtccttgtaagttaaaagcttccatgggagccttcctt

SEQ ID NO: 361483 - DNA, 83 bp, Homo sapiens
cttctctccacttctatggataaaactttcaaggccgcattgacaggaagattgagttccccctgcctgatgaaaagacgaag

SEQ ID NO: 361484 - DNA, 101 bp, Homo sapiens
agaggtagctcacgcgatagaaacgtgttcgctgcccagaagaagggaaggcgcgagtgaggaaaggaggtactgtaggggccagtgtcattcaaagatgt

SEQ ID NO: 361485 - DNA, 80 bp, Homo sapiens
ccccctccctcagcttccgccccaaaagatattcttactgattctccgggctctgcagctcttgacccggctggtattgt

SEQ ID NO: 361486 - DNA, 99 bp, Homo sapiens
cgcgagcgtctgggcgggtggtaggcatcagaacacaccatgatggctgtgacctaagaccctcaggaagccccggggtcatggcccagaagcaccccg

SEQ ID NO: 361487 - DNA, 100 bp, Homo sapiens
agcgagccgccgacccgccgagcaaaatggtccacctcattcatttaaccgagatgagacaataatcattgctttggcatcagtctctgtattagctgtt

SEQ ID NO: 361488 - DNA, 75 bp, Homo sapiens
ctgtgatgtgtgtctgaaggaggatgataaagagaagcatgccatagggacattgtgaatttgcaagtggagatg

SEQ ID NO: 361489 - DNA, 50 bp, Homo sapiens
ctcccggtgtggccacgagtcggctggagaatgctggaggagaccttaag

SEQ ID NO: 361490 - DNA, 82 bp, Homo sapiens
ggaaatcagggagctcttaacccagtttgaaacgtaactggttccctgaccagcttcgagagcatgcagaggctctgcgaca

SEQ ID NO: 361491 - DNA, 50 bp, Homo sapiens
caaactccacgaagccaacgcccagaggcgtagaggctccggtgtttttt

SEQ ID NO: 361492 - DNA, 98 bp, Homo sapiens
gaaacacctgtaaggaccagaatagtttcaagcattcttgttatttaacacgggaaggaggtgacttcgcctgtgatggacttccagtgtgagcactg

SEQ ID NO: 361493 - DNA, 50 bp, Homo sapiens
ggccctgggagctggaggaaccgcgaagccaagtacaagaagctggagaa

SEQ ID NO: 361494 - DNA, 120 bp, Homo sapiens
cgcccccgccggttcgcgtctctctgctgcggcgcggggaccgctgtgctctcgcaggttcaggagaagtggcacctggtggaggacctgtcgcgactgctgccggagccaggcccgagc

SEQ ID NO: 361495 - DNA, 100 bp, Homo sapiens
atgtgcagttaaaaaatctgcccttttatgatgtccttgatgttctcatcaagcccacgagtttaggttatgaagacagtatggagtttccagaccatag

SEQ ID NO: 361496 - DNA, 120 bp, Homo sapiens
cgaaggaagattatttcaagtggaatatgccattgaggctatcaaggtggtgaaggcatttgtggtcctggcctcgcagttcctgtcccatgacccagaacagctcaccaaggagctgca

SEQ ID NO: 361497 - DNA, 75 bp, Homo sapiens
cggagagagactgtgccagtcccagccgccctaccgccgtgggaacggagcctgtcactctgctgggccagattg

SEQ ID NO: 361498 - DNA, 49 bp, Homo sapiens
agcaacttcctcgagatcgatagtaaagctgctgctaaagctggatctt

SEQ ID NO: 361499 - DNA, 75 bp, Homo sapiens
cggcttttgggggatcactgtcctctctcggcagcaggtggtctatgttgcccgaaacccaaaggacgtggcggt

SEQ ID NO: 361500 - DNA, 99 bp, Homo sapiens
aacgtggagcaggcgttccagacgattgcacggaatgcacttaagcaggacctgaaggagaagaaggagaaggtggaggagaaggcaagccggaaagag

SEQ ID NO: 361501 - DNA, 100 bp, Homo sapiens
caaggaggagaccccagggcagaggccagccaccttccaaaaagggaaagaagcggaaggcacaaagggaagaggaacaggaacattcaaataaagctcc

SEQ ID NO: 361502 - DNA, 99 bp, Homo sapiens
gctgatctatctactggaacatggacaggaactgtggacagtgaagagaggcctctcccaaagcacctgcgcaggtcagaatggcggcagtggagcatc

SEQ ID NO: 361503 - DNA, 101 bp, Homo sapiens
gagacgtatgcggaggttgggaaggagggcaagcatatgtaagtggaactcagaaggcaacattccctgaacatactcttccaccagaatctcctctacag

SEQ ID NO: 361504 - DNA, 100 bp, Homo sapiens
taaagctgagctgcgaggaaaatggcggcgggaggccacaccatgaggccccagccccaccagaggccccgcgctgccctggcccccggtgcaccgtgct

SEQ ID NO: 361505 - DNA, 89 bp, Homo sapiens
tcgtctcgtagtccgacgcctggggcgatggatccgtttacggaggattttgcaggttaattcctcacacacgttcaccaggtacttgg

SEQ ID NO: 361506 - DNA, 50 bp, Homo sapiens
atgaaatgctgtcccaaccttactggaaccactcacgaattcttgtttgg

SEQ ID NO: 361507 - DNA, 74 bp, Homo sapiens
cgactcttccagcgtctcgggctccttgcagcaggttgggtatctacagccattggttgctgttcaggtcagct

SEQ ID NO: 361508 - DNA, 98 bp, Homo sapiens
gaggggctcagttgggtggactacggggagcgcgccgagctggatgactcggacgcacggggtcactctggtgcccattgaggagttcagcccggagt

SEQ ID NO: 361509 - DNA, 100 bp, Homo sapiens
ggtgcctgggaagtaacagcaagagaatcttttagctgaaaaagtagagcagctgatggaatggagttccagacgctcaatcttccgaatgaatggtgat

SEQ ID NO: 361510 - DNA, 83 bp, Homo sapiens
ctggagcctcagttggaagcagccgatccagcctgcggagcctgtggggcaggcaagaaataccgcccacgaatggatcagga

SEQ ID NO: 361511 - DNA, 100 bp, Homo sapiens
ggagccgcggccgcggcggcggcggccgggaaggagggatggagccccccaaacagaaattatcaatgctcatacgaaggaaactcgctgggctctccct

SEQ ID NO: 361512 - DNA, 100 bp, Homo sapiens
gctggctacgaatacgtgagcccggagcagctggctggctttgataagtacaaggatggctgcagctcctccaagttactgttttgttgccttccctcca

SEQ ID NO: 361513 - DNA, 98 bp, Homo sapiens
gggcacagaaacacagcagcgggagcagcaacaccagcactgccaacagctcctgggcaacgtgctggtctgtgtgctggcccatcactttggcaaag

SEQ ID NO: 361514 - DNA, 82 bp, Homo sapiens
gcaggctccggcttccgtcccggacagagcccgtggtcgcgcagggcgaacctttcctacacacccatacttctctgcccag

SEQ ID NO: 361515 - DNA, 82 bp, Homo sapiens
gtcgccttgctcctcgccgcggcggggactgcagatcatggaagggaagtggttgctgtgtatgttactggtgcttggaact

SEQ ID NO: 361516 - DNA, 75 bp, Homo sapiens
gtactgctttaaacttaaagacctctttggacccgaaattgtaagtcatcaagagttcatataactagagctgtc

SEQ ID NO: 361517 - DNA, 75 bp, Homo sapiens
ttttctgttcagtgacatctgggatattccaatgcctttagttagctcaggagtagagcatggtaacctgagaga

SEQ ID NO: 361518 - DNA, 82 bp, Homo sapiens
aggaagctcaccccgaggaagtctctcgccacgaaactaatctggattcactccctctggttgatacccactcaaaaaggac

SEQ ID NO: 361519 - DNA, 74 bp, Homo sapiens
taccaacaagactaaaagattacttggaagaatataaattccaggccgaatacatcaagcaatggtaacatctt

SEQ ID NO: 361520 - DNA, 75 bp, Homo sapiens
aggaagaggaagaggaggatgacccacttgattttgaagatgtaactgagtttctggaagaggtcattgaagcct

SEQ ID NO: 361521 - DNA, 101 bp, Homo sapiens
tcgatgccaatctctgcttgaaaggagaagacttggattctcagtcttcacagaaaagtactgtacagctaaccatgtggataagcttcctggcccaagag

SEQ ID NO: 361522 - DNA, 50 bp, Homo sapiens
tggtggagtctgcccaggctgtgaggcaccttccactagcaacagtctcc

SEQ ID NO: 361523 - DNA, 75 bp, Homo sapiens
tttagaaaaggacagcaccctcacggaaccagcatttgttgctatcggggactacaatggccacgtcggtctggg

SEQ ID NO: 361524 - DNA, 75 bp, Homo sapiens
aagcttcattgttttcagctaacagtaaccccagggattgttgtctgagattctgcgtaaggaagaagaccctcg

SEQ ID NO: 361525 - DNA, 98 bp, Homo sapiens
aattgctgaatgagcacaaggatttgaaggaatttagataatgggctgtgtgcaatgtaaggataaagaagcaacaaaactgacggaggagagggacg

SEQ ID NO: 361526 - DNA, 100 bp, Homo sapiens
ccctgtggccatccggaccctgggcagactgcaggaactgaaactggtggtgacaaaagagaaagagaagaaagtggggctgtatacgatctatgtgaat

SEQ ID NO: 361527 - DNA, 100 bp, Homo sapiens
accgggggaggcgacgctaagttgctgatcgtggcggtggtggtgaagtttattaagaaggagaaggtcttggaggattgttggattgaggatcccaaac

SEQ ID NO: 361528 - DNA, 100 bp, Homo sapiens
ccagggcgggggggatggcgtctccccgactccacctgagggactggctcctggggattgaaagaaggtggcaagaggaagaagcagaagcagagagagg

SEQ ID NO: 361529 - DNA, 100 bp, Homo sapiens
acgtctgcggaagtgcagctgcctcagttcttagcgcagctctctctcccacagattcgattgaatagactattgaccattgatacagatttgttggagc

SEQ ID NO: 361530 - DNA, 50 bp, Homo sapiens
ctggataccagcattcctgagacaatcctttgatacaaccaagtcggatg

SEQ ID NO: 361531 - DNA, 75 bp, Homo sapiens
gcaggactgcgccgcgtcttcctcaagggtggcccagttgaaatccttcccttcctctaccttggaagtgcctac

SEQ ID NO: 361532 - DNA, 74 bp, Homo sapiens
cacactcaaggtcatcgacctgcgtgtcagcaacatccgccaggtgttcaggacatgagtgcattggtggctgc

SEQ ID NO: 361533 - DNA, 80 bp, Homo sapiens
gtgcttcgttttgtgaaaggccaatttcatgaatttcaagagagtaccattgggggaaccctaaggactctgcaatatga

SEQ ID NO: 361534 - DNA, 100 bp, Homo sapiens
actccaacagtgccgaggatttctcggactgcaattacaacagcttcaatccgtcgtcatagatggagaagagaaggtagtgggcagcagtcagtgacag

SEQ ID NO: 361535 - DNA, 100 bp, Homo sapiens
ttgttgcccagttccccagttctggcagattctggaaactgtacattgaagcagaggtgaaaggtgtagcagtcactcggcctacacccacagcatcgac

SEQ ID NO: 361536 - DNA, 88 bp, Homo sapiens
accttacccagcccagcccatgggcccaccggcctaccacgagaccctggctgacgccagcatgtctccggacgccaccaagccgagc

SEQ ID NO: 361537 - DNA, 82 bp, Homo sapiens
gccggagctgggcgcggattcgccgaggcaccgaggcactcagaggagccgcttacaaacacgcagatggcaagaagattga

SEQ ID NO: 361538 - DNA, 75 bp, Homo sapiens
atgatgaaaaatatgttcctgcccacaaggagttagcgacctactgggataatgtatccagtgctgagggttggc

SEQ ID NO: 361539 - DNA, 82 bp, Homo sapiens
gcagaaggtctctggagacatcttcagcagggtctgggggtggtggcatctcccctaaaggaagtggtccctctgtggcaag

SEQ ID NO: 361540 - DNA, 74 bp, Homo sapiens
gtcctacacttgcgcaaatgtctccgttggttcgactatgcaatgagggcgcccggaagatggaaaggactgag

SEQ ID NO: 361541 - DNA, 100 bp, Homo sapiens
ctggagcgggcggagctgtgcgagagcctcctcacttggctctccctgtccagccgcctgcagctgaccctgtaccagtacaagacgtgtcccttctgca

SEQ ID NO: 361542 - DNA, 100 bp, Homo sapiens
tcgtttcccagcgctgcgcaggacttctcctggcggcgctgcggatccagggggtcggctgccaggtacagatatggctcgtggacagcagaaaattcag

SEQ ID NO: 361543 - DNA, 100 bp, Homo sapiens
cagcccatattgggtttctccagcatattccaaaacactggaactattttggggctgatgagaatcttggtccagtggctgtgagcattcgaagggaaaa

SEQ ID NO: 361544 - DNA, 75 bp, Homo sapiens
aggacagaaatggcagcacaagcacatcacttacagaatcaaagaatcttcaggatggcagcaagtgtttacgag

SEQ ID NO: 361545 - DNA, 100 bp, Homo sapiens
gcagtgactttcttggatcgggtcgcctgtgtggcaagagtagaaggagcatcgatgcagactgggctggcttagatgaagatgaagatgcacatgtctg

SEQ ID NO: 361546 - DNA, 73 bp, Homo sapiens
gagcttgacgccttagataacagccatcctattgaagctcctcctgctggaccctccagccccgggcctcagg

SEQ ID NO: 361547 - DNA, 83 bp, Homo sapiens
caaacctccgggcccccaggcatggctagctcgccctgggcgctgcctatggcacagccaagagcggtaccggcattgcggcc

SEQ ID NO: 361548 - DNA, 100 bp, Homo sapiens
ttccgccctgctgcaggcggaggtgctggatctggacgaggacgaggacgacctggaggtgttcagcaaggcatttggctttatgtcccgagttgcccta

SEQ ID NO: 361549 - DNA, 95 bp, Homo sapiens
acagagccatggatgttggcaagtctttacaatggcagtgtgtgtgtttggaatcatgaaacacagtgagggccccaaggctgttgcagctcctc

SEQ ID NO: 361550 - DNA, 100 bp, Homo sapiens
cccctacttcaagtactccgtcatgatcaacaaggccacgccctacaactacccaggccttcccttcttcttggtggtgttcttgagtaagataatctgg

SEQ ID NO: 361551 - DNA, 88 bp, Homo sapiens
ctccctggaccgctgtgtaggcacctgagttaacggacgctaagcggggtaggggaagaacttgggaatcagtgaaacgtacaaccag

SEQ ID NO: 361552 - DNA, 73 bp, Homo sapiens
cctggctgagctggagctggagctgtcggaaggctggagcattggatttgctaaaggagcttaagaatattcc

SEQ ID NO: 361553 - DNA, 90 bp, Homo sapiens
ggaaaaaagagaggatttgcttttgtaacttttgatgatcatgatacagttgataaaattgttggactcaagatcaacatggaagaagag

SEQ ID NO: 361554 - DNA, 125 bp, Homo sapiens
ctgccaccctacgccgtagccgtccagagactggcaggcctcggcctaaaggtcctgcacccagacctcacgacgcacctcctgcctctccgctgcttttggaaagtcagaaaaagaagatgtct

SEQ ID NO: 361555 - DNA, 100 bp, Homo sapiens
gctgagggcggagaggcgcatcgtgttcgaggcggagaccgagggggagccccgcgcgcggcgtcgtaagactttgaccccgacgcaggcttcagtgatt

SEQ ID NO: 361556 - DNA, 75 bp, Homo sapiens
cacgtgtttgttctgggcgaatggcagcccatcgagttcctggtccagaactttacacagaaaaggtgctcaaag

SEQ ID NO: 361557 - DNA, 100 bp, Homo sapiens
gaagaaatgctgtggcatctgttgtcgcaggtatattgtgtctttggtgcaacactaacaaggcttgtctggactacccagttacaagcgtcttgccacc

SEQ ID NO: 361558 - DNA, 100 bp, Homo sapiens
gagcagctgcgagccgaccatgtcttcatttgcttccacaagaaccgcgaggacagagccaaaaagcctacccaagcaggcatcagatacaggaagtaac

SEQ ID NO: 361559 - DNA, 100 bp, Homo sapiens
tcccaggcagcacagatagacggatccttgttataccacatttgcataagttagccttggtgaacaacttacagattgtggattctaaaagactggacat

SEQ ID NO: 361560 - DNA, 100 bp, Homo sapiens
gttccatgatgggaagtgacatgaatggcttattcagaagagcataaaggtatgccctgtggtttcatccgccagaattccggcaactccatttccttgg

SEQ ID NO: 361561 - DNA, 100 bp, Homo sapiens
ctaaacagaaagatggaaactaaagtacatttattctgccaggatttttgaagtgaagcatcagcataggaaggtggaaaaccagatcaaaatggccaag

SEQ ID NO: 361562 - DNA, 90 bp, Homo sapiens
actcggcttcatcaaggtcctcgagtggccctttctaaggcacaaaatgatgtgatggaaatgaagatgcagtcagagagactttcgaaa

SEQ ID NO: 361563 - DNA, 74 bp, Homo sapiens
caggaagcgcggggcggcggcgaaaggacggaaataagatatgtggaacggagttatgtatcaaaacccacttt

SEQ ID NO: 361564 - DNA, 83 bp, Homo sapiens
tgtgctcatctgggccatgtgcatctctgtgaaagagggcgtctctggccgagcctctttttgtggaaaacgacagcagcagc

SEQ ID NO: 361565 - DNA, 100 bp, Homo sapiens
cgcccgtggtggaggatgaggagatggaggcgtcgggcgtgagcggaaatgaggaggagatggtggaggaggctgaagattttgttgacctcaacaatgg

SEQ ID NO: 361566 - DNA, 100 bp, Homo sapiens
cgcagatcgctgtagtgggcggccagagcgccggcaagagctcggtgctggagaacttcgtgggccggcagcctgcttctgcaaagtggtacgatcgaag

SEQ ID NO: 361567 - DNA, 83 bp, Homo sapiens
cccagatgcgcgcgatgctggaccagttgatgggcacctcccgggacggttcagcagctggacatggagaaccaacgctcatc

SEQ ID NO: 361568 - DNA, 82 bp, Homo sapiens
ggaatcagcttctctcattttctttccctgcaccaactagcagatccagtttagagagaaggttctgtggactgctataacg

SEQ ID NO: 361569 - DNA, 110 bp, Homo sapiens
atagccacactcctctggagtctttaattcatccacagccatcatataaaggtttcattgtttgcggaacttttcaacgaaatgcttcaaagagattttggtgtccgtat

SEQ ID NO: 361570 - DNA, 51 bp, Homo sapiens
cccactcctgggccgtccctgaaggtagcgggaaggatgaccacgctcaca

SEQ ID NO: 361571 - DNA, 100 bp, Homo sapiens
atgcatgaaagacaaagctactcagggttccaagcttgaactacccttgtggctggcaaaaggactttttgacaacaagcgacggatcctttctgtggaa

SEQ ID NO: 361572 - DNA, 76 bp, Homo sapiens
cgtgtcccggaggagcggcctgcgccgccgcgcgagaggaaaagttcaccatgtctattctcaagatccatgccag

SEQ ID NO: 361573 - DNA, 82 bp, Homo sapiens
ttgtggacccagaggattttatggcacatttgatgtattcggaaggaagtgacattgtacctcagagtaatgagacagctct

SEQ ID NO: 361574 - DNA, 51 bp, Homo sapiens
gatcatcgtgggcgacgccacagagaaaggaagaggatcacctagcccggg

SEQ ID NO: 361575 - DNA, 50 bp, Homo sapiens
ccgcgggcgatgccaaaaacgtgcctacaccaactaatgttacaattgaa

SEQ ID NO: 361576 - DNA, 96 bp, Homo sapiens
ctacctgctgcctctcctgcctgcgctggtcctcagcaccaggtttatggctacaaatgatttgatgacggaactgcagaaagattccatcaagtt

SEQ ID NO: 361577 - DNA, 103 bp, Homo sapiens
gagaggacagaggtgcctggggcaacctccaccttgacggttccagcctgtgaagttgaagcagggaaagtataccaggtctcctcaaaagagcatatgcagc

SEQ ID NO: 361578 - DNA, 75 bp, Homo sapiens
caactggaatatttagcaaggattcaaggctttcaggccgaagaacagttgagaattgttgaagaacaaagaaag

SEQ ID NO: 361579 - DNA, 98 bp, Homo sapiens
ccacactgccctgggactagtgcagcaagatgatgatgaatgaagtcctggcagcttcctgtgtcccaggccttgtagaaataaatgagacagacgtg

SEQ ID NO: 361580 - DNA, 98 bp, Homo sapiens
gatccccaagaccctaaagttcgtcgtcgtcatcgtcgcggtcctgctgccagatccatcagttacacaagtgacaagaaatgttccaccaggacttg

SEQ ID NO: 361581 - DNA, 75 bp, Homo sapiens
cgcccactccagaagtagcatggaaatggagggcatcttcaaccacaaaggaacgtcaaggtcgtgggaaataaa

SEQ ID NO: 361582 - DNA, 74 bp, Homo sapiens
attccttaccattccgagactggaagaactttacaacactgtgggaaagcagtgccactctccgcttcacagat

SEQ ID NO: 361583 - DNA, 75 bp, Homo sapiens
ggggctttcgcgaatcccgaggcaatctcggaggcgaagaataactgtgtgatgcctgaagatgtgaagaacttt

SEQ ID NO: 361584 - DNA, 100 bp, Homo sapiens
agttgactcacaagagccccattgagcgtcagaagagcctgttgagtcttctccccctattcctaaagagtccttggtataaatgaatggcagaatacgg

SEQ ID NO: 361585 - DNA, 99 bp, Homo sapiens
gtgatggagattttgatgtggatgatgccaaagttttattagctccaaaaggaattcttcatttgtctcctgatgtttatcaagagatggaagccagcc

SEQ ID NO: 361586 - DNA, 95 bp, Homo sapiens
gctgccccggcgcaccgactggaccgggaaggagcatcccaggacctaccagaatctggatttaagtgccctgtatgctcaaaatttgtatcctc

SEQ ID NO: 361587 - DNA, 75 bp, Homo sapiens
gtgggacccgtgagcaagcagcgacgccagcggcggagaaccgacgaaagattgtcctggcctttggcaactaca

SEQ ID NO: 361588 - DNA, 75 bp, Homo sapiens
cgaaggtgctaccatcgtgagagtaaggaaacaagattttggtgaagcagtcgcccatgcttgtagcgtacgaca

SEQ ID NO: 361589 - DNA, 100 bp, Homo sapiens
gaatcactgacattgtggtgttacagatgacagatttgaagatctggaagaggcaaatccattctcttttagagagtttctgaagaccaagaacctcggc

SEQ ID NO: 361590 - DNA, 74 bp, Homo sapiens
acagtaacaaaacatataaagcccgagcccaaaccccgccaccatcataggtaccagctggaggatgagtctgc

SEQ ID NO: 361591 - DNA, 82 bp, Homo sapiens
cagtcatcattgatctagatgaggaagatcggcagcaggagtttcggagagcgtgtgaaggcaaagaagaatgctgctccat

SEQ ID NO: 361592 - DNA, 100 bp, Homo sapiens
gttgaatgagaaccctacttgcctaaatgaggaatgtctttcctaccatctaaaatacgaaggtttctggctgggtcctgcatctccagtatggaatgta

SEQ ID NO: 361593 - DNA, 100 bp, Homo sapiens
gctggtgggtgttccagctggaagtaaccccttccgggagcctagatcctgtgctttactctgaagactcatgcagttcgaacattaagcaatgccgagg

SEQ ID NO: 361594 - DNA, 75 bp, Homo sapiens
cttggatgaggtgaaagactatgtggccaagtgctttctcctgctcaagacagccacacgaacacggatctcccc

SEQ ID NO: 361595 - DNA, 96 bp, Homo sapiens
ccgaagacactgcgactccggagacagcccaaatatcctcggaagagcgctcccaggagaaacaaatgacccagcagatggctgggatgaacttct

SEQ ID NO: 361596 - DNA, 100 bp, Homo sapiens
agcagctcttccggaagatcaactgcagactgtcctattgcatctcaagccgtggatgacaatattccacttagggtaatgctgcttctcatggatgaag

SEQ ID NO: 361597 - DNA, 74 bp, Homo sapiens
ctggactacaatgcaggactgctctcctactacacgtgattcgcctttgccagtctcatctcgtgtctgctttg

SEQ ID NO: 361598 - DNA, 75 bp, Homo sapiens
tcttcaatgacttccttatgctctctaatacccagttcatagagaatgaagaggatcacctagcccgggtagaag

SEQ ID NO: 361599 - DNA, 100 bp, Homo sapiens
gtcggctccagaaaccccgcgccttcatcctaatctccagccaagtcctccgtgctcgtggtgggaatcgtcatcggtgtcttgctactcacggcagcgg

SEQ ID NO: 361600 - DNA, 90 bp, Homo sapiens
agacctggtgaaggtggaacggggctcccaggacctccactaatcaccagaacaaaatgtgcagagcccagcattacatcaacatgcccg

SEQ ID NO: 361601 - DNA, 100 bp, Homo sapiens
ccatatttggaggacatcccagaccctgaagtaaactggatcccctgtaataatcgtaacaggtgagattaaatttacctacacctagagaaataattgg

SEQ ID NO: 361602 - DNA, 135 bp, Homo sapiens
gagaaggatgaggcagaaaaggagcacagagagttcagagcaaaaactaacagggatcttgaaattaaagatcaggttttgcacactagggaccaagaagccctcggggacactgctgagaaaagactgccgaag

SEQ ID NO: 361603 - DNA, 99 bp, Homo sapiens
ctgagcctgttggaggaactggcccggaaacaggaggacggttcgggggtgattaaagctggctttgcaggagaccagattcccaaatactgtttccca

SEQ ID NO: 361604 - DNA, 100 bp, Homo sapiens
ggcctcgccatgtcctgctgcccgtgttcttggggaagatcccgactaagccattttccagtggcacctcttccatcatgagttcctgaggcagtccgat

SEQ ID NO: 361605 - DNA, 100 bp, Homo sapiens
gtgcatcgaagtgttccaagctgtgacttaccttaacatgttcttgaagtaccatggcgtggattaaaaggctttaccgccagcacctgttcagaatcac

SEQ ID NO: 361606 - DNA, 82 bp, Homo sapiens
aggaacgaggcaaggagctaaagcagcgtgcgttcagccctgggctgtccaggcagccatcttgtctggagacaagtctgag

SEQ ID NO: 361607 - DNA, 101 bp, Homo sapiens
gaccaggacagtcgcgaggttcgagtgttgcagagcctgcggggcaagatctgttttaaaatcaaagatgggaaaatcggagaaaattgcccttccccatg

SEQ ID NO: 361608 - DNA, 87 bp, Homo sapiens
ctattattgtaaggagtgcaccatccaggagaaggacggtcttgctctgttgcctaggctggagtgcagtggtacaagcacggctca

SEQ ID NO: 361609 - DNA, 83 bp, Homo sapiens
gctggcatatgctgaatatgtcatctacagaggagaacagatccctgaatattgccgagccttagaagagaatgaaatatctg

SEQ ID NO: 361610 - DNA, 100 bp, Homo sapiens
aagaagaagcacccagatgcttcagtcaacttctcagagttttctaagaagtgctcagagaggtggaagataagtctgccattcagtacagcgttcggag

SEQ ID NO: 361611 - DNA, 97 bp, Homo sapiens
cgggggaccgcccttcgccttcgttgagttcgaggacccgcgacccaacatgagtgaagtttcctgcaagaaacgggacgactatttggaatggcca

SEQ ID NO: 361612 - DNA, 101 bp, Homo sapiens
cccgtgggcctgtggactgcagcctcggcggtcagcagccaggaagaaagctcaggcccattagtgatgactctgaaagcattgaagaaagtgatacaagg

SEQ ID NO: 361613 - DNA, 100 bp, Homo sapiens
ctcgcggcgctcgcccgctctccctcgctctcgctctgtcttttttgggcgccatgctgaggggaaggaatcattgaccttcaaggacgtgtttgtggac

SEQ ID NO: 361614 - DNA, 75 bp, Homo sapiens
gaaatcagaggagatgtaactatcggaggaatgttattgaagccgtttacaatagactgaatccttacaaaaatg

SEQ ID NO: 361615 - DNA, 75 bp, Homo sapiens
gttttgtacagtcttactgggaacaatataagctgcaagctttcttcctggtggcagatgacatcatggattcat

SEQ ID NO: 361616 - DNA, 76 bp, Homo sapiens
atgatctctacatctcagactactgtgtgtggattcagaaagtcaagctgaccggttccctgatgtgttacctgct

SEQ ID NO: 361617 - DNA, 114 bp, Homo sapiens
gtactcagcaagctcgagttaaagttggatgtgctggaacagagtacaagaggcaattgcagaagtggctgctgaattaaaccctgatggttctgcccagcagcaatcaaaagc

SEQ ID NO: 361618 - DNA, 83 bp, Homo sapiens
cacctgacggcgtgaccgacccgagccgagctggaagtcgagtgtgctactcaactcaggagatttggagacaaactgaactt

SEQ ID NO: 361619 - DNA, 75 bp, Homo sapiens
gccagcgttctcttttcccatcatagagtgactgttttgcagtcttatcgggacctcaaagaagtaactcctgaa

SEQ ID NO: 361620 - DNA, 115 bp, Homo sapiens
gccgctcatcgtgtggctgctggtgaaaagcttctccgagagatccaggtccagagagcatcgcagacatcgatctcgctccatgtcacgtgaacgcaagaggagaactcgatcc

SEQ ID NO: 361621 - DNA, 90 bp, Homo sapiens
gttccttcattttcctgtatattctctgtactatgtcgattcgacagcctcccaagaatgagtccttggagacttacccagtgatgaagt

SEQ ID NO: 361622 - DNA, 100 bp, Homo sapiens
gcagcagaaatcctactccacccataggaagacccacgtccacacctactcctcctcagacatatctgaagagatggattaagaatgctttggattaagg

SEQ ID NO: 361623 - DNA, 50 bp, Homo sapiens
attaactcattcaaggttacccagttgtactatactggcaattgctggag

SEQ ID NO: 361624 - DNA, 100 bp, Homo sapiens
cattgatgtgcttctgctgagcaagaaagggtttgatgtgttcaatgcactggatctcatggagaacaaaaccttcctggagaagctcaagtttggcata

SEQ ID NO: 361625 - DNA, 99 bp, Homo sapiens
aaactccgagacttcccgggcagcggctacgacctgacggacaccacccaagcaggggttgccctgctgtcagacgtctatcctgagaaaatcttgccg

SEQ ID NO: 361626 - DNA, 75 bp, Homo sapiens
caagctctgctccacactgccaaccggccagaggacgagtgtggcctgctctccctcctgtacctgccaacagga

SEQ ID NO: 361627 - DNA, 75 bp, Homo sapiens
tcaagaaagtattgcaggacaagagatttaagtttacagatgatccaactcttgcaatttgcaacgacagcggag

SEQ ID NO: 361628 - DNA, 80 bp, Homo sapiens
tacttctcctggcccttgggtgtccagccctacccacagatacctcttccaaatgcatgatgaagatgttctcatcaaca

SEQ ID NO: 361629 - DNA, 100 bp, Homo sapiens
ctgagctcgcggctcacgctgagagggacacgcagtgacgagcggccgaagcagctttgcggtgagcgagtgctgtgctttcatgggcctcttctttatg

SEQ ID NO: 361630 - DNA, 74 bp, Homo sapiens
tactcgggacgctgcacctcccgcgccgcacggtggacgaggctgaccccgcactacatctacccaccagccat

SEQ ID NO: 361631 - DNA, 80 bp, Homo sapiens
ctattacaactccctcaaggactgcctttcctggaaccactcgttttgactattattttatcactctttgtgaaacttca

SEQ ID NO: 361632 - DNA, 90 bp, Homo sapiens
catcatttttgccctcaaaagaaatggcaggtttcagagcagcgatggagaaattaaatacttgcaattagcagaggaactgattcgtcc

SEQ ID NO: 361633 - DNA, 100 bp, Homo sapiens
cgcggagatggcagcgtccagcaactccagcctgtccggctcgtcggtgtcctccgatgaactcacaaattcgtcagaaaccagattgtctttggaagac

SEQ ID NO: 361634 - DNA, 100 bp, Homo sapiens
cacaaggccaagggcaagtgatttgacaggctctgtgtgctccgggatggagcaggtgtgcagagggtgagaacccagctctgggaccaagtcacttgct

SEQ ID NO: 361635 - DNA, 50 bp, Homo sapiens
tccagctttactgtgcaacttggagatggggtcttgctgtgttgtccagg

SEQ ID NO: 361636 - DNA, 78 bp, Homo sapiens
cgacgctggctgcagggacccggtgacagcgtgagaggaatcttgtcgattggcctggctgctgcctactacagcgga

SEQ ID NO: 361637 - DNA, 75 bp, Homo sapiens
agcactacctttgtgagcagtgtgacccaaggcctgtggacagggagctctccttgtgtacatcatcatggttcc

SEQ ID NO: 361638 - DNA, 74 bp, Homo sapiens
gtcggcagcaagaacagagagagaggtggacagatctgagagatactgaggaatacctcaatagcattctccag

SEQ ID NO: 361639 - DNA, 98 bp, Homo sapiens
tgcttcaccattaactagtaaagcagtacaagaggtatctcgggggagctttgtgccttgatggatcaagttcatcatatgcagcactcaaaatggca

SEQ ID NO: 361640 - DNA, 74 bp, Homo sapiens
ctgcacttgtcctcatgagccgctccaatgtccagcccacagccgagagggtgacctctctgggcaaggactgg

SEQ ID NO: 361641 - DNA, 73 bp, Homo sapiens
cagattttgaagctaaagttaagcaggaagagagaagggcacagttacctaagtatcaacgtaatcttcctcg

SEQ ID NO: 361642 - DNA, 100 bp, Homo sapiens
ctgcagcagaacaacttctggcagagtacttagagaggcaaaagaacttcagactttacacaacctgcgcaaactctttgttcaggacctggctacaaga

SEQ ID NO: 361643 - DNA, 90 bp, Homo sapiens
aaccccaaaatcagtgattctacatctcaagctcatattttgaagtgtttacgggctgtggaaaatctctgttctcacaaagtctcccca

SEQ ID NO: 361644 - DNA, 75 bp, Homo sapiens
gggagatcttcttcttttcttaactggtcaagaggtcaagagcaatctgaatccaaatgcaaaggagtttgttcc

SEQ ID NO: 361645 - DNA, 75 bp, Homo sapiens
gtggaacttgttggaaatggaacatacgggcaagtttataaggaatggcgaggatcagatctgccccaaatgcag

SEQ ID NO: 361646 - DNA, 98 bp, Homo sapiens
taaccctcactggagaatccagagatcttctggtgaccccacttctcgctgctcatgccgctgggactggggcggcggaaaaaggcgccccctctagt

SEQ ID NO: 361647 - DNA, 83 bp, Homo sapiens
ccgaggctcgcgggcggcgggcccgggtactccaaagattcaggtttactcacgtcatccagcagagaatggaaagtcaaatt

SEQ ID NO: 361648 - DNA, 101 bp, Homo sapiens
cgaggactctgtgaatctgtggtggaagcagacctcgtggaagcgctggaaaaatttgggacaatatggtactaggttttgacaagcttgcatcatgcgtg

SEQ ID NO: 361649 - DNA, 82 bp, Homo sapiens
ctttattctgtgggctctgattctccaatgggaataccaaggggatttttcaagccacattcaattgataggatgaaaaaat

SEQ ID NO: 361650 - DNA, 88 bp, Homo sapiens
ccccatgttctgcagcgtggcttcctttggtgccagctctttgtctaggaaaatggctttgtaaagaagtttgaacctaaatctggct

SEQ ID NO: 361651 - DNA, 100 bp, Homo sapiens
ctgagtgtgagcagagctctgccaggcagaaggcctctctcctgatacagcaggcgctcaccatgttccctggagatcatgacaagatgtttaagatgag

SEQ ID NO: 361652 - DNA, 98 bp, Homo sapiens
tcgagaattccagtctcctgatgaggaaatgaaaaaaattgtgctgaaggaacaagaccctgcagatggagaagatcaaggctcgtttgaaggctgag

SEQ ID NO: 361653 - DNA, 75 bp, Homo sapiens
ccgtattctctgaagcctggaaacgaggcactcagttggaagagtccagcaagaagtctggaacgttttttctta

SEQ ID NO: 361654 - DNA, 74 bp, Homo sapiens
tgctgaagtaagattgtcttggaaatactaagttgggtatctccatgcagtagctaatccagggttgatttctt

SEQ ID NO: 361655 - DNA, 83 bp, Homo sapiens
caggccctcgttgcccagatatcttgatgtggaagaaatggaggactcagaaccaaggatttccaagtgatttcttccaaagc

SEQ ID NO: 361656 - DNA, 100 bp, Homo sapiens
ggaaaatgcgcgtcccgggcgcgggtaggattggatagctttagtcaaagcagctgctgcagctgcagccaagaacaaaacagggagtaaacctcgaacc

SEQ ID NO: 361657 - DNA, 100 bp, Homo sapiens
attcatttcaggctccttctaaatggccaaggatgaagatgagctggattcccacaccatggtgaagactagtgtggagagtgtgggcaccatgcgggcc

SEQ ID NO: 361658 - DNA, 50 bp, Homo sapiens
tgctcctaaatgatcgcaaagtgtgggcaaacgcagaggcgggaacaaac

SEQ ID NO: 361659 - DNA, 98 bp, Homo sapiens
ggacatcgagcctgagggaggggaaaggcgcagggtatcacagaggacagagaccccagggccccagcccctggtgggggcggggagtgcaagggggc

SEQ ID NO: 361660 - DNA, 100 bp, Homo sapiens
cgccgccgccacccccgggctcggggtggcccccgcttcagtcccagggcaggacccagatgatgtggtaccagttggccaaagaagagcctggtgttgg

SEQ ID NO: 361661 - DNA, 82 bp, Homo sapiens
gtgacttgcagtcatcatccattaccacaaaattagatggcaaccgccgatgagattgtgaaactcatgctcgaccacatga

SEQ ID NO: 361662 - DNA, 82 bp, Homo sapiens
tcaacttcggtgcctctctccagcagactgcggttgaaatcacaaagattagacacctttttagataggtgttcttcagcac

SEQ ID NO: 361663 - DNA, 95 bp, Homo sapiens
acctctgtttagaatacctacgacgacatagacagcctaaacccagttctcagggacaacccgcagcttcatgaggaagtgaaagtctgggtaaa

SEQ ID NO: 361664 - DNA, 100 bp, Homo sapiens
gcggctacggcgtcatggaggagatccggcggcagggcaagctgtgcgacgtgaccctcaagggaacttaggctgcggaactatgtcccggaggatgagg

SEQ ID NO: 361665 - DNA, 97 bp, Homo sapiens
gcagcaggaggagggctggttccggctgcagcccgaccagtccaagagccggcggcatgacgagtcacacctgggtcctgagctggcgccatcaccg

SEQ ID NO: 361666 - DNA, 85 bp, Homo sapiens
cggcctgaagccatctctagcaagtggtcaggacgctgattgttctgcgcaggttggaggtggacattgcatctgggatggccat

SEQ ID NO: 361667 - DNA, 75 bp, Homo sapiens
gcacttcgtcatgttcttcgcgccctggcctccggtgtggctgtctctgatggtgtcatcaaggtgttcaacgac

SEQ ID NO: 361668 - DNA, 100 bp, Homo sapiens
agctgaggcggtcgcggccatgaagataacaaagctttattcgtcatttccatgtcagacaatggcgctcagatttatgaactggtggcacagacagttt

SEQ ID NO: 361669 - DNA, 82 bp, Homo sapiens
caatggcacaaagttctctcgatcagggcatacatctttcttcgacaaaggtccagaacacatattacataatggagccggg

SEQ ID NO: 361670 - DNA, 100 bp, Homo sapiens
aaacttatagctgatgtaggcctagtaggcttacgaggaaatatttcagtaaaagcagttaaaaaagaagtagaaaagaaactccgatgtcttcttgctg

SEQ ID NO: 361671 - DNA, 82 bp, Homo sapiens
ccccaattcagcagagaatattttcaaggggggtgatgtgtccaatctagatcccaacttctcatttgaaggcaccaaactg

SEQ ID NO: 361672 - DNA, 87 bp, Homo sapiens
ggggctggttctctccaggacatctaccaagagaaacttgcccaggccaaagaagagaacgtgggcttacatcagacactggatcag

SEQ ID NO: 361673 - DNA, 75 bp, Homo sapiens
ggccaccgcctggctcaccttctacgacatcgccatgaccgcggggtacaagaatattccacagatgtcctttga

SEQ ID NO: 361674 - DNA, 88 bp, Homo sapiens
gcgctacctgcctccgggcgcctgggcttcaggatgaaggaccgtctggagcagctgaaggccgccctctttgtatcatcagactatt

SEQ ID NO: 361675 - DNA, 51 bp, Homo sapiens
tatctaacgtttaccctagcaaaccagtcccgcggcagtgctggtggccat

SEQ ID NO: 361676 - DNA, 76 bp, Homo sapiens
gcggggcagctgccaggaacgagggtagcagagaccttttaatcaaagtgaagtttggggaaagcattgaggactt

SEQ ID NO: 361677 - DNA, 96 bp, Homo sapiens
ctggatcatggctgccgcgccgccgctacgggaccgcctgagctttctacaccggtaagactttgaccccgacgcaggcttcagtgattgccgcgg

SEQ ID NO: 361678 - DNA, 88 bp, Homo sapiens
cgggcgcggcactgcgggtcccgattgctgcagccgcttgtcagtgtgatgaagattggcacccagatgctgagctgcctggagcaca

SEQ ID NO: 361679 - DNA, 92 bp, Homo sapiens
ccaagggcctccgtctggatttccaaggaagaatttcctctgaagcaccggtcgcaatggaagaagagatcgccgcgctggtcattgacaat

SEQ ID NO: 361680 - DNA, 83 bp, Homo sapiens
cgtgaagctgctgctgtccaagggctctgacatcaacatccgagacaacggcaccggcagaagctggaggaccagaccaagcc

SEQ ID NO: 361681 - DNA, 100 bp, Homo sapiens
caggacttcagctgagattgctgcaattgtatatctccatgaataacctaaatgatcccccaaattggaatatccggcctaattccagggcggatggtgg

SEQ ID NO: 361682 - DNA, 98 bp, Homo sapiens
atcagttcagtatcgctacttcaaagggtactttttagaaccaaaggatgttttagaagaatgtatgtctcttcccaagctatcttcttattctggat

SEQ ID NO: 361683 - DNA, 74 bp, Homo sapiens
acacagctgcttccattggccagtatgaagtggtgaaggagtgtgtgcagcgccgaatttgccacatacctgaa

SEQ ID NO: 361684 - DNA, 75 bp, Homo sapiens
acctccaaggaagccacgtgcagacatctacaaccttcgatctcctgacgaggcaaacttgaagataaatctttt

SEQ ID NO: 361685 - DNA, 75 bp, Homo sapiens
caagggcggcacgctccggggcatcatcaagagcatggtttacccaaggtccagcctagcccctaggcaccatgt

SEQ ID NO: 361686 - DNA, 75 bp, Homo sapiens
gcctgacgcatctgtctgaggagcggtcagtgacgcgatggagcgggcaagaatctgatcatgatacaacaaaga

SEQ ID NO: 361687 - DNA, 73 bp, Homo sapiens
ggaagacaaatatggaaacaaatactatgaagacaacaagcaattttttgctgtccaatgtgaaagaaaaccc

SEQ ID NO: 361688 - DNA, 90 bp, Homo sapiens
ctatggtgcagatgtgaatggtaccctctatgaaaagaaagtccatgagatgctgaagaaggggtgggatgctgaaggttctcccttccg

SEQ ID NO: 361689 - DNA, 89 bp, Homo sapiens
cggaatcttggaaaactacaccatatcaaattgcctgtggaattagacaaatatggtctctttagaaggccttaccaaagtagttgatc

SEQ ID NO: 361690 - DNA, 75 bp, Homo sapiens
tcgacatcgagatcaaccgggagccggaaaggtcccccttctgggaaagaccgagtgaagaaaggtggatcctac

SEQ ID NO: 361691 - DNA, 100 bp, Homo sapiens
cgcgaaagccccaggggccattggaccctacaggaaacccctcctggagtttccccaaagccatggacagccctagtcttcgtgagcttcaacagcctct

SEQ ID NO: 361692 - DNA, 112 bp, Homo sapiens
ctactactactacatggacgtctggggcaaagggaccacggtcaccgtctcctcagacacagcattcaacccctctggaggaagtagcatttaaggcaccatcttggaagca

SEQ ID NO: 361693 - DNA, 100 bp, Homo sapiens
agaatgctccaggcagtgtaatctcattccatcttcattcatgactccagacagcctgcctagggtagttaaaagacgagtgaatgctctcaaaaacctg

SEQ ID NO: 361694 - DNA, 75 bp, Homo sapiens
ccccgggccccgatggccccgaccgcgtgctggagctcttcgacccacccaagggtgactatgaccagagcagga

SEQ ID NO: 361695 - DNA, 90 bp, Homo sapiens
tgacgagcggccgaagcagctttgcgaaccgggctgtgggtcggcccaaggggaagctgggcccggcctccgcggtgaagttggccgcca

SEQ ID NO: 361696 - DNA, 74 bp, Homo sapiens
cccacaaaagagatgagacaagaggaatggttacacagttgggagctgaaagtgccgacagcattggtgccgtg

SEQ ID NO: 361697 - DNA, 95 bp, Homo sapiens
accaggttcaagggtctctccagaaaatcttgtggacaaatccaggggaaggaaattaaggatgcagacactcagggcgtgtgtcttgcacagcc

SEQ ID NO: 361698 - DNA, 90 bp, Homo sapiens
ggaacaggggtctccagtatattcatctaccatgcttttcatgcaacacccaacacttataagcggaagaacacagaaacagctctagac

SEQ ID NO: 361699 - DNA, 75 bp, Homo sapiens
gagaaaaaactgtggctgttggtttgtggaacagacagctccttctttattgtcaaaggagaaactgcttcaaag

SEQ ID NO: 361700 - DNA, 50 bp, Homo sapiens
tcaaacatcgacgccatcgacaagcggaagttgacaaaagtgttgaagaa

SEQ ID NO: 361701 - DNA, 110 bp, Homo sapiens
ctgaaggatccagccagaaatgcaagatttggtgctatggagaaatttttggtagaatataagagtgcagtggagaagaaactggcagagtacaaatgtaacaccaacac

SEQ ID NO: 361702 - DNA, 100 bp, Homo sapiens
tcctcggcggccccggcgccggcaaggggacccagtgcgcccgcatcgtcgaggttgaaatcacaaagattagacacctttttagataggtgttcttcag

SEQ ID NO: 361703 - DNA, 82 bp, Homo sapiens
ctcggcatgaggccccttctcccaggaggggaggcacacacatctttgccatcgtggcatcagcctatgacctggctcagaa

SEQ ID NO: 361704 - DNA, 100 bp, Homo sapiens
tcggtccttacagccgctcgtcagactccagcagccaagatggtgaagcagatcgagagcaaggtatggagagtcggcttgactacactgtgtggagcaa

SEQ ID NO: 361705 - DNA, 83 bp, Homo sapiens
cttggaaatcctgccgcggacttctctgcacagcatccctgtgacagatttgaagattgtaccaggagagccgcagtgttcca

SEQ ID NO: 361706 - DNA, 90 bp, Homo sapiens
caacttcaagtagtggaaggagtacagggaagtctataagctttgcaacagaattacagagtatgatgttgtgggctgcacactgcagaa

SEQ ID NO: 361707 - DNA, 100 bp, Homo sapiens
tcgggagacagccgggcgctgcaagtgcagcctgggagctctattccaccttacaacaccgaggtgactgagaccaccattgtgatcacatggacgcctg

SEQ ID NO: 361708 - DNA, 80 bp, Homo sapiens
catgggcgggaagaacaagcagcgaactaaagggaacctgaggatctgtgccatcattggcgggaccttcaccgtcgccg

SEQ ID NO: 361709 - DNA, 88 bp, Homo sapiens
agtttcaaaaggtggcctttccactggagttgcttcacttagctctacaatcaacccatgtggcccagaggcagagctacacaaccat

SEQ ID NO: 361710 - DNA, 100 bp, Homo sapiens
cctgcgttctgaagcccgagaggagccacaatggagacgccgccgctgcctcccgcgtgaaaaattagacgatttcaagaattggagctgaatctgatgt

SEQ ID NO: 361711 - DNA, 99 bp, Homo sapiens
ggcaatattattcgtggctgggatcggtatctgaccaaccaaaagcaaaataatcctatggtgaaaaaaatcaacaagataatctctgcttgagaaaaa

SEQ ID NO: 361712 - DNA, 85 bp, Homo sapiens
actcgaggcaactattgtgcacaaatgaagatgtttccagccctgcctcggcggaccaaaggaaaaacgttgacctcttggcgag

SEQ ID NO: 361713 - DNA, 100 bp, Homo sapiens
tagaatgcatcagtgcccttgtggcgaatggggctcacgtcgagaccgccgggagagcctgcccacctccccaccctggacgccgggcgcgtcccggccc

SEQ ID NO: 361714 - DNA, 100 bp, Homo sapiens
cctgcctcctgttccgcttctcagaggacgccttcaacaccaccttcatctccaccatcggaagatgagaatgtgcctactgctcctgatcctccaagtc

SEQ ID NO: 361715 - DNA, 75 bp, Homo sapiens
agatcagcaccaaatcccacagaggcatctgagggaggctgtgctgcccaagcttcacctggatgaggactaccc

SEQ ID NO: 361716 - DNA, 100 bp, Homo sapiens
ccttccgggtggagttcagtgaaagggcaggtaacagagattcaaaggtaccttcagaaggaaagaaatctctctacacagatgagtcatccaaacctgg

SEQ ID NO: 361717 - DNA, 95 bp, Homo sapiens
aaaagcacaagaactggaggtttcagaagacgaggcagacgtggctcctgctgcacatgtatgacagtgacaagtgggctcgggatgagtttgaa

SEQ ID NO: 361718 - DNA, 90 bp, Homo sapiens
tgagggcactggcctagttcccgacttgtttctcaggtggcgggacaggcttcattgggacagccctaacccagctgctgaatgccagag

SEQ ID NO: 361719 - DNA, 49 bp, Homo sapiens
ctcttatgtcagcatttcgcaagggtgtgtttgaccatcgaatgaagtg

SEQ ID NO: 361720 - DNA, 88 bp, Homo sapiens
ggtacaaaagcgttggcgattgaggagttttgcaaatctctaggtcacgcctgcataagtagccggatcgagctgggagatgtgacac

SEQ ID NO: 361721 - DNA, 100 bp, Homo sapiens
cgtcttctcaggagaccagctggtccaacgagcgtgaggatcatccccggagaggacgggaggatcggcagcacagggaaccatcagaacaggaacacag

SEQ ID NO: 361722 - DNA, 50 bp, Homo sapiens
cctttatgaaccagtgtatcccaattggaaaatggatataccttatttga

SEQ ID NO: 361723 - DNA, 100 bp, Homo sapiens
gcactaccaatatgttatctccagatgccgcgcaactgtctgatctcagttcatggggttgagcattcatgatggtacctggaagtcagcaatttatggt

SEQ ID NO: 361724 - DNA, 87 bp, Homo sapiens
atgggcagtcatggtcccagaaacgtcactatcaagaagagactttagaagacagctttccatcgacactaggccctttagaccagc

SEQ ID NO: 361725 - DNA, 50 bp, Homo sapiens
caaggcccaatgacccaggcggaattgaatgatctggcacgggaccctcc

SEQ ID NO: 361726 - DNA, 96 bp, Homo sapiens
acgacctccgcggggtgtacagtggccgtgcccaccccaaggtggcgttcaagatgtacttgggcatcactccaagcattactaattggagcccag

SEQ ID NO: 361727 - DNA, 95 bp, Homo sapiens
aggcggggaaccgcagcgcagtgacagtgcagaaccccggcgcggcccttggcctcctcgctggggaggcagagtcctcgcgtggtctcctgcct

SEQ ID NO: 361728 - DNA, 100 bp, Homo sapiens
catctccaccggccacatgatcctgttccgctcagtggacgagactacccaggctatggcctttgatggcatcatcttccagggccagtcactaaagatc

SEQ ID NO: 361729 - DNA, 80 bp, Homo sapiens
tggagaaggaagaactgtgctgagattgtcctggcctttggcaactacatgaacagtagcaagcgtggggcagcctatgg

SEQ ID NO: 361730 - DNA, 134 bp, Homo sapiens
ggcccgggaactggtgttgcgggctgggacctcagatatggaggaggaagagggcccgctggtggtgatctttgtgaagtctgtgcagcggtgcattgccttggcccagctactagtggagcagaacttcccag

SEQ ID NO: 361731 - DNA, 80 bp, Homo sapiens
agaccctaatcaaaggccttcagagactggagtacagaggatatgattctgctgattctgaaaaagagttccacgtcctc

SEQ ID NO: 361732 - DNA, 75 bp, Homo sapiens
tggaaaggagaatgactttaactgatagcattgaacgctgcctgaaaaaagctcccggagccctgcctgttccct

SEQ ID NO: 361733 - DNA, 90 bp, Homo sapiens
cggagaagcagtggtgggttccatgtgatggtggagtaggaggcaggtctccgcgaacgacaccgtaactatccgcactagaaagttcat

SEQ ID NO: 361734 - DNA, 74 bp, Homo sapiens
cagaaggcggcgatcctgggctgcgggcaaggcgagctcagagttctacagagtcaccactgaacaatatcaga

SEQ ID NO: 361735 - DNA, 50 bp, Homo sapiens
cctaatggaggtctccagtttcgcgggctgacgcacgaggcacacaggaa

SEQ ID NO: 361736 - DNA, 71 bp, Homo sapiens
agttattgaacggctgggccagagcgtggttgctgaccagttgaaagaagtaaccaagatccttctgtttg

SEQ ID NO: 361737 - DNA, 100 bp, Homo sapiens
aaacatcaaggcaaattaaggaatcaagatcacagaaacacacacggtatgcttcagaagatgcagagcttctcttagttggaaataagttggactgtga

SEQ ID NO: 361738 - DNA, 83 bp, Homo sapiens
tggaacagcacccccttctttaagatgcctgaggaaacccagacccaagaccaaccgatggaggaggaggaggttgagacgtt

SEQ ID NO: 361739 - DNA, 106 bp, Homo sapiens
ccccaaccagcctggaggcaagaggctcctgcagacccctggcttcctaacatgctgtttgagagcatccaggagggcaagtacgagttccccgacaaggactggg

SEQ ID NO: 361740 - DNA, 73 bp, Homo sapiens
ggagtaattggagccaagaaatgagtatagacacatcatctcagagttggagcacctgacgtttgtcaacacg

SEQ ID NO: 361741 - DNA, 90 bp, Homo sapiens
caataaaagagacctctacttagctcagcaattcttaccttgcacccagattggctgaaaacttctgtgtctgccatttagctactgggg

SEQ ID NO: 361742 - DNA, 100 bp, Homo sapiens
aagaaataaaaatagtcaccttaatcatcaaaaagctttctgaaaaggatatgagcatgctcgaggagaggattaagcggtcagcaaagagaccctctgc

SEQ ID NO: 361743 - DNA, 89 bp, Homo sapiens
aatcggcacaagccccccaagcagaacgagatgctggaggagggccaagaatatgctgtcatgctgtacacctggaggagctgctcccg

SEQ ID NO: 361744 - DNA, 74 bp, Homo sapiens
ttttgttaccgacaagaactctggagaagtcatgacagtagggaaaattgcctaagaattatgacccaaaagtt

SEQ ID NO: 361745 - DNA, 95 bp, Homo sapiens
tcaccggcgtgccccaccatgtcagacgcagccgtagacaccagctccgaaatcaccaccaagggacctcaggatggaaaccagcagcctgcacc

SEQ ID NO: 361746 - DNA, 100 bp, Homo sapiens
gtatgtgttgagactggcagaagatggaccagcaataaggaatgggaggatgaggacatatgtagagtgtgtcggtcagaaggaacacctgagaaaccgc

SEQ ID NO: 361747 - DNA, 100 bp, Homo sapiens
gcgagccagcgcccggagcaagcggagctcccccaagagccggaaagtggtgcttcatgccccacctccaaccaagatcaaacgggagctgcacagcccc

SEQ ID NO: 361748 - DNA, 82 bp, Homo sapiens
ctgaatttgaaagctagacaggatcgtcaggctgaaggaatcttggtaaatggtttggtgccctggttgtcagatgttggaa

SEQ ID NO: 361749 - DNA, 74 bp, Homo sapiens
agccatcatcatgttgtagtgttcctgctcactttcttcaggaaattatggaagtggaaattacaatgattttg

SEQ ID NO: 361750 - DNA, 98 bp, Homo sapiens
ggaaaaaatcccagaaattggcaaatttggggaaaaagggaacagctgccaccaacaatatatcagcaacacctacatttttgttttttcgaaacaaa

SEQ ID NO: 361751 - DNA, 50 bp, Homo sapiens
cttcaaccactatctcagtgcaatgggcaggccagaaagcagacccaggg

SEQ ID NO: 361752 - DNA, 82 bp, Homo sapiens
ggcccgcgaccgtccgccagtcgtcccgagagacacctatggctgccgatgaaggctcagcagagaaacaggcaggagaggc

SEQ ID NO: 361753 - DNA, 82 bp, Homo sapiens
tggcaaggctgaggacgggaggctgattgagaggcgaaggctgcctgctgtttcccggggagatcatgaaacgaggtcgcct

SEQ ID NO: 361754 - DNA, 76 bp, Homo sapiens
atggaaatcctaatgacagtctccaaattcgcctccatctgtaccatgaaattccgggtagatatgcctggctcag

SEQ ID NO: 361755 - DNA, 75 bp, Homo sapiens
accgggctgtcaaatttacattaactatgagaattaagcaggcaacaatttgggatgaatcccaaagacattatg

SEQ ID NO: 361756 - DNA, 99 bp, Homo sapiens
gagccaagctggagtttacacaggcaaactgtcagaaaagagtagcctgggctgtctggaaatctgaggtttaatagactacaacttccactgtttccg

SEQ ID NO: 361757 - DNA, 100 bp, Homo sapiens
ggactcagagaccaataaaaataaactgcttgaacatcctttgactggttagccagaacggccggtttgtgggcgatgctgaccttgaaagacagaaatt

SEQ ID NO: 361758 - DNA, 100 bp, Homo sapiens
acccgggtttggtagagtgacttctattcactaaaaccatgtgtctgaactgaagaagcttgggctcacttccacaaatgccaacatagccgaggtagag

SEQ ID NO: 361759 - DNA, 115 bp, Homo sapiens
agaggaagcggaaaccagtggccacagcatctttgtctagccccagtgcagtcatcttccctcatctccagtgccacagcagcagctctactgagctctggggctgtggactact

SEQ ID NO: 361760 - DNA, 75 bp, Homo sapiens
cccacaagtagctccagcgccgtaagcgaggcctccttctcctacaagcacgagaagccctgccaacgtgggata

SEQ ID NO: 361761 - DNA, 100 bp, Homo sapiens
ccatggccagtgaggaagtcttgaagaatagagccataaagaaagcaaagcgcagaaatgttggatttgaattttcggctttgtgagaaaccttaccatc

SEQ ID NO: 361762 - DNA, 50 bp, Homo sapiens
cgggaaccaggaaaatgagctggaaattactatactggcaattgctggag

SEQ ID NO: 361763 - DNA, 75 bp, Homo sapiens
gagctggcagcagcatctcagcccaagagaagatatggatcagaaactttcgaagttggtagaagagctcacaac

SEQ ID NO: 361764 - DNA, 90 bp, Homo sapiens
aaaaagaaggccctgagtcaaagaagatgcctcgaactaaacaaattcatcccagaaatctaagaggtgcaacagctgcagcccggaaag

SEQ ID NO: 361765 - DNA, 96 bp, Homo sapiens
ttgaacgtctaaaacagtttctggaatgcatggaagaagttgttccgaatgtaattgaaccttccttcggcctgggtaggatcatgtatacggtat

SEQ ID NO: 361766 - DNA, 76 bp, Homo sapiens
ccgagtccccgtacggccacccggcggccgcggcgagtcctttgcacatgttggcaacacacgcatccgcatcggc

SEQ ID NO: 361767 - DNA, 100 bp, Homo sapiens
ctcgtggggcgcctggagtgagggttctggttcccgccggcgagtttccaacatggctagatccatcagaaactgaagccgtggagaacgctctcggggc

SEQ ID NO: 361768 - DNA, 75 bp, Homo sapiens
gcacttcctattccactggattgggaaagaccatggcaggaagatattcctcgtcagcttgtctacattggtctt

SEQ ID NO: 361769 - DNA, 95 bp, Homo sapiens
gtatggaaaaatcttcaggtccctggaataaaacagctccagtacaagcacctcctgctccagtaattggagacagtgtttcacaaaatgatttt

SEQ ID NO: 361770 - DNA, 97 bp, Homo sapiens
ctgcaccctccgccaggctccgcgggatgcaccgtggtagccgagggcggaggcgacactctcagggatagtaaagctctgaaggatgaaaatctac

SEQ ID NO: 361771 - DNA, 48 bp, Homo sapiens
aagctgcacggcagtctgtttatgagagagaaaaggaacagttccgta

SEQ ID NO: 361772 - DNA, 82 bp, Homo sapiens
atgacgagattattgagttaaagaaggtttggtgcacctcgatttggaggaagtagggcagggcccttatctggaaagaagt

SEQ ID NO: 361773 - DNA, 100 bp, Homo sapiens
atctacggcagcgaggaggacctatgtgctctgccctaccacgaaaccagcctggacaccaagtctgtgtcagaaggccacctcaagaggaacatcgtgg

SEQ ID NO: 361774 - DNA, 75 bp, Homo sapiens
gtggtttggacgccggcggagacgcgggcgagacctgcctagagctggaacgttacctccagagcgagccctgct

SEQ ID NO: 361775 - DNA, 100 bp, Homo sapiens
gatgcaagcctggattctttggggcccactgcagctcccgacctaaagggagcatcgttaccgacagcaggcaggtgcgccttgccacaggcatcttccc

SEQ ID NO: 361776 - DNA, 75 bp, Homo sapiens
ccctgagattgagctttttgtaaaggaggaaaaggcttctcttttacatcgtactcaggaagaaagaagaaagag

SEQ ID NO: 361777 - DNA, 90 bp, Homo sapiens
cttgggagcccacacaccctgtcatctggactcctatggttgtaacttggtattccaggtacaaggaagttggaggtccccctccccact

SEQ ID NO: 361778 - DNA, 87 bp, Homo sapiens
aagacgatcaatcaaattcgtcaagatgcagtaaaaactgaaactgttgaggagcccatggaggaagaagaagcagccaaagaagag

SEQ ID NO: 361779 - DNA, 75 bp, Homo sapiens
aggcggcgggctggagacatggaccgcggcgagcaagtttttcagaagaagtgaagtcaagatgaagaaccattt

SEQ ID NO: 361780 - DNA, 88 bp, Homo sapiens
ttcctgctaagccaaacagagaaggtgcagaaaagccctgtgttccggagggacggcgcagacatccactccgacctctttatttcta

SEQ ID NO: 361781 - DNA, 75 bp, Homo sapiens
gttattgatggattgggtaaatgctgtttgtgccttctataataaaaagattatgatgcatcattatcacagaag

SEQ ID NO: 361782 - DNA, 51 bp, Homo sapiens
catgagatgattgccaaacccccagacttctgcctggtgtcgaaggtggtg

SEQ ID NO: 361783 - DNA, 75 bp, Homo sapiens
gccacttcttgcgggagaacatcaaggccagcaccgacaagttggatggcttgaggactggtactaaaaggaaac

SEQ ID NO: 361784 - DNA, 100 bp, Homo sapiens
agcaagaatattcccctggcaaacctgcagatacccaattgtgaatgtgaaagatgttgcagaagtgttccagaagtggctgaagatagaaggaaaaaag

SEQ ID NO: 361785 - DNA, 90 bp, Homo sapiens
aaagtatggaaaaatgtgggggtacaggacacaatatccaatcctaggcctcctatatgatgactacgaatatataccaccaggtagtga

SEQ ID NO: 361786 - DNA, 100 bp, Homo sapiens
cgggaatcactgacattgtggtgttacagaaactaatctggattcactccctctggttgatacccactcaaaaaggacacttctgattaagacggttgaa

SEQ ID NO: 361787 - DNA, 90 bp, Homo sapiens
tcagtacatggattcttcacttgttaagttggctggatctattattggcaaaggtggtcagcggattaaacaaatccgtcatgagtcggg

SEQ ID NO: 361788 - DNA, 100 bp, Homo sapiens
atcttgctcagtctctgtcagaggaagatcccttggagccatgtggctagaaatcctcctcacttcagtgctgggctttgccatctactggttcatctcc

SEQ ID NO: 361789 - DNA, 75 bp, Homo sapiens
atggtgggagagcatcggaagcttcactgaatagccctcgaggaatactctgaagatagtaactccgagccaaat

SEQ ID NO: 361790 - DNA, 100 bp, Homo sapiens
tctactctgaagatccctgtggtagagagaaaaatcctggatctgtatgctttgagcaaggttgaattcaagctaaataaagacacatcgtcattccccg

SEQ ID NO: 361791 - DNA, 82 bp, Homo sapiens
caatcttcaagatggtcttcagagagcaactatcctccccaggtggataatattaatgcagctgtgatggatttgaaaaaaa

SEQ ID NO: 361792 - DNA, 96 bp, Homo sapiens
acatggaaaactgttgaaattgtccatatagatattgcagatagaagtcaagttgaaccagcaatggaacagattaaaagggccaataaactgttt

SEQ ID NO: 361793 - DNA, 98 bp, Homo sapiens
ggcgtcttatccaaccttgcgctgcatccgctcgacctcgtgaagatccgcttcgccggtactatggatatagaggagagaaatcgccaaatgaaaat

SEQ ID NO: 361794 - DNA, 75 bp, Homo sapiens
gttggagaccccaatccgcatgagcgtcctttcggttggtactaagaagtgcctttcctgacgtctctgctgctt

SEQ ID NO: 361795 - DNA, 101 bp, Homo sapiens
gttgaaacatacaatcagctgttgcatcttgcttctgagcaaggtagttttgatggaagtatactgaagatgcaagtttttttcatctggagttctgcctg

SEQ ID NO: 361796 - DNA, 51 bp, Homo sapiens
acggtggaagcgagagaggagggtgaaatgacaatggatgctctgttggct

SEQ ID NO: 361797 - DNA, 101 bp, Homo sapiens
gcgaacgaccaagagggtgttcgactgctagagccgagcgaagccagaagatggctgtgccacccacgtatgccgatcttggcaaatctgccagggatgtc

SEQ ID NO: 361798 - DNA, 83 bp, Homo sapiens
aggacagtgagactcgaacagatgttcacgtcccagtatgcccactctgtaatacccccatcccagtaaaaaagggccagata

SEQ ID NO: 361799 - DNA, 90 bp, Homo sapiens
ccggcctcggcgtgcctgggtcccccagcttcctcaatggctccaccgccacctcgcccttcgccaggtcaaccggatgcacatcagtcc

SEQ ID NO: 361800 - DNA, 75 bp, Homo sapiens
ggcgaaggtcgtattgaatggtgttgtaggatgcctaaatcaaaggaacttgtttcttcaagctcttctggcagt

SEQ ID NO: 361801 - DNA, 74 bp, Homo sapiens
tcgcttcgtcctacacttgcgcaaatgtctccgctgcttttctaacccaaactgtatgtcttgatgacactaca

SEQ ID NO: 361802 - DNA, 100 bp, Homo sapiens
ggagatgcttctgtggaagatgatgcttttatcaagggggcagctggcattttatgctatgtgggagcctatgtcttcatcacttatgatgactatgacc

SEQ ID NO: 361803 - DNA, 99 bp, Homo sapiens
agtttcggaggggcttggagtgagtggacgcactcgggaattgtaggaggacgaggtgttggagcgggccggagagaagtagagtgggctgcgaggaga

SEQ ID NO: 361804 - DNA, 100 bp, Homo sapiens
ccggcaccgggacttcccagacgtgatctcaggagcgtatataattgaagtaattcctgataccccagcagaagcgatttgttaaggattccaagtaact

SEQ ID NO: 361805 - DNA, 75 bp, Homo sapiens
ttagaaggatgcttggattgtctgcttcaagccctggctcaaaataatattgatgatgttaagaagttcaaaccg

SEQ ID NO: 361806 - DNA, 141 bp, Homo sapiens
ctccactgactcagcaggaagatatcaaactgtatgatatggcagatgtatgggtgaagatccaagatgttctacagctttcggaaaatgtgattgatcgaatgaaggaatcctctccatctggttcgaagtctcagcggt

SEQ ID NO: 361807 - DNA, 75 bp, Homo sapiens
tgaggacaagagtggacggcagagttttcaagctgtgacagataagctagatgtggaagagccagacagcgccaa

SEQ ID NO: 361808 - DNA, 98 bp, Homo sapiens
ccgacgaagatgaccacctgctctcacccacgaaaggcatctgtcccaagcaggagaacattgcagaggttgacggatatattcagacgttacgacac

SEQ ID NO: 361809 - DNA, 90 bp, Homo sapiens
cccgagtcgaggatcgtggtgccggaaatcaaggttcagaaatttgccttgaagaagaacttccagacgaaatcactgcagaaatattcg

SEQ ID NO: 361810 - DNA, 50 bp, Homo sapiens
agcagtttacacatctcacccaattcagtgaaatattgtggggctgagat

SEQ ID NO: 361811 - DNA, 117 bp, Homo sapiens
ccgagtcccccggagtccgactcgctacgcgggtcttgcgagatatctggccgcctctgccgcagctggaggtcatgcttctcatcgatatcgagctggcttacatgaacaccaacc

SEQ ID NO: 361812 - DNA, 74 bp, Homo sapiens
gtgaacagaaagagaagtcgcttgagagctatcagcttcccagtttgcacaattcatcaagaaattatgcgggg

SEQ ID NO: 361813 - DNA, 100 bp, Homo sapiens
agcgctgtcgtgctcctctactcggtgttccaacgccaagccaagaaattctgcggcacacgctgaacacgctggtacgggagaggaagatctacccaac

SEQ ID NO: 361814 - DNA, 100 bp, Homo sapiens
acacaccctccagacccccgtccagtgaattctgtggagccgccaccaaaatgcagattttcgtgaaaacccttacggggaagaccatcaccctcgaggt

SEQ ID NO: 361815 - DNA, 98 bp, Homo sapiens
gactacgaagcctatgtcaagtgtcaagataaagtgagtcagctgtacatgaataatccagaatggctactctgatctatgttgataaggaaaatgga

SEQ ID NO: 361816 - DNA, 98 bp, Homo sapiens
aaaggcgacgtgcacgacataggcaagaacatagttggagtagtccttggctgcaataatttccggtgtcagcggaagcagtggcgggtggatctgcc

SEQ ID NO: 361817 - DNA, 135 bp, Homo sapiens
gaaaaatcctacctaggtaatgtgtagttctcaatgcatcatgtcaggcagcttatgatgccaatttgtcccatgcattagtgccagcagtagttcccaagggctgtctcagccatccacccagacgactcagta

SEQ ID NO: 361818 - DNA, 75 bp, Homo sapiens
gcgcacattaccattaaccagtacctgcagcagtactatactggcaattgctggagaagattttgcaattgttgc

SEQ ID NO: 361819 - DNA, 75 bp, Homo sapiens
tccatgctgtctgttcagacttcagcttggtgtgctgatattcgtggcttcagtgctcctaggacatttggcctt

SEQ ID NO: 361820 - DNA, 100 bp, Homo sapiens
gcccgctggccgggagcggagcccctgtggggaatgactctactaatgatggggtcagcagatgctcttccagaagaaccctcagccaaaactgtcttcg

SEQ ID NO: 361821 - DNA, 100 bp, Homo sapiens
ggcgccgagccggaggaaggaggagctgtggagtccaagtgtgactgccaagaggaatccagcaaagccaaaaagcccaagcatgtagccctgcccgaag

SEQ ID NO: 361822 - DNA, 90 bp, Homo sapiens
ccaaactgtcacagaataatttcgccctgggttacaaggctgcggacttccagctgcacacacatgtgcttttaaagaagcagttttttc

SEQ ID NO: 361823 - DNA, 90 bp, Homo sapiens
acatgggccacactgatagaatagagaatttgagaaaaatctgggtctttctaaaaactgcttttgcagaatacagaaactgcagccatg

SEQ ID NO: 361824 - DNA, 74 bp, Homo sapiens
tggattattgcagcagacacctctaacctccttaatctgtgtctgagaaacatcttacctattacaacagcaaa

SEQ ID NO: 361825 - DNA, 120 bp, Homo sapiens
ttctacgccgcccggtcgccagggagagtgaatacagctagggacgtgaaagttccctgtattgaacactgatatacaaggaatgaatagaagtcaagaaaaacagacctggtgggaaaa

SEQ ID NO: 361826 - DNA, 90 bp, Homo sapiens
gtcaggacgtctacctgtccaccattgtgaccgaggatcatccagcagctcgtcaacggcatcatcacgcccgccaccatccccagcctg

SEQ ID NO: 361827 - DNA, 83 bp, Homo sapiens
tggctttaatcctgaaagccatgcagcggcaaaatgatgcttcaacacccaggccaggtctctgcctcggaagtgagtgcttc

SEQ ID NO: 361828 - DNA, 110 bp, Homo sapiens
gacaatcgagcaaggaaacctggaataaaagccagggatccatctttgtccggatacacgccccgtggcaggtgctggccagagaggcagaattcttgaagatcaaagtt

SEQ ID NO: 361829 - DNA, 82 bp, Homo sapiens
ttgtggagccggagctgggcgcggattcgccgaggcaccgaggcactcagaggagagaggtggagaagagcgagtacttgag

SEQ ID NO: 361830 - DNA, 107 bp, Homo sapiens
agactggaagcaatattaatgtaaattcagagctgaacccttcaaccggaaatcgatcaagagtacaagaagatcatcctattatgtcttttactatttcaaaaaat

SEQ ID NO: 361831 - DNA, 97 bp, Homo sapiens
tgaagtaacagaattaaccagagaaggtgaaacgatcatcgagctaaaatatcgtgttggtcctcttcctgatggatgggaacaagccatgactcag

SEQ ID NO: 361832 - DNA, 82 bp, Homo sapiens
ctctgtaggaaggaacttggttccccctccctcagcttccgccccaaaaggtgtcatggagaaactccagctgggcccagag

SEQ ID NO: 361833 - DNA, 100 bp, Homo sapiens
gttcatgctgcccacatctcatccaaacagaaggcggtcaccttctccttactatagtcgtggaggatacagatcacgttccagatctcgatcatactca

SEQ ID NO: 361834 - DNA, 95 bp, Homo sapiens
tcagaatcaaaaaagaaaaagaagaaaaagagaaaaatggtgaatgatgctgagcctgatggcgggtgaaaaagttgagaagccagatactaaag

SEQ ID NO: 361835 - DNA, 50 bp, Homo sapiens
tcccaattcaggagacggtggacacactgcagaatacagaaactgcagcc

SEQ ID NO: 361836 - DNA, 100 bp, Homo sapiens
aggcgggagggttcgaggccaatgatgggagaccaccgggatgggcagctccagctccagaaatcccagtacctgcaactgggccccagccgaggccagt

SEQ ID NO: 361837 - DNA, 75 bp, Homo sapiens
acagtggcttggccaatggcacagattgatgggtcaaccttgagaacgatctgcatgcagcatggcccactgctg

SEQ ID NO: 361838 - DNA, 75 bp, Homo sapiens
acagcagagacgcgaaggagaggccctagaaccaaccttctgaggaaaggaggccatacagaaattgaacctcag

SEQ ID NO: 361839 - DNA, 87 bp, Homo sapiens
aacacaagccctcagcaccactttgaacagacggcctttcttagcatcttgatgagatcattaggaaataagaatactgtcctcctt

SEQ ID NO: 361840 - DNA, 83 bp, Homo sapiens
ggctggacatcccttcttctatgagatttattgctaaacatgggtgcatttttggataaacccaaaactgaaaaacataatgc

SEQ ID NO: 361841 - DNA, 75 bp, Homo sapiens
cccacccggcctgataaagcgcgccgactgggctacaaggccaagcaaggttcagcggcagtggatctgggacag

SEQ ID NO: 361842 - DNA, 101 bp, Homo sapiens
gccgctcccgggggccgtgacgggattttacggagaaagatttggagaggatgtggttgaagtaatcaaagactctaatcctgtagacaagtgtaaattag

SEQ ID NO: 361843 - DNA, 130 bp, Homo sapiens
gacgcgtcaggcctgcctagacggtgctgggagcgcgtctccttgaacgttgtcccgcctgggattgcgaggaactccatgctccactgactgttgttgcagatgggcttttctccaagttcaggaaaag

SEQ ID NO: 361844 - DNA, 74 bp, Homo sapiens
gacatcctgttatttccctatcgattttacccctaaaggcctaaagaatgtatttgacgaagcaatattggctg

SEQ ID NO: 361845 - DNA, 83 bp, Homo sapiens
gtgcttaattcaaggtcacacaatgtcggggatggacctccagatttccttactggaccaggaagaaacaggctcctgccagc

SEQ ID NO: 361846 - DNA, 76 bp, Homo sapiens
gtgggttctagcctctctgaagccctggacttgatcgagtcggatgaatttttagatgtgatctactggttccgac

SEQ ID NO: 361847 - DNA, 83 bp, Homo sapiens
aggagaaactaacaagaggaacacggtagatctagcatttttagatgaattcactaactggtcaagaataaatcccaacaagg

SEQ ID NO: 361848 - DNA, 90 bp, Homo sapiens
ggatggcatctctgctgggacagaggggcaactcacactccggccagactgggcagcacagggatgggccacagcaaacagcaccacggc

SEQ ID NO: 361849 - DNA, 82 bp, Homo sapiens
cgaggccttgcttccttccactcgaaggccacaagaggaagctgaatgaagaggacgccgccagcgagtccagcagggagtc

SEQ ID NO: 361850 - DNA, 82 bp, Homo sapiens
cagaggatccagtgttcaccatcctggccccggaaggtctcggcgcggaagatggccggcggcgtggacggccccatcggga

SEQ ID NO: 361851 - DNA, 100 bp, Homo sapiens
cgttcgtggaggagtacatccccacacaggagatccaggtcaccagcatccactggagctacaagaggcaacaggtttgtctatgctggctctaactcgg

SEQ ID NO: 361852 - DNA, 100 bp, Homo sapiens
gctgtctttgaggtctgaggagagaacaggcggagacagcagccaatcgcatctgcaaggtgttggccgtcaaccaggagaacgagcagcttatggaaga

SEQ ID NO: 361853 - DNA, 96 bp, Homo sapiens
cggacctgtctgggtctcagccgccaaagaccccgtccggtagggtaacaagatgctcaactatagtgctcccagtgcagggggttgcctgctgga

SEQ ID NO: 361854 - DNA, 84 bp, Homo sapiens
gtccgggcaggggcagcgggagccggccgggtcaaaatgcagatcttcgtgaaaacccttaccggcaagaccatcacccttgag

SEQ ID NO: 361855 - DNA, 78 bp, Homo sapiens
agaactgttgctggcctgaatacacctgcatgaggtggctgaagactccagttgtggactcccgaaaaattgaccagg

SEQ ID NO: 361856 - DNA, 100 bp, Homo sapiens
ggcagctgaagacccggccgcccagatgatgcggtggtgggggacctgccggcacgcgactccccccgggcccaaaggcaccggcagaagctggaggacc

SEQ ID NO: 361857 - DNA, 83 bp, Homo sapiens
agcaaaggcaagaaggcaacgacgttccatctgtggaaggacctaccaaccagagttgatctctctaatgtattagatcttca

SEQ ID NO: 361858 - DNA, 100 bp, Homo sapiens
actttggcgtgctgggcctggacctctggcaggagtatgaacccaccatcttctaccccacacgctcgctggacctgctgcatcgggacctgaccaccca

SEQ ID NO: 361859 - DNA, 90 bp, Homo sapiens
aaagaatgcacattaaagccatgcccgaggatgctaaggggcagaaaacatccagtacagacctttctgatatccctgctctccctgcaa

SEQ ID NO: 361860 - DNA, 90 bp, Homo sapiens
ggacaccaaacacatagtgggaattgcctgtgggcctgcccagaatgagtccctggaacgccagatgcgtgaaatggaagagaactttgc

SEQ ID NO: 361861 - DNA, 100 bp, Homo sapiens
aagcagcaggatggtcggaattaagtgagagagatgccatctacaaagaattctccttccacaattttaatcagtttcaccagtgatcattaaagaatgg

SEQ ID NO: 361862 - DNA, 100 bp, Homo sapiens
ttttcttatttagccggagtgagaagcaagaaggccctggacacagcaatatctctgggctttcacaggaatggccaacctgctgacgggccccaaacgg

SEQ ID NO: 361863 - DNA, 100 bp, Homo sapiens
gctggacctgggcagcgaggccagaggtccttgaatgggcaagagggcacatgaagtacggcgtcctccacattcacggcctctacacggacccctgcgg

SEQ ID NO: 361864 - DNA, 88 bp, Homo sapiens
gaaacaggcggatctctacatttctgaagagccagcaccgctctttgaccttgccatgcttgccttagatagtccagagagtggctgg

SEQ ID NO: 361865 - DNA, 75 bp, Homo sapiens
ctccaggcagtgtaatctcattccatcttcattcatgactccagacagcggaagaagtccctatagaaccataca

SEQ ID NO: 361866 - DNA, 100 bp, Homo sapiens
caggactccaaaatggcgtcagttgaattttccagttcatatgaagaggtgatctctcaaataaatacgtcattacctgctccccacagttggcctcttt

SEQ ID NO: 361867 - DNA, 75 bp, Homo sapiens
ctcagccacccgctgggaatcgtgcagggattcttcgctcccagatggacgtatcatcaaagttgggggagagag

SEQ ID NO: 361868 - DNA, 100 bp, Homo sapiens
agcggcttatcgaacagagccgggagttcaagaagaacactccagagttatgaggagtcaaatcctaaggatccagcggcagtgacagaatccaaagagg

SEQ ID NO: 361869 - DNA, 82 bp, Homo sapiens
ctgacctcatctgggccaaaatgctgagttctaaggaggctggaattcagaaggagctggcggacatcactttagaccctcc

SEQ ID NO: 361870 - DNA, 71 bp, Homo sapiens
ctgatattgatattattacagcttcatatgcaccagaaggagatgaaggccctcgggaccaaggatcacgt

SEQ ID NO: 361871 - DNA, 97 bp, Homo sapiens
tggaactgctctgccctcggcgagaagaccgtcttcgggcaagagctccgagtagatccgcctaatgggaatggagccggcaatttcctgctgcctt

SEQ ID NO: 361872 - DNA, 102 bp, Homo sapiens
ctcccgcttcagcctcccaaagcattgggcttacagcacgcactcctggctttaaagtttatacttgcatttgccatacctgataagccacggcatatccag

SEQ ID NO: 361873 - DNA, 101 bp, Homo sapiens
ccgctgcagccgagatgccgggggagcggggccttccacaccccctccgtgggtgtgtgattttaccaaatgttgcaagaactctggagttcttatggtag

SEQ ID NO: 361874 - DNA, 89 bp, Homo sapiens
aagattcgaaaagccacttgaagaaaagggtgaaggaggcgaattttcagttgatagcagagcactgtccagagcttcctccagtggac

SEQ ID NO: 361875 - DNA, 75 bp, Homo sapiens
ctcgctgggagagaggtacctctccttttccctctccctttccctaaggagtctccccaggacagtgctatcacc

SEQ ID NO: 361876 - DNA, 74 bp, Homo sapiens
gctcacccgcgcgcaggagaaggtactgtctgatgagcgtgaaaggttgtttcaccgacttccacatcgacttt

SEQ ID NO: 361877 - DNA, 82 bp, Homo sapiens
gagctggggcaccgagctctggcatttaaatcaaacggtattgagatggattgggttatgaaacataatggtccaaatgacg

SEQ ID NO: 361878 - DNA, 87 bp, Homo sapiens
ggtgtacaaatacccctttgaattaattatggctgggctgcttgctctcggtgactacatgaatgtccagtgccatgcctgcattgg

SEQ ID NO: 361879 - DNA, 80 bp, Homo sapiens
tatttttccccaattcagcagagaatattttcaaggggggagcaggccgggctctcgccatgggtcactgtcgcctctgc

SEQ ID NO: 361880 - DNA, 78 bp, Homo sapiens
cgagggcctcggccatccaagggtctcccaggaattgaatgatctggcacgggaccctccagcacagtgttcagcagg

SEQ ID NO: 361881 - DNA, 100 bp, Homo sapiens
aaactcctgccagccctgctgctgcagcatgtcctcctgcatctcctcctgctccccatcgccatcccctatgcagcttcctgcctgacacagctcactt

SEQ ID NO: 361882 - DNA, 74 bp, Homo sapiens
aaggaggttttaaacagtataacaggttttgacatttgcatataaacatgcattagtaaataaaatgtatggga

SEQ ID NO: 361883 - DNA, 50 bp, Homo sapiens
gcggagtccccgccgaagaacccgagttggacagagagactctgaagatg

SEQ ID NO: 361884 - DNA, 100 bp, Homo sapiens
gagcagcagctggaggcggcgctggccgcgctgcaggagcagctggcttatcaggagggcagacttcaaaagctactaaaaatgaacggccctgaagatc

SEQ ID NO: 361885 - DNA, 157 bp, Homo sapiens
ttagagtcctcagaagcatgtgtcttccccagctctgcagccacatactatccgtttgttcaggaaccaccagtgacagagagttcatgatcaagtgttgcccacaccaaatgcttcatccagagtcatagtacatgtggatctggattgcttttat

SEQ ID NO: 361886 - DNA, 99 bp, Homo sapiens
attcttgaaggagagcttgaagcaagggaccttgttatagaagccttaaaggatctagtgaaaagccatttgatgtatgcggtcagagaagaagtggag

SEQ ID NO: 361887 - DNA, 75 bp, Homo sapiens
atggcacctatggacaagtctataaggtccggtttatcactaaaatatggcatcctaatattagttccgtcacag

SEQ ID NO: 361888 - DNA, 82 bp, Homo sapiens
agcaatgatggaaagtggggtgagagactatagcaagcaggtgatcacgaacaaaggtattggcagaagattttggttgata

SEQ ID NO: 361889 - DNA, 98 bp, Homo sapiens
ggagacggcttctataacccagtcacgagggtagtcaaggactataggaaccgctttctaagaaacgcagaggtttttcattagtcaatacagtgaag

SEQ ID NO: 361890 - DNA, 80 bp, Homo sapiens
cctggcctgggcgctccggtggcggcggaggtattgttgcagcatctggcagtgagactgaggatgaggacagcatggac

SEQ ID NO: 361891 - DNA, 90 bp, Homo sapiens
acaagaaagatgagactctggtgtgggaggccttggtgaaaccagcctacgaggacaagcagaaactcaagcggaccgagatcatcagcc

SEQ ID NO: 361892 - DNA, 136 bp, Homo sapiens
tgcatagcctggacccacgacggcaggaattattggaggccaggtttactggagtaggtgttagtaagataatcgcttatcagccgtatggaaaatctgtggactggtgggcctatggcgtcctgttgtatgaaat

SEQ ID NO: 361893 - DNA, 118 bp, Homo sapiens
gggcggatggtggtgatggaagcaggtggaattatgccctgttggttccaatgctgggattggctgcttttcaaccgagattaagcgtagctcctgaaatggatatcatggactactg

SEQ ID NO: 361894 - DNA, 100 bp, Homo sapiens
cctccgagacccggacagaggcaagcaggggcgccgtgggtgccagagaggcggaagaggaggcctgatggggcatcctctggtatcacgattccaaaac

SEQ ID NO: 361895 - DNA, 75 bp, Homo sapiens
tatgctgcagcatattgtactggcctgctgctggcccgcagggatgtgatcttcgtggtggaaagctaaatttta

SEQ ID NO: 361896 - DNA, 100 bp, Homo sapiens
tccacgattccactctgctccgctcagtgggagcggatgtttaatacttcccggatcccaggagaggagacagccctggtacctgacagtgtaaagaagg

SEQ ID NO: 361897 - DNA, 75 bp, Homo sapiens
gatgcaggaatcaagaccatcactatgctggatgaacaaaaggatatatggtacatttgctggagttggctgtga

SEQ ID NO: 361898 - DNA, 75 bp, Homo sapiens
ctcggaggcgttcagctgcttcaagatgaagttatcccagatcactgaagctgagatggctgatgaagtaatttg

SEQ ID NO: 361899 - DNA, 74 bp, Homo sapiens
agagacatgagatcatggtggccaaacccacaggatggtgccatgacaatggtgtgaactacaagattggagag

SEQ ID NO: 361900 - DNA, 100 bp, Homo sapiens
aagacagcactctgaaagcagctggaatcgttgaccacgttgttcctgagcctgggacaagcctgctcgctgcctttgaccagtggagggaatgggccga

SEQ ID NO: 361901 - DNA, 88 bp, Homo sapiens
tttaattttagggtcctttatatagaagggagagtaggacctcagcaatggagaatatccccatcatcacaactgtcatcactctgcc

SEQ ID NO: 361902 - DNA, 100 bp, Homo sapiens
ttgaaggtcatttaaccaacctcagctttacaaaccctgaatttataactgagcgttacatagccatgtgccgcgagaagcagcccatggtgccagagtc

SEQ ID NO: 361903 - DNA, 74 bp, Homo sapiens
acagcaagacgttgagttacatgttcagaaggtcagcccttcataaacccagatgggagtccagttgtgtataa

SEQ ID NO: 361904 - DNA, 90 bp, Homo sapiens
cgctaggccgtccccgaccttgcctgaacaagtattctaccttgtaaatactgttatttgtatatactgtaaatgatgacatcggtgggc

SEQ ID NO: 361905 - DNA, 87 bp, Homo sapiens
acgacaaaatgcaaaaaaggaggccaaagactttaaactaatctggattcactccctctggttgatacccactcaaaaaggacactt

SEQ ID NO: 361906 - DNA, 100 bp, Homo sapiens
tgaagatggaaatgtagcttaatgacctccttgtcctggagtctcccttaatacagatccaaacgatcaaagatgttgctggagataaataggcagaagg

SEQ ID NO: 361907 - DNA, 75 bp, Homo sapiens
cagccatggccccctggcgcaaagctgacaaggagcggcacggcgtggttgacattttgctaaaggctgtgggag

SEQ ID NO: 361908 - DNA, 122 bp, Homo sapiens
ttctattgtgcgcactggcaaacgtatgtttctggaacattgcgatttggaatctccataaaattctaggagataaggtgaacaatactgctgtaattgaaaagcaagtactagaactttgg

SEQ ID NO: 361909 - DNA, 100 bp, Homo sapiens
catggacctgtcagcaactaaggaacaaaagtaatgaagatttacacaaactttggaaagaatcagaagggggcccagacccagacagaggaggagatga

SEQ ID NO: 361910 - DNA, 98 bp, Homo sapiens
tccgcaagagctccctcaagaagggagggaggctggtggagaaggcctccggtgtggctgtctctgatggtgtcatcaaggtgttcaacgacatgaag

SEQ ID NO: 361911 - DNA, 83 bp, Homo sapiens
ggagaagcgagaaaagatgaaacggaccctggcacttggaacgggccctgggtgtccactgaggtgctggctgcggcgatcgg

SEQ ID NO: 361912 - DNA, 100 bp, Homo sapiens
atggaaaggttcatggagcaagtggtttttaaatatcttcgagctgaacctgaggaccattattttttaatgatagctttccaatgattagacgaattga

SEQ ID NO: 361913 - DNA, 87 bp, Homo sapiens
ccatggccgagcgccgcgccttcgcccagaagatcagcagagccctttttgattatgacaagactaaagacagtgggcttcccagtc

SEQ ID NO: 361914 - DNA, 50 bp, Homo sapiens
taaccttgatgaaattcccgacgtgatggaatggggagaagatattaaag

SEQ ID NO: 361915 - DNA, 90 bp, Homo sapiens
atttacgcgcacgttggaaccgaagagagctctgttgttgcactcctctggtgcaagtgtggtagctattgacaacaaaatcgagcaagc

SEQ ID NO: 361916 - DNA, 83 bp, Homo sapiens
ccaaatgccaaccttgttaagacattggtttttttctttctagaaagtgaggtggataatattaatgcagctgtgatggattt

SEQ ID NO: 361917 - DNA, 78 bp, Homo sapiens
atgcaaaacttgcagattttggggtagcaggtcaacttacaacagatggataccaagcaactatccaattactgaaaa

SEQ ID NO: 361918 - DNA, 90 bp, Homo sapiens
gtctctgcagttgaatctgacaaagatcgaacagttgtgctcagaatgcttcagacatgcctgaaacaatcaccagccgggatgccgccc

SEQ ID NO: 361919 - DNA, 75 bp, Homo sapiens
agacttgattaaagtaattgaggattttccagcaaaggcatgccagatttcctggagaagctgcacatggccact

SEQ ID NO: 361920 - DNA, 100 bp, Homo sapiens
aatcacagaagaaaaccttccacagcttggtgctaatgagaatcttgagtcgcagtcaggccccaataagaaacccttttccctgaaggagaagaaacca

SEQ ID NO: 361921 - DNA, 83 bp, Homo sapiens
ctgcggccaccgtttctgcgatacctgcctgcaggagttcctcaggtgcagaccatgaattacgtggggcagttagccggcca

SEQ ID NO: 361922 - DNA, 100 bp, Homo sapiens
ttacctttgccttggaatacaggagtttgaaaaagtaccagaaggtcctatccctccatctacaccaaagtttgcatatggaaaggtcactttggaaaag

SEQ ID NO: 361923 - DNA, 100 bp, Homo sapiens
aagtgctcgcagttctgcaccactggcatggatggcggcatgagtatctgggatgtgaaggttcgagcacttggagggctgctgaagttcctgggtcgaa

SEQ ID NO: 361924 - DNA, 100 bp, Homo sapiens
tgaaaaatgaagatgatgtagacactggactattagcatgctacaagtgaaaactgatgagaaactgaatgtgtctgatgagaatacagcaagttgccct

SEQ ID NO: 361925 - DNA, 88 bp, Homo sapiens
aggcgacgctaagttgctgatcgtggcggttatggaaacaaaggacatgctttacatcgtcactgaatttgctaaaaatggagaaatg

SEQ ID NO: 361926 - DNA, 101 bp, Homo sapiens
gtttaggaagtggtatcatgagagatatagcccacttagaaatcacaattgcagcaggagagaagattcctttgagccaggaagaaataactctgcagggc

SEQ ID NO: 361927 - DNA, 80 bp, Homo sapiens
aggtgccacccgaggagttccgcccctttctggcaaagatgagggggattcttaaggtatgggctacgtgagttcgtggt

SEQ ID NO: 361928 - DNA, 83 bp, Homo sapiens
cggccgcagcgaggagaagatctcggactcggaggcgcagttgtgtagcagttgagtaatgctggttagctgttaaggtggcg

SEQ ID NO: 361929 - DNA, 100 bp, Homo sapiens
aacgcttgcaatgcagttatacagaagccaggtggtattggaatgctatgtaagaaaggacttggtctacaccaaagccaatccaacgtttcatcactgg

SEQ ID NO: 361930 - DNA, 100 bp, Homo sapiens
aggcatcacgttgacgtccatttaccagtcttccctggcaagattcttctgaattgtgctgccttggccaaaagaggatctccctaatactatgaacgcg

SEQ ID NO: 361931 - DNA, 83 bp, Homo sapiens
ttggaaatggctgcaggttcagagtttctactacacttagcggacaaaactggtggcataattgtgacaaatgataatttcag

SEQ ID NO: 361932 - DNA, 95 bp, Homo sapiens
tctggataagtgtttcgaaaatgtgtgtgaattggatttgatcttccatatggataaggtttctaaggtaaacggagtcactcgaatgtcatctc

SEQ ID NO: 361933 - DNA, 130 bp, Homo sapiens
ctgaagctgaggacacacccaggaaaagactcaggacggacaagcacagtcttcggaaggttggctgatcaagatgacactgagtaacccttcagaactagatgaacttatgagtgaagaagcatatgag

SEQ ID NO: 361934 - DNA, 100 bp, Homo sapiens
cggagctgtccccagagaccctatgcaacgggcagctgggctgcagtgaccccgctttcctcacgcccaggttaaagctgaagctcaacaaagatatagt

SEQ ID NO: 361935 - DNA, 76 bp, Homo sapiens
acgtatggactacctccttttggtgctggagaatctggtaaaagcaccattgtgaagcagatgaggatcctgcatg

SEQ ID NO: 361936 - DNA, 101 bp, Homo sapiens
ccgcactgagtcaacagactgagcgcgtccaggcctgacagctctgcggctcgggccctgagatgagacaccaattattgcggtgatggtggccctgtcct

SEQ ID NO: 361937 - DNA, 80 bp, Homo sapiens
caccgacagtgccctgagggccttcgagagctaccgcgccagacagatcattgagaagcagccaggccacattcggagca

SEQ ID NO: 361938 - DNA, 98 bp, Homo sapiens
gcagtgcaactggctcagtattcacagggaaagctgtgagggccaactccacaggttgattggaacaaaattggtggtgacttaccaaaggggagaga

SEQ ID NO: 361939 - DNA, 74 bp, Homo sapiens
gacattcgaaggatggaagaagagacgaagagacagctggatgaagtgtgagcctcagcagcgatttcattgct

SEQ ID NO: 361940 - DNA, 80 bp, Homo sapiens
ccggattattctgcctttgaacactgccagtgaaagatgtagaagataaacctgaacaacaaaccagaacaagagagact

SEQ ID NO: 361941 - DNA, 98 bp, Homo sapiens
tgctgagctggttggccctgtgatccctcaagactggtccacggagtgtatgaccacaaacagccatcaaggagctctccttgtgtacatcatcatgg

SEQ ID NO: 361942 - DNA, 49 bp, Homo sapiens
gattttgtcagcttgtcgtcaagataatggcgtttctcctgaggaagaa

SEQ ID NO: 361943 - DNA, 83 bp, Homo sapiens
cagatcctcctgcacagccacaagctgcatcttcctcccgtgaggctggccgagctccacgctgatctgaagatacaggagag

SEQ ID NO: 361944 - DNA, 75 bp, Homo sapiens
ctggagttcccttcccttccacagtgcaaggaagacgccgagaatatggtcaagcagaaagccttgcgagtttta

SEQ ID NO: 361945 - DNA, 75 bp, Homo sapiens
tccttgccctgcagaagtggatcatagacctggccatgtttgtgaagtgtggatatgcaggctctaactttccag

SEQ ID NO: 361946 - DNA, 50 bp, Homo sapiens
ctccgggcctggcagtcatgaagtcaacgaaacggaatattccaatgctc

SEQ ID NO: 361947 - DNA, 109 bp, Homo sapiens
gtcttcggtggactccttcggcagtccacccaccgccgccgcctcccaggctgaccccgcactacatctacccaccagccatcgtgcagcccagcgtggtgatcccagc

SEQ ID NO: 361948 - DNA, 98 bp, Homo sapiens
gcacttggcgcctcggggaggggaccgcgcccgcctcatttgcgccttgcagcactgctggaccagaatcttgccctgtcgctcaagctggggtgcag

SEQ ID NO: 361949 - DNA, 83 bp, Homo sapiens
tcaagatctggactactgttgaaaaaatttccagtgaggctgctctttggcgtaaattgcaatcgattagggatcgtttctca

SEQ ID NO: 361950 - DNA, 51 bp, Homo sapiens
tgcaattggcagataaaatggcaaagagatggggtttgaccttgttgtcca

SEQ ID NO: 361951 - DNA, 100 bp, Homo sapiens
catctggtgctgggagtggtgtctctgcacgcagccgtgagcacagccgaggaccagtccaccatgcctgaagtcaaagacctctcagaagccttgccag

SEQ ID NO: 361952 - DNA, 117 bp, Homo sapiens
ccccgctctgctgtgggcgctgctggcgctctggctgtgctgcgcgacccccgcgcatgtgtctaccatcagagggagatctctgccccctggggctgagagaccccaacctttccc

SEQ ID NO: 361953 - DNA, 90 bp, Homo sapiens
atatttggtccctggtcagtttctgctttgggacttaagtcacaacagattatctttcatcaaggcaagttccatgagccaccttcaaag

SEQ ID NO: 361954 - DNA, 74 bp, Homo sapiens
ggctgcacttggggcgtggcataccaagtgcaaggggagcaggtactccaaagattcaggtttactcacgtcat

SEQ ID NO: 361955 - DNA, 100 bp, Homo sapiens
aacgcactccagccacagggtccccaactaccggcggctggagacgcagagaggtgagccaccagctgggcagcatcatggacctcttcaccaccagcct

SEQ ID NO: 361956 - DNA, 100 bp, Homo sapiens
ctgagtcggagctcggcaggaagtgggaccggtgtctggcggatgcggtcgtgaagataggtaactactccagacccccagcgtatagtggggtgcccag

SEQ ID NO: 361957 - DNA, 74 bp, Homo sapiens
gtggccatcttcgggccccccaacacctactacgagggcggctacttcaagtcttgctctgttgcccaggctgg

SEQ ID NO: 361958 - DNA, 90 bp, Homo sapiens
cagagcaacccccggcagatcaagcatggactcaccctgtcacccaggttggactgcactggcctcaacctcctgagttcaagtgatcgt

SEQ ID NO: 361959 - DNA, 74 bp, Homo sapiens
cccaaggtcagaaggaagcaccacacagaggtatgctgccccacaaaaccaagcgaggccaggccgctctggac

SEQ ID NO: 361960 - DNA, 80 bp, Homo sapiens
gcctccccagccctgcggaactattgcagtgcttttgtccacaaaggctgccgagaaagtctagcctcctgtgcaaaggt

SEQ ID NO: 361961 - DNA, 102 bp, Homo sapiens
ggattatccactgatttatgaaattattttttgggaaaacacttcaaatgctgagttggttgaaatgttggatatgtctgtccctgcagttgctaaattgag

SEQ ID NO: 361962 - DNA, 75 bp, Homo sapiens
ctgacactatgaatgctacttggatgcctcttaaggattctttctactaatccagatacttgttgaagtgctgac

SEQ ID NO: 361963 - DNA, 101 bp, Homo sapiens
gatgaaaatggtaactggagccgtagcgtcggtgctggaagacgaggccacagacacttctgatagtgaaggctacggggcgtggagtgctggacctgcca

SEQ ID NO: 361964 - DNA, 80 bp, Homo sapiens
aagaaatttatatgctgcctcgaattcggagttccactaaaaagctgtcggaaaaggtaacagaagatggaactcgaaat

SEQ ID NO: 361965 - DNA, 100 bp, Homo sapiens
ctgaagatgaggttgaaaaacctgacttttatcatcatattgataatctcaggagaactctatgcagaagaaatttcatgcaaatccccagatgttataa

SEQ ID NO: 361966 - DNA, 98 bp, Homo sapiens
ttcggagcggccggtactgttgaaagcgacaagtggaggcgccgctctagcggccgggactctgaactatggcgctctgctatgttatgccatcatcc

SEQ ID NO: 361967 - DNA, 90 bp, Homo sapiens
gggcagatcacttgagatcaggagttcgagaccagcctgcacatcccgctctgggctttaaacgtgacccctcgcctcgactcgccctgc

SEQ ID NO: 361968 - DNA, 100 bp, Homo sapiens
tgcaaggaactgatagcttatggttctccattgtgatgaaagcacatggtacaggttttcaaatggaacattttgatgcatcacttagtacctatttcaa

SEQ ID NO: 361969 - DNA, 73 bp, Homo sapiens
gcagggaagaggaagcggaggcactcggaagggaaacaaaggacccatcgcaaatgttttccatgctgatctc

SEQ ID NO: 361970 - DNA, 96 bp, Homo sapiens
aatctgatcctccacttcagagaacagggttatagctgaggtggtaccagtttaagaagtgagaacttcttcactgactgaaatttgcatatcaat

SEQ ID NO: 361971 - DNA, 51 bp, Homo sapiens
gctgtggcgggaaacgctgtttgaagcggtagagacagggttttaccatgt

SEQ ID NO: 361972 - DNA, 89 bp, Homo sapiens
gcccatctgctgacattgggactactactgagaatatgacagatacctagcatctagcaaaataatggcagctgcttaccttgacccca

SEQ ID NO: 361973 - DNA, 51 bp, Homo sapiens
cctggacattcaaaataacctttaccagactctatcttgtctgctacaaac

SEQ ID NO: 361974 - DNA, 98 bp, Homo sapiens
caacaggttaacgtgtatggcgtgtgcgtgccagggatctacggacatcctcttcctttggaatgacatgaatgagccttctgtctttagagggccag

SEQ ID NO: 361975 - DNA, 100 bp, Homo sapiens
ctaggtggatagtactccttgtacctcctgcaacccagaaccctggctgaccactttgaaggaggatgctccagcagctttggtgtcatccccagcactc

SEQ ID NO: 361976 - DNA, 74 bp, Homo sapiens
ccttgccaccgcagtgatcaacagatgaaacaggcgcctatttaatcgacagagaccccacctactttgggcct

SEQ ID NO: 361977 - DNA, 75 bp, Homo sapiens
cgccaagagggacatcagaaaggtcctcacaagcttgaggaaggggaagtggccatgggccgagtggtgaaggtg

SEQ ID NO: 361978 - DNA, 73 bp, Homo sapiens
aagctgcacattcgcacagttcccctctatgagtctccaaggacgccaacaaggagagcagcaagacctccaa

SEQ ID NO: 361979 - DNA, 95 bp, Homo sapiens
cttctcaacttgaaggtcatttaaccaacctcagctttacaaaccctgaatttataactgagatcagttcgacagcttagacaagcatacacaat

SEQ ID NO: 361980 - DNA, 73 bp, Homo sapiens
ttggctgcctaattgcggaacatatccaatgggttaagaatctaaccctgcaactggagcaggaatcaaataa

SEQ ID NO: 361981 - DNA, 75 bp, Homo sapiens
ggcaacatggatgaggatggcttttttgaagtggggtcgggggcccacccccagctgggggaccccatgcaggct

SEQ ID NO: 361982 - DNA, 99 bp, Homo sapiens
ctccgccacctcgagctgcggtagcagcgactcatgagagcgcggccggaggacaggcatcaagcatgatggaaccatgtgtgatacctgccgccagca

SEQ ID NO: 361983 - DNA, 101 bp, Homo sapiens
ggacctgaaggagaagcacctgatccgtgggcgtgagcgcttcgagatgttccgagagctgaatgaggccttggaactcaaggatgcccaggctgggaagg

SEQ ID NO: 361984 - DNA, 95 bp, Homo sapiens
gtccagatggacagagttgatcagactgacaaagtgaagctgacatggagagatcggttcccagcctacctcactaacttggtctccatcatctt

SEQ ID NO: 361985 - DNA, 82 bp, Homo sapiens
tctggatggaaatagccttgaaaaggagctggaaaatgcagaatttatccccatgcctgacagcccatctcctctcagtgca

SEQ ID NO: 361986 - DNA, 98 bp, Homo sapiens
cgaaaagctgccaagttgaaaatggacgagtaatcgcctgctttgattcattgaaaagactgacttgcataccaaatgtgtggtggatgtggatgcaa

SEQ ID NO: 361987 - DNA, 100 bp, Homo sapiens
ccctcacctggccagcgggacagcaggttcaacttcccaggaaccagtgttatccaaggagcagcctgcgttccagtatagcagccacgtctcgctgcag

SEQ ID NO: 361988 - DNA, 90 bp, Homo sapiens
ctgcacaactgcaggaacaccgtcacgctgctggaggagtgtgtgttttaatagaaaagttgtcactttccaaaatgccctttagaggtg

SEQ ID NO: 361989 - DNA, 75 bp, Homo sapiens
aaccatgaagacttgaacttaatacagcaagaaagaccatcaagtttaccaggtcccgggattcttgagctgtgc

SEQ ID NO: 361990 - DNA, 83 bp, Homo sapiens
ccagccggcagcatgctgaggacttcctgggagagggctcccactgcagcagctcgggggaccccgctgagtacaacctgcgc

SEQ ID NO: 361991 - DNA, 100 bp, Homo sapiens
tatggctctgccgtgccacctgctgcacccacgaatctgcccacccctcctgtaacccagcctgtttcacttcttggatacagttgatatattagttgga

SEQ ID NO: 361992 - DNA, 75 bp, Homo sapiens
accactggcatggatggcggcatgagtatctgggatgtgaagctgctgggcatgctgtgtgcttgcatcgtgttg

SEQ ID NO: 361993 - DNA, 137 bp, Homo sapiens
ggaaacgtgacagaggagaccagaatcaagttcatgacggatggtgtgctgcttaaagaaatccagaagcacatggcgactgctgatgggctgagacagcgctctgggggcatggaacgcccctttgtcctggccag

SEQ ID NO: 361994 - DNA, 75 bp, Homo sapiens
ccaaggcagaagaaatcttggagaagggtctaaagggcggcgactggcggcgcgatggacctgaccgggctcctg

SEQ ID NO: 361995 - DNA, 49 bp, Homo sapiens
cagggggcactggcaatccgtcagatcttcatgaatgtcgctatctttg

SEQ ID NO: 361996 - DNA, 100 bp, Homo sapiens
caaaggtggcccagaattttccagtgccctgaaaaataggatcactgagattctgatgaacagaccttctgcccgcaatgccttggggaatgtcttcgtc

SEQ ID NO: 361997 - DNA, 75 bp, Homo sapiens
tttctgtttatagaagtgtcaagaggctaggtattcctgacaggcatgaatgctttacagttgcagaacctggcg

SEQ ID NO: 361998 - DNA, 82 bp, Homo sapiens
tgacggggcgggacctggcgccaccttgcaggtgtgaacccacatccctgcccccagggccacctgcaggacgccgacacct

SEQ ID NO: 361999 - DNA, 101 bp, Homo sapiens
agacagcatatttgagtcatttccttcgtacccacagtgcttcatgagaggcttgccatggctagtcgaggggctcggcagcgcctgaagggcagcggggc

SEQ ID NO: 362000 - DNA, 75 bp, Homo sapiens
gctggagtgggcgcggaggcgaccgccatggcgttcctcaaactccgtgaccagtttgaaggatgacctctagga

SEQ ID NO: 362001 - DNA, 90 bp, Homo sapiens
cggctttataagcgggcgctacgccacctcgagtcgtggtgcgtccagaggcactacacgctggatgcttccctgcctttgcgtctgcga

SEQ ID NO: 362002 - DNA, 101 bp, Homo sapiens
ccatatcaactcctatgatcatgcacacaagcaggtacaagaaaattccccaggacacagagctggtttggagcctttctttgattttattgtttctatta

SEQ ID NO: 362003 - DNA, 100 bp, Homo sapiens
ctgccttcgcttcacggcgccgagccgcggtccgagtgacttcaggtggaacattcattggcattggacggaaaacaccagattgccaagggaacaccaa

SEQ ID NO: 362004 - DNA, 89 bp, Homo sapiens
gaggccgcggagctcgcggaggcaaggccgaggataaggagcggatgaccaccaggctctcatctgggacatccagcaaatgccccgag

SEQ ID NO: 362005 - DNA, 83 bp, Homo sapiens
cgcgagcacagagcctcgcctttgccgatccgccgcccgtccacacccgccgccagtgaacttcgaccacttccagatccttc

SEQ ID NO: 362006 - DNA, 100 bp, Homo sapiens
gttccagctggaagtaaccccttccgggagcctagatcctgtgctttactctgaagactcgtcctgatatggaagaaactactgatgtcagctgaaggac

SEQ ID NO: 362007 - DNA, 75 bp, Homo sapiens
cttcccgcgtccgccgattcctcctccttggtcgccgcgtccttggctggcgtaatgttggctaccagggtattt

SEQ ID NO: 362008 - DNA, 90 bp, Homo sapiens
atttgtcacgggcattgcaaggtacattgagcaggctacagtccactccagcatggtgctcctcgcctgcttgcagatatcagaccccag

SEQ ID NO: 362009 - DNA, 78 bp, Homo sapiens
tcaaccttttttgataagaaggccacaacacacagtgatcttgttctaagagcaacaaagctgggaattccttataga

SEQ ID NO: 362010 - DNA, 100 bp, Homo sapiens
ttcacctcgggagacatcagcttaatgaacaactacgatgacttgtctcccacggtcatccgctcagggctgaaagattgatgaactcccagagggcgct

SEQ ID NO: 362011 - DNA, 104 bp, Homo sapiens
cggagagcgtactacagccccacccctggggacgtacaggacctgaagaagtacggggctaccactgtggtgcgtgtgtgtgaagtgacctatgacaaaacgcc

SEQ ID NO: 362012 - DNA, 50 bp, Homo sapiens
ggagcgtgcctcggcggcctgtcgggcccgccatgttcatagaggataaa

SEQ ID NO: 362013 - DNA, 75 bp, Homo sapiens
gcagggaggatgtcgggacaccccggaagctgggaaatggatatcaatgcttacaattgtgaagagcccacagaa

SEQ ID NO: 362014 - DNA, 90 bp, Homo sapiens
caaaagtttgatgagattttttcagcaacaagatttctctatgaatcatcatcaagaactctgggagaacttttgaattcataaccaagc

SEQ ID NO: 362015 - DNA, 100 bp, Homo sapiens
tcgatctcaagccgactctcaccatcatcaagacggaaaaagtcgatctggagcttttcccctccccgggaattgaatgatctggcacgggaccctccag

SEQ ID NO: 362016 - DNA, 100 bp, Homo sapiens
tgaaggaacaccaggaggatcctgaaatgttgattgatctaatgtacagaacattactactggatggaaatccattccgagttcctcgagcagccatatt

SEQ ID NO: 362017 - DNA, 98 bp, Homo sapiens
acagcctggcttggctactcactcttctgttaacagggtcctggcagacagttaaatctcacacagaaacagatgagaaacaaacagagagccgcacc

SEQ ID NO: 362018 - DNA, 122 bp, Homo sapiens
cgacatcaccacggagaaccagtaccggctgacctcgctgtacgccgagcacccaggcgactgcctcatcttcaagggggagtcggtgaagtacttcctggacaacttggaccggatcggcc

SEQ ID NO: 362019 - DNA, 75 bp, Homo sapiens
agagagagtctcaaaggagctgcagattggtttatcttggaagctaaagggcattgctcatcctgaagatcagct

SEQ ID NO: 362020 - DNA, 98 bp, Homo sapiens
tttggacaggttcttggctcttatgaagaagcctaaagaaactgttccaactcttgctccaaaaactctttcagtagcagcagcttttaatgaagatg

SEQ ID NO: 362021 - DNA, 75 bp, Homo sapiens
agaaaaggcctaagaattttggcattgtggtacaggagctgcagcaggccatctccaagctggaggcccggctga

SEQ ID NO: 362022 - DNA, 49 bp, Homo sapiens
gtagtcgtgcatcatcaggatacagaggacagagcgggatgccaccagc

SEQ ID NO: 362023 - DNA, 90 bp, Homo sapiens
cttttttagaaaactcagcagtgagacctacagtcaagcaaaggacctgggtagatgacattaatgctgataagaatatctcttctgcac

SEQ ID NO: 362024 - DNA, 83 bp, Homo sapiens
gcccaccctccaactttgcgacggaaatgtgtcatcgaaagccagactgaaactgttgaggagcccatggaggaagaagaagc

SEQ ID NO: 362025 - DNA, 75 bp, Homo sapiens
taaactttggaactgataagtgagagagataagattgagaggatccagaatccagatctctggaatagctaccag

SEQ ID NO: 362026 - DNA, 100 bp, Homo sapiens
aggaatcaacatttaccgaaagccacccatctacaaacagcatggtttctgttgcttacaactcattagattttgaaccagagatattctttgccttggg

SEQ ID NO: 362027 - DNA, 100 bp, Homo sapiens
ggcgcggagcttcctggagcggctggaagcgcggggcggccgggagggggcagtcctcgccggcgagttcagcatggtgtcctactcttctgtcctcaca

SEQ ID NO: 362028 - DNA, 75 bp, Homo sapiens
ggcctcggagcaacgagcgcagcgccgcgtttagtgggctacagatggcatggcatctaaaaccttacaatgctt

SEQ ID NO: 362029 - DNA, 50 bp, Homo sapiens
aaatggaaattaaatgggttccagaagctatgtggaagcagtgacctgaa

SEQ ID NO: 362030 - DNA, 76 bp, Homo sapiens
tactgaaaccctctacaaaggcattagtcctatcttgtaagattatctgcctggacctgtcagaggaaatgtcact

SEQ ID NO: 362031 - DNA, 100 bp, Homo sapiens
gccgccctggaggagtggctgcctaggtggtctttgggaagaagcttcctgcctttgccaccatccccatccaccagctgcagcatgagaagaaatatga

SEQ ID NO: 362032 - DNA, 75 bp, Homo sapiens
ggaatttgaagtgaccaaaacagcagacgcaaacatgcagatctttgtgaagaccctcactggcaaaaccatcac

SEQ ID NO: 362033 - DNA, 100 bp, Homo sapiens
caattttagtggacaataacacatggaataatacccatatttctcgagtagggcaggcaatggcgtccagcaacatgcatgaagccgaagagtggtaccg

SEQ ID NO: 362034 - DNA, 100 bp, Homo sapiens
acaccttcctgtgcagtcctgttggaatttggacagagcagaatgggctgatatagatccggtgccgcagaatgatggccccaatcccgtggtccagatc

SEQ ID NO: 362035 - DNA, 82 bp, Homo sapiens
tcggcttctgcctggtgctctgcgtcctcatcgggcttatgttcgagaagttcatctggacccctaccgaacatggtgtcct

SEQ ID NO: 362036 - DNA, 95 bp, Homo sapiens
ctgcaagagacttgcacctgagtatgaagctgcagctaccagattaaaaggaatagtcccattagcaaagttttttgctccactcaagcctgtta

SEQ ID NO: 362037 - DNA, 83 bp, Homo sapiens
tggagcgggcggagctgtgcgagagcctcctcacttggacaaatttacatgtattggagaccagaccagaagcccttctgaat

SEQ ID NO: 362038 - DNA, 75 bp, Homo sapiens
ggacgaagtgctcggcggcatggaggatttgttggtattgaggaaaacggtgaaatcctttttggctgtttgcca

SEQ ID NO: 362039 - DNA, 99 bp, Homo sapiens
cactctgctccttccctgttgccaatgtctcgctgactaagggtggacgtgatcgggaaaacggacgatgtattactaagctggaaaacatggggtttc

SEQ ID NO: 362040 - DNA, 100 bp, Homo sapiens
gattgtcttctgtgctgtcacctcgaatgagcaggtcaaggactggacctacagagacatctgggattttctgcgtcagctgtttgtcccatactgtatc

SEQ ID NO: 362041 - DNA, 75 bp, Homo sapiens
gaactcggcctatcgctaccctccgaagtccggtttacccaaggtccagcctagcccctaggcaccatgtcggac

SEQ ID NO: 362042 - DNA, 129 bp, Homo sapiens
ctgtttgggatcccgctgtggtacttctcgcagtccccgcgcgtggtcatccagccacacccactcgcccgggtctatggccacggtcggagagtggtcctgtgtgcgctgcaccttcctgaacccggc

SEQ ID NO: 362043 - DNA, 75 bp, Homo sapiens
gtctgttctagtatctgcacatacctcagcgggaaaaacagtatgcgccgaggaagcagagactttcaaggaaca

SEQ ID NO: 362044 - DNA, 100 bp, Homo sapiens
ccagcagaggagcacgcagctgaacaagaagagagccatccccaatcagtattctgaaaaggaggacaaatatgaagaagaaattaaacttctgtctgac

SEQ ID NO: 362045 - DNA, 51 bp, Homo sapiens
ctccgaagaggaattgacatagagcatcctggccagaacaagccaaggagc

SEQ ID NO: 362046 - DNA, 51 bp, Homo sapiens
ccacggggggttcctggagtcttttaagaatgtccctcttccagtggaaag

SEQ ID NO: 362047 - DNA, 89 bp, Homo sapiens
gacgaagacagtccctggatcaccgacagcacagacagaatccctgctaccagtgtggatgaggtcaccattgtcaacattttgaccaa

SEQ ID NO: 362048 - DNA, 106 bp, Homo sapiens
cagaactgttccttcagccaaagaaacaagccgtggaataggtgtatcaagtaatggtgcaaagcctgaaagcaaatcatggaggaagataaaaaacatggtgcac

SEQ ID NO: 362049 - DNA, 82 bp, Homo sapiens
tcggaccagctctgtaaaagccccgcctctgccttcggatagaaattacagaagacatccccgtgaagactttgaatatgaa

SEQ ID NO: 362050 - DNA, 85 bp, Homo sapiens
catatttttggacctgaaacagaaattctggaacacctatatgtctccagagaatacagagggcaaagatggatccaaagtaact

SEQ ID NO: 362051 - DNA, 101 bp, Homo sapiens
gccgatcatggcggatggcccccggtgcaagaggcgcaaacaagccaatcccaggaggaaaaacggagttattcctgatgaagctaaagctttgtctctgt

SEQ ID NO: 362052 - DNA, 74 bp, Homo sapiens
ctacaaatcccaggagcacttcacgtgaagatagtgatccggggagacaggaacacgggcaagacagcgctgtg

SEQ ID NO: 362053 - DNA, 97 bp, Homo sapiens
ttttatattcatctcaaaaacaaaattctgaactcaggacttggcaagtccagaggtgtccttctaaagctggtagaggtttcacgagtcatcaggg

SEQ ID NO: 362054 - DNA, 99 bp, Homo sapiens
cccactgcaagtccaggatactctatgcaaccgaggatggacttatacacacaaatgaccaggccaggactctacccaaagaatgggtttgtatttaag

SEQ ID NO: 362055 - DNA, 100 bp, Homo sapiens
taaaagaaaagacacagaagatgaagataaatcagaatcatttatgcaaaaatatgagcaaaaaatcagacattttggacacattggcgtgagacctggg

SEQ ID NO: 362056 - DNA, 90 bp, Homo sapiens
aatcttattacacatgtaaagcagtgtgttccattggcaggatggtggatgtggggggccagcggtcggagcggaggaagtggatccact

SEQ ID NO: 362057 - DNA, 100 bp, Homo sapiens
ctggaatgccacaaatgcaaatacttgtgcactgggagaggtagatttcgggcagacaacttgaacaagctgaagaacctatgcagcaagacaatcggag

SEQ ID NO: 362058 - DNA, 75 bp, Homo sapiens
ggcttcctaacgcagactcgagtgcgaagcgcgcagtcgccgggaaccagcttgagttagaactaaaacaggaaa

SEQ ID NO: 362059 - DNA, 100 bp, Homo sapiens
tccggttcgacgaggagacccagaggacgttcctcaaggaggttggatggcaagcatgtggtgtttggcaaagtgaaagaaggcatgaatattgtggagg

SEQ ID NO: 362060 - DNA, 99 bp, Homo sapiens
gtgggcgtcaacgccgtatccagcgactacgcggccgcggagacctacctgcggcgtcggcagctgctgctccgagaggacggtcgggccctggaagga

SEQ ID NO: 362061 - DNA, 74 bp, Homo sapiens
gaaaaaaacaagaaagctcatgccccagctgacggtgagaaatctgcagtttgaagatggaaaaatgatccctg

SEQ ID NO: 362062 - DNA, 75 bp, Homo sapiens
atcatttacggcatgtacttctgcatgaacatctccagccaggtttggtgccctggttgtcagatgttggaaagc

SEQ ID NO: 362063 - DNA, 97 bp, Homo sapiens
cgcgtgtctaggtgagtcgcggtgggtcctcgcttgcagttcagcgaccacggagccttcacgtaaatgggtccagtcatgcctcccagtaagaagc

SEQ ID NO: 362064 - DNA, 75 bp, Homo sapiens
aaggagttcaggcagctggccaacagtggcaagattggattcagcatcaaaatacatctactcatattgagagct

SEQ ID NO: 362065 - DNA, 99 bp, Homo sapiens
tgatcctgctggtgggccagtacagcaccggcaagaccaccttcatcaggtactccaaagattcaggtttactcacgtcatccagcagagaatggaaag

SEQ ID NO: 362066 - DNA, 80 bp, Homo sapiens
ccctaggacttcatgtctatatatttccccattcactggtgcaatggatgagcttcatagtctggatccaagaaggcaag

SEQ ID NO: 362067 - DNA, 109 bp, Homo sapiens
gactgccgaggaacgagagcgcgaagctaagccatcagaaaaaattcggattgagatcatagctctaagccttaatgattctcaagtaaccatggatgacactatccaa

SEQ ID NO: 362068 - DNA, 82 bp, Homo sapiens
aacttcaagccaaacatcaagcagaatgtgatttgcttgaagatatgaggtttttcgttggaatatacgttgcacatttatg

SEQ ID NO: 362069 - DNA, 75 bp, Homo sapiens
atgacgaagctcccaaaaggcagactcgtcgaagagcggctaaaaacgttagggaccaaagcagtatccttacaa

SEQ ID NO: 362070 - DNA, 75 bp, Homo sapiens
agaatgaatacagtattcccaagacctacaacaagaaaggggcctcccgaaggaaagaccacctgaaggaccacc

SEQ ID NO: 362071 - DNA, 50 bp, Homo sapiens
ggagaacctggcacttatgtcctccctggtctcgaagatatgactccagg

SEQ ID NO: 362072 - DNA, 100 bp, Homo sapiens
aagatttcggaaaattaactataaaggagagcgccaaaccattactgatgatgtggaggttaacagctatctttctttaccgaagtgcatgtttgggatt

SEQ ID NO: 362073 - DNA, 90 bp, Homo sapiens
gagaaaatggcagacgatattgatattgaagcaatgcttgaggctccttacaagaagtattcacaggcctccactgggctctcagtaggt

SEQ ID NO: 362074 - DNA, 98 bp, Homo sapiens
cctggccattgtgcacccggtcaagtccctcaagctccgcaggcccctctcctacccagataccgatgttatactgatgtgtttttccatcgacagcc

SEQ ID NO: 362075 - DNA, 100 bp, Homo sapiens
attttacaagatgtgcatgataagcaacacagtcactcctggcggcaaaccaaacaaaaccagagtcatctggggaaaagtaactcgggcccatggaaac

SEQ ID NO: 362076 - DNA, 100 bp, Homo sapiens
gcggcccctggagatgattgagccgcgcacgctacagtacaaggcttcgcaaggcatggtgggtcagctggcggcacggcgggcggctggcgtggtgctg

SEQ ID NO: 362077 - DNA, 100 bp, Homo sapiens
acctgcgctgggtgcagacactgtctgagcaggtgcaggaggagctgctcagctcccaggtcacccaggaactgaggagtggctgtaaggtgaagaagca

SEQ ID NO: 362078 - DNA, 83 bp, Homo sapiens
ccccctcttgtttgtgttgtgtgtggaaatggcgaactcggcaaatacaaacaccgtgggtgtacagcaagctgtgattcctg

SEQ ID NO: 362079 - DNA, 90 bp, Homo sapiens
ggccaagaaggctatgcctggggctgaatacaaggccaaggacctgaaggagaagaaggagaaggtggaggagaaggcaagccggaaaga

SEQ ID NO: 362080 - DNA, 82 bp, Homo sapiens
gatggacggaggaaggacgtgcagttgcagctctttctgcagatgccctgagagaggagggctggtctacaacgcctcgggc

SEQ ID NO: 362081 - DNA, 75 bp, Homo sapiens
ccataaatatggggaatactttcctggcacaggagacttgagggtcgtagttcccccgctccctgggaaagcgtt

SEQ ID NO: 362082 - DNA, 80 bp, Homo sapiens
aagtctgccgttactgccctgtggggcaaggtgaacgtggatgaagttggtggtgaggctttccccgtctcggagcacca

SEQ ID NO: 362083 - DNA, 83 bp, Homo sapiens
ctcattgctcagcgcggacctagacctggaatcgcccaagtccctctactcgcgaggaaggcactgatcctgaaactgaagac

SEQ ID NO: 362084 - DNA, 98 bp, Homo sapiens
ggggaggagatcccggtgcagaagaacatcctggcggcggccagcccgtacatcagaccatcatcaaagaggggatgctgaccaaacagaacaattca

SEQ ID NO: 362085 - DNA, 75 bp, Homo sapiens
gcgaaaacgtggttgtagagttccgtgactcccagaggttggagcaatcactgaagaaactgaagcctgtgattg

SEQ ID NO: 362086 - DNA, 100 bp, Homo sapiens
ggaagctgcaaggtcttcttcaaaagagccgctgaaggaacaggtgacgtgtctgatgttggcctagggaagggacggtactacagtgtaaatgtgccca

SEQ ID NO: 362087 - DNA, 75 bp, Homo sapiens
tccccaaacaagtgctcctacattctgagaatgtgatcaatgggcaggactacgaagtgatgatgcagattgact

SEQ ID NO: 362088 - DNA, 98 bp, Homo sapiens
cctttccaagcagttcaagaaggtgttgacagctcttctaccacaagcagtgcttctccaatgcccaacagttatgatgccctggaaggaggcagtta

SEQ ID NO: 362089 - DNA, 98 bp, Homo sapiens
cggtactcacccagcaatcattgttgcctgacaaaagtcacagagaaggctcagttcttccttcctatgttgtggcagcactgcctgaaggtatgaga

SEQ ID NO: 362090 - DNA, 100 bp, Homo sapiens
aacaatgtcacttcacacgcctccatctccaagcagactctgggacatctggagaaagctgtagtcttggaattaactttgaaacacttaaaagctttaa

SEQ ID NO: 362091 - DNA, 73 bp, Homo sapiens
tgaaattacaagcgaagaccgttttatacagactcgagttgccgcgtcgggctgggcgcgccgccgggtccca

SEQ ID NO: 362092 - DNA, 90 bp, Homo sapiens
attgaatatggacccaagagtcagcggtatattagttcagttaccactaccagattctggaacttttcaaagcctgactctcttcttgaa

SEQ ID NO: 362093 - DNA, 100 bp, Homo sapiens
agtgcctcagttttcccttccacaaaatgagaattctgcttggtcagaatcgtgatggcattgtgttcagcactgatgactattttcaccatcaagatgg

SEQ ID NO: 362094 - DNA, 76 bp, Homo sapiens
taacaaccctcgcattgaccttcctcttccaagctagagaggtcagaggaggtctgcggatcaatggagagctaat

SEQ ID NO: 362095 - DNA, 90 bp, Homo sapiens
tctgagtattgtctttatatcctgacactatgaatgctacttggatgcctcttaaggcagcctgcttctgcaaagtggtacgatcgaagg

SEQ ID NO: 362096 - DNA, 100 bp, Homo sapiens
gcatcgtgtggcaggaaacagaagatgggaaattggattccaagatccatcaaggagcaaagaaggggttaatgaagcagaataaagctgtctgacccag

SEQ ID NO: 362097 - DNA, 82 bp, Homo sapiens
acaaatccgggggcaaggccaaaaagaagggtggagggcagatcctggtacaccccccacagaggacgactttggatagcag

SEQ ID NO: 362098 - DNA, 90 bp, Homo sapiens
cagtttgccatcccaaggccgaagatgactcctcctctgagagtggcagcggcaatggctcctccaccctgaacccatccacgtcgagca

SEQ ID NO: 362099 - DNA, 100 bp, Homo sapiens
acgctccctgtctgggaccttctccctgcctggacccctactattgcaacaagcatcacaggacatggccccctcagccacctagctggggcccatctag

SEQ ID NO: 362100 - DNA, 99 bp, Homo sapiens
tccaggtcgaggttctgcagaaggttgtgactttagtatacaatattaccaaatctctcttggtgactgagttgggctcttccagaacaccagagactg

SEQ ID NO: 362101 - DNA, 100 bp, Homo sapiens
tgtgagagaacatattgccgatttcaacacacagcagaacatgcagctggggaggctgtgtgacatcttaggtcaaaatgcagatcttcgtgaaaaccct

SEQ ID NO: 362102 - DNA, 74 bp, Homo sapiens
cctgtgggtgctgggcctctgctgcgtcctgctgaccttcgatgtggaagatgtgaaatttgtcatcaattatg

SEQ ID NO: 362103 - DNA, 75 bp, Homo sapiens
ggccatctgtgtgtctgggcagtgcaagctggtgaattctatagccaagacgtatgttggaacaaatgcttatat

SEQ ID NO: 362104 - DNA, 87 bp, Homo sapiens
ttacttggtgcaggaaggcagtctttgctacgtacagcaaaagaaatgggcaagttcatgaaacctgggaaggtggtgcttgtcctg

SEQ ID NO: 362105 - DNA, 82 bp, Homo sapiens
ctgtacctgccttgggatccggagggaggaagctgggacacccgggagtcaggaaatgacgcaaacatgcagatctttgtga

SEQ ID NO: 362106 - DNA, 100 bp, Homo sapiens
ttcattgaaggaatcattgctcgtgggaacgcttattcaacggcaaaaggatgctataaaatcaccacggtctttagccatgcacaaacggtagttttgt

SEQ ID NO: 362107 - DNA, 99 bp, Homo sapiens
acactgattttggatgctctgaagaaagatggtttgtggatgcacttagatgtttgcaatgagcactgtggctggcatgccccagtgttttggatacca

SEQ ID NO: 362108 - DNA, 90 bp, Homo sapiens
ggaggcctctaggcagccgcgcagcttccgtgtttgctgcgcccgcactgcgacttaattcagtgcacaaatgagatgaatgtgaacatc

SEQ ID NO: 362109 - DNA, 88 bp, Homo sapiens
tcggtccttacagccgctcgtcagactccagcagccaagatggtgaagcagatcgagagcaaggtcagccatgtcatctgagcctccc

SEQ ID NO: 362110 - DNA, 100 bp, Homo sapiens
gatgaggagctggaaagagatgagaaggtatttctgcttggagaagaagttgcccagtatgatggggcatacaagctacctggaccagccctgccttgag

SEQ ID NO: 362111 - DNA, 90 bp, Homo sapiens
ccgagatgcagctgatgcagtccgagagctagatggaaggaaaatgtttataggaggccttagctgggacactacaaagaaagatctgaa

SEQ ID NO: 362112 - DNA, 100 bp, Homo sapiens
gttgtgcttatgaagtttctcaggcacataaatcctgtgaagttattattgatatggctcgtggacagcagaaaattcagtctcagcagaaaaatgccaa

SEQ ID NO: 362113 - DNA, 112 bp, Homo sapiens
gtgaagctcaccgacagtgccctgagggccttcgagagctaccgcgccagacaggtgtttgagaagtcccccctgcgggtgaagaacttcgggatctggctgcgctatgact

SEQ ID NO: 362114 - DNA, 75 bp, Homo sapiens
tcaatgctgaggtccactactccctcctgaaagatattgatgatgttaagaagttcaaaccgggttacctggaag

SEQ ID NO: 362115 - DNA, 75 bp, Homo sapiens
caggacctggcctgaagacatttcctctcctcccctctggatttctcagaggatgaagtaggtgttccaggtagc

SEQ ID NO: 362116 - DNA, 75 bp, Homo sapiens
cggggctgaagaagcagttctacaaggcgagccaggagggtgtgaagacagagaatgaccacatcaacctgaagg

SEQ ID NO: 362117 - DNA, 99 bp, Homo sapiens
ggaaagaaagacaagtcaggcatggctctcacccagctgctactccaccgacacgcactggttctctggcccgcgctgcgaggtggccgtccactggag

SEQ ID NO: 362118 - DNA, 121 bp, Homo sapiens
cggagaaacaggcgccgcgggctccgcgcccggccggacccgggcccgaggtactccaaagattcaggtttactcacgtcatccagcagagaatggaaagtcaaatttcctgaattgctat

SEQ ID NO: 362119 - DNA, 100 bp, Homo sapiens
tcttcatactctcattgagtctggtcctagatattatcctactgaagatgtgcctcgaaagctgttgagccacggcaaaaaacccttcagtcagcacgtg

SEQ ID NO: 362120 - DNA, 75 bp, Homo sapiens
ctgagtctttgaggacacagcctcgctggaggcagtttctgggtcctgaggacaccgtgagccagccaggcctgg

SEQ ID NO: 362121 - DNA, 75 bp, Homo sapiens
ccttagctgtgctcgcgctactctctctttctggcctggaggctatccagcaccttattgcaatatgcaagcaac

SEQ ID NO: 362122 - DNA, 100 bp, Homo sapiens
gcccctgcacgtccgcaaccttctcagcgcctatggcgaggtcggacgcgtcttctttcaggctgaggggtagctataaccagcctctgggcctgtccag

SEQ ID NO: 362123 - DNA, 101 bp, Homo sapiens
gtgtttgtgcagccagtcttcctaccactatgggtgtggttgctgggatcttagtacaaaacgtgttaaaatcatgatgctgcgattaatagatatagccg

SEQ ID NO: 362124 - DNA, 75 bp, Homo sapiens
cccgtccgtccgccgccaccacccactccggacacaggcaaggtgaccccatggcaaggcgcaagccagaagggt

SEQ ID NO: 362125 - DNA, 97 bp, Homo sapiens
gaaaagagccctggaatatgaagcaacatgagatggtggatgaacccacagtggacctaagcgttatgactggactgggaaaaactgggtgtactcc

SEQ ID NO: 362126 - DNA, 99 bp, Homo sapiens
gacgaccggatcctgaggaggcagctgcggtggcagctgctgagttctcggtgaagcaattctgtggtgttcttggtcacacatttatggagtttctga

SEQ ID NO: 362127 - DNA, 80 bp, Homo sapiens
agctcatcagcgtggaggacctgtggaaggcatggaagtcatcagaaggtaaacgcaaagcactgaagttgaattttgca

SEQ ID NO: 362128 - DNA, 82 bp, Homo sapiens
caggagttccgatcgacccggtaccaagaaggggagtgcccgcggcaggcggtgcgtctttctacgtgaataggattttgtg

SEQ ID NO: 362129 - DNA, 83 bp, Homo sapiens
aaacacaggagccggagcagaagcaaagaggacctgctgtcctttgagctgttggatataaacattgttcaagagttggagag

SEQ ID NO: 362130 - DNA, 90 bp, Homo sapiens
attttatgctgatcacaaacaaatccttgaaagaagaagatggagaagaaatagttacctatgatcaatagcctaacatggcagaccaga

SEQ ID NO: 362131 - DNA, 99 bp, Homo sapiens
caaagaccaggttcaagggtctctccagaaaatcttgtggacaaatccaggggaagagtcgggtttctccattcaaggacatgattttatgcttctctg

SEQ ID NO: 362132 - DNA, 100 bp, Homo sapiens
gaggggacggtcaacgagggacgcccagaatcggacgcggcagagcactagacaaactgaatggatttcagttagagaatttcaccttgaaagtagccta

SEQ ID NO: 362133 - DNA, 126 bp, Homo sapiens
gttatttccaattttgtcagttacgtgggtaaagttgccacaggaagatatggaccatcacttggtgcagaattccaggcttggactggagtgaagccctcaagatccacaaagacaaaaccagcc

SEQ ID NO: 362134 - DNA, 85 bp, Homo sapiens
ctgacttctggaactgacaaggttattaagggactttgaggaggaagatgacaaccccgactgggtgtcagagctgaagaagcga

SEQ ID NO: 362135 - DNA, 100 bp, Homo sapiens
tacgggtgtgaacctaatcgcagagctgacaagctctctactgatgatctgaactccctcattgctcatgcacatcgtcgtattgatcagctgaacagag

SEQ ID NO: 362136 - DNA, 75 bp, Homo sapiens
aagcagcagaaaggccgcggcatgggcggcgctggccgagaccgagacatgggtgcccggcaccgcgcccgagcc

SEQ ID NO: 362137 - DNA, 82 bp, Homo sapiens
ttttgctaccgtgaccgtttagggatggttgtgcgagctgttacgctggaaagaagatccttctccagaaaacagaaccctg

SEQ ID NO: 362138 - DNA, 87 bp, Homo sapiens
tgaaacaaaataggaaaatggcagcaaactcttcaggacaagggatccacaaatgctaaagagctgtcttccaagggagtgaaaatc

SEQ ID NO: 362139 - DNA, 100 bp, Homo sapiens
tggccgaggagattcaggatgaagttggaagtgtttggattgtgagctatttcagaactgttctcaggactcattattttaacatttgggagaaacacag

SEQ ID NO: 362140 - DNA, 90 bp, Homo sapiens
agaaacctgggtgaactttcacggacaacctcagaggacaacgaagtgttcgagctggaagtcgagtgtgctactcaactcaggagattt

SEQ ID NO: 362141 - DNA, 90 bp, Homo sapiens
agatgatgatgtcctcagtattgattcagaatcctcactatggatgggctcattgaggacattaagcatcggcggtattatgagaagcca

SEQ ID NO: 362142 - DNA, 74 bp, Homo sapiens
aggagcgattccgtcgccaaacaggtgaaagaaaagatgttgtcccggttaagagtagtttccaccacttgtac

SEQ ID NO: 362143 - DNA, 100 bp, Homo sapiens
agaaggcgcatcactcccagctgcgcaaagcttgcgaggtggcgttagtgaggatgaggatgatgaccttcagtatgccgatcatgattatgaagtacca

SEQ ID NO: 362144 - DNA, 98 bp, Homo sapiens
ggaaatcatgtcaagcgaagccttgaaaaagctgccctgagacggtgtcccgccgaaaggcatttggctttatgtcccgagttgccctacaagcagag

SEQ ID NO: 362145 - DNA, 99 bp, Homo sapiens
cactttcattagagatggctacaagttgtggcatcagctgacacttcaggtgcttgattttgtgcaggatccgtgctttgcccaaggagatggtctcat

SEQ ID NO: 362146 - DNA, 100 bp, Homo sapiens
ctcgcgatggcgggcatcctgtttgaggatattttcgatgtgaaggatattgacccggagggcaagaagtttgaccgagtcctatgcaccagctccccac

SEQ ID NO: 362147 - DNA, 88 bp, Homo sapiens
ctgaaaatcttggtcaggtactattcggggaaagaattgaaccttcaccatataaggcagcagaagatgtcgttttcattggacctga

SEQ ID NO: 362148 - DNA, 100 bp, Homo sapiens
acttgtggtcgccttcgccagcggtatccacaagtgaaaatccacaactctgaagagaaactaccaagactcctcctgccccaaacctcgccagagaagc

SEQ ID NO: 362149 - DNA, 83 bp, Homo sapiens
ggaaggcttcgagaagattagcaaaggtgctaatccagtggaaatcaggagagtgtaccacatgaaggaagatggttgggtga

SEQ ID NO: 362150 - DNA, 82 bp, Homo sapiens
ctcggggacattattgcgcgtggaacggctgcttttggaaggtggaaatgagttctcaacagtttcctcggttaggagcccc

SEQ ID NO: 362151 - DNA, 48 bp, Homo sapiens
atccaggacatctatgagaacagggaactgctcgcagaaagaagaagg

SEQ ID NO: 362152 - DNA, 100 bp, Homo sapiens
tggggctggaaattgcgctggaccgtcgccttgctcctcgccgcggcggggactgcagtttgtcccgctggctggaagcctggcagtgacacgattaagc

SEQ ID NO: 362153 - DNA, 73 bp, Homo sapiens
aattgttagatactagaatacggtatatttgcttacttaaactaccatgttcctcgaacgagacgagaaatcc

SEQ ID NO: 362154 - DNA, 75 bp, Homo sapiens
cagcaccacagtccttctgcagtccctcgtccagccacccccagatatcccgcccaggtacccgttccaagccct

SEQ ID NO: 362155 - DNA, 90 bp, Homo sapiens
gcagagagtagcctgcaacattcggccgtggttacgatgagatggatttataaaagctattggtcctgctgatgttattcaaagacagtt

SEQ ID NO: 362156 - DNA, 80 bp, Homo sapiens
gcaaaggcttggagaagtccagggcgacaacaagagatgtgaaagctggaaacattcttcttggagaagatggctcagta

SEQ ID NO: 362157 - DNA, 136 bp, Homo sapiens
accgtggacagctccaaggccaggacctccctggatgccctgaagatcagcatccgccagctcaagtggaaggaggcagataaaacgtcactgtgcagagccttttacagaatattggacttgcattgattatact

SEQ ID NO: 362158 - DNA, 100 bp, Homo sapiens
ctgagatgagtgaggattgtttcagaaaatcaggcctcctcctggggaatgtgcctcagcttctgtgtgcaacttgctttggtgtttgctgttttattgc

SEQ ID NO: 362159 - DNA, 100 bp, Homo sapiens
gactgcaagccaaaggttcatagagctgggagcagagattaaaagagttcggcgaggaactccagaatacaagagagaagaagaaggaggttcctgctgt

SEQ ID NO: 362160 - DNA, 95 bp, Homo sapiens
gcagatgttgggatgagagtcggagccgaataccaagctcggatccctgaatttgatccaggttccccacattggcagacaaaattagaagcggc

SEQ ID NO: 362161 - DNA, 88 bp, Homo sapiens
ctcccacctcgtctgggctcgcggcgtctccggggaaagccgtggccccgagggcggatccgagggacatgagagatggctttagaag

SEQ ID NO: 362162 - DNA, 78 bp, Homo sapiens
cagcaccgcagatgttgtcaaggtggcctaccaggaggccaggggtgtcgccatgcatgcaatgatgctacctgttct

SEQ ID NO: 362163 - DNA, 75 bp, Homo sapiens
aatacagcaagaaagaccatcaagtttaccaacctgcctagagctggaacgttacctccagagcgagccctgcta

SEQ ID NO: 362164 - DNA, 75 bp, Homo sapiens
gtggaagagcagtgccatccattgaatgggttgaacttttcacaggtacaggtttgcagattccgccagcagcac

SEQ ID NO: 362165 - DNA, 58 bp, Homo sapiens
ccggggccctctcagcaagaacgggaacaaaactctgatgcctgaggaaacccagacc

SEQ ID NO: 362166 - DNA, 74 bp, Homo sapiens
cagtctttgaaggacaccaagaccacggttgatgacaacaagaaactaggagaatgggtaggcctttgtaaaat

SEQ ID NO: 362167 - DNA, 80 bp, Homo sapiens
gtcaccccgactcaacgtgagacgcaccgcccggactcaccatgcatggcggacaccgacctgttcatggaatgtgagga

SEQ ID NO: 362168 - DNA, 80 bp, Homo sapiens
acaaatagagctgccagaggttccctccgagccccttcctgagaagatcccaggtcccctgcctgtgcccttcaccaatg

SEQ ID NO: 362169 - DNA, 50 bp, Homo sapiens
tttaaacaagagatttccacagaaggttgacaatggtctccaggatggtc

SEQ ID NO: 362170 - DNA, 75 bp, Homo sapiens
ttgacgcggtgaactctgtccagttttcaaaccacacagaaacgcttcgttaagggactcaggcagtacgggaag

SEQ ID NO: 362171 - DNA, 100 bp, Homo sapiens
ggcactaataggaagtacttcaccaactgcaagcagtggtaccaaaggaaaatctgtggcaaatcaacaaacgaggatgcagtcaatcagatggccgtta

SEQ ID NO: 362172 - DNA, 99 bp, Homo sapiens
ctcgggtcgttgtggtgcgctgtcttcccgcttgcgtcagggacctgcccgactcagtgctatcatggtgaacttacttcagattgtgcgggaccactg

SEQ ID NO: 362173 - DNA, 74 bp, Homo sapiens
gttggtggctctcattccctatggggaccagaggctgaagcccaagcacaccctcacagcatggaaccacaggt

SEQ ID NO: 362174 - DNA, 96 bp, Homo sapiens
cccaatgtggagcggaagatcttggacctctacagccttagtaaggatgagaacaagttgagcagtgccaacggccatgaagaacgtagcaaaaag

SEQ ID NO: 362175 - DNA, 75 bp, Homo sapiens
attaaaaggaacactaaggagaataaagattgtgagatgcccactttaggacctgagggcactcgctttgctcct

SEQ ID NO: 362176 - DNA, 98 bp, Homo sapiens
ctccctctgcggtggggtccgggacatggcagaaaggcacttggggtcttatctgttggactctgaaaacacttcaggcgcccttccaaggcttcccc

SEQ ID NO: 362177 - DNA, 82 bp, Homo sapiens
agcacctcctcgccagcagccgtccggagccagccaacgagcgacattccacttcttccatctattacatctctgagtctaa

SEQ ID NO: 362178 - DNA, 82 bp, Homo sapiens
ttcttcagcgagattcctgagccgttctatccctgtatgcagtgccattcagaatcaggatttcactgtgatcgaagactac

SEQ ID NO: 362179 - DNA, 75 bp, Homo sapiens
ctgcagagagagtgcgcagaaggattccgggagcacagttccgccgaatggcccactgcgtgaccttggttcagc

SEQ ID NO: 362180 - DNA, 97 bp, Homo sapiens
agagttcaaggaggccttccagctgtttgaccgaacaggtcacaatccaaggtccggctcctccgcgtcccagggccggacggagggatgaggcagg

SEQ ID NO: 362181 - DNA, 53 bp, Homo sapiens
ttaaggattccaagtaactcttatttggagttgtaagacgttcatcgccgtgt

SEQ ID NO: 362182 - DNA, 100 bp, Homo sapiens
aggactctacacttatcatgcagttgttacgtgataatctgacactatggacttcagacatgcagggtgacggtggagcatgactttatcctgcaggccg

SEQ ID NO: 362183 - DNA, 96 bp, Homo sapiens
aaaagctttggatgaaggagcttcaaacccaaagaggtaagcattcagtctactgcttatgaaaagcaatttcctgcaaccagtaaggacaacttt

SEQ ID NO: 362184 - DNA, 75 bp, Homo sapiens
ttggtccgcggcatccgtaaccacaaggaggacgaggtggtctttgggaagaagcttcctgcctttgccaccatc

SEQ ID NO: 362185 - DNA, 90 bp, Homo sapiens
ttcgtggttcacccgctgccgggcaccgaggaccagctcaatgacaggtgctggagaatctggtaaaagcaccattgtgaagcagatgag

SEQ ID NO: 362186 - DNA, 90 bp, Homo sapiens
taggcttagtcctagccctgcactgaaggttgtttacattcagagctctatcaataagaggaatacatattacagtgaattcgacaaccg

SEQ ID NO: 362187 - DNA, 89 bp, Homo sapiens
catgaatgaaatgaagagttattctcaagctgtcacaggagctctggaatgtttttgtcaggcagcatctgaagtaggcaaagaggaat

SEQ ID NO: 362188 - DNA, 90 bp, Homo sapiens
cacgtctcgtccacgacctccctaggtttattcttcagtccaaggaagcaattcacagtcagctgttagagaagcagaaaatagcagaag

SEQ ID NO: 362189 - DNA, 98 bp, Homo sapiens
ttcgagtgacccgggtgccgaggagcgggaagagttgctggggtactgtctgatgagcgtgaaaggttgtttcaccgacttccacatcgactttggag

SEQ ID NO: 362190 - DNA, 75 bp, Homo sapiens
gtactggctattggaaggaggagattctgaagataaggaggtgtagtacagcgaatagccgattggcagcctatg

SEQ ID NO: 362191 - DNA, 75 bp, Homo sapiens
agtatctggtgaagtggaaaggatggcccccaaaatgatatcatcaagttgaatcgaaaggaagggaagaagcag

SEQ ID NO: 362192 - DNA, 51 bp, Homo sapiens
aacccgcgaggagtccagggcggaacagcactgaacctaccagatgtattt

SEQ ID NO: 362193 - DNA, 86 bp, Homo sapiens
tcgacttggagtctttgtccaggacgttaccggtattgtaagaacaagccgtacccaaagtctcgcttctgccgaggtgtccctgg

SEQ ID NO: 362194 - DNA, 82 bp, Homo sapiens
atcgagaagatgagctcagaggtggtggattcgaatccctacagcaacaacgaaagcttgacctcctgacgataaccagccc

SEQ ID NO: 362195 - DNA, 100 bp, Homo sapiens
tagatgatcaggaaatctggcacctggaaaagaactgcatgtcccaggaggatggttgaactcgaatcatttatgacagaaagtttctgttggatcgtcg

SEQ ID NO: 362196 - DNA, 100 bp, Homo sapiens
gcttgatggcttagaactctccacagccatcactcatgtccataaggagtggaacacacgggccaagcgggagaagctgacagagctgatgttcgagcag

SEQ ID NO: 362197 - DNA, 75 bp, Homo sapiens
ctctgccatggacttcgaggacggagaaattgacacaagattctctttttgtgcggtggcaactttggctttgtt

SEQ ID NO: 362198 - DNA, 100 bp, Homo sapiens
ccagccacatgtggaccctcagcctgggactgaccagggccaagtggcgctcggcgggcactacatggcggagggtgaagggtacttcgccatgtctgag

SEQ ID NO: 362199 - DNA, 100 bp, Homo sapiens
ccttttgaagctgcccgtagatttcagcaatatccccacataccttctcaagctacaggaccgcactcagttcagtgaccgagacttagccacccttaag

SEQ ID NO: 362200 - DNA, 100 bp, Homo sapiens
ctgggtcctctcagtgaagccagggtggccgccccagcagacagtgctacagagccaactcctgacaggtctgccatcatggatgttctcgcagaagcaa

SEQ ID NO: 362201 - DNA, 100 bp, Homo sapiens
aacaaagaagagcccaaggcccggcccttgagagtcaaaatgcagatcttcgtgaaaacccttaccggcaagaccatcacccttgaggtggagcccagtg

SEQ ID NO: 362202 - DNA, 100 bp, Homo sapiens
ttgcaggctgccctctgcctggagaacttctcctcccaggttgtggaacgacacaacaagccggaagtggaagtcaggatttttactctgttccacgaac

SEQ ID NO: 362203 - DNA, 100 bp, Homo sapiens
gcgaaggcgggcggcagaggcgatcagctcgccctcccctacctgcggaagagtcaagggaatgtcatcaacatctccagcctggtgggggcaatcggcc

SEQ ID NO: 362204 - DNA, 100 bp, Homo sapiens
cgctcgctgggagagaggtacctctccttttccctctccctttccctaagctattgtggacgatgaaaggctctctgcagaggagatggatgagaggagg

SEQ ID NO: 362205 - DNA, 100 bp, Homo sapiens
gcatggaggagggtgctgaacctcgggaacgagctatcctagcttctgaatccaggtacgtgaacacactcctgaaactcatcccgctggtgctgggtct

SEQ ID NO: 362206 - DNA, 74 bp, Homo sapiens
agaaatactaagggtgccttttaggagaaataaagaggaagttgcttgccggaaggaggaagaggaacggaaag

SEQ ID NO: 362207 - DNA, 90 bp, Homo sapiens
cgagatgcttgtgatggtcatgagattggaaggggatctgttccaaataaattttatgttcacaatgatatgtttcgttatgaagatgaa

SEQ ID NO: 362208 - DNA, 100 bp, Homo sapiens
cagagatgaggccaaggacaagaagagaatgcaggatgccgctttccacctagaagaaggttggtcaaagaaaaagtgatgtatgaaaaagaggcaaaac

SEQ ID NO: 362209 - DNA, 100 bp, Homo sapiens
aacccgccggggagaggcacccgagacccacggagaccgcgcagaggtggaggagacactgaagcgactgcagagccagaagggagtgcagggaatcatc

SEQ ID NO: 362210 - DNA, 100 bp, Homo sapiens
caggatggtgatccgtgtatatattgcatcttcctctggctctacagcggattctgcttcaggaaaaaaggaattgtctacttatgcagctggaagaagc

SEQ ID NO: 362211 - DNA, 100 bp, Homo sapiens
aggaactccaggccgccaacgaaagcaagcagcaggagctggaggccgtgcggaaggtatccgttacagcactgatgtgagtgtagatgaagtaaaagct

SEQ ID NO: 362212 - DNA, 98 bp, Homo sapiens
cctgaccctcacaaagggatcgggaaatgatcttcattggttagcatgtgccttatatgtggcttgcagaaaatctgttccaactgtaagcaaaggga

SEQ ID NO: 362213 - DNA, 82 bp, Homo sapiens
gaaacgaggcgccgcgttggcgcttggacggcgggaaccggctccggagcgagaacgcgccaaacggggattcagcgtccga

SEQ ID NO: 362214 - DNA, 80 bp, Homo sapiens
aatagtacctatgacctgtacaccatccctaaagatgctgactcccagaatcctgatggaaagagcatctacggtgagcg

SEQ ID NO: 362215 - DNA, 88 bp, Homo sapiens
tcgcttcacggaggcaatagctagccggcagagatcctacaagaatccaggatgatgatcccagattgccagcgcaggttggaagccg

SEQ ID NO: 362216 - DNA, 82 bp, Homo sapiens
cagtgcgtcaatcagagcgtcctgtgcgataacgaaggaggcccaacttcattcaataaggagcctgacggatttatcccag

SEQ ID NO: 362217 - DNA, 75 bp, Homo sapiens
cgccggttcctcaccctcggggagcaacatggagacttcagatggattttaaaattgaacacacttgggatggtt

SEQ ID NO: 362218 - DNA, 96 bp, Homo sapiens
ttctttctgcaccaaacccggaaggaattgcatttgctggtctggcctttgcgtccttctacctggcagggaagttacactgcttcacaccacaag

SEQ ID NO: 362219 - DNA, 100 bp, Homo sapiens
cgctccgtggccttagctgtgctcgcgctactctctctttctggcctggaggctatccagcgaggagagggcagtgagagataggaatctcctccaggtt

SEQ ID NO: 362220 - DNA, 75 bp, Homo sapiens
ggggggagcagggctcactccaggtcttgggcgtctttggtactggcttttttaggggtctgcctggggattacc

SEQ ID NO: 362221 - DNA, 98 bp, Homo sapiens
gttgccaagcacctactatttgctttgtctaccaggtgcagcggaactgctgcctgacgctctgcaacttcagcatccccgaggagctggaattccag

SEQ ID NO: 362222 - DNA, 98 bp, Homo sapiens
tcagacctgccaatttaccagagataattgataacaccctgtaacagctgaatacactctgtgcagttttagagagagacacactcagtattcgagaa

SEQ ID NO: 362223 - DNA, 100 bp, Homo sapiens
atctctcatcatttcagcaacaaggaaataaattagtggcagagtaagggtgacttggttgtgttccaccatgattactttctccttcagcgaataggct

SEQ ID NO: 362224 - DNA, 74 bp, Homo sapiens
ttgacatccacttgtaatagatggtgaggaagaggatggagatgaagatgaggaagctgagtcagctacgggca

SEQ ID NO: 362225 - DNA, 100 bp, Homo sapiens
ctatgagaaggacgttgccaagattaaccaggacccccaggagtggagtcaacatatcaatggagcaagtcacagtcgtcgatgccagcttcttcttgaa

SEQ ID NO: 362226 - DNA, 100 bp, Homo sapiens
ccccaagtaagcctacacttgcctatccagaaagcaacagcagaggtgtcctgatggcaaatttcaagggccacgcgcttccagggagtttcttcctgat

SEQ ID NO: 362227 - DNA, 83 bp, Homo sapiens
gcaagtcggaggaaacgctagtgcagcattggaatggatacttgtgtcattcctttgaggcacggtgggctttccttggttca

SEQ ID NO: 362228 - DNA, 82 bp, Homo sapiens
ggagctgtcgacccggcctggcgccggactaggagaactacgatgacccgcacaaaacccctgcctccccagttgtccacat

SEQ ID NO: 362229 - DNA, 82 bp, Homo sapiens
caagatgcatggacccagctcagcgggacgcgccgctggagaatgaagtttgggatatgagattgaaaatgacgactcggaa

SEQ ID NO: 362230 - DNA, 76 bp, Homo sapiens
gaaagaaagtaaaagatgtcattgagggtgtctggctgttttggggaaactattcctgaccttattttgactaaaa

SEQ ID NO: 362231 - DNA, 83 bp, Homo sapiens
ctccaggacagcatccaggcctcattggacagcattcgaggtgacttaagagattaaaattaatttggttgctgttggttctg

SEQ ID NO: 362232 - DNA, 86 bp, Homo sapiens
ggaattcctccatcagggccagctggagaattgaagtttgagccacgatcaaaatggtttcaatcccagaatactatgaaggcaag

SEQ ID NO: 362233 - DNA, 100 bp, Homo sapiens
gatattagtgcaaactccaatggcccaaaacccacagaagttgtattagatgatgacagagaagatctttttgcagcaggggaaatgctgtctgtagctg

SEQ ID NO: 362234 - DNA, 100 bp, Homo sapiens
tagtttggatgtggaggggaatagactccatctatccatatgagcaccagtatgcatgagcgggtgaaccgaacagaaagacagtttcgatcacttccag

SEQ ID NO: 362235 - DNA, 74 bp, Homo sapiens
gacaatggtcaccgtctcttcagggggggccctcagcctcttggccttgaacgggctgttcatcttgattcaca

SEQ ID NO: 362236 - DNA, 75 bp, Homo sapiens
agcaacttagaatgcagcttcagcagaggctgcagggccagcaggcagggcaagaatcctttcgttccatcacaa

SEQ ID NO: 362237 - DNA, 98 bp, Homo sapiens
gtggctgtaacttacgtgtactttaccaacgagctgaagcagtgaattttgaagattgcaccggtcgacaaaggacagcctatttttccctcgacacc

SEQ ID NO: 362238 - DNA, 136 bp, Homo sapiens
caacatccagaaaaaagcgatgactgtgaaggagttcaggcagctggccaacagtggcaaggagaaatgcctgctgcctctccagttggctttggaatccaagaatgtgaagctggcccaacatgctttggcaggg

SEQ ID NO: 362239 - DNA, 88 bp, Homo sapiens
gaaaaagaacgacatgatgcaatcttcaggaaagtaagaggactataatgtaactgcaaactccaagctggtcattatcacggctggg

SEQ ID NO: 362240 - DNA, 90 bp, Homo sapiens
ccgcttcgagtctattgccattgcccaaggggtaaaagcatgtctacgaagaaaagtatgtgaacaggaagaaaagtatgaaattcctga

SEQ ID NO: 362241 - DNA, 97 bp, Homo sapiens
caggctgtaaaaaatgtggctaccgtttttagaacttcagccataaaaatgggcagaattttccttgatcatatcggtggtacccgtctgttttctt

SEQ ID NO: 362242 - DNA, 82 bp, Homo sapiens
tgatgatcacggatgaggtcaaggagtttgtgacattcgaggatgtggctgtgcaccttactcgagaggaatggggatacct

SEQ ID NO: 362243 - DNA, 80 bp, Homo sapiens
catcgactcagtcagtctcttggtttggtctctaaaagtaaagggttctggctccttggcagcaatggctgtatttgaag

SEQ ID NO: 362244 - DNA, 82 bp, Homo sapiens
gcaggctctgcgggaggtggagcacctgaagagatgccagcaggcttgggcactgtttaaaggaaagttccgagaaggcatc

SEQ ID NO: 362245 - DNA, 100 bp, Homo sapiens
agttatttattcaattagaacaaatggtgtgcttctatttataccaagccatgtctggtgagaacagagaaaatacactgttttattctgaaattcccaa

SEQ ID NO: 362246 - DNA, 90 bp, Homo sapiens
cgcgaattggagaaaaagttcagtgggaagcatgtcgtctttatcgctcaggttcatcacaagacctatgaagatatagataaacgtgga

SEQ ID NO: 362247 - DNA, 100 bp, Homo sapiens
cgctgcacactgccctccgaagtcggggacgcgggctcggttctgcggggagtgtctccagccctgcctgcaggtgccatccccgctgtgcccactctgc

SEQ ID NO: 362248 - DNA, 75 bp, Homo sapiens
ataatggcctgcattttattggtctacaaagacagcatatgtccgtggttcagaccctgtattaaagcttttgga

SEQ ID NO: 362249 - DNA, 100 bp, Homo sapiens
ccgtgcccgaggggctcagcgccttcacccaagcgctgaaatactcttaattctaaggaaaacctggaagcacaatgggagatgacagtgagtggttgaa

SEQ ID NO: 362250 - DNA, 74 bp, Homo sapiens
actggcccagtgagagccttggatgtgaacattttccagattgaaaatggaagccctgactgacagggaacatg

SEQ ID NO: 362251 - DNA, 75 bp, Homo sapiens
taacgaactggtgatcgaattaggggaaaagaaacctcgtcggagagcagagcctgaaaaaggactgcgcggact

SEQ ID NO: 362252 - DNA, 82 bp, Homo sapiens
tgtgttctttcggaataatcattttagcaccatgaccaaatacaagtgtcccagaagcttttgttgacaattccagtttccg

SEQ ID NO: 362253 - DNA, 117 bp, Homo sapiens
gtgtggcctgtattactcctactacaagcagatgctgcaggctccaaccctcgtgcaagaattctcagaagccaccgctgaactgaccgtctcattcacaaacgaagtcttcacaac

SEQ ID NO: 362254 - DNA, 96 bp, Homo sapiens
ctgaacatgagcctcctcctctccttctacctgctggggttgcttgtcagtagcgggcaaggatacttttgtggaactctatgggaacaatgcagc

SEQ ID NO: 362255 - DNA, 51 bp, Homo sapiens
agagcgcgaatatcgtcatcgttagaaggaaaactaggtgtctgtgttcac

SEQ ID NO: 362256 - DNA, 50 bp, Homo sapiens
tgaagcagatgttgaacaacaaggaatcccagtcagaagttccagcctgc

SEQ ID NO: 362257 - DNA, 100 bp, Homo sapiens
agcaggaccagagtggaccagcacaccccaggagagaggactggggtcccaggagtaggaggagggttgccgagaaggagcccatcaacaaaatgtcact

SEQ ID NO: 362258 - DNA, 100 bp, Homo sapiens
gcggatggtctgggtggacctggagtgaacagagtatctgtcaggcaagagctgctgtgatggtttatgatgatgccaataagaagtgggtgccagctgg

SEQ ID NO: 362259 - DNA, 98 bp, Homo sapiens
cgtccatggagccatgcgtgtgctgacagataagaccatcatcatgtggaaactgaccagggatgagaccaactatggaattccacagcgtgctctgc

SEQ ID NO: 362260 - DNA, 80 bp, Homo sapiens
acaccaggacctggcctgaagacatttcctctcctcccctctggatttctcagagctctagaggacaaaatcccagtcct

SEQ ID NO: 362261 - DNA, 98 bp, Homo sapiens
ctcctccaagaccgtgctggtctttctcaacctcatcttctgggcaactttttcctgtacctgtgaggagcagtacgtgggtactttctgtgaagaat

SEQ ID NO: 362262 - DNA, 100 bp, Homo sapiens
ttcacagcacagttcctgggaaggtggagccaccagcctctccttggatctagtgaaaagccatttgatgtatgcggtcagagaagaagtggaggtcctc

SEQ ID NO: 362263 - DNA, 100 bp, Homo sapiens
cgaatctgcccacccctcctgtaacccagcctgtttcacttcttggaaaaaggcctgtgtcatatcaacacttatctaacagcatggcacaaaagagaaa

SEQ ID NO: 362264 - DNA, 83 bp, Homo sapiens
ctcccagctccaagtccccctgggtggagtccgaatacctggattacctttttgaaggagtgatacgcgccccctgaggcaca

SEQ ID NO: 362265 - DNA, 100 bp, Homo sapiens
cttctcagcgttcccctctggcgcctttgctgctcctctctctgcacgctgcttttctaacccaaactgtatgtcttgatgacactacagtaaagtttga

SEQ ID NO: 362266 - DNA, 100 bp, Homo sapiens
cagatattatcatagttgctgcagaaaaggaagaccagtgtctcatgcctgaagcctggaatgtggaccagggagtaattaccaaactcaaggaacaata

SEQ ID NO: 362267 - DNA, 96 bp, Homo sapiens
tgtgctaagggctattaccgcccttatggggttccagtggatgcccctgatggctgcatccctgtgttcaattacaaaaaaagatggaaaagactg

SEQ ID NO: 362268 - DNA, 101 bp, Homo sapiens
aagttctgtgcgcgctgcggaggccgcgtgtctctacggtcaaacaacgaaacatcccagttatctggactccctgagtttgttaaaatagtagaagttgg

SEQ ID NO: 362269 - DNA, 90 bp, Homo sapiens
aggcctctataaacaaggacaacattggctagagaaaaaagatgttgtggggagagccagggggtggccacagggcagccccatgagggc

SEQ ID NO: 362270 - DNA, 96 bp, Homo sapiens
tggcagcctaccagcactacatcctggccaaggtttccaatacttatctacaggaatcgccatgaccccagctctgagggaggcaacagcaaaggg

SEQ ID NO: 362271 - DNA, 100 bp, Homo sapiens
cgctgatctagtgcttctcgaaaaaaaccttcaggcggcccatgggttgctcagacaactgctctcccggatgaggatgatgacctgtgagaatgaagct

SEQ ID NO: 362272 - DNA, 124 bp, Homo sapiens
ctgctgcagccgccgcctccgacctgggcgctcagcccccggatcagcctgcctctgggccctggccaacgtcaacattgggagcctcatctgcaatgtaggggccggtggacctgctccagca

SEQ ID NO: 362273 - DNA, 100 bp, Homo sapiens
gcctgtgtccctgaccatggctccctgcagtaccctttaacggatggtgatcgagacatttttattgatggggttgttgctcgtaatagagccttaaatg

SEQ ID NO: 362274 - DNA, 99 bp, Homo sapiens
ccctcgtgcatggcaagcctctggacagctcctctcgtcatgagaactacaaacctttatgttcatgcggatgctcctaccaataaaacactggctggg

SEQ ID NO: 362275 - DNA, 98 bp, Homo sapiens
aaattgaagataaaatgaaagggttcagcttcaaagaagacactttgctgttgatagctgagccacctccgcctttagtgaaagttattgaagatttg

SEQ ID NO: 362276 - DNA, 87 bp, Homo sapiens
atcatgtctgcgagccaggattcccgtaaggtacctgccgtgggcagatctgagctttcttcttggacaccccatacccacagtcct

SEQ ID NO: 362277 - DNA, 114 bp, Homo sapiens
ctatttgaagaataccagtttcaagcagtattaagagtaaatgatatgagggaaggcaccattggagatatggctatcctgggtataacagaaagttttcaagtgaagcgacag

SEQ ID NO: 362278 - DNA, 74 bp, Homo sapiens
tttcagttcagtatgaagaaaaatttcagaaccatcacaaactggttatacattggctcttcaaagacgttcac

SEQ ID NO: 362279 - DNA, 75 bp, Homo sapiens
tgctgggtccgctgagcggggcgacccgagatgaggacactgaggcacaggaagtcaagaaacctgcacaaagcc

SEQ ID NO: 362280 - DNA, 90 bp, Homo sapiens
ctcctgaggagctgggattacagacagggtctcactttgttgcccaggctggagtgcaatggcacaatcatggctcactgcgccctccac

SEQ ID NO: 362281 - DNA, 100 bp, Homo sapiens
actactcttggaatcaaagataaatccaaatactgcatatcagaaacaacagatctgccttctggagactgcgccgtcctcccgggagagccagaaagag

SEQ ID NO: 362282 - DNA, 97 bp, Homo sapiens
ttaccctcggacgtagcccggcttgtattggattacctctctagtgacccttcagctgttaaccctggttggccatgacgatcagcttgatggacca

SEQ ID NO: 362283 - DNA, 87 bp, Homo sapiens
cggacccagggcagccgtgcccatttccccagggcatggaggtagacaagggcgtggtccccctggcagggacaaatggcgagacta

SEQ ID NO: 362284 - DNA, 100 bp, Homo sapiens
ggaagagggaggcgtggacgcggtgaggacgcttgagcggaagttagaagcaaaaatgatcaaggaggaaagcgactaccacgacctggagtcggtggtt

SEQ ID NO: 362285 - DNA, 100 bp, Homo sapiens
ggatggttcttctaaatgaagcagcaacttcgaaaggcgatgttggaaaaagacggaatccagatgcagaggtgtgccttcatgtactgaggcttgtcca

SEQ ID NO: 362286 - DNA, 90 bp, Homo sapiens
taagatgccaggaccccctgggaagcctagaaaaatgcaacggcagcctttaacagttgagcacatgtatgaagacatcagtcaggatca

SEQ ID NO: 362287 - DNA, 122 bp, Homo sapiens
gcagcccctcggagccagaggagaggcgcccccgccggccgccgcgccgcccggcagcctcggcaggatctttaccttatatagtaaatctctgcccctcgacctggcctgtcgtatctggg

SEQ ID NO: 362288 - DNA, 100 bp, Homo sapiens
ccttgccaggcccagtgagagcagcccggggggcttcacgctgtccgtcagggtctgctcttgataaaataacagcaagtttatgtgatcttaaatcaag

SEQ ID NO: 362289 - DNA, 100 bp, Homo sapiens
aagtagaaagtctcagcagacccttcctgagggccgagcaacagtgtagtggcgtattccacatagcaaacagcataaatgcagttccaactacaacgaa

SEQ ID NO: 362290 - DNA, 82 bp, Homo sapiens
agatcttcaacaagaggacccaggagaaattcgccctcaaaatgcctgaggaaacccagacccaagaccaaccgatggagga

SEQ ID NO: 362291 - DNA, 100 bp, Homo sapiens
acctgcgtgggcaagagtttccacacctatgacggacaagaatccttcaagaaacaggaaaaaactcctaaaacaccaaaaggacctagttctgtagaag

SEQ ID NO: 362292 - DNA, 100 bp, Homo sapiens
ctggataccactacatgcagcagcttcctgtggatatcttgatattgcagaattctggaggaagccgaccaccattgttgccaccgggaggaagatccac

SEQ ID NO: 362293 - DNA, 75 bp, Homo sapiens
gaacttgcagactctgcgcttgagatcttcaaacaagcatcagcgttttccaggattgccaaggacatggaacgc

SEQ ID NO: 362294 - DNA, 98 bp, Homo sapiens
tgctgggacatgaagcttcgggaacagtcgaaaaagtgggatcatcggtaaagcacctaaaaccagcttggacttaaagtatgatgttgaatatcctt

SEQ ID NO: 362295 - DNA, 90 bp, Homo sapiens
gcgcagccgagaagatgtctccgacgccgccgctcttcagtttgcccgaagcgcggacgcggtttacggaaactggccaagaagcggaaa

SEQ ID NO: 362296 - DNA, 50 bp, Homo sapiens
accaggtcttgtagcagcgcctcctcgcttggctgaagaggaaataaaaa

SEQ ID NO: 362297 - DNA, 75 bp, Homo sapiens
agacctacgtggcagctgtgaaaaaagccatttccgaaggtgtgatgaatgcagactctgctaccattttggctg

SEQ ID NO: 362298 - DNA, 75 bp, Homo sapiens
gtcgcgagtatctccgtttcctggatgtgaacgaattgaatgatctggcacgggaccctccagcacagtgttcag

SEQ ID NO: 362299 - DNA, 100 bp, Homo sapiens
gtcccttcgcgctcctgagccgccggcgcgccgggcgccccggatttgggaatggatgatgaaggagatgatgacccagttcctctaccaaatgtgaatg

SEQ ID NO: 362300 - DNA, 100 bp, Homo sapiens
gtcccggatctcagcggacacaggcaggagcgccccatcatttgacgttcccaccatcttcctgagcaagaaaccccgagaaaaggaggtggattctaag

SEQ ID NO: 362301 - DNA, 90 bp, Homo sapiens
ccggactgccgcaggaccgtggagaaggaggagaggcatggcggccttgaccagccagtgcatttcatttagatagaagaaattcaccac

SEQ ID NO: 362302 - DNA, 50 bp, Homo sapiens
ggaccgccccacctttcttgacaaggtggacccccaaaagtacaagggca

SEQ ID NO: 362303 - DNA, 99 bp, Homo sapiens
aacagaaacgattgtggaaacagctttgattgctaacccaaggaggaagctggtttgggccataagtgtcaccatgataggtgtcgttctctttgattt

SEQ ID NO: 362304 - DNA, 98 bp, Homo sapiens
gttcttcactgtctgggtatttggaggaggaacaacccccatgttgacttggcttcagatcagtgatcacatggaaaatgtgtatggctatttaatga

SEQ ID NO: 362305 - DNA, 98 bp, Homo sapiens
tttgttcaccgccaaccccttcgagcaagacgtgggggccacctacagatgctcctgcagtggacacagcagaacaagtctatatctcttccctggca

SEQ ID NO: 362306 - DNA, 96 bp, Homo sapiens
gagcaaaaaattgtggccatattcccttcttttttcctacccaaggacatgactatgtacttgcagaaaaacagacgttgagaaagaagggcctta

SEQ ID NO: 362307 - DNA, 100 bp, Homo sapiens
gtatagacctgcctccgcctcagtatcggctctgattggagaggctccggggagaccttggggacttctttgtcggctgcatcttcacggcagaactgag

SEQ ID NO: 362308 - DNA, 97 bp, Homo sapiens
ttatgcactttaccctttttaatattggccaatcatcaagacaagccagcagctcgctcagtacaagagggaaatcagcaagttctgtaaaatctgt

SEQ ID NO: 362309 - DNA, 100 bp, Homo sapiens
cggaggcctgcagcagcagaagcagcagaaaggccgcggcatgggcggcgctggccgaggtggagccgccaccaaaatgcagattttcgtgaaaaccctt

SEQ ID NO: 362310 - DNA, 100 bp, Homo sapiens
ggccgtcctcctcacggtcctcctggctgtgctcatatacacctgagttcttggaaaatactccatccagtctgaatatagaagatatagaagacctttt

SEQ ID NO: 362311 - DNA, 75 bp, Homo sapiens
tgaccagcttagcttctgtcctaaaggccccttcacagatgtagtcactacaaatcttaaattgcgaaatccatc

SEQ ID NO: 362312 - DNA, 51 bp, Homo sapiens
atcccaggaatacagctttgcattagctgggcgccgtgtacacagaaggtg

SEQ ID NO: 362313 - DNA, 100 bp, Homo sapiens
gacctagtgggcgttgcctttagacccaggtgaatggaagagaatccgaagaagaaaatctcaataaatctgaaataagtcaagtgtttgagattgcact

SEQ ID NO: 362314 - DNA, 100 bp, Homo sapiens
gctgtaattgctgaacttaaaaagcagtctaaacctgtgaccacccctgaagaaattgcacaggaggtttttacagaaatggaggagaagtatggggaag

SEQ ID NO: 362315 - DNA, 51 bp, Homo sapiens
tttcgtagcctgcattttccaggctgctctttggcgtaaattgcaatcgat

SEQ ID NO: 362316 - DNA, 83 bp, Homo sapiens
tcggggatagtgtcatcggttcggtaaagtttctgttctctggtgagaagccctaccactgcaactgggacggctgcggctgg

SEQ ID NO: 362317 - DNA, 101 bp, Homo sapiens
ggcaccaaggaggccaaagagaagaggagctgcactgactctgcagccaggacgaagtccaggaaggccagttgacattcgtgaaattaaggagatccgcc

SEQ ID NO: 362318 - DNA, 74 bp, Homo sapiens
attttgaagtacaccgtggtgacattgtatcattggtatttattcaggagattgagcatgctctgggtcttggc

SEQ ID NO: 362319 - DNA, 99 bp, Homo sapiens
tacgcatcaatgagttgccttccactatgcagaggaagactgatttccccattaaaaatgcaggcaatgtgaagtattcatccggccaaccaatgtttc

SEQ ID NO: 362320 - DNA, 75 bp, Homo sapiens
cagacagaaaaccttcctgcacaagtaaaagcaactgtattgcaacagttagaccattactgggacttccacccc

SEQ ID NO: 362321 - DNA, 51 bp, Homo sapiens
agcagagaccatggagcttcttggggtcgaactggaaaaattagagtgcag

SEQ ID NO: 362322 - DNA, 100 bp, Homo sapiens
ctcatggtgtggacaaggtcgtggcctgcacctcggtctgtgccgacaacaaccacgtgcggacatggtctgtgactcgcttccgcggcatgatttccac

SEQ ID NO: 362323 - DNA, 75 bp, Homo sapiens
gtgaaatgccccaagcttttctatttgatgtgatttatgaagcatatcagcagaaaacacgagatttttctccta

SEQ ID NO: 362324 - DNA, 100 bp, Homo sapiens
aggcgcggcggcaggacgggaaccacgcgagctgcagccaggatggggtgcatgaagtccaagttcctccaggtcggaggcaatacattctcaaaaactg

SEQ ID NO: 362325 - DNA, 51 bp, Homo sapiens
tcccaagtagctgggactgcagaatgcgttgatatcaatgttactccagat

SEQ ID NO: 362326 - DNA, 100 bp, Homo sapiens
ctgtacaaactacacagctcatgtcttgctctgttgcccaggctggagtgcagtggtgccatcatgccaacctcgacctcctggacttaagtgatcctcc

SEQ ID NO: 362327 - DNA, 100 bp, Homo sapiens
gacaagtccccagggaatgccacagcatcctccagcacctcaggtcgttccaggggtagaggaggcatgaaggatgaccgtcgggacagatactctgcgg

SEQ ID NO: 362328 - DNA, 82 bp, Homo sapiens
agcaacaaagagagaaacagcagcaacatttttgaaaaagggcactgcacttggctgtgattcatcagcatgaacccttcct

SEQ ID NO: 362329 - DNA, 98 bp, Homo sapiens
gagagaggtacctctccttttccctctccctttccctaagagaatcacattttggaagatgtgaacaaatgtgtcattgctctccaagagaaggatgt

SEQ ID NO: 362330 - DNA, 83 bp, Homo sapiens
cttcggcagtccacccaccgccgccgcctcccaggtcagaagttgagtagcaggggcctaggagggctcgaagccttcacagc

SEQ ID NO: 362331 - DNA, 100 bp, Homo sapiens
ctgcaccagttggcaatgcaacagtctcattttcccatgacgcatggcaacaccggattcagtggagcggcattgcccccgaatgtccagattatccctg

SEQ ID NO: 362332 - DNA, 80 bp, Homo sapiens
gttgttactgatgcagagatacagcaaaagagtctacataggagaagccccgatatccaagcaaaagaagagttatggaa

SEQ ID NO: 362333 - DNA, 95 bp, Homo sapiens
cccggaggaggttcgaagctgagtatgtgacagacccaagaaactcgagagatcttacatttccactataccacatggcctgactttggagtccc

SEQ ID NO: 362334 - DNA, 100 bp, Homo sapiens
cgtgctgatggacaccgtctccatgcccgagttcatggccaacctcaggctcaggtaacaaacctgaatttggcaactggcatcataaacagaagcagtg

SEQ ID NO: 362335 - DNA, 98 bp, Homo sapiens
gccgcgctcagcgacaaacaacgattattggagccggaattggtggcacttcagcagcctattacctgcggcagaaatttgggaaagatgtgaagata

SEQ ID NO: 362336 - DNA, 83 bp, Homo sapiens
tgaatggacacaggtgtcagcagggccacctggtaaaggtatggagacatctttccaggaacagcgtgaggaggacagaagca

SEQ ID NO: 362337 - DNA, 100 bp, Homo sapiens
ccgactgcttttggaataaaaagattcccaggatgtgagcaacacgggaccgaaaccaccaagttttatatgacagagataattattcagtcatctgaga

SEQ ID NO: 362338 - DNA, 75 bp, Homo sapiens
cagtgccattcacctcattgatccaaacaccctacaaggtgtggcacttgctgaaggatttcatgcaagattaca

SEQ ID NO: 362339 - DNA, 101 bp, Homo sapiens
agatggcagccagtcagtggtggaggtcgctgaaaattttgttccccctctgttggatgcagttctcattgattatcagagaaatgtcccagctgctagag

SEQ ID NO: 362340 - DNA, 74 bp, Homo sapiens
atgcagatgcccctcctccaccagaggactgggaggagcatgtcaacaggtcacagggattatggacccagaac

SEQ ID NO: 362341 - DNA, 83 bp, Homo sapiens
gggttacgtcctcgtgggattcgttggcggtggctgaggtcacacagcggcagtgataaagagcacagggatgtggagagatc

SEQ ID NO: 362342 - DNA, 98 bp, Homo sapiens
acaatgtggagaaagacattacaccatctgaattgcctgcaaacccagaaaaggcaacagatggctccctgcaaagtgaggattggacgttgaatatg

SEQ ID NO: 362343 - DNA, 75 bp, Homo sapiens
gaatatattcggcaaggaagcctctctgctaaaccccctcttgtagattttcagtggaaactgggtatggctgtg

SEQ ID NO: 362344 - DNA, 98 bp, Homo sapiens
aagaaaatggactccctggctgctggagagttgaatgccagccaccagccatgggtgtatgtggaatttgatgatcttgaatgggataaacgagagtg

SEQ ID NO: 362345 - DNA, 50 bp, Homo sapiens
gggtttagcggcagcctcttcgaacactcgtgaaactgctcaggccatca

SEQ ID NO: 362346 - DNA, 51 bp, Homo sapiens
ctgaagagggaagacacgcggaaacagggctccggtacaagtcatccacag

SEQ ID NO: 362347 - DNA, 101 bp, Homo sapiens
ggtagagcccggtactcacccagcaatcattgttgcctgacaaaagtcacagagaaggctcagttcttccttcctatagtttcactcttgttgcccaggct

SEQ ID NO: 362348 - DNA, 100 bp, Homo sapiens
gaggatagctaactgtatcgtgcacagcactgacaagggccccaacagtgcattagtgcagcagcttatcaaaggtgcaaaatgagttgataacaaccag

SEQ ID NO: 362349 - DNA, 100 bp, Homo sapiens
ttcaggctcatgtttctgacttggaatatcgaattcgtcagcaaacagacatttacaaacagatacgtgctaataagcatcagcgagagctttctaactg

SEQ ID NO: 362350 - DNA, 100 bp, Homo sapiens
gggaccacttaatagtgagtcttccaaccagagcttgtgtagcgtcagatccttgagtgataaaggagtagagatcatgtttcactccttcggcaacaag

SEQ ID NO: 362351 - DNA, 83 bp, Homo sapiens
cgtcggcttcttggtgccttggttcatccctaagggtcctaaccggggggagagctggtgacggcctccaaggccatcattga

SEQ ID NO: 362352 - DNA, 90 bp, Homo sapiens
agcgctctcatgaagcaaccgcccattcagtctacggctggggccgtcccagttcgcaatgagaaagcatcaattcctgaagattgccaa

SEQ ID NO: 362353 - DNA, 100 bp, Homo sapiens
agaccctccgaaggcctggcggccagcgattgctgatctgtgcatggagccaaatttagaaagtatgtgggccattctgcacatgtcacaaatgtccgct

SEQ ID NO: 362354 - DNA, 100 bp, Homo sapiens
gaagaccacaataaaagagacctctacttagctcagcaattcttaccttggtattacttatgaccatgtcgaattaaatgtatacttgaatggaaaaaac

SEQ ID NO: 362355 - DNA, 100 bp, Homo sapiens
cgctgaccaagcaggacaccatgctgaaggccatgttcagcgggcgcatggaagtgctcaccgacagtgaaggaggagagggcagtgagagataggaatc

SEQ ID NO: 362356 - DNA, 82 bp, Homo sapiens
agacccaggagaagccgcccaaagaactggctaactatatgtcagaaagcatcagcttttctcgatggacccattcatctaa

SEQ ID NO: 362357 - DNA, 82 bp, Homo sapiens
ctggagatgatgacatggataggtatatgaatgacctaaaggtacaaataaagacggagagagaacagtgccaactgggagc

SEQ ID NO: 362358 - DNA, 75 bp, Homo sapiens
ggctcagcggccgcgaggccgcagctcccggtgtggacactgccagcggctgcagccgacttggaatgacctggg

SEQ ID NO: 362359 - DNA, 50 bp, Homo sapiens
cctcaacctgttttagcacagatatgatttgggccaggcttagtcatcta

SEQ ID NO: 362360 - DNA, 96 bp, Homo sapiens
agacgggctcagggaagacatacaccatgggggaggccagtgtgggctgggtggagaaggagacatactactgaccccattggaagaagaaccagg

SEQ ID NO: 362361 - DNA, 100 bp, Homo sapiens
gcctaaagtctgagagagggaagtcgcctctgtgctcgtgagtgcatggggtataagccacacacagcaccttgacttgcatgagcagggagttccagtg

SEQ ID NO: 362362 - DNA, 98 bp, Homo sapiens
caggatttgctgatattcagggacacccgttcttccgaaatgttgattgggatatgatggagcagttcatccagtaccttgacgagccaacagtcaac

SEQ ID NO: 362363 - DNA, 98 bp, Homo sapiens
ctacgatatcattgctgaagacattcaaggaaccgtctttttcgctggtgagcccattgcagatgcaaaggctcctgagaagcgggcctcaccatcca

SEQ ID NO: 362364 - DNA, 98 bp, Homo sapiens
gagtccagataacactgactgtcagagttggttcatgtgatcctggttaatggaacataagtgagattttatgggtgacagggagagagatcaggctt

SEQ ID NO: 362365 - DNA, 75 bp, Homo sapiens
attcccaaatgccccaaggatgaagaacggagacggaattgtcttagaagaaagaaggcaagccaccattttacc

SEQ ID NO: 362366 - DNA, 100 bp, Homo sapiens
aaagcggaaaagccaggattcggtgctggaccctgcagagcgtgctgtggtcagagtcgctgccatgcctttcttggacatccagaaaaggttcggcctt

SEQ ID NO: 362367 - DNA, 75 bp, Homo sapiens
ctcagcctcccgagcagctgggattacaggtgcctgctaccacacccggccccagttgtgacagcgttgaggaag

SEQ ID NO: 362368 - DNA, 99 bp, Homo sapiens
tatgcattggctggggagacccatctggactaccaaggagaagctatagactacttctactccaccaggaaggaaggcgcaatggcgaggaagttatct

SEQ ID NO: 362369 - DNA, 83 bp, Homo sapiens
ggcctgcagcgggagctggacggcgagcgcgagcggcgcgagaaatgagacggtttaagcggaagcatcttactgccattgac

SEQ ID NO: 362370 - DNA, 87 bp, Homo sapiens
aggaccactagttggaccccatcctcgtgctggaggaacaggtatgttatgcataaaagtggataatttacatgataaatgaaaatg

SEQ ID NO: 362371 - DNA, 75 bp, Homo sapiens
cagaagaccccctacatcgtgctcagcggcagcggcaagagcatgaacgcacatttgtccgactccataaccaga

SEQ ID NO: 362372 - DNA, 100 bp, Homo sapiens
aaacattttaccaattttgcattgtttgtttgaaattgcattgacgactgagatgagcatcaggattttatggatgagcaaaaacgactaaagaagcttc

SEQ ID NO: 362373 - DNA, 101 bp, Homo sapiens
ccagccccaggcatggtctacgattagtacgaaaaagagctggctttatgtgctggggcagaagagatccgatagctatgttctgctggagcattctgtga

SEQ ID NO: 362374 - DNA, 126 bp, Homo sapiens
ggagatccacctatgatctcaggtcctcagaccaaccagcccaaggaacatcttgccaatttcaaatcgggtttttcttcccccagtccctcagctgctgctgctgctcaggaggtcagatctgcc

SEQ ID NO: 362375 - DNA, 95 bp, Homo sapiens
ccattgacgccatgtcgggttattcgagtgaccgagaccgcggccgggaccgagggtgaaagaaaatggcccgaaccaagcagactgctcgtaag

SEQ ID NO: 362376 - DNA, 50 bp, Homo sapiens
ggagaatctgggcgtcgctctagaggtgctgctgatgtagagaaggtgga

SEQ ID NO: 362377 - DNA, 83 bp, Homo sapiens
aggagcccccgacttccctgtggaatattctgagagaccctgtgaaggtaaaaatctctacaccaatgaatatgtagcaatca

SEQ ID NO: 362378 - DNA, 98 bp, Homo sapiens
gacgtgtcccctagtccctacagcagcagcagctggcgccgctctcgcagtccctacagccctgtgctcagaggttgaaggctgcattgactcaccac

SEQ ID NO: 362379 - DNA, 75 bp, Homo sapiens
accgccctcaccacccctatccagacggctgcccttcaagtaccaaaggccaatgatgaggccaatcagagtgat

SEQ ID NO: 362380 - DNA, 88 bp, Homo sapiens
gtgttttacattgaagctgcatataaaactgctgctaccaagcagtttctcgaagagattaacaagtggacagttcagtacaatgttt

SEQ ID NO: 362381 - DNA, 100 bp, Homo sapiens
gcggcgagccggagcgcggagcccggctcccgcaccatggaggaggacgacagctacgagaacaccttctgcagtggggaccatgtgtcctggcacagcc

SEQ ID NO: 362382 - DNA, 100 bp, Homo sapiens
ctcacagcctgtcagccttgctgatcgacttattgattcctcgaggtctgaacaagaaccactgacgcagaacgtgaaaactagaagcgttcattagcga

SEQ ID NO: 362383 - DNA, 74 bp, Homo sapiens
aaccagaacccaagcgtgatcctgaaccggagcccgagcctgctgcaggtggtgttcccactgatgaagagcag

SEQ ID NO: 362384 - DNA, 97 bp, Homo sapiens
tgaagccttgcggcagtacagcccagtattggtaaaggttttcaaggtgtcatgaaaagatggggatttaaaggccagcctgctacgcatggtcaaa

SEQ ID NO: 362385 - DNA, 100 bp, Homo sapiens
gaggaaagtggcctccggggaagccagagctgactgaagaccgcaacagatgaccaaggaagtttgggattatgttttcttcaaggaggctccatttcct

SEQ ID NO: 362386 - DNA, 75 bp, Homo sapiens
gctaaccacgctggtggatgccgacgccgaggccttcaccgcctacctgtaagactttgaccccgacgcaggctt

SEQ ID NO: 362387 - DNA, 75 bp, Homo sapiens
cctggaaaggccatcggctttgtcaaggatgtagccaacatcacaatcgtgcaaacggaggttcttcagaagagg

SEQ ID NO: 362388 - DNA, 82 bp, Homo sapiens
tggtggaggcgatagacgagtatcagatactgattcttgctattccaaatcctcttccacgttgacagcccttcagatattt

SEQ ID NO: 362389 - DNA, 100 bp, Homo sapiens
gctggcgctctggctgtgctgcgcgacccccgcgcatggttagagcagccagcgggtacagaatggattttggaagagggagtcaccactggacctccaa

SEQ ID NO: 362390 - DNA, 83 bp, Homo sapiens
gatgagtatgcggaggacagctctgatgaggaggactggagactgatgcatgagggggctacggaggcgcaggagcggtggtg

SEQ ID NO: 362391 - DNA, 95 bp, Homo sapiens
cagtgttcaccatcctggccccggaagagtgcctggaagagctgggatgtctggttgagtcctatggcatgaatgtttgccaaccaaccccagga

SEQ ID NO: 362392 - DNA, 75 bp, Homo sapiens
caagctcgagttaaagttggatgtgctggaacagaattctgaaggtggactctatgtatgcatgaatacattttt

SEQ ID NO: 362393 - DNA, 148 bp, Homo sapiens
acagacggagtcctgttccaccttcagagcgtcacggcgtacgccctcatggggaaaatctccccggtgactttcaggtctctaattaacagaagatggcaaagcccagccacagcagctatgtccttcagcagctaaacaaccaaag

SEQ ID NO: 362394 - DNA, 75 bp, Homo sapiens
agttcacttattgcctatgctgtattccataatatacagaaatctccagaggctgcctttaatattggttgggaa

SEQ ID NO: 362395 - DNA, 100 bp, Homo sapiens
ccctcaagtcctggctggccaagttactggagccgatacagagtctcgttctgtcacccagcctggtgtgcagtggttcaagccattctcctgcctcagc

SEQ ID NO: 362396 - DNA, 100 bp, Homo sapiens
tcagcctctggttcagactgcagtaaccagtcacacagcggcagtgataaagagcacagggatgtggagagatctcaagaacaagaatctgaagcacaaa

SEQ ID NO: 362397 - DNA, 82 bp, Homo sapiens
tctggaccaaatcaaaattccttgggatgtcaattggggtgcacaacatagggcaggctctggagcctcccagctcaattgc

SEQ ID NO: 362398 - DNA, 51 bp, Homo sapiens
gcttcatgttcctggtgtttgacctggtctccgtctctccaccgggggctt

SEQ ID NO: 362399 - DNA, 88 bp, Homo sapiens
accctcatttctggggtcaacagtccagatggggtggaagaagctgggcaggtgttcctgttaatgaaaaaggattatcgaatctccc

SEQ ID NO: 362400 - DNA, 83 bp, Homo sapiens
gtcagccttcccagtagctgggaccacagctgaataccactagaaacatacctgtaaccagagacagctgattatagctttct

SEQ ID NO: 362401 - DNA, 98 bp, Homo sapiens
gcgagggtgcgatggcgcggagcccgggacgcgcgtacgccctgctgcttctcctggagtacaagcgcaagctagccagagtttccctggtgcgcaaa

SEQ ID NO: 362402 - DNA, 100 bp, Homo sapiens
ccggaacgatgccggccgtgagcctcccgcccaaggagaatgcgctcttcaagcggatcttgcaccctggaggggtattatgtggatgatgccttgcagg

SEQ ID NO: 362403 - DNA, 98 bp, Homo sapiens
gcttgaaatgctacatttccaaggtgatggcatcagctgagaagggaaggaagcccatgtgaggacactgaagaaggagtgagcagacaataagaagc

SEQ ID NO: 362404 - DNA, 50 bp, Homo sapiens
gatgtgcaacaaagtgcgatggagccaccttcctcgtcacgtttggaaac

SEQ ID NO: 362405 - DNA, 100 bp, Homo sapiens
cgaccacaagatcaaccacctgggctgcctggtcttcagcaggtgcagagcattgtagaccaaggagccatggataggagaagtatgggtgaaacagaaa

SEQ ID NO: 362406 - DNA, 100 bp, Homo sapiens
ctggcagctgcaggcccctgacgttctcttctacccactgagaccagagttagtggaatccacatatctcctctaccagaaaacctcggatcaattctca

SEQ ID NO: 362407 - DNA, 75 bp, Homo sapiens
gaggaaaacaacttcgagggcagatgtatccaaagtgtgtacatcagtaagatcataagcagtgatcgagatctc

SEQ ID NO: 362408 - DNA, 100 bp, Homo sapiens
aactatactaaaacacctacagaatctttttgtaccaagtagccggatcgagctgggagatgtgacaccacacaatattaaacagttgaaaagattgaat

SEQ ID NO: 362409 - DNA, 51 bp, Homo sapiens
catggcatctaagaaatttgctgttaaactgcatccagatctcattatgca

SEQ ID NO: 362410 - DNA, 50 bp, Homo sapiens
ccagaataatgaaactcagcaattggaaaatggttctcctgaagaacatg

SEQ ID NO: 362411 - DNA, 100 bp, Homo sapiens
cgcaaggtcaacctgggagtgggagacatccaatgacacctttgaaattcccctaatgttgactggaaatatagtgttaaggaagaggctcaactatgaa

SEQ ID NO: 362412 - DNA, 82 bp, Homo sapiens
agccaaccatgctcaacttcggtgcctctctccagcagactgcgctcctgtccaaatatgacccccagaaggaggcagagct

SEQ ID NO: 362413 - DNA, 100 bp, Homo sapiens
gttttgtgcagattgccagtctaaaggttgtctgcattcaaaagagcattctattaaagctaccttaatttggcgcttatttttcttaatcatgtttctg

SEQ ID NO: 362414 - DNA, 75 bp, Homo sapiens
ggaacctcaagaaggaggtcagccgggtgctgtgcaagcggtgcgactctggaaaatcccaagtatgaactgatc

SEQ ID NO: 362415 - DNA, 90 bp, Homo sapiens
gccgagggggcatcatgaagcgggctggcggcgctgccgctcccgggcggccgcgggcgggctcgcgatgcctctacacaagtatcccgt

SEQ ID NO: 362416 - DNA, 98 bp, Homo sapiens
cccctacccgcttctcgtagtcctgggagcacagcagaagtgtgttacagttcgagtgcctcaaacaaccacatatgttgtaaacaatggactaaccc

SEQ ID NO: 362417 - DNA, 75 bp, Homo sapiens
gcagctgaaagcgtgaactgtcatcaacaaagagagcattgtggatgtagaaggtgttgtgagaaaagtgaatca

SEQ ID NO: 362418 - DNA, 75 bp, Homo sapiens
ctgtcaagcgagaaagaacatcctctttaacccagttcccaccctcacagtcagaagctggcagggcggagatgc

SEQ ID NO: 362419 - DNA, 75 bp, Homo sapiens
taatcctgaggacttcatccggtcaccatctacctattcttcaaatggccgaatacatcaagcaatggtaacatc

SEQ ID NO: 362420 - DNA, 49 bp, Homo sapiens
caccattgtactcttacacaacagcttggacagcttttagcagctacat

SEQ ID NO: 362421 - DNA, 100 bp, Homo sapiens
ttgttcaagactgggcttccaccgagcaggatgtacagttacccagcacgtgtacctcctcctcctcctattgctcgggctgtagtgccctcgaaacgtc

SEQ ID NO: 362422 - DNA, 100 bp, Homo sapiens
ccgttctgggattcagtttggaagctggggttccttccagctccctggattgctgaactttggcgagtttaaggggaacgcccttttgcttgtgactggc

SEQ ID NO: 362423 - DNA, 95 bp, Homo sapiens
tcctcatgtatacttacttatctggccaagaattgttacctgtggatcagaaggcagtcctggtgacagcttcagtatcagacacagcacagcag

SEQ ID NO: 362424 - DNA, 90 bp, Homo sapiens
ccctaatgtagcccggaccaagaacaacctggtatgacaacgaatttggctacagcaacagggtggtggacctcatggcccacatggcct

SEQ ID NO: 362425 - DNA, 78 bp, Homo sapiens
aagaattcaaggccagaggctaatgaagaattcagtaattggatcataacgagacttctgcggattgcagcaactccc

SEQ ID NO: 362426 - DNA, 100 bp, Homo sapiens
gaagtcggggggcacgcagctgaagctcatcatgaccttccagaattacgggcaagcgctgttcaaacccatgaaatgatatcatcaagttgaatcgaaa

SEQ ID NO: 362427 - DNA, 75 bp, Homo sapiens
ggagcgaggaaaggtgtgctgtgcctgaggccagattactctcgtggctttggtggccggtacggggtggagaag

SEQ ID NO: 362428 - DNA, 75 bp, Homo sapiens
gcggatcctagtaatctctttgtggtttcttctgatttctgccattgggggtctgcggaagagggagctgctgaa

SEQ ID NO: 362429 - DNA, 100 bp, Homo sapiens
cttgtcctaacgagaggccactcatgcagactgagcttcatcagcttgttcctgaggctgagccggagagccacgggcatctcgggtgccatcttcagat

SEQ ID NO: 362430 - DNA, 80 bp, Homo sapiens
cctctccttgctgcagccatggattaccggtattgtaagaacaagccgtacccaaagtctcgcttctgccgaggtgtccc

SEQ ID NO: 362431 - DNA, 51 bp, Homo sapiens
tcaaaaatagtgatagctttgataacattgctgtatatgatttaggtggtg

SEQ ID NO: 362432 - DNA, 100 bp, Homo sapiens
gttctccagcctttctggagggatgcagagcctttccttaggacaaacaaggattaagttgtcatcattctgggaagaaaaaaaaaacattaatgaagag

SEQ ID NO: 362433 - DNA, 106 bp, Homo sapiens
cgtgatctagtgtgcacttcccccaaagatgaagaagctttggagtttaacccttctgccaatccagaggcaagcacaatattccagaggaactctcaaacagatg

SEQ ID NO: 362434 - DNA, 142 bp, Homo sapiens
tgctgcggagaattggagatggggaccgccctggacatcaagattaaaagagcgaataaagtttatcacgccggggtactccaaagattcaggtttactcacgtcatccagcagagaatggaaagtcaaatttcctgaattg

SEQ ID NO: 362435 - DNA, 90 bp, Homo sapiens
atgaagagtgtccggacccggctgaggacacccatgaaccttcccaaactaatggcagcattagccgctgttgggcctcctaatcctcgg

SEQ ID NO: 362436 - DNA, 75 bp, Homo sapiens
atgtcaagtagagatttgctcaatgcattgaagtcagtcattaatgaccctgtgatgcccagggagtggaagaac

SEQ ID NO: 362437 - DNA, 95 bp, Homo sapiens
attcagccagcacactcctcgcgagcaaggtattgttgcagcatctggcagtgagactgaggatgaggacagcatggacattcccttggaccttt

SEQ ID NO: 362438 - DNA, 75 bp, Homo sapiens
tgctatcgacaacacggcttttatggacgagttcttttctgaggagtgtgaggaagaggctgtctgtgtcattat

SEQ ID NO: 362439 - DNA, 75 bp, Homo sapiens
agaggctcttcctcctcctcccgcgacgtggcccgaacctgtaacttgatcttgattgttctggatgtcctgaaa

SEQ ID NO: 362440 - DNA, 100 bp, Homo sapiens
atgccggccgtgagcctcccgcccaaggagaatgcgctcttcaagcggatcttgaaattcgagctcaactggtagaacaacaaaaatgcctggagcagca

SEQ ID NO: 362441 - DNA, 82 bp, Homo sapiens
tctcgggagaagcagcgcctgttcccggggcagatccaggttcaggtgcgcgcggagccatggttatcatgtcggagttcag

SEQ ID NO: 362442 - DNA, 74 bp, Homo sapiens
aggaaacatggcggcggcgggtgttgtgagcgggaagagggagacgtggtgggcggtccttcctgtgacacgac

SEQ ID NO: 362443 - DNA, 74 bp, Homo sapiens
gaaccggtacctggatggcatgcatgaacgtgcagggtgattatgagccaactgatgccaccgggttcatcaac

SEQ ID NO: 362444 - DNA, 75 bp, Homo sapiens
gaaaaaaccaaaattatcgccaagattcagcaacttgaagaagcaaacagcatgctaaccaaagatattgaaata

SEQ ID NO: 362445 - DNA, 100 bp, Homo sapiens
gtctctcttcaccctgccgtcatgtctaagtcagagtttaagtgctgtggggctgctaactacacagattgggagaaaatcccttccatgtcgaagaacc

SEQ ID NO: 362446 - DNA, 100 bp, Homo sapiens
cgacggcaaaggtgtcgtggtggtcattaagcggagatccggctgaccccgcactacatctacccaccagccatcgtgcagcccagcgtggtgatcccag

SEQ ID NO: 362447 - DNA, 90 bp, Homo sapiens
ctacccgggatacggaggagggaattcaattcgccacaatctctctctgaatcgttatttcatcaaagtgccgcgttcccaggaagaacc

SEQ ID NO: 362448 - DNA, 75 bp, Homo sapiens
aggacctgggcagagactccaagacaagctcagccgaggtcaccatccaggtacagcaacatctttcatgtcttc

SEQ ID NO: 362449 - DNA, 75 bp, Homo sapiens
agccagtgctaacaggccagcggttcaaaactcggaaaagggggtatttctcaagctgccagatacgtttaccaa

SEQ ID NO: 362450 - DNA, 97 bp, Homo sapiens
ctgccgcaccaggctcatcctgtccatcgtgtgcctgatgatcacgcagctggctggcttcagtggaccacatcaaagctaagccagaagatttatc

SEQ ID NO: 362451 - DNA, 74 bp, Homo sapiens
caccgggacctcctggaagccaaaaatgatcccagctctcctgttggcttcgtgcttggggtagatcttcttca

SEQ ID NO: 362452 - DNA, 75 bp, Homo sapiens
tttcatgagcacaggcatcagtcaggcagatgtttgtcgactggaatggatggtgaaaggcttttctaaccgtgc

SEQ ID NO: 362453 - DNA, 98 bp, Homo sapiens
ccgggctggtcctgctgcgagccggcggcccggagtggggcggcgggtgaaaggaaagcaagccaggatggatatttacgacactcaaaccttggggg

SEQ ID NO: 362454 - DNA, 82 bp, Homo sapiens
attcagtttgccttaacaggaatgagagggcatatcgatgcatttacttcaaaactttttctactggaagaaattacctcag

SEQ ID NO: 362455 - DNA, 75 bp, Homo sapiens
agcactatccacacgacaggcctacactctattcaaacaggtgatgggcagaatctgtttacgaaagacgtgaca

SEQ ID NO: 362456 - DNA, 82 bp, Homo sapiens
tgaaggcgaacgcggtctgcaagctgacgtatttacgagaactggtcagcatgtgcatctgccctgacccccaccagagacc

SEQ ID NO: 362457 - DNA, 100 bp, Homo sapiens
catattgacgcaatcagaaaatcaagtaaaggaacccaacagagatctcttctgttctccactgctaggtgtcttctgctgtgggccatcaccactgacc

SEQ ID NO: 362458 - DNA, 100 bp, Homo sapiens
ccgagggctaccacgttctgcgggctggaggctctcaggtcatttttaccaacccattggagatagtgaagattcgtctgcaagtagctggagagatcac

SEQ ID NO: 362459 - DNA, 74 bp, Homo sapiens
agagtgctgttttagagctggcagcagcatctcagcccaagagaaggaaaatgtttataggaggccttagctgg

SEQ ID NO: 362460 - DNA, 75 bp, Homo sapiens
ttcctgtggtctctgcacctcctttctgtgcgtatagcagcaaaattcatcattcatgcccctcctggagaattt

SEQ ID NO: 362461 - DNA, 98 bp, Homo sapiens
tgaacggcagccacctgggctccctgagtgagtgagatcattggccgagacctgagtggcttccctgcacctcctggagaagagcctcctgcctgaac

SEQ ID NO: 362462 - DNA, 117 bp, Homo sapiens
aagcagttgctgttcgaaagcatcttgagaggaacagaaagtacttcctcgcgtattgctaaaggaggagttgaccacaccaaaatgagtctacatggtgctagtgggggacatgag

SEQ ID NO: 362463 - DNA, 74 bp, Homo sapiens
ctgcagctgcagcctgccagctgttcaagtttggatttaggtggcgagtagaaaaagaagtaatttcaggaaaa

SEQ ID NO: 362464 - DNA, 75 bp, Homo sapiens
cctgaagagggaagacacgcggaaacagggctgctaaggaagcaaaaaaggctaagcaagcatctaaaaagactg

SEQ ID NO: 362465 - DNA, 82 bp, Homo sapiens
cttgccttgagtcagtgcgccgctctccagcccgcttgaacgacctgcctagagctggaacgttacctccagagcgagccct

SEQ ID NO: 362466 - DNA, 75 bp, Homo sapiens
ggaagctgaaatactgaaagaaattcgagaagctgcaaatgccagagcaattatgtttgcctctccacattttag

SEQ ID NO: 362467 - DNA, 82 bp, Homo sapiens
agggcctgcagcgggagctggacggcgagcgcgagcggcgcgagaaacccaaaatggagttaatcctgactgggagaagaaa

SEQ ID NO: 362468 - DNA, 50 bp, Homo sapiens
ggttaaaaggaatgacttctctccattgtgaaacaggatttaaagatggg

SEQ ID NO: 362469 - DNA, 75 bp, Homo sapiens
cccagagccggcatgaactctcccaacgagtcggcaatctgcagagcgctgtgtaagcacattgcttgatctaat

SEQ ID NO: 362470 - DNA, 82 bp, Homo sapiens
cggcagggcaggcagctccaggagggtcgcgtggggcaggcagtggcgctgcgggccaaggccttcggcttcaacgtgctct

SEQ ID NO: 362471 - DNA, 82 bp, Homo sapiens
gaggagatgcttcagagagaggaagccgaaaacaccctgcaatctttcagacaggtactgatgctttgggttggaaaaaatt

SEQ ID NO: 362472 - DNA, 100 bp, Homo sapiens
aggagcgcttcgtggctggctccctggctggtgccacagcccaaaccatcatttaccctatggaggaatggaagttggatacactttgtgacttgtacga

SEQ ID NO: 362473 - DNA, 100 bp, Homo sapiens
gcccgagccggagcgccagctcagcgtgcccatcccggggggcagcaacggcgacatccagcaagcatgttggaacaggattccaggagaatgaacccta

SEQ ID NO: 362474 - DNA, 75 bp, Homo sapiens
gaagcggcagcagtcccttgggggcttctttaaaggcctgactttataacaaagatgccgtcattgaatttctct

SEQ ID NO: 362475 - DNA, 74 bp, Homo sapiens
aaccaggtggccaggttcaacgaccttcgcttcgtgggccgcagtgggcgagagctcctccaagttccccctga

SEQ ID NO: 362476 - DNA, 100 bp, Homo sapiens
gagctgtggccctcagaatttaaacttaaggaaagagtgggaaagtgagggatgtatcaggaatgccagctctgtgctctccaatttcccagggaggggg

SEQ ID NO: 362477 - DNA, 100 bp, Homo sapiens
cacgccaataactcagtcactggctgcaacaggaccacagtcaagacgatcatagtcactggtgatcgagaaaaacttgagtggctggtggtacattcag

SEQ ID NO: 362478 - DNA, 74 bp, Homo sapiens
ctggagagcctgcaggacggcgcggcagagtccccgtacgcctacagtaacggagccaaaaacctgtatatcat

SEQ ID NO: 362479 - DNA, 75 bp, Homo sapiens
cagcagggtggagatcgtggctgccatgcgccggatacgggacttgatagacgacctgaagtcagaactgagtgg

SEQ ID NO: 362480 - DNA, 75 bp, Homo sapiens
cagccacagccttataaaagggaagaatcccctactttgaaactagtgctgccaatgggacaaacataagccaag

SEQ ID NO: 362481 - DNA, 75 bp, Homo sapiens
gacagaagaggtgctctgaaggcacagacttggaagcaccaggccaaacgtaccaagaaagtcgggatcgtcggt

SEQ ID NO: 362482 - DNA, 100 bp, Homo sapiens
ctttggttttttcgtgtggaagatgcaatgtctcaggctgtgcagacaaacggaactcaaccattaagcaaaacatgggaactcagtttatatgagttac

SEQ ID NO: 362483 - DNA, 98 bp, Homo sapiens
cagggccagtccaacactgataagattgaatgccaagcagaaaattacctaaatgcactctttcgaaagaaagtttaagatttgttagtggaagtcga

SEQ ID NO: 362484 - DNA, 100 bp, Homo sapiens
ccctgatggcctcagaggaggagaccctacgtccgctccaagggccggaagttcgagcgtgccagaggccgacgggccagccgaggctacaaaaactaac

SEQ ID NO: 362485 - DNA, 100 bp, Homo sapiens
cggccccttggcactcgcctcggatttgggggcttcctcactcgtggctttccgaaggctgctgaggaactgacaccattgattttggcaactcagaagc

SEQ ID NO: 362486 - DNA, 100 bp, Homo sapiens
gtcagaactactggacaagtgtgcacaattgatccagtcctgatggtcagccaacactgcttcccccagaacatgtacaggagttaaatttgaggtctac

SEQ ID NO: 362487 - DNA, 80 bp, Homo sapiens
tctgtgaaggagctaagagacatgggaatcactctgcatctgactatttaagaaacaactgaggcatcagaccaactttc

SEQ ID NO: 362488 - DNA, 75 bp, Homo sapiens
cccgcttcaacgaagaccgagactttcagcctggagatgcccaaagatgagctgcccaaccataactgcattaag

SEQ ID NO: 362489 - DNA, 100 bp, Homo sapiens
cggaaaccagtggccacagcatctttgtctagccccagtgcagtggtcctcgcggaggtgatccaggcgttctccgccccggagaatgcagtgcgcatgg

SEQ ID NO: 362490 - DNA, 89 bp, Homo sapiens
cgttggttcgtgctggactacaatgcaggactgctctcctactacacgagtaaccagagagcacagagaaatgctggtgaaactggcca

SEQ ID NO: 362491 - DNA, 50 bp, Homo sapiens
actccgcccagaagacaacatcaggctgatggggtcttcttatgttgccc

SEQ ID NO: 362492 - DNA, 50 bp, Homo sapiens
cttctatatctacaagggggtccgcaaggatgtacagttacccagcacgt

SEQ ID NO: 362493 - DNA, 50 bp, Homo sapiens
caggcatcatccgctatgcaattgggatcctacgggacaccttctccgag

SEQ ID NO: 362494 - DNA, 80 bp, Homo sapiens
cgcagaaaccccgttgacaaggcactgctttttcatgacggctgaccccgcactacatctacccaccagccatcgtgcag

SEQ ID NO: 362495 - DNA, 90 bp, Homo sapiens
gtaggagtgaatataaaaggacttcatctcctcaacatggaaactaagggaaaggaaaacctcttcagcgcaaggtgaaaccacctaaga

SEQ ID NO: 362496 - DNA, 83 bp, Homo sapiens
atcggttcggtaaagtttctgttctctggtgtcgtgaaaactacccctaaaagccaaaatgggaaaggaaaagactcatatca

SEQ ID NO: 362497 - DNA, 90 bp, Homo sapiens
ctactaccactatgggaagttcgcagaaaagtatgacagcgaccgcacagtcatttgtgagagaaacaaaagccaccaattcagatgtca

SEQ ID NO: 362498 - DNA, 99 bp, Homo sapiens
cgagactcatgactcccagagaggatggcatctagaaggcactactgcagtcttcagttaagcaacaagtagaagctattgaaaaacagtacatttctg

SEQ ID NO: 362499 - DNA, 100 bp, Homo sapiens
ttcatagagctggactattggaaggacgcacagacattcgggtgcttcagccagaacaaccccagcaaccggcgagcaaagccccggtgctcggagccgg

SEQ ID NO: 362500 - DNA, 97 bp, Homo sapiens
tactgtactggaaacgtcaccggaatcaggaccgagggccgttgctccagggagaactgcaaatatcttcatccacccccacatttaaaaacgcagt

SEQ ID NO: 362501 - DNA, 101 bp, Homo sapiens
ttcccaggatggtgatccgtgtatatattgcatcttcctctggctctacagcgttttgtccatcaactaaaggcacaaacagatacctcacttctactggt

SEQ ID NO: 362502 - DNA, 75 bp, Homo sapiens
aacatcacatcacatgctgacagcacaagaaggtatcttctgtatgacgtcaaccccccggaaggcttcaacctg

SEQ ID NO: 362503 - DNA, 100 bp, Homo sapiens
tcctggacagaaggccgtgtcctgggacttctctgatggcgagaggctgcggctgtaccagaatgctatcttctttgagaagtcaaattgtcaggatcag

SEQ ID NO: 362504 - DNA, 83 bp, Homo sapiens
cagcacgcgcctgcttcccgtctgcgcgagtccacgcagctccccagcgtggtgatggtggatgaggcacacgaaaggaccct

SEQ ID NO: 362505 - DNA, 101 bp, Homo sapiens
cgtcgcgctgaagaaaggatgctcgaggatgctgtccaggtgggcggccgcgggcgcgatgcggcactgcagacttcacagagaatgcagttgtcttgact

SEQ ID NO: 362506 - DNA, 97 bp, Homo sapiens
tacccggttgtcctcaggcgctgtcaggtaattttttctgcaggatgaattaagagaagagacacttgctcatcaggcatggagagcactttgtcag

SEQ ID NO: 362507 - DNA, 82 bp, Homo sapiens
attgtcttaacttccaaacatcatgaaggcctccggtgtggctgtctctgatggtgtcatcaaggtgttcaacgacatgaag

SEQ ID NO: 362508 - DNA, 73 bp, Homo sapiens
tgtggagtgttctaaccaacaaggaagagtatggcatttcaaatatagatacaaccattgaaggaacgtcaga

SEQ ID NO: 362509 - DNA, 100 bp, Homo sapiens
cccgtgccgccccgcaccggacccccccgcctgctggtgagggaggaaataatgctggccatacagttgttgtggattctgtggaatatgattttcatct

SEQ ID NO: 362510 - DNA, 98 bp, Homo sapiens
gaagtgactgggcggtgccggcgccggagacgatgccgtttgcttagatgagtacgaagatgatgaagcagggcagaaagagcggaaacgagaagatg

SEQ ID NO: 362511 - DNA, 89 bp, Homo sapiens
ctgggggaacacagtgaatgtctctagtcgtatggacagcacgggggtccccgaccgaatccaggcgacgttgtggacgtttaccagcg

SEQ ID NO: 362512 - DNA, 75 bp, Homo sapiens
agcataagacctgctctcccgcgtccctgagccaggccagcgccgacctggagctttaccaacagggacgcttat

SEQ ID NO: 362513 - DNA, 75 bp, Homo sapiens
gatcacattcattttaattttgccggaatatttcaagacaccgaaaggccacaccatgaggccccagccccacca

SEQ ID NO: 362514 - DNA, 75 bp, Homo sapiens
cctcctgacacaacaccactcagacatggatttgattgacatactttggaggcaagatatagatcttggagtaag

SEQ ID NO: 362515 - DNA, 82 bp, Homo sapiens
tagacattgaccccgaggagacgccttatgccagcctggaccatcttggaggcagtgtaggatcatggaagaactttgaatt

SEQ ID NO: 362516 - DNA, 90 bp, Homo sapiens
cctggcctgcccggacgagttcgatgacttcgtcacctatgagcttgctcacttccgacagagaaaaacaaaaggtgacagttcgcattc

SEQ ID NO: 362517 - DNA, 123 bp, Homo sapiens
aaataaaaacagaacaggaggtggtagagggcatggatatctctactcgctccaaaggtgtcatggagaaactccagctgggcccagagattctgcagcgggaaaatccaaggcttatttatg

SEQ ID NO: 362518 - DNA, 95 bp, Homo sapiens
ttcttcctcaacaccagcaccgcagatgttgtcaaggtggcctaccaggaggccaggggtgtcgccatgggcaaattcattcgcatcaactttga

SEQ ID NO: 362519 - DNA, 82 bp, Homo sapiens
aaccgaaaaggagagtttcctgaagttcagttctgcaagcaagtatgctgctctctctgttgatggtgaagatgaaaatgag

SEQ ID NO: 362520 - DNA, 74 bp, Homo sapiens
tgtctgagactcctgctcagtgtagcattaaggaatcccgttctgcttccagaagtggaagtgctcacggatcg

SEQ ID NO: 362521 - DNA, 108 bp, Homo sapiens
agcttatactcctcccagtgacgggtctggagtgcgtgggggaccggctgttggcgggtgaaatgacaatggatgctctgttggctcgattgaaacttctgaatccag

SEQ ID NO: 362522 - DNA, 100 bp, Homo sapiens
cctatgtcaactatggaacaacaacttgcagctcatctctattgatgtttccatagcaaggcgtgtacaagatccattagctgagctagtgaaaattgag

SEQ ID NO: 362523 - DNA, 100 bp, Homo sapiens
gctcttcccggcgctctcctggctcccttctgccccagctccgtctcggcggcggcgggttctaaagaagtacccacgcctctggtgcatgaccaagccc

SEQ ID NO: 362524 - DNA, 75 bp, Homo sapiens
gcggccgcttcttccagaagggccaagggacttgcttttatttcgctcctgtccaaatatgacccccagaaggag

SEQ ID NO: 362525 - DNA, 75 bp, Homo sapiens
cacaaacatgtaaggattgaaaggcttgtaatccaaagttactttgggaaatcctcattgacgattcaatttgtt

SEQ ID NO: 362526 - DNA, 83 bp, Homo sapiens
gggaaatcgggctgaagcgactgagtccgcgatggaggtcagcagccttgttttacatattgaagaagcccataaactcccag

SEQ ID NO: 362527 - DNA, 75 bp, Homo sapiens
gataattatccaaataaattgcaagcattctatccaaatgattgctcgctgtaagcagctcatctgtgaccccag

SEQ ID NO: 362528 - DNA, 74 bp, Homo sapiens
cccggacctcgcttacctgcatgctgctgccactggtgacatgccaacttaccagatccgagctcctactgctg

SEQ ID NO: 362529 - DNA, 126 bp, Homo sapiens
cgaggagccatgaggcgccagcctgcgaaggtggcggcgctgctgctcgggctgctcttggagggatgtgtttggccaaatgggagagtggttacaacacacgagctacaaactacaatgctggag

SEQ ID NO: 362530 - DNA, 100 bp, Homo sapiens
aaggaagtaccaggacttgcacagcctgtcccaagccagatgatttaccattttccacagtggtcccgttaaaaacattctatgagccaggagaagagat

SEQ ID NO: 362531 - DNA, 135 bp, Homo sapiens
ctcagtacatattcaccttgaagaggaagacggggcggaagaccaagatcatcgagatggtgaatctggattgggaaagtcgacattaatcaactcattattcctcacagatttgtattctccagagtatccagg

SEQ ID NO: 362532 - DNA, 75 bp, Homo sapiens
taagcgagacgagtaggtggaggagaaggcgtgtgagcagaaccgggagaagtacctgctgcccttcctgtccct

SEQ ID NO: 362533 - DNA, 90 bp, Homo sapiens
attgcctacagaagagagaagccatgagagacagttgagctctagccggcccggtccttggactgaaagaatgcaccaggggctcggcag

SEQ ID NO: 362534 - DNA, 100 bp, Homo sapiens
ttagtaaggatgggaccttgtttgcctggggcaatggagaaaatgcctatcagaataatgacatcactgaatttgaaaagattctaaaaacaaatcacag

SEQ ID NO: 362535 - DNA, 75 bp, Homo sapiens
aagccacgtgcagacatctacaaccttcgatctcctgacgagtgttagtaaaatggcctttcgccatttaattga

SEQ ID NO: 362536 - DNA, 98 bp, Homo sapiens
agcaaacagccaacccatgagagtcgaattggagaacttgttggagtgctggtgaatcatttcaagaggggcaagctctgtgtgattgattggaagac

SEQ ID NO: 362537 - DNA, 98 bp, Homo sapiens
cagcaacagctcggcgggctggaagatttttcgaaagaaagcagtggaacttggggtaaaattgctacctgcatttcatactccctctggaatacctt

SEQ ID NO: 362538 - DNA, 60 bp, Homo sapiens
atacagatgtattcaaatggatcttcaaaggtgatctgcaactctttcaccatctgtaat

SEQ ID NO: 362539 - DNA, 75 bp, Homo sapiens
cggcgctgtgtccgtcgccatgacaggtcctagcagaagatgtgactcagactgcctctgggtggggctggctgg

SEQ ID NO: 362540 - DNA, 50 bp, Homo sapiens
tgaagcaaaagcctttcatgattatgctgtatcgcatccattgaatactg

SEQ ID NO: 362541 - DNA, 75 bp, Homo sapiens
tgagcgaggacgaggtgcgccggctgatcggttgcacgttttcaaaaaatacctaatggtgaaaatgagacaatg

SEQ ID NO: 362542 - DNA, 75 bp, Homo sapiens
gtcctctctgatgacatgaagaagctgaaggcccgaatgagcagcccgacggccatggaggctgaagagacgatg

SEQ ID NO: 362543 - DNA, 83 bp, Homo sapiens
gagcactacagacctcacagtgccaaatggagctggaagcagtccagtgggattctcaaagttggattggtggaaacaatgaa

SEQ ID NO: 362544 - DNA, 116 bp, Homo sapiens
agcatatggagatagaatagaaagaatgcttcgcctcagtttgaacattgaccctgatgcaaagctggaagaagagttgaaggcacgaattgaattgtgggaacaggaacattcaa

SEQ ID NO: 362545 - DNA, 100 bp, Homo sapiens
tccaggagaacactaaagagaagattcaaccaaacccaccatcttctggtttcattgctctattaccaggttttaaacttcgccatgatcgtgtcttctg

SEQ ID NO: 362546 - DNA, 96 bp, Homo sapiens
tcagctcccagaggatcaccagcgtggagtgtgaacatggctacgcctcttcattcccgtccatgccgagcccccgactgcagcattcaaagcccc

SEQ ID NO: 362547 - DNA, 99 bp, Homo sapiens
ctgaacttgttgagcagtttggacagatcagagtggagtggtaaaattttatggaagttttgcatttaatagaaaacgaaatgtcttggaactggaaat

SEQ ID NO: 362548 - DNA, 100 bp, Homo sapiens
tggacatctgctgccggaaggggtcccgaagccccctgcaggaactctacaacccaatccagagatgggcagtagcgaaccccttcccatcgcagatggt

SEQ ID NO: 362549 - DNA, 74 bp, Homo sapiens
gcctgcctcagcctccaaagtagctgagactacagctccagtgatccacaagctcagaaatacatcgcggaaag

SEQ ID NO: 362550 - DNA, 82 bp, Homo sapiens
tgcctctgtcactcctggtgaccagcattcaaggttggcagtggcaatgacccctggtcagcctggagtgcctccaaatctg

SEQ ID NO: 362551 - DNA, 50 bp, Homo sapiens
gagagaatatgaaaatgagctggcaaaggccctggccaacgtcaacattg

SEQ ID NO: 362552 - DNA, 100 bp, Homo sapiens
cagacaccctgaaccagggggaattcaaagagctggtgcgaaaagatctgcaaaattttctcaagaagccagctgaagatgagtggggtaaaaccccaga

SEQ ID NO: 362553 - DNA, 97 bp, Homo sapiens
cgcaaattgagatcccccacgaaatgtagggattgtgaaggcattgtagtgttccaaggtgttgaatgtgaagagaaattgagggtgctgcaaagga

SEQ ID NO: 362554 - DNA, 75 bp, Homo sapiens
cttgaacttaatacagcaagaaagaccatcaagtttaccagatgtgatcttcgtggtggaaagctaaattttaaa

SEQ ID NO: 362555 - DNA, 100 bp, Homo sapiens
gtggcttgcaggatggagaagctgcaccagtgttattggaagtgctggtaaacaatgccaaaactcatggagatacaagagcattggaactgaatcagag

SEQ ID NO: 362556 - DNA, 100 bp, Homo sapiens
cggccgtcctccaccgtttcctccaggacagcacctagtcgtggccggaggagtctcagagctgtcagaaagcttcataaacaagcagatatgcaagaag

SEQ ID NO: 362557 - DNA, 103 bp, Homo sapiens
ctaaggccgcgttggggtgagaccctcacttcatccgaccagtgtgcttttcttggagaaagaagaaaagaagaaagaaggaagaagaagaagaaagaaagga

SEQ ID NO: 362558 - DNA, 97 bp, Homo sapiens
cctcacaccagacctacggagggagctggaaattcctgacgttcattgatctggtgcctcaatcaggaaccctgaagctgtcccacctacaggaggg

SEQ ID NO: 362559 - DNA, 83 bp, Homo sapiens
ctggcgatgctgagctccctactggctgagggcagagactctcccggttttaaaatcaaagatgggaaaatcggagaaaattg

SEQ ID NO: 362560 - DNA, 82 bp, Homo sapiens
aacctgggggctccctggacaactccgagcaggttttaaaatcaaagatgggaaaatcggagaaaattgcccttccccatgg

SEQ ID NO: 362561 - DNA, 96 bp, Homo sapiens
actgcagcgatggttacattgaatactacatatgtcgagggaatgcagaaagagttaaggaaggcaggtaatctgtaagtcagatgctccaacagg

SEQ ID NO: 362562 - DNA, 100 bp, Homo sapiens
ttggcggtccctgtgacctgtggagacacggccagatctgccctccagtggtattaaagataatcaaacattatcaagaagaaggacaaggaactgaagt

SEQ ID NO: 362563 - DNA, 100 bp, Homo sapiens
gagtctctcccaacctacggggttcactattatgcagtgaaggatttgcctcaaagggcactgcaaaaattgaacagaggaatcccaaggaagctgcctg

SEQ ID NO: 362564 - DNA, 100 bp, Homo sapiens
caatagggaaagtgaggcagctgcaaggagggcggcgggactgcactcgagtgtccagacctgctcgatggtgatagtagaaaaggctcccaaagctcgg

SEQ ID NO: 362565 - DNA, 83 bp, Homo sapiens
cacgcataccccagcgcccggcagttatgtattctccgctctgtctcacccaggtctcctctgagcctccggcctccataaga

SEQ ID NO: 362566 - DNA, 75 bp, Homo sapiens
cgttcagccgctcgctctccgccttccagaaggaaacggggtctctgggggatccagtgacgtgcccaaccacag

SEQ ID NO: 362567 - DNA, 100 bp, Homo sapiens
gattcattcccaaaccaaaagattgaagttcaacgcacttataacaacatatgagatcctcttgaaagataaggaaaatgtttataggaggccttagctg

SEQ ID NO: 362568 - DNA, 98 bp, Homo sapiens
tttaattcttcacattccttcttagaagacttgactggtcttacattgctgcatcaagaaacccaagctgctgagaggaggctgcggaggaggaggag

SEQ ID NO: 362569 - DNA, 74 bp, Homo sapiens
gaagattggtacaaaaatcaggggagaattttaaggtatgttgagtctaaaaaggacagagtcacagtagtctt

SEQ ID NO: 362570 - DNA, 75 bp, Homo sapiens
cgaaagccatggagttgagctgcagcgaagcacctctttacgaaaatgtttataggaggccttagctgggacact

SEQ ID NO: 362571 - DNA, 92 bp, Homo sapiens
tgctgagcccgtccgtccgccgccaccacccactccggacacaggaatcccagtcagaagttccagcctgccactgttctctgatgccatgc

SEQ ID NO: 362572 - DNA, 51 bp, Homo sapiens
attgagatcgagaacctgcagaccagtgatcccagggcaccgccgtgtgaa

SEQ ID NO: 362573 - DNA, 100 bp, Homo sapiens
gaggaaccgcccaacatggcctcggaggctccgtatgtggatgtgatctgtttgaacagctactactcttggtatcacgactacgggcacctggagttga

SEQ ID NO: 362574 - DNA, 50 bp, Homo sapiens
ggattgcagtagctacagtacatactgcaggaacgaatgcaggaatttgg

SEQ ID NO: 362575 - DNA, 82 bp, Homo sapiens
gcagtggtcgcttcttctccttggtgctgtgtagcatcaattcaattatccacaatccaagagctccagtaataatttataa

SEQ ID NO: 362576 - DNA, 101 bp, Homo sapiens
cacgaacattgatttgaggaggatgcttcgcagtttacgaacttcgagcaaatgctctcatcaaaagaggcagcatgtacatgcaacagcagcagcctttg

SEQ ID NO: 362577 - DNA, 100 bp, Homo sapiens
cctgggtggactggaggaggccgcgccgatgaacctgaccgagactacgtctactttgagaactcctccagcaacccatacctgatccggagaatcgagg

SEQ ID NO: 362578 - DNA, 99 bp, Homo sapiens
ggcgggtggcatggcggagaaggatgacaccggagtttgacgaagaggtggtttttgagagatggatttataaaagctattggtcctgctgatgttatt

SEQ ID NO: 362579 - DNA, 74 bp, Homo sapiens
acgattacgagctgcaggaggtgatcgccgctcctgacatcactggccataaacggagtgagaacaagaatgaa

SEQ ID NO: 362580 - DNA, 74 bp, Homo sapiens
gatccagaagtccagagctgaggactgcctgtttgcagcaatggctgccatccggaagaaactggtgattgttg

SEQ ID NO: 362581 - DNA, 83 bp, Homo sapiens
gatcaagccaacaacagtgacggaatgcctccatacatgttttgtatgaacaattcaagtttttcttgaatctctattttcta

SEQ ID NO: 362582 - DNA, 82 bp, Homo sapiens
ttcaggtcctactccaggggcgctcagaaggatatggccctgaagccacatgagcggaaggagaagtgggagcgtcgtctca

SEQ ID NO: 362583 - DNA, 75 bp, Homo sapiens
taaaatcgcacaccaacaccagccacgtcatgcagtatggaaacaaatatcatcgagaaaggagaagaacactgt

SEQ ID NO: 362584 - DNA, 82 bp, Homo sapiens
gaggacattcccctgaacctcagccgggagctgctgcaggagagcgcactcatcagctctgcttatgataatgtcaacaaag

SEQ ID NO: 362585 - DNA, 100 bp, Homo sapiens
aaacttgttcacatacagaaatgggatggcaaagaaacaaattttgtaagagaaattaaggatggcaaaatggttatggatccaaactactggatacagg

SEQ ID NO: 362586 - DNA, 90 bp, Homo sapiens
accgagggctaccacgttctgcgggccaaggggcagtttaagaaacagtcagtggccaacggtgtggagatatctgtgcctgtacccagc

SEQ ID NO: 362587 - DNA, 75 bp, Homo sapiens
ctcatgcaggtggtcccgctggagggccatgatccaaaggaaccagagcagttgagaaaactgtttattggtggt

SEQ ID NO: 362588 - DNA, 98 bp, Homo sapiens
cttagatctcgacttagattctgggaaatccacaccaccacgtaagttgctgaacctgtttgcatgagttgctcctgacggccctttaggatacttcc

SEQ ID NO: 362589 - DNA, 100 bp, Homo sapiens
tcctcagagtcggagagctccagtgagtccagctcctctgacagcgaagactccgaaacagcttcttggacacttaatgattgttggcaagaaatgtgct

SEQ ID NO: 362590 - DNA, 98 bp, Homo sapiens
tgacatttatcatggatgctaaccagacttacctggtgtcagaacgcctagaaagtttctctataacaacaatacaaggcaacaaactgaagcaagag

SEQ ID NO: 362591 - DNA, 90 bp, Homo sapiens
agtggatgtgacagttcagcattagaagggctacccctaataaagcgactcattgagcaggggcagcttcatgacttctgggtaccagat

SEQ ID NO: 362592 - DNA, 100 bp, Homo sapiens
tacaggatgtgactttttgagattggcttttttcgttgactatcctgcccctgagatccacccaagttgtgtgaagtaagaactctgctagagaggaaat

SEQ ID NO: 362593 - DNA, 90 bp, Homo sapiens
gagatgactgctgagctccgagaggtgaacagagcccctgacttaattcagtgcacaaatgagatgaatgtgaacatcccacagttggca

SEQ ID NO: 362594 - DNA, 75 bp, Homo sapiens
gggatctttccggatcaatccagatggcagccagtcagtggtggaggtggtcagtcgggtggcagcccagcaagg

SEQ ID NO: 362595 - DNA, 78 bp, Homo sapiens
tgaggacaatggacctgcctgggcatagacttccttaaggaactgatgaggagtttcaacagagacaggcggattttt

SEQ ID NO: 362596 - DNA, 75 bp, Homo sapiens
ttctccttttcatgagtgttcctgtggtctctgcacctcctttcttgccatggtgtgcagccaaaggaatgcctc

SEQ ID NO: 362597 - DNA, 75 bp, Homo sapiens
gacaaagccaaagccaaaaagttttcagcagtcagatactaatggaccatactaccaaggaccagtccacctgaa

SEQ ID NO: 362598 - DNA, 50 bp, Homo sapiens
ggaacaaacacttctggatgcatccgttatgaagacagtatggagtttcc

SEQ ID NO: 362599 - DNA, 83 bp, Homo sapiens
cttcgttcatgaggcaccatctcaggagcagaagaacttggctgccattcaagcattcactcatacggcacaatatgatgaag

SEQ ID NO: 362600 - DNA, 83 bp, Homo sapiens
cgcgcgcctttgtgcgcgcgccgaggtgagaagccctaccactgcaactgggacggctgcggctggaagtttgcgcgctcaga

SEQ ID NO: 362601 - DNA, 95 bp, Homo sapiens
caagcaacaatcagtgctccacacatggtgctggaaacatgcatgaagagctgcggcaagcggttccacgacgaagtgggcaagttccgctttct

SEQ ID NO: 362602 - DNA, 75 bp, Homo sapiens
aagaccagcgcgagggccctgggcaaggcccgacaggaagaaaacaggcagattttggcgcggcaaaagtcaaac

SEQ ID NO: 362603 - DNA, 100 bp, Homo sapiens
caggacctggtgaagctctgtcaaccggctgaaagacacacagaagtcttcatggatatagttgatacatttaatcatttaattcctactgaacacttag

SEQ ID NO: 362604 - DNA, 100 bp, Homo sapiens
aagaaagtggtgaatcccctgtttgagaaaaggcctaagaattttggcattggtgaagtattacagacacttagcacctgatcacttgctgcaaatatgt

SEQ ID NO: 362605 - DNA, 101 bp, Homo sapiens
gtagcggtagcgatggacactctggatcgagtagtgcatgaacaaccgggaggtgctggagcaggtggagcgaggctacaggatgccctgcccgcaggact

SEQ ID NO: 362606 - DNA, 51 bp, Homo sapiens
cacctgtgcgggatggaacaaaaggaggaggagctggctaccctatctgag

SEQ ID NO: 362607 - DNA, 89 bp, Homo sapiens
gtcactgcctacactggacccctcgttgaggacttccttagtggtttccagggcctgagcgcctgcgaacagatccgagctgctctcta

SEQ ID NO: 362608 - DNA, 49 bp, Homo sapiens
cacgtcgtcaaggcgcctgaggagatctgaagaagacacttgaatcatg

SEQ ID NO: 362609 - DNA, 100 bp, Homo sapiens
ccccggtgcagatgaacctgtacgccacctgggaggtggaccggagctcgtccagctgcgtgcctaggcacacagaggagtactttctgcctcggatgat

SEQ ID NO: 362610 - DNA, 80 bp, Homo sapiens
acttagctcagcaattcttaccttgcctgagacctgggaggaagctggagaaaagatgccctctgaatctttgtgtttgg

SEQ ID NO: 362611 - DNA, 100 bp, Homo sapiens
tggtggttgccactcacctgaggatgacagagcgggatgccaccagcttgtccaaagggaagttccaggagctcctggtgggcatcgttgtggagaatga

SEQ ID NO: 362612 - DNA, 75 bp, Homo sapiens
cactgctgggccctgaggctgcaccaagtggcgaaggagccggctccaagctacccgtacagtgaggacgcccgc

SEQ ID NO: 362613 - DNA, 59 bp, Homo sapiens
cttgatcccaacaatgttatcattgatgtgaagcctcagtttaggtcatctggtggttc

SEQ ID NO: 362614 - DNA, 75 bp, Homo sapiens
cttcagcagccagtggccagtgagcggacaaacataaattgcagagattcctgactgctgacatggccctggtgg

SEQ ID NO: 362615 - DNA, 100 bp, Homo sapiens
cccgtggttccagcgccggttttgaccgccacattaccattttttcacccgagggtcggctctaccaagtaggaatgtctgaatctgaacaggctcttaa

SEQ ID NO: 362616 - DNA, 74 bp, Homo sapiens
tcgccatcatgattatctaccgggacctcatcagccgggctatcaaggactcacaaactgcatgatggccgccc

SEQ ID NO: 362617 - DNA, 100 bp, Homo sapiens
gaagaagatggaagccaaagttcatcagagtccaaaatggtgatcaggaagaacttggatttttccaaaggtcaccagggtattacaggggacaaagaag

SEQ ID NO: 362618 - DNA, 88 bp, Homo sapiens
cgggtggtcaccgagaagtccccgaccgactggctgaaggtgatgtggccgccctcaaccgacgcatccagctcgttgaggaggagtt

SEQ ID NO: 362619 - DNA, 123 bp, Homo sapiens
ggacggtacttctgccactgctgctccgtggagatcgtcccgcgcctgccgcggggatctgacgagcttttctctacttgtgtcactaacggaccgtttatcatgagcagcaactcggcttct

SEQ ID NO: 362620 - DNA, 100 bp, Homo sapiens
cgcgaatatcgtcatcgttagaagcgctgctcccactgcaccaggctcggtgcctccatcccttgccgctcacctggatgtccacggctttaccacttcc

SEQ ID NO: 362621 - DNA, 89 bp, Homo sapiens
gcacctgatcgccgcgcgagctgccttatgatctcctcattgcgtccccctctgcccactggacttggacttcagatctgaccccagac

SEQ ID NO: 362622 - DNA, 100 bp, Homo sapiens
gaggatgaaacaagtaatcttatatggtgtgattctgctgttcagcaggagaaaatttcagagctgcaaaattatcagatatttggagttcttacaacat

SEQ ID NO: 362623 - DNA, 74 bp, Homo sapiens
ccaattcctacttcatggatgtgaaatgcccagcatcgatttcttccctgtgaaaacaagagcaaggccgtgga

SEQ ID NO: 362624 - DNA, 101 bp, Homo sapiens
tggtcactcatatataagaaagaattggcttggatgcattgtcttccctttttctgctcttctgcaacaatctgaggagctgaagttgccctcctataaag

SEQ ID NO: 362625 - DNA, 100 bp, Homo sapiens
ttccagcgctccacgccagccatcaccctcgagagcccggacatcaagtacccgctgcggctcatcgaccgggagatggatttgcagccgctgcaagtgt

SEQ ID NO: 362626 - DNA, 87 bp, Homo sapiens
cagagcaaattgagacgtccgggctgcatagagcctggacctgggcactggggtgagctgagccggacaccagtcccatctaaaccc

SEQ ID NO: 362627 - DNA, 75 bp, Homo sapiens
aggattcgttacagccagagattgctcgggaagcagagctccgccagcttcgcaaatccaacatggagtttgagg

SEQ ID NO: 362628 - DNA, 90 bp, Homo sapiens
gtaagaagtgccttttgcctcccaccgtgattctgaggcctccccaaccatgtgcaattctcattcttggaatcccagaacaggccttaa

SEQ ID NO: 362629 - DNA, 83 bp, Homo sapiens
agttggaagcagccgatccagcctgcggagcctgtggggcaggctcgcaggaaggaggtatttatccaggaacggtatgggag

SEQ ID NO: 362630 - DNA, 97 bp, Homo sapiens
gaggagttctcggagtttggaaaggaagatgagaatgtgcctactgctcctgatcctccaagtcaacatttacgtgggcatgggacaggcttttgct

SEQ ID NO: 362631 - DNA, 82 bp, Homo sapiens
gtgggctcactctgaagacctgcagtccctcctgcttagggatgagctcaggtttctacaaaaatgtggtgaagattcaaaa

SEQ ID NO: 362632 - DNA, 75 bp, Homo sapiens
aaggaacggctgaaggccctacgggagaaaaccgggcgcaagggaggtgttcctgtgggcttagcatctaaacct

SEQ ID NO: 362633 - DNA, 100 bp, Homo sapiens
atgaaccccaactgcgcccggtgcggcaagatcgtgtatcccacggagaaggtgaactgtctggataagatgttctcaaatagtgatgaagctgtaatca

SEQ ID NO: 362634 - DNA, 100 bp, Homo sapiens
agcctcccgagtagctgagattacaggctctcccggctgtgatagaccttcagttacagagagagggagcagagtgggaccaggtctgagaatagtgaag

SEQ ID NO: 362635 - DNA, 87 bp, Homo sapiens
cggagcccggctcccgcaccatggaggaggacgacagctacgcaaaaagatggcacctttgcagcagggggctacatgccccctctc

SEQ ID NO: 362636 - DNA, 85 bp, Homo sapiens
agaccctggagcctcagttggaagcagccgatccagcctgcggagcctgtggggcaggggccagtgtcattcaaagatgtggctg

SEQ ID NO: 362637 - DNA, 75 bp, Homo sapiens
cgaaaggactgaggaacggtgcctggaaaaggtaagaatgattgatgttggctgatattggagtgctcattcaca

SEQ ID NO: 362638 - DNA, 82 bp, Homo sapiens
aaggattccaagtaactcttatttggttcttgatacatatttgccagacttcaagatttcagaaaaggggtgaaagagaaga

SEQ ID NO: 362639 - DNA, 83 bp, Homo sapiens
cacacaagctaaagacgggccattttccagacctcatccagggactggtgattgcagctggaagtgcccatgaccgagctggc

SEQ ID NO: 362640 - DNA, 89 bp, Homo sapiens
tgctcctgggatttcggagaggccgcaggagtcatttctgagcagcggttccatcgcagtgaacgccgactcttcggtgcagttgttgg

SEQ ID NO: 362641 - DNA, 51 bp, Homo sapiens
aaaaatgaaaattccttgaactataagctgtcattggaaggaatagtggta

SEQ ID NO: 362642 - DNA, 50 bp, Homo sapiens
gcctttgtgtctatcacagtggagcgtgtgaaggcaaagaagaatgctgc

SEQ ID NO: 362643 - DNA, 84 bp, Homo sapiens
gcgtgggggaccggctgttggcggatgatatcatcaagttgaatcgaaaggaagggaagaagcagaattttccaagactaaata

SEQ ID NO: 362644 - DNA, 82 bp, Homo sapiens
cggagccccgccgccgccggcttgatgctgtgggccctgagggaaaggatcacagaggcgctgagccgggatggctacgtgt

SEQ ID NO: 362645 - DNA, 60 bp, Homo sapiens
ctgcaaggactccaaagtggtgagtcccacccgctgtacctgtgcaatgccagtgatgac

SEQ ID NO: 362646 - DNA, 75 bp, Homo sapiens
gcctgccaggcgctcgggggccgaactggccctggactacctctgcaggaggcatacacggaatacctgaggagc

SEQ ID NO: 362647 - DNA, 90 bp, Homo sapiens
cggggcttgccctggtcttgctcggccgatgaagtgcagaggtttttttctgaattcctgctctccttgttggtgttcttttgataactg

SEQ ID NO: 362648 - DNA, 100 bp, Homo sapiens
gcagccgccagttgggatcaaatgtgagcctatggatcaagagtctcactgtcacccaggctggagtgcagtggcgtgatctcaactcaatgcaacctcc

SEQ ID NO: 362649 - DNA, 50 bp, Homo sapiens
caaagaacctctggtgttgaaaggtaaatcaacagactgggaagatgatg

SEQ ID NO: 362650 - DNA, 100 bp, Homo sapiens
agaggatttgcttttgtaacttttgatgatcatgatacagttgataaaattgttggtcatgctcttaaacctcaggtttcctctatttttacatcatttt

SEQ ID NO: 362651 - DNA, 75 bp, Homo sapiens
ctgaactccagcgaactggaagtaaatggggagcaggagaaccgagtgcagaagggaaatggatattttcaagtg

SEQ ID NO: 362652 - DNA, 100 bp, Homo sapiens
cggacgcgtccggctgtggaagagagcggcggccgctcacaacatgcacagcctggcgacggctgcgaataatcatgggccagactgggaagaaatctga

SEQ ID NO: 362653 - DNA, 102 bp, Homo sapiens
aggctctgcggctggtccaggccttccagtacacagacgagcatggggaagttatggctgcagcttcgattgccaatattgtaaaaagttctcttggtccag

SEQ ID NO: 362654 - DNA, 90 bp, Homo sapiens
gcaaaacttattcgggataaagtagcagaacacagatatgtagaactcttcttgaattctacagcaggagcaagcggtggtgcttatggt

SEQ ID NO: 362655 - DNA, 83 bp, Homo sapiens
gcttcgccccgggccccccagcatgaagaccccggcggacacagatctctgttgaggagctggcgcggaatctggtcatcaag

SEQ ID NO: 362656 - DNA, 114 bp, Homo sapiens
gcatatgtctgcacgctgaggccgaggcggagaaggggcttcctgagcgtcccagtacactgacagagatatatttttgccatcatggatcagtttggagatatattagaaggt

SEQ ID NO: 362657 - DNA, 100 bp, Homo sapiens
gtgatgatgaagagcctagcacctcttatactgataatgacatcttcgagtggtccagggaccaccgagcccaccacaagtactcagagacggatgctga

SEQ ID NO: 362658 - DNA, 98 bp, Homo sapiens
ttatgatgatccacttctacttattaaatagtaaagagagcgttttcccaaagaaaataacatagcacagaaggaaaaataaaaagaaattgctgcag

SEQ ID NO: 362659 - DNA, 100 bp, Homo sapiens
gacttcttcctgctgctgcttttcaggggtttcttcttgaagggctcaaggaatgaagcatcccacaaaatgatcctgctgaataattgccagatgctgc

SEQ ID NO: 362660 - DNA, 75 bp, Homo sapiens
gacagcggcgagcagaactacggcgagcggaaggtagaagatagcaccatgccgattcgtcgaactgtgaattct

SEQ ID NO: 362661 - DNA, 98 bp, Homo sapiens
caagttgggggctcagaggggagtcatcatgagcgatgttaccattgtgaaagaaggttgggttcagaagagggattttccacagaatgagcctcaga

SEQ ID NO: 362662 - DNA, 100 bp, Homo sapiens
ttggaaactaaatcaagtctgccaatggtgcatgccttgcatccaagggtccttaagccgttgtcttcattgattcatcttcaggcaaattctaatcctt

SEQ ID NO: 362663 - DNA, 96 bp, Homo sapiens
gtcgagtatctggtgaagtggaaaggatggcccccaaagtatcatgatattagctggtttgacatcaagtcatttgtgagtcatcagatcttctcc

SEQ ID NO: 362664 - DNA, 100 bp, Homo sapiens
cggcggggcccaggtgagaaaggcccacctgtgtcctggttgagggtctccagggttctttggggcccgagctcaaatagctataactgtaccaaagaca

SEQ ID NO: 362665 - DNA, 100 bp, Homo sapiens
tttctgcaggaacacggttcagattcgatagcagaccccacgttagctgaaatgggaaaaaacttgaaggaggcagtgaagatgctggaggacagtcaga

SEQ ID NO: 362666 - DNA, 50 bp, Homo sapiens
tggccaaacaaattgttaaagatgccataaacctagaagtcggaatccgg

SEQ ID NO: 362667 - DNA, 90 bp, Homo sapiens
cgcagaaggattccgggagcacagttccgccgaacttcccaagtaagaagcggaagaggagccgctggaaccaagacacaatggaacaga

SEQ ID NO: 362668 - DNA, 101 bp, Homo sapiens
aaaagctaacattccgattatggacaccggtgaaaacccagaggttcccttcccccgggacatgattgacttagagagccacactcaagaatgggaagaaa

SEQ ID NO: 362669 - DNA, 83 bp, Homo sapiens
ggcgagcatgcgagtggtgaagacaatgcagatcttcgtgaagactctgactggtaagaccatcaccctcgaggttgagccca

SEQ ID NO: 362670 - DNA, 74 bp, Homo sapiens
gaaaagactagagacagtacaaggagggagagagaaggaagaatcctgctcaaaaatgaggtgaattaatactt

SEQ ID NO: 362671 - DNA, 82 bp, Homo sapiens
tactctgtgaccggggccaagcagacccctttgctgatgcaagtaagggtgatgacctgcttcctgctggcactgaggatta

SEQ ID NO: 362672 - DNA, 75 bp, Homo sapiens
gatttacagctcattgactttgagatgaaggagggacgaagaacatcaagtttaaaagccagttatgaagcattt

SEQ ID NO: 362673 - DNA, 100 bp, Homo sapiens
attgctagaatggaagacagttactgaaaaagagctctatgaagcactagtgaaggttatcaataatcccagtgttccttgcctgtatctccccttggtt

SEQ ID NO: 362674 - DNA, 134 bp, Homo sapiens
tgggaatcctatgcttggtaatactggtgatagctgtggtcctgggtaccatgggaatccagatgcaggccaagtacagcagcacgagggacatgctggatgatgatggggacaccaccatgagcctgcattct

SEQ ID NO: 362675 - DNA, 87 bp, Homo sapiens
tttggaggaggaggatgaatttgatagagaggtggatgctctccgattgcgtttggaagagaaggaaaccatgttgaataaaaagac

SEQ ID NO: 362676 - DNA, 74 bp, Homo sapiens
acccaaacaatcggctgagaatgagaagaggggttcatgtgtcacacaagtaggccttctggaaagcgtgtatg

SEQ ID NO: 362677 - DNA, 100 bp, Homo sapiens
ctatgtgacatgagggcatctgccctctgtgatagacattctaaatgtaacaccgtgattcacttagatcaagcattagccagaatgagagaatatgagc

SEQ ID NO: 362678 - DNA, 97 bp, Homo sapiens
tcgaaccactcagaggctgaggagggctccattactcccatggacacccctgatgagcctcaaaaaaaggtggactataatgcgagtgcctggctga

SEQ ID NO: 362679 - DNA, 95 bp, Homo sapiens
gaggtcaacaaggttctggacaagatgaagtctttctgccaggcaaatcctgatcctaactgttgtcttggagtatttgggctgagcttgtacac

SEQ ID NO: 362680 - DNA, 100 bp, Homo sapiens
ccggggccgacccggcccgtagtgtggaagcagcttcagctgaagtgagtagtgaatatagtatggacaaggcaatggttgaatttgctacattggatcg

SEQ ID NO: 362681 - DNA, 100 bp, Homo sapiens
gaaaggcactatcgagattggaaccacagaagacaagttggatggcttgaggactggtactaaaaggaaacgtgactgggaggccattgccagcagaatg

SEQ ID NO: 362682 - DNA, 98 bp, Homo sapiens
acacagaatggcagccacattccagcttccagggcaccaggatctgtgccagttcagaagcaggcgagcctcttccctgatgaaaaagaagataactt

SEQ ID NO: 362683 - DNA, 80 bp, Homo sapiens
gaatctatagttaatcttggcgacattgacaatgatggctttgaagctgcagaaccttggcctgaaaatgctacattata

SEQ ID NO: 362684 - DNA, 101 bp, Homo sapiens
tccaaacttaaagttaaagagctttcggtgattgatggtcggagagctcagaattgcaacatccttctatcgagggcaacttcctgggagctaaggctact

SEQ ID NO: 362685 - DNA, 100 bp, Homo sapiens
gaggcgcagctccacgagcacatcaagtttggaaattttagcattcaggtgccaggaatgcagatgggacagccagtgccagaaacaggcccagctatac

SEQ ID NO: 362686 - DNA, 98 bp, Homo sapiens
tgccctggtgcagacaagacttaaccaccctagtgccgctgttccggaactcgcgcctggtccagttccacttcaccaaggacctggagacactgaag

SEQ ID NO: 362687 - DNA, 75 bp, Homo sapiens
ccggaccggcggcgtgaaagtcgtgatatcatcgttgaactgaaaatgttggggcttttcaggaagcataataag

SEQ ID NO: 362688 - DNA, 100 bp, Homo sapiens
actacttcctcggtggctgcgccggaggcctgactctgggagcacgcaagtccggcagcgtcttctcttgagggagcaatttggagaagagctggaaccc

SEQ ID NO: 362689 - DNA, 51 bp, Homo sapiens
ggaatctgattccaagcaaaaaccagtatcagatgtagaaggtggtgatgg

SEQ ID NO: 362690 - DNA, 82 bp, Homo sapiens
aatgatccttactaaccacgaccatcaaatccgtgtcggagtccttacaggcttgggcactgtttaaaggaaagttccgaga

SEQ ID NO: 362691 - DNA, 90 bp, Homo sapiens
cagcacagacagaatccctgctaccaggcccatttggaggccagcgctgagaagtggaacaggttgctgatgtccttagaagaactgatc

SEQ ID NO: 362692 - DNA, 100 bp, Homo sapiens
ttacgtctgcggaagtgcagctgcctcagttcttagcgcagacatgcacatgatggtgtccaagccagaacagtgggtaaagccaatggctgtagcagga

SEQ ID NO: 362693 - DNA, 85 bp, Homo sapiens
cagacatcttcaaacactacatgaaggatttttagactctgaggagcagttggagctaatccacattatggaaatggaaaccacc

SEQ ID NO: 362694 - DNA, 90 bp, Homo sapiens
acaagcttacgtctctgctcttcagtacaatcctactcatgatagtaaagagcacctggcaatgatggaacgaatattaggacccatacc

SEQ ID NO: 362695 - DNA, 82 bp, Homo sapiens
cctcatgttcgccttcaacctgctcttctggaaggatatggccctgaagccacatgagcggaaggagaagtgggagcgtcgt

SEQ ID NO: 362696 - DNA, 100 bp, Homo sapiens
atggctacttcatattttggaaagcagtttttaagacaacaccagcagacgtttttgaatcaactgagagaaattacggggattaatgacacccagatac

SEQ ID NO: 362697 - DNA, 82 bp, Homo sapiens
aaaactctttggatgattctgccaaaaagagctggaagtcgagtgtgctactcaactcaggagatttggagacaaactgaac

SEQ ID NO: 362698 - DNA, 75 bp, Homo sapiens
tctgaagagggtctggaggagccttctcaagaacagaggccaagcaaataaagtagccaaagaagctgctaacag

SEQ ID NO: 362699 - DNA, 74 bp, Homo sapiens
agcaacatggcagagaagaaggtggcatctgagctcccccaggatgtgccagaaagtgttgtgaagagcgaaga

SEQ ID NO: 362700 - DNA, 101 bp, Homo sapiens
gaaaatagcaaacgatccagacggcagggagtgcatcaaaggtgtgaacacagaggtcatgacgccagtcagatcacactagccttgggcacagctgcctc

SEQ ID NO: 362701 - DNA, 82 bp, Homo sapiens
tatttcaccagtagcaaatgagatgaaccatcttcctgcacacagccacgatttgcaaagtgctgggattacaagcgtgagc

SEQ ID NO: 362702 - DNA, 83 bp, Homo sapiens
gggtacctgcggccaattcggtggaacgaggacgcggactgcgaaggcaggactggagactgatgcatgagggggctacggag

SEQ ID NO: 362703 - DNA, 100 bp, Homo sapiens
ggcaggcccgacccgcctccccggcgccgccgtggctcgacggagaccagctaggtactatactggcaattgctggagaagattttgcaattgttgcttc

SEQ ID NO: 362704 - DNA, 95 bp, Homo sapiens
ccggagctagctggatcctctaggcaggcgacattgactacagcaccgtgctcctcggcatgctggtgacgcaggacgtgcagctcgggctcttc

SEQ ID NO: 362705 - DNA, 100 bp, Homo sapiens
ggatacggtcactttctacaaggagtaccaggctcaagtggaagaaatgaggttgatgatgaatcagttggaagaggatcttgtctcagcaagaagacgg

SEQ ID NO: 362706 - DNA, 100 bp, Homo sapiens
agctgtgaacctgatatacctaatccaccaaggatagccaatcggaccaaaaattcactcactttgcaatggaagagtgctgagattgattctgatgaca

SEQ ID NO: 362707 - DNA, 83 bp, Homo sapiens
ggaggaaaattataatgtggttgcaccaggctgtctttcacaatccaggtcagcccaaggccaaccccactgtcactctgttc

SEQ ID NO: 362708 - DNA, 75 bp, Homo sapiens
ctgacaaattatgctgcagcatattgtactggcctgctgctggcccgcaggtcttttagagattcctgccaaaaa

SEQ ID NO: 362709 - DNA, 75 bp, Homo sapiens
ccccgccgcatccacacagtccgtgtgcggggaggaacttgtaatagctggcatcgttgagaatgaatggaaaag

SEQ ID NO: 362710 - DNA, 82 bp, Homo sapiens
atcgtcatcctgctgctgaagatctggaagacgcgctcctgcgccgacatgaagacatcttatccatcctcactgctgtcaa

SEQ ID NO: 362711 - DNA, 88 bp, Homo sapiens
cttgcaagaaacctcaggacttgagtaacagcaacatgcgattgaacaggagaagcaagcaggcgaatcgtaatgaggcgtgcgccgc

SEQ ID NO: 362712 - DNA, 50 bp, Homo sapiens
tcattggtccaaaattgaagagaaggaccgcctggcccggtgcaccatgc

SEQ ID NO: 362713 - DNA, 75 bp, Homo sapiens
cgctactctctctttctggcctggaggctatccagcgaactcgaatcatttatgacagaaagtttctgttggatc

SEQ ID NO: 362714 - DNA, 90 bp, Homo sapiens
ctttgatgtactactataatgggaaagcgctggagtcacatcagaagccgcgcagactatcaccacggctcctgatgcctcagggcctga

SEQ ID NO: 362715 - DNA, 82 bp, Homo sapiens
ctgtttgagagtgggaacatgacgcaggtgcaggtgtctcttctcgccctggcggggaagacggcgggcgctaacaccaccg

SEQ ID NO: 362716 - DNA, 100 bp, Homo sapiens
tcaagtctgccttcgaccccccggacatcccgctgttttggagtcagcggaagatcaccaaggccagggagtggttccaccgcactgtgaagattgactc

SEQ ID NO: 362717 - DNA, 75 bp, Homo sapiens
agctgggccagggcctggactacttctacgacctgctctagaattcagaaggagctggcggacatcactttagac

SEQ ID NO: 362718 - DNA, 107 bp, Homo sapiens
atcaatatcgtgaaaatggccatactgcccaaggcatctcccctcagatggaagtcacatgtgtgcccacgcccacaagcacagtgtcctccataggtaacacaaat

SEQ ID NO: 362719 - DNA, 75 bp, Homo sapiens
caggaatccattatggtgtcattacatgtgaaggctgcaaggcgagtgttgtgtataaaggaagttgaaatcctg

SEQ ID NO: 362720 - DNA, 74 bp, Homo sapiens
cgccaaacctgagtttctacagaaatgagatccgcttcctgcccaacgggtctattgacattcagggatgtggc

SEQ ID NO: 362721 - DNA, 90 bp, Homo sapiens
tgaaggaaaacctccttatgctgatatacatccaatgaggataacggcaaaagcttctatcatttttgttactcttcagtacaatgtcac

SEQ ID NO: 362722 - DNA, 82 bp, Homo sapiens
caggccctgagcacgctgctgtgtgagcagcagggaaatcctcattgacgattcaatttgttgaaggccaatttgtggactc

SEQ ID NO: 362723 - DNA, 100 bp, Homo sapiens
tccagctcctgaacaagacatggaaggaaatgagggcaacttctgaagacttcaacaaggtaattatgaggaattagaaaactcaggagatacaactgtg

SEQ ID NO: 362724 - DNA, 76 bp, Homo sapiens
gatctgccgaccctctgggagaaaatccagcaagatgcaagccttcagtgccctgtgggacattgagacaggccag

SEQ ID NO: 362725 - DNA, 88 bp, Homo sapiens
ggccctgccgcgccccatccgcaacctggaggtcaagttcaccaagacgctctgcacaaaagccaccatgcagacggtccgggccgcc

SEQ ID NO: 362726 - DNA, 106 bp, Homo sapiens
aaaaagaatggatcaaccaagaacgtcaaacactccaacaattgagagcatttaaagatttctgggagatgattggtgaggaacacgggatcgacttggctgggag

SEQ ID NO: 362727 - DNA, 75 bp, Homo sapiens
ccagaggtcaacaaggttctggacaagatgaagtctttctgccagttgctgatgattcctctgatcatgtcagta

SEQ ID NO: 362728 - DNA, 74 bp, Homo sapiens
gttttttgctgtgagtgttgtttgcccagaaacaggaagcccatgaaacctttaatgagtggtttaagcatatg

SEQ ID NO: 362729 - DNA, 82 bp, Homo sapiens
tcagggaatacttcaagaagttcggagtgtaagactttgaccccgacgcaggcttcagtgattgccgcggatcagaagcctg

SEQ ID NO: 362730 - DNA, 76 bp, Homo sapiens
cggcgtgggcgtttgaggaagctggataaggctcaattacttgaaatagccaaagctaatgcagctgccatgtgtg

SEQ ID NO: 362731 - DNA, 99 bp, Homo sapiens
gtgaagccgtgacatcctgggatattctttgttgagagtcctggtacctgggctagcttggttcctttccaagtgtcaaataggacacccatcttaccg

SEQ ID NO: 362732 - DNA, 126 bp, Homo sapiens
tatgttctgcacttcactgcactgaatgggaagatttactttcgaagctataatctttactcctcctgtgaagaagggagaggaccccttccgaacagacaaccttcctgaaaacctgggctatca

SEQ ID NO: 362733 - DNA, 101 bp, Homo sapiens
ctcacgacgggccgagcctgccactgtttggtgcacctcgatttggaggaagtagggcagggcccttatctggaaagaagtttggaaaccctggggagaaa

SEQ ID NO: 362734 - DNA, 100 bp, Homo sapiens
ccgagaccaggctcccgctccggttgcggccgcaccgccctccgcggccgccccctggggatccagcgagcgcggccaggggttatcaccatgcaagctt

SEQ ID NO: 362735 - DNA, 75 bp, Homo sapiens
aatcctgaaagccatgcagcgggcaattaagttggaatatgcaaggttggttaagttggcccaagaagacacccc

SEQ ID NO: 362736 - DNA, 87 bp, Homo sapiens
ccgaagaagcatcgttaaagtctctcttcaccctgccgtcatgtctaagtcagagggagtgctcagaatccttggattctgctttaa

SEQ ID NO: 362737 - DNA, 83 bp, Homo sapiens
cccaaatatcctcggaagagcgctcccaggagaaacaacttcaccagcctccaccaagacgggacaagcagggagtttatccg

SEQ ID NO: 362738 - DNA, 75 bp, Homo sapiens
gagaaactcggagtgtactccgcctgcaagacaacaagggaggtgtcacagttttccatttagatcaacaacttc

SEQ ID NO: 362739 - DNA, 75 bp, Homo sapiens
tcgcatcctatggctcaaagaaagatgattatatgctacaaaacttagagtttctcctaagaatcctcgtatccc

SEQ ID NO: 362740 - DNA, 75 bp, Homo sapiens
gctgcttccaaagctcattgacttttctgctcagataacggcaaaagcttctatcatttttgttactcttcagta

SEQ ID NO: 362741 - DNA, 100 bp, Homo sapiens
ttccagcttgggaacaggctacttcgaggagagggcagtgagagataggaatctcctccaggttcatgaccataatcagcccatcccgtggaaagtgcag

SEQ ID NO: 362742 - DNA, 76 bp, Homo sapiens
tgggcatccacccggccaggttcccaggaaggtactccaaagattcaggtttactcacgtcatccagcagagaatg

SEQ ID NO: 362743 - DNA, 88 bp, Homo sapiens
ctggagacccttcgcgagcggctgctgagcgtgcagcaggatttcacctccgggtactacctttcccaagccaggtggtgtacaacag

SEQ ID NO: 362744 - DNA, 82 bp, Homo sapiens
tgggattgttgcggtgcgctggagccggttatcaatactctggctgaccatcatcatcgtgggactgactttggtggaagtc

SEQ ID NO: 362745 - DNA, 50 bp, Homo sapiens
cggcgatccggggtctgggcgcggcgagggagtgcatccgccccaaccct

SEQ ID NO: 362746 - DNA, 100 bp, Homo sapiens
cgaagctttacagaagccgctattcgcctgggattggagcatgattccacctttccactgatagactcaagttcccagaaccagattagaaaacgcatcg

SEQ ID NO: 362747 - DNA, 100 bp, Homo sapiens
atcagaggcaaaaaattaaagcagcatttaagacctcctatggcaaggctttaatgactgatgaaacaatatccaatgtgccaatccttatcttgggtaa

SEQ ID NO: 362748 - DNA, 100 bp, Homo sapiens
aggcagagctgcacccgctgccccagctcaaagctacgccttccacaaatccatttgttgctgctgctggtccttctgtggcatcttctacaaacccatt

SEQ ID NO: 362749 - DNA, 100 bp, Homo sapiens
catcaaaatacatctactcatattgagagctgtcgacagttacgtcaacagtaaagaacaagcacctttggagatgagtatgcatccagcggcaagcgct

SEQ ID NO: 362750 - DNA, 75 bp, Homo sapiens
accaggtgcctaggaatgctaacagtctgggaccacatagaccaccagggtgtacaactatgagcctttgacaca

SEQ ID NO: 362751 - DNA, 80 bp, Homo sapiens
cttctggacccaactgtggaatatgtgaaggttcgatctggggctaatgttctaatttgtggtccaaatggctgcggaaa

SEQ ID NO: 362752 - DNA, 90 bp, Homo sapiens
actacattctgggtgacacgctgggggtcggcaccttcggcaaagtgaaggtcctcctcgccctctgactaatatgaatgacaccatggt

SEQ ID NO: 362753 - DNA, 51 bp, Homo sapiens
cctccccagctatgtggaactgccctatgatgccaagtagagaaatccagc

SEQ ID NO: 362754 - DNA, 83 bp, Homo sapiens
acccttcctggagaaccgggcccagcagcactgggtaagactttgaccccgacgcaggcttcagtgattgccgcggatcagaa

SEQ ID NO: 362755 - DNA, 101 bp, Homo sapiens
tagcgcagaggcggcggtggcgagaggtgcggcgaaggaggcagaggcacttatgcttgtcagtcatcagtgagttctgcctcagtcagctcccaagtgag

SEQ ID NO: 362756 - DNA, 80 bp, Homo sapiens
gggtctgtcatcatgtcgcgttacgggcggtacggaggagggatattccaatgcctttagttagctcaggagtagagcat

SEQ ID NO: 362757 - DNA, 98 bp, Homo sapiens
ctagttaagctctctgaaaagaaggtggcagacccggtttgctgatcgccccagggatcaggaggctcacttatgtctgtaaagatgggaaaaaaata

SEQ ID NO: 362758 - DNA, 96 bp, Homo sapiens
agcccgcccaactcccagcggagagcaaggtaacgatgggggtccatcctcttcaagtaagactacaaacaagtttgagggactatcccagcagtc

SEQ ID NO: 362759 - DNA, 100 bp, Homo sapiens
cggtgctggcatccgaacaccgggtggctggtgcagccgaggtcttcgggaattccagcgaggcgaatgtctgcgacaacgagctcctgcactgccagaa

SEQ ID NO: 362760 - DNA, 82 bp, Homo sapiens
cgcggagccggccatgggcaagtcaggcgcagttgtgtagcagttgagtaatgctggttagctgttaaggtggcgtgttgca

SEQ ID NO: 362761 - DNA, 90 bp, Homo sapiens
aggacataccacctccaggatcaggatgcagaggtctgctcaccaggtggccagataccgcccacgtgcccccatcattgctgtgacccg

SEQ ID NO: 362762 - DNA, 100 bp, Homo sapiens
cgcctggcaggccctgcgcaccagccctgggcgctgcctatggcacagccaagagcggtaccggcattgcggccatgtctgtcatgcggccggagcagat

SEQ ID NO: 362763 - DNA, 75 bp, Homo sapiens
ggacattgaggctggatgctgcgatcccgcaggactttgctataaaacacgtgaccctagggaaacttttgaagt

SEQ ID NO: 362764 - DNA, 101 bp, Homo sapiens
tatctccctaccaggagtttctagcactgaagggattgtttccattgccaccctaaccgtgctggcctatgaacgttacattcgcgtggtccatgccagag

SEQ ID NO: 362765 - DNA, 100 bp, Homo sapiens
agatttcatgaagatggcgccaggacgaaggccctactgggcaagatcactggggtgatcctgctggctgttggagtctggggcaaacttactctgggca

SEQ ID NO: 362766 - DNA, 75 bp, Homo sapiens
aagacaaaagacacagaagaaaaagtgggactgaagtacactgaagcagataacatttggtcagccaggcttgga

SEQ ID NO: 362767 - DNA, 75 bp, Homo sapiens
aggaaattacccagtatattcaaagctacaagggatttgttgacataacggatgaaacgaggaggaagagatagt

SEQ ID NO: 362768 - DNA, 90 bp, Homo sapiens
ggcggcgcagctcggaacccgccagggtccagggtccaggttccagcgcccggcggcccagaccattactgggacttccacccccaccac

SEQ ID NO: 362769 - DNA, 100 bp, Homo sapiens
ctgaaccaagacttacccgaagttgccgcggggccttccgatcccctaccccaccaacaactgaacgctttggtcaggctgctacaatggaaggaattgg

SEQ ID NO: 362770 - DNA, 75 bp, Homo sapiens
tctcactgcggagaggtgtttggtgcagaagtggtgccagtgaagaagaggacacatgaaggcttgctaccccca

SEQ ID NO: 362771 - DNA, 78 bp, Homo sapiens
aacgccaaacgcacgagtattacccctatctcagcagtgatggggagagccatagcgtatacaattggaccgtggatg

SEQ ID NO: 362772 - DNA, 60 bp, Homo sapiens
ttggagccagaagctacatgacccctaaacggtacctgggccagctggacgacagtgagt

SEQ ID NO: 362773 - DNA, 75 bp, Homo sapiens
gtctctgttcgtcaggaacgtggccgacgacaccagccgccgccgctccactgtcactctccaaggccagcgcca

SEQ ID NO: 362774 - DNA, 98 bp, Homo sapiens
atctcgcccgcccttccgtcccaggatagtgtgattgcgggaccatggaatttacaagttctttaaggaaaaacagtagtgctctgcatagtttactg

SEQ ID NO: 362775 - DNA, 100 bp, Homo sapiens
ccctggtcctctgccctcgcgccccgctagggccaggttatgggtgctacatgtgtgctttcagagcagtagtgtgaggaagcttggagtgggatggcag

SEQ ID NO: 362776 - DNA, 82 bp, Homo sapiens
ctccggcgtgttcatgcccccgggaacatccagtcatggataaaaatgagctggttcagaaggccaaactggccgagcaggc

SEQ ID NO: 362777 - DNA, 100 bp, Homo sapiens
gtcgggtgccgagatttgggagagacgctctgaactgactgccccgcatcaccggagcgtcccagctgcgaggaggtggtgtttggactctagaccatgt

SEQ ID NO: 362778 - DNA, 100 bp, Homo sapiens
ccgccggctccgcggcgatggcgctctataacccctaccgccacgtgattctaccagaaaggaatgaagaacagaaccttcaggaattgagtcacaatgc

SEQ ID NO: 362779 - DNA, 98 bp, Homo sapiens
ggccacctctgagaagggagacgacgctgctgggtccgctgagcggggcgacccgagtgccggtggtggtgtgcacattgagccccggtatagacagt

SEQ ID NO: 362780 - DNA, 151 bp, Homo sapiens
attgacattcaaccgtacccgccaagctgtcatcacaaaagagttgattgaaattatctctggtgctgcagctctaaaaatatgtcgtaactgcaagtgtggccaagaagagcatgatgtcctcttgagcaatgaagaggatcgaaaagtg

SEQ ID NO: 362781 - DNA, 90 bp, Homo sapiens
gaaagttctacaaggtgtcatgatgccccagtgaagttgtgtgactttggatttgccaagattgaccaaggtgacttgatgacaccccag

SEQ ID NO: 362782 - DNA, 100 bp, Homo sapiens
gaaaaggggctctccctgggaggatctgacggagggctgcaagctttcttcctggtggcagatgacatcatggattcatcccttacccgccggggacaga

SEQ ID NO: 362783 - DNA, 101 bp, Homo sapiens
gcggaggaggaggaggaggcgaggaggagagactgttcgagaacttgtcttggacaattgcaaatcaaatgatggaaaaattgagggcttaacagctgaat

SEQ ID NO: 362784 - DNA, 98 bp, Homo sapiens
tggaatactctactggacaaacatttcctccaaggtggggagcattaagcgggaaatgaccttcacatttcagtcagaggacttaaaacgtgactgtg

SEQ ID NO: 362785 - DNA, 100 bp, Homo sapiens
ccgcggatccccaagcccgccacgccgcccagcccggccccgcccgcgccggaagagccacgccggaattgaatgatctggcacgggaccctccagcaca

SEQ ID NO: 362786 - DNA, 100 bp, Homo sapiens
agcaacggacactttcgcaacatcaagggagttttccggggccctctcagcaagaacgggaacaaaactctggagctcgaggccatgagcagatatacca

SEQ ID NO: 362787 - DNA, 100 bp, Homo sapiens
atcatcctctcccacctgtccaagctcaagatggtgtgatccctcacatccacaaatctctgattggaaagaagggacagcagaaaactgcttagaggga

SEQ ID NO: 362788 - DNA, 98 bp, Homo sapiens
acacgtggcagcaggatggcactggggcacacagttcaactcaagagtacccaagtggccttggaccatctggagtctgtgcctgagaaactgagcct

SEQ ID NO: 362789 - DNA, 100 bp, Homo sapiens
gggcctttgtccgtgttcggtgaccgcagcactggggaaacgatccgctcccaaaacggtcttttatcagaaatcaccgatccagagagcttcctgaagg

SEQ ID NO: 362790 - DNA, 82 bp, Homo sapiens
tctcggacgtgcggggcctgggcctcccggtccgcaagcaggtttacccaaggtccagcctagcccctaggcaccatgtcgg

SEQ ID NO: 362791 - DNA, 75 bp, Homo sapiens
ccctgctgcactgcttccagtgctgcggggcgaaggtgctgctggtgtcgccagccctgtatgatgagattcgtc

SEQ ID NO: 362792 - DNA, 99 bp, Homo sapiens
ggttgccttggaaaatgccaacgccgtgtctgaagctatccagtcagttcgctgctattcccatgggtcacaggagacagatgaggagtttgatgctcg

SEQ ID NO: 362793 - DNA, 75 bp, Homo sapiens
ctgaagggaagctgcagaatatggaaaacatatattggagctacatggattgtctgtagtgggaagtcttcatga

SEQ ID NO: 362794 - DNA, 78 bp, Homo sapiens
tgggcgcgcagatacccgcggtgcaccgcctgctgggagcgccgctcaaggtcctgaacgaggctgtgggggccctga

SEQ ID NO: 362795 - DNA, 98 bp, Homo sapiens
ggacgggggcccacggaggtcagaggggaggaggactctggagctgacagcgcgcacttcacccgcagttggcagttcaattaacctccagaagatgg

SEQ ID NO: 362796 - DNA, 85 bp, Homo sapiens
aaaggcaagacggctggcttggtgagggccattcacatgttaaactgcagcttgcagccatgttttgtatatcaaacctcatatg

SEQ ID NO: 362797 - DNA, 100 bp, Homo sapiens
ccaaccagagattcatctttcatgcagtgacatgttgataaaaaatgatggcttctccagggaaagtgaccgaggcagtgaaagaggccattgacgcagg

SEQ ID NO: 362798 - DNA, 75 bp, Homo sapiens
cacggacaacctcagaggacaacgaagtgttcggtgacttaagagattaaaattaatttggttgctgttggttct

SEQ ID NO: 362799 - DNA, 90 bp, Homo sapiens
ctgatttagaaggaggttcaggctacgttcctgagactggcccagacgctgcggcactatggctacttgcgctttgatgcctgtgtggct

SEQ ID NO: 362800 - DNA, 82 bp, Homo sapiens
cgggacacgcctagcgcgggctccagagcggttctggtgaggttggaaggatgcagccacccggttgtcatgaaaggcctgt

SEQ ID NO: 362801 - DNA, 100 bp, Homo sapiens
cgccacgcggcccgccggccacgcgccctgggacaaccacgtctccggccacgatatatttttgccatcatggatcagtttggagatatattagaaggtg

SEQ ID NO: 362802 - DNA, 90 bp, Homo sapiens
caaatctgaatcgacagtttcttttccggccctgggatgtcacgacacacaaactcgggccacttctaagagtctcttacctgttaggtc

SEQ ID NO: 362803 - DNA, 95 bp, Homo sapiens
cggcggcggttgcgggggggaagtgactgggcggtgccggcgccggagacgatgccgtttctgtgtctgtgtggagtgttgcaggacgagtggaa

SEQ ID NO: 362804 - DNA, 90 bp, Homo sapiens
atgccagccaaacctgtaaacaactttatgagtcttcctgccattgactctaccagaggagattcttcaagcttagttgctgaacttcaa

SEQ ID NO: 362805 - DNA, 74 bp, Homo sapiens
aggctcagtctgcggccaagactccatcctgcaaggaacctggcttctgtatttaccatgtacctggagcattg

SEQ ID NO: 362806 - DNA, 82 bp, Homo sapiens
caaggatattcaacgcatccccagcttaccgcccagtacgcagactctgtttgaaccctggtgacacttaaattcatttggt

SEQ ID NO: 362807 - DNA, 90 bp, Homo sapiens
gaggggtgaatcagtatgttgtgcaagaggtactgtccatcaaacatcttccaccacagcttagaggggcaatttgaaattcgatatgca

SEQ ID NO: 362808 - DNA, 78 bp, Homo sapiens
caaggcagctaagaatagactgcatatatattgggattttaaaccgctgttctgtaggaagttatacaatcaattttc

SEQ ID NO: 362809 - DNA, 100 bp, Homo sapiens
cgcaggcattgctctggggaagctgtgcacagctgagcccagctctgatgtgaattacctcattgaagaagctgccaaaatgaagaagatcaagtttcag

SEQ ID NO: 362810 - DNA, 75 bp, Homo sapiens
cggtgttaacgtctgctccagctcgcagcccgctgctggtgactctgacagttggcagtgtgaacctagagatcc

SEQ ID NO: 362811 - DNA, 75 bp, Homo sapiens
cgaggagggttgctagtggagaagcttcggaaccaaaaagaagcttcccagagccggggccaggagccccaagcg

SEQ ID NO: 362812 - DNA, 95 bp, Homo sapiens
tgacaagaggcattgctaaaataattagtgcacacatccatccagtgtgttctttatgatcttcttggaaacagaattgttctacaaaggtatcc

SEQ ID NO: 362813 - DNA, 82 bp, Homo sapiens
acctgttaagctttattccatgaaatttcaagggccagataatggttgtaaagctctctgaaatagtgaccttagcgaagca

SEQ ID NO: 362814 - DNA, 100 bp, Homo sapiens
tcggagtacagcaagcagatgcagagatgttggatggcaagcatgtggtgtttggcaaagtgaaagaaggcatgaatattgtggaggccatggagcgctt

SEQ ID NO: 362815 - DNA, 75 bp, Homo sapiens
acggagactgagtacttcgctgctctgaaaatttttactactggagatgtcaacaaagatgggaagctggatttt

SEQ ID NO: 362816 - DNA, 90 bp, Homo sapiens
ctcctgagtagctggaattacaggaatgtaagaagcacttggcaggcttgggggctttggggctgggcagcctgatcactgaactcacgg

SEQ ID NO: 362817 - DNA, 100 bp, Homo sapiens
gccggagcagctcctaacccagacttgtgcaccatggacaattttgctgagggagatttcactgtggcggattatgccttgttagaagattgccctcacg

SEQ ID NO: 362818 - DNA, 74 bp, Homo sapiens
gtcgtctgccacaagctcgccacacgagagaagaagaaggaggttcctgctgtgccagaaacccttaagaaaaa

SEQ ID NO: 362819 - DNA, 83 bp, Homo sapiens
ggaattggcaaaggatactagaagtgatcacttaacagttgtgaatgcgtttgagcaattctgtggtgttcttggtcacacat

SEQ ID NO: 362820 - DNA, 100 bp, Homo sapiens
cgactgggaccgggacctgctgctggacccggcctgggagaagcagcagcgcaagtgctcctgcgggaagaagtgtcgcggctccaggaggaagttcacc

SEQ ID NO: 362821 - DNA, 82 bp, Homo sapiens
cctctttaacccagttcccaccctcacagtcagcaattctgtggtgttcttggtcacacatttatggagtttctgaagggca

SEQ ID NO: 362822 - DNA, 75 bp, Homo sapiens
cagctcaacgtgtgcaactgggcggtcatggtgtacatcggtgagctcccgcaggacttcctccgcatcacgccc

SEQ ID NO: 362823 - DNA, 114 bp, Homo sapiens
caggagctagaactagcggaatgtcctactacggaagccggagctgaaaattggctcctccgcctctgatgcagaatttgatgctgtggttggatatttagaggacattatcat

SEQ ID NO: 362824 - DNA, 100 bp, Homo sapiens
gtcgggttttgagctgccgcggtcccgggactgaggtccaggagccggctgtgcacatcccaggacaggagcccctgaccgcgtccatgctggctgcggc

SEQ ID NO: 362825 - DNA, 132 bp, Homo sapiens
actgaaagtagtgcatccacttgcacaacccaaggcagaagatgacacttgggagcctggaagtaccaccaagaacagggaaggacaagccagaggctggaggaagatacctgcagaacacagacctgacaa

SEQ ID NO: 362826 - DNA, 102 bp, Homo sapiens
gtcatgactgtgtcctttcataagtatggagagtacttcccaggaactggggacctacggatgctggaatgggagatggctgtgagagagaaggaggtggag

SEQ ID NO: 362827 - DNA, 76 bp, Homo sapiens
tttttgggaaaagacagagtaagaagactcccgagaatcgggaccagtattcacatctgctaagtgatcattttct

SEQ ID NO: 362828 - DNA, 75 bp, Homo sapiens
aaaaaccaactgaagcagctgacagaggtggagccgccaccaaaatgcagattttcgtgaaaacccttacgggga

SEQ ID NO: 362829 - DNA, 82 bp, Homo sapiens
ccgctggccgggctggctgcggccgccctgggccgggccccaccggacgtattctaccttgtaaatactgttatttgtatat

SEQ ID NO: 362830 - DNA, 75 bp, Homo sapiens
cccagcgccgcctcacctcgcttttcgaactccgcgacccgagcgcaaggcagccatgttgttcagttctggagt

SEQ ID NO: 362831 - DNA, 100 bp, Homo sapiens
gctaggctacacacacctgtactcttccactcaggcattggacaaaatccggtatgaaagcttgacagatcccagtaaattagactctgggaaagagctg

SEQ ID NO: 362832 - DNA, 98 bp, Homo sapiens
cgtcgttgtcgccccctcctcgtcgggaagaatcgtttggtctcctgccgtgcccgacaatgcagatcttcgtgaagactctgactggtaagaccatc

SEQ ID NO: 362833 - DNA, 59 bp, Homo sapiens
acttctactgacgaagcttggaagttgcagaaggagtcattgcagttttcagtagaggt

SEQ ID NO: 362834 - DNA, 100 bp, Homo sapiens
gggaccggctgctgcaggccatcgacccccagagcaacagagaaatattcactggaacaagacattcgagaaaaggaagaggcaatcagacagaaaacca

SEQ ID NO: 362835 - DNA, 75 bp, Homo sapiens
gtgtgttgatcttggcttgattcagtctgccttgtaacagaaagctgtagaggaaccccttaatggtatgtggtt

SEQ ID NO: 362836 - DNA, 74 bp, Homo sapiens
gacactgtgagggaacaagaccagagtttcacggactcatctgatgatgtgagaagagttcagaggagggagaa

SEQ ID NO: 362837 - DNA, 100 bp, Homo sapiens
tgctggggcgtactccaaagttgttcaggaacgagtagtgaagccccgtgtcaactcactgaggcccaaggggttagggctgggtgccaacctgaccgag

SEQ ID NO: 362838 - DNA, 99 bp, Homo sapiens
agacaccaagtgagaggccaaccaggacctgggaggaaggcaaggtgctcatctttgatgactcctttgagcacgaggtatggcaggatgcctcatctt

SEQ ID NO: 362839 - DNA, 75 bp, Homo sapiens
gatattttccgaaagctgggactgaggcagtgccttgtaactcacaatgggtattccagcatattaaatgatttt

SEQ ID NO: 362840 - DNA, 100 bp, Homo sapiens
cacgttcggcagttatgagtgccaatgccgcagtggcttcgtcctccatgacaacaagcacgactgcaaagaaggacagagcgggatgccaccagcttgt

SEQ ID NO: 362841 - DNA, 115 bp, Homo sapiens
gctctcgcaggcccccccgcgccgaccgcgttcctatggacagacgcacagacacctgcagccgattacacctcaacaagaaggcaactgacaaacagccttatagcaagctccc

SEQ ID NO: 362842 - DNA, 75 bp, Homo sapiens
aagactccactctccctacgagatcaccacagaccgtggtttgtgatgaaaatggttccaagggctatggatttg

SEQ ID NO: 362843 - DNA, 50 bp, Homo sapiens
cgggagctcaaagtgtgccttctcgggcaagagtgagccatggagctacg

SEQ ID NO: 362844 - DNA, 88 bp, Homo sapiens
ccgcccggccccagccctagcgctggccgcgaccccggcgatccagtccttctgtggaacttctgaacatcttttattagtggaaata

SEQ ID NO: 362845 - DNA, 101 bp, Homo sapiens
tcagcctcccaagtagctgagattatagagagttggaaactcaactattggaacaatgtactgttgacacaagtgttgctaaagaacagagccttccctca

SEQ ID NO: 362846 - DNA, 73 bp, Homo sapiens
ggaggtcacccgcgtgctaatggtggaaacccacaacggggacggcaaaacagaacagaaaggcggagataaa

SEQ ID NO: 362847 - DNA, 90 bp, Homo sapiens
cggagcgtgccctcgccgctgacctcctgccccccgaggtctgcagtctcctgaacccagcagccatctacgccaacaacgagatcagcc

SEQ ID NO: 362848 - DNA, 76 bp, Homo sapiens
tggagcccagaatgaagagatgttacccagtatcttggtgttgctgaagaggcatgaaggatatgtaccaagcagt

SEQ ID NO: 362849 - DNA, 83 bp, Homo sapiens
cttgatccgggagtctttccactggccctcccaggcccaatacttcaaagcatcctacctctgctcaatatatattacttgga

SEQ ID NO: 362850 - DNA, 75 bp, Homo sapiens
agcagctggctctgggccttgaacattccgaaactgtcaagattggcaaggttcggctcctggctgatcccactg

SEQ ID NO: 362851 - DNA, 75 bp, Homo sapiens
tatccaccatttacttaacagattacaggactttgcctcccgggccaaactggcagttcaaaaactagtacagaa

SEQ ID NO: 362852 - DNA, 108 bp, Homo sapiens
acagctagaggccgcgcagcagcaaaggatgagcggaaccttggaaaagctctttcgacgtgtagcagcagctttgccgggaatggaaagcacacaggacagaagcag

SEQ ID NO: 362853 - DNA, 104 bp, Homo sapiens
tcaggagaaagttctgccactaatgaacccaggtctcatctgagtagcagcttcctgccctccttcttggagataagtcgggcttttggtgagacagactttcc

SEQ ID NO: 362854 - DNA, 90 bp, Homo sapiens
cacgtccagagggcggtatgcgacacacgggccaaatatcgagagggacgacggcctcgtgctgtgaagatgctattaactgagtacttg

SEQ ID NO: 362855 - DNA, 97 bp, Homo sapiens
ttccatagtgaagtgctccactcgaacagatgtgagcgagaaagccgttgcctccagcaccacttctaatgccatcatcgtctacagactgccgtgg

SEQ ID NO: 362856 - DNA, 100 bp, Homo sapiens
ctttgatatgattgaagaagcatacatgacaaaatgtggccacagcttttggtaagaatgattgatgttggctgatattggagtgctcattcacatgaag

SEQ ID NO: 362857 - DNA, 75 bp, Homo sapiens
ctacaggcgtgcaccaccatccccagcttcgctgatcctgcaagctccactttctgtgtttgaaggagactctgt

SEQ ID NO: 362858 - DNA, 75 bp, Homo sapiens
gcaaacttgacactcaccctgaccgacctgcgaccgcatcaagcagtccgccagcggaaccaagcggcgcgtgtt

SEQ ID NO: 362859 - DNA, 100 bp, Homo sapiens
gctagcgcgaccctgagccggcgcccgtggtccggccatggacgacctcgagtgaagtcaccctgctgagaaatgaagtggcacagctgaaacagcttct

SEQ ID NO: 362860 - DNA, 75 bp, Homo sapiens
gccagcggccgagcgggcggcttcctggcctgggcgctccggtggcggcggaggatgacgacctcaggcgcgctc

SEQ ID NO: 362861 - DNA, 75 bp, Homo sapiens
ccgttgcctgctcccggagggagacgcgctgccgaggagaacccagcggcatatagcactttctacattgtgggt

SEQ ID NO: 362862 - DNA, 101 bp, Homo sapiens
gacggaaatgtgtcatcgaaagccaggtgaatctggattgggaaagtcgacattaatcaactcattattcctcacagatttgtattctccagagtatccag

SEQ ID NO: 362863 - DNA, 83 bp, Homo sapiens
tttcactgccatgtctttgaacagcagtgcacagtgcagtcttcttcgtggctgaacaggattcccgagaaagcaccaagagg

SEQ ID NO: 362864 - DNA, 101 bp, Homo sapiens
tgacagcgcctcaccgccaccagctcctggaccaccatggccaagaaccgcagggacagaaacagttggggtaggagcaacggtgggaatgccctctgagg

SEQ ID NO: 362865 - DNA, 100 bp, Homo sapiens
tcggcgggcgcggacgcgcagcatggcggtggaggacgaggggctccgggtcttccagagcgtgaagatcaagatcgggcgccaatgcttcggcattaga

SEQ ID NO: 362866 - DNA, 75 bp, Homo sapiens
gtagggagctcccccagcaccgaagactgcgatgcacctgcgcctgtccctgaacggccacggccagtgtcacgt

SEQ ID NO: 362867 - DNA, 83 bp, Homo sapiens
ggtgaaacaccactgaagcattgccaagctcttttgtgacagggacggcttgttgcgggcacttctcacccctgagaatctgg

SEQ ID NO: 362868 - DNA, 50 bp, Homo sapiens
agaaacattcacagaagatcctagtatccctgctggagtaccgaaaacgg

SEQ ID NO: 362869 - DNA, 82 bp, Homo sapiens
gtgcaaagtagcaattaactggtctggagggtggcatcatgcaaagaagtctccaggaaaagttgggctttcaacattcaag

SEQ ID NO: 362870 - DNA, 50 bp, Homo sapiens
ccgctggcgagcgccaccgcatggggtttccaggcctgaggtgcccgccc

SEQ ID NO: 362871 - DNA, 75 bp, Homo sapiens
gaaacttttgccagcacattcttacgacagggagcccagaagttgactggtctgagtgtctccaatggaaaggac

SEQ ID NO: 362872 - DNA, 95 bp, Homo sapiens
agcaaccccaagtcaccacaaaaacctatcgttagagtcttcctgcccaacaaacagaggacagtggtctccgctggttcatcctccaagccatg

SEQ ID NO: 362873 - DNA, 108 bp, Homo sapiens
cctttccaaacctttgcagctgccctttgttaaagagtggttttacccctttgcacatagctgcacattacggaaatgtcaacgtggcaactcttcttctaaaccggg

SEQ ID NO: 362874 - DNA, 100 bp, Homo sapiens
ggctgaggaggggccccagcagcccccgaaggccctatcaggacatggagtatgaaagacgggtcctgcagttctgagcttgggttccctttgcctggac

SEQ ID NO: 362875 - DNA, 101 bp, Homo sapiens
ccgcttgcgtcagggacctgcccgactcagtgtggctgtcgctgggcgcggactccaacgggagcggcgtctctgtgctgctggagctggcacgcctcttc

SEQ ID NO: 362876 - DNA, 82 bp, Homo sapiens
gcaggagtcggcggctcagttgtccatgaccctgaaggtccaggagtacccgaccctcaagagaatgcctgaatctaaggtg

SEQ ID NO: 362877 - DNA, 108 bp, Homo sapiens
aaaagaacaggaccccgtacgtcactaccactgtctctgctcacagtgccaaggacaatacatggcttgatatacaacgccctgaagctcttcatggagatgaaccaa

SEQ ID NO: 362878 - DNA, 100 bp, Homo sapiens
tttctactagcgtggaggaacggaggaagaatccattcacactccccaaaccagcggtcttgcgagtggctggttccctgcagaagagcacagaagtgat

SEQ ID NO: 362879 - DNA, 75 bp, Homo sapiens
agcggcagtggcggcgcgtaggaggcgaatattccaacccgggaccggctagagggcatggcagccttcagggag

SEQ ID NO: 362880 - DNA, 73 bp, Homo sapiens
acatcccatgggtgttggattcggccatcaggaggaggaaattatggaagtggaaattacaatgattttggaa

SEQ ID NO: 362881 - DNA, 100 bp, Homo sapiens
ccacccgcagacggcccttctgggaaatctgaaatagagtactatgctatgttggctaaaactggtgtccatcactacagtggcaataatattgaactgg

SEQ ID NO: 362882 - DNA, 100 bp, Homo sapiens
taaacaacagaggactcaacatatttgcagtagaagtgggacccaaatctacaatggaatataaatagtttctggaaaggacactgacaacttcaaagca

SEQ ID NO: 362883 - DNA, 83 bp, Homo sapiens
tggagttcctcctggggaacccgttcagcacaccagtggggcagtgcctcgtttggcaatgaggagcagcagctggcgtgggc

SEQ ID NO: 362884 - DNA, 90 bp, Homo sapiens
ccgcaaggaggaggccaccaaccagacgattccctcccaggctgtccctcgccgccttgctacagcccccaagactgaaaaacctcccgc

SEQ ID NO: 362885 - DNA, 100 bp, Homo sapiens
cgagaagtttttacaaagaacatgctcacatcttcaggtgcctcattcacatacgtcaaggaaattgagaattcctggaaaactcaagcaattcgtattt

SEQ ID NO: 362886 - DNA, 100 bp, Homo sapiens
tgtggacgccctgagctcccattaggagccgctggctgcggcagcaggggactagcgtgagaggtgttccatttggtttaaaaaatacttcaagtctcag

SEQ ID NO: 362887 - DNA, 75 bp, Homo sapiens
acagcccgaactgcaagttgcttattgtttcaaatccaggaggagatgttaaagtaacccatcttgcaggacgac

SEQ ID NO: 362888 - DNA, 100 bp, Homo sapiens
gtatagtcttccgtcacttagctgaccatgggcaactttctgggatccagcgagcgacatggctctgtgtgctccgggatggagcaggtgtgcagagggt

SEQ ID NO: 362889 - DNA, 100 bp, Homo sapiens
gaggcccagctcgggagccaagcagctgaaggacatcatgacagtgctctaactcatatgctttacacagccattgccttcttaggtgtggcagatcaca

SEQ ID NO: 362890 - DNA, 75 bp, Homo sapiens
gtggagactgggacttaaaagtcatgtactaggttttgacaagcttgcatcatgcgtgagtataagctagtcgtt

SEQ ID NO: 362891 - DNA, 83 bp, Homo sapiens
cgtcccctgcaccatgagctggggcaccgagctctgggaagtcctgacggccacgctggatctggaggacgtccggagctaca

SEQ ID NO: 362892 - DNA, 100 bp, Homo sapiens
tgctcctcgccgcggcggggactgcaggacgcccttgtggaatttgggtcatttgacccttcctgcctgatgcctacctgcccagattactggacctact

SEQ ID NO: 362893 - DNA, 96 bp, Homo sapiens
ccaggttgccttggaaaatgccaacgccgtgtctgaagaccaaaccaatgcacaactcctacgtactgatggtggtcttacgtttccctaagtttc

SEQ ID NO: 362894 - DNA, 101 bp, Homo sapiens
ttcgaatcacttaaaggagtggacattgctagcaatgagctcccaaagccatccaggtgctggagaatctggtaaaagcaccattgtgaagcagatgagga

SEQ ID NO: 362895 - DNA, 80 bp, Homo sapiens
ccttgcaagaagtgaattacccgaccctggttttaaaatcaaagatgggaaaatcggagaaaattgcccttccccatggc

SEQ ID NO: 362896 - DNA, 50 bp, Homo sapiens
agcagattttgtaagggaacgtgccggtggtggtgtgcacattgagcccc

SEQ ID NO: 362897 - DNA, 100 bp, Homo sapiens
taacttggacacatgtggttccatcagtcaggtcattgagcagttacctcagccaaacaggacaagcaggggctttgttatgcacctaaagccatattgg

SEQ ID NO: 362898 - DNA, 75 bp, Homo sapiens
gttgtttgggctgtgtttcgaaatgaagacagagtcactgctagttggattgaagcacacctgccagatgattct

SEQ ID NO: 362899 - DNA, 75 bp, Homo sapiens
gtgggacttgtgtagtggagaaaaatggtcctatgtgtcgatttaaccacttatgatacagtgaaacactacttg

SEQ ID NO: 362900 - DNA, 82 bp, Homo sapiens
gccaggacgagaggatgcggagcccgcagaacctccacagtcaagaggacgcaacgaaggttttgggaacagtaaaatggtt

SEQ ID NO: 362901 - DNA, 101 bp, Homo sapiens
ccacaaccaggcgaagcaggtagtggcgctgaatcgctcctgccgcgggtgagaaagatcagtctaaagaaaaggagaagaaagtgaaaaaaacaattcct

SEQ ID NO: 362902 - DNA, 98 bp, Homo sapiens
cctcttcttggtgctgtggctgatgcatttcatggctatcatctacaccggttcaagctctacgttcgtgacatcaaacctcctgttgggccatttcc

SEQ ID NO: 362903 - DNA, 115 bp, Homo sapiens
tcatggccatctatatgtcaataaagtagcagggaattttcacataacagtgggcaaatggtggcctagcaagtcgcctacagcagattcaagtgcatgtgttagaaagagaggt

SEQ ID NO: 362904 - DNA, 101 bp, Homo sapiens
aaaattacgaactcactgagctggaagtcattcaacgggaattgaatagacttaattcagtgcacaaatgagatgaatgtgaacatcccacagttggcaga

SEQ ID NO: 362905 - DNA, 97 bp, Homo sapiens
gcccgcaagagcgagccgcctgccccggtgcgcagacagagctattccagcaccagcagagactaactggatcttctgggtttgtgacagatggacc

SEQ ID NO: 362906 - DNA, 51 bp, Homo sapiens
aaagttcctattgatggtccccccataaaggcaattctcaagttcaactac

SEQ ID NO: 362907 - DNA, 75 bp, Homo sapiens
gtaaggagcagcttccaggatcctgagatccggagcagccggggtcggagcggtagagacggggtttcgccgtgt

SEQ ID NO: 362908 - DNA, 101 bp, Homo sapiens
ccaggatacagggtcaaaggagagcacaaccatcgcagttggaagcccatggggcaggccattgagaaactagtcgctcttctcaacacgctggacaggtg

SEQ ID NO: 362909 - DNA, 101 bp, Homo sapiens
atggcccctcctcgatgtcccctccagcgccacagtcaaggacacgaggtcaccatctccagcacacttgtggtagacggaggagaagtccatccccacca

SEQ ID NO: 362910 - DNA, 100 bp, Homo sapiens
ttcaagttcccggctcccaggtttattctcccatagcatgtgttctggagagtcttggcttctgggaggaagtcagagggattatctcaggatcagagct

SEQ ID NO: 362911 - DNA, 82 bp, Homo sapiens
cgcgggccctgccctgggctggaacgaccctgtgcctccggagccagcgtggtggccatagacaacaagatcgaacaggcca

SEQ ID NO: 362912 - DNA, 99 bp, Homo sapiens
cactatcacgcctctcatgttcacaggtgaagattgtccccagtggatggtccctatcacaatctctactagtgaagaccccaaccaggccaaactaaa

SEQ ID NO: 362913 - DNA, 75 bp, Homo sapiens
cctggcaagattcttctgaattgtgctgccttggccaaaagagtgagacggtttaagcggaagcatcttactgcc

SEQ ID NO: 362914 - DNA, 90 bp, Homo sapiens
gccacccagtcccacttcaaacattcgtctcggaaaccccgcctcttacagtcacgagacagcccacctgaggatattgaccataaggac

SEQ ID NO: 362915 - DNA, 100 bp, Homo sapiens
tggagaacctcacagaagaccagaagttcaaaatgctactattgagtttatggctccttcagaatacatggtgaaatgacaatggatgctctgttggctc

SEQ ID NO: 362916 - DNA, 75 bp, Homo sapiens
ctggaccctacctacatcctgagctacatggccccctggtttagggagggaattgaatgatctggcacgggaccc

SEQ ID NO: 362917 - DNA, 50 bp, Homo sapiens
gtctgtggtgtgtttgctgttcccaggtgctggagaatctggtaaaagca

SEQ ID NO: 362918 - DNA, 96 bp, Homo sapiens
tggaagttgagcaagagcagcggcgcagaaaggtggaggccgggaggacgaagactacgtctactttgagaactcctccagcaacccatacctgat

SEQ ID NO: 362919 - DNA, 60 bp, Homo sapiens
tgcttgccgccctctttggatacctaacattttacggtattttctaaggaagagctaagg

SEQ ID NO: 362920 - DNA, 100 bp, Homo sapiens
ctgagcagccaacacaccagcccagacagctgcaagtcaccatggacgctgaagctctatgttctatgatgaggatggggatctggctcacgagttctat

SEQ ID NO: 362921 - DNA, 101 bp, Homo sapiens
gccctggaatatgaagagacatgagatggtagctaaacatttagtatttaggtcagttaacgtccataccaggatacctgaatccctccagtaggactgaa

SEQ ID NO: 362922 - DNA, 80 bp, Homo sapiens
tcaaacttagcgcctgcttgttttccagaaggtgatttactacctctgcatcttattgaaagatccagtggaaccacatg

SEQ ID NO: 362923 - DNA, 50 bp, Homo sapiens
ggaggttgcccagaagaaaaaggaagctgccacttttgctagagagcaag

SEQ ID NO: 362924 - DNA, 75 bp, Homo sapiens
ttggagccccccaggccccagtaggttaatcactgttctgaagatggtgtttgtaacaccagttatgcttcatac

SEQ ID NO: 362925 - DNA, 75 bp, Homo sapiens
gcatagagaatgagatagccgtcctgagaaatcagaaaaagtggacagggcagtgctgaaggaactgagtgaaaa

SEQ ID NO: 362926 - DNA, 50 bp, Homo sapiens
catcatgctgaaacgattcaatagcattagtgccagcagtagttcccaag

SEQ ID NO: 362927 - DNA, 85 bp, Homo sapiens
aacaaatcagcctggtcaccagcttttcggaacagcagagacacagagggcagtcatgagtacaaatggtgatgatcatcaggtc

SEQ ID NO: 362928 - DNA, 83 bp, Homo sapiens
cctgctcaaagccctgggtcgcttggaagaagccaaggcacagttcgagtgacaactgctgcccatcttgcactgctggtggc

SEQ ID NO: 362929 - DNA, 100 bp, Homo sapiens
ccgagaccccatcaacgtggagggcctgctggtgctgggagaccgtgaagtgcaaagcagatggagtccaggccctcggggagacagcacgccagtgagg

SEQ ID NO: 362930 - DNA, 92 bp, Homo sapiens
ggggacccgggacgacgagtacgactacctattcaaaggctcgggacgtgtacgaggaggccatccggacagtgatgaccgtgcgggacttc

SEQ ID NO: 362931 - DNA, 100 bp, Homo sapiens
gtgcagcccaacttccagcaggacaagctggaggtcacagcagatctggcagagcggcggcgcatccgctcagccatccgggaactgcagcggcaggagc

SEQ ID NO: 362932 - DNA, 75 bp, Homo sapiens
cggatctgacggggcgggacctggcgccaccttgcaggtatacaaaactaggatatgctggaaatacagaaccac

SEQ ID NO: 362933 - DNA, 75 bp, Homo sapiens
taaagttgacagcagaggcagagggtgttgaaagcagcaggggcctagaagacattaaaccgataccacagaaat

SEQ ID NO: 362934 - DNA, 121 bp, Homo sapiens
gtcgggctggccatggcgaggggtgcacggcggccacctgagtggcgcggcggtgtcaggtgctggagaatctggtaaaagcaccattgtgaagcagatgaggatcctgcatgttaatggg

SEQ ID NO: 362935 - DNA, 76 bp, Homo sapiens
ctttcacttattcatctgtccagcatgactcatccccgggagtgttgagatgtcctggaacaggtggaggcctatc

SEQ ID NO: 362936 - DNA, 83 bp, Homo sapiens
cccggagaactctaccctggaggagattctggggcagtatcaacggagtctccgggccgggggccatcaagtataagaccaca

SEQ ID NO: 362937 - DNA, 100 bp, Homo sapiens
tagcaagatcatcagtgaggagtgtcggaaagagggccgagatggacgaaaaaatgtggttccttgtgttctctctgtaaatggggacctagaccgaggc

SEQ ID NO: 362938 - DNA, 100 bp, Homo sapiens
agaagatgaagaagattgtggatgccgtgatcaagtacaaggacaggttgaaatcacaaagattagacacctttttagataggtgttcttcagcaccact

SEQ ID NO: 362939 - DNA, 100 bp, Homo sapiens
tagtaagaaaacaaaaactgatgaccaagagaatgtgtcagccgatgcaccgagtccagcccaggaaaatggagaggggacagagggacttggactggct

SEQ ID NO: 362940 - DNA, 100 bp, Homo sapiens
ccaacgtcgccccggtttgacgcacacggcaccaaactaaggctcccctgatgctcttcagaatccctgctacatcggcactcatgggtgtgacaccaac

SEQ ID NO: 362941 - DNA, 82 bp, Homo sapiens
ggatctgtgtgcccacagctcctggagccccacagagatcctgaaggagctagacgagtgctacgagcgcttcagtcgcgag

SEQ ID NO: 362942 - DNA, 100 bp, Homo sapiens
tccacagtgattgatgctgcctcagtcccggctgagacaacaggacatcggcctgaagacccacctggaccagctggacctgcagattagcaagctgcag

SEQ ID NO: 362943 - DNA, 100 bp, Homo sapiens
aagagtcttcggcatcgggcgacagcaggtcacagtggacgaggtgttggcggaaggacttcctcgttctgcccatcttcctaacaaggctatggctgat

SEQ ID NO: 362944 - DNA, 98 bp, Homo sapiens
cgagatttgggagagacgctctgaactgactgccccgcatcaccggagcgtcccagctgcgaggagggaaaagaagatctcccggagcagtgccctga

SEQ ID NO: 362945 - DNA, 90 bp, Homo sapiens
tggcagccaccacgggctcggggtcaatacacctaagaaacaaggaggactgggacccatgaacattcctttggtatcagacccgaagcg

SEQ ID NO: 362946 - DNA, 80 bp, Homo sapiens
actccacttttatctccaccatagagaaacttgcccaggccaaagaagagaacgtgggcttacatcagacactggatcag

SEQ ID NO: 362947 - DNA, 116 bp, Homo sapiens
gctgacaagacctacatgttacgagaatatacgtcacgagaaagcaaaatttctagtttgatggttgttgaggcatcttcattaagctggagtaccaggataaaaggcttcattgc

SEQ ID NO: 362948 - DNA, 100 bp, Homo sapiens
cggtgagaaggcccagtttgcacagccggagatcttaataggaaccatcccaggctcgaaaacagcagcagcaacaccgactggagaacctccatggagc

SEQ ID NO: 362949 - DNA, 96 bp, Homo sapiens
atacttttgaaggtgcaagatactatataaaattcatgatgttgctatcaaaagttgagaaattgtcagaagaaatcatggagataatgcaaaatt

SEQ ID NO: 362950 - DNA, 98 bp, Homo sapiens
acctggacatcgatggacgcattcagaagaaggatatggccctgaagccacatgagcggaaggagaagtgggagcgtcgtctcatcaagaagccccgg

SEQ ID NO: 362951 - DNA, 100 bp, Homo sapiens
tatttgactgagagaaacccactgaagacgtctgcgtgagaatagagaccaccgaggagaagtacagcatcggggagcccacagtgccatccaccctggc

SEQ ID NO: 362952 - DNA, 75 bp, Homo sapiens
ccagccaagagcatggctatgggagaaggaaggcaggcagcaggcaggtgactatgaaaggcttatatttccaac

SEQ ID NO: 362953 - DNA, 122 bp, Homo sapiens
aggaatatgtggctaatctccttaagtcggccttccctcacctacaagagacagtcattttgtttactcattcagccctgttgcaggtcccaataaactcttcataaggttgacagaagcac

SEQ ID NO: 362954 - DNA, 75 bp, Homo sapiens
gccgttagtcccttaatacaaagggtagattttcgttccgtcacccaggctggagtgcagtggtgtgaccttggc

SEQ ID NO: 362955 - DNA, 50 bp, Homo sapiens
tctctacacctactgggctcctctgatgagctttgatccaaaccttctcc

SEQ ID NO: 362956 - DNA, 105 bp, Homo sapiens
ctgcgggccaggggtactcggaaggcgcgggcaggagcctggcgaggatgcaccttcccctgccttggaaaggctttcagtccagtgtaaagctgttggagcgcg

SEQ ID NO: 362957 - DNA, 74 bp, Homo sapiens
tactagcccaacagcaactgacagtgccggtggtggtgtgcacattgagccccggtatagacagttcccccagc

SEQ ID NO: 362958 - DNA, 100 bp, Homo sapiens
gcaataattctccattgagaagagagaagaacattctcgaatacctagaatgggcttaagtgagagctttttcatggtgaaaggcgcagccctcttctta

SEQ ID NO: 362959 - DNA, 83 bp, Homo sapiens
gaggaggacagttcgctacacagcaatgcatcgaggaagaagaaattgtcgagacgaataacatgaggtcatatagaatccca

SEQ ID NO: 362960 - DNA, 100 bp, Homo sapiens
cgtgaccgagaccgtgaccgagagcgtgaccgagagcgcgaatatcgtcatcgttagaagttgaagtcaagtgattttgctgttctgaagcagttgttgc

SEQ ID NO: 362961 - DNA, 82 bp, Homo sapiens
tttaatggaccagatcaggatttgagcggaagaacgaatgtaactttaagaggtctgcggggtttccgagaggctcgccggg

SEQ ID NO: 362962 - DNA, 73 bp, Homo sapiens
gctgaaaagtgcctgcaatttgccatttatttgtaataagatgccttcaattaagttgcagagttctgatgga

SEQ ID NO: 362963 - DNA, 100 bp, Homo sapiens
gcgtccctggagcggccgccttccagcaaaatggacccaagtggggtcaaagtgctggaaacagcagaggacatccaggagaggcggcagcaggtcctag

SEQ ID NO: 362964 - DNA, 82 bp, Homo sapiens
ggaggtcctgccgtccatgcggaagatcgtcgccacctggatgctggagtgtgtcccggcatggatatccggaacaacctca

SEQ ID NO: 362965 - DNA, 96 bp, Homo sapiens
ttcagtttagttgaggataccacattagagccagaagaggtcctgctgtactagccaccaaagcagctgctggtactaagaaatatgatcttagta

SEQ ID NO: 362966 - DNA, 50 bp, Homo sapiens
acagaatatttgatggatttgccgcagcttcaccagcctccaccaagacg

SEQ ID NO: 362967 - DNA, 100 bp, Homo sapiens
ggaacttgtgattgagcagtttgaagacttgctagttaggattttattactggcagcatgtatatcttttgtctatcagccacagtctctgcaagtttcc

SEQ ID NO: 362968 - DNA, 82 bp, Homo sapiens
ccgcgagggctccttccctcaggacatgtattcctctgagaaaccttggacagcagattttggtttaatatctgattgggac

SEQ ID NO: 362969 - DNA, 99 bp, Homo sapiens
aggcaccgggatcgtgaccgagaccgtgaccgagagcgtgaccgagagcgcgaatatcgtcatcgttagaagataagtttataccatggatagcacaaa

SEQ ID NO: 362970 - DNA, 100 bp, Homo sapiens
ctcggttcgagatggagcgggcgcactgggaggtggaacgggccgaactgcagggttatgtaccgaaggactctaccgtgtcagcgggaataaaactgac

SEQ ID NO: 362971 - DNA, 83 bp, Homo sapiens
gcccgggctgcggcgtgtgcgcgcccgccagctgctccggagatacggctgaccccgcactacatctacccaccagccatcgt

SEQ ID NO: 362972 - DNA, 75 bp, Homo sapiens
cccaccctgggcttcagcactggcagcccccaggcagcaattccatttccgtgagggcgtttctagatgaagatg

SEQ ID NO: 362973 - DNA, 98 bp, Homo sapiens
tgacccggagaaccccacgaaatcccttagagatttgtttgattccatggataaaacttcttccagtattccacctattattctactgcagtttttgc

SEQ ID NO: 362974 - DNA, 98 bp, Homo sapiens
ggcgctgctgctgtggggccgccgcctgcggcctttgctgcgggcgccggcgctggcggccgtgccgggagacaatgcagatcttcgtgaagactctg

SEQ ID NO: 362975 - DNA, 88 bp, Homo sapiens
gccacgagcaggtggtggagcggctgctggaaacgcaagacggtgccgagaagcagctgcgagactatggaaatgatgttagacaaaa

SEQ ID NO: 362976 - DNA, 100 bp, Homo sapiens
tctcactatttgaaaattcatgctgaaaaactgagtgaatatgatcagatttctccaccaaattctcagcctgataaggccttaattttaaagaccccga

SEQ ID NO: 362977 - DNA, 83 bp, Homo sapiens
cgggaagatggcggcgccgctcatccccctctcccagcaggtggatccataaagaacccagccaacccgcagagggaggggag

SEQ ID NO: 362978 - DNA, 74 bp, Homo sapiens
cagcgatttatacaactgcttttatgccataatgaataagtacattcccaggactcagtgacctttgaagatgt

SEQ ID NO: 362979 - DNA, 100 bp, Homo sapiens
ttaagcaaacgggaattctcgcgttctccttactatgacaatgtccgccccctctcttaccctgattcggatgctgtgctgatttgctttgacatcagta

SEQ ID NO: 362980 - DNA, 51 bp, Homo sapiens
gccaacccaaattaccttaattgttattcagcttctcaaggctggaaaagc

SEQ ID NO: 362981 - DNA, 98 bp, Homo sapiens
aagaggccggatggagtccgtgagatgggttttagctgccgccggagtcgagggtgaagagggaacagaaatctttgccccctgactttggaaatctc

SEQ ID NO: 362982 - DNA, 101 bp, Homo sapiens
ttttcctaaaaggattgtacaccttagaagtgcttaaggaagagtgatgaagtttttcagaaactttggaattggcagatgacatggccattgatattccc

SEQ ID NO: 362983 - DNA, 100 bp, Homo sapiens
ttggccttgaggaagaagacatgctctacagtgctcagtctttgagttgctctaggtcgtaaccagcctttgaaaaaggagaaaccaaaatggaaaagcg

SEQ ID NO: 362984 - DNA, 100 bp, Homo sapiens
cgaggagcctgagcgcctgccctgcctgcagcgcctcctggaccttggagctgatgtcaatgccgctgacaagcatgaaactggcgatggaatatgagag

SEQ ID NO: 362985 - DNA, 100 bp, Homo sapiens
ttacaagggttatatatggaattatggtaccctccctcagagtaccttcaagtttaaatctgagagtgatattcatttggcagaacatcataaacaggtg

SEQ ID NO: 362986 - DNA, 76 bp, Homo sapiens
gaggaaactctgcattctcgcttcctggagccgtggtccttcagcatatctctgtgctgcagacaacacaccttcc

SEQ ID NO: 362987 - DNA, 87 bp, Homo sapiens
tggcctagcacgtggaattcgcgaagctgccaaagccttagacaagcactcttggaaagaacaggctacacacttgatgtgaccact

SEQ ID NO: 362988 - DNA, 74 bp, Homo sapiens
cctgttcttcctgggggactggcaggttgcagagcctgaggcctgtgatcagatgtacgagagcttagcgcgac

SEQ ID NO: 362989 - DNA, 50 bp, Homo sapiens
tggatggtgcacactcacattgaggaccaagatcactccatggatgaaat

SEQ ID NO: 362990 - DNA, 49 bp, Homo sapiens
ccactggggtctccagactgtttttgtctgaacaggaattaagaataac

SEQ ID NO: 362991 - DNA, 75 bp, Homo sapiens
ctggactgtcctctacagaaggaagcacaaaaagggacagtcggacacattcagctaacgtattttagcaggtgg

SEQ ID NO: 362992 - DNA, 100 bp, Homo sapiens
ttgaagaggtcggaagctctgaggcccggggcttccggaggtcgcggagatggaattggagcagagagaaggggtccgcaagcaggtggtgaacatcccg

SEQ ID NO: 362993 - DNA, 82 bp, Homo sapiens
gctccgccagatcatcggtcaggccaagaagcatccgagcgttcaggaagatttgactgaagagaaaaaaagggaactggag

SEQ ID NO: 362994 - DNA, 75 bp, Homo sapiens
ccctcttcactttcctcggcaagaaatgtgtgagcacaatcattgtggagaagacagttcaagacctcctgaacc

SEQ ID NO: 362995 - DNA, 80 bp, Homo sapiens
cgtcatcacgccctttctcttgctcaaggcattgggatcccgtggcagttgcagcactgaagtggagaaggagacccagg

SEQ ID NO: 362996 - DNA, 51 bp, Homo sapiens
tggagtttacatatcggcgtttgctgatgattcctctgatcatgtcagtac

SEQ ID NO: 362997 - DNA, 88 bp, Homo sapiens
gaggcgctggagctgggtcagtccgccgctcaccccgcggccgcaccttcccgccttctcaggacttcagggccacaggtgctgccaa

SEQ ID NO: 362998 - DNA, 98 bp, Homo sapiens
acaaatgctccttctcctggagacgcaactcaagctgctgccaatcgcaatgatcctgtgtttgaaaccctgcgcactggggtgatcatggcaaacaa

SEQ ID NO: 362999 - DNA, 100 bp, Homo sapiens
gctgtgaagttcagtgtttttctattcatgattggacatgtcctagacatcacttagaggaagcaatgaggctccccaagaacacacctgaggaaaagga

SEQ ID NO: 363000 - DNA, 75 bp, Homo sapiens
gtggggaccataactgatgatgtgcgggttcaggaggtacccaaactgaaggttgattcttcaccacactgaaac

SEQ ID NO: 363001 - DNA, 83 bp, Homo sapiens
tgctgagaagcctgacataccaggactgcctgagacaagccacaagctgcaagagtgagccatggagctacgtgtggggaaca

SEQ ID NO: 363002 - DNA, 98 bp, Homo sapiens
gattgccagcgaggcgggcagaagaagaaagatctgctcactttagcactctggcaattaaacagaacccccttctggcagaagcttattcgaatttg

SEQ ID NO: 363003 - DNA, 100 bp, Homo sapiens
tcaccacatgcagccccttgatcttagacttctcagcttctagaactgtggtcctggctctgccatatgacacccccgtgcccggctacatgaataacac

SEQ ID NO: 363004 - DNA, 100 bp, Homo sapiens
tcatttgctttaccctcttcttcttctgcaacacggccactgtgtacaagatatgtgcctggatgcagctcacctccgtgctgggctttgacaaacttcc

SEQ ID NO: 363005 - DNA, 74 bp, Homo sapiens
gggctacgggaagatcctggaggtggatctgaagaacgggtacatgtcccagagcaagcacacggaggcccggg

SEQ ID NO: 363006 - DNA, 75 bp, Homo sapiens
cctaaatgagcctcttgccaaagtgtcccttttaaaagatagcaaagccattgtggatgggaacctgaagctcat

SEQ ID NO: 363007 - DNA, 90 bp, Homo sapiens
tggctttaatcctgaaagccatgcagcgggtgttgacttcaaaatcaaaactgtagagctaagaggaaagaaaattagattacagatctg

SEQ ID NO: 363008 - DNA, 90 bp, Homo sapiens
aaggcggagctggagatattcggggagcaggtccggagcgcccccgaggtcggggccggcgagggagagtagagacggggttttaccgtg

SEQ ID NO: 363009 - DNA, 98 bp, Homo sapiens
tagaccgaagtgtactagccaaggagttgaagtttgtgactttggtgaatggaagagaatccgaagaagaaaatctcaataaatctgaaataagtcaa

SEQ ID NO: 363010 - DNA, 74 bp, Homo sapiens
ctctcggcgccctggcgctgctcctgctgtccagcctctcccgctgctcaggtcagcccaaggccaaccccact

SEQ ID NO: 363011 - DNA, 83 bp, Homo sapiens
cttgaactggtgctgtctgggcttcatagcattcgcctactccgtgaaggctcttgtcaggatggtgaagctgttcatcggaa

SEQ ID NO: 363012 - DNA, 99 bp, Homo sapiens
aagcaggagctggccagcattgaggagaaggtggcctaccaggcctacgagcgctcgcgggacatccaggtatagggaggacacctctggattgaggat

SEQ ID NO: 363013 - DNA, 90 bp, Homo sapiens
cgcgggccggccccgcggggagcgcccccggcgcgatgcccttcaggaaagctccagctccagaaatcccagtacctgcaactgggcccc

SEQ ID NO: 363014 - DNA, 75 bp, Homo sapiens
gagaattacgaaccatgttcaagtcaaaactgcagctgctaccatggtgaacagcagagaatttcaaaggacctt

SEQ ID NO: 363015 - DNA, 100 bp, Homo sapiens
caagatggccgcagtcggcaaggagagacgtcgctgaggggcttgcctgaagcgagggaatggcctgtccagaagacagccaaatacatccttcaaacag

SEQ ID NO: 363016 - DNA, 88 bp, Homo sapiens
atgacaatctagaaacttattggcaatcagatggttcccagcctcatttagtgaacatccaattcagctacattattgagcagggggt

SEQ ID NO: 363017 - DNA, 87 bp, Homo sapiens
gaacaactgcggaatcagattcagatgatgattctgataccgagacgtcaaatgacttgccaaaatttgcagatggaatcaaggcca

SEQ ID NO: 363018 - DNA, 82 bp, Homo sapiens
tcactttcggccctgggaccaaagtggatatcaaacgagcagcctcagaacaaagtgagacagtccagcctggagatgaaat

SEQ ID NO: 363019 - DNA, 97 bp, Homo sapiens
tgcagcctcaacttcttgtcctcaagtgatcctcccaccttagcctcctaagtagctgggaccacagaatacaaatcatattcccctgaagccctct

SEQ ID NO: 363020 - DNA, 83 bp, Homo sapiens
cagaatatgagtgatgccatggcaattttgcacaaactacagacaggcctggatgtaaatgttaagtctttcgagaaggaaag

SEQ ID NO: 363021 - DNA, 74 bp, Homo sapiens
tcagtgtttgggaatgattctgatgatgatgatgaggtggcagtagagaagagcatcacagaagttgctcagga

SEQ ID NO: 363022 - DNA, 82 bp, Homo sapiens
tattggaggcctacttgcagcatattacctatcaggagaggaggttgcacaaaagtttataccaagtcttctcatttaaaag

SEQ ID NO: 363023 - DNA, 100 bp, Homo sapiens
agtgcagtggattactactttattcaagatgacggaagcagatttaagtgagcctttgaatacatctttatcaatgaccagtgcagtacagaactccaca

SEQ ID NO: 363024 - DNA, 83 bp, Homo sapiens
gctcggactgcgagtccctggacagcagcaacagtggcttcgggccggaggaagccgagcctcttgaagccattcttacagat

SEQ ID NO: 363025 - DNA, 83 bp, Homo sapiens
ctgacaagcccttgcgcctgcctctccaggatgtctacaaaattggtgatgcttgggatttgctttacattctaagtggattt

SEQ ID NO: 363026 - DNA, 92 bp, Homo sapiens
ttctatggaaaacattgagctcgggctgagtgaggcccaggattgacttctaaggactcttggtacatgaggaagaaacccggaaggggaag

SEQ ID NO: 363027 - DNA, 75 bp, Homo sapiens
ataagctttgcaacagaattacagagtatgatatctgaaatagctcaactcagtcaagaaaaaaggtatacatat

SEQ ID NO: 363028 - DNA, 75 bp, Homo sapiens
attcccagtcaagaaatgctcagccttccaattttttaagaagcgggccctccacgcccttcaggaggagcaggc

SEQ ID NO: 363029 - DNA, 100 bp, Homo sapiens
cctaccaccggctcctcgataaagtggagctgatgctgcccgagaaattgaggccgttgtacaaccatccagcagtgacagctggagtatcagccttgga

SEQ ID NO: 363030 - DNA, 118 bp, Homo sapiens
cgggaccccggagcccaaacccggggcaggcgggcagctgtgcccgggcggcacggccagacaatgcagatcttcgtgaagactctgactggtaagaccatcaccctcgaggttgagc

SEQ ID NO: 363031 - DNA, 98 bp, Homo sapiens
ttcgtgtgacaaacagagatatcatttgtcaggcactgaacgcagaggaggcccgccttcttcatgtcaaggagaccatgcagattgatgagaggaag

SEQ ID NO: 363032 - DNA, 100 bp, Homo sapiens
ctactatggagttctggaacgggactttgcagaaatgtgtgcagactacatggcatctaccatagggagctcaaatgatacttttcccacagcaatgcac

SEQ ID NO: 363033 - DNA, 90 bp, Homo sapiens
caagaagcagcccaaagtcgaatgattcagacttgcaagggttttttgattaactcaaaaccagagaatgcctgtgaacccatagtgcct

SEQ ID NO: 363034 - DNA, 107 bp, Homo sapiens
ccagcctaatccaaagactgtggaacttttaagtggagtggtggatcagaccaaagatggttcccagtgggaaaagctacagaaagatgacacagatccggggcaac

SEQ ID NO: 363035 - DNA, 96 bp, Homo sapiens
gcggaggcagcggggccgccgctcgagcccgatccaggatgggggccccgtttgtctgggccttgggccttttgatgctgcagatgctgctctttg

SEQ ID NO: 363036 - DNA, 83 bp, Homo sapiens
cgaggcaccgaggcactcagaggagatttggtcgtattgggcgcctggtcaccagggctgcttttaactctggtaaagtggat

SEQ ID NO: 363037 - DNA, 96 bp, Homo sapiens
gcggtcatggagggagcaggagctggatccggcttccggaaggttgtggcagcactgcctgaaggtatgagaccagattctaatctttatggtttt

SEQ ID NO: 363038 - DNA, 74 bp, Homo sapiens
taaaaaagccggacccaaacatcaaaattaaattcactgaggaagaggagcagctaagcaggaagatgatgaag

SEQ ID NO: 363039 - DNA, 100 bp, Homo sapiens
ggaagccgaaaacaccctgcaatctttcagacaggactcagcccaaaaccatgtttgcccaagttgaatctgatgatgaggaagcaaagaatgagccaga

SEQ ID NO: 363040 - DNA, 75 bp, Homo sapiens
gaactggctctgaaagctactctggtggaacgtgtgatcaccattatgcagaatccacgccagtacaagatccca

SEQ ID NO: 363041 - DNA, 75 bp, Homo sapiens
gcgggagagccccttgcagaagacgccgtacgaggcagcagtgaggatgccagagttcatgggtttctagaagac

SEQ ID NO: 363042 - DNA, 90 bp, Homo sapiens
cttcgcggcaacctccgggactctgacggtcttggctgttcaaccgtactttctccagaaggatcagctcaatttgctgctcagatattt

SEQ ID NO: 363043 - DNA, 101 bp, Homo sapiens
ggtgcaggacagtggaacagcttgttcagatttaagcatcttgcaactggaaactatttagctgcagaggtaaagctttccagtttgaatttagatgatca

SEQ ID NO: 363044 - DNA, 98 bp, Homo sapiens
agcctcactctctggtttctgagggtttcacagtcaaagccatgatgaaaaactcagtcgtctcccaggcagctgcggacctcctggcctactgtgaa

SEQ ID NO: 363045 - DNA, 100 bp, Homo sapiens
tcggagtccggcggcgacctgcctctgaaacatggcaggctcggatgctgtgggctcgggatgagtttgaaggcctcttcaagcagccagcagaaaatgt

SEQ ID NO: 363046 - DNA, 100 bp, Homo sapiens
ccgtgtccgacccctggaagctgatgctgctggacgccactttccggggtgcacagcaagtggatgcacttgcagccttggaaactccaggacgtcccag

SEQ ID NO: 363047 - DNA, 100 bp, Homo sapiens
aacccatcgacaagaaggcacctttattggagggtggtgaagagaggatggagacaccccaggaagaccacctcaggggacagcactatcatcagaaggg

SEQ ID NO: 363048 - DNA, 75 bp, Homo sapiens
atggagagggcaacgtttggattgcaaagtcatcagccggtgccaaaggcatgttggagacttgggcaatgtgac

SEQ ID NO: 363049 - DNA, 95 bp, Homo sapiens
aaaagagcgaataaagtttatcacgccgggatgccttcaattaagttgcagagttctgatggagagatatttgaagttgatgtggaaattgccaa

SEQ ID NO: 363050 - DNA, 101 bp, Homo sapiens
gggagttttcgtggtgggatcaggaaagcaggtgtgtagaccacactccaaaactgaaactgtggatggcagccatgaaggaagatcccacagtctcagcc

SEQ ID NO: 363051 - DNA, 75 bp, Homo sapiens
ctggggtcccaggaggccctacccccaccctgtgagaggcagactcagtgggatcctcctacttgggaaagccca

SEQ ID NO: 363052 - DNA, 75 bp, Homo sapiens
cccggccaagaggcaaaggggaggttacgcagcaaaccatccagaagggcaaaataacatggcagccagacgaat

SEQ ID NO: 363053 - DNA, 83 bp, Homo sapiens
cactccggagtcgccgctgccgcggggacatggtcctctgcgttcaggggcttctcctacgctggctcggtggccatcagcgg

SEQ ID NO: 363054 - DNA, 87 bp, Homo sapiens
ctctgggaccggaggagacatcggcctctgcaggcttgccgaagaagggaggactaccgaccagactcccggaaatcatgttggtag

SEQ ID NO: 363055 - DNA, 100 bp, Homo sapiens
ttctactttgggagagagagaaagtcagatgccccttttaaactccctcttcaaaactcatctcctgggtgactgcaagagaaggcagctgctgtggatt

SEQ ID NO: 363056 - DNA, 114 bp, Homo sapiens
tctcacctgggttttcttagccctctacttttcaagacaccaagtgagaggccaaccaggtttttagaacttcagccataaaaatgggcagaattttccttgatcatatcggtg

SEQ ID NO: 363057 - DNA, 100 bp, Homo sapiens
ctcccagtgacaaaagcgttaagattgaggaacgggaaggcatcactgtctattccatggacatgagagatggctttagaagaaaaagtttctactcttc

SEQ ID NO: 363058 - DNA, 75 bp, Homo sapiens
gcgacaagtggaggcgccgctctagcggccgggactctgaactatggcgtcaggtcaattcagtgaagatatgat

SEQ ID NO: 363059 - DNA, 75 bp, Homo sapiens
atctctggtgcatgctgatgacgaaaaacatgccactgccgccaggagccctgtaacatcagccatcgtcaaccc

SEQ ID NO: 363060 - DNA, 98 bp, Homo sapiens
gctggataatgtccaccccgagccgattcaagaaggacaaagagatcatagccgagtatgaaagtcaagtcaaagactgtgaagcatcctgtgtgtgt

SEQ ID NO: 363061 - DNA, 98 bp, Homo sapiens
cgagggccaccacctgcagcacatcagcgaccgcgagatgcccgaaggtgtcgaagcaggccaaggagtttctggagtacgtgtacgaagagccgctc

SEQ ID NO: 363062 - DNA, 82 bp, Homo sapiens
ggggactaagcaacaggtgtttcaaggaactaattctctggttgcaaccagtgtggcagagagtctaagcttttgtcaaaat

SEQ ID NO: 363063 - DNA, 100 bp, Homo sapiens
tgttcctgtggtctctgcacctcctttctatggactagaggcttttaccagatttcttaaaactgaattcagtgaagaaaatattgaattttggatagcc

SEQ ID NO: 363064 - DNA, 50 bp, Homo sapiens
ccgcgcccggccggacccgggcccgaggttttggctacgggcctccacct

SEQ ID NO: 363065 - DNA, 78 bp, Homo sapiens
ttcagttctgaaatggcaaagaggtccaagatgctgagtttgaacaattacagtgctaaggagagagtgttgaaaaaa

SEQ ID NO: 363066 - DNA, 82 bp, Homo sapiens
ccgtgaggatgcagcccgggaaagagctagaaatgagccgtcagactgctacagcattacctaccggtacctcgaagtgtcc

SEQ ID NO: 363067 - DNA, 101 bp, Homo sapiens
cggggaccgccgggagcgcgcggatgtcggtgttcctggggccagatgccttcaattaagttgcagagttctgatggagagatatttgaagttgatgtgga

SEQ ID NO: 363068 - DNA, 74 bp, Homo sapiens
gccaagccaagctcaacctcaaatcagtactgaggggaagaagatgaagtaccggacgatgagactctgaacca

SEQ ID NO: 363069 - DNA, 82 bp, Homo sapiens
ttccccaagcgcggccagacctgcgtggtgcactacaccgggggatatgagactttctactcggaatatcctgagtgttgcg

SEQ ID NO: 363070 - DNA, 90 bp, Homo sapiens
ctggcgggctccgtggaagcgtggccggcagcgtcccggacgaggaggttgcccccaagtttcctggcagtgtgtgatactgaggaggtg

SEQ ID NO: 363071 - DNA, 100 bp, Homo sapiens
gaaaaaaccaacaccttcctgtgcagtcctgttggaatttgtgctggagaatctggtaaaagcaccattgtgaagcagatgaggatcctgcatgttaatg

SEQ ID NO: 363072 - DNA, 82 bp, Homo sapiens
tatgtgacgctgctggaggaaacacctcaggacacggcctacaacaccaagaggagggtgaggacaaaatcttcttaatcaa

SEQ ID NO: 363073 - DNA, 100 bp, Homo sapiens
tcaaatcagagagaaggaatccaccttcttacgctatggcagggatgcccgggtagttaaagacatggcaactggaaaatccaaaggctatggttttgta

SEQ ID NO: 363074 - DNA, 110 bp, Homo sapiens
gaaacacctctacctcctgcgaggcctcccgggctccgggaaaactacactggccaggttttaaaatcaaagatgggaaaatcggagaaaattgcccttccccatggcca

SEQ ID NO: 363075 - DNA, 100 bp, Homo sapiens
catcgccctgtccattggaacgctgctgtctaacgcgctattccagctcatcccagaggacctgaaggagaagaaggagaaggtggaggagaaggcaagc

SEQ ID NO: 363076 - DNA, 82 bp, Homo sapiens
tataaatgactgggtggcagagaagactgaagaatgcagagagctggaattccttgtccaacagttgtactactgaagaaac

SEQ ID NO: 363077 - DNA, 80 bp, Homo sapiens
cctcaggcgtgcgcggacggtgtgcgggtgtctattttagaaaggcgcaacacagcaggaagggtggtgtataaaaccct

SEQ ID NO: 363078 - DNA, 100 bp, Homo sapiens
ctgttggaacatgctttcttcaagatggaacaaagactgttgagtatgctccatgtagatcacgcctagtaaatgacaaagactcaaaagattctatgac

SEQ ID NO: 363079 - DNA, 100 bp, Homo sapiens
cttttctctctctcctctggcaggatgaggcgtgcaggcctggctgcagaagctcctcctggccacatcctacccaacatcaagctctgacacccagaag

SEQ ID NO: 363080 - DNA, 101 bp, Homo sapiens
cgcggggggcccgaggcacagcggcggcggcggcggcgcgcgggggaaagcgctttcagtcggagagtagaaggcaaagcacaaaaccactttgaagagac

SEQ ID NO: 363081 - DNA, 101 bp, Homo sapiens
tggaggtctgcgttgctcttgcttttcctcgctggggtgtacgatcaatgaactgagccatgttcaaatccctgttatgttgatgccagatgacttcaaag

SEQ ID NO: 363082 - DNA, 100 bp, Homo sapiens
tgtatatcccagttcctatgcacatgtacagtcagaatattcctgttcctactacagttcctgttccttcgaggggagctgcagcgggagtcagacttca

SEQ ID NO: 363083 - DNA, 101 bp, Homo sapiens
ctgtctgccgccagacagggaacacatgcaaggagctgagagaccctgtgacctcgggactcaacacctcggtggttctcacaccatccagataatgtatg

SEQ ID NO: 363084 - DNA, 96 bp, Homo sapiens
tcaagaacaagggccgcgatgtggaagctctgacgcccgctctgcggcttcggtgtttgaacaggccacagtccaggagcgcttacattcaggagc

SEQ ID NO: 363085 - DNA, 83 bp, Homo sapiens
gccacaccaggctggagaatatggtgcagaggccctccacggtttgttgataagccggggcccttcgtgggaccctgcggtca

SEQ ID NO: 363086 - DNA, 75 bp, Homo sapiens
caccatgccgctcctaagcctgcacagccgcggcggcagcagcagtgagagaccgcgctgagcacgttcttccaa

SEQ ID NO: 363087 - DNA, 90 bp, Homo sapiens
cagactcctgtgatgtaaatgactgtgtccagcaagttgtggaacttctacaggaacgggaacttagtgatttggcccgtgaccctccag

SEQ ID NO: 363088 - DNA, 75 bp, Homo sapiens
cgagtgaccgagaccgcggccgggaccgaggatatggccgcgtggaaagtgtcaaaattcttcccaagaggggat

SEQ ID NO: 363089 - DNA, 71 bp, Homo sapiens
ggagggggagtatgatgcagagcggccccccagcaaggtggttatcactaggctaaaactggacaaagacc

SEQ ID NO: 363090 - DNA, 75 bp, Homo sapiens
cgctctagcggccgggactctgaactatggcggagaggagaggcagcagcatggcgagtgtcctgtcccgacgcc

SEQ ID NO: 363091 - DNA, 100 bp, Homo sapiens
caatgaagagcgttttacggggtttgctgcatactatgttgccacaggatggtgccatgacaatggtgtgaactacaagattggagagaagtgggaccgt

SEQ ID NO: 363092 - DNA, 96 bp, Homo sapiens
ttccagtcacctgataaagcagaaacccagcgtggagacccgtctgttatttctgtgtgggcccatcgctggatggatctgtcagaacacggcttt

SEQ ID NO: 363093 - DNA, 101 bp, Homo sapiens
ctactgcaagcgccccatctatgagttcaagatcacatggtgataaccacctgcctcaaagataatctgctcaaaagacttccatttcattctccacccca

SEQ ID NO: 363094 - DNA, 100 bp, Homo sapiens
cagggacactccattttgggctgggatcattgtacccactgatggtaatgctggcctgctggctgaaccccagattgccatgttctgtggcagactgaac

SEQ ID NO: 363095 - DNA, 100 bp, Homo sapiens
ttagctaataaccaactgcaattcctacctccagttcattatgctgacatatcttttcatgttggcctggctgggagtcacggctttcacctcactgcca

SEQ ID NO: 363096 - DNA, 50 bp, Homo sapiens
caaagtgtaccagtcggcagcatggggcacctcctctgaatttgaagtgg

SEQ ID NO: 363097 - DNA, 100 bp, Homo sapiens
taatttcagtgactgaattaaaaggtgtcaagaagctcagaatggaaagatatggatgaagttgaagagaaatctaaagatgttataaactttactgccg

SEQ ID NO: 363098 - DNA, 83 bp, Homo sapiens
agaacctcctttacacagtatcagaacgtgtattgccaggaatggcccctcctatcgtacccatgatacatccccaggttgct

SEQ ID NO: 363099 - DNA, 98 bp, Homo sapiens
cgccaaacagcccagctcgcgcttcagcgtcccggcgccgtcgcgccactcctccgaacttaattcagtgcacaaatgagatgaatgtgaacatccca

SEQ ID NO: 363100 - DNA, 90 bp, Homo sapiens
gtccagaagtgtccaaaccacaagttctcaaaactctctgaaaaatggctccctccgagttaaggtagacgttacatccaagaggaaata

SEQ ID NO: 363101 - DNA, 86 bp, Homo sapiens
gcggagaggagatgcacacggcactcgagtgtgaggtgctggagaatctggtaaaagcaccattgtgaagcagatgaggatcctgc

SEQ ID NO: 363102 - DNA, 88 bp, Homo sapiens
ccattcaacgcattgaagactaagaatatgagaaacctgaatccagaaggttggatggcaagcatgtggtgtttggcaaagtgaaaga

SEQ ID NO: 363103 - DNA, 101 bp, Homo sapiens
aaggcgaccttccttgctttcagaatttcacccaggttctgacagcactgacgtcttcatctgcacaagccccatcaagatgttcaagtactgtccctatg

SEQ ID NO: 363104 - DNA, 75 bp, Homo sapiens
tggagctatactgacatcagtaataggttgaaggtttagaacagatgtggaaaaatgtttacttcagagaaaggg

SEQ ID NO: 363105 - DNA, 85 bp, Homo sapiens
cagggaggagaccggcacccagacaggtggcgaaggcagaggaccctgggcgctgcctatggcacagccaagagcggtaccggca

SEQ ID NO: 363106 - DNA, 75 bp, Homo sapiens
tgcttacaagcataatactcaccctactattgaggacagtgaggaggaatttggttctgagcgagatgagtaccg

SEQ ID NO: 363107 - DNA, 100 bp, Homo sapiens
ctcagtgccagagaaccgagcatccagtcatctcctataaagcttccatgaggcaggctgaacctgcagatatgcgcccagagatatggatcgcccaaga

SEQ ID NO: 363108 - DNA, 99 bp, Homo sapiens
tccagggcggatggtggtgatggaagcaggtggaattatgccctgttggttccaatgctgggattggctgcttttcaaaaagcttgtggtgaagggggg

SEQ ID NO: 363109 - DNA, 100 bp, Homo sapiens
tgattggcgcctttctcattattataggctccctcctgctgtcaggctacatcagcaaagggggcatcttttatgaccaagactgtccagtaccaaaatg

SEQ ID NO: 363110 - DNA, 89 bp, Homo sapiens
tcagaattactagattttctctcaaactacgaggattcactggcaaaatttgctggcagaaaactgaaagactgtggagaagatcttct

SEQ ID NO: 363111 - DNA, 100 bp, Homo sapiens
ctgaagtaacagcagcaatgaccttccctcgggaattccacctctgcgtttttccctccaggaagatgagaatgtgcctactgctcctgatcctccaagt

SEQ ID NO: 363112 - DNA, 102 bp, Homo sapiens
tcatcctgagttgccaatcattatcacaggttcagaagatgattcggttccagtgcaaaggtcgtccactttttggggtccatgaaaccttggaactacaag

SEQ ID NO: 363113 - DNA, 108 bp, Homo sapiens
cagctatccttagcagagcaccctggagtctgcaaagtgttaatccaggcctaaagacaaggttacacatcattttggaatgactgtatatcatctggattacgtggc

SEQ ID NO: 363114 - DNA, 98 bp, Homo sapiens
taaagctccacagaacaactcttttgcagggaggagagagcgatggcttttttcacccagaaggccagccccagcggcttccccagcctccggaagtg

SEQ ID NO: 363115 - DNA, 100 bp, Homo sapiens
gcgtcgagcagatccgcgaggtggcgtccggcgctgccaggatccgcggggagaccttgggcatcatcggacttgatgaaggatttgggggcagagcact

SEQ ID NO: 363116 - DNA, 75 bp, Homo sapiens
actggaccgcgttcctgttccaggaaaacctcaattgctattgacacaatcattaaccagaaacgtttcaatgat

SEQ ID NO: 363117 - DNA, 137 bp, Homo sapiens
ccgcaccaggctcatcctgtccatcgtgtgcctgatgatcacgcagctggctggcttcagtggaccagctgctctttggcgtaaattgcaatcgattagggatcgtttctcagaatcaagttagaagtgagagttca

SEQ ID NO: 363118 - DNA, 100 bp, Homo sapiens
gtactgcttcctgagcaccgccagccaccggcaccaagaccggccacatcccagcactgcccacctctgggcagagcggcttgggtaaatccaccttaat

SEQ ID NO: 363119 - DNA, 100 bp, Homo sapiens
agaaagaattaaaagccttttgtgctgatcaacttgatgtctttttacaaaaagtgtttcaggctgcatgtaccaagtagttcagacgattggctcggat

SEQ ID NO: 363120 - DNA, 80 bp, Homo sapiens
actgggtctcctctcaagaaatctcaagatattaaagttactgctgttaaaaagacctttaccagaagatgatagtattg

SEQ ID NO: 363121 - DNA, 74 bp, Homo sapiens
gctgtatgggcccaagaagaggggacccaaacccaaaactttcctcctgaagtagagatggagtttcaccatgt

SEQ ID NO: 363122 - DNA, 90 bp, Homo sapiens
atcctagtggtggactgatttcaaagggacacccactaggcgctacagatataaaaccagctaatgtgttcattacagccactggggtgg

SEQ ID NO: 363123 - DNA, 100 bp, Homo sapiens
catttcctcgtcgagcgcaacccaaggcatctccttggaaacaatgccatctttgaatgtgagagataaacctagtttcagcatgtctgcagcagagacc

SEQ ID NO: 363124 - DNA, 98 bp, Homo sapiens
gtggtatctcagttagaggaggcagaagatttctggccagtggagagaggaattcctcaagacaccattccagcatctggaatcaagagacccatggc

SEQ ID NO: 363125 - DNA, 98 bp, Homo sapiens
cccaacagcagggtggagatcgtggctgccatgcgccggatacggactcaagaatgaacaatccgtcagaaaccagtaaaccatctatggagagtgga

SEQ ID NO: 363126 - DNA, 98 bp, Homo sapiens
cttgcaacctacatgaatagcatcagattgtatgctggagtattaaaaatctccatgccaaaatcatagagaaagatgctatgattaaggtcctgcag

SEQ ID NO: 363127 - DNA, 100 bp, Homo sapiens
cgagagcagtggatccgggccaagtacgagcgacaggagttcatctacccggagaagcaggagccctactcggcagacccagtggcttattggctcagga

SEQ ID NO: 363128 - DNA, 100 bp, Homo sapiens
attccgggagcacagttccgccgactgaaacagaaccgcatgagggaaagaggaaagtggaatctctgtggcccatcttcaggatccaccaccagaaaac

SEQ ID NO: 363129 - DNA, 51 bp, Homo sapiens
atcacattggaccctcctcccaactgtagatctcagaaaactgatcttcac

SEQ ID NO: 363130 - DNA, 75 bp, Homo sapiens
aactggctctctggaacgtgtgacagcaggcagaaggggctcccaggccagtgccagtacttgggcttgccagtg

SEQ ID NO: 363131 - DNA, 83 bp, Homo sapiens
cccacctcgcaagagcagccgcggcgccactatgcctgaggaaacccagacccaagaccaaccgatggaggaggaggaggttg

SEQ ID NO: 363132 - DNA, 100 bp, Homo sapiens
gccgcgcggcgctggactggagcagaaccccaggactgcgcccccgggagcgggcgcccagaggttgaaatcacaaagattagacacctttttagatagg

SEQ ID NO: 363133 - DNA, 75 bp, Homo sapiens
tctccgagatcgacgagtctgtggcagcctggcatcctcgctacaacctcattgttgtgggccgatacccagatc

SEQ ID NO: 363134 - DNA, 82 bp, Homo sapiens
cagccagcgccttcatcctggggctgcgatgtccaagtggtaagaagttcagaagcaagcctcagttggcaaggtacctggg

SEQ ID NO: 363135 - DNA, 100 bp, Homo sapiens
gggtcctcaagcagcacgtgggtgaaagaaacttccacgccttctaccaaaaagtttcctacactactgaggtttaggggcactgtgaagcaaaagccac

SEQ ID NO: 363136 - DNA, 98 bp, Homo sapiens
agaaggagctgaactactttgcaaaggccttggagagcccagagcgacccttcctggccatcctgggcggggcttatttcaaaacctttgtccctcag

SEQ ID NO: 363137 - DNA, 74 bp, Homo sapiens
tttcctgcatggattgggagatactgggaaaatcatcagcgtgttagcattttctttgactatgcaagatgtag

SEQ ID NO: 363138 - DNA, 100 bp, Homo sapiens
cgcagcggccgctgtcgggctggccatggcgaggggtgcacggcggccacctgagtggcgcggcggtgtcagataatcagacagctaaatggagtctgag

SEQ ID NO: 363139 - DNA, 74 bp, Homo sapiens
gaattcagcaacactcctgaccaagcccctgagcacatcagcaaagcttgcacagaaatctggaggcagtatca

SEQ ID NO: 363140 - DNA, 75 bp, Homo sapiens
atctgatcaagccaacaacagtgacggaatgcctccatacatggtttggacagaggagccaaaggccaaatttcc

SEQ ID NO: 363141 - DNA, 96 bp, Homo sapiens
ggttggggatggcgtgcagcgcaaccacgagacggccttccaaggtcaaaatgcagatcttcgtgaaaacccttaccggcaagaccatcacccttg

SEQ ID NO: 363142 - DNA, 100 bp, Homo sapiens
acgcttgtggaggaaacccacactaacgagttcatcacctggagccaggtaatatatgctttaaacactaaaaatgatgagcatgaatctgcaattcaag

SEQ ID NO: 363143 - DNA, 83 bp, Homo sapiens
ctgggatcccggccaccagcaattgtccggtttacccaaggtccagcctagcccctaggcaccatgtcggacagtgatctagg

SEQ ID NO: 363144 - DNA, 98 bp, Homo sapiens
cattctgccgaagagaacaagacgtgtgaagactcaggtggaggagttactgatggccatggagaaggtaaagcaggaactagaatccatgaaagcaa

SEQ ID NO: 363145 - DNA, 102 bp, Homo sapiens
cgcactttttggatcggcatctagtctttccgcttcttgaatttctctctgtaaaggagatgatggatgccaaccagcgctgggatgtgcctgaggcggtgg

SEQ ID NO: 363146 - DNA, 75 bp, Homo sapiens
cccagaagacactccccagggcagaaatagcgaccatggcgagatgccttcaattaagttgcagagttctgatgg

SEQ ID NO: 363147 - DNA, 113 bp, Homo sapiens
gccccgataacgggccgcccccacagcaccccgggctggcgtgaggcctccaagcagcatcgtcttaaacgctaccacagccagacctatggcaatgggtccaagtgcgacct

SEQ ID NO: 363148 - DNA, 50 bp, Homo sapiens
ggacatcctggaagctgggaaatggttatactactccaactgccccccag

SEQ ID NO: 363149 - DNA, 87 bp, Homo sapiens
ccagtccccacaggagtgggaggcgatccaggccttgacgggttgtgagtcccggcccagcccctccacccccctgcccccccgatg

SEQ ID NO: 363150 - DNA, 100 bp, Homo sapiens
gatggataggagcaaccctgtaaaaccagccttagactatttttcaaacatgacttttttgaacgaaccattctgtgcaacagccttgtgtggagttgtg

SEQ ID NO: 363151 - DNA, 95 bp, Homo sapiens
gaggaagaagaggacgacgacgacgaggaagaggaggtttctgagccacgacagcccaaccctgactggcgttactctgcctccctgagagcagg

SEQ ID NO: 363152 - DNA, 75 bp, Homo sapiens
tccagcatcgcaccccaagaaaccagttggaaatggaggatgaagatacaattgatgtgttccaacagcagacgg

SEQ ID NO: 363153 - DNA, 100 bp, Homo sapiens
ataagcgtggcaagaaaaatgggaagttctcgacaatgcagatcttcgtgaagactctgactggtaagaccatcaccctcgaggttgagcccagtgacac

SEQ ID NO: 363154 - DNA, 82 bp, Homo sapiens
tgggaacccgcggtggagcgggacacgaacgtggacactcatgaggaccatgatacttccactgagaatacagacgagtcca

SEQ ID NO: 363155 - DNA, 95 bp, Homo sapiens
caataaaagagacctctacttagctcagcaattcttaccttaatgattacggacctgaagccaaagaacaagatgcgctagtggacagattgctg

SEQ ID NO: 363156 - DNA, 100 bp, Homo sapiens
ctttgcgcttggatccacttccccatctgtaacgaggtgttgagacgaggtttcagaaggatcccacttggtcagagactggagaccgttatctgttgaa

SEQ ID NO: 363157 - DNA, 101 bp, Homo sapiens
ccgagctggacccggaccggttttgggaagctggagaagcttcgagagaaggagcgtaagaaggaagccaagcggaagatctccagcctgtccttcaccct

SEQ ID NO: 363158 - DNA, 101 bp, Homo sapiens
ttcaggcgaataccactgcgtatatcactttgtcagcgctcctaaagcaaacgccaccattgaagtgaaaggaatggcggcgctagatagtaaggcatcag

SEQ ID NO: 363159 - DNA, 109 bp, Homo sapiens
tgctaaatttgtgaatgctgtgtatgataccttacttaatactaaacctctgtagaggagcaggatgcaaccgacaggctgtggccggacagctgctgcccagcacatg

SEQ ID NO: 363160 - DNA, 100 bp, Homo sapiens
aacttattcacagttaccaaagctggaccgtataatagacgctggccccaaaggaaactactctcgatttatgaatcacagctgccagcccaactgtgag

SEQ ID NO: 363161 - DNA, 100 bp, Homo sapiens
gccatgaatttgttactttttcttgtccgggtgcggataagggacccgacactgatgtcctcgggcgggaagtgtacacctccaataaccagctgggggg

SEQ ID NO: 363162 - DNA, 75 bp, Homo sapiens
ctttccctctcccaacatggcggcctcaggacgcaaatcaatttcacagtggctattgattttacagcatcaaac

SEQ ID NO: 363163 - DNA, 100 bp, Homo sapiens
cagcttcatggccagcaggtggcgagaatcctcctccaggagaacggccatatttatgtgtgtggccaaatggtgcaaaatgcattccagtacgagaccg

SEQ ID NO: 363164 - DNA, 100 bp, Homo sapiens
caaaatgtcaacaaattgatggagagttggaaactcaactattggaacaatgtactgttgacacaagtgttgctaaagaacagagccttccctcagtgat

SEQ ID NO: 363165 - DNA, 100 bp, Homo sapiens
gcggagatgacggcgcccgccctcccgccgccgccctaagggtacagctctgccggggggggaaaaagtggtaccattttgggcgttcttgagcttcaga

SEQ ID NO: 363166 - DNA, 82 bp, Homo sapiens
ccctgtcagcagaaacttctcaagccccatccttgccaggaagctctgtgaaggtgccagatgtgacatccagatgacccag

SEQ ID NO: 363167 - DNA, 52 bp, Homo sapiens
caggaacttggtagtagtcaatcagcagggtgaccaagaatatggcccaggt

SEQ ID NO: 363168 - DNA, 98 bp, Homo sapiens
cagccgcaagtacccgtccatcatagtcaactgcgtggaagagaagatatgatcgcttgctggagacctgctctattgcccttgtgggcaaatacacg

SEQ ID NO: 363169 - DNA, 96 bp, Homo sapiens
ttcgatggacatggacatgagccccctgaggccccagaactatcttttcgcccgatggcaccagcaaggagtgtgtgttcatcgagaaggttctgg

SEQ ID NO: 363170 - DNA, 82 bp, Homo sapiens
cagattcgcagtggtcgcttcttctccttgggacagaagatgagcctgtcggtcctggagggtatggggttccgtgtgggcc

SEQ ID NO: 363171 - DNA, 75 bp, Homo sapiens
ctcgtggctgcgtcaccgccgcccccccagacaagatggacaccgcggaggaagcgtttgcctcagcatggaggg

SEQ ID NO: 363172 - DNA, 83 bp, Homo sapiens
gcctggtttggaaactgttgaaatgatggaggaatccagtggaccatattctgatggagagtcttttagtcctgctatacagc

SEQ ID NO: 363173 - DNA, 83 bp, Homo sapiens
gaacaaggcgtgatcctaatgtcacagaatccaaaggactgcatgacacaccataggatatagtcaagaagcctttggacatg

SEQ ID NO: 363174 - DNA, 50 bp, Homo sapiens
gaaaagaatcttttatggggggctgagcagacaagatggagacaaattcc

SEQ ID NO: 363175 - DNA, 96 bp, Homo sapiens
cgagcttcagtggtgattccagtgactggggatagtgaaggtgctacggtgcagagtggaatgttggctgtccgtgaaaaccgctacattgtcctg

SEQ ID NO: 363176 - DNA, 100 bp, Homo sapiens
gcccctcctccaccagaggactgggaggagcatgtcaacaggtgctgggactctggtgcccccaaccctgggcatcctcaggctttgaggagaatacaca

SEQ ID NO: 363177 - DNA, 100 bp, Homo sapiens
ggactgactccagtgatgacgcaggccttaaggagaaagtttcaggaatggaagttggatacactttgtgacttgtacgagacactgaccattacacagg

SEQ ID NO: 363178 - DNA, 82 bp, Homo sapiens
acttacccgagaacgtgcgggaagagaagatcatcgagcatttcaaacggtcagcccaagactaccccgtcggtcattctgt

SEQ ID NO: 363179 - DNA, 82 bp, Homo sapiens
cagcggcttcctcggcctcccggcgcccttcagcgaggaagacctcctgccccccgaggtctgcagtctcctgaacccagca

SEQ ID NO: 363180 - DNA, 98 bp, Homo sapiens
cgaaatatggctacagagagccctgctacgcgtcgggtccaggtggcagaacatcctaggcatcagatgccagctctgaaaaactcttcaacactgtt

SEQ ID NO: 363181 - DNA, 78 bp, Homo sapiens
gctggactgcgagacggcccggctgcagcgagcgctggacggagaggaaagcgaatcattccgcgcacccacgttttc

SEQ ID NO: 363182 - DNA, 90 bp, Homo sapiens
ggacattcaggaattctcctgccaccgcgtggtgcttgccgcagccagcaactatttcagattcgagaaatgatggagtccttcgaaggc

SEQ ID NO: 363183 - DNA, 75 bp, Homo sapiens
cggcgctccaccggcgtggtcaacatccctgccgcagagcggggatctgatgagcttctttcttctggcatcatt

SEQ ID NO: 363184 - DNA, 82 bp, Homo sapiens
atttctgtgcctggaaaatatctgttaacagactgcttttacacctacggagtggagcttggtttcgggatctcggtgctgc

SEQ ID NO: 363185 - DNA, 88 bp, Homo sapiens
ttctgcagctcatcttctcaaaaacagaggagaaggcagagcccccccaggctatgaatgccctgatgcggttgaaccagctgaagcc

SEQ ID NO: 363186 - DNA, 97 bp, Homo sapiens
cccatttctcctcctttgacagggacatcagtggagccttctcagacccacagcaataccaagtttccaggcccgaagagcatcccagactattggg

SEQ ID NO: 363187 - DNA, 74 bp, Homo sapiens
cgcgagtgaggaaaggaggtactgtaggatgaaattgattctgcagtaaagatgttggtgtcattaaaaatgag

SEQ ID NO: 363188 - DNA, 82 bp, Homo sapiens
aagaaattcccacctgtcaaagaggcacctgaatggacagaagaggacctcagccaactgacaagaagtatggttaagttcc

SEQ ID NO: 363189 - DNA, 90 bp, Homo sapiens
aaattatttatccaacagctcctcccaggcagtatttggcagtcgtattcagagataaacccctggagctatgggatgttaggacttgta

SEQ ID NO: 363190 - DNA, 98 bp, Homo sapiens
tggccgtgtggctccagagtctgaccgcctcccgcggaggggtggccgccgccgaccggtgatgaccgcttctccgagagcatcctgacctatgtggc

SEQ ID NO: 363191 - DNA, 100 bp, Homo sapiens
attcatcgcagctggtgggtgtacacactgctgtttaccttggcgaggcctttcaccaagtccatggaacatggaggagacatatttccacctatttctc

SEQ ID NO: 363192 - DNA, 100 bp, Homo sapiens
ctggcagcagaggatgatgagggcttcagtgcagacgcagtggtggccctggagcagtatgccagcaaggtgctgtcccacaacctgtacacggtcctgc

SEQ ID NO: 363193 - DNA, 83 bp, Homo sapiens
ccctctgcgacctggggccctgggtgaagtgctccgtcgcccttgcctccagtgttctaagaacggaagcatctgggctggat

SEQ ID NO: 363194 - DNA, 100 bp, Homo sapiens
gtcaaccctcagaaggcctcatcctccactttggaaagtggaaccttacgtcaggagctggcagctgtgtgctacgtagttggcaaaaaaggagaaagcc

SEQ ID NO: 363195 - DNA, 51 bp, Homo sapiens
tgcaggaagcccttccgcggaccgaaaggaatgtctgatcacagatacggg

SEQ ID NO: 363196 - DNA, 50 bp, Homo sapiens
cgtgaggctgctcttcgagcgctagttcttctggagctcaacttcttgcc

SEQ ID NO: 363197 - DNA, 75 bp, Homo sapiens
tgacctcacatggtgtggtgaattcaacacttccatggccacagatgtctttaattccaaaaacctggccgttca

SEQ ID NO: 363198 - DNA, 100 bp, Homo sapiens
catcacctacctgtctgcctgctttgctggctgcaacagcacgcaagtgaaactggaggaatttggaagaccaaagattgacggggaactgaaagtccgg

SEQ ID NO: 363199 - DNA, 91 bp, Homo sapiens
tggggccagggaaccctggtcaccgtctcctcagccctgggcgctgcctatggcacagccaagagcggtaccggcattgcggccatgtctg

SEQ ID NO: 363200 - DNA, 100 bp, Homo sapiens
cgccagcattttgttagaggagttagacttggaaaagtgtgaaatcaaagttgcacaacccaaagaggtatataggcagcaacagcaacaacaaaaaggt

SEQ ID NO: 363201 - DNA, 75 bp, Homo sapiens
acttcgtctcccaccgactgcctgtttaaggacgccaacaaggagagcagcaagacctccaagccacacaaggtg

SEQ ID NO: 363202 - DNA, 98 bp, Homo sapiens
ggaaaatggccttgtctccggtcgttcccgttcaggagcagagagcagagctgacatctgataaagacatgtaccttgacaacagctccattgaagaa

SEQ ID NO: 363203 - DNA, 95 bp, Homo sapiens
ataccaaagaaaagaaagagaaaaagcagaaagtagatgaagatgagattcagaagatgcagagctatgaagacatgattggtgaggaggtgcca

SEQ ID NO: 363204 - DNA, 80 bp, Homo sapiens
ccaggctttatgggagcatgggttaccagcgacgcaccctgtttggtgcacctcgatttggaggaagtagggcagggccc

SEQ ID NO: 363205 - DNA, 49 bp, Homo sapiens
gtggacagaaagtcagcctcttgtggtggagccgccaccaaaatgcaga

SEQ ID NO: 363206 - DNA, 100 bp, Homo sapiens
tggctggagacatgagcaagaaaagcctctgggagcagaagggaggctccaagacctcatcaacaattaagtcttaggaaaagtcctcagtgctgtgggc

SEQ ID NO: 363207 - DNA, 101 bp, Homo sapiens
cgatgccgctgaatgggctgaaggaggaggacaaagagcccctcatcgagctcttcgtcaagggtcctgaggacaccgtgagccagccaggcctggccgct

SEQ ID NO: 363208 - DNA, 100 bp, Homo sapiens
gaaccaattgttttacagtctgttccacatgatcattgtaataaggtccattttagcttcctatctcctgaaggaaaagctcaacatcttgggcaagttg

SEQ ID NO: 363209 - DNA, 75 bp, Homo sapiens
cctcaatttaagcctgatctaacccctagaaacaggtagaacgtcatgacatgaataccttaagcctgcccctga

SEQ ID NO: 363210 - DNA, 129 bp, Homo sapiens
catggtgggacctcagttccaagctgacctcagcaacctgcacttgaaccggcactgtgagaagagttctactgggacttcaccatgctgctgttcatggtgggaaacctcatcatcatcccagtgggc

SEQ ID NO: 363211 - DNA, 100 bp, Homo sapiens
ggaagatggcggcgccgctcatccccctctcccagcagaaccaccgggaggaactgggccattctaacacccgttgctaccatgctggccacccgcctct

SEQ ID NO: 363212 - DNA, 50 bp, Homo sapiens
ggacctcacatcaacttctaccagctgtagagacggggttttaccatgtt

SEQ ID NO: 363213 - DNA, 98 bp, Homo sapiens
cgccgagcgcgtattaacgagagcctcgctcagctcaaaaccctcatcctggacgccctcagaaaagaggttcgggtctggcggtacttgaagggcaa

SEQ ID NO: 363214 - DNA, 46 bp, Homo sapiens
tattgagccatatattaccaatgctctaagtatgcagtcatctcca

SEQ ID NO: 363215 - DNA, 82 bp, Homo sapiens
cgtttgcgacgttccctcagcctctgcccaaagaaagaaggagataaaatcagtggttctggaagtaactctgatatgatgg

SEQ ID NO: 363216 - DNA, 100 bp, Homo sapiens
cattttgctgtctcctcctaatacgatacaatgctcctgagaagacagcattttccacaggaggctgtttcctcccctggtggatttaagagacggtcct

SEQ ID NO: 363217 - DNA, 80 bp, Homo sapiens
tcacaagcccagcaacaccaaggtggacaagaaagttggtgtcttcagtgccctgggtttgcctgtgacccaatgcccac

SEQ ID NO: 363218 - DNA, 83 bp, Homo sapiens
ggaatatttgtcccggcactggctcttcagtcccttcaaaaacttctgcagcatccagaactgagtaatagtcaacttctggc

SEQ ID NO: 363219 - DNA, 100 bp, Homo sapiens
gaaaacttgaacatgttatcaaagtagcacatgcttgtcttcatcctctagagccactgctggatactaaatgtgatgtggcagctttggctatcgcaag

SEQ ID NO: 363220 - DNA, 96 bp, Homo sapiens
caagtcgctgctagaaatattttagcctctccaaagcccagaatgcagccccgacccaagtttgtaaggtttctggcatttgaagtcaaagagtat

SEQ ID NO: 363221 - DNA, 75 bp, Homo sapiens
aggaatgtcagcaccagaccaatgcatataacctacagcaagcgagcatggcagctggctgcacggactccggag

SEQ ID NO: 363222 - DNA, 75 bp, Homo sapiens
gaggtaattttggccgtggtggaaactttggtggaagaggaggaaaaggccaaagcgtacaagaaagagaaacag

SEQ ID NO: 363223 - DNA, 73 bp, Homo sapiens
tggaggctgccgagcgtgaggagactcagcagaaggtgcaggaatcagtttagacttgaaattcagtttttcc

SEQ ID NO: 363224 - DNA, 90 bp, Homo sapiens
ccagaaagagtcatacctggagcagcaggtgctggagaatctggtaaaagcaccattgtgaagcagatgaggatcctgcatgttaatggg

SEQ ID NO: 363225 - DNA, 85 bp, Homo sapiens
ccgggctgggcgcgcccggccgcgacgcccgggacccagattgcgggttcagcttcatgtttcctgttgcaggtgggataagacc

SEQ ID NO: 363226 - DNA, 98 bp, Homo sapiens
acaagaagagcagttcccaggatctgcataaagtaggagagaagtttgctgaggaatgccttcaagcacaaagtgatgaatgactgccttcaagtctc

SEQ ID NO: 363227 - DNA, 75 bp, Homo sapiens
tgctgaaatgtttgacgacactgatggtttggagaagatggtataaactggtccatcagtgacaaagacattgag

SEQ ID NO: 363228 - DNA, 96 bp, Homo sapiens
ccacgttctatgtcagtgacgtcgagaactacgtggagtatcgagatcgttatgattcagaccggtatcgggatgggtatcgggatgggtatcggg

SEQ ID NO: 363229 - DNA, 101 bp, Homo sapiens
gatgaactgagctttcacactggagatgttttgaaggaaaaggggaagatagtgatgtactcagtataaatgcagatgcttatgacagcgacatagaaggc

SEQ ID NO: 363230 - DNA, 119 bp, Homo sapiens
gacaatgcggcagatcttctcatattcgggaaggagctaagatcccagctctcctgttggcttcgtgcttggggtagatcttcttcacatattccccctggaaggagcaacttttctgt

SEQ ID NO: 363231 - DNA, 100 bp, Homo sapiens
ccgtgagaagaagattatcgaggtacatgttgaaaaaggctttcccctttgctcggctctccttctctctcctgctgccctgtgaagaggtgtcttctgc

SEQ ID NO: 363232 - DNA, 90 bp, Homo sapiens
gatgccctgcagtacctgcagaaggtctctggagacatcttcagcagcatgcttttcacttccactgcatctctcgctggctcaaaacac

SEQ ID NO: 363233 - DNA, 50 bp, Homo sapiens
gggcaagccccgctccggccaacaactgtgagtaccagagtgcccactgg

SEQ ID NO: 363234 - DNA, 100 bp, Homo sapiens
agctgccgcttcagtccgaaggaggaagggaaccaacccactttctcggcgccgcggctcttttctaaaagtcttctcggacaaactatttagtggaaaa

SEQ ID NO: 363235 - DNA, 97 bp, Homo sapiens
cgcaggcatcacctatgtgccgcctctgctgctggaagtgggggtagaggagaagttcatgaccatggtgctgggtatcttgtcaaactccgggccc

SEQ ID NO: 363236 - DNA, 75 bp, Homo sapiens
cgatccattttacctggagataaaatggatgacgtagtagatgaaagtgatgacaacgatgatattgatgtagaa

SEQ ID NO: 363237 - DNA, 50 bp, Homo sapiens
ttcctcccttcgctcgcaccatggttggagctgaaggagtgcccaggctg

SEQ ID NO: 363238 - DNA, 51 bp, Homo sapiens
aggagcagttgtctgatgaagagaagaaaccaggaatggatctggcagaca

SEQ ID NO: 363239 - DNA, 100 bp, Homo sapiens
gaaagacaaagacccagtgaacaaatccgggggcaaggccaaaaagaagagatggacagagacgtatgtgcgttggtctcctaagggcacctacctggct

SEQ ID NO: 363240 - DNA, 50 bp, Homo sapiens
gagcccacaggctataattggagcactgcgccaagtgccgggaatcattt

SEQ ID NO: 363241 - DNA, 82 bp, Homo sapiens
cgactcgcttctttcggttctacctgggagaatccaccgccatccgccaccatgagatgcgctggcagctgagcgagcagct

SEQ ID NO: 363242 - DNA, 100 bp, Homo sapiens
tttaatgcactaaacctttaatattgtattctcctaaatgagacgtctcgcatttgagcaggtaacactcgtctgcgggccaggcatcgacatccgcaac

SEQ ID NO: 363243 - DNA, 100 bp, Homo sapiens
tgacgggcaatgccggggagtggtgcctcatggaaagcgaccccggggtcttcaccgagctcattaaaggattcggtagcatctccgcccccacttactg

SEQ ID NO: 363244 - DNA, 75 bp, Homo sapiens
ttctgagacggcggcagcagcggcattcagcaatgcagttgcaggcgagagtgctctagatcgaatggcttgcgg

SEQ ID NO: 363245 - DNA, 100 bp, Homo sapiens
gggggcggaacaaggagccttggagcggggcaaagaagttccagcgtgagctaagcaccaaatgggtgctgaatacagtgagtacaggtgctcatgtgct

SEQ ID NO: 363246 - DNA, 83 bp, Homo sapiens
cttcactactgcctcttggccgtcacgcaagaaggatcccgcaaacgtggattacgaggatctcttcctctactccaacgcag

SEQ ID NO: 363247 - DNA, 123 bp, Homo sapiens
tcggatcgccatcccgggcctggcgggggcaggaaattctgtattgctggtcagcaacctcaacccagaggccaagcagctggtcagcagggtggtgacccagaacatctgccagtaccggag

SEQ ID NO: 363248 - DNA, 99 bp, Homo sapiens
tcaaacaagtcaaggtcactgtgaactactgggctggcttagatgaagatgaagatgcacatgtctgggaggataattgggatgatgacaatgtagagg

SEQ ID NO: 363249 - DNA, 100 bp, Homo sapiens
atcactaagagtggcatcaaatgtcagccctggagttccatgataccacacgaacacagttttctggatatgccgcagaaggatccgtgccagaagcaag

SEQ ID NO: 363250 - DNA, 75 bp, Homo sapiens
gcagacaagacggatgtgatgctgttgttgaatgttgggtcacgaagatctcaacctggccaaagaagagaaccc

SEQ ID NO: 363251 - DNA, 99 bp, Homo sapiens
ggccaagggccgcggccgcggaggcctgcagcagcagaagcagcagaaaggccgcggcatgggcggcgctggccgagtcagtcaagaacaatacccaag

SEQ ID NO: 363252 - DNA, 100 bp, Homo sapiens
ctgcgcggcgcggcggccgggccctcgagacggggacggtgcctctgagcctcggaacatgatctacatgagccgcttgggtatctggggcgagggcaca

SEQ ID NO: 363253 - DNA, 100 bp, Homo sapiens
gtcatatgctagtgatctctataatggttccagtatagtctctagatggggcattctcttctcccaccctcgggactttaccccagtgtgcaccacagag

SEQ ID NO: 363254 - DNA, 51 bp, Homo sapiens
acaagcacctcctgctccagtaattggtgcagattcactttataggaacag

SEQ ID NO: 363255 - DNA, 108 bp, Homo sapiens
gtcccgctggccctctgtctgcctgtgtccctgaccatggctccctgcagtaccctttaacggtatacaaaactaggatatgctggaaatacagaaccacagtttatc

SEQ ID NO: 363256 - DNA, 83 bp, Homo sapiens
agaagagacgaactgtgaggagagtaaaccaagaagaaatccacagatttagttctgtcacaatccaaggtccggctcctccg

SEQ ID NO: 363257 - DNA, 75 bp, Homo sapiens
agaggcccggagaacacaaccctcccgagaagcccagacttccttgccgtccaggaagggatttcgacaccagac

SEQ ID NO: 363258 - DNA, 100 bp, Homo sapiens
gaacccgaagaagaaaggattcgttacagccagagattgccctgcattctcatgaataacactcaacagctacgagttcagctggagaagatgttcgaag

SEQ ID NO: 363259 - DNA, 90 bp, Homo sapiens
atcaaacatgtcacaagagtcggacaactccagaacctgggtatcaacccagcaaacattggcttcagtaccctgactatggagtctgac

SEQ ID NO: 363260 - DNA, 90 bp, Homo sapiens
tcgtaacaacacggaagtggagaggttttcagaggcctatgttgtccttggccagtttctggtgctaaagaaagatgaagacctcttccg

SEQ ID NO: 363261 - DNA, 101 bp, Homo sapiens
tccagccagagctgagcggcgcgggctccagactcgccgtggtcaagttcaccatgagagggtaattccagtggagaagctagtgaaaggacgtttccagg

SEQ ID NO: 363262 - DNA, 80 bp, Homo sapiens
gcttgtcagcatgccctgtggatcaagtctagggggcctcaggaggagggaggtgtgtgtcctggagtggggagcagaag

SEQ ID NO: 363263 - DNA, 85 bp, Homo sapiens
gggggttcgcgcccgccgacccgcgccctgctccctctcagcacctgggcggacggaggtgcttcccaaggaccgtagatgcctc

SEQ ID NO: 363264 - DNA, 80 bp, Homo sapiens
tggagcgcgggccctggggccgcaacccgcgccgggcgaggtgggtttggaggatttgggacaacatctacaactgcagg

SEQ ID NO: 363265 - DNA, 75 bp, Homo sapiens
agatgaggacactgaaattcagagaggggaagtgatttgcctcagcttgtactgctacagatgcacatgttgaat

SEQ ID NO: 363266 - DNA, 80 bp, Homo sapiens
catatgtagcctacaaagttacaacacaggacccacctgccatgctgtgaggacacccaggccacatagagagagtgagg

SEQ ID NO: 363267 - DNA, 100 bp, Homo sapiens
tgacaccctgcaaggccaccgggaccgcttcatggagcagtttacaaaaatagctgaaacctttggacttcaagaaaattatatcaaaattgtcataaat

SEQ ID NO: 363268 - DNA, 100 bp, Homo sapiens
catggacgcgccgcgcgcctcggcggccaagcccccgaccggatcaggatcctcatgaccagccaaagagaagaagaattaggaagcataaatcaaagaa

SEQ ID NO: 363269 - DNA, 82 bp, Homo sapiens
caagcctggagactcgcaacaagatcccctatgagagtcccatcttcagcagaggctaccggctctctgaccagttccacga

SEQ ID NO: 363270 - DNA, 82 bp, Homo sapiens
cgccgaggcaccgaggcactcagaggaggcagtcatggatcaggtaatgcagtttgttgagccaagtcggcagtttgtaaag

SEQ ID NO: 363271 - DNA, 90 bp, Homo sapiens
ttcagaaggaaaatgggtcaagcttgaaaaaacaacgtacatggatcctactggtaaaactagtgagacggtttaagcggaagcatctta

SEQ ID NO: 363272 - DNA, 100 bp, Homo sapiens
ctgcggtcatggagggagcaggagctggatccggcttccggaagggtgattctgggggtccacttgtctgtaatggtgtgcttcaaggtatcacatcatg

SEQ ID NO: 363273 - DNA, 90 bp, Homo sapiens
ccggcggatcggatcccgcagatcggagacggggcctggagaatgttggctaccagggtatttagcctagttggcaagcgagcaatttcc

SEQ ID NO: 363274 - DNA, 107 bp, Homo sapiens
cacagggttcctgacagaatatgtggccacacgttggtacagggctccagaaattatgttgaattccaaggacaaccctccatatgataagggagccttcagaatcg

SEQ ID NO: 363275 - DNA, 100 bp, Homo sapiens
cgggaccgcccgcccccgcgcttcgaggataccggcggacttcagaaatgggcttgggaaccagctgagttcaggatcccacacctctgctgcatctcag

SEQ ID NO: 363276 - DNA, 75 bp, Homo sapiens
gtccaattttatggattttgatgaaactgacactgcccatctctaagataagaacctggaaaggggactctgttg

SEQ ID NO: 363277 - DNA, 75 bp, Homo sapiens
attttagggtcctttatatagaagggagagtagtacaaacctccagggaacctggctggctagaagggactctga

SEQ ID NO: 363278 - DNA, 90 bp, Homo sapiens
tggctgtaaggacccctaaggcaccggcagctgctgaaggacagcttcatggtggagctggtggagggggcccgcaagctgcgccacgtc

SEQ ID NO: 363279 - DNA, 75 bp, Homo sapiens
tccagtacgagttgaatcattgttcaaataaggtccctttcaatgcagtcgcactccggattacccactctgatg

SEQ ID NO: 363280 - DNA, 96 bp, Homo sapiens
ctaactggagcacggagctgcagccggttgggccggtgtactttcccggtgtgaccatgaagctcatggatgaggtcgccgggatcgtggctgcac

SEQ ID NO: 363281 - DNA, 95 bp, Homo sapiens
agcaggacttccaaggagagcatgtcggaggctgatcgcgcccagaagggcccccctggacgcccaggccttcctggggccgatggcctgcccgg

SEQ ID NO: 363282 - DNA, 100 bp, Homo sapiens
aggattccatggtagctgggatgttagggctcagggccagatattcgaagcttacaacatggcagctttgtggaaattaccttgtattttcatctgtgag

SEQ ID NO: 363283 - DNA, 100 bp, Homo sapiens
tgctgctcgccgcgctgcgcccttcggccgcctacttcgggtgacagagttagtccttgataattgcctgtgtgtcaatggggaaattgaaggcctgaat

SEQ ID NO: 363284 - DNA, 76 bp, Homo sapiens
agaatctttttggctgttagatgctcttgttggaagaatactaccagtttcttatctcagtcatcactatggtgct

SEQ ID NO: 363285 - DNA, 87 bp, Homo sapiens
cctcgacgtcttgcctgtgtcccacttgttcgcggcctatagtgcagagcagagcgggcggaggaccccgggcgcgggcgcggacgg

SEQ ID NO: 363286 - DNA, 100 bp, Homo sapiens
cagctgggcatgatctgctacaatccagaattttgaatagccatggagctcctaaaaagaatgggacctttcacttgacctcccttctctcccttgccta

SEQ ID NO: 363287 - DNA, 74 bp, Homo sapiens
aggaccccaccagctgcccagcccccattggcgagtttgagaagactatcaagaaatccaagtggtaatgggcg

SEQ ID NO: 363288 - DNA, 102 bp, Homo sapiens
cggcaacctccgggactctgacggtgaccaacttattagaaaaggggaccatggctaaacctcctggatcattagccagaagcagcagcctgtgccgttcac

SEQ ID NO: 363289 - DNA, 74 bp, Homo sapiens
cacagcactggttgtttctggtgggatcgttggctatgtaaaaacagattattcagagctgggagagcttcccc

SEQ ID NO: 363290 - DNA, 100 bp, Homo sapiens
cctggacaggatgcaggcagatgtgggagatgccatcccagcagtggaggtgtttgaaggggagccagggaacaaggtgaacctggcagagctgttcaag

SEQ ID NO: 363291 - DNA, 100 bp, Homo sapiens
gatcttgttgactatgaggaagttctaggcgcatattaaatttcctattgactacccctattcaccacctaccttcagattcttgaccaaaatgtggcac

SEQ ID NO: 363292 - DNA, 100 bp, Homo sapiens
gagacagatcctctgctcattgccatgaaggaactcaaggggcagtgcccaaaggaaatgccactaaagaattcatcgagagtttacagttgaagcctgg

SEQ ID NO: 363293 - DNA, 73 bp, Homo sapiens
gccactcttcgttttccatgtactgcatgctgtttgtggcagagcagcttgttgctatataccattgaaaagc

SEQ ID NO: 363294 - DNA, 96 bp, Homo sapiens
cgccatcatcatgccccacaacatctacctgcactcggccctggtcaaggacagtcattttgtttactcattcagccctgttgcaggtcccaataa

SEQ ID NO: 363295 - DNA, 82 bp, Homo sapiens
tactctttcaactacaccagccagcccgaccaggcatttgcctggtggcctgatttattggctgaacatgcagagaaatttt

SEQ ID NO: 363296 - DNA, 75 bp, Homo sapiens
cggcgcacggagcggagcgctgcagccaagccgagtactccaaagattcaggtttactcacgtcatccagcagag

SEQ ID NO: 363297 - DNA, 75 bp, Homo sapiens
tggactttctcctggggaacccgttcagctctccagtgggacagcgcatcggacatggatttgattgacatactt

SEQ ID NO: 363298 - DNA, 100 bp, Homo sapiens
cccagctccatcaacctcacgctgcacctgggattggcagccaccatttgcatgtgatgttgataaacttcattttacgccacgtatccagagactgaat

SEQ ID NO: 363299 - DNA, 100 bp, Homo sapiens
aggttacttcttcctcaacaccagcaccgcagatgttgtcaaggtggcctaccaggaggccaggggtgtcgccatgagggcttccctggaggccgccatt

SEQ ID NO: 363300 - DNA, 50 bp, Homo sapiens
cctgaaccgcgcggccgaaccctccgggctgaaggcctttcggcagcagc

SEQ ID NO: 363301 - DNA, 73 bp, Homo sapiens
gacttgattaagcaacccaaaataacaacgaacttgatgcaagtgataggtttgccaaggtcagacctctcat

SEQ ID NO: 363302 - DNA, 80 bp, Homo sapiens
caccagagtcactactttaggcggattcgcgaagcaaattgtggctactaatttgccccctgaagatcaagatggctctg

SEQ ID NO: 363303 - DNA, 75 bp, Homo sapiens
ctaaaacgaacagccaaaagatatgaagaaatccttgatgcagaggcaaggctggcagcaaaacgggctgcccgg

SEQ ID NO: 363304 - DNA, 100 bp, Homo sapiens
aagggagaaggcatgcaagttaatactctatttgaaacaagccaggttccagactggagtgatcctcctcaggatctcctgtatcgaaggtctaggtcac

SEQ ID NO: 363305 - DNA, 90 bp, Homo sapiens
cgggactggcagagcggccgggccctgggcgccctggtggacagctgtgccccggacccagatttcaaccagctggatggtcccacccgc

SEQ ID NO: 363306 - DNA, 74 bp, Homo sapiens
ccgttgctaacccccagtcctgtcacagtgaccgtgtctaccaggtgcgctacttgaaggtgtttgaaccgaag

SEQ ID NO: 363307 - DNA, 101 bp, Homo sapiens
ggatgagcccggcctcccttttcatcaggacgggaagagccagctctcccaggcgctgaacggactgtcagacagggccaaagaagccaaggagtttctgg

SEQ ID NO: 363308 - DNA, 144 bp, Homo sapiens
cagaagttgggctggtccaggaggaacgagtccgagaactggctgaagccgatgaacagcgccgggatccagcggcccagcccaatccagctttactcccctccctttatattggccccaatcaaagacaagcagacagagctg

SEQ ID NO: 363309 - DNA, 75 bp, Homo sapiens
aggatttcaacatgcctctgacaatctctagtgtgctgactgggttacttttttaaacactaggaatggtaattt

SEQ ID NO: 363310 - DNA, 51 bp, Homo sapiens
aaacctcgagtccctgtgatcaagcatcaaagctaagccagaagatttatc

SEQ ID NO: 363311 - DNA, 76 bp, Homo sapiens
acggcaaagaacttactgattcttgaggacccactgatctcagcatgaagagacaattggcgactagctcaggatc

SEQ ID NO: 363312 - DNA, 83 bp, Homo sapiens
ctgtaaagtcaccaacgagatcttccgccactacgaacagaagccctgggggatgcggaggaagatgaggacgatgaggactt

SEQ ID NO: 363313 - DNA, 98 bp, Homo sapiens
ttaaacccaagaacattgtggagaagattgactttgacaattttgggaaccagtaggacattgacatacatccgagaacattctgtggtggatccagt

SEQ ID NO: 363314 - DNA, 100 bp, Homo sapiens
tgagcccccaggggactgtgcgaactgcagtgtgttctaggtcagtggcttcaaagactccagttggattcattggactgggcaacatggggaatccaat

SEQ ID NO: 363315 - DNA, 129 bp, Homo sapiens
gtgacaacgcaagcactcgtgctatggccggttccataatcagttcctacaacccacaggacagaatgcagtaatagtggccttgtcttcaaaatcatgggatgtagagactgcaacagaattgcttct

SEQ ID NO: 363316 - DNA, 75 bp, Homo sapiens
tagctcagcaattcttacctttgtgttcacaatgaaaccaagaatgaattggagaagatgttgaaatgtaatgag

SEQ ID NO: 363317 - DNA, 90 bp, Homo sapiens
gaccaagaaggggccccccttggacgggactatgtgtgcacctggcaaggcctgtaactgtgaccagtacctaaaggtctccagggacat

SEQ ID NO: 363318 - DNA, 100 bp, Homo sapiens
accatggcgaggagtctctgtccgggggcctggctaaggaaaccctattacctccagacccctaagggagcctgtgcaacatcggtgaaggttgctattg

SEQ ID NO: 363319 - DNA, 82 bp, Homo sapiens
ccaagttccggcacaccgaggctcggccgccccgccgcgaggccctgagcctgtgcaattatttcgagagtcaaaatgtgga

SEQ ID NO: 363320 - DNA, 102 bp, Homo sapiens
ctaaaaagatatttgatattgatgaagctgaagaaggtgtaaagccgacatcggcctggctgcctggggacgcaaggccctggacattgctgagaacgagat

SEQ ID NO: 363321 - DNA, 100 bp, Homo sapiens
aagaagagaagatggacagtttcagtgcattacagaacctaaatcacagccacagcagcttcatcagggacaatacagatcatcaaatactgagcaaaat

SEQ ID NO: 363322 - DNA, 99 bp, Homo sapiens
cccctggtgctggtgcagctgtcggagcactacgagggtgtggggctggcctcgctcgtggcacctctgctgatctcacaggccatgggactggccctc

SEQ ID NO: 363323 - DNA, 82 bp, Homo sapiens
gtgaagagtctggagtttatctggagtgaggtggccggttcttggtgggatctgagcagaaggatatggccctgaagccaca

SEQ ID NO: 363324 - DNA, 100 bp, Homo sapiens
tccttcgtacccacagtgcttcatgagagatcgtctggtagaatcaacttccttgagaaaagccatagaaacagtgtatgcagcctatttgcccaaaaac

SEQ ID NO: 363325 - DNA, 100 bp, Homo sapiens
ctaatgccatcgagcacaccctgcagctagtgtcagcagtgggatacctgcgcttgaaggacatcatccaccgtgacatcaaggatgagaacatcgtgat

SEQ ID NO: 363326 - DNA, 139 bp, Homo sapiens
tgagtttcccacttgattacccgttaagtcccccaaagatgagatttacctgtgagatgtttcatcccaacagtgctggagaatctggtaaaagcaccattgtgaagcagatgaggatcctgcatgttaatgggtttaa

SEQ ID NO: 363327 - DNA, 50 bp, Homo sapiens
ggatcctctgtacgcccgttcactggtacacctgagagcctggcagaaaa

SEQ ID NO: 363328 - DNA, 95 bp, Homo sapiens
cccggcgccgtcgcgccactcctccgattcctaaggacggtctgaagagccaagagctatttgatgaaattagaatgacctacatcaaagagcta

SEQ ID NO: 363329 - DNA, 83 bp, Homo sapiens
ccggccgcccagacgctgcccgcgggcccggccacggcggagccaaggagcatcagatccatgctgctgctgactcggagccc

SEQ ID NO: 363330 - DNA, 78 bp, Homo sapiens
ctctatcatggattcaaagaagtagaagaaaactggtctaagcatttctcatcaggcaagcaccggaagcaccccggc

SEQ ID NO: 363331 - DNA, 106 bp, Homo sapiens
gtccttctccactttcgccagcccgtgccgcgagcgcggcctgcaggaggtatcacctcttctgggctcaagatggacaacaagaagcgcctggcctacgccatca

SEQ ID NO: 363332 - DNA, 89 bp, Homo sapiens
gtacgaaagagaaacccggagggcgccgggttttccaagagataacttcaccaagatgtccagtgataggcaaaggtccgatgatgaga

SEQ ID NO: 363333 - DNA, 90 bp, Homo sapiens
ttatgggaaaattaagcagatgctccagtttgagaaacctggatctgcgatctgtttgtgtttttccagaaaggaggagtcaaggaagcc

SEQ ID NO: 363334 - DNA, 90 bp, Homo sapiens
ggaggagtccctgaagatctatgctcctctgtacttgggacttaagtcacaacagattatctttcatcaaggcaagttccatgagccacc

SEQ ID NO: 363335 - DNA, 75 bp, Homo sapiens
atcctgctggccatgctctacgggacagcctcctccagctggtgatctcgggtcccgtgcagcagtcgcctcacg

SEQ ID NO: 363336 - DNA, 83 bp, Homo sapiens
agcgcaaccacgagacggccttccaagtcctcctgcatatgcccaagaggattgggagtggaatggacaccagcagaagcacc

SEQ ID NO: 363337 - DNA, 75 bp, Homo sapiens
agaaaatggagtctaaacacctataagtctctggcaagatgctttaggaagataaaagtttgaggagaacaaaca

SEQ ID NO: 363338 - DNA, 51 bp, Homo sapiens
ctgcgggcccgctccgacgcggaagataatgttaattcaagactctcgaag

SEQ ID NO: 363339 - DNA, 83 bp, Homo sapiens
cttatcaggggaagaaaaatattccacgcatcacggttatcaatactctggctgaccatcatcatcgtgggactgactttggt

SEQ ID NO: 363340 - DNA, 83 bp, Homo sapiens
gtgcatcggtacatgaagatgttttggcccgaaccgcgacttcaacaaaaaataagagaagaaaggaatattttctagctgtg

SEQ ID NO: 363341 - DNA, 90 bp, Homo sapiens
tcttcgccgtcatccgcttcgaaagcatcatccacgagttcgacccgtgggagccgggaggctgcgttcacctacgccatcattgccgcc

SEQ ID NO: 363342 - DNA, 100 bp, Homo sapiens
gtggaagaaggcagctgctggcgagatcatctacaacaagtgccccccgaatgcctcagggtccccacatgccgcagaggccaccgccagtacctgcgca

SEQ ID NO: 363343 - DNA, 83 bp, Homo sapiens
ttccctgctcggacgccgagcaccgccaaagcgcgtacactgaggaggggacggctccgtcttcacattgtgcacagatctga

SEQ ID NO: 363344 - DNA, 75 bp, Homo sapiens
agccattttttaaacttaggtatttaagtactgaaagactgacatcaatttgccctatcttacaatggattcttc

SEQ ID NO: 363345 - DNA, 83 bp, Homo sapiens
gcgcagggcctgcagcgggagctggacggcgagcgcgagcggcgcgagaaagacgtctgctcactggagatgacacgtgcgtg

SEQ ID NO: 363346 - DNA, 82 bp, Homo sapiens
cgggcgccatcgagccttggcggcggacgtgcaggtcagctggccgccggcacctgtgagattgtgaccttggaccgggaca

SEQ ID NO: 363347 - DNA, 99 bp, Homo sapiens
cagccttattacaaagacattctcccctgcctggatggatacctgaagacttcagccttgtcagggacatctctacaccgttcccatccgggaacaggg

SEQ ID NO: 363348 - DNA, 124 bp, Homo sapiens
caaaggccgcggcactcccacgcggaccccgaagtccgcaacccggggatgggcccgcggctgcgagcctggatgtgtaaatacaactgaagtggacattaagaagtcatccagaatgagaaac

SEQ ID NO: 363349 - DNA, 96 bp, Homo sapiens
gagccgggcgcggggagctgcgcgaagccggggcggagcacgcgagctatgacaatgcagatcttcgtgaagactctgactggtaagaccatcacc

SEQ ID NO: 363350 - DNA, 96 bp, Homo sapiens
atgattgtggattatgaaaaccctttaaagaagatgatggaagaatttgtaccccatagcaaggaaagaagattctatatgatatacttgcctttg

SEQ ID NO: 363351 - DNA, 90 bp, Homo sapiens
cgcaaccaccgccctggccatctaccatgtggctggcgcccatgcggctctacacgctctccaagcgccactttgtcctcgtgtttgtcg

SEQ ID NO: 363352 - DNA, 50 bp, Homo sapiens
gattgactatggtctctccggctaccagggagttgaccacatttggccat

SEQ ID NO: 363353 - DNA, 83 bp, Homo sapiens
ccggtgcccgaggaggcagccaagctcatggcctgccactgcgtgcgttttaaaatcaaagatgggaaaatcggagaaaattg

SEQ ID NO: 363354 - DNA, 58 bp, Homo sapiens
atgagaataaagaacacgaagctgatacagcctgtgaacttatgaatcaaggcatctt

SEQ ID NO: 363355 - DNA, 82 bp, Homo sapiens
cttcggcaccgtccgcgactgctatgagggtctgcagcccagagggcaccttctgcaaacatgtctgtggatcccctatcca

SEQ ID NO: 363356 - DNA, 83 bp, Homo sapiens
ctcagttggaagcagccgatccagcctgcggagcctgtggggcaggagagtagttatcttgatggaattagaagttttgaagt

SEQ ID NO: 363357 - DNA, 75 bp, Homo sapiens
ctctgtccagttttcaaaccacacaggtagtgggcagcagtcagtgacaggtgtaacctctgtggatgacagcaa

SEQ ID NO: 363358 - DNA, 100 bp, Homo sapiens
agatgaacatcaagatatagatgtagcaatacttactgcactgctaaaagggagtaatgtggtcattgcatcccgtaagttggagagattgaagtctgcg

SEQ ID NO: 363359 - DNA, 101 bp, Homo sapiens
atgcgatgcgggggctgctgcaatgacgagggcctggagtgtgtgcccactgaggagtccaacatcaccatgcagattggaattccaccagcccctcgtgg

SEQ ID NO: 363360 - DNA, 83 bp, Homo sapiens
agcttccaagagaaccaatggaatggagaagccagagactgctgctactttgaaacgtacgatagaggccctgatggacagag

SEQ ID NO: 363361 - DNA, 109 bp, Homo sapiens
gagtgttccttccgctagtgatcctttgcaccctgcttggagacggacttgcttccgttgctgattgttggaggttcttttggtcttcgtgagttttctcaaatccgat

SEQ ID NO: 363362 - DNA, 75 bp, Homo sapiens
gactcatctaactagacatatgcgtactcattcagatggtttgtgcttgtcggaatcagaaacagtcaacaaaga

SEQ ID NO: 363363 - DNA, 100 bp, Homo sapiens
caagaattctctatttctgctccgtcatccatgccactgtttattacccagaactctttgtctgggtcagtcaagaaccatttccaaacaaggacatgga

SEQ ID NO: 363364 - DNA, 82 bp, Homo sapiens
caagggcgcagattctttctgtacgcccgcggcgccatggctcacgtcggctcccgcaagcgctcgaggagtcgcagccggt

SEQ ID NO: 363365 - DNA, 50 bp, Homo sapiens
ccgggaccctcctgtgggcccaggggccgagtacagatgctgccccaggc

SEQ ID NO: 363366 - DNA, 100 bp, Homo sapiens
gggagagacgagccccgagcccggctggacgccgctgcctcagcttaattggcttagtgtcgacttcaataattggaaagactgggaagatgattcagat

SEQ ID NO: 363367 - DNA, 100 bp, Homo sapiens
gatcagatgtctaacgataaggagcggtttgccagatacttggcatatcgaaattttatgattgacacgtatcgtctaaacccccaagagtatttaacta

SEQ ID NO: 363368 - DNA, 100 bp, Homo sapiens
ttcatacaatcccagcatttgacaatgaaaagcgaaccccattgcacgccgcagcttaccttggagatgcagaaatcattgaacttcttattttatctgg

SEQ ID NO: 363369 - DNA, 97 bp, Homo sapiens
ctacccgctgctccgggccaccggggccatgagacctgtcctgatgccccaggtggtacactggcagatgacatgatgcgtacagatgtctgcgtgt

SEQ ID NO: 363370 - DNA, 82 bp, Homo sapiens
cgggccgtgagggccttggaaccggaggacaatgcagatcttcgtgaagactctgactggtaagaccatcaccctcgaggtt

SEQ ID NO: 363371 - DNA, 82 bp, Homo sapiens
cgccatcaaccgccagatcaacctggagctctacgcctcctacgtttacctgtccatgtaatagttatgcacgagtgcgagc

SEQ ID NO: 363372 - DNA, 98 bp, Homo sapiens
tcagtggtcctacctggggatattatcaaatctactactgttcatggcagggaccactgacatttagggatgtggccatagaattctctctggaggag

SEQ ID NO: 363373 - DNA, 90 bp, Homo sapiens
gacaaccttcccagaaagtccaagctcgtggtgtgcttcccgcacagctgcagccatggggtctgaggaccacggcgcccagaaccccag

SEQ ID NO: 363374 - DNA, 98 bp, Homo sapiens
aggattccaagtaactcttatttggctgggaagttcaagcacatggctctagcttctggtgagaggtttcaggctgcgtcataatatggcagagaaga

SEQ ID NO: 363375 - DNA, 82 bp, Homo sapiens
ctcgaacccgcctgcgatggggcgagaaaggtcccactgcagccctccaagcagatttggtcgtattgggcgcctggtcacc

SEQ ID NO: 363376 - DNA, 100 bp, Homo sapiens
agcaacccccgcttggcctcccaaagtgctgggattagaggcgtgagccactgcacctgacctaagatcctggtggctttgagacaccttcacttcaaga

SEQ ID NO: 363377 - DNA, 100 bp, Homo sapiens
tcttaacccagaagtagctgaatgtgttactccattgctgaggagtgatttgggctgcaaacgctggtgtcacagccagccccccaactgacctcatctg

SEQ ID NO: 363378 - DNA, 75 bp, Homo sapiens
accccgaacgggttgcttcccccgctgcgagacgcaaacatgcagatctttgtgaagaccctcactggcaaaacc

SEQ ID NO: 363379 - DNA, 90 bp, Homo sapiens
gatggtcaattgccatgcacacttctgggtgattgaaatctctgaatatcgaacccagctctatgaatatctacaaaatcgaatgatggc

SEQ ID NO: 363380 - DNA, 75 bp, Homo sapiens
gaacgcgagggcggcgcccggggactggagctgcgcgcaatagttccagggtctccctccactgctgtagtaacc

SEQ ID NO: 363381 - DNA, 98 bp, Homo sapiens
gcggacctgtgaggggatccgacttgccggcagaacttacgctgcgggaccccgggcactgttgctgctgcgggagtgtaaggagaggatgaggcccg

SEQ ID NO: 363382 - DNA, 83 bp, Homo sapiens
cccagctggaactccggccacagccagcatgcaggtggtctttgggaagaagcttcctgcctttgccaccatccccatccacc

SEQ ID NO: 363383 - DNA, 100 bp, Homo sapiens
gggaactgctggggaaggcgattggcatcgatctctccatcccttccgaggcccgacttcggttttaaaatcaaagatgggaaaatcggagaaaattgcc

SEQ ID NO: 363384 - DNA, 50 bp, Homo sapiens
tgttaactttgaaactaagcagaatggagatgtatgcatttcgattcttc

SEQ ID NO: 363385 - DNA, 75 bp, Homo sapiens
ctctggggaaaatggctgcgtcttcgagtggttgcccgaagctcagcagagagtcggaggctgctttttaaacct

SEQ ID NO: 363386 - DNA, 75 bp, Homo sapiens
actcggcctggatcctcattctgcacatgaccccaccaacaactgaacgctttggtcaggctgctacaatggaag

SEQ ID NO: 363387 - DNA, 101 bp, Homo sapiens
aggacattgagtcaaaaatccctctaaatatggaggagcctcccgtggaggaaccgtagtattattgattccacagaatacagccaacctccaggtttcag

SEQ ID NO: 363388 - DNA, 100 bp, Homo sapiens
gcccgctgctgcctccagagaggctacggtggaatacaaatgagggctgtgggacagatgatgtctaccatgttctacccactggtcacctttgtcctcc

SEQ ID NO: 363389 - DNA, 83 bp, Homo sapiens
gacgccggaagccgggaaatgttaccggtattgtaagaacaagccgtacccaaagtctcgcttctgccgaggtgtccctggta

SEQ ID NO: 363390 - DNA, 75 bp, Homo sapiens
gaatttcccaccaggatgagtatgattggctgtgattttaggttgctgctaaatgggaaaaacttagcttagtac

SEQ ID NO: 363391 - DNA, 83 bp, Homo sapiens
gcaaacgcagagacaaaagaaacgggccccgactgcattccaaaatatgcccggtgctatccgcccagctgctcctagaccac

SEQ ID NO: 363392 - DNA, 90 bp, Homo sapiens
ccggccgtgtcccgaggaagtgcaagacccggtgtcgtgaaaactacccctaaaagccaaaatgggaaaggaaaagactcatatcaacat

SEQ ID NO: 363393 - DNA, 80 bp, Homo sapiens
catccaagatacaagagaacgcattgccactgatgcttgctgagccgttgcaaaagcttctcatttcagagagatgccag

SEQ ID NO: 363394 - DNA, 96 bp, Homo sapiens
ctccctgccgccgtcctcgccgcttccccggcggtagcagcctgcagccacgtgaaaacgtgtggctctaatcttcaaggaccaagtggtaccttt

SEQ ID NO: 363395 - DNA, 80 bp, Homo sapiens
cgaaagattcgggccagagacgacaacccgggcctccgaggagaactacgatgacccgcacaaaacccctgcctccccag

SEQ ID NO: 363396 - DNA, 51 bp, Homo sapiens
gaagagggtggctaatgattaagatctgaagaaaacccttgctgtgttatt

SEQ ID NO: 363397 - DNA, 48 bp, Homo sapiens
cctctcagaagaggaccgcggagtatgctttactcagaataattatat

SEQ ID NO: 363398 - DNA, 98 bp, Homo sapiens
tgaagtacaaaatattttccaggacttggaaaaggagagtgacacacccctccagcaagtatccattgaagaaattctagaagaacaaagggtggaac

SEQ ID NO: 363399 - DNA, 100 bp, Homo sapiens
atgaaactctcagatcactgtataaccacccagtaccaaaggcaaatactcctgtaaatttgagtgtgagctcttcagtatccccatcagccagtttccg

SEQ ID NO: 363400 - DNA, 82 bp, Homo sapiens
cccagaccctggagcctcagttggaagcagccgatccagcctgcggagcctgtggggcagaaggtgacaaagtacaatttga

SEQ ID NO: 363401 - DNA, 50 bp, Homo sapiens
ggatcctctgtacgcccgttcactggccacctcaccgatcagcacctggc

SEQ ID NO: 363402 - DNA, 83 bp, Homo sapiens
caagtagctgctcttccaagcaaggaagtcgacagctcaatgtcaattgctgcaagcttagtgagtgaagatacaaagaccaa

SEQ ID NO: 363403 - DNA, 82 bp, Homo sapiens
acttcctataaatctcgcccaaacaggaaagccgccgccatgtctgcgcatctgcaatggatggtcgtgcggaactgctcca

SEQ ID NO: 363404 - DNA, 98 bp, Homo sapiens
ccgatactcgcgggaggctaacgctccgggccccgtacccggagagcggcaactcgcgcactcaaaggttgctgctgactcagccattctagaagttc

SEQ ID NO: 363405 - DNA, 90 bp, Homo sapiens
gatgagatttacctgtgagatgtttcatcccaacagtattcagaaacgtgaagccagcaattgtttcgcaattcggcattttgaaaacaa

SEQ ID NO: 363406 - DNA, 73 bp, Homo sapiens
ggcaaggtggtgactaagaaattcagcaaccaggagacctgcacctggctgcagtggaagaaagaaagatcaa

SEQ ID NO: 363407 - DNA, 74 bp, Homo sapiens
caccgacctcatcagtgagctgtccctgctggaggagcgcttccgggtctcagacttgatccgcagtggaaaac

SEQ ID NO: 363408 - DNA, 109 bp, Homo sapiens
atgtcacaggtccagggcagaggaccaacatgggcattttgtttatgagcaaggtgccgagcagagagatcgacaaggcggagggcaagttctggacacactggaaccg

SEQ ID NO: 363409 - DNA, 75 bp, Homo sapiens
cagagagggcctgggagcttgctgcagcttcaggagctggccctcagcgcactcctgaagttcgtgcagctggaa

SEQ ID NO: 363410 - DNA, 116 bp, Homo sapiens
aaaatattcatcaacctagagctgccaagaagcattcttcatctaaagataagtttgcaatggattttggataaacaagatctgttgaaggagcgccaaaaggatttaaagtttct

SEQ ID NO: 363411 - DNA, 73 bp, Homo sapiens
gggagcttatcctatctgtgaatatcttgtaccctgttatatttcataagatcatcacttaccgggactacct

SEQ ID NO: 363412 - DNA, 75 bp, Homo sapiens
ttgcatgcgagggaccattgcaaatatggctacacacacctttctgcaggagagctgcttcgtgatgaaaggaag

SEQ ID NO: 363413 - DNA, 75 bp, Homo sapiens
ttggaatgatcatcttaatttcttactgtattcgatgactgataaaggcattcctagccgagtgtgacacagtgg

SEQ ID NO: 363414 - DNA, 98 bp, Homo sapiens
ggatgtccccctggatcttcacacagctgcttccattggccagtatgaagtggtgaaggagtgtgtgcagcggttctggcctataggaacaagacatt

SEQ ID NO: 363415 - DNA, 98 bp, Homo sapiens
gaccgctcctccaactaaccatttaatagaaaatggtcagcttgaaattgtgacaggtggctgggttatgcctgatgaagctactccacattattttg

SEQ ID NO: 363416 - DNA, 75 bp, Homo sapiens
cgcgctgcgcggactgcggcgccccgggggcagggtggacaggaagcagctcagcccagcctgggagaggccaag

SEQ ID NO: 363417 - DNA, 100 bp, Homo sapiens
caaaagcatacaagatctcataaaggaagtggaggagctgcagggacgaccgggagctttcccattatcaggaactgttgccgttattacatcagatggg

SEQ ID NO: 363418 - DNA, 50 bp, Homo sapiens
gctggattgtctgccagagattgagaagatgatgataattccgaagaagg

SEQ ID NO: 363419 - DNA, 75 bp, Homo sapiens
caaggattctcgctgtgacagagacaacaccgagtatgagaacgaggatgccatgaggaaagctggtgtggcaca

SEQ ID NO: 363420 - DNA, 100 bp, Homo sapiens
tggacagcagcaaggctggcctggctccgctggaagtgagggttctgggcccacgagcctcacagaatgaggttcctgcggcacccctggaagaactggc

SEQ ID NO: 363421 - DNA, 50 bp, Homo sapiens
ggcctgtgtacttgctgtagatgaaaatgataacgaaggaggcccaactt

SEQ ID NO: 363422 - DNA, 75 bp, Homo sapiens
cttccatcaatcatatctcacaggataaagaggaatttggataaacagttgaaattatttttctactcagaagat

SEQ ID NO: 363423 - DNA, 90 bp, Homo sapiens
gctgagcttgtggcagaagggaggaactgtggaaggtgccatggacttgatcttgatcaattccctacctcttgtatctgatgctgaaac

SEQ ID NO: 363424 - DNA, 76 bp, Homo sapiens
gaaggcatggaaagttccagccggttcgagagctagtggaaggaatgaaggccagctgaatggtgaaacaaataca

SEQ ID NO: 363425 - DNA, 101 bp, Homo sapiens
ccgcggcggagcgagcgagcggccggcaggttgggaggagcggccgaagtgctgcttttgacacaaaaacggggttacgtgtggcagtgaagaagctctcc

SEQ ID NO: 363426 - DNA, 83 bp, Homo sapiens
atgaaagtgtgatgttcgcgtatttcttgacagttcagagaagccgaactgggattaccatgcagaaatacaagcttttggac

SEQ ID NO: 363427 - DNA, 101 bp, Homo sapiens
ctcaccatggcaatgggcagttcaccgagaagcgggtgtatctcaacaggcattgggatcccgtggcagttgcagcactgaagtggagaaggagacccagg

SEQ ID NO: 363428 - DNA, 98 bp, Homo sapiens
aagaatccgccatgggctactcagtttacagccactgcagtatcacagccagacagccagctaaaggtgtggatgagcaaatacggctggagtgccga

SEQ ID NO: 363429 - DNA, 99 bp, Homo sapiens
gaaagttgctcctcaaaatgacttctcaacaaggcaaaccgttaagaaaggatcggtctgcagaagaaacttttcagctctctcggtggacacctttta

SEQ ID NO: 363430 - DNA, 100 bp, Homo sapiens
tgtgcaggacaccgacatggaacagggactcactggggatgctcagaagagaaagagcaagtgggattcggctatcccagtgacaacgatagcccagccc

SEQ ID NO: 363431 - DNA, 75 bp, Homo sapiens
ggacgccggaagccgggaaatggtggcagcaccatggatagctccgcaggaagcaaggctaggcgtgaggctggg

SEQ ID NO: 363432 - DNA, 74 bp, Homo sapiens
tcggcctcggagcaacgagcgcagcgccgcgggagatacagatgacccaccaagaattactcagaaccctgtga

SEQ ID NO: 363433 - DNA, 95 bp, Homo sapiens
agtcagaaaactcatcatcaggcgacgccctggcggctgggtggagaaggagacatactactgaccccattggaagaagaaccaggcatggaaag

SEQ ID NO: 363434 - DNA, 83 bp, Homo sapiens
cctcccccgtcctccgttagctaattaaaacatttttcagggacgtagccatccagagattgatcacttattcattagtaatt

SEQ ID NO: 363435 - DNA, 75 bp, Homo sapiens
ggagaaggaatgtgtgaccatttccaacggtgctggagaatctggtaaaagcaccattgtgaagcagatgaggat

SEQ ID NO: 363436 - DNA, 71 bp, Homo sapiens
taaatcagagtctactggctcacccagaggcctccattcaggctgttttttcagatgcccaaatgcatatt

SEQ ID NO: 363437 - DNA, 74 bp, Homo sapiens
gttttctccatttggtacaatcactagtgcaaagaagatgattgaagaatcactgaagattaaaataaaaaagg

SEQ ID NO: 363438 - DNA, 100 bp, Homo sapiens
cgtcctgctacagacagctttgatgactacccacctagaagaggtgatgatagctttggagacaattctggaacttttcaaagcctgactctcttcttga

SEQ ID NO: 363439 - DNA, 75 bp, Homo sapiens
ttgacagctgcagggccgcggcctggcttgcaagccaggctgggattccttcaggtgtatacaatgttattccct

SEQ ID NO: 363440 - DNA, 75 bp, Homo sapiens
tggcagtttacatattcacttgatgcagctttctcaagatgtggacgagtgctcactagcagaaaaaacctgtgt

SEQ ID NO: 363441 - DNA, 96 bp, Homo sapiens
tggaaaggtgaccaagcccaaagaggagaaagatgcttctaaggggaaatcctcattgacgattcaatttgttgaaggccaatttgtggactccta

SEQ ID NO: 363442 - DNA, 116 bp, Homo sapiens
catcacagaagctggaagttctgatgttccactgaaatcacaatggaaagtcttgacttgactgcattaaagggcagtatttaaagtcagttggcaagcagtggaataagattttt

SEQ ID NO: 363443 - DNA, 96 bp, Homo sapiens
ttccgtatctgcctaggcattttgctgtctcctcctaatacggaaacattggcaaatttggagcgacagatctatgcttttgagggaagctacctg

SEQ ID NO: 363444 - DNA, 98 bp, Homo sapiens
gaggccatgtcaggagacggagccacggagcagtacctccctgcacttggctattcaaaacgggtccatctgatgaatcctatggttccaggattaac

SEQ ID NO: 363445 - DNA, 100 bp, Homo sapiens
tagcgctatgcctgcggcggagactgcatcaggctctcgggtctgcaagtggatgatgagattgtggagttcggctctgtgaacacccagaacttccagt

SEQ ID NO: 363446 - DNA, 50 bp, Homo sapiens
gactttcttcatgagattgaaacagattaataaagcgtgcacaacaagag

SEQ ID NO: 363447 - DNA, 75 bp, Homo sapiens
tgaggcttcatgaagatggcgccagaacgaagaccctactaggcaaggaatgctgtctctgcaatttgagaggag

SEQ ID NO: 363448 - DNA, 75 bp, Homo sapiens
ctcagttggaagcagccgatccagcctgcggagcctgtggggcagtatgggcgaacgcctctgcaccttgcggcc

SEQ ID NO: 363449 - DNA, 74 bp, Homo sapiens
atcttcggggacctgaagaagatgaacaagcgccagggttattatattatgcaggacatggttatgaaaatttt

SEQ ID NO: 363450 - DNA, 82 bp, Homo sapiens
cagatagaaaacggcgagagtgggcgagaacgtccactgcgggccggcgaaagctgactagacgcttgaagcaaagctgcca

SEQ ID NO: 363451 - DNA, 100 bp, Homo sapiens
ccacagctaagacaccgggacctcctggaagccaaaaatgggggccgaaggccagagaccaggatttggctacggaggcagagcgtccgactataaatcg

SEQ ID NO: 363452 - DNA, 75 bp, Homo sapiens
tgatcgcctaacttctactgacgaagcttggaagttgcagaagtgtggaaccatcagagaatctacaatccctga

SEQ ID NO: 363453 - DNA, 90 bp, Homo sapiens
cagaagaaagctggccggggcctgggcctgagcatcgttgggaaacggcattgggatcccgtggcagttgcagcactgaagtggagaagg

SEQ ID NO: 363454 - DNA, 87 bp, Homo sapiens
ccaccgaggctgaggatgatggtagattgccagttacagaatgtctgaaggggacagtgtgggagaatccgtccatgggaaaccttc

SEQ ID NO: 363455 - DNA, 76 bp, Homo sapiens
ggcagacgttagcgtgagtgatcactctcaatcccggatcacaaaatttgtccaggatagacatagagctagaaga

SEQ ID NO: 363456 - DNA, 89 bp, Homo sapiens
tccagatcagcatgggcccatcccttgatggctcctcaggtctctgagcggcccctgatgttcctgttggacactcctggcgtgctggc

SEQ ID NO: 363457 - DNA, 75 bp, Homo sapiens
tgtgcagaacttccagatgaaacatgagatccggccccacatcgcaactcttcgtaagtacacctatggcaagca

SEQ ID NO: 363458 - DNA, 98 bp, Homo sapiens
aagaacaagcagctgggccatgaggaagtggagaacatgcagctgaccctgaacctgcagacggagaacaaaggcagcgttgtctcaggcggagagct

SEQ ID NO: 363459 - DNA, 75 bp, Homo sapiens
gaaaagttggagataaaattctcggagatctgagctacagaagtgcaggtgaaggtgataaagtaaagtgctttc

SEQ ID NO: 363460 - DNA, 50 bp, Homo sapiens
caggagtcatcggacgccagaatctgctcattgctatggacagtgctatc

SEQ ID NO: 363461 - DNA, 90 bp, Homo sapiens
ctcgtatgcaacctcaggcttcagccagggcaagctctgtgtgattgattggaagacatcagagaaaccaaagccttttattcaaagtac

SEQ ID NO: 363462 - DNA, 100 bp, Homo sapiens
gctaattctagatttggatcattgcccaaagttgcacgatgaaaactttcggaagagaaagttgcctgtggtaagttcagttgttaaagtaaaaaaattc

SEQ ID NO: 363463 - DNA, 82 bp, Homo sapiens
cccaaatcgatgtgcatgcacttacggatttactggaccccagtgtgaaagaggattttgtgtcatgtatagagaactacag

SEQ ID NO: 363464 - DNA, 75 bp, Homo sapiens
aacgatgcaccatgctctcttacaggttaaagaaagacctgatgtgggagtttatatcaaagatttatcagctta

SEQ ID NO: 363465 - DNA, 75 bp, Homo sapiens
agaactggagagaactgctggaaggagactggatgatagaatttttctccttggaccaagatgactgatggaaaa

SEQ ID NO: 363466 - DNA, 82 bp, Homo sapiens
cgcatgaaccgggtcctcagcttccacagcgtgtctgccagcgacgtgccccaggacgggctgcttctgcacggccccttcg

SEQ ID NO: 363467 - DNA, 100 bp, Homo sapiens
ctttcccagaagttgttctaacgctgcctttgctttaaaacagtattacttgcgatcaggaactgaggacatatctaaattttctagttttatagaaggc

SEQ ID NO: 363468 - DNA, 100 bp, Homo sapiens
caatggagtcacatcagcattttctgttgactgtaaaggtgctggtaagatttcttctggtgaacatgtcaaaccttttaagccagagaaagcaaaagaa

SEQ ID NO: 363469 - DNA, 97 bp, Homo sapiens
cgagaagctgccgccgaacgacaggacgttggggcggcctggctccctcagtgccctaaagtacatgccccacgcagtcctcaaactcctggagaac

SEQ ID NO: 363470 - DNA, 75 bp, Homo sapiens
ttcatcagaatcaaccaggattatatccgaacgttttgcagattgtgcttcaagaagaccatagggaagaacgca

SEQ ID NO: 363471 - DNA, 75 bp, Homo sapiens
atctcgcagaacgccatcaaccagctgccgttgatgctcactgccatcagctgcatcctccctatggcactggta

SEQ ID NO: 363472 - DNA, 83 bp, Homo sapiens
catgtccgaggagaagcccaagtgtggacgaatgtggaacctcgctctgtggctgtgttcccttggcactccttagtcccctt

SEQ ID NO: 363473 - DNA, 80 bp, Homo sapiens
gcgctgcactacgcctttcaggacgagaaccacctgagtcttgctatggagatacacttcaattcctacttcagtggaag

SEQ ID NO: 363474 - DNA, 74 bp, Homo sapiens
caaggtggcctaccaggaggccaggggtgtcgccatgcacctgtggccttgccgaagaactggaaaaagagaag

SEQ ID NO: 363475 - DNA, 82 bp, Homo sapiens
gtcccggacagagcccgtggtcgcgcagatagggccagatttgagtgtgtgaatttttgagtgaaacctggaacccaaatga

SEQ ID NO: 363476 - DNA, 100 bp, Homo sapiens
cagtctctgatcgaaggggagtttccacagtgattgatgctgcctcagattttcagctgaactctcatctctcaacactggcaaatattcataagatcta

SEQ ID NO: 363477 - DNA, 75 bp, Homo sapiens
cacagctgctcccttcgccttcgccctttccacctcgcggcagttcggtggacaagagcaaggaccaagtgtgga

SEQ ID NO: 363478 - DNA, 100 bp, Homo sapiens
tgagaaacataatgtattttgaacaactctgctcatggtgattacatgcaaaataacgagagcagcttaatagagcaagctccaatacctcaggacggac

SEQ ID NO: 363479 - DNA, 82 bp, Homo sapiens
tacggggtgctgtcacgctgcctttggcagcctaccagcactacatcctggccaagataacagtcttcactcctatgctgat

SEQ ID NO: 363480 - DNA, 82 bp, Homo sapiens
gctgatgtgaaaaataccacgacaaaaccaccctaaactgccattggatgtccagaatcccctgtagttgataatgttggga

SEQ ID NO: 363481 - DNA, 51 bp, Homo sapiens
ctggaaacatgatacaatctgcaaatggccacgtgctgctgggtctcagtc

SEQ ID NO: 363482 - DNA, 100 bp, Homo sapiens
gatccacctctcggcccacgccatcaagcacgccaaggcctactgctgcagcatgtgtgggcgggcctacacctcgatggagtctcactctgtcacccag

SEQ ID NO: 363483 - DNA, 100 bp, Homo sapiens
ttgggcctggtggtcttcttcttcagttttctactttcaatatttcgttccaagtaccacggctatccttataggttttctgtctcaactggtctctgac

SEQ ID NO: 363484 - DNA, 51 bp, Homo sapiens
atccatttctcctattgaggagtcaacgatgtcctggaacaggtggaggcc

SEQ ID NO: 363485 - DNA, 96 bp, Homo sapiens
ggaagcccagaaagggaaaaactaccagaacggagatgtgtttggcgatttagtggttgaaggactgcgatgtgtagttttgccagaagatctttg

SEQ ID NO: 363486 - DNA, 100 bp, Homo sapiens
gacaaggaagatgagctgtcctttcaggaaggagccattatttatgtcatcaagaagaatgacgatggaggatatgatggttaccgcccttcattctcta

SEQ ID NO: 363487 - DNA, 75 bp, Homo sapiens
ctcataggctcgtctggtgctatcctgtcatacatcatgtgtgtggtatctgcccaaactggaacttatgctgta

SEQ ID NO: 363488 - DNA, 75 bp, Homo sapiens
aaagaattcgctaaatttgaggaagaacgcgccagagcaaaatgggacacactgataccccaatgtccttctttg

SEQ ID NO: 363489 - DNA, 73 bp, Homo sapiens
cggagtcctgagtccggatgaactgccttaattttaaagaccccgaagcagtcagagctctgacgtgtactct

SEQ ID NO: 363490 - DNA, 83 bp, Homo sapiens
aaaacggcaacgtgtaatcagaaggcacagattagaggaaggaagaggtcctaggcctacttacaagcctccagtctcaaatt

SEQ ID NO: 363491 - DNA, 100 bp, Homo sapiens
gccgggtactctacacttgcttccaatccatacaggcccaaaagagttcagagatagagtggtgacttccaagcttcatgcagaaccggacaacagaaat

SEQ ID NO: 363492 - DNA, 75 bp, Homo sapiens
tgtgcaacctgcccagctacaaggccaaggaagggaacctgattggattaccccttctgattgacaactatgtgc

SEQ ID NO: 363493 - DNA, 90 bp, Homo sapiens
caatcgtggctacaaaaatcaatctcagggctacaaccagtggcagcagggtgcaaagatgccttttgatgccaacaaactgtattgcag

SEQ ID NO: 363494 - DNA, 75 bp, Homo sapiens
aaggtggcggcgctgctgctcgggctgctcttggagaggctgggaggcggcagaatgcagccagaggagggcaca

SEQ ID NO: 363495 - DNA, 98 bp, Homo sapiens
gcattgccctgatatgtgggatggcaatctcctatatgatatagtctgtgggttctggcaccacctgagcccactgggcatctggtcatccctggcac

SEQ ID NO: 363496 - DNA, 82 bp, Homo sapiens
ctggatattcctaaagtccagcatgtcatccattaccaggtgaaaggtgtagcagtcactcggcctacacccacagcatcga

SEQ ID NO: 363497 - DNA, 100 bp, Homo sapiens
agcagcccaagcgccttccctcacagactctgacctgtttttgttggacacccgtgtagtatgggcctcagaagaaggctggctggaatttgacatcacg

SEQ ID NO: 363498 - DNA, 96 bp, Homo sapiens
cgtgttgttgccatccagggagtgaaaacagggttgtatatagccatgaatggagaaggttacctctacccatcatgaatttatggcagaagaaag

SEQ ID NO: 363499 - DNA, 98 bp, Homo sapiens
gaagctactggacctcgttcagcagtcatgtaactataagcagcttcggaaaggagccaatgagggactccctggaggaaaagcggaagcggcagcgg

SEQ ID NO: 363500 - DNA, 50 bp, Homo sapiens
aacaccactgaagcattgccaaggtttggcagttctctaccagtggacca

SEQ ID NO: 363501 - DNA, 100 bp, Homo sapiens
aatggccacaactgtgaagttagaaaagccctgtcaaagcaagagatggctagtgcttcatccagccaaagaggtcgaggtgattgggggagcagacaag

SEQ ID NO: 363502 - DNA, 50 bp, Homo sapiens
agatgatgccagttaattactttgaatatggaatttcgctcttgttgccc

SEQ ID NO: 363503 - DNA, 75 bp, Homo sapiens
acgtcaagtcaatttttgtcacctgtggagactgggacttaaaagtcatgatgacatctgaactggagagcagcc

SEQ ID NO: 363504 - DNA, 87 bp, Homo sapiens
cgggatcccagcctcaggcgtgcgcggacggtgtgcgggcaaatgttctgaaaaagactctgcatgggaatggcctgccttacgatg

SEQ ID NO: 363505 - DNA, 83 bp, Homo sapiens
atacacgggacgttgagcacaacgtatctcctggctacaatttcagctctggaggctgccatcgagaacctcaatgaagccaa

SEQ ID NO: 363506 - DNA, 100 bp, Homo sapiens
ttgccaaacagaccttgaaagacaaaactggcactgattcaaattcaacagaatcctctgaaacttccacagaatatcgataacttgatgaccccagaag

SEQ ID NO: 363507 - DNA, 100 bp, Homo sapiens
cgccccagcctggcgggagaaggaggaggagcagcaggcctccgggcccggcgccgccgcccgcaggttatcaccaatctagtgaaaatgttgaagtcca

SEQ ID NO: 363508 - DNA, 50 bp, Homo sapiens
caggaaccctcatctcaacaaggctgaccggttccctgatgtgttacctg

SEQ ID NO: 363509 - DNA, 98 bp, Homo sapiens
gcggatgccctgcagtacctgcagaaggtctctggagacatcttcagcagcattccagatgagaattttgaagatcacagtgctcctccttcccctga

SEQ ID NO: 363510 - DNA, 100 bp, Homo sapiens
ctcacaggcggtcaagtgcgacacatttggttcgactgaatcgatgtcttcacatcccttcatgcggttgttctctgatcaactgcctgtagtcaccagt

SEQ ID NO: 363511 - DNA, 106 bp, Homo sapiens
cagaatgagaagactttgggacatttcatgagtcattcaagcaacatttctaagatgctgtgagagaagtaaggaaatattcctcagttcataccattgagaagag

SEQ ID NO: 363512 - DNA, 100 bp, Homo sapiens
agcaagcagttcagaagagccaaggaataaacatgcaatgaacccaaaagggtacaggtttgcagattccgccagcagcacagcaagctctacagatgag

SEQ ID NO: 363513 - DNA, 75 bp, Homo sapiens
tatcttcatggtgcggctcatcttcgagagtactatactggcaattgctggagaagattttgcaattgttgcttc

SEQ ID NO: 363514 - DNA, 75 bp, Homo sapiens
gagatccatctgcaccacggtgctggcaacatgagtgagaatgaggaagaggaaatttctcagcaagaaggcagt

SEQ ID NO: 363515 - DNA, 83 bp, Homo sapiens
ggaggagatcctgggatcagatgatgaggagcaagaggaccctgcggactactgcaaagtaagtacaaggtggactgtgcatg

SEQ ID NO: 363516 - DNA, 80 bp, Homo sapiens
gtgctcgactgtgaggatggagtggctgcaaacaaaaagaaagacgagaatccaggacttgaatcgtatcttcccacttt

SEQ ID NO: 363517 - DNA, 100 bp, Homo sapiens
acaaagctgaggatggcttccatggagtctccccagtgaatgctttccccgcccagaacaactacggctcgtggtcccaagaagcatctgaagcgggtgg

SEQ ID NO: 363518 - DNA, 100 bp, Homo sapiens
cagagtgcggcgcagcgcagctcctgaggctgctctttggcgtaaattgcaatcgattagggatcgtttctcagaatcaagttagaagtgagagttcaga

SEQ ID NO: 363519 - DNA, 101 bp, Homo sapiens
tcaaggatcccagttttctctggatgacgtgacttaattcagtgcacaaatgagatgaatgtgaacatcccacagttggcagacagtttatttgaaagaac

SEQ ID NO: 363520 - DNA, 99 bp, Homo sapiens
ctgtggctgggatgagcacttttctatggatattattgattccctgaggaactatcatggtgaacttacttcagattgtgcgggaccactgggttcatg

SEQ ID NO: 363521 - DNA, 96 bp, Homo sapiens
ggagattctccggggacccttccgtatctgcctaggcattttgctgtctcctcctaatacggtgaccattgtgaggtagatattttgttctaattt

SEQ ID NO: 363522 - DNA, 50 bp, Homo sapiens
gctttattgacctcgactcccatgcgagtatgctcaggtaatcaaaatgt

SEQ ID NO: 363523 - DNA, 100 bp, Homo sapiens
aaaatgcacaaaagcatattttcacatgggaaaagccaacctggccctgaagaactacagtgtgaaaactttagaaactgttcctttggagaggaaaaag

SEQ ID NO: 363524 - DNA, 83 bp, Homo sapiens
ggcccgcccaccagttcgcccgtccccctgccccgttcacaatgaattcatgatttgttcctgtagctgaaacatacattgaa

SEQ ID NO: 363525 - DNA, 75 bp, Homo sapiens
aaagcggcggactatgtccgaagcaaggatttccgggactacctcatgagatgctgggctcttgcactgtttggt

SEQ ID NO: 363526 - DNA, 75 bp, Homo sapiens
gctcagcctccagccagctggacgagggcaagtgcgcttacatccgagctggagccgagatggtcataaactcgt

SEQ ID NO: 363527 - DNA, 76 bp, Homo sapiens
gaacgagccaagaaatttccaactggagatccgatcacataggacagtatgcaccttaagatcctgaagaaacggc

SEQ ID NO: 363528 - DNA, 88 bp, Homo sapiens
ttatttttattaactggaggcgacggcggctgcggcggcggcgggacccataacgaaggaggcccaacttcattcaataaggagcctg

SEQ ID NO: 363529 - DNA, 75 bp, Homo sapiens
tcctggcgatctacttcctctggcagaattatatccagatcgagagacagaagattctgaaagggttcaatgaaa

SEQ ID NO: 363530 - DNA, 95 bp, Homo sapiens
caggcagaagtcctgaaggctgacatgacaggaatgatgagaagacagcagctgattacaagattttaggtggttcagtccttcacctggtgttg

SEQ ID NO: 363531 - DNA, 100 bp, Homo sapiens
ccgggccagcctggggcggccggccaggaaccacccgttaagattcacaatgacatcctttcaagaagtcccattgcagacttccaactttgcccatgtc

SEQ ID NO: 363532 - DNA, 96 bp, Homo sapiens
aggaagttccagctctgcgccgatctatgcacgcagatgctggagaagtccccttatgaccagaactacagttcctgaggaagaactaaatccaaa

SEQ ID NO: 363533 - DNA, 75 bp, Homo sapiens
aaacagtgacagacctggagactgcagttctctatccttcacacagtgagaaagatcagtctaaagaaaaggaga

SEQ ID NO: 363534 - DNA, 97 bp, Homo sapiens
tacttatcacagattcattcaatgctacatatgtacagcctagaagaaaacagagagatgagcagcttctgactatcatggtgaacttacttcagat

SEQ ID NO: 363535 - DNA, 75 bp, Homo sapiens
gacggtcgccgcccacggcgagaagttggtgagatggcaaagcagtatatagagaaaagtcttttggttccagac

SEQ ID NO: 363536 - DNA, 75 bp, Homo sapiens
agagtaaaagacctgtgataagtcagccacacaagtcatcatctctggctgctgagcttcgtgcttatctgaaat

SEQ ID NO: 363537 - DNA, 111 bp, Homo sapiens
ccagcagctggatgtccagctgccaattcatcaatttgagaagtcgctacccacaggagaacaagggaacctacatcccagtgcctatagtctcagagttacaaagtggaa

SEQ ID NO: 363538 - DNA, 74 bp, Homo sapiens
cagagtcaaaacagagcttttggaatctgaacaaggggtatgagaaagtgccagtcatcttggttgggaacaaa

SEQ ID NO: 363539 - DNA, 75 bp, Homo sapiens
atactactacatcccgcagtacaagaactggagaggatggtgattgctcacaccaaagccttggacccctcccag

SEQ ID NO: 363540 - DNA, 82 bp, Homo sapiens
acgaatctgcccacccctcctgtaacccagcctgtttcacttcttggaaaaccaattctgtgtcctcggaggaccacagccc

SEQ ID NO: 363541 - DNA, 98 bp, Homo sapiens
cggggggcacgcagctgaagctcatcatgaccttccagaattacgggcaagcgctgttcaaacccatgaaaaacctaacaccatgtaccagcagtgga

SEQ ID NO: 363542 - DNA, 75 bp, Homo sapiens
gaagaattcccaagccaaagctttccaggagtacaagcgcaagctagccagagtttccctggtgcgcaaagaact

SEQ ID NO: 363543 - DNA, 82 bp, Homo sapiens
gaggatatcgtgtctggagcagtggagcccaaagacccctggagacatggggttgtgtccactgtggtccccgactctgccc

SEQ ID NO: 363544 - DNA, 75 bp, Homo sapiens
ctggaagcagcagctcaccgaggacggggactcgtgattgaagcctccgatgttgtcctagaggtgttggatgcc

SEQ ID NO: 363545 - DNA, 82 bp, Homo sapiens
cagatgaaaaagtgtgacttggcagctggacttaaccaccaccatgtcgagcaaaagaacaaagaccaagaccaagaagcgc

SEQ ID NO: 363546 - DNA, 100 bp, Homo sapiens
ccttggagcggcttttgtctacttggctgacctcctgatgcctcacttgctgttcgggggtcttgtctggattttggttgcctcctccaatgttcctcta

SEQ ID NO: 363547 - DNA, 75 bp, Homo sapiens
caaaaagacacttatactatgaaagaggtttacacagtaaacaatgtgaatgtgatcaccaaaatacgcacagaa

SEQ ID NO: 363548 - DNA, 74 bp, Homo sapiens
accatccagatcaccgtcaccgcctgctgctgcggcatggcctatctgcacgcgcagcactacatccaccgaga

SEQ ID NO: 363549 - DNA, 100 bp, Homo sapiens
ccggactatttttgtatgcgatgaagatgctactttagaattaagagttaaaactgtgaaatactttaaaggttctaagctggtctatgtccatcacctt

SEQ ID NO: 363550 - DNA, 97 bp, Homo sapiens
agcgtttcagttttggtcatcggaagtggtgccttcagcacagatatgtggtggtgtccgggaccccggagaagattttggagcaccttttgaatga

SEQ ID NO: 363551 - DNA, 100 bp, Homo sapiens
cgagctgagtggttgtgtggtcgcgtctcggaaaccggtagcgcttgcagcatggcctggcagctgcgattcagccacctcgtggggtatggtgctagat

SEQ ID NO: 363552 - DNA, 101 bp, Homo sapiens
tcaccgtgtactttaacccactagaagccaagctctatcaacagaccatttactgcgacattttaggcgaagctgctctcaggggagaacccagaatacag

SEQ ID NO: 363553 - DNA, 82 bp, Homo sapiens
cggtgcctgtccccgggggcgccatggcgaccggagcgaacgccacgccgttggcattccacgcctacgggaaggcaggcaa

SEQ ID NO: 363554 - DNA, 80 bp, Homo sapiens
tgctgaccctgtaacccaaaggaggaaacagctggctaagctcatcattgttactgttcactgagacttttttgacggag

SEQ ID NO: 363555 - DNA, 83 bp, Homo sapiens
cggtgattttcatgactacaaagaattactgtgatcctcagggccatcccagtacagggagtgcatccgccccaacccttttc

SEQ ID NO: 363556 - DNA, 75 bp, Homo sapiens
cagacactgaacgaggagccagtgctttccccagacatggccaacaagggtccttcctatggcatgagccgcgaa

SEQ ID NO: 363557 - DNA, 75 bp, Homo sapiens
agcagatttacaaactggccaagaagggccttactccttcacagatcggcccagggctcctcagagcaggaactc

SEQ ID NO: 363558 - DNA, 124 bp, Homo sapiens
ccagcatctggcaatatcaaagcataatcttatgttcctttataccatctttattgtggccacaaagatgctgttccactgccagggactccctccccatatcttcctggaaaacacttgttca

SEQ ID NO: 363559 - DNA, 98 bp, Homo sapiens
gcagctggtgtcatcctctggggtgacgcggggtacaccacaagcacgatttggagtccaggaatgagactaagcatttatctgtaggaaaagatatt

SEQ ID NO: 363560 - DNA, 75 bp, Homo sapiens
gacacctcagggacaaagagatctggacagaatcgccggacaggacaacataggagagcttgatcttgataaaca

SEQ ID NO: 363561 - DNA, 80 bp, Homo sapiens
ggaaaactacaccatatcaaattgcctgtggaattaggtacggccgaatagaaattctgtctggatttattaatggactt

SEQ ID NO: 363562 - DNA, 96 bp, Homo sapiens
catggattgtgagctgaagctttctgaatcaggaaagttgcagacgttggcagtgctgttgcggcagctcaaggcagagggccaccgagtgctcat

SEQ ID NO: 363563 - DNA, 75 bp, Homo sapiens
ctgtttcaactcctgttccatctcctgagtacgaagatgccctggtgctcctgctcacagaggtgttgaatcgaa

SEQ ID NO: 363564 - DNA, 100 bp, Homo sapiens
aggacccaagaagcagaaggagaacaagccaggaaaaccccgaaaacgcaagaagcgtatttagcatgtagactgctggggcaatcaatggatgaaagtg

SEQ ID NO: 363565 - DNA, 95 bp, Homo sapiens
caccaaggatagccaatcggaccaaaaattcactcactttgcaatggaaggagctgatggtacacacatggatggtgatcaaattgttgtggaag

SEQ ID NO: 363566 - DNA, 100 bp, Homo sapiens
gatctcatatcttcacttggcaaactcaacaagaacattccagcatggaaaccccgctgtgcaaggcccctgcactggccacagaagccgcacctatctg

SEQ ID NO: 363567 - DNA, 100 bp, Homo sapiens
gttcgttcgtttccagcctcaggaatttatggtcgcctttttgaatgaggaaaatgtttataggaggccttagctgggacactacaaagaaagatctgaa

SEQ ID NO: 363568 - DNA, 83 bp, Homo sapiens
ctgagaacaaacgcaaaaggacagtaaactgtggaccttgaagttagcaggaactgtggctgcaccatctgtcttcatcttcc

SEQ ID NO: 363569 - DNA, 95 bp, Homo sapiens
ccatctcccaacttgtccatgcaacagcattattgagaaaagcccttacagaagagtgtggccgtaggtcagctattcacagtagtgaatcatct

SEQ ID NO: 363570 - DNA, 90 bp, Homo sapiens
gctcatcgggcagattagcgacatccgagtgcagaacctgcaaggcattatattgtacttctagcaagtgcaccaacagaaaaacaacgc

SEQ ID NO: 363571 - DNA, 100 bp, Homo sapiens
tttgcacactcggacttcaaaactgttccagggccagtatcggagtttgctgatgtagcccagcagttccagtatgctgtgcgggtgattggcagcaact

SEQ ID NO: 363572 - DNA, 83 bp, Homo sapiens
gtaatgcaatggtctcaatctctggaaaaacttcttgccaaccaaatctgaagatgatgagaaactgaaaaagaggaaggagc

SEQ ID NO: 363573 - DNA, 90 bp, Homo sapiens
ttcagaacctgtcattgcaccctggctcatcagctttgcactatgcagtggaactaatggcagcattagccgctgttgggcctcctaatc

SEQ ID NO: 363574 - DNA, 80 bp, Homo sapiens
aacagcaggcacccaagcgggcggcaggcagaggtggaggagacactgaagcgactgcagagccagaagggagtgcaggg

SEQ ID NO: 363575 - DNA, 96 bp, Homo sapiens
ttacctgcaggtattgggagatccacagctaagacgccaggacccactggaagcctagaaatgagtaatcaagtcagaggattatatgacttttat

SEQ ID NO: 363576 - DNA, 100 bp, Homo sapiens
gaccgtggacaatgtgctctttgcccctattatggagaaaggtgttccctagggatatagctagtgcaataaaagaacttcttgatacagtgaataatgt

SEQ ID NO: 363577 - DNA, 75 bp, Homo sapiens
gaaaattccaccagaaaaaatgagggagctggaacggaagtgcacattgcaagcaacccgtgccttgatggtggt

SEQ ID NO: 363578 - DNA, 74 bp, Homo sapiens
cgccgaaagttgtgctaaaaagcaccaccaagatgtctctaaatgagcgaggtatgaaggttattgaaaaccgg

SEQ ID NO: 363579 - DNA, 100 bp, Homo sapiens
cgactttggggcccgtcaccctcaggctgcttctgatgcttggaagatatcctctcagccacaaagatggtaataaatctttgcctcccacagttcagac

SEQ ID NO: 363580 - DNA, 100 bp, Homo sapiens
tgacagccctgtgtgacaccaagataagtaacgtagctttgcagtttggggagggctgttttccatgattgactgtagtatggttcaagtcagaggaaag

SEQ ID NO: 363581 - DNA, 100 bp, Homo sapiens
gaccaagctgcgcctcagcaaccggcccgccttcatgccctccgagggcaagatggtctcgggtgcatctgagaaagacatcgtgcactctggcttggca

SEQ ID NO: 363582 - DNA, 75 bp, Homo sapiens
catccctgcttgggggcgcctgccacccctggctgtttatcgaggagtactccgtcccgcaggccgagcttcagg

SEQ ID NO: 363583 - DNA, 109 bp, Homo sapiens
tcgggattattgccgattgccagggtgctgaccgtgggagccgaccgagacaagttggatggcttgaggactggtactaaaaggaaacgtgactgggaggccattgcca

SEQ ID NO: 363584 - DNA, 82 bp, Homo sapiens
tagaaaggagagttgcatcagcaagtttgcaagtgaaggcacccgacaggaggatcctttattcgtccgaacaaggtaaatt

SEQ ID NO: 363585 - DNA, 90 bp, Homo sapiens
ccatgccctatttcatccaggtcatgaaggagtacttgacaaaggggaaactgactctactctgtgatgccaagacagatgggagtttcc

SEQ ID NO: 363586 - DNA, 100 bp, Homo sapiens
ggtggccaagtatgcgcccagcggattctacattgcctccggagtccagaatgacagggtccagaaactggcgagccacgagggacatgtgtaggtatcg

SEQ ID NO: 363587 - DNA, 75 bp, Homo sapiens
cagcggagcgcctcccgggacaggcgacgacgcaggagttcatgatcaagtgttgcccacaccaaatgcttcatc

SEQ ID NO: 363588 - DNA, 90 bp, Homo sapiens
ctacgatgaacaaaaaccagttgcgaaatggtctgaggcagagtgtggttcatccagttacaacacagggatcacaacaaacacaaccgc

SEQ ID NO: 363589 - DNA, 100 bp, Homo sapiens
gtcgagattatcgtagacggcacagccacagccattctcccatgtctactcgcaggcgtcatgttgggaatcgggtcacatgtgccaatttaacgaacgg

SEQ ID NO: 363590 - DNA, 99 bp, Homo sapiens
aatggagcctgtaataacatgtgataaaaaatttcgtactcaattttacattgactggtgcaaaatttcattgggctgacaggacaactggatcagttt

SEQ ID NO: 363591 - DNA, 137 bp, Homo sapiens
cgaggagagcatcgactggaccaagatcgagcccagcgtcaacttcctcaagtcgcccaaaggtactccaaagattcaggtttactcacgtcatccagcagagaatggaaagtcaaatttcctgaattgctatgtgt

SEQ ID NO: 363592 - DNA, 75 bp, Homo sapiens
tctgtcttccgacatctggatgaagtagccgctacaagtatactggatgtctggtgagctgtaccttctttctgg

SEQ ID NO: 363593 - DNA, 97 bp, Homo sapiens
gcccgcgggacctgacagccgggtcagagacaaacgagggagcaggagacaccccctgactttttttatttctctgactacgagaggcacaatgcgg

SEQ ID NO: 363594 - DNA, 100 bp, Homo sapiens
ggagacaagtgtcacagcctggttggaaaacccaagatatttatcattcaggtggatgaaaatactaggaaaagtttatttaagttacgttctacatggg

SEQ ID NO: 363595 - DNA, 75 bp, Homo sapiens
caccctgctgggaatcccgttcttcgccatgggtgggccatgcacagacacagctcatgtctcattaatcacacc

SEQ ID NO: 363596 - DNA, 100 bp, Homo sapiens
tagaatcagtgtttcgtattccacctgaacttgatatgtctttattactggagttcattgggtttggcagttctctaccagtggaccaatcttttcatcc

SEQ ID NO: 363597 - DNA, 74 bp, Homo sapiens
caagcaagcatgcagcttactgcttgaaagatggctgatcactgggaaactgcacctcgtcacatgatgcgtct

SEQ ID NO: 363598 - DNA, 75 bp, Homo sapiens
tgaaaagcatgacgtaccaaacaggcacgagataagggacaattcaagctttcgaaatacaaaaatcacattgtg

SEQ ID NO: 363599 - DNA, 46 bp, Homo sapiens
gtttggagacaggccactgaagaaactctgctcttaaagacaaaga

SEQ ID NO: 363600 - DNA, 90 bp, Homo sapiens
tgctgtggatgacattagtattaataaccacatttcacaagaagattgtgcaagtcagaaagcaacattgaatgcagaagaaatggcgga

SEQ ID NO: 363601 - DNA, 122 bp, Homo sapiens
ttccacagaaggttagaccctgaaagagatggctcagcaccacctatggatcttgctcctttgcctgcaaacctgttgactatagtcaatggggccaatggagccaagtgtatggaaaccca

SEQ ID NO: 363602 - DNA, 83 bp, Homo sapiens
tggagtactgtggggctggttctgtatctgatatcattcgattacgaaataaaacgctggcagggaaactgtcttccttttct

SEQ ID NO: 363603 - DNA, 75 bp, Homo sapiens
accatagcctctcaccctaagggttggatggcaagcatgtggtgtttggcaaagtgaaagaaggcatgaatattg

SEQ ID NO: 363604 - DNA, 76 bp, Homo sapiens
gaccactgggatgcagtcaacctgatgtgccaggtgcagagattaaggagttatctgcaaagagggctattaatga

SEQ ID NO: 363605 - DNA, 75 bp, Homo sapiens
aagtggtgaatcccctgtttgagaaaaggcctaagaattttggcattgtatttagcgtggactacaatgatgaac

SEQ ID NO: 363606 - DNA, 100 bp, Homo sapiens
ggctccttcagtgagcaaggcatcaacgagtttctcagggtcaacatatttcactggcacctattcacaagcttgaagaagctctgtatgaataccagcc

SEQ ID NO: 363607 - DNA, 83 bp, Homo sapiens
gcaaggagctaaagcagcgtgcgttcagccctgggggacaagaatccttcaagaaacaggaaaaaactcctaaaacaccaaaa

SEQ ID NO: 363608 - DNA, 98 bp, Homo sapiens
tcttgttatagccagtgtgcagctccctaatgatgatgctcagtttgatgcgtcacactacgacagtgagaaaggagatggagtttcactgttgttgc

SEQ ID NO: 363609 - DNA, 97 bp, Homo sapiens
aaaggtcgcctctttgctgcaccaggtgtcctggagacagatgaagatctccttcaacgacaaaagcctgcagaccacatttgagtacccttccgag

SEQ ID NO: 363610 - DNA, 75 bp, Homo sapiens
tcaccaaaatctgcaaatgtaaactgaaggacatcgcatgtttaaaatgaggcctcacgacaggactagtgcctt

SEQ ID NO: 363611 - DNA, 100 bp, Homo sapiens
tctaccctggaggagattctggggcagtatcaacggagtctccggggtgtggtcactcacctgtctaccactcccgtgaaatggcagctcgtgccttggt

SEQ ID NO: 363612 - DNA, 51 bp, Homo sapiens
ttgcacatggggaaggcctggtaaagtgatgaggaaaatgaggcccaaaga

SEQ ID NO: 363613 - DNA, 82 bp, Homo sapiens
tcggcagtccacccaccgccgccgcctcccagatgcatcactgtaagcgataccgctcccctgaaccagacccgtacctgag

SEQ ID NO: 363614 - DNA, 50 bp, Homo sapiens
gcttccccagctatgtggaactaaaccaagagccacgactagctgaggac

SEQ ID NO: 363615 - DNA, 106 bp, Homo sapiens
cgctgctcgagctgctgctggattgaactcagagaagccggggttcgagaacttgtcttggacaattgcaaatcaaatgatggaaaaattgagggcttaacagctg

SEQ ID NO: 363616 - DNA, 100 bp, Homo sapiens
tagaccaagatagaacagcccttcagaaagtgaagaagtctgtaaaagcaatatataattctggtcaagcagcgatggattttgggtggggaagtcctcc

SEQ ID NO: 363617 - DNA, 94 bp, Homo sapiens
tgacatttaattttagggtcctttatatagaagggagagtagctgtcggaaaaggtaacagaagatggaactcgaaatcccaatgaaaaaccta

SEQ ID NO: 363618 - DNA, 100 bp, Homo sapiens
cggggaacgactgcggcgcgctgctggacgaagagctctcctccttcttcctcaactatctcgctgacacgcaggtgtccctggccagtgtccttccacc

SEQ ID NO: 363619 - DNA, 74 bp, Homo sapiens
atttatggatgaaattgtcagatgcctagcatttgctccatgataatctgagggaaagctaacagccagggaga

SEQ ID NO: 363620 - DNA, 90 bp, Homo sapiens
gatggaacctctgaataacctccaggtatcctgaagcagtttatgttgtttataccggcgatgttaatgtcaacggtcaacagatactag

SEQ ID NO: 363621 - DNA, 90 bp, Homo sapiens
atttgttaaggattccaagtaactcttatttgagagactagcttgcaaaattttcctcatattgaggtggttcggaaaaaagaggagaga

SEQ ID NO: 363622 - DNA, 97 bp, Homo sapiens
ggcttacacccgaggtccctctttggggtggctctttgctaagtgctgctgttgcttcccgtgtagaggacatggatttgattgacatactttggag

SEQ ID NO: 363623 - DNA, 90 bp, Homo sapiens
gctatgtgcacccagatgagttcttccagtcccctgaggtgatggcagatttcagccttccaagttctgatgtaacaaacaacttaaaac

SEQ ID NO: 363624 - DNA, 96 bp, Homo sapiens
catcattactaacaggatattcctcatgacattgctgtctgagataattgacgaccttgccaacctagtggagaacacagatgaaaaacttcgcaa

SEQ ID NO: 363625 - DNA, 100 bp, Homo sapiens
gcagagtggaccaccccatgaacctcggagcatccccccggtccttcagaatccaaacacgctttccgtcctaccaacgcagccaccgccacctcacatt

SEQ ID NO: 363626 - DNA, 74 bp, Homo sapiens
caggcgaagctggtggtggcgctgagccgcacctaccgcacgttatagctgaggtggtaccagtttaagaagtg

SEQ ID NO: 363627 - DNA, 50 bp, Homo sapiens
acgagcttgttttgtcccggactcgcacctgtgagaatatgaacttctct

SEQ ID NO: 363628 - DNA, 100 bp, Homo sapiens
cgaacatgtaacaagaatccaaagaaaacaaaatggtggtatcatggatgctgaaaacgccattcaacagatgggtggccagtggcttggtggaagacaa

SEQ ID NO: 363629 - DNA, 51 bp, Homo sapiens
ctgactcggagtcttagtgtgtcgtggctgtgaaaaacaatatcgatgtct

SEQ ID NO: 363630 - DNA, 98 bp, Homo sapiens
caaagccactcacattaagttaccaagaacaaccacagaatctgaggcatcccgggcccaaatcctagacaaagccacagaatatatccagtatatgc

SEQ ID NO: 363631 - DNA, 88 bp, Homo sapiens
atccaagaaaaatgtccttaaagcaattgagcaggctgatctactgcaggaggttactcactataaacaatatccacccaacacaagc

SEQ ID NO: 363632 - DNA, 85 bp, Homo sapiens
tacctctgtttatccaacgctctctcagcagcttccaagagaaccaatggaatggagaagatctcccttgagtttagaaatctgg

SEQ ID NO: 363633 - DNA, 82 bp, Homo sapiens
cacggatgagcccggcctcccttttcatcaggacgggaagcaattctgtggtgttcttggtcacacatttatggagtttctg

SEQ ID NO: 363634 - DNA, 87 bp, Homo sapiens
agacaacagcctggtggcagcggagaagataagcgaggacctcagggccacactgaacgccttcctgtaccgcacgggccagcacag

SEQ ID NO: 363635 - DNA, 124 bp, Homo sapiens
cggcgacctcaagaagcagctccacgaaaggcagccgcggatcgccgcgctcagcgacaaacaaagctgcagagagacaaggcggcggcggctgctgtgctgggtgcagtgaggaagaggccct

SEQ ID NO: 363636 - DNA, 82 bp, Homo sapiens
gcggcggcggttgcgggggggaagtgactgggcggtgccggcgccggagacgatgccgttgcggctatgagaggttttcctc

SEQ ID NO: 363637 - DNA, 75 bp, Homo sapiens
acatcagccgagaggagacgagggagccccggcccacgctgaccctctcgcaggccccacagcctggccctcgca

SEQ ID NO: 363638 - DNA, 101 bp, Homo sapiens
gtatgaaagtccttccttgggttctcactcgatgtgatgactgaagcccaccacaaatatgaccactctgaggctacaggatcctcaagctgggatatcca

SEQ ID NO: 363639 - DNA, 90 bp, Homo sapiens
ctttcccctcgggatcaactcttccaggaccaccaaaaataactttggctgggttggctgttgaaggcacgaatggaatagataatcatg

SEQ ID NO: 363640 - DNA, 75 bp, Homo sapiens
agatgatacctttgatccagaacttgcagcaacaataggagaagccccgatatccaagcaaaagaagagttatgg

SEQ ID NO: 363641 - DNA, 100 bp, Homo sapiens
tatcagctaactagaatgtgcaccataagaatgagttttgtgaaagggtggggagcagaataccgctccatcaagtatgatggtgaaggatgaatatgtg

SEQ ID NO: 363642 - DNA, 90 bp, Homo sapiens
gtggcctacggcgtgggcatcattggcttcttcaagacattcacggcatggtgtaactcccacctccggaaggcggggacacagatcgag

SEQ ID NO: 363643 - DNA, 82 bp, Homo sapiens
gggacccaccgctgccctcagctccgagtccagggcgaggccgccatggcatcagatgaaggcaaactttttgttggagggc

SEQ ID NO: 363644 - DNA, 82 bp, Homo sapiens
gattaatgtctgcaagagcacgctatgagagatacagtggcaatcaggttctcttttggaattggcaaattgtcaactgctg

SEQ ID NO: 363645 - DNA, 82 bp, Homo sapiens
gcctcggcaccgtcctttcctttctccctcgcgttagaagaggactgtcagaaggacgtagaaggcacggttttactgtgag

SEQ ID NO: 363646 - DNA, 51 bp, Homo sapiens
ccggtgttccaactgtttaaaaaactgttcaggttccattatcaaaacgag

SEQ ID NO: 363647 - DNA, 93 bp, Homo sapiens
gcctgatgtaccatatgaaccagatttggatatcgaaatagattttcccagaggacagtcattttgtttactcattcagccctgttgcaggtc

SEQ ID NO: 363648 - DNA, 83 bp, Homo sapiens
tttcttctctctctcctaggcttcttttggaagttcgagcccagggggctgttgtggttccgactataaacagtacgtgtttg

SEQ ID NO: 363649 - DNA, 100 bp, Homo sapiens
aagtagaaagtctcagcagacccttcctgagggccgagcaacagtgtagtggcgtattccacatagcaaacaggtggagttggcatgaacttaacagcag

SEQ ID NO: 363650 - DNA, 75 bp, Homo sapiens
cctggtaatagaggacttgaagcagaaagcaagtgaatacgagtcagaagggttctgatgactgtcttgtgaaaa

SEQ ID NO: 363651 - DNA, 96 bp, Homo sapiens
catgcctgtaaagaacttgcagttgaaggagtataacacaggaagaaggtagataatgactataatgcccttcgagaaagactcagcaccttgcct

SEQ ID NO: 363652 - DNA, 96 bp, Homo sapiens
aagagatggtggcatctgtatatttaatgggggtcgaggtggaagattgctctgctgtgaatcgtgcccagcttccttccacccggaatgcctaag

SEQ ID NO: 363653 - DNA, 75 bp, Homo sapiens
cagaacgtgagggtgtaacttacaaaaagcttgctcacttccgacagagaaaaacaaaaggtgacagttcgcatt

SEQ ID NO: 363654 - DNA, 104 bp, Homo sapiens
ctggagcctcagttggaagcagccgatccagcctgcggagcctgtggggcaggcattgtttccaagtcgtacgagtgccgtctaaagggacaaggagccacctt

SEQ ID NO: 363655 - DNA, 90 bp, Homo sapiens
ggagcgggactccggacctccaggaggttaagtagcctgtcttctctgggagattctgcaccagagcgcaagtccccttcccaccatcgc

SEQ ID NO: 363656 - DNA, 100 bp, Homo sapiens
gtcaccgcaagtacagagagtacagccccccatatgcgccgacttacagccagctggcccaccccatccagcaggccaaggcactgggtctccagttcca

SEQ ID NO: 363657 - DNA, 90 bp, Homo sapiens
cgcgatgtggagcgcttctttaagggctacgggaagatcctggaggtggatctgaagaacggtaattctacaataatgcgtttttcttct

SEQ ID NO: 363658 - DNA, 51 bp, Homo sapiens
tcaaagaggaccctgcttactgaccaagatcactccatggatgaaatgaca

SEQ ID NO: 363659 - DNA, 98 bp, Homo sapiens
cttagtcgtttatttcttccgagttagaaatcctacaaaggaccttatcctgatgaatttgagcgaatatatgagcctctggatgtcaaaagtaaaaa

SEQ ID NO: 363660 - DNA, 75 bp, Homo sapiens
tgatccgcactgccctttttgcaccccagggagctgctgctgcccagaccctatccctccttcctgggctggagg

SEQ ID NO: 363661 - DNA, 83 bp, Homo sapiens
acgtggagatcaactcctctctgttaatggagtgaagttgattcaagtcagttgagacgccagttgtgtggaggaagtcaggc

SEQ ID NO: 363662 - DNA, 88 bp, Homo sapiens
ccatcctgccgtccttctccactttcgccagcccgtgccgcgagcgcggcctgcaggagcttgccttgcgccatggactggcagccag

SEQ ID NO: 363663 - DNA, 75 bp, Homo sapiens
ccgccaccgcccccgctggaaaccctggaggcagtcccctgttttcatagcccaagttggccaagacctggtctc

SEQ ID NO: 363664 - DNA, 101 bp, Homo sapiens
ggcgcgtttctatcgggacgtcctggggatgaagccaaaacagagtggagtacgagaaaagggtccgagcacaagccaagaagtttgcgccctcataagca

SEQ ID NO: 363665 - DNA, 100 bp, Homo sapiens
aagttccaatgtgttgggcatgaagtcatcattagacagtgttgacttcaaaatcaaaactgtagagctaagaggaaagaaaattagattacagatctgg

SEQ ID NO: 363666 - DNA, 90 bp, Homo sapiens
gtctgaaaagccctcaagaaagcctcagtgatcttggtgccatagagagtctccgggtccctggaaagcagtctggaccgaaaagaaagg

SEQ ID NO: 363667 - DNA, 82 bp, Homo sapiens
tatgctggatgagctgctgaagcccaccgaattaggaactgcaagcacatgttgaccagataactgaaatggcagcagtaat

SEQ ID NO: 363668 - DNA, 87 bp, Homo sapiens
agagagcaaggggaaggatcgggagtacacagacatcatccggaattgactttaaaattaggaccatagagctcgatggcaagagaa

SEQ ID NO: 363669 - DNA, 82 bp, Homo sapiens
cgcaggcagtcccgcggcagcaggatcacagatagcagaccccacgttagctgaaatgggaaaaaacttgaaggaggcagtg

SEQ ID NO: 363670 - DNA, 100 bp, Homo sapiens
catcaaggcctggccaccagcaggtgtttccctcccagatgatgacccagaggctggccagggaagcaagttttgcctagtggccattggcagattgcag

SEQ ID NO: 363671 - DNA, 60 bp, Homo sapiens
gcaagaaagaaaattagagtgaatgtagttgcaccagttctaaatggagcccctggattt

SEQ ID NO: 363672 - DNA, 83 bp, Homo sapiens
ccgtccggaggacctgggacaccgcggaagtcgggaaatggttcgagaacttgtcttggacaattgcaaatcaaatgatggaa

SEQ ID NO: 363673 - DNA, 101 bp, Homo sapiens
accaagtcgggctggccccgacagaacgaaaagaagccctccgaggtatgtcaccacgccgactgccagcagctgcaccgccgggggcccctcaacctctg

SEQ ID NO: 363674 - DNA, 112 bp, Homo sapiens
gttactagagcaggccatgattggaccatcccccaatcctctcatcttgtcctacctgaagtatgccattagttcccagcccactttccttgtggaactgtccagagtgctg

SEQ ID NO: 363675 - DNA, 75 bp, Homo sapiens
tctttgcagtgaacggcattctcttcaatcatgagagtcccagaagagatcccataaaaactgcccaaggatctc

SEQ ID NO: 363676 - DNA, 74 bp, Homo sapiens
accgattgccaccgcaaagcctacagcaccaccagtattgccagcgtcgctgattgcagccaaaattggaggcg

SEQ ID NO: 363677 - DNA, 90 bp, Homo sapiens
tgctcaagagccagcagcggaaagtccggcaaatgatagagcagcaacaagccaatctgatcccagggttgaacctcagcgcacttggca

SEQ ID NO: 363678 - DNA, 100 bp, Homo sapiens
ggatttgttagaaaggagacccgactgcaactgctggattgctgcaaggctgagggacgagaacgaggaaaatggcattcctatgaagaaagcacgaaat

SEQ ID NO: 363679 - DNA, 71 bp, Homo sapiens
cttcagtggtatggactgtgaggaggacattgatgactgccttgccatgaatgaaaggaatactctacagg

SEQ ID NO: 363680 - DNA, 100 bp, Homo sapiens
ccagtaataggccttctggagaaacttctgttccacctcctcctgcagatggtcatccagactcagagctctctctacagagaggaaattctccactgtg

SEQ ID NO: 363681 - DNA, 75 bp, Homo sapiens
ggcaacccccaggatgtgacctattttgtggcctatcagaggccttcccttcttcttggtggtgttcttgagtaa

SEQ ID NO: 363682 - DNA, 98 bp, Homo sapiens
aagaaaggtgcagaagtcattttaaactatggacgactccgaggaacattgaggtctcctctgagcctccggcctccataagacccaaaacagatgac

SEQ ID NO: 363683 - DNA, 75 bp, Homo sapiens
gcctggtcaatttgtacctgcaggcctcctacacctacctctctctgagggaatctggaaaaattgcaatcaaaa

SEQ ID NO: 363684 - DNA, 75 bp, Homo sapiens
aaaaactgcaatcatttttcttcagctttatcagaggatgtaaatgttaatcctgagattactgcactacaaact

SEQ ID NO: 363685 - DNA, 82 bp, Homo sapiens
ctgagagattgaagcatgctctggaaatgttcccagaacattgcacgatgcctcctgtgtcttctcagaaacaaccagctga

SEQ ID NO: 363686 - DNA, 83 bp, Homo sapiens
tgaggctccctgctcagctcctggggctgctaatgctctgggtctctgccctgggcgctgcctatggcacagccaagagcggt

SEQ ID NO: 363687 - DNA, 100 bp, Homo sapiens
acctggtttctgcagacctggaagaggtagctcagaaatgtggcttgtcttacaagccttatacaggatgctgtgttctttgctcctttgtgaatgtctg

SEQ ID NO: 363688 - DNA, 112 bp, Homo sapiens
gctgagcccagtatgggaaagatctaccttctggaagctactactacgtggtgcttggaaagacaatgcagatcttcgtgaagactctgactggtaagaccatcaccctcga

SEQ ID NO: 363689 - DNA, 95 bp, Homo sapiens
atggagagcaaggagaaggatcgccaggtgctggaggacttcccaacggcccgatgagagaaagggaaagttaaggatgctggagcagaacaatg

SEQ ID NO: 363690 - DNA, 75 bp, Homo sapiens
gacggaaccatctcttcaccatgatggttctgcggcatgaggaatttgaagaaggctgcaaagctgcctgtaatg

SEQ ID NO: 363691 - DNA, 82 bp, Homo sapiens
gtttgcagatcgggagcgcaaggtcgccctcaaggccatgatcaaaacacttcccagactcccggccagccatcgaggacct

SEQ ID NO: 363692 - DNA, 75 bp, Homo sapiens
aaggactgttcttgaggtattcagatggagtcatcagaacccactgtgaggaagtgacttctccttgaggtcacc

SEQ ID NO: 363693 - DNA, 100 bp, Homo sapiens
tcctcaccccgcgcatcaaggtgggacgggattacgtccagaaggcgcagactaaagagcagaccaccgctgaaacttcacttctacacagaggctttct

SEQ ID NO: 363694 - DNA, 100 bp, Homo sapiens
ggctttcgaagagaccaagcatttccctatgaaccacagcttacaagtctcttacagtacatcaatcagaggaagaagttcagaaggcgctgggtgggag

SEQ ID NO: 363695 - DNA, 100 bp, Homo sapiens
acttcgagctgaagcacctctccagcggggacctgctccgggacaacatgctgcggggcacagaatgattacggacctgaagccaaagaacaagatgcgc

SEQ ID NO: 363696 - DNA, 98 bp, Homo sapiens
cagctgccccgccgccaaagccgggggaagcggtggcgccggcgtcactctggatgaggccagggtacaagaaaattccccaggacacagagctggtt

SEQ ID NO: 363697 - DNA, 96 bp, Homo sapiens
agcagatcatggaggaggctgtgacacgcaagtttgtccacgaagacagcagccacatcatctccttctgtggaccgagatctcactcagcagaca

SEQ ID NO: 363698 - DNA, 99 bp, Homo sapiens
cagattcgcagtggtcgcttcttctccttgcgcatttgtagccatgaagtgccatcttgcccaatatgcctctatccacctactgcagccaagataacc

SEQ ID NO: 363699 - DNA, 88 bp, Homo sapiens
tgggcccagtcatgaagatggaacctctgaataacctccagactgatgaagtatttctggaagcccagattcagaatatgacaacctc

SEQ ID NO: 363700 - DNA, 100 bp, Homo sapiens
aagaaactaaagcttgacggcttggacgaagatggggagaaggaagcgagactcatacgcaacctcaatggtggtcaagtaccccctgcacgccatcatg

SEQ ID NO: 363701 - DNA, 82 bp, Homo sapiens
ggttatagatggacaagagacgatcattctgcaagcaggcaacctgaatacagctgcaggacaagttcgagcatcttaaaat

SEQ ID NO: 363702 - DNA, 75 bp, Homo sapiens
gcaaggttcgaaggaaggacctcagaaatgttctgccagcgcaaaggagtgggctttgccaccaggaaagtggct

SEQ ID NO: 363703 - DNA, 83 bp, Homo sapiens
cgccatgtcgggttattcgagtgaccgagaccgcggccgggaccgaggctgatgaccaaacacccagccaagcggctgggctg

SEQ ID NO: 363704 - DNA, 98 bp, Homo sapiens
tgcaaacagacttcggagtacctgcgctatgaagacacgcttcttctggaagaccagccaacagcagctgaagggccgggtcctggtgaagggaaaga

SEQ ID NO: 363705 - DNA, 100 bp, Homo sapiens
cggcggtcgacatgttccaggtcccggatagcgagggcggccgcgccggctccagctgtcgcctggttgggcccggaaatgggacgtcgcgctttctcag

SEQ ID NO: 363706 - DNA, 83 bp, Homo sapiens
ctggactacgtggcggcgctggaagggatgtcgtctcagcagtgctcgggcgcagagcactccgctggtccaggcggcaacat

SEQ ID NO: 363707 - DNA, 98 bp, Homo sapiens
aaggagtcccccgggcgtacacctacagcgcattcttctgtcccagtgtgtttctacacctgtgggttatgacaaagacaactgccaaagaatcttca

SEQ ID NO: 363708 - DNA, 138 bp, Homo sapiens
atggcctcaccctggggctccgggtctgggcagggggcgcagggagctccaggtggacgaaatcctccagcgaagattctgtttctggcgtctgcatacgcaagtccccaactcgctgaggagagctgttcagctatg

SEQ ID NO: 363709 - DNA, 111 bp, Homo sapiens
gaaggcgagcagggtgcgggagagccccttgcagaagacgccgtacgaggtgctggagaatctggtaaaagcaccattgtgaagcagatgaggatcctgcatgttaatggg

SEQ ID NO: 363710 - DNA, 50 bp, Homo sapiens
accatgaaatcacagcttcagatcactgccgacatcggcctggctgcctg

SEQ ID NO: 363711 - DNA, 89 bp, Homo sapiens
aaaatggcgggcagccaaggcaggcgagaagaccatctctgtggtcctacagaagaaggacccagcccagttcctgcaggtacatggcc

SEQ ID NO: 363712 - DNA, 100 bp, Homo sapiens
cggagatggagcgctgtctggcgcgcaggagcggagacctggacgccctggacaagcagcacaggcgaggattaaatccaccacacagggtgaaatctat

SEQ ID NO: 363713 - DNA, 100 bp, Homo sapiens
ctggccaaagcctgcccagacggctcacctgtgcgggatggaacaaaagggttgtgagtcccggcccagcccctccacccccctgcccccccgatgcgac

SEQ ID NO: 363714 - DNA, 82 bp, Homo sapiens
cgtctcttacgtctgcggaagtgcagctgcctcagttcttagcgcaggtttggcaaacatcgaaaagatgacaagattgaga

SEQ ID NO: 363715 - DNA, 90 bp, Homo sapiens
cagtggccgacatcaagttttcctctgcaggtccacaaggagaatccagaacaggtccaccagggtccacaggttcaagaggtccccctg

SEQ ID NO: 363716 - DNA, 83 bp, Homo sapiens
gagggccttcgagagctaccgcgccagacaggaaccctaaggactctgcaatatgaataattccctagagaacaccatctcct

SEQ ID NO: 363717 - DNA, 75 bp, Homo sapiens
attttgaagatgcagatacccagcagaagatggctgtgccacccacgtatgccgatcttggcaaatctgccaggg

SEQ ID NO: 363718 - DNA, 75 bp, Homo sapiens
cagctgagcaagtccaccaacagtttctgtgtcccacttcatctttaataagacagctcagcagctcctcctcct

SEQ ID NO: 363719 - DNA, 136 bp, Homo sapiens
attcagcgcatggacaccactggccggacgatcctggaaaacaactcaggaaggtccaagtgatcatggagctcagcttggtctccatggggctggtggtgatggaatacatgatgacacagcaggtggagaggaa

SEQ ID NO: 363720 - DNA, 87 bp, Homo sapiens
ctctagaagtagatcctccagtagtgattcaatcagcagcagcagtagtaccagcagtgacagggtgtcagtgtggaggcagttgat

SEQ ID NO: 363721 - DNA, 90 bp, Homo sapiens
aaagccaagatgcaggaatcaggagagcaaactataagcctttgcaaaatgttagcacagtgctgcagaagcctaatcctctctataatc

SEQ ID NO: 363722 - DNA, 82 bp, Homo sapiens
cgcgccgcgagggctccttccctcagtacctggagtagaacagaaaaattattatgtctgtgttcccttgggactcattgga

SEQ ID NO: 363723 - DNA, 75 bp, Homo sapiens
tgaatcccctgtttgagaaaaggcctaagaattttggcattgggacgtgtggtgtgctactgcggaaggtgaatg

SEQ ID NO: 363724 - DNA, 82 bp, Homo sapiens
atgtgtcctacaccaggcagcccccaaatcccggcccagaataccgtagcagtaggcaggacagttccaattcaacaaaaac

SEQ ID NO: 363725 - DNA, 80 bp, Homo sapiens
caaggacacggtctacaccgacttcgacgtgccctgtgggacatcgagaccggccagcagacgaccacgtttaccggaca

SEQ ID NO: 363726 - DNA, 83 bp, Homo sapiens
gcaaccactgcgagtactgcttcaccagggtaacaagatgctcaactatagtgctcccagtgcagggggttgcctgctggaca

SEQ ID NO: 363727 - DNA, 115 bp, Homo sapiens
cctacgcgtccctttgggtttagcacgatgagctcaatcggcactggggtctctaattaacagaagatggcaaagcccagccacagcagctatgtccttcagcagctaaacaacc

SEQ ID NO: 363728 - DNA, 102 bp, Homo sapiens
gtactgatgtaaccaggtgcatatgtggttttacacatgatgatggatacatgatctgttgtgacaaatgcagttctgctaagccaatattctctagaatga

SEQ ID NO: 363729 - DNA, 98 bp, Homo sapiens
tttgtacggcttagaggacttccctttggatgtagcaaggaagaaattgttcagttcttctcagggtgtccgcaatgttgccagtgtctgtctgcaga

SEQ ID NO: 363730 - DNA, 100 bp, Homo sapiens
ccataaaaattcatcagagagcattttactactgagctgcaaaggtgatcactgtgttcagtgttgttggaatggattcagactggctaatgggggaaag

SEQ ID NO: 363731 - DNA, 100 bp, Homo sapiens
cctgctcttgaggttcacagatgatacgtttgatccagaacttgcagcaacaataggtaccgttttgcagagattcgctaccatcgccctgaggagaccc

SEQ ID NO: 363732 - DNA, 75 bp, Homo sapiens
gttaaaacctgacacttttaacagtatatttgccttccctccatgatctccaacactatccgataaagtagaagc

SEQ ID NO: 363733 - DNA, 80 bp, Homo sapiens
ttcgggacagctctctagaaactcgctctaaagacggaaccgccacagcactcaatgcctccggagccagcgtggtggcc

SEQ ID NO: 363734 - DNA, 100 bp, Homo sapiens
tcaatctcacagctgctgatacctgcatcatatttgattctgactggaacccacaaaatgacttgcagctattcaaagtgtgattagagctgggcttggt

SEQ ID NO: 363735 - DNA, 99 bp, Homo sapiens
tcaaaaacttggactctcaaatgggggacaggagctcttgtccctggcaaagcgaaagcgcagtgactctgaggagaaggagccgcctgtgagtcagcc

SEQ ID NO: 363736 - DNA, 83 bp, Homo sapiens
cttttctcagatgttggatatttgcttggaaaaacgtgtgggtacgaccttggttctcccagcagagatgtgggtccttccct

SEQ ID NO: 363737 - DNA, 75 bp, Homo sapiens
cctgctgtgcacctgggggtacaggtggtggctaatgccgtagcggcattatctgaaatcagtgagtctcaccca

SEQ ID NO: 363738 - DNA, 51 bp, Homo sapiens
ctgcggccgagcgccgggagcagaactcccccactggaaaggattctgaaa

SEQ ID NO: 363739 - DNA, 100 bp, Homo sapiens
caagaactggctcaagaaatttgcctcgaaaaccaagttacactcctggcacaccttacaaagtgtcctgttcccccaccagcggggctgtgccaccgta

SEQ ID NO: 363740 - DNA, 87 bp, Homo sapiens
tcagaatcctcttctgagtgatggagatttgtctaccatgattggcaaggtgcgctttgtaaagaatataacttcctggaaagagat

SEQ ID NO: 363741 - DNA, 75 bp, Homo sapiens
ccggagccggtgccgcagctgcgatggccgtggccgtggggagaccgtctgtatttgaaatggacatcgctaaac

SEQ ID NO: 363742 - DNA, 82 bp, Homo sapiens
ctgctggatggaggggattttgtcagcttgtcgtcaaggtgagaagccctaccactgcaactgggacggctgcggctggaag

SEQ ID NO: 363743 - DNA, 89 bp, Homo sapiens
ctccaaatgatgacactttggatgaaggagtaggacttgtgcattcaaacatagcaactgaggttcctccccgggcagaagaaatcacc

SEQ ID NO: 363744 - DNA, 100 bp, Homo sapiens
aaccaaggagctgcgctgctacagatgttaccacttctgtggctgctaccccactcctgggccgtccctgaaggttctgatctacaatggccaactggac

SEQ ID NO: 363745 - DNA, 133 bp, Homo sapiens
gattttaaagcctgcagagaaaaagaagccaaatgccacgagacctgtaacgcctccaaggggcagtttgaagagaacacatgaagaagaggatgattttggaaccatgcaagtggcgactgcacagaatggc

SEQ ID NO: 363746 - DNA, 87 bp, Homo sapiens
gacatcgaggtcaacacccgccgagcacaggctgacctggcctatcagcttcaggcttaccactcttctctcatggatcctgatacc

SEQ ID NO: 363747 - DNA, 100 bp, Homo sapiens
cgacggcaaaggtgtcgtggtggtcattaagcggagatccgaactgataaatttcaaacggaagagagtggcagcatttagaaagaatctaattgaaatg

SEQ ID NO: 363748 - DNA, 95 bp, Homo sapiens
ccgattcctcctccttggtcgccgcgtccttggctggcgtgcatccgtgtcattctggaccttactcccaactaccggggtgagaactcgtggtt

SEQ ID NO: 363749 - DNA, 83 bp, Homo sapiens
cgcgcgcctgcccagctttgcagcccccgaacgcggcctcgcacaggatgctgaaaacgccattcaacagatgggtggccagt

SEQ ID NO: 363750 - DNA, 100 bp, Homo sapiens
gaggtacagtgtgcatcctacaacaacaagccattcatgggccggttttatgagtgggaaccatttgcagaaggtcccagtagggatggcacaatcagcg

SEQ ID NO: 363751 - DNA, 100 bp, Homo sapiens
gtgtactaaaccagattgtcccttcactcatgtgagtagaagaattccagtactgtctccaaaaccaggagttcatgatcaagtgttgcccacaccaaat

SEQ ID NO: 363752 - DNA, 73 bp, Homo sapiens
ttagaagcattttgcaacgtagtgttgccaatccagcatttttgaatgaaggtggtgtttttaaggctcatct

SEQ ID NO: 363753 - DNA, 98 bp, Homo sapiens
tagccgggccttccggtcgctggtgcagcttcacctggccgggctgcgtcgcttcgatgccgcgcagatttggacaattccattgataaaacagaagc

SEQ ID NO: 363754 - DNA, 100 bp, Homo sapiens
tgaaaaccttgtggaagagacaagccattttgtgcgcaccacttttgtgtccaggcataagaaatttgacggtatgagaaagtgccagtcatcttggttg

SEQ ID NO: 363755 - DNA, 50 bp, Homo sapiens
gctgatccgaagaatcacaggaagtactatactggcaattgctggagaag

SEQ ID NO: 363756 - DNA, 100 bp, Homo sapiens
gtgaccctaatctcttcgttgcactttatgattttgtagcaagtggtgataacacactcagcatcactaaaggatttgtaatgcaataactaaaagtcac

SEQ ID NO: 363757 - DNA, 97 bp, Homo sapiens
aactcccgcgtgtgttctgactatggcaaagaaggtctttgccgcgtgcacggacatatgtagagtgtgtcggtcagaaggaacacctgagaaaccg

SEQ ID NO: 363758 - DNA, 83 bp, Homo sapiens
gatcactggagccaaaacctgtcccagtttttccctgaggccatttctttcatagatgtgtatatctcatgattgatatggag

SEQ ID NO: 363759 - DNA, 74 bp, Homo sapiens
gccgacatcgcggccttcttccgatccgaaccgagattaagcgtagctcctgaaatggatatcatggactactg

SEQ ID NO: 363760 - DNA, 75 bp, Homo sapiens
ttctccaccaggatcacgtttgagtgtgctcagatatcgatgtggcaaaatctggcaaaggcagagaccaaactt

SEQ ID NO: 363761 - DNA, 50 bp, Homo sapiens
catgagggccgggcccagtcaccgaccctggaagacccaggagaaggcgg

SEQ ID NO: 363762 - DNA, 90 bp, Homo sapiens
ctaagaaagaagattcctctgacagtggtcaaaatgcagatcttcgtgaaaacccttaccggcaagaccatcacccttgaggtggagccc

SEQ ID NO: 363763 - DNA, 82 bp, Homo sapiens
ataagacacaatctattctgctgattcacaattatggagactgttgagaaagatcagtctaaagaaaaggagaagaaagtga

SEQ ID NO: 363764 - DNA, 105 bp, Homo sapiens
ctctgcccggccgagaccccgtctgggaggtatttaacagactcccgacaaaaagcagaatgatcagcgaaatcggaaaagaaaagctgaaccatatgaaactag

SEQ ID NO: 363765 - DNA, 75 bp, Homo sapiens
tttcattgtcaagtatcgtggtgtcagctatggcccggaggtgcccacgagtgtattcggggagaagcttcgaga

SEQ ID NO: 363766 - DNA, 75 bp, Homo sapiens
acttggtgttcgctaagatgaagggctaccctcactggcctgccagggaagcggggagaggtggtgagagatgac

SEQ ID NO: 363767 - DNA, 97 bp, Homo sapiens
tgcgcagcctcttcgagcgccgcggacgcgtcatcgagtgtgacgtggtgaaagcggagctggagttcgcccaaatcatcatcatcgtcgtggtggt

SEQ ID NO: 363768 - DNA, 82 bp, Homo sapiens
ccgccttccgaggaggactcagcagaggcagagcgcctcaaaaccgaagacaaagccacagacccaagcatgtcggaacagg

SEQ ID NO: 363769 - DNA, 74 bp, Homo sapiens
agagtttgttagctcgtcgttcacttcaggcccaacttcaggagctggcgttacagcccaaagatgatattgta

SEQ ID NO: 363770 - DNA, 82 bp, Homo sapiens
agccgcggcggcagcagcagtgagagcatgatgccttcttctgtagagtgggcgctttgcagaatacgtgttgaatgaaatc

SEQ ID NO: 363771 - DNA, 100 bp, Homo sapiens
cgagacttaccagagccacaagctggcatattccaggccatgtgtctcctgatctgtgccgagatgtaccaagtgtccagactgcagcacatctgtgagc

SEQ ID NO: 363772 - DNA, 133 bp, Homo sapiens
cggagatctctctcatctcgctcggctgcgggaaatcgggctgaagcgactgagtccgcgatggaggattcctgccagctcccaggggctttggttatagaagtgaagtggactaaatacggatccctgctga

SEQ ID NO: 363773 - DNA, 100 bp, Homo sapiens
agaactggagggcccagacaggactggacatccgagaatcctatggccagacagaaacgggaggagtgagatgtggatgttgcttttgcacctacggggg

SEQ ID NO: 363774 - DNA, 75 bp, Homo sapiens
ccgcgggccaggagagcgctcggcggggggggccctcagcctcttggccttgaacgggctgttcatcttgattca

SEQ ID NO: 363775 - DNA, 75 bp, Homo sapiens
aaatggttctggcaaactgctcaagaatccagggcctgaaaacccagaatgaacttgtgtccatcccagagatca

SEQ ID NO: 363776 - DNA, 100 bp, Homo sapiens
gagcctttttggcctggcttgtttgcaaagtgtttacaggcattggagtttttacatgctaatcaagtgatccacagagacatcaaaagtgacaatgtac

SEQ ID NO: 363777 - DNA, 100 bp, Homo sapiens
cctgtgttccagcccttttcaggacagggtcacagactaggaagtatcgtcgtcctccccgcagtcaggctgcccatcacccaccattccagcaggtaaa

SEQ ID NO: 363778 - DNA, 101 bp, Homo sapiens
ggaaaacctaaccatgaagacttgaacttaatacagcaagaaagaccatcaagtttaccagatcttagaaatgaagttgaaaaattacgcaatgaagtgaa

SEQ ID NO: 363779 - DNA, 83 bp, Homo sapiens
gggtctgtcatcatgtcgcgttacgggcggtacggaggagggactttgaacatgtcggggatcgccctcagcagactcgccca

SEQ ID NO: 363780 - DNA, 100 bp, Homo sapiens
ctccgcagaggccagggctgctgccttccagcaccttctgctcctcgtgggcatccacctcctcaaggccctagactggagctggttacagacggaagaa

SEQ ID NO: 363781 - DNA, 74 bp, Homo sapiens
cgtgaccgagagcgtgaccgagagcgcgaatatcgtcatcgttagaagaaaacccgctacgagacctacgtgca

SEQ ID NO: 363782 - DNA, 50 bp, Homo sapiens
ctgatgatgatgaaagttacacagatagtgaattcctaagaagaaaataa

SEQ ID NO: 363783 - DNA, 100 bp, Homo sapiens
gaagcagtgtctgagaccatgcagtcagctacgggaattcagtactctgtaacacccagctaccagtgatgagccctcctcttcagctaggaaaatgacg

SEQ ID NO: 363784 - DNA, 98 bp, Homo sapiens
agcagcccaccagggagctcctgcaggtgatggaattttactgccagtcctgtgagactgccatgtgtcgggagtgcacggagggggagcacgcagag

SEQ ID NO: 363785 - DNA, 74 bp, Homo sapiens
cgcgccagagggccggtggctcctccgggcttctgaggacccgcagggagcggacggagtcttgctctgtggcc

SEQ ID NO: 363786 - DNA, 83 bp, Homo sapiens
cctggtcttgctcggccgatgaagtgcagaggtttttttctggcctccccatggccacccatggaccagtcggcattcacttc

SEQ ID NO: 363787 - DNA, 96 bp, Homo sapiens
cacccgtggaccctggcgctaggcaggcgttgaggaagaagccacccgagcggactcccgaggtaatactgcattgcatgattgtgcagaatctgg

SEQ ID NO: 363788 - DNA, 96 bp, Homo sapiens
ttgcaacaggactgtgacctgagctgtcagatcaccattcccaaaggaatagccaggccagaagaaggaaggcctgtggtgagtgggacaggaaat

SEQ ID NO: 363789 - DNA, 73 bp, Homo sapiens
tcagggcctgccgccccattatgatgatgtcgagaattgatgaattgcaagtttgtgccccatagctgcacag

SEQ ID NO: 363790 - DNA, 75 bp, Homo sapiens
ggccttctgcatttcagaagccaaaaggacgtttattaatgccagaagaagaatagtacagcccatgattgacca

SEQ ID NO: 363791 - DNA, 100 bp, Homo sapiens
ccacgttcctgtgccagcccctggatgtgctgaagactcgcctgatgaactccaagggggagtatcaggagaaggagaggaacgcgcggaggaagaagaa

SEQ ID NO: 363792 - DNA, 98 bp, Homo sapiens
gaagccatgatttaaatatcggcgttaagatttgaacatggaattcaatccttcagatcatcctcgggccagcacaatattcctcagtaaatctcaga

SEQ ID NO: 363793 - DNA, 88 bp, Homo sapiens
ggcttgccctggtcttgctcggccgatgaagtgcagaggtttttttctggaactctccggagtcctttctgtattgttgtgattttgc

SEQ ID NO: 363794 - DNA, 100 bp, Homo sapiens
tgggaagtgtgatgacgtcatgcggctcctcatggccgagctgggcttggagatccccgcctatagcagcaagagtgagccatggagctacgtgtgggga

SEQ ID NO: 363795 - DNA, 90 bp, Homo sapiens
cagggagtttaagaaagaaaatactaaggaagagaaattttggatgaataagggagagcttatggatggagaccaaacatccagatctgg

SEQ ID NO: 363796 - DNA, 74 bp, Homo sapiens
tggtgaacgagtctgaaatcatcccggccagcaacggacacgaggttgactatagtcaatggggccaatggagc

SEQ ID NO: 363797 - DNA, 71 bp, Homo sapiens
ggattccaagtaactcttatttgcctcattgactgttatttcagtaaaggccgtctcaggcatgatcactt

SEQ ID NO: 363798 - DNA, 75 bp, Homo sapiens
attagcaacatttgtcaattgtcttcacaatagtcttcaacaaggacattcactgaacaatgccagggatacaag

SEQ ID NO: 363799 - DNA, 75 bp, Homo sapiens
aagcaactggattttttaactgaagatagtgcctttcagccctaccagcagcgatggattttgggtggggaagtc

SEQ ID NO: 363800 - DNA, 83 bp, Homo sapiens
tgaaatcttccaagtccaaggatgttgcttatgaggtgatcaaactcaaaggctacacatcctgggctattggactctctgta

SEQ ID NO: 363801 - DNA, 100 bp, Homo sapiens
cagttatcaagctttagagcctggctactcacagttgaagcctgattgcagaaagctgatgtcctgaccactggagctggtaacccagtaggagacaaac

SEQ ID NO: 363802 - DNA, 101 bp, Homo sapiens
ccctgctcttggatactgcacatgttttgttcaccttgagttcacatgagaaagatcagtctaaagaaaaggagaagaaagtgaaaaaaacaattccttcc

SEQ ID NO: 363803 - DNA, 78 bp, Homo sapiens
tctggatttccaaggaagaatttcctctgaagcaccggttatcaatactctggctgaccatcatcatcgtgggactga

SEQ ID NO: 363804 - DNA, 75 bp, Homo sapiens
aaaggatatcgtcaatgggctgaggtgatcaagtacacactggaccctgtgtggaagccattcacagtgcccttg

SEQ ID NO: 363805 - DNA, 98 bp, Homo sapiens
gccaaaaccatggaggaggctagcaagcgaagctaccagttctgggatacgcagcccgtccccaagctgggcagtttgaaaattgcaaggagggactt

SEQ ID NO: 363806 - DNA, 97 bp, Homo sapiens
ggaggctgatcgcgcccagaagaagcatcagatggtgaaggagaaggagacacagaagtgatgcagcaggagacagttccagttcctgtaccttcag

SEQ ID NO: 363807 - DNA, 82 bp, Homo sapiens
cggagccgtggccgctgggggttgcggcggcgctgagccagcggggccgagataattgacgaccttgccaacctagtggaga

SEQ ID NO: 363808 - DNA, 75 bp, Homo sapiens
aacatcctcctggccaccgactcctacaagaccatcatggagcagttcaaccctagcctccggaacttcatcgcc

SEQ ID NO: 363809 - DNA, 83 bp, Homo sapiens
cgcgccgcgcgccggcggcaccatgaagtcagcggaggaaggttgacatcatggacatatgtgagtccatcctggagaggaag

SEQ ID NO: 363810 - DNA, 88 bp, Homo sapiens
aggatatcccagaccctcaggtgaactggattccgtgtcaagacccccacaggatggctggctgtggtgaaattgatcattcaataaa

SEQ ID NO: 363811 - DNA, 100 bp, Homo sapiens
gctttttctggtgtcctgaacctggaagttgtgctttttaagcatcttcatgatacagttaagaggaatcttgacagcgccacttcccctcagaatggcg

SEQ ID NO: 363812 - DNA, 83 bp, Homo sapiens
caacgacgttccatctgtggaaggacctaccaaccaggatgagctcaggtttctacaaaaatgtggtgaagattcaaaagcat

SEQ ID NO: 363813 - DNA, 74 bp, Homo sapiens
gcgcctgggctgccggcacttcgcggcaggcctccaggcccaaggtcagcatcccactgtcagccatcattgag

SEQ ID NO: 363814 - DNA, 83 bp, Homo sapiens
cataaaccagtcacccaagtgcattgcctttggaaacgagcaacggcagcctttaacagttgagcacatgtatgaagacatca

SEQ ID NO: 363815 - DNA, 98 bp, Homo sapiens
gcgtgaccgagagcgcgaatatcgtcatcgttagaaggtcttctcagtacagcatggtggctggggcaggccgagagaatggcatggagacgccgatg

SEQ ID NO: 363816 - DNA, 100 bp, Homo sapiens
tttggcagtggctttcctgtccgagatgggaaaatcaaactctcacctgaggaagagtttggaaattttagcattcaggtgccaggaatgcagatgggac

SEQ ID NO: 363817 - DNA, 75 bp, Homo sapiens
ggggactcgctctcggcttgaccgcattcttcctcccaggtctccgtgttggtcctcttcgccctggccttcctc

SEQ ID NO: 363818 - DNA, 82 bp, Homo sapiens
ggaatagtctacaaaggaagacttgtaacctggagaagagcttacaacaggttgatgaacatagtaaacctcctcatctgag

SEQ ID NO: 363819 - DNA, 96 bp, Homo sapiens
cttccgaggtttgtgacactgaagcagtgataaagatgaggaaactgaggcttggtgaagttacgaaacttgtccaaaatcacacaacttgtaaag

SEQ ID NO: 363820 - DNA, 88 bp, Homo sapiens
ccggaagaaaaacatctgccatcactgtggcgcttttaatggggatcccaacaagccctcaggattcagaagtgttaaagctcctgtc

SEQ ID NO: 363821 - DNA, 132 bp, Homo sapiens
gtgggctcagcggtattcaacatcctgtgcatcattggtgtctgtgggctctttgctgggcagctgtcaaagctcgaaaaacagcagcagaggaaagaaaagaccagagctaagggaccttctgaatcaagc

SEQ ID NO: 363822 - DNA, 100 bp, Homo sapiens
ccaagccggaggtcgaggtcgagcccgccaagcaccgagtgtccttccagcccaaggtctgcgcaggcatggcactaagtgtcccatggcacatttggcc

SEQ ID NO: 363823 - DNA, 100 bp, Homo sapiens
tcaggtgatggataggagcaaccctgtaaaaccagccttagactatttttcaaacaggacttgccatgaggtgttgaagccttgtttcactgagttggag

SEQ ID NO: 363824 - DNA, 90 bp, Homo sapiens
aaaaatcatgcaattttctctgaagaccttgaaaatctgaagaccaggattatagctgagaaggtaaaggacgttctgtttatccgaccc

SEQ ID NO: 363825 - DNA, 98 bp, Homo sapiens
cggggtcgacgacatagcgggagccatgtccattggagcccgttcccaatcagctcgtacttacttggagagacatatgtctgaatttatggagtgta

SEQ ID NO: 363826 - DNA, 83 bp, Homo sapiens
cccggcggcggcacgatgccctttgacttcaggagttggctgattgcaattctggcccaactcaaccctctctttggaccgca

SEQ ID NO: 363827 - DNA, 100 bp, Homo sapiens
agtcatgtacagaacatgatcaagggtgttacactggttctgactaataagaagacgaccttctttggtggcaattctatctctatgattgattacctca

SEQ ID NO: 363828 - DNA, 97 bp, Homo sapiens
taccagagataattgataacaccctgtaacagctgaggtatttgaagtataccatacaactgttttgaaaatccagcgtggacaatggctactcaag

SEQ ID NO: 363829 - DNA, 100 bp, Homo sapiens
taaaatgaaagaaaccgctgaggcttatttgggaaagaagttctttattggtgaaaacatgaatccagatggcatggttgctctattggactaccgtgag

SEQ ID NO: 363830 - DNA, 134 bp, Homo sapiens
aagctccaaatctgggtcctcaaagaggaacaaagtcatcaagctagtggacatcacggacatccagaagaccccgtgcctgtgtttgaggcggcacgcagcctagacgacagactgcagccccccagctttga

SEQ ID NO: 363831 - DNA, 85 bp, Homo sapiens
tggacctgcctgggcatagacttccttaagaggagaaggcagagcccccccaggctatgaatgccctgatgcggttgaaccagct

SEQ ID NO: 363832 - DNA, 98 bp, Homo sapiens
cggctttacgttcacctcggtgtctgcagcaccctccgcttcctctcctaggcgacgagacccagtggctagatctgagtgggacatacttttgaagg

SEQ ID NO: 363833 - DNA, 67 bp, Homo sapiens
gtggagcaaatggtggctttcattgggtttggcagttctctaccagtggaccaatcttttcatcccc

SEQ ID NO: 363834 - DNA, 50 bp, Homo sapiens
gccaaggggtccttctactcctaaccttctcttggagtcaagaagcctac

SEQ ID NO: 363835 - DNA, 100 bp, Homo sapiens
ccgagactctagaagaaatgccctccgggtcacaggataaggtcctcgagaggttgcagcaaagaggatttgaaatcgtgggctcctgtgggggaggagt

SEQ ID NO: 363836 - DNA, 75 bp, Homo sapiens
tcggtgctgcagacggcgagacctcctgcacagggtgagaactctgtctcagtcgacgggaagtgcagtgactcc

SEQ ID NO: 363837 - DNA, 82 bp, Homo sapiens
gcgcggagctggacgccgcgatcgtggggcccgcgaggcgggcagccggggcgtccaggaattgaatgatctggcacgggac

SEQ ID NO: 363838 - DNA, 74 bp, Homo sapiens
tacaaagtaagctggaaagcagatggtactcggattgtctcaaagcttgccaggagcagattgaggcggtgctc

SEQ ID NO: 363839 - DNA, 98 bp, Homo sapiens
gaagcgcaggacaggctgcattggggccaaacacagaatcagcaaagaggaggccatgcgctggttccagcagaagattctgtttctggcgtctgcat

SEQ ID NO: 363840 - DNA, 100 bp, Homo sapiens
ctggaagacatggccactccagtcggtgttgagcacggcgagcagtctcaggcctttagtgatgatggatcttttgccagaaatgagggcatactggcct

SEQ ID NO: 363841 - DNA, 75 bp, Homo sapiens
agggtggcaaggaacttcctggctgcctggggagacagcagaacccaggaaaacagttcctcctgaggatttcag

SEQ ID NO: 363842 - DNA, 90 bp, Homo sapiens
gagaaaattgaaggctccaaatccttagctcagagctggaggatgaaggatcggagctcccagctcctccagcagccgacaggaggcccg

SEQ ID NO: 363843 - DNA, 101 bp, Homo sapiens
cgaggagacggccctcatcacccgacccggggcgccgagccggaggaaggagtatttttcagtgctgtacaagcgtcttgaattactctggtagcttttcc

SEQ ID NO: 363844 - DNA, 75 bp, Homo sapiens
aagacgatccgggtaaagttccagggaggccgcgaagttgttgacctcctgtactggagagacattaagaagact

SEQ ID NO: 363845 - DNA, 100 bp, Homo sapiens
ccccggtacatctgaaagccgggaaatgacagttcggcatggttttcctcatcagcccacagcattagcctttgatccagttcagaaaatcttggctatt

SEQ ID NO: 363846 - DNA, 74 bp, Homo sapiens
taagaaaaaagaccccatgggcagccagaaccgctggctgattgacaatggagagtcccactctgtcacccagg

SEQ ID NO: 363847 - DNA, 88 bp, Homo sapiens
cagaagtagaaatcagtactggaggttttacaactgcctacagcatgctttggaaagggaaacgatgactaacttacatcccaagatc

SEQ ID NO: 363848 - DNA, 101 bp, Homo sapiens
tgctgagactcggctccaaggtcacagctcgtaacactgaaaagaggcacagttagatgaagaaggacagtttcttgtcagaataatatatgatgactcca

SEQ ID NO: 363849 - DNA, 100 bp, Homo sapiens
ctagaagacttatataatggtgcaacaagaaaactggctctgcaaaagaatgtgatttgtgacaaatgtgaaggcggagatgctgcacatgtacagccag

SEQ ID NO: 363850 - DNA, 145 bp, Homo sapiens
ctggcagctgctgctgacttgagtgagaacaagagagaggacggcagcgccaagcaggagctgaaggacttcaggatggagctatgacattgaagagaggaaggttccaaaacccaagtccaagtcttatggtgcaaacttttct

SEQ ID NO: 363851 - DNA, 74 bp, Homo sapiens
attggggaaggacatctgtgcctgtgcagccactgggacaggttctatgaatttgaatgctgtgtgtgtcgcgg

SEQ ID NO: 363852 - DNA, 100 bp, Homo sapiens
gccggcaccatgggctgctgcaccggacgctgctcgctcatctgcctctgcgcgctgcagttggtgtgatgaatgcagactctgctaccattttggctgt

SEQ ID NO: 363853 - DNA, 95 bp, Homo sapiens
atcatggggcccaagaaaaagcacctggacttgggcctttggagtgacgctgtgggaactcatgactctgggccagactccctacgtggacattg

SEQ ID NO: 363854 - DNA, 100 bp, Homo sapiens
cggagaggagcatgaatggagcaaaatggcggatcatgtgcagctgaagtgagtagtgaatatagtatggacaaggcaatggttgaatttgctacattgg

SEQ ID NO: 363855 - DNA, 100 bp, Homo sapiens
ctgctgaccgagagagctcactcagccagaccaagatcactccatggatgaaatgacagctgtggtgaaaattgaaaaaggagttggtggcaataatggg

SEQ ID NO: 363856 - DNA, 75 bp, Homo sapiens
cttttggaatctgaacaaggggctggacgtaaagaaagaagtgatgcactcaattctgcaatagataaaatgacc

SEQ ID NO: 363857 - DNA, 100 bp, Homo sapiens
gccgccagcaccatggccagcaccatttccgaggtggggctggtgtccgagcacttctcgcaggccccgcagaggctgtccttctacagctggtacggca

SEQ ID NO: 363858 - DNA, 76 bp, Homo sapiens
catcaaacagctatggtgatgattagagacatactaatgtacatggtatcgagaaccttccctgcgaacttcagag

SEQ ID NO: 363859 - DNA, 83 bp, Homo sapiens
gtctcaatatctgtcttcggtggactccttcggcagtccacccaccgccgccgcctcccagactgcctctgtcaccgggtccc

SEQ ID NO: 363860 - DNA, 134 bp, Homo sapiens
tgctggagtaacgcttgttttctttgtttttctccacaggaagcgagggatggaggttgtgcagtgtactaatggtcacttgatgtgcgctggctgttttatccacctactagcagatgcccggctgaaggagg

SEQ ID NO: 363861 - DNA, 87 bp, Homo sapiens
gaaattaatgaagctcttgcagaaaatccaggacttgtaaacaaatcttgttatgaagatggcataatcaccagcaacacccgggac

SEQ ID NO: 363862 - DNA, 90 bp, Homo sapiens
gctgtgagcgcccccatcccggaggtctccgccggctcccggaaatcgtggatgggaatgtgaagatgaccctgggcatgatctggacca

SEQ ID NO: 363863 - DNA, 100 bp, Homo sapiens
aacaagaggcagtgacatggcgcagaaggagggaatagccaggtctggctgggtcggcacaacctgtttgagcctgaagacacaggccagagggtccctg

SEQ ID NO: 363864 - DNA, 140 bp, Homo sapiens
ccgaagccggagtcgcgcggccgggagcacgggcgccggcatagtacaatgaggcagccagcggatcttgggtgcagaggccaagaccgttttgcccaagaaggagaaaatgaagctgaggcgtgagcaatggttgcaga

SEQ ID NO: 363865 - DNA, 97 bp, Homo sapiens
ctgctccaatgctggcttgatcgtcaagtccttcaagcagttcgcactacagcgggagcaggagctggagtttggaaattttagcattcaggtgcca

SEQ ID NO: 363866 - DNA, 100 bp, Homo sapiens
gttggccacagccaattcaaaggaaggagtgggactctgggacattcgaaaacctcagaggtaaagatgagccttccagctacatttgcacaacatgcaa

SEQ ID NO: 363867 - DNA, 100 bp, Homo sapiens
actgagaagtgtatatcaagccacaatttccatcaaaaagtgattaagcagagaatggagaagaaggttgattccagttaattggccttggtcctcacag

SEQ ID NO: 363868 - DNA, 100 bp, Homo sapiens
cgccgatgcccggggctgcgacggctgcaggtcttgttccgagcgagtggtggcaagcccatcgccgtgctctgcctgactgtggagctgcagccccacg

SEQ ID NO: 363869 - DNA, 80 bp, Homo sapiens
actggcccggaaacaggaggacctggattactgggccagttacaggtcttgttcttactggacatccaaggtcaggcatg

SEQ ID NO: 363870 - DNA, 74 bp, Homo sapiens
cagcggcctggggacccagcaaggtgctgctggtgagtagcagccggtacccagaccagtggattgtcccagga

SEQ ID NO: 363871 - DNA, 83 bp, Homo sapiens
ctctcttacaacaaaatggttttccactccattgttgttagaagccagccaaaattgcctggaaaagagcagtgagaggagtc

SEQ ID NO: 363872 - DNA, 75 bp, Homo sapiens
accactcgaccatcagcctccagatgggcacgaacaagtgtgccagccaggctggagtgcaatggcacgatctcg

SEQ ID NO: 363873 - DNA, 82 bp, Homo sapiens
cgccgcgctgcgcatctccaacagcgacctgagcgtgttctacgcagaaatagaagagctgaaactggtgtatccttatcac

SEQ ID NO: 363874 - DNA, 88 bp, Homo sapiens
caaaggcagggcaaggaaactggccacaaggacctgatgcccagaaccctggacgggcagatcaccatggagaagacgcccagttact

SEQ ID NO: 363875 - DNA, 100 bp, Homo sapiens
cttgggccaaaggacagttagaagacagtaggccctggaaatttgaacatataggcattgggcttctgtctctactgctgagagatgaccgagtgttgcc

SEQ ID NO: 363876 - DNA, 100 bp, Homo sapiens
ccgcctctttgggttcgtgagatttcatgaagatggcgccaggacgaaggccctactgggcaaggtgaaaggtgtagcagtcactcggcctacacccaca

SEQ ID NO: 363877 - DNA, 90 bp, Homo sapiens
gctggcctggtgctgctccggcagcggcagcgggccaagcgcaacgccgtgctggacgaggccatggatgctccccactccaaagcagcc

SEQ ID NO: 363878 - DNA, 73 bp, Homo sapiens
ttgacatttaattttagggtcctttatatagaagggagagtagatctttggggccgtagaagaggacagctcc

SEQ ID NO: 363879 - DNA, 82 bp, Homo sapiens
ctactgctccccaattacagcccacctcttgcatcgtcacctacaggaattgaatgatctggcacgggaccctccagcacag

SEQ ID NO: 363880 - DNA, 75 bp, Homo sapiens
cctttacctggagcaaaccaaagcctggccacacccctatatttcgatcacacgcgctgcaacgtgtggattctg

SEQ ID NO: 363881 - DNA, 101 bp, Homo sapiens
actccccgccgctcccgggggccgtgacgacaatgcagatcttcgtgaagactctgactggtaagaccatcaccctcgaggttgagcccagtgacaccatc

SEQ ID NO: 363882 - DNA, 82 bp, Homo sapiens
caccatttctgcctcaagacgcatgtaaagaggtgtagattcagttaagtgggcagaccaacatccacctcagcaaaaactt

SEQ ID NO: 363883 - DNA, 82 bp, Homo sapiens
ttcagacagcatatttgagtcatttccttcgtacccacagtgcttcatgagagtggcatccagcagctggagggtctgtcag

SEQ ID NO: 363884 - DNA, 75 bp, Homo sapiens
ggacgcggagcccggagctggggcgacgaggcgattgcgggggcctgggctagggaaaagaagatctcccggagc

SEQ ID NO: 363885 - DNA, 82 bp, Homo sapiens
ctcctccttcttcctcaactatctcgctgacacgcagggcgtgatggtgggcatgggtcagaaggattcctatgtgggcgac

SEQ ID NO: 363886 - DNA, 98 bp, Homo sapiens
ttaccagctcacctctcaccgcgcatgtttggagaggtcctgctgtactagccaccaaagcagctgctggtactaagaaatatgatcttagtaaatgg

SEQ ID NO: 363887 - DNA, 75 bp, Homo sapiens
ggccccaggtgtaagcgcagaaagcaggcgaacccgcggcgcaataacggtgactccccggacagctcaacacca

SEQ ID NO: 363888 - DNA, 80 bp, Homo sapiens
acgtgcatgaagatggacgaggtcctgtacagcatcgccgagaagatatggctcgtggacagcagaaaattcagtctcag

SEQ ID NO: 363889 - DNA, 75 bp, Homo sapiens
taaaagagccctgcaatttgaagatacatgagacagcagccaaacccccaggagaaactcccatgtatggaatcc

SEQ ID NO: 363890 - DNA, 100 bp, Homo sapiens
aggaccactgtttgcatatatccaggagtttcgattcttgcctccacctctttattcagaggaggaggtgcgccagtctgtaactcctgccgagccagtc

SEQ ID NO: 363891 - DNA, 83 bp, Homo sapiens
ctgccgctggcgagcgccaccgcatggcggagctggagtttgttcagatcatcatcatcgtggtggtgatgatggtgatggtg

SEQ ID NO: 363892 - DNA, 100 bp, Homo sapiens
catctacaccttgcagaataacctccagtatgttgccatctctaacctaccagctgccactttccaggtttatgatgataaagactacaggagaattcgg

SEQ ID NO: 363893 - DNA, 82 bp, Homo sapiens
ccgcgctggtgcagccaccctcgctccctctgctcttcctcccttcgctcgcaccatgaatgattacggacctgaagccaaa

SEQ ID NO: 363894 - DNA, 100 bp, Homo sapiens
ttgatgacaatgtctttgttccaccagagtcattgcaggaagtggatgagttccacctcattttagagtatcaagcagtataccaaatactacattcacc

SEQ ID NO: 363895 - DNA, 75 bp, Homo sapiens
taccagctcacctctcaccgcgcatgtttggaggtctatgctccatcagcaagcactgccgactacaatagggac

SEQ ID NO: 363896 - DNA, 75 bp, Homo sapiens
gcgctcgttttgtgcagcttcagcacaatgacattgacaaacggggaccagttactctccacaagaaaattcaca

SEQ ID NO: 363897 - DNA, 100 bp, Homo sapiens
cggcagtggtgctttcccgaatctcagaatgccgtgttatttggaagatggagcttcaaagggtgcctggctgaaccggtcaagtattatttttgcggga

SEQ ID NO: 363898 - DNA, 98 bp, Homo sapiens
cgaacctgagccggaacgggccagcgctgcaagaggcctacgtgcgggtggtcaccgagaagtccccgaccgactggaccttaaagaagccaacttcg

SEQ ID NO: 363899 - DNA, 98 bp, Homo sapiens
gatatgtgcctggatgcagctcacctccgatgcagagcaaagcggcagtccccggacagggatgggctctgaccaggaggacagcaagcccatcacgc

SEQ ID NO: 363900 - DNA, 100 bp, Homo sapiens
agcggcctcggcctccccttggattcagacgccgattcgcccaggacctgaaggagaagaaggagaaggtggaggagaaggcaagccggaaagagcgaaa

SEQ ID NO: 363901 - DNA, 90 bp, Homo sapiens
ctgcaatccaagccgactgatgactggagaggatggctactatttcaccaatctgacattggtgaagactgaggaagaaacagcccaggc

SEQ ID NO: 363902 - DNA, 51 bp, Homo sapiens
gaaaatccgcaagaccatcatgcagtgggctcgggatgagtttgaaggcct

SEQ ID NO: 363903 - DNA, 83 bp, Homo sapiens
accaggaggtgccggtggccgcgctcggacccgacggccgaagccctgcagcccacgctacagccggagatgcagctcgagca

SEQ ID NO: 363904 - DNA, 100 bp, Homo sapiens
tgccggccagcgtcctctggccatggacaccccggaaaatgtccttcaatgtcatacttgtaacaccacagatcgaaatgccatatgtgtgaactgcatt

SEQ ID NO: 363905 - DNA, 75 bp, Homo sapiens
agattcctaaaggagggggaaagccaggctgtgtggtagaagaggagacacggcgatcccagcaagctgctcggg

SEQ ID NO: 363906 - DNA, 75 bp, Homo sapiens
cagtattatgatgctcaatgtcaagtcatctttggctcaagtatcgagaaccttccctgcgaacttcagaggaac

SEQ ID NO: 363907 - DNA, 97 bp, Homo sapiens
caagcctaggacaaaagcctggaggctccgacttcctcatgaagagactccagaaaggggactcatctgatgatgtgagaagagttcagaggaggga

SEQ ID NO: 363908 - DNA, 100 bp, Homo sapiens
aaagagttctggcagtgtagcatctcttccacaatcagacaggtcctcatccagctcacaggaaagtctcaactgcccagagcccagaccaagcatggac

SEQ ID NO: 363909 - DNA, 95 bp, Homo sapiens
gggtgtggaaaaacccggtactgtgcactattctttcccaggaaccattggataaggataaagccatgcaggatatacgtactgtgggtcttgtg

SEQ ID NO: 363910 - DNA, 82 bp, Homo sapiens
cttatggcggcgctggagagggggcgctgagctgttgggactgcctctgtcaccgggtccctccacccttgtctcctgtgcg

SEQ ID NO: 363911 - DNA, 51 bp, Homo sapiens
aaggagctcggggactcccccaaagacaagactgtgtacagtgccctgggc

SEQ ID NO: 363912 - DNA, 99 bp, Homo sapiens
tactttggttacctatgtacctgttaccactttcaaaagagaaatggcttccctgaggcaagtgtaacctacattcccagcccaccagcctgacgccca

SEQ ID NO: 363913 - DNA, 100 bp, Homo sapiens
tttccccagaggcgtcggaatggacctgtgccacccagactcggtgaaatacctggagtgctcagctctcacccagagaggcctgaaaaccgtgttcgac

SEQ ID NO: 363914 - DNA, 100 bp, Homo sapiens
ccgtggtcatcttcaacgtgggctccaacaccaacgagaccatcaccatgccccacgcggcatgcagtgacctggagttcagggaagtggcaaacagatt

SEQ ID NO: 363915 - DNA, 139 bp, Homo sapiens
ggcagtgtgaggagctgctatggtgctgagtttcctggtagagccggccgagctgaggcggtcgcggccatgaagggtgtccgcaatgttgccagtgtctgtctgcagattggctacccaactgttgcatcagtacccc

SEQ ID NO: 363916 - DNA, 75 bp, Homo sapiens
cactgcctcctttattgcagcaggaatttgcaatgactcagatgcatataaagatcaaatatcagtactgccaaa

SEQ ID NO: 363917 - DNA, 82 bp, Homo sapiens
aaggattccaagtaactcttatttgcgatgccctcctagctagccgtcacgggatggagggcttcatggactcagggacaca

SEQ ID NO: 363918 - DNA, 100 bp, Homo sapiens
gcacatgccggcacaggggctcttctgcgagaggaacaagaccaatttcttcaacacttccttgtgaaacctcctagtagaaaaagttcttgggacaaac

SEQ ID NO: 363919 - DNA, 88 bp, Homo sapiens
ttagtattttttccactgccggtcaccaggacttctcacagacttaattcagtgcacaaatgagatgaatgtgaacatcccacagttg

SEQ ID NO: 363920 - DNA, 89 bp, Homo sapiens
gagatttatggcagcctcactcccagtagtttctgcatttagtgagataaggtcaaaggttccgttacagttactatgatgaatcccag

SEQ ID NO: 363921 - DNA, 100 bp, Homo sapiens
aggcgcctgaaggcgaggagacggagttctacgtgtcccccgaggatctggaggcacagctgcagtctgacgagagggggtagaatggttttgaagaaga

SEQ ID NO: 363922 - DNA, 100 bp, Homo sapiens
gcaacatttcccacaggacacgaagtttgtcggcccttgccttggcagagctgagggtcatcgagcagctcggtgggaagcagctggtcatgaaccacat

SEQ ID NO: 363923 - DNA, 88 bp, Homo sapiens
gatgaagtccagtcacctacaggtgtttgtctcagaaatcgtatacatagacggatctcaatggagcccttgaaggtagtggacccag

SEQ ID NO: 363924 - DNA, 50 bp, Homo sapiens
ctgaacttaggaggactttatgggaagtggtcatagtaagtgctacaaga

SEQ ID NO: 363925 - DNA, 101 bp, Homo sapiens
aagacatgggtagcgtccaacgagatcaaggacaagaggcagcttatagacaaccgcaagctcattgagacgggagaagcagaatttgcccgcatcatgag

SEQ ID NO: 363926 - DNA, 51 bp, Homo sapiens
cccggacagtggcagtgaaacagaatgtaacacactctggaaggcacaaag

SEQ ID NO: 363927 - DNA, 100 bp, Homo sapiens
ccaggatgtgacctattttgtggcctatcagaggtgagcacctgcggatctgtccccagggctacacctgctgcaccagcgagatggaggagaacctggc

SEQ ID NO: 363928 - DNA, 99 bp, Homo sapiens
ggccatctacctggacatcgatggacgcattcagaaggtaaaatgtcggttccaggaccttaccaggcggccactgggccttcctcagcaccatccgca

SEQ ID NO: 363929 - DNA, 100 bp, Homo sapiens
ctgcaacttcatgcatttgaagcccatttccagagagctgcggcgggagctgtatggccgccgtcgcaagaagaaatcttactgatgaggggcagcagta

SEQ ID NO: 363930 - DNA, 83 bp, Homo sapiens
ctttctgtcagccagaaactggatcagttcttaagagcagccccggtaactggaggaatgggagccgttttgatgagaaaaat

SEQ ID NO: 363931 - DNA, 100 bp, Homo sapiens
taacgattaccctgatagtagtgttagtgatgcaaacgaacctggagagagccaaagtaccatagttttcagatgcttcaagtgttgtgaacagagactt

SEQ ID NO: 363932 - DNA, 76 bp, Homo sapiens
actgaatccacatagagaaagtgatgggacggtctggaaaatcccgaagcagaagcccgtattcatctaggcattc

SEQ ID NO: 363933 - DNA, 100 bp, Homo sapiens
agcagaccgatcactggggtagtactgaaatggaacttgctgctagagggattaaagaaatgcttgcttctgatgatgaggaagatgtatcttctaaagt

SEQ ID NO: 363934 - DNA, 96 bp, Homo sapiens
ggaccctgccagcctggacttcgcgcagtgcctggggtactacggctacagcaaggtttcaagtgccccatttgctccaagtctgtggcttctgac

SEQ ID NO: 363935 - DNA, 96 bp, Homo sapiens
cctgctgaaagtggcgcaaatgatttttcggacgccgcccgatactacattccctgagcccacctgcctgtcagcatcacccccaaatgcgccacc

SEQ ID NO: 363936 - DNA, 88 bp, Homo sapiens
cagatggcggatgccctgcagtacctgcagaaggtctctggagacatcttcagcagtcaaaacttctttgagacgatgctgtcggcct

SEQ ID NO: 363937 - DNA, 82 bp, Homo sapiens
ctcttcggaaagactgttccaaaaacagtggataattttgtggccttagctacaggagagtgcacagccagagaacaacaca

SEQ ID NO: 363938 - DNA, 75 bp, Homo sapiens
gagcaagatacaggcttggaccagagctggaaatatgggaactctaatgatccaggacaaagaagttaccctgga

SEQ ID NO: 363939 - DNA, 100 bp, Homo sapiens
aaggattccaagtaactcttatttggtgtccctggccagtgtccttccacctgtccacaagcatggggaacatcttcgccaacctcttcaagggcctttt

SEQ ID NO: 363940 - DNA, 95 bp, Homo sapiens
acagattgtcccccggccttcttcccgctggccgccatctgctgcagactggagcctgagagcaggtgcttgaggaatccaaagccctcgtgcgc

SEQ ID NO: 363941 - DNA, 89 bp, Homo sapiens
tctcaggcttactgtggatctggattctaaggcaacacttccttgaagaaacaagcttacagcatgttctgtactattcaagacagtgc

SEQ ID NO: 363942 - DNA, 75 bp, Homo sapiens
ggtgacggtggcgccgcccggggcgaggcagggccagcagcaggcgggaggtagctttgcagtttggggagggct

SEQ ID NO: 363943 - DNA, 100 bp, Homo sapiens
ctgtaaatggtaaacccatgctaggagttatacataagccattttccgaatatacagtatccagtccagccagaagaagagccaaaagctctcagcacct

SEQ ID NO: 363944 - DNA, 75 bp, Homo sapiens
ggctgtgcgcatgcagcacctggatattatcaactcactggtaacaacagtattcatgctcatcgtatctgtgtt

SEQ ID NO: 363945 - DNA, 75 bp, Homo sapiens
ttgagaggtcacttctgcctttccagtgacaaaatggtgtgttcaaatctgaacatcaatgatgtactagggaac

SEQ ID NO: 363946 - DNA, 100 bp, Homo sapiens
ctccggagggcgagggttaaaaattttaacttctagtcatggcgaatgatcgcaggagagcacagactggaccctgctacgatctctcttggagtggatc

SEQ ID NO: 363947 - DNA, 78 bp, Homo sapiens
ggcaagggcaacttcgctgtggtgaagctggggcggcaccggatcaccaagacggagcttccatgcctatggctgttc

SEQ ID NO: 363948 - DNA, 90 bp, Homo sapiens
ctagaaaggaatgatagctggggttcttttgacctgagggctgctattgtatatcacactaaaggtttccttaatgacaacaaaaaaggg

SEQ ID NO: 363949 - DNA, 83 bp, Homo sapiens
agcataagaccacaaaaagaaggagacttcagaaaggaggaactgtggctgcaccatctgtcttcatcttcccgccatctgat

SEQ ID NO: 363950 - DNA, 83 bp, Homo sapiens
caaggccaaatgggacgcatggaatgcccttggcagcctgcccaagtgagaaatgttttagatgaagataatgataatgttgg

SEQ ID NO: 363951 - DNA, 98 bp, Homo sapiens
agaaagtgaagctgtttcgggccagcgacccgctgctcagcgtcctcatgtggggggtaaaccactcgtttgtgggcatcacctatgccctgaccgtt

SEQ ID NO: 363952 - DNA, 76 bp, Homo sapiens
ttggaatacaagatggttgccgggtcatgttaattgggaaaaagatcagcacttgactgtttattttcaaatctca

SEQ ID NO: 363953 - DNA, 75 bp, Homo sapiens
agctccaggggactgagcctcggccctccaggctcctggagtccatgatccctatcaagatggtcaacttccccc

SEQ ID NO: 363954 - DNA, 75 bp, Homo sapiens
aactataatataaccacagtggaaaactttcaacatttcatggatagaataaggagtgggaatagctttgcgaaa

SEQ ID NO: 363955 - DNA, 83 bp, Homo sapiens
gagttctctggaccttccaccccgacggggacgctggagtttgaaggagcgagcccagggcgtggtgctgaaagtgctcacaa

SEQ ID NO: 363956 - DNA, 100 bp, Homo sapiens
gcgactgaggccggacggggcggacggcgacgcagcccgcggcagaaggttctgagtcgtataagtcatctgcaggaagcgctgagcagacggcaccagg

SEQ ID NO: 363957 - DNA, 110 bp, Homo sapiens
cagccacctgcctggcagtttgcacacctgtaaactgaagctgcaggaggaccggcgacagcaagcgctaagctgcaacgaaaacgacgcagagcacctggaccgtgacc

SEQ ID NO: 363958 - DNA, 127 bp, Homo sapiens
ggggttctccgggagagggggagtgcgcggcggccgcagctgccacaaaccaggtgctggagaatctggtaaaagcaccattgtgaagcagatgaggatcctgcatgttaatgggtttaatggagag

SEQ ID NO: 363959 - DNA, 100 bp, Homo sapiens
aggtgaagtccacaatcaagttccaaatgaagaagcctctctgccagcaccctgtccatgtcatctgggagcagcctgggttccctggcatcgagtcggg

SEQ ID NO: 363960 - DNA, 98 bp, Homo sapiens
tttggtagagaagaatgaacattgtattgagaacaatatagatttgcaggttcgtattcaagagacccaagctgagcttcctcgagggagtatccccc

SEQ ID NO: 363961 - DNA, 82 bp, Homo sapiens
ctctgctcctgatttttgctaacaaacaggtggcttctggcacagcagcttaattgaccggaacctcattgattattttgtt

SEQ ID NO: 363962 - DNA, 83 bp, Homo sapiens
cagaagtccagagctgaggactgcctgtttgcaggaacatcatttacagcgagcaatttcagcacagcaagtgtttagagaaa

SEQ ID NO: 363963 - DNA, 51 bp, Homo sapiens
atcgtcgagaagcctatcatcggtcagcccaaggccaaccccactgtcact

SEQ ID NO: 363964 - DNA, 74 bp, Homo sapiens
gtgaactgtgaggagttcgccgagttccaggcctggcctccagttgggactcctccatcatcagagtctgagcc

SEQ ID NO: 363965 - DNA, 98 bp, Homo sapiens
ggggaccgccctggacatcaagattaaaagagcgaataaagtttatcacgccgggctgagtcagtgctgattctctcaaatagagcttgaaggataaa

SEQ ID NO: 363966 - DNA, 82 bp, Homo sapiens
gcgattctcagggattgatcgcctcttcagtcagagcaccataacatggtgtgggaagtgaagacaaatcagatgcctaatg

SEQ ID NO: 363967 - DNA, 98 bp, Homo sapiens
gaagatacagaaatctctgggaacactattataatgttgaaaatgagcccatgagcacaagtcagaaaaaggaaaatgtactttcatcagaagcagta

SEQ ID NO: 363968 - DNA, 101 bp, Homo sapiens
agcggattcagctaatgatgatggtcaaagaaaagatgatcacaattgaggaagcacttgctagggtgcagcggaactgctgcctgacgctctgcaacttc

SEQ ID NO: 363969 - DNA, 100 bp, Homo sapiens
gcgtgtgcggggtgcgtgggtgcctggagatgaagctggaaaggactccagaagacctttccagattcgtggttgagctgcagcagagggagcttgcctt

SEQ ID NO: 363970 - DNA, 100 bp, Homo sapiens
tcttccatctggggatggacaacctgcattggacccagctattgctgcagcatttgccaaggagacatccctcttaggaaggtgtcttgctgcaggtaac

SEQ ID NO: 363971 - DNA, 100 bp, Homo sapiens
cttgattgatatatatgctgacgaggagttcaaccaggatttgctagtccacttactgggatagcggatgcctctcaaagcagcatgcacaatgccttgc

SEQ ID NO: 363972 - DNA, 87 bp, Homo sapiens
gaaattaatgaagctcttgcagaaaatccaggacttgtaaacaaatcttgttatgaagatgatgccagaattccagaaaagttcagt

SEQ ID NO: 363973 - DNA, 50 bp, Homo sapiens
ccgcgcgcctttgtgcgcgcgccgaggcccggcgcccgcctgcccgcacc

SEQ ID NO: 363974 - DNA, 100 bp, Homo sapiens
acctgtagctaatgccttccaactggaaagacctcacttcaccttaccaggtgcaacagctgcagcccggaaagaggtgataaggaacaagatccgagca

SEQ ID NO: 363975 - DNA, 55 bp, Homo sapiens
tgccaggaacacaacctcaccttgatcagtcctggttcctctgataagatcgaca

SEQ ID NO: 363976 - DNA, 106 bp, Homo sapiens
agcaataccaccttcagtacttggcaagatttgatgctcttgtgctcagtgacatcattcaggtcaagtctggcaccatctttgacaacttcctcatcaccaacga

SEQ ID NO: 363977 - DNA, 75 bp, Homo sapiens
ctcgcctatcagactgataacaagaaggccatcacttacacttatgatttggcttccgaagatcttctcaaggaa

SEQ ID NO: 363978 - DNA, 75 bp, Homo sapiens
gacagattcgcagtggtcgcttcttctccttgatctgtgctgttctggctgctgtcactgaggtgattcgctccc

SEQ ID NO: 363979 - DNA, 83 bp, Homo sapiens
tttggctctgcgtgagtgtggtctacgagctgtttctcatctttatactcttccagccaaaacagagtggagtacgagaaaag

SEQ ID NO: 363980 - DNA, 74 bp, Homo sapiens
acgactcctcggccgagctgagtgagagtgcttgtgatttcacgtatttttgctgaactcgtaaaagagacact

SEQ ID NO: 363981 - DNA, 51 bp, Homo sapiens
cacggccagatctgccctccacaggctcctgctccagcccagcccccagag

SEQ ID NO: 363982 - DNA, 87 bp, Homo sapiens
gagtctgggtcttctacttcttcatacagtggctatgaaggcagcagataatggcagctttaaactcccagactgccgtgcagttcc

SEQ ID NO: 363983 - DNA, 75 bp, Homo sapiens
gtgggcaaactaagccgattttccggaaaaagacactcttgcactcctgtaatgagcctggcactgtgatgaaac

SEQ ID NO: 363984 - DNA, 83 bp, Homo sapiens
cccagaccgtgctgatcttcgatgagctctcggattccttatgcagagtggccgacttgaaatgcactcggtgatggaaagag

SEQ ID NO: 363985 - DNA, 58 bp, Homo sapiens
ctggctactctggccccgcaggccgggagcagagcatcagaagagctaacaattgctg

SEQ ID NO: 363986 - DNA, 50 bp, Homo sapiens
aaatggttgaaaacagatatacagagcggcactgcagaggtggagctgaa

SEQ ID NO: 363987 - DNA, 82 bp, Homo sapiens
tcgcggtgacggtggcgccgcccggggcgaggcagggccagcagcaggcgggagtgcctccggagccagcgtggtggccata

SEQ ID NO: 363988 - DNA, 82 bp, Homo sapiens
tttggggtagttaccttcctccagccctggcaggtgcccggcccgccccccaccctccggctcccagggcctgctggaggag

SEQ ID NO: 363989 - DNA, 50 bp, Homo sapiens
ggacaggccttgtccggcaataccaaggttatgaagacagtatggagttt

SEQ ID NO: 363990 - DNA, 100 bp, Homo sapiens
agaagggccagatggtgaaaactcttctctagtggacagactgatgcttagtgattccaaattatggaaaggttttaggtagaggaatttcaggaagcat

SEQ ID NO: 363991 - DNA, 98 bp, Homo sapiens
agtactcttgccgctatcatacgccagctgagcagtctgagagttgatccctgaattttattatctccctgagatgtttgtcaacttcaataattata

SEQ ID NO: 363992 - DNA, 101 bp, Homo sapiens
gcgtctctctgctgcggcgcggggaccgctgtgctctcggctgcactccccgaaagtgcggcagaggtgtcaccgatgtcgtcatcaccagggaggaagcg

SEQ ID NO: 363993 - DNA, 73 bp, Homo sapiens
gagttgtaagacgttcatcgccgtgttatccttgagtaaagtgtgaagcctcagtttaggtcatctggtggtt

SEQ ID NO: 363994 - DNA, 83 bp, Homo sapiens
ggatgaacatggccgagcttactatgaattccgagaggaggcttaccacagccgtatcagcaaacctggtatcatgaaggacc

SEQ ID NO: 363995 - DNA, 100 bp, Homo sapiens
ccacaagcccaggagaaattccaggatctgggtgctgcttatgagatctcactgatgaaaaggcctccaggtttttcacctttccgatcatcacgaatag

SEQ ID NO: 363996 - DNA, 75 bp, Homo sapiens
gcagttggttgggacccgctccaaccctcggaaacttccattttagaagaatacagtatcaattggactcagaag

SEQ ID NO: 363997 - DNA, 100 bp, Homo sapiens
gccagaaatgtacacacaggagagctggctgcagtaaaaatcattaaattggagcctggattatcattggcaatggcgttcattccttacgagtggcttt

SEQ ID NO: 363998 - DNA, 75 bp, Homo sapiens
gtcctcgcttgcagttcagcgaccacgcggaaggagagttttacatggaagtggcttacagaaacttggcgctga

SEQ ID NO: 363999 - DNA, 100 bp, Homo sapiens
ttatcctctgaggaaactggagggaaggaggaaagaatggatggagatagagatggatcctgtgcaaaaagcggttattaaccatacatttggagtatcc

SEQ ID NO: 364000 - DNA, 90 bp, Homo sapiens
aaaatgcactcggatgccgccgctgtcaggctccacgtgttccccacgtttgtggcgtacgagctcacggtgctggtgttcctcaccttg

SEQ ID NO: 364001 - DNA, 100 bp, Homo sapiens
cacaagggcagtcaccatgaaaggtgcagctaaatcaagtccagcagctaaaccaggatccacaccttctcgaccctcatcagccaaaagggcttcttcc

SEQ ID NO: 364002 - DNA, 100 bp, Homo sapiens
cccgactccagtgctgcctgaggggcgccggagccactcggcctgtaaccctgagatcacagatgcaggcattggatacctcttttcttttaggaaacta

SEQ ID NO: 364003 - DNA, 100 bp, Homo sapiens
agccttctcagcaccactgcagaggacagccttgtgctggcctgtgggcggccccaagcaacagcagtgtacaaggtgtcagagtatgcacggcgctttg

SEQ ID NO: 364004 - DNA, 49 bp, Homo sapiens
agtccggacatctgaaacttgatttgttgacaagaataggagaagcaac

SEQ ID NO: 364005 - DNA, 75 bp, Homo sapiens
gaaagttcatctagaaatctcaaagccatgtctcaggtcctaaaaacatcctgagtttctttggcctgccagaaa

SEQ ID NO: 364006 - DNA, 83 bp, Homo sapiens
ctcctgctggatggcaacatggacatcaagctggcagttatctccagaagaagaagagaaaaggagaatccgaagggaaagga

SEQ ID NO: 364007 - DNA, 50 bp, Homo sapiens
agagctgaacattactcttccagaagaggacaagtgttggacagccggag

SEQ ID NO: 364008 - DNA, 81 bp, Homo sapiens
ccgccgccaccaccaccgccgctgccccggctgcctcctccctgaggttttgagcaaaattttggactgtgaagcaaggca

SEQ ID NO: 364009 - DNA, 100 bp, Homo sapiens
atcggggcctttatttctcgtcggcggcgccctgcaccgcgcctcgcaaagtactccaaagattcaggtttactcacgtcatccagcagagaatggaaag

SEQ ID NO: 364010 - DNA, 88 bp, Homo sapiens
ctaggctcaaaccatcctcccacctcagcctcccaagtagctgggactaagattactgacagccctgtcctaggagcacaacgtccga

SEQ ID NO: 364011 - DNA, 101 bp, Homo sapiens
gtggggtgcacgcttcgggttggtgtcatggcagctgcggggagccgcaagagcattccaaaatatgcccggtgctatccgcccagctgctcctagaccac

SEQ ID NO: 364012 - DNA, 112 bp, Homo sapiens
cccagcgcctgaagtcacccggaattgggaagtgctcagaagcttacaaagctgcctcgagactctgtggcaacagcatccgggccactactagtcgaagttgccaaaactc

SEQ ID NO: 364013 - DNA, 73 bp, Homo sapiens
ctctttgcgccgggaaccgataaaggtccctggggggtgatgttgcctctgatggtgacttcctcatctttga

SEQ ID NO: 364014 - DNA, 74 bp, Homo sapiens
gcgagctcctgggcatcccgctggaccaggacttcagaaatgggcttgggaaccagctgagttcaggatcccac

SEQ ID NO: 364015 - DNA, 98 bp, Homo sapiens
ttgcctctggttcagctcatacaacagcttcttaggtatcggctgtcggatgagggcgagtggctggtgagggagttgaacctcccagtggacaggac

SEQ ID NO: 364016 - DNA, 89 bp, Homo sapiens
tgactgccccgcatcaccggagcgtcccagctgcgaggaggccaaaggatgccattcgagccctgaagaagcggctcaacgggaaccgg

SEQ ID NO: 364017 - DNA, 75 bp, Homo sapiens
ccttgcccatgtctcacgcggattgtgaagatggaaagggtccaacccctggaagagaatgtgggaaatgcagcc

SEQ ID NO: 364018 - DNA, 98 bp, Homo sapiens
ctgaggcggcgagagatggtcaggtctggagctcgaccgggccagatccagtctcccactttcatgcctctgatcatgtgcccaagccaggagtgcca

SEQ ID NO: 364019 - DNA, 50 bp, Homo sapiens
ccagagtccgcggccggggcgcgggagactgcggcatgaatgtgcaccat

SEQ ID NO: 364020 - DNA, 100 bp, Homo sapiens
gtgaggtcatcacggcgcgacgacgagctgcagttgtgggcaccttgtatgcgccccccaatcagccatgagtattatgacccggcggagtttatggagg

SEQ ID NO: 364021 - DNA, 83 bp, Homo sapiens
agctgctggataattttatcccagggtggctgaatcacggaatgtttgaaattgttcctgaagatgacccccagaatgccatt

SEQ ID NO: 364022 - DNA, 75 bp, Homo sapiens
cgccaccacccactccggacacagatttggtcgtattgggcgcctggtcaccagggctgcttttaactctggtaa

SEQ ID NO: 364023 - DNA, 51 bp, Homo sapiens
cagtcaagtatgtcccaaacgtctgttcttgatcaatatgaacgagaagga

SEQ ID NO: 364024 - DNA, 99 bp, Homo sapiens
acagcaggcaaagtgtttgaaaatcaaaggaaaagaagatattgacttggataatctcttcagaggcataaaggcatcacaagtggtcgggctcagcta

SEQ ID NO: 364025 - DNA, 83 bp, Homo sapiens
gcctgccttctgccgccggccggcgcgtcgtccccacagtgcctccggagccagcgtggtggccatagacaacaagatcgaac

SEQ ID NO: 364026 - DNA, 83 bp, Homo sapiens
aaaatttgtctgcaaacctggagccagaaacattaccgtcatattccacccattactaaggtgacttaagagattaaaattaa

SEQ ID NO: 364027 - DNA, 82 bp, Homo sapiens
agccaccctcgctccctctgctcttcctcccttcgctcgcaccatgatcagtcgcatcgaatacattcattcaaagaacttc

SEQ ID NO: 364028 - DNA, 101 bp, Homo sapiens
tctctttcttctatttcttgtggatattatggctaataacacaacaagtttagggagtccatggccagaaaacttttgggtggaaggagaacatgaatctc

SEQ ID NO: 364029 - DNA, 101 bp, Homo sapiens
tcctccgtttagtctcctcctcggcgggagccctcgcgacgcgcccggcccggagcccccagcgcagcggccgcgaaatatggctacacacacctttctgc

SEQ ID NO: 364030 - DNA, 75 bp, Homo sapiens
catgatggagtacctgttgcagggcttcagcaaccaggagggattgactgagatcttaacaacagcagcaacgat

SEQ ID NO: 364031 - DNA, 100 bp, Homo sapiens
tatttctgcttactcacttgtagatccagagaaagccaaagcttcttcagattattaaggaatcccagcagcagcatggtttacggcatggagattttca

SEQ ID NO: 364032 - DNA, 102 bp, Homo sapiens
cagcccaccgacatggcccggaggcagcagaaggctcttgcagccaatgccggaacaggatttgctgttgctgagcctcaaatcgcaatgttttgtgggaag

SEQ ID NO: 364033 - DNA, 101 bp, Homo sapiens
ggacctttgagcatacaccgagagagtgaggagccagacgacaagcacacactatggcgctgaaacggattaataagcctccggcacccacaggccctgag

SEQ ID NO: 364034 - DNA, 98 bp, Homo sapiens
tgcaaattacgatttgtacaaaaacgatgcaaccacaggtgatttggcttctgcacagttaggaggagcaccaaaccgatgggaggttttgtcagcca

SEQ ID NO: 364035 - DNA, 100 bp, Homo sapiens
ctggagatgattgagccgcgcacgctacagtacaagtttaagtgctgtggggctgctaactacacagattgggagaaaatcccttccatgtcgaagaacc

SEQ ID NO: 364036 - DNA, 100 bp, Homo sapiens
gagctccagccgaaggagaaggggggctgtctccaagacattaaaattgattggaatcacattaccctggagaacatctcgtctggctcatcattaaatg

SEQ ID NO: 364037 - DNA, 75 bp, Homo sapiens
tttaatgatgaaactaatgtgaggtggtatcacggaaaacttgacagaacgatagcagaagaacgcctcaggcag

SEQ ID NO: 364038 - DNA, 75 bp, Homo sapiens
ccaatacttcggctactcgggagccttcaagaacagatggagtcggataactgttcaggaggagatgatgactgg

SEQ ID NO: 364039 - DNA, 82 bp, Homo sapiens
ggggccgcggccggaccgagcgcctcgacctcggtctgagtgagacggtttaagcggaagcatcttactgccattgactgcc

SEQ ID NO: 364040 - DNA, 83 bp, Homo sapiens
cctgggatgccttcgcgtcttctcttccctcgggtgacttgagataccgaaactggcaacacccagagacatttccctcctag

SEQ ID NO: 364041 - DNA, 101 bp, Homo sapiens
tgaaaaatggggattatattactgtaaaagttgcacttaattcaaatgaagaatataacctggaccaagagtagagacggggtttcaccttgttagccagg

SEQ ID NO: 364042 - DNA, 96 bp, Homo sapiens
ggagaaagtgtttcatcacgggccctctccttctgaatactgagataattttatggagaaaagctcctgaaaaactgaggaaacagagaacaaact

SEQ ID NO: 364043 - DNA, 82 bp, Homo sapiens
cttatcccggagagctgacaatgatgaatctcagtgctatacttggtagatcagaaactcaggagtgtcttttctttaatgc

SEQ ID NO: 364044 - DNA, 90 bp, Homo sapiens
cttgttggatgaattaatgaaccttgacccacaccaagagaggccaatgagacttgaaccctgagcctaagttgtcaccagcaggactga

SEQ ID NO: 364045 - DNA, 75 bp, Homo sapiens
cagagctagactacaccctcatgagggtctgcaagcagatgataaaggtctctgcaatgaaatgtggcctcttgc

SEQ ID NO: 364046 - DNA, 100 bp, Homo sapiens
gacgggatgcatgggtcacatagacaagcctcgagaatgggagccgttacatttttgcactgcctggtaacaaggcatctgtgggaaaactagaattgca

SEQ ID NO: 364047 - DNA, 80 bp, Homo sapiens
tcttcagtacaatgtcaccctcccagcaacaggtggtgttcccactgatgaagagcaggcgactgggttggagagggaga

SEQ ID NO: 364048 - DNA, 100 bp, Homo sapiens
gaaattcatccagagggtccaggccatgaagagtcctgaccacaatggggaggacaacttcgcccgggacttcatgatttgataatgggctgcattaaaa

SEQ ID NO: 364049 - DNA, 101 bp, Homo sapiens
ctcaccttctgctaccaccgtagggacacagacccttccacatagcagttctggcttcctcgattctgcatatccttcctgggcatcagtaaataggggaa

SEQ ID NO: 364050 - DNA, 100 bp, Homo sapiens
agcctggtgagacggagctatcggcgccgcggcaagagccaggaaacccagcgtttgctggcagaaccagttcctggcatcaaagccgaaccagatgaga

SEQ ID NO: 364051 - DNA, 98 bp, Homo sapiens
gaagagcttactgtcacagcaactcctttgcaagatgccccggtctcctctgagcctccggcctccataagacccaaaacagatgacacctcttccca

SEQ ID NO: 364052 - DNA, 98 bp, Homo sapiens
ctgaaaggagagacacttgtgaacattcaagtgaagcaaaagcctttcatgattatgggcgccctcgcgcgacgtcctgctggtctctgccatcatca

SEQ ID NO: 364053 - DNA, 101 bp, Homo sapiens
tggtcttgcagctggaaaaggggtgattgttgcaaagagcaaagaagaggcctgcaaagctgtacaagagatcatgcaggcaaacctgtatgtgggactgg

SEQ ID NO: 364054 - DNA, 74 bp, Homo sapiens
ggcggccgcggggcccgagcgcaggtcgcaatggaagaagagatcgccgcgctggtcattgacaatggctccgg

SEQ ID NO: 364055 - DNA, 101 bp, Homo sapiens
ctcttcttcttctgcaacacggccactgtgtacaagatatgtgcctggatgcagctcacctccgaaatcacaccagcagcattcagcactttaactacggc

SEQ ID NO: 364056 - DNA, 100 bp, Homo sapiens
tgggacccctgctagaagagaagggcaaacgggtaatcgccaacccacccaaattccaagatgagatgggattctccaacatggaagatgatggcccaga

SEQ ID NO: 364057 - DNA, 101 bp, Homo sapiens
acagggctccagaaattatgttgaattccaagatgatgaagaacgagagcttcaaatggatcctgcagactatggaaagcaacatttcaatgatgtccttt

SEQ ID NO: 364058 - DNA, 100 bp, Homo sapiens
cgttgtcgtagctggtgggattcatgacgtcatagcagatgagcacgaggggccatttgctacctttaagatgcagtatgatcgaacttgtgagtggaca

SEQ ID NO: 364059 - DNA, 74 bp, Homo sapiens
aacgcattgccgccggtcctgaccaccgtgaacggacagtcccccccagaagttggtgagatggcaaagcagta

SEQ ID NO: 364060 - DNA, 100 bp, Homo sapiens
gagaactactgctctaaactggaaagcgtcgagaagagacactccagccacccttcaccagcacctgtcctcccggtgaatgccctgggacatacccgca

SEQ ID NO: 364061 - DNA, 100 bp, Homo sapiens
tcagctagttgtgatggatctgtcagagtgtggcaaatttcagatcagaagacgtgaacgatcaagagagagggaccatagtagatcacgagaaaagagt

SEQ ID NO: 364062 - DNA, 83 bp, Homo sapiens
gcagttggatggcggtgactgcgtggtcagcccaaggccaaccccactgtcactctgttcccgccctcctctgaggagctcca

SEQ ID NO: 364063 - DNA, 75 bp, Homo sapiens
tccacacagaatttcagaatttattggatgctgacaaaaatgaaggttttaaaatcaaagatgggaaaatcggag

SEQ ID NO: 364064 - DNA, 100 bp, Homo sapiens
ggggttggtgtgattagcttcgcagtctggaaagctttaggagttcacagtaatcgagagctccagatcatgagaaagctagatcactgtaacatagtcc

SEQ ID NO: 364065 - DNA, 98 bp, Homo sapiens
tgcagccctatgagcatctcatctgcggcaagaacgccaatgtttctctgcaggtggatattgttcccagccagggggagatcagcgttggagagtcc

SEQ ID NO: 364066 - DNA, 89 bp, Homo sapiens
ctgggattcgcgctgctgggcacccacggagcctccggggctgcaagagtgagccatggagctacgtgtggggaacaagtaccgcctgg

SEQ ID NO: 364067 - DNA, 80 bp, Homo sapiens
ctcctcggagtccttggggacggagcagcgcgtcgtggggcgagcggcaggtctcggcgcggaagatggccggcggcgtg

SEQ ID NO: 364068 - DNA, 50 bp, Homo sapiens
agtggcagaagattttaattagggcaattgaaggaacagactaaaaatcg

SEQ ID NO: 364069 - DNA, 82 bp, Homo sapiens
cctcaggacacggcctacaacaccaagaggttagctttatacgtctacgaatatttactgcacgtaggagcacagaaatctg

SEQ ID NO: 364070 - DNA, 95 bp, Homo sapiens
gacgcggagccgtgggacgagggcggcgaggcaaggtctcactcggtcatccaggttggaatgcagtggtgtgatcacagttcactgtaaactca

SEQ ID NO: 364071 - DNA, 100 bp, Homo sapiens
gaaaaccttatcagcactatttgaaacttttatctcatctggcttggcgcctgaggttctcccattaggatttctctctgatcaaacggacagttcagga

SEQ ID NO: 364072 - DNA, 75 bp, Homo sapiens
cgactactagaaggggaggggagtggaaaggctctcagtgaaaaagttataggatattccaagataaatgcatga

SEQ ID NO: 364073 - DNA, 82 bp, Homo sapiens
gaactggcgtcacgtttacaaggtacatgtcccagagcaagcacacggaggcccgggagctcatgtactcgggagccctgct

SEQ ID NO: 364074 - DNA, 74 bp, Homo sapiens
ccaccaaccgcctcacccagcgcatcatccccagactaccaccctcatcatcagtatctttggtctgtgagctg

SEQ ID NO: 364075 - DNA, 100 bp, Homo sapiens
ttgaatcatgaagctactaaccagagccggctctttctcgcctgtcccaagccagatgatttaccattttccacagtggtcccgttaaaaacattctatg

SEQ ID NO: 364076 - DNA, 101 bp, Homo sapiens
cttgacctttaggtgcttttatattcatctcaaaaacaaaattctgaactcaggacttggcaagcacagtgaacgtgggtcaactaatcaaagaagtgaaa

SEQ ID NO: 364077 - DNA, 100 bp, Homo sapiens
aacaagtgcgacctctcagatattaggtactgatggctttctaccagctggagatcctggctgaggaaacaattctgagctggttcagccaaagagatac

SEQ ID NO: 364078 - DNA, 90 bp, Homo sapiens
cctgtcttcagatcttcacagcacagttcctgggaaggtggagccaccagcctctccttgaccattcctcaagaattttgtatccaaggc

SEQ ID NO: 364079 - DNA, 83 bp, Homo sapiens
gctggaccgtcgccttgctcctcgccgcggcggggactgcaggtgaatgactggcaggaggactgggtcgtgttctatgcccg

SEQ ID NO: 364080 - DNA, 90 bp, Homo sapiens
cagtggaagatgatcacatcccaggataccatacttgcagagctccttcagatacataaagaacacattgtaggataccatgaacatgat

SEQ ID NO: 364081 - DNA, 100 bp, Homo sapiens
cgacgaccacgtgcggaggaaggactcctcgctctatatagatcttgtagaaaatttcagctgtagcccttggactagaagctgaaataacagaagctgt

SEQ ID NO: 364082 - DNA, 75 bp, Homo sapiens
tcggggcggcggactggctcgcggtgcagatacagatccacgggttttagaaaaacaagaattacagcagccaac

SEQ ID NO: 364083 - DNA, 100 bp, Homo sapiens
gcccgcacctcgctagcgttcccctgtcttccccaacgccccggagccgccggccgctagcgtcagcgccagccaggtacaagaaaattccccaggacac

SEQ ID NO: 364084 - DNA, 75 bp, Homo sapiens
tggagaacatctcgctgtcggtgaagaaggctgatgaattcatccgagcaaatgccaccaacaagctgacagtca

SEQ ID NO: 364085 - DNA, 78 bp, Homo sapiens
gagcgccagagaggacgtttccaactcaaattggagtcattcgttgcccagtttgcagccaagaatgtgcagagagac

SEQ ID NO: 364086 - DNA, 101 bp, Homo sapiens
ctcacagcttttgtcagaagtgtattgataaatggtttgatgagaagagggcagtgcagcagctgagagcatgtggtgtcctggaaaccatccgaatcagt

SEQ ID NO: 364087 - DNA, 100 bp, Homo sapiens
cttttatataaaggatcccaaaaaggctctccaaggcttttttgaccgagaagtttcctagaggaagttctggcttctggactgcacagccgaagcaagg

SEQ ID NO: 364088 - DNA, 75 bp, Homo sapiens
aaggtggacaatcacctttttaacaagttgctaggaagaggctcaatgtttgtgttttcaccagatcagtttcag

SEQ ID NO: 364089 - DNA, 100 bp, Homo sapiens
ttttgaagaggaaatgaagggtattgccgctgttactgatatacctttagacatatggaaagttgatcatgtgctggagcgcttgcagagtgaaagcctg

SEQ ID NO: 364090 - DNA, 100 bp, Homo sapiens
ggagggtggacgaagctctctccagaaagacatcctgagaggacttggcaggcaagcactatggagtgtacagctgcgaggggtgcaagggcttcttcaa

SEQ ID NO: 364091 - DNA, 100 bp, Homo sapiens
caggaagggagatgcagcatcccagtttttggtcttctgtcaaaaacacagggatgagtctcagaggagcagtgcctgtaccagatctacattgatgagt

SEQ ID NO: 364092 - DNA, 83 bp, Homo sapiens
cttgggacccaccgctgccctcagctccgagtccagggcgagggctagttgcacatagtgatttagatgaaagagctattgaa

SEQ ID NO: 364093 - DNA, 75 bp, Homo sapiens
gggtcttctgacgtgccgggcgggaagagttcaagctgaagaagatgtggaaaagtcccaatggaactatccgga

SEQ ID NO: 364094 - DNA, 99 bp, Homo sapiens
tcagcctttgaaaaaatgtctgtcacatatgatgattccgttggagtagaagtgtccagcgacagcttctgggagccggatcgagctgggagatgtgac

SEQ ID NO: 364095 - DNA, 75 bp, Homo sapiens
gggcgcatatcctgggtagcctctaggaagcgctagacacatattttcagctgaactctcatctctcaacactgg

SEQ ID NO: 364096 - DNA, 137 bp, Homo sapiens
ttggatcttggaggtggtgtaaaggaagctcaagtatatcaagcattcaaattgctcacagctgatcctaagcatccaccagctgaggaacaaagtatcagaggagcatgatgttctcaggaagaaagagatggagt

SEQ ID NO: 364097 - DNA, 82 bp, Homo sapiens
gaggaaattaaccggagaatggcagacgacaataagctcttcagggaggaattcaacgaatgtatcctgtcaggtataatgt

SEQ ID NO: 364098 - DNA, 100 bp, Homo sapiens
tgtgagcctggactcgccctcctatgtcctgtacaggaaattgcagaggccgtcaacatggaaaagcagccccagaacagcaggagaggcctcgcccccc

SEQ ID NO: 364099 - DNA, 51 bp, Homo sapiens
cgggcggcgccagagctccatgggacagttgaatgcaatgataacagaaag

SEQ ID NO: 364100 - DNA, 82 bp, Homo sapiens
agatctttggctggtgccccgtggaggtggatgacgacatcccgcgcactgcctgctgggctgggacatttttcctccgaag

SEQ ID NO: 364101 - DNA, 100 bp, Homo sapiens
gtcgaagcgagggtctgaagttcacgactactagaaggggaggggagtggaaaggctctcagtgaaaaagttattcattttggacctggagaaagttctt

SEQ ID NO: 364102 - DNA, 76 bp, Homo sapiens
ggattataggcgtgagccaccgtgcctggctgaagactcttgtgactttacttcccatggaacactaatcatctgt

SEQ ID NO: 364103 - DNA, 83 bp, Homo sapiens
gaagacatcaagggaaaatggggtgaggaagattttgaagacaatcgtcacttatacagtcgtgagatggagaataaagaaac

SEQ ID NO: 364104 - DNA, 82 bp, Homo sapiens
ccagaagatgagaccgcaattcgagaatcaaagggccgggagcgatggtggctattatcatggaaaactaatttttcccaga

SEQ ID NO: 364105 - DNA, 100 bp, Homo sapiens
cggaggccgcggaggctcctcggtccttcagcacccctcggcccgacgcacccacgcccctcaccccccgagagccgagcagctatcccacagcagagag

SEQ ID NO: 364106 - DNA, 83 bp, Homo sapiens
ggactagggattaacacaaaaacaacagcaacaaatctgatttaagcttcacacatcatgatgccttcttctgtagagtgggc

SEQ ID NO: 364107 - DNA, 82 bp, Homo sapiens
gtccgagcccttcctgaccccgtacctgctggggccggacaagaacctgaccgagagggagatttgggaatggatgatgaag

SEQ ID NO: 364108 - DNA, 82 bp, Homo sapiens
tggctgaacactgggaaggaactggtacttggagtctggacatctgaaacttgagttgcatgctgagaatttgaaaaatgaa

SEQ ID NO: 364109 - DNA, 100 bp, Homo sapiens
taacacatcatgaaggctagtttggatgtggaggggaatagactccatctatccatatgaggatttttcaagccacattcaattgataggatgaaaaaat

SEQ ID NO: 364110 - DNA, 100 bp, Homo sapiens
attcctgaggccgtgtttgtggcctggcgcaagcgctggtttgtcctccggcgaggccgcatgagcggcaaccccgatgtcttggagtactacaggaaca

SEQ ID NO: 364111 - DNA, 100 bp, Homo sapiens
ctcgaagctggctcagcctttgttcaggaaccggtgggtgtgtacactggcactgagctgcagtaggatttttccttggatagtctggtctggagctggg

SEQ ID NO: 364112 - DNA, 100 bp, Homo sapiens
gttgtgagcagggtctgcacgaaataaagctcctgggcaaggggacgtctgcagctgattttcatatgagtccaacaagcaatgaagacctcaggaaaat

SEQ ID NO: 364113 - DNA, 75 bp, Homo sapiens
gggcactcttcatagttcctagacaaaggttatcctgaatacatgtctaacaattttccttgcaacgttagctgt

SEQ ID NO: 364114 - DNA, 74 bp, Homo sapiens
atctccgccaccgtcttcaggccagatcttcgtgaagactctgactggtaagaccatcaccctcgaggttgagc

SEQ ID NO: 364115 - DNA, 95 bp, Homo sapiens
cgacccgggccccgccatgtccttcttccggcggaaaggtgctgaccttaaggaaagagccaaaatgagttccagtgaagttggtccttttgtct

SEQ ID NO: 364116 - DNA, 75 bp, Homo sapiens
tagacctggaatcgcccaagtccctctactcgcgaggtccctggatggccggttgcaggtgtcccatcggaaggg

SEQ ID NO: 364117 - DNA, 100 bp, Homo sapiens
aagacgaacctgctttgaaacgccagcgactagaaatcaattgccaggatccatctataaaggttggtgttcgaggaagagacattgttgttcttggtgt

SEQ ID NO: 364118 - DNA, 100 bp, Homo sapiens
gcccagctggaaaaacggtccattggtcgcaatggaagaagagatcgccgcgctggtcattgacaatggctccggcatgtgcaaagctggttttgctggg

SEQ ID NO: 364119 - DNA, 98 bp, Homo sapiens
ggaatactcctaaccaagaagttgcccagtctgcgggccaggcatcgacatccgcaacgactatcagcagctgaagcgcctggagaactgcacggtga

SEQ ID NO: 364120 - DNA, 51 bp, Homo sapiens
aaagaagtgataggagggctctgtaggcgagcccacaccttaaccgtgctc

SEQ ID NO: 364121 - DNA, 96 bp, Homo sapiens
aagagaaacccggagggcgccgggccaggacggcaaccttcccaccctcatatccagcgtccaccgcagccgccacctcgttatgcccgagcatca

SEQ ID NO: 364122 - DNA, 90 bp, Homo sapiens
aagcggaaggtgatgcccaagatggaccaggaccaagaatcgccttcagccctgtctggtgcatccttggcagaaagtgaggaggaaaac

SEQ ID NO: 364123 - DNA, 75 bp, Homo sapiens
ctgaaggacctggaggaggaccacgcctgcatccccatcaagatgcagaggccaggatgtgggcccagccctgtg

SEQ ID NO: 364124 - DNA, 100 bp, Homo sapiens
cggaaatgtgtcatcgaaagccaggtctggagcccccaactcccttgacagtgtacgctggagcaggttccagggtggggctgccctgccgcctgcctgc

SEQ ID NO: 364125 - DNA, 50 bp, Homo sapiens
ccctgctcatcttgagtttgttcagttaagtgggcagaccaacatccacc

SEQ ID NO: 364126 - DNA, 99 bp, Homo sapiens
gtatggagcgattttgcagatgtcagccataatggcaggtgaagaaattaatgaagactatccagtagaaattcacgagtatttgtcagcgtttgagaa

SEQ ID NO: 364127 - DNA, 75 bp, Homo sapiens
caccctggctgctaaagtaaagatttgttcccgacaaggagttttctggttcagaccgtagacagagaggccgag

SEQ ID NO: 364128 - DNA, 141 bp, Homo sapiens
ggaggcaaagaagtggacagcagtgccatcgcagcacatgtgtgtggccgcctcggacaagagacccaggtactccaaagattcaggtttactcacgtcatccagcagagaatggaaagtcaaatttcctgaattgctatg

SEQ ID NO: 364129 - DNA, 87 bp, Homo sapiens
cgacgtcttgcctgtgtcccacttgttcgcggcctataggaagtggttctgaaagatggaagaattgaaagactaaagttagagctt

SEQ ID NO: 364130 - DNA, 98 bp, Homo sapiens
ttgccgccctgggcgcggccctgctcctgtcttccattgaggcagaagctcagttcctacccccggttgcgagaggagacagagcgaatcgtcaccac

SEQ ID NO: 364131 - DNA, 100 bp, Homo sapiens
gaatggacttcggaccctggcctcttgggatgcaaaggtgacgacgtcatcaggaagcaagtgcttttcctgccggtctgcagctgagcgggataagtgg

SEQ ID NO: 364132 - DNA, 76 bp, Homo sapiens
gtgacacacaaacaacttacagacttccacaagcaagtcactagaggtttgtgaagaaaattcaacctcagcaact

SEQ ID NO: 364133 - DNA, 51 bp, Homo sapiens
agaaaatgccgaaggcactcagacaggatgagtctgctccagctgacaaac

SEQ ID NO: 364134 - DNA, 75 bp, Homo sapiens
acgaaagcagtgacggaggagcttgtaccaccgattagtgggatggtttggccatgaactcagcaccagatttaa

SEQ ID NO: 364135 - DNA, 50 bp, Homo sapiens
gagatccgttggctcctggaagttcccagtgacctgacagcagaggagcg

SEQ ID NO: 364136 - DNA, 90 bp, Homo sapiens
ttgtcagatatattccgggtggtcccattcatatcagacagccttttgattgattatcaatttaccttcagcttattacaggaagatgat

SEQ ID NO: 364137 - DNA, 101 bp, Homo sapiens
gaggctatccgcagcgagatggagcagctcaaggagctgctgatgcaaggaatcccctgggctcccgtccactccactgctgaccagcccattcgcctgtg

SEQ ID NO: 364138 - DNA, 90 bp, Homo sapiens
agaacacaggacttgccccatgtgcaaatgtgacatactcaaagctttgggaattgaggtgatctgtgaaaatggttcgctattcacttg

SEQ ID NO: 364139 - DNA, 98 bp, Homo sapiens
cggggcgcgcccaccgcgccgcatccatgttcgagaagccgagatcccccgcgaggtgatcgagaggctggcccgcagtcagatccacagcatccggg

SEQ ID NO: 364140 - DNA, 90 bp, Homo sapiens
cagccactgaagatcctggtgtcgccatgggccgccgccccgcccgttggtcaaaatgcagatcttcgtgaaaacccttaccggcaagac

SEQ ID NO: 364141 - DNA, 113 bp, Homo sapiens
atgtgcaaagtagcaattaactggtctggagggtggcatcatgcaaagaaatgaagatggaacaagcttgaattcaagtatcctggcagcactccgaaaaatgcaagatgggt

SEQ ID NO: 364142 - DNA, 100 bp, Homo sapiens
ccgctgcctgcctgcctggcatctctctctcccggggttcatgtgtcacacaagtaggccttctggaaagcgtgtatgaaatgttcaggaaggatgaccc

SEQ ID NO: 364143 - DNA, 82 bp, Homo sapiens
tgaagttcgagcactaatatttaagaaagaagatgttaactttcagactaccaaaaggaagcgtggctacattaaaaataag

SEQ ID NO: 364144 - DNA, 91 bp, Homo sapiens
cttcaattttggggctccctcgggcacctccggtaccgctgcagccaccgcggcccccgcggcctcctgacaaggtgatccgggcgggccc

SEQ ID NO: 364145 - DNA, 83 bp, Homo sapiens
ggtggtgttgtcgtggccggagcggcccgcgcctgggctgccggcacttcgcggcaggcttcaacggaccacaccaaaatgcc

SEQ ID NO: 364146 - DNA, 71 bp, Homo sapiens
cgattcctcctccttggtcgccgcgtccttggctggcgtatatggctcgtggacagcagaaaattcagtct

SEQ ID NO: 364147 - DNA, 50 bp, Homo sapiens
ctcaaattctcagcaaggaacgtcatcttcagatattttggatggcagta

SEQ ID NO: 364148 - DNA, 75 bp, Homo sapiens
cttttggcccaatgaatatcaggattggattcagcatcaaaatacatctactcatattgagagctgtcgacagtt

SEQ ID NO: 364149 - DNA, 87 bp, Homo sapiens
ccatgagggaaatagcaattgatgtcccaaatatgatttgtcattaattcggaagaacagaatggctctctttcaacaattgacatg

SEQ ID NO: 364150 - DNA, 75 bp, Homo sapiens
ccctggcctccctcaccttggacacctcgcttggttctccaaggagaagtacatcctggactcatcgccagagaa

SEQ ID NO: 364151 - DNA, 115 bp, Homo sapiens
ggagcgcccggcggcggtttcggcgcgcggccgggctggcgatggaagatggaaggaaggagcgcagcggaattctcacactcaagaaagcaaatgaacttcttctgagcacagg

SEQ ID NO: 364152 - DNA, 100 bp, Homo sapiens
ctcatcccctggatgggggaccacaagatcctcatcgacaggctgcagaagatcctggcagagtctcccccacccgcccgtctggacatccagctgccaa

SEQ ID NO: 364153 - DNA, 96 bp, Homo sapiens
gaaatttgcagccaactcagatttaaagatatggctcgtggacagcagaaaattcagtctcagcagaaaaatgccaaaaagcaagctggacaaaag

SEQ ID NO: 364154 - DNA, 88 bp, Homo sapiens
cgagctgggcgacggcgccttcggcaaggtttacaagggcagcaaggagcgcttccactggcagagccacaacgtgaagcagagcggc

SEQ ID NO: 364155 - DNA, 113 bp, Homo sapiens
aactggacaatgtattactggactctgaaggccacattaaactcactgactacggcatgtgtaagaataatccagaatggctactctgatctatgttgataaggaaaatggag

SEQ ID NO: 364156 - DNA, 50 bp, Homo sapiens
aaacagagtgaactttctgccaagatgcgctcctactccaatgtggccag

SEQ ID NO: 364157 - DNA, 75 bp, Homo sapiens
aaagagtaccggatctgcatgccgctcaccgtagacgaggaatcatattgacaggtcatgaaaatgagaccaaaa

SEQ ID NO: 364158 - DNA, 106 bp, Homo sapiens
aaggaaactgccttggataatggcaaaagaagagataagaggcccattgccaggaaacccttcaaatagttggccttcacccactgaaccaagctccaaaaccggt

SEQ ID NO: 364159 - DNA, 100 bp, Homo sapiens
cagccgggaggccgaggactcggagttcacctgcaggaacttagtgatttggcccgtgaccctccagcacaatgttctgcaggtccagttggggatgata

SEQ ID NO: 364160 - DNA, 97 bp, Homo sapiens
ctggaagcacagaacggacttttcgtgtcccgctgtaaggaaacaagatggtccttaaaaccgaagaggaggacgagggaccacagagcaccagcct

SEQ ID NO: 364161 - DNA, 100 bp, Homo sapiens
tgaacctactggggacgtacaccttgaccaagggcaacgggcatgaggaggtagttgcatgcgcctgggatggacagacatatatcattgatcacaaccg

SEQ ID NO: 364162 - DNA, 82 bp, Homo sapiens
cccgggtgccgaggagcgggaagagttgctggggagcttctacctggccctctacaagcagatgagcttcctggagaagcga

SEQ ID NO: 364163 - DNA, 85 bp, Homo sapiens
accgccccggagcctcacagcctgggcatcctccatgcctcctacagcgtcaggacttcgagtaagaaggtgatttacagccagc

SEQ ID NO: 364164 - DNA, 82 bp, Homo sapiens
gagaaaaagatctcgatacttgaggaaccttcaaaggcacttcgtggggtcacaggaaatctactttcttcaatgtgttaac

SEQ ID NO: 364165 - DNA, 83 bp, Homo sapiens
cccgcaatccacgccacggaatccccgagccttatgccagcctggaccatcttggaggcagtgtaggatcatggaagaacttt

SEQ ID NO: 364166 - DNA, 50 bp, Homo sapiens
tcatccagctgatgcccttcttcgtaaccacaatggacactgccagccat

SEQ ID NO: 364167 - DNA, 87 bp, Homo sapiens
gagaacaaagctgaggtccagatgaaagagaagtttctggtcactccccaggattatgcgcggtagatgacattaatgctgataaga

SEQ ID NO: 364168 - DNA, 100 bp, Homo sapiens
tcatgttctatgtgccaaatgtgtcatggcttcagcaagaggccacaaggaaaatgtttataggaggccttagctgggacactacaaagaaagatctgaa

SEQ ID NO: 364169 - DNA, 51 bp, Homo sapiens
ctctaggccttttagaaaacatgcggacaaacataaattgcagagattcct

SEQ ID NO: 364170 - DNA, 49 bp, Homo sapiens
attctgacagggatgttgcgaaggttttcatactctgcacaccatcctc

SEQ ID NO: 364171 - DNA, 98 bp, Homo sapiens
cgttccccgccaaccgcaaccattgacgccatgtcgggttattcgagtgaccgagaccgcggccgggaccgagggggaataatcctccaggctgagag

SEQ ID NO: 364172 - DNA, 51 bp, Homo sapiens
gaagtagatggagcagatgatgtcttcggataaactcaaccaactgtcaac

SEQ ID NO: 364173 - DNA, 82 bp, Homo sapiens
gggaaccctggtcaccgtctcctcaggcctacagattcctggaggagatgcggcggcggcttcccttggccaacatgtccta

SEQ ID NO: 364174 - DNA, 82 bp, Homo sapiens
ccccgactcgggcttggcgcggcggccagaggaaccccgaggtgagaagcgccactgctttgatgtcaactataattcaagt

SEQ ID NO: 364175 - DNA, 98 bp, Homo sapiens
ggaataggtgtatcaagtaatggtgcaaagcctgaagatagtgatgaggaagaagaagacactgaaaatgttgaggctgcaagtagtgggaaagtcac

SEQ ID NO: 364176 - DNA, 75 bp, Homo sapiens
cagtgaccggagctcgggcgggtcctacagagacagttatgacagttacggagccgaaccaagaacatgatgtgg

SEQ ID NO: 364177 - DNA, 74 bp, Homo sapiens
cacagaggacaatgcttcccaggctcgagttgatgcccacaggtatggcatttcaaatatagatacaaccattg

SEQ ID NO: 364178 - DNA, 75 bp, Homo sapiens
tcctgtacagcctgcagaactgaggcattgaaattttcagcagagaccttccaaggacatattgcaggattctgt

SEQ ID NO: 364179 - DNA, 100 bp, Homo sapiens
caggtcttagaggctcccggagtgtatgtctttggagaacttctggagctggccaacgtgcaggagaaaatatttacaccagcagctccagttcatacca

SEQ ID NO: 364180 - DNA, 71 bp, Homo sapiens
gcggccagttaaacctgtcgggtagaaacctcagtgaaggaaatactcctttacaccttgctgtgatgtta

SEQ ID NO: 364181 - DNA, 82 bp, Homo sapiens
ctaggatgatcgaggttgtttgcaacgaccgtctggggaagaaggtccgcgttaaatccagcagaaaactgagcttccggtc

SEQ ID NO: 364182 - DNA, 51 bp, Homo sapiens
ctccttttccctctccctttccctaaggtgaatctggattgggaaagtcga

SEQ ID NO: 364183 - DNA, 82 bp, Homo sapiens
ggagcggcagggcatgaaggtccaggcgctggccagacaatgcagatcttcgtgaagactctgactggtaagaccatcaccc

SEQ ID NO: 364184 - DNA, 50 bp, Homo sapiens
agagctacagagcatgctccaaagaagagataccatggagtagtttgaaa

SEQ ID NO: 364185 - DNA, 88 bp, Homo sapiens
aggtttcacctgctttgcatcagcatgtgcagtctttgccaacaaaaaaaattaccaagaaacctattccagatgagcacctcattct

SEQ ID NO: 364186 - DNA, 100 bp, Homo sapiens
cctcggcactgtattctttacctgcttcccaatcccactgatgaggatcagcccatggtgctgagcgccgtcctcaaggatctctaccacctgctgaagc

SEQ ID NO: 364187 - DNA, 74 bp, Homo sapiens
gaggtggagcacctgaagagatgccagcagcagccccccgtggcccagcaaccgcaggcacaggggccgccggc

SEQ ID NO: 364188 - DNA, 75 bp, Homo sapiens
aattaaaagaggagcagcatggcatttcagtcactggtttgcagagtccaggtgagacctggaaccccttcaaat

SEQ ID NO: 364189 - DNA, 111 bp, Homo sapiens
gaagttccctgatgatcagactcagaaaattttggaaagagaagatgctcggctgatggatgtgaggtctggaacagctgcagccattttgccaccatgggaaacctggga

SEQ ID NO: 364190 - DNA, 106 bp, Homo sapiens
ttcattcagatgtggtggaatatgccaaggaaaaactggagagcttcatcaaaaatagtgatagctttgataagtcgcgtctccttcttcacctcggggtccgaga

SEQ ID NO: 364191 - DNA, 100 bp, Homo sapiens
ccccgtgcccgggagggagcgggcgcaccgcggcccccaggacacgcgctattcaagaaatccatggtgaaaggtttggattcctatgaagaaaaggagg

SEQ ID NO: 364192 - DNA, 100 bp, Homo sapiens
gacatcatgcaaaagcaaagaccagaaagagtgtctcatcttcttcaagataacttgccaaaatattcaggaattgtagggcctcaacctatagactttg

SEQ ID NO: 364193 - DNA, 101 bp, Homo sapiens
ggaagcgctatccgagcaggatgcggttcgtggttgccttggtcctcctgaacgtcgcagcggcggaccgcatggacctggaggagcccgaaaaagtggac

SEQ ID NO: 364194 - DNA, 100 bp, Homo sapiens
caaagtcatcggagagtttctgtccaaccagcagccatacccccagttcatggccaccgtggtgtataagttatgcaaagggtgacctggacatatctta

SEQ ID NO: 364195 - DNA, 100 bp, Homo sapiens
tttggcgtgcaacatggggcttgagaaagggtatctcaaatctgtgaagtattgtagaggagacacaaaaggaattgggggtcacaaatggttctcattg

SEQ ID NO: 364196 - DNA, 75 bp, Homo sapiens
tgaagacctgccttccctctgggaatctggagcttcagtaacaggtcatgccctgaccacagctgcccttcagga

SEQ ID NO: 364197 - DNA, 97 bp, Homo sapiens
atgaaagccaggagcaccgagggcctctggttggctcacaaacatgcctggtgcaccaggcagagggaacaggtccggcctctttggcctacccccg

SEQ ID NO: 364198 - DNA, 75 bp, Homo sapiens
ctggagttcacgactctgagtgctgattgtcctaaagcagttggatgggaaaagaaccagaaaggaggcatggga

SEQ ID NO: 364199 - DNA, 82 bp, Homo sapiens
tcaacgtcaagcgggagtatgaccacatgaatggatccaggtgtgatgaatgcagactctgctaccattttggctgtttgga

SEQ ID NO: 364200 - DNA, 80 bp, Homo sapiens
ggcagataccgtttgacaccaccatgaagtacatgcgagaagccacgccctatgtgaagaaaggatccccagtatccgag

SEQ ID NO: 364201 - DNA, 82 bp, Homo sapiens
gtggagccggagctgggcgcggattcgccgaggcaccgaggcactcagaggaggtcatcccagactggaaggagcaggaatg

SEQ ID NO: 364202 - DNA, 50 bp, Homo sapiens
tctaacatccagaagatcacacagtgttagtccgaaattgaagttcagag

SEQ ID NO: 364203 - DNA, 83 bp, Homo sapiens
gctgaagtaatgcaatggtctcaatctctggaaaaacttcttgccaaccaaaaatccacattcatctcaatggaaggatcctg

SEQ ID NO: 364204 - DNA, 73 bp, Homo sapiens
gggagttcaaggaggtgctgaagagcgaggagtgaaaatgcctcgtgtaaaagcagctcaagctggaagacag

SEQ ID NO: 364205 - DNA, 100 bp, Homo sapiens
ccaaatctgggtcctcaaagaggaacaaagtcatcaagctagtggacatcacggacatccagaagcacagcaaagggagacgtcatttgctactatggga

SEQ ID NO: 364206 - DNA, 99 bp, Homo sapiens
acctcaccgaaaagagcctgtacaaccagcgcctgcgcctacagaacgagcaccgaggctagcttgtcactttctgcaaaggtttccctcagggagcct

SEQ ID NO: 364207 - DNA, 80 bp, Homo sapiens
tggatatctctactcgctccaaagctgatgttctaatcatgtcagataaagatgatattgagactccactgctaactgaa

SEQ ID NO: 364208 - DNA, 100 bp, Homo sapiens
gacagctttcacagtttgcgggactcagtcccatcactccaaggagagaagctccatgatgcgttatctgggtctggaaacccaaaccctcaaggatggc

SEQ ID NO: 364209 - DNA, 74 bp, Homo sapiens
agcctcccgagtggctgggattacaggtgaccaagaatatggcccaggtgaccaaagccctggacaaggccctg

SEQ ID NO: 364210 - DNA, 75 bp, Homo sapiens
ttgatatatatgctgacgaggagttcaaccagacttaattcagtgcacaaatgagatgaatgtgaacatcccaca

SEQ ID NO: 364211 - DNA, 76 bp, Homo sapiens
caggaagtctatgatgagtacaagatgattgtcttttgaaagtgtggtatcctatgactggttggaagtcttcaat

SEQ ID NO: 364212 - DNA, 100 bp, Homo sapiens
agagcttcctgacagagttcatcaactacatcaaggctgcttctgatgcttggaagatatcctctcagccacaaagatggtaataaatctttgcctccca

SEQ ID NO: 364213 - DNA, 100 bp, Homo sapiens
ccctgaagcaaagagaggaaatgctcgaggtgatgtttgcagacagaaaaagtaaactgtcaaggaattcagagcattgggtacttgttatttggaccag

SEQ ID NO: 364214 - DNA, 100 bp, Homo sapiens
tattcctgcctatcctcgaacctgcactgtggacttttcgacctgtgcacaccgatatgaggcaaggcagcgagtggaccagatcctggagacgcgggat

SEQ ID NO: 364215 - DNA, 50 bp, Homo sapiens
cattgttggagatgagatccttaaggccttaccagaggggcagacagctt

SEQ ID NO: 364216 - DNA, 73 bp, Homo sapiens
gctgagtggttgtgtggtcgcgtctcggaaaccggtagcgcttgcagcatgccggaagaattaacctcgagtc

SEQ ID NO: 364217 - DNA, 98 bp, Homo sapiens
cccgggacaccctggaagccaggaaatggctccggtagattgcaaatgacctgctttctttctgttcccgggcgtttggacccctgtcttggaccgct

SEQ ID NO: 364218 - DNA, 83 bp, Homo sapiens
actgcatgtgaagctcaccgagacggcgatccgggcgctcgagacttaccagagccacaagggagtggagcaactgctgtagt

SEQ ID NO: 364219 - DNA, 90 bp, Homo sapiens
ccgcacctgccgctcatcgccatcacccgcaacccggtgttcccgcgctttatcaagattatcgaggttcgagaacttgtcttggacaat

SEQ ID NO: 364220 - DNA, 75 bp, Homo sapiens
gaaagactttgttcctgaactgctcccttctcttttaggtggtggtgaccgcggtggcttcaaaaattttggtgg

SEQ ID NO: 364221 - DNA, 75 bp, Homo sapiens
tggaaattgaacaagcgtcacttgacaagcctatagaatcggggtttgttaaagttgttaagaataaggcctact

SEQ ID NO: 364222 - DNA, 128 bp, Homo sapiens
ctcaggaggaaattacagagacaattatgacaactgaaatgagacatgcacataatatagaggagccccatggctgcttctctctggccgagcgcccctcaccacccaaggcttgggaccagctgcgg

SEQ ID NO: 364223 - DNA, 74 bp, Homo sapiens
ggaagcaggagccatgacttttcaaaattccagtgtagaagttggcataagtagccaggaaaagatgcaatctg

SEQ ID NO: 364224 - DNA, 90 bp, Homo sapiens
agctaggcaaggtggtgactaagaaattcagcaaccaggagacctgttttatccaagtatgaagatcagattactattttcactgactac

SEQ ID NO: 364225 - DNA, 90 bp, Homo sapiens
agcccgcggcgaccaagatcaggaacctgccctggaggaagacaatgtgtggcaccctggactacctgcccccagagatgattgaggggc

SEQ ID NO: 364226 - DNA, 78 bp, Homo sapiens
aggcctgatagactgattaaaccacagccccttcatgaataagttttttccagccagctttccaaatcgacagtacca

SEQ ID NO: 364227 - DNA, 74 bp, Homo sapiens
cggaaatgtgtcatcgaaagccagctctgatccagtatatacggcctgtgttcgtgtcccggtcagaccaggat

SEQ ID NO: 364228 - DNA, 82 bp, Homo sapiens
tcctaaaattcatggaagtagttttgtaacatctactgtcaagtaaattgttgaagactacttcacaatttccacttcctct

SEQ ID NO: 364229 - DNA, 100 bp, Homo sapiens
caaaacctcgctccggaaaggggacacctggtctgaatttcctgctgctgttcacaaagatgctttttatctttaactttttgttttccccacttccgac

SEQ ID NO: 364230 - DNA, 100 bp, Homo sapiens
aagtatttaaggaccatttatttcaaaaggcagaggaagaaggttattttgaagcattcaaaaatgaacttgaagctttcaagtcaagagtaagacttta

SEQ ID NO: 364231 - DNA, 100 bp, Homo sapiens
gctctccagcagaactatctcctactactctttcccctgttaatcatagcttggtttcctcactgcttggaggaagatgagaattctcagaggtccttat

SEQ ID NO: 364232 - DNA, 98 bp, Homo sapiens
aaaatcccagatctacctgacgggcctgcgagggttgaagattgtgaagcaatagcctaaggtggtaataagctgcagtcaacaggaaataaagcaga

SEQ ID NO: 364233 - DNA, 100 bp, Homo sapiens
ccaagcctgtttattaaccaattttacccaagaccaggaactcctgctgcaaaaatggaacaagttccagcacaagtgtcatgcggaggaatccctttgg

SEQ ID NO: 364234 - DNA, 100 bp, Homo sapiens
ttgacttggtgttgaaagtgaaatgtcatgcctctgaaaatgaagtattctaccttgtaaatactgttatttgtatatactgtaaatgatgacatcggtg

SEQ ID NO: 364235 - DNA, 50 bp, Homo sapiens
cgcgagtcggcgcgcgggacgaagggagaagaaatgggtgaccgttggtg

SEQ ID NO: 364236 - DNA, 82 bp, Homo sapiens
cgctgtccccaccactgcagccatgatctccttaacggacacgcagaagtccactgccagctggttcgactctttgcacgag

SEQ ID NO: 364237 - DNA, 98 bp, Homo sapiens
ggcatccccgacctggcccaaaagctccatttctatgaccgctgggctccggactacgaccaggcgttttaaggatgaacagattgacatcctcgtgg

SEQ ID NO: 364238 - DNA, 90 bp, Homo sapiens
ttgtgatgggtcagctagtatgcaggctaggcaaactgaaaatatgttgtgttcttcttttaccctcttgacttcacctttgtgtgcccc

SEQ ID NO: 364239 - DNA, 96 bp, Homo sapiens
tggtgtaggaggacgccagttactgcacggaaagcagcgtcaggagccatagtacctacagcagcactccagcaggaacgaatttcatatacacct

SEQ ID NO: 364240 - DNA, 75 bp, Homo sapiens
ccgggaacggcgcgggtggtagaggaggagccgcgggctcggcctctgagcccaagtctgcacgtattcatccag

SEQ ID NO: 364241 - DNA, 101 bp, Homo sapiens
atgccaaggaaaaactggagagcttcatcaaaaatagtgatagctttgataagaataagacgagttggaagaagacctgatcaacaacttcagggtgaagg

SEQ ID NO: 364242 - DNA, 51 bp, Homo sapiens
ggcgctgcgcaagcacgctgaggaggactactcaccaggggattctccacc

SEQ ID NO: 364243 - DNA, 98 bp, Homo sapiens
tcagcttgtctgcactggcagtgacgatggcacagttaagtttttcagaagaagtgaagtcaagatgaagaaccatttgcttttctggggagtcctgg

SEQ ID NO: 364244 - DNA, 100 bp, Homo sapiens
ccgtgaggaccttccacgtctgacgtgtgatctcgagagacctgcgtacattcggggtgccagaaggaaagcataggatctcatagatcagaacatactg

SEQ ID NO: 364245 - DNA, 95 bp, Homo sapiens
ttgccagcctcagcagccctgctgacagctacaacgagggtgtcaagaaagtggtggagagagagctggatgctcttttggaacagcaaaacacc

SEQ ID NO: 364246 - DNA, 75 bp, Homo sapiens
gcaggaatgcacgaagccaaactggaagtccgcgagtttgtggattatctgaagatacaaactggactctcagga

SEQ ID NO: 364247 - DNA, 100 bp, Homo sapiens
caaccccaagtcaccacaaaaacctatcgttagagtcttcctgcccaacaaacagaggacagtgtgcccttgctaccagttccgagccagccgagacctg

SEQ ID NO: 364248 - DNA, 98 bp, Homo sapiens
ggcggttggtcagtgtgaatttgtgacagctgcagttgctccccgcccccgagcagccgagccaataggagctctgaacccaaaaagagcagcattct

SEQ ID NO: 364249 - DNA, 90 bp, Homo sapiens
gaggtcctccatgcgcagtcatgagtcgcttcaagtttatcggccaacagagattttgagaaacacattgaaggatctgttaacacttga

SEQ ID NO: 364250 - DNA, 96 bp, Homo sapiens
gaatgggccaagctccactgttcagatgcaaagttttcagcattgcaaataacaatctcagctactgggatgcccccctgggaagttcttatatgt

SEQ ID NO: 364251 - DNA, 50 bp, Homo sapiens
gaagatgaaaccaagcccttgccaaaagaatgcaatggtgtaaagattcc

SEQ ID NO: 364252 - DNA, 101 bp, Homo sapiens
ggcagacagacttctggacatggggtttgaggcaagggtcctgaggacaccgtgagccagccaggcctggccgctgggcctgaccggccccccagccccta

SEQ ID NO: 364253 - DNA, 100 bp, Homo sapiens
ctgtggtggaaatgctcccaagagggcggcggcagcgggtcctacgaggagggctgtcagagcctcatggagtacgatcctatagcaatggaactcagcg

SEQ ID NO: 364254 - DNA, 98 bp, Homo sapiens
caagaactggaggtttgtgcaatttgagaccggtcggcactgtgcagagatcagagtactaagagacagggataccttgggaaaatgcttcttcctac

SEQ ID NO: 364255 - DNA, 100 bp, Homo sapiens
acctgctttacaagcaaatgaagcaactgaaaaaccccttggaaatagtcagcatacctgatcaggatcctcatgaccagccaaagagaagaagaattag

SEQ ID NO: 364256 - DNA, 82 bp, Homo sapiens
aacaggggaaaatggaagaaaatgttccaatatttccattggagatgagaattggcagagggggtcgatttgggaggaaagg

SEQ ID NO: 364257 - DNA, 98 bp, Homo sapiens
ttggactcttgattggaatgttctccctgcagcagtcagcccaaaggaaggtgagcctgaatttaaatacattgggaatatgcatgggaatgaggctg

SEQ ID NO: 364258 - DNA, 100 bp, Homo sapiens
ttgcggtttcggcggactagaatttctacgcagaagtctccctcaggatcagaccgtagcccttccggaaacctccatgaagtcacctgcaccggtgccc

SEQ ID NO: 364259 - DNA, 75 bp, Homo sapiens
gattccaagtaactcttatttgatatcaacatggcaggagagcccaaaccatacagaccaaaacctggaaacaag

SEQ ID NO: 364260 - DNA, 90 bp, Homo sapiens
acaagaaactagagcaaataaccgttttgaaattagttctaaagttcctgttgcttcagacaatggatgagcaatcacaaggaatgcaag

SEQ ID NO: 364261 - DNA, 74 bp, Homo sapiens
ttgttgcagagcaagtgatgatagaccacttatctagcgtggagattggtgaaagcgtgagaggggaagatgtc

SEQ ID NO: 364262 - DNA, 51 bp, Homo sapiens
ttcccatattatgggaaaaaactgcatcttttatcaaaatacaactcaaac

SEQ ID NO: 364263 - DNA, 87 bp, Homo sapiens
aagacacgtcggatgttgcagcagagccagcagctagcgcagggacttccttccccgcggttcaggaatcgtcacccggcggcctct

SEQ ID NO: 364264 - DNA, 102 bp, Homo sapiens
caagaaacagtcctggacggcaacctcattatccgctatgatgtggaccgggccatctccgggggctccattcaggaagcaatgaggctccccaagaacaca

SEQ ID NO: 364265 - DNA, 100 bp, Homo sapiens
ataaagggctctgaaagctagaagaaaaggtgtacttgcaagaaacctcaggacttgagtaacagcaacatgcgcctgcctggacgagctgagctgcgag

SEQ ID NO: 364266 - DNA, 88 bp, Homo sapiens
atgaggaaaacgaagtgcctaatccccgctggacgctaactgcagggtgttaagccccacctacaagcagagaaatgaagacttcaga

SEQ ID NO: 364267 - DNA, 74 bp, Homo sapiens
ggcatcctccttgaagtatttggctgaggagttttcaatcccattatcatgtgatgtaaaacttgatcctcgtc

SEQ ID NO: 364268 - DNA, 90 bp, Homo sapiens
gtgaggtgctgaagaaaaaagtagggcttctcaaggagacgcccagcggcagcaggatgagtgcggaggcaagcgcccggcctctgcggg

SEQ ID NO: 364269 - DNA, 82 bp, Homo sapiens
gcagcctgctcgtcacttgcctcccgggagtcgctgtggcaaaagtaagactttgaccccgacgcaggcttcagtgattgcc

SEQ ID NO: 364270 - DNA, 83 bp, Homo sapiens
gaatgatctctacatctcagactactgtgtgtggattcagaaagtcaacagcagccgctcttctaaaacattcaaaccaaaga

SEQ ID NO: 364271 - DNA, 75 bp, Homo sapiens
tattctttacctgcttcccaatcccactgatgaggatcagcccatgattgtaaaccatggctgtgtggatacaag

SEQ ID NO: 364272 - DNA, 96 bp, Homo sapiens
tcccagcagagacagcaccaggggtcagcagggggccagctcaggacacacagacccagctggaactcgcctgaggaagaacttgatcctgaagag

SEQ ID NO: 364273 - DNA, 86 bp, Homo sapiens
cgcacttcgtcatgttcttcgcgccctgtaagactttgaccccgacgcaggcttcagtgattgccgcggatcagaagcctgagcac

SEQ ID NO: 364274 - DNA, 98 bp, Homo sapiens
tgtactcgcagttgcctcatcacatcctagccgatgtctctctgaagatcgatgtgtacttggccaagagtctggcggaaaagctgtatctatttcag

SEQ ID NO: 364275 - DNA, 50 bp, Homo sapiens
ctgagagttacgtggcagaaatgatcaagacggttacctggcacgctggc

SEQ ID NO: 364276 - DNA, 90 bp, Homo sapiens
gcctcgagcgctcaggatggaggaagactcgatccgcctgcctgcgcacctgcctgctgcagaagaatattttgcctgctggaacctgct

SEQ ID NO: 364277 - DNA, 75 bp, Homo sapiens
ccgagccggagctgctcgacgaccaagaggcgaagaggaaagatctaggagagagggagaaattgatgctgccag

SEQ ID NO: 364278 - DNA, 101 bp, Homo sapiens
ggtcaagcctcgttccaggcccagccaactcctgcaggaatcgcagctcctccagcccccagggcctcttgggccactgacccctctgcagtgggatgaag

SEQ ID NO: 364279 - DNA, 96 bp, Homo sapiens
ctggacagacagtgacgattatagcacaatatcaacctgaaggtgtcatggagaaactccagctgggcccagagattctgcagcgggaaaatccaa

SEQ ID NO: 364280 - DNA, 100 bp, Homo sapiens
aaccagccgaacttcagggtttccaccgttcgttcaaggctgcaagatcaaggccctgcgggccaagacaaacacctacatcaagaccccagtgcggggc

SEQ ID NO: 364281 - DNA, 95 bp, Homo sapiens
ggctctaacggggctttctacaaggttgacatcatggacatatgtgagtccatcctggagaggaagcggcatgacagcgaaaggtctacttgcag

SEQ ID NO: 364282 - DNA, 100 bp, Homo sapiens
tggaggaggaagaaaagagagccagccgagcaccctccaagcagaggttcctcatgggtgcctcctgtggcgggggcaacatgaaggtggacgattcggc

SEQ ID NO: 364283 - DNA, 98 bp, Homo sapiens
agtcacgtttccaaagctgtgtgctcaacctacttacagtcacgttactacagattgcttcctgaggaggctggcacttctgaagatcctgaagaccc

SEQ ID NO: 364284 - DNA, 98 bp, Homo sapiens
tcagtagggacaacaggcaggagaattatgggagcgcatttccccaggatatcagttttagagaatgtggcgtggagaaattctcaaggaaagagtaa

SEQ ID NO: 364285 - DNA, 83 bp, Homo sapiens
aagcttgggaggtaggagttggcgagtagtagcgaggagacgaaggatgcttctatggcatggttccaggatgagtaactggg

SEQ ID NO: 364286 - DNA, 80 bp, Homo sapiens
gtccagctctgccgaacagagcttcctgttctccagggaggaggcggacacgctcagttcaaatctgaacatcaatgatg

SEQ ID NO: 364287 - DNA, 101 bp, Homo sapiens
aattaagtaactggtcgaggttgtatcagtaagaagggagcacggaacagattcaagctcaggggtttttagatgcctgcgagaagggccctctttctggt

SEQ ID NO: 364288 - DNA, 100 bp, Homo sapiens
cagtgacactgatggtgctgagctccccactggctttggctggggacacccgacgttggatgccagtgagatccaggtggacgaaaccatcttcctgctg

SEQ ID NO: 364289 - DNA, 82 bp, Homo sapiens
ctggcatctgccggctgctccgcaccccggggtcccaggaagggcggcccaggatttttagactctgaggagcagttggagc

SEQ ID NO: 364290 - DNA, 100 bp, Homo sapiens
atggaatcacaaacggcgcacattggtatgatgtggaaggaagaggatcacctagcccgggtagaagaggcaatcacccgtatgcttgtgtgtgccctga

SEQ ID NO: 364291 - DNA, 82 bp, Homo sapiens
aatgacggttataagaccatttatttctttggagacaaaactatgccaagcagtcattatggcgaaccttggctgctggatg

SEQ ID NO: 364292 - DNA, 90 bp, Homo sapiens
ctgaatcctctaaaggccccatacaatgaagtagacattggtggaaacatttaaaccactggttcacctacaatgagacaatgacagtgg

SEQ ID NO: 364293 - DNA, 100 bp, Homo sapiens
gctgaatcaatacagccagctgtgaggggagcacttcctggacccaggaagggagagtcttcttccaaggtgttacagcacatgaaggccgtgcaggcag

SEQ ID NO: 364294 - DNA, 100 bp, Homo sapiens
ctgaggtggtacctgatgattctggaactttctatgatcaggcagttgtcaggttaatgttcgtgaagaaattgaagagttttttccaagaatgtggaag

SEQ ID NO: 364295 - DNA, 100 bp, Homo sapiens
aagcagctgagatccagaggagtggaaggctcccccttgactaaagcttgagtgttgtggggccctagaatactacgacaaagcctttgaccgcatcacc

SEQ ID NO: 364296 - DNA, 75 bp, Homo sapiens
cttgctcccatctactttcttctctagaatccacggacttttggaacagaatccggcaagagcaaaccgaggatt

SEQ ID NO: 364297 - DNA, 83 bp, Homo sapiens
tggtgatgcaagaagtttctaggaaaggccggacaccagtctgatcatcggatatcatggagtctggcaagacggcttctccc

SEQ ID NO: 364298 - DNA, 82 bp, Homo sapiens
catgatcaacctcgtcatgtcctacgcgctggctggaggcgtgatcctgggtgtggccctgtggctccgccatgacccgcag

SEQ ID NO: 364299 - DNA, 128 bp, Homo sapiens
ccgttctcagccggctctggagtgcgggcgggggcgacagggccgattccggagtgggtactccaaagattcaggtttactcacgtcatccagcagagaatggaaagtcaaatttcctgaattgctat

SEQ ID NO: 364300 - DNA, 75 bp, Homo sapiens
ttgcagccagtactctatatgaacaatccgtctggatcacggatgtaggaagtgtattgcctaagtgtaatcttg

SEQ ID NO: 364301 - DNA, 98 bp, Homo sapiens
gaaggctggtatctttcagagtgtaaagtaatcttggaatataaaggttacctacctgggcaaagtctccaccactggcatgcagtttttgtcaggct

SEQ ID NO: 364302 - DNA, 100 bp, Homo sapiens
tggtccttttgtctccaaaataagagcagtgattaacgatattggtgcagtagacattgttgcaatcatgatcggcaatctgaaaggcacaaaaattctg

SEQ ID NO: 364303 - DNA, 52 bp, Homo sapiens
atctgcaatgaatgtcgcacaggaattgtacctacttctgtgattgtgactg

SEQ ID NO: 364304 - DNA, 90 bp, Homo sapiens
agtggcaatgacccagacccggacgacccccattgctgagccagcggagctgcttgtttcgccgtgaggaagatgcggaaaaggctgtga

SEQ ID NO: 364305 - DNA, 126 bp, Homo sapiens
ggtaattcttctcgtcctaatctcaatcttactgtactggaaacgtcaccggaatcaggaccgagtatgccgagattttgctgtcctggaggaccacaccctggctcacagcctgcaggaacaaga

SEQ ID NO: 364306 - DNA, 82 bp, Homo sapiens
gacagcagtacagacagctcaggctgcccagatggtggctcccggagtccagctgcagatctgggacacggccggccaggag

SEQ ID NO: 364307 - DNA, 100 bp, Homo sapiens
aaggaatgaacatgtatttaaccaagttccaacaaaagaatgctgccgcaggatctccctaatactatgaacgcggcagagataacggacaagctcggcc

SEQ ID NO: 364308 - DNA, 50 bp, Homo sapiens
gcccgggaccgtttaaaaaactgggcagcagagaagaaagtggtgaaaat

SEQ ID NO: 364309 - DNA, 98 bp, Homo sapiens
aggcgacagcctggattataaggatgtcatccccatggctgatgcagcaggcatcatccgctatgcaattgggaaatgattctggggaccattctgac

SEQ ID NO: 364310 - DNA, 82 bp, Homo sapiens
gccagagcccattatccctgtcactcagccccggatgcctgccatattagatggagaggaggcagtttctaaatggcttgac

SEQ ID NO: 364311 - DNA, 97 bp, Homo sapiens
caggccgcgaagtccccgtctccagttcagggcaagaagagtccgcgactcctccgcttacaaacacgcagatggcaagaagattgatggcaggagg

SEQ ID NO: 364312 - DNA, 89 bp, Homo sapiens
gaagcaatgcttgaggctccttacaagaaggtgaactgaaaacgtcaaccccccttgatcgtgaggagcaagctgtttatcatcttctc

SEQ ID NO: 364313 - DNA, 98 bp, Homo sapiens
gcgcagtgcagatccgcaggcgcaaggcttcaggcgacccgtactgggcctactctgaacccttaggagaaatcttgagagtggacagcaattgtgaa

SEQ ID NO: 364314 - DNA, 100 bp, Homo sapiens
accaggctgttgaggaagaatctatggcaacattgtatctattaatatacagcttctgtatttatcagaaagaagacatagctcatccagcaagccgcct

SEQ ID NO: 364315 - DNA, 71 bp, Homo sapiens
ctttctcaaggcacgaactgagctgatccttgccccagtattaaaggtggaagaaggtccatatctttttc

SEQ ID NO: 364316 - DNA, 50 bp, Homo sapiens
ccggaagaaaagggaggagaagtttacagctctatcaaagaaagcaagag

SEQ ID NO: 364317 - DNA, 98 bp, Homo sapiens
gccaatgtcagagaaatctttgacaaggtaccatggagagaagctacagccatttgggcaactgaagaggccccgtagaaatggcttggggctcatct

SEQ ID NO: 364318 - DNA, 100 bp, Homo sapiens
cggaagatggcggccggcgaaaggagctggtgcctgtgcaagttgttgagacatatctgaagagatggattaagaatgctttggattaaggattgtggag

SEQ ID NO: 364319 - DNA, 101 bp, Homo sapiens
ggagagagagggaaggacggggcctggcccccgggactccctgtgccttgcttggagctgacgccgacgggttatacattggctcttcaaagacgttcacc

SEQ ID NO: 364320 - DNA, 75 bp, Homo sapiens
cgcgaggcagggagcttccaggttatagatgtggaaactaaagcccagagagaaagtctgacttgccccacagcc

SEQ ID NO: 364321 - DNA, 97 bp, Homo sapiens
ctctgcgccgccggcaccatgaggcctatatgaacccaatagcaatggcgagatcaaggggtccaatccagtcttcagggccaacaatacaggatta

SEQ ID NO: 364322 - DNA, 100 bp, Homo sapiens
tgatggcggatcaggatcggaagcctgcgtaactttctcccttgatccgggagtctttccactgggtgtgatgaatgcagactctgctaccattttggct

SEQ ID NO: 364323 - DNA, 96 bp, Homo sapiens
ggctggcacagcagctacacggggagagcctgctggcacgggcacgccggggtctgcagcgcctggctatggaaagggcaaatggaatggagctgg

SEQ ID NO: 364324 - DNA, 75 bp, Homo sapiens
ccaacagtgtaccagcagggcgttggctatgtgcccatcacagccttatgccagcctggaccatcttggaggcag

SEQ ID NO: 364325 - DNA, 50 bp, Homo sapiens
acgcataatggatgaaaggaaccgacaggctgtgtttgatgtggacaaga

SEQ ID NO: 364326 - DNA, 126 bp, Homo sapiens
cggcgggtgcagaactacctgtacaacgtgctggagagaccccgcggctgggcgttcatctaccacgctttcgtctgcagaagaaagatcagcaactggagcctaaaaaaagtaccagccctaaaa

SEQ ID NO: 364327 - DNA, 90 bp, Homo sapiens
ctctcgccgccgggaacgggctgcaccaatggccaggtgattttacaacgagatgctgctctccatagggatgctcatgctgtcagccac

SEQ ID NO: 364328 - DNA, 100 bp, Homo sapiens
actgccacaagccggacacgtattgctgctaaaattgattcaattcctcacttgaataattccacacctctagtggacccctcagtatatggatacggag

SEQ ID NO: 364329 - DNA, 82 bp, Homo sapiens
agacctttgtcgtccatttgctgctcactgttgctctatatgcaatcagtgctgtctactttgctggagtgatggtgcgact

SEQ ID NO: 364330 - DNA, 90 bp, Homo sapiens
agttcttggcaagagaggcatcctccttgaagtatttggctgaggagttttcaatcccacttgatccagctggaggccttcctgagccgc

SEQ ID NO: 364331 - DNA, 75 bp, Homo sapiens
cagtgtacctccttgatggtgggtttaataagacagggctgttcatgtgaaggcacgtgtggttctcaaatatag

SEQ ID NO: 364332 - DNA, 100 bp, Homo sapiens
ccgacggctgctcaaacatcaggaaaaagcttgtggtgaaggggggcaaaaaaaagaagcaagttctgaagttcactcttgattgcacccaccctgtaga

SEQ ID NO: 364333 - DNA, 76 bp, Homo sapiens
gaaaggtgcccccgaagtgaaagagatggcctggtggaaagcctggaccaagatcactccatggatgaaatgacag

SEQ ID NO: 364334 - DNA, 100 bp, Homo sapiens
atgtcaagaatatgaaatgagtctggaaaactgggccaaagcagtgaaacgctccatgaattggcatcaagcatgatggaaccatgtgtgatacctgccg

SEQ ID NO: 364335 - DNA, 88 bp, Homo sapiens
ggagctggacccccccatcgagtcgctgatccctgaagaccaaatagatatgaggccccaggattcctggcgaggtcctcctcccctt

SEQ ID NO: 364336 - DNA, 90 bp, Homo sapiens
ggcagctgagacggccttggccgtgtctgcacatcaccgaacgatgagagaggactacagcgacaaagtgaaagccagccactggagtcg

SEQ ID NO: 364337 - DNA, 100 bp, Homo sapiens
ccgggcacagaaacacagcagcgggagcagcaacaccagcactgccaacaggtcaaaatgcagatcttcgtgaaaacccttaccggcaagaccatcaccc

SEQ ID NO: 364338 - DNA, 112 bp, Homo sapiens
cggctgctggatggaggggattttgtcagcttgtcgtcaagggcttcgagctgggcacgctggccggccccgcctttgcctggctgcgccgctccctgggcctggcggagga

SEQ ID NO: 364339 - DNA, 90 bp, Homo sapiens
cgaatgggccctattgtgctcacacattcagaacctgttacccaaggaattccctaaagctcttcaagtctgcaataaaaaatggcctcc

SEQ ID NO: 364340 - DNA, 50 bp, Homo sapiens
ctgactttcagctatggaatcgctctccacacaaggagatgcaagtcagg

SEQ ID NO: 364341 - DNA, 90 bp, Homo sapiens
agtccttatacttcagttgttcagtcagattggaccctgtaaaagctgtaaaatgataacagaggctcctgtgacgtttgatgacatcac

SEQ ID NO: 364342 - DNA, 75 bp, Homo sapiens
gtgggattgagacattctcacctcctcctccgcctccaaagtcgcgttactggccaacaccttcccaagaacaag

SEQ ID NO: 364343 - DNA, 74 bp, Homo sapiens
acaacctgcagcctcctggcaccaaagcttggtggaaccgtgggggacatagaaagcatgccctttattgaggc

SEQ ID NO: 364344 - DNA, 83 bp, Homo sapiens
gcggccaatggcacggaggcctgcgtgctcgggacgtgtacgaggaggccatccggacagtgatgaccgtgcgggacttcaca

SEQ ID NO: 364345 - DNA, 75 bp, Homo sapiens
cgtgctttcccattttgctcagcgactgtttgatgacgtcccgcaggtggaagttaaacgagctgagcctcggga

SEQ ID NO: 364346 - DNA, 105 bp, Homo sapiens
gccgcgaggaggcgcgggaggtgttcgagaacgaccccgagacggttctgcggggagtgtctccagccctgcctgcaggtgccatccccgctgtgcccactctgc

SEQ ID NO: 364347 - DNA, 87 bp, Homo sapiens
ctgtgtgggaagaagatttgtaaagaaaactcttaggagcctgaacgaactgcgggtgttgctgctggaggccaatcgtcactcccc

SEQ ID NO: 364348 - DNA, 98 bp, Homo sapiens
ttccttcagccaaagaaacaagccgtggaataggtgtatcaagtaatggtgcaaagcctgaatctctggcatctctatcccctatgaggcaccacgta

SEQ ID NO: 364349 - DNA, 50 bp, Homo sapiens
aggagggtcctctcagtgattaaggtggtatcacggaaaacttgacagaa

SEQ ID NO: 364350 - DNA, 100 bp, Homo sapiens
cttactaccaaacagcacttcctggcaatgatagatacatcagtgtgggaagccaagcagatacaagggtaccaaagtctgatctcttgcacaccaaatc

SEQ ID NO: 364351 - DNA, 100 bp, Homo sapiens
ttccacacggtgacgtgctgcggcttcatcccgcaggattactacagcatcccatttcccacacccactactccgctgactgggagggatggtagcctgg

SEQ ID NO: 364352 - DNA, 88 bp, Homo sapiens
ttggagcagatggataccgtatcgacgtggggcctccggctgctctttggcgtaaattgcaatcgattagggatcgtttctcagaatc

SEQ ID NO: 364353 - DNA, 74 bp, Homo sapiens
cgagagagtcctccttaccacacagggtgagggtcccgatgtcctggtgtacagcttggactttggtgggcatc

SEQ ID NO: 364354 - DNA, 83 bp, Homo sapiens
cttcgcctccttcaccgccgcagaccccttcaagttctagtcatgcacaagctccgggtggataaggcagctgctgcagcagc

SEQ ID NO: 364355 - DNA, 100 bp, Homo sapiens
tgcgctgcctgctctacgccctcaatctgctcttttgggtttccctaggacttctgcatgcccatgccacacatatcctgtggcccccagagcgctggca

SEQ ID NO: 364356 - DNA, 100 bp, Homo sapiens
gtggagacccacaggagccccggacttcacctgagctacctcagggtgttttgaatgctgtatcaaatgcctggggggcattccctatgcctctctgatt

SEQ ID NO: 364357 - DNA, 100 bp, Homo sapiens
gaggacttcttcttcaccgccaggacctccttcttcaggagagcgccccagggcaagccccgctccggccaacaagaatgtatcctgtcaggtataatgt

SEQ ID NO: 364358 - DNA, 100 bp, Homo sapiens
atatgagatcctgactccaaactccattcccaagggtttcatggacgggaagcaggcgtgcgtgctcatgaatgacctggatgaccctgaaagaggaatg

SEQ ID NO: 364359 - DNA, 73 bp, Homo sapiens
tgaaactgaatcacaggagatatttccaggtggctgcaatcagtaaaacagtactggaaacaggcagacaaga

SEQ ID NO: 364360 - DNA, 83 bp, Homo sapiens
cagaaacttgttaaagacattattggttgcagatatcaagaaagtcaacaacttcatcagagaacaagacttatatgctttga

SEQ ID NO: 364361 - DNA, 100 bp, Homo sapiens
cgggcccacatcttccggccaacttccattgaacttcccagcactcgaaagggaccgaaatggagagcaaaggccaccaccacctatcatgacagatggt

SEQ ID NO: 364362 - DNA, 144 bp, Homo sapiens
agagagagagaaagaggaggggaggaggaggaggattcagggaataggagctggggagcccttctgcgccacagtctccagtgccagatagtccacagctgtcctctcttggaaaatcagattcatctttctctgaaatttccg

SEQ ID NO: 364363 - DNA, 75 bp, Homo sapiens
gtggagtatctggtgaaatggagaggctggtcgcccaatcctggaatcaagatgtgagaccaagaaattatttct

SEQ ID NO: 364364 - DNA, 73 bp, Homo sapiens
cggagtggagctcagccaggggcagccggctctggtgctcccagaagagaaatgaagctgttgtcatttctgg

SEQ ID NO: 364365 - DNA, 90 bp, Homo sapiens
aagaggagcggcagagcctgctggctcaccatggatgatgatatcgccgcgctcgtcgtcgacaacggctccggcatgtgcaaggccggc

SEQ ID NO: 364366 - DNA, 75 bp, Homo sapiens
gcttctggcctctgggcatcgcagccttctacttgtcccatgagtgtgatggggttggggtggacctgagcaaca

SEQ ID NO: 364367 - DNA, 50 bp, Homo sapiens
ccggatcaacttcgacaaatagttgcagaatgaacatgtaaagttacaaa

SEQ ID NO: 364368 - DNA, 100 bp, Homo sapiens
ccatggctgtagaacccagcagctcagaatccattaaaaggagagctgggaggagaatggagatgtatgcatttcgattcttcatccgcctgtagatgac

SEQ ID NO: 364369 - DNA, 75 bp, Homo sapiens
cagagtcactactttaggcggattcgcgaaggtaccgaaagcacagtaatcactggtgtcgatattgtcatgaac

SEQ ID NO: 364370 - DNA, 82 bp, Homo sapiens
cacggtgccccggcgccacctggagagaggccgcgtcctgggcagaggtgtcgtgaaaactacccctaaaagccaaaatggg

SEQ ID NO: 364371 - DNA, 83 bp, Homo sapiens
aaaggtcccactgcagccctccaagcaggttgcaaaacttcctcaagttgttcaacagcaaacacccgtggccagcatccagc

SEQ ID NO: 364372 - DNA, 75 bp, Homo sapiens
agatgctgccagggtccctgaagagggaagacacgcggaaacaggctccccaaaaaggccacaaagacagcccca

SEQ ID NO: 364373 - DNA, 100 bp, Homo sapiens
agacagcctggagaagagcgaccagctcactaagaacatgggattgtcaatgaggcagatcagattccgatttgacgggcaaccaatcaatgaaacagac

SEQ ID NO: 364374 - DNA, 51 bp, Homo sapiens
cgagacatgtaagcagcatcatggagggctgtgtggagaagattgggggct

SEQ ID NO: 364375 - DNA, 75 bp, Homo sapiens
gggagcccagcccagccagcctccaggaacaagatcactcaaggtgaaggataatctactaataccagcactttg

SEQ ID NO: 364376 - DNA, 90 bp, Homo sapiens
tgcaacttcttgttaaatggggttgtagcatagaagatgtggactacaatggaaaccttccagaattgcttcagattgctggaattagcc

SEQ ID NO: 364377 - DNA, 50 bp, Homo sapiens
cggacggtcgcgcggcggcaggcacaggaagccagttgagggaagttctc

SEQ ID NO: 364378 - DNA, 83 bp, Homo sapiens
gaaataccagtccccagtgagggtgtacaaatacccctttgaattaattatggctggcctactctaggtgcggtacttcacta

SEQ ID NO: 364379 - DNA, 100 bp, Homo sapiens
ccgacggctgctcaaacatcagggttattcagcttctcaaggctggaaaagcgaaggaagtttcctacaatgcactagcctcacacataatctcagagga

SEQ ID NO: 364380 - DNA, 100 bp, Homo sapiens
aagaaaacatcaatgatgagcctgtggatatgagtgctagacggagacatgtcatgctgcccaaggacatagccaagctggtccctaaaacccatctgat

SEQ ID NO: 364381 - DNA, 75 bp, Homo sapiens
agtctgttggtgcacaaaaagacacttatactatgaaagaggttaccaacttggcaagcctgtccgagctctaaa

SEQ ID NO: 364382 - DNA, 100 bp, Homo sapiens
aacattgatctcctatttttggcttcaagattttgtgccaaccaggcttgtgcagacataagagccagttcagtgttttggcagcaaatggagttcgttg

SEQ ID NO: 364383 - DNA, 98 bp, Homo sapiens
gaaatggagacggtcatccctgtagatgtcatgaggcgagctggggagtgggaactggtggtgctggggaagttgaagtggaacctggcagctgtcac

SEQ ID NO: 364384 - DNA, 82 bp, Homo sapiens
tctgaagagggctccaggcatccggtcctggtccctgctggttgatacttcggggataaaatacagaacatcttctcagagg

SEQ ID NO: 364385 - DNA, 75 bp, Homo sapiens
gcagcaccggcttctttttgaagtgtttgacgaaaaccgattgtactaaggctcgtacgtctgcatcgattatct

SEQ ID NO: 364386 - DNA, 100 bp, Homo sapiens
ccagggaaccctggtcaccgtctcctcagcggatctgaaaagaacaattgctgtccttctggatgacattttgcaacgattggtgaagctggagaacaaa

SEQ ID NO: 364387 - DNA, 100 bp, Homo sapiens
agaaaaagagaagtaggaagaggatgaattcatttcgcttatctggcaaatgtgtaatctgagtaatagagatacttggcatatcgaaattttatgattg

SEQ ID NO: 364388 - DNA, 100 bp, Homo sapiens
gaacagatgagaaacccggcaatgaaactgagatctgtatctgtggacctgaatgttgatccctcgcttcagattgacatacctgatgcgctcagtgaga

SEQ ID NO: 364389 - DNA, 97 bp, Homo sapiens
ctcgcgtccgtaatcagtgacgaggtccgctacgtaaatccctttgcggcgggtgtcatggagaaactccagctgggcccagagattctgcagcggg

SEQ ID NO: 364390 - DNA, 100 bp, Homo sapiens
cgcgctactctctctttctggcctggaggctatccagcggctctgccagcagacagccttggcacacaggcacaagggctggagcccagagatgagagtg

SEQ ID NO: 364391 - DNA, 83 bp, Homo sapiens
caacatgctcccttggtctctgcaaccatcgattcctaacagcctagagggaaagtctttatcacttattcgatggacacagc

SEQ ID NO: 364392 - DNA, 88 bp, Homo sapiens
tttcaatgctgcgaaagctgccaaaagtgacatgcaggagcatattaatgaaaagtgccataaactgaaaaaccaaacatgagggtag

SEQ ID NO: 364393 - DNA, 97 bp, Homo sapiens
cgcagagcaagcgcggggaaccaaggagacgctcctggcactgcaggtgctgctgttttttcaaacgaaggaaaaggaaaaccatacagcgccacaa

SEQ ID NO: 364394 - DNA, 100 bp, Homo sapiens
cggcgatggctacagaaggagggaaaacctctgagccagagaataacaataaaaaacccaaaacctcaggctcccagatatggtccggcttgctttcaca

SEQ ID NO: 364395 - DNA, 90 bp, Homo sapiens
ctgagcggcgagtttccgatttaaagctgagctgcgaggaaaatggcggcgggagatcgaagcaaagctgagatggatttgaaggagctg

SEQ ID NO: 364396 - DNA, 100 bp, Homo sapiens
gtggccgctgggggttgcggcggcgctgagccagcggggccgacgagaccctccgctctttggccagcccttcctccctgcagggccccgagctccacgg

SEQ ID NO: 364397 - DNA, 90 bp, Homo sapiens
cccaaggactaatctgatcgggtcttccttcatcaatacgagaattggagacccaaccagccagacagcttcttttctgctggagaagac

SEQ ID NO: 364398 - DNA, 75 bp, Homo sapiens
tcatgagcgacagcggcgagcagaactacggcgagcgggtggaaccgtcccaaaatgtcccttgctcagaagaag

SEQ ID NO: 364399 - DNA, 75 bp, Homo sapiens
ccggcgcgcccgtccccggcagcgacaatgagagtgatcagcagctggactgtgccttggacctaatgaggcgcc

SEQ ID NO: 364400 - DNA, 100 bp, Homo sapiens
gtggtggccttcgcggtggcgatgctcttcttggaaaaccagatccagaaactggaggagtcccgctcgaagctagcacccttacccttctgaagaacag

SEQ ID NO: 364401 - DNA, 87 bp, Homo sapiens
aagacaatccaaaacaaacgctattcctctcacgtgtgttccagagaacaagccttcagacatttgctatattgacgctgagctgtc

SEQ ID NO: 364402 - DNA, 90 bp, Homo sapiens
cgccctggtcttcgggctgtcgctcgtctacttcctcagcagcaccttcaagcagatattctctaagccgctttcatcatgggagaaata

SEQ ID NO: 364403 - DNA, 82 bp, Homo sapiens
ctcatggaatatcctgcagaagaaaatggatttcgttatatcccctttagaatatatcaggaaactgttaaggcagcaataa

SEQ ID NO: 364404 - DNA, 100 bp, Homo sapiens
gcaggctgatctactgcaggaggatagcagtgagattcacttcaaagtgaaaatgacaacacatctcaagaaactcaaagaatcatactgtcaaagacag

SEQ ID NO: 364405 - DNA, 82 bp, Homo sapiens
caataagagcagaggatggaacacttcagtgcattcaaggattttttatcaagcagaaatgcatcgaacaacgagaatcaag

SEQ ID NO: 364406 - DNA, 82 bp, Homo sapiens
aagagcggcggtagcgcaggggagattacttttctggaagttcctggccattttctatccaagatgtggtacaacctcttac

SEQ ID NO: 364407 - DNA, 100 bp, Homo sapiens
aagaccatgccgaagtccgtcgtgggcctgagagaactcgatgccaccgcaacggtattggcgaaccggcaggatgaaagtgagcagtccagaaagcggc

SEQ ID NO: 364408 - DNA, 90 bp, Homo sapiens
gccaaacaactagcaaaacccaaagagaaaattcccatcattgagtgggaatagctttgcgaaaaatgggcgcaatggccaagccagatt

SEQ ID NO: 364409 - DNA, 75 bp, Homo sapiens
cagtccacccaccgccgccgcctcccaggagggccctcctggacccgggagcggaccctggtggcggtgaagccc

SEQ ID NO: 364410 - DNA, 104 bp, Homo sapiens
cttagctgtgctcgcgctactctctctttctggcctggaggctatccagcgctgagtttgagaaagctgcagaggaggttaggcaccttaagaccaagccatcg

SEQ ID NO: 364411 - DNA, 90 bp, Homo sapiens
agcagtggtgggttccatgtgatggtggagtaggaggcaggtctccgcgtttgcctgagaatacagatcaacccacagaacaaagcggat

SEQ ID NO: 364412 - DNA, 83 bp, Homo sapiens
gggaacttcaaacagttcaacatcttctgtcatatgctggagtcagccctcactcagtgtggcgtgtggaaagaagaggaacc

SEQ ID NO: 364413 - DNA, 85 bp, Homo sapiens
cccatcctggctgtgggtaactgtaccctcaacttgctatcaaaagtttctgcagaaaaatgtgggccccctccacctattgaca

SEQ ID NO: 364414 - DNA, 146 bp, Homo sapiens
agcagaggaactgctgttgttacctgggaaccctggaggggccttcctcatccgggagagccagaccaggagaggtgctggagaatctggtaaaagcaccattgtgaagcagatgaggatcctgcatgttaatgggtttaatggag

SEQ ID NO: 364415 - DNA, 89 bp, Homo sapiens
aggacttttgggaatgaggctcgattcatcaggcggtcttgtacacccaatgcagagtcaggatctggtgattttgaagagaaaccaca

SEQ ID NO: 364416 - DNA, 98 bp, Homo sapiens
ctctcctcccctctggatttctcagagataattttccccagatggcccatcagaagcggttcatcgaacggaagtacagacaagagttaaaagaaatg

SEQ ID NO: 364417 - DNA, 109 bp, Homo sapiens
gatgaggtgatggcaacggccaacttcggcaagatccagatcgggatttacgtggagatcaagcgcagcgatgatatttggagttcttacaacatggcagacattgaca

SEQ ID NO: 364418 - DNA, 82 bp, Homo sapiens
gtaactgcctcagccttctgagtagctgggattacaggtgtgcaccaccacgcccagcatcttggactcaagtgattctcct

SEQ ID NO: 364419 - DNA, 73 bp, Homo sapiens
catgacgagctctagctggatgggcgcagagggatgctgagaacttgctggagtcacagccactgggatcctt

SEQ ID NO: 364420 - DNA, 101 bp, Homo sapiens
cgtgtctgttgctgatgcctcaaaaagtgtgcatgatggtcattgtcctccagagcagtgatggaggaaataccagcccaggaagcagcagggtcaccaag

SEQ ID NO: 364421 - DNA, 99 bp, Homo sapiens
cagtgcctcagagtgcagttcccaaggaggcttcaagacaaagggccccttacacaccagacagaaagaatcttcaagagggagacatagggaaaagga

SEQ ID NO: 364422 - DNA, 96 bp, Homo sapiens
gaatccagtaccaaaaacgtcaacaacagttttacgacctgaaggctgaaattgacaagttggccactgagtatatgagtagtgcccgcagcctga

SEQ ID NO: 364423 - DNA, 106 bp, Homo sapiens
gagtgcgcagggcgacggccccacctccggccactgggacggcggcgcggagaaggcagctgcagaaccttggcctgaaaatgctacattatatcagcaattgaaa

SEQ ID NO: 364424 - DNA, 82 bp, Homo sapiens
ggaaactggatgcagcaaggaaataggatttaaccgctctctgcctcccaggactctccttcagcaactccagaagcttcag

SEQ ID NO: 364425 - DNA, 98 bp, Homo sapiens
catcaagggtttccaaacactctgaatcccattctcgatcaagatcaaaatccagctttcaccaacaatcaccagtggtttacacaacattgcaagga

SEQ ID NO: 364426 - DNA, 75 bp, Homo sapiens
tgaagctgactactaaggagaataaggtaacaaacctgaatttggcaactggcatcataaacagaagcagtgctt

SEQ ID NO: 364427 - DNA, 100 bp, Homo sapiens
ctagtggaagttactgccgcgccaccgagtccggaccggagactttggggcctaactagtgatttcctgaaggaaatataatgatctgttcatcgaagta

SEQ ID NO: 364428 - DNA, 76 bp, Homo sapiens
aagaaatggaagcttatacacccaagttaactcaggacccactgatctcagcatgaagagacaattggcgactagc

SEQ ID NO: 364429 - DNA, 100 bp, Homo sapiens
atcagatcacacggcggcttggagaccggagcggttgcagggcacacattactcggtgcagtcggacatctggagcatgggcctgtccctggtggagctg

SEQ ID NO: 364430 - DNA, 74 bp, Homo sapiens
cgcgacgctatggcgcactggagtaccctgttcctggcaggtgttccaatgaattcactcaggtttctctttga

SEQ ID NO: 364431 - DNA, 88 bp, Homo sapiens
gaaggacatgcgcaaagttctgagaacattacagcagatcaagaaatccagctcaactgaagaaaaggtgactggtctcatgagccct

SEQ ID NO: 364432 - DNA, 75 bp, Homo sapiens
atgcttgctcaggctcagagggacctcacccctgagcagcctgagagacactctcgtaagttacatgcaaactaa

SEQ ID NO: 364433 - DNA, 98 bp, Homo sapiens
ggcagattatggctttgtccccacccagcactgatgatattataaagacacattcagctaacgtattttagcaggtggagtgaggttgaagattcctg

SEQ ID NO: 364434 - DNA, 100 bp, Homo sapiens
ggaggaagaagatgatgaccgaccccccaagaaaccccgccatggaggcttcattctggacgaggctgcattcgcaacgacaggcgcctcctctgccaac

SEQ ID NO: 364435 - DNA, 90 bp, Homo sapiens
catcaatacttttcggattaaatctggaaatgaaaatggagagttctacctacgagctcaacgagaacctttgacaagagcacgaagtga

SEQ ID NO: 364436 - DNA, 83 bp, Homo sapiens
gactgagagaaacccactgaagacgtctgcgtgagaatagagaccaccgaggttttgagcaaaattttggactgtgaagcaag

SEQ ID NO: 364437 - DNA, 74 bp, Homo sapiens
gccacgatcgcagactccaaccagaacatgcagtccctgcttcctgccacaggggcaagtgtccgagtggtgaa

SEQ ID NO: 364438 - DNA, 96 bp, Homo sapiens
cagccacatcattgctttatgtggccccaggatgcaggccctggtgctactcctctgcattggagccctcctcgggcacagcagctgccagaaccc

SEQ ID NO: 364439 - DNA, 74 bp, Homo sapiens
cgctactcgcaggaggtcttcgctgctgcagaagaatattttgcctgctggaacctgctgtatctactcaagag

SEQ ID NO: 364440 - DNA, 100 bp, Homo sapiens
aaggttctgtgggctgcgttgctggtcacattcctggcagggtccagcgagggcactatctctatggccgagggtgaagacctcagtcttatggaagaag

SEQ ID NO: 364441 - DNA, 80 bp, Homo sapiens
gatgtgcgagaactgcgcagacctggtggaggtgttaaatgaaagttgtttgcattcgctccacttggaatgctctctct

SEQ ID NO: 364442 - DNA, 50 bp, Homo sapiens
cacccggccttactgaggaacaaaggggcatttttggtcgaagagagctg

SEQ ID NO: 364443 - DNA, 83 bp, Homo sapiens
aggacgtggcgcgggtctccagtgcttcaggaacatcatcttcagcgggctatttcagcacagcaggtgtatggcgagaagag

SEQ ID NO: 364444 - DNA, 100 bp, Homo sapiens
caactgaaaatagggtcctccctgctcctgcccccaggcgagagaaaacgaatgaagagttgcaaggcccaggagcactacaatgccacgcagaagggcc

SEQ ID NO: 364445 - DNA, 90 bp, Homo sapiens
ccaagaacttctacgggggcaatggcatcgtgggagcgcagaacaaatcattcacatgtactttgttcatgccctttgaagagtttgaaa

SEQ ID NO: 364446 - DNA, 75 bp, Homo sapiens
aacttatatcgccagtccagcagctaaggatattttgtgcagtattggctggagttggcgatgactcagcagatc

SEQ ID NO: 364447 - DNA, 90 bp, Homo sapiens
tgtttcccattgcagcccaggtggataaggaacatctcttcccagcggctcaggttcccgatatggatgatgaagaaggagaaggagaag

SEQ ID NO: 364448 - DNA, 98 bp, Homo sapiens
tcagatgcagctgagcctggcagaaagtgaagcttccttgggaaacactgtgagccaatggtggcagcagaagtaggcgtatgggataactattgtgt

SEQ ID NO: 364449 - DNA, 123 bp, Homo sapiens
gaggacacgaggcggcgggctggagacatggaccgcggcgagcaagcattttgaaagcgaagcagaagccgtagaatcagcggcgagcctgttgaaagaacccacaggtgcatttcacagcac

SEQ ID NO: 364450 - DNA, 98 bp, Homo sapiens
gacgctgctcaaaacctcgctccggaaaggggacacctggcattttgttcccaacatcacctttggtcaccctgtggtagaaagccttcgaaagcagc

SEQ ID NO: 364451 - DNA, 83 bp, Homo sapiens
ctgtacttgagcagtcacctggcacagaagtcccgggcccagagcccggccagcaggagcagttggtcttcggcagcggggat

SEQ ID NO: 364452 - DNA, 85 bp, Homo sapiens
cgcgggagccggggcggcccttggccgcattcccgcccgtcccgcagcggcgcgcggagccagaggcctttgaaattgttgttcg

SEQ ID NO: 364453 - DNA, 82 bp, Homo sapiens
gtgggatccggttccttggtgtcatccagccttagcaaaccagaggtttaccgacaagactgtgaaactttcgggatggtgg

SEQ ID NO: 364454 - DNA, 98 bp, Homo sapiens
tccgttgccttgggcggtcgttttgcgcaccctgccgggagttgtagtcctggacccgaaggtacccactgatggtaatgctggcctgctggctgaac

SEQ ID NO: 364455 - DNA, 100 bp, Homo sapiens
caagagtcggcactgggaacagctgtgcgtagaccagaccagtgacttataagcaaaacccttgaagatcgtttgaaaattgaagcaaaaaatgggacat

SEQ ID NO: 364456 - DNA, 75 bp, Homo sapiens
tgccgccgcaccctgcacacccgcccctctcctgtgccagcaaccatgtccaagggacctgcagttggtattgat

SEQ ID NO: 364457 - DNA, 100 bp, Homo sapiens
gcaacatcaagggagttttccggggccctctcagcaagaacgggaacaaaactctggaactcttggtgtaataacagaagctacaataaaaatcagacca

SEQ ID NO: 364458 - DNA, 82 bp, Homo sapiens
ttgaatgttgaagatgtccttaccagctttgacaatacaggaaatgtttgacatccaggcagaaattgatgcccacaatgac

SEQ ID NO: 364459 - DNA, 82 bp, Homo sapiens
gatatctggggccaagggacaatggtcaccgtctcttcaggttttaaaatcaaagatgggaaaatcggagaaaattgccctt

SEQ ID NO: 364460 - DNA, 85 bp, Homo sapiens
caaatgccccaaggatgaagaacggagacggtgtgatgaatgcagactctgctaccattttggctgtttggatcctcctttgaaa

SEQ ID NO: 364461 - DNA, 100 bp, Homo sapiens
agaaaagaaagatgcagaggaagaggaaagcgaactggttgttgaagattggaaattcatagcccaggttcttgatcggatgtttctgtggacttttctt

SEQ ID NO: 364462 - DNA, 75 bp, Homo sapiens
aggccatgctctggcaaaaacaaaacaaccctttttgctgcacatgtaagtggagctgtgcttacctttggtatg

SEQ ID NO: 364463 - DNA, 100 bp, Homo sapiens
cagccgctcgcccctcttttccatgtatccgtccagtgcatgactcctgatcagctgatgacattatgcaaagcaggcattcatagtagtaatgtcgggg

SEQ ID NO: 364464 - DNA, 75 bp, Homo sapiens
ggcatcacttgccccatcgtccccgggatctttcccatccagtttgatgaaggccggaacaactttgaaggggag

SEQ ID NO: 364465 - DNA, 75 bp, Homo sapiens
ccgtggttgccaggagagctgcgccggcgagaagcggccgagccagcagcagctgtaacatcttatgaagatctt

SEQ ID NO: 364466 - DNA, 85 bp, Homo sapiens
ggttttgagaggggaagatggggacaaagccgctccacctcccatgtcggcacagtataaccccgttttcacacgaatggcccct

SEQ ID NO: 364467 - DNA, 50 bp, Homo sapiens
atgcatgcaccaaaacgaggacaggatatgaataatgccaaattatttag

SEQ ID NO: 364468 - DNA, 75 bp, Homo sapiens
tctgctgcggcgcggggaccgctgtgctctcgggaaagcaggcaggatgggagagtcgccgatagaaccacctct

SEQ ID NO: 364469 - DNA, 100 bp, Homo sapiens
tctaaatgcagattccagaaaaattacagcacatctcagtgaatttgcaagtggtgcgagaagatgtactaaattcattgaataacaactttcttcaaac

SEQ ID NO: 364470 - DNA, 75 bp, Homo sapiens
ctggagtttgcagcccagtaccctcccacctttgaccgggctggagtgcaatggcgagatctcagctcactgcaa

SEQ ID NO: 364471 - DNA, 101 bp, Homo sapiens
ttttgcttggtacacaaaatggatctggtacaggaggatcaacgggacctgtgggggcttatttggcctccccaggatggactggagcatcagtagtgccc

SEQ ID NO: 364472 - DNA, 75 bp, Homo sapiens
cgggacttggccgagcggatcctaataaggggaaaatgcagaaagatgaaggtcttagaatcattgattggaatg

SEQ ID NO: 364473 - DNA, 100 bp, Homo sapiens
cagctgtcagaggggcaggagcttctgggagccaccgtctgaaggttatgatgtgattgctcaagcccaatctgggactgggaaaacggccacatttgcc

SEQ ID NO: 364474 - DNA, 100 bp, Homo sapiens
tcctgcacaggcagacgcgggccagcctcagcaccgacagccgacgcgcagatagcagagccatccttggggttatcaatactctggctgaccatcatca

SEQ ID NO: 364475 - DNA, 100 bp, Homo sapiens
tatgtttgcagtacacaactcccagctgaaaggtgtggacactgccagcggctgcagccgacttggaatgacctgggagacaaatacaacagcatggaag

SEQ ID NO: 364476 - DNA, 83 bp, Homo sapiens
ccgccgccgcctcgggtcgtggagccaggagcgacgtcaccgccatggcaggcatcaaaggtttacaggtacatacattacac

SEQ ID NO: 364477 - DNA, 50 bp, Homo sapiens
aacctggcagccgccgccgtggaagggattgccatggaaagcataactgt

SEQ ID NO: 364478 - DNA, 88 bp, Homo sapiens
gccatggcggcccccggcagcgcccggcgacccctgctgctgctactgctgttgctgctgctcgtacctggagtagaacagaaaaatt

SEQ ID NO: 364479 - DNA, 100 bp, Homo sapiens
tctgtcactcacttacacagtattgggaaatctgtgaaagaacactgatatttgcatttaatggggaacaaaagatgaagaaggaaaaggaatatattca

SEQ ID NO: 364480 - DNA, 100 bp, Homo sapiens
cttctgtttacatggaactcagacatctgcaaatcatggcctgtatccggtgtccgaggcgaactcagtaagatgatgttaagaggaaacctgaagcaag

SEQ ID NO: 364481 - DNA, 100 bp, Homo sapiens
ggagagcggcgcgagaagcggcggccgcgtcctcaagccggcacctgagcggcggagacggctgtagcacaaggtttcaagtgccccatttgctccaagt

SEQ ID NO: 364482 - DNA, 100 bp, Homo sapiens
cttggagtgcagtgaacccgctgctcagagagacaagagagacacctccaacttcgacaaagagttcaccagacagcctgtggaactgacccccactgat

SEQ ID NO: 364483 - DNA, 75 bp, Homo sapiens
cccagcggcagcagcagcggcgggaggagcctccgggaaatcaagatgactaccagctggttcgaaaattaggcc

SEQ ID NO: 364484 - DNA, 73 bp, Homo sapiens
ccagaccctctcctttccctttgagaccgtgaagagaaagatgcagagacgagttgtactgctgtcacaggaa

SEQ ID NO: 364485 - DNA, 98 bp, Homo sapiens
taggtcgatggtcggcggcgcccggatgggcagctgagatatatttttgccatcatggatcagtttggagatatattagaaggtgaagtggaccattc

SEQ ID NO: 364486 - DNA, 90 bp, Homo sapiens
ctttccaacgctgtaaaaaaggacagaggctgttccctatggcaggagaccaagacacattccaccccagtggggggtcccataccactc

SEQ ID NO: 364487 - DNA, 83 bp, Homo sapiens
ctcccgcgcctcgctcagctccaacatgagatgtgaactttgtccccataaggatggagctttaaaaagaacagataatgggg

SEQ ID NO: 364488 - DNA, 83 bp, Homo sapiens
gggtcccccgacctctcctcactctcgctcgccgtttccaggagcacaggtgtcccgacccaggctaagcttgagcatggctg

SEQ ID NO: 364489 - DNA, 75 bp, Homo sapiens
aacttgagcagtaatctgaatatttctcaagttcaagggacttataaatatggggtggtatttccaacattttgg

SEQ ID NO: 364490 - DNA, 75 bp, Homo sapiens
ccgtgaccgagagcgtgaccgagagcgcgaatatcgtcatcgttagaaggtactttgcagcaactcagtttgaac

SEQ ID NO: 364491 - DNA, 83 bp, Homo sapiens
cgcagcgttgtggaggggcgggccggacgctgagcggagcagctgcgccacggttgtgaccgagattcccgacgagagagact

SEQ ID NO: 364492 - DNA, 100 bp, Homo sapiens
ggcactgctcctgctggccgcctggacggctcgggcgctggagcttcatcgcagtaggaatggcagccccatctatgaaggaaagacaggtctgctgggg

SEQ ID NO: 364493 - DNA, 97 bp, Homo sapiens
cccagtacagctggacgtttgccgtccactctgaggtcacagagatgcggcggaccctgacgcctgccagctccccagtgtcctcgcccagcaagca

SEQ ID NO: 364494 - DNA, 76 bp, Homo sapiens
ggaagtcttggctttgctgcaggggcctcccagtagcattggatgcaggaaaaaatacattgacggtgaaaaacaa

SEQ ID NO: 364495 - DNA, 100 bp, Homo sapiens
gtgaactttcacggacaacctcagaggacaacgaagtgttcgagacacctatggctgccgatgaaggctcagcagagaaacaggcaggagaggcccacat

SEQ ID NO: 364496 - DNA, 80 bp, Homo sapiens
ctaggaattctcttccacagcacctgaaagagttagctaaattacaagatcgagaatggttaacagaactttttcaacaa

SEQ ID NO: 364497 - DNA, 100 bp, Homo sapiens
actatttttcatgacctttctcatctgactcgtgatctgcccatcttgttactccctagcagtgtggtaaggaaaatatatgcagatgatgaacattctt

SEQ ID NO: 364498 - DNA, 100 bp, Homo sapiens
tgccgggacccgaaatccttcctgtaccgcttatgccaggccgatcccgacctggactcagacaaggtacgaggaacagcaaattcaggaaaaagtggcg

SEQ ID NO: 364499 - DNA, 96 bp, Homo sapiens
gctcctgttccctgtgagctgcctggtcctgctgcaggtggcaagctctggaaaaccaattctgtgtcctcggaggaccacagcccagttgggccc

SEQ ID NO: 364500 - DNA, 100 bp, Homo sapiens
acatgcaagatcttccggcctccccgggcctcccattgcagcatctgtgacaactgtgtggaggcattcgacttacagcagtgtgcggccagccagcaga

SEQ ID NO: 364501 - DNA, 75 bp, Homo sapiens
tgagaacttaatcttccaaaatgtcaagaggtcccaggtgattgaaaagtttgaggccttggacattgagaaggc

SEQ ID NO: 364502 - DNA, 100 bp, Homo sapiens
gctcaccgcagtcgtgcaggatctgaaggaggaagaagtctttaattacattcacaatatcttatccattcccggacacagtgcagaggagaagcagtct

SEQ ID NO: 364503 - DNA, 90 bp, Homo sapiens
agtgccaagacttggttaaagtcattgaggactttccagcaaagattccagtcaagaatacactgattcaactggcatagatctacatga

SEQ ID NO: 364504 - DNA, 98 bp, Homo sapiens
tagccaccaaactgattatgaattgccctgaaatctgaaaaatttcaattccaatcggaaacggcatacactggagaagaatgtgttggttgtctctg

SEQ ID NO: 364505 - DNA, 90 bp, Homo sapiens
tgatttgtttttggcatactacgtgcaggagcaagtgtgccacctgggcttgaaggcatgaaggaacaggacctgtgcaacaagataatg

SEQ ID NO: 364506 - DNA, 75 bp, Homo sapiens
ggacaatggtcaccgtctcttcagcactctcgagtggaccctgaggagctcttcaccaagctcgaccgcattggc

SEQ ID NO: 364507 - DNA, 100 bp, Homo sapiens
aagagaaactgcaccttatcacccggaacctgcagtccaagccttatgcatttgatcgggtgttccagtcaagcacatctcaagagcaagtgtataatga

SEQ ID NO: 364508 - DNA, 96 bp, Homo sapiens
gacaggaatggaacacacttggatgcagattggaggtggacacaaaggaagaggcagccagacagctacttcagcgtcctcaacgcattcatcgac

SEQ ID NO: 364509 - DNA, 101 bp, Homo sapiens
ttattatttgttgaaggattttgcactcaccattaaatctatcagattgttcagttcaagggaatgaagaattcagaataattttggtaaatggattccaa

SEQ ID NO: 364510 - DNA, 75 bp, Homo sapiens
ctttcatcattcacccttggcacagaatggccaacctgctgacgggccccaaacggaacctgatggccctggccc

SEQ ID NO: 364511 - DNA, 75 bp, Homo sapiens
cggacgcaagatggcgacggcgaccatagctctcccatcgacgagtacaagccccaggatgctaccaccaacccg

SEQ ID NO: 364512 - DNA, 75 bp, Homo sapiens
cgacaaaatattgaagcaaactttattaaaccaaactttcagcagttatttagggcttttacctttacagtcatc

SEQ ID NO: 364513 - DNA, 75 bp, Homo sapiens
taaatcttcagtgggacaatgggttcagacaaaagcaaaccattcctcaagcaactgcagcaaaatatccccgga

SEQ ID NO: 364514 - DNA, 100 bp, Homo sapiens
cgccagcctcaggccgtccgagcccttcctgaccccgtacctgctggggccggacaagaacctgaccgagagggaggatgctgatatgctaactggtgat

SEQ ID NO: 364515 - DNA, 50 bp, Homo sapiens
tgaagagggaagacacgcggaaacaggtttgagtacaagctcagcttcaa

SEQ ID NO: 364516 - DNA, 101 bp, Homo sapiens
cagcccagctcgcgcttcagcgtcccggcgccgtcgcgccactcctccgagtcagtcttcactgtttccaatggaagatggattcttggatgatggccgtg

SEQ ID NO: 364517 - DNA, 74 bp, Homo sapiens
gtagcttggttggtggtaccctaaaattagggcatgattaagagcatggatcattttgatgacattggtcccag

SEQ ID NO: 364518 - DNA, 75 bp, Homo sapiens
cgggttattcgagtgaccgagaccgcggccgggaccgaggcattccacgcctacgggaaggcaggcaagatgctg

SEQ ID NO: 364519 - DNA, 102 bp, Homo sapiens
gactaccagaaggcttatgaggatggctgcaagactgtcgacctaaagcctgactggggcaaggatgagccccaagagcctcaagaacccaacaaggtgccc

SEQ ID NO: 364520 - DNA, 74 bp, Homo sapiens
gggtttagcaaaagttcatctccttctgcatccttaactgagaatgaggtacagcctttccttcataccatttg

SEQ ID NO: 364521 - DNA, 102 bp, Homo sapiens
ctgttttagtgctttttatttttccccaattcagcagagaatattttcaagggggggggatatgagactttctactcggaatatcctgagtgttgcgtggat

SEQ ID NO: 364522 - DNA, 83 bp, Homo sapiens
gaacgcttcactggggcagtctctgcatatcatggggagatagacgctgctgcctagcgatatctgaagtggctctgatgcct

SEQ ID NO: 364523 - DNA, 75 bp, Homo sapiens
acgcgcttttgctcctcctgaagtgtctttggtccaacgttgttccagctttgcccgaagtttttacatacaaat

SEQ ID NO: 364524 - DNA, 100 bp, Homo sapiens
agctcagagaagtgaagcaacttgcccagctatgagagacagagccaggatttgaaaccagtccacaagaatcggaatgtcagttaatgctattcgcaag

SEQ ID NO: 364525 - DNA, 100 bp, Homo sapiens
gttcgacagagttcttttgccctgttaggtgacctcacaaaagcttgctttcagcatgttaagccttgtataggcacgaaggcagttccagtctcagctg

SEQ ID NO: 364526 - DNA, 76 bp, Homo sapiens
gatgctggctcacgttcgaaccctggaggatgttttagaagaatgtatgtctcttcccaagctatcttcttattct

SEQ ID NO: 364527 - DNA, 96 bp, Homo sapiens
gacgacagtcaggagctcagtatggctcttttccaggagtggttaatgtgttgctaacaactccactctgggtggtaaacaccagactgaagcttc

SEQ ID NO: 364528 - DNA, 83 bp, Homo sapiens
aaccaagaagaaatttggaaaatgaagcctaggagaaatttagaagacaacgattatttgcataaggacacgggagagaccag

SEQ ID NO: 364529 - DNA, 75 bp, Homo sapiens
tgctcgtggagtttgcacataagtggaacaagaactgccaatggagatcttcgtggatgatgagacgaagttgac

SEQ ID NO: 364530 - DNA, 83 bp, Homo sapiens
catcacctacccgcagggcctggcactggccaaggagattgtcaccttcaggccattcagaggaggaaagagaggggaatatg

SEQ ID NO: 364531 - DNA, 75 bp, Homo sapiens
agtatgcacttaatgtccctgttcaatgtatctatgcctgcctacctcaatctgcaagggagtgtcagaaaggcc

SEQ ID NO: 364532 - DNA, 74 bp, Homo sapiens
gaagagcagagcggagggagccccagacacggttaaaaataagaagttggttgagctgctgagaaggaaagttc

SEQ ID NO: 364533 - DNA, 100 bp, Homo sapiens
gggcacccacggagcctccggggctgggatcagtttcattcacggatgtgactgtggactttacccaggaggaatgggaacaactggacccctctcagag

SEQ ID NO: 364534 - DNA, 150 bp, Homo sapiens
tttctatggattaaattttttgctgatggagagctggaatctatgggattttcagctcgatacaatttcacacctgaggacagttatgggatggatgggaaggttaatcagccccgtctcactgcagacatcaactggcaaggcctagag

SEQ ID NO: 364535 - DNA, 98 bp, Homo sapiens
tttgattcctcagtgttctcagaaaaaggctcagaagataacagaactccggccctttaatagttgggaggctctgcaagaaccagttgagtcatctc

SEQ ID NO: 364536 - DNA, 50 bp, Homo sapiens
cacacatgttagagcccttctgaaaaagaagctgaagagggaactaccct

SEQ ID NO: 364537 - DNA, 83 bp, Homo sapiens
ggtgaagcgtgaggccggcatcgtctttccgtcctctgaggcgacggccgcggctgcacagatacgatgaatggattaaagca

SEQ ID NO: 364538 - DNA, 100 bp, Homo sapiens
aaaaaagcagacaatctgaggatgatgttgacttggggatccaaaggcacagacttaattcagtgcacaaatgagatgaatgtgaacatcccacagttgg

SEQ ID NO: 364539 - DNA, 100 bp, Homo sapiens
tctcttacgtctgcggaagtgcagctgcctcagttcttagcgcagggagaaagcccaggagctgtcggactggatccaccagctggagtctgagaagttc

SEQ ID NO: 364540 - DNA, 74 bp, Homo sapiens
atgccaacattccagttttttaagaagggacaaaagaaaagtcttcctcaatgtcatcactcaatattgcgaag

SEQ ID NO: 364541 - DNA, 75 bp, Homo sapiens
tatgactctctgcagcgggatcaagctgtgtgcattagtacaaatggctaccaagcagtttctcgaagagattaa

SEQ ID NO: 364542 - DNA, 80 bp, Homo sapiens
aaatgttcttaatggcatctagaatggaactgtggctgcaccatctgtcttcatcttcccgccatctgatgagcagttga

SEQ ID NO: 364543 - DNA, 75 bp, Homo sapiens
gggactgctttcactttctgtcaggcagcctcagtcagagcaccctgaagtttttgctcctgaatccagctgtgc

SEQ ID NO: 364544 - DNA, 100 bp, Homo sapiens
ccagtccttggatccctcctaaatttacctggaattagatcaattttccatggtctggtaaagttaaagatattctgcaaaatgtctttaaactggaaaa

SEQ ID NO: 364545 - DNA, 78 bp, Homo sapiens
aagtgggagcttcaggctcgctccgtgcggaagctccaccatgaggcgaggtggatggaggaagcgagctgaaaatga

SEQ ID NO: 364546 - DNA, 101 bp, Homo sapiens
cgccagtcaataggaagtacgagtgattatatgcgtcaggcaggagaagtgacttatgcagatgctcacaagggacgcaaaaatgaaggggtgattgaatt

SEQ ID NO: 364547 - DNA, 100 bp, Homo sapiens
ccatgaagaaatgatgaagatgcgacaggctaagctggattatcagcactggccccctcaccttttcctttccagctgtttggggctcagctaagtgacc

SEQ ID NO: 364548 - DNA, 85 bp, Homo sapiens
caccactgtttccacgacagcagcagtgctgctctacgttcgaaaggagtcagaagaagtctttgatgccctgatgctcaaaacc

SEQ ID NO: 364549 - DNA, 75 bp, Homo sapiens
gggatttataacctctccaaaggagtcaaccgattctgcctgtccaagcctgataatgctaagtttgcaacagag

SEQ ID NO: 364550 - DNA, 141 bp, Homo sapiens
taaggaataatttatgaagctccgttgactaccgtggagagatcataatttggggttcaagattccagcactggcttctctggactttgcacacctccaggagaagaacccagaaaattgatcagttctaaaaaaccatgc

SEQ ID NO: 364551 - DNA, 74 bp, Homo sapiens
caaataccagctcgacaaagatggggttgtcctctttaagaaggccgccatggcatcagatgaaggcaaacttt

SEQ ID NO: 364552 - DNA, 100 bp, Homo sapiens
gagcagcaactcacccagcacacaaaatggatctcttacggggcagaggcctggcctccaggggtttgtcttaaatatgtcgggggagaccaatttggac

SEQ ID NO: 364553 - DNA, 100 bp, Homo sapiens
aaccactgaaaggggtagatcctaacttaatcaacaacctggaaacattctttgaattggattatcccaaagcagctgttgtgctgtgtatggacgtggg

SEQ ID NO: 364554 - DNA, 100 bp, Homo sapiens
tagagtcactctgctggttgctgagcaagtgtaaagacctcagccaggtggaataaaccgagactactccttccttgactacatcctgggaggctgccag

SEQ ID NO: 364555 - DNA, 76 bp, Homo sapiens
ctagaaatctctgacacatcttgaccatgagaccacggctggtttttggcagcttttcctaaaaggattgtacacc

SEQ ID NO: 364556 - DNA, 125 bp, Homo sapiens
gctggagcaggagcggggccggaactggagccgaggcgcaggtggcgctggcttcggaaccaaaaagaagcttcccagagccggggccaggagccccaagcgccctctagcagcaaacacagaag

SEQ ID NO: 364557 - DNA, 75 bp, Homo sapiens
atcaccttcaaggagcacaagtagctgctcttccaagcaaggaagtcgacagtttcaccagtgatcattaaagaa

SEQ ID NO: 364558 - DNA, 100 bp, Homo sapiens
gccttcagacttctgtacagcagctgaaagaccagcattactctactgactggcagagacaggagaggtagatgtccacgcccacagaccctggtgcgat

SEQ ID NO: 364559 - DNA, 121 bp, Homo sapiens
tggaaattaattgctatcaatgcgaatgatcctgaagcctcaaagtttcatgtttgcagctcaccttgtgaagatgaaatatccaagaatctgtattctagatggtggcattaataaaata

SEQ ID NO: 364560 - DNA, 76 bp, Homo sapiens
tagaattaagagttaaaactgtgaaatactttaaagagaatagtgacagtggtacaggaaagaaagaaaaagaaaa

SEQ ID NO: 364561 - DNA, 87 bp, Homo sapiens
agtgatagaaggcaaagttgaccagatccgagccagagtggagcgtaacgcagtggattttttatcaagcagaaatgcatcgaacaa

SEQ ID NO: 364562 - DNA, 75 bp, Homo sapiens
aagatggcacatggcccaggcagaccttgcagtcaaagtatcgaaggatgatcgcagtgatgtggagagcagctc

SEQ ID NO: 364563 - DNA, 100 bp, Homo sapiens
tcaaaggtcacctgtcggggactactggagtattttaaggcacgtgtggttctcaaatataggcattctgatgggaacttgtgtgttaaagtaacagatg

SEQ ID NO: 364564 - DNA, 134 bp, Homo sapiens
tcgtgaccgagaccgtgaccgagagcgtgaccgagagcgcgaatatcgtcatcgttagaagtcctgacacagctctccctgaggagcagccacattccagctcccagtgcgcccctctccactgtctctccaag

SEQ ID NO: 364565 - DNA, 75 bp, Homo sapiens
agcggccgccgccgctgccgcttccaccacagaattcagaaggagctggcggacatcactttagaccctccacct

SEQ ID NO: 364566 - DNA, 74 bp, Homo sapiens
gtggctatcatactggctattatatggtgccttggaatttgtgtcgctgagtcagcaagcctttcagatttgcc

SEQ ID NO: 364567 - DNA, 101 bp, Homo sapiens
ctcacgcacccaggattcctgctgcccacagtgtacagttcttcgtgccatgaaggaggacagtgaaaaagttccgagcttgttaactgattatattctga

SEQ ID NO: 364568 - DNA, 74 bp, Homo sapiens
tgacatttaattttagggtcctttatatagaagggagagtagggcagcagagaagaaagtggtgaaaattacat

SEQ ID NO: 364569 - DNA, 96 bp, Homo sapiens
acagctctgcggcccaggcccaaggtgagaagccttataagtgctcatgggagggatgtgagtggcgttttgcacgaagcgatgagctcacgaggc

SEQ ID NO: 364570 - DNA, 82 bp, Homo sapiens
ggttcagctgatgaagcttctgaaccatccacacatcataaagctttaccagttgatattcactgatggactccaaagaatc

SEQ ID NO: 364571 - DNA, 75 bp, Homo sapiens
gaaaaacttagcccatgggacatggaaccaattcctgataatgataccatggcctgggagaccatcctgatggat

SEQ ID NO: 364572 - DNA, 100 bp, Homo sapiens
gtaatcgcctgtttcaagaaaactctgttctcagttcactccccctcaattctctgagtaggaacaatgaagcctctaattgtggcattgtagaaagtat

SEQ ID NO: 364573 - DNA, 51 bp, Homo sapiens
ctgctggacaaatattttggaaatgccatccacggcttccgagagacagag

SEQ ID NO: 364574 - DNA, 100 bp, Homo sapiens
gattacaggagtgagccaccgcgcccggccggtacctaccagggccagtgggccggaggcatgcggcatggctacggcgtgcgccagagcgtgccctacg

SEQ ID NO: 364575 - DNA, 101 bp, Homo sapiens
gaattagattacagcgatggggacacagaaggttacattggcgaatttgaaatcattgatgaccacagagctgggaaaattgttgtgaacctcacaggcag

SEQ ID NO: 364576 - DNA, 82 bp, Homo sapiens
cggagcgacgcggcctgggaggataagggggatatgagactttctactcggaatatcctgagtgttgcgtggatgtaaaacc

SEQ ID NO: 364577 - DNA, 90 bp, Homo sapiens
cttggcaacaatgactgaccagcagcgtgaagacatcacatccagtgcacagttggactcagagttaacagcccgacatgagctacaggt

SEQ ID NO: 364578 - DNA, 75 bp, Homo sapiens
gcgggatctaacccaggagcagacagagaagctgctgcagtttcaggccgcatctacaagtgcttgtttactggc

SEQ ID NO: 364579 - DNA, 75 bp, Homo sapiens
gatgaaagctttgtatgaacaaaaccagtctgatgtgcttgccgagggaccgagcttgatgatggcatccaggcc

SEQ ID NO: 364580 - DNA, 101 bp, Homo sapiens
acgaatgtgaagaaatgttgaaactatttaaagaggttgctagcttacaggtttagtgtttcaaatgacttaaagtatgatgctgaaagagatttaaggga

SEQ ID NO: 364581 - DNA, 82 bp, Homo sapiens
tcgtagatacaaatttttggatgatgatggatccatttctcctattgaggagtcaacgtctatcagccacagtctctgcaag

SEQ ID NO: 364582 - DNA, 75 bp, Homo sapiens
tcaaagataaaccctggcatatttgtcttagagtttgaaagagtctatcttgataatctccccagtgcatccatg

SEQ ID NO: 364583 - DNA, 50 bp, Homo sapiens
gtgcccggcgagtacctccgctctcgtgtgaaggcaaagaagaatgctgc

SEQ ID NO: 364584 - DNA, 50 bp, Homo sapiens
agaaaactggtcaaggaagctaagtctcaggggatccagaactgcagcca

SEQ ID NO: 364585 - DNA, 100 bp, Homo sapiens
gctctctaaattgactcagctccaggcctcttctgaagagctgaaagctgcctaccggaggctctgtatgctctaccatccagacaagcacagagaccca

SEQ ID NO: 364586 - DNA, 82 bp, Homo sapiens
ctctgctgatcccactctgaaggccggggggtggcccagttgaaatccttcccttcctctaccttggaagtgcctaccatgc

SEQ ID NO: 364587 - DNA, 75 bp, Homo sapiens
gcgggagcagccaagtggactggactcttttcttgacttagctaccagacaatgcagatcttcgtgaagactctg

SEQ ID NO: 364588 - DNA, 100 bp, Homo sapiens
ccggctttgaccgcgctaagatggcgactcccatgcatcggctaatagcccggagacaagcctggcataaccttgacaacagattgccttgaagatagcc

SEQ ID NO: 364589 - DNA, 80 bp, Homo sapiens
gctaggagcgctctgtggtgcctggggctgaacgcggctttctgccctgcctgatgtggctctgggaattcctgcagaga

SEQ ID NO: 364590 - DNA, 75 bp, Homo sapiens
ctcattgaattttgtgcaggtggagcagtagatgctgtgatgcttgcactgccagtgaaagatgtagaagataaa

SEQ ID NO: 364591 - DNA, 90 bp, Homo sapiens
cgaaaacgtggttgtagagttccgtgactcccagaatttatccagttggcgaaggactttgaggatttccgtaaaaagtggcagaggact

SEQ ID NO: 364592 - DNA, 75 bp, Homo sapiens
ggcacttggagtccggacatctgaaacttggatcacacaagaggagtttgagccttggtgataaagaaataagcc

SEQ ID NO: 364593 - DNA, 101 bp, Homo sapiens
ccagcactggactcatggaggctgagcatttattcaggcagactcagtgggatcctcctacttgggaaagcccaggagatgatgccagccttgagcatgaa

SEQ ID NO: 364594 - DNA, 100 bp, Homo sapiens
cagccatgcaaaggcaggggaggaagccacctcgaggtaaaagtcttgcagtgaaaaacccgaggacccttaccgcaagtgtcttttgctcccagctact

SEQ ID NO: 364595 - DNA, 51 bp, Homo sapiens
acaccaaaccattactggcttctaaggaacaagagtttgttcagaaacaac

SEQ ID NO: 364596 - DNA, 83 bp, Homo sapiens
ttgtccccgcaggcactcacactcctgggagccggctccagatattgatgatgttaagaagttcaaaccgggttacctggaag

SEQ ID NO: 364597 - DNA, 80 bp, Homo sapiens
aatgttctggttttaaaaaatacatatctggttttggagaataaaggcagccccgttgatgactgaaaatgacaaagcat

SEQ ID NO: 364598 - DNA, 82 bp, Homo sapiens
cacggcgactggacttacgaggagcagtttaagcagctccaccgggggacggctacgtgcaggcggacgcccggggcccccc

SEQ ID NO: 364599 - DNA, 90 bp, Homo sapiens
cagaaattccagtgactagtaatggagaagttgatgactctcgtgaacatagctttaatagggagtgaactgctttcttttatcaaaaaa

SEQ ID NO: 364600 - DNA, 98 bp, Homo sapiens
tagacctacaggtggagttggagcagtagctctgctaattgggccaaatgctcctttaatttttgaacgagatccatctgtgtgtgctgtggaattca

SEQ ID NO: 364601 - DNA, 74 bp, Homo sapiens
aagacgccaggacccactggaagcctagaaatgttttcagataactattatcgtgcagaaatgattgatgccct

SEQ ID NO: 364602 - DNA, 82 bp, Homo sapiens
gagcccgctactgcagggacctatggtgtggacactgccagcggctgcagccgacttggaatgacctgggagacaaatacaa

SEQ ID NO: 364603 - DNA, 75 bp, Homo sapiens
caacaacccagagtccgtgtattactgggcccagaaggctaaagaattacctccaaagccattgtcaagaccaca

SEQ ID NO: 364604 - DNA, 82 bp, Homo sapiens
cccagcaagatgcggaggctgcctcggcggagcagaggaaccacacgctgatcatgagccaaatctcctcagccacctgttg

SEQ ID NO: 364605 - DNA, 100 bp, Homo sapiens
aagttgttctaacgctgcctttgctttaaaacagtattacttgcgtcccacccccagcctggggcctctgggagccttggtcctgagcagccaacacacc

SEQ ID NO: 364606 - DNA, 100 bp, Homo sapiens
cagaggctgcggcctacagccggggagaggccagcccggcctacagtgcggacacaggacagaggggagccagggcctggagaacagctggcgccagcac

SEQ ID NO: 364607 - DNA, 82 bp, Homo sapiens
cccgtcgcagctccattaatgcaactaccattacactaagctgaaaaagatcgggggcgggggctttggtgagatctacgag

SEQ ID NO: 364608 - DNA, 100 bp, Homo sapiens
gttatcagtcccgtgggcaatagagtcactgtatttgaccttaaaaaaactggtcatgctgctggagtggtggtcctgcacggagtgtacactgttcacg

SEQ ID NO: 364609 - DNA, 83 bp, Homo sapiens
ccatcacccaccaacaacaccacaataatccacagccaaggtacagtagcagagggagctcccattattccaatttcagctca

SEQ ID NO: 364610 - DNA, 75 bp, Homo sapiens
ttagaccctccacctaattgcagtttttcagaagaagtgaagtcaagatgaagaaccatttgcttttctggggag

SEQ ID NO: 364611 - DNA, 95 bp, Homo sapiens
gcgatgtggcgcttctgccgggccctcagactggggagtgtgagagtgcctggtgaagaatgtgatgggatcactagcatgtctgcggagagcgg

SEQ ID NO: 364612 - DNA, 75 bp, Homo sapiens
atcatagtcaactgcgtggaagagaagattgggaaaatgaggtacgttagtgttcgcgattttaaaggcaaagtg

SEQ ID NO: 364613 - DNA, 100 bp, Homo sapiens
ctgggattcccgcgcccctcggacggccacgagactcgggtactccaaagattcaggtttactcacgtcatccagcagagaatggaaagtcaaatttcct

SEQ ID NO: 364614 - DNA, 101 bp, Homo sapiens
aacctcctgcaaaagtggaagcgaagccgaaaaaggcagcagcgaaggcagcggttctgacgtcatggtgagtgactgccgaagtaaggagcagatgagtg

SEQ ID NO: 364615 - DNA, 100 bp, Homo sapiens
tccacagaggcaaagtcagcctcgtggcattcgtccctacaaatgcaacgtctgcaataaagccttcacccagcgctgctctctggagtcccacctgaag

SEQ ID NO: 364616 - DNA, 100 bp, Homo sapiens
gcaggttgcaccgcaggaagcaaggcatcagaacacaccatgatggctgtgacctaagaccctcaggaagccccggggtcatggcccagaagcaccccgg

SEQ ID NO: 364617 - DNA, 100 bp, Homo sapiens
gcggagccggcggagcctctggaatcacccgggtcgctgttcctgaggggtggacactgacgagctggacagcaacgtggacgactgggaagaggagacc

SEQ ID NO: 364618 - DNA, 98 bp, Homo sapiens
ccagctgagacgatcacttttctgtaggccatttgtccagtgacttctgacagctctctccatggaaggaggcggcggccgcgatgagccttcagcct

SEQ ID NO: 364619 - DNA, 100 bp, Homo sapiens
cggcggacggctgggccatggggacactgtgactttgccaataccattcctggccatggaggcatcatggatcgctttgactgccagtatctgatggcca

SEQ ID NO: 364620 - DNA, 100 bp, Homo sapiens
tatgagctcatccggaagattgaggcctacatggaaggagctgctcagagaccctctgtacatcggcctgaaacaccagcgcgtgcacgggaaggcatac

SEQ ID NO: 364621 - DNA, 73 bp, Homo sapiens
aagtctactaatggacagttagtcacccacctacatgttgagctcctcttttgacttggactatgactttcaa

SEQ ID NO: 364622 - DNA, 74 bp, Homo sapiens
gagcacgtcttcttactagacaagtattatgatgacacattcccctccatgaaggagcagatggttttcgagaa

SEQ ID NO: 364623 - DNA, 77 bp, Homo sapiens
gtgatttgcctcagcttgtactgcaggcaatccatggaccttgtggaacttgtgtctctttttcccacgctggctgg

SEQ ID NO: 364624 - DNA, 98 bp, Homo sapiens
gacaggactacatggatgccatggctgagaaggtaactgtgacatttgatgatgtggccttatatttttcggaacaagagtgggagatcctggagaag

SEQ ID NO: 364625 - DNA, 123 bp, Homo sapiens
gttttgagactcgatttgaaaaaatggacaacctgctgcgggatcccaaatcggaagtgaattcggattgtttgctgaattaaacaaccaccatgtcgagcaaaaaggcaaagaccaagacca

SEQ ID NO: 364626 - DNA, 100 bp, Homo sapiens
agccttggaaggagcccgaatcactgatggaattggacagtgcatggagatggttcagcaggacaagggcccagtgctaaacgacggtataaaaaccaga

SEQ ID NO: 364627 - DNA, 75 bp, Homo sapiens
gtcagcatggaggctgctgggcaggtcatgagtcaccatgcctccagggtcgtatagacctccccctcctatggg

SEQ ID NO: 364628 - DNA, 82 bp, Homo sapiens
atacccaataaccaggtgcttggcaaaatcgagcgggccattggtggtacagaagttggtcctgccctttgggcgactgaac

SEQ ID NO: 364629 - DNA, 100 bp, Homo sapiens
tccgtttgttggtggaggaggtggcaggcctcggcgctggttggtggagaatttgaactggagatgaactctattatccaggatgctgagagtataatac

SEQ ID NO: 364630 - DNA, 100 bp, Homo sapiens
agaccagcgcgagggccctgggcaaggcccgacaggatgaagatttgataaagtggaaggcactgtttgaggaagtccctgagttactcactgaggcaga

SEQ ID NO: 364631 - DNA, 89 bp, Homo sapiens
aaaagacactgaaaggcctcaacaggtttccaatacttatctacaggaatcgccatgaccccagctctgagggaggcaacagcaaaggg

SEQ ID NO: 364632 - DNA, 50 bp, Homo sapiens
ctgaaagttatgtggctcaaatgattgtgatcgaaagctgctttgcgtcg

SEQ ID NO: 364633 - DNA, 75 bp, Homo sapiens
cccacaggtgctaaagagagcagtaccctgatggagtcccttgcaggtgcagaggccaagaccgttttgcccaag

SEQ ID NO: 364634 - DNA, 96 bp, Homo sapiens
caaaatcacatgatccgcacccccagcatgaggcaggaggagcgctacctgtatctctcagaagatagaagtgtgcaagaagtactacagaagcat

SEQ ID NO: 364635 - DNA, 75 bp, Homo sapiens
gaggttggctcgatgctgttcccagcacttgctctgaaatttggggactgagtacaccaaatacgatagatcagt

SEQ ID NO: 364636 - DNA, 75 bp, Homo sapiens
ttcaacgacaccaagctggacgctgtcctggaggaattcaagcgaggtgcccgaaatcaggtggtgataagagca

SEQ ID NO: 364637 - DNA, 98 bp, Homo sapiens
ccttggaaggagcccgaatcactgatggaattggacagtgcatggagatggttcagcaggacaaggttgatccacctgaagaattaggagctagtatt

SEQ ID NO: 364638 - DNA, 74 bp, Homo sapiens
gccatcgtggtgtgttcttgactccgctgctcgccatggaacttcctgtagaaaagcccccaaaacaaaacaaa

SEQ ID NO: 364639 - DNA, 100 bp, Homo sapiens
ccggaggagtgggccgacctcttccaggccgcgggcgccaagttaaagctgaagctcaacaaagatatagtgatctctgtgggcatttataatctggtcc

SEQ ID NO: 364640 - DNA, 99 bp, Homo sapiens
aatgtggaacaggaccttaaggagaaggaagatactattaaacagaggacaagtgaggttcagggttctcggaccagcagtgaccttcaaagtgagcgc

SEQ ID NO: 364641 - DNA, 90 bp, Homo sapiens
gcaacggccaacttcggcaagatccagatcgggatttacgtggagatcaagcgcagcgatgactactccaaaggattcggcgggaagtat

SEQ ID NO: 364642 - DNA, 51 bp, Homo sapiens
ctggccgaatcagccttttcacgctcaagattctataccagactgttacag

SEQ ID NO: 364643 - DNA, 101 bp, Homo sapiens
aaggagttcgagcagatcgacaagtccgggagctgggcggccatttaccaggtagatttcgggcagacaacttgaacaagctgaagaacctatgcagcaag

SEQ ID NO: 364644 - DNA, 75 bp, Homo sapiens
tgaagagatgctggaacatgcagagtctgcacaagcctccccatggccacccatggaccagtcggcattcacttc

SEQ ID NO: 364645 - DNA, 60 bp, Homo sapiens
caccattgccacgggcattctccatctccttgcagatacccataatatctgccgaacatc

SEQ ID NO: 364646 - DNA, 88 bp, Homo sapiens
accaatggagcctgaagagttcggcgcagttcctggggtctccacagctgaggcagggcgttacctactgcggagaaagttcagcaag

SEQ ID NO: 364647 - DNA, 90 bp, Homo sapiens
ccagggctggtgatgactggaaccaagtgtggctacaaccatgttttacgagaggcgaaggagaaagaagagatacggacctccaatgag

SEQ ID NO: 364648 - DNA, 100 bp, Homo sapiens
tacgctcttccaaaagcgcagaccacagttacatgtatggagaatggctggtctcctactcccagatgcatccgtgtcaacctgatggccaaaagaaagg

SEQ ID NO: 364649 - DNA, 83 bp, Homo sapiens
ctccggggccgctggattctgaggaccagcagatggccagtcacgagaacccagttccagggtctccctccactgctgtagta

SEQ ID NO: 364650 - DNA, 100 bp, Homo sapiens
ttgtgaagtaacagaattaaccagagaaggtgaaacgatcatcgagctaaaatatcgtgttggaagtggggataaatggtcaaacaagcaactcttcttg

SEQ ID NO: 364651 - DNA, 83 bp, Homo sapiens
gcccttcacagcaagacccaggaagccgcgggcaaactcagactcgaagggaatgcccagaacaccttggcccagcccacggt

SEQ ID NO: 364652 - DNA, 100 bp, Homo sapiens
gtctagattcaccaatgtcaaacagtttattgcaccagggctgacagatgaagagattgatatggccttccagcagtcgggcactgctgccgatgagcct

SEQ ID NO: 364653 - DNA, 98 bp, Homo sapiens
ttgcctggctcacattcggaggctggtgtccagggtctcagcgcgggggacgactcagggtggattacaggaggtggcagaacagttagagctggaac

SEQ ID NO: 364654 - DNA, 90 bp, Homo sapiens
cttgaagatagccatcagccgctacgtgactcttttctccagattcgtctgtgatggctgtttaaagaaaagtgcacgaactaggaaaga

SEQ ID NO: 364655 - DNA, 98 bp, Homo sapiens
gcacatttgacttggaagcaatgtttgaacaaactcgaagaacagctgtggaaagaagttgcaaaacactggatgctgttgatggagtaatgaatggt

SEQ ID NO: 364656 - DNA, 90 bp, Homo sapiens
tggggtgagaccctcacttcatccgatatgaagatcaatgatgcagactgatggttttgatgaagctgggcatttataactagattcatt

SEQ ID NO: 364657 - DNA, 100 bp, Homo sapiens
caggtttcgagatttgctgctaggggaccaaggatggcaaaacgacgacagcctcgtgtgcaagctgaacacaaggaccaccatcctggcagcaacgaac

SEQ ID NO: 364658 - DNA, 100 bp, Homo sapiens
gtgccaaagactgagcctgaacctccttctgtcaagactttatattcagagcaccaatcaaattaagcaagcctggggaacttcgtgaggaatatgaaag

SEQ ID NO: 364659 - DNA, 51 bp, Homo sapiens
atccccacctctgatgattcctcaggatacagaggttgatattctggtgac

SEQ ID NO: 364660 - DNA, 50 bp, Homo sapiens
ccaagaacgagcaggagcgagagcaacatggctgacaaggccaagcctgc

SEQ ID NO: 364661 - DNA, 88 bp, Homo sapiens
gggctgcaggagggctctgtgctgcgtgtggtggaagatgccacagggcccagtgggctccgggtcctgccccagggctacggctgga

SEQ ID NO: 364662 - DNA, 75 bp, Homo sapiens
tgaagatccagaaaggaaaataaagaagaagggcttcggcgccatgctgagatatattcgactttatgggagaaa

SEQ ID NO: 364663 - DNA, 74 bp, Homo sapiens
atcctgctgctgaagatctggaagacgcgctcctgcgccgaataatcatgggccagactgggaagaaatctgag

SEQ ID NO: 364664 - DNA, 95 bp, Homo sapiens
agcaaaaggatatgacaatccgtccttccttagaaagctgaaagctgataaggaaatggaaaggtcagtagttgcacagctgctgagggtagttt

SEQ ID NO: 364665 - DNA, 73 bp, Homo sapiens
tcattgcagcctcggcgtttgtagaagaggagcatctgctccagacatgaagaggagcatcggcggcgtgagg

SEQ ID NO: 364666 - DNA, 100 bp, Homo sapiens
tcctgggctcaaaccatcctcccacctcagccttgtgtgtggaggtcattgcaaaggaaggacaaaacctgaaagagctatatttggtgtcctgtaaaat

SEQ ID NO: 364667 - DNA, 100 bp, Homo sapiens
caccggcccgtggccatcggcagctgcggccacacgtgtcctgtggccaggcggaaagcagtgagaagcccaacgctgaggacatgacatccaaagatta

SEQ ID NO: 364668 - DNA, 75 bp, Homo sapiens
aaagacagtcctcgtcagcactgactttcagctatggaatcgatgttcctcctgctgatcaagagaagcttttta

SEQ ID NO: 364669 - DNA, 100 bp, Homo sapiens
aagaattttccaaatgaatttgcaaaacttactgtagggttccccactgaaggacttggtccagctgtctggcagggaggagagacagaagctctggccc

SEQ ID NO: 364670 - DNA, 100 bp, Homo sapiens
cccacgactgcctgggacctggccaagggctccacacaccaagaccaaggcacagttggcgggcagctcccaggtctccatgagtacggcgccgtcgggg

SEQ ID NO: 364671 - DNA, 87 bp, Homo sapiens
ctatgttactgacgagaccggcggcagacctgtctaactacaagccagacttgggttttctcctgtagtttgaagacacactgactc

SEQ ID NO: 364672 - DNA, 75 bp, Homo sapiens
cacagtcatggtggataggactgatggtgcagtagacattgttgcaatcatgatcggcaatctgaaaggcacaaa

SEQ ID NO: 364673 - DNA, 75 bp, Homo sapiens
tggtgaagtggaaaggatggcccccaaagtgtggacactgccagcggctgcagccgacttggaatgacctgggag

SEQ ID NO: 364674 - DNA, 50 bp, Homo sapiens
ggatggtgaactcattagaactttcggaaaatgtgattgatcgaatgaag

SEQ ID NO: 364675 - DNA, 100 bp, Homo sapiens
aggaccttggggacaagctgcgcatgatcgtcatgggacacagaagatccaggatgggggccccgtttgtctgggccttgggccttttgatgctgcagat

SEQ ID NO: 364676 - DNA, 100 bp, Homo sapiens
gtaggccgtctcgctctgggtctccaggcccgcgaccgtccgccagtcgtcccgagctcggtgctgattatcacaactgtttggtgacctacttcactga

SEQ ID NO: 364677 - DNA, 90 bp, Homo sapiens
ggagctggacgccgcgatcgtggggcccgcgaggcgggcagccggggcgtccagggtgtgctgatctgcaaaccctggacacaatgcagc

SEQ ID NO: 364678 - DNA, 75 bp, Homo sapiens
tggagccaagaaatgagtatagagaacgtttgtctgcctgatgagagccacttgggttaagaaactacctgtgaa

SEQ ID NO: 364679 - DNA, 90 bp, Homo sapiens
cggtccctccacgggcggctgcagggtggagggcagagcggcttgggtaaatccaccttaatcaacaccctcttcaaatccaaaatcagc

SEQ ID NO: 364680 - DNA, 82 bp, Homo sapiens
atttaagaaagaagatgttaactttcaggattcagtggtcccaatttaaaggctattttattttcaaactggagaaagtgat

SEQ ID NO: 364681 - DNA, 100 bp, Homo sapiens
atgcaagcgaagaaccttttccctaatacgtacctcattgtgggagaaatacatgctacaggatttaactatcagaatgaagatgaaaaagtcaccttgt

SEQ ID NO: 364682 - DNA, 100 bp, Homo sapiens
atcgagacctgaacatgtggtggtggttgcacagtcgccttttccagtttggagagacgttgtaagaatgattgatgttggctgatattggagtgctcat

SEQ ID NO: 364683 - DNA, 75 bp, Homo sapiens
ttctgtctcgactgcactttgagaaggtcctgtccctgctatcagtggggcactgaagaaagcaggactgagtct

SEQ ID NO: 364684 - DNA, 50 bp, Homo sapiens
tcgtcatcgtcgcggtcctgctgccagtgggcaccatgtccttgaagctt

SEQ ID NO: 364685 - DNA, 75 bp, Homo sapiens
gccatctcttcagttaattttggatccgtctaacacagggtgcaaaaatgcagagtaataaaacttttaacttgg

SEQ ID NO: 364686 - DNA, 83 bp, Homo sapiens
acagattcgcagtggtcgcttcttctccttgggcgaaatgaccctgaatgtgacctgtgtggtggagacccagaaaagaaatg

SEQ ID NO: 364687 - DNA, 83 bp, Homo sapiens
tgaaaatggggcggaagaaaatacaaatcacacgcataatggatgaaaggaaccgacagtgggccgaattcattttgttttcc

SEQ ID NO: 364688 - DNA, 75 bp, Homo sapiens
cctacaagcaagctgaatggaggccagatagtaccatgatagctgtatcagttctaaatggcttctaagaagttg

SEQ ID NO: 364689 - DNA, 75 bp, Homo sapiens
caactcctatgagctcctctctggcagaccgagacatgggtgcccggcaccgcgcccgagcccactccattcaga

SEQ ID NO: 364690 - DNA, 102 bp, Homo sapiens
aggaggaagggaaccaacccactttctcggcgccgcggctcttttctaaaagtgttaaagtattgcacaatcagctggtccttttccacaatgccattgccg

SEQ ID NO: 364691 - DNA, 80 bp, Homo sapiens
cacgggatccagagcgccgcgcacttcgtcatgttcttcgcgccctgtgttcatcatttgccacttaagctacttgcagt

SEQ ID NO: 364692 - DNA, 97 bp, Homo sapiens
ggacacctggaagctgggaaatgattttaacattatggcagggaggcatcagaatcgtagttttcctcttccaggagttcagtcaagtggtcaagta

SEQ ID NO: 364693 - DNA, 82 bp, Homo sapiens
cttttgcctcagatactattttgaaggaaccactcgttttgactattattttatcactctttgtgaaacttcacaatgttcg

SEQ ID NO: 364694 - DNA, 100 bp, Homo sapiens
ccttcatgcacttatggcagtggtttctggcctacagagtgccccaattttcaggttgactaaaacatgggcgaactgataaatttcaaacggaagagag

SEQ ID NO: 364695 - DNA, 99 bp, Homo sapiens
attacttggagcaaagggcagtcggcggagcttcgccaaggctggcgcagtcggccggtctaattgaagccaacggagaactcaaggtcttcatagacc

SEQ ID NO: 364696 - DNA, 75 bp, Homo sapiens
acttgaccaggtttccagtgaaataagaaatgggtcctgatgaatatgaagagatggaagaagaggaggaggagg

SEQ ID NO: 364697 - DNA, 80 bp, Homo sapiens
gccggctgctccgcaccccggggtcccaggaagggcggcccagggaactactggagaccacgtgccgcctggccaacacg

SEQ ID NO: 364698 - DNA, 101 bp, Homo sapiens
tgtgagatgctacagcagtgtaaagaggaattcattaagagacgcaggtcagaatggaaatgggctgcagaccgggcagctattgtcagccgctggaactg

SEQ ID NO: 364699 - DNA, 75 bp, Homo sapiens
gtgtgtacaatggagacttacatcacctataggatcaccaccaaagcagaatattactgaagaatgatcctgttc

SEQ ID NO: 364700 - DNA, 98 bp, Homo sapiens
acctatgtgctgcagaactccacgctgccctccatctggatatccattaccaaaacttgacatgaacttctcattggagaatagagaagagccatggg

SEQ ID NO: 364701 - DNA, 75 bp, Homo sapiens
tatggaagcagaagaagctgaggatgaagaagatgacagaaccaagttgtattgttagacacactggaacaagag

SEQ ID NO: 364702 - DNA, 100 bp, Homo sapiens
cacgctggactggatttattcagtggtactccgtggaaggcttcatcgacaagaacagagatttcctcttccaggacttcaagcggctgctgtacaacag

SEQ ID NO: 364703 - DNA, 79 bp, Homo sapiens
cctgacaggagatgtattacaacccccaggaactagtggtttagaaacatcaactggaatcaatttgcatttgaaaatt

SEQ ID NO: 364704 - DNA, 100 bp, Homo sapiens
ggccaccgactatgtgttccggatcatctaccccggccacaggcacgagcacagagcgggctgcagatgacagcaaagaggttgagagcttccagcagct

SEQ ID NO: 364705 - DNA, 75 bp, Homo sapiens
gacgagcaggacttcatccaggcctacgaggaggtgcgcgagaagtacaaagcctgagaagccaggccccggcag

SEQ ID NO: 364706 - DNA, 74 bp, Homo sapiens
tttccttacctgtttttccagctcacccactgccagcagagccgccgccgcgccgccgtcgctctccaacgcca

SEQ ID NO: 364707 - DNA, 100 bp, Homo sapiens
atcccgagcagcgtcatgtacccctcctgcctagggtagttaaaagacgagtgaatgctctcaaaaacctgcaagttaaatgtgcacagatagaagccaa

SEQ ID NO: 364708 - DNA, 50 bp, Homo sapiens
aggttacgcagcaaaccatccagaagagccgcagagcacacaacattgac

SEQ ID NO: 364709 - DNA, 100 bp, Homo sapiens
catgggggtcccgcggcctcagccctgggcgctggggctcctgctctttctccttcctgggagcctgggcgcagaatgtggccccgtcccagagcaccac

SEQ ID NO: 364710 - DNA, 83 bp, Homo sapiens
cccgtggccaccgcctccagcttgccaccaaagacctgcgactttgctcagacagccctcagcgcctttttccaggagaccaa

SEQ ID NO: 364711 - DNA, 98 bp, Homo sapiens
gtcagccagccagggccgcgcggggatgctgatatgctaactggtgatgagcaagtatggaaggaagttcaagaatccctgaaaaaaattgaagaact

SEQ ID NO: 364712 - DNA, 100 bp, Homo sapiens
tccaagtcaaacgcagaaggactgcctcactgagcaaccaagatccttcagctgtggaagaggatgaagatgaagatggtcatactgtggtggccacagc

SEQ ID NO: 364713 - DNA, 100 bp, Homo sapiens
taatggagacattctgatggaatttggaaacattattccatcatttgtgttgatggatatccaggcttctacagtggtcacctatgtgtatcagctaatt

SEQ ID NO: 364714 - DNA, 75 bp, Homo sapiens
ggaaacctttccaacacagatgtccaagctgccaagaaaatctggagagctgaagagttggagctattcacgaga

SEQ ID NO: 364715 - DNA, 98 bp, Homo sapiens
cgcggcggaggacgcgcccggcgcccctgagccggccgagcggcgacggaccgcgagattcctttagatgaggatgaccctaggctgcatttaagtca

SEQ ID NO: 364716 - DNA, 97 bp, Homo sapiens
tgggagtctccgcgtcccgctcgctgggagagagaggtggggctggtgtccgagcacttctcgcaggccccgcagaggctgtccttctacagctggt

SEQ ID NO: 364717 - DNA, 80 bp, Homo sapiens
tggctccagcatgtatcagccgaggtggagctgcggggccctggcatgaaaggctaccggctctctgaccagttccacga

SEQ ID NO: 364718 - DNA, 74 bp, Homo sapiens
gagagctccagtgagtccagctcctctgacagcgaagactccgaaacaggtgttgtcctacatcaatggggtca

SEQ ID NO: 364719 - DNA, 123 bp, Homo sapiens
tatttgctgagaatgcagccgtgtgacagtaactgaacattggtctaaagtctttccaaaaggtcaaggttcacaaggttatcctgaatacatgtctaacaattttccttgcaacgttagctg

SEQ ID NO: 364720 - DNA, 82 bp, Homo sapiens
tgagttaacacctctgccgctgctaaaagttgatattcactgatggactccaaagaatcattaactcctggtagagaagaaa

SEQ ID NO: 364721 - DNA, 100 bp, Homo sapiens
tgctccacaagcggcgccgcgccctcggcctgcacgggaaatacaactggagcacgcaaagcaagcctttgtgcaacgggacaatgctaggactgggaga

SEQ ID NO: 364722 - DNA, 100 bp, Homo sapiens
tggtggatgtgaagaatggcaaaggatcagtgcttcctaactcaggtgtaaagcaggccctctggctcaccaagaccaagttaatagaaggccttcccga

SEQ ID NO: 364723 - DNA, 82 bp, Homo sapiens
gcccgggcgccatcgagccttggcggcggacgtgcaggcatgtcgggccccaggcctgtggtgctgagcgggccttcgggag

SEQ ID NO: 364724 - DNA, 101 bp, Homo sapiens
ccacgaccgaaaagaattcgctaaatttgaggaagaacgcgccagagcaaaatgggacacagtcctgaggcacgtgaatggccaggatcagattgtgcccg

SEQ ID NO: 364725 - DNA, 78 bp, Homo sapiens
gaaattgcgctggaccgtcgccttgctcctcgccgcggcggggactgcaggtgccgacttcacaaacaccttctactt

SEQ ID NO: 364726 - DNA, 75 bp, Homo sapiens
ggggaagatgctggggaaggctgtgtatgagtctttaggcccagtgggatttatgaaaagtgccatctctttagc

SEQ ID NO: 364727 - DNA, 51 bp, Homo sapiens
aaaccagccttagactatttttcaaacacttgaccacatattatcccctcc

SEQ ID NO: 364728 - DNA, 90 bp, Homo sapiens
cccgcagcttcatggcccagaatctggacaccacaaagggaaagtgaaagcattgggctggagcattggatttgctaaaggagcttaaga

SEQ ID NO: 364729 - DNA, 100 bp, Homo sapiens
aggatttctacctttccatagcagttaaacacagtgggaatatcacttttgatgagattgtcaacattgctcgacagatgcggcaccgatccttagccag

SEQ ID NO: 364730 - DNA, 75 bp, Homo sapiens
cagaggacgcgggctctgaggatgagctggaggaggggcttttcctccgcaaccatgtctgacaaacccgatatg

SEQ ID NO: 364731 - DNA, 100 bp, Homo sapiens
ggagggaaaagaaagaatgtatgaggagaattctcagcctagcatctcttgggcagtgaacagcagtcttctgtccagctctgggtctcctttggccgga

SEQ ID NO: 364732 - DNA, 82 bp, Homo sapiens
ggggggctcggctgcagacttggccaaatggacgggactattaaggtatcatgatattagctggtttgacatcaagtcattt

SEQ ID NO: 364733 - DNA, 100 bp, Homo sapiens
caggcacagcccgagaaaccgcagcactacacggcagatgattctggaccagatgaagcctgaggagccttccagctctaagatagcaggataggagact

SEQ ID NO: 364734 - DNA, 85 bp, Homo sapiens
cccagctcttcagcattgtccgccaggcctgtgtccggagcctgagctgtgagctccgctctgcattggataaaacagaagagct

SEQ ID NO: 364735 - DNA, 78 bp, Homo sapiens
tctggaattttgccgatttcatgactaaccagtgacttgacccaatgaaagaagcatatggcacttgtgaagataaat

SEQ ID NO: 364736 - DNA, 75 bp, Homo sapiens
ctggcccgtgacctgaaggctgtcaagtatgtggagtgttctgcacttacacagttgctgtctctgctggccttc

SEQ ID NO: 364737 - DNA, 75 bp, Homo sapiens
gctctgaacacagcatcaatggcaggaggtttcctgttgaggaagttgccttaaagaatagacaagagctgtatg

SEQ ID NO: 364738 - DNA, 50 bp, Homo sapiens
aatgaacactgtccttcaaaacgaactgacatcaatttgccctatcttac

SEQ ID NO: 364739 - DNA, 75 bp, Homo sapiens
cccaggaaggggttcccagaagtcagaatccaagatggtctggaggcggctggtggaaatccaattccccgcgga

SEQ ID NO: 364740 - DNA, 101 bp, Homo sapiens
ctccaagaaaaaaaccacaaatgtttttctgttttgcctgaatacatgatttaaacaagagatttccacagaagatatggtttggagtgcctttttcgata

SEQ ID NO: 364741 - DNA, 75 bp, Homo sapiens
tcatttcttcagatagctccccagctgtggaaaatgagcatcctcaaggtggacaagagcaaggaccaagtgtgg

SEQ ID NO: 364742 - DNA, 82 bp, Homo sapiens
agaaagacaaagacccagtgaacaaatccgggggcaaggccaaaaagaagccccagcatgagaccagatgtaagctctcctc

SEQ ID NO: 364743 - DNA, 51 bp, Homo sapiens
cagacattttgctgctgctacaaagacatggatttgattgacatactttgg

SEQ ID NO: 364744 - DNA, 100 bp, Homo sapiens
gcactgcgggtcccgattgctgcagccgcttgtcagtgtgatgaagattggcacccagagaatctcgatgctggcctggagcagaaactgagctggacca

SEQ ID NO: 364745 - DNA, 90 bp, Homo sapiens
ggcgctctggctgtgctgcgcgacccccgcgcatggagcttactccacgggaacagcctctagataatctgagttgttgaaaatacgaag

SEQ ID NO: 364746 - DNA, 98 bp, Homo sapiens
ttaacaaaatgaaaaaattgactactgatgggaagttaattgccagagcattgagaagttcagctgttgtagaggtcttagtcctgggtaacaagcga

SEQ ID NO: 364747 - DNA, 75 bp, Homo sapiens
tgccacgcgcccccgacgaccgcccgacgtgcattcccgaaccgggagaagtacctgctgcccttcctgtccctg

SEQ ID NO: 364748 - DNA, 97 bp, Homo sapiens
aaagcctgaatttcaggatctttcagcaaaagcccaggatggtgcagccatggaaatgcagccattgaagagtgaagaaggtggagatggtgatgaa

SEQ ID NO: 364749 - DNA, 59 bp, Homo sapiens
gaggacactgagtcaccatgctagcactgtgcaggttccccctactgagacagttcctc

SEQ ID NO: 364750 - DNA, 90 bp, Homo sapiens
gctacgaggcccgccacgcggagtactgtgatggctgtggggagcacatcggaggagatgttaaagtaacccatcttgcaggacgacatt

SEQ ID NO: 364751 - DNA, 100 bp, Homo sapiens
atgctgctgctatgaatatgggtcgaccattccaaaaaaatcgttccgtgatgatggtctaagcaaagacccttcgtcctgttaaagataaattaaaaaa

SEQ ID NO: 364752 - DNA, 90 bp, Homo sapiens
ctcttattgctgaaagactacccatgctatatccagaagtaattcaacaggtgcctaggaatgctaacagtctgggaccacatagaccac

SEQ ID NO: 364753 - DNA, 110 bp, Homo sapiens
actgccagaggtggaggggaggattttgaggacacttgtggagagctcgaattccagaatgatgaaattgtatgatagtatttctgctgcaagtacttctgatgttcaag

SEQ ID NO: 364754 - DNA, 75 bp, Homo sapiens
gctcagaagataaacgaggggctggaacacctcgccaaagcagagaaatagggcctttacaacaactaaacggac

SEQ ID NO: 364755 - DNA, 100 bp, Homo sapiens
cttaggaccacccaccatgcctatccagatgctgcctggaaacattggccagaaagtaacactgaggcccatgtagaaaacatcaccttctatcagaatc

SEQ ID NO: 364756 - DNA, 50 bp, Homo sapiens
cttccccagccacgtggaactggactttgaacatgtcggggatcgccctc

SEQ ID NO: 364757 - DNA, 100 bp, Homo sapiens
cagctggagagtttggagccctgcagactgtccgcctggagcgttacaaggccttctacattaccgacagatgtacagaagattttaagaaatgcaagga

SEQ ID NO: 364758 - DNA, 74 bp, Homo sapiens
ggactacagcacgacccccggcggcacgctcttcagcaccaccccgggaggtctctgtgtccctgtgtcctgaa

SEQ ID NO: 364759 - DNA, 98 bp, Homo sapiens
gaaaatttttgttataataacattcagcaagcacatagtggagcaaatggtggctttcattggggtcagttaaatgaaagcatggaccatgggggagt

SEQ ID NO: 364760 - DNA, 75 bp, Homo sapiens
cctagaccggtttttagtccattgactatgcagcctaatggacttggcagatgaacttgctcttgttgatgtcat

SEQ ID NO: 364761 - DNA, 82 bp, Homo sapiens
atttgaccatcttggtgagaaacattaagacctactaccaggtttacccaaggtccagcctagcccctaggcaccatgtcgg

SEQ ID NO: 364762 - DNA, 74 bp, Homo sapiens
caagaaggacgtggaagaggcagtctcggtatgttctggatgatcagtacacaagttcttctggtgctaagttt

SEQ ID NO: 364763 - DNA, 90 bp, Homo sapiens
cgtggccttcgcgtctgcccggccaagaggcaaaggggaggttacgcagcaaaccatccagaaggcctccgtggcactcagtaagcagcg

SEQ ID NO: 364764 - DNA, 89 bp, Homo sapiens
taagctgaaggaaagagctcaaagatttggtttgaatgtctcttcaatctccagaaagggacctggtggccttagtctttcaggtggaa

SEQ ID NO: 364765 - DNA, 83 bp, Homo sapiens
aagctaaagaagctcatcgaacagtacgcactgagggaagagttttctggatatgccgcagaaggatccgtgccagaagcaag

SEQ ID NO: 364766 - DNA, 51 bp, Homo sapiens
ttcaggaaccaccagtgacagagctctgctgaccgagatgatggaaaggtg

SEQ ID NO: 364767 - DNA, 82 bp, Homo sapiens
gaagactccaagccctactgggaggcacggagggtggcgaggcagggtggcccagttgaaatccttcccttcctctaccttg

SEQ ID NO: 364768 - DNA, 98 bp, Homo sapiens
cagcgtccagcaactccagcctgtccggctcgtcggtgtcctccggatctggagtgggagagcaggatgggggactgatcggtgccgaagagaaagtg

SEQ ID NO: 364769 - DNA, 75 bp, Homo sapiens
agaaagtttactcatatttcagctctgttacagggtcgaggagccaggctacgcagagagccagcctctgcaagg

SEQ ID NO: 364770 - DNA, 88 bp, Homo sapiens
ttcagaagccagaagagaaaacaaaagaccaacccttgagggaagagaattatctctaagtgctcaagtaaagctctttgtgacaggg

SEQ ID NO: 364771 - DNA, 78 bp, Homo sapiens
agcaaggagtcatatatccttcatatgatccatcttagtgaagaattaggatacagggataaagtaattcctaataaa

SEQ ID NO: 364772 - DNA, 100 bp, Homo sapiens
cctgccactgctgtgcctgtcgtcgtcattgaaggagagagcaagaccactaaggcttttcttcctacgatgctggagattaatcatggtcatattgtga

SEQ ID NO: 364773 - DNA, 83 bp, Homo sapiens
cgcatgagaattgagagcctttcatcccagctttctaatctacagaaagaggaaaactaggtgtctgtgttcactccaggctg

SEQ ID NO: 364774 - DNA, 100 bp, Homo sapiens
tcagctccaaggagaagagcaaatacaagttccctcctgctgctttgccccaggaattcagcgccttcttccaagccctcccagctcttcactctggggg

SEQ ID NO: 364775 - DNA, 100 bp, Homo sapiens
accagaaggaaccaattccggacacataacaagcagcagtgaggacaccaaaggttgccaaggaaagtgtactgcagttttacccgaaagctaatatcgt

SEQ ID NO: 364776 - DNA, 87 bp, Homo sapiens
caaccatctggatattgctccttctatgaatgacccatattaaatcgcccttggtgaaagaaaattcttggaatactaaaaatcatg

SEQ ID NO: 364777 - DNA, 97 bp, Homo sapiens
taattcctgatatttttggtatcacaaatgaatccaaccagccacagatactattaggaggaaaaccagtctatccaagaccaggcacctatgttgg

SEQ ID NO: 364778 - DNA, 82 bp, Homo sapiens
gagcaatgccaccattatcaatgaagagctggatattctggaatatattcacgagcatgagtatgtgcatggagatatcaag

SEQ ID NO: 364779 - DNA, 75 bp, Homo sapiens
acgagtacccagtgggctccgagtgctgccccaagtgcagtccagccctgaaacatgtatctgatgacatgaaga

SEQ ID NO: 364780 - DNA, 75 bp, Homo sapiens
atagactgtaaatgtcacagcagtggtgaaagactggtatctctcctctttgtcacaacctctttgccctgtatg

SEQ ID NO: 364781 - DNA, 91 bp, Homo sapiens
ggaatttccccgtaccgcagcccccgggcacgacctctcggacacggtgcaggcagattgatatcagtaaatgccattatttagtggattt

SEQ ID NO: 364782 - DNA, 76 bp, Homo sapiens
ccgggagcgagacttcctgaagaaagtccacgagaccgtggagcgtggtgggaagctctgtgaggtgggcacagat

SEQ ID NO: 364783 - DNA, 90 bp, Homo sapiens
ctcagcttcaggagtttggtcaaagcaaccgaaaaggagagtttcctgggtgtcgtagtcattcttcagcacaattcttaattggagacc

SEQ ID NO: 364784 - DNA, 90 bp, Homo sapiens
ccctgtttgagaaaaggcctaagaattttggcattgatgcagtggcagaacgtggagcacgttggtgaccagagcccctacgtcacctct

SEQ ID NO: 364785 - DNA, 78 bp, Homo sapiens
aagaatacattcctgattacctgccacccattgtgtcttctcaagaagattgctcgctgtaagcagctcatctgtgac

SEQ ID NO: 364786 - DNA, 74 bp, Homo sapiens
cttttgtgaggaccttcctgaagaagaaaggtggccaagcaagaggagttcttcaacctgtcccactgccaact

SEQ ID NO: 364787 - DNA, 100 bp, Homo sapiens
atggacccaggagatcccgctggtgaccctgccgctggcgagcgccaccgcatgggcttgggcactgtttaaaggaaagttccgagaaggcatcgacaag

SEQ ID NO: 364788 - DNA, 82 bp, Homo sapiens
ctacccggtgtactggaaccgccctgatccttcaccagctaggccgctacagtctggcggagaagatcctccgggacgcggt

SEQ ID NO: 364789 - DNA, 80 bp, Homo sapiens
gagagggacctggtgaaccgactgaaggttgggacagcgtcttcgctgctgctggatagtcgtgttttcggggatcgagg

SEQ ID NO: 364790 - DNA, 75 bp, Homo sapiens
gcaggtcaacaggaccactctgaccatcacgcaggaaaattacgggcagaaggaggctgagaaagtggcccgggt

SEQ ID NO: 364791 - DNA, 82 bp, Homo sapiens
ccagcggccgagcgggcggcttcctggcctgggcgctccggtggcggcggagtgttatagttttgccgctggactcttccct

SEQ ID NO: 364792 - DNA, 83 bp, Homo sapiens
ccgccgagagccggaggcaatggatgaacagagcgtggaggcaattaagttggaatatgcaaggttggttaagttggcccaag

SEQ ID NO: 364793 - DNA, 103 bp, Homo sapiens
ccaagttccagttcgtggcctgttaccacgagctagtgttggagtgcaccaagaaatgggggatatgagactttctactcggaatatcctgagtgttgcgtgg

SEQ ID NO: 364794 - DNA, 75 bp, Homo sapiens
tgttaaggattccaagtaactcttatttgatcaatgaactgagccatgttcaaatccctgttatgttgatgccag

SEQ ID NO: 364795 - DNA, 82 bp, Homo sapiens
cctgaggccgactactacgccaaggaggtcacccgcgtgctaatggtggaaacccacaacgctggagaagcgactggaggag

SEQ ID NO: 364796 - DNA, 100 bp, Homo sapiens
ttgatattcagagccttggaagtcaacactgtcaataaactgccagggagaagaatgagaagacaggagacaaactgtttggaaagctaaatcttccctc

SEQ ID NO: 364797 - DNA, 97 bp, Homo sapiens
ctcgctccggagcgcggcgccgagcgcagggatacggcgcccagcgggggacctcggaccgtcccccagacccactggagccaccgtcacttcctgc

SEQ ID NO: 364798 - DNA, 75 bp, Homo sapiens
ttcttgcagcgccagcagcttgcttatggcatctatgtcatccaccagtacggtggggattgcagctgctgagca

SEQ ID NO: 364799 - DNA, 50 bp, Homo sapiens
cctcccttcgaatattctcgagtggctggagtgcagtggcgtgatctcgg

SEQ ID NO: 364800 - DNA, 75 bp, Homo sapiens
cacctctctggagctggagacacctcaatctctgaccgtaaatccaagaaatgacatcagatgtaccatcactgg

SEQ ID NO: 364801 - DNA, 100 bp, Homo sapiens
gggcgcggcggtcggtgaccgcggccggggctgcaggcggcggagcggctgggttttctcttatactgccaacaaagaaattagaacagatgacctttgc

SEQ ID NO: 364802 - DNA, 97 bp, Homo sapiens
tttttctgaggaagtaaccaaacaagaagacctcatgagagaggttttgcactgattgcaaaaataaagtcctccgagcatacaatatccttattgg

SEQ ID NO: 364803 - DNA, 100 bp, Homo sapiens
cgggacccggttccccggcccacagtgggggtgtgcaaacccgagagaactggctattcaggattatgaaactgctcaggaacacaatgaaaatgatcag

SEQ ID NO: 364804 - DNA, 100 bp, Homo sapiens
tggacctgttctgttgaaggctttacttgataatatgtcatttttacctgcagcaacaactggtgtacgtagagaaatcgacactcttaatgaacgttta

SEQ ID NO: 364805 - DNA, 127 bp, Homo sapiens
aaaaaacctgagaacttcctgatctctctcgctgtgagacatgtctgagactcctgctcagtgtagcattaaggtactccaaagattcaggtttactcacgtcatccagcagagaatggaaagtcaa

SEQ ID NO: 364806 - DNA, 75 bp, Homo sapiens
aaggacattccaggcagaggcaagttaatgaaggagttcccccttctgagtatgttcaatatccatgaaaacctt

SEQ ID NO: 364807 - DNA, 90 bp, Homo sapiens
ccctgcgcaaggagggactccccgtgaacaacatcttccagcagatctcccccgtggacaatgcagatcttcgtgaagactctgactggt

SEQ ID NO: 364808 - DNA, 101 bp, Homo sapiens
tctgaagacctattttactgataagaaaacacatctttacacactaagctggagtatagtggcatgatcatagatcactgcagcctcaaactcctgggctc

SEQ ID NO: 364809 - DNA, 90 bp, Homo sapiens
gccatctacctggacatcgatggacgcattcagaagcagggagagcaacaagccccggccctcagagctcagccggatgagcgcagccca

SEQ ID NO: 364810 - DNA, 90 bp, Homo sapiens
gcctgattactgttatgcagattcatttaacagaaccaccagatgcggaaaacgccatgcggtacataaatgggacgcgtctggatgacc

SEQ ID NO: 364811 - DNA, 75 bp, Homo sapiens
ggactgtgatggccagagagatgacgatcttaggttttgaaaacattgaattgactcctcttgctgcaatatgtg

SEQ ID NO: 364812 - DNA, 74 bp, Homo sapiens
caggtgtaatcacttatatcctgctgtgtggtttccctccattccgtgggccaagaagcttgagagaagaaaaa

SEQ ID NO: 364813 - DNA, 83 bp, Homo sapiens
ccccggctcgcggggcccggcgaagggcagtaagcaagctgtgtgggaagtgcagccccactgacgtggacatcctgcagccc

SEQ ID NO: 364814 - DNA, 75 bp, Homo sapiens
cagcaggcggggaagatgaaaggtctacaaataagaaacctcgaaaatctccaggtgagaagagcagaattgaag

SEQ ID NO: 364815 - DNA, 100 bp, Homo sapiens
tcaagcgcaagcacaccctaccgaattacaagatcaggtattcttcagcggaaataaggaaacagtttactctcccaccaaaccttggccagtaccatcg

SEQ ID NO: 364816 - DNA, 101 bp, Homo sapiens
ggggacagagtgcagctcctaaacctgctggtgacacgactcagacagaaggctctgaagagtgttgtactctatgttatcctggctccttttgacaatga

SEQ ID NO: 364817 - DNA, 98 bp, Homo sapiens
ttcaatacaataccaatgtggtgtataatacagaaggaaaactcgtggcacgttaccataagaaacttctgcagcatccagaactgagtaatagtcaa

SEQ ID NO: 364818 - DNA, 103 bp, Homo sapiens
ctggacacggcctcctcggatgaggagaatgaggacggagacttcacggtgtacgagtgcccgggcctggccccggttggagtgcagtggcgtgatctcggct

SEQ ID NO: 364819 - DNA, 98 bp, Homo sapiens
cgtcttcccggcgagtccgcgacggtcgccgcccacggcgaggtgggcctgggtcctccaggatgccctgggcatcgccttctgcctctacatgctga

SEQ ID NO: 364820 - DNA, 100 bp, Homo sapiens
gctcgggcaaggatggtggaggcgagaacactgaggagaagaagccattgaagatgttgaaggacccagtgaaacagctgctgatccagaggagcttgct

SEQ ID NO: 364821 - DNA, 87 bp, Homo sapiens
aggtgcggagtttcgtgagtttttactgactcgagagctggaagtcgagtgtgctactcaactcaggagatttggagacaaactgaa

SEQ ID NO: 364822 - DNA, 83 bp, Homo sapiens
ttcccgtccgcggcgtggaggacgtgaagccctccaatatgctagtaaacacaagaggacaggttaagctgtgtgattttgga

SEQ ID NO: 364823 - DNA, 83 bp, Homo sapiens
agtctctgtgagggaaggccagggtgtcgttctgatgtgctctcctccgccacattcaccagtctgttcccagtattctagag

SEQ ID NO: 364824 - DNA, 75 bp, Homo sapiens
actcagtgcatacaaagtggagttagcagagagtgtgtttggggcagggaggtctgttgtggaaccaatcctgac

SEQ ID NO: 364825 - DNA, 51 bp, Homo sapiens
tccagccaccagtgggatgatgcttgacaaaagtaagctgaagccaggaac

SEQ ID NO: 364826 - DNA, 100 bp, Homo sapiens
gaacgaaagcagtgacggaggagcttgtaccaccgtacatagtggaatgtcatgggatcacccttcttccccagttcttgggcatgtaccggcttaatgt

SEQ ID NO: 364827 - DNA, 74 bp, Homo sapiens
ttatatgatgtcgctgggcaggggtaccttcgggaatctatttctcgaatgctggcagccaaaaccgttttggc

SEQ ID NO: 364828 - DNA, 50 bp, Homo sapiens
gaaacgcttacttatttgaaccaagaccagcatctcagacatgtcgaaaa

SEQ ID NO: 364829 - DNA, 101 bp, Homo sapiens
gccacgcgacatctgcaaggacagttgtttggtgttttgcttcaggttatagatggagagacctataaagggagttgaccacatttggccatttcccagaa

SEQ ID NO: 364830 - DNA, 97 bp, Homo sapiens
gtggaacactgtagagcgtttaaaggacaataagcccaactacaaactcgaccacatcatcaaggaacgtcatgagggtcctgtgtggcaagtggcc

SEQ ID NO: 364831 - DNA, 100 bp, Homo sapiens
gactacaggcgtgcaccaccatccccaggcgcgggcggtgatgaactttgtggttcgctaccggccagacgagcagccgtctctgcggccacaccacgac

SEQ ID NO: 364832 - DNA, 100 bp, Homo sapiens
cagatcaccgggggcgccctggaggagtccctgaagatctatgctcctctgtacttgcatctgcaaacatagagaattctgggcttccacacaactccag

SEQ ID NO: 364833 - DNA, 87 bp, Homo sapiens
caggccaccaccggccgcctcagccatggacgcgtccctggagaagaggtggggctggtgtccgagcacttctcgcaggccccgcag

SEQ ID NO: 364834 - DNA, 88 bp, Homo sapiens
acccaaggtcatcattgtccaggcctgcagaggtggcgaacagctgcttggagaactacaagtgaagaaaagaaagcattagatcagg

SEQ ID NO: 364835 - DNA, 98 bp, Homo sapiens
caaactaagcccaagatgcaaagtttggttcaatgggggttaggtggcctgcatgcagtttataaatgcccttgtcacttctccttatgagcttgatt

SEQ ID NO: 364836 - DNA, 100 bp, Homo sapiens
ccacaagcatctgaagagagttttcctgatagatctcaacagtagggctggtggcagcagcgtcgtcataggtaatattggtgccctgatgggctacgcc

SEQ ID NO: 364837 - DNA, 75 bp, Homo sapiens
gccgcctgacccggcgggtggaggagatcaagatctggtgctctcatgaaaatctacatcaggaggacctagaaa

SEQ ID NO: 364838 - DNA, 75 bp, Homo sapiens
tctgcaaacaatggacggagattcttcactttacagttgagagggaaaatgtgcagaagaggacctttacacgat

SEQ ID NO: 364839 - DNA, 100 bp, Homo sapiens
atggcagaggcacgggagaagaggaggatgcggctcgtggtggatggcatggggcgctttggcagatttaacagaggctttggatgaagatgcagacccc

SEQ ID NO: 364840 - DNA, 90 bp, Homo sapiens
tcgcttcctggctggtattatggtctgggtgatgatcatcatggtgattctggtgctgggctacggtgctccgagagatgctccctctcc

SEQ ID NO: 364841 - DNA, 100 bp, Homo sapiens
ctcctgcgtgagaccagaaagctgggagccctgcgtggaggaaaactcactaccatgagaattgcagtgatttgcttttgcctcctaggcatcacctgtg

SEQ ID NO: 364842 - DNA, 98 bp, Homo sapiens
gaatattgcttgtgaagactgctccaaatctgagtgggacatacttttgaaggatgtgcaatgttcaatcataagtgtgacaaaaactgacaagcagg

SEQ ID NO: 364843 - DNA, 75 bp, Homo sapiens
cgcttccgctggcccatagtgatctttgcagtgacccagtctgaaccggacggcttttctcatttccacttgtac

SEQ ID NO: 364844 - DNA, 125 bp, Homo sapiens
ctggggacaagaatgccaccaaagcaggcgatgacgagccagagtacgagggacttcaaggatgttgaagccgccttgcatgccatgaagaacgtggcccagctcatcaacgagcggaagcggag

SEQ ID NO: 364845 - DNA, 101 bp, Homo sapiens
ttcctgcatgaagacagtggctggcggtgcctggacgtacaagtatcatcagagagtcttatatattgatatagatattcatcatggtgatggtgttgaag

SEQ ID NO: 364846 - DNA, 75 bp, Homo sapiens
gccttcatcacagctggagggtccctccgaagtattcagcgcagcctcttgttaaattcctcatctatgcctgtc

SEQ ID NO: 364847 - DNA, 82 bp, Homo sapiens
caaggtgctggcgaacccgcggcggacttacgtcacgcctcctggcacaggaaattcgaaatgagtcccatgactatcctca

SEQ ID NO: 364848 - DNA, 83 bp, Homo sapiens
ggtgtctcacctttaactctccttatgctgggtgaaaacaaaggtggtgtttcataagatgtcacccaacgagaccctctttt

SEQ ID NO: 364849 - DNA, 83 bp, Homo sapiens
cgacgtcgtgatccagaagtccagagctgaggactgcctgtttgcaggacttgaactgccatgtcctctgaagaaggaaagct

SEQ ID NO: 364850 - DNA, 73 bp, Homo sapiens
aacccaggaggagactctccctggaaaacttcccttccctttcgatagaaaatgctgctgaagaacctagagt

SEQ ID NO: 364851 - DNA, 125 bp, Homo sapiens
cagaccctggagcctcagttggaagcagccgatccagcctgcggagcctgtggggcaggtttggtgcacctcgatttggaggaagtagggcagggcccttatctggaaagaagtttggaaaccct

SEQ ID NO: 364852 - DNA, 90 bp, Homo sapiens
gtttgagtccgcatcgccacagctgaaggctgcgagggactaagagcagagaagagtgtcttccaaagtgttcttcactctttttgccct

SEQ ID NO: 364853 - DNA, 75 bp, Homo sapiens
ctgggcctgcagcgcggagcagaaagcagaacccgcagagccatgtccattggagcccgttcccaatcagctcgt

SEQ ID NO: 364854 - DNA, 100 bp, Homo sapiens
cagtgacacagaacagatagctgaagaaggtgacgataatttggctacattcacagctctgatggagggcaaaatcaataagcagctgaaaaaagttctg

SEQ ID NO: 364855 - DNA, 118 bp, Homo sapiens
ccgccatgctgtctctagactttttggacgatgtgcggcggatgaacaagcggcagaattgagaaagtgactgaccacctggaagccctcattgatccatttgacctggacgttttca

SEQ ID NO: 364856 - DNA, 90 bp, Homo sapiens
gtcgatggtcggcggcgcccggatgggcagctgaggctgttcgctgctatgaatctctaatcttaaaagctgaaggaaaagtggagtctg

SEQ ID NO: 364857 - DNA, 97 bp, Homo sapiens
tctgacaagagcatcaaccctctggatgcacatgatggggaagtcaacgctgtgcagttcagtccaggttcccggttactggccactggaggcatgg

SEQ ID NO: 364858 - DNA, 83 bp, Homo sapiens
cgccccagcgatggaagaggatcaggagctggagagagaccatttgtttgtgactatgaagggtgtggcaaggccttcatcag

SEQ ID NO: 364859 - DNA, 100 bp, Homo sapiens
ccagaggacctcagaaaggagctctatgaactttgggaaatgaggataggaattcactcaggctccgtgctggctggagttgttggggtgcgaatgccac

SEQ ID NO: 364860 - DNA, 100 bp, Homo sapiens
tatgtttgggatatcaagagtataatgtctatggtgaagtcttttgtacagtggttaggcgggcaaaactgttccgatttgcctctgagaacgatctccc

SEQ ID NO: 364861 - DNA, 89 bp, Homo sapiens
gttctttagaactgaagccattctcaaagcctcctggccccagagacagatctccttacaacatgcattataccttctgcatcatggaa

SEQ ID NO: 364862 - DNA, 98 bp, Homo sapiens
caggcctgcgtggaaattgaatgagattgtgtagcccatcagtgttatcatggtttcatgaaggctgtccaggaaggaaacattcagtgggagagccg

SEQ ID NO: 364863 - DNA, 75 bp, Homo sapiens
gggaaggaaaaacagaatcagctgttccctgcgaaagggtaatcactttgatcagtatgaggaaggacacttgga

SEQ ID NO: 364864 - DNA, 101 bp, Homo sapiens
tagaaagaagcaactcaagttgcaaggatattcctcatgtatcatgcaaggatattcctcatatatcatatcgcagcctgcagctgagcgcatgggagagc

SEQ ID NO: 364865 - DNA, 89 bp, Homo sapiens
ggtgcagccccgggccaggccgcggccggggcaggagcgcagggttacattccgaaaagcaaatgggagatggacacatctgaggcaaa

SEQ ID NO: 364866 - DNA, 83 bp, Homo sapiens
gataatcaaccaactgttacaatcaaggtctatgaagggcaagaagtacaagcccctggacctgcggcctaagaagacacgtg

SEQ ID NO: 364867 - DNA, 51 bp, Homo sapiens
atgcaggaaattttgtggaagctacaactgacgaggaagattctgtttcga

SEQ ID NO: 364868 - DNA, 100 bp, Homo sapiens
attgcacacgacgtggatcccatcgaggctaaagaattacctccaaagccattgtcaagaccacagcagtcatctgcaccagtccagctgaactctggct

SEQ ID NO: 364869 - DNA, 49 bp, Homo sapiens
gcgctgccgccgctctgaggagttaaagtttccacgggctcccttgctc

SEQ ID NO: 364870 - DNA, 100 bp, Homo sapiens
gagcccgaggccggcgccggcgccggcgccgcggcctcttcggctgcggaccctgccattccggaggagatgtagaagacagaagtagctcagggtcctg

SEQ ID NO: 364871 - DNA, 75 bp, Homo sapiens
ttgtagtcatgtacagaacatgatcaagggtgttacactgggtgaagcaagaagcatttcatttgcacatctttc

SEQ ID NO: 364872 - DNA, 50 bp, Homo sapiens
gggcagagttcttgaggaagccagtactatactggcaattgctggagaag

SEQ ID NO: 364873 - DNA, 100 bp, Homo sapiens
gtgcgcgccctcaatgacaagctgtacgaaaagcggaaggtggcagcgctggagatcgagaagaccatgacttcttccagcatgtggaaatgcacctgcg

SEQ ID NO: 364874 - DNA, 82 bp, Homo sapiens
gaacgtgagcaagcccaggcacagccgacgccgcgggagaagcagggccctgagcggaagaggattaagaaggagcctgtca

SEQ ID NO: 364875 - DNA, 98 bp, Homo sapiens
tgagttcctgcatgagtatgacatgaccaagatgcccgagtgctacttctactccaagttcggctcaatattgtgcatgacacccgctacaagtgttg

SEQ ID NO: 364876 - DNA, 50 bp, Homo sapiens
tttggacctagcaggttcggcggccggggacctcagcaatggagaatatc

SEQ ID NO: 364877 - DNA, 90 bp, Homo sapiens
caaaaatactggacagagaggcctgaaaatgtgacaggatcatgaatgtcaaaggtgatgactgaaaaagggaaactgtgccactatttg

SEQ ID NO: 364878 - DNA, 124 bp, Homo sapiens
agccgcgtggaggcggtgtacgtgctgggcacctacctctggaccgatgtctacaggacgggctctacgagtgcattctctgtgcctgctgtagcaccagctgccccagctactggtggaacgg

SEQ ID NO: 364879 - DNA, 101 bp, Homo sapiens
cagaggtggaggcgctttgaaagatacacaatcatcatcttactagttctctgtgttgctcgctaaccagtcccccagttcagtagactggagcccagagc

SEQ ID NO: 364880 - DNA, 58 bp, Homo sapiens
cttctctcctcacagaaatttaactggaaaatgtttataggaggccttagctgggaca

SEQ ID NO: 364881 - DNA, 100 bp, Homo sapiens
tttgaaacctcgtcattaattggacacagtgccagagtgtatgcactttactacaaagatggacttctctgtacaggatgaatttcacccattcatcgag

SEQ ID NO: 364882 - DNA, 97 bp, Homo sapiens
ctcaggccctaggccattaaatcctgtaactcaagctcccttgccacctgggttccagagttctaaatctggaaagatctacctccatagagacgta

SEQ ID NO: 364883 - DNA, 100 bp, Homo sapiens
agaaaacttcgaaggcttaagaagctgcacagtgggatgaagacgtacgggtgcgagctctgcgggaagcggttcctggatagtttgcggctgagaatgc

SEQ ID NO: 364884 - DNA, 87 bp, Homo sapiens
cggttttcttatgcttataagagtggaacaggtattgttgcagcatctggcagtgagactgaggatgaggacagcatggacattccc

SEQ ID NO: 364885 - DNA, 100 bp, Homo sapiens
ttctatagacctgttgcggtcatgctttttgcagcagagttcttggagtctctgcggagtccctgggccagatctcacagtgaaagctgcaggatcttcc

SEQ ID NO: 364886 - DNA, 100 bp, Homo sapiens
agcagctgctgtcccgggcctaccccctggactccctggagaagcagatggaaaaggcccaccttgtgaactcctcgtgcccagggctgatgtgcgtctt

SEQ ID NO: 364887 - DNA, 112 bp, Homo sapiens
gtccagttgcagcccatggagatccagttcaattatgaatctcaggaacaccaccttctgtcaggtgcagctaaatcaagtccagcagctaaaccaggatccacaccttctc

SEQ ID NO: 364888 - DNA, 75 bp, Homo sapiens
gcctcagtttgtgcaggacaccgacatggaacagggactcactgggggtattgactgggctcccaagagcgaccg

SEQ ID NO: 364889 - DNA, 100 bp, Homo sapiens
cctcctggcagctggacaccagtttgaatcttcctttgagctccggaaagttggaaaaccagtagattcccagacatcgcgaagtgaatctgaaattgtg

SEQ ID NO: 364890 - DNA, 100 bp, Homo sapiens
ggggctgaagaagcagttctacaaggcgagccagggcggcgactggcggcgcgatggacctgaccgggctcctgctggacgaagaaggcaccttctccct

SEQ ID NO: 364891 - DNA, 100 bp, Homo sapiens
caaatgtttttctgttttgcctgaatacatgatttaaacaagagatttccacagaaggatggagaagagttcctgggaaatacatgagaggagaatgaag

SEQ ID NO: 364892 - DNA, 100 bp, Homo sapiens
agcctggagtctgcgaaggccgggacccggttccccggcccacagtgggggtgtgcaaacccgagagaactggatgatgaggagtctgatgaggaagctg

SEQ ID NO: 364893 - DNA, 114 bp, Homo sapiens
aagtagtcaaacttttcagactggaacagtagaatggaaattgcgatctgatacagcacaagtagaactgacaggcggcaccatacaggaagattacttgagagagctgctgac

SEQ ID NO: 364894 - DNA, 90 bp, Homo sapiens
cggcagcctagcgcaatgaggcgggcagcactgcggagtgtggccatctggggccgtgtggtatttgccactcaggagacatgtccctat

SEQ ID NO: 364895 - DNA, 74 bp, Homo sapiens
ttgaaaacagctggtggacaaaattttgtggcgctctgcgtcccctgaagatggaggtttgctcttgttgccca

SEQ ID NO: 364896 - DNA, 99 bp, Homo sapiens
cgctgcggcccgacgagctggagcgcctgtcaggctgggaggaggaggaggagagctgcttccttgtggtcatagatgcaaagagatgtgtcatcctgg

SEQ ID NO: 364897 - DNA, 82 bp, Homo sapiens
tgccatattgtgtcttccccggccggtccctcgcctcccggccgagctgacggaagctcttcgtgggcggtcttgactggag

SEQ ID NO: 364898 - DNA, 83 bp, Homo sapiens
ggccccgctgggctggccctgcagggaccatggaatccagagctgaatgcgcctgcttcctctgcgccagaagaaggcccacc

SEQ ID NO: 364899 - DNA, 75 bp, Homo sapiens
tgtgtctccccggacgcgagcccgctcccctgagacaacagctttgagcagttcattattaattattgtaacgaa

SEQ ID NO: 364900 - DNA, 76 bp, Homo sapiens
gtataccaacccaccccacatggcccacgtacctcaggcctcaggcccaggcccaaggccaagtgagagagcccag

SEQ ID NO: 364901 - DNA, 96 bp, Homo sapiens
cctgccctgccttcactcttctcccctgattcaagactcctctgctttggactgaagagaacaatagtcaagggacgacacagtcaaacgtggata

SEQ ID NO: 364902 - DNA, 75 bp, Homo sapiens
cctggccaacaagattgtccccattgccatccaggtacgttgtatgttaaacatttggggtgtgatgcttttcat

SEQ ID NO: 364903 - DNA, 100 bp, Homo sapiens
cttgccagatacgacttttcagaggaggagctccggaagctgcgagaagaaaccaacgcggagatgctgcggcaggagctggaccgcgagcggcagcggc

SEQ ID NO: 364904 - DNA, 80 bp, Homo sapiens
ggctgagggagctcgggccaatcagagggacggccccagaatggcatgctgtgtaaatgagtatggaagattatgatttc

SEQ ID NO: 364905 - DNA, 100 bp, Homo sapiens
cctcagatgggagagattattagctgctgtggaggcacatacctacccagcatgcctcggtcctataagcttaagatctccttcagcgagacagccctgg

SEQ ID NO: 364906 - DNA, 101 bp, Homo sapiens
tgcagaccggcctcgcggagcccgcgcgccgagccccacgatgatcaggatggtgctttcacaaaatggagagtggagaattcatggggtgaagaccatgg

SEQ ID NO: 364907 - DNA, 75 bp, Homo sapiens
gaatattttacagcaaagcagtcatttgggccaggcttagtcatctattggtatggatttatccaggagctggac

SEQ ID NO: 364908 - DNA, 90 bp, Homo sapiens
caacattgtcactgttggggatgtagaagagatcaataagaccgtttcccgaatgaaagatgtgatcttcgtggtggaaagctaaatttt

SEQ ID NO: 364909 - DNA, 80 bp, Homo sapiens
caatggggaggacaacttcgcccgggacttcatgtgtgcaacttgctttggtgtttgctgttttattgccacagatgaca

SEQ ID NO: 364910 - DNA, 78 bp, Homo sapiens
tagctgggagccatcacgcccagctagccatcttctaattttcattccttcaaagtctgtgctgagacctataaccct

SEQ ID NO: 364911 - DNA, 75 bp, Homo sapiens
cgttgccggtgccggcctagcgtcctggaattacttcaatcaagattcactggcaaaatttgctggcagaaaact

SEQ ID NO: 364912 - DNA, 90 bp, Homo sapiens
ataaaccagaacatcgttcttcaaggattccagacagcattggaaaagacatagaaaaggcttgccaatctatttatcctctccatgatg

SEQ ID NO: 364913 - DNA, 100 bp, Homo sapiens
atttgcttttgtaacttttgatgatcatgatacagttgataaaattgttgggagaagatagcattcttcacaaggccaaggatcaacatacctcctctcc

SEQ ID NO: 364914 - DNA, 82 bp, Homo sapiens
agaactggtcgccatcaagaaagtattgcaggacaagagatttaaggcactgccaggacttaccgtacaacactccttggct

SEQ ID NO: 364915 - DNA, 100 bp, Homo sapiens
ctctcagagcaaagaccccagagtgaagcagccgacacgagtcgttgttcataaaacagcttttgaaagttgagagcacacccctggagaaccgactgtg

SEQ ID NO: 364916 - DNA, 50 bp, Homo sapiens
ccaagctcgtagcctgccactccgtgcgatccagacacattagtcaagct

SEQ ID NO: 364917 - DNA, 48 bp, Homo sapiens
ggcgccgcgccctcggcctgcacgggtggtggacataatgcgagttaa

SEQ ID NO: 364918 - DNA, 82 bp, Homo sapiens
cagcgggtgacatggaaggggcagtacaagcttacgtctctgctcttcagtacaatcctgctctcaaaattagagagatgtg

SEQ ID NO: 364919 - DNA, 100 bp, Homo sapiens
cccgggacggaacacgctgcctcagggagcccgcgaccgcgccttctcctccgccggtcccatacggtactccaaagattcaggtttactcacgtcatcc

SEQ ID NO: 364920 - DNA, 82 bp, Homo sapiens
aggcagcgggctttgccagcaaaaccgaaacagacaatgcagatcttcgtgaagactctgactggtaagaccatcaccctcg

SEQ ID NO: 364921 - DNA, 109 bp, Homo sapiens
aagtggtgatgcaagaagtttctaggaaaggccggacaccaggcaaggggagagccagttgcgcagagccctgcaaccagcagtccagggagaagtggtgaatgtcatg

SEQ ID NO: 364922 - DNA, 90 bp, Homo sapiens
tgaaacttgcccagatgttctcagatatggtcttaaaaggtcagcttttgccaactgttttcaaatcacatgcatgggggatcttacaca

SEQ ID NO: 364923 - DNA, 75 bp, Homo sapiens
attcctactgctgctaaatatgagtgtgacaacatctggggtgatggaaagtatgaagaaagtcaagaaggtgac

SEQ ID NO: 364924 - DNA, 98 bp, Homo sapiens
agtattgcaccatgaagagatgattgggaaagctgggggagtgtctctgtcaaagacatggacatcttccagcaacagatctcgagaagacagctggc

SEQ ID NO: 364925 - DNA, 100 bp, Homo sapiens
aggaactgtggacagtgaagagaggcctctcccaaagcacctgcgcagcctacaaggagaagatgaaggagctgtcggtgctgtcgctcatctgctcctg

SEQ ID NO: 364926 - DNA, 96 bp, Homo sapiens
tcccaagagcagcggaaaatgatccagtcacaggactttgaagaatatcctgaacatagaacgaactttttcttactacttcaggctgtcaattct

SEQ ID NO: 364927 - DNA, 100 bp, Homo sapiens
caaactctgcctgtgtgagcagtctctggacaagatgaccacactccaggaatgccagtgcatcttttgcacagctgtatttataacagcaatgatgtag

SEQ ID NO: 364928 - DNA, 89 bp, Homo sapiens
tgcctgggaatcggtcgcctggaggaccagtatttcccatggaggctccggggaaccttgtacaacaccggccgacatgtctccttcct

SEQ ID NO: 364929 - DNA, 74 bp, Homo sapiens
ggctgctgtttctcttcgccgacggccaagaataaggagacgggtgctttggctgcggccaaagtcattgaaac

SEQ ID NO: 364930 - DNA, 100 bp, Homo sapiens
cagctggaaaaaccaccatcttgtataaattgaagctgggggagactgtgcctgccgtccctacagtagaacgagcgacgtgacacaagaggtcccaagg

SEQ ID NO: 364931 - DNA, 99 bp, Homo sapiens
tcgcagtggtcgcttcttctccttgacaccattcgcttttcacccaagatgatttgatgtcttataaaactctgatgaaccatgatggctacacagaca

SEQ ID NO: 364932 - DNA, 74 bp, Homo sapiens
ccagcttctagaagacccattacagaggatagaagaagtcagagatgccatggaaaatgaaatgagaacccagc

SEQ ID NO: 364933 - DNA, 90 bp, Homo sapiens
gccatgctgacctacaagcagaagagggagtgcatccgccccaacccttttccccctcgtctcctgtgagaattccccgtcggatacgag

SEQ ID NO: 364934 - DNA, 83 bp, Homo sapiens
gtccactacatttcactggccgcttctgtgaaaaagctgagccagttccagctgttggaacaagagattacaaagcccgtgga

SEQ ID NO: 364935 - DNA, 75 bp, Homo sapiens
acggcctgcatcgggcccacgctcagacgtccttctatggccgcttcaggcacttcttggatatcatcgaccctc

SEQ ID NO: 364936 - DNA, 100 bp, Homo sapiens
ggtcgctccatttcgaattctgcttcaagttcccggctcccaggtttattctcccatagcatgtggtctattattagcagaagatttttctgcatagttg

SEQ ID NO: 364937 - DNA, 100 bp, Homo sapiens
ggacaagatcccgtccatgaatcagagggtcaccatgaagttcaatcccttcgttacctcggaccgcagtaaaaaccgcaaacgtcacttcaatgccccc

SEQ ID NO: 364938 - DNA, 50 bp, Homo sapiens
tcgactgctagagccgagcgaagccctgtgggccaaagctgaccaactcc

SEQ ID NO: 364939 - DNA, 75 bp, Homo sapiens
tggttttgtgtacagtgaagctgtagccaggtgccaaatcaatcattcaggagtttccagagatcacaattttaa

SEQ ID NO: 364940 - DNA, 100 bp, Homo sapiens
gcgagattataagaagcttgggttcattgaattggcagcaatgaaacagattctcgttaagatgcatagtaaacattctgagaacagcttacttctcact

SEQ ID NO: 364941 - DNA, 100 bp, Homo sapiens
tctgagatatgccgtttacggatgcccttggaaatcacccgtagctttatccagaaccgagatgggacttatgagctatttaaatgccctaaagtggaag

SEQ ID NO: 364942 - DNA, 82 bp, Homo sapiens
cgagaccgcggccgggaccgaggatcatggaagggaagtggttgctgtgtatgttactggtgcttggaactgctattgttga

SEQ ID NO: 364943 - DNA, 74 bp, Homo sapiens
gaggaggggcgcctggggacagaaggcgacgtcccctgaaccactgaggcggctcccagctgcgttggcgacat

SEQ ID NO: 364944 - DNA, 75 bp, Homo sapiens
aacagtcagaactttgatgagtacatgaaggctctaggatatagacctgcagctaactggatttgatttataaga

SEQ ID NO: 364945 - DNA, 100 bp, Homo sapiens
tacagctggagcgcccagaggcgagccctggtggaggaagagatctcagtgaatatcttccggactctgccgcccagtgagaaccctgaatttgaccctg

SEQ ID NO: 364946 - DNA, 83 bp, Homo sapiens
tggaaaggagattgacagtcacaattttgtaataagatattggtacagaaacttttaaacaagtttattgtcgaaagtctcac

SEQ ID NO: 364947 - DNA, 75 bp, Homo sapiens
atccttttgctcctggtggaacagttgttgcagcaagcgattcaggcagtggccattcaccaccgagtagcagtc

SEQ ID NO: 364948 - DNA, 100 bp, Homo sapiens
attttagcaacgcagaagcccggcgccgggaagcctcagctcgcctgaagtgagcatttgtcctgtgctttcacattctttctgcatggagaaagtaatg

SEQ ID NO: 364949 - DNA, 74 bp, Homo sapiens
gctgtcaacaagaagagcagttcccaggatctgcataaagtctctgctggatgaaccgaatcctaacagtccag

SEQ ID NO: 364950 - DNA, 114 bp, Homo sapiens
cgctgatggtgtcggtgagcgcgtttcccgcctgagcgcaactagcggcgggtcgtgggcacctccaggtaagaatgattgatgttggctgatattggagtgctcattcacatg

SEQ ID NO: 364951 - DNA, 97 bp, Homo sapiens
gaaaaggaaggtggctgaacaggaggagcggcagggcatgaaggtccaggcgctggccaggcagtttggtggttatgccaaggaagcagactacgta

SEQ ID NO: 364952 - DNA, 100 bp, Homo sapiens
cccaccaacaacaccacaataatccacagccaagggtgtggatgaatggaacatagctcgcctcaatacagtcttggatgtggttgaagaagagtgtggc

SEQ ID NO: 364953 - DNA, 96 bp, Homo sapiens
tcctggatctgaggatgtgaaacttaaatttgaagaggtgaagagaaacggattcgggaattctaccagtcccgaggtttggaccgggtcacccag

SEQ ID NO: 364954 - DNA, 99 bp, Homo sapiens
gaacgggttttgttagccctacatgatcgaggacttggaaaaggagagtgacacacccctccagcaagtatccattgaagaaattctagaagaacaaag

SEQ ID NO: 364955 - DNA, 83 bp, Homo sapiens
tccagaggcgtttttgtacgaagggatcctgtgccggtatcagaatatctggaacatcaacctgcagttgcggcccagcctca

SEQ ID NO: 364956 - DNA, 75 bp, Homo sapiens
tggtggttccaatgagacagggcacaccaaactccatctgcttcgagagctgtgcccaggagtgaacaaccagcc

SEQ ID NO: 364957 - DNA, 100 bp, Homo sapiens
gccctcattctgcacgacgatgaggtgacagtcacggtacatttgaagaatacagaaatagaaaataccaagcttatgtcagaggtccagactttaaaaa

SEQ ID NO: 364958 - DNA, 100 bp, Homo sapiens
cacgtggccaccaacctggggcgcagatgggcaacactccagattcagcctcagacaacctcggtttccgctgtgctgcagacgcaggccggccgccagg

SEQ ID NO: 364959 - DNA, 82 bp, Homo sapiens
gcaatttccctgagaaccgtttacttccagaagattggtggagcttgatctgaagagtgctgcagcagctcccagtccagtg

SEQ ID NO: 364960 - DNA, 88 bp, Homo sapiens
accacaaatgtttttctgttttgcctgaatacatgatttaaacaagagatttccacagaagtgtgggccgacccaagcacgttcgtgt

SEQ ID NO: 364961 - DNA, 100 bp, Homo sapiens
agcgcctggacccagcacggagggacttctgcagagagagtgcgcagaaggattccgggagcacagttccgccgagtgcagtctttgcaagccacatttg

SEQ ID NO: 364962 - DNA, 100 bp, Homo sapiens
ggaagacccttctgctagctgaagtagcaaagaagctaactgccttctatgaaagcagtcattattcaaggtgatcgtattcttccagtgaaaacaagac

SEQ ID NO: 364963 - DNA, 100 bp, Homo sapiens
ttgcactccagcatgccgatagttcaaacttctatatcacagaaaaggcagtcgatgatgtgaagaaaggttacatcaaagcagaagaaaagtcctatca

SEQ ID NO: 364964 - DNA, 100 bp, Homo sapiens
ttattacagtatattcaagaagagacggcagaacacaccggggagggcaggccagcgaaactgtcctacacggaggcagagggcgaacgatctgcactgc

SEQ ID NO: 364965 - DNA, 75 bp, Homo sapiens
gcgaaactgaggtctcatggagaagccccggagtattgagcatctggttttgtagcctggatgtgtctgctagta

SEQ ID NO: 364966 - DNA, 123 bp, Homo sapiens
gggagtctgcggtcgttccctcggctgtggaccgggcggcacgcacgcggtgcagggtaacatggcggatgcggaagcaaccaaccagtggttcatcccagccgtgaggggggacattccccc

SEQ ID NO: 364967 - DNA, 82 bp, Homo sapiens
ccagctcaaccgcttcgtgcaactctccgggcggccgcacctgccagcatcgagagtaaacatgaggttacgatcctgggag

SEQ ID NO: 364968 - DNA, 100 bp, Homo sapiens
gagctctaccgcgcctggtatcgggaggtgccgaacactggttaattatagaaaatgccaagtaggaaatttgccgatggtgaagtggtaagaggtcgat

SEQ ID NO: 364969 - DNA, 90 bp, Homo sapiens
ctcagtgagacacaatttatcattgaataagtgttttaagaaagtggacaaagagaggagtcagtgagaagcgccaccttcaagtgaacg

SEQ ID NO: 364970 - DNA, 75 bp, Homo sapiens
gggtgtgcaaacccgagagaactggatgcacgaaggagagagagtgagaagtctctagaaaatgaaacactcaat

SEQ ID NO: 364971 - DNA, 75 bp, Homo sapiens
ttttgagtctccccggtacctgcagactctgatgccagtatggactggagatgatgggagccagttggatagccc

SEQ ID NO: 364972 - DNA, 75 bp, Homo sapiens
ggttgtgtctgtgacaaggaagccagaagaggacggggctcggcgcagaggctgctgctcctgctgccccatgag

SEQ ID NO: 364973 - DNA, 87 bp, Homo sapiens
aggctggcttctctccctactccattgactctgagccaggaagccctctattggatgatgcaaagacggggtctggctctgtcaccc

SEQ ID NO: 364974 - DNA, 100 bp, Homo sapiens
aaattctcatgatagcttccaagggacaaggtgtcaacaatgtgccgttgaaatggatgcagtcagaactgaatgttgaagaagtggtaaatgacaggag

SEQ ID NO: 364975 - DNA, 82 bp, Homo sapiens
aggaaagaaaagaatacattcctgattacctgccacccattgtgtcttctcaagaaggccatggaggaattgcaagaccaag

SEQ ID NO: 364976 - DNA, 75 bp, Homo sapiens
ctagacaatggtacaatctcacatgtgcagtctttgccaacaaaaaaaattaccaagaaacctattccagatgag

SEQ ID NO: 364977 - DNA, 78 bp, Homo sapiens
aagaaacctcaggacttgagtaacagcaacatgggtagtcagcagagtgcacacagcagctgtcatccctccttcgct

SEQ ID NO: 364978 - DNA, 83 bp, Homo sapiens
ctcgcagttgcctcatcacatcctagccgatgtctctctgaagggagaaaactggttgtcctggatgtttgaaaagttggtcg

SEQ ID NO: 364979 - DNA, 90 bp, Homo sapiens
gggcatcctcctgggcatcctgcttccccaggtctgctcaccaggtggccagataccgcccacgtgcccccatcattgctgtgacccgga

SEQ ID NO: 364980 - DNA, 75 bp, Homo sapiens
ttcgaaatggtctcctgaactgtaatgattgctacatgcgatccagaagcttgccttttgtcactgctccgaata

SEQ ID NO: 364981 - DNA, 50 bp, Homo sapiens
agagatctctgctgcctgcattgagggaaatcaatgtggactgaacataa

SEQ ID NO: 364982 - DNA, 74 bp, Homo sapiens
tccaacacagtgaagcagaaatatctgagctttactcctcctgggaacctcagaacctgttctggatccacagc

SEQ ID NO: 364983 - DNA, 75 bp, Homo sapiens
tcatggaaaacaactttgtggatttgacagaagtggaagtagtggaggaagtggaagtcgagaaaacagtggtag

SEQ ID NO: 364984 - DNA, 83 bp, Homo sapiens
agaatttagcgacggcgcctgtgaaccagatccaagtcttaaaattttggtagcagaaagcaaatgtgcaaagagcaatggaa

SEQ ID NO: 364985 - DNA, 100 bp, Homo sapiens
tgttgctgatgccacctcatcaagaagcatgatggacaggatgtttgccctcgaggccagcgatctgtacatgagacccaggaattatttccaaagcaag

SEQ ID NO: 364986 - DNA, 97 bp, Homo sapiens
agagaacagccctccatcttgcagcccagaaggtcacagaattttccacactccttgacagaggtgcttaacccttatccatcagcattctcagaca

SEQ ID NO: 364987 - DNA, 75 bp, Homo sapiens
ggagaaggtctacagagcggcctgcgccagcgaggcgtctctggccgagcctctttttgtggaaaacgacagcag

SEQ ID NO: 364988 - DNA, 98 bp, Homo sapiens
ctgccaattcatcaatttgagaagcatatctttttcttgcacatcaaggaggccctcttggcaggccacctcttgtgttccccagagcaggcagtgga

SEQ ID NO: 364989 - DNA, 100 bp, Homo sapiens
gaagaatttcctctgaagcaccggacctggaggaacttgctttgtaccagatccagctgctgaaggacctcagacatacagagaatgaagaggacaaagt

SEQ ID NO: 364990 - DNA, 85 bp, Homo sapiens
cgctggtgcagccaccctcgctccctctgctcttcctcccttcgctcgcaccatggttttaaaatcaaagatgggaaaatcggag

SEQ ID NO: 364991 - DNA, 100 bp, Homo sapiens
ttctttcgcaggtaaaaaacatgaagcagatgagttgagtggagatgcttctgtggaagatgatgcttttatcaagttccagaaagctgagtctgatctg

SEQ ID NO: 364992 - DNA, 100 bp, Homo sapiens
gctgcatgcacgagccaggaactgcgcagcctcttcgagcgccgcggacgcgtcatcgagtgtgacgtggtgaaaggaataagacgagttggaagaagac

SEQ ID NO: 364993 - DNA, 96 bp, Homo sapiens
gccagcgctgaatatcttcaggaaaatgggttccatgagaagtgacatcctcctcgaatcaaaagctccaattgattggtaacagaagatgaagac

SEQ ID NO: 364994 - DNA, 101 bp, Homo sapiens
tccgcgcacaatcggggcaccgagctcgactttgggatcatgctactatgacagaagtgaaatctctaaattttaatatgtctgttagtagtatggaatat

SEQ ID NO: 364995 - DNA, 75 bp, Homo sapiens
atcccttgaaccccctatggctgctgcttttggttgggaatccacgtgttgaacttaccctctcagagctccaag

SEQ ID NO: 364996 - DNA, 90 bp, Homo sapiens
agcaacgggtgcccctgagtgtgcaactgaagcctgaggtctccccaacgcaggacatcagttgcagagtgggcaggatcttaagacccg

SEQ ID NO: 364997 - DNA, 100 bp, Homo sapiens
tcgggtgggagtgacccgattttccaggtgttacacataatattgcattacttcgagaggtgataatcaactcacgctttgtaaaaggagacatcagcac

SEQ ID NO: 364998 - DNA, 90 bp, Homo sapiens
caggccctcaggctcctctgccttctgcttgggcttcagggctgcctggctgcagatggcttccggaaagtggtccacatcgagcagggc

SEQ ID NO: 364999 - DNA, 75 bp, Homo sapiens
agcctggtgagggtgatgttcgggaggaggccttgtccacagtgcacctatgatatgtgttttagaaatagccgt

SEQ ID NO: 365000 - DNA, 82 bp, Homo sapiens
tcggttttcttatgcttataagagtggaacaggagaatggggtactaagagaaaagcacgaagctgtggatcatagttccca

SEQ ID NO: 365001 - DNA, 83 bp, Homo sapiens
ccctgatgaaagcctacgggatccgctttgacgtgatggtgaacggcaagatgaggacggggacttggttgccttttccagtg

SEQ ID NO: 365002 - DNA, 85 bp, Homo sapiens
tttatcatcatattgataatctcaggagaactctatgcagaagaaacagattgtctcagtttacctagctttgaaaatgccatac

SEQ ID NO: 365003 - DNA, 100 bp, Homo sapiens
ctcccagctgctccaaatcctgggctcaagcaatcttcctgcctcagcctcccaaagtgctaggaatgcagatatttggagttcttacaacatggcagac

SEQ ID NO: 365004 - DNA, 87 bp, Homo sapiens
cgctctgaccactctccagcaccagcttccagttagtggatatagcacaccatccccagccaatgagttttgatcatcctgagaaaa

SEQ ID NO: 365005 - DNA, 51 bp, Homo sapiens
atgccttggaaaccatctcaatatgagctttgatccaaaccttctccacaa

SEQ ID NO: 365006 - DNA, 100 bp, Homo sapiens
acaggtttcgagatttgctgctaggggaccaaggatggcaaaacgacgacagggtggtgcacgagaccaggaaccacctgcgcctggttggctgttctgt

SEQ ID NO: 365007 - DNA, 100 bp, Homo sapiens
gataatggctacttcctgattaaacccactctccacagtactaggttttgacaagcttgcatcatgcgtgagtataagctagtcgttcttggctcaggag

SEQ ID NO: 365008 - DNA, 83 bp, Homo sapiens
cagttgaagtgtcattctacagtgtttcagatgacaatgctccctctccttatatggtcagcacgagggaccattgcccaggc

SEQ ID NO: 365009 - DNA, 98 bp, Homo sapiens
agtaccagccagcgccagctgcagccctggccgcgcactcgcctcagctgagcctggtaacgtttgaagataagaagcgggagaactttgaacgtggc

SEQ ID NO: 365010 - DNA, 96 bp, Homo sapiens
aggagctcagcatggtcatcctgctgccggatgacattgaggacgagtccacgggcctgaagaagggtaaactagcgctcctttccgtaaccacgg

SEQ ID NO: 365011 - DNA, 98 bp, Homo sapiens
gtcgggcctgtggaagaagcgccgcgcacggacttcggcagagcgctcctggttgcagccagaatgcatgacttcaggaggactgtgaaggaggtcat

SEQ ID NO: 365012 - DNA, 96 bp, Homo sapiens
gaacctgaatgcctacttgcaacagggttgcaaactgtcttccaggtctggttccagaacgcccgagccaagttcaggcgcaacctcttacggcag

SEQ ID NO: 365013 - DNA, 80 bp, Homo sapiens
gctcctggctcctggctccctactcttctaaggatcgctgtcctgacagaagagctggtgaattctatagccaagacgta

SEQ ID NO: 365014 - DNA, 75 bp, Homo sapiens
gagttcacagaccattacatcgaggtgattggcgtgaagctgacgggctctctctccggttggtcctcacccaaa

SEQ ID NO: 365015 - DNA, 97 bp, Homo sapiens
gtttatctcaaggcctgagtagccggtaacaaacgagggttcccgggattggaccgacgcagccatggcacatggtgcttctgaaggagcagtacgg

SEQ ID NO: 365016 - DNA, 75 bp, Homo sapiens
tttccctccagctctgtctatcctaccaagttctgggaggtgatcagtgatgaacatggcatcgaccccaccggc

SEQ ID NO: 365017 - DNA, 74 bp, Homo sapiens
aaggcaagaaggcaacgacgttccatctgtggaaggacctaccaaccaggccagagcctgggaacctctcagag

SEQ ID NO: 365018 - DNA, 82 bp, Homo sapiens
cactgttcctgccacagcggcttcgagctctcctctgatggcaggacctgccaaggttctgcggggagtgtctccagccctg

SEQ ID NO: 365019 - DNA, 50 bp, Homo sapiens
ctcaggagtggagctttttgccattccaagatgagatgggattctccaac

SEQ ID NO: 365020 - DNA, 100 bp, Homo sapiens
gagctgggtatcaccgccctacacatcaaactccgggccacaggaggaaatagaatcctggttttgacttcagtggagcagaaatctcaggaaactacac

SEQ ID NO: 365021 - DNA, 100 bp, Homo sapiens
attcagacaagagcattctccttatctcatctgcacaggaagcaggtctaagtaatagacctggacccacaggagcagcaaggccgaaggcggtttctgt

SEQ ID NO: 365022 - DNA, 87 bp, Homo sapiens
ttaagaaaggaaaatatcccaaggactaatctgatcgggtcttccttcatctgctctgttaaaagcgaaaatgaaacaattgcctgc

SEQ ID NO: 365023 - DNA, 82 bp, Homo sapiens
ggtttgtgtccagagccggactgattctctcaatttgcgtagcagaaggtcaagaaatttgtgtgattgaagccatgaaaat

SEQ ID NO: 365024 - DNA, 82 bp, Homo sapiens
tcgaatgggcacacctgtgtaggaaggcaacagcccccaggggagcaaccagggagtcaaaatcacaccggaccagcagaag

SEQ ID NO: 365025 - DNA, 50 bp, Homo sapiens
ctgcaggaactctacaacccaatccagctcaagactgcagtgcagatgac

SEQ ID NO: 365026 - DNA, 87 bp, Homo sapiens
cattgacatttaattttagggtcctttatatagaagggagagtagccccgtcgcagaatttagtctcaaaggaaacttcaaccacag

SEQ ID NO: 365027 - DNA, 50 bp, Homo sapiens
atgaacagcaggagcttgttgaaaggggtggtgaagcacttgcccaaagc

SEQ ID NO: 365028 - DNA, 90 bp, Homo sapiens
tctaagctgaataaagctgttttggaactgtcaggtacctcaaagcaatctttagaacacgatgttcttgatgataatacagagcagaca

SEQ ID NO: 365029 - DNA, 76 bp, Homo sapiens
gaatccacgagcatgccagcattgacttaccaggcatcaaagcggaaagtgaccagaagaggtgtgcagtttccag

SEQ ID NO: 365030 - DNA, 100 bp, Homo sapiens
acttggttctgccagatgttcctggggttactgtaaatgggaaggacaggcagagctaaacaagatgcaatgctcttggtggcagagcgactggaggggc

SEQ ID NO: 365031 - DNA, 75 bp, Homo sapiens
ctgccactgttttctggcactgaaggactccattgtccccttggggcggaaagaagccaaggccaaggagctggt

SEQ ID NO: 365032 - DNA, 100 bp, Homo sapiens
gcggagggtgcgcgagctctaccgcgcctggtatcgggaggtgccgaacactggaaatggaagttccagtattaccgaaaatctctctaccgatcaccag

SEQ ID NO: 365033 - DNA, 83 bp, Homo sapiens
acacggcagcacagctgtccaagggtagatatggattcccagtttctccagcggccagtgctccccctagtccacacagtgag

SEQ ID NO: 365034 - DNA, 82 bp, Homo sapiens
ctgagccggacgccggaatggagtttgaggaagagccttcatcccgcgtggagtctacccccaagcccttctcctcttccca

SEQ ID NO: 365035 - DNA, 75 bp, Homo sapiens
gaatgttcttaacccagaagtagctgaatgtgttactccattgctgaggagtgatgaggtggaaagtgagaaatg

SEQ ID NO: 365036 - DNA, 75 bp, Homo sapiens
cgcatcatgccagggagccaagcgtcctgcccggccgaagacggaagaaagtgccgggaagaaagaaaaccccgt

SEQ ID NO: 365037 - DNA, 100 bp, Homo sapiens
ccctggtcccaagggaacatcagttctacgagaccctccctgctgagatgcgcaaattcactccccagtacaaaggaatactcccccagttgcaagaggc

SEQ ID NO: 365038 - DNA, 83 bp, Homo sapiens
acccgccgacgcctcagccgcttggggcccgcacggaccctctacttcagctgagggtaaaaagctgggattggtaggctggg

SEQ ID NO: 365039 - DNA, 100 bp, Homo sapiens
attaaggggaaattacaagaattaggagcttatgttggagaactgtgtttatgaaactgtagttttgcctttggatgaaagggcatttgagaagacttta

SEQ ID NO: 365040 - DNA, 100 bp, Homo sapiens
gcgctttgagaactgagcgcatgtggagttcggaggaaaagggctcagatgcagacagacatgctgaactatctggaagtccactgaaaagcaaaagcac

SEQ ID NO: 365041 - DNA, 74 bp, Homo sapiens
gtggatcgctgtgatcgtcacttggcaaaatacatatctcagtgcattgatgagatcaagcaggagctgaagca

SEQ ID NO: 365042 - DNA, 50 bp, Homo sapiens
cgctgaggcttatttgggaaagaagactctggccatctatgaccggtttg

SEQ ID NO: 365043 - DNA, 100 bp, Homo sapiens
tggacccgaagaaggacgtgctgacccgcctgaagcacctgcgggcgctgctggactgggctggcttagatgaagatgaagatgcacatgtctgggagga

SEQ ID NO: 365044 - DNA, 75 bp, Homo sapiens
tcgccacaggctgcaagcgcccaaagccaatgggaatcacctggttcaagctgatctcattatgcttggccttgc

SEQ ID NO: 365045 - DNA, 100 bp, Homo sapiens
ctgtggtactttgaatttggcacctcggagacttttgcagcgacctgcaagaaactccacgaccacattgagttggaggggaagtcatctacaataagac

SEQ ID NO: 365046 - DNA, 90 bp, Homo sapiens
cttagctcgacggggctgaccgctctggcccagggtggagctgcacagtaaaggtcccaaaatacacaccaccacgagtgcaaaaaccca

SEQ ID NO: 365047 - DNA, 52 bp, Homo sapiens
gcaaacttgacactcaccctgaccgatttcctggcacatcatggaaccgact

SEQ ID NO: 365048 - DNA, 73 bp, Homo sapiens
tcatcttcctttgaccacgttatcaaggagattgctcgagactttaatcccaactggatgagtgctgtggaaa

SEQ ID NO: 365049 - DNA, 50 bp, Homo sapiens
ctaagagatatctgcaatgatgtactgcgatctataactacaatgcttct

SEQ ID NO: 365050 - DNA, 82 bp, Homo sapiens
cgttagcgactcatgcaccggacccgttaacgcgttgattcgttccgtgctgctgcaggcctcagtgtctccaccatccccc

SEQ ID NO: 365051 - DNA, 75 bp, Homo sapiens
tgaagataaaagtcctgaaacagttttgcagtcggttatcaatactctggctgaccatcatcatcgtgggactga

SEQ ID NO: 365052 - DNA, 89 bp, Homo sapiens
ataaagtgattttttgcctttgttgattaactggacaaattcaggcatcattaagcaagctaatggaaacacttggtcaagcagaacca

SEQ ID NO: 365053 - DNA, 100 bp, Homo sapiens
ctgaccaacatccaaagggcttctggacccactggactcctctggaggggcatacaaacttgcctgattccagggatgtatggataggggatgagcgagg

SEQ ID NO: 365054 - DNA, 75 bp, Homo sapiens
ttgagacactttgcaaaaaaacttgatcctcgaagagaaggtggtgatcaaaggcctttctgagaaaagtctaca

SEQ ID NO: 365055 - DNA, 100 bp, Homo sapiens
atggctcctttagcagagacacatttcctgaggatatcgtgtattgtgcttctgctaagccaaaaacaggcacttgaagaactgaaacagtcagtccagc

SEQ ID NO: 365056 - DNA, 74 bp, Homo sapiens
tctgggcttccacacaactccagtgctaactcaacaggcaccactggatcataccagtgacaagtcacttctcg

SEQ ID NO: 365057 - DNA, 101 bp, Homo sapiens
cctggaccctgcccagcagaatttgtatagagatgtgatgttggagaactacagaaacctggtctccctagagatgcagaggatgctatttatggaagaaa

SEQ ID NO: 365058 - DNA, 100 bp, Homo sapiens
ttatctgcatatcagagatattacagtttacaggctgactactggaaggttaacctcaccctacagatgaagataatagagcaagaaaaagaaattgcag

SEQ ID NO: 365059 - DNA, 76 bp, Homo sapiens
tttgtgttgatgaagatgaaagagactgcaggaggcaagtgaggcctatctggttggcctttttgaagacaccaac

SEQ ID NO: 365060 - DNA, 98 bp, Homo sapiens
gtgatccctcaagactggtccacggagtgtatgaccacaaacagccatcaagagttggccaccctgttcaagggcttaggagaaagtcaacacacttc

SEQ ID NO: 365061 - DNA, 90 bp, Homo sapiens
cttcccttcctggtcctgcttgtgcatatgtcaatcttaacatttgtgcaaatggcagtgaacaaggggggacacagcgattgccacgcg

SEQ ID NO: 365062 - DNA, 50 bp, Homo sapiens
ctttgcacttatggcctctctgggtgacaaaatatctgaacagaagagga

SEQ ID NO: 365063 - DNA, 51 bp, Homo sapiens
ctttaccagctcattaaagagagttgcccatatgtcttaatcttggatgag

SEQ ID NO: 365064 - DNA, 97 bp, Homo sapiens
ctccgccaactttcacgctgcctcggcggcccggcccggctcgacgccaatgggataacaaagccattgacctttgccgattgtgttggggacgaac

SEQ ID NO: 365065 - DNA, 75 bp, Homo sapiens
gaaagcagcatagagaatgagatagccgtcctgagaaacgcaaatctgtccaaggctgcctggggagcattggag

SEQ ID NO: 365066 - DNA, 51 bp, Homo sapiens
gccctggtcaagcggctcaaagggggtgagaactctgtctcagtcgacggg

SEQ ID NO: 365067 - DNA, 83 bp, Homo sapiens
gctataccagccaccctgcccccaagaaggaagtcatcatgggccggcctggaacagatacagtttatgtaacttgatggaag

SEQ ID NO: 365068 - DNA, 87 bp, Homo sapiens
tcagagcccggcaccacccatcttgagtatctgtataaatcaaagccattctgtgaaaaactgctttcctgggtgaaaagcagtggc

SEQ ID NO: 365069 - DNA, 98 bp, Homo sapiens
cgctgcccgggcggtgtctcgggaccccgacagctgcggttggcgggcaccataggccgaagcacccggttttccaagagataacttcaccaagatgt

SEQ ID NO: 365070 - DNA, 75 bp, Homo sapiens
ggtttgtatggacaggcttgtccatctgtaacttcattaagtggaatgcagtagccctctgggcctgggatattg

SEQ ID NO: 365071 - DNA, 82 bp, Homo sapiens
gggcgctccggtggcggcggagctgccgcagcgggaaccgcaagagcttggtggtaggaacgccctccccgaccctctcccg

SEQ ID NO: 365072 - DNA, 75 bp, Homo sapiens
ggaaagagttgtcaaacgaaacccatgtttctaatgaccagcaggtgctggagaatctggtaaaagcaccattgt

SEQ ID NO: 365073 - DNA, 83 bp, Homo sapiens
ggaatgcatccaagagaatccctcaacatgctggtggaaaatgagcttatatatgaagaagtcagcgagtggacaaagccagg

SEQ ID NO: 365074 - DNA, 100 bp, Homo sapiens
tgcaatcatttttcttcagctttatcagaggaggaagattatccaggagctattcagttgtgccttgaatgtcaaaaagctgccagcacttttaaacatt

SEQ ID NO: 365075 - DNA, 74 bp, Homo sapiens
gaggcgcctcgctggggcggggaccttgccttgcccggggcccagaggcagagctacacaaccatggaatccaa

SEQ ID NO: 365076 - DNA, 90 bp, Homo sapiens
ctttggtccaacgttgttccaggtttgtcaccgtttctctccggccggtcagggcaagagccaggtccagcatcctttgaagcatgagtt

SEQ ID NO: 365077 - DNA, 90 bp, Homo sapiens
cagaaaatgaatccatacaagattgatataggcgcagtatattctcacagaattggccgcgtaatccaggttgctgctgggagcagcaac

SEQ ID NO: 365078 - DNA, 75 bp, Homo sapiens
tagccattcttatagttgtaaggtttgccagaacccaataaagatgccatcttccaaggcctgacgcaggaccag

SEQ ID NO: 365079 - DNA, 82 bp, Homo sapiens
ccggagcaagcggagctcccccaagagccggaaagaaagcgtggatacccatcaacgaagttttgatattggaattcagatt

SEQ ID NO: 365080 - DNA, 82 bp, Homo sapiens
tttctgccggctgtaaagtcatcacctcctgggatcagatgtgcattgagactgttggcaagagtagcaagatgctgcagca

SEQ ID NO: 365081 - DNA, 90 bp, Homo sapiens
atcaaatggcacttcattggccacctacagaaacaaaatgtcaacaaattgatgggttcttcacacacccccattcggcgtagtacccag

SEQ ID NO: 365082 - DNA, 90 bp, Homo sapiens
cgagtaattaccttggaaccagatcgtccagaggtatttgagcagcgagcagaagagaaccagcagaaatccaccaatgtagtctatcag

SEQ ID NO: 365083 - DNA, 75 bp, Homo sapiens
aaactacccattttcttttttggaactcatgagacgtggataattactgtaccttcctcatggaaaaagttttat

SEQ ID NO: 365084 - DNA, 83 bp, Homo sapiens
gggcctgcaccatgagcgtcccggccttcatcgacatcagtgaagaagatcaggtcttgggcgtctttggtactggctttttt

SEQ ID NO: 365085 - DNA, 74 bp, Homo sapiens
cggctcacctggcggtgcccgaggagtagtcgctggagtccgcgcctccctggatcaggatcctcatgaccagc

SEQ ID NO: 365086 - DNA, 82 bp, Homo sapiens
tatgatgcaagatgtggcagaagaacaagaagttgagaccgagaatgtggaaacaggagaataaaggcagccccgttgatga

SEQ ID NO: 365087 - DNA, 100 bp, Homo sapiens
agtccatctgactcctgcttcccgggtgttgctcgtatggcattcctgcgtcctttacaagcgccaagtctgtattcagcagtaaggccctggtgaaaat

SEQ ID NO: 365088 - DNA, 100 bp, Homo sapiens
cttttgtaacttttgatgatcatgatacagttgataaaattgttggtacaccaggggttggaaaaaccacactaggcaaagaacttgcgtcaaaatcagg

SEQ ID NO: 365089 - DNA, 126 bp, Homo sapiens
ctgtctttgtgtcctgagatcaaatggcacttcattggccacctacagaaacaaaatgtcaacaaattgatgggtgatctgtgaaaatggttcgctattcacttgacccggagaaccccacgaaat

SEQ ID NO: 365090 - DNA, 75 bp, Homo sapiens
gtcttccgccaggactagagtttcctcgcggtaacagcctccgtggcctccgcactattcatggccgaattgatc

SEQ ID NO: 365091 - DNA, 100 bp, Homo sapiens
cagagaaacagacggcaagccagataacaacgaacttgatgcaagtgataggtttgccaaggtcagacctctcatcatccggatgaactgcaatttccag

SEQ ID NO: 365092 - DNA, 51 bp, Homo sapiens
cctcccgggtagctgggactacagagacgggatttcgccatgttgcccagg

SEQ ID NO: 365093 - DNA, 75 bp, Homo sapiens
gataagtcgaaggggaaggcgcctgaagaggacgaagatgctcccataatactctcagatagtgaagaagaagaa

SEQ ID NO: 365094 - DNA, 98 bp, Homo sapiens
ggcagagcatcatccgcaaggtggtggaccctgagacggggcgcaccaggttcccagtctaagtgggtgactttccaagatagaggcagatcatttct

SEQ ID NO: 365095 - DNA, 76 bp, Homo sapiens
ccggcacagcccggaccgaaattttgccgctgccttagagcgttagacaggtccctgagcgtgagcagcgtctcct

SEQ ID NO: 365096 - DNA, 75 bp, Homo sapiens
ggaacagcatcctgacatcgaaaacccggacctcgcttacctgcatgctggagaggcagatgcgaaccagaacaa

SEQ ID NO: 365097 - DNA, 75 bp, Homo sapiens
tgaggaccagcagagagaagaagcaacaaggttgcaagaatgaactctggaagcccagccagggacaatgcacct

SEQ ID NO: 365098 - DNA, 98 bp, Homo sapiens
caccatgagcgtcccggccttcatcgacatcagtgaagaagatcaggtactgcaaaaagcctttgacttcaaactgcacaattcagatagcaacacct

SEQ ID NO: 365099 - DNA, 102 bp, Homo sapiens
ctgtgccccaactctacttccctctgctccttcccagaacaggacgcaggccttgatgccctttcctctatcataagtcgccaaaaacaaatggggcaggaa

SEQ ID NO: 365100 - DNA, 83 bp, Homo sapiens
cccagaccctggagcctcagttggaagcagccgatccagcctgcggagcctgtggggcagcgagtaaccagctcataaatcac

SEQ ID NO: 365101 - DNA, 131 bp, Homo sapiens
tgttagccgagcaagtgagtagtcacatcacctccagccctctgcattcacgtagcattgctgcggatttctctctgatcaaacggacagttcaggactcagaatctaaggatgaatgttcaccgtggcag

SEQ ID NO: 365102 - DNA, 101 bp, Homo sapiens
cagagctgaggactgcctgtttgcagggggattcccgaagtcttccgttttctgagaatgtgagtgctgttcaaaaattagacttttcagatacaatggtg

SEQ ID NO: 365103 - DNA, 100 bp, Homo sapiens
gttgctttttgatggccatggcataaggaactctatcccaggaatacagctttgcattagcatccctacccaacagaggatgagaaaaaacagattgctg

SEQ ID NO: 365104 - DNA, 53 bp, Homo sapiens
gctatgtgcacccggacctgctgaaagggagacagaggggacccaggactgcc

SEQ ID NO: 365105 - DNA, 101 bp, Homo sapiens
ccgccaccgccgccatgaagaagcagttcaaccgcatgaagcagctggctaaccagaccgtgggcaggtacacagataagctgtttctctccaagttcttt

SEQ ID NO: 365106 - DNA, 75 bp, Homo sapiens
ggcgcctctgcccgccgttctgctcgctcgctccccgctctggatcttggaggaggaactttttttggtctctgc

SEQ ID NO: 365107 - DNA, 100 bp, Homo sapiens
tccaaactttgccatggaaacatgggttcttgtggctaccagcctggtactcctctatatatttggagtccaggaatgagactaagcatttatctgtagg

SEQ ID NO: 365108 - DNA, 89 bp, Homo sapiens
ttccttgcggaaaggatgttggcggtccctgtgacctgtggagacacggccagatctgccctccagtagagcagaaaatgatgacgcag

SEQ ID NO: 365109 - DNA, 105 bp, Homo sapiens
gttctgactagggatggagcctcagaggtgcagaagagaaaccttgtctgcatcaggaccaaaggctcatcttggagcggttgcaggtcatgtacactgtcggct

SEQ ID NO: 365110 - DNA, 100 bp, Homo sapiens
cggggacccgcactgtggttggtgtgtgctgcgacacaggcgtcgaccagaagattatgatattcataacagcagaaagaaaccaaggattgactatccc

SEQ ID NO: 365111 - DNA, 75 bp, Homo sapiens
tgcggcgggacaagcgcgacgcccggcgcgagctcaagctgctgctgctcgggaggaggtacaggagaactgtgt

SEQ ID NO: 365112 - DNA, 100 bp, Homo sapiens
cgtggtgcttctgttgctcacagacagtaaggattgtatcctggagccgctttccctgccagaaagtccaggtggcaccaccactttagaaggttctcca

SEQ ID NO: 365113 - DNA, 88 bp, Homo sapiens
gtaactcggatggccagaaagtttactcatatttcagctctgttacaggatgagagccactcagagtgggtgtcttgtgtccgcttct

SEQ ID NO: 365114 - DNA, 75 bp, Homo sapiens
ggatgctggttcctggagggctgggatatgataggtacccagaagctattactgaccctgcctacaaaggacaga

SEQ ID NO: 365115 - DNA, 75 bp, Homo sapiens
tcacagtttgctctgctcttccaacaccagtggaagatgatcacatcccagtctctagtgatccctgaaaagttc

SEQ ID NO: 365116 - DNA, 100 bp, Homo sapiens
accagcagggaaatggaggagtgacggaaagaaccagactcctctctgagaataactgaagtgaagtgatggactccgatttggagagtagtaagacgtg

SEQ ID NO: 365117 - DNA, 100 bp, Homo sapiens
gcccttacacctgtgctcctatacaagattaacattcagaagcttttgtccagtgatcgaaatccaccaattgatgacttaataaaatctggaatattgc

SEQ ID NO: 365118 - DNA, 74 bp, Homo sapiens
tgtactttctgtctctatgaacttgactactctagacacctcataattcttccatctctatgacaacaagccca

SEQ ID NO: 365119 - DNA, 51 bp, Homo sapiens
catgtactgcatgctgtttgtggcagggaagaagatggctctctgtaccaa

SEQ ID NO: 365120 - DNA, 100 bp, Homo sapiens
atgactaatttggttatggccaaggaccgcttacaacttctagccagtcagaagtccagaaagaagagatagaaaagcatcagctaatgctcgaaagagg

SEQ ID NO: 365121 - DNA, 50 bp, Homo sapiens
caagcacctcctgctccagtaattgagactaaggtgtcagtatgttcttc

SEQ ID NO: 365122 - DNA, 114 bp, Homo sapiens
aagaggaggatccacctggagctgaggaaccggaccccggcagctgctgcctgctgtttcccggggagatcatgaaacgaggtcgccttcccagcagcagtgaggattctgacg

SEQ ID NO: 365123 - DNA, 83 bp, Homo sapiens
tccggggcttgccctggtcttgctcggccgatgaagtgcagaggtttttttctggtaactaggatttctacctcaaccgcgag

SEQ ID NO: 365124 - DNA, 51 bp, Homo sapiens
agcaaaagcctttcatgattatacttcccagtccagcttgagtgagaatga

SEQ ID NO: 365125 - DNA, 75 bp, Homo sapiens
ccgaggagacggcggccttcgaggaggtgatgatggacatcggctccacccgggatgtgggctctcttgatgaga

SEQ ID NO: 365126 - DNA, 100 bp, Homo sapiens
cgcggctcctgttgctcctcgggctctcggccggcggttacctgtcctgctgccgattcctggatgacaatcagatcgtcaccagctctggagacaccac

SEQ ID NO: 365127 - DNA, 100 bp, Homo sapiens
gaggcagaaggagccccagagctcaatgggggaccacagcatgcacttccttccagcagctacacaggctacccacctttctgttctgagacccctcaag

SEQ ID NO: 365128 - DNA, 75 bp, Homo sapiens
ttcgtacccacagtgcttcatgagagcgtccttgagactttgtgctgcgcggggtgctcactcaatcttggctac

SEQ ID NO: 365129 - DNA, 100 bp, Homo sapiens
gcttcctctgctcgcggttagcccgtcagtccctgctctgtgcgcgcctccatctgggccatggatgggcccgcgatgctcccagcccggtgagacctgc

SEQ ID NO: 365130 - DNA, 75 bp, Homo sapiens
ggacttgaaagaagctgcagcggaggaaggcgaggtactccgtggaaggcttcatcgacaagaacagagatttcc

SEQ ID NO: 365131 - DNA, 75 bp, Homo sapiens
tggaaaacatggggtttcgagtgggacaaggattgatagaaagttggactaaatgctcttccttcagaggattat

SEQ ID NO: 365132 - DNA, 144 bp, Homo sapiens
tgtcagcgtgtccccagacggagtgtgtggaccctgtgtacgagcctgatcagtgctgtcccatctgcaaaaatggttggacaagccctctgaaagttactcccttacaacctcatcatgaaggacgctcattaagtcacatat

SEQ ID NO: 365133 - DNA, 83 bp, Homo sapiens
ggcaaaaggaagaggacgtgggaggaaagaaacaggagaaccgtcgtcgggccaaagaggaagcctctgccatggaggaggag

SEQ ID NO: 365134 - DNA, 100 bp, Homo sapiens
aggagaactaaatgggagaagaggaatgttccctgacaatttcgttaagctggaaactgacaaactagctctcccgatgagccccagcccgcttagcccg

SEQ ID NO: 365135 - DNA, 75 bp, Homo sapiens
tagagagataacaaaagctgctcagagtctcaatgaacttgatgctgcaatttcacagcagttccttccttcgcg

SEQ ID NO: 365136 - DNA, 51 bp, Homo sapiens
gagtctcccccagcccgagctcaggcctggattggcagccaccatttgcat

SEQ ID NO: 365137 - DNA, 100 bp, Homo sapiens
gtagagaagagtggctgagggcgcgccctgatctcagcgggaagagtgcgaccccgagggcgcgctagaatgaaatgaatgatgtgcctttctttgatat

SEQ ID NO: 365138 - DNA, 101 bp, Homo sapiens
agaaattgaacagaactatgcgaaacaattgagatgcctgaaatgtgcagatgccccgtgtcagaagagctgtccaactaatcttgatattaaatcattca

SEQ ID NO: 365139 - DNA, 100 bp, Homo sapiens
ctgctgagtgtgctggagagccctgagaatgcctttgggctgcctgaggatgagttcctggtggtgctgcgctgtgtggaaagggataaacagcacttcc

SEQ ID NO: 365140 - DNA, 83 bp, Homo sapiens
ctgctattgaaccaccaaaagtccattatgaaactggctatgactttgcagccgtcctggagtggttcgcggagcgtgtggac

SEQ ID NO: 365141 - DNA, 74 bp, Homo sapiens
attttgctattgatttgaatgggaagaaatatgcatggcaagaaacagaagcctatcagttgctgaagaaggcc

SEQ ID NO: 365142 - DNA, 100 bp, Homo sapiens
ctgtgggctctgattctccaatgggaataccaagggatgcacctgcttcccaaggcctgaaagctgagcatctgtatattctcatcggggtctcagtggt

SEQ ID NO: 365143 - DNA, 100 bp, Homo sapiens
catgggctactcagtttacagccactgcagtatcacagccaggacacagagtctgggatctaataattcagtcattttggatggactaaaaagaagacag

SEQ ID NO: 365144 - DNA, 75 bp, Homo sapiens
gtgaccagtgtggggcagagacctaccagccggtcaccttctacctcatccttagcacctccgggatcagcattg

SEQ ID NO: 365145 - DNA, 100 bp, Homo sapiens
agagccataaagaaagcaaagcgcagaaatgttggatttgaagccaagaagcttgagagaagaaaaatttcagaaaaattgtctcaatttgactagaata

SEQ ID NO: 365146 - DNA, 100 bp, Homo sapiens
aacaaagcatctgataaagccactatcatggcctttgatgccctggtgaccttctgtgaagaactggggttggcgctgtacgtttatgagtacctgctgc

SEQ ID NO: 365147 - DNA, 98 bp, Homo sapiens
gaccttccagaattacgggcaagcgctgttcaaacccatgaagctggagtgcagtggcgagatctcgactcactgcaggctccgactccccagttcaa

SEQ ID NO: 365148 - DNA, 100 bp, Homo sapiens
gacgacgaggatgaggatggagatgacctgctccatcaccaccacattctctcgggcctagccgtccttggaacccgatattcgggctgggcggttccgc

SEQ ID NO: 365149 - DNA, 144 bp, Homo sapiens
gcagtgaccgccatggggcagctgtccagccagggcctgcacgcccccaccagccctgagcatgcagaggcccggcagggctcaagggttcttgttgatgcacgagataagcttggcattccttggcagtattctgaaaatgag

SEQ ID NO: 365150 - DNA, 100 bp, Homo sapiens
cttgcccggggccgcgggaaggccgaccgactgccgcggtgctggagaatctggtaaaagcaccattgtgaagcagatgaggatcctgcatgttaatggg

SEQ ID NO: 365151 - DNA, 75 bp, Homo sapiens
gctcacctgtgcgggatggaacaaaagaggatggcattccctgtggatatgctggaaaattgcagccatgaggaa

SEQ ID NO: 365152 - DNA, 96 bp, Homo sapiens
acgatctgcacttcgcattttggcattgacatttaattttagggtcctttatatagaagggagagtagcacttttcaggattagaagaggctgtgt

SEQ ID NO: 365153 - DNA, 115 bp, Homo sapiens
gttctccatcaggctcgtgccgaacatgactcctgaagtcgtcggcgagcaggctgcgtccctgctggctgtgctgctgctgctgctggagcgcggcatgttctcctcaccctcc

SEQ ID NO: 365154 - DNA, 82 bp, Homo sapiens
cgcgagcatgtgtcccgggcgctgtgcatccacactggacgcgagctgcgctgcaagtgcaggcctgagtgttccttccagc

SEQ ID NO: 365155 - DNA, 100 bp, Homo sapiens
catggagactggaggaagaattcccaagccagagctttccagagcatattaaaaatcttcagactgaacaagcatctttgcagtcagaaaacacacattt

SEQ ID NO: 365156 - DNA, 51 bp, Homo sapiens
gcttgtgaccctgcagctcctcaaaaacccttaggagaaatcttgagagtg

SEQ ID NO: 365157 - DNA, 83 bp, Homo sapiens
gtgcccagaggactttcttccagcttctgctgtccttctttgtggagagcaaggttattaacacggggatcaaagtctggtgt

SEQ ID NO: 365158 - DNA, 83 bp, Homo sapiens
aggccggctacgtcagcaagattgtcggcaagtggtgtcccgacccaggctaagcttgagcatggctgagcaggagcccacag

SEQ ID NO: 365159 - DNA, 95 bp, Homo sapiens
ggagaatacacacatcacaaagatcctggaatatataaatgtgttgtttgtggaactccattgtttaagccggagcctcaacagaaagctccttt

SEQ ID NO: 365160 - DNA, 100 bp, Homo sapiens
agcaatcagcgagactccgtgggcataggaccctccgagccaggggggctatttcctaggggcgccgatcaagaatacagtgcatttcgagtagggatgg

SEQ ID NO: 365161 - DNA, 100 bp, Homo sapiens
cggcgcggcccagctcgttccaggatgatcggctgaatgtaacagaggaactaacgtccaacgacaagacgaggattctcaacgtccagtccaggctcac

SEQ ID NO: 365162 - DNA, 100 bp, Homo sapiens
gtggaattctccgtccctttccagggagggaacaaagcccacaagcaccggacccttgaacatctgtgaagaaatgactattctgcatggaggcttcttg

SEQ ID NO: 365163 - DNA, 75 bp, Homo sapiens
gttcatctcctccgtcaccagccacatctaccaggcagttccggcgaggggggagcctcagcaggattgctgtgt

SEQ ID NO: 365164 - DNA, 100 bp, Homo sapiens
gccgccaccgtctggtgtctaaaccgcctcggcagtgcctgatttgagatggggtcccaggtctcggtggaatcgggagctctgcacgtggtgattgtgg

SEQ ID NO: 365165 - DNA, 100 bp, Homo sapiens
cagctcccgcgaggaccacccgcggttacgactttggctacttaatcaaaatcctaaccaactctaacttgcctgaagaagaacttgacttctttgagat

SEQ ID NO: 365166 - DNA, 82 bp, Homo sapiens
cagcgcgcacttcacccgcagttggtgatgtgtccaatctagatcccaacttctcatttgaaggcaccaaactggatgtggg

SEQ ID NO: 365167 - DNA, 83 bp, Homo sapiens
tttttaaggaaagccggagtgttcataatcatcttacttctgctccatccaggtccagagagcatcgcagacatcgatctcgc

SEQ ID NO: 365168 - DNA, 75 bp, Homo sapiens
cccccaatgcggccgcgagaagcagcgggggggcaggcgatcgaaggagctggaggagggaatgatattcagtgg

SEQ ID NO: 365169 - DNA, 75 bp, Homo sapiens
tttaaagcacggacttacacctattgcaaaatgtttactgaattcatcctcaatgttcccatgggcttgctgacc

SEQ ID NO: 365170 - DNA, 100 bp, Homo sapiens
cagcaacgtgatgcgggagagcggggaccatgcctggccggatgctgccgcctggcttcagtgccatctgcatgtcctcagggatgacaaaggactcatt

SEQ ID NO: 365171 - DNA, 51 bp, Homo sapiens
aaaggactcaggtgaggactggagctgctgctgctgcactacaaggccagc

SEQ ID NO: 365172 - DNA, 100 bp, Homo sapiens
gcttaggaatccgggcttttgctgatatgcatgcatgtaccgaccttctgaacaaggccaacacctatgcagcattcctctgaatattgatttgctgaat

SEQ ID NO: 365173 - DNA, 83 bp, Homo sapiens
cagagattaaatgcggtttccaagcacacggatggtcagtaggacagaaggtaacattgatgactcgctcattggtggaaatg

SEQ ID NO: 365174 - DNA, 82 bp, Homo sapiens
tggccgcacagtatagtgaagataaagccaggcaaggggccatcgaagacggcaatttggaggaaatggaagaggaagtacg

SEQ ID NO: 365175 - DNA, 101 bp, Homo sapiens
cggggcgatgtgtgattaccatggcgaggagtctctgtccgggggcctggctaaggaaaccctattacctccaggaatgggatgtttctggggagctgaaa

SEQ ID NO: 365176 - DNA, 122 bp, Homo sapiens
cggctgtaatgttccaggacacctgccatcatggagggttatccagcacctggaggatacctgctacctgggtcaggcccagccccaggcccagtggtattactgaattcactgaatgtgga

SEQ ID NO: 365177 - DNA, 75 bp, Homo sapiens
ctcctgagtacctgggactacagcatgaacaaggctcagttatgatgtttgagcaccttattaattctaatggaa

SEQ ID NO: 365178 - DNA, 74 bp, Homo sapiens
ctccaacatggaccgcctgggggactcggaactgcaggaagagtgaggaagagaacctttttgagatcatcaca

SEQ ID NO: 365179 - DNA, 75 bp, Homo sapiens
ctactgcccaagaaaatgaactaattccttccataatcagaaagagcttaattcccgagatggagcttgggaaag

SEQ ID NO: 365180 - DNA, 75 bp, Homo sapiens
ggaggggctccggctggtctgtggtgagactattgcagatatcatccgaacatgtttgggacccaagtccatgat

SEQ ID NO: 365181 - DNA, 74 bp, Homo sapiens
cagcctgcggagcctgtggggcagcagtaggtcagacctcgtcctgcccggcacggccggggacttcagcctga

SEQ ID NO: 365182 - DNA, 100 bp, Homo sapiens
cctcaacagctacaagccacaggcaaggctcaagttgatgaaggagtccctctgaagatttgcttatctcagttctgtaaatggattcataagattcagc

SEQ ID NO: 365183 - DNA, 98 bp, Homo sapiens
tggggacctgtcccacctggcggccatcgtcatcctgctgctgaagatctggaagacgcgctcctgcgccggcgaggccttcttgggcagctttgtgg

SEQ ID NO: 365184 - DNA, 95 bp, Homo sapiens
acagctattaaaaccagggctccacagttaggagcctccctgcccttcgctatcctgacgctggtgaacgccccgtacaagcgaggattttactg

SEQ ID NO: 365185 - DNA, 90 bp, Homo sapiens
gtgattttttgcctttgttgattaactggacaaattcaggttagtggatgacagatgtgtggtgcacccagaggccggggaccttgccaa

SEQ ID NO: 365186 - DNA, 100 bp, Homo sapiens
catttgggataatgaaacacctatttgtgacaccaagaaggatcaagaaggtggagaagaaaagaaatctgtgcaaaagaaaaaagtaaaagagttaaag

SEQ ID NO: 365187 - DNA, 82 bp, Homo sapiens
ccggctcgacaagttcaagcagctgcttgccggccccaacacggaccttggaacatcatttacagcgagcaatttcagcaca

SEQ ID NO: 365188 - DNA, 112 bp, Homo sapiens
ctggtacaagtacctccttttcagctacaacatcatcttctgggccatgctgctcttcctcctctctgcactggtcctgctcacacagcccctgggctacctggaagcagaa

SEQ ID NO: 365189 - DNA, 83 bp, Homo sapiens
ctgtgacttgcagtcatcatccattaccacaaaattaggtgtttcccattaaacactaccaggacaaaatcaggccttacatc

SEQ ID NO: 365190 - DNA, 100 bp, Homo sapiens
cagacggcagggagtgcatcaaaggtgtgaacacaggatttggagttccatggagtgatgagattttattttcaagataaagctgctggaaactttgcaa

SEQ ID NO: 365191 - DNA, 83 bp, Homo sapiens
cgcggtcgtcttcgtgtggcttctgcttagcacctggtgcacagttccagggtctccctccactgctgtagtaacccgggtcc

SEQ ID NO: 365192 - DNA, 101 bp, Homo sapiens
gatcgctgcaacctttagactaatgactgtccgaaacatcgcctccatctgtaatatgcattggagaaaccaatgtagaaagaaaggccaagaaaaaaagg

SEQ ID NO: 365193 - DNA, 80 bp, Homo sapiens
gtcccaccggctggaaatgcttcgtttaccacttcgccgtactttatattcagagcaccaatcaaattaagcaagcctgg

SEQ ID NO: 365194 - DNA, 100 bp, Homo sapiens
cttcgtcatcgtgtcctcggtgagcaggcccgaagcaggcacgacctttggcgtgcaatggaattgagttttgccctggtaaatgggaataatatccgag

SEQ ID NO: 365195 - DNA, 87 bp, Homo sapiens
cgccgtgaagagccttcaggcgctgggcgaggtgaagtcccgcttggcttttgggaagcccctggtggagcagggcacagtgctggc

SEQ ID NO: 365196 - DNA, 74 bp, Homo sapiens
tcatcaggacctcagtgtgatacagccaattgtaaaagactgcaaagaggaattgaacaacacatgtgaacccg

SEQ ID NO: 365197 - DNA, 100 bp, Homo sapiens
gttttgtttatataactcaagttgtttggctaaattcttcaggtacctgcaaggtgtggagttacagtccgagacagtctaaagaaagcactgatgatga

SEQ ID NO: 365198 - DNA, 80 bp, Homo sapiens
acatgatggcgggagagaagaagcgcaggcacaggaagctggtgacggcgatgaacgggttttggccaaattgggcgagg

SEQ ID NO: 365199 - DNA, 121 bp, Homo sapiens
tagcatctcctccttcagctaccgggagatcttgcgggaaaaggagagctcggctgttccagccagggaatcagagatcattgatttcttcctgggggcctctctcaaggatgaggttttg

SEQ ID NO: 365200 - DNA, 100 bp, Homo sapiens
gtaatggaaagcatatggacaggtctacgccacatcacttagaaagcataacccctactgtagaactaaatgcactgtgcatgaaacttggaaaaaaacc

SEQ ID NO: 365201 - DNA, 74 bp, Homo sapiens
aaccattgaaaaatttgagaaggaggctgctgagatatatcaagatgcttatagggcggagtggcaggtatata

SEQ ID NO: 365202 - DNA, 82 bp, Homo sapiens
ggcgttcatgatcctggccagcctgctcatcgcctactgcagtgtggacactgccagcggctgcagccgacttggaatgacc

SEQ ID NO: 365203 - DNA, 80 bp, Homo sapiens
tggccaagtggactgcgacaacggctcagacgagcaaggctgtcggagtgcatccgccccaacccttttccccctcgtct

SEQ ID NO: 365204 - DNA, 75 bp, Homo sapiens
gagtggacttgattgatatatatgctgacgaggagttcaaccaggaccctgatgctcccataagacagaaaatgc

SEQ ID NO: 365205 - DNA, 82 bp, Homo sapiens
ttcaccaaggaactggtgctgcagcgagagactacatgaggaaataattgacttttataacttcatgtccccttgtcctgaa

SEQ ID NO: 365206 - DNA, 88 bp, Homo sapiens
gatccagtggacaaaagaggggaaactatgggagttcccaattaacaatgaagcaggtaattggtatgtgaaaaagtgtctaaacgac

SEQ ID NO: 365207 - DNA, 98 bp, Homo sapiens
ggcgcgcgagcggtcagcatccggaatctggcccctgcaggcgtggggttccacgtgggagtggttggcacttaccatggttccccagaccagtccca

SEQ ID NO: 365208 - DNA, 82 bp, Homo sapiens
agccgccgcgcgcccgcgccctccgcgcgacgccaggtgtcctgtggccaggcggaaagcagtgagaagcccaacgctgagg

SEQ ID NO: 365209 - DNA, 100 bp, Homo sapiens
atcagtggtcacagaagtctctaccaatggtgcttcagaagtttcatactttcagatggccagttcttcacctggggaaagaacagccatgggcagcttg

SEQ ID NO: 365210 - DNA, 51 bp, Homo sapiens
aaggattccaagtaactcttatttggtcacagccaggggctttgggccgct

SEQ ID NO: 365211 - DNA, 96 bp, Homo sapiens
atgtttttggttatttggaactgtcatacttaaatacttgacatctaaaatttttggtattgcagatgacactatatcatcatgtacatagaaaaa

SEQ ID NO: 365212 - DNA, 74 bp, Homo sapiens
tgaagaagcaagtggagaagctgcaggcccaggtcaccctgtcaaatgcccagcggatgcagtggtgcagtatg

SEQ ID NO: 365213 - DNA, 89 bp, Homo sapiens
gtcacctggataccatctctggacttactagtttgtgaagcactggagcctgacatggacactatgtgaagccctatggggccacctga

SEQ ID NO: 365214 - DNA, 100 bp, Homo sapiens
agtggaggaagcacttgcgccactgctgagcggttggaaggggaacactgcagacctccttaactacgtgttttgctcaagaaacttttgggaaacagta

SEQ ID NO: 365215 - DNA, 123 bp, Homo sapiens
tggtgaaggtggaacggggctcccaggacctccactaatcaccagaacaaaatgtgcaggtatattactcgaggggtttttaaatattgtcaggaaaaagaaggaagctcaacgatatcggaa

SEQ ID NO: 365216 - DNA, 80 bp, Homo sapiens
ggcttctaagacaaatgctaaattcttgtcagattacgcagtgtcatttactttgaatgaggatcttgcaaatattcatg

SEQ ID NO: 365217 - DNA, 100 bp, Homo sapiens
ggaggagaatggggagaaacaagccatggagaggttgctttccaaagaggtgtttgaaagctcgagaacattttggtacagtaaaaacacatctaacatc

SEQ ID NO: 365218 - DNA, 100 bp, Homo sapiens
gatcactgcccagggtcacccaatgataacatgcatgcatatggaacttgctgcatgccagcaccatgcgccctggcaaatccaggagacagctccgccc

SEQ ID NO: 365219 - DNA, 98 bp, Homo sapiens
cctgtcgcacggcgtcacctccttctgccccaccctggtcacttccccaccggaggtttatcacaagggctccttcacctaccaaacgcaaagaccgc

SEQ ID NO: 365220 - DNA, 75 bp, Homo sapiens
tttcaagaaatgaaaatgaagggcgccctggaataggttcgccgaagagagagcaggtgcagttaataaccaaag

SEQ ID NO: 365221 - DNA, 90 bp, Homo sapiens
caggattttcagcttcagcaagcaggtgagccagccatgagagggtatcttgtggccatattcctgagtgctgtcttcctctattatgta

SEQ ID NO: 365222 - DNA, 114 bp, Homo sapiens
gcgagggtacctgtcctaccccagcaacgtgtttgacgggctcctcaccgttgtcctgctggtggaggcaatgcccagagctgtggcagccaccttgcagccgtgaagcaccag

SEQ ID NO: 365223 - DNA, 74 bp, Homo sapiens
cggctccggcttctgctgttgctcttctccgccgcggcactgatccccacagatatggaatgtgcagatgtccc

SEQ ID NO: 365224 - DNA, 100 bp, Homo sapiens
atccgggggcaaggccaaaaagaaggatgtggatgctgcctacatgagcaaggtggagctggaggccaaggtggatgccctgaatgatgagatcaacttc

SEQ ID NO: 365225 - DNA, 100 bp, Homo sapiens
ggaggttcgcggctctaacggggctttctacaaggaaagagctgatcctctctggcactttaaatccaattaaggatttacatctgggaaaactcgcctt

SEQ ID NO: 365226 - DNA, 98 bp, Homo sapiens
aagctttgcaagctgataatgatttcaccaatgaaaggctaacagctttacaagacctgcgaccgcatcaagcagtccgccagcggaaccaagcggcg

SEQ ID NO: 365227 - DNA, 100 bp, Homo sapiens
cggcggtcgacatgttccaggtcccggatagcgagggcggccgcgccggctccagtattaaaggtggaagaaggtccatatctttttctgtgggtgcttc

SEQ ID NO: 365228 - DNA, 83 bp, Homo sapiens
ttacattctctatctgcgcaccttggagtccaagcttgtgctctttgagcacttggagctaccttctgtttctttgctgtaga

SEQ ID NO: 365229 - DNA, 74 bp, Homo sapiens
tacacgccgccgcttgtgctgcagccatggaatgggtaccacagaccatgtcatcgtcctggcgtccacgaacc

SEQ ID NO: 365230 - DNA, 100 bp, Homo sapiens
cacaacaggcgcccagacagcgcggagcgtctactgtcagcagctattgtggacgatgaaaggctctctgcagaggagatggatgagaggaggcggcaga

SEQ ID NO: 365231 - DNA, 100 bp, Homo sapiens
gagcaaataaaagagccctgcaatttgaagatacatgagacagcagccaaacccccaggtactactgagcgagtgtgcttgatccagggaacggttgaag

SEQ ID NO: 365232 - DNA, 102 bp, Homo sapiens
agtgttagaaacagtagtggagaatcaaggtatcagcagatgttgcacacaaacttggtataccttgctacaatagcagattctaatcaaaatatgcagtct

SEQ ID NO: 365233 - DNA, 75 bp, Homo sapiens
cccgccgccgccgttggctggagagatcctgaaggagctagacgagtgctacgagcgcttcagtcgcgagacaga

SEQ ID NO: 365234 - DNA, 83 bp, Homo sapiens
cgacgggcgcctggaggagctgtaccgcggcatgatcaatgtccgagttaccaccatggatgcagagctggagtttgcaatcc

SEQ ID NO: 365235 - DNA, 100 bp, Homo sapiens
attggagtgggggcacccgtgtacatggccgccgtcctggaatacctgacagatgagaccccgctttctacaccaaccgcaagagacagccttgacaaac

SEQ ID NO: 365236 - DNA, 135 bp, Homo sapiens
ctttaagtcgtacaagggtcgacagattatcggaccatttcagaggttcaccgccatcattggacccaatggctctgggttgtgagtcccggcccagcccctccacccccctgcccccccgatgcgaccatgggc

SEQ ID NO: 365237 - DNA, 100 bp, Homo sapiens
atttcctgcgctgttccacctcattcaacttcagggtgtcttttatgaataatcaaaagcagcaaaagccaacgctatcaggccagcgttttaaaactag

SEQ ID NO: 365238 - DNA, 83 bp, Homo sapiens
ctacaagttggcgaagaagatccttcacgcaggctttaagatgatgagcaaatgtctttggtgcaacactaacaaggcttgtc

SEQ ID NO: 365239 - DNA, 51 bp, Homo sapiens
gaagtcattcaacgggaattgaatagagcttactcacatagcatattggta

SEQ ID NO: 365240 - DNA, 100 bp, Homo sapiens
gttcaaacagcagtgttagcaagacctgggggagaggttgccaacttggcctgttccatctcaaataatgaagaaggtgtaaagcttgttcgaatgtctg

SEQ ID NO: 365241 - DNA, 83 bp, Homo sapiens
ttcgagaatcaaagggccgggagcgatgcctcgccgctcctgctatttgccaaccgccgggacgtacggctggtggacgccgg

SEQ ID NO: 365242 - DNA, 100 bp, Homo sapiens
cggggacttcggcggcggcgcctcaggcacctcggcccgggacccagacagttactcttggaggcatcttccagttgggaaactggagtgaactaaacaa

SEQ ID NO: 365243 - DNA, 118 bp, Homo sapiens
tgcatgggtccaatatacaagcatcttctgtcctgaatacagtatctccttaagaggactactgagcccagccaggctgtatgccattgctgccaaagaaaaagatattcaagaggag

SEQ ID NO: 365244 - DNA, 100 bp, Homo sapiens
caaaactaggatatgctggaaatacagaaccacagtttatcatcccttcctatgtgttcagagcaacattgttttgttgacacaagcatttagaagaaag

SEQ ID NO: 365245 - DNA, 74 bp, Homo sapiens
gaagagggctccaggcatccggtcctggtccctgctggttgaaagaagcttccggttctgaggtcctggaggtg

SEQ ID NO: 365246 - DNA, 75 bp, Homo sapiens
aggtgaaggtcggagtcaacggcacctgaactcctggggggaccgtcagtcttcctcttccccccaaaacccaag

SEQ ID NO: 365247 - DNA, 75 bp, Homo sapiens
gccagctgacggagatggtgcagaagatggaggaggtctcaccaacggctttgggggtgcgaggagcgagcagga

SEQ ID NO: 365248 - DNA, 82 bp, Homo sapiens
gggaaatgtgttcctgcgacaggctgaaatcgagaaccccctggaggatcctgtgactatcttcttcagcagtatcgttctg

SEQ ID NO: 365249 - DNA, 83 bp, Homo sapiens
acccgccgccaggagcctcagcctgcaggaagatcatggaagggaagtggttgctgtgtatgttactggtgcttggaactgct

SEQ ID NO: 365250 - DNA, 74 bp, Homo sapiens
gatgtctgtggactgtcttgggcagcatgcagtgctttctggttgctccttcacatgttcccactctctgtgcg

SEQ ID NO: 365251 - DNA, 100 bp, Homo sapiens
cggggaccttaagaagctgattgcagcccaaactggtacccgttggaacaagattgtcctgaagaagtgagatcctgaaggagctagacgagtgctacga

SEQ ID NO: 365252 - DNA, 75 bp, Homo sapiens
gttggctgatgattccacagataacccagtcttgtgataatggtcactgtatgctgaatggaacacatggtccat

SEQ ID NO: 365253 - DNA, 50 bp, Homo sapiens
gccagtttggagctcctggaagagttttcggtttggtgtggaaatagctt

SEQ ID NO: 365254 - DNA, 100 bp, Homo sapiens
cagtgacccagtcagtgcccttcagttaaagaccaccaggagcacacttatgttctcagtgcagctgagtcttggtgagcagacatgggaatccgaaggc

SEQ ID NO: 365255 - DNA, 50 bp, Homo sapiens
ctcaggcgtgcgcggacggtgtgcgggcaacagcattattgagaaaagcc

SEQ ID NO: 365256 - DNA, 98 bp, Homo sapiens
ggaaatattttgctaaatacagaaggacatgcaaaacttgcagattttggggtagcaggtcaacttacactttttgtacctgaacctcgcccagttcc

SEQ ID NO: 365257 - DNA, 75 bp, Homo sapiens
caggcctgctcggccctcacaggatagcctgggctggaagctcttctacgtcacaggctgcctgtttgtggctgt

SEQ ID NO: 365258 - DNA, 98 bp, Homo sapiens
caaaagtccaggaggaagagcatgaccttgttgacgatgacatcaccactggtgtgggccatgtttgaggattgccccagcattcagttctatgagta

SEQ ID NO: 365259 - DNA, 75 bp, Homo sapiens
tatctaacgtttaccctagcaaaccagtgtgttccagagaacaagccttcagacatttgctatattgacgctgag

SEQ ID NO: 365260 - DNA, 90 bp, Homo sapiens
ccatgacgtccatccatttcgtggttcacccgctgccgggcaccgaggaccagctcaatgacagccccaaagtggttctaaaggctacca

SEQ ID NO: 365261 - DNA, 82 bp, Homo sapiens
gcggaggcttcgagtgacccgggtgccgaggagcgggaagagttgctgggggaacggcaggagcagctgatgggatatcgga

SEQ ID NO: 365262 - DNA, 98 bp, Homo sapiens
gttcgtctcttacgtctgcggaagtgcagctgcctcagttcttagcgcaggcaaaggtagctgcagcagatgagaagaagttccagcaacagatcttg

SEQ ID NO: 365263 - DNA, 51 bp, Homo sapiens
ccgtcgttgccttgtatttccagagaacagaacaagtaagaagtttgcgac

SEQ ID NO: 365264 - DNA, 75 bp, Homo sapiens
cttttaacctatgtcttacaaaggcccaagtaggtagccatccaagcttcctgaaggaggttcgagatcacatgc

SEQ ID NO: 365265 - DNA, 75 bp, Homo sapiens
ctgtctgggaccttctccctgcctggacccctactattgcaacaagaggcgtggagctatttcctatgacagttc

SEQ ID NO: 365266 - DNA, 75 bp, Homo sapiens
agattgtacacatatgagcctcgggatttacccctatggtcctgacttgtcctgggcaagccaagtccattgctt

SEQ ID NO: 365267 - DNA, 98 bp, Homo sapiens
gaaatcatgtcaagcgaagccttgaaaaagctgccctgagacggtgtcccgccgaaagatttgagttctgtgaacctgcatttgttgttggtaattgc

SEQ ID NO: 365268 - DNA, 75 bp, Homo sapiens
ggtatgggagtcccaaaagacagctccagttttacaggtctcctctgagcctccggcctccataagacccaaaac

SEQ ID NO: 365269 - DNA, 98 bp, Homo sapiens
cagggcggccccggttctggtgtttggcgtcggcattagtgccagcagtagttcccaagggctgtctcagccatccacccagacgactcagtatctga

SEQ ID NO: 365270 - DNA, 98 bp, Homo sapiens
caggacctccactaatcaccagaacaaaatgtgcagatctgaattctacaaacacattgtgctttctggagggtctactatgtatcctggcctgccat

SEQ ID NO: 365271 - DNA, 83 bp, Homo sapiens
accgcgcgcagggcctgcagcgggagctggacggcgagcgcgagcggcgcgagaaaagaaccatggagtctggcagtaccgcc

SEQ ID NO: 365272 - DNA, 100 bp, Homo sapiens
ttattaccctttgtgtcatcctccacagctccagggaaggcactcaaaagtggggggcaggaaagacatcaactagtcaggcagtcttccgtctccagtc

SEQ ID NO: 365273 - DNA, 103 bp, Homo sapiens
cactgattagcaatttaaagatcctctccaagcaagtagaaaccagtccagagacgagcaggtcttctgacgcttttaccactcagcatgctctccgtcaagc

SEQ ID NO: 365274 - DNA, 74 bp, Homo sapiens
ccccatggctgcaggcatcattgcgctggccctggaagccaatctggatactcaaaaagcttgtcattcacttt

SEQ ID NO: 365275 - DNA, 75 bp, Homo sapiens
aggctttttttctccagccgagaggacgcggctgtgatatacgaagcctctgaagagccaatccattcaggatgg

SEQ ID NO: 365276 - DNA, 100 bp, Homo sapiens
gaacgggtgcagcgggaaaaggctaatggcacaactgtccacgtaggcattcaccccagcaaggtgatgaaggggataacttctatgtgattgatcaagg

SEQ ID NO: 365277 - DNA, 100 bp, Homo sapiens
cacagcactgcacctgcagacaagcctgccagccctttctgaggcagatacccaggaactaacccaggtgtgaccatgaagctcatggatgaggtcgccg

SEQ ID NO: 365278 - DNA, 90 bp, Homo sapiens
tcatcggcttcactgtcctcacagaggcagaccctgcagccaattctgaaaaagagttccacgtcctcccttatcgagtctttgttcccc

SEQ ID NO: 365279 - DNA, 88 bp, Homo sapiens
ggcgcccgggcccacgcggaacgacggggcgaggtcatcatcagatttgaaatatttaaagtggatacaaaactatttcagcaatgca

SEQ ID NO: 365280 - DNA, 75 bp, Homo sapiens
tgggcctggccgacctgcaccccgatgttttcgccaccgcgcccagatacagccttttcctccctctccatgaac

SEQ ID NO: 365281 - DNA, 100 bp, Homo sapiens
gaggagctgcctattctttataatagcctccacctcctggatgccctcccaatgctgctcagcttgcagtcatgcagggagccaacgtcctcgtaactca

SEQ ID NO: 365282 - DNA, 100 bp, Homo sapiens
ctcccggcctttcccagggaccagggaaggaaaccttggagagcgctctcatcgccctcgactcggaaaaaggaagaatacaagcgattgagtgaagcac

SEQ ID NO: 365283 - DNA, 98 bp, Homo sapiens
ggagcgcggaaatctggaaccgggatggcgacgtctacactgagtcggaggcgaagctcagagtcaagatctccactgaagttggcatcacaaatgtt

SEQ ID NO: 365284 - DNA, 82 bp, Homo sapiens
ctaatactctaggttctctgggagaaaacccaattcctattttctttaatcaaggaatgggagattctactttggagttcca

SEQ ID NO: 365285 - DNA, 75 bp, Homo sapiens
ggcggggagcagctggtggaccagctcatccgcgacctggtgaagtcccgcttggcttttgggaagcccctggtg

SEQ ID NO: 365286 - DNA, 75 bp, Homo sapiens
tccccatgcgcttctcggtgctggaaactactttgcttcgcactttttcatgggaggagagaaattcgacacccc

SEQ ID NO: 365287 - DNA, 75 bp, Homo sapiens
cagcaaacacagttgtttacagctctaacaaaatagacgggttgaagctttgagagaagcagcaactgctgttga

SEQ ID NO: 365288 - DNA, 71 bp, Homo sapiens
ctgctgctggttctgcccctgctgcagcccaggtgaccttcagaaagacattggagaaggaagcaaaggga

SEQ ID NO: 365289 - DNA, 100 bp, Homo sapiens
gtgcagggagtggccatcaccttcgagcccaaagacttcctgcacatcaaggagtgaccaggctgaggcccgcaggtctaagaccaaggaagcacgcaag

SEQ ID NO: 365290 - DNA, 75 bp, Homo sapiens
tggagcctgacgagctggcggtatgccgagattttgctgtcctggaggaccacaccctggctcacagcctgcagg

SEQ ID NO: 365291 - DNA, 96 bp, Homo sapiens
ccgagaggcacgagaactctggtcccggctacaggtcttgggcgtctttggtactggcttttttaggggtctgcctggggattacccttgctgtgg

SEQ ID NO: 365292 - DNA, 75 bp, Homo sapiens
ccatcttcgacttgagcgaagttttatgcaagacctgcctagagctggaacgttacctccagagcgagccctgct

SEQ ID NO: 365293 - DNA, 75 bp, Homo sapiens
ggggaaagtgctaaagccgctgagacctcttaagtcatgaaaatgcagcaacgctgaatgatgtaaagacattgg

SEQ ID NO: 365294 - DNA, 90 bp, Homo sapiens
caaggaaaaactggagagcttcatcaaaaatagtgatagctttgataactgcaggtggagctggagcaagaataccaagacaaattcaaa

SEQ ID NO: 365295 - DNA, 90 bp, Homo sapiens
catccctcgtcgaaaggattggattggcatctttagacacatccgggcaacgtttgatcctgacacagggctgttgatggagattatgaa

SEQ ID NO: 365296 - DNA, 106 bp, Homo sapiens
ggaaagtgccgctttaaggagaactgcaggtaccctcacctgagtcccaagtacaaggagtcttttgatgtgggctgtaacctctttgccaagttttctgcataca

SEQ ID NO: 365297 - DNA, 100 bp, Homo sapiens
aacctggaggagctgagtgagatgcgttatgggatcgagatcctgccgttgcctgtcatgggagggcaggatggcacatttcctagaggcagaatcctac

SEQ ID NO: 365298 - DNA, 82 bp, Homo sapiens
acaggtgtgtgtgccagtcagatggcactgaccctcctcggaggacctaacaggtcagaagttgagtagcaggggcctagga

SEQ ID NO: 365299 - DNA, 83 bp, Homo sapiens
tataagtattgacattacacagtgttaacaatgcatccacagaggtgaatgataaaagatacttacgatgcccagcagcaatg

SEQ ID NO: 365300 - DNA, 83 bp, Homo sapiens
ctgaacctttgctgtctatggatctgctctaaaccttatagcctgcttatgggggaagatattaataaggcagcggaaagaag

SEQ ID NO: 365301 - DNA, 100 bp, Homo sapiens
gccaggactgtgatggtacaggaagggaacgtggaaagcgcatacaggaccctaaacagatctgtgaagtcctggaacgctcccactctccacccctgaa

SEQ ID NO: 365302 - DNA, 50 bp, Homo sapiens
ggccttgctgatgaacctgactgagtgagaaagatcagtctaaagaaaag

SEQ ID NO: 365303 - DNA, 102 bp, Homo sapiens
tcccggggagatcatgaaacgaggtcgccttcccagcagcagtgaggattctgacgacaatggcagaagctgagctgaacacattacgatggatgatggaaa

SEQ ID NO: 365304 - DNA, 75 bp, Homo sapiens
ggcaggggcggaggcggaggcagaggtggaggcgctttgaaagatcatggaagggaagtggttgctgtgtatgtt

SEQ ID NO: 365305 - DNA, 75 bp, Homo sapiens
actggagtgcaagaagaaattcccacctgtcaaagaggcccttccttctaccatgattatagtagcagtttattg

SEQ ID NO: 365306 - DNA, 74 bp, Homo sapiens
gcagcacctcctcgccagcagccgtccggagccagccaacgagcgatggcagaaacggtggacacaagcgaaat

SEQ ID NO: 365307 - DNA, 50 bp, Homo sapiens
atcaccttcggggggctgctggcacctacaggacttgggctgcttcaggc

SEQ ID NO: 365308 - DNA, 88 bp, Homo sapiens
ctcgtgcttcgggatggaaacctatggttatctgcagagggagtcatgctttcaaggacctcatgatgttcaagatccttcagtattt

SEQ ID NO: 365309 - DNA, 100 bp, Homo sapiens
gcggcgaggaggggaatttccttgtgcctccattcccgggaggggggagcggcgttggaggccaccgtttccaggatccgtggcctcctatgagctgact

SEQ ID NO: 365310 - DNA, 100 bp, Homo sapiens
ggaggtcagctgagtccgaggagatgaagagcatgagtgtgggggacccccgaaccttccccttcatcgagcccccaccaccagccagcctggaaaccgc

SEQ ID NO: 365311 - DNA, 97 bp, Homo sapiens
caaggtggagcactggggcctggaccagcctcttctgaaacactggggtttctagagaggaaggatctccccagctgtcttcagcaaggccgtctcc

SEQ ID NO: 365312 - DNA, 100 bp, Homo sapiens
tcctaacttcacaaatcagctgctcaggcgttttatacctaccagtatttttgtcaagcaaatactggcccctctttgttctatttttttacatcctttc

SEQ ID NO: 365313 - DNA, 51 bp, Homo sapiens
ttccaggggctctgggagtggctgccagattcgcttcaagctcagcttatc

SEQ ID NO: 365314 - DNA, 74 bp, Homo sapiens
aaactcctctcagagcagagccgccatcttcatataagagatgctgttcagttaaatgtgattgcaacgcgaca

SEQ ID NO: 365315 - DNA, 98 bp, Homo sapiens
gagcagagctcagacatgttctcaccacccttggtggagatggggccctttaaacatacagtggacgatgggctggacgtgcggaaggcggcctttga

SEQ ID NO: 365316 - DNA, 74 bp, Homo sapiens
cccgcgcgggcggacggcggaggcgcctcccaggagcagtgaggagaatgaataccttccaagaccagagtggc

SEQ ID NO: 365317 - DNA, 50 bp, Homo sapiens
tacatgagacagcagccaaacccccagatggatgagatcaaagggaaaga

SEQ ID NO: 365318 - DNA, 51 bp, Homo sapiens
atactggaaagttgctatgttttggtctctaattaacagaagatggcaaag

SEQ ID NO: 365319 - DNA, 75 bp, Homo sapiens
gctgagcctcggtgcggcggcgagcgcggtcgagatcgccatgcctacccaggactaccccaatggcacctggct

SEQ ID NO: 365320 - DNA, 83 bp, Homo sapiens
tttggattacataaaccagtcacccaagtgcattgcctttggaaacgaggagtccaatgtgctgattgctgctaacagtcagg

SEQ ID NO: 365321 - DNA, 101 bp, Homo sapiens
ggaaaggagagtggatgggactcaggtcccacgtacctcggagatttatgtccaccgaagtggtcgaactgctcgagctaccaatgaaggcctcagtctga

SEQ ID NO: 365322 - DNA, 100 bp, Homo sapiens
gaaattacaggacttagtaagagaagtggatcctaatgagcagttggatgaagatgtggaggagttggcttcagttttgggatgaagcagccctgtggtc

SEQ ID NO: 365323 - DNA, 100 bp, Homo sapiens
ttcattgtttgtcaccacaaaaaggacaggttggggaagcgcctggaatttgggaagccgccttcacacatgtcttcatcgccgctgccgtcagcccagg

SEQ ID NO: 365324 - DNA, 75 bp, Homo sapiens
tccttggcactacctatagtgagacttttggcaaagacatgcgcaagatatattgggttgggcccatcataggag

SEQ ID NO: 365325 - DNA, 74 bp, Homo sapiens
gatgatggaaatgaagtataataccaagaaagccccacttggctctgctgccatgaaggtgaagattaagtgct

SEQ ID NO: 365326 - DNA, 83 bp, Homo sapiens
cgccgagggtggggtcgacgacgaagacagcggagaggagagcggtgcggaggactgaggtcgcaatggaagaagagatcgcc

SEQ ID NO: 365327 - DNA, 100 bp, Homo sapiens
gatgctggaaatatcaaattggctttcaatagtgcctgttacatgaacagaatatggcaaaaatgagactacttacttttatgggaatggcagtagaaaa

SEQ ID NO: 365328 - DNA, 90 bp, Homo sapiens
cccagcatgaagaccccggcggacacaggaccaagaatcgccttcagccctgtctggtgcatccttggcagaaagtgaggaggaaaacac

SEQ ID NO: 365329 - DNA, 82 bp, Homo sapiens
ggacacctcctccaaggtcatccagtccgtcgctaaggactttgaacatgtcggggatcgccctcagcagactcgcccagga

SEQ ID NO: 365330 - DNA, 98 bp, Homo sapiens
aaggacagaggctgttccctatggcagattgagtgtagaaattgacactctcagaaggagaccaaaaatcggttcttcatcccaaagacctattaaac

SEQ ID NO: 365331 - DNA, 82 bp, Homo sapiens
taccaacttcgccaccctgcggtggattgactacggcaaagtggccactcagcgagcagctgatgcagctgtacagtgcgcg

SEQ ID NO: 365332 - DNA, 75 bp, Homo sapiens
cttggattcataaacttcacaaatttcttggatcagtttctcttcagcaacgggtagcagaattggaaaaaatta

SEQ ID NO: 365333 - DNA, 73 bp, Homo sapiens
gcagtggtcgcttcttctccttgctcggcttaggccataccaaccatgttcgagaaccaaccctggtaacagg

SEQ ID NO: 365334 - DNA, 83 bp, Homo sapiens
gttggtcccggcggagatccagtgggaagagccggcggctgcccgggcaagagaagctgaatttggacgacagccagtgggag

SEQ ID NO: 365335 - DNA, 100 bp, Homo sapiens
atttacagaagcagtacgagaactggcagccaaggtgatcagggccaaagcggtcagtgagaaggaagtggactctggaaacgacatttatggcaaccct

SEQ ID NO: 365336 - DNA, 75 bp, Homo sapiens
ccacctttacttttacctacgttggcggccccagaagtgcccgaaggaggaaacagtgacagacctggagactgc

SEQ ID NO: 365337 - DNA, 83 bp, Homo sapiens
cgcgccccgcctcccccgtccggtccctctctccacggtaagggatcagttggccttatttcctcagtggaaatctactcact

SEQ ID NO: 365338 - DNA, 75 bp, Homo sapiens
ctgttaaaggatggctttggctttgcagacagcacagtcttacagaaatccaccatggagagtaaggatgaggtc

SEQ ID NO: 365339 - DNA, 89 bp, Homo sapiens
ctcggtgccctctccttttcgtttccggaaacatggattttttatcaagcagaaatgcatcgaacaacgagaatcaagatcactgagct

SEQ ID NO: 365340 - DNA, 100 bp, Homo sapiens
gtgaatgctgagacaattcgagaagtatgtaccaaatacatttataataggagtccagctattgctgctgttggttgtaaagctctctgaaatagtgacc

SEQ ID NO: 365341 - DNA, 100 bp, Homo sapiens
caggagggcaggagcagcacacagacactggaagacagctggaacatgtttgacaagctgaaccgtgatgcctttcatataatttcttattttttgtttc

SEQ ID NO: 365342 - DNA, 75 bp, Homo sapiens
gccactcagcttttgcggcacttggaggatcagctcagctactatttaataaaacaaaatctgtagaattcacgt

SEQ ID NO: 365343 - DNA, 100 bp, Homo sapiens
aaagctgggaagtgttaaagaagattacaacagactgagaagagaagtggagcaccaggagactgcctatgggaggtaccttcttccaaacccggtggcg

SEQ ID NO: 365344 - DNA, 82 bp, Homo sapiens
ttctgctgctgaagtaatgcaatggtctcaatctctggaaaaacttcttgccaaccaaactaccaagtcaggattgttaccc

SEQ ID NO: 365345 - DNA, 98 bp, Homo sapiens
aagctatatactttggttacctatgtacctgttaccactttcaaaagcgcaaatatcctgcgagattcaacaggcaacgtcaaactaggagattttgg

SEQ ID NO: 365346 - DNA, 75 bp, Homo sapiens
acaacttcttccagaaagaattcatcagcgatggcagtttcatagtattgaccaactacggttgaaaacgtaaaa

SEQ ID NO: 365347 - DNA, 88 bp, Homo sapiens
ccatgtccggcttctccaacacggaggaggagcagacgctcaaccagcttctggtagaaatggatggcagcctggcatcctcgctaca

SEQ ID NO: 365348 - DNA, 101 bp, Homo sapiens
ttgaagcagaagaataaggagaaggataagtcgaaggggaaggcgcctgaagaggacgaagttggacatgatataggtcgtggatgtatggggaatctaag

SEQ ID NO: 365349 - DNA, 101 bp, Homo sapiens
cccgggacacccccgcaagcgagcagttacagaatgtctgaaggggacagtgtgggagaatccgtccatgggaaaccttcggtggtgtacagatttttcac

SEQ ID NO: 365350 - DNA, 74 bp, Homo sapiens
ctgtggctcctccattcaaacatcgacgccatcgacaagcgatgtgttttcgcattataacaaggacctgttga

SEQ ID NO: 365351 - DNA, 88 bp, Homo sapiens
agaaatgaaatttcatgagttcgttgagaaactgcaggatatacagcagcgaggaggggaagagagaccattaaaaatctcaagtgac

SEQ ID NO: 365352 - DNA, 101 bp, Homo sapiens
gttcccttctaggattcaagtatggctcaggacaaaaactaagaaaaatggctttgtcagcccaacagatacccagatggtttaactcagttaagttgagg

SEQ ID NO: 365353 - DNA, 110 bp, Homo sapiens
cgcgcagggcctgcagcgggagctggacggcgagcgcgagcggcgcgagaaagtggcctgtgagtacggcatggtgcacgtggtctcccaggccgggggccccgaaggca

SEQ ID NO: 365354 - DNA, 140 bp, Homo sapiens
cggaagatttaaaaagcagccggggcctccgtattgaatgaaagacccagtgcaaagacatcaccatgaacactagcaagctgtaggtaaaacttgcctactgatcagttacacaaccaatgcatttcctggagaatata

SEQ ID NO: 365355 - DNA, 125 bp, Homo sapiens
aagggcagagcaaagactccagtaacactcaagcaaagaagagttgagcacaatcagagagacaagagagacacctccaacttcgacaaagagttcaccagacagcctgtggaactgacccccac

SEQ ID NO: 365356 - DNA, 98 bp, Homo sapiens
gaaacacatgaaagacttcctcaaggactacagtatgcacttaatgtccctactctttttgatcagaacaatgctgcaaaaaaagaagagtcagaaac

SEQ ID NO: 365357 - DNA, 101 bp, Homo sapiens
gctgttgagggtctgacagaggctgaggaggaggagctcagggctgagcttaccaaggtgaccaagaatatggcccaggtgaccaaagccctggacaaggc

SEQ ID NO: 365358 - DNA, 75 bp, Homo sapiens
agctcagctggtggtgattgcacacgacgtggatcccatcgaggtaacctggatggagaggaccatgccgcagag

SEQ ID NO: 365359 - DNA, 90 bp, Homo sapiens
agcctgcagagcgcgcagtacctccggccttcatggtgaaacacctcttggagtatacccaggcaacagagtctaacctgcagtacagct

SEQ ID NO: 365360 - DNA, 75 bp, Homo sapiens
gaaccattgaagcttgagagaaaagcccccaaaagcagctattcaggtgagccgttctccaaccctttggccccc

SEQ ID NO: 365361 - DNA, 75 bp, Homo sapiens
aggaccccacgcccagccagcccaggacccagcctcccaggctcagcagctccacggagcagagcacctcatcca

SEQ ID NO: 365362 - DNA, 76 bp, Homo sapiens
ccatgcgcagtcatgagtcgcttcaagtttatcggagaagaaactgaggcctggaatttgattaactcattcaagg

SEQ ID NO: 365363 - DNA, 80 bp, Homo sapiens
agcagaaataagagaaataaaacaaaggatgatggaaatggaaacacagcttcgggctcagaatcaggttctgaaaaaag

SEQ ID NO: 365364 - DNA, 49 bp, Homo sapiens
gcgggcccggccacggcggagccaagaggactaccccaatggcacctgg

SEQ ID NO: 365365 - DNA, 82 bp, Homo sapiens
ggagaacgtcccgctggatctgacccgagttgatattcactgatggactccaaagaatcattaactcctggtagagaagaaa

SEQ ID NO: 365366 - DNA, 98 bp, Homo sapiens
aagaaaggacagcattcctgtgacctctgcctaccatccataaaatactcattcccctctcaggtgcctgattattacaaaataattaaaaatccaat

SEQ ID NO: 365367 - DNA, 93 bp, Homo sapiens
gtacttccgcgttccggcatcgtcgcctggtgcgtgaagatgctcatgaagcagcaggaccggctggaggagcgagagcaggacattgaggac

SEQ ID NO: 365368 - DNA, 76 bp, Homo sapiens
cactcaaaactgtaatactaaatgtgttaccataccaagaacaactctgctcatggtgattacatgcaaaataacg

SEQ ID NO: 365369 - DNA, 100 bp, Homo sapiens
gtccatctcagatgttgttgatgaagtaatacagaactgccccatcgatgtgcggcgtccgctgtataagaaatctcctttacagacaataggtgaagaa

SEQ ID NO: 365370 - DNA, 82 bp, Homo sapiens
tgctgggcttcgtccagatcgggaaggacgttggacctctcgaacaaccagctgagcgagatccctgcagagcttgcggact

SEQ ID NO: 365371 - DNA, 100 bp, Homo sapiens
atgtgaactgcacgataaaggaactcaggcgcctcttcttagttgatgatttagttgattctctgaagtatccctctgaagaagatatgatcgaatgggc

SEQ ID NO: 365372 - DNA, 86 bp, Homo sapiens
accgagagcgtgaccgagagcgcgaatatcgtcatcgttagaagggatttagtgcaagaagaagaacagttgatggaagaaaagaa

SEQ ID NO: 365373 - DNA, 50 bp, Homo sapiens
tggacaacatgtcccaacattacatcccaagggaatctggaaaaattgca

SEQ ID NO: 365374 - DNA, 90 bp, Homo sapiens
ctagcattaccgtgggcaacaccaccatgcatgttatgaaagatctccttccagaaaccacctaccggcaacagcattattgagaaaagc

SEQ ID NO: 365375 - DNA, 75 bp, Homo sapiens
agctgcataccctgagccagattgaaacttctattgcaacagttcagcttcagctttagctgcagctgcctctgt

SEQ ID NO: 365376 - DNA, 87 bp, Homo sapiens
accgggtttctttgatgcgacctcaggaaggagatgagttgtaatttagattcgagaagtggtttatcctttgactggaaaagaaaa

SEQ ID NO: 365377 - DNA, 100 bp, Homo sapiens
gccttgaatggcaactgatacataataagacacaatctattctgctgattcacaattatggagactgtgttgatccaaaagactacatgttcagtggact

SEQ ID NO: 365378 - DNA, 96 bp, Homo sapiens
ggtgataaagattttcggacaggtttagaaaatggaatcctcctctgcgagtgtcaaggagcagaagcttttgaaatccagcattctggattggca

SEQ ID NO: 365379 - DNA, 75 bp, Homo sapiens
cacagagcctcgcctttgccgatccgccgcccgtccacacccgccgccagaagctccaccatgaggcgaggtgga

SEQ ID NO: 365380 - DNA, 82 bp, Homo sapiens
ccacacaaggggagctcgtaaggtccctcaaagcgggaaatgcgtcaaaggttaagacatcagaattttatagatactcccg

SEQ ID NO: 365381 - DNA, 75 bp, Homo sapiens
agcaagcatgcagcttactgcttgaaaggtatgtggaactgaccaactactgtgattataaagactacagggaaa

SEQ ID NO: 365382 - DNA, 99 bp, Homo sapiens
ggctctgccaatcaccgggcccgggtcaccaccagctgtgtggagctgaaccggtctgcattcctggaaccagagggattatccaagaccaggaagtcg

SEQ ID NO: 365383 - DNA, 100 bp, Homo sapiens
atcacctccatccagcccggggcccccaaggttccagcgccagaacaagttgaaaaaggtggtgtgagcaatgtaacagaagccaaactcatagttttcc

SEQ ID NO: 365384 - DNA, 90 bp, Homo sapiens
atcaggacgtctcattagcgaactttttcagaaactgccttctaaagtggatcaaaatacttgctggatggtggactcagagaccaataa

SEQ ID NO: 365385 - DNA, 75 bp, Homo sapiens
actatggaaactgagaagcccaaaacaatcacagagctggaattcaaggaagccttctccctatttgataaagat

SEQ ID NO: 365386 - DNA, 82 bp, Homo sapiens
tgtgggctgccatccagagctgggacataaactctcggagaaacatcaattacaggcagtagaacgagtcctgtacccacac

SEQ ID NO: 365387 - DNA, 100 bp, Homo sapiens
caggacatgtggaggttgctagacctgggatccagcccttctggtgtcacctcccagggtgactcaactccagatcccagcatggtgagtgcctacatgt

SEQ ID NO: 365388 - DNA, 89 bp, Homo sapiens
tggagaactacagaaacctcgtctccctgggacatctggaggacctgttgatgctagttcagagtatcagcaagagctggagagggagc

SEQ ID NO: 365389 - DNA, 100 bp, Homo sapiens
catgatccaggccctggaggacacgcatgtatctgaagaagctgcacacgcaggagcgggcggtggaggaggtgaagctggccatcaagccatactatca

SEQ ID NO: 365390 - DNA, 100 bp, Homo sapiens
gcccggcgctgatctacaagaaaatccacaagaacgcactttcctcccaggtcgcaatggaagaagagatcgccgcgctggtcattgacaatggctccgg

SEQ ID NO: 365391 - DNA, 75 bp, Homo sapiens
cggaaacaaagttattttgctcggaatgtaagctcagagaggagtgaagctcgccggaaacttcgggaatgtgat

SEQ ID NO: 365392 - DNA, 75 bp, Homo sapiens
gatggccttcacaatccaagttccacaatatattgactactgccacaattccgccaaatgggcggactgttgaag

SEQ ID NO: 365393 - DNA, 101 bp, Homo sapiens
ccgggatagagaggagaaacaggatgtggacgttgatctctcagccaaaatcccttcattaacaggagaaatgcaaataccttcatatcccctcagcagag

SEQ ID NO: 365394 - DNA, 82 bp, Homo sapiens
gtggagaagatgacgacctctggaacagtgagaaagatcagtctaaagaaaaggagaagaaagtgaaaaaaacaattccttc

SEQ ID NO: 365395 - DNA, 75 bp, Homo sapiens
gaactccaagccaaaatcacagctttgagtgagaaacagcttcaaggttactgactttttatgatgtttggtggc

SEQ ID NO: 365396 - DNA, 100 bp, Homo sapiens
ttctaccccccacaccaggactacacctggacctttgatgacatcattgtctttgccttctccagcaggcaagcaggtgcacacatcttgaccaactcag

SEQ ID NO: 365397 - DNA, 83 bp, Homo sapiens
agggccccgggccctcagcctctcttgtggatttcattgactgggtagacaacatgtggccaaggcacttgaaggaaagccag

SEQ ID NO: 365398 - DNA, 90 bp, Homo sapiens
gaactacaggaacctggagtctgtggtggaaagaggcaaaacctgatgaattaatggattccaaattgagatgcgtatttgaaatgccca

SEQ ID NO: 365399 - DNA, 100 bp, Homo sapiens
cgtcgaaagagccactgaacagttacagcgagctgcttactatcaggagttatgatcgaagttccaggagcttagatcaagattcaccttcaaaaaagaa

SEQ ID NO: 365400 - DNA, 105 bp, Homo sapiens
tctctttcaatgacaaaaagtttgtcattaaacccatcgacaagaaggcacctcaattctgtggtgttcttggtcacacatttatggagtttctgaagggcagtg

SEQ ID NO: 365401 - DNA, 101 bp, Homo sapiens
agaccgagagtcaccacaaggccaagggcaagtgatttgacagatcatccagcgggaggtattcactatgaaatgtgcatagaatgtccacctactttcag

SEQ ID NO: 365402 - DNA, 74 bp, Homo sapiens
tatcccaccagcaatgaatgagcgttccagcttctccctgtggaataatggcaacagaaagactggctaactac

SEQ ID NO: 365403 - DNA, 75 bp, Homo sapiens
ggctgctccgcttggccaccttctgccatctgactgtcctgctggctgagatgtggtatggtgtattcctgtggg

SEQ ID NO: 365404 - DNA, 90 bp, Homo sapiens
tgaagaaggtcgttgcttccccttcaccttccaccaccatgattctacctggcctatcgaaactttatgattgacacttaccgactgaac

SEQ ID NO: 365405 - DNA, 98 bp, Homo sapiens
ctgtccggctcgtcggtgtcctccggaggaagatgaaggctcgtgctcccccacctcctggaaaggctgccactctgcatgtgcacagtgaccagaag

SEQ ID NO: 365406 - DNA, 96 bp, Homo sapiens
caagtgcgcggttggggccactgcgaggccgttttagaacatgccagatccccacaaccttccaatagtggctggttggaagaaatacccactctt

SEQ ID NO: 365407 - DNA, 50 bp, Homo sapiens
atgctcttagctccaataattcatggtgctggagaatctggtaaaagcac

SEQ ID NO: 365408 - DNA, 98 bp, Homo sapiens
agaagcgcagatcaaggccaactatgacgtgctggaaagcatgcttctgatgagcagaattcacagtcctcgatggaacattcgatgaacagctcaga

SEQ ID NO: 365409 - DNA, 83 bp, Homo sapiens
agcccggaggaacattccaaaggaaaaatttcagtttgtagaagactatgaacctaccaaagctgacagttatagaaagaaag

SEQ ID NO: 365410 - DNA, 83 bp, Homo sapiens
cggcgatggagctgttatttttagatacttttaaacacccgagcgctgagggattaaagcctgtggtttccacagaagcacca

SEQ ID NO: 365411 - DNA, 123 bp, Homo sapiens
gtgcaagctatatttaacggagatcctgatgaagttcgagcactaatatttaagaaagaagatgttaactttcagaataactgaagtgaagtgatggactccgatttggagagtagtaagacg

SEQ ID NO: 365412 - DNA, 76 bp, Homo sapiens
aaacggagagactggggagaagaaccagtgaccttccgggatgtggctgtggactttacccaggaggaatgggggc

SEQ ID NO: 365413 - DNA, 80 bp, Homo sapiens
aggaaggaagaaactggaaattaggaactgcttcctcatttaacaaggatagagactcttaatggaacaatgattctgaa

SEQ ID NO: 365414 - DNA, 98 bp, Homo sapiens
tggtgctggaacagtttgaggacctcctggtgcgcatcctgctgctggctgcccttgtctccttttggtcgtaacccacaaaatccttcggaaggcca

SEQ ID NO: 365415 - DNA, 100 bp, Homo sapiens
gaggagatgaggaaggctggtatctttcagagtgtaaagtaatcttggaatataaaggtccaataaaacactggctgattctctggataatgcgaacgac

SEQ ID NO: 365416 - DNA, 82 bp, Homo sapiens
tgggaggacccgggacaccgcacagccgggaaatgctcattgctatggacagtgctatcaccctgtggcagttccttcttca

SEQ ID NO: 365417 - DNA, 145 bp, Homo sapiens
gggataccacctgaattggcacaaggaactagagagcgtgctcacaaaccacacttggaagtcttgggagaggaactctggttgaagaagtgtattttgcgcagaaggaacgtgatgaagctgttatgtctagactgcaattagc

SEQ ID NO: 365418 - DNA, 74 bp, Homo sapiens
gccatggcccagattctgccaattcgttttcaggagcatctccagtgtaaacaggaacatcgataagtagtgta

SEQ ID NO: 365419 - DNA, 85 bp, Homo sapiens
agccttgatgaatgaatgcattggccatgtcataggaaaaccacacagtcctgttacaggaaatggaagttccagtattaccgaa

SEQ ID NO: 365420 - DNA, 100 bp, Homo sapiens
agccggaggagtcagtcagaggggcgagcaggagcgattccgtcgccaaacagcatcctggtggggaagaagttttaagggaacaagctggaggtgacgc

SEQ ID NO: 365421 - DNA, 90 bp, Homo sapiens
acaagtatcaatggacaaaaagacttggaaatgcttccagactgcacacttttacttagaggacagtacatcccctagagttatatccac

SEQ ID NO: 365422 - DNA, 102 bp, Homo sapiens
cggcgtcccccagggcctcggcggccgctctgcctgcgcgctgctcctgctctgctacctgctatatgttctcctttcagccaagacctttcaccagtgcag

SEQ ID NO: 365423 - DNA, 82 bp, Homo sapiens
ggggatttaaagcactgaaacaaatgattaagattaacttcaagttgctcctggctaaatacaaaagcttgcaatgggacaa

SEQ ID NO: 365424 - DNA, 74 bp, Homo sapiens
ggtctggccgtcggctgcggcgccatcgcaccgggtgctcagcagttctgcttcttgctttccactcgagctgg

SEQ ID NO: 365425 - DNA, 100 bp, Homo sapiens
cggggcctttatttctcgtcggcggcgccctgcaccgcgcctcgcaaatgtcagagatggctttggattccccgttctgtgtgctgctgtctggctcctg

SEQ ID NO: 365426 - DNA, 75 bp, Homo sapiens
tgagtatatccctgacccggagagagttttttacactggccagaaatttggagagcttgtaatgaccaaagaatc

SEQ ID NO: 365427 - DNA, 111 bp, Homo sapiens
ccgggccctcggcagggaggatgacggagctgcagtcggcactgctactgcgaagacagctggcagatgctaatcctgaggtgacgatgacaatgcttcgctggatctata

SEQ ID NO: 365428 - DNA, 100 bp, Homo sapiens
aactgcaggagacagagttcttccagaaactaggctatgagaggaaactccagaaaccacaggcagatgaagcatattccatcggccccgctccctccca

SEQ ID NO: 365429 - DNA, 75 bp, Homo sapiens
atggtcccagaggcctggaggagcggactgcgtttagtgggctacagatggcatggcatctaaaaccttacaatg

SEQ ID NO: 365430 - DNA, 75 bp, Homo sapiens
ccgccgcattttttaaccctagatctcggaccaggcctcctcttcccacctgtccagcagcatgaaagcagcatg

SEQ ID NO: 365431 - DNA, 83 bp, Homo sapiens
agtatgcgctgtatagaccactgcagagcccacaggcggttttgtgagctgcttccccaggagcagcggagcgtggagtcgtc

SEQ ID NO: 365432 - DNA, 100 bp, Homo sapiens
tttattggatagcttggaaccacctggagaaccaggaccttccaccaatattcctgaaaatgccttatgccagcctggaccatcttggaggcagtgtagg

SEQ ID NO: 365433 - DNA, 75 bp, Homo sapiens
gcgggacctggcgccaccttgcaggttatgaagacagtatggagtttccagaccatagtagacatttgctacagt

SEQ ID NO: 365434 - DNA, 51 bp, Homo sapiens
tgtgtctcttgccaaagcgaagttgcctttccccatcttcctggttctgct

SEQ ID NO: 365435 - DNA, 50 bp, Homo sapiens
ccagggtctgcagacaaggcaggatgatgataattccgaagaaggcttcc

SEQ ID NO: 365436 - DNA, 101 bp, Homo sapiens
ctatcgctaatgagtatagcgaccgctgcacgccgcttatgcatctggatgtgacattgtaatactgggaagcgattttgaaagattacagataatcccag

SEQ ID NO: 365437 - DNA, 82 bp, Homo sapiens
cttccaaagaatgccacagaatcaggggaggcatgcttcaggtaacaggacattcagttagtaatgatggttgcaggttgaa

SEQ ID NO: 365438 - DNA, 101 bp, Homo sapiens
gtctgtgcagtggcacctgcgcgaagctggccaaagcctgcccagacggctcacctgtgcgggatggaacaaaagtggatgaggatcgcagtacggaacct

SEQ ID NO: 365439 - DNA, 75 bp, Homo sapiens
tgtggcgaatggggctcacgtcgagataataaaaagtcgctcacagcagcgtaacttccagcttctggtaatcac

SEQ ID NO: 365440 - DNA, 82 bp, Homo sapiens
tcgtggacaagtttgcagatcgggagcgcaaggtcgccctcaaggccatgatcaaaacctctaagcagctgcagcagtcacc

SEQ ID NO: 365441 - DNA, 100 bp, Homo sapiens
agcagtcgaattttgtaaaagtggctataacagagaggaatgtcttcgaacagtcgaatgctataatccacatacagatcactggtcctttcttgctccc

SEQ ID NO: 365442 - DNA, 75 bp, Homo sapiens
caacaggctgggagagtttactgtgggttgtcaatcaattgacctatgatgcctactccactttctacctgaatt

SEQ ID NO: 365443 - DNA, 75 bp, Homo sapiens
agcaatcacagagactcggagagcatcactgggttccattaacttcaaatgatgatgaagatgaagataaagaga

SEQ ID NO: 365444 - DNA, 75 bp, Homo sapiens
gtgagatcgtcagcgctgactccatgcagagctgaggcttcgaagacctcagaggacttctctcagcactcacag

SEQ ID NO: 365445 - DNA, 100 bp, Homo sapiens
cagttgtccaagacctggcccaggttgttgaagaggtcataggggttccacagtcttttcagaaactcatatttaaggaatgaaactagtgatcgagaag

SEQ ID NO: 365446 - DNA, 75 bp, Homo sapiens
caacggctgcggcgacaattttgacctgaaggagaagaaggagaaggtggaggagaaggcaagccggaaagagcg

SEQ ID NO: 365447 - DNA, 75 bp, Homo sapiens
gcccgaagaggagagagcgcgggcctctaggaagggcttcgtgctggccgtcactgtcatccgtgaggcggtgga

SEQ ID NO: 365448 - DNA, 74 bp, Homo sapiens
attcagaaggagctggcggacatcactttagaccctccacctaattgcagtcctattttgtaacggattatgat

SEQ ID NO: 365449 - DNA, 149 bp, Homo sapiens
gtccccggcgcctcggagcgggtggcgctcaagaaggagatcgggctgctgagcgcctgcaccatcatcatcggtgtctggtggcctgacatgcaccgcctggctgaccgcatccacctggaggagctggcccacatgggcatcctgag

SEQ ID NO: 365450 - DNA, 98 bp, Homo sapiens
tctgggctcgcggcgtctccggggaaagccgtggccccgagggcggatccgaggtgaccatagccgatgactactcagatccctttgatgccaagaat

SEQ ID NO: 365451 - DNA, 59 bp, Homo sapiens
gacatcttctccctcccttgcctcagatgactttgggaaattgctgctggctgaggccc

SEQ ID NO: 365452 - DNA, 100 bp, Homo sapiens
ggagagtctgccggcggagaatataagggcggcgactggcggcgcgatggacctgaccgggctcctgctggacgaagaaggcaccttctccctcgccggc

SEQ ID NO: 365453 - DNA, 88 bp, Homo sapiens
ggaactcaaagtggatgaggaaagttaaacccatccagagtaatggctgcggccttacccaggaccctgggggagttgcagctgtata

SEQ ID NO: 365454 - DNA, 100 bp, Homo sapiens
cctttaccaacgccatcaccgacctcatcagtgagctgtccctgctggaggagcgctttcgggttttgtcaagagtcaggaaggagaaaatgaagaagga

SEQ ID NO: 365455 - DNA, 82 bp, Homo sapiens
tgtcgctggacgtctagagatgtgggcatggcagacaaatctgtagtgtcctgggtcatgaaacttaatccacagcaagctc

SEQ ID NO: 365456 - DNA, 90 bp, Homo sapiens
gcgctgcgcctcgaggtgcgcgccggcccggactcggcgggcatcgccctctacagccatgagcagcaccagcagtaagagggctccgac

SEQ ID NO: 365457 - DNA, 100 bp, Homo sapiens
gcacattaacatcagcttccacagctttgatgtggaaaatggcccttccccaggtcggagtccactggatccccaggccagctcttccgctgggctggta

SEQ ID NO: 365458 - DNA, 78 bp, Homo sapiens
ttcaactcttttctctcgggcttcatctcttgtgtggggagtttcatcctagcggcgggaatgcatatcagtccacgt

SEQ ID NO: 365459 - DNA, 96 bp, Homo sapiens
aggccatgggccgcgaggtgaacgcactcaagagcaagctcagcttgaaatggcgattgaaaacctccaaaaaagcgaaggaatcacatcacacaa

SEQ ID NO: 365460 - DNA, 111 bp, Homo sapiens
acgagaccggctacttctcggcgctgccgtctctggaggagtactggcaacaggagccttcacgtaaatgggtccagtcatgcctcccagtaagaagccagaaagctcagg

SEQ ID NO: 365461 - DNA, 116 bp, Homo sapiens
cgtctctctgctgcggcgcggggaccgctgtgctctcggaaaaccaattctgtgtcctcggaggaccacagcccagttgggccccaggcgaaacccagcctggagcttgcaggcag

SEQ ID NO: 365462 - DNA, 100 bp, Homo sapiens
tcttcctgctgcagaactcctctatgatgaagaagaccttgaaatgcatccgctggtcgctgccggaaatggccagattgtgcttcttggtcagaccccg

SEQ ID NO: 365463 - DNA, 100 bp, Homo sapiens
gacaccttacagcagtgcttcatgaacaccaaagtgaccaggccagattacctgtccctaatactgagcagaagctggtgaatgaaacaggagatccctc

SEQ ID NO: 365464 - DNA, 141 bp, Homo sapiens
gagaggaggatagcagcagaagagaagaagaagcaggatgaactgaaacggattgccagagaattggcagaagatcggggctgctagtcgcatacccggagtaacacctgccgccatcatcaatctgctgagatttgtgaa

SEQ ID NO: 365465 - DNA, 75 bp, Homo sapiens
aacttatatatgagaattgctccagaactctatcataaggtatccctgttgatccgccgggagctgacagagagg

SEQ ID NO: 365466 - DNA, 80 bp, Homo sapiens
ctacggacctgtctgggtctcagccgccaaagaccccgtccggccctggagaagaaggggatcagccacctggaggagaa

SEQ ID NO: 365467 - DNA, 100 bp, Homo sapiens
tctcaggacgctctctggccgctatcatcccagcagtggagttcagcccactactctgaaccaggattttttatcaagcagaaatgcatcgaacaacgag

SEQ ID NO: 365468 - DNA, 100 bp, Homo sapiens
cttcacccaggaggccccggaggaggggaccgggggcttcgattcacagtctgagaatgaggcttcaccagtaaaacggccacgactacttgagaatacg

SEQ ID NO: 365469 - DNA, 75 bp, Homo sapiens
tccaaggccacctggggaagaagcaggtgcctccggatctcttccagccaaatatcatgcagcttcgtgacagac

SEQ ID NO: 365470 - DNA, 99 bp, Homo sapiens
ctcggccacggctccctcctcggtggtcgcggcgacctccggcggcgggaggcccggcctgggcaggtgcccgcctggctgggtgggtgagcggtgtca

SEQ ID NO: 365471 - DNA, 98 bp, Homo sapiens
ctgactttcagctatggaatcgatctgttacctaaagcaataaaaaatggccagaggatcagtgtccgatgaggaaatgatggagctcagagaagctt

SEQ ID NO: 365472 - DNA, 100 bp, Homo sapiens
cagcaaaccgctagcaaagggagaagtctcgggtttgacaaagatgaataatacggcagctagtccaatgtctactgcaacttcaagtagtggaaggagt

SEQ ID NO: 365473 - DNA, 98 bp, Homo sapiens
actgatttaaataacaactgaatagcaaggaccttctggaacataatcttacattcacagccctctttggattccagtacgatgcatcagaccatacc

SEQ ID NO: 365474 - DNA, 83 bp, Homo sapiens
gctgagacagggcgccacttactagtgtactaatggtcacttgatgtgcgctggctgttttatccacctactagcagatgccc

SEQ ID NO: 365475 - DNA, 100 bp, Homo sapiens
actgagcgtatcatgttaaagatgagcgggtggcagcgacagagccaaaatcagagctggaacctgaggagagaggcctcatcatttctgtctcctgttt

SEQ ID NO: 365476 - DNA, 100 bp, Homo sapiens
tgggacaaatacctaaaagaaacatgttcagtcccagcgcctgtccattgcttcaagcaggatgaaatggagatcggctacatccaagccccacacaaaa

SEQ ID NO: 365477 - DNA, 100 bp, Homo sapiens
ccttcagaaacagtattacaattaaaggcattaggatttcctgaaggacttgtgatacaagcgtattttgcttgtgagaagaatgagaatttggctgcca

SEQ ID NO: 365478 - DNA, 82 bp, Homo sapiens
ccggccggcgcgtcgtccccacaggtttggtgcacctcgatttggaggaagtagggcagggcccttatctggaaagaagttt

SEQ ID NO: 365479 - DNA, 100 bp, Homo sapiens
gggactgccccggcaactccagggtgtctggtccacgacctatcctaggcgccatgaaaaaatgcctgtcttaaaggctgaagcgtcacattataactct

SEQ ID NO: 365480 - DNA, 100 bp, Homo sapiens
gaaaagcctccagactactagtacgaggacgtaggaggaacatatgcagcagaaaaaagaggaggaagaagttcttaaagaagtaactgcacatttccaa

SEQ ID NO: 365481 - DNA, 74 bp, Homo sapiens
gcgtccgccgattcctcctccttggtcgccgcgtccttggctggcgtggactttgaacatgtcggggatcgccc

SEQ ID NO: 365482 - DNA, 100 bp, Homo sapiens
acagttgtgacagctttgcttctgataattttgcaaacacgctcctttggtgaagattaaacagagcttaacaaaactgaagcaagaaactgtagagatg

SEQ ID NO: 365483 - DNA, 98 bp, Homo sapiens
gtgaaaaatcatcaacctttctaatgaaggttggatggcaagcatgtggtgtttggcaaagtgaaagaaggcatgaatattgtggaggccatggagcg

SEQ ID NO: 365484 - DNA, 75 bp, Homo sapiens
cacgacgcactggcccaggacctgcacaagacttaattcagtgcacaaatgagatgaatgtgaacatcccacagt

SEQ ID NO: 365485 - DNA, 101 bp, Homo sapiens
cgtggagcggcagctctgcagcgtctggatcagcaacaaaaccgccaagcagcactcgctgcactccgcccagtggttggatggcaagcatgtggtgtttg

SEQ ID NO: 365486 - DNA, 82 bp, Homo sapiens
gtacctgaaccggcacctgcacacctggatccaggataacggaggctgggcaacagcattattgagaaaagcccttacagaa

SEQ ID NO: 365487 - DNA, 100 bp, Homo sapiens
cgcctcccgagaagaagttgaggcgctattagctgctgctggtggtgacaatgtcaaataacggcctagacattcaagacaaacccccagcccctccgat

SEQ ID NO: 365488 - DNA, 101 bp, Homo sapiens
cggaggtggattacctggagcagtttggaacttcctcgttggagaccttccccagacgcctccaggggctgtcccagacccctctcttgccagtacagact

SEQ ID NO: 365489 - DNA, 115 bp, Homo sapiens
ctctgggcaggaatgaaggcaacatctttcctaaccctgaagcgacttttgtcaaggaaatagacgagttgtactgctgtcacaggaaatggacgctggattacaagcatggcag

SEQ ID NO: 365490 - DNA, 130 bp, Homo sapiens
aacatacagcactttgtggagaaagtcgtcttccacttgcacgaaagctttcctaggccaaaaagaggtggaatatgtgatcaagtgtgacatgtcagctctgcagaagattctgtatcgccatatgcaa

SEQ ID NO: 365491 - DNA, 50 bp, Homo sapiens
ttggtcagccacctcattgctacagaggcatttcatccttcatgaagcca

SEQ ID NO: 365492 - DNA, 100 bp, Homo sapiens
cgctacttcaaagggtactttttagaaccaaaggtagctacagcaagctgggtagcaggcagatccaaaggatatcatgaagtttccagggcctttggaa

SEQ ID NO: 365493 - DNA, 100 bp, Homo sapiens
gcgtccccagagagcgccctgagagaacagggtggccgcttggtccaggtgcgagaagatgtactaaattcattgaataacaactttcttcaaacgctaa

SEQ ID NO: 365494 - DNA, 51 bp, Homo sapiens
tggatgaagtgggcatcccactccggcatgttccaccttccctcttcacgg

SEQ ID NO: 365495 - DNA, 90 bp, Homo sapiens
gcgtcaggtccgggctcctggacttcgcctttcccgagccctggaggtggggagaaaagatgactctggggacgacgacgaggctaccac

SEQ ID NO: 365496 - DNA, 75 bp, Homo sapiens
gcacctgaaaatgagcaagaaaatcgcccagctcaccaaggtcacaaacatgtcagacaaaagtgaattaaaggc

SEQ ID NO: 365497 - DNA, 135 bp, Homo sapiens
gtgatcttggcctgcaggaacatggcaagggcgagtgaagcagtgtcacgcattttagaagaatggcctacaacacagcagtcccctcaggatgagcaggaaaagctcttggatgaagccatacaggctgtgaag

SEQ ID NO: 365498 - DNA, 76 bp, Homo sapiens
gaccacactccaggaatgccagtgcatcttttgcacagctccattgccgaaatctaaaaaaacttgtagcaaaggc

SEQ ID NO: 365499 - DNA, 50 bp, Homo sapiens
caaaggaagacttgtaacctggagaagagtcttatgatgtaatcagcgcg

SEQ ID NO: 365500 - DNA, 82 bp, Homo sapiens
ctccttgcagctgcttagacgctggatttttttcgggtagtggaaaaccagttaattggccttggtcctcacagctccaaaa

SEQ ID NO: 365501 - DNA, 98 bp, Homo sapiens
ctggaattctgcctagctgtgctcactgctgtgctgcggtggaaacaggcttactctgacttccctgggggcttccagggctggctggagaccatggt

SEQ ID NO: 365502 - DNA, 75 bp, Homo sapiens
tgaaaggctgtgtggtgggaaccaagaagcgggtgctcaccctccgcaagtccttaatggatcagtactttgccc

SEQ ID NO: 365503 - DNA, 50 bp, Homo sapiens
aagcatgagactatatgctagagattgttaaaggaaatgggctggcagga

SEQ ID NO: 365504 - DNA, 78 bp, Homo sapiens
cgcgaccacgaaggccgctactccgaggcggtgttttattacaaggctataccccagctttggcctgtgctcccaata

SEQ ID NO: 365505 - DNA, 80 bp, Homo sapiens
agatcatcagtcaaggaagacccactggagagtgtgtgtaactggtgtgtgcaccgtttcgaccatcactgtgtttgggt

SEQ ID NO: 365506 - DNA, 89 bp, Homo sapiens
gcccgcgcctagaccccattcaataacatccctgaggacctcagagaccctttctacgttgaccagtatgagcaggagcacattaagcc

SEQ ID NO: 365507 - DNA, 90 bp, Homo sapiens
ggggcagagaggaagcttctagtgtactcttactttgaaaagtgtgtcccggcatggatatccggaacaacctcactaggttgcatgagc

SEQ ID NO: 365508 - DNA, 50 bp, Homo sapiens
ggagattcatgacaaaatcatggaggaagcagtcaattatagatttcttc

SEQ ID NO: 365509 - DNA, 75 bp, Homo sapiens
gtaagatgttcgcctgcgccaagctcgcctgcaccccctctctggaattactctgcttaatgtaagcaagctgaa

SEQ ID NO: 365510 - DNA, 75 bp, Homo sapiens
ctgcgatctctgtggtaggcccagaaagtgactgagaccgaagatgatagtgatagtgacagcgatgatgatgaa

SEQ ID NO: 365511 - DNA, 100 bp, Homo sapiens
acatgaatattctgttttgctgcccgaagcttggttctaaatgagaagaaacttcaagaggttgatagtttatggaaagaatttgaaactccagagaaag

SEQ ID NO: 365512 - DNA, 75 bp, Homo sapiens
ctccccgcgccccctccccctcgccatgaagcacatgattaagtaccggtacatcccgttcacacatgggaagag

SEQ ID NO: 365513 - DNA, 100 bp, Homo sapiens
tccgcaacaaaccctatcctgtccgagcaaagattacctattaccagaacacactgacagttggacaccgaggaacagtaagagattatccagactttag

SEQ ID NO: 365514 - DNA, 100 bp, Homo sapiens
gattacccgttaagtcccccaaagatgagatttacctgtgagatgtttcatcccaacagtatgttgagtctaaaaaggacagagtcacagtagtcttcag

SEQ ID NO: 365515 - DNA, 75 bp, Homo sapiens
agcctcctaagtagctgggattacagtcaccaaaggcttcgtgtacagctctttcctaaagccctacaatcctcg

SEQ ID NO: 365516 - DNA, 87 bp, Homo sapiens
ggaagacccagatctgtcatacgctagctgtcacctgccagttgcagcaatatcagtactacagtgcaggcctgctctccacatatg

SEQ ID NO: 365517 - DNA, 75 bp, Homo sapiens
cccggcagacattgtttgaagattccttccaacagattcttacaaccagtacagaaaatagacatgaatctcaca

SEQ ID NO: 365518 - DNA, 51 bp, Homo sapiens
cttttccagaaactgtgccaggatcacgacaacgctcctcgacttagatgc

SEQ ID NO: 365519 - DNA, 100 bp, Homo sapiens
tctgttctgccctggctgcctcagccctaccagcactggtcatgtctaaagcggagcgtgctttggacaccatgaattttgatgttataaagggcaagcc

SEQ ID NO: 365520 - DNA, 75 bp, Homo sapiens
agccgggccgcgccgccgctgccgccgccgcgcgcgggaatggggtttttttggcatctgaactggaagactttg

SEQ ID NO: 365521 - DNA, 90 bp, Homo sapiens
tgtaagcaggatccgagcgttctgcacaccgaggaaatgcgcttcctgagggagtgggtggagagatcaacaggcggtccttcgggtcgg

SEQ ID NO: 365522 - DNA, 73 bp, Homo sapiens
gcggcgctggagagggggcgctgagctgttggggtcacagtgctgtcgatatcaccaaggtggctagaagaca

SEQ ID NO: 365523 - DNA, 75 bp, Homo sapiens
ccgctgccgggcaccgaggaccagctcaatgacagatgcgctggctccctccctccgaggctacttctcagggct

SEQ ID NO: 365524 - DNA, 82 bp, Homo sapiens
caaggcactggatgatgcaatcaaagctcgacttctcaatcccaagtggccaaaggagaggtgctgagaggggaccggattg

SEQ ID NO: 365525 - DNA, 100 bp, Homo sapiens
cgccagatagaaaacggcgagagtgggcgagaacgtccactgcgggccggcgaaagctgtgaaagcaagttgaatacattggtgcagaagcttcatgact

SEQ ID NO: 365526 - DNA, 74 bp, Homo sapiens
tctggaaccgcactgcagagaaaacaaggcgaccagccagctcctgttggagacagattgggagtccattttgc

SEQ ID NO: 365527 - DNA, 80 bp, Homo sapiens
gacagtgggacattctgaagggaggcaaggaggcggactgagcgctcccaattgggaccatggtgaatccgggcagcagc

SEQ ID NO: 365528 - DNA, 75 bp, Homo sapiens
ctggagcccgagctgcgccgccgccgctacgaatacgatcactgggacgcgaaaattggggaggagttcctgact

SEQ ID NO: 365529 - DNA, 83 bp, Homo sapiens
caccgcgcctgctgccgggttgcgctccgtgcacctcttgcggtgtcttcattggctgctctggcatggagctgatatcacac

SEQ ID NO: 365530 - DNA, 97 bp, Homo sapiens
tgccctctttgcaacatttcaggaaaacagagaaagaagtgataggagggctctgtagaagtccattggaatattaagcccaggagttgctttgggg

SEQ ID NO: 365531 - DNA, 90 bp, Homo sapiens
agaatcctcatgctcctactatccatttcaactacagatactttgaagtagaagaagctgatgctctggatgagggggatattgccttgt

SEQ ID NO: 365532 - DNA, 100 bp, Homo sapiens
gcgtttctatcgggacgtcctggggatgaaggttacagagaagatcccagtaaggcatttatatacaaaagatattgacatacatgaagttcgtattggc

SEQ ID NO: 365533 - DNA, 103 bp, Homo sapiens
atcaaacagcaacgcctgaaccgccttgtggaagggacctgctttaggaaactcaatgcccggcggaggcaagccggagaccacccccatcaccaactcgtcc

SEQ ID NO: 365534 - DNA, 59 bp, Homo sapiens
gcggccgaccgagaacgcagcatccacgcagcctcccgcgacgatgcccctcaacgtta

SEQ ID NO: 365535 - DNA, 101 bp, Homo sapiens
ggctgcgccagcaagcggggccggtggcgcccgtgtcggagaccccgcgccggaccctgaggcagcgaggattagaaaatgagtatcaggaagaagggcag

SEQ ID NO: 365536 - DNA, 74 bp, Homo sapiens
cctgtctgcaatacacctgcaggaagagctcgatcaggttcagtacgctggggaggaggaggaggaagggagcg

SEQ ID NO: 365537 - DNA, 83 bp, Homo sapiens
ctgaggtcatcggggatgtggacgaaggggccgacctcctagtggctccggaagcctggttggcattgacaacaaaatcgagc

SEQ ID NO: 365538 - DNA, 73 bp, Homo sapiens
cgggaccgaggcgaaccgggtgcggagccaatacccgcggcagcagcaccagtgcaccgtccaggtgaggtta

SEQ ID NO: 365539 - DNA, 96 bp, Homo sapiens
gtctctcaggagcttatgatttcccccactgccaagaggaggtccgagaactgctggccaccctggagggcctagacctagacggggaggactggc

SEQ ID NO: 365540 - DNA, 88 bp, Homo sapiens
agcagtgacggcgaggaggccgagcacccccccaggcagcagcagcagttttcatctctggatgacaagccccagttcccaggggcct

SEQ ID NO: 365541 - DNA, 75 bp, Homo sapiens
aaggaataaacatgcaatgaacccaaaagggaaagtgactattttaccccacagggagaattccgtgtagacaaa

SEQ ID NO: 365542 - DNA, 50 bp, Homo sapiens
ttggcgaggcctttcaccaagtccatgtaatctcaggggcgatataatca

SEQ ID NO: 365543 - DNA, 82 bp, Homo sapiens
aaccattgacgccatgtcgggttattcgagtgaccgagaccgcggccgggaccgaggatgcctgctctgtgcctgtatctga

SEQ ID NO: 365544 - DNA, 76 bp, Homo sapiens
atactcctactttctaccaaactctggctggagtcacacatttcaccttcaggccattcagaggaggaaagagagg

SEQ ID NO: 365545 - DNA, 75 bp, Homo sapiens
aatttccacctctgtgtgtgtacgagctcatgaaggcgcttacagctcaatgctaatcaggccttcttcctgttg

SEQ ID NO: 365546 - DNA, 100 bp, Homo sapiens
gaagggatactggttcgtccttactgcggaaagcttgtcctggtataaagatgatgagcattgtttacaataaccaagatatgaaatcaacctatgtctt

SEQ ID NO: 365547 - DNA, 100 bp, Homo sapiens
cttttatatgagcaagaaggaccccaattttctgaagttaatgaaggagttcccccttctgagtatgttcaatatccatgaaaaccttttagaagccctt

SEQ ID NO: 365548 - DNA, 76 bp, Homo sapiens
gcggggccttccacaccccctccgtgggtgtgtgctcagtgtggaggctgctggccctgccatctgtaagaagatg

SEQ ID NO: 365549 - DNA, 101 bp, Homo sapiens
caaaaacgtcaacaacagttttacggtgcaatggatgagcttcatagtctggatccaagaaggcaagagttattggaagctagatttactggagttgcaag

SEQ ID NO: 365550 - DNA, 100 bp, Homo sapiens
ggagggtccccgacctcgctgtgggggctcctgtttctctccgccgcgctctcgctctggccgacgagtggagaaatgcagggacttcacagcccacacg

SEQ ID NO: 365551 - DNA, 82 bp, Homo sapiens
gtcatcctgctgctgaagatctggaagacgcgctcctgcgccgtgctgcttttgacacaaaaacggggttacgtgtggcagt

SEQ ID NO: 365552 - DNA, 100 bp, Homo sapiens
agggaaatataacattcttggcacaaatactattatggataagatgatggtggccaccaaatatgaagtgagtgtctatgctcttaaggacactttgaca

SEQ ID NO: 365553 - DNA, 98 bp, Homo sapiens
tcttcatcgtgctattcctggtctacatcctgcgggtgcctttgaaaatcaacgacaacttgagcacaggagatacaactcgtcaacgaatcaaattc

SEQ ID NO: 365554 - DNA, 82 bp, Homo sapiens
ccagaatgcactgcacaatattaaaactttacctggggataaggagccccgtggaatcatccctttagagaatctgagtatc

SEQ ID NO: 365555 - DNA, 74 bp, Homo sapiens
gggataacgcctgcaacgacatggggcggcgactggcggcgcgatggacctgaccgggctcctgctggacgaag

SEQ ID NO: 365556 - DNA, 96 bp, Homo sapiens
cccgtcgtctgcacgcagcccaaatccccatccgggacagtgtgcacctcaagctggatccagacccctttgtgcggcacaccttctggaccttgg

SEQ ID NO: 365557 - DNA, 74 bp, Homo sapiens
atgcctatgtattccctggggatggcgcatcacacaccaaagtgatcggagggtatggttggcatggaattgaa

SEQ ID NO: 365558 - DNA, 49 bp, Homo sapiens
atgatttaaatatcggcgttaagatattgagctcctggcagcttgcaga

SEQ ID NO: 365559 - DNA, 75 bp, Homo sapiens
ctgaccacagtgctcaccacccaccaccactggttctgcggggagtgtctccagccctgcctgcaggtgccatcc

SEQ ID NO: 365560 - DNA, 75 bp, Homo sapiens
tggacagtcgccctgagatccagcgcctggacacgacagaactgtaccgctctctttttggccagctccaccctc

SEQ ID NO: 365561 - DNA, 83 bp, Homo sapiens
gctggggacagctgctggtgtggttcggagccgcggccacctgtctgtccagccacccttccacagactgaggcttgacaccg

SEQ ID NO: 365562 - DNA, 101 bp, Homo sapiens
tccggagctagctggatcctctaggcaggtacacggtcctcttctcgcacggcaatgccgtggacctgggccagatgagcagcttctacattggcctgggc

SEQ ID NO: 365563 - DNA, 100 bp, Homo sapiens
gactctgatgaagacattcgagagacatatggctacgacatgaagtttgtgaagaaatatgggaacctttttagcttggagcttggtgacatatctgcag

SEQ ID NO: 365564 - DNA, 100 bp, Homo sapiens
ggggtttcaccatgttagtcaggttgcaatgaggtgtcgctgcagcagcatgcacttcttggtagcagaatggaatgaaccatccatcaacttctataaa

SEQ ID NO: 365565 - DNA, 101 bp, Homo sapiens
cggcctggaggggcgaagaggacgagggggccaaggcttcctccgggactctgctaacaccagatagtggaaagaaaccatgtgctgaaatgtttgacgac

SEQ ID NO: 365566 - DNA, 88 bp, Homo sapiens
ggtggcggcggccgtaggtgtggggcgggcgtccgcgtccggcacgcgagatggagcgccgtgatggcaagattattttatcataaac

SEQ ID NO: 365567 - DNA, 85 bp, Homo sapiens
agcttaaagccttgaagacaaggcggccccgctcccgggttcctctgaggattggaattctagtttacaatatcatgaaggaagg

SEQ ID NO: 365568 - DNA, 76 bp, Homo sapiens
tcaagatgctgcaaaacgtgactccccacaataagctctgacgcccgctctgcggcttcggtgtttgaacaggcca

SEQ ID NO: 365569 - DNA, 83 bp, Homo sapiens
cctgcacttagccccgcgcccgagtgcctatgattacacaataccacctatggagaaagctgttgtgaaaacggacattcaga

SEQ ID NO: 365570 - DNA, 75 bp, Homo sapiens
gtgaagctcctgggagcctactatcacgacgggaagctgtgggacctagatgtgaaggctggtggaggctgtgta

SEQ ID NO: 365571 - DNA, 82 bp, Homo sapiens
ggaaatagtggcaggtgacagtctgcatgtgcagttttcagatattgatgatgttaagaagttcaaaccgggttacctggaa

SEQ ID NO: 365572 - DNA, 75 bp, Homo sapiens
gcagaaaatagcagccaggaaccaagaaaacttgatgtccagaaggcttcttgggggaatattgtcaacatcgag

SEQ ID NO: 365573 - DNA, 100 bp, Homo sapiens
caacacctacgtccacttccaagaatacagattctgttcatcttgctctgaaattaaataattctgaactcatggggagaaaactcagagtcatgcgttc

SEQ ID NO: 365574 - DNA, 101 bp, Homo sapiens
cacttggagaaccaggaaaacctttcaatgaactgtgggattatgaaggaagaattttaaatcgtttctccaaagacattggacacttggatgatttgctg

SEQ ID NO: 365575 - DNA, 75 bp, Homo sapiens
caggaagccgggagtccgagacccgggtctatgttaacaatgaatgggcaaccagtgttggggaaggagggagct

SEQ ID NO: 365576 - DNA, 74 bp, Homo sapiens
cctaccccttgcacacctaccctaaggataccttcttctactcattggtctatgacccctcattgaaaacacta

SEQ ID NO: 365577 - DNA, 75 bp, Homo sapiens
gaagcgctgcgctcgcgcccggatccctcagaatgagatgctggaggaaggacatgagtatgcggtcatgctgta

SEQ ID NO: 365578 - DNA, 116 bp, Homo sapiens
gtcgtttttccttgagctgaacgtcttgcaacagtggccgcacgcataggatcaaagtgcttgactttgttggttgaaatccaccctgttaacaatgtgaaggttctaaaggctgt

SEQ ID NO: 365579 - DNA, 90 bp, Homo sapiens
ctccccatcaagggaatgaacttcacaggaccactgacatttagggatgtggccatagaattctctctggaggagtggcaatgcctggac

SEQ ID NO: 365580 - DNA, 100 bp, Homo sapiens
acaaggcagccatagttcacaatgttgattctgatgacctcattagcatgggatccaacgacagtaagtacaggagtgattcgggaaagttacctcaaag

SEQ ID NO: 365581 - DNA, 76 bp, Homo sapiens
gagaactgtttccagtatatacatcaagtcactgagccagtgcacaaagactctattagccttttcatggcacatg

SEQ ID NO: 365582 - DNA, 50 bp, Homo sapiens
tcttgctgcaatcagcccttacttcagtactgtcccactgaccaggctgc

SEQ ID NO: 365583 - DNA, 100 bp, Homo sapiens
gcaatgaaatcctgctttcttttcctcagaactactatattcagtggctaaatggctccctgattcatggtgctaaagagattgatatcgcagcgaccct

SEQ ID NO: 365584 - DNA, 82 bp, Homo sapiens
cgggagtcggcgtccaggctcggagcgcgacacggagactaggtggcagggactttgaacatgtcggggatcgccctcagca

SEQ ID NO: 365585 - DNA, 74 bp, Homo sapiens
ccatttctcctattgaggagtcaacatgctgggctcttgcactgtttggtggaaatggtgagacaggatttgag

SEQ ID NO: 365586 - DNA, 122 bp, Homo sapiens
gaatcccagaggaaactgacggagacgcagatgtggacttgaaagaagctgcagcggaggaaggcgagtttgaacgccatgaccctgtggatgggagaattactgagaggcagtttggtggc

SEQ ID NO: 365587 - DNA, 96 bp, Homo sapiens
aggaggttcacatctcccacgtgggccagcccatgctgaacttctccgatgactacctgtccctggagggttcccgctggccaccagccatcaggc

SEQ ID NO: 365588 - DNA, 74 bp, Homo sapiens
cgcgggaggtgttcgagaacgaccccgagacggagaagaaggaagttgtggaagaggcagaaaatggaagagac

SEQ ID NO: 365589 - DNA, 98 bp, Homo sapiens
gcattgcccatccttctgtgatctgtgcatctccttggaaacaatgccatctttgaatgtgagagataaacctagtttcagcatgtctgcagcagaga

SEQ ID NO: 365590 - DNA, 100 bp, Homo sapiens
gccccgtgaggacccagtccttctccagggcattcgagtctccattgcacaatggccagccctggtattctctactgccgctgatggtcaaacgcaagtg

SEQ ID NO: 365591 - DNA, 100 bp, Homo sapiens
gttctgtggcccctcccctgtggtcttcagggaggcatgcatctccccatgtgctatgatgctggctctggtgtacattgaacggctccggcaccgaaac

SEQ ID NO: 365592 - DNA, 96 bp, Homo sapiens
atatagtgcttccaactggctattgtggacagcccaagaaaggacatcttatctttgatgcttgctttgaaagtgcccgtggaacacagagcattc

SEQ ID NO: 365593 - DNA, 75 bp, Homo sapiens
gggcttcgtgccctgtgcacgtttgccacctagtgaccaaactgagctgcctgctgtttcccggggagatcatga

SEQ ID NO: 365594 - DNA, 75 bp, Homo sapiens
gtgaggagccagacgacaagcacacactatggcgctgaaacggattaataaggaataactcaagtcacctgtact

SEQ ID NO: 365595 - DNA, 100 bp, Homo sapiens
gcttacttccccttcaccttccttcatgatggttttgtaatcaacccccctcagcatggtcctctcatcccccgactggtaacgaccaagcctaccggag

SEQ ID NO: 365596 - DNA, 96 bp, Homo sapiens
aaaaatataataaagaggttgaagaacgaaaaagattagaggcagaggttaaagccttgcaggctaaagccatttgtgtaggaccagaaaacatgc

SEQ ID NO: 365597 - DNA, 100 bp, Homo sapiens
cgtgaacgctctggggctcagccaggcctgcgcgggcccgaggccggaggaacccggactccggcgtagcgacaatggcgatgaccactcagaaggaggc

SEQ ID NO: 365598 - DNA, 98 bp, Homo sapiens
tcgaacttagacttccggaaggactttggcgaggacctgcgaccgcatcaagcagtccgccagcggaaccaagcggcgcgtgttcatcatcgagacca

SEQ ID NO: 365599 - DNA, 110 bp, Homo sapiens
caccaggttcttcgaaaactgaagcagatgttgaacaacaagtattttcatctcagcctagtgacgatgaatcaagtagtgatgaaaccagtaatcagcccagtcctgcc

SEQ ID NO: 365600 - DNA, 96 bp, Homo sapiens
gagagagaaagaaaagaaaagaagccctcaagatgttgaagttctcaagagtctccttggaggtgacatggatatgggcaacccaggaaccctttc

SEQ ID NO: 365601 - DNA, 97 bp, Homo sapiens
gttctcctccacaactgatgattagtaaagtcttctctgctagaatgggcagcttctgtggaagtacaaataagaattgaacaacacatgtgaaccc

SEQ ID NO: 365602 - DNA, 83 bp, Homo sapiens
ctggcctggaggctatccagcgcacgctacaccccaactgccaagacagcagcgggcggccgcggcgtgacatcggcaccatc

SEQ ID NO: 365603 - DNA, 101 bp, Homo sapiens
tagcagtcacgacctccagcacagtctgctcccagttctcgagaggggtgtatgccatctttggattctatgaccagatgtcaatgaacaccctgacctcc

SEQ ID NO: 365604 - DNA, 100 bp, Homo sapiens
tccagaggcattgaggcctgcaccaatgctgctgatgcccttctgcagtgcatgaatgtagctcttcgaccaggggatggcattcctactgtatttgtgg

SEQ ID NO: 365605 - DNA, 102 bp, Homo sapiens
atcacagataccctgtcaaagggtgagacaaagttcatggtgtcagaaatggctgtttctgagctacctggtaaccccaacgctgtctggacagtgcgtcga

SEQ ID NO: 365606 - DNA, 71 bp, Homo sapiens
atgtaacataccaagtctatgaggaacaagatttagcatgtagactgctggggcaatcaatggatgaaagt

SEQ ID NO: 365607 - DNA, 74 bp, Homo sapiens
acagcacgcccagcccggacctgctgatggcccgcagcttcggtgacaaggatgtggacaacaaagtagagagg

SEQ ID NO: 365608 - DNA, 98 bp, Homo sapiens
acagtctgcggaacggagcagtatttcaatgtggagattcacagtctgagaatgaggcttcaccagtaaaacggccacgactacttgagaatacggaa

SEQ ID NO: 365609 - DNA, 75 bp, Homo sapiens
gaaatgtcatccgatggcacaatcagtttttcagaagaagtgaagtcaagatgaagaaccatttgcttttctggg

SEQ ID NO: 365610 - DNA, 80 bp, Homo sapiens
gacgatgaccaagaaggcggccatcaccgtacaggtagatgatgagctggagatcaaggcctactatgcaggccacgtgc

SEQ ID NO: 365611 - DNA, 75 bp, Homo sapiens
tggcaaagtggaaaaatgtgcgtgctacctgggcgatgccttccgctgtgccagctgcccctaccttgggatgcc

SEQ ID NO: 365612 - DNA, 98 bp, Homo sapiens
cggcccggggggctgaggcgcccgccgcctgccgcgggggccgctcgcgtcctccatggaggccggagttccatcatgtccccctctatctggagtgg

SEQ ID NO: 365613 - DNA, 74 bp, Homo sapiens
ctccccagccacgctttctgtacagcctgcagaactagctattctcaagctggaataactgagactgaatggac

SEQ ID NO: 365614 - DNA, 100 bp, Homo sapiens
ccgggttttgatcgcgcgtttgtgtaggatgtgtctagtccgaatgaagcaggaaggccggagtgggaagtacatgtgtcgtatcatagttcattttatg

SEQ ID NO: 365615 - DNA, 100 bp, Homo sapiens
aaattaaattttaaccatgagggaaatcgtgcacatccaggctggtcagtgtggcaaccagatcggtgccaagagtcagcgtgggagaaattgtaacgag

SEQ ID NO: 365616 - DNA, 100 bp, Homo sapiens
tggacttccagctgggcctgacagagaaggctcactcaaggatcagttggctttagcaattgtactcccctgccctcaacaagatgttttgccaactggc

SEQ ID NO: 365617 - DNA, 75 bp, Homo sapiens
aacttgccactcagccaaggcgactgcttaacacactgagcaattaccagctctggctgggtcgccacaacttgt

SEQ ID NO: 365618 - DNA, 100 bp, Homo sapiens
gggggtgtgcaaacccgagagaactgggaccgtataatagacgctggccccaaaggaaactactctcgatttatgaatcacagctgccagcccaactgtg

SEQ ID NO: 365619 - DNA, 97 bp, Homo sapiens
gtggtgctgacagattttggtctgagtaaggagtttgtggctgatgaagtatggcccatctcctgtacgcttggagcgacctttggctacgtggctg

SEQ ID NO: 365620 - DNA, 83 bp, Homo sapiens
agaacaaaaaacaccacagtactatcgtctatcattggatgaagtggctccggagatattttggtcctaaaaacagattctca

SEQ ID NO: 365621 - DNA, 99 bp, Homo sapiens
gaacagaatctgccggatggtgctggccacttgcttgggatcctttatcctggtcatcttctatttccaaagtgggtgcgggaatttctgaatgatgaa

SEQ ID NO: 365622 - DNA, 100 bp, Homo sapiens
tccgcggccggcaggaccatgctgctgaaagagtaccggatctgcatgccgctcaccgtagacgagacaagttggatggcttgaggactggtactaaaag

SEQ ID NO: 365623 - DNA, 75 bp, Homo sapiens
gagccctcgttttcgagatcaggcctgaccgggataagctccaggacagtcattttgtttactcattcagccctg

SEQ ID NO: 365624 - DNA, 90 bp, Homo sapiens
ggcgtactttgggcttcatcatggaggactacctgcagggttgtcgagctgctctgcagggggcgacgatggccttctgaggggctggga

SEQ ID NO: 365625 - DNA, 100 bp, Homo sapiens
aacgcctggctcggagcagcagcctctgaggacatccggaacacggtgggcaacgtgcccttggagtggtacgatgacttcccccacgtgggctacgacc

SEQ ID NO: 365626 - DNA, 100 bp, Homo sapiens
ctgatgcgatgcgggggctgctgcaatgacgagggcctggagtgtgtgcccactgaggagtccaacatcaccatgcagtttcagatgcttcatcaagatg

SEQ ID NO: 365627 - DNA, 100 bp, Homo sapiens
cctggaccctgctcagagggacttgtacgtggatgtaatgttggagaactatagtaacttggtgtcactggatgaggaaactgaggcttggtgaagttac

SEQ ID NO: 365628 - DNA, 75 bp, Homo sapiens
ccgtgctgtgtagcgggacggcagctcttcagtaggttacctgcaacatccaggatcagaacaagtacaatttcc

SEQ ID NO: 365629 - DNA, 80 bp, Homo sapiens
agatggctacgagggtaacatgttcgcatgcagccagtaaagatcccagagaagttcgagaagctagagatcataaggaa

SEQ ID NO: 365630 - DNA, 96 bp, Homo sapiens
ctacagggagctggacctcaacagcttcaattagtggagacacaggggttatccacgtagtagagaaagaggaggacctacagtgggtattgactg

SEQ ID NO: 365631 - DNA, 78 bp, Homo sapiens
tctgaggaaggcaacattgaacatgccttcatcctctataacaagtatatcacgcaggggaaatggaaggtgatgcag

SEQ ID NO: 365632 - DNA, 82 bp, Homo sapiens
agtggagccaccagcagcgggtgggcgacctcttccagaagctgccttatgccagcctggaccatcttggaggcagtgtagg

SEQ ID NO: 365633 - DNA, 100 bp, Homo sapiens
tcagggacgtagccatccagaggccaaagaactgccaactctgaaagataatgatttcattaatgagggccaaaagatttatattgatgacaacaacaag

SEQ ID NO: 365634 - DNA, 50 bp, Homo sapiens
tcccaccgcacgttcagaagtcgggtgaagatggagctggaaaaacaagc

SEQ ID NO: 365635 - DNA, 76 bp, Homo sapiens
gatggttttttggacagttcagaagaaatatactacactgcaagatctaatctgaattgccattgccttcagaaag

SEQ ID NO: 365636 - DNA, 104 bp, Homo sapiens
gaaaatgcccaggaggaagcaggagcagcccaagcgccttccctcacgtactccaaagattcaggtttactcacgtcatccagcagagaatggaaagtcaaatt

SEQ ID NO: 365637 - DNA, 90 bp, Homo sapiens
ttttgcattgtttgtttgaaattgcattgacgactgatttctctatgaatcatcatcaagaactctgggagaacttttgaattcataacc

SEQ ID NO: 365638 - DNA, 123 bp, Homo sapiens
gtttgccgtggtttttatcaccacacgactgggtatatttcctctctggtaagaagagttcctgggtcaagtggtcaccttcataaaaccgaagacggggactgggagtggagtgacgacgag

SEQ ID NO: 365639 - DNA, 100 bp, Homo sapiens
ttctgctgcatttcctgcccagaggtgttggagcgggccggagagaagtagagtgggctgcgaggagaaggaaacaggcctttcggaggctcctcatccc

SEQ ID NO: 365640 - DNA, 74 bp, Homo sapiens
agcgccgagcgcggcccgggcgccatcgagccttggcggcggacgtgcagaactgtaagagtaaatgggtccag

SEQ ID NO: 365641 - DNA, 100 bp, Homo sapiens
agaaagctatctagggacgagatctagaatcaactgagagagatgcttaaaaatcaccagttactttaatgagtggattacaaagctgacgagtggctga

SEQ ID NO: 365642 - DNA, 50 bp, Homo sapiens
ggacagagttcacagaccattacatcgagacttcctcttcaaattcctgg

SEQ ID NO: 365643 - DNA, 75 bp, Homo sapiens
caggaaggtgagatcttcgacacagaaaaagagctggagaagaagcaggcgctccctccattccagccacagatc

SEQ ID NO: 365644 - DNA, 98 bp, Homo sapiens
atgaaatagatctctcggctctgagggagaagattggctggcgaaaggatgcactgcatttgctggtgttcacaacagatgatgtgccccacatcgca

SEQ ID NO: 365645 - DNA, 98 bp, Homo sapiens
ggcaaggcggcggacggctgcgtcgcccgaggcgaggaggagcgctggcggtttgaattttgggaagattttgaagaagaccatgggaaggggagaga

SEQ ID NO: 365646 - DNA, 75 bp, Homo sapiens
gtgacaggaaagacaaaattagttggagatgtggacttcgaaggtgttataactaaggctatttataagtccagt

SEQ ID NO: 365647 - DNA, 51 bp, Homo sapiens
agacccaggactctgcgactttacgtgggtgtacatggcattagaatagaa

SEQ ID NO: 365648 - DNA, 50 bp, Homo sapiens
gcggagggagccccagacacggttcgatacaagaggctgttttcctagcg

SEQ ID NO: 365649 - DNA, 83 bp, Homo sapiens
aaaaaggagatgcctggcagccccgctctctgcagatctggaaatagtatattcctatttacatggtatggaagccttatcaa

SEQ ID NO: 365650 - DNA, 97 bp, Homo sapiens
cggctgtgtggatgtcggcgaagccgcgggcgagatttctccacccaggtgaactcctccctcacctccccgacggggcgaggctccatggctgccc

SEQ ID NO: 365651 - DNA, 98 bp, Homo sapiens
gggacccggcccgggaccggcggcgcgcggcggccgaggccagattgtctaaagccccaggaaaaatggtggaaaattcaccgtcgccattgccagaa

SEQ ID NO: 365652 - DNA, 80 bp, Homo sapiens
cgtcggcggcgccctgcaccgcgcctcgcaaagtggctttctagaagatgaccatagaggaccttccagattttccatta

SEQ ID NO: 365653 - DNA, 100 bp, Homo sapiens
ggcagatcgtagccagccagctggagcgatgcaagctcggatccgagactggcagcatgagcagcatgaggcttttgatgaggccattgctgaacttgat

SEQ ID NO: 365654 - DNA, 75 bp, Homo sapiens
cacgctctgagcacagagaaggaggaagtaatggggctgtgcataggggagagtcctgaggctgtgcgtgcagtt

SEQ ID NO: 365655 - DNA, 101 bp, Homo sapiens
gcctggaatgcagccaaatgtctcctttgtgaggataaacagctcgttggcagtagcagcttatgaggatgatctggcaggggatcgacattgagaccaag

SEQ ID NO: 365656 - DNA, 75 bp, Homo sapiens
cgaaattgtctacaagtcctgaatcctgagacgccgtggacctgtcttctgctggcacggcaggcgtgctcattg

SEQ ID NO: 365657 - DNA, 100 bp, Homo sapiens
ggcggccggcgaaaggagctggtgcctgtgcaagttgttgaggttcgagaacttgtcttggacaattgcaaatcaaatgatggaaaaattgagggcttaa

SEQ ID NO: 365658 - DNA, 100 bp, Homo sapiens
tgaactttctaaccttaagaagaataggttttaattgataaagaccagagtccaaaatggaaaccagctgatctaaaagaagttactgaggaagatttga

SEQ ID NO: 365659 - DNA, 100 bp, Homo sapiens
gcgtctccagcctcggtaccatggccgggatcatcaagaaacaaatcttgaagcacctctccagtttcacaaaggctgaaaaatttgcctcatacttccc

SEQ ID NO: 365660 - DNA, 90 bp, Homo sapiens
agctatatactttggttacctatgtacctgttaccactttcaaaagaatgcacagcctcattgctacaggccatcttatgtcagtagatc

SEQ ID NO: 365661 - DNA, 74 bp, Homo sapiens
ctgtgatgcgtgctccccaggccacagtgggcgtcactgtgagagaaacctgctcctccaaagccagagcccaa

SEQ ID NO: 365662 - DNA, 80 bp, Homo sapiens
agcctgcacagccgcggcggcagcagcagtgagagatgtcgtgatctcaacagcttgtcacccaacagaaaacatcatcg

SEQ ID NO: 365663 - DNA, 75 bp, Homo sapiens
gttgtggccaccatgaggtgcctgccgtcgatacatcctatcttcaaggctggagtgcagtggcgtgatctcggc

SEQ ID NO: 365664 - DNA, 98 bp, Homo sapiens
aagaaggcgagcagggtgcgggagagccccttgcagaagacgccgtacgagctacatccgatactcccagatctgtgcaaaagcagtgagagatgcac

SEQ ID NO: 365665 - DNA, 100 bp, Homo sapiens
gccatgtccacctacctcctctctgtgtaccggctggagtacatgagcccgaccattttgttcaggaccctgcagtgctgagagagaaggcagaagccag

SEQ ID NO: 365666 - DNA, 50 bp, Homo sapiens
gtggagagagtggtgctggaaagacaaagaaacagccttggtataatagc

SEQ ID NO: 365667 - DNA, 87 bp, Homo sapiens
tctcgcctcgggtctcgggggccgctctgggatcccggccaccagcaattgtccgatctattaatgagatgaagcggttggaagaaa

SEQ ID NO: 365668 - DNA, 75 bp, Homo sapiens
ttttcttcagcctccttgtcctagggttagaataggctcagtggctcatgcctatagtcctagcactttgggacg

SEQ ID NO: 365669 - DNA, 74 bp, Homo sapiens
ctaagtttcctgacgcctcccagccgtgcttcctgttaagcctgtgaaacttttgcgtgtgaacttggacatgg

SEQ ID NO: 365670 - DNA, 75 bp, Homo sapiens
cagtctgcaagcgtcttcaaaggagccccacatgagataaactcaagccatggagggattactgcattacatcaa

SEQ ID NO: 365671 - DNA, 139 bp, Homo sapiens
cctcaggggccatggcgaagcacgagcagatcctggtcctcgatccgcccacagacctcaaattcaaagggagttctgggaaatcgttcattcatttacagatgaacagaaaagactcttcttgcagtttacaacgggc

SEQ ID NO: 365672 - DNA, 99 bp, Homo sapiens
cgaggattagacggaaatggaacagagtcgtccttgtctactccactaccaaatgttgaagttcttcaagaatcagtcctttggaggtgatgtcattga

SEQ ID NO: 365673 - DNA, 101 bp, Homo sapiens
cccgcccgtgaaggccacgccattaaagcgcttcagtcaaaccctgcaggaggatttgttggtattgaggaaaacggtgaaatcctttttggctgtttgcc

SEQ ID NO: 365674 - DNA, 90 bp, Homo sapiens
ctttcagaaagtggctgacatggccaccaacacacgtggtgttcttcttttgggagacgcatataatatgaggcatccacttactggtgg

SEQ ID NO: 365675 - DNA, 142 bp, Homo sapiens
gcagccgccttggtagcagcgggtgacatggaaggggcagtacaagcttacgtctctgctcttcagtacaatcctctctacattaatcatactcctccaccactgtccaagagtaaggagagagaaatggacaagaaagatt

SEQ ID NO: 365676 - DNA, 90 bp, Homo sapiens
aacactcaagtgaagcaaaagccttccatgattacataagtaatggaacatcatctgtgatcgtctccagaaagaggccatcagaaggaa

SEQ ID NO: 365677 - DNA, 101 bp, Homo sapiens
ctcccctgaggggccgctgcgggtcgccgtcttcggaggcaccggcgagggcagagccaacagcctcttcacgatggcattcctgcgtcctttacaagcgc

SEQ ID NO: 365678 - DNA, 100 bp, Homo sapiens
gccggaaccgctccttggaaggtcgctgggaggtggcattcaaagacttaattcagtgcacaaatgagatgaatgtgaacatcccacagttggcagacag

SEQ ID NO: 365679 - DNA, 100 bp, Homo sapiens
cgtgaaggcaatgatttataccatgaaatgattgaatctggtgttatcaacttaaaagatgccacctctaaggatgaaactgattccaagacagcctccc

SEQ ID NO: 365680 - DNA, 100 bp, Homo sapiens
ccaaggagactcaaacccagcagctattccgcatgcagcagaagatattcaaggagatgaccgatggatgtctcagtttcgctcttgttgcccaggctgg

SEQ ID NO: 365681 - DNA, 75 bp, Homo sapiens
cttacagtatgcaacacattttcctatacctctggtagctttggatatgttaaatcctcatgttactttgcctgt

SEQ ID NO: 365682 - DNA, 100 bp, Homo sapiens
caaaaacaaaattctgaactcaggacttggcaagggcaagattcttgccaagagaattaatgtgcgtattgagcacattaagcactctaagagccgagat

SEQ ID NO: 365683 - DNA, 90 bp, Homo sapiens
aaggttcagttggcaaaccagatatatgacttggcccttgggactgaaagaatccaagatctggatctcctctatagcgcccagaaccac

SEQ ID NO: 365684 - DNA, 82 bp, Homo sapiens
gaccagcagctgtcgccgccgctctcagaatgattacggacctgaagccaaagaacaagatgcgctagtggacagattgctg

SEQ ID NO: 365685 - DNA, 51 bp, Homo sapiens
gggcattattcatttctccagctctgctactacccacagatggcatgatcc

SEQ ID NO: 365686 - DNA, 82 bp, Homo sapiens
cgggaagatggcggcgccgctcatccccctctcccagcagggtctgatgctgagtcggctgggccacaagagcttggcccag

SEQ ID NO: 365687 - DNA, 50 bp, Homo sapiens
atttcttgtctgtgatgcttgaaaaagatcttcgcaaatactgtggacaa

SEQ ID NO: 365688 - DNA, 83 bp, Homo sapiens
ctggggactctgcctcgtgccgctgagcctggcgcagatcggtggtaaattcactccagcagcaacctcaggctgcatcccct

SEQ ID NO: 365689 - DNA, 86 bp, Homo sapiens
gtgacaagggaggaagtacagaggttaaaaatctgtaagagcctgattttagaattcaccagctcctcagaagtttggcgaaatat

SEQ ID NO: 365690 - DNA, 90 bp, Homo sapiens
gtatggagaatggctggtctcctactcccagatgcatccgtgtcagtcttgagtcaccacgtccgaatataattcttgggttagtaatct

SEQ ID NO: 365691 - DNA, 100 bp, Homo sapiens
cccgcccgctgcctgcctgcctggcatctctctctcccggtacagcacgtgggagccagaagagcacatcttggacccccgcctcgtcatggcctacgag

SEQ ID NO: 365692 - DNA, 98 bp, Homo sapiens
tgcgaataaaattcgagccaagttaaaggctgtcggaaaaggtaacagaagatggaactcgaaatcccaatgaaaaacctacccagcaaagaagcata

SEQ ID NO: 365693 - DNA, 90 bp, Homo sapiens
agtagcttcctttggaggtggctatggcaggtcttcggagagtgggctcgggatgagtttgaaggcctcttcaagcagccagcagaaaat

SEQ ID NO: 365694 - DNA, 100 bp, Homo sapiens
tcaaaacgcactcattcagtttgctactagggatgcccgggtagttaaagacatggcaactggaaaatccaaaggctatggttttgtatctttttataac

SEQ ID NO: 365695 - DNA, 100 bp, Homo sapiens
tagcgacatcaggaagaacagggtcgaggatcgagaattaaacaaccaccatgtcgagcaaaaaggcaaagaccaagaccaccaagaagcgccctcagcg

SEQ ID NO: 365696 - DNA, 83 bp, Homo sapiens
ccggattccagactcgtgggggaaaggctgcttcagctttagctgcagctgcctctgttcagccacttgcaacacaatgtttc

SEQ ID NO: 365697 - DNA, 74 bp, Homo sapiens
ccagctgtccaatcacctcgcaggagccctaggacttctgctggatgtgtctaggagattggaagactcatggc

SEQ ID NO: 365698 - DNA, 96 bp, Homo sapiens
gagatgttacccagtatcttggtgttgctgaagagtaccaaacgattccctggttatgattctgaaagcaaggaatttaatgcagaagtacatcgg

SEQ ID NO: 365699 - DNA, 75 bp, Homo sapiens
cttcggcagtccacccaccgccgccgcctcccagggccatgaagcccccaggaggagaatcgagcaatctttttg

SEQ ID NO: 365700 - DNA, 98 bp, Homo sapiens
cagagttaagactgttacttcttcagatgttgctgctgctgctactggcgccactcttcctccgccccccgggcgcgggcggggcgcagacccccaac

SEQ ID NO: 365701 - DNA, 100 bp, Homo sapiens
cttggtgaagagttactagctcaaggttgtttacattcagagctctatcaataagaggaatacatattacagtgaattcgacaaccgcacaagttggcag

SEQ ID NO: 365702 - DNA, 100 bp, Homo sapiens
gacaaccccgagtattctcccgatcccagtatctatgcctatgataactttggcgtgctgggcctggacctctggcaggctcatgtttgtgaacatttct

SEQ ID NO: 365703 - DNA, 75 bp, Homo sapiens
gctgctgccgccttcgctgccgctgctgctgctgctaatgctagggatgctgtgaagaagtgttttgccgtgtgt

SEQ ID NO: 365704 - DNA, 100 bp, Homo sapiens
ccacgtgtgctgggcctggctccctggctggccagcctctgcttggcatccccttgctggacagtggctgtgggcacttcaggcaaccggggcctccagg

SEQ ID NO: 365705 - DNA, 101 bp, Homo sapiens
ctgagctgctcaggctgaggcggtgtgctcagcacagagcccccggaactggcatctgcagggcgtgagattatgtctactttgagaattcctccagcaac

SEQ ID NO: 365706 - DNA, 100 bp, Homo sapiens
agtgattcttgtgggtggcatgactaggatgcccaagattggtccagaaaagggcgtggtgcacctggcgacagcggccgtcctaaacgcggtgtgggac

SEQ ID NO: 365707 - DNA, 97 bp, Homo sapiens
ccagaaaggagagcgcgacatcctctccaacggccagcaggattgccaacactcctgatagctgaatgtgtgctggtttacatgactccagagcagt

SEQ ID NO: 365708 - DNA, 109 bp, Homo sapiens
ctgaactgaatgagtttcttactcgggagctggctgaagatggctactctggagttgaggcggctgagccagaggccaactgcagaggaactggaacagaggaacattt

SEQ ID NO: 365709 - DNA, 87 bp, Homo sapiens
gaaaagcgagcctcttctgataactcaggatttacttgaaacaaaaggagaccctaatcttcaggctccttcctcagagaagcttcc

SEQ ID NO: 365710 - DNA, 90 bp, Homo sapiens
tccacaaagggacctgatgaagcgaagatcaagtctctgttggatgaacccaatcccaatagtccagcaaacagccaggctgctcagctg

SEQ ID NO: 365711 - DNA, 90 bp, Homo sapiens
caattcaaaggacctgcccccagagagagaccagtccaccatgcctgaagtcaaagacctctcagaagccttgccagaaacgtcaatgga

SEQ ID NO: 365712 - DNA, 100 bp, Homo sapiens
attgtgacatatcgttggacccagaattgagctgaatagcattggcaattactacaagccgtggttctttaagcatgtggagaactatctgaagacaaac

SEQ ID NO: 365713 - DNA, 100 bp, Homo sapiens
gagactaatgaacttcaagcagaatgctgctccattggttaaatacttccaggaaaaggggctcatcatgacacctgattacatcaaccccagagccgtg

SEQ ID NO: 365714 - DNA, 83 bp, Homo sapiens
tctcgactcggtcctgtttcgacagcgaacatgtcgcggcctgtcagggaaatcctcattgacgattcaatttgttgaaggcc

SEQ ID NO: 365715 - DNA, 100 bp, Homo sapiens
ctaaacatagttttggaactagcagatgctggcgacctatccagaatgatcaaggagaaaatgaacaggatgcggcagcgcattgctcagcgtctgaagg

SEQ ID NO: 365716 - DNA, 83 bp, Homo sapiens
cacctgaggtgaaccttcgaccttggacttctcagcctccagaatggctttcatctgagtggcacagtaactgagctggccac

SEQ ID NO: 365717 - DNA, 100 bp, Homo sapiens
atctttctcctggcctgccctccatgtcggggagctatcgtcgtcttcaacctgcctagggtagttaaaagacgagtgaatgctctcaaaaacctgcaag

SEQ ID NO: 365718 - DNA, 74 bp, Homo sapiens
gggcctactcggagcttatggtgttgacggacctgttgcgtaggaggctctgtctggtatcttgaaagaagaac

SEQ ID NO: 365719 - DNA, 99 bp, Homo sapiens
agtgctggagaacatcatggaaaacaacactcagtggctaatgaaggtagcaaaccatgtgatttcttctgactctatttcctcttctgccagtagttt

SEQ ID NO: 365720 - DNA, 90 bp, Homo sapiens
accttgtccctggcccggccctccttcagtttagttgaggataccacattagagccagaaggccccttcacagatgtagtcactacaaat

SEQ ID NO: 365721 - DNA, 100 bp, Homo sapiens
cacaaacggttttcagagctctatgagtctataagaaggagaaagctcgagtcatcactgaggaagagaagaatttcaaagccttcgctagtctccgtat

SEQ ID NO: 365722 - DNA, 83 bp, Homo sapiens
aaacaaaatcaaccgggaccccagcttttcagaactgcagggaaacagccatcatgagcctcccgcgacgatgcccctcaacg

SEQ ID NO: 365723 - DNA, 82 bp, Homo sapiens
tcgcatcctatggctcaaagaaagatgattattggatgattcaacagccacacaaagcagcaacattttttggatgcattgg

SEQ ID NO: 365724 - DNA, 75 bp, Homo sapiens
ccgccccccgccgccccctccttccgccaggctttatcctgtggataaacgcagagtgaacgagtttggggagtc

SEQ ID NO: 365725 - DNA, 100 bp, Homo sapiens
ctgagtgccctctactcacccatggacatccaggtgctgagccaggagcggcagcctttctgcgttgacccggacgacacctataatgagaccccctacg

SEQ ID NO: 365726 - DNA, 82 bp, Homo sapiens
gtggcgtgcgacaacgcggcgcagaagttgcgaggggcggtgttgaagaatgtgtgggcgaacatcctgtcacttacctaga

SEQ ID NO: 365727 - DNA, 98 bp, Homo sapiens
aatccctctgtgtgcatgaacttctgtgccgccttccttagctttgcccagagcacggttgtccaggatgaccccagtctcccaagcagcaaaaggaa

SEQ ID NO: 365728 - DNA, 75 bp, Homo sapiens
agagtgcaccgtatcctgtcacttctggatgtgagttggaggctggcagcgaagaagatcgaaaattaaacctca

SEQ ID NO: 365729 - DNA, 50 bp, Homo sapiens
tgtgtgttaaagtaacagatgatttagttccctactgccaataaagggaa

SEQ ID NO: 365730 - DNA, 82 bp, Homo sapiens
ttgtgtcagctatgccaggaagacggcagcctaacaaaggaattacatgaacgacagccttcgcaccgacgtcttcgtgcgg

SEQ ID NO: 365731 - DNA, 100 bp, Homo sapiens
gaaccagaagcagattgccaacattgaccgtattacaaaaataccaagctgctattttacacttgaagagggagcacaaagaagaaattgaaaacctgca

SEQ ID NO: 365732 - DNA, 90 bp, Homo sapiens
aatgtgttagtgtctggagccatgaaggccttgtgctgaccaagctgctcacctcgggtcctacagtgctagccagggtgtcaactgcat

SEQ ID NO: 365733 - DNA, 75 bp, Homo sapiens
ttacaagcagcaagtgcgcggttggggccactgcgaggccgttttaggaccctgatgctcccataagacagaaaa

SEQ ID NO: 365734 - DNA, 82 bp, Homo sapiens
ctgaacttcatcgctcctgacaagcatgagaatacgccagacaccttttgaaagctaatttttggtgaagaaatggattcgg

SEQ ID NO: 365735 - DNA, 100 bp, Homo sapiens
ggtgtcaaacgcacagccacatatttacctgaggttgctaaggaacaaggtctcatcacaactacgtcaaggaagctagaccgagaacagcaagatgaac

SEQ ID NO: 365736 - DNA, 73 bp, Homo sapiens
aactgaggaatttgaagtgaccaaaacagcaggttggatggcaagcatgtggtgtttggcaaagtgaaagaag

SEQ ID NO: 365737 - DNA, 75 bp, Homo sapiens
gacttctgtgagctcattgcgcgggactagggaggtgcgtatagcagcaaaattcatcattcatgcccctcctgg

SEQ ID NO: 365738 - DNA, 99 bp, Homo sapiens
cccattgcagcatctgtgacaactgtgtgggaaccaaatggcgagacaccatcatctttatacagagttgcagcagtacttctacaatttaatcttatt

SEQ ID NO: 365739 - DNA, 101 bp, Homo sapiens
cgagaagatacccgccctgcgccccgctctgctgtgggcgctgctggcgctctggctgtgctgcgcgacccccgcgcatgatctcctgggaggcccccgtg

SEQ ID NO: 365740 - DNA, 100 bp, Homo sapiens
ccaccaggatcacgtttgagtgtgctcagatatcgtgcacacatataatcttagataatgctgatgttctgagtcagtaccaactgaattctatccaaaa

SEQ ID NO: 365741 - DNA, 100 bp, Homo sapiens
tggaagcattgttcagcaggattaacctgatggcctatcctgatttaaacgagatttacagaagcttccagaatgtgaatggtagtgtctagaaagggta

SEQ ID NO: 365742 - DNA, 74 bp, Homo sapiens
gccatcaaatgtggaacctatggaaaagcttctcaataggtttggcatggacaagatctatgaaggccaagtgg

SEQ ID NO: 365743 - DNA, 75 bp, Homo sapiens
cgggcagccatggccctccacagcccgcagattgatgaacagagtgagctgaaagccatcgagaaagagaagaag

SEQ ID NO: 365744 - DNA, 100 bp, Homo sapiens
ctggcgaatcgacacatatcttgatattccattggtcatccgaccttatgggtccagccaagcatttgctagtgtggttatcaatactctggctgaccat

SEQ ID NO: 365745 - DNA, 100 bp, Homo sapiens
cagtggtcgcttcttctccttgaggtttttcattagtcaatacagtgaaggctggcatgatcatcagcttcccatccaataatatctactcatcagtgtg

SEQ ID NO: 365746 - DNA, 82 bp, Homo sapiens
gaagctttggatcagacttttgtgttgcagttcgggcggcggcggcggcgcccgggagccggagccttcgcggcgtccacgt

SEQ ID NO: 365747 - DNA, 100 bp, Homo sapiens
acaaatgaacttcaatgcagattctagccaacataaaggtaaaggccgaggggcaaagaaaaggaaagcatctggctctgaaaatgaaggcgattataac

SEQ ID NO: 365748 - DNA, 75 bp, Homo sapiens
cctgaagagggaagacacgcggaaacaggtgacaaccagggcatccccatcatgtccagcatcaagctgaaagag

SEQ ID NO: 365749 - DNA, 76 bp, Homo sapiens
cggcggcctcggctgaagaaagaaggtgggggagtctgtgttccacacaacccgctgggtgccccccttgatcggg

SEQ ID NO: 365750 - DNA, 83 bp, Homo sapiens
ccccagacaagatggacaccgcggaggaagaacatacatatgatagttgagaaagacacatattctgatcatgaagaaataaa

SEQ ID NO: 365751 - DNA, 90 bp, Homo sapiens
caagaagcaggaatgaaagtggcgctttctccgccccaggaaggggccctggaccttctgaagaagctgcacagctgccagatgtccatc

SEQ ID NO: 365752 - DNA, 50 bp, Homo sapiens
agtccacccaccgccgccgcctcccagacctcacgtggtgggcagtggcg

SEQ ID NO: 365753 - DNA, 75 bp, Homo sapiens
tttaaaaatttggaatgcaaattacttcctttggagtgcctcaagcttattgcctctcaaaaatttacagacaaa

SEQ ID NO: 365754 - DNA, 89 bp, Homo sapiens
ccagtcacctacaggtgtttgtctcagaaatcgtatacatagacggatctcaatggagatttccaaagagtcagaggacttcattgtgg

SEQ ID NO: 365755 - DNA, 75 bp, Homo sapiens
gctgccgggcagccgggcgctgcggccgggcgactgcgaagcacttttccagccattaactccaggctctcgaga

SEQ ID NO: 365756 - DNA, 100 bp, Homo sapiens
ggtaggaactcctctgatgtcctggtttatgttaccagcaatgacactacggttgacctgacagttcaagaaaaggagaaatatcttaatgtgtctcgct

SEQ ID NO: 365757 - DNA, 74 bp, Homo sapiens
ggccctctcagcaagaacgggaacaaaactctgacaatgcagatcttcgtgaagactctgactggtaagaccat

SEQ ID NO: 365758 - DNA, 76 bp, Homo sapiens
aagaggaactcattcagagtgctacagaaacaataggtggctttggctgaagcctaattccacagctccttgtttt

SEQ ID NO: 365759 - DNA, 75 bp, Homo sapiens
gtgtacccggttgtcctcaggcgctgtcaggattttttatcaagcagaaatgcatcgaacaacgagaatcaagat

SEQ ID NO: 365760 - DNA, 83 bp, Homo sapiens
ggcctgccccgccggagcagcatcatcaagttggatatgtcaagtgaccagatagctgccaatctgcaagcagttattaatga

SEQ ID NO: 365761 - DNA, 87 bp, Homo sapiens
tggcgtattccacatagcaaacagctacctctgacttttgaggatgttgctatttatttctccgagcaagaatggcaggatctagag

SEQ ID NO: 365762 - DNA, 83 bp, Homo sapiens
ctgccaaactccaggctcagatgtcacagatatctcccggggccaattcagcatctctacctggccatcctaacaaggtgatt

SEQ ID NO: 365763 - DNA, 100 bp, Homo sapiens
tgcccttcgaaaaatgatcaactattgaccatataggaacacatgattctgtgcagatttgcagaccagacagctgtccagctcccaccccaacgaaggc

SEQ ID NO: 365764 - DNA, 98 bp, Homo sapiens
tgataaaaaaaaaattcatctgggcggtatctggaacttggaagatgaagatcctgccaaaggtgatcagagtcgatcagttgaccttggggaagata

SEQ ID NO: 365765 - DNA, 100 bp, Homo sapiens
tggagaggggccgaaccgtgaagggctggaggccccggcggctagatctttgtggagttcacctctgtgtttgactgccagaaagccatgcagggcctga

SEQ ID NO: 365766 - DNA, 100 bp, Homo sapiens
ccaactcattcgtgggaacagcgcagtacgtttctccagagctgctcacggagaagtccgcctgtaagagatcaacaggcggtccttcgggtcggagtgg

SEQ ID NO: 365767 - DNA, 100 bp, Homo sapiens
atcatcgcagccaccatggcacggaccgtttattgtacaggtgccatgtttcagaacagagtaagacccctggtaaagaagaactgaagatattatacag

SEQ ID NO: 365768 - DNA, 98 bp, Homo sapiens
tcggatcatgtctggtggctccgcggattataacagctggagaatgctggaggagaccttaaggatggccaccaccactatgaaggagctgttgtcat

SEQ ID NO: 365769 - DNA, 75 bp, Homo sapiens
agatccatttacactttacagtctaccagccacagtctctgcacgtttccaagagcagcagaaaatgaacacatt

SEQ ID NO: 365770 - DNA, 100 bp, Homo sapiens
tacatccatgatagaaaaacttctttcacatggtacaaatattgaagaatgcagcaaggttacggcctccgctgccacagggccatcatcaccatctgcc

SEQ ID NO: 365771 - DNA, 78 bp, Homo sapiens
ggagctctgatcgccgggaacccttgccgctgctgtcctgcgaccccaagcaggttttgagcaaaattttggactgtg

SEQ ID NO: 365772 - DNA, 100 bp, Homo sapiens
tctgaaagcaaaacaagaagtggaaaagtctttcagaataaaatgaatcctcactatggatgggctcattgaggacattaagcatcggcggtattatgag

SEQ ID NO: 365773 - DNA, 50 bp, Homo sapiens
caacggggcagatgttaacattcagatgacccagcagatggctgggatga

SEQ ID NO: 365774 - DNA, 75 bp, Homo sapiens
aggcctctggtatttctttctcttctgcttgcgcattaaagttttaacagtgcactgacaggcagaactcaccag

SEQ ID NO: 365775 - DNA, 100 bp, Homo sapiens
ccgggaagggcgagactggagcagagccgctgggcgccggagccgaggcgagcgccgcgcgcaccactggaacatgcttgccaactcagccagcgtgagg

SEQ ID NO: 365776 - DNA, 113 bp, Homo sapiens
tggccggctccggaggcttggtgactccagtggcccaggcctatgaaaggaggttccctacatgtcctttgattccgatgttcgtgggcagtgacactgtgaatgaattcaag

SEQ ID NO: 365777 - DNA, 100 bp, Homo sapiens
gggtccctcaaggacaacccgtacatcaccgacggctaccgggcctacctgccgtccaggctgtgtatcaaaagtattacatcattgaagtgaatgccag

SEQ ID NO: 365778 - DNA, 75 bp, Homo sapiens
gagcccggcaccccccgccgacaaggaggactgaggctgatgtgaatccaaaggcctatccccttgccgatgccc

SEQ ID NO: 365779 - DNA, 83 bp, Homo sapiens
caggaatttatggtcgcctttttgaatgaggttgaaggagaagacttattccctgtggccatttcttttggaagaccaaaaga

SEQ ID NO: 365780 - DNA, 98 bp, Homo sapiens
gactggttctccccagaagagggaagaggatgtgtgccagtgccggcctgagtgttcccagttactccacaggatccgctgaacataggatgttgcca

SEQ ID NO: 365781 - DNA, 88 bp, Homo sapiens
cgcgctggataaagatgcgcctctgcgatttgcaggacagagcgggatgccaccagcttgtccaaagggaagttccaggagctcctgg

SEQ ID NO: 365782 - DNA, 86 bp, Homo sapiens
cctttgccgatccgccgcccgtccacacccgccgccagtgtggacgaatgtggaacctcgctctgtggctgtgttcccttggcact

SEQ ID NO: 365783 - DNA, 88 bp, Homo sapiens
cttctttcgatcagagatcggcggagaccctcgaagtgcgcaaacttgacactcaccctgaccgcttatgtccctgatgccaaaaatg

SEQ ID NO: 365784 - DNA, 103 bp, Homo sapiens
gaaccggaagctctttgaccttctggatgtccttgagttcaaccagaattatatccagatcgagagacagaagattctgaaagggttcaatgaaatgagagtc

SEQ ID NO: 365785 - DNA, 75 bp, Homo sapiens
aacaatcagtgatgaagatgaatcgttttgcaggtaatttggaactctgggaaacatctccaaacctcttccacg

SEQ ID NO: 365786 - DNA, 80 bp, Homo sapiens
gagtgtcgggacgccatccaggtggttcgggaggagctcaagccagatcaggggagcaagggagcccccggtcctgctgg

SEQ ID NO: 365787 - DNA, 75 bp, Homo sapiens
gtggtttttatcaccacacgactgggtatatttcctctctgattttggggtaagtgcgttcctagcaacaggggg

SEQ ID NO: 365788 - DNA, 83 bp, Homo sapiens
cccagtccctcggacccatcgccgcttctagaccctactgcggtctcggatattgccggacctgcctagagctggaacgttac

SEQ ID NO: 365789 - DNA, 100 bp, Homo sapiens
caatcccccactctttccgccctaatggaggtctccagtttcggttcttcccaggagactctgccggccttttccccaccagccccagcttggccatccc

SEQ ID NO: 365790 - DNA, 75 bp, Homo sapiens
gatatcaaatcagcatttgccccctttggtaaaatatcgatgcttgaagcccacatgcagagctacaagggcaat

SEQ ID NO: 365791 - DNA, 75 bp, Homo sapiens
attttccctcctcaaactgactttgcagccacggagagatttctcgaatgctggcagccaaaaccgttttggcta

SEQ ID NO: 365792 - DNA, 90 bp, Homo sapiens
atggcctggtggaaagcctgggacctgaaggagaagaaggagaaggtggaggagaaggcaagccggaaagagcgaaagaaagaagtggtg

SEQ ID NO: 365793 - DNA, 102 bp, Homo sapiens
ccgcgcgcagggcctgcagcgggagctggacggcgagcgcgagcggcgcgagaaagattctgtttcactgaggccatctatccgatttcaaggaagccaagg

SEQ ID NO: 365794 - DNA, 100 bp, Homo sapiens
cttggaaccaagattcataaactaaggcgtctgcgagatgagctgagggctgtggtgcggcaccggcgagccagcttgctctaggtcgtaaccagccttt

SEQ ID NO: 365795 - DNA, 100 bp, Homo sapiens
agtgcactcttctccttcacagtaaagtggctggtcacatgggagcccgacaccatttggaggagattcagagaagtatgaacagcacaaagcacttggc

SEQ ID NO: 365796 - DNA, 100 bp, Homo sapiens
ccatcatcccgacacccatgtaccgtcctcggccagccaacccagatgaaatcggcaactttataattgagtgtgctggatcgaaggggtattttgccac

SEQ ID NO: 365797 - DNA, 88 bp, Homo sapiens
aaaatgtcttgagaagatatatcaactcaccatcaattaccaaggcccttgcatctccccagatcgtttcccaagtttggcgatttgc

SEQ ID NO: 365798 - DNA, 75 bp, Homo sapiens
gcaagatctacgtggatgatgggcttatttctctccaggtgaagcagaaaggcgaggtgtccaggcccaacccct

SEQ ID NO: 365799 - DNA, 100 bp, Homo sapiens
aacctcggagcttatactcctcccagtgacgggtctggagtgcgtgggggaccggctgttggcggtgatgtcttggcattgcccattttcaagcaggaag

SEQ ID NO: 365800 - DNA, 100 bp, Homo sapiens
gactatcttcaagactgcctcgatgccatccagcaagacttcgtgatttttaacagagaaaagatgagagtccccaaatcagcgaagagtccacttacta

SEQ ID NO: 365801 - DNA, 83 bp, Homo sapiens
ttttgcattacagcctccctgctttgcccgcctgctgctggaagcttagcagttcaaatctgaacatcaatgatgtactaggg

SEQ ID NO: 365802 - DNA, 98 bp, Homo sapiens
cgggacggacatgcgcgggagggcgccgcggggcagccgccgctcctccggggaggctgaacagtacccagggggagattcgtgtcggtcctagtcat

SEQ ID NO: 365803 - DNA, 82 bp, Homo sapiens
accacctaacgctggccgacaacagcctggcgtccgccacggaagctcttcgtgggcggtcttgactggagcacgacccaag

SEQ ID NO: 365804 - DNA, 100 bp, Homo sapiens
ctcacactcttctgaaacgactcgggtagaggctgaggaaggccgtgttgtttgtctacctgggactagtgtgtccagggaggaactactgctatccctg

SEQ ID NO: 365805 - DNA, 75 bp, Homo sapiens
tttggctgcgcgggttcccccgaagttcagaatagcctaacatggcagaccagagacagcgctcactgtctacct

SEQ ID NO: 365806 - DNA, 97 bp, Homo sapiens
cgctggggaggtcctccatgcgcagtcatgagtcgcttcaagtttatcgaatcaagcactcttttggaagagggtaatctctctccaaaaactgagg

SEQ ID NO: 365807 - DNA, 78 bp, Homo sapiens
aggagcccagacaccagccccccaccatgacgcaaacatgcagatctttgtgaagaccctcactggcaaaaccatcac

SEQ ID NO: 365808 - DNA, 98 bp, Homo sapiens
gccaacccggactggatcaacaccggggagtctgcggtattggtaaaggttttcaaggtgtcatgaaaagatggggatttaaaggccagcctgctacg

SEQ ID NO: 365809 - DNA, 74 bp, Homo sapiens
gaggaccagactttgttaatgaagggaaatcctcattgacgattcaatttgttgaaggccaatttgtggactcc

SEQ ID NO: 365810 - DNA, 83 bp, Homo sapiens
gtcggagccgaataccaagctcggatccctgaatttgatccaggagcattccggaagagtttttcgactacagtttgatgaat

SEQ ID NO: 365811 - DNA, 76 bp, Homo sapiens
cgatgatcgcgggctcccttctcctgttgactatattgtggagtatgactatgatgctgtacatgatgatgaatta

SEQ ID NO: 365812 - DNA, 75 bp, Homo sapiens
cacttgcaggccgggcagtgcggcaaccaaatcggcgccaaggtggatccataaagaacccagccaacccgcaga

SEQ ID NO: 365813 - DNA, 100 bp, Homo sapiens
cagcgagattctcgccctgagcaacggcctgacgtcggtggagggaagcaggcgcaggctccgtgaggaggcaagcctgctggcctgccttcactgtcct

SEQ ID NO: 365814 - DNA, 100 bp, Homo sapiens
gttggagcccctgaagccacttaaggtcaccttccgcaaccctgtcattgagaggattcctcggctccgacggcagaagaaaattttctccaagcagcaa

SEQ ID NO: 365815 - DNA, 50 bp, Homo sapiens
cgagcaggaggcgccatcatggtcaaaatgcagatcttcgtgaaaaccct

SEQ ID NO: 365816 - DNA, 75 bp, Homo sapiens
tttcaagcagtattaagagtaaatgatatttggcatgatcttcagtatgatcttgtgctgtgctatccgcaggaa

SEQ ID NO: 365817 - DNA, 76 bp, Homo sapiens
ctcagatttccctgctcaccagggtttggcggcacctttgattgtggtatctgaacgggaactatttggttctgtt

SEQ ID NO: 365818 - DNA, 100 bp, Homo sapiens
ctcaccgcccagcccaaaccaggagattgcgagggagcgatgcggtgcagcgcgcgggctgacgcacgaggcacacaggaaggaggtggagcaggtgtat

SEQ ID NO: 365819 - DNA, 102 bp, Homo sapiens
aggagctcatgaacaccaagctggccctggacgtggagatcgccacttaccgcaagctgctggagggcgaggaatgcagaatgtctggagaatgccagagtg

SEQ ID NO: 365820 - DNA, 82 bp, Homo sapiens
ctggccccgagcggaactggagaaagctgagggctttccttaaagtttcccatgtctcaatggactcctgaatataacgagc

SEQ ID NO: 365821 - DNA, 82 bp, Homo sapiens
gccaacagcaccatcattgcatttacctcggatcatgatttaatccagagactgacttcactatagaacccacagttgtatc

SEQ ID NO: 365822 - DNA, 100 bp, Homo sapiens
tgccgcgatgtagccacccggcgctcgctgggctacgcctacatcaacttccagcagcccgcggacgttgctctaggtcgtaaccagcctttgaaaaagg

SEQ ID NO: 365823 - DNA, 82 bp, Homo sapiens
taactttctcccttgatccgggagtctttccactgggagaatggggtactaagagaaaagcacgaagctgtggatcatagtt

SEQ ID NO: 365824 - DNA, 75 bp, Homo sapiens
catgaacttcttttggccaagctcaagctgcagatctgggacacggccggccaggagcggttccgcaccatcacc

SEQ ID NO: 365825 - DNA, 83 bp, Homo sapiens
ttcctgtacagcctgcagaactgatcgacgagaacgtgctaggagcccagctggacgttgaggccgcccattcagagatcctc

SEQ ID NO: 365826 - DNA, 100 bp, Homo sapiens
gtgaccgagagcgcgaatatcgtcatcgttagaaggaagactgtatcgctaggtacaagttgctggttgaactggtccaaaagaaaaaacaagctaaaag

SEQ ID NO: 365827 - DNA, 50 bp, Homo sapiens
acagccaaaacagttcattcatattcagcaattcaattcgtcataatctg

SEQ ID NO: 365828 - DNA, 75 bp, Homo sapiens
cggccgcctggctccccatactagtcgccgatatggaatgtgcagatgtcccactattaactccaagcagcaaag

SEQ ID NO: 365829 - DNA, 90 bp, Homo sapiens
ctgcacccaagaggtggaagaggacgggctttaggctggaagcgccttagaggagccatttttccagatctgaagacagcatgtacacag

SEQ ID NO: 365830 - DNA, 90 bp, Homo sapiens
tggaatatgccaaggaaaaactggagagcttcatcaaaaatagtgatagctttgataagtctctaattaacagaagatggcaaagcccag

SEQ ID NO: 365831 - DNA, 90 bp, Homo sapiens
ctcctccaacccagaactggacaatctggtcccaggtgtgacaccttcagcaggtctcagggaagatggcagccctaggggacattcagg

SEQ ID NO: 365832 - DNA, 75 bp, Homo sapiens
tcgccaaggctggcgcagtcgtccatgtggattgagagaacctccttcgtgactgcatacaagctgccggggatc

SEQ ID NO: 365833 - DNA, 82 bp, Homo sapiens
ccgagcgcaaggacagcgcgaggtccgcgcagcccagcgcagccatcaggatgatgggcaggacagggagaggctgacctac

SEQ ID NO: 365834 - DNA, 74 bp, Homo sapiens
gctaatcttgtacttcaagaggaggaatcacgctcggaaacaatggactgtcagcatcaataaggccattaata

SEQ ID NO: 365835 - DNA, 100 bp, Homo sapiens
cagctacacatcttgaaagagaagctcttcctgtgagagacgctctcctggtctgtgttctgactctttggaaaagagcttaaggatcactgttggcaat

SEQ ID NO: 365836 - DNA, 82 bp, Homo sapiens
gggcctgggagcttgctgcagcttcaggtcagctggccgccggcacctgtgagattgtgaccttggaccgggacagcagcca

SEQ ID NO: 365837 - DNA, 100 bp, Homo sapiens
atttaacaaacctgccaacccaggagctgatgggaaaaagatggttgcattactcattgagacaggtgctctagttcacagctataggggaacaggtgga

SEQ ID NO: 365838 - DNA, 100 bp, Homo sapiens
atgcatcttggcgtcactcaacatcaaatctatgcagtttgatgacagcatcggagtcttgcaggctaattcccaagggactgctgagatgtcctctatt

SEQ ID NO: 365839 - DNA, 100 bp, Homo sapiens
tctgttttgcctgaatacatgatttaaacaagagatttccacagaagtgagagcttacaagaaaattgtagaattgagacacctcctggaaattgccgag

SEQ ID NO: 365840 - DNA, 100 bp, Homo sapiens
tggcaacatcaggtgactgtcccagaagtgaatcgcagtttttccagaaaggaggagtcaaggaagcccttagtgaacgagaactcttcaatgctgtttc

SEQ ID NO: 365841 - DNA, 82 bp, Homo sapiens
tataagctttgcaacagaattacagagtatgatgagttccaggatctctggcctcagttgtccttggttattgatgggggac

SEQ ID NO: 365842 - DNA, 88 bp, Homo sapiens
aatccactcatgatcaaaatcaaccaggatcccttaggcatccagggacgcaggattcacaagctggtgggcacggaggatgctcttc

SEQ ID NO: 365843 - DNA, 82 bp, Homo sapiens
gtcaaatttacattaactatgagaattaagcagttacatgggaataggactctcggctcaaggcgtcaacatgaacagactt

SEQ ID NO: 365844 - DNA, 95 bp, Homo sapiens
gaggacgcggccaggcgattcggtgaagcgattcctgcaggcgttggttcccctctttgacctgtcatccctttcaagccctgatatcttcgact

SEQ ID NO: 365845 - DNA, 110 bp, Homo sapiens
aagagacaggaggcagtagccaaacacccaggcctatatgaacccaatagcaatggcgagatcaaggggtccaatccagtcttcagggccaacaatacaggattatctga

SEQ ID NO: 365846 - DNA, 123 bp, Homo sapiens
gggtcgccggagctctgatcgccgggaacccttgccgctgctgtcctgcgaccccaagcaggcctctccttccgatgaaaagagaaaggaagaatggactacagccaccaaacgtccctagtc

SEQ ID NO: 365847 - DNA, 82 bp, Homo sapiens
ccgcagaggaggagcgcagcccggcctcggtggagaagaccaagctttcttcctccgaggagttccctcagactctgagcct

SEQ ID NO: 365848 - DNA, 100 bp, Homo sapiens
agtacgtgattcaagggtatcacaaaagaagagagtatattgctgcttttctcagtcactttggcacacttcacagagaatgcagttgtcttgacttcag

SEQ ID NO: 365849 - DNA, 82 bp, Homo sapiens
cggccgaagagcggcggcggcagcggcggatttttagactctgaggagcagttggagctaatccacattatggaaatggaaa

SEQ ID NO: 365850 - DNA, 50 bp, Homo sapiens
cccaaactggtcacccctcatgacagaatggactggtacctattgttgaa

SEQ ID NO: 365851 - DNA, 100 bp, Homo sapiens
gcctccagccacaaatactttttagtcgccataagcataatcaagaaatcattttgcaaatgctgatttagaagaaagttttaatgaacatgaactggag

SEQ ID NO: 365852 - DNA, 83 bp, Homo sapiens
ctgagtggttgtgtggtcgcgtctcggaaaccggtagcgcttgcagcatggaactgtggctgcaccatctgtcttcatcttcc

SEQ ID NO: 365853 - DNA, 75 bp, Homo sapiens
aaaaaggataaggagatcatagcagagtacgatactcaggtcaaaggcagctgtgcctcctgctgaatgcggaga

SEQ ID NO: 365854 - DNA, 100 bp, Homo sapiens
aatctacaggagtaaagcgaattgtccaagccctgaatgccaatgtgtggtccaatgtagtgatgaagaatgctagagatgatcgctatggaaaatcctg

SEQ ID NO: 365855 - DNA, 98 bp, Homo sapiens
cgtgatgctgtcccgatcccgctgtgtgtctcgggcgttcagccgctcgctctccgccttccagaaggaaggatctgagtctctccctgcggagacag

SEQ ID NO: 365856 - DNA, 100 bp, Homo sapiens
aaatttggagtgtgcgtgcgcgccgagcggtgctggagaatctggtaaaagcaccattgtgaagcagatgaggatcctgcatgttaatgggtttaatgga

SEQ ID NO: 365857 - DNA, 101 bp, Homo sapiens
tttcgtttttcggatgatgccttcaatactacctttatttccaccataggaattgaatgatctggcacgggaccctccagcacagtgttcagcaggtcctg

SEQ ID NO: 365858 - DNA, 75 bp, Homo sapiens
ttctagtgttgctttggatcttgtggaaagtcagagccttgtctggttttagacagattcatgttatagatatgg

SEQ ID NO: 365859 - DNA, 42 bp, Homo sapiens
ctgctgctgctgctgctgctgatgatgatgaagatgatgatg

SEQ ID NO: 365860 - DNA, 98 bp, Homo sapiens
gaggagggcccttcacagaaccgggcagtcctagagtctgcaccagcggaccgagcaggagtggaaagctcccctgcagcggacaccacagaactttc

SEQ ID NO: 365861 - DNA, 51 bp, Homo sapiens
cggggaggtaggcgctgggccgaggagatgaatcagaactccttacggttc

SEQ ID NO: 365862 - DNA, 82 bp, Homo sapiens
ctaggttctgcggcacgggatggcggaggcgcctcctgtctcaggttcgagaacttgtcttggacaattgcaaatcaaatga

SEQ ID NO: 365863 - DNA, 89 bp, Homo sapiens
gtcacgcacacgctcggcgctgcgatccgcgcatataacggtgaaaggtgtagcagtcactcggcctacacccacagcatcgaccttgt

SEQ ID NO: 365864 - DNA, 82 bp, Homo sapiens
tctcattgccacggctgaaccctccttctcaatcttggaacagcacccccttctttaaggtgcccttcgctttatgaggcgg

SEQ ID NO: 365865 - DNA, 97 bp, Homo sapiens
cacctggaccagaccccaggaaagaggctgcctaccacaaggactttagcttactttttaaagattgaagaaaaaaaagaagacagaaaaagaagaa

SEQ ID NO: 365866 - DNA, 75 bp, Homo sapiens
tggacaagatcatgggcaaaggacagatccagaacatgaaaggctcccggagcagcgctgactcctccaggaaac

SEQ ID NO: 365867 - DNA, 50 bp, Homo sapiens
gacaaatcaaattagtggttttggttttgctgttactgctcagtgtagtc

SEQ ID NO: 365868 - DNA, 100 bp, Homo sapiens
agccactttgcattgactggaaacaatggcatttacagaaagagtcaacagcagtggcaacagttggatgaaaaatctgacaaacagtatgctgaaaatt

SEQ ID NO: 365869 - DNA, 75 bp, Homo sapiens
cagcgatgctgaggatcgaggaacgttgtctggtgtggccgacgacgatgccctcgctgaggagcgcatgcggag

SEQ ID NO: 365870 - DNA, 100 bp, Homo sapiens
cgggacccggttccccggcccacagtgggggtgtgcaaacccgagagaactgggtccacgaactgtgcgataacttctgccaccgatacattagctgttt

SEQ ID NO: 365871 - DNA, 99 bp, Homo sapiens
gcggaccagaaatgaggagctcgcccagacatggaagaggtctgagcagtgggccaccatcgagcagctgtgcaataaaatcagtggttctggaagtaa

SEQ ID NO: 365872 - DNA, 96 bp, Homo sapiens
cacattcaggggaaccgcctcaccgttctgcccccagaactaggtagattatgataatcatgcactttataaacacggaaagacaggtcgaaaaca

SEQ ID NO: 365873 - DNA, 100 bp, Homo sapiens
tagttggattttcacgtgctcttgctaaagaggtagcaagaaagaaaattagagtgaatgtagttgcaccagggaactctaatgatccaggacaaagaag

SEQ ID NO: 365874 - DNA, 75 bp, Homo sapiens
ggcggagctgacggtggaggttcgcggctctaacggggctttctacaagatggcgtttaatgattgcttcagttt

SEQ ID NO: 365875 - DNA, 82 bp, Homo sapiens
ggccggtgagtgaggcttacagggccccgggaccaagctctgttcactcggagagcccgccggctgcctgagtgtgggttcg

SEQ ID NO: 365876 - DNA, 82 bp, Homo sapiens
ctaaaaaggtcctgtaagaagcggcatagcacccgtggtgcatgacaccattcgcttttcacccaagatgatttgatgtctt

SEQ ID NO: 365877 - DNA, 100 bp, Homo sapiens
cctgtttgcagcacgatgtctgaagaagaggcggctcagatccccagatccagtgtgtgggagcaggaccagcagatggaaactgtcaagcaaggcgttg

SEQ ID NO: 365878 - DNA, 73 bp, Homo sapiens
tgctgtgtgttggacctttatacgtattgtaaagcacttttcaggattagaagaggctgtgtatagaaacata

SEQ ID NO: 365879 - DNA, 87 bp, Homo sapiens
gcagctgcgatctctgtggtaggcccagggaaagcgctctagcgagtgctgatttagaagaagaaattcaccagaaacaagggcaga

SEQ ID NO: 365880 - DNA, 83 bp, Homo sapiens
acggggctgctggtgggccgcgtcgaagacatggaccagggctacggagcccagctcaacattggcaatgtgctccctgtggg

SEQ ID NO: 365881 - DNA, 101 bp, Homo sapiens
ggcgtgcactccgcacctcggggacattattgcgcgtggaacggctgcttttggaagatgatatcatcaagttgaatcgaaaggaagggaagaagcagaat

SEQ ID NO: 365882 - DNA, 75 bp, Homo sapiens
tggagaatggctggtctcctactcccagatgcatccgtgtcaggcgaatcaaagccatccagctggagtactcag

SEQ ID NO: 365883 - DNA, 83 bp, Homo sapiens
ctcattgtcagctccacccaacagttcttcaactgaggaagacaactgttagttttgtggcttactgctgctccacccagtgt

SEQ ID NO: 365884 - DNA, 75 bp, Homo sapiens
gcccctcctggtccggagggatgtggctgatcagcaggttcaggagaagtggcacctggtggaggacctgtcgcg

SEQ ID NO: 365885 - DNA, 75 bp, Homo sapiens
tgtcagagcagggaaaatcacctttgcagaaaagcccagtactataaagaacgtttcaccataatgaccctccag

SEQ ID NO: 365886 - DNA, 100 bp, Homo sapiens
tcctcgggctgaaggcacactgtgaaaacttcaacctgctgctcccgggacctgcaggacccaagggcaacctgggctctaagggcgaacgaggctcccc

SEQ ID NO: 365887 - DNA, 76 bp, Homo sapiens
ggtcatcccgcctgccatcacccccgggatgaaacaggcgcctatttaatcgacagagaccccacctactttgggc

SEQ ID NO: 365888 - DNA, 80 bp, Homo sapiens
acgacccattcaggagcctccaggagcccagacaccagccccccaccatgttacagaatgtctgaaggggacagtgtggg

SEQ ID NO: 365889 - DNA, 80 bp, Homo sapiens
cctcccgggggctctggtcccctcctcgtgctgaaaggtggtcctttctctgacagctacaggctctttcagttccattt

SEQ ID NO: 365890 - DNA, 100 bp, Homo sapiens
ccgggacgcgcggcggcaccgggaggccgggccgagcggttttcacctcaaatggccccacggtgatcatgcccacctggttctgctcgcgagcgtggtt

SEQ ID NO: 365891 - DNA, 82 bp, Homo sapiens
accaccaatcagatgtctgtctgccggcccaccttgggacaccttgactccaagcccagcagtaagtccaacatgattcggg

SEQ ID NO: 365892 - DNA, 82 bp, Homo sapiens
aacaccacaataatccacagccaagaacattgtgctgtctgtcagcatatgtatatcagctacaaaatatattcaactttga

SEQ ID NO: 365893 - DNA, 95 bp, Homo sapiens
gcgcgcagggcctgcagcgggagctggacggcgagcgcgagcggcgcgagaaaagcgggacaaggagaaccggcatcggaagcgcagccacagcc

SEQ ID NO: 365894 - DNA, 100 bp, Homo sapiens
ccggcgccgggacgcttcttcttccccaaagctccagagatagatccagtagagtgtttggtggcagataactctgtaacagtggcttggagaatgccag

SEQ ID NO: 365895 - DNA, 51 bp, Homo sapiens
aagaattccccttcaggaaaagcaggcagctcatgatggagcagtccaaga

SEQ ID NO: 365896 - DNA, 83 bp, Homo sapiens
gagagctattagagattgtgaagaagaatttcgatctccgccctggggtcattgtcaggtagatgatgagctggagatcaagg

SEQ ID NO: 365897 - DNA, 89 bp, Homo sapiens
gtatttcatctgtagcattcaagacttcaaactgagttgctggagaatgtaaccctaatccataaaccagtgtcgttgcaaccccgtgg

SEQ ID NO: 365898 - DNA, 75 bp, Homo sapiens
gccatgtggatgaaataaaggaatttcttcactttttaacggaccagttcaggttgctccttgagggcaggacag

SEQ ID NO: 365899 - DNA, 85 bp, Homo sapiens
aggtgtcggcgcgggagcagcacttccacagccaagtgcgggagtccacgcacacgacggttctgccctttatattaatcgagat

SEQ ID NO: 365900 - DNA, 100 bp, Homo sapiens
ctccggcatgcggtcccagtggccctcggcgcggcagcgctccagctcgctctccaccttcagatttggagcaagaggtggtggtggccttcccccgaag

SEQ ID NO: 365901 - DNA, 50 bp, Homo sapiens
cgcaagtttctgcttagcaatgtcctagctgttgatctatggacgaccag

SEQ ID NO: 365902 - DNA, 78 bp, Homo sapiens
tggcctgagcacatgaagtcctgcacccagtcagtgccggtggtggtgtgcacattgagccccggtatagacagttcc

SEQ ID NO: 365903 - DNA, 95 bp, Homo sapiens
ggatttgttaaggattccaagtaactcttatttggccggaaggtggtggtcgtacgctgtgaaggcatcaacatttctggcaatttctacagaaa

SEQ ID NO: 365904 - DNA, 97 bp, Homo sapiens
ggcggaatatgggcgggaaccactcccacaagccccccgtgtttgacgagaatgaggaaggaacaaaagcggatcctggagatgggcatcacgggtc

SEQ ID NO: 365905 - DNA, 50 bp, Homo sapiens
ttccggccagcttcacgaagtcagagagtgtttcctgaggttataggcgg

SEQ ID NO: 365906 - DNA, 98 bp, Homo sapiens
tgaacaggtgaccataactctgccaaatatagaagattctggactctacttataatatccctaactgctggattctcctgttgcagcttttcttggac

SEQ ID NO: 365907 - DNA, 100 bp, Homo sapiens
tgggggaaccactatgatcaatgccatggacaatattaccaggcagaaccaattctacgatacccaagtcatcaaacaagaaaacgagtcaggctacgag

SEQ ID NO: 365908 - DNA, 100 bp, Homo sapiens
gaggccaacgacctgtttgagagtgggaacatgacgcaggtgcaggtgtctcttctcgccctggcggggaagctgcttccagctgccatggtgatgccac

SEQ ID NO: 365909 - DNA, 100 bp, Homo sapiens
cagagcacagggcccaagagctgcgtcatcacctacctggcccaggtggaccccaaaggaagagccaatgttttccacccataatcctttctgccgaccc

SEQ ID NO: 365910 - DNA, 82 bp, Homo sapiens
gctgtgctcgcgctactctctctttctggcctggaggctatccagcatcacggatacacgactctagccaccagtgtgaccc

SEQ ID NO: 365911 - DNA, 100 bp, Homo sapiens
gccgagatccccttctccaatgtcatgacctgcgaggacgatgacaagaaggagcttcaagagcagggggagatcagaatcgtccagctgggcttcgact

SEQ ID NO: 365912 - DNA, 74 bp, Homo sapiens
gtggcagtccatcgaggggaccaaactctccatcacccaggtctatggggtggagctgttcctgaaggttgccg

SEQ ID NO: 365913 - DNA, 98 bp, Homo sapiens
tttgggacacggcaggccaggagcggttccagagcatgcatgcctcctactaccacaaggcccatgcctgcatcatgatgaagaagccaagacttggg

SEQ ID NO: 365914 - DNA, 99 bp, Homo sapiens
ggcctgacagagaaggctcactcaaggatcagttggctttagcaattgggacgtaccaaggccagttcaccaacggcatgcgccatggctacggagtac

SEQ ID NO: 365915 - DNA, 75 bp, Homo sapiens
atgaccatggcaagaactggcgtcacgtttacaagaaaaagcttgtggtgaaggggggcaaaaaaaagaagcaag

SEQ ID NO: 365916 - DNA, 80 bp, Homo sapiens
ctccctctatcctcgactgtagtataatccgcgtggaatattcactaatgtttgttttgacaccgattgaagttgccatt

SEQ ID NO: 365917 - DNA, 101 bp, Homo sapiens
ggccccgcctcggttcaagccatcaagcacggccatgtctgcttccaatttgatgcaccttttgtttttgcagagtctactctggatgatgccactgatgc

SEQ ID NO: 365918 - DNA, 98 bp, Homo sapiens
agaggaggatagcagcagaagagaagaagaagcaggatgaactgaaacggattgccagagaattggcagaagattccaactccacagagtgaccagag

SEQ ID NO: 365919 - DNA, 98 bp, Homo sapiens
tcagcctcaaaaccgtcctgctgcttgctgaccaaatggttgaaggggcccggccaggactcggggaagggtggcctgagagcagcgatgacctctgg

SEQ ID NO: 365920 - DNA, 100 bp, Homo sapiens
agggaacctgatttgagatcaattcttggagaacacaaagaagtgtgatgtttgcctatctggggcgcctggctcacgaggttggctggaagtaccaggc

SEQ ID NO: 365921 - DNA, 50 bp, Homo sapiens
gccatcgttgctgccttcttcgtcaagacatttgaagacagtgatttgtt

SEQ ID NO: 365922 - DNA, 82 bp, Homo sapiens
gcgaactgggtggcgaacggggcgagcctggaggattgtcactccaacctcttttcgctgacgccgcaccaggctgcaggcc

SEQ ID NO: 365923 - DNA, 82 bp, Homo sapiens
agaccctggagcctcagttggaagcagccgatccagcctgcggagcctgtggggcagagacatcatttcagctttccatcca

SEQ ID NO: 365924 - DNA, 75 bp, Homo sapiens
gccacagaagttgctgctgacgctctgggtgaagaatggaagacaggggcaagtgtccgagtggtgaatcagcta

SEQ ID NO: 365925 - DNA, 90 bp, Homo sapiens
ggtctacgagctgtttctcatctttatactcttccagtgtgcaccggcacagacatgaagctgcggctccctgccagtcccgagacccac

SEQ ID NO: 365926 - DNA, 82 bp, Homo sapiens
aactgcgcagcctcttcgagcgccgcggacgcgtcatcgagtgtgacgtggtgaaaggagaactatgccatttttgggtcag

SEQ ID NO: 365927 - DNA, 91 bp, Homo sapiens
tgttgtgtgtggaaatggcgaactcggcaaatacaaacaccgtgacaatgcagatcttcgtgaagactctgactggtaagaccatcaccct

SEQ ID NO: 365928 - DNA, 55 bp, Homo sapiens
tgagcagatactgaatgtaaaccctgcagtgccgccaagctcctggacaagaacc

SEQ ID NO: 365929 - DNA, 73 bp, Homo sapiens
gtgtggcacgacacaaaaatcagggtaacaagaaggggcccttaggccgttgggactttgatacccaggaaga

SEQ ID NO: 365930 - DNA, 98 bp, Homo sapiens
aattcccggttcacagactgctgcttgtgtgttgccggccaggaattccaggctcacaaggctatcttagcagaatgtagaagcgaggcctggaggtg

SEQ ID NO: 365931 - DNA, 115 bp, Homo sapiens
cgtggtggtgtcctgccctcacaagtgcagcgtccagactctcctgaggagcgagatgccgacaaaaggatcaaggtggcgaagcccgtggtggagatggatggtgatgagatga

SEQ ID NO: 365932 - DNA, 90 bp, Homo sapiens
gattcgcagtggtcgcttcttctccttgttcttggccaggctgactgagagatttgtgctgggagtggatatgttcgtggagacactgtg

SEQ ID NO: 365933 - DNA, 90 bp, Homo sapiens
tgttcttcttcgagtatttgtagaaggcaacggcagcctttaacagttgagcacatgtatgaagacatcagtcaggatcatgtgaagaaa

SEQ ID NO: 365934 - DNA, 75 bp, Homo sapiens
gctccgcgggccaagaaactggagaaactcggagtgtactccgcctgcaagcacagtgaacactagtctgaatgt

SEQ ID NO: 365935 - DNA, 90 bp, Homo sapiens
gtcgcaccaaccggccgcctctgtccctttcccggatggcctatggtcctgcccagcacgccatttcaactgagaaaatcaaagccaagt

SEQ ID NO: 365936 - DNA, 100 bp, Homo sapiens
aagaattaaagaaaatacgagtaaaatatggtttacagaacaccagagactgggtaattaataaaaagaagaaattgatctggcctacagttctggagcc

SEQ ID NO: 365937 - DNA, 100 bp, Homo sapiens
gaacagccaggaggcgtttattaggggggcggggggaaagagccccagcaccgcccctcctggaagaaggaagaggtgaccattgtgaggtagatatttt

SEQ ID NO: 365938 - DNA, 83 bp, Homo sapiens
aggacctgtgcgtgcaggctgccaaggccagcgttggaatcgaagcctcttaaaatggcagatgacttggacttcgagacagg

SEQ ID NO: 365939 - DNA, 100 bp, Homo sapiens
cccttcctgaccccgtacctgctggggccggacaagaacctgaccgagagggaggaatccactgcgaagaagacgtcaatgaatgttcttcaaacccttg

SEQ ID NO: 365940 - DNA, 100 bp, Homo sapiens
ttgctcttacgtatttgtgtgacttgactcttcaaacacaaagtcactcaagactgcttgcaactgattgcagacagtgaaacaccaactatacaaaaag

SEQ ID NO: 365941 - DNA, 98 bp, Homo sapiens
ctggggcctggaccagcctcttctgaaacactggggactcgtgagctgaagtgcagatgaccacattcaagggggaaccttctgccccagctttgcat

SEQ ID NO: 365942 - DNA, 98 bp, Homo sapiens
gcttttggatggtgtgtggccctgccaacctttacattttggacttccagcctccgaaatgcagtctctggtcccagcccaccccatggcccctccca

SEQ ID NO: 365943 - DNA, 78 bp, Homo sapiens
gacacatccaggagtttattggagcgcagactgatggcgcaaaggatcctgctattactatgagtcaagccactacag

SEQ ID NO: 365944 - DNA, 100 bp, Homo sapiens
atctcctcatgagctttggtatccttaaacctgacttaaggattgtctttgtacataacaagggggctagagagctgaaggagagccagtttccccaaaa

SEQ ID NO: 365945 - DNA, 76 bp, Homo sapiens
cccgacctctcctcactctcgctcgccgtttccaggagcacagtttgtgtttaaggagaaactaacaatgaaaacg

SEQ ID NO: 365946 - DNA, 100 bp, Homo sapiens
tctgcgcgaccagaccggcccccccgaggtgctggagaatctggtaaaagcaccattgtgaagcagatgaggatcctgcatgttaatgggtttaatggag

SEQ ID NO: 365947 - DNA, 75 bp, Homo sapiens
gtccgaagcccgaggcagaggaaccggctcccaggtacgagtgcttccatatccatttacccaccattggcaatt

SEQ ID NO: 365948 - DNA, 82 bp, Homo sapiens
cataccacccagacagactgctataacaatctagctgatgatgattattccccaccttctaagagacaaagaccaacgagcc

SEQ ID NO: 365949 - DNA, 100 bp, Homo sapiens
gttttgtgtccatgtgaacaactatgatgtgatgccagccacttactgtgaaattgatttagataaagaaaagagagatgcatttgtatatgccataaaa

SEQ ID NO: 365950 - DNA, 75 bp, Homo sapiens
tcaagagaagctgcaagagcaacatctttcctcaccccaagaccctctttcccagctgcccgctcctcagcaccc

SEQ ID NO: 365951 - DNA, 100 bp, Homo sapiens
cagaccccgcgcggggcgccggctccatggcgaccgggctcggggagccggtctatggactttccgaagacgagttacagaatgtctgaaggggacagtg

SEQ ID NO: 365952 - DNA, 100 bp, Homo sapiens
ttcaaactggtcaaatgcactgtccagacggagatccggtggtggtgtgatgatctactttgacagaattgaagtggtgaacttcctggtcccgaacgca

SEQ ID NO: 365953 - DNA, 82 bp, Homo sapiens
tctcccagcgaccccaagcaataccgaaagggctattgcaagacacgaagtccgagaaattgagcagcgacatacaatggat

SEQ ID NO: 365954 - DNA, 82 bp, Homo sapiens
cctgaaatgccctcccctaggagcttcctccaatttatctactctttcacattcaagaagctccagtttcttttcagcgaaa

SEQ ID NO: 365955 - DNA, 98 bp, Homo sapiens
gtagccatggaaggagtaagagctgggtacttcttctcaattcccccttctatcataagaagtggacagttcaatcaatgtactgaatataactgctg

SEQ ID NO: 365956 - DNA, 90 bp, Homo sapiens
cagaacctttgacttggtgttgaaagtgaaatgtcatgcctctgaaaatgaaggacttgcaattgtgaccaaatatattacaaagggctg

SEQ ID NO: 365957 - DNA, 100 bp, Homo sapiens
ctggattaatcgaattacagctgctagccaggaacatggactgaagtatccagcgctcattgggaatttagttaaggtttgctggttggctcccgagcag

SEQ ID NO: 365958 - DNA, 100 bp, Homo sapiens
gcatacaaaatcagcttctgttgtatcatcagattccatttcaacttctgccgacaacttttctcctgatttgaggggtccccttctgcttgttatagcc

SEQ ID NO: 365959 - DNA, 51 bp, Homo sapiens
ggacagaagttagtggttcctggaaacgctatgtattagaggaagctgagc

SEQ ID NO: 365960 - DNA, 100 bp, Homo sapiens
ctcggggcaagagcccgcaggctaccttccccgggcaggggcgctcaacccaaccggctccagggcactggttttgagcaaaattttggactgtgaagca

SEQ ID NO: 365961 - DNA, 88 bp, Homo sapiens
ggcctttaccatcgcccatgagctgggccacaagaattgcattttgtgaaaaaagaacaagaattttctgcaaggatcatatctaagt

SEQ ID NO: 365962 - DNA, 82 bp, Homo sapiens
aggcgtacgaggatgtgctggagcggtacaaaggcacaagatgctggtcttggggtgtcaattttactgtgtgtcagagctc

SEQ ID NO: 365963 - DNA, 75 bp, Homo sapiens
caagccgcagctcggagactcgtccccgccttttaggtgtccctattgcatatgataacatcaaagttgtgggag

SEQ ID NO: 365964 - DNA, 100 bp, Homo sapiens
caggtgcccaccgcgcactcggagatgcagccgctgattctgatagttggtggtggtgttgctgggcttgcttctgcaggcgcagcaaagtcgatgggtg

SEQ ID NO: 365965 - DNA, 101 bp, Homo sapiens
ctccaggtttccctattacaactccctcaaggactgcctttcctggatcatccagcagctcgtcaacggcatcatcacgcccgccaccatccccagcctgg

SEQ ID NO: 365966 - DNA, 90 bp, Homo sapiens
tctccccgctcaccctccttgctaactttgccacccttgtcagcacctacgccaaagccaagacaatgcaaactccagtgaacattcccg

SEQ ID NO: 365967 - DNA, 98 bp, Homo sapiens
acttgattgatatatatgctgacgaggagttcaaccagaattttccagttcatatgaagaggtgatctctcaaataaatacgtcattacctgctcccc

SEQ ID NO: 365968 - DNA, 83 bp, Homo sapiens
tggacaggcagagtgctgatgtgaaaaataccacgacaaaaccaccctaatctgactgcagccatgagcagcaatgagtgctt

SEQ ID NO: 365969 - DNA, 100 bp, Homo sapiens
ggattccaagtaactcttatttgctttgtttgctagcaaaatgctttaagcctgcccttccatatcttgacgtggatatgatggatatctgtaaagagaa

SEQ ID NO: 365970 - DNA, 100 bp, Homo sapiens
ggagagagaggaatgtgctcttgtcctggcattgcatccacaggaggggcaggaaattctttgaagtcaccagtgccaactcaaggagcccagccagccg

SEQ ID NO: 365971 - DNA, 101 bp, Homo sapiens
tatggctaataacacaacaagtttagggagtccatggccagaaaacttttggggatccatcagttacacaagtgacaagaaatgttccaccaggacttgat

SEQ ID NO: 365972 - DNA, 98 bp, Homo sapiens
gcttacgtggacctggaaaaggactttgctgctgagatatttgaatggtggtacttccataagcatggcacatcttttattgagcaagtatctgtaag

SEQ ID NO: 365973 - DNA, 100 bp, Homo sapiens
ccctgctgctcctgctgcagccgccagcatttctgcagcctgtcctgggctgagatcaccagccaaactgagggcctgagccgcttgctgcggcagcacg

SEQ ID NO: 365974 - DNA, 101 bp, Homo sapiens
caagaaaaaaaccacaaatgtttttctgttttgcctgaatacatgatttaaacaagagatttccacagaagaccttggttgcatgtacaagttatttagtc

SEQ ID NO: 365975 - DNA, 100 bp, Homo sapiens
cggcggcgtaggctgtggcgggaaacgctgtttgaagcggagcccccctccatgcgcctgaaggcccgacccagcagccctggcttttccgtgcttacct

SEQ ID NO: 365976 - DNA, 100 bp, Homo sapiens
gaggagaaggacccgctctggcagcctgaacccccgccaacaaacaaatggcaacttgataattggctgaataaagtgaacccacataaagtgtcacccg

SEQ ID NO: 365977 - DNA, 75 bp, Homo sapiens
ccgtgctcccaggtgcccccggcctgcgctcccatccacacgctcgggagtggggaaggccagggccagattctg

SEQ ID NO: 365978 - DNA, 74 bp, Homo sapiens
ttgttgtttgttatctcaattaccaccatcattgtcattttccttaacagctccctgatggctcggagatcccg

SEQ ID NO: 365979 - DNA, 100 bp, Homo sapiens
ctggtcttgctcggccgatgaagtgcagaggtttttttctgaattcctccacgtactgggaaggcaaagcagatatggagactctccagagaatttatgg

SEQ ID NO: 365980 - DNA, 100 bp, Homo sapiens
gtgggtgaagataggatcaagatggccatgtggcaggaaatgggcaagttcatgaaacctgggaaggtggtgcttgtcctggctggacgctactccggac

SEQ ID NO: 365981 - DNA, 90 bp, Homo sapiens
gcactgaggaaggaaaatggagcccggagcttcctgtctgtgctcaacggcagaggtgtgctctttggattagaaagctgtgcgaacctt

SEQ ID NO: 365982 - DNA, 100 bp, Homo sapiens
cagcagcagcagtagtaccagcagtgacaggaaagaccacagcaagattctttcattcgtctcctcctagcctgggggaccaggctcgaactgaccctgg

SEQ ID NO: 365983 - DNA, 100 bp, Homo sapiens
ggtgcctcccgccagtatctgatgaaggtaagaggccagaagcggactcctagaagaggggagcagcaaggatggaatgacagccgtgggccggagggga

SEQ ID NO: 365984 - DNA, 75 bp, Homo sapiens
acgctcctcggaccaagcctcgggagctaaggttcacaaaaaggattctggcttttggcgagattttggctttgg

SEQ ID NO: 365985 - DNA, 100 bp, Homo sapiens
gcacctttggagtctgccgtgatggcatcaaccgctacgactgtgtctgccaacctggcttcacaggtgctggaaatggaaacctgcaaggacctagaca

SEQ ID NO: 365986 - DNA, 75 bp, Homo sapiens
tcagaacaatcttgaatcatgaagctactaaccagagccggctctttctcggagaagtacagcatcggggagccc

SEQ ID NO: 365987 - DNA, 82 bp, Homo sapiens
atcccgaactcgctggaggacaagggtcctgcagttctgagcttgggttccctttgcctggacaccaaccaagcccccaact

SEQ ID NO: 365988 - DNA, 101 bp, Homo sapiens
agctccggcagaacccaggcgagggacagctccggacagaatgtttggaatggttttggaaaaaattattattcctgaaattcagaaggtatctggaaatg

SEQ ID NO: 365989 - DNA, 73 bp, Homo sapiens
aagtcttggcctcggaggatgcagcctttggactcaagggtagaatttcagaacaaattctacgttggtgcag

SEQ ID NO: 365990 - DNA, 96 bp, Homo sapiens
ggcgtctcatggcgttggaataccggctctcagcggctacaacctctcctacattgagcacatctttgagatctcccgccgtcctgacctactcac

SEQ ID NO: 365991 - DNA, 51 bp, Homo sapiens
cgcgacgggtctgcggcttaggacccatcctcatgccaacaaactaccctt

SEQ ID NO: 365992 - DNA, 101 bp, Homo sapiens
cacatttccaagtacattctcaggtggagacctgagtctgatgacttttcacagtaccaactcaaaggcttgcttaaaaagaactatctgaaccagcatat

SEQ ID NO: 365993 - DNA, 96 bp, Homo sapiens
ggcgttcgcgtggctcccagcccgggaccccacccccgctggacagtgggggaaactgaggcctgagcggagcatggactcctcggacttgtctga

SEQ ID NO: 365994 - DNA, 102 bp, Homo sapiens
cactccagtcggtgttgagcacggcgagcagtctcaggcctttagtgatgatgattatcaagaatgatctgtgggttaaccctctacgctactacctgagag

SEQ ID NO: 365995 - DNA, 82 bp, Homo sapiens
ccgggcgctgcggccgggcgactgcgaagacttaattcagtgcacaaatgagatgaatgtgaacatcccacagttggcagac

SEQ ID NO: 365996 - DNA, 100 bp, Homo sapiens
ggaaggatgataaagactatgctttaaaacaaatagaaggaactgggatctctatgtcggcatgtagagaaatagcagtgtctttcaggttgcagaaaag

SEQ ID NO: 365997 - DNA, 100 bp, Homo sapiens
tttgacactgccatatcactctgtcagacttttaagcttcccttaacgccagtctttgaagggcttgccttcaaggcaattgaaggaacagactaaaaat

SEQ ID NO: 365998 - DNA, 99 bp, Homo sapiens
gctgaggaggggccccagcagcccccgaaggccctatcaggacatggagtatgaaagacgctgggagaaccaccacagacgacgagctagaagagatgc

SEQ ID NO: 365999 - DNA, 100 bp, Homo sapiens
ccagcagcccccggcccgcgctgcccgcactcctggtcctgctcggggctctgttcccaggtattggctgggatccaccaaaacttcaatcaattttcct

SEQ ID NO: 366000 - DNA, 75 bp, Homo sapiens
aggagacagccggttgctgagccgggagcgctgactggcccggctgggcaggatataattggtgattacaacttt

SEQ ID NO: 366001 - DNA, 126 bp, Homo sapiens
agaataagactgattttatgggaaaattaagcagatgctccagtttgagaaacctggatctgcgatctgtttgtgtatgacctgtcagcctctacattctctcctgacggaagagtttttcaagtt

SEQ ID NO: 366002 - DNA, 101 bp, Homo sapiens
gcaagagcgggctgctcaccagccacacgacagattcactgcagctattgacctgaaaagtggttctggaaaagtgtaccaaggccctgcaaaaggtgctg

SEQ ID NO: 366003 - DNA, 96 bp, Homo sapiens
tgcatcctacagatgtgctgtaaacatcaaaagaagacggtgggatcaggagatggatcctcagagttggttataaaatatttaagggcgagaaaa

SEQ ID NO: 366004 - DNA, 75 bp, Homo sapiens
atcacacgcataatggatgaaaggaaccgacagctgcagaaccttggcctgaaaatgctacattatatcagcaat

SEQ ID NO: 366005 - DNA, 138 bp, Homo sapiens
aaaagatgatgagaaataaggacaaaagccaagaggaggacagttcgctacacagcaatgcatcgaggtaaaataccatgaagattttgaaaaaacaaaggggagaggctttactcccgtcgtggacgatcctgtgac

SEQ ID NO: 366006 - DNA, 83 bp, Homo sapiens
gacgccagtcaccagcaggagcagccaaccagcagcagccatcatggagaaagttcaggagccctggaaaggagaaggaataa

SEQ ID NO: 366007 - DNA, 100 bp, Homo sapiens
cggagcttctcagaagacagagggttttcttttgaggtctagatcatccccattgtctgtcatacaaattagagcttggatcagaccaagaaattccctc

SEQ ID NO: 366008 - DNA, 50 bp, Homo sapiens
cgcagttcggagttattatgaggatcagttcgacagcttagacaagcata

SEQ ID NO: 366009 - DNA, 82 bp, Homo sapiens
ctggcacctggcgcccagcgcgcccgtggccgctgccgcctccgccccaggtgattgatgagatttatcgtgtgttgagata

SEQ ID NO: 366010 - DNA, 95 bp, Homo sapiens
gatatccctgtatctgctgctgctgctcataaaagtgaagtcactgcttttgctgtcttggatcaagaccagaaagaaattattgataccaatgg

SEQ ID NO: 366011 - DNA, 74 bp, Homo sapiens
aagtgatttgtcggatgaagataagacactttctcagttacagagaggtggatgcccggagcataccagtgtta

SEQ ID NO: 366012 - DNA, 82 bp, Homo sapiens
cggtgagcgcgtttcccgcctgagcgcaactagcggcgggtcgtgggcacctccaggattttctgccgtctcttggcaaaaa

SEQ ID NO: 366013 - DNA, 98 bp, Homo sapiens
agacgcagccgcccgtggcgcttaagaaagaagactttgagaatcactacaagaaaaactccttgtggtgaaggttctaagacgtgggatcgtttcca

SEQ ID NO: 366014 - DNA, 50 bp, Homo sapiens
cagaaatctttactgattccaattgttccttgcctgtatctccccttggt

SEQ ID NO: 366015 - DNA, 75 bp, Homo sapiens
agaagaagagcatgatcggcatgtccaccaaggcagggggggccctcagcctcttggccttgaacgggctgttca

SEQ ID NO: 366016 - DNA, 51 bp, Homo sapiens
actgcaggtgctggatttatccaggctctgggcatcaccagcggccccagg

SEQ ID NO: 366017 - DNA, 83 bp, Homo sapiens
gttggagaactatagcaatctggttttcttggtgagaaggcaaccaaagtgcaggacatcaaaaacaacctgaaagaggcgat

SEQ ID NO: 366018 - DNA, 105 bp, Homo sapiens
agctggacaagaagattatgacagattacgccccctatcctatccgcaaacagtcatgttggcagcttcctattggtctcttctggccccagcagttgagatggc

SEQ ID NO: 366019 - DNA, 75 bp, Homo sapiens
tcaagatgaatatgaccctatggaagcagaagaagctgaggatgaagaagatggaattacccaactctgtctttt

SEQ ID NO: 366020 - DNA, 100 bp, Homo sapiens
tggaacagagggggccagtctaaaagataagagtactatcccaactgtgaggtcgtgttcatgggaatggccaacatccatgccatccggaacagctttc

SEQ ID NO: 366021 - DNA, 98 bp, Homo sapiens
cctggatacggtcactttctacaagaacatgaacgattggatgcccatcgccaaggagtatgatccactcaaagcgggcagcattgatggcaccgatg

SEQ ID NO: 366022 - DNA, 100 bp, Homo sapiens
atcatccctgtatcgaattcatccctgtataatcctgcccttacacctgtgctcctatacaagattaacattcaaattaacactgaatcctccggaagga

SEQ ID NO: 366023 - DNA, 100 bp, Homo sapiens
accaggatgcagacaaggctcttactctggtgcgttcagtgctgactcggagacgccaggctgtgcagccacgaaggaagacaggaggtccgaggagaaa

SEQ ID NO: 366024 - DNA, 96 bp, Homo sapiens
agccactggagaaaaacggccaagaggcagacctaggaaatggataaatttgcgcctcattttggtaagcggaaaaacaaaagagttcctgttttc

SEQ ID NO: 366025 - DNA, 100 bp, Homo sapiens
gtggagcagctgcctgggagaatgttgactctactgcaggtgttggagcgggccggagagaagtagagtgggctgcgaggagaaggaaacaggcctttcg

SEQ ID NO: 366026 - DNA, 51 bp, Homo sapiens
cgaaaattcggccagggttctcgctcttgagacagggtcttgccatgttgc

SEQ ID NO: 366027 - DNA, 125 bp, Homo sapiens
cgtagagtcctggtttcagtgtggcctggtatccacagtgcaccccgtgctggtgggtggctcaggacggtcagcttactgtatgattaagtaacacaaggcacagtagccatctttttcattat

SEQ ID NO: 366028 - DNA, 90 bp, Homo sapiens
ccacatgaaagttttcagcctcatccagcaggcggtgacccgctaccggaaggccatcgccaagatttctccacccaggtgaactcctcc

SEQ ID NO: 366029 - DNA, 135 bp, Homo sapiens
ctagaagttggtcttccgccaggactagagtttcctcgcggtaacagcctccgtggcctccgttttcagtgtggacagcagatgaaggaattgagagcacagcatgaagaaaatattaaaaagttagcagaccag

SEQ ID NO: 366030 - DNA, 49 bp, Homo sapiens
tgaagaggatgatgtttttggtgaaggctacccacctttctgttctgag

SEQ ID NO: 366031 - DNA, 100 bp, Homo sapiens
ggccaagaaagacaaagacccagtgaacaaatccgggggcaaggccaaaaagaaggctgtggtccaaggccatttttgctggctataagcggggtctccg

SEQ ID NO: 366032 - DNA, 87 bp, Homo sapiens
gacatctactcttcctgcagtactttatagcttcttggacacttaatgattgttggcaagaaatgtgctgctgatctgggcctgaat

SEQ ID NO: 366033 - DNA, 98 bp, Homo sapiens
ggcacctagagacggatggtcgcacgcatgattgtcggcatctcacaggcatgcggatcctggtcactctgctgctggatacgctgcccatgctcggg

SEQ ID NO: 366034 - DNA, 100 bp, Homo sapiens
caagcaagaacagctaaaatgaaagccatcattcatcttactcttcttgctctcctttctgtaaacacagatcttagcaaagcaatgtctcaagatggtg

SEQ ID NO: 366035 - DNA, 83 bp, Homo sapiens
cctctgacgacgacaggcagaggacaggtccagtctctgtggggaccaagaaaggagaccagtatgatgtctgtgccatttgc

SEQ ID NO: 366036 - DNA, 50 bp, Homo sapiens
gtcgagggccaagacgaagacagcacgtctgagaatggtggatgtggtgg

SEQ ID NO: 366037 - DNA, 74 bp, Homo sapiens
ttttttcacccgagggtcggctctaccaagtagtttgcctgagaatacagatcaacccacagaacaaagcggat

SEQ ID NO: 366038 - DNA, 83 bp, Homo sapiens
gtgcgttgcgtgccctacttcaaggataagggcgacagcaacagctctgccggctggaagtgcctccggagccagcgtggtgg

SEQ ID NO: 366039 - DNA, 82 bp, Homo sapiens
cgagtctgacgaagacagcctgggcagctctggacggccaagtacatcgtgcaagtggatggtaagatagggctgttccgag

SEQ ID NO: 366040 - DNA, 82 bp, Homo sapiens
cagatggcggatgccctgcagtacctgcagaaggtctctggagacatcttcagcagatgaagatctccttcaacgacaaaag

SEQ ID NO: 366041 - DNA, 89 bp, Homo sapiens
ctgaggtctggtgtcccgaggcggatctgcaggacctgcgccgggcactggaggagggctcgacctagaggatcaagacataatgggag

SEQ ID NO: 366042 - DNA, 100 bp, Homo sapiens
cggggcgggacctggcgccaccttgcagggaagtcgagataacatgagtattgtactagtttgcttttcaaatgctcccaaggtctcagatgaagcggtg

SEQ ID NO: 366043 - DNA, 75 bp, Homo sapiens
acagctggagcgcccagaggcgagccctggtggaggaagagggggatatgagactttctactcggaatatcctga

SEQ ID NO: 366044 - DNA, 90 bp, Homo sapiens
gtcaggcccaaatggaatgtggaaatggagtcatccaggatatgaaaaacagtagctccgtatcgaatacattgacaaatggatgtgtca

SEQ ID NO: 366045 - DNA, 101 bp, Homo sapiens
caagtattctgaaagcttaatgcaaataaatcccactttagatcttacagctaactgtgtgccttagaaaccaggtgatcaacccaacactcatcaactgt

SEQ ID NO: 366046 - DNA, 137 bp, Homo sapiens
gcagcctctgcggagccgggctcgggtcgccggagccgcgccccaccccgccagctccagagccacgtacggtccggacactgtttgtcagcggcctccctgtggacattaaacccagagaactctacttgctcttc

SEQ ID NO: 366047 - DNA, 75 bp, Homo sapiens
ggcccttgttggggcacaaggtggcagctgctctgttaaaagcgaaaatgaaacaattgcctgcggcaacagttc

SEQ ID NO: 366048 - DNA, 101 bp, Homo sapiens
cttgattgatatatatgctgacgaggagttcaaccaggcctccccatggccacccatggaccagtcggcattcacttcctcccttctgcggcccataaaag

SEQ ID NO: 366049 - DNA, 100 bp, Homo sapiens
cgacgcccggcgccagcacatcgcagattgaggtggtgccttctgcctctgccctgatcatcaaagccctcaaggaaccaccaagagacagaaagaaaca

SEQ ID NO: 366050 - DNA, 101 bp, Homo sapiens
ggcttgtctggtgtgcaaagagaagctcattatttggaagattgctctgtcacctattactaagatcgggtgctaccaaggttttgcttttgcatggaaat

SEQ ID NO: 366051 - DNA, 100 bp, Homo sapiens
cagttccggaaagcacagccaggtgtcatggagaaactccagctgggcccagagattctgcagcgggaaaatccaaggcttatttatgccaggctgagtg

SEQ ID NO: 366052 - DNA, 100 bp, Homo sapiens
ggaactggcacttggagtccagacatctaaaatttgtcaattgaccctggccagcagttcacttgggaacattcaaacttggaagtaaacaaaccaaaga

SEQ ID NO: 366053 - DNA, 90 bp, Homo sapiens
gctagtggaagttactgccgcgccaccgagtccggaccggagactttggggcctaactaggttggagaaacgtacggtaaggatataacc

SEQ ID NO: 366054 - DNA, 75 bp, Homo sapiens
ctgagccgtcgcggagccgcgcagccctcggagcacgacgcaaacatgcagatctttgtgaagaccctcactggc

SEQ ID NO: 366055 - DNA, 100 bp, Homo sapiens
cagcctcccataccagttcaactttttcagattccacgtagactaaggtgtcagtatgttcttcaagctgctctgctcctgggcccaagctattctcctg

SEQ ID NO: 366056 - DNA, 100 bp, Homo sapiens
ccagaacaagccagatcttcatctcttccagtgtgatgaggttaagcacaacattctgaaattttttggttattgtaatgatgttgatcgggagttgaga

SEQ ID NO: 366057 - DNA, 75 bp, Homo sapiens
ccaaatccaagcgcgacaagaaagctcaccatggatgatgatatcgccgcgctcgtcgtcgacaacggctccggc

SEQ ID NO: 366058 - DNA, 74 bp, Homo sapiens
gagagacaaaatgacaggcatcggcaaagggtttggctatgtgctctttgaggaggctgtaggagtgcaattgg

SEQ ID NO: 366059 - DNA, 50 bp, Homo sapiens
gggcacggccaacatccagctccacggagacggtggctcagggagtaaag

SEQ ID NO: 366060 - DNA, 100 bp, Homo sapiens
cagcccccattggcgagtttgagaaggagctgcacgcggccgaggtgcgcaggaacaaggagcagcgagaagagatgtcgggctaagggcccgggacggg

SEQ ID NO: 366061 - DNA, 83 bp, Homo sapiens
ctcgagagacctgcgtacattcggggtgccagaaggaaagcataggtggtgcaggaggcaaaggtgtctggggtacacctgga

SEQ ID NO: 366062 - DNA, 99 bp, Homo sapiens
agcacctacgtcccgctgccgtcgccgccgccaccatgcccaagagaaaggtcgcaatggaagaagagatcgccgcgctggtcattgacaatggctccg

SEQ ID NO: 366063 - DNA, 101 bp, Homo sapiens
aaaaggagaaaatgaatgccaaatgggacacggcttctccagggaaagtgaccgaggcagtgaaagaggccattgacgcagggtaccggcacttcgactgt

SEQ ID NO: 366064 - DNA, 90 bp, Homo sapiens
ctctgtttctctgctgcaccgacctcgacgtcttgcctgtgtcccacttgttcgcggcctatagtctgcgctcctcagaccaccggcagg

SEQ ID NO: 366065 - DNA, 88 bp, Homo sapiens
cgctgggtgcgtggggctgcctcgccgcgtctcgccacggaaactactttgcttcgcactttttcatgggaggagagaaattcgacac

SEQ ID NO: 366066 - DNA, 100 bp, Homo sapiens
atgtaagaagtgcctttcgcctcccaccatgattctgagacctccccagcaatgtggaactgtttttgagttccagttgactgcagaggacatgaaagcc

SEQ ID NO: 366067 - DNA, 102 bp, Homo sapiens
ctcagctgcagagcaggctggagcccaagccccagccccctgtggctgaggctacaccccggagccaggagggtactccaaagattcaggtttactcacgtc

SEQ ID NO: 366068 - DNA, 100 bp, Homo sapiens
agcctcgtcctggacccctacctcggtttccgcacccataagatgaacgtcagatcctgcctgtgacccacacggagatctccccagaacaggtaacggg

SEQ ID NO: 366069 - DNA, 83 bp, Homo sapiens
agcatgtgtcccgggcgctgtgcatccacactggacgcgagctgcgctgcaaggccaaccaggatctcccaacccgaagacag

SEQ ID NO: 366070 - DNA, 75 bp, Homo sapiens
cgcctgtgtcttctgcagtgattttaaccaaggcagttggtggaaatgaggatcaaaatacttgctggatggtgg

SEQ ID NO: 366071 - DNA, 90 bp, Homo sapiens
atcagtatgttgtgcaagaggtactgtccatcaaacatcttccaccacagcttagagatccagtgcacattgcaggacgtcggctcggcc

SEQ ID NO: 366072 - DNA, 75 bp, Homo sapiens
gccaaacctcattcttcctggacatgggacaagaacttggaacctgctgaatggctggagtatagtggcatgatc

SEQ ID NO: 366073 - DNA, 71 bp, Homo sapiens
cgactgcatctctctctgcatccaggcgcagggtgtgccatgtgacttggtgacaggtgaagagcgtgtga

SEQ ID NO: 366074 - DNA, 95 bp, Homo sapiens
ttttcacgtgctcttgctaaagaggtagcaagaaagaaaattagagtgaatgtagttgcaccaggatctaccatacccattgactaactatggaa

SEQ ID NO: 366075 - DNA, 87 bp, Homo sapiens
ccctgggtggccctcgccctcctctggggatcgctgtgcgccggagcggaaagaatgtcggagcgggccgcggatgacgtcaggggg

SEQ ID NO: 366076 - DNA, 75 bp, Homo sapiens
tctggagtcatgcctgaaatgccagaggacatggagcagattagctctttggaactgagagatgagatgaggcct

SEQ ID NO: 366077 - DNA, 74 bp, Homo sapiens
tggagctggaaatagtgtgtttccaattttgaacactttggagaagtaccaccaagaacagggaaggacaagcc

SEQ ID NO: 366078 - DNA, 115 bp, Homo sapiens
ggtggtgttgtcgtggccggagcggcccgcgcctgggctgccggcacttcgcggcagatcagtcgcatcgaatacattcattcaaagaacttcatccaccgggatgtgaagccag

SEQ ID NO: 366079 - DNA, 96 bp, Homo sapiens
tggacagttctgagattcactggtggagagtccaggacaggaatggtacagaatacgccatcaataaattgcggcaagaaggaagcgaggagggga

SEQ ID NO: 366080 - DNA, 101 bp, Homo sapiens
gacccggcgagaggcggcgccgctcccaagatgtcgcagacggccatgtccgaaacctacggaatgtatacaaagactatcgcttccttgagctggcatgt

SEQ ID NO: 366081 - DNA, 100 bp, Homo sapiens
ctgacttccagcttctttttaacaatgcaaagtcctattataagattgagaggatccagaatccagatctctggaatagctaccaggcaaagaaaaaaac

SEQ ID NO: 366082 - DNA, 113 bp, Homo sapiens
cttgaaagagcctctacttacatttcatctttttgatgcttttgtcagtgtactgggatgtgatcttcgtggtggaaagctaaattttaaaaccaccccaatggatgcagaca

SEQ ID NO: 366083 - DNA, 100 bp, Homo sapiens
cacatactatccgtttgttcaggaaccaccagtgacagagcgtccaagaggagttatttccaccccagtgattagaacatttggaagaggtggaaggtac

SEQ ID NO: 366084 - DNA, 90 bp, Homo sapiens
cctggccctcgttcctggaacacagattttaccaaatgttgcaagaactctggagttcttatggtagtaaaatgccggaaagaaaattct

SEQ ID NO: 366085 - DNA, 50 bp, Homo sapiens
gggcacaccaaactccatctgaaatggtggagtcaatgaagaaagtagca

SEQ ID NO: 366086 - DNA, 90 bp, Homo sapiens
agggggaagtagagagataacaaaagctgctcagagtctcaatgaacttgatctaggatcctggaattcacaagtgaatgcattttgtgt

SEQ ID NO: 366087 - DNA, 74 bp, Homo sapiens
tcagcggtggcaccgggatcggttgccttgagcctgactgggctggcttagatgaagatgaagatgcacatgtc

SEQ ID NO: 366088 - DNA, 90 bp, Homo sapiens
cagaaaaaggtcttgagagcaccttgtggcgcacccagtgtaactgtgacgttatcggcaggggaggtgagcagatttcacggattcaag

SEQ ID NO: 366089 - DNA, 74 bp, Homo sapiens
aggaggattcagggaataggagctggggagcccttctgcgccacagccgtgctggtatagaggactctaagaag

SEQ ID NO: 366090 - DNA, 124 bp, Homo sapiens
ctaaagcgtttcctcgcttgcattcagctcctctgtgtttgccgcctggttggagtcattcgttgcccagtttgcagccaagaatgtgcagagagacacatcatagataacttttttgtgaagg

SEQ ID NO: 366091 - DNA, 100 bp, Homo sapiens
aggatttccaagtgatttcttccaaagcacaggaatctcactctgttaaagctggtctgttctaactgaggcaaaagagatttcactagcagacctccag

SEQ ID NO: 366092 - DNA, 98 bp, Homo sapiens
atcttcacacactactagatgcagggaaacatgaagccattgtgaagaatgtacatgatctcctggcaaaattggcatgggatttttctcctgaacaa

SEQ ID NO: 366093 - DNA, 98 bp, Homo sapiens
gctgttcccagcttggttgcacttgagaaaattaatgtggcagttaatcagctgtgttcagcgaatacttatgaacagaaggctccagcagcagtaca

SEQ ID NO: 366094 - DNA, 82 bp, Homo sapiens
attcaacccgtgtacgtgcctgtgcctaaaggtgtcgtagtcattcttcagcacaattcttaattggagaccaagaaccctg

SEQ ID NO: 366095 - DNA, 100 bp, Homo sapiens
aaaggatgctttcatctgggtaaaaagcaaggctgggatatgaagaacaacagcctgaggttccaattctttatcatgatgtaacatcccttttgctcat

SEQ ID NO: 366096 - DNA, 100 bp, Homo sapiens
agaatgcctggttggcagaatggccattaaacctgctgttctgaaagcacagtttaatggcaacgagaagcggcagtcatccccctcaccttcgcgggac

SEQ ID NO: 366097 - DNA, 82 bp, Homo sapiens
ccgagagcgtgaccgagagcgcgaatatcgtcatcgttagaagttggatgaaaaatctgacaaacagtatgctgaaaattat

SEQ ID NO: 366098 - DNA, 92 bp, Homo sapiens
cagccctcgctggaccagaccatggccgcggccttcgatcattgagaagcagccaggccacattcggagcagggttttcagggaggtggaga

SEQ ID NO: 366099 - DNA, 90 bp, Homo sapiens
tctccgtccctttccagggagggaacaaagcccacagcaccggaattgaatgatctggcacgggaccctccagcacagtgttcagcaggt

SEQ ID NO: 366100 - DNA, 76 bp, Homo sapiens
gccaagtatccgccagtcaataggaagtacgagtgctgattcaccccaagagtggccgttcctaccacgaggagtt

SEQ ID NO: 366101 - DNA, 97 bp, Homo sapiens
atgggaaggacaggcagagctaaacaaggtgtcatggagaaactccagctgggcccagagattctgcagcgggaaaatccaaggcttatttatgcca

SEQ ID NO: 366102 - DNA, 98 bp, Homo sapiens
ggagggggggctccaaagccgaaagaggaggtccctacctgccacggataccagtcaggaagctcttcgtgtggtgaagatcttacagaaccttgatc

SEQ ID NO: 366103 - DNA, 87 bp, Homo sapiens
tccttcccctcccttgcatgatggaaacaccatggctgcggcggcccagctctctctgacacagggagtaccctgacttctaccgga

SEQ ID NO: 366104 - DNA, 75 bp, Homo sapiens
ctacagagaagtgatgttagagaattatgggaacgtggtctcactgggttgagcgcaccatcacatctaagccat

SEQ ID NO: 366105 - DNA, 100 bp, Homo sapiens
gaaggcggcaaaatggcggaccgcttctcccgcttcaacgaagaccgagactttcaggggtattccctcagcggatactacacccatccatttcaaggct

SEQ ID NO: 366106 - DNA, 100 bp, Homo sapiens
cactgacagaagccctgaggcttttggctgatgaggattggacagtcattttgtttactcattcagccctgttgcaggtcccaataaactcttcataagg

SEQ ID NO: 366107 - DNA, 87 bp, Homo sapiens
gaatatgggcgggaaccactcccacaagccccccgtgtttgacgagaatgaggaaggctggagaatcgggaagggagaaggctacgc

SEQ ID NO: 366108 - DNA, 97 bp, Homo sapiens
cttgggccgccgagctggacccggaccggttttggtgtcaaatcaacagtgccttgacatctttccacactgctttggaacttgcagtagaccagag

SEQ ID NO: 366109 - DNA, 100 bp, Homo sapiens
ccagtatgctgcatgaaaggcgcatcgtgattatctcgagcaaattaagcactagttctaaagttcctgttgcttcagacaatggatgagcaatcacaag

SEQ ID NO: 366110 - DNA, 99 bp, Homo sapiens
gcctagaatgcatcagtgcccttgtggcgaatggggctcacgtcgagtcgggtcacaaatcttcgaagagtgacatatgttgttttagatgaagcagac

SEQ ID NO: 366111 - DNA, 124 bp, Homo sapiens
gcctcatcacacaggatccgcccctggacatggaggagaaggtccgcttcaagatgaatgctatcaagtaagacaagtgtttgcccagaaacttcacaaaggcctttcccgtttacggcttcca

SEQ ID NO: 366112 - DNA, 101 bp, Homo sapiens
catggaaggggcagtacaagcttacgtctctgctcttcagtacaatcctctgttaagaagaaatcctgaacggcgccttggggctagcgagaaagatgcag

SEQ ID NO: 366113 - DNA, 82 bp, Homo sapiens
gattccaagtaactcttatttgattactcttgtctctgctgctcctgggaaagtgatttgtgaaatgaaagtagaagaagag

SEQ ID NO: 366114 - DNA, 90 bp, Homo sapiens
tgccactgctgctccgtggagatcgtcccgcgcctgccgcccgtggaccgggagcccgtggaccgggagccggtggtgtgccaccccgac

SEQ ID NO: 366115 - DNA, 101 bp, Homo sapiens
catgatgtattgagtaaaaggaacttcggtacacaggcctttagtgatgtggtggtaagatgtatgatcgtaaagctgaaaattgaaatcatgaaagtaga

SEQ ID NO: 366116 - DNA, 90 bp, Homo sapiens
gttgaggctgaggactgactggggttctgagactccctgtcccggaccgcagcccaagagttccatggcctccacttcccgccgccaacg

SEQ ID NO: 366117 - DNA, 98 bp, Homo sapiens
gaaagataaagcccttaaggacaagctgagaaacaatggtccaagttcattcagcaaggcaatgctccatcttcagtggccttacaaatataataata

SEQ ID NO: 366118 - DNA, 89 bp, Homo sapiens
ctttggacaaaactaaaagaatgtcatgatagagaagtacaagtttgtcagggagccactggtgatgtggatggggcacagattgtctt

SEQ ID NO: 366119 - DNA, 100 bp, Homo sapiens
tccttggctgttcaagtgtagaggctactggatcaaggtcagttcctatgccactgtcaaatatatcagtgccaaaatcatctgtttcgcgtgtgccctg

SEQ ID NO: 366120 - DNA, 83 bp, Homo sapiens
atggcaatggcacaaagttctctcgatcagggcatacatctttcttcgacaaaggataacgaaggaggcccaacttcattcaa

SEQ ID NO: 366121 - DNA, 73 bp, Homo sapiens
tggattgaagccgcctctgtattacttaccagagctcaagcgcccagctctgcccgaggagcccaggctgccc

SEQ ID NO: 366122 - DNA, 90 bp, Homo sapiens
tcgcgctgggtgccgcttcgccagcgcccgaggcttctccagggaaagtgaccgaggcagtgaaagaggccattgacgcagggtaccggc

SEQ ID NO: 366123 - DNA, 74 bp, Homo sapiens
agacatcaatgtatttcttaccaaaagacactttcaggtggatgcccggagcataccagtgttagcaaaatggc

SEQ ID NO: 366124 - DNA, 98 bp, Homo sapiens
tttaagaaaggacagcattcctgtgacctctgcctaccatccataaaatactcattcccctctcagagcaacttccagtcctgcaagctccattcatg

SEQ ID NO: 366125 - DNA, 100 bp, Homo sapiens
gcgagatctgccgccagtacccgctgttctgcttcctgctgctctgtctcagcgccgcctccctgcttcttaacaggtgtcagaactgggaaggtggcat

SEQ ID NO: 366126 - DNA, 75 bp, Homo sapiens
ctcgaaagtgacaaaacttttattccacatttggaggattatcccatccactctgtagaagacagacacaaattg

SEQ ID NO: 366127 - DNA, 100 bp, Homo sapiens
aatatctgttaacagactgcttttacacctacctcattttggagactataattcttccatacatcatccaggctatctttccgatagtcactttataccc

SEQ ID NO: 366128 - DNA, 100 bp, Homo sapiens
aaatcgggctgaagcgactgagtccgcgatggagatttggtgcttccagatgtgagttatcaggtggaatccagtgaggaggatcagtctcagactatgg

SEQ ID NO: 366129 - DNA, 75 bp, Homo sapiens
ggccagctttcccccgagggtcaacgagaaagagatcggtcccctcttgctgttggctgcacatcaggaaggctg

SEQ ID NO: 366130 - DNA, 100 bp, Homo sapiens
ctcacctagtcattgtatgttggctgtccggaagctgaaaaaggtggttcaactcataatgacaagagacagtgatggttatgaaaactcaacagatggt

SEQ ID NO: 366131 - DNA, 88 bp, Homo sapiens
gagcgtgaccgagagcgcgaatatcgtcatcgttagaagctcactccatcactcgatgagataatatgagatttctacttcggagagg

SEQ ID NO: 366132 - DNA, 83 bp, Homo sapiens
caaggaaggaggcaggggcgggagcggcggcggtggggagggcatacaggaccgggagaggccgtgcagcatcgaagacagga

SEQ ID NO: 366133 - DNA, 98 bp, Homo sapiens
gctgaccgaggcccccctgaaccccaaggccaacagagagaagatgactcagaatatgtggatcgagagaaccatatatacaactgcatataaattac

SEQ ID NO: 366134 - DNA, 75 bp, Homo sapiens
ctgcgaacagaagctgagcagtgcaagacttgctatggagagactctatgcagtttttacagattacgagcatga

SEQ ID NO: 366135 - DNA, 78 bp, Homo sapiens
agcctgatccgggagaggtggttccagaattatgggcatttgatgtagaactactgtacatagcacagttctttaaaa

SEQ ID NO: 366136 - DNA, 82 bp, Homo sapiens
ccggctccgtggggccgtcttcccggcgagtccgcgacggtcgccgcccacggcgagtcaccaggagactaaagtccatcaa

SEQ ID NO: 366137 - DNA, 100 bp, Homo sapiens
ccagggcctttcccgctgcttcctctacccctgtatttcgctgggctctctaaatggattcagctccaggtgctggagaatctggtaaaagcaccattgt

SEQ ID NO: 366138 - DNA, 74 bp, Homo sapiens
atgctggtggtctgcatcaccaccggatcaacttcgacaaataaaggagcatatcccagcgctcttgggaatgg

SEQ ID NO: 366139 - DNA, 97 bp, Homo sapiens
agacggagtcctgttccaccttcagagcgtcacggcgtacgccctcatggggaaaatctccccggtgactttcaggctttggacgtggaccggatgg

SEQ ID NO: 366140 - DNA, 90 bp, Homo sapiens
cgctgggcacactggcttcacgccggctccgcctcaccagcaagcgcattcccagcaaccgcctccacgtttgataaactttcagaatca

SEQ ID NO: 366141 - DNA, 100 bp, Homo sapiens
agacctccgggaagaatgctgccctttacaccgggtccagtgaccataccatccgctgctataatgttaagagctcgctgcccaaatcattcaagaggaa

SEQ ID NO: 366142 - DNA, 99 bp, Homo sapiens
gagcatcatggacacctcgtcagagatgctggtacggtttggacggcgctgtggacgggcgaaggaaagtacagagtgacatcactgcctctcttcctg

SEQ ID NO: 366143 - DNA, 74 bp, Homo sapiens
tcaaaaaaactaaacggaaggtagtgccaccttctcctatgactgtgtctttctcgagaagcaggtggaaacat

SEQ ID NO: 366144 - DNA, 98 bp, Homo sapiens
gcgcagggccaagttcaagtttcctggccgccagaaggtaccatcactgaacgaagttccccttcattatttgaaacctaatagttttgtgaaatttc

SEQ ID NO: 366145 - DNA, 82 bp, Homo sapiens
aagttcgagcactaatatttaagaaagaagatgttaactttcaggagccagatgaccaggatgccccagatgagcatgagcc

SEQ ID NO: 366146 - DNA, 100 bp, Homo sapiens
gccttgcggaacccgggccaggacagtggcggccaggccgggacacggcgctggcgtgctggttaccacagtggtggccggaggcattaccatcctacac

SEQ ID NO: 366147 - DNA, 90 bp, Homo sapiens
agaaaatgtccactggacctctgtccagtttctattccaaggacaatgaaggcagctggttccgctccctctttgttcacaaagtggatc

SEQ ID NO: 366148 - DNA, 98 bp, Homo sapiens
cgcagtacacggtcttccacagcctcatccattacctaaaacctcgggcagaagaggagaggaggatagcagcagaagagaagaagaagcaggatgaa

SEQ ID NO: 366149 - DNA, 100 bp, Homo sapiens
gccagtgggacgtctgagactttctccttcaagtacttggcagatcactctcttagcaggctatagaaagcgcaattggtggtaacgcttatcaacacag

SEQ ID NO: 366150 - DNA, 122 bp, Homo sapiens
tttgagcatacaccgagagagtgaggagccagacgacaagcacacactatggcgctgaaacggattaataagcacaaacgtgcagatatctgatagccctttccgttgcactcaagaggaag

SEQ ID NO: 366151 - DNA, 90 bp, Homo sapiens
tgaacattgaattcagggacctttcctattcggttcctgaaggaccctggtggaggaagaaaggagtggacctaccctatgagacgagag

SEQ ID NO: 366152 - DNA, 90 bp, Homo sapiens
cgcaaaccaaggatctggggatcttcgcactatcccaagcttattgcaggagtgaccaggacactacctcctagaagtaatgcccacaga

SEQ ID NO: 366153 - DNA, 90 bp, Homo sapiens
gagcccaaaccccgccaccatcatagttttcggctttgtgagaaaccttaccatcaaacacgatggccagcaacgttaccaacaagacag

SEQ ID NO: 366154 - DNA, 106 bp, Homo sapiens
ggcagcagagaggcagacgtgagctgagggcgcagaggcaggcaggtggaagttaaacgagctgagcctcgggacagcaagagccaagcgccgggacagccaggtg

SEQ ID NO: 366155 - DNA, 90 bp, Homo sapiens
cctggacccagctgagcgggcggtcattcgcatcgcagctcctgcccctcctaaagctgaagccaaagcgaaggctttaaaggccaagaa

SEQ ID NO: 366156 - DNA, 75 bp, Homo sapiens
aaacgagaattaaatgccgagaaggccagtacgacttaattcagtgcacaaatgagatgaatgtgaacatcccac

SEQ ID NO: 366157 - DNA, 98 bp, Homo sapiens
aaggaagcgagactcatacgcaacctcaatggggctggcgtcttcttcctgtcctcggccgagggggagcagatcagcttcctgttcgactgcatcgt

SEQ ID NO: 366158 - DNA, 75 bp, Homo sapiens
cggaaatctggaaccgggatggcgacgtctacactgagtcggaggcgaaggctcttgtcaggatggtgaagctgt

SEQ ID NO: 366159 - DNA, 100 bp, Homo sapiens
aagcccccgttccgctacctgcacgacatcatcacggaggccaaggcgaacctagacaagaataagcagacgctggagaaagagaacgcagacctggccg

SEQ ID NO: 366160 - DNA, 98 bp, Homo sapiens
cgtgaacgaaagcagtgacggaggagcttgtaccaccgggtgaggtggctttgaccccgggttgcccggccagcacgaccgaggaggtggctggacag

SEQ ID NO: 366161 - DNA, 99 bp, Homo sapiens
gagaaagaacggcagaacacacagcaagaaactatgttccaacttcctgtcaacaatcttggcagtttaagaaaagcccggaaaactgtgaaaaaaata

SEQ ID NO: 366162 - DNA, 50 bp, Homo sapiens
aaaagattgcccaaaagaatcagggcagcacattccccctgttcccaggt

SEQ ID NO: 366163 - DNA, 75 bp, Homo sapiens
aggagcacaacgggcaggtgacaggtgtgattcgctcactgcacagcctgggccgcctggagcatgccttctgca

SEQ ID NO: 366164 - DNA, 100 bp, Homo sapiens
ccggctctgcccgtccccggggagcccgaacgccccgcagccctcacccctcccgccagtctccagccatggccacaagctttggaattgccctgccagc

SEQ ID NO: 366165 - DNA, 82 bp, Homo sapiens
gaggagcactttgaggacatggcctccgacgaggacatgaaccccggggttagcaccgtggtgctgggtgcctatgacctga

SEQ ID NO: 366166 - DNA, 100 bp, Homo sapiens
caatggggaggacaacttcgcccgggacttcatggagtggttaatgtgttgctaacaactccactctgggtggtaaacaccagactgaagcttcaaggag

SEQ ID NO: 366167 - DNA, 75 bp, Homo sapiens
cgggtatctggaagatggggaagagtgtgactgtggagaagaagagatagaagcagatttgggatatcctggagg

SEQ ID NO: 366168 - DNA, 98 bp, Homo sapiens
ttgtcagggctgagagcgacgataccatggagtagtttgaaacaggaacaaaatcttctgaaagctcggagcagaagcctttttggtcaacatggagg

SEQ ID NO: 366169 - DNA, 100 bp, Homo sapiens
tgaaattgccggcaagagggagttaaggacattccaggcagaggcaaggaggctttcgagctacccttggatgattgtgaagtgattgaaactgcagcag

SEQ ID NO: 366170 - DNA, 82 bp, Homo sapiens
gtggcagatatcgaggtggatggaaagcaggacctggcaatgcccagacatctgtgtccccctcaaaagtcatcctgccccg

SEQ ID NO: 366171 - DNA, 75 bp, Homo sapiens
aaatagaaccaaatctgtttgctgatgaagattcacctgtgcatgaggttggaaagaaccatgactgtattcagg

SEQ ID NO: 366172 - DNA, 100 bp, Homo sapiens
ttggacctgaaacagaaattctggaacacctatatggtgtcgtgaaaactacccctaaaagccaaaatgggaaaggaaaagactcatatcaacattgtcg

SEQ ID NO: 366173 - DNA, 100 bp, Homo sapiens
gcgaaaacgtggttgtagagttccgtgactcccagttaaacacagtgggaatatcacttttgatgagattgtcaacattgctcgacagatgcggcaccga

SEQ ID NO: 366174 - DNA, 90 bp, Homo sapiens
ttatcattcggaccctccggaaggacattgccaactacaacaaggaggatgacattatgcttctgatgatctagatgacttgaacttctt

SEQ ID NO: 366175 - DNA, 100 bp, Homo sapiens
tccatgctacctgattgcccccgggtctcagcaggaaaatatatgcagatgatgaacattcttaagccaattgcctttgatgttattcatttcatgtctc

SEQ ID NO: 366176 - DNA, 75 bp, Homo sapiens
acccaaaggaggaaacagctggctaagctcatcattgttactgaaactggcgatggaatatgagaggagccctct

SEQ ID NO: 366177 - DNA, 100 bp, Homo sapiens
atgggaagtatgagaaggtgcttgtggaagggggcccggctccctaggcgtcccatctcggagccctctggcacaaatggaagaagaaagaagggagcaa

SEQ ID NO: 366178 - DNA, 50 bp, Homo sapiens
cagatggtactgaactttttgatcagacagaatgttgctgcgggatgtaa

SEQ ID NO: 366179 - DNA, 50 bp, Homo sapiens
ccctcgcctcccggccgagctgacgtgcaagcagctaatgactcagtctg

SEQ ID NO: 366180 - DNA, 100 bp, Homo sapiens
gaagaatttggacttgatgaagaagatgaagatgaggatgaggatgaagagaacgcattcgactgcagaaaaagttccagaaacaatttggggttaggca

SEQ ID NO: 366181 - DNA, 50 bp, Homo sapiens
atcccagcactttaggaggccaaggactctgcttaccctttgtgaataag

SEQ ID NO: 366182 - DNA, 75 bp, Homo sapiens
ctcagatgctgccagggtccctgaagagggaagacacgcggaaacagggcatgagccagaaggagagctctaagt

SEQ ID NO: 366183 - DNA, 75 bp, Homo sapiens
gtcaaccccttcctcccgtatatcaggtgaacctgggcccaaacaaaatggtggttgacctgacagatcccaacc

SEQ ID NO: 366184 - DNA, 80 bp, Homo sapiens
aagcaagttcatgggcatgtccgtgggggtctctatgataggggaaggaaagtgactattttaccccacagggagaattc

SEQ ID NO: 366185 - DNA, 100 bp, Homo sapiens
ccctgcccccatggcatgcatgatccattagggaggaccgtctgcacaaaggcatgactacggggccccccaggaggcgactctcggggccaacaaggtg

SEQ ID NO: 366186 - DNA, 100 bp, Homo sapiens
agcacagtaacatacagcactttgtggagaaagtcgtcttccacttgcacgaaagctttcctaggccaaaaagagtttttcagtttccaagatggaatag

SEQ ID NO: 366187 - DNA, 74 bp, Homo sapiens
tggaaaagtctcgtctgaagaacccaaagaaccctgggctgtggcatgtgatgtgaatcagctgacatcatctt

SEQ ID NO: 366188 - DNA, 90 bp, Homo sapiens
ctcagatcagcaggaactggaatgtgttcaagtcttggcagagccaggtgtgggccatgtttgaggattgccccagcattcagttctatg

SEQ ID NO: 366189 - DNA, 100 bp, Homo sapiens
ggcctatgcccaccggaaccccaagattggatactgccagatatctcttccaaacacatgatgaaggaggtcttgtcaacagggcaaggcaatagagaag

SEQ ID NO: 366190 - DNA, 75 bp, Homo sapiens
ccgcctggctccccatactagtcgccgtggccactgcctccaccatggctgaggctttctctaagacaacctctg

SEQ ID NO: 366191 - DNA, 98 bp, Homo sapiens
aactgtttgtagccctcgtccagacgccccaaacaaacacgcgagcccagcattgacctgctgcaggccttcgtggagcactggaagggcatcacgca

SEQ ID NO: 366192 - DNA, 100 bp, Homo sapiens
gccgagggcagcagctcccagtttcttcttttcgaggctggacgactgtggcctcacggaagcacggtgcaaggacatcagctctgcacttcgagtcaac

SEQ ID NO: 366193 - DNA, 100 bp, Homo sapiens
cacttcatgtcagaactatgacatggtcagtgggatctactcatgcaaagtggaagatgctttctacaaaggtgaactcaggctgaatgaggaaaaatta

SEQ ID NO: 366194 - DNA, 100 bp, Homo sapiens
ggaggcttcgcgggaagacgcggcggcggcggcggaggatgagcctgcagagcgcgcagtacctccgcacctcaatgacctgaagaaggagaacttcagc

SEQ ID NO: 366195 - DNA, 100 bp, Homo sapiens
tgtcaggctcccatcgagaagaacgaggggtgcctgcagcttcagcaaccaggagggattgactgagatcttaacaacagcagcaacgatacatcagcaa

SEQ ID NO: 366196 - DNA, 75 bp, Homo sapiens
gttttaatgcatcagtttgatgatgccgtcagtatcactgtggagtccttcaataatgttaaacagtggctgcag

SEQ ID NO: 366197 - DNA, 50 bp, Homo sapiens
gtgggaacaatttcagacactggtgcagcatgattatgatatgagggtgg

SEQ ID NO: 366198 - DNA, 101 bp, Homo sapiens
tgccagatcaaccactacccatgggtcaggaatcatctgctgcagtttgctttagagtcaccagccaaatctcctgcttcttcctcttcaaagaatcttgc

SEQ ID NO: 366199 - DNA, 80 bp, Homo sapiens
caaatattgaccaactggcatcccacagcctcctcttccagaatgcctttgcgcagtggccaacagtgttgcaaacagga

SEQ ID NO: 366200 - DNA, 100 bp, Homo sapiens
cacagcccaagatagttaagtggggctccttctacaagggagtggcagagggagaggtggacccagccttcggccctctggaagcactgcgcctctcgat

SEQ ID NO: 366201 - DNA, 74 bp, Homo sapiens
ggaatgcttgacagagatgagtttgcagtttggtgaaaatgtagggttggaatccaaatacctgaagaaaaggg

SEQ ID NO: 366202 - DNA, 50 bp, Homo sapiens
cggcagcgtcccggacgaggagaaatcgagctatagcagattatcttcgt

SEQ ID NO: 366203 - DNA, 95 bp, Homo sapiens
aagttagatttgttggacatgctaaacagagaatacaagaggattatcttagaattttaagatacttcagcctttgaagtaaattttatggatga

SEQ ID NO: 366204 - DNA, 98 bp, Homo sapiens
ccggggactacagcacgacccccggcggcacgctcttcagcaccaccccgggaggtgctggagaatctggtaaaagcaccattgtgaagcagatgagg

SEQ ID NO: 366205 - DNA, 90 bp, Homo sapiens
catgagcgagtgcctgacatgcagacctatccaccactcccagatatattcttagacagatccagctccaggtcccacaggggctcttct

SEQ ID NO: 366206 - DNA, 88 bp, Homo sapiens
caggcaacaaaggatcattggtttatgcaggaattaaatcaattgtaaagtcatcgttggggggaacaaggaccacaaggcttcccag

SEQ ID NO: 366207 - DNA, 75 bp, Homo sapiens
ctgaggacggctcaggagcatgacaagcgagaccctgtggtggcttattactattctggaacttttcaaagcctg

SEQ ID NO: 366208 - DNA, 100 bp, Homo sapiens
gaaggcaccgacgtcatcatgctgaccaccaatcagatccgtaaggttttgcacactagggaccaagaagccctcggggacactgctgagaaaagactgc

SEQ ID NO: 366209 - DNA, 90 bp, Homo sapiens
cgagcggagaggagatgcacacggcactcgagtgtgagggaaagaatatggcaaagctgatgcaagatgggtttattttgatccaaccat

SEQ ID NO: 366210 - DNA, 100 bp, Homo sapiens
agggctccaccccgtcgcctcgacagtctgcgggccaggcatcgacatccgcaacgactatcagcagctgaagcgcctggagaactgcacggtgatcgag

SEQ ID NO: 366211 - DNA, 98 bp, Homo sapiens
cgcgggcaaccggggaccccggccactggagcaggtcacctgttacaaggaggaagagcaagcaggccctgagggactataagaaggttcagatccag

SEQ ID NO: 366212 - DNA, 98 bp, Homo sapiens
attgataacaccctgtaacagctgacctttgaagtaaattttatggatgatgtaggtcagactctattaaactgggcctctgcttttggaactcagga

SEQ ID NO: 366213 - DNA, 73 bp, Homo sapiens
tgatctcaggaagcacaaagggaccttcctagctctgactgaaccacggagcttcggaaggagtatggggcca

SEQ ID NO: 366214 - DNA, 90 bp, Homo sapiens
ggaagatggcgctggccggatggaaatcctaatgacagtctccaaattcgcctccatctgtaccatggtgaacttcacggtagaccagat

SEQ ID NO: 366215 - DNA, 96 bp, Homo sapiens
ggacagcctctgccctgggaacttcgactgggcctactgctaagcgaatatgacagatacctagcatctagcaaaataatggcagctgcttacctt

SEQ ID NO: 366216 - DNA, 96 bp, Homo sapiens
tccaaccagggctacatgccttatttaaacaggttcattttggaaaagatagtcactgccaatccttggaacacaattgctcttctctgtggcgcc

SEQ ID NO: 366217 - DNA, 74 bp, Homo sapiens
tggcgggagggagaggccaccagcagcgcgcgcgggagcccggggaacagcgtggattctgctgcgaaccggag

SEQ ID NO: 366218 - DNA, 50 bp, Homo sapiens
aaactgcagtcaccaagtaaaacaggtttttaatgaccacaacaagcaag

SEQ ID NO: 366219 - DNA, 100 bp, Homo sapiens
agacacattttatgttgtgtcatttcgaaggcagagagagatcatcattgcctgaatttagctttgtgactgcaagagcaagaccagttcctgtctggag

SEQ ID NO: 366220 - DNA, 95 bp, Homo sapiens
ttctgatcactactgacttgttgctgggctcaaaatgcagagaactcaaagatattcatttcggccagtgttacaagatctcagatgaaggcatg

SEQ ID NO: 366221 - DNA, 75 bp, Homo sapiens
ctggcccggcggctcagccccatcatgctggatggagaaggatgaaactgtgagtgactgctccccacacatagc

SEQ ID NO: 366222 - DNA, 83 bp, Homo sapiens
cttcggttcgggtgcgctgctcaaggacacggtctacaccgacttcgacgtggtcccaggctgcacccatggcagaaggagga

SEQ ID NO: 366223 - DNA, 100 bp, Homo sapiens
tcacgaggcgcctcaggccctgtcgggctccaggctttaccgccagcacctgttcagaatcacacaaataagcatcaggtattcaatgcatctcttcaag

SEQ ID NO: 366224 - DNA, 90 bp, Homo sapiens
ttccttccttactttgtcttggtatactacatggcaaaatgggaaagatggcttgttcaatcagtatatcagtcaacaggaatataagcc

SEQ ID NO: 366225 - DNA, 100 bp, Homo sapiens
gatggcccggcagacgggcgtcttctacctgacgctcgtcctcatcctggtcactagcggactcttcttcgccttcgagagtgcctgtgaagaaaacggg

SEQ ID NO: 366226 - DNA, 74 bp, Homo sapiens
tgatagatgaggggattgccccggaagagggaggcgtggacgcggccggtattaccgcaccaaccacactgtga

SEQ ID NO: 366227 - DNA, 83 bp, Homo sapiens
tctcaggagtattttacgcattttattgtaataacaactcttgatgtttcagtgagctttaatggaggaaaatctgtcatttc

SEQ ID NO: 366228 - DNA, 98 bp, Homo sapiens
atcatcaagccagacaacttctggcagaaacagaggactaattttggcagttctaaatttgaatttgaggaaggtgataaagaaattgctacaaaaat

SEQ ID NO: 366229 - DNA, 100 bp, Homo sapiens
ccgcggggccaggaagtcggagtttgagccccggaggcagagcggctgccatggtgtgaatgacagaggtggtgccatccagcgcgctcagcgaggtcag

SEQ ID NO: 366230 - DNA, 50 bp, Homo sapiens
ccgcagtgggtcccggacaaggagaacccagcgggtgccgcttctccacc

SEQ ID NO: 366231 - DNA, 100 bp, Homo sapiens
actacgcttatattgggaatatcctctctgcatactccttccacgttactgcagacggtcagatgcagcctgtcccttttccccccgacgccctcatcgg

SEQ ID NO: 366232 - DNA, 82 bp, Homo sapiens
ctgaaagcagagtattaaagaacactagacatccctttttaacagacatggatttgattgacatactttggaggcaagatat

SEQ ID NO: 366233 - DNA, 89 bp, Homo sapiens
cttggcattacttctatagaaatggctgaaggaaaacctccttatgctgatatacatccaatgaggattgctgtcgtggctgtgatgtg

SEQ ID NO: 366234 - DNA, 100 bp, Homo sapiens
cactgtcccatcaaatcgcgcaaaggggatgtcctgcacatgcactacacgacctcctgccccccgaggtctgcagtctcctgaacccagcagccatcta

SEQ ID NO: 366235 - DNA, 100 bp, Homo sapiens
ccgacgacgccatggtctccatcgaccccaccatgcccgcgaattcagaacgatgtgtgttaaaagagctagaaacattgggaaaggacttatatggggc

SEQ ID NO: 366236 - DNA, 100 bp, Homo sapiens
aggacgactgggaccgggacctgctgctggacccggcctgggagaagcagcagcgcaagaatgtttctccatcccagagagatgaagtaattcaatggct

SEQ ID NO: 366237 - DNA, 75 bp, Homo sapiens
agccccggaggcagagcggctgccatgccttcctaatgatggtgatgaaaaatatgagaagaccataattaaaag

SEQ ID NO: 366238 - DNA, 100 bp, Homo sapiens
ggctgtggctcccgacagagacaggggagtagtgtcgggctgaggcgaggagtcagggctaaaggtcaaccagccagcctcttttgcagtcagcctgaac

SEQ ID NO: 366239 - DNA, 50 bp, Homo sapiens
ctgcgctgttccacctcattcaacttcagatgggtccgctgtgtgcagag

SEQ ID NO: 366240 - DNA, 98 bp, Homo sapiens
gaggacgacgactatgaatcggagccggaccagtgaaaatgcctcgtgtaaaagcagctcaagctggaagacagagctctgcaaagagacatcttgca

SEQ ID NO: 366241 - DNA, 75 bp, Homo sapiens
cccgacgaacatttctgggtgacactcaacaggattcccgaaccttcaacaactagtactgcttcaaattatcca

SEQ ID NO: 366242 - DNA, 100 bp, Homo sapiens
gggcggcggcggggccgagcgcggccctgcaggcgatgtcgccgaaaccgggctgcaggcggcaaatgcagccctgaggatttggctactgcatataaca

SEQ ID NO: 366243 - DNA, 98 bp, Homo sapiens
aaggagttcaatcacttggcgtgacttcactacttttaagcaaaagagaagatgatccctatgatcttgaagatgtttctgcacagaaatgagggaaa

SEQ ID NO: 366244 - DNA, 83 bp, Homo sapiens
tgctgcgggtctgctcgggggtctacttcgagggtttttcgttggaatatacgttgcacatttatggcgattctgagtgtgag

SEQ ID NO: 366245 - DNA, 50 bp, Homo sapiens
aaggagttgaagtttgtgactttggcatttagtaagaagaagattgatga

SEQ ID NO: 366246 - DNA, 100 bp, Homo sapiens
aagactattgctcaaatgattgcctccctgcccttcgctatcctgacgctggtgaacgccccgtacaagcgaggattttactgcggggatgactccatcc

SEQ ID NO: 366247 - DNA, 88 bp, Homo sapiens
agatgccaggcaaggcgtgcttctggtagccccgtggtttaaggttccatacccatgtatttttgcagtgttgaaggaaaagtgcgga

SEQ ID NO: 366248 - DNA, 87 bp, Homo sapiens
ggcgcagtacaccaacgcggtgcgcgaccgggagctggacctccggggaagacaactgttagttttgtggcttactgctgctccacc

SEQ ID NO: 366249 - DNA, 99 bp, Homo sapiens
aatacctggtgcagagcttgagtctggccagcgggtcaggctcttgctagatcagcaccggaggtggaagactgatggaagatggtaccccaaagcata

SEQ ID NO: 366250 - DNA, 50 bp, Homo sapiens
tgctcattcctaacagtggatttacttgttgtatcagagtaagatggacg

SEQ ID NO: 366251 - DNA, 82 bp, Homo sapiens
ccgtccggagccagccaacgagcgggaaatcctcattgacgattcaatttgttgaaggccaatttgtggactcctacgatcc

SEQ ID NO: 366252 - DNA, 93 bp, Homo sapiens
ccacaataacaggcggagggtcggcgtaggcaatgaatcgctccctggctaatgtgattcttggaggctatggcaccacttcaacagctggtg

SEQ ID NO: 366253 - DNA, 83 bp, Homo sapiens
gaactatagcaatctggttttcttggaaaacattcagaactctcagaacttaatgtgaaagtgatggaggccctttccttata

SEQ ID NO: 366254 - DNA, 100 bp, Homo sapiens
acaagccgtggaataggtgtatcaagtaatggtgcaaagcctgaaactgacacgtctgaccccgagaaggtggtctctgccttcctaaaggtgtcatctg

SEQ ID NO: 366255 - DNA, 76 bp, Homo sapiens
acaggccaaagccagactacagctggttcttgaagctgctgaaccctgccatcagcatcactgaaaacgtgctgca

SEQ ID NO: 366256 - DNA, 86 bp, Homo sapiens
tggcggacggcgtggaccacatagacatttacgcggatgtcggcgaagagttcaaccagacctgcctagagctggaacgttacctc

SEQ ID NO: 366257 - DNA, 100 bp, Homo sapiens
gcccacgctcccttcctcccagcacgactggctgtcgttggacgaaacgcttcgttaagggactcaggcagtacgggaagaacttcttcagaattagaaa

SEQ ID NO: 366258 - DNA, 100 bp, Homo sapiens
ccgaggaggcagccaagctcgtagcctgccactccgtgcgtcttaacccatatttaactttgaacacctctggtagtggaacaattcttatagatctgtc

SEQ ID NO: 366259 - DNA, 75 bp, Homo sapiens
accctggtcaccgtctcctcagcctccaagcccttgcctccagcccctgctccagatgagtatcttgtgtccccc

SEQ ID NO: 366260 - DNA, 100 bp, Homo sapiens
gagccagctcaagaaaatggtgtccaaggggctaagccagctctaccataaccagagtcagggactcttatcccagctgcaaggacagtcgaaggatatg

SEQ ID NO: 366261 - DNA, 91 bp, Homo sapiens
cgtgtcctgaaggagttccaccaggccgggaagcccatcggatgtgaagttcatttccaatccgccctccatggtggcagcggggagcgtg

SEQ ID NO: 366262 - DNA, 83 bp, Homo sapiens
gccggatgcagacggcagcacgggtactccaaagattcaggtttactcacgtcatccagcagagaatggaaagtcaaatttcc

SEQ ID NO: 366263 - DNA, 100 bp, Homo sapiens
ttccagcctgcttgactttgaaaatgatttaattgaatcaagctgcaaagtaactagcaacatggccaatctttcctaagctgctcagcttacaagaaaa

SEQ ID NO: 366264 - DNA, 97 bp, Homo sapiens
atgaatgtggctcgtctgaacttctctcatggaactcatgagttattttaccaagaaaatggtttgcacgactttgaacatatactatccatgctga

SEQ ID NO: 366265 - DNA, 97 bp, Homo sapiens
agagaggggaaaccccgtaaagtggttggttgcagttgtgtagtagttaaggagggggctggagtatggcatcaggatggagccctcccgcagcagt

SEQ ID NO: 366266 - DNA, 87 bp, Homo sapiens
gcaaaggagatgtgatgtccactgcctgtggaactccaggctatgtcgagtgctgcagcagctcccagtccagtgctaggaaacatt

SEQ ID NO: 366267 - DNA, 82 bp, Homo sapiens
ttgagaggagcaatagaagacatgggatttgatgctaccttgtcagatcatggaagggaagtggttgctgtgtatgttactg

SEQ ID NO: 366268 - DNA, 95 bp, Homo sapiens
ggatggaagaccaacatggactttgttgggcaccggaaagctgtgactgtcgtgaagtcaaattttctactactctactgggatgactgtgggaa

SEQ ID NO: 366269 - DNA, 98 bp, Homo sapiens
atcagaagtatgatgaagttatggctacttatattcttctaggtagaaaaccacctgaaggtgacccaggccctgcaggcctccctgggaaagatggc

SEQ ID NO: 366270 - DNA, 100 bp, Homo sapiens
aaggattccaagtaactcttatttgatctgatgagacgacaggaagaattaagacgcatggaagaacttcacaatcaagaaatgcagaaacgtaaagaaa

SEQ ID NO: 366271 - DNA, 100 bp, Homo sapiens
gcagagtggacctgcaggtacttggatctccagtgggagctgccctctcgaaggcaggacagcggtggcggcaggggaggagccccagccccgcgacgag

SEQ ID NO: 366272 - DNA, 100 bp, Homo sapiens
aaagcagtgcaactggctcagtattcacagggaaagctgtgaggggcgacataccttctgttgaataccttttacaaaatggaagtgatccaaatgttaa

SEQ ID NO: 366273 - DNA, 100 bp, Homo sapiens
aggaaatccattttaaagagctaccttcaggacagagcgggatgccaccagcttgtccaaagggaagttccaggagctcctggtgggcatcgttgtggag

SEQ ID NO: 366274 - DNA, 100 bp, Homo sapiens
cgagcgggtcaagctgctgctgcagattttggtttcagtaacctcttcactcctgggcagctgctgaagacctggtgtggcagccctccctatgctgcac

SEQ ID NO: 366275 - DNA, 90 bp, Homo sapiens
gtgctgtgcgggatcgacgcggacagcgggctggagcctgacgagctggcggctcaaactggaggattataaggatcgcctgaaaagtgg

SEQ ID NO: 366276 - DNA, 101 bp, Homo sapiens
gaaatgggctagatatttccagaggctgcaatctggaggcgtttggaggtgtgtgggccatgtttgaggattgccccagcattcagttctatgagtaataa

SEQ ID NO: 366277 - DNA, 90 bp, Homo sapiens
tggaaattgaacaagcgtcacttgacaagcctatagaatcggtaaagtcagtgataaatcttttgtttgctgcatatactggagatgtgt

SEQ ID NO: 366278 - DNA, 83 bp, Homo sapiens
cgagaacgtgcgggaagagaagatcatcgagcatttcaaacgactctttttgatcagaacaatgctgcaaaaaaagaagagtc

SEQ ID NO: 366279 - DNA, 74 bp, Homo sapiens
ctacactgtgctgccttaaaagtgtttacgttggaaaatggatataccttatttgattatgatgttggactgaa

SEQ ID NO: 366280 - DNA, 100 bp, Homo sapiens
gcgcgcacaggctgtagcaggttccggcggacggcgttgcgaaggccgactgcagcagtggcccagggcaaagagtgtgcgtcatcgatgagattgggaa

SEQ ID NO: 366281 - DNA, 120 bp, Homo sapiens
ctgttgtccaaactctgcagtgaaagccccgataacgtcgtgtcgaccacaggtcgttgaggacttccacatggagattggcacaggaccagactcaagacacacaactcataacagttg

SEQ ID NO: 366282 - DNA, 101 bp, Homo sapiens
gaggaaaaggcggagcccatctcctaagcccaccaaagtgcacattgggagactcacccggaatgtgacaaaggttgaagagttacagaaacatagtgctg

SEQ ID NO: 366283 - DNA, 100 bp, Homo sapiens
gagatgtgatgttggagaactacagaaacctggtctccctaggaaaattgcctaagaattatgacccaaaagttaccccagatccagaaagatggctgcc

SEQ ID NO: 366284 - DNA, 83 bp, Homo sapiens
cgcctccgcccagggccacctaaggagcggaccccgcatcttcgccgtctggaaaggtcaaaatgcagatcttcgtgaaaacc

SEQ ID NO: 366285 - DNA, 73 bp, Homo sapiens
gacgccttagataacagccatcctattgaaacaaccagatgttccaatattttattacagttgtgccaacaaa

SEQ ID NO: 366286 - DNA, 82 bp, Homo sapiens
tggaaagaccgctttccatggagagtaaaggccggctggaaagtccccaagcgcaatggctgccatccggaagaaactggtg

SEQ ID NO: 366287 - DNA, 98 bp, Homo sapiens
tggaaaatgggcatccagtacagcagcaccaaaaggagccaccaaagcagaagaaacagagtttagacaccatgaccacccttgatgataagttgctg

SEQ ID NO: 366288 - DNA, 74 bp, Homo sapiens
ccaggttccacgaaacgaaggcagtgctacccaaaagcattcctccaggagtgatccaaaatggagcgcgggtc

SEQ ID NO: 366289 - DNA, 98 bp, Homo sapiens
cagcagccaagatggtgaagcagatcgagagcaagccctgccaaggtaaccctgctggggtcagttatcttcacattccagcacacccagcatctggc

SEQ ID NO: 366290 - DNA, 90 bp, Homo sapiens
ggaggacacccggacacctggaagctgggaaatggcagacctcaacaccaacatcgaggatgaaggcagctccttctatggggtctccag

SEQ ID NO: 366291 - DNA, 100 bp, Homo sapiens
attcagccgtgaagcaagtgcagatagatggccttgtgatgagaagctacaaggcgaccatccagcagaccttggacatcctgttcctccgggaaggctc

SEQ ID NO: 366292 - DNA, 75 bp, Homo sapiens
atgaagaccacaataaaagagacctctacttagctcagcaattcttaccttaaagctgtatgtgatggcttctgt

SEQ ID NO: 366293 - DNA, 50 bp, Homo sapiens
tggggactgccttccattgtgaagtctagtctcactctgtcgcccaggat

SEQ ID NO: 366294 - DNA, 97 bp, Homo sapiens
ggccgagcgggcggcttcctggcctgggcgctccggtggcggcggagaattcagaaggagctggcggacatcactttagaccctccacctaattgca

SEQ ID NO: 366295 - DNA, 75 bp, Homo sapiens
gcgaaatgctgaagcgctgtaaaactcagcttaagatatatttttgccatcatggatcagtttggagatatatta

SEQ ID NO: 366296 - DNA, 83 bp, Homo sapiens
ggaaaagtcattcaactcaagcagatcaaagttgttttgagttatctccagaagaagaagagaaaaggagaatccgaagggaa

SEQ ID NO: 366297 - DNA, 101 bp, Homo sapiens
aaaaaaccttcaggcggcccatggaatgagtccctggaacgccagatgcgtgaaatggaagagaactttgccgttgaagctgctaactaccaagacactat

SEQ ID NO: 366298 - DNA, 74 bp, Homo sapiens
cgccgagtggtgctggcctccttcctgctcctgctgctggggctggtggtgtttccccaggatctgctggagaa

SEQ ID NO: 366299 - DNA, 76 bp, Homo sapiens
aacaatgaagctcctgaagccgacctgggtcaaccacaatggaatgtatcctgtcaggtataatgtcagtgaatgg

SEQ ID NO: 366300 - DNA, 51 bp, Homo sapiens
ctggaccagaccatggccgcggccttcgcagggtttccaggcctgaggtgc

SEQ ID NO: 366301 - DNA, 82 bp, Homo sapiens
gtccttccgaggaagctaaggccgcgttggggtgagaccctcacttcatccgagaagatggcgaattagaagatggtgaaat

SEQ ID NO: 366302 - DNA, 98 bp, Homo sapiens
tcatgcccaaatcccggaaactccagcgtgtctccagccgtgacaaaacctgctacaaccccctcttcaactacgaggacatgcaggagatcacccag

SEQ ID NO: 366303 - DNA, 100 bp, Homo sapiens
aagctggacatcttcctgcaactgcgcatctttgagcagtacaccatcgagattatctcaactttggtctcctgggaccactcgttgctgacagtcagaa

SEQ ID NO: 366304 - DNA, 98 bp, Homo sapiens
aaagcagtcgtaagaagaggtcccaatcccccactctttccgccctaatggaggtctccagtttcggtgcacattcaggttcccgagcacaaacatca

SEQ ID NO: 366305 - DNA, 89 bp, Homo sapiens
tgcccgcttccacccggaaagccccccaggctgagtgcggcatgatctccatcaccgaatggcagacctttctgcagatgtccctaagg

SEQ ID NO: 366306 - DNA, 73 bp, Homo sapiens
cctggttgcctgcagcggcccggacccgagaggccctctccgcattgtggtcctagtcgtcagtgtgggtgtc

SEQ ID NO: 366307 - DNA, 75 bp, Homo sapiens
ggatggagaacctccggcgagcggtgcatcccaacaagatattgttaatcctgccagtctttctcttcaagccag

SEQ ID NO: 366308 - DNA, 75 bp, Homo sapiens
cagctctttccccgtcagcatcccagccgtgctcacgatctattaatgagatgaagcggttggaagaaatgtcaa

SEQ ID NO: 366309 - DNA, 100 bp, Homo sapiens
tccactctaccaccccgctgtcttccacacggggcactgggcttcctgccatcaccgatgtgcctaggcgcatttcagactcaaggcacaggagggaaga

SEQ ID NO: 366310 - DNA, 100 bp, Homo sapiens
ggtggtcaaggcttaccaatacacaactctgaccagtatccagatcattcaacttcaagtggcacattatcttttaagcctagtcaatcattgattactc

SEQ ID NO: 366311 - DNA, 100 bp, Homo sapiens
caacaccaagtgcatcaccatccccagcatctcctccgccaaggccggccggctgtgcaggcctcccacgagcttgaggtcgtggcaactgaatacgagc

SEQ ID NO: 366312 - DNA, 50 bp, Homo sapiens
tggtcatgagcttcgttaacatgggccctgggaggagcggggacactgag

SEQ ID NO: 366313 - DNA, 96 bp, Homo sapiens
gtgatatttgcctttagtgcactcttctccttcacagtaaagtggctgccagagactgctgctactttgaaacgtacgatagaggccctgatggac

SEQ ID NO: 366314 - DNA, 82 bp, Homo sapiens
tctgcgggcccggcggcgtggaccacctcccggtgaagatcctgcagccaggaccatcagcacgtgcccatcgacatccaga

SEQ ID NO: 366315 - DNA, 90 bp, Homo sapiens
ttcacacggcgagcatacggcaccaattacatcgagaccctcagagtgcaggtattaataggggaccctattaccacatgtctttctccc

SEQ ID NO: 366316 - DNA, 100 bp, Homo sapiens
ggagcgcgcgggcaccctgcagcgcgagctggaccacgagaggaagctgagggagaccatggcccactgcgtgaccttggttcagctgtccatttcctgt

SEQ ID NO: 366317 - DNA, 101 bp, Homo sapiens
ctcaggggaagaagctggacttcagccgtccaagcactagaaagtttgggatttggctcttacatcagtgaagtaaaagaagtcttgcaagagtgtaaaac

SEQ ID NO: 366318 - DNA, 108 bp, Homo sapiens
cgggtggcagcgacagagccaaaatcagagctggaacctgaggagagagacaatgcagatcttcgtgaagactctgactggtaagaccatcaccctcgaggttgagcc

SEQ ID NO: 366319 - DNA, 74 bp, Homo sapiens
ttaatgttgggagaaatgctgactttaccacagaattttgggcacaaatatgccagctacctttggacatttgg

SEQ ID NO: 366320 - DNA, 100 bp, Homo sapiens
gaggcctgacgggccagtacattgggaggcagcgtccatggagcaaaaggaatgccaggatcctgcacaggcagacgcgggccagcctcagcaccgacag

SEQ ID NO: 366321 - DNA, 101 bp, Homo sapiens
aaatgggaattctacttgtgtgggtgagactgctgctcctcgggccattttgaccggccatgactatgaggtcacatgtgctgcggtgtgtgcggagctag

SEQ ID NO: 366322 - DNA, 109 bp, Homo sapiens
ggctacctggacgaggagctggactaccggaaacaggccttggaccaggccaacaaggattttttatcaagcagaaatgcatcgaacaacgagaatcaagatcactgag

SEQ ID NO: 366323 - DNA, 83 bp, Homo sapiens
gaacctggctctcatatcctcgctgggtccgcgggagagctgtggggcttggtgagtgtttcgtggcctctcgggttggtcag

SEQ ID NO: 366324 - DNA, 50 bp, Homo sapiens
tccagcccaggaaaatggagaggggcataaggaaatggtggcaggcactt

SEQ ID NO: 366325 - DNA, 75 bp, Homo sapiens
cccgaagccccctgcaggaactctacaacccaatccagattttgctggaggagcttgccaacagcgatcccaagt

SEQ ID NO: 366326 - DNA, 75 bp, Homo sapiens
tgaagagctatggtgaaacaccactgaagcattgccaagaaatacatgctacaggatttaactatcagaatgaag

SEQ ID NO: 366327 - DNA, 74 bp, Homo sapiens
gatgggctcgctccagaggacatgagcaaggagcagtggaagccgtgaggtggtggatgaaggcttgatccctg

SEQ ID NO: 366328 - DNA, 76 bp, Homo sapiens
cgcgagctatatctgcgcgtggagctgagtgacgtacagatatcaatgagtgtttgagtatcagtgccccgtgccc

SEQ ID NO: 366329 - DNA, 90 bp, Homo sapiens
tgggaaccgctcgagcctaccagccctggtgatggacactccttccctatgaggtctatgaatgagtcacagaacccactgctagcaaat

SEQ ID NO: 366330 - DNA, 97 bp, Homo sapiens
ttccaagggagcatgattggaagctttatcgatatataccaacaagaaggcaccaggggtctgtggagggtgtaattgaaaagtgatcctctcttca

SEQ ID NO: 366331 - DNA, 100 bp, Homo sapiens
gccatgatgacccacctgcatgtgaagtctacagaacccaaagccgcccctcagccctgcccaccagaagtatgtccgacaagcctggcagaaggcagac

SEQ ID NO: 366332 - DNA, 75 bp, Homo sapiens
tatagatcaaaagaaacctgttcgcttctatcatgattggaatgacaaagaggcagttatttggcagaaaagcag

SEQ ID NO: 366333 - DNA, 87 bp, Homo sapiens
tatttaatggaaaatcgcttggttaaaacctgacacttttaacaggctgttgccaaaatggttcaacagtgctgtacttatgttgag

SEQ ID NO: 366334 - DNA, 82 bp, Homo sapiens
cctggggccaggaggagcgaacacctgccgcggtcctcccgccggcgctggggaactctcaactttggtgggatcagggtgg

SEQ ID NO: 366335 - DNA, 99 bp, Homo sapiens
caagacattctacagcacactcagactcaagatctgcaagttttcctaaaagtttgctggggctttcactctgcggcagcgaatgctcaacttcgtcca

SEQ ID NO: 366336 - DNA, 100 bp, Homo sapiens
ggcattggccgccgcgatgtcagctcagtgctgtgcgggccagaaaaggcgacggcggattgacagaagtatgattggagagcccacaaactttgtgcat

SEQ ID NO: 366337 - DNA, 90 bp, Homo sapiens
aagaaagaaaacctaaagtatttgccgttggtgattcaagggtacatcaggaacgtctctatcaagaatacaatttcagcaaggctgagg

SEQ ID NO: 366338 - DNA, 75 bp, Homo sapiens
cagccagaccgagagcagcctgccggggcggagaatcggcaaggttggaaaccagaagcgtgttgttggtgtgct

SEQ ID NO: 366339 - DNA, 101 bp, Homo sapiens
ctcacattcaagctgataggctgcgctaccggaatgtcatccagcgagtgattagcattagtgccagcagtagttcccaagggctgtctcagccatccacc

SEQ ID NO: 366340 - DNA, 100 bp, Homo sapiens
ggttctccatacccgtgacctggggatcgctacggaccttaaaatacccgcaacagccccttcgtcccaagagccacaaaccactgtggtacacaacgct

SEQ ID NO: 366341 - DNA, 75 bp, Homo sapiens
ttgccctcttcgaccccttctccaaggaaggggttatggttttgtgaaattcacagatgaactggaacagaagcg

SEQ ID NO: 366342 - DNA, 50 bp, Homo sapiens
cggcggaggaggagacggcaggtcgggtgctggagaatctggtaaaagca

SEQ ID NO: 366343 - DNA, 51 bp, Homo sapiens
accacaggatggagactacgagtttatcctaagtatatcactgcagcctgt

SEQ ID NO: 366344 - DNA, 75 bp, Homo sapiens
aaggcaccgacgtcatcatgctgaccaccaatcagatccgtaagaggctgaggggatctggcggtggagcgctag

SEQ ID NO: 366345 - DNA, 51 bp, Homo sapiens
gtggatggaaagcactcctaccctccagccctgattgagtccctcaaccag

SEQ ID NO: 366346 - DNA, 105 bp, Homo sapiens
gcggggggacgccgctgctgaacggggctgggcctggggctgcgcgccagggccatgaagcccccaggaggagaatcgagcaatctttttggaagtccagaagaa

SEQ ID NO: 366347 - DNA, 89 bp, Homo sapiens
cttttggggggaaactaggtcgatggtcggcggcgcccggatgggcagctgagggaatctggaaacatcaaagctggattagaacatct

SEQ ID NO: 366348 - DNA, 100 bp, Homo sapiens
acattgtgttctgcaaaaaacaaaaaggatagcctccggcattccagaaatgggacgtcggtcatcagatactgaagaagaaagcagaagcaagagaaaa

SEQ ID NO: 366349 - DNA, 100 bp, Homo sapiens
ataactttcaacagtgaagtcaaaacggatgtaaataagattgaggaatttcttgaagaagtcttatgccctcccaagttcacagcatgtccgcctcggc

SEQ ID NO: 366350 - DNA, 98 bp, Homo sapiens
gccgtggtttttatcaccacacgactgggtatatttcctctctggaccctggctctcaagctcccacatcctggattagtgagtctcaggtttcccag

SEQ ID NO: 366351 - DNA, 95 bp, Homo sapiens
tgactggggttctgagactccctgtcccggaccgcagagcgtttcccaaagtgtattctgcggaactagcacctactgtgttctcaacaccgtgc

SEQ ID NO: 366352 - DNA, 90 bp, Homo sapiens
ccaggaagtaactttagaggaggatctgtccaatatcagatggaaatgatgcggagccttcgccatgtaaacattgatcatcttcacgtg

SEQ ID NO: 366353 - DNA, 100 bp, Homo sapiens
gcgccacgctcagcagcatcagacacatgatccgcaagaacaagtaccgccccgacctgcgcatggcagccacctggacagccaccggaggatggcgccc

SEQ ID NO: 366354 - DNA, 100 bp, Homo sapiens
gatcttggttcactgaaacctctgcctttctggttcaagcaattctcatgtttcagcctcccagttctgggaggtgatcagtgatgaacatggcatcgac

SEQ ID NO: 366355 - DNA, 100 bp, Homo sapiens
aagtcgtccccctctccgccccccaggaggggcgagagggagccgcagctgatgtcaggaatcagtttagacttgaaattcagtttttcctgaaactgat

SEQ ID NO: 366356 - DNA, 80 bp, Homo sapiens
ggatcagacttttgtgttgcagttcgggagagacgtggactggctggggctggaccaaggactccaggcttcagatgtgg

SEQ ID NO: 366357 - DNA, 75 bp, Homo sapiens
cggcctctcagctctagggccctctgcacactggcccccccagcggtacctggatgaggccgagagagagaagca

SEQ ID NO: 366358 - DNA, 73 bp, Homo sapiens
tgagtatgagcgtagagtggaacgggaaatacaggtatcaggatgaagatacacctcctcaagagcatatttc

SEQ ID NO: 366359 - DNA, 90 bp, Homo sapiens
gccaaggatgtggaaggatctacttctcctcaaataggagataagtgatcccggccgctgatctgtcgcagcagatctccactgcaggca

SEQ ID NO: 366360 - DNA, 95 bp, Homo sapiens
aagttcccgccccggagagcggcgaggcggcagccacaggaaggtgggagtcaatcattttgacaagtctcctgaaaggaacagctagcaggaac

SEQ ID NO: 366361 - DNA, 83 bp, Homo sapiens
caaccacgagacggccttccaaggaactgtggctgcaccatctgtcttcatcttcccgccatctgatgagcagttgaaatctg

SEQ ID NO: 366362 - DNA, 100 bp, Homo sapiens
ggaacaccagcactgagaaccattttggttctgaactgggcaccttgctgtgacaagctttatacttgccgcttgtgtcatgataacaatgaagatcatc

SEQ ID NO: 366363 - DNA, 100 bp, Homo sapiens
agttgtctggctagccaagccatcctgctgggtatactgctcaaaagagaaggccccaacttcatcacaaaggaaggttgcagagaacacatcttagaag

SEQ ID NO: 366364 - DNA, 98 bp, Homo sapiens
ttagagctggcagcagcatctcagcccaagagaaggacgagattgaggagctgcgggccgagatgctggagatgcgggacgtctatatggaggaggac

SEQ ID NO: 366365 - DNA, 82 bp, Homo sapiens
acgagccatttctccgtcgattaaagagccatctgtggtgccaattgaagtaagactttgaccccgacgcaggcttcagtga

SEQ ID NO: 366366 - DNA, 100 bp, Homo sapiens
cagggcctcgcctcactatggcagcagcacggcacagcacgctcgacttcatgctcggcgccaaaggcttccacctctacctcggatgggatgctgacct

SEQ ID NO: 366367 - DNA, 100 bp, Homo sapiens
gtgccctgaggaccagcttcctctggactatgccaagggtcctgaggacaccgtgagccagccaggcctggccgctgggcctgaccggccccccagcccc

SEQ ID NO: 366368 - DNA, 51 bp, Homo sapiens
ggccgagcggcgacggaccgcgaggggaatcccggaggcaagacacttgag

SEQ ID NO: 366369 - DNA, 74 bp, Homo sapiens
agcccatggaattccagtacctgccagatacagcccagctccatgaccttctccagctgaggcaggagaatgcc

SEQ ID NO: 366370 - DNA, 101 bp, Homo sapiens
atggagaggaggagagtctacagactgctttcaaaaaattaagagtggatgcatcagggacaagccacgccaaggccaaagctgaggcagcggaacaggcc

SEQ ID NO: 366371 - DNA, 83 bp, Homo sapiens
ttggatactcagcgtcgctggcagccgctgtacttggtctgggataaaagtgaaagtggtgattggcattgtactgctagctg

SEQ ID NO: 366372 - DNA, 88 bp, Homo sapiens
catcgctcggcatttgtttccaagaacaactcctactccttagctttcctggcagggtgtagaatgagccaaggagactcaaacccag

SEQ ID NO: 366373 - DNA, 100 bp, Homo sapiens
ggggacactttgcgttcgggctgggagcgtgctttccacgacggtgacacgcttccctggattgggttgcctgcccctatgttggctgcggagaatcctt

SEQ ID NO: 366374 - DNA, 121 bp, Homo sapiens
ccgctgaggtggacgtgtacaacccgacgaggaacgaatgggacaagatcccgtccatgaatcaggaaaattgcctaagaattatgacccaaaagttaccccagatccagaaagatggctg

SEQ ID NO: 366375 - DNA, 100 bp, Homo sapiens
ttcagccagatgtttctggaggttgggactggcatgctaaaccagataagaaacctgatcgggaagaaattcagatgagcaatatgggatcaaacacaaa

SEQ ID NO: 366376 - DNA, 82 bp, Homo sapiens
tggaagttcatttaagtcaccagacacagtcttgcaagagcaaaatccgtccctagccacacatactccaacgaagtggtta

SEQ ID NO: 366377 - DNA, 101 bp, Homo sapiens
gcctcattttggatatctgtgataaagttggtcagtctcgcactggcttactgcagtgcatggtattcagtcagcttttgatgaagctatgtcatactgtc

SEQ ID NO: 366378 - DNA, 80 bp, Homo sapiens
ttcgagttcaaagagaccctcggaaccccagctcaacattggcaatgtgctccctgtgggcaccatgcctgagggtacaa

SEQ ID NO: 366379 - DNA, 99 bp, Homo sapiens
gccgagcgggcccgttccgccggagctgaggaccagccaggcccagacatgtccgtccttgtaagttaaaagcttccatgggagccttccttcctaatc

SEQ ID NO: 366380 - DNA, 100 bp, Homo sapiens
gttttcctaaaagactgaaatgggggcgaccattcttagacaacagtgagctgggacggagacaagctccagtgtgtgcagaagggtgagaaggaggggc

SEQ ID NO: 366381 - DNA, 100 bp, Homo sapiens
tgaacatgaaccactagaaagacttcttcactcaacacacatcagcctgctccacccagagaagcacactttgtgagaaccaatgggaaggagcctgagc

SEQ ID NO: 366382 - DNA, 85 bp, Homo sapiens
tctcctctggcaggatgaggcgtgcaggcctggattctgaagggagtggtaatggaagtgaagatgcttcaaaggacagtggaga

SEQ ID NO: 366383 - DNA, 75 bp, Homo sapiens
aaacaagcagctttttgaattactttgttatgcagaaagtgctgctgagcttcgtgcttatctgaaatctaaagg

SEQ ID NO: 366384 - DNA, 82 bp, Homo sapiens
ctcgtcagcactgactttcagctatggaatcgaaaaggtggacaagtcctattttcaagagaagatgacttttaacagtttt

SEQ ID NO: 366385 - DNA, 82 bp, Homo sapiens
ggaagtgcggagccagcctgagttgggagaagagctccagagaagcggttctggtgaggttggaaggatgcagccacccggt

SEQ ID NO: 366386 - DNA, 132 bp, Homo sapiens
ttcgggccgagatgtctcgctccgtggccttagctgtgctcgcgctactctctctttctggcctggaggctatccagcccttatgccagcctggaccatcttggaggcagtgtaggatcatggaagaacttt

SEQ ID NO: 366387 - DNA, 101 bp, Homo sapiens
tgtggggcggtcccggccccgcagacctgcgaccgcatcaagcagtccgccagcggaaccaagcggcgcgtgttcatcatcgagaccatgggcggctactg

SEQ ID NO: 366388 - DNA, 75 bp, Homo sapiens
ttgaaaccaaaatgtcatttatagatccttaccagcacattataccccatctgctttgatatgattgaagaagca

SEQ ID NO: 366389 - DNA, 75 bp, Homo sapiens
gggcgtgagccactgtgcccagatgagattgtggggaacctgggtgaaggcacctttggcaaggtggtggagtgc

SEQ ID NO: 366390 - DNA, 100 bp, Homo sapiens
cagacctgtaggcctgatagactgattaaaccacagctgaaccttattcacagtgaaatcagtaatttagccggctttgaggtggaggccataatcaatc

SEQ ID NO: 366391 - DNA, 83 bp, Homo sapiens
caggagcggagacctggacgccctggacaagcagcacagagtgaagtcaccctgctgagaaatgaagtggcacagctgaaaca

SEQ ID NO: 366392 - DNA, 100 bp, Homo sapiens
ggcgtcttgcagccctatgagcatctcatctgcggcaagaacgccaatgatttgaatataacctgccgctttgcaggtgtattccacgtggagaaaaatg

SEQ ID NO: 366393 - DNA, 100 bp, Homo sapiens
acccagaccctctcctttccctttgagaccgtgaagagaaagatgcagtgtttgcatgccatggagatccaagtcatgatacagtttctacctgtaattc

SEQ ID NO: 366394 - DNA, 83 bp, Homo sapiens
ctccggggacccttccgtatctgcctaggcattttgctgtctcctcctaatacgggtgatctggaccctctggcatctctcaa

SEQ ID NO: 366395 - DNA, 82 bp, Homo sapiens
gtttgtgagcctgtggcgcggcttctgtgggccggaaccttaaagcctcccgcgacgatgcccctcaacgttagcttcacca

SEQ ID NO: 366396 - DNA, 98 bp, Homo sapiens
caggaggagatgcttcagagagaggaagccgaaaacaccctgcaatctttcagacaggttctggagatatatcttcagattctattgaccacagccca

SEQ ID NO: 366397 - DNA, 90 bp, Homo sapiens
gcctccttgcccgtgaccgtcgctagaactcagttgtgcgttgcggccagtcgccactgcttgcagtagtgtggttgacggtaattttga

SEQ ID NO: 366398 - DNA, 75 bp, Homo sapiens
catcactgccctccagaacatgctacaaaactgctccagaatcttatggcaagggccttatatgacaatgtccca

SEQ ID NO: 366399 - DNA, 107 bp, Homo sapiens
gaccgagaccgtgaccgagagcgtgaccgagagcgcgaatatcgtcatcgttagaaggtcctagcagaagatgtgactcagactgcctctgggtggggctggctggc

SEQ ID NO: 366400 - DNA, 98 bp, Homo sapiens
tggactctgcagagtgaagagaaaatagcaaacgatccagacggcagggagtgcatcaaaggtgtgaacacaggaggccagatgctccagtgcctgat

SEQ ID NO: 366401 - DNA, 118 bp, Homo sapiens
acactccctaccaggagcatgtggccttacacgcccccatcagaaagaaccggaggctgaagcaggccaaagaagaagctcaggctgaaattgaacagtaccgcctgcagagggagaa

SEQ ID NO: 366402 - DNA, 83 bp, Homo sapiens
cccgccgccgctcaccgcagccccctcctggcgacccgcaagtatagtggaggattacaagccaccgttctacgatgtggttc

SEQ ID NO: 366403 - DNA, 96 bp, Homo sapiens
caattcaagaaaactcttggaccatcctgggttcattaccagtgcaaatgtcaattgtcaagccttggacaaagctacacccttgttcattgctgc

SEQ ID NO: 366404 - DNA, 74 bp, Homo sapiens
tttaaacaggactggctacctcatttgcaggaactgtggctgcaccatctgtcttcatcttcccgccatctgat

SEQ ID NO: 366405 - DNA, 101 bp, Homo sapiens
aaaagccacccaggccttggtcctagcacccactcgagaattggctcagcagaactgtggtccaagtttccagtctctgattgtgaagaaggaatttgtta

SEQ ID NO: 366406 - DNA, 100 bp, Homo sapiens
atgtatttgtgttgttactgatgcagagatacagcaaaagagtctacatagggaatgcagagagcaaccaatgtcacctaccaagcccatcatgtcagca

SEQ ID NO: 366407 - DNA, 100 bp, Homo sapiens
cacatcagaggcagacaaaaacctttccaagcaagcatgggacaccaagaaggcagcggaggaggagaaagagatggacctcccggactcggcctcgagg

SEQ ID NO: 366408 - DNA, 88 bp, Homo sapiens
ttgctgagaatactcttcaagaatgatgatttcatgaatgcagatgaagatgggaagaagttgtccgatgaggacataagagcagaag

SEQ ID NO: 366409 - DNA, 75 bp, Homo sapiens
agaatagacctgaagacaaaaatccagaagtacaagcagtctgaccctcaaactgacacaagacctacagagaaa

SEQ ID NO: 366410 - DNA, 75 bp, Homo sapiens
agcgagctgtttgacccctttgacctcttcgatgtgcgagactttggaaagggtgttctaaggatacattttatt

SEQ ID NO: 366411 - DNA, 111 bp, Homo sapiens
ctgaaaatgcaggtagacccattcaaaactctgctttaccctctgcatctattacatccaccagtgcagctgcaggctgcagaagatgtcaatgttactttcgaagatcaa

SEQ ID NO: 366412 - DNA, 50 bp, Homo sapiens
cctgaactcaaagatgcccttaaaagcttgccacagctaccttggatggt

SEQ ID NO: 366413 - DNA, 100 bp, Homo sapiens
gaatttatgtccaccagtgctgtggcttccaggtctcaaaggcagaagatatttgggctatagggtgtatatttgcagaactactaacgtcagaaccaat

SEQ ID NO: 366414 - DNA, 83 bp, Homo sapiens
cgacatcagtgaagaagatcagcgggagatacagatgacccaccaagaattactcagaaccctgtgatcaatgggaatgtggc

SEQ ID NO: 366415 - DNA, 80 bp, Homo sapiens
ctcccaaagtgctgggattgcagccaatgaccctgttccagattcagttcctgaatagtgttggagatctattggatctg

SEQ ID NO: 366416 - DNA, 100 bp, Homo sapiens
gccaggtagagtgaagtcctacagagttatcaggttccagaccctgccttctcttctgaaaggtgaaaggaaagcaagccaggatggatatttacgacac

SEQ ID NO: 366417 - DNA, 100 bp, Homo sapiens
tgtatgtctttggagaacttctggagctggccaacgtgcaggaggaaaagcaggtgatattctcagtggagaccaggacaaggaacagaaagacccttac

SEQ ID NO: 366418 - DNA, 100 bp, Homo sapiens
tcaaatctactactgttcatggcagattattgctcagttgtaactattgtggaccagacaaatgtaaaactaacttgcctgctctttagtggaaactatg

SEQ ID NO: 366419 - DNA, 100 bp, Homo sapiens
cccctgagccagagcccctggagaaggaagcttgtgagaagtggaagaggcccttcagggtccccagccccaccccagccccaaaggaggctgttcgaga

SEQ ID NO: 366420 - DNA, 100 bp, Homo sapiens
gtgacttcccggacgctgggaaatggggccattgacgtttagggatgtggccatagaattctctctggaggagtggcaatgcctggacagtgctcagcag

SEQ ID NO: 366421 - DNA, 50 bp, Homo sapiens
ccagctcattgcctcagctaaactgatgggaagaagagttactataagaa

SEQ ID NO: 366422 - DNA, 100 bp, Homo sapiens
ggaatattggggggctcggctgcagacttggccaaatggacgggactattaaggtttctgagtcccttcaacatgatcctgggaggaatcgtggtggtgc

SEQ ID NO: 366423 - DNA, 75 bp, Homo sapiens
gtggtggcatcgtgggcatccagaccaagacggtgcagggtattaacgtgtcagggctgagtgttctgggatttc

SEQ ID NO: 366424 - DNA, 75 bp, Homo sapiens
gacaaggggggatatgtgatcaaagcatcagaaggaaatgacctcattcttgatggctgctgctaacttatggtg

SEQ ID NO: 366425 - DNA, 51 bp, Homo sapiens
cagctcaggaccaggcaccttctgtggaagagacaaaatctggctctgtca

SEQ ID NO: 366426 - DNA, 100 bp, Homo sapiens
tacaaacataggatgttttggcgagagatgtattcagtggaggaagctgctattcctgcaccaactgacctgaagttcactcaggtcacacccacaagcc

SEQ ID NO: 366427 - DNA, 90 bp, Homo sapiens
ggtacaaaccaggaagtcagggtatttccccagctcatctgtgaagccctgccctgtggatggaaggacgagatttctataagatcttgg

SEQ ID NO: 366428 - DNA, 100 bp, Homo sapiens
cagcaagctgcgccgcgccgcagtcggtcgtccgctggacaagcacgagggcgcgctcgagacgctcctgaggtaacacgtacacagacctctcggccgg

SEQ ID NO: 366429 - DNA, 100 bp, Homo sapiens
atggaggatgatttcatgtgcgatgatgaggaggactacgacctggtggtggaatgggtagcatgaacagtgtgactggaggaatggggatgggactgga

SEQ ID NO: 366430 - DNA, 83 bp, Homo sapiens
tccttgctggtgcatgcgtcgtcggcctctgggcagcagaaatggtggagtcaatgaagaaagtagcagggatggatgtggag

SEQ ID NO: 366431 - DNA, 111 bp, Homo sapiens
ggtgccggcctagcgtcctggaattacttcaatcaagcgaccatggccttgctgggtaagcgctgtgacgtccccaccaacggctgcggacccgaccgctggaactccgcg

SEQ ID NO: 366432 - DNA, 74 bp, Homo sapiens
cggagctttatctgttgtccgttattactcaggagcaatttacagcaatgagggatttatacatgaaaaatgga

SEQ ID NO: 366433 - DNA, 94 bp, Homo sapiens
agatagaaggacaaggacagaatcaccagcactggctgaagagcattggggagtcagcaatgtccgttgtgttaaatcagctgctgcccatgat

SEQ ID NO: 366434 - DNA, 51 bp, Homo sapiens
gacgagatgatcaaacgcctgaaggctggagcattggatttgctaaaggag

SEQ ID NO: 366435 - DNA, 90 bp, Homo sapiens
gccaagagggccaagggcaaaggccgaggttgtacatcctggagacctgaagaattctgttgaagtcgcactgaacaagttgctggatcc

SEQ ID NO: 366436 - DNA, 83 bp, Homo sapiens
gacgccatgtcgggttattcgagtgaccgagaccgcggccgggaccgaggtcggcagaaccaattgaaagaccaacagcaaca

SEQ ID NO: 366437 - DNA, 74 bp, Homo sapiens
ggaaatccttcggatggtgaactcattagaagtctattctggataagcaggttttgtgaagacatttattcttt

SEQ ID NO: 366438 - DNA, 100 bp, Homo sapiens
cttggactgagtcctgcaggacacagtctaaagaaggtgcatttattgtcagagattcaagacatttaggatcctacacaatttccgtatttatgggagc

SEQ ID NO: 366439 - DNA, 74 bp, Homo sapiens
cctacggcttctccgccatgcaaggctggcgcgtctccatggaggagctgctaagacacatggttgcacagaag

SEQ ID NO: 366440 - DNA, 76 bp, Homo sapiens
gattgtgtaggcgttggtcttctgatagcaactttaatgtgcacggatgtatttcaaagattgggctcaaattcag

SEQ ID NO: 366441 - DNA, 101 bp, Homo sapiens
ccagaactgattagccgtctggagcaaagacaggagccctggaatgtgaagagacatgagaccatagccaaacccccagcgccgcgcggtgaggttctcta

SEQ ID NO: 366442 - DNA, 100 bp, Homo sapiens
gtgtggagagggactgacgtgtttggagggaaatgggaatgtacacgataattaaagagtaaagttgtgctcaacggcatgtactggcattgaaaacatt

SEQ ID NO: 366443 - DNA, 50 bp, Homo sapiens
tctggagacattcgacagctaccccgatatgcagcagcctatgaatgtga

SEQ ID NO: 366444 - DNA, 114 bp, Homo sapiens
caggatctacaaccagagcttcttccagagccttctcaaagccacaggtcagaatggcggcagtggagcatcgtcattcttcaggattgccctactggccctacctcacagctg

SEQ ID NO: 366445 - DNA, 75 bp, Homo sapiens
tgctttgggacatttaacgatcagaaacgtggcatctgtcgaccctggacaaaggcatttgtttacctgagcaat

SEQ ID NO: 366446 - DNA, 100 bp, Homo sapiens
cgctatgtggtgctgaaaggggaccagctctacatctctgagaaggaggagtggaagctggacacactatgtgacttgtatgaaaccctgaccatcaccc

SEQ ID NO: 366447 - DNA, 100 bp, Homo sapiens
aacgtcttggaggaaatagcttcttttggagaaaggattaagaaaggtcctgctgtactagccaccaaagcagctgctggtactaagaaatatgatctta

SEQ ID NO: 366448 - DNA, 74 bp, Homo sapiens
ctgctattctccgagcttcgcaatgatacataatccgtggggacgatgaagagtggaatgaagttttgaacaaa

SEQ ID NO: 366449 - DNA, 82 bp, Homo sapiens
tgccgctttaaggagaactgcagggtctccgtctctccaccgggggcttcatccttccagggaggagaagagggactccaga

SEQ ID NO: 366450 - DNA, 100 bp, Homo sapiens
gatgtggaggaaaacaacttcgagggcagagcttctgcttcagtttacccaacctcagcaaacatcgtttgctttggagaggaacttaaggactcagcag

SEQ ID NO: 366451 - DNA, 100 bp, Homo sapiens
gcgctcgcctcagcccggcggcggcggcggccgaacaatgaagctcctgaagccgacctgggtcaaccacaatggcatgggcaagaaggacgaccccaag

SEQ ID NO: 366452 - DNA, 98 bp, Homo sapiens
tgaagatgtcttttgaaaggtgtactgcaaggaacaaaatgtttgtaaattctccttttaccaaggtgtgtgcagtggcctcagggatccggaaagtc

SEQ ID NO: 366453 - DNA, 135 bp, Homo sapiens
tgaggcttatgctcttatggcccatgccatggaggaagtcaagaaatttctagtaccgttcacagaagaaaagcttggccaggctgagaagacagaattggatgctcacttagagaacctccttagcaaagctga

SEQ ID NO: 366454 - DNA, 78 bp, Homo sapiens
aggcggtgatgaagaatccccccgaaaggaccccccagctgtgcaaccatattgcttctgggaaaaaatgtcaatatg

SEQ ID NO: 366455 - DNA, 75 bp, Homo sapiens
tcattcagaagatcaggtacacaaatgcacgcgacaggaaccaggtgatgcaggttctgaatgctgatgccattg

SEQ ID NO: 366456 - DNA, 74 bp, Homo sapiens
gctcagcgactgtttgatgacgtcccgcaggtcacggagctgctggacgtctccatggagctgggctgtttcct

SEQ ID NO: 366457 - DNA, 95 bp, Homo sapiens
ggagctttgcagctgacctacatctcgaaggcaatccagcatccagcagatgagaagttgcaagagaaggcatggggtgcagttgttccactagt

SEQ ID NO: 366458 - DNA, 75 bp, Homo sapiens
aacttctttatccttcgaaggaagcctgtggaggttcacgagctcatgaagctgtgctgggcccctagcccacag

SEQ ID NO: 366459 - DNA, 90 bp, Homo sapiens
gtcaccgtgtgggagcgggagctgcggaaagaaccatggccaactgtgagcgtaccttcattgcgatcaaaccagatggggtccagcggg

SEQ ID NO: 366460 - DNA, 74 bp, Homo sapiens
gaccgcctgagctttctacaccggcctcgatgacttacgagccctcaaggggaagcattttctcctggacccct

SEQ ID NO: 366461 - DNA, 75 bp, Homo sapiens
actttggtgccctcaacatctctcagagacgaaaggtggctgaatccacagaggagcctgctggttctaatcggg

SEQ ID NO: 366462 - DNA, 100 bp, Homo sapiens
ttactggcatgctcaaggaatgggctattaaggtccagccagatggtgtcaccctggagtacaacccctattcttggaatctggtatagctggagctgtg

SEQ ID NO: 366463 - DNA, 99 bp, Homo sapiens
acttgcctgctctctacactattttccaaggagagtgggatggagtaggacctcttccagactgtgctgaaccaccaaaagggatccagatgctgtggc

SEQ ID NO: 366464 - DNA, 98 bp, Homo sapiens
cgcagtctccctgctacttaccacctgccgccggttgccggaggccatcgaggaagtgaagaacagagctggcctgaacctccaggacttcagccctt

SEQ ID NO: 366465 - DNA, 83 bp, Homo sapiens
ccaggccccagccggcagcatgctgaggacttcctgggagaggagcatcagatccatgctgctgctgactcggagccccacag

SEQ ID NO: 366466 - DNA, 96 bp, Homo sapiens
aagtggtgaaggagtgtgtgcagcgaatgcaatgagagccactatggaacaccatgccaacagaggtgtttacccccctattcaagttcatgtcac

SEQ ID NO: 366467 - DNA, 121 bp, Homo sapiens
tggacttggaacaaaaggacttgtacagagatgtcatgttggagaactacagcaacttggtctcactggagtgctgcagcagctcccagtccagtgctaggaaacattcccccaggagatg

SEQ ID NO: 366468 - DNA, 90 bp, Homo sapiens
aaagtccttgaagctttacagttaatttagtagcctctagttcgttagtcaaaacgtgaaaaaaaagacctgctttgccctgggaaatag

SEQ ID NO: 366469 - DNA, 101 bp, Homo sapiens
gtactttgggcttcatcatggaggactacctgcagggttgtcgagctgctctgcaggatgctccagaccttgtatgattacttctggtgggaacgtctgtg

SEQ ID NO: 366470 - DNA, 100 bp, Homo sapiens
gacaccaacatcacccacccatttgagtttgacttctatctgtgcagccacgcaggcatccagagatggacagagacgtatgtgcgttggtctcctaagg

SEQ ID NO: 366471 - DNA, 75 bp, Homo sapiens
gctctgcccggcgagtcgggctctggaggaaaagaaaggtgatctgcaactctttcaccatctgtaatgcggaga

SEQ ID NO: 366472 - DNA, 114 bp, Homo sapiens
ctcaatatctgtcttcggtggactccttcggcagtccacccaccgccgccgcctcccagctcagagcccgggcgctgtggaagagattctagaccgggagaacaagcgaatggc

SEQ ID NO: 366473 - DNA, 75 bp, Homo sapiens
tgctcttcctcccttcgctcgcaccatgacagccctcagcgcctttttccaggagaccaacatcccctacagcca

SEQ ID NO: 366474 - DNA, 75 bp, Homo sapiens
gccaagggccaccatcgtcttgctgggtgatcgtggacttcctggttttcctgggcttcatggcatgccaggatc

SEQ ID NO: 366475 - DNA, 75 bp, Homo sapiens
gtgctcaagagcctcattatctaccacccgagatgccccaagtcattgaagtcaacaagagagacatagtcttcc

SEQ ID NO: 366476 - DNA, 80 bp, Homo sapiens
gaagcatcactggataaatttattgaatctattcagtcaattcctgaggcaaagcagagagcagaggttcttcagtccac

SEQ ID NO: 366477 - DNA, 100 bp, Homo sapiens
gtatggagctcaagttcttaattattcagaatgctgcggttttccaagagaatagtgacagtggtacaggaaagaaagaaaaagaaaagaaaaacagaaa

SEQ ID NO: 366478 - DNA, 98 bp, Homo sapiens
gtcaaacgcagaaggactgcctcactgagcaaccaagagccctgatccttcaccagctaggccgctacagtctggcggagaagatcctccgggacgcg

SEQ ID NO: 366479 - DNA, 90 bp, Homo sapiens
agtactgattgaattactcaaggctgcctctctgcaaagttgagggaggctgccggcgtggaccgcgggaaggcggggctggggctcggc

SEQ ID NO: 366480 - DNA, 100 bp, Homo sapiens
tctcaagctcgctatggagaattacgttttaattgactatgacaccaaaagggagtgcatccgccccaacccttttccccctcgtctcctgtgagaattc

SEQ ID NO: 366481 - DNA, 75 bp, Homo sapiens
gggttagagacatgctgactgatgagatcaccaaggcagctgcaaagtagagatggattcctggaaatacctcct

SEQ ID NO: 366482 - DNA, 74 bp, Homo sapiens
ctctgactccaggttatcatggattcccagcgcgggacagccagactgggatggaaaggtgtctgagattaaga

SEQ ID NO: 366483 - DNA, 90 bp, Homo sapiens
aggaaggtctcacctgaggtgaaccttcgaccttggacttctcagcctccagaatgtgaagctgtggtctaccaatctagacaactcagt

SEQ ID NO: 366484 - DNA, 100 bp, Homo sapiens
gccggttttgagaggggaagatggggacaaagccgctccacctcccatgtcggcacagattgtgaataagtggaatacagctctcattggccttatgaca

SEQ ID NO: 366485 - DNA, 100 bp, Homo sapiens
ctatgcttagtaaaaaattgggtgtataccagtggctgtccctagtaattttgatgacaggagttgcttttgtacagctggtacaaatcatcataaacac

SEQ ID NO: 366486 - DNA, 83 bp, Homo sapiens
cagcagcccagacgcggcacagagagggcctgggagcttgctgcagcttcagcggagctggagtttgttcagatcatcatcat

SEQ ID NO: 366487 - DNA, 49 bp, Homo sapiens
gctgttgagcaccttcctaactgtagaaactggcgatggaatatgagag

SEQ ID NO: 366488 - DNA, 90 bp, Homo sapiens
aagctctttgggaagtggagcaccgatgatgtgcagatcaatgacatttccctgcaggatttctctctgatcaaacggacagttcaggac

SEQ ID NO: 366489 - DNA, 100 bp, Homo sapiens
ccagatgtgtaatacattactgcagagaaacacggaaactaggaagaggaaattaactatctgtacttataagccttgctcgaggttttgccctgctgag

SEQ ID NO: 366490 - DNA, 100 bp, Homo sapiens
gggagcgctgttttcgtgatcttcagaccccaggttctttggttaaccagcttcgtggcatcctcaagcttctgcagctcctaaaagttcagaatgaaga

SEQ ID NO: 366491 - DNA, 99 bp, Homo sapiens
tggagttgaggaaggaagtagagggagatgatgtgcctgaatctataatgctggagatgaaagatgctgaagaaggaagaagcaattccatggcctgga

SEQ ID NO: 366492 - DNA, 100 bp, Homo sapiens
gttgaagatgtccttaccagctttgacaatacaggaaatgtttgggatatcattttcaatgcccaatacccagaactgcctcccgattttatctttggag

SEQ ID NO: 366493 - DNA, 98 bp, Homo sapiens
gaaattcttcatctgaaattacctctcagactttctgtaaaggaaaacaaggagcagtcgaactgtcccggcgccaccccatcgcgtcctggctgtgc

SEQ ID NO: 366494 - DNA, 90 bp, Homo sapiens
ccttagaggaagtgatagtgggcagagcagaaaacgcctgtgttccaccgttcaccatcgaggtgaagggcaagtgtccagagaatggct

SEQ ID NO: 366495 - DNA, 100 bp, Homo sapiens
ccctgaccgagacctgggccgaaaaagggtgcagacgtctggttcaaagagttggatatcaacactgatggtgcagttaacttccaggagttcctcattc

SEQ ID NO: 366496 - DNA, 99 bp, Homo sapiens
ccatctcctgggtcccagcgattctcctgcctcagcctcttcctatttcacaagtagggaaactgaagcccaggctggagtgcagcggcgtgatctcgg

SEQ ID NO: 366497 - DNA, 90 bp, Homo sapiens
cccaatttcccagctgctaaaggaagaggaagagaaactcttgctactcagttggatctagcagaaacaaaagctgagtctgagcagttg

SEQ ID NO: 366498 - DNA, 50 bp, Homo sapiens
ctctgacatcactcaggttacccccagccttcaacaattggatccatggc

SEQ ID NO: 366499 - DNA, 101 bp, Homo sapiens
ccttggagtaattcgtcgacaggaagtggagagactgattttggacctcagctcaagaacctcaataagaagctcttcacggtggtcgcctgggatcctcg

SEQ ID NO: 366500 - DNA, 98 bp, Homo sapiens
gataaatctcaaagatctcgtacaagatccttcttttttgctaatccagactttacacaacctatctcagaagttgtagatgaagtaattcagaattg

SEQ ID NO: 366501 - DNA, 90 bp, Homo sapiens
cttctggcattgatggcccaagaacagaagttgccagaggaagtggccacacccactacagatgagaaactctataaaacaggtcgggag

SEQ ID NO: 366502 - DNA, 96 bp, Homo sapiens
cttgctgacagctcaaactatcacatctgagaccccaagcagcaccaccacaactcaaattaccaaggttaaggctacctttccagataatccaac

SEQ ID NO: 366503 - DNA, 96 bp, Homo sapiens
ccactctctgggggcaggtgggcccggtgacagctgcatatctatgtgagactgaattttcctcttagacttcagctaaaactgtgtattgcatca

SEQ ID NO: 366504 - DNA, 75 bp, Homo sapiens
agcccgccctccccaagtcgacgccgcaacccggggaaagcagagcctcagctcaaaggcatcgtcaccaaactg

SEQ ID NO: 366505 - DNA, 75 bp, Homo sapiens
cttttggggggaaactaggtcgatggtcggcggcgcccggatgggcagctgagatctcacattcttgaaggtggc

SEQ ID NO: 366506 - DNA, 100 bp, Homo sapiens
gttctacttcacactgcagaactgggttctggactttgggcgtcccattgccatggtgctcagagccagaccctggtttgaggagccccccaaggctgtg

SEQ ID NO: 366507 - DNA, 90 bp, Homo sapiens
gttgatgaccctcttccaggttacatacagcttacatcttgcatcctcaagcggtggtaataagctgcagtcaacaggaaataaagcaga

SEQ ID NO: 366508 - DNA, 98 bp, Homo sapiens
tgcagtgtacagtgccagccgtatccagcactctattaccaggttttaaacttcgccatgatcgtgtcttctgcactcatgatatggaaaggcttgat

SEQ ID NO: 366509 - DNA, 51 bp, Homo sapiens
ctgaagctggtgcgcaaggacagtatgatgaagaaggtgaagaagcggatg

SEQ ID NO: 366510 - DNA, 100 bp, Homo sapiens
tcagcatctacgggaggcaaacttgtaaaacctggaacagcagcatcattgtcaaaggtttgattcctgggcaggcatggctctggcccgggccagccgc

SEQ ID NO: 366511 - DNA, 99 bp, Homo sapiens
agacaaaccccacaagcactgcatacgtaaccctccactgagtgaagaaatgttgcctcctggagagtggatgtgtcaccggtgcactgttcgccgaaa

SEQ ID NO: 366512 - DNA, 83 bp, Homo sapiens
cccgcgttcacagccccagcgcaggagaagacagactgctgctttggacctgttggtaatgatggcctgagctaaacatctaa

SEQ ID NO: 366513 - DNA, 82 bp, Homo sapiens
gaaggtctctggagacatcttcagcagagctcaggccccggggcctccagcggcaccagcggagaccacggtgagctcgtcg

SEQ ID NO: 366514 - DNA, 98 bp, Homo sapiens
gctccatttcgaattctgcttcaagttcccggctcccaggtttattctcccatagcatgtggtgcagtcagcctcagtttccaaagccggaaaaggat

SEQ ID NO: 366515 - DNA, 87 bp, Homo sapiens
aacaagagagaaagagtggatttcagcctgcacggatggtcttgaaacacaaatggtttttgatcacaaaatttgtccaggatagac

SEQ ID NO: 366516 - DNA, 75 bp, Homo sapiens
cctcaatttaagcctgatctaacccctagaaacaggtctcgtctacagaggactggtctttcaatagcaagtttt

SEQ ID NO: 366517 - DNA, 75 bp, Homo sapiens
agacctacgtggcagctgtgaaaaaagccatttccgaagaaggacagaataacgggctcccagattcacaagccc

SEQ ID NO: 366518 - DNA, 75 bp, Homo sapiens
tatgatcgcattatcgaaggtcactacaatggtgaacaactggccaattataggcagagcatcgacaagttgaag

SEQ ID NO: 366519 - DNA, 100 bp, Homo sapiens
agagtgacctttgcatctgcctgtccagccagcatggaaccaaagcggatcagagagggctaccttgtgaagaaggtactccaaagattcaggtttactc

SEQ ID NO: 366520 - DNA, 98 bp, Homo sapiens
caacattgagcgtctggaggaggcgcagttgtgtagcagttgagtaatgctggttagctgttaaggtggcgtgttgcagtgcagagtgcttggctgtt

SEQ ID NO: 366521 - DNA, 89 bp, Homo sapiens
gttaaaacgggtcagttggcagccatcaaagttatggatgtcactgagattcctcggacaagaaggaaaagaaatcttttagccttgag

SEQ ID NO: 366522 - DNA, 100 bp, Homo sapiens
tggaggtccaaggcccccattgaggatacctaatcagattctgtttctggcgtctgcatacgcaagtccccaactcgctgaggagagctgttcagctatg

SEQ ID NO: 366523 - DNA, 98 bp, Homo sapiens
ctgaatacctctcattatttattgatgataagctgaaaaagggagtcaaagggtccgtccactctctcatcagtgactttaaggacccgccgactgct

SEQ ID NO: 366524 - DNA, 75 bp, Homo sapiens
ggctccgcgcccgccgcgccgggagcagcaccgcggggccaggtatggctgatggcaagcattgtacttttccac

SEQ ID NO: 366525 - DNA, 83 bp, Homo sapiens
gccgtcgccgccgccaccatgcccaagagaaaggaatcccagtcagaagttccagcctgccactgttctctgatgccatgcca

SEQ ID NO: 366526 - DNA, 87 bp, Homo sapiens
tctactccttctacaggtgtgtatgcaatcaaggagaccgcgaaggcgtacattcccgggtgttgcttccaggagaaaccctgaacg

SEQ ID NO: 366527 - DNA, 123 bp, Homo sapiens
aacatttttctctgtgtctggatgtttataggcatcatattaacagataattgtatggaagagatacagtgattttaagaaactacacaaagaactatggcaaattcacaaaaacttattccg

SEQ ID NO: 366528 - DNA, 75 bp, Homo sapiens
ctcgcgatgagtggtctcggcaggctcttcgggaaggtggaatcccccaaagaaggtaaagggagcaagccttcc

SEQ ID NO: 366529 - DNA, 75 bp, Homo sapiens
cgagagtggcagaggagctggcggagagcggcctgcgggcgatcgggccgagccgctgccatggcccagacactg

SEQ ID NO: 366530 - DNA, 98 bp, Homo sapiens
agccggtaacgttgctggaccgggacgcacgctcagctgaggaggacccccaaaggtgaaaggtgtagcagtcactcggcctacacccacagcatcga

SEQ ID NO: 366531 - DNA, 107 bp, Homo sapiens
gagctcagatatcgggctgaacggtcaaagacattcacaacatggatgcagccccaacaagcgaggcccacccacgtacaacgagcacatcaccaagcgcgtggcct

SEQ ID NO: 366532 - DNA, 101 bp, Homo sapiens
aggacgccgagcggtgactccccgccgctcccgggggccgtgacgatgagtgaccgaggaggtggcgttcctttgaggaaaattgacagacttttcaacta

SEQ ID NO: 366533 - DNA, 87 bp, Homo sapiens
tacaacacccgcgagcacagccaaaaattcttcctgggacacaacgacgacattatcagaatggactgctgaattatgaagtatttc

SEQ ID NO: 366534 - DNA, 83 bp, Homo sapiens
ggaagagaactactcctttttacctttggttcacaacatcatcaaatgacaatgcagatcttcgtgaagactctgactggtaa

SEQ ID NO: 366535 - DNA, 48 bp, Homo sapiens
atagcccttcagtactgttgtacgggatcgatttgcttagtggtataa

SEQ ID NO: 366536 - DNA, 87 bp, Homo sapiens
gctgaagaggaatcaattttggttatcaatactctggctgaccatcatcatcgtgggactgactttggtggaagtccttggttacat

SEQ ID NO: 366537 - DNA, 83 bp, Homo sapiens
cccgcagagacttctactggctgcgctcctttctggccggaggttatcaatactctggctgaccatcatcatcgtgggactga

SEQ ID NO: 366538 - DNA, 75 bp, Homo sapiens
gtagtgagttgaaactcttggaggaagcaaccatttcagtctgcaggtcattagtcttcccaagggattgttgaa

SEQ ID NO: 366539 - DNA, 80 bp, Homo sapiens
gtcagccttcccagtagctgggaccacagtattctgaagaagccaataatctcattgaagaatgtgaacaagctgaacga

SEQ ID NO: 366540 - DNA, 51 bp, Homo sapiens
gagactcctgaccctcagaatgtatcagaggttctggtgatagcagtcatt

SEQ ID NO: 366541 - DNA, 76 bp, Homo sapiens
aaacaggagcagaacttggaccagacctacttggatgatggcccacctgccgtttgctgtcattggcagcacagaa

SEQ ID NO: 366542 - DNA, 96 bp, Homo sapiens
gtctggcttatgcagcacctgagttaatacaaggcaaatcatatcttggatcagagaatggttgttgagccgaatctccaagatgaaagtgaattc

SEQ ID NO: 366543 - DNA, 82 bp, Homo sapiens
tggaagctgagcccatattaagagatgtcagtctctgctttctatccgtcaagatgataaagtcgtgtgcccgagaaccaaa

SEQ ID NO: 366544 - DNA, 99 bp, Homo sapiens
tggatgttttaccaattttgaaggaaaaagttgcatacctttcagttcaacccaatggaaatggattgaaagagtgaaagtcactggtctcaaagaatc

SEQ ID NO: 366545 - DNA, 75 bp, Homo sapiens
cacctgtccagcatccgaccaccgaggctggagggggagaacacccagaatcaagctatagaagtggtctggagt

SEQ ID NO: 366546 - DNA, 98 bp, Homo sapiens
gcagggttcatgacctggaggaaggtgctggaaacgtgcgtagcaacagtaggccgagtatccaacgttgatcataacaaacgggtcattggcaaggc

SEQ ID NO: 366547 - DNA, 50 bp, Homo sapiens
tcaaactgaccaagcattgaaaagattcatgatgttgctatcaaaagttg

SEQ ID NO: 366548 - DNA, 82 bp, Homo sapiens
ggatgacatatttttggacctgaaacagaaattctggaacacctatatgttgtgctgaaagacattatgacaccgccaaatt

SEQ ID NO: 366549 - DNA, 98 bp, Homo sapiens
gcaaagcctatggcaagaatttgtctcaggaaaggattcatgcttaacaagtctagcatcatcatcacttaaacaaattcttggagattctttttcac

SEQ ID NO: 366550 - DNA, 60 bp, Homo sapiens
ggatcggcccaaggccagttctccgcagggttgccatctaccagacttggcacctttcta

SEQ ID NO: 366551 - DNA, 71 bp, Homo sapiens
gaatatgactctctgcctgaaaatagcgagacagagcccccctccatgcgcctgaaggcccgacccagcag

SEQ ID NO: 366552 - DNA, 75 bp, Homo sapiens
aaggcttatgaggatggctgcaagactgtcgacctaaagcctgactggggcaagatcctgttcatcttcatcgac

SEQ ID NO: 366553 - DNA, 73 bp, Homo sapiens
cccgggatcgagctgagaatagggacggccccaaggcagtgctcggaatgtgaccaggcagggagcagtgaca

SEQ ID NO: 366554 - DNA, 90 bp, Homo sapiens
atggaacacggctccatcatcacccaggcgcggagggaagacgccctggtgctcaccaagcaaggatgtggctgggccgccgggccctgt

SEQ ID NO: 366555 - DNA, 71 bp, Homo sapiens
gcgtcgggctgcaggagaagatggcggtctccacaggagctggaagctatcaaagctcgagtcagggagat

SEQ ID NO: 366556 - DNA, 100 bp, Homo sapiens
taccactccagctgctgggaacgggcgagaaagaggaggaggcgagaaactcccaccgacccacagagacatgtgcattgccattgcgatttctcttctc

SEQ ID NO: 366557 - DNA, 82 bp, Homo sapiens
cctggatcatggctgccgcgccgccgctacgggaccgcctgagctttctacaccgggatgaccgagtgggagacagcagcac

SEQ ID NO: 366558 - DNA, 92 bp, Homo sapiens
tgttcacgcacgggatccagagcgccgcgcacttcgtcatgttcttcgcgccctggttctgcggggagtgtctccagccctgcctgcaggtg

SEQ ID NO: 366559 - DNA, 75 bp, Homo sapiens
ttaagcacacgagctggaggactgggtatcaatctcactgctgcagacacaacaattccaagctcgagtgtctcg

SEQ ID NO: 366560 - DNA, 100 bp, Homo sapiens
gctgaatatcagctacggcttcatgaagctgaaaagaaacaccaggctttgcttttggacacaaacaaacaggtggtggtcaccaatacaattccacatg

SEQ ID NO: 366561 - DNA, 100 bp, Homo sapiens
caagaacttcctcgcactgtgacatgtctgatcccttgctcccatccctgcagcatgaacaaggtgcaatggatgagcttcatagtctggatccaagaag

SEQ ID NO: 366562 - DNA, 74 bp, Homo sapiens
ccccctcctggcagcccagacgtttattcagaggccttcccttcttcttggtggtgttcttgagtaagataatc

SEQ ID NO: 366563 - DNA, 100 bp, Homo sapiens
gtgcagtgaaataagctggtcacagagagacaaatcctgggtgatcccacttacatgaggttaaataggattgcgaatcaggtggccattcagcggaaga

SEQ ID NO: 366564 - DNA, 90 bp, Homo sapiens
aggatctgtaaaagcataattgaatttgtttcacccccgtggattccagtgggcccgacagcgcaacagtttaaacccattttcctgaac

SEQ ID NO: 366565 - DNA, 75 bp, Homo sapiens
gtgatgaaggggataacttctatgtgattgatcaaggagagacggataccacagctcctttcaaaatccctaaaa

SEQ ID NO: 366566 - DNA, 74 bp, Homo sapiens
gaattcttccagtttctttatcctaaaactggtgtaacagattgaagacccggaagaaccagaccccaagaaaa

SEQ ID NO: 366567 - DNA, 74 bp, Homo sapiens
cgcattgccatacctgatgcctctaagctgcaattcatcctagcaggagtgtgctgaaaaacaaggccaaattg

SEQ ID NO: 366568 - DNA, 83 bp, Homo sapiens
aaggagcgcctggctcttctccacaaagacacacaatgcagatcttcgtgaagactctgactggtaagaccatcaccctcgag

SEQ ID NO: 366569 - DNA, 100 bp, Homo sapiens
ccagtcgcctccaggccaagagggatccttcacccgtgtctggataacttcaaactaatgtgtactaatgccatgatttacaataaaccagagaccattt

SEQ ID NO: 366570 - DNA, 97 bp, Homo sapiens
gcggaggcttgtcattctgacccggggattcctcacagcgtctggcagatcgatgccttccagcacatgcagcattttgtccagaccatgcagcaac

SEQ ID NO: 366571 - DNA, 131 bp, Homo sapiens
gtaaggtgcgcagcagaaagcatttaaccagcatggctacttcatattttggaaagcagtttttaagacaaaatgatatggaacctagcaaagctgttccactgaatgcatctaagcaagatggacctatg

SEQ ID NO: 366572 - DNA, 74 bp, Homo sapiens
taaaagctgatgatcggaatgattacaggaaatccctttggaccaggtggacatagacaaagagaatgagatgc

SEQ ID NO: 366573 - DNA, 75 bp, Homo sapiens
gcccggaaccactctttgtgccgcagcttcgcagctccccgaagtgcataccaacagctgtgacaacatctccca

SEQ ID NO: 366574 - DNA, 90 bp, Homo sapiens
cattgaagtgcttggagtgcagaactgaaagaggtgctcctgacctctgataaagctgcagccaatttctcagatcgttctttgctgaag

SEQ ID NO: 366575 - DNA, 50 bp, Homo sapiens
gctccgtcatccatgccactaatcaaccttgtcctatgttaggcagctgg

SEQ ID NO: 366576 - DNA, 100 bp, Homo sapiens
attaccaccttcaaaatggagatgttgttgggcagcattcatttcctggcaggttttgcacactagggaccaagaagccctcggggacactgctgagaaa

SEQ ID NO: 366577 - DNA, 82 bp, Homo sapiens
ggaaccactcattcacttctagacgacaaaatgcaaaaaaggaggccaaagactttgccataaaattttgagtagaaaaatc

SEQ ID NO: 366578 - DNA, 77 bp, Homo sapiens
ttgtggtagattactatgagaccagcagcctctgctcccagccagctgtggtgttgagactgagctaaagttaatct

SEQ ID NO: 366579 - DNA, 100 bp, Homo sapiens
gaaatggccgctgtgtggttgcaacggagataaattcccggaaccgcgattcggcgtgtcaggtgattgctggcttcaaccgccttcggcaggaacagcg

SEQ ID NO: 366580 - DNA, 97 bp, Homo sapiens
tcccgaggcaaacagaaccatgtgctaaagaatgtggaaacgcacacaggatcattggctacacacctgatctggacccagagacagtggatgatgc

SEQ ID NO: 366581 - DNA, 100 bp, Homo sapiens
catgtggatgaagctctagaacatttgatgagagttttagagaagaagactgaagactaatagggatgccaaaggaaaaatatgatcctccagatcctcg

SEQ ID NO: 366582 - DNA, 98 bp, Homo sapiens
tcacacgcgccggctgctgctactactaccactttgggctgatggcaactggaatactcccccagttgcaagaggcgcaggaccgtggaagacttcaa

SEQ ID NO: 366583 - DNA, 100 bp, Homo sapiens
gaaggacaaggacagaatcaccagcactggctgaagagccagtcttggtgctctgtgttcacctggttcatctgaggagctgcatctaccctgcccatgc

SEQ ID NO: 366584 - DNA, 46 bp, Homo sapiens
ccccactcctgggccgtccctgaagcagatccagtttgctgaccag

SEQ ID NO: 366585 - DNA, 75 bp, Homo sapiens
gccatgccaaggactatgtggaggtgaaaggtgtagcagtcactcggcctacacccacagcatcgaccttgtgaa

SEQ ID NO: 366586 - DNA, 83 bp, Homo sapiens
gaaaaaacctacacctataataccagagcatctagataaaacccttcccaccatgaataatctcatcagccaagataagcgta

SEQ ID NO: 366587 - DNA, 90 bp, Homo sapiens
cggactatctcctgagacgtcacacagctgggaactgatccgcaatacagcaaaggagattacctggggcaattgatgttatcggtcaga

SEQ ID NO: 366588 - DNA, 100 bp, Homo sapiens
gagtgactcccaccctgttgaagagattgaacttcatccccagttcctgtgaagctttctggatctcgtcttccaagaagaaaggtgagcagccaacagg

SEQ ID NO: 366589 - DNA, 75 bp, Homo sapiens
cctgatctaacccctagaaacagctatcatggtgaacttacttcagattgtgcgggaccactgggttcatgttct

SEQ ID NO: 366590 - DNA, 75 bp, Homo sapiens
aatctttacctacactgactctgatagatacaccaatttggaggagaatcctcactatggatgggctcattgagg

SEQ ID NO: 366591 - DNA, 97 bp, Homo sapiens
gccctgacttacctgaatgcactgcagcattcaattcgtctttctggagtggaagaccacgtgaaaaactttagtgtatgtggtagaagaccaaaga

SEQ ID NO: 366592 - DNA, 82 bp, Homo sapiens
ccagcagcccccggcccgcgctgcccgcactcctggtcctgctcggggctctgttcccaggagcatcagatccatgctgctg

SEQ ID NO: 366593 - DNA, 76 bp, Homo sapiens
gaggggggagcggcgttggaggccaccgtttccaggacagtgtcccaatgggctctcctgccttccttctctctct

SEQ ID NO: 366594 - DNA, 98 bp, Homo sapiens
agggcctcgggtcttcggcgcctctgaccctcgcaggttgctgcctttcggtgcagaaccgtcaaaatgcagatcttcgtgaaaacccttaccggcaa

SEQ ID NO: 366595 - DNA, 88 bp, Homo sapiens
gtcaggactaagagaagtcacaaaacagcagatttcccaagagcagcggaaaatgatccagtcacagaatcctgttacacctgggatt

SEQ ID NO: 366596 - DNA, 82 bp, Homo sapiens
tggcgccgggtcccgcggggaaacaagagtgagccatggagctacgtgtggggaacaagtaccgcctgggacggaagatcgg

SEQ ID NO: 366597 - DNA, 97 bp, Homo sapiens
agactccaagggagtaaaagagctgatgaaacaatggcaattgcagaatgaagaagagtctggagaacctgaacaggctgcaggtgatgctcctcca

SEQ ID NO: 366598 - DNA, 100 bp, Homo sapiens
aagtgtggcaagctcatcaatgctgtcgagcttaaggactacaaatccctccaggatatcattgccatcctgggtatggatgaactttctgaggaagaca

SEQ ID NO: 366599 - DNA, 123 bp, Homo sapiens
gacgggggcggcggccgcgcgggtctggcgggaccggtttggaagactttgccggcctgcagaatttcgctaaggagtttgtgatcagtgatcggaaggagctggaggaagatttcatcaaga

SEQ ID NO: 366600 - DNA, 50 bp, Homo sapiens
accctatttaggttttaaacagacatgatgccttcttctgtagagtgggc

SEQ ID NO: 366601 - DNA, 75 bp, Homo sapiens
aaaataattaacttcaagaccccagaggatgccagggacctagatgtgaaggctggtggaggctgtgtaatgacc

SEQ ID NO: 366602 - DNA, 101 bp, Homo sapiens
acgccatgggcttcttattaatgtttgacctcaccagtcaacagagcttcttaaatgtcagaaactggatgactccagcggcgccatgagcaaatgaaaaa

SEQ ID NO: 366603 - DNA, 136 bp, Homo sapiens
cgaaaccactgtgttttgaagcagaatcctgagggccaatggacaattatggacaacaagcttcccggcattggaagaagggaccgtcctcttccttgtcttggccacccaaatcctggtatcgaaagggttgaac

SEQ ID NO: 366604 - DNA, 98 bp, Homo sapiens
ctgcggcagaagccgagttcaacatcctcctggccaccgactcctacaaggtaaaagagaacctgctttcatgcaagatgctgctgcactgcaaacgg

SEQ ID NO: 366605 - DNA, 75 bp, Homo sapiens
aagaaaacaaaggtagaacatggaggatcgtcaggctctaaacaaaattctggtgctaacagacatcaaagctga

SEQ ID NO: 366606 - DNA, 90 bp, Homo sapiens
ggcgtcagttggtgagtgtccggccccagggcgtctctggccgagcctctttttgtggaaaacgacagcagcagcagtggcctggaagac

SEQ ID NO: 366607 - DNA, 119 bp, Homo sapiens
aagaagtggagcgtgtcctgaaggagttccaccaggccgggaagcccatcgggttaatttggagtggcccctggagtcagtttcctacaccatccgaggccccacccagcacgagctac

SEQ ID NO: 366608 - DNA, 100 bp, Homo sapiens
catcattcattgaagataatgaactaaacatagttttggaactagcagatgctggcgacctatccagaatgatcaagatatgatgcttcctggtgtgttt

SEQ ID NO: 366609 - DNA, 92 bp, Homo sapiens
cgccgcccggggcgaggcagggccagcagcaggcgggagatgaaggatttgggggcagagcacttggcaggtcatgaaggggtccaacttct

SEQ ID NO: 366610 - DNA, 100 bp, Homo sapiens
tcccaagaagaataagcacaagagaaagaaggttaagctggctgtcctgaaatattataaggtgggatgcagatcttcgtgaagaccctgactggtaaga

SEQ ID NO: 366611 - DNA, 100 bp, Homo sapiens
caccaaggggcagccgtccgaaggcgagagcaggtgctgggactgtacaacactctgaaccctgaagcatctgcctcgccttgctgcgtgccccaggacc

SEQ ID NO: 366612 - DNA, 98 bp, Homo sapiens
cgaacgggggtcttcctcctccgccgttgacagggagttctgggaaatcgttcattcatttacagatgaacagaaaagactcttcttgcagtttacaa

SEQ ID NO: 366613 - DNA, 98 bp, Homo sapiens
gggttattcgagtgaccgagaccgcggccgggaccgaggtaaaatgtttattggaggcttgagctgggatacaagcaaaaaagatctgacagagtact

SEQ ID NO: 366614 - DNA, 74 bp, Homo sapiens
cagtacgttgtgtgaagagtatcattcgacaggaattgaatgatctggcacgggaccctccagcacagtgttca

SEQ ID NO: 366615 - DNA, 83 bp, Homo sapiens
ggggcatctttgagaccaagtttctctctcagatcgagaggaaattcgaaatgagtcccatgactatcctcatagagtggcca

SEQ ID NO: 366616 - DNA, 75 bp, Homo sapiens
cagagttatcaggttccagaccctgccttctcttctgaaaggcagtggaccaatccagctatggcagtttcttct

SEQ ID NO: 366617 - DNA, 100 bp, Homo sapiens
caagaatcgtaggccaggctgatggagagctgaacattactcttccagaagaggggcaagattcttgccaagagaattaatgtgcgtattgagcacatta

SEQ ID NO: 366618 - DNA, 100 bp, Homo sapiens
ctagccgctgctgtcttcgtgggaggcgccgtgagttcgccgctggtggctccggagaatgtaactggtcactacatttccccctttcatgatattcctc

SEQ ID NO: 366619 - DNA, 73 bp, Homo sapiens
ccgtgcaggacacgaagctgcatgtgtttgacgcaattttaaccatgctgaccaacgaaactggctttgaaat

SEQ ID NO: 366620 - DNA, 50 bp, Homo sapiens
agatcatcattaaggacggaggcacgggggcagtacccaaaggaaacgct

SEQ ID NO: 366621 - DNA, 97 bp, Homo sapiens
tgacttctttaaaacccttaaagaaaacttccacactagcaggaggaaacttgttcctttgagtaagaaggtggagcgtagggagaaaagaagagag

SEQ ID NO: 366622 - DNA, 74 bp, Homo sapiens
ccgacttcgatgatcgtgtgtcggatgaggagaagtttcaggtttagctgtgcctcccagtgactataatgaca

SEQ ID NO: 366623 - DNA, 100 bp, Homo sapiens
gcggcggctgggcgggagccccagaggaacatcgcaaaggtggtgagccaggtgcacgcgttccaggagaacccttacaccttcagccccgaccccaagc

SEQ ID NO: 366624 - DNA, 75 bp, Homo sapiens
tcgcagtggtcgcttcttctccttgagctgacagatgtccgacgctactggggtaaggagaagtcacattatcat

SEQ ID NO: 366625 - DNA, 82 bp, Homo sapiens
cctgggtggttgttggcgtgtccctgcagcgaaggatcctggttgcttcggaaccaaaaagaagcttcccagagccggggcc

SEQ ID NO: 366626 - DNA, 83 bp, Homo sapiens
gctgaaatgtttgacgacactgatggtttgcctttctgagaaaagtctacagcattctttctctgcaggttctcttaactaca

SEQ ID NO: 366627 - DNA, 90 bp, Homo sapiens
ccagaagaagtccgtccatgtcaaagatgagtgagaaagatcagtctaaagaaaaggagaagaaagtgaaaaaaacaattccttcctggg

SEQ ID NO: 366628 - DNA, 82 bp, Homo sapiens
cgggcggcttcctggcctgggcgctccggtggcggcggaggtttacccaaggtccagcctagcccctaggcaccatgtcgga

SEQ ID NO: 366629 - DNA, 78 bp, Homo sapiens
tccagagtagctggtgatcctcccccctcagcctacagagtagctgggaatacaaggcttcgtgggacacatatgcaa

SEQ ID NO: 366630 - DNA, 109 bp, Homo sapiens
tcaatatctgtcttcggtggactccttcggcagtccacccaccgccgccgcctcccaggcctccggtgtggctgtctctgatggtgtcatcaaggtgttcaacgacatg

SEQ ID NO: 366631 - DNA, 100 bp, Homo sapiens
ttgattgccggcggtgccgggacgccgggggaagcagcctggcatcctcgctacaacctcattgttgtgggccgatacccagatcctaatttcaaaagtt

SEQ ID NO: 366632 - DNA, 93 bp, Homo sapiens
tgcagcccaggagcctcaaggcggcccggcgggcgactggacggccggacagctgtggaaagtgaagaaggcattgaagatgactattttttg

SEQ ID NO: 366633 - DNA, 100 bp, Homo sapiens
tgcacagtcggctgggcggtgcaatggcgagctccttaataagcatttatagtcagtttttggcagcaatagaatcactaaaggcattctgggatgttat

SEQ ID NO: 366634 - DNA, 80 bp, Homo sapiens
catggatgcttgttggatgaattaatgaaccttgacccacaccaaggctatgtccaaactgggtcttcggcaggttacag

SEQ ID NO: 366635 - DNA, 75 bp, Homo sapiens
cagcatggtgggcgtctacaacggcaagaccttcaaccaggtggagatcaagcatgtccggcatgatttcgggtg

SEQ ID NO: 366636 - DNA, 100 bp, Homo sapiens
ggagccgtccggaggacctgggacaccgcggaagtcgggaaatgggcgtctctggccgagcctctttttgtggaaaacgacagcagcagcagtggcctgg

SEQ ID NO: 366637 - DNA, 90 bp, Homo sapiens
ctcaggggttggaaagtcttgccttcttcttaggtttgcaagtgagcacaaatggatcagatgaccctgaagatgcaggagctggtgaaa

SEQ ID NO: 366638 - DNA, 75 bp, Homo sapiens
aatttttgcaacgcgccaaatctaaactggctcatgcacaattagttcgagaagttgatgtggagaaggtgtctg

SEQ ID NO: 366639 - DNA, 100 bp, Homo sapiens
aagaaaggaaccgggagcatgagagacaccgggatagagaacgggaccggcaccactgagaaaggacctccacaaaaagtactcgtacatccgcaagacc

SEQ ID NO: 366640 - DNA, 75 bp, Homo sapiens
gccagatcaacctggagctctacgcctcctacgtttacctgtccatgagatggacagagacgtatgtgcgttggt

SEQ ID NO: 366641 - DNA, 83 bp, Homo sapiens
gagaagctgcacgacgtggacttctacaaggcccgcatggaggagccttcacgtaaatgggtccagtcatgcctcccagtaag

SEQ ID NO: 366642 - DNA, 100 bp, Homo sapiens
agagatggtcaggtctggagctcgaccgggccaggagacctctgagagcactgatcttcagacaactcttcagctctctatgaaggccattcaacatgaa

SEQ ID NO: 366643 - DNA, 75 bp, Homo sapiens
agatggcggatctggaggagcagttgtctgatgaagagaaggcagcggaggaggagaaagagatggacctcccgg

SEQ ID NO: 366644 - DNA, 100 bp, Homo sapiens
tccagaagatcacacagtgttcacccgacagctacaaagtgcaagataagaaaaatgcctccagccgccctgcctctgcaatttcaggacaaaataacaa

SEQ ID NO: 366645 - DNA, 96 bp, Homo sapiens
gcagtccgagagctagatggaaggtttttgtctgatgaaaatagtctggagtataaatattacaagctgaagttggcagaaatgcagcggatgagc

SEQ ID NO: 366646 - DNA, 71 bp, Homo sapiens
tcggcctcggcctcggcctccgacacgacttcccaagtaagaagcggaagaggagccgctggaaccaagac

SEQ ID NO: 366647 - DNA, 100 bp, Homo sapiens
caccttcagcaaccgcccggtcctcatctacgagcaagtcaggctgaagacctgcgaccgcatcaagcagtccgccagcggaaccaagcggcgcgtgttc

SEQ ID NO: 366648 - DNA, 80 bp, Homo sapiens
cgtctccagccttggtctgagtggactgtcctgcagacacggcttacctggatggggtgtcgttgcccgacttcgagctg

SEQ ID NO: 366649 - DNA, 50 bp, Homo sapiens
aattacataacatcaaacgtggcaccagaaaagtaccactgtaagtcatg

SEQ ID NO: 366650 - DNA, 100 bp, Homo sapiens
gagtgccaggcgccggccggctgcgaagacgcggtgggccgcccctccgttgcaggacgaggagcggaggcggcagcagcagttagaagagatgcgcaag

SEQ ID NO: 366651 - DNA, 90 bp, Homo sapiens
ggatctggagaggaagattgagtcgctggaggaggagatccggttcttgaggaagatccacgaggagctaattttgtcttctaaagatga

SEQ ID NO: 366652 - DNA, 100 bp, Homo sapiens
tcaagaatctcgtgctcaccggtttctcccacatcgacctggtgtgggccatgtttgaggattgccccagcattcagttctatgagtaataaatatccac

SEQ ID NO: 366653 - DNA, 78 bp, Homo sapiens
taatgtcagcagacagattgaggacactgtattatacggttactatatatttcagacaacttttaagaggtgcagaat

SEQ ID NO: 366654 - DNA, 100 bp, Homo sapiens
ctgtccaaaggcctggcccggcggctcagccccatcatgctgggtgacaatggaatggactctgatatggaagaggaagcagatgatggttctaagatgg

SEQ ID NO: 366655 - DNA, 75 bp, Homo sapiens
atccacgcacctgcagctctgctgagagagtgcaagccgtgggagaatgtaactggtcactacatttcccccttt

SEQ ID NO: 366656 - DNA, 100 bp, Homo sapiens
caggtcctcaactttgaagagatcgactacaaggagatcgaggtggaagagaacaatatgatgcgtttgtgaagtttacgcatgatcaaataatgcgacg

SEQ ID NO: 366657 - DNA, 90 bp, Homo sapiens
ggctcctcgggctcccacgtggagatctcagaatcaagtctcgagtcagattctgaagcagttctgggaagtcatcagtgatgagcatgg

SEQ ID NO: 366658 - DNA, 90 bp, Homo sapiens
gaagggaggctccaagacctcatcaacaattaaggtcattgctagaatcgtggatggaagcagattcactgagttcaaagccttttatgg

SEQ ID NO: 366659 - DNA, 87 bp, Homo sapiens
ctgccctctcgctttccctctcgcgtctctggctgcagctcaccatggatgatgatatcgccgcgctcgtcgtcgacaacggctccg

SEQ ID NO: 366660 - DNA, 100 bp, Homo sapiens
ggatctggacacccagcggtctgacatcgcgacgctgctcaaaacctcgctccggaaaggggacacctgtagaaaacccctttggtgaaacatttggaaa

SEQ ID NO: 366661 - DNA, 90 bp, Homo sapiens
cctgactctctgaggctcattttgcagttgttgaaattgtccccgcagttttcaatcatgtggttctcaccattcaggaagcccttcagc

SEQ ID NO: 366662 - DNA, 75 bp, Homo sapiens
cgatatgttacatcaaaaattcttcatctggctcagagtcaagaacaagcccctgagctggaaaacctcaccgtg

SEQ ID NO: 366663 - DNA, 90 bp, Homo sapiens
gacgtggccactgtggccttctgcgacgcgcagtccacgcaggagatccatgagaaggaaacttttgacgctgggctgcaggccttccag

SEQ ID NO: 366664 - DNA, 98 bp, Homo sapiens
cgggagttacaccgccaccgccaggctactgcagcactggggtgtcagttgttggtccgacccagaacgcttcagttctgctctgcaaggatatataa

SEQ ID NO: 366665 - DNA, 100 bp, Homo sapiens
cccgtcgatcactatccaaaagctctgcagcaatacttcatgctgttgctgctgactgatggtgctgtgacggatgtggaagccacacgtgaggctgtgg

SEQ ID NO: 366666 - DNA, 100 bp, Homo sapiens
ggcggtgccggcgagggggcagaggaggcggccaaggacctggccgacatcgcggccttcttccgatccgttttacctagccacacttgtggaaatcctg

SEQ ID NO: 366667 - DNA, 83 bp, Homo sapiens
ctaccttctggaagctactactacgtggtgcttggaaaggaaatggtgtttgcaagtgtcgtgtgtgtgagtgcaaccccaac

SEQ ID NO: 366668 - DNA, 122 bp, Homo sapiens
gaggtgggcggctttgaccgagaggctgctggagctcgtgtttggacgcgaatatgtttatccagaagccagagacagacaatacttactatttttccataaaggagccaaaaagtcacgtt

SEQ ID NO: 366669 - DNA, 100 bp, Homo sapiens
ggagcggcggcggcggtggtgcctccggactgcacttgcgaagggagcttggggaggaagccgaaatagaactatttgtgaacagacttgattcagtgga

SEQ ID NO: 366670 - DNA, 100 bp, Homo sapiens
agaaattacggggattaatgacacccagatactacagcaagccttgaagtgttacgagatgacttccgacaaaaccccacagatgttgtagtggcagctg

SEQ ID NO: 366671 - DNA, 75 bp, Homo sapiens
agcctcagttggaagcagccgatccagcctgcggagcctgtggggcagtccctggtacgtgagcccctttcccgg

SEQ ID NO: 366672 - DNA, 99 bp, Homo sapiens
gcggacatggtcatgagctttgtgaacctgggtgagaatcctgaactctctggcttagaaagaatcttagcaagacatcagttgccaaaagagattaat

SEQ ID NO: 366673 - DNA, 139 bp, Homo sapiens
ttcttcttcaccgccaggacctccttcttcaggagagcgccccagggcaagccccgctccggccaacaagatcaagtcttccataccagggaccaggccaaaaccagactgccactgcccctacttgggccccactgtc

SEQ ID NO: 366674 - DNA, 74 bp, Homo sapiens
ctctctgctgcggcgcggggaccgctgtgctctcggccagtacgggatccctgaaccatggaattttccttttc

SEQ ID NO: 366675 - DNA, 100 bp, Homo sapiens
ttctgctaccagaaaaccttctccaccagaatccagctcacgctgaagaagcctgggaagtttataaacagataaagacgcaacatgaaagacttgtaag

SEQ ID NO: 366676 - DNA, 75 bp, Homo sapiens
cgaggaggaaggtagcagccgtctgtctccgccccacagtccacgagacaggcaatctatacctgcgggggcccc

SEQ ID NO: 366677 - DNA, 98 bp, Homo sapiens
acaaaatactatgggtcatatttaaagattagtgatgatgaaccaggttatgaccttgatttattttgcatacctaatcattatgctgaggatttgga

SEQ ID NO: 366678 - DNA, 100 bp, Homo sapiens
ctggccgaaagtcatcctttaatagacgagattgctcatttagaaagtggatgtgtgggataacatgtccaatgtgtccgaggagagaagaaaaaggcag

SEQ ID NO: 366679 - DNA, 74 bp, Homo sapiens
tggaaagtttttccaaatattcatctgtacaggttagtggatgacagatgtgtggtgcacccagaggccgggga

SEQ ID NO: 366680 - DNA, 83 bp, Homo sapiens
gccaagaaatccaaaaagccgagtagagaagttatcagacgagccaaactcaggctgtaccttgagcagctcaagcaactggt

SEQ ID NO: 366681 - DNA, 74 bp, Homo sapiens
gagaatgtgacaatcactgctggtcagagattggctctaccagtgcacctggacagggaggaatcctggctcag

SEQ ID NO: 366682 - DNA, 97 bp, Homo sapiens
agctgccgccgcctgcagtcggtgaccgcgcgactcggcgcccgcccgcgaaaaatggctacaaacttcctagcacatgagaagatctggttcgaca

SEQ ID NO: 366683 - DNA, 100 bp, Homo sapiens
cggacgcgtttggcaacagcgagggcaaagagctggtggcctcaggtgaaaagttgactttggcagaatatcatgaacaggaagaaattttcaaacttag

SEQ ID NO: 366684 - DNA, 100 bp, Homo sapiens
aaagagaaacctcaagatgtggatttaccttatcccctcaacaacttttcagtggcaatttccaggaatatggatctactggaacagcccatgctgatag

SEQ ID NO: 366685 - DNA, 75 bp, Homo sapiens
tgaggttggacgtggggaatttctcctggggctcagagttgtgtgatccagtcttgggtgacaagtgggacggcg

SEQ ID NO: 366686 - DNA, 75 bp, Homo sapiens
attagttcaagtagcaactatatcagttttgtttggctatgccaccacagtcatccccagggtctatacatacta

SEQ ID NO: 366687 - DNA, 75 bp, Homo sapiens
atgatgccccctatgggagggccaccaatgggacaagtacaagaaaattccccaggacacagagctggtttggag

SEQ ID NO: 366688 - DNA, 51 bp, Homo sapiens
cgggccgcggaggaggtctcagggattggctaaaagatgtgtgtgaaaaga

SEQ ID NO: 366689 - DNA, 51 bp, Homo sapiens
cggaaccactgcacgacggggctggacgctaaagaattacctccaaagcca

SEQ ID NO: 366690 - DNA, 100 bp, Homo sapiens
cctcgccccgcctcccccttccctccccttggggaccaccgggcgccacgccgcgaacggaccatggccaacctggagcgcaccttcatcgccatcaagc

SEQ ID NO: 366691 - DNA, 75 bp, Homo sapiens
tattgctgcagcatttgccaaggagacatccctcttaggaataagacgagttggaagaagacctgatcaacaact

SEQ ID NO: 366692 - DNA, 83 bp, Homo sapiens
tgcccttgccagaatttcctgcgctgttccacctcattcaacttcagcgtccgtctccaagagagtatgaagagagtgcgtct

SEQ ID NO: 366693 - DNA, 100 bp, Homo sapiens
ttgccagctcactcggatccagtctcggccgtatgtgaaagcaagaacagagctaacatgggattatggctatgaagctgggactgtgcctgagaaggaa

SEQ ID NO: 366694 - DNA, 90 bp, Homo sapiens
tggaggccacccagccaacgcggtcgccatggagacgccggtgaaatgacaatggatgctctgttggctcgattgaaacttctgaatcca

SEQ ID NO: 366695 - DNA, 101 bp, Homo sapiens
gttctgtacagtttaggaaatagaggctttcaaagataattcgcagtgatgtgaaactggcctcccaagccctgataagtgcaatggatgagcttcatagt

SEQ ID NO: 366696 - DNA, 83 bp, Homo sapiens
agcgactcggggacctggagctgacgcctaatctattccagaggggagcttcaccacttcattgacggctttaatgaagagaa

SEQ ID NO: 366697 - DNA, 96 bp, Homo sapiens
ctccactccgtcccccgcgggtctgctctgtgtgccatggacggctcaccatggatgatgatatcgccgcgctcgtcgtcgacaacggctccggca

SEQ ID NO: 366698 - DNA, 75 bp, Homo sapiens
agtgtcccaccatcaaagagatcagagaccagggctcctgtggctcctgctggggaattgcaacccagtgaagaa

SEQ ID NO: 366699 - DNA, 100 bp, Homo sapiens
aggggcagccggctctggtgctcccagaagaggtgttatgagatggagaaaaggctaaaaacaccagatcttttcaaattccctttctttgaagccatat

SEQ ID NO: 366700 - DNA, 97 bp, Homo sapiens
ccaggacagcgtggactttgatattgatgtgaacgcctctgtgtttgaaacaaacattcgagggagatacatctggggactataagaaagctcttct

SEQ ID NO: 366701 - DNA, 96 bp, Homo sapiens
atcaggggaagaaaaatattccacgcatcacggtcaactttgtagtgtgccaactctttgccttgctagcagccatttggtttcgaacttatctac

SEQ ID NO: 366702 - DNA, 50 bp, Homo sapiens
cggcgccggagacgatgccgttattggagctggagtgagccttccaggaa

SEQ ID NO: 366703 - DNA, 90 bp, Homo sapiens
cgagcaccgggccctctgcgacctggggccctgggtgaagtgctccgtcgcccttgcctccagcggttaagaagattgtctaccaaatat

SEQ ID NO: 366704 - DNA, 100 bp, Homo sapiens
ggagcagtgcctgatcctgcaacacgagcatggcatggccccgcaggtcttcacccaggccctggagtgcatgcgcagcctcctgacaaggtgatccggg

SEQ ID NO: 366705 - DNA, 80 bp, Homo sapiens
gacataagggagatagtgcagagactgaagataaacatgatgctggcaaacctgtacaagaaggctggtcaggagcgccc

SEQ ID NO: 366706 - DNA, 98 bp, Homo sapiens
gtaaggcgctccacaatgggacactgagctttgtggaagcatttggcggcataccaccctgcactgtgaggtgtcatggagaaactccagctgggccc

SEQ ID NO: 366707 - DNA, 89 bp, Homo sapiens
catagtgctaggatgacacttgcaaaagcttgtgaactctgtccagaggaggactatcggacaaaacctttctgctgcagcgcttgtcc

SEQ ID NO: 366708 - DNA, 100 bp, Homo sapiens
aagaggagggcaagaagggcaagaagcggaaggcagacagattgctgccaacatgaggggtattgggatgatgcccaatgatattcctgagtggaagaag

SEQ ID NO: 366709 - DNA, 95 bp, Homo sapiens
gaacagaaggatctctccttaacgcctttcaccattaagaggaaagcgatggaggagctgagcgctgatgagaacccttaggagaaatcttgaga

SEQ ID NO: 366710 - DNA, 75 bp, Homo sapiens
tctttgtttcccctggagaatcttcagccagactttaatgaagactatctagtccctcggacgacgagaacagcg

SEQ ID NO: 366711 - DNA, 100 bp, Homo sapiens
gccagaaggaaaatggcctaactggatgagtattgggaaagggtcgttgtggtgcatagacccagagtatagacaaaatctaattcaggctttgaaaaag

SEQ ID NO: 366712 - DNA, 100 bp, Homo sapiens
ggcggcaggagccgcggagccggcgctgagaggggctgcggccggagcgggcggctgagacaaaggcgacgctgtgagtaccagagtgcccactggttcc

SEQ ID NO: 366713 - DNA, 100 bp, Homo sapiens
ttcctcctccagaggcctgcacgcggggcgcgggccccgaaggctctccatcgaaggcaacattggactcgggtcaagctggaaagcctggaagacgcct

SEQ ID NO: 366714 - DNA, 74 bp, Homo sapiens
aatgggttaccagaggaagagctaagacccctgacctggagcagctggagccgtctttggaagatgtggaaagc

SEQ ID NO: 366715 - DNA, 73 bp, Homo sapiens
caaaagcacaaggattctcgctgtgacagagacaacaccgagtatgagaatgagagtaacacatgcgcactgt

SEQ ID NO: 366716 - DNA, 97 bp, Homo sapiens
agctgtctaagtccaaagatttttacccaggtgtcttcaaaaacaaacatatttaaaagattttacttctcatctccaggaagaaccagctaggagt

SEQ ID NO: 366717 - DNA, 74 bp, Homo sapiens
cgtccctgcagcccgtggtgatgtgcgtcatgaagcacctgcccaagggggcatcccggggcccatcgccttcg

SEQ ID NO: 366718 - DNA, 98 bp, Homo sapiens
cgtctgcatggctctgtcactcacggcaaaggcagctcgagcatctcatctgacgtgagttcaagtacagatcacacgcccactaaagcccagaagaa

SEQ ID NO: 366719 - DNA, 98 bp, Homo sapiens
cttgtgccacggactccgaggagtccttcagctactgaacactcaaagctgaggagggattacatctactacaacgacgtgtatgcctttaatctgga

SEQ ID NO: 366720 - DNA, 100 bp, Homo sapiens
cttggcctcggaggatgcagcctttggactcaagtggatccttcaggttccagggatttcaccagtagcagtgaaagcctacttctgctaattttgactg

SEQ ID NO: 366721 - DNA, 75 bp, Homo sapiens
aggcagacattcaacacctttacatttagcaggtcgatggcgtgaacattcagggttttgccaaccatgatgttg

SEQ ID NO: 366722 - DNA, 75 bp, Homo sapiens
tttgattttattgtttctattaatggttcaagattagattctgtaaagcctggtgcccatctaacagtgaagaaa

SEQ ID NO: 366723 - DNA, 100 bp, Homo sapiens
ctgcccacgtcgagcgtgcccgagacccgagagtggtgaaggaggagatctcggatgacaatgccaagctaccatgcttcaatggccgggtggtgtcctg

SEQ ID NO: 366724 - DNA, 90 bp, Homo sapiens
ctaaaaacggccacatcgacatcatcagcaggacagctggcctgaagctcagagccggggcgtgcgccatggccccacactgggctgtct

SEQ ID NO: 366725 - DNA, 90 bp, Homo sapiens
tgcatttgccttatacagctaaagccatggaaagctattgacctgaaaagtggttctggaaaagtgtaccaaggccctgcaaaaggtgct

SEQ ID NO: 366726 - DNA, 75 bp, Homo sapiens
ctgcagtacctgcagaaggtctctggagacatcttcagcagggccaggatcctcttcctgctccagttgctggcc

SEQ ID NO: 366727 - DNA, 119 bp, Homo sapiens
cttttcccctggccttctgtatcttcatggtgcggctcatcttcgagagacctgtcatttactccatcctttatagtgatgctacaggacgaagaggaatggataaaaacattggcgag

SEQ ID NO: 366728 - DNA, 100 bp, Homo sapiens
gcggaaaccagtggccacagcatctttgtctagccccagtgcaggttcacgcaaagaatctgctccacaagttttgcttccagaagaagagaaaattata

SEQ ID NO: 366729 - DNA, 83 bp, Homo sapiens
aatagcgtctgagatcataggattactgatgctggagaggaagaatacaagcgattgagtgaagcactagcagaggatgggag

SEQ ID NO: 366730 - DNA, 100 bp, Homo sapiens
ggacggggaggacgcgccgcggccaggcagggaggagaccggcacccagacaggtggcgaaggcagaggaaacatccagtcatggataaaaatgagctgg

SEQ ID NO: 366731 - DNA, 100 bp, Homo sapiens
tccagcatcaagatccgtctgacagattgatgcactgagtaaaagaagcaaggaagctgaagcagctttcttgaatgtctacaaaagattgattgacgtc

SEQ ID NO: 366732 - DNA, 83 bp, Homo sapiens
ctctcagtggtcctacctggggatattatcaaatctactactgttcatggcaggtgattaggaagaagcttgttcgtaaaacg

SEQ ID NO: 366733 - DNA, 80 bp, Homo sapiens
agcctcagttggaagcagccgatccagcctgcggagcctgtggggcagatataagagttcggaccgcccagcacacaagg

SEQ ID NO: 366734 - DNA, 75 bp, Homo sapiens
agctccccaagggggtggagcccccagcggaggaggagctctcaaaagagctgcagcagttctataacagccagg

SEQ ID NO: 366735 - DNA, 76 bp, Homo sapiens
tcactgacttcaagaatgaagccacggacccttgcgaaatgcactcggtgatggaaagagagccactattctgaag

SEQ ID NO: 366736 - DNA, 105 bp, Homo sapiens
gcccgctctgcgttttgttttcccctcggcactaggcagcggaggagcccgaccgacccgtttggtgccctggttgtcagatgttggaaagcagtaggacggaac

SEQ ID NO: 366737 - DNA, 75 bp, Homo sapiens
tgcgtccgagtctccgccgctgcgggcccgctccgacgcggaaggtgcaccctttgctcccgggctcatccacca

SEQ ID NO: 366738 - DNA, 82 bp, Homo sapiens
gaaaaaggctcagaagataacagaactccggccctttaatagttgggaggctctggctttccttaaagtttcccatgtctca

SEQ ID NO: 366739 - DNA, 150 bp, Homo sapiens
gagaaggatgaggcagaaaaggagcacagagagttcagagcaaaaactaacagggatcttgaaattaaagatcaggctgagtcatcactagagagtgggaagggcagcagcagcagagaatccaaaccctaaagctgatatcacaaagta

SEQ ID NO: 366740 - DNA, 100 bp, Homo sapiens
agagccaaggaataaacatgcaatgaacccaaaaggtcaacgcaaaatcatgctgccgtgttccgtgtgggaagcttgttgcaagaaggttgtgggaaaa

SEQ ID NO: 366741 - DNA, 99 bp, Homo sapiens
ggcacctggctttccagggccagatggcagcagccacggcggaaccagaggaggctgaagccgacgtagcttctctgaacagacgcatccagctggttg

SEQ ID NO: 366742 - DNA, 82 bp, Homo sapiens
atccaagatcaacgcgagcaagaatcagcaggatgacgggaactgtggctgcaccatctgtcttcatcttcccgccatctga

SEQ ID NO: 366743 - DNA, 97 bp, Homo sapiens
ccttagttcccaacttcaccttcaacttgggcttctcgggcaagttctatcatactgctgaggagccaaaggagaagtcctctcggaaggtagccga
